United States Patent Application Publication US 2015/0141320 A1 - sequence listing, part 50

SEQ ID NO: 1980662 - DNA, 15 bp, Homo sapiens
tgtcgcccacgctgg

SEQ ID NO: 1980663 - DNA, 15 bp, Homo sapiens
gtcgcccacgctgga

SEQ ID NO: 1980664 - DNA, 15 bp, Homo sapiens
tcgcccacgctggag

SEQ ID NO: 1980665 - DNA, 15 bp, Homo sapiens
cgcccacgctggaga

SEQ ID NO: 1980666 - DNA, 15 bp, Homo sapiens
gcccacgctggagag

SEQ ID NO: 1980667 - DNA, 15 bp, Homo sapiens
cccacgctggagaga

SEQ ID NO: 1980668 - DNA, 15 bp, Homo sapiens
ccacgctggagagaa

SEQ ID NO: 1980669 - DNA, 15 bp, Homo sapiens
cacgctggagagaag

SEQ ID NO: 1980670 - DNA, 15 bp, Homo sapiens
acgctggagagaagt

SEQ ID NO: 1980671 - DNA, 15 bp, Homo sapiens
cgctggagagaagtg

SEQ ID NO: 1980672 - DNA, 15 bp, Homo sapiens
gctggagagaagtgg

SEQ ID NO: 1980673 - DNA, 15 bp, Homo sapiens
ctggagagaagtggc

SEQ ID NO: 1980674 - DNA, 15 bp, Homo sapiens
tggagagaagtggcg

SEQ ID NO: 1980675 - DNA, 15 bp, Homo sapiens
ggagagaagtggcgc

SEQ ID NO: 1980676 - DNA, 15 bp, Homo sapiens
gagagaagtggcgcg

SEQ ID NO: 1980677 - DNA, 15 bp, Homo sapiens
agagaagtggcgcga

SEQ ID NO: 1980678 - DNA, 15 bp, Homo sapiens
gagaagtggcgcgat

SEQ ID NO: 1980679 - DNA, 15 bp, Homo sapiens
agaagtggcgcgatc

SEQ ID NO: 1980680 - DNA, 15 bp, Homo sapiens
gaagtggcgcgatct

SEQ ID NO: 1980681 - DNA, 15 bp, Homo sapiens
aagtggcgcgatctc

SEQ ID NO: 1980682 - DNA, 15 bp, Homo sapiens
cctcccaggttcaca

SEQ ID NO: 1980683 - DNA, 15 bp, Homo sapiens
ctcccaggttcacac

SEQ ID NO: 1980684 - DNA, 15 bp, Homo sapiens
tcccaggttcacacc

SEQ ID NO: 1980685 - DNA, 15 bp, Homo sapiens
cccaggttcacacca

SEQ ID NO: 1980686 - DNA, 15 bp, Homo sapiens
ccaggttcacaccac

SEQ ID NO: 1980687 - DNA, 15 bp, Homo sapiens
caggttcacaccact

SEQ ID NO: 1980688 - DNA, 15 bp, Homo sapiens
aggttcacaccactc

SEQ ID NO: 1980689 - DNA, 15 bp, Homo sapiens
ggttcacaccactct

SEQ ID NO: 1980690 - DNA, 15 bp, Homo sapiens
gttcacaccactctc

SEQ ID NO: 1980691 - DNA, 15 bp, Homo sapiens
ttcacaccactctcc

SEQ ID NO: 1980692 - DNA, 15 bp, Homo sapiens
tcacaccactctcct

SEQ ID NO: 1980693 - DNA, 15 bp, Homo sapiens
cacaccactctcctg

SEQ ID NO: 1980694 - DNA, 15 bp, Homo sapiens
acaccactctcctgc

SEQ ID NO: 1980695 - DNA, 15 bp, Homo sapiens
caccactctcctgcc

SEQ ID NO: 1980696 - DNA, 15 bp, Homo sapiens
accactctcctgcct

SEQ ID NO: 1980697 - DNA, 15 bp, Homo sapiens
atgcccagctaatta

SEQ ID NO: 1980698 - DNA, 15 bp, Homo sapiens
tgcccagctaattat

SEQ ID NO: 1980699 - DNA, 15 bp, Homo sapiens
gcccagctaattatt

SEQ ID NO: 1980700 - DNA, 15 bp, Homo sapiens
cccagctaattattt

SEQ ID NO: 1980701 - DNA, 15 bp, Homo sapiens
ccagctaattatttt

SEQ ID NO: 1980702 - DNA, 15 bp, Homo sapiens
cagctaattattttt

SEQ ID NO: 1980703 - DNA, 15 bp, Homo sapiens
agctaattatttttt

SEQ ID NO: 1980704 - DNA, 15 bp, Homo sapiens
gctaattattttttg

SEQ ID NO: 1980705 - DNA, 15 bp, Homo sapiens
ctaattattttttgt

SEQ ID NO: 1980706 - DNA, 15 bp, Homo sapiens
taattattttttgta

SEQ ID NO: 1980707 - DNA, 15 bp, Homo sapiens
aattattttttgtat

SEQ ID NO: 1980708 - DNA, 15 bp, Homo sapiens
attattttttgtatt

SEQ ID NO: 1980709 - DNA, 15 bp, Homo sapiens
ttattttttgtattt

SEQ ID NO: 1980710 - DNA, 15 bp, Homo sapiens
tattttttgtatttt

SEQ ID NO: 1980711 - DNA, 15 bp, Homo sapiens
actcaggtggtaaca

SEQ ID NO: 1980712 - DNA, 15 bp, Homo sapiens
ctcaggtggtaacaa

SEQ ID NO: 1980713 - DNA, 15 bp, Homo sapiens
tcaggtggtaacaac

SEQ ID NO: 1980714 - DNA, 15 bp, Homo sapiens
caggtggtaacaaca

SEQ ID NO: 1980715 - DNA, 15 bp, Homo sapiens
aggtggtaacaacac

SEQ ID NO: 1980716 - DNA, 15 bp, Homo sapiens
ggtggtaacaacaca

SEQ ID NO: 1980717 - DNA, 15 bp, Homo sapiens
gtggtaacaacacag

SEQ ID NO: 1980718 - DNA, 15 bp, Homo sapiens
tggtaacaacacagg

SEQ ID NO: 1980719 - DNA, 15 bp, Homo sapiens
ggtaacaacacaggg

SEQ ID NO: 1980720 - DNA, 15 bp, Homo sapiens
gtaacaacacagggc

SEQ ID NO: 1980721 - DNA, 15 bp, Homo sapiens
taacaacacagggca

SEQ ID NO: 1980722 - DNA, 15 bp, Homo sapiens
aacaacacagggcat

SEQ ID NO: 1980723 - DNA, 15 bp, Homo sapiens
acaacacagggcata

SEQ ID NO: 1980724 - DNA, 15 bp, Homo sapiens
caacacagggcatag

SEQ ID NO: 1980725 - DNA, 15 bp, Homo sapiens
aacacagggcatagg

SEQ ID NO: 1980726 - DNA, 15 bp, Homo sapiens
acacagggcataggg

SEQ ID NO: 1980727 - DNA, 15 bp, Homo sapiens
cacagggcatagggt

SEQ ID NO: 1980728 - DNA, 15 bp, Homo sapiens
acagggcatagggtg

SEQ ID NO: 1980729 - DNA, 15 bp, Homo sapiens
cagggcatagggtgt

SEQ ID NO: 1980730 - DNA, 15 bp, Homo sapiens
agggcatagggtgtc

SEQ ID NO: 1980731 - DNA, 15 bp, Homo sapiens
gggcatagggtgtca

SEQ ID NO: 1980732 - DNA, 15 bp, Homo sapiens
ggcatagggtgtcaa

SEQ ID NO: 1980733 - DNA, 15 bp, Homo sapiens
gcatagggtgtcaaa

SEQ ID NO: 1980734 - DNA, 15 bp, Homo sapiens
catagggtgtcaaag

SEQ ID NO: 1980735 - DNA, 15 bp, Homo sapiens
atagggtgtcaaagc

SEQ ID NO: 1980736 - DNA, 15 bp, Homo sapiens
tagggtgtcaaagcc

SEQ ID NO: 1980737 - DNA, 15 bp, Homo sapiens
agggtgtcaaagccc

SEQ ID NO: 1980738 - DNA, 15 bp, Homo sapiens
gggtgtcaaagccca

SEQ ID NO: 1980739 - DNA, 15 bp, Homo sapiens
ggtgtcaaagcccag

SEQ ID NO: 1980740 - DNA, 15 bp, Homo sapiens
gtgtcaaagcccagg

SEQ ID NO: 1980741 - DNA, 15 bp, Homo sapiens
tgtcaaagcccaggc

SEQ ID NO: 1980742 - DNA, 15 bp, Homo sapiens
gtcaaagcccaggct

SEQ ID NO: 1980743 - DNA, 15 bp, Homo sapiens
tcaaagcccaggctt

SEQ ID NO: 1980744 - DNA, 15 bp, Homo sapiens
caaagcccaggctta

SEQ ID NO: 1980745 - DNA, 15 bp, Homo sapiens
aaagcccaggcttac

SEQ ID NO: 1980746 - DNA, 15 bp, Homo sapiens
aagcccaggcttaca

SEQ ID NO: 1980747 - DNA, 15 bp, Homo sapiens
agcccaggcttacac

SEQ ID NO: 1980748 - DNA, 15 bp, Homo sapiens
gcccaggcttacacc

SEQ ID NO: 1980749 - DNA, 15 bp, Homo sapiens
cccaggcttacaccc

SEQ ID NO: 1980750 - DNA, 15 bp, Homo sapiens
ccaggcttacaccct

SEQ ID NO: 1980751 - DNA, 15 bp, Homo sapiens
caggcttacaccctg

SEQ ID NO: 1980752 - DNA, 15 bp, Homo sapiens
aggcttacaccctgg

SEQ ID NO: 1980753 - DNA, 15 bp, Homo sapiens
ggcttacaccctggt

SEQ ID NO: 1980754 - DNA, 15 bp, Homo sapiens
gcttacaccctggtc

SEQ ID NO: 1980755 - DNA, 15 bp, Homo sapiens
cttacaccctggtct

SEQ ID NO: 1980756 - DNA, 15 bp, Homo sapiens
ttacaccctggtcta

SEQ ID NO: 1980757 - DNA, 15 bp, Homo sapiens
tacaccctggtctat

SEQ ID NO: 1980758 - DNA, 15 bp, Homo sapiens
acaccctggtctatg

SEQ ID NO: 1980759 - DNA, 15 bp, Homo sapiens
caccctggtctatga

SEQ ID NO: 1980760 - DNA, 15 bp, Homo sapiens
accctggtctatgac

SEQ ID NO: 1980761 - DNA, 15 bp, Homo sapiens
ccctggtctatgact

SEQ ID NO: 1980762 - DNA, 15 bp, Homo sapiens
cctggtctatgactt

SEQ ID NO: 1980763 - DNA, 15 bp, Homo sapiens
ctggtctatgactta

SEQ ID NO: 1980764 - DNA, 15 bp, Homo sapiens
tggtctatgacttac

SEQ ID NO: 1980765 - DNA, 15 bp, Homo sapiens
ggtctatgacttact

SEQ ID NO: 1980766 - DNA, 15 bp, Homo sapiens
gtctatgacttacta

SEQ ID NO: 1980767 - DNA, 15 bp, Homo sapiens
tctatgacttactag

SEQ ID NO: 1980768 - DNA, 15 bp, Homo sapiens
ctatgacttactagc

SEQ ID NO: 1980769 - DNA, 15 bp, Homo sapiens
tatgacttactagct

SEQ ID NO: 1980770 - DNA, 15 bp, Homo sapiens
atgacttactagctg

SEQ ID NO: 1980771 - DNA, 15 bp, Homo sapiens
tgacttactagctgt

SEQ ID NO: 1980772 - DNA, 15 bp, Homo sapiens
gacttactagctgtg

SEQ ID NO: 1980773 - DNA, 15 bp, Homo sapiens
acttactagctgtgt

SEQ ID NO: 1980774 - DNA, 15 bp, Homo sapiens
cttactagctgtgtg

SEQ ID NO: 1980775 - DNA, 15 bp, Homo sapiens
ttactagctgtgtga

SEQ ID NO: 1980776 - DNA, 15 bp, Homo sapiens
tactagctgtgtgac

SEQ ID NO: 1980777 - DNA, 15 bp, Homo sapiens
actagctgtgtgact

SEQ ID NO: 1980778 - DNA, 15 bp, Homo sapiens
ctagctgtgtgactt

SEQ ID NO: 1980779 - DNA, 15 bp, Homo sapiens
tagctgtgtgacttc

SEQ ID NO: 1980780 - DNA, 15 bp, Homo sapiens
agctgtgtgacttca

SEQ ID NO: 1980781 - DNA, 15 bp, Homo sapiens
gctgtgtgacttcag

SEQ ID NO: 1980782 - DNA, 15 bp, Homo sapiens
ctgtgtgacttcagt

SEQ ID NO: 1980783 - DNA, 15 bp, Homo sapiens
tgtgtgacttcagtc

SEQ ID NO: 1980784 - DNA, 15 bp, Homo sapiens
gtgtgacttcagtca

SEQ ID NO: 1980785 - DNA, 15 bp, Homo sapiens
tgtgacttcagtcaa

SEQ ID NO: 1980786 - DNA, 15 bp, Homo sapiens
gtgacttcagtcaag

SEQ ID NO: 1980787 - DNA, 15 bp, Homo sapiens
tgacttcagtcaagt

SEQ ID NO: 1980788 - DNA, 15 bp, Homo sapiens
gacttcagtcaagtt

SEQ ID NO: 1980789 - DNA, 15 bp, Homo sapiens
acttcagtcaagttg

SEQ ID NO: 1980790 - DNA, 15 bp, Homo sapiens
cttcagtcaagttgc

SEQ ID NO: 1980791 - DNA, 15 bp, Homo sapiens
ttcagtcaagttgct

SEQ ID NO: 1980792 - DNA, 15 bp, Homo sapiens
tcagtcaagttgctt

SEQ ID NO: 1980793 - DNA, 15 bp, Homo sapiens
cagtcaagttgctta

SEQ ID NO: 1980794 - DNA, 15 bp, Homo sapiens
agtcaagttgcttac

SEQ ID NO: 1980795 - DNA, 15 bp, Homo sapiens
gtcaagttgcttacc

SEQ ID NO: 1980796 - DNA, 15 bp, Homo sapiens
tcaagttgcttaccc

SEQ ID NO: 1980797 - DNA, 15 bp, Homo sapiens
caagttgcttaccct

SEQ ID NO: 1980798 - DNA, 15 bp, Homo sapiens
aagttgcttaccctc

SEQ ID NO: 1980799 - DNA, 15 bp, Homo sapiens
agttgcttaccctct

SEQ ID NO: 1980800 - DNA, 15 bp, Homo sapiens
gttgcttaccctctc

SEQ ID NO: 1980801 - DNA, 15 bp, Homo sapiens
ttgcttaccctctct

SEQ ID NO: 1980802 - DNA, 15 bp, Homo sapiens
tgcttaccctctctg

SEQ ID NO: 1980803 - DNA, 15 bp, Homo sapiens
gcttaccctctctga

SEQ ID NO: 1980804 - DNA, 15 bp, Homo sapiens
cttaccctctctgat

SEQ ID NO: 1980805 - DNA, 15 bp, Homo sapiens
ttaccctctctgatc

SEQ ID NO: 1980806 - DNA, 15 bp, Homo sapiens
taccctctctgatcc

SEQ ID NO: 1980807 - DNA, 15 bp, Homo sapiens
accctctctgatccc

SEQ ID NO: 1980808 - DNA, 15 bp, Homo sapiens
ccctctctgatccct

SEQ ID NO: 1980809 - DNA, 15 bp, Homo sapiens
cctctctgatccctg

SEQ ID NO: 1980810 - DNA, 15 bp, Homo sapiens
ctctctgatccctgc

SEQ ID NO: 1980811 - DNA, 15 bp, Homo sapiens
tctctgatccctgcc

SEQ ID NO: 1980812 - DNA, 15 bp, Homo sapiens
ctctgatccctgcct

SEQ ID NO: 1980813 - DNA, 15 bp, Homo sapiens
tctgatccctgcctt

SEQ ID NO: 1980814 - DNA, 15 bp, Homo sapiens
ctgatccctgccttt

SEQ ID NO: 1980815 - DNA, 15 bp, Homo sapiens
tgatccctgcctttt

SEQ ID NO: 1980816 - DNA, 15 bp, Homo sapiens
gatccctgccttttg

SEQ ID NO: 1980817 - DNA, 15 bp, Homo sapiens
atccctgccttttga

SEQ ID NO: 1980818 - DNA, 15 bp, Homo sapiens
tccctgccttttgaa

SEQ ID NO: 1980819 - DNA, 15 bp, Homo sapiens
ccctgccttttgaag

SEQ ID NO: 1980820 - DNA, 15 bp, Homo sapiens
cctgccttttgaagt

SEQ ID NO: 1980821 - DNA, 15 bp, Homo sapiens
ctgccttttgaagtg

SEQ ID NO: 1980822 - DNA, 15 bp, Homo sapiens
tgccttttgaagtgg

SEQ ID NO: 1980823 - DNA, 15 bp, Homo sapiens
gccttttgaagtggt

SEQ ID NO: 1980824 - DNA, 15 bp, Homo sapiens
ccttttgaagtggtg

SEQ ID NO: 1980825 - DNA, 15 bp, Homo sapiens
cttttgaagtggtga

SEQ ID NO: 1980826 - DNA, 15 bp, Homo sapiens
ttttgaagtggtgag

SEQ ID NO: 1980827 - DNA, 15 bp, Homo sapiens
tttgaagtggtgagg

SEQ ID NO: 1980828 - DNA, 15 bp, Homo sapiens
ttgaagtggtgaggc

SEQ ID NO: 1980829 - DNA, 15 bp, Homo sapiens
tgaagtggtgaggct

SEQ ID NO: 1980830 - DNA, 15 bp, Homo sapiens
gaagtggtgaggctc

SEQ ID NO: 1980831 - DNA, 15 bp, Homo sapiens
aagtggtgaggctcg

SEQ ID NO: 1980832 - DNA, 15 bp, Homo sapiens
agtggtgaggctcgg

SEQ ID NO: 1980833 - DNA, 15 bp, Homo sapiens
gtggtgaggctcggg

SEQ ID NO: 1980834 - DNA, 15 bp, Homo sapiens
tggtgaggctcgggg

SEQ ID NO: 1980835 - DNA, 15 bp, Homo sapiens
ggtgaggctcgggga

SEQ ID NO: 1980836 - DNA, 15 bp, Homo sapiens
gtgaggctcggggaa

SEQ ID NO: 1980837 - DNA, 15 bp, Homo sapiens
tgaggctcggggaag

SEQ ID NO: 1980838 - DNA, 15 bp, Homo sapiens
gaggctcggggaagc

SEQ ID NO: 1980839 - DNA, 15 bp, Homo sapiens
aggctcggggaagcc

SEQ ID NO: 1980840 - DNA, 15 bp, Homo sapiens
ggctcggggaagcca

SEQ ID NO: 1980841 - DNA, 15 bp, Homo sapiens
gctcggggaagccag

SEQ ID NO: 1980842 - DNA, 15 bp, Homo sapiens
ctcggggaagccagc

SEQ ID NO: 1980843 - DNA, 15 bp, Homo sapiens
tcggggaagccagct

SEQ ID NO: 1980844 - DNA, 15 bp, Homo sapiens
cggggaagccagctg

SEQ ID NO: 1980845 - DNA, 15 bp, Homo sapiens
ggggaagccagctgg

SEQ ID NO: 1980846 - DNA, 15 bp, Homo sapiens
gggaagccagctggg

SEQ ID NO: 1980847 - DNA, 15 bp, Homo sapiens
ggaagccagctgggc

SEQ ID NO: 1980848 - DNA, 15 bp, Homo sapiens
gaagccagctgggct

SEQ ID NO: 1980849 - DNA, 15 bp, Homo sapiens
aagccagctgggctt

SEQ ID NO: 1980850 - DNA, 15 bp, Homo sapiens
agccagctgggcttg

SEQ ID NO: 1980851 - DNA, 15 bp, Homo sapiens
gccagctgggcttgg

SEQ ID NO: 1980852 - DNA, 15 bp, Homo sapiens
ccagctgggcttggg

SEQ ID NO: 1980853 - DNA, 15 bp, Homo sapiens
cagctgggcttgggc

SEQ ID NO: 1980854 - DNA, 15 bp, Homo sapiens
agctgggcttgggca

SEQ ID NO: 1980855 - DNA, 15 bp, Homo sapiens
gctgggcttgggcag

SEQ ID NO: 1980856 - DNA, 15 bp, Homo sapiens
ctgggcttgggcagc

SEQ ID NO: 1980857 - DNA, 15 bp, Homo sapiens
tgggcttgggcagcc

SEQ ID NO: 1980858 - DNA, 15 bp, Homo sapiens
gggcttgggcagcct

SEQ ID NO: 1980859 - DNA, 15 bp, Homo sapiens
ggcttgggcagcctg

SEQ ID NO: 1980860 - DNA, 15 bp, Homo sapiens
gcttgggcagcctgg

SEQ ID NO: 1980861 - DNA, 15 bp, Homo sapiens
cttgggcagcctgga

SEQ ID NO: 1980862 - DNA, 15 bp, Homo sapiens
ttgggcagcctggag

SEQ ID NO: 1980863 - DNA, 15 bp, Homo sapiens
tgggcagcctggagt

SEQ ID NO: 1980864 - DNA, 15 bp, Homo sapiens
gggcagcctggagtt

SEQ ID NO: 1980865 - DNA, 15 bp, Homo sapiens
ggcagcctggagttg

SEQ ID NO: 1980866 - DNA, 15 bp, Homo sapiens
gcagcctggagttgc

SEQ ID NO: 1980867 - DNA, 15 bp, Homo sapiens
cagcctggagttgct

SEQ ID NO: 1980868 - DNA, 15 bp, Homo sapiens
agcctggagttgctg

SEQ ID NO: 1980869 - DNA, 15 bp, Homo sapiens
gcctggagttgctgt

SEQ ID NO: 1980870 - DNA, 15 bp, Homo sapiens
cctggagttgctgtg

SEQ ID NO: 1980871 - DNA, 15 bp, Homo sapiens
ctggagttgctgtgt

SEQ ID NO: 1980872 - DNA, 15 bp, Homo sapiens
tggagttgctgtgtt

SEQ ID NO: 1980873 - DNA, 15 bp, Homo sapiens
ggagttgctgtgtta

SEQ ID NO: 1980874 - DNA, 15 bp, Homo sapiens
gagttgctgtgttag

SEQ ID NO: 1980875 - DNA, 15 bp, Homo sapiens
agttgctgtgttagc

SEQ ID NO: 1980876 - DNA, 15 bp, Homo sapiens
gttgctgtgttagca

SEQ ID NO: 1980877 - DNA, 15 bp, Homo sapiens
ttgctgtgttagcag

SEQ ID NO: 1980878 - DNA, 15 bp, Homo sapiens
tgctgtgttagcagg

SEQ ID NO: 1980879 - DNA, 15 bp, Homo sapiens
gctgtgttagcagga

SEQ ID NO: 1980880 - DNA, 15 bp, Homo sapiens
ctgtgttagcaggag

SEQ ID NO: 1980881 - DNA, 15 bp, Homo sapiens
tgtgttagcaggagc

SEQ ID NO: 1980882 - DNA, 15 bp, Homo sapiens
gtgttagcaggagct

SEQ ID NO: 1980883 - DNA, 15 bp, Homo sapiens
tgttagcaggagcta

SEQ ID NO: 1980884 - DNA, 15 bp, Homo sapiens
gttagcaggagctaa

SEQ ID NO: 1980885 - DNA, 15 bp, Homo sapiens
ttagcaggagctaaa

SEQ ID NO: 1980886 - DNA, 15 bp, Homo sapiens
tagcaggagctaaag

SEQ ID NO: 1980887 - DNA, 15 bp, Homo sapiens
agcaggagctaaagg

SEQ ID NO: 1980888 - DNA, 15 bp, Homo sapiens
gcaggagctaaagga

SEQ ID NO: 1980889 - DNA, 15 bp, Homo sapiens
caggagctaaaggag

SEQ ID NO: 1980890 - DNA, 15 bp, Homo sapiens
aggagctaaaggagg

SEQ ID NO: 1980891 - DNA, 15 bp, Homo sapiens
ggagctaaaggaggc

SEQ ID NO: 1980892 - DNA, 15 bp, Homo sapiens
gagctaaaggaggcg

SEQ ID NO: 1980893 - DNA, 15 bp, Homo sapiens
agctaaaggaggcgc

SEQ ID NO: 1980894 - DNA, 15 bp, Homo sapiens
gctaaaggaggcgca

SEQ ID NO: 1980895 - DNA, 15 bp, Homo sapiens
ctaaaggaggcgcag

SEQ ID NO: 1980896 - DNA, 15 bp, Homo sapiens
taaaggaggcgcagg

SEQ ID NO: 1980897 - DNA, 15 bp, Homo sapiens
aaaggaggcgcaggg

SEQ ID NO: 1980898 - DNA, 15 bp, Homo sapiens
aaggaggcgcagggc

SEQ ID NO: 1980899 - DNA, 15 bp, Homo sapiens
aggaggcgcagggcc

SEQ ID NO: 1980900 - DNA, 15 bp, Homo sapiens
ggaggcgcagggccc

SEQ ID NO: 1980901 - DNA, 15 bp, Homo sapiens
gaggcgcagggccca

SEQ ID NO: 1980902 - DNA, 15 bp, Homo sapiens
aggcgcagggcccag

SEQ ID NO: 1980903 - DNA, 15 bp, Homo sapiens
ggcgcagggcccagc

SEQ ID NO: 1980904 - DNA, 15 bp, Homo sapiens
gcgcagggcccagca

SEQ ID NO: 1980905 - DNA, 15 bp, Homo sapiens
cgcagggcccagcag

SEQ ID NO: 1980906 - DNA, 15 bp, Homo sapiens
gcagggcccagcagg

SEQ ID NO: 1980907 - DNA, 15 bp, Homo sapiens
cagggcccagcaggc

SEQ ID NO: 1980908 - DNA, 15 bp, Homo sapiens
agggcccagcaggca

SEQ ID NO: 1980909 - DNA, 15 bp, Homo sapiens
gggcccagcaggcag

SEQ ID NO: 1980910 - DNA, 15 bp, Homo sapiens
ggcccagcaggcagc

SEQ ID NO: 1980911 - DNA, 15 bp, Homo sapiens
gcccagcaggcagct

SEQ ID NO: 1980912 - DNA, 15 bp, Homo sapiens
cccagcaggcagctt

SEQ ID NO: 1980913 - DNA, 15 bp, Homo sapiens
ccagcaggcagcttt

SEQ ID NO: 1980914 - DNA, 15 bp, Homo sapiens
cagcaggcagctttt

SEQ ID NO: 1980915 - DNA, 15 bp, Homo sapiens
agcaggcagcttttt

SEQ ID NO: 1980916 - DNA, 15 bp, Homo sapiens
gcaggcagctttttt

SEQ ID NO: 1980917 - DNA, 15 bp, Homo sapiens
caggcagcttttttc

SEQ ID NO: 1980918 - DNA, 15 bp, Homo sapiens
aggcagcttttttct

SEQ ID NO: 1980919 - DNA, 15 bp, Homo sapiens
ggcagcttttttctt

SEQ ID NO: 1980920 - DNA, 15 bp, Homo sapiens
gcagcttttttctta

SEQ ID NO: 1980921 - DNA, 15 bp, Homo sapiens
cagcttttttcttag

SEQ ID NO: 1980922 - DNA, 15 bp, Homo sapiens
agcttttttcttagc

SEQ ID NO: 1980923 - DNA, 15 bp, Homo sapiens
gcttttttcttagct

SEQ ID NO: 1980924 - DNA, 15 bp, Homo sapiens
cttttttcttagctg

SEQ ID NO: 1980925 - DNA, 15 bp, Homo sapiens
ttttttcttagctgc

SEQ ID NO: 1980926 - DNA, 15 bp, Homo sapiens
tttttcttagctgca

SEQ ID NO: 1980927 - DNA, 15 bp, Homo sapiens
ttttcttagctgcag

SEQ ID NO: 1980928 - DNA, 15 bp, Homo sapiens
tttcttagctgcagc

SEQ ID NO: 1980929 - DNA, 15 bp, Homo sapiens
ttcttagctgcagct

SEQ ID NO: 1980930 - DNA, 15 bp, Homo sapiens
tcttagctgcagctc

SEQ ID NO: 1980931 - DNA, 15 bp, Homo sapiens
cttagctgcagctct

SEQ ID NO: 1980932 - DNA, 15 bp, Homo sapiens
ttagctgcagctctc

SEQ ID NO: 1980933 - DNA, 15 bp, Homo sapiens
tagctgcagctctct

SEQ ID NO: 1980934 - DNA, 15 bp, Homo sapiens
agctgcagctctctg

SEQ ID NO: 1980935 - DNA, 15 bp, Homo sapiens
gctgcagctctctgg

SEQ ID NO: 1980936 - DNA, 15 bp, Homo sapiens
ctgcagctctctggg

SEQ ID NO: 1980937 - DNA, 15 bp, Homo sapiens
tgcagctctctgggc

SEQ ID NO: 1980938 - DNA, 15 bp, Homo sapiens
gcagctctctgggcc

SEQ ID NO: 1980939 - DNA, 15 bp, Homo sapiens
cagctctctgggcct

SEQ ID NO: 1980940 - DNA, 15 bp, Homo sapiens
agctctctgggcctt

SEQ ID NO: 1980941 - DNA, 15 bp, Homo sapiens
gctctctgggccttg

SEQ ID NO: 1980942 - DNA, 15 bp, Homo sapiens
ctctctgggccttgt

SEQ ID NO: 1980943 - DNA, 15 bp, Homo sapiens
tctctgggccttgtc

SEQ ID NO: 1980944 - DNA, 15 bp, Homo sapiens
ctctgggccttgtct

SEQ ID NO: 1980945 - DNA, 15 bp, Homo sapiens
tctgggccttgtctc

SEQ ID NO: 1980946 - DNA, 15 bp, Homo sapiens
ctgggccttgtctca

SEQ ID NO: 1980947 - DNA, 15 bp, Homo sapiens
tgggccttgtctcaa

SEQ ID NO: 1980948 - DNA, 15 bp, Homo sapiens
gggccttgtctcaag

SEQ ID NO: 1980949 - DNA, 15 bp, Homo sapiens
ggccttgtctcaagg

SEQ ID NO: 1980950 - DNA, 15 bp, Homo sapiens
gccttgtctcaaggg

SEQ ID NO: 1980951 - DNA, 15 bp, Homo sapiens
ccttgtctcaaggga

SEQ ID NO: 1980952 - DNA, 15 bp, Homo sapiens
cttgtctcaagggag

SEQ ID NO: 1980953 - DNA, 15 bp, Homo sapiens
ttgtctcaagggagg

SEQ ID NO: 1980954 - DNA, 15 bp, Homo sapiens
tgtctcaagggaggt

SEQ ID NO: 1980955 - DNA, 15 bp, Homo sapiens
gtctcaagggaggtt

SEQ ID NO: 1980956 - DNA, 15 bp, Homo sapiens
tctcaagggaggttg

SEQ ID NO: 1980957 - DNA, 15 bp, Homo sapiens
ctcaagggaggttgg

SEQ ID NO: 1980958 - DNA, 15 bp, Homo sapiens
tcaagggaggttgga

SEQ ID NO: 1980959 - DNA, 15 bp, Homo sapiens
caagggaggttggag

SEQ ID NO: 1980960 - DNA, 15 bp, Homo sapiens
aagggaggttggagc

SEQ ID NO: 1980961 - DNA, 15 bp, Homo sapiens
agggaggttggagct

SEQ ID NO: 1980962 - DNA, 15 bp, Homo sapiens
gggaggttggagctg

SEQ ID NO: 1980963 - DNA, 15 bp, Homo sapiens
ggaggttggagctgt

SEQ ID NO: 1980964 - DNA, 15 bp, Homo sapiens
gaggttggagctgtg

SEQ ID NO: 1980965 - DNA, 15 bp, Homo sapiens
aggttggagctgtgg

SEQ ID NO: 1980966 - DNA, 15 bp, Homo sapiens
ggttggagctgtgga

SEQ ID NO: 1980967 - DNA, 15 bp, Homo sapiens
gttggagctgtggag

SEQ ID NO: 1980968 - DNA, 15 bp, Homo sapiens
ttggagctgtggagc

SEQ ID NO: 1980969 - DNA, 15 bp, Homo sapiens
tggagctgtggagcc

SEQ ID NO: 1980970 - DNA, 15 bp, Homo sapiens
ggagctgtggagccc

SEQ ID NO: 1980971 - DNA, 15 bp, Homo sapiens
gagctgtggagcccc

SEQ ID NO: 1980972 - DNA, 15 bp, Homo sapiens
agctgtggagcccct

SEQ ID NO: 1980973 - DNA, 15 bp, Homo sapiens
gctgtggagcccctc

SEQ ID NO: 1980974 - DNA, 15 bp, Homo sapiens
ctgtggagcccctca

SEQ ID NO: 1980975 - DNA, 15 bp, Homo sapiens
tgtggagcccctcag

SEQ ID NO: 1980976 - DNA, 15 bp, Homo sapiens
gtggagcccctcaga

SEQ ID NO: 1980977 - DNA, 15 bp, Homo sapiens
tggagcccctcagag

SEQ ID NO: 1980978 - DNA, 15 bp, Homo sapiens
ggagcccctcagagc

SEQ ID NO: 1980979 - DNA, 15 bp, Homo sapiens
gagcccctcagagct

SEQ ID NO: 1980980 - DNA, 15 bp, Homo sapiens
agcccctcagagctg

SEQ ID NO: 1980981 - DNA, 15 bp, Homo sapiens
gcccctcagagctgt

SEQ ID NO: 1980982 - DNA, 15 bp, Homo sapiens
cccctcagagctgtg

SEQ ID NO: 1980983 - DNA, 15 bp, Homo sapiens
ccctcagagctgtgg

SEQ ID NO: 1980984 - DNA, 15 bp, Homo sapiens
cctcagagctgtggc

SEQ ID NO: 1980985 - DNA, 15 bp, Homo sapiens
ctcagagctgtggcg

SEQ ID NO: 1980986 - DNA, 15 bp, Homo sapiens
tcagagctgtggcgg

SEQ ID NO: 1980987 - DNA, 15 bp, Homo sapiens
cagagctgtggcggg

SEQ ID NO: 1980988 - DNA, 15 bp, Homo sapiens
agagctgtggcgggc

SEQ ID NO: 1980989 - DNA, 15 bp, Homo sapiens
gagctgtggcgggcc

SEQ ID NO: 1980990 - DNA, 15 bp, Homo sapiens
agctgtggcgggccc

SEQ ID NO: 1980991 - DNA, 15 bp, Homo sapiens
gctgtggcgggccct

SEQ ID NO: 1980992 - DNA, 15 bp, Homo sapiens
ctgtggcgggccctc

SEQ ID NO: 1980993 - DNA, 15 bp, Homo sapiens
tgtggcgggccctca

SEQ ID NO: 1980994 - DNA, 15 bp, Homo sapiens
gtggcgggccctcac

SEQ ID NO: 1980995 - DNA, 15 bp, Homo sapiens
tggcgggccctcact

SEQ ID NO: 1980996 - DNA, 15 bp, Homo sapiens
ggcgggccctcactt

SEQ ID NO: 1980997 - DNA, 15 bp, Homo sapiens
gcgggccctcactta

SEQ ID NO: 1980998 - DNA, 15 bp, Homo sapiens
cgggccctcacttag

SEQ ID NO: 1980999 - DNA, 15 bp, Homo sapiens
gggccctcacttagc

SEQ ID NO: 1981000 - DNA, 15 bp, Homo sapiens
ggccctcacttagct

SEQ ID NO: 1981001 - DNA, 15 bp, Homo sapiens
gccctcacttagcta

SEQ ID NO: 1981002 - DNA, 15 bp, Homo sapiens
ccctcacttagctac

SEQ ID NO: 1981003 - DNA, 15 bp, Homo sapiens
cctcacttagctacc

SEQ ID NO: 1981004 - DNA, 15 bp, Homo sapiens
ctcacttagctaccc

SEQ ID NO: 1981005 - DNA, 15 bp, Homo sapiens
tcacttagctaccca

SEQ ID NO: 1981006 - DNA, 15 bp, Homo sapiens
cacttagctacccac

SEQ ID NO: 1981007 - DNA, 15 bp, Homo sapiens
acttagctacccact

SEQ ID NO: 1981008 - DNA, 15 bp, Homo sapiens
cttagctacccactc

SEQ ID NO: 1981009 - DNA, 15 bp, Homo sapiens
ttagctacccactct

SEQ ID NO: 1981010 - DNA, 15 bp, Homo sapiens
tagctacccactcta

SEQ ID NO: 1981011 - DNA, 15 bp, Homo sapiens
agctacccactctat

SEQ ID NO: 1981012 - DNA, 15 bp, Homo sapiens
gctacccactctata

SEQ ID NO: 1981013 - DNA, 15 bp, Homo sapiens
ctacccactctatac

SEQ ID NO: 1981014 - DNA, 15 bp, Homo sapiens
tacccactctatacc

SEQ ID NO: 1981015 - DNA, 15 bp, Homo sapiens
acccactctataccc

SEQ ID NO: 1981016 - DNA, 15 bp, Homo sapiens
cccactctataccca

SEQ ID NO: 1981017 - DNA, 15 bp, Homo sapiens
ccactctatacccac

SEQ ID NO: 1981018 - DNA, 15 bp, Homo sapiens
cactctatacccaca

SEQ ID NO: 1981019 - DNA, 15 bp, Homo sapiens
actctatacccacag

SEQ ID NO: 1981020 - DNA, 15 bp, Homo sapiens
ctctatacccacaga

SEQ ID NO: 1981021 - DNA, 15 bp, Homo sapiens
tctatacccacagaa

SEQ ID NO: 1981022 - DNA, 15 bp, Homo sapiens
ctatacccacagaac

SEQ ID NO: 1981023 - DNA, 15 bp, Homo sapiens
tatacccacagaacg

SEQ ID NO: 1981024 - DNA, 15 bp, Homo sapiens
atacccacagaacgg

SEQ ID NO: 1981025 - DNA, 15 bp, Homo sapiens
tacccacagaacggc

SEQ ID NO: 1981026 - DNA, 15 bp, Homo sapiens
acccacagaacggcc

SEQ ID NO: 1981027 - DNA, 15 bp, Homo sapiens
cccacagaacggcca

SEQ ID NO: 1981028 - DNA, 15 bp, Homo sapiens
ccacagaacggccac

SEQ ID NO: 1981029 - DNA, 15 bp, Homo sapiens
cacagaacggccacg

SEQ ID NO: 1981030 - DNA, 15 bp, Homo sapiens
acagaacggccacgg

SEQ ID NO: 1981031 - DNA, 15 bp, Homo sapiens
cagaacggccacggc

SEQ ID NO: 1981032 - DNA, 15 bp, Homo sapiens
agaacggccacggct

SEQ ID NO: 1981033 - DNA, 15 bp, Homo sapiens
gaacggccacggctt

SEQ ID NO: 1981034 - DNA, 15 bp, Homo sapiens
aacggccacggcttc

SEQ ID NO: 1981035 - DNA, 15 bp, Homo sapiens
acggccacggcttca

SEQ ID NO: 1981036 - DNA, 15 bp, Homo sapiens
cggccacggcttcag

SEQ ID NO: 1981037 - DNA, 15 bp, Homo sapiens
ggccacggcttcagc

SEQ ID NO: 1981038 - DNA, 15 bp, Homo sapiens
gccacggcttcagct

SEQ ID NO: 1981039 - DNA, 15 bp, Homo sapiens
ccacggcttcagctg

SEQ ID NO: 1981040 - DNA, 15 bp, Homo sapiens
cacggcttcagctgc

SEQ ID NO: 1981041 - DNA, 15 bp, Homo sapiens
acggcttcagctgcc

SEQ ID NO: 1981042 - DNA, 15 bp, Homo sapiens
cggcttcagctgccc

SEQ ID NO: 1981043 - DNA, 15 bp, Homo sapiens
ggcttcagctgccca

SEQ ID NO: 1981044 - DNA, 15 bp, Homo sapiens
gcttcagctgcccag

SEQ ID NO: 1981045 - DNA, 15 bp, Homo sapiens
cttcagctgcccagg

SEQ ID NO: 1981046 - DNA, 15 bp, Homo sapiens
ttcagctgcccaggc

SEQ ID NO: 1981047 - DNA, 15 bp, Homo sapiens
tcagctgcccaggca

SEQ ID NO: 1981048 - DNA, 15 bp, Homo sapiens
cagctgcccaggcac

SEQ ID NO: 1981049 - DNA, 15 bp, Homo sapiens
agctgcccaggcacc

SEQ ID NO: 1981050 - DNA, 15 bp, Homo sapiens
gctgcccaggcacct

SEQ ID NO: 1981051 - DNA, 15 bp, Homo sapiens
ctgcccaggcacctg

SEQ ID NO: 1981052 - DNA, 15 bp, Homo sapiens
tgcccaggcacctgc

SEQ ID NO: 1981053 - DNA, 15 bp, Homo sapiens
gcccaggcacctgcg

SEQ ID NO: 1981054 - DNA, 15 bp, Homo sapiens
cccaggcacctgcgc

SEQ ID NO: 1981055 - DNA, 15 bp, Homo sapiens
ccaggcacctgcgcc

SEQ ID NO: 1981056 - DNA, 15 bp, Homo sapiens
caggcacctgcgcca

SEQ ID NO: 1981057 - DNA, 15 bp, Homo sapiens
aggcacctgcgccag

SEQ ID NO: 1981058 - DNA, 15 bp, Homo sapiens
ggcacctgcgccaga

SEQ ID NO: 1981059 - DNA, 15 bp, Homo sapiens
gcacctgcgccagac

SEQ ID NO: 1981060 - DNA, 15 bp, Homo sapiens
cacctgcgccagacc

SEQ ID NO: 1981061 - DNA, 15 bp, Homo sapiens
acctgcgccagacca

SEQ ID NO: 1981062 - DNA, 15 bp, Homo sapiens
cctgcgccagaccat

SEQ ID NO: 1981063 - DNA, 15 bp, Homo sapiens
ctgcgccagaccatt

SEQ ID NO: 1981064 - DNA, 15 bp, Homo sapiens
tgcgccagaccattc

SEQ ID NO: 1981065 - DNA, 15 bp, Homo sapiens
gcgccagaccattca

SEQ ID NO: 1981066 - DNA, 15 bp, Homo sapiens
cgccagaccattcag

SEQ ID NO: 1981067 - DNA, 15 bp, Homo sapiens
gccagaccattcaga

SEQ ID NO: 1981068 - DNA, 15 bp, Homo sapiens
ccagaccattcagaa

SEQ ID NO: 1981069 - DNA, 15 bp, Homo sapiens
cagaccattcagaag

SEQ ID NO: 1981070 - DNA, 15 bp, Homo sapiens
agaccattcagaaga

SEQ ID NO: 1981071 - DNA, 15 bp, Homo sapiens
gaccattcagaagaa

SEQ ID NO: 1981072 - DNA, 15 bp, Homo sapiens
accattcagaagaag

SEQ ID NO: 1981073 - DNA, 15 bp, Homo sapiens
ccattcagaagaagg

SEQ ID NO: 1981074 - DNA, 15 bp, Homo sapiens
cattcagaagaaggt

SEQ ID NO: 1981075 - DNA, 15 bp, Homo sapiens
attcagaagaaggtc

SEQ ID NO: 1981076 - DNA, 15 bp, Homo sapiens
ttcagaagaaggtcg

SEQ ID NO: 1981077 - DNA, 15 bp, Homo sapiens
tcagaagaaggtcgg

SEQ ID NO: 1981078 - DNA, 15 bp, Homo sapiens
cagaagaaggtcggg

SEQ ID NO: 1981079 - DNA, 15 bp, Homo sapiens
agaagaaggtcgggg

SEQ ID NO: 1981080 - DNA, 15 bp, Homo sapiens
gaagaaggtcgggga

SEQ ID NO: 1981081 - DNA, 15 bp, Homo sapiens
aagaaggtcggggag

SEQ ID NO: 1981082 - DNA, 15 bp, Homo sapiens
agaaggtcggggagc

SEQ ID NO: 1981083 - DNA, 15 bp, Homo sapiens
gaaggtcggggagcc

SEQ ID NO: 1981084 - DNA, 15 bp, Homo sapiens
aaggtcggggagcct

SEQ ID NO: 1981085 - DNA, 15 bp, Homo sapiens
aggtcggggagcctg

SEQ ID NO: 1981086 - DNA, 15 bp, Homo sapiens
ggtcggggagcctgt

SEQ ID NO: 1981087 - DNA, 15 bp, Homo sapiens
gtcggggagcctgtg

SEQ ID NO: 1981088 - DNA, 15 bp, Homo sapiens
tcggggagcctgtga

SEQ ID NO: 1981089 - DNA, 15 bp, Homo sapiens
cggggagcctgtgaa

SEQ ID NO: 1981090 - DNA, 15 bp, Homo sapiens
ggggagcctgtgaac

SEQ ID NO: 1981091 - DNA, 15 bp, Homo sapiens
gggagcctgtgaacc

SEQ ID NO: 1981092 - DNA, 15 bp, Homo sapiens
ggagcctgtgaacct

SEQ ID NO: 1981093 - DNA, 15 bp, Homo sapiens
gagcctgtgaacctt

SEQ ID NO: 1981094 - DNA, 15 bp, Homo sapiens
agcctgtgaaccttc

SEQ ID NO: 1981095 - DNA, 15 bp, Homo sapiens
gcctgtgaaccttct

SEQ ID NO: 1981096 - DNA, 15 bp, Homo sapiens
cctgtgaaccttctc

SEQ ID NO: 1981097 - DNA, 15 bp, Homo sapiens
ctgtgaaccttctca

SEQ ID NO: 1981098 - DNA, 15 bp, Homo sapiens
tgtgaaccttctcat

SEQ ID NO: 1981099 - DNA, 15 bp, Homo sapiens
gtgaaccttctcatc

SEQ ID NO: 1981100 - DNA, 15 bp, Homo sapiens
tgaaccttctcatcc

SEQ ID NO: 1981101 - DNA, 15 bp, Homo sapiens
gaaccttctcatccc

SEQ ID NO: 1981102 - DNA, 15 bp, Homo sapiens
aaccttctcatccct

SEQ ID NO: 1981103 - DNA, 15 bp, Homo sapiens
accttctcatccctt

SEQ ID NO: 1981104 - DNA, 15 bp, Homo sapiens
ccttctcatcccttt

SEQ ID NO: 1981105 - DNA, 15 bp, Homo sapiens
cttctcatccctttc

SEQ ID NO: 1981106 - DNA, 15 bp, Homo sapiens
ttctcatccctttcc

SEQ ID NO: 1981107 - DNA, 15 bp, Homo sapiens
tctcatccctttcca

SEQ ID NO: 1981108 - DNA, 15 bp, Homo sapiens
ctcatccctttccag

SEQ ID NO: 1981109 - DNA, 15 bp, Homo sapiens
tcatccctttccagg

SEQ ID NO: 1981110 - DNA, 15 bp, Homo sapiens
catccctttccaggt

SEQ ID NO: 1981111 - DNA, 15 bp, Homo sapiens
atccctttccaggtg

SEQ ID NO: 1981112 - DNA, 15 bp, Homo sapiens
tccctttccaggtgg

SEQ ID NO: 1981113 - DNA, 15 bp, Homo sapiens
ccctttccaggtggg

SEQ ID NO: 1981114 - DNA, 15 bp, Homo sapiens
cctttccaggtggga

SEQ ID NO: 1981115 - DNA, 15 bp, Homo sapiens
ctttccaggtgggac

SEQ ID NO: 1981116 - DNA, 15 bp, Homo sapiens
tttccaggtgggact

SEQ ID NO: 1981117 - DNA, 15 bp, Homo sapiens
ttccaggtgggactg

SEQ ID NO: 1981118 - DNA, 15 bp, Homo sapiens
tccaggtgggactgg

SEQ ID NO: 1981119 - DNA, 15 bp, Homo sapiens
ccaggtgggactggc

SEQ ID NO: 1981120 - DNA, 15 bp, Homo sapiens
caggtgggactggcc

SEQ ID NO: 1981121 - DNA, 15 bp, Homo sapiens
aggtgggactggccc

SEQ ID NO: 1981122 - DNA, 15 bp, Homo sapiens
ggtgggactggcccc

SEQ ID NO: 1981123 - DNA, 15 bp, Homo sapiens
gtgggactggccccc

SEQ ID NO: 1981124 - DNA, 15 bp, Homo sapiens
tgggactggccccct

SEQ ID NO: 1981125 - DNA, 15 bp, Homo sapiens
gggactggccccctt

SEQ ID NO: 1981126 - DNA, 15 bp, Homo sapiens
ggactggcccccttc

SEQ ID NO: 1981127 - DNA, 15 bp, Homo sapiens
gactggcccccttcc

SEQ ID NO: 1981128 - DNA, 15 bp, Homo sapiens
actggcccccttccc

SEQ ID NO: 1981129 - DNA, 15 bp, Homo sapiens
ctggcccccttccct

SEQ ID NO: 1981130 - DNA, 15 bp, Homo sapiens
tggcccccttccctg

SEQ ID NO: 1981131 - DNA, 15 bp, Homo sapiens
ggcccccttccctgt

SEQ ID NO: 1981132 - DNA, 15 bp, Homo sapiens
gcccccttccctgtc

SEQ ID NO: 1981133 - DNA, 15 bp, Homo sapiens
cccccttccctgtcc

SEQ ID NO: 1981134 - DNA, 15 bp, Homo sapiens
cccttccctgtcccc

SEQ ID NO: 1981135 - DNA, 15 bp, Homo sapiens
ccttccctgtccccc

SEQ ID NO: 1981136 - DNA, 15 bp, Homo sapiens
cttccctgtccccca

SEQ ID NO: 1981137 - DNA, 15 bp, Homo sapiens
ttccctgtcccccag

SEQ ID NO: 1981138 - DNA, 15 bp, Homo sapiens
tccctgtcccccagg

SEQ ID NO: 1981139 - DNA, 15 bp, Homo sapiens
ccctgtcccccaggg

SEQ ID NO: 1981140 - DNA, 15 bp, Homo sapiens
cctgtcccccagggg

SEQ ID NO: 1981141 - DNA, 15 bp, Homo sapiens
ctgtcccccagggga

SEQ ID NO: 1981142 - DNA, 15 bp, Homo sapiens
tgtcccccaggggag

SEQ ID NO: 1981143 - DNA, 15 bp, Homo sapiens
gtcccccaggggaga

SEQ ID NO: 1981144 - DNA, 15 bp, Homo sapiens
tcccccaggggagag

SEQ ID NO: 1981145 - DNA, 15 bp, Homo sapiens
cccccaggggagaga

SEQ ID NO: 1981146 - DNA, 15 bp, Homo sapiens
ccccaggggagagag

SEQ ID NO: 1981147 - DNA, 15 bp, Homo sapiens
cccaggggagagagg

SEQ ID NO: 1981148 - DNA, 15 bp, Homo sapiens
ccaggggagagaggc

SEQ ID NO: 1981149 - DNA, 15 bp, Homo sapiens
caggggagagaggct

SEQ ID NO: 1981150 - DNA, 15 bp, Homo sapiens
aggggagagaggcta

SEQ ID NO: 1981151 - DNA, 15 bp, Homo sapiens
ggggagagaggctat

SEQ ID NO: 1981152 - DNA, 15 bp, Homo sapiens
gggagagaggctata

SEQ ID NO: 1981153 - DNA, 15 bp, Homo sapiens
ggagagaggctatag

SEQ ID NO: 1981154 - DNA, 15 bp, Homo sapiens
gagagaggctatagt

SEQ ID NO: 1981155 - DNA, 15 bp, Homo sapiens
agagaggctatagtg

SEQ ID NO: 1981156 - DNA, 15 bp, Homo sapiens
gagaggctatagtgt

SEQ ID NO: 1981157 - DNA, 15 bp, Homo sapiens
agaggctatagtgtg

SEQ ID NO: 1981158 - DNA, 15 bp, Homo sapiens
gaggctatagtgtgt

SEQ ID NO: 1981159 - DNA, 15 bp, Homo sapiens
aggctatagtgtgtt

SEQ ID NO: 1981160 - DNA, 15 bp, Homo sapiens
ggctatagtgtgttg

SEQ ID NO: 1981161 - DNA, 15 bp, Homo sapiens
gctatagtgtgttgt

SEQ ID NO: 1981162 - DNA, 15 bp, Homo sapiens
ctatagtgtgttgtt

SEQ ID NO: 1981163 - DNA, 15 bp, Homo sapiens
tatagtgtgttgttc

SEQ ID NO: 1981164 - DNA, 15 bp, Homo sapiens
atagtgtgttgttcc

SEQ ID NO: 1981165 - DNA, 15 bp, Homo sapiens
tagtgtgttgttccc

SEQ ID NO: 1981166 - DNA, 15 bp, Homo sapiens
agtgtgttgttccca

SEQ ID NO: 1981167 - DNA, 15 bp, Homo sapiens
gtgtgttgttcccat

SEQ ID NO: 1981168 - DNA, 15 bp, Homo sapiens
tgtgttgttcccatc

SEQ ID NO: 1981169 - DNA, 15 bp, Homo sapiens
gtgttgttcccatcc

SEQ ID NO: 1981170 - DNA, 15 bp, Homo sapiens
tgttgttcccatcca

SEQ ID NO: 1981171 - DNA, 15 bp, Homo sapiens
gttgttcccatccag

SEQ ID NO: 1981172 - DNA, 15 bp, Homo sapiens
ttgttcccatccagt

SEQ ID NO: 1981173 - DNA, 15 bp, Homo sapiens
tgttcccatccagtg

SEQ ID NO: 1981174 - DNA, 15 bp, Homo sapiens
gttcccatccagtgg

SEQ ID NO: 1981175 - DNA, 15 bp, Homo sapiens
ttcccatccagtgga

SEQ ID NO: 1981176 - DNA, 15 bp, Homo sapiens
tcccatccagtggac

SEQ ID NO: 1981177 - DNA, 15 bp, Homo sapiens
cccatccagtggact

SEQ ID NO: 1981178 - DNA, 15 bp, Homo sapiens
ccatccagtggactg

SEQ ID NO: 1981179 - DNA, 15 bp, Homo sapiens
catccagtggactga

SEQ ID NO: 1981180 - DNA, 15 bp, Homo sapiens
atccagtggactgat

SEQ ID NO: 1981181 - DNA, 15 bp, Homo sapiens
tccagtggactgatg

SEQ ID NO: 1981182 - DNA, 15 bp, Homo sapiens
ccagtggactgatgt

SEQ ID NO: 1981183 - DNA, 15 bp, Homo sapiens
cagtggactgatgtc

SEQ ID NO: 1981184 - DNA, 15 bp, Homo sapiens
agtggactgatgtct

SEQ ID NO: 1981185 - DNA, 15 bp, Homo sapiens
gtggactgatgtctc

SEQ ID NO: 1981186 - DNA, 15 bp, Homo sapiens
tggactgatgtctca

SEQ ID NO: 1981187 - DNA, 15 bp, Homo sapiens
ggactgatgtctcag

SEQ ID NO: 1981188 - DNA, 15 bp, Homo sapiens
gactgatgtctcagg

SEQ ID NO: 1981189 - DNA, 15 bp, Homo sapiens
actgatgtctcaggg

SEQ ID NO: 1981190 - DNA, 15 bp, Homo sapiens
ctgatgtctcagggc

SEQ ID NO: 1981191 - DNA, 15 bp, Homo sapiens
tgatgtctcagggct

SEQ ID NO: 1981192 - DNA, 15 bp, Homo sapiens
gatgtctcagggctg

SEQ ID NO: 1981193 - DNA, 15 bp, Homo sapiens
atgtctcagggctgg

SEQ ID NO: 1981194 - DNA, 15 bp, Homo sapiens
tgtctcagggctggc

SEQ ID NO: 1981195 - DNA, 15 bp, Homo sapiens
gtctcagggctggcc

SEQ ID NO: 1981196 - DNA, 15 bp, Homo sapiens
tctcagggctggcct

SEQ ID NO: 1981197 - DNA, 15 bp, Homo sapiens
ctcagggctggcctg

SEQ ID NO: 1981198 - DNA, 15 bp, Homo sapiens
tcagggctggcctga

SEQ ID NO: 1981199 - DNA, 15 bp, Homo sapiens
cagggctggcctgat

SEQ ID NO: 1981200 - DNA, 15 bp, Homo sapiens
agggctggcctgatc

SEQ ID NO: 1981201 - DNA, 15 bp, Homo sapiens
gggctggcctgatct

SEQ ID NO: 1981202 - DNA, 15 bp, Homo sapiens
ggctggcctgatctg

SEQ ID NO: 1981203 - DNA, 15 bp, Homo sapiens
gctggcctgatctga

SEQ ID NO: 1981204 - DNA, 15 bp, Homo sapiens
ctggcctgatctgag

SEQ ID NO: 1981205 - DNA, 15 bp, Homo sapiens
tggcctgatctgagg

SEQ ID NO: 1981206 - DNA, 15 bp, Homo sapiens
ggcctgatctgaggt

SEQ ID NO: 1981207 - DNA, 15 bp, Homo sapiens
gcctgatctgaggta

SEQ ID NO: 1981208 - DNA, 15 bp, Homo sapiens
cctgatctgaggtac

SEQ ID NO: 1981209 - DNA, 15 bp, Homo sapiens
ctgatctgaggtacc

SEQ ID NO: 1981210 - DNA, 15 bp, Homo sapiens
tgatctgaggtacca

SEQ ID NO: 1981211 - DNA, 15 bp, Homo sapiens
gatctgaggtaccag

SEQ ID NO: 1981212 - DNA, 15 bp, Homo sapiens
atctgaggtaccaga

SEQ ID NO: 1981213 - DNA, 15 bp, Homo sapiens
tctgaggtaccagag

SEQ ID NO: 1981214 - DNA, 15 bp, Homo sapiens
ctgaggtaccagagg

SEQ ID NO: 1981215 - DNA, 15 bp, Homo sapiens
tgaggtaccagaggc

SEQ ID NO: 1981216 - DNA, 15 bp, Homo sapiens
gaggtaccagaggct

SEQ ID NO: 1981217 - DNA, 15 bp, Homo sapiens
aggtaccagaggctg

SEQ ID NO: 1981218 - DNA, 15 bp, Homo sapiens
ggtaccagaggctgg

SEQ ID NO: 1981219 - DNA, 15 bp, Homo sapiens
gtaccagaggctggg

SEQ ID NO: 1981220 - DNA, 15 bp, Homo sapiens
taccagaggctgggg

SEQ ID NO: 1981221 - DNA, 15 bp, Homo sapiens
accagaggctggggt

SEQ ID NO: 1981222 - DNA, 15 bp, Homo sapiens
ccagaggctggggtg

SEQ ID NO: 1981223 - DNA, 15 bp, Homo sapiens
cagaggctggggtgg

SEQ ID NO: 1981224 - DNA, 15 bp, Homo sapiens
agaggctggggtggc

SEQ ID NO: 1981225 - DNA, 15 bp, Homo sapiens
gaggctggggtggcg

SEQ ID NO: 1981226 - DNA, 15 bp, Homo sapiens
aggctggggtggcgg

SEQ ID NO: 1981227 - DNA, 15 bp, Homo sapiens
ggctggggtggcggc

SEQ ID NO: 1981228 - DNA, 15 bp, Homo sapiens
gctggggtggcggcc

SEQ ID NO: 1981229 - DNA, 15 bp, Homo sapiens
ctggggtggcggccg

SEQ ID NO: 1981230 - DNA, 15 bp, Homo sapiens
tggggtggcggccgg

SEQ ID NO: 1981231 - DNA, 15 bp, Homo sapiens
ggggtggcggccggc

SEQ ID NO: 1981232 - DNA, 15 bp, Homo sapiens
gggtggcggccggcc

SEQ ID NO: 1981233 - DNA, 15 bp, Homo sapiens
ggtggcggccggccc

SEQ ID NO: 1981234 - DNA, 15 bp, Homo sapiens
gtggcggccggccct

SEQ ID NO: 1981235 - DNA, 15 bp, Homo sapiens
tggcggccggccctt

SEQ ID NO: 1981236 - DNA, 15 bp, Homo sapiens
ggcggccggcccttg

SEQ ID NO: 1981237 - DNA, 15 bp, Homo sapiens
gcggccggcccttgg

SEQ ID NO: 1981238 - DNA, 15 bp, Homo sapiens
cggccggcccttgga

SEQ ID NO: 1981239 - DNA, 15 bp, Homo sapiens
ggccggcccttggag

SEQ ID NO: 1981240 - DNA, 15 bp, Homo sapiens
gccggcccttggagt

SEQ ID NO: 1981241 - DNA, 15 bp, Homo sapiens
ccggcccttggagtg

SEQ ID NO: 1981242 - DNA, 15 bp, Homo sapiens
cggcccttggagtga

SEQ ID NO: 1981243 - DNA, 15 bp, Homo sapiens
ggcccttggagtgat

SEQ ID NO: 1981244 - DNA, 15 bp, Homo sapiens
gcccttggagtgatc

SEQ ID NO: 1981245 - DNA, 15 bp, Homo sapiens
cccttggagtgatcc

SEQ ID NO: 1981246 - DNA, 15 bp, Homo sapiens
ccttggagtgatcca

SEQ ID NO: 1981247 - DNA, 15 bp, Homo sapiens
cttggagtgatccag

SEQ ID NO: 1981248 - DNA, 15 bp, Homo sapiens
ttggagtgatccagg

SEQ ID NO: 1981249 - DNA, 15 bp, Homo sapiens
tggagtgatccaggt

SEQ ID NO: 1981250 - DNA, 15 bp, Homo sapiens
ggagtgatccaggtt

SEQ ID NO: 1981251 - DNA, 15 bp, Homo sapiens
gagtgatccaggttc

SEQ ID NO: 1981252 - DNA, 15 bp, Homo sapiens
agtgatccaggttca

SEQ ID NO: 1981253 - DNA, 15 bp, Homo sapiens
gtgatccaggttcag

SEQ ID NO: 1981254 - DNA, 15 bp, Homo sapiens
tgatccaggttcagg

SEQ ID NO: 1981255 - DNA, 15 bp, Homo sapiens
gatccaggttcaggg

SEQ ID NO: 1981256 - DNA, 15 bp, Homo sapiens
atccaggttcagggt

SEQ ID NO: 1981257 - DNA, 15 bp, Homo sapiens
tccaggttcagggtt

SEQ ID NO: 1981258 - DNA, 15 bp, Homo sapiens
ccaggttcagggtta

SEQ ID NO: 1981259 - DNA, 15 bp, Homo sapiens
caggttcagggttaa

SEQ ID NO: 1981260 - DNA, 15 bp, Homo sapiens
aggttcagggttaag

SEQ ID NO: 1981261 - DNA, 15 bp, Homo sapiens
ggttcagggttaagc

SEQ ID NO: 1981262 - DNA, 15 bp, Homo sapiens
gttcagggttaagct

SEQ ID NO: 1981263 - DNA, 15 bp, Homo sapiens
ttcagggttaagctt

SEQ ID NO: 1981264 - DNA, 15 bp, Homo sapiens
tcagggttaagcttt

SEQ ID NO: 1981265 - DNA, 15 bp, Homo sapiens
cagggttaagctttt

SEQ ID NO: 1981266 - DNA, 15 bp, Homo sapiens
agggttaagcttttc

SEQ ID NO: 1981267 - DNA, 15 bp, Homo sapiens
gggttaagcttttcc

SEQ ID NO: 1981268 - DNA, 15 bp, Homo sapiens
ggttaagcttttcct

SEQ ID NO: 1981269 - DNA, 15 bp, Homo sapiens
gttaagcttttcctc

SEQ ID NO: 1981270 - DNA, 15 bp, Homo sapiens
ttaagcttttcctcc

SEQ ID NO: 1981271 - DNA, 15 bp, Homo sapiens
taagcttttcctccc

SEQ ID NO: 1981272 - DNA, 15 bp, Homo sapiens
aagcttttcctcccc

SEQ ID NO: 1981273 - DNA, 15 bp, Homo sapiens
agcttttcctcccct

SEQ ID NO: 1981274 - DNA, 15 bp, Homo sapiens
gcttttcctcccctc

SEQ ID NO: 1981275 - DNA, 15 bp, Homo sapiens
cttttcctcccctca

SEQ ID NO: 1981276 - DNA, 15 bp, Homo sapiens
ttttcctcccctcag

SEQ ID NO: 1981277 - DNA, 15 bp, Homo sapiens
tttcctcccctcagg

SEQ ID NO: 1981278 - DNA, 15 bp, Homo sapiens
ttcctcccctcaggg

SEQ ID NO: 1981279 - DNA, 15 bp, Homo sapiens
tcctcccctcagggc

SEQ ID NO: 1981280 - DNA, 15 bp, Homo sapiens
cctcccctcagggca

SEQ ID NO: 1981281 - DNA, 15 bp, Homo sapiens
ctcccctcagggcaa

SEQ ID NO: 1981282 - DNA, 15 bp, Homo sapiens
tcccctcagggcaag

SEQ ID NO: 1981283 - DNA, 15 bp, Homo sapiens
cccctcagggcaagc

SEQ ID NO: 1981284 - DNA, 15 bp, Homo sapiens
ccctcagggcaagcc

SEQ ID NO: 1981285 - DNA, 15 bp, Homo sapiens
cctcagggcaagccc

SEQ ID NO: 1981286 - DNA, 15 bp, Homo sapiens
ctcagggcaagcccc

SEQ ID NO: 1981287 - DNA, 15 bp, Homo sapiens
tcagggcaagccccg

SEQ ID NO: 1981288 - DNA, 15 bp, Homo sapiens
cagggcaagccccgg

SEQ ID NO: 1981289 - DNA, 15 bp, Homo sapiens
agggcaagccccggc

SEQ ID NO: 1981290 - DNA, 15 bp, Homo sapiens
gggcaagccccggcc

SEQ ID NO: 1981291 - DNA, 15 bp, Homo sapiens
ggcaagccccggcct

SEQ ID NO: 1981292 - DNA, 15 bp, Homo sapiens
gcaagccccggcctc

SEQ ID NO: 1981293 - DNA, 15 bp, Homo sapiens
caagccccggcctca

SEQ ID NO: 1981294 - DNA, 15 bp, Homo sapiens
aagccccggcctcag

SEQ ID NO: 1981295 - DNA, 15 bp, Homo sapiens
agccccggcctcagg

SEQ ID NO: 1981296 - DNA, 15 bp, Homo sapiens
gccccggcctcaggt

SEQ ID NO: 1981297 - DNA, 15 bp, Homo sapiens
ccccggcctcaggtg

SEQ ID NO: 1981298 - DNA, 15 bp, Homo sapiens
cccggcctcaggtga

SEQ ID NO: 1981299 - DNA, 15 bp, Homo sapiens
ccggcctcaggtgac

SEQ ID NO: 1981300 - DNA, 15 bp, Homo sapiens
cggcctcaggtgacc

SEQ ID NO: 1981301 - DNA, 15 bp, Homo sapiens
ggcctcaggtgacct

SEQ ID NO: 1981302 - DNA, 15 bp, Homo sapiens
gcctcaggtgacctg

SEQ ID NO: 1981303 - DNA, 15 bp, Homo sapiens
cctcaggtgacctgg

SEQ ID NO: 1981304 - DNA, 15 bp, Homo sapiens
ctcaggtgacctgga

SEQ ID NO: 1981305 - DNA, 15 bp, Homo sapiens
tcaggtgacctggac

SEQ ID NO: 1981306 - DNA, 15 bp, Homo sapiens
caggtgacctggacc

SEQ ID NO: 1981307 - DNA, 15 bp, Homo sapiens
aggtgacctggacca

SEQ ID NO: 1981308 - DNA, 15 bp, Homo sapiens
ggtgacctggaccaa

SEQ ID NO: 1981309 - DNA, 15 bp, Homo sapiens
gtgacctggaccaaa

SEQ ID NO: 1981310 - DNA, 15 bp, Homo sapiens
tgacctggaccaaag

SEQ ID NO: 1981311 - DNA, 15 bp, Homo sapiens
gacctggaccaaaga

SEQ ID NO: 1981312 - DNA, 15 bp, Homo sapiens
acctggaccaaagag

SEQ ID NO: 1981313 - DNA, 15 bp, Homo sapiens
cctggaccaaagagg

SEQ ID NO: 1981314 - DNA, 15 bp, Homo sapiens
ctggaccaaagaggg

SEQ ID NO: 1981315 - DNA, 15 bp, Homo sapiens
tggaccaaagagggg

SEQ ID NO: 1981316 - DNA, 15 bp, Homo sapiens
ggaccaaagaggggc

SEQ ID NO: 1981317 - DNA, 15 bp, Homo sapiens
gaccaaagaggggca

SEQ ID NO: 1981318 - DNA, 15 bp, Homo sapiens
accaaagaggggcag

SEQ ID NO: 1981319 - DNA, 15 bp, Homo sapiens
ccaaagaggggcagc

SEQ ID NO: 1981320 - DNA, 15 bp, Homo sapiens
caaagaggggcagcc

SEQ ID NO: 1981321 - DNA, 15 bp, Homo sapiens
aaagaggggcagccc

SEQ ID NO: 1981322 - DNA, 15 bp, Homo sapiens
aagaggggcagcccc

SEQ ID NO: 1981323 - DNA, 15 bp, Homo sapiens
agaggggcagcccct

SEQ ID NO: 1981324 - DNA, 15 bp, Homo sapiens
gaggggcagcccctg

SEQ ID NO: 1981325 - DNA, 15 bp, Homo sapiens
aggggcagcccctgg

SEQ ID NO: 1981326 - DNA, 15 bp, Homo sapiens
ggggcagcccctggc

SEQ ID NO: 1981327 - DNA, 15 bp, Homo sapiens
gggcagcccctggca

SEQ ID NO: 1981328 - DNA, 15 bp, Homo sapiens
ggcagcccctggcag

SEQ ID NO: 1981329 - DNA, 15 bp, Homo sapiens
gcagcccctggcagg

SEQ ID NO: 1981330 - DNA, 15 bp, Homo sapiens
cagcccctggcaggc

SEQ ID NO: 1981331 - DNA, 15 bp, Homo sapiens
agcccctggcaggcg

SEQ ID NO: 1981332 - DNA, 15 bp, Homo sapiens
gcccctggcaggcga

SEQ ID NO: 1981333 - DNA, 15 bp, Homo sapiens
cccctggcaggcgag

SEQ ID NO: 1981334 - DNA, 15 bp, Homo sapiens
ccctggcaggcgagg

SEQ ID NO: 1981335 - DNA, 15 bp, Homo sapiens
cctggcaggcgagga

SEQ ID NO: 1981336 - DNA, 15 bp, Homo sapiens
ctggcaggcgaggag

SEQ ID NO: 1981337 - DNA, 15 bp, Homo sapiens
tggcaggcgaggagg

SEQ ID NO: 1981338 - DNA, 15 bp, Homo sapiens
ggcaggcgaggaggt

SEQ ID NO: 1981339 - DNA, 15 bp, Homo sapiens
gcaggcgaggaggtg

SEQ ID NO: 1981340 - DNA, 15 bp, Homo sapiens
caggcgaggaggtga

SEQ ID NO: 1981341 - DNA, 15 bp, Homo sapiens
aggcgaggaggtgag

SEQ ID NO: 1981342 - DNA, 15 bp, Homo sapiens
ggcgaggaggtgagc

SEQ ID NO: 1981343 - DNA, 15 bp, Homo sapiens
gcgaggaggtgagca

SEQ ID NO: 1981344 - DNA, 15 bp, Homo sapiens
cgaggaggtgagcat

SEQ ID NO: 1981345 - DNA, 15 bp, Homo sapiens
gaggaggtgagcatc

SEQ ID NO: 1981346 - DNA, 15 bp, Homo sapiens
aggaggtgagcatcc

SEQ ID NO: 1981347 - DNA, 15 bp, Homo sapiens
ggaggtgagcatccg

SEQ ID NO: 1981348 - DNA, 15 bp, Homo sapiens
gaggtgagcatccgc

SEQ ID NO: 1981349 - DNA, 15 bp, Homo sapiens
aggtgagcatccgca

SEQ ID NO: 1981350 - DNA, 15 bp, Homo sapiens
ggtgagcatccgcaa

SEQ ID NO: 1981351 - DNA, 15 bp, Homo sapiens
gtgagcatccgcaac

SEQ ID NO: 1981352 - DNA, 15 bp, Homo sapiens
tgagcatccgcaaca

SEQ ID NO: 1981353 - DNA, 15 bp, Homo sapiens
gagcatccgcaacag

SEQ ID NO: 1981354 - DNA, 15 bp, Homo sapiens
agcatccgcaacagc

SEQ ID NO: 1981355 - DNA, 15 bp, Homo sapiens
gcatccgcaacagcc

SEQ ID NO: 1981356 - DNA, 15 bp, Homo sapiens
catccgcaacagccc

SEQ ID NO: 1981357 - DNA, 15 bp, Homo sapiens
atccgcaacagcccc

SEQ ID NO: 1981358 - DNA, 15 bp, Homo sapiens
tccgcaacagcccca

SEQ ID NO: 1981359 - DNA, 15 bp, Homo sapiens
ccgcaacagccccac

SEQ ID NO: 1981360 - DNA, 15 bp, Homo sapiens
cgcaacagccccaca

SEQ ID NO: 1981361 - DNA, 15 bp, Homo sapiens
gcaacagccccacag

SEQ ID NO: 1981362 - DNA, 15 bp, Homo sapiens
caacagccccacaga

SEQ ID NO: 1981363 - DNA, 15 bp, Homo sapiens
aacagccccacagac

SEQ ID NO: 1981364 - DNA, 15 bp, Homo sapiens
acagccccacagaca

SEQ ID NO: 1981365 - DNA, 15 bp, Homo sapiens
cagccccacagacac

SEQ ID NO: 1981366 - DNA, 15 bp, Homo sapiens
agccccacagacacc

SEQ ID NO: 1981367 - DNA, 15 bp, Homo sapiens
gccccacagacacca

SEQ ID NO: 1981368 - DNA, 15 bp, Homo sapiens
ccccacagacaccat

SEQ ID NO: 1981369 - DNA, 15 bp, Homo sapiens
cccacagacaccatc

SEQ ID NO: 1981370 - DNA, 15 bp, Homo sapiens
ccacagacaccatcc

SEQ ID NO: 1981371 - DNA, 15 bp, Homo sapiens
cacagacaccatcct

SEQ ID NO: 1981372 - DNA, 15 bp, Homo sapiens
acagacaccatcctg

SEQ ID NO: 1981373 - DNA, 15 bp, Homo sapiens
cagacaccatcctgt

SEQ ID NO: 1981374 - DNA, 15 bp, Homo sapiens
agacaccatcctgtt

SEQ ID NO: 1981375 - DNA, 15 bp, Homo sapiens
gacaccatcctgttc

SEQ ID NO: 1981376 - DNA, 15 bp, Homo sapiens
acaccatcctgttca

SEQ ID NO: 1981377 - DNA, 15 bp, Homo sapiens
caccatcctgttcat

SEQ ID NO: 1981378 - DNA, 15 bp, Homo sapiens
accatcctgttcatc

SEQ ID NO: 1981379 - DNA, 15 bp, Homo sapiens
ccatcctgttcatcc

SEQ ID NO: 1981380 - DNA, 15 bp, Homo sapiens
catcctgttcatccg

SEQ ID NO: 1981381 - DNA, 15 bp, Homo sapiens
atcctgttcatccgg

SEQ ID NO: 1981382 - DNA, 15 bp, Homo sapiens
tcctgttcatccggg

SEQ ID NO: 1981383 - DNA, 15 bp, Homo sapiens
cctgttcatccgggc

SEQ ID NO: 1981384 - DNA, 15 bp, Homo sapiens
ctgttcatccgggcc

SEQ ID NO: 1981385 - DNA, 15 bp, Homo sapiens
tgttcatccgggccg

SEQ ID NO: 1981386 - DNA, 15 bp, Homo sapiens
gttcatccgggccgc

SEQ ID NO: 1981387 - DNA, 15 bp, Homo sapiens
ttcatccgggccgct

SEQ ID NO: 1981388 - DNA, 15 bp, Homo sapiens
tcatccgggccgctc

SEQ ID NO: 1981389 - DNA, 15 bp, Homo sapiens
catccgggccgctcg

SEQ ID NO: 1981390 - DNA, 15 bp, Homo sapiens
atccgggccgctcgc

SEQ ID NO: 1981391 - DNA, 15 bp, Homo sapiens
tccgggccgctcgcc

SEQ ID NO: 1981392 - DNA, 15 bp, Homo sapiens
ccgggccgctcgccg

SEQ ID NO: 1981393 - DNA, 15 bp, Homo sapiens
cgggccgctcgccgc

SEQ ID NO: 1981394 - DNA, 15 bp, Homo sapiens
gggccgctcgccgcg

SEQ ID NO: 1981395 - DNA, 15 bp, Homo sapiens
ggccgctcgccgcgt

SEQ ID NO: 1981396 - DNA, 15 bp, Homo sapiens
gccgctcgccgcgtg

SEQ ID NO: 1981397 - DNA, 15 bp, Homo sapiens
ccgctcgccgcgtgc

SEQ ID NO: 1981398 - DNA, 15 bp, Homo sapiens
cgctcgccgcgtgca

SEQ ID NO: 1981399 - DNA, 15 bp, Homo sapiens
gctcgccgcgtgcat

SEQ ID NO: 1981400 - DNA, 15 bp, Homo sapiens
ctcgccgcgtgcatt

SEQ ID NO: 1981401 - DNA, 15 bp, Homo sapiens
tcgccgcgtgcattc

SEQ ID NO: 1981402 - DNA, 15 bp, Homo sapiens
cgccgcgtgcattca

SEQ ID NO: 1981403 - DNA, 15 bp, Homo sapiens
gccgcgtgcattcag

SEQ ID NO: 1981404 - DNA, 15 bp, Homo sapiens
ccgcgtgcattcagg

SEQ ID NO: 1981405 - DNA, 15 bp, Homo sapiens
cgcgtgcattcaggc

SEQ ID NO: 1981406 - DNA, 15 bp, Homo sapiens
gcgtgcattcaggca

SEQ ID NO: 1981407 - DNA, 15 bp, Homo sapiens
cgtgcattcaggcac

SEQ ID NO: 1981408 - DNA, 15 bp, Homo sapiens
gtgcattcaggcact

SEQ ID NO: 1981409 - DNA, 15 bp, Homo sapiens
tgcattcaggcactt

SEQ ID NO: 1981410 - DNA, 15 bp, Homo sapiens
gcattcaggcactta

SEQ ID NO: 1981411 - DNA, 15 bp, Homo sapiens
cattcaggcacttac

SEQ ID NO: 1981412 - DNA, 15 bp, Homo sapiens
attcaggcacttacc

SEQ ID NO: 1981413 - DNA, 15 bp, Homo sapiens
ttcaggcacttacca

SEQ ID NO: 1981414 - DNA, 15 bp, Homo sapiens
tcaggcacttaccag

SEQ ID NO: 1981415 - DNA, 15 bp, Homo sapiens
caggcacttaccagg

SEQ ID NO: 1981416 - DNA, 15 bp, Homo sapiens
aggcacttaccaggt

SEQ ID NO: 1981417 - DNA, 15 bp, Homo sapiens
ggcacttaccaggtg

SEQ ID NO: 1981418 - DNA, 15 bp, Homo sapiens
gcacttaccaggtga

SEQ ID NO: 1981419 - DNA, 15 bp, Homo sapiens
cacttaccaggtgac

SEQ ID NO: 1981420 - DNA, 15 bp, Homo sapiens
acttaccaggtgacg

SEQ ID NO: 1981421 - DNA, 15 bp, Homo sapiens
cttaccaggtgacgg

SEQ ID NO: 1981422 - DNA, 15 bp, Homo sapiens
ttaccaggtgacggt

SEQ ID NO: 1981423 - DNA, 15 bp, Homo sapiens
taccaggtgacggtg

SEQ ID NO: 1981424 - DNA, 15 bp, Homo sapiens
accaggtgacggtgc

SEQ ID NO: 1981425 - DNA, 15 bp, Homo sapiens
ccaggtgacggtgcg

SEQ ID NO: 1981426 - DNA, 15 bp, Homo sapiens
caggtgacggtgcgc

SEQ ID NO: 1981427 - DNA, 15 bp, Homo sapiens
aggtgacggtgcgca

SEQ ID NO: 1981428 - DNA, 15 bp, Homo sapiens
ggtgacggtgcgcat

SEQ ID NO: 1981429 - DNA, 15 bp, Homo sapiens
gtgacggtgcgcatt

SEQ ID NO: 1981430 - DNA, 15 bp, Homo sapiens
tgacggtgcgcattg

SEQ ID NO: 1981431 - DNA, 15 bp, Homo sapiens
gacggtgcgcattga

SEQ ID NO: 1981432 - DNA, 15 bp, Homo sapiens
acggtgcgcattgag

SEQ ID NO: 1981433 - DNA, 15 bp, Homo sapiens
cggtgcgcattgaga

SEQ ID NO: 1981434 - DNA, 15 bp, Homo sapiens
ggtgcgcattgagaa

SEQ ID NO: 1981435 - DNA, 15 bp, Homo sapiens
gtgcgcattgagaac

SEQ ID NO: 1981436 - DNA, 15 bp, Homo sapiens
tgcgcattgagaaca

SEQ ID NO: 1981437 - DNA, 15 bp, Homo sapiens
gcgcattgagaacat

SEQ ID NO: 1981438 - DNA, 15 bp, Homo sapiens
cgcattgagaacatg

SEQ ID NO: 1981439 - DNA, 15 bp, Homo sapiens
gcattgagaacatgg

SEQ ID NO: 1981440 - DNA, 15 bp, Homo sapiens
cattgagaacatgga

SEQ ID NO: 1981441 - DNA, 15 bp, Homo sapiens
attgagaacatggag

SEQ ID NO: 1981442 - DNA, 15 bp, Homo sapiens
ttgagaacatggagg

SEQ ID NO: 1981443 - DNA, 15 bp, Homo sapiens
tgagaacatggagga

SEQ ID NO: 1981444 - DNA, 15 bp, Homo sapiens
gagaacatggaggac

SEQ ID NO: 1981445 - DNA, 15 bp, Homo sapiens
agaacatggaggaca

SEQ ID NO: 1981446 - DNA, 15 bp, Homo sapiens
gaacatggaggacaa

SEQ ID NO: 1981447 - DNA, 15 bp, Homo sapiens
aacatggaggacaag

SEQ ID NO: 1981448 - DNA, 15 bp, Homo sapiens
acatggaggacaagg

SEQ ID NO: 1981449 - DNA, 15 bp, Homo sapiens
catggaggacaaggc

SEQ ID NO: 1981450 - DNA, 15 bp, Homo sapiens
atggaggacaaggcc

SEQ ID NO: 1981451 - DNA, 15 bp, Homo sapiens
tggaggacaaggcca

SEQ ID NO: 1981452 - DNA, 15 bp, Homo sapiens
ggaggacaaggccac

SEQ ID NO: 1981453 - DNA, 15 bp, Homo sapiens
gaggacaaggccacg

SEQ ID NO: 1981454 - DNA, 15 bp, Homo sapiens
aggacaaggccacgc

SEQ ID NO: 1981455 - DNA, 15 bp, Homo sapiens
ggacaaggccacgct

SEQ ID NO: 1981456 - DNA, 15 bp, Homo sapiens
gacaaggccacgctg

SEQ ID NO: 1981457 - DNA, 15 bp, Homo sapiens
acaaggccacgctgg

SEQ ID NO: 1981458 - DNA, 15 bp, Homo sapiens
caaggccacgctggt

SEQ ID NO: 1981459 - DNA, 15 bp, Homo sapiens
aaggccacgctggtg

SEQ ID NO: 1981460 - DNA, 15 bp, Homo sapiens
aggccacgctggtgc

SEQ ID NO: 1981461 - DNA, 15 bp, Homo sapiens
ggccacgctggtgct

SEQ ID NO: 1981462 - DNA, 15 bp, Homo sapiens
gccacgctggtgctg

SEQ ID NO: 1981463 - DNA, 15 bp, Homo sapiens
ccacgctggtgctgc

SEQ ID NO: 1981464 - DNA, 15 bp, Homo sapiens
cacgctggtgctgca

SEQ ID NO: 1981465 - DNA, 15 bp, Homo sapiens
acgctggtgctgcag

SEQ ID NO: 1981466 - DNA, 15 bp, Homo sapiens
cgctggtgctgcagg

SEQ ID NO: 1981467 - DNA, 15 bp, Homo sapiens
gctggtgctgcaggt

SEQ ID NO: 1981468 - DNA, 15 bp, Homo sapiens
ctggtgctgcaggtt

SEQ ID NO: 1981469 - DNA, 15 bp, Homo sapiens
tggtgctgcaggttg

SEQ ID NO: 1981470 - DNA, 15 bp, Homo sapiens
ggtgctgcaggttgt

SEQ ID NO: 1981471 - DNA, 15 bp, Homo sapiens
gtgctgcaggttgtt

SEQ ID NO: 1981472 - DNA, 15 bp, Homo sapiens
tgctgcaggttgttg

SEQ ID NO: 1981473 - DNA, 15 bp, Homo sapiens
gctgcaggttgttgg

SEQ ID NO: 1981474 - DNA, 15 bp, Homo sapiens
ctgcaggttgttggt

SEQ ID NO: 1981475 - DNA, 15 bp, Homo sapiens
tgcaggttgttggtg

SEQ ID NO: 1981476 - DNA, 15 bp, Homo sapiens
gcaggttgttggtgc

SEQ ID NO: 1981477 - DNA, 15 bp, Homo sapiens
caggttgttggtgcg

SEQ ID NO: 1981478 - DNA, 15 bp, Homo sapiens
aggttgttggtgcgt

SEQ ID NO: 1981479 - DNA, 15 bp, Homo sapiens
ggttgttggtgcgtg

SEQ ID NO: 1981480 - DNA, 15 bp, Homo sapiens
gttgttggtgcgtgg

SEQ ID NO: 1981481 - DNA, 15 bp, Homo sapiens
ttgttggtgcgtggc

SEQ ID NO: 1981482 - DNA, 15 bp, Homo sapiens
tgttggtgcgtggcc

SEQ ID NO: 1981483 - DNA, 15 bp, Homo sapiens
gttggtgcgtggcca

SEQ ID NO: 1981484 - DNA, 15 bp, Homo sapiens
ttggtgcgtggccaa

SEQ ID NO: 1981485 - DNA, 15 bp, Homo sapiens
tggtgcgtggccaag

SEQ ID NO: 1981486 - DNA, 15 bp, Homo sapiens
ggtgcgtggccaagg

SEQ ID NO: 1981487 - DNA, 15 bp, Homo sapiens
gtgcgtggccaaggc

SEQ ID NO: 1981488 - DNA, 15 bp, Homo sapiens
tgcgtggccaaggcc

SEQ ID NO: 1981489 - DNA, 15 bp, Homo sapiens
gcgtggccaaggcct

SEQ ID NO: 1981490 - DNA, 15 bp, Homo sapiens
cgtggccaaggcctc

SEQ ID NO: 1981491 - DNA, 15 bp, Homo sapiens
gtggccaaggcctcc

SEQ ID NO: 1981492 - DNA, 15 bp, Homo sapiens
tggccaaggcctcct

SEQ ID NO: 1981493 - DNA, 15 bp, Homo sapiens
ggccaaggcctcctt

SEQ ID NO: 1981494 - DNA, 15 bp, Homo sapiens
gccaaggcctccttg

SEQ ID NO: 1981495 - DNA, 15 bp, Homo sapiens
ccaaggcctccttga

SEQ ID NO: 1981496 - DNA, 15 bp, Homo sapiens
caaggcctccttgag

SEQ ID NO: 1981497 - DNA, 15 bp, Homo sapiens
aaggcctccttgagc

SEQ ID NO: 1981498 - DNA, 15 bp, Homo sapiens
aggcctccttgagcc

SEQ ID NO: 1981499 - DNA, 15 bp, Homo sapiens
ggcctccttgagccc

SEQ ID NO: 1981500 - DNA, 15 bp, Homo sapiens
gcctccttgagcccc

SEQ ID NO: 1981501 - DNA, 15 bp, Homo sapiens
cctccttgagccccc

SEQ ID NO: 1981502 - DNA, 15 bp, Homo sapiens
ctccttgagccccct

SEQ ID NO: 1981503 - DNA, 15 bp, Homo sapiens
tccttgagccccctt

SEQ ID NO: 1981504 - DNA, 15 bp, Homo sapiens
ccttgagcccccttg

SEQ ID NO: 1981505 - DNA, 15 bp, Homo sapiens
cttgagcccccttgt

SEQ ID NO: 1981506 - DNA, 15 bp, Homo sapiens
ttgagcccccttgtt

SEQ ID NO: 1981507 - DNA, 15 bp, Homo sapiens
tgagcccccttgttt

SEQ ID NO: 1981508 - DNA, 15 bp, Homo sapiens
gagcccccttgtttc

SEQ ID NO: 1981509 - DNA, 15 bp, Homo sapiens
agcccccttgtttcc

SEQ ID NO: 1981510 - DNA, 15 bp, Homo sapiens
gcccccttgtttccc

SEQ ID NO: 1981511 - DNA, 15 bp, Homo sapiens
cccccttgtttccct

SEQ ID NO: 1981512 - DNA, 15 bp, Homo sapiens
ccccttgtttccctt

SEQ ID NO: 1981513 - DNA, 15 bp, Homo sapiens
cccttgtttcccttc

SEQ ID NO: 1981514 - DNA, 15 bp, Homo sapiens
ccttgtttcccttcc

SEQ ID NO: 1981515 - DNA, 15 bp, Homo sapiens
cttgtttcccttccc

SEQ ID NO: 1981516 - DNA, 15 bp, Homo sapiens
ttgtttcccttccct

SEQ ID NO: 1981517 - DNA, 15 bp, Homo sapiens
tgtttcccttccctg

SEQ ID NO: 1981518 - DNA, 15 bp, Homo sapiens
gtttcccttccctgg

SEQ ID NO: 1981519 - DNA, 15 bp, Homo sapiens
tttcccttccctggg

SEQ ID NO: 1981520 - DNA, 15 bp, Homo sapiens
ttcccttccctgggc

SEQ ID NO: 1981521 - DNA, 15 bp, Homo sapiens
tcccttccctgggct

SEQ ID NO: 1981522 - DNA, 15 bp, Homo sapiens
cccttccctgggctg

SEQ ID NO: 1981523 - DNA, 15 bp, Homo sapiens
ccttccctgggctgg

SEQ ID NO: 1981524 - DNA, 15 bp, Homo sapiens
cttccctgggctggg

SEQ ID NO: 1981525 - DNA, 15 bp, Homo sapiens
ttccctgggctgggc

SEQ ID NO: 1981526 - DNA, 15 bp, Homo sapiens
ccctgggctgggctg

SEQ ID NO: 1981527 - DNA, 15 bp, Homo sapiens
cctgggctgggctgc

SEQ ID NO: 1981528 - DNA, 15 bp, Homo sapiens
ctgggctgggctgct

SEQ ID NO: 1981529 - DNA, 15 bp, Homo sapiens
ggctgggctgctggg

SEQ ID NO: 1981530 - DNA, 15 bp, Homo sapiens
gctgggctgctgggg

SEQ ID NO: 1981531 - DNA, 15 bp, Homo sapiens
ctgggctgctggggc

SEQ ID NO: 1981532 - DNA, 15 bp, Homo sapiens
tgggctgctggggcc

SEQ ID NO: 1981533 - DNA, 15 bp, Homo sapiens
gggctgctggggcca

SEQ ID NO: 1981534 - DNA, 15 bp, Homo sapiens
ggctgctggggccaa

SEQ ID NO: 1981535 - DNA, 15 bp, Homo sapiens
gctgctggggccaag

SEQ ID NO: 1981536 - DNA, 15 bp, Homo sapiens
ctgctggggccaagg

SEQ ID NO: 1981537 - DNA, 15 bp, Homo sapiens
tgctggggccaaggg

SEQ ID NO: 1981538 - DNA, 15 bp, Homo sapiens
gctggggccaagggt

SEQ ID NO: 1981539 - DNA, 15 bp, Homo sapiens
ctggggccaagggtg

SEQ ID NO: 1981540 - DNA, 15 bp, Homo sapiens
tggggccaagggtgg

SEQ ID NO: 1981541 - DNA, 15 bp, Homo sapiens
ggggccaagggtggg

SEQ ID NO: 1981542 - DNA, 15 bp, Homo sapiens
gggccaagggtgggg

SEQ ID NO: 1981543 - DNA, 15 bp, Homo sapiens
ggccaagggtggggc

SEQ ID NO: 1981544 - DNA, 15 bp, Homo sapiens
gccaagggtggggcc

SEQ ID NO: 1981545 - DNA, 15 bp, Homo sapiens
ccaagggtggggcca

SEQ ID NO: 1981546 - DNA, 15 bp, Homo sapiens
caagggtggggccag

SEQ ID NO: 1981547 - DNA, 15 bp, Homo sapiens
aagggtggggccagg

SEQ ID NO: 1981548 - DNA, 15 bp, Homo sapiens
agggtggggccaggg

SEQ ID NO: 1981549 - DNA, 15 bp, Homo sapiens
gggtggggccagggg

SEQ ID NO: 1981550 - DNA, 15 bp, Homo sapiens
ggtggggccagggga

SEQ ID NO: 1981551 - DNA, 15 bp, Homo sapiens
gtggggccaggggac

SEQ ID NO: 1981552 - DNA, 15 bp, Homo sapiens
tggggccaggggacc

SEQ ID NO: 1981553 - DNA, 15 bp, Homo sapiens
ggggccaggggaccc

SEQ ID NO: 1981554 - DNA, 15 bp, Homo sapiens
gggccaggggaccca

SEQ ID NO: 1981555 - DNA, 15 bp, Homo sapiens
ggccaggggacccaa

SEQ ID NO: 1981556 - DNA, 15 bp, Homo sapiens
gccaggggacccaac

SEQ ID NO: 1981557 - DNA, 15 bp, Homo sapiens
ccaggggacccaacc

SEQ ID NO: 1981558 - DNA, 15 bp, Homo sapiens
caggggacccaaccc

SEQ ID NO: 1981559 - DNA, 15 bp, Homo sapiens
aggggacccaaccca

SEQ ID NO: 1981560 - DNA, 15 bp, Homo sapiens
ggggacccaacccac

SEQ ID NO: 1981561 - DNA, 15 bp, Homo sapiens
gggacccaacccaca

SEQ ID NO: 1981562 - DNA, 15 bp, Homo sapiens
ggacccaacccacag

SEQ ID NO: 1981563 - DNA, 15 bp, Homo sapiens
gacccaacccacagc

SEQ ID NO: 1981564 - DNA, 15 bp, Homo sapiens
acccaacccacagct

SEQ ID NO: 1981565 - DNA, 15 bp, Homo sapiens
cccaacccacagctc

SEQ ID NO: 1981566 - DNA, 15 bp, Homo sapiens
ccaacccacagctca

SEQ ID NO: 1981567 - DNA, 15 bp, Homo sapiens
caacccacagctcac

SEQ ID NO: 1981568 - DNA, 15 bp, Homo sapiens
aacccacagctcaca

SEQ ID NO: 1981569 - DNA, 15 bp, Homo sapiens
acccacagctcacat

SEQ ID NO: 1981570 - DNA, 15 bp, Homo sapiens
cccacagctcacatt

SEQ ID NO: 1981571 - DNA, 15 bp, Homo sapiens
ccacagctcacattt

SEQ ID NO: 1981572 - DNA, 15 bp, Homo sapiens
cacagctcacatttt

SEQ ID NO: 1981573 - DNA, 15 bp, Homo sapiens
acagctcacattttc

SEQ ID NO: 1981574 - DNA, 15 bp, Homo sapiens
cagctcacattttcc

SEQ ID NO: 1981575 - DNA, 15 bp, Homo sapiens
agctcacattttcca

SEQ ID NO: 1981576 - DNA, 15 bp, Homo sapiens
gctcacattttccag

SEQ ID NO: 1981577 - DNA, 15 bp, Homo sapiens
ctcacattttccagt

SEQ ID NO: 1981578 - DNA, 15 bp, Homo sapiens
tcacattttccagtc

SEQ ID NO: 1981579 - DNA, 15 bp, Homo sapiens
cacattttccagtcc

SEQ ID NO: 1981580 - DNA, 15 bp, Homo sapiens
acattttccagtcca

SEQ ID NO: 1981581 - DNA, 15 bp, Homo sapiens
cattttccagtccac

SEQ ID NO: 1981582 - DNA, 15 bp, Homo sapiens
ttttccagtccactg

SEQ ID NO: 1981583 - DNA, 15 bp, Homo sapiens
tttccagtccactgc

SEQ ID NO: 1981584 - DNA, 15 bp, Homo sapiens
ttccagtccactgcc

SEQ ID NO: 1981585 - DNA, 15 bp, Homo sapiens
tccagtccactgccc

SEQ ID NO: 1981586 - DNA, 15 bp, Homo sapiens
ccagtccactgcccc

SEQ ID NO: 1981587 - DNA, 15 bp, Homo sapiens
cagtccactgcccca

SEQ ID NO: 1981588 - DNA, 15 bp, Homo sapiens
agtccactgccccag

SEQ ID NO: 1981589 - DNA, 15 bp, Homo sapiens
gtccactgccccagc

SEQ ID NO: 1981590 - DNA, 15 bp, Homo sapiens
tccactgccccagca

SEQ ID NO: 1981591 - DNA, 15 bp, Homo sapiens
ccactgccccagcag

SEQ ID NO: 1981592 - DNA, 15 bp, Homo sapiens
cactgccccagcagg

SEQ ID NO: 1981593 - DNA, 15 bp, Homo sapiens
actgccccagcaggc

SEQ ID NO: 1981594 - DNA, 15 bp, Homo sapiens
ctgccccagcaggcc

SEQ ID NO: 1981595 - DNA, 15 bp, Homo sapiens
tgccccagcaggcct

SEQ ID NO: 1981596 - DNA, 15 bp, Homo sapiens
gccccagcaggcctg

SEQ ID NO: 1981597 - DNA, 15 bp, Homo sapiens
ccccagcaggcctgg

SEQ ID NO: 1981598 - DNA, 15 bp, Homo sapiens
cccagcaggcctggc

SEQ ID NO: 1981599 - DNA, 15 bp, Homo sapiens
ccagcaggcctggcc

SEQ ID NO: 1981600 - DNA, 15 bp, Homo sapiens
cagcaggcctggccc

SEQ ID NO: 1981601 - DNA, 15 bp, Homo sapiens
agcaggcctggccct

SEQ ID NO: 1981602 - DNA, 15 bp, Homo sapiens
gcaggcctggccctg

SEQ ID NO: 1981603 - DNA, 15 bp, Homo sapiens
caggcctggccctgg

SEQ ID NO: 1981604 - DNA, 15 bp, Homo sapiens
aggcctggccctggt

SEQ ID NO: 1981605 - DNA, 15 bp, Homo sapiens
ggcctggccctggtt

SEQ ID NO: 1981606 - DNA, 15 bp, Homo sapiens
gcctggccctggttg

SEQ ID NO: 1981607 - DNA, 15 bp, Homo sapiens
cctggccctggttgg

SEQ ID NO: 1981608 - DNA, 15 bp, Homo sapiens
ctggccctggttggc

SEQ ID NO: 1981609 - DNA, 15 bp, Homo sapiens
tggccctggttggca

SEQ ID NO: 1981610 - DNA, 15 bp, Homo sapiens
ggccctggttggcag

SEQ ID NO: 1981611 - DNA, 15 bp, Homo sapiens
gccctggttggcagg

SEQ ID NO: 1981612 - DNA, 15 bp, Homo sapiens
ccctggttggcaggg

SEQ ID NO: 1981613 - DNA, 15 bp, Homo sapiens
cctggttggcagggg

SEQ ID NO: 1981614 - DNA, 15 bp, Homo sapiens
ctggttggcaggggt

SEQ ID NO: 1981615 - DNA, 15 bp, Homo sapiens
tggttggcaggggtg

SEQ ID NO: 1981616 - DNA, 15 bp, Homo sapiens
ggttggcaggggtgg

SEQ ID NO: 1981617 - DNA, 15 bp, Homo sapiens
gttggcaggggtggg

SEQ ID NO: 1981618 - DNA, 15 bp, Homo sapiens
ttggcaggggtgggg

SEQ ID NO: 1981619 - DNA, 15 bp, Homo sapiens
tggcaggggtggggt

SEQ ID NO: 1981620 - DNA, 15 bp, Homo sapiens
ggcaggggtggggtg

SEQ ID NO: 1981621 - DNA, 15 bp, Homo sapiens
gcaggggtggggtgg

SEQ ID NO: 1981622 - DNA, 15 bp, Homo sapiens
caggggtggggtggt

SEQ ID NO: 1981623 - DNA, 15 bp, Homo sapiens
aggggtggggtggtc

SEQ ID NO: 1981624 - DNA, 15 bp, Homo sapiens
ggggtggggtggtcc

SEQ ID NO: 1981625 - DNA, 15 bp, Homo sapiens
gggtggggtggtccc

SEQ ID NO: 1981626 - DNA, 15 bp, Homo sapiens
ggtggggtggtccct

SEQ ID NO: 1981627 - DNA, 15 bp, Homo sapiens
gtggggtggtccctg

SEQ ID NO: 1981628 - DNA, 15 bp, Homo sapiens
tggggtggtccctgg

SEQ ID NO: 1981629 - DNA, 15 bp, Homo sapiens
ggggtggtccctgga

SEQ ID NO: 1981630 - DNA, 15 bp, Homo sapiens
gggtggtccctggag

SEQ ID NO: 1981631 - DNA, 15 bp, Homo sapiens
ggtggtccctggagc

SEQ ID NO: 1981632 - DNA, 15 bp, Homo sapiens
gtggtccctggagcc

SEQ ID NO: 1981633 - DNA, 15 bp, Homo sapiens
tggtccctggagcca

SEQ ID NO: 1981634 - DNA, 15 bp, Homo sapiens
ggtccctggagccag

SEQ ID NO: 1981635 - DNA, 15 bp, Homo sapiens
gtccctggagccagt

SEQ ID NO: 1981636 - DNA, 15 bp, Homo sapiens
tccctggagccagtg

SEQ ID NO: 1981637 - DNA, 15 bp, Homo sapiens
ccctggagccagtga

SEQ ID NO: 1981638 - DNA, 15 bp, Homo sapiens
cctggagccagtgac

SEQ ID NO: 1981639 - DNA, 15 bp, Homo sapiens
ctggagccagtgacc

SEQ ID NO: 1981640 - DNA, 15 bp, Homo sapiens
tggagccagtgaccc

SEQ ID NO: 1981641 - DNA, 15 bp, Homo sapiens
ggagccagtgacccc

SEQ ID NO: 1981642 - DNA, 15 bp, Homo sapiens
gagccagtgaccccc

SEQ ID NO: 1981643 - DNA, 15 bp, Homo sapiens
agccagtgaccccct

SEQ ID NO: 1981644 - DNA, 15 bp, Homo sapiens
gccagtgaccccctg

SEQ ID NO: 1981645 - DNA, 15 bp, Homo sapiens
ccagtgaccccctgc

SEQ ID NO: 1981646 - DNA, 15 bp, Homo sapiens
cagtgaccccctgct

SEQ ID NO: 1981647 - DNA, 15 bp, Homo sapiens
agtgaccccctgctc

SEQ ID NO: 1981648 - DNA, 15 bp, Homo sapiens
gtgaccccctgctca

SEQ ID NO: 1981649 - DNA, 15 bp, Homo sapiens
tgaccccctgctcac

SEQ ID NO: 1981650 - DNA, 15 bp, Homo sapiens
gaccccctgctcact

SEQ ID NO: 1981651 - DNA, 15 bp, Homo sapiens
accccctgctcactg

SEQ ID NO: 1981652 - DNA, 15 bp, Homo sapiens
ccccctgctcactgt

SEQ ID NO: 1981653 - DNA, 15 bp, Homo sapiens
cccctgctcactgtc

SEQ ID NO: 1981654 - DNA, 15 bp, Homo sapiens
ccctgctcactgtca

SEQ ID NO: 1981655 - DNA, 15 bp, Homo sapiens
cctgctcactgtcag

SEQ ID NO: 1981656 - DNA, 15 bp, Homo sapiens
ctgctcactgtcagg

SEQ ID NO: 1981657 - DNA, 15 bp, Homo sapiens
tgctcactgtcagga

SEQ ID NO: 1981658 - DNA, 15 bp, Homo sapiens
gctcactgtcaggag

SEQ ID NO: 1981659 - DNA, 15 bp, Homo sapiens
ctcactgtcaggagg

SEQ ID NO: 1981660 - DNA, 15 bp, Homo sapiens
tcactgtcaggaggc

SEQ ID NO: 1981661 - DNA, 15 bp, Homo sapiens
cactgtcaggaggcg

SEQ ID NO: 1981662 - DNA, 15 bp, Homo sapiens
actgtcaggaggcgt

SEQ ID NO: 1981663 - DNA, 15 bp, Homo sapiens
ctgtcaggaggcgtg

SEQ ID NO: 1981664 - DNA, 15 bp, Homo sapiens
tgtcaggaggcgtgg

SEQ ID NO: 1981665 - DNA, 15 bp, Homo sapiens
gtcaggaggcgtggt

SEQ ID NO: 1981666 - DNA, 15 bp, Homo sapiens
tcaggaggcgtggtg

SEQ ID NO: 1981667 - DNA, 15 bp, Homo sapiens
caggaggcgtggtga

SEQ ID NO: 1981668 - DNA, 15 bp, Homo sapiens
aggaggcgtggtgac

SEQ ID NO: 1981669 - DNA, 15 bp, Homo sapiens
ggaggcgtggtgacc

SEQ ID NO: 1981670 - DNA, 15 bp, Homo sapiens
gaggcgtggtgaccc

SEQ ID NO: 1981671 - DNA, 15 bp, Homo sapiens
aggcgtggtgaccca

SEQ ID NO: 1981672 - DNA, 15 bp, Homo sapiens
ggcgtggtgacccaa

SEQ ID NO: 1981673 - DNA, 15 bp, Homo sapiens
gcgtggtgacccaac

SEQ ID NO: 1981674 - DNA, 15 bp, Homo sapiens
cgtggtgacccaact

SEQ ID NO: 1981675 - DNA, 15 bp, Homo sapiens
gtggtgacccaactg

SEQ ID NO: 1981676 - DNA, 15 bp, Homo sapiens
tggtgacccaactgg

SEQ ID NO: 1981677 - DNA, 15 bp, Homo sapiens
ggtgacccaactggg

SEQ ID NO: 1981678 - DNA, 15 bp, Homo sapiens
gtgacccaactgggt

SEQ ID NO: 1981679 - DNA, 15 bp, Homo sapiens
tgacccaactgggtc

SEQ ID NO: 1981680 - DNA, 15 bp, Homo sapiens
gacccaactgggtct

SEQ ID NO: 1981681 - DNA, 15 bp, Homo sapiens
acccaactgggtctg

SEQ ID NO: 1981682 - DNA, 15 bp, Homo sapiens
cccaactgggtctgt

SEQ ID NO: 1981683 - DNA, 15 bp, Homo sapiens
ccaactgggtctgtc

SEQ ID NO: 1981684 - DNA, 15 bp, Homo sapiens
caactgggtctgtct

SEQ ID NO: 1981685 - DNA, 15 bp, Homo sapiens
aactgggtctgtctc

SEQ ID NO: 1981686 - DNA, 15 bp, Homo sapiens
actgggtctgtctcc

SEQ ID NO: 1981687 - DNA, 15 bp, Homo sapiens
ctgggtctgtctccc

SEQ ID NO: 1981688 - DNA, 15 bp, Homo sapiens
tgggtctgtctcccg

SEQ ID NO: 1981689 - DNA, 15 bp, Homo sapiens
gggtctgtctcccgc

SEQ ID NO: 1981690 - DNA, 15 bp, Homo sapiens
ggtctgtctcccgca

SEQ ID NO: 1981691 - DNA, 15 bp, Homo sapiens
gtctgtctcccgcag

SEQ ID NO: 1981692 - DNA, 15 bp, Homo sapiens
tctgtctcccgcaga

SEQ ID NO: 1981693 - DNA, 15 bp, Homo sapiens
ctgtctcccgcagac

SEQ ID NO: 1981694 - DNA, 15 bp, Homo sapiens
tgtctcccgcagaca

SEQ ID NO: 1981695 - DNA, 15 bp, Homo sapiens
gtctcccgcagacaa

SEQ ID NO: 1981696 - DNA, 15 bp, Homo sapiens
tctcccgcagacaag

SEQ ID NO: 1981697 - DNA, 15 bp, Homo sapiens
ctcccgcagacaagc

SEQ ID NO: 1981698 - DNA, 15 bp, Homo sapiens
tcccgcagacaagcc

SEQ ID NO: 1981699 - DNA, 15 bp, Homo sapiens
cccgcagacaagcca

SEQ ID NO: 1981700 - DNA, 15 bp, Homo sapiens
ccgcagacaagccaa

SEQ ID NO: 1981701 - DNA, 15 bp, Homo sapiens
cgcagacaagccaag

SEQ ID NO: 1981702 - DNA, 15 bp, Homo sapiens
gcagacaagccaagt

SEQ ID NO: 1981703 - DNA, 15 bp, Homo sapiens
cagacaagccaagtc

SEQ ID NO: 1981704 - DNA, 15 bp, Homo sapiens
agacaagccaagtcc

SEQ ID NO: 1981705 - DNA, 15 bp, Homo sapiens
gacaagccaagtcct

SEQ ID NO: 1981706 - DNA, 15 bp, Homo sapiens
acaagccaagtcctc

SEQ ID NO: 1981707 - DNA, 15 bp, Homo sapiens
caagccaagtcctcc

SEQ ID NO: 1981708 - DNA, 15 bp, Homo sapiens
aagccaagtcctccc

SEQ ID NO: 1981709 - DNA, 15 bp, Homo sapiens
agccaagtcctcccc

SEQ ID NO: 1981710 - DNA, 15 bp, Homo sapiens
gccaagtcctcccca

SEQ ID NO: 1981711 - DNA, 15 bp, Homo sapiens
ccaagtcctccccag

SEQ ID NO: 1981712 - DNA, 15 bp, Homo sapiens
caagtcctccccagg

SEQ ID NO: 1981713 - DNA, 15 bp, Homo sapiens
aagtcctccccagga

SEQ ID NO: 1981714 - DNA, 15 bp, Homo sapiens
agtcctccccaggat

SEQ ID NO: 1981715 - DNA, 15 bp, Homo sapiens
gtcctccccaggatc

SEQ ID NO: 1981716 - DNA, 15 bp, Homo sapiens
tcctccccaggatct

SEQ ID NO: 1981717 - DNA, 15 bp, Homo sapiens
cctccccaggatctc

SEQ ID NO: 1981718 - DNA, 15 bp, Homo sapiens
ctccccaggatctcc

SEQ ID NO: 1981719 - DNA, 15 bp, Homo sapiens
tccccaggatctccg

SEQ ID NO: 1981720 - DNA, 15 bp, Homo sapiens
ccccaggatctccgg

SEQ ID NO: 1981721 - DNA, 15 bp, Homo sapiens
cccaggatctccggg

SEQ ID NO: 1981722 - DNA, 15 bp, Homo sapiens
ccaggatctccgggt

SEQ ID NO: 1981723 - DNA, 15 bp, Homo sapiens
caggatctccgggtg

SEQ ID NO: 1981724 - DNA, 15 bp, Homo sapiens
aggatctccgggtga

SEQ ID NO: 1981725 - DNA, 15 bp, Homo sapiens
ggatctccgggtgac

SEQ ID NO: 1981726 - DNA, 15 bp, Homo sapiens
gatctccgggtgact

SEQ ID NO: 1981727 - DNA, 15 bp, Homo sapiens
atctccgggtgactg

SEQ ID NO: 1981728 - DNA, 15 bp, Homo sapiens
tctccgggtgactga

SEQ ID NO: 1981729 - DNA, 15 bp, Homo sapiens
ctccgggtgactgac

SEQ ID NO: 1981730 - DNA, 15 bp, Homo sapiens
tccgggtgactgacg

SEQ ID NO: 1981731 - DNA, 15 bp, Homo sapiens
ccgggtgactgacgc

SEQ ID NO: 1981732 - DNA, 15 bp, Homo sapiens
cgggtgactgacgcc

SEQ ID NO: 1981733 - DNA, 15 bp, Homo sapiens
gggtgactgacgcct

SEQ ID NO: 1981734 - DNA, 15 bp, Homo sapiens
ggtgactgacgcctg

SEQ ID NO: 1981735 - DNA, 15 bp, Homo sapiens
gtgactgacgcctgg

SEQ ID NO: 1981736 - DNA, 15 bp, Homo sapiens
tgactgacgcctggg

SEQ ID NO: 1981737 - DNA, 15 bp, Homo sapiens
gactgacgcctgggg

SEQ ID NO: 1981738 - DNA, 15 bp, Homo sapiens
actgacgcctggggt

SEQ ID NO: 1981739 - DNA, 15 bp, Homo sapiens
ctgacgcctggggtc

SEQ ID NO: 1981740 - DNA, 15 bp, Homo sapiens
tgacgcctggggtct

SEQ ID NO: 1981741 - DNA, 15 bp, Homo sapiens
gacgcctggggtctt

SEQ ID NO: 1981742 - DNA, 15 bp, Homo sapiens
acgcctggggtctta

SEQ ID NO: 1981743 - DNA, 15 bp, Homo sapiens
cgcctggggtcttaa

SEQ ID NO: 1981744 - DNA, 15 bp, Homo sapiens
gcctggggtcttaat

SEQ ID NO: 1981745 - DNA, 15 bp, Homo sapiens
cctggggtcttaatg

SEQ ID NO: 1981746 - DNA, 15 bp, Homo sapiens
ctggggtcttaatgt

SEQ ID NO: 1981747 - DNA, 15 bp, Homo sapiens
tggggtcttaatgtg

SEQ ID NO: 1981748 - DNA, 15 bp, Homo sapiens
ggggtcttaatgtgg

SEQ ID NO: 1981749 - DNA, 15 bp, Homo sapiens
gggtcttaatgtggc

SEQ ID NO: 1981750 - DNA, 15 bp, Homo sapiens
ggtcttaatgtggct

SEQ ID NO: 1981751 - DNA, 15 bp, Homo sapiens
gtcttaatgtggctc

SEQ ID NO: 1981752 - DNA, 15 bp, Homo sapiens
tcttaatgtggctct

SEQ ID NO: 1981753 - DNA, 15 bp, Homo sapiens
cttaatgtggctctg

SEQ ID NO: 1981754 - DNA, 15 bp, Homo sapiens
ttaatgtggctctgg

SEQ ID NO: 1981755 - DNA, 15 bp, Homo sapiens
taatgtggctctgga

SEQ ID NO: 1981756 - DNA, 15 bp, Homo sapiens
aatgtggctctggag

SEQ ID NO: 1981757 - DNA, 15 bp, Homo sapiens
atgtggctctggagt

SEQ ID NO: 1981758 - DNA, 15 bp, Homo sapiens
tgtggctctggagtg

SEQ ID NO: 1981759 - DNA, 15 bp, Homo sapiens
gtggctctggagtgg

SEQ ID NO: 1981760 - DNA, 15 bp, Homo sapiens
tggctctggagtgga

SEQ ID NO: 1981761 - DNA, 15 bp, Homo sapiens
ggctctggagtggaa

SEQ ID NO: 1981762 - DNA, 15 bp, Homo sapiens
gctctggagtggaag

SEQ ID NO: 1981763 - DNA, 15 bp, Homo sapiens
ctctggagtggaagc

SEQ ID NO: 1981764 - DNA, 15 bp, Homo sapiens
tctggagtggaagcc

SEQ ID NO: 1981765 - DNA, 15 bp, Homo sapiens
ctggagtggaagcca

SEQ ID NO: 1981766 - DNA, 15 bp, Homo sapiens
tggagtggaagccac

SEQ ID NO: 1981767 - DNA, 15 bp, Homo sapiens
ggagtggaagccacc

SEQ ID NO: 1981768 - DNA, 15 bp, Homo sapiens
gagtggaagccaccc

SEQ ID NO: 1981769 - DNA, 15 bp, Homo sapiens
agtggaagccacccc

SEQ ID NO: 1981770 - DNA, 15 bp, Homo sapiens
gtggaagccacccca

SEQ ID NO: 1981771 - DNA, 15 bp, Homo sapiens
tggaagccaccccag

SEQ ID NO: 1981772 - DNA, 15 bp, Homo sapiens
ggaagccaccccagg

SEQ ID NO: 1981773 - DNA, 15 bp, Homo sapiens
gaagccaccccagga

SEQ ID NO: 1981774 - DNA, 15 bp, Homo sapiens
aagccaccccaggat

SEQ ID NO: 1981775 - DNA, 15 bp, Homo sapiens
agccaccccaggatg

SEQ ID NO: 1981776 - DNA, 15 bp, Homo sapiens
gccaccccaggatgt

SEQ ID NO: 1981777 - DNA, 15 bp, Homo sapiens
ccaccccaggatgtc

SEQ ID NO: 1981778 - DNA, 15 bp, Homo sapiens
caccccaggatgtcg

SEQ ID NO: 1981779 - DNA, 15 bp, Homo sapiens
accccaggatgtcgg

SEQ ID NO: 1981780 - DNA, 15 bp, Homo sapiens
ccccaggatgtcggc

SEQ ID NO: 1981781 - DNA, 15 bp, Homo sapiens
cccaggatgtcggca

SEQ ID NO: 1981782 - DNA, 15 bp, Homo sapiens
ccaggatgtcggcaa

SEQ ID NO: 1981783 - DNA, 15 bp, Homo sapiens
caggatgtcggcaac

SEQ ID NO: 1981784 - DNA, 15 bp, Homo sapiens
aggatgtcggcaaca

SEQ ID NO: 1981785 - DNA, 15 bp, Homo sapiens
ggatgtcggcaacac

SEQ ID NO: 1981786 - DNA, 15 bp, Homo sapiens
gatgtcggcaacacg

SEQ ID NO: 1981787 - DNA, 15 bp, Homo sapiens
atgtcggcaacacgg

SEQ ID NO: 1981788 - DNA, 15 bp, Homo sapiens
tgtcggcaacacgga

SEQ ID NO: 1981789 - DNA, 15 bp, Homo sapiens
gtcggcaacacggag

SEQ ID NO: 1981790 - DNA, 15 bp, Homo sapiens
tcggcaacacggagc

SEQ ID NO: 1981791 - DNA, 15 bp, Homo sapiens
cggcaacacggagct

SEQ ID NO: 1981792 - DNA, 15 bp, Homo sapiens
ggcaacacggagctc

SEQ ID NO: 1981793 - DNA, 15 bp, Homo sapiens
gcaacacggagctct

SEQ ID NO: 1981794 - DNA, 15 bp, Homo sapiens
caacacggagctctg

SEQ ID NO: 1981795 - DNA, 15 bp, Homo sapiens
aacacggagctctgg

SEQ ID NO: 1981796 - DNA, 15 bp, Homo sapiens
acacggagctctggg

SEQ ID NO: 1981797 - DNA, 15 bp, Homo sapiens
cacggagctctgggg

SEQ ID NO: 1981798 - DNA, 15 bp, Homo sapiens
acggagctctggggg

SEQ ID NO: 1981799 - DNA, 15 bp, Homo sapiens
cggagctctgggggt

SEQ ID NO: 1981800 - DNA, 15 bp, Homo sapiens
ggagctctgggggta

SEQ ID NO: 1981801 - DNA, 15 bp, Homo sapiens
gagctctgggggtac

SEQ ID NO: 1981802 - DNA, 15 bp, Homo sapiens
agctctgggggtaca

SEQ ID NO: 1981803 - DNA, 15 bp, Homo sapiens
gctctgggggtacac

SEQ ID NO: 1981804 - DNA, 15 bp, Homo sapiens
ctctgggggtacaca

SEQ ID NO: 1981805 - DNA, 15 bp, Homo sapiens
tctgggggtacacag

SEQ ID NO: 1981806 - DNA, 15 bp, Homo sapiens
ctgggggtacacagt

SEQ ID NO: 1981807 - DNA, 15 bp, Homo sapiens
tgggggtacacagtg

SEQ ID NO: 1981808 - DNA, 15 bp, Homo sapiens
gggggtacacagtgc

SEQ ID NO: 1981809 - DNA, 15 bp, Homo sapiens
ggggtacacagtgca

SEQ ID NO: 1981810 - DNA, 15 bp, Homo sapiens
gggtacacagtgcag

SEQ ID NO: 1981811 - DNA, 15 bp, Homo sapiens
ggtacacagtgcaga

SEQ ID NO: 1981812 - DNA, 15 bp, Homo sapiens
gtacacagtgcagaa

SEQ ID NO: 1981813 - DNA, 15 bp, Homo sapiens
tacacagtgcagaaa

SEQ ID NO: 1981814 - DNA, 15 bp, Homo sapiens
acacagtgcagaaag

SEQ ID NO: 1981815 - DNA, 15 bp, Homo sapiens
cacagtgcagaaagc

SEQ ID NO: 1981816 - DNA, 15 bp, Homo sapiens
acagtgcagaaagcc

SEQ ID NO: 1981817 - DNA, 15 bp, Homo sapiens
cagtgcagaaagccg

SEQ ID NO: 1981818 - DNA, 15 bp, Homo sapiens
agtgcagaaagccga

SEQ ID NO: 1981819 - DNA, 15 bp, Homo sapiens
gtgcagaaagccgac

SEQ ID NO: 1981820 - DNA, 15 bp, Homo sapiens
tgcagaaagccgaca

SEQ ID NO: 1981821 - DNA, 15 bp, Homo sapiens
gcagaaagccgacaa

SEQ ID NO: 1981822 - DNA, 15 bp, Homo sapiens
cagaaagccgacaag

SEQ ID NO: 1981823 - DNA, 15 bp, Homo sapiens
agaaagccgacaaga

SEQ ID NO: 1981824 - DNA, 15 bp, Homo sapiens
gaaagccgacaagaa

SEQ ID NO: 1981825 - DNA, 15 bp, Homo sapiens
aaagccgacaagaag

SEQ ID NO: 1981826 - DNA, 15 bp, Homo sapiens
aagccgacaagaaga

SEQ ID NO: 1981827 - DNA, 15 bp, Homo sapiens
agccgacaagaagac

SEQ ID NO: 1981828 - DNA, 15 bp, Homo sapiens
gccgacaagaagacc

SEQ ID NO: 1981829 - DNA, 15 bp, Homo sapiens
ccgacaagaagacca

SEQ ID NO: 1981830 - DNA, 15 bp, Homo sapiens
cgacaagaagaccat

SEQ ID NO: 1981831 - DNA, 15 bp, Homo sapiens
gacaagaagaccatg

SEQ ID NO: 1981832 - DNA, 15 bp, Homo sapiens
acaagaagaccatgg

SEQ ID NO: 1981833 - DNA, 15 bp, Homo sapiens
caagaagaccatggt

SEQ ID NO: 1981834 - DNA, 15 bp, Homo sapiens
aagaagaccatggtg

SEQ ID NO: 1981835 - DNA, 15 bp, Homo sapiens
agaagaccatggtga

SEQ ID NO: 1981836 - DNA, 15 bp, Homo sapiens
gaagaccatggtgag

SEQ ID NO: 1981837 - DNA, 15 bp, Homo sapiens
aagaccatggtgagc

SEQ ID NO: 1981838 - DNA, 15 bp, Homo sapiens
agaccatggtgagcc

SEQ ID NO: 1981839 - DNA, 15 bp, Homo sapiens
gaccatggtgagccc

SEQ ID NO: 1981840 - DNA, 15 bp, Homo sapiens
accatggtgagccca

SEQ ID NO: 1981841 - DNA, 15 bp, Homo sapiens
ccatggtgagcccag

SEQ ID NO: 1981842 - DNA, 15 bp, Homo sapiens
catggtgagcccagg

SEQ ID NO: 1981843 - DNA, 15 bp, Homo sapiens
atggtgagcccaggg

SEQ ID NO: 1981844 - DNA, 15 bp, Homo sapiens
tggtgagcccagggt

SEQ ID NO: 1981845 - DNA, 15 bp, Homo sapiens
ggtgagcccagggtc

SEQ ID NO: 1981846 - DNA, 15 bp, Homo sapiens
gtgagcccagggtct

SEQ ID NO: 1981847 - DNA, 15 bp, Homo sapiens
tgagcccagggtctg

SEQ ID NO: 1981848 - DNA, 15 bp, Homo sapiens
gagcccagggtctgg

SEQ ID NO: 1981849 - DNA, 15 bp, Homo sapiens
agcccagggtctggg

SEQ ID NO: 1981850 - DNA, 15 bp, Homo sapiens
gcccagggtctgggg

SEQ ID NO: 1981851 - DNA, 15 bp, Homo sapiens
cccagggtctggggt

SEQ ID NO: 1981852 - DNA, 15 bp, Homo sapiens
ccagggtctggggtc

SEQ ID NO: 1981853 - DNA, 15 bp, Homo sapiens
cagggtctggggtcc

SEQ ID NO: 1981854 - DNA, 15 bp, Homo sapiens
agggtctggggtccc

SEQ ID NO: 1981855 - DNA, 15 bp, Homo sapiens
gggtctggggtcccc

SEQ ID NO: 1981856 - DNA, 15 bp, Homo sapiens
ggtctggggtcccca

SEQ ID NO: 1981857 - DNA, 15 bp, Homo sapiens
gtctggggtccccac

SEQ ID NO: 1981858 - DNA, 15 bp, Homo sapiens
tctggggtccccacg

SEQ ID NO: 1981859 - DNA, 15 bp, Homo sapiens
ctggggtccccacgt

SEQ ID NO: 1981860 - DNA, 15 bp, Homo sapiens
tggggtccccacgtg

SEQ ID NO: 1981861 - DNA, 15 bp, Homo sapiens
ggggtccccacgtgc

SEQ ID NO: 1981862 - DNA, 15 bp, Homo sapiens
gggtccccacgtgca

SEQ ID NO: 1981863 - DNA, 15 bp, Homo sapiens
ggtccccacgtgcac

SEQ ID NO: 1981864 - DNA, 15 bp, Homo sapiens
gtccccacgtgcacc

SEQ ID NO: 1981865 - DNA, 15 bp, Homo sapiens
tccccacgtgcaccc

SEQ ID NO: 1981866 - DNA, 15 bp, Homo sapiens
ccccacgtgcaccct

SEQ ID NO: 1981867 - DNA, 15 bp, Homo sapiens
cccacgtgcaccctg

SEQ ID NO: 1981868 - DNA, 15 bp, Homo sapiens
ccacgtgcaccctgc

SEQ ID NO: 1981869 - DNA, 15 bp, Homo sapiens
cacgtgcaccctgcc

SEQ ID NO: 1981870 - DNA, 15 bp, Homo sapiens
acgtgcaccctgcct

SEQ ID NO: 1981871 - DNA, 15 bp, Homo sapiens
cgtgcaccctgccta

SEQ ID NO: 1981872 - DNA, 15 bp, Homo sapiens
gtgcaccctgcctag

SEQ ID NO: 1981873 - DNA, 15 bp, Homo sapiens
tgcaccctgcctagg

SEQ ID NO: 1981874 - DNA, 15 bp, Homo sapiens
gcaccctgcctaggc

SEQ ID NO: 1981875 - DNA, 15 bp, Homo sapiens
caccctgcctaggcc

SEQ ID NO: 1981876 - DNA, 15 bp, Homo sapiens
accctgcctaggccc

SEQ ID NO: 1981877 - DNA, 15 bp, Homo sapiens
ccctgcctaggcccg

SEQ ID NO: 1981878 - DNA, 15 bp, Homo sapiens
cctgcctaggcccgg

SEQ ID NO: 1981879 - DNA, 15 bp, Homo sapiens
ctgcctaggcccggc

SEQ ID NO: 1981880 - DNA, 15 bp, Homo sapiens
tgcctaggcccggca

SEQ ID NO: 1981881 - DNA, 15 bp, Homo sapiens
gcctaggcccggcag

SEQ ID NO: 1981882 - DNA, 15 bp, Homo sapiens
cctaggcccggcaga

SEQ ID NO: 1981883 - DNA, 15 bp, Homo sapiens
ctaggcccggcagac

SEQ ID NO: 1981884 - DNA, 15 bp, Homo sapiens
taggcccggcagacc

SEQ ID NO: 1981885 - DNA, 15 bp, Homo sapiens
aggcccggcagaccc

SEQ ID NO: 1981886 - DNA, 15 bp, Homo sapiens
ggcccggcagaccca

SEQ ID NO: 1981887 - DNA, 15 bp, Homo sapiens
gcccggcagacccag

SEQ ID NO: 1981888 - DNA, 15 bp, Homo sapiens
cccggcagacccagg

SEQ ID NO: 1981889 - DNA, 15 bp, Homo sapiens
ccggcagacccaggc

SEQ ID NO: 1981890 - DNA, 15 bp, Homo sapiens
cggcagacccaggcc

SEQ ID NO: 1981891 - DNA, 15 bp, Homo sapiens
ggcagacccaggccg

SEQ ID NO: 1981892 - DNA, 15 bp, Homo sapiens
gcagacccaggccgc

SEQ ID NO: 1981893 - DNA, 15 bp, Homo sapiens
cagacccaggccgca

SEQ ID NO: 1981894 - DNA, 15 bp, Homo sapiens
agacccaggccgcag

SEQ ID NO: 1981895 - DNA, 15 bp, Homo sapiens
gacccaggccgcagc

SEQ ID NO: 1981896 - DNA, 15 bp, Homo sapiens
acccaggccgcagct

SEQ ID NO: 1981897 - DNA, 15 bp, Homo sapiens
cccaggccgcagcta

SEQ ID NO: 1981898 - DNA, 15 bp, Homo sapiens
ccaggccgcagctac

SEQ ID NO: 1981899 - DNA, 15 bp, Homo sapiens
caggccgcagctacc

SEQ ID NO: 1981900 - DNA, 15 bp, Homo sapiens
aggccgcagctaccc

SEQ ID NO: 1981901 - DNA, 15 bp, Homo sapiens
ggccgcagctaccct

SEQ ID NO: 1981902 - DNA, 15 bp, Homo sapiens
gccgcagctaccctt

SEQ ID NO: 1981903 - DNA, 15 bp, Homo sapiens
ccgcagctacccttc

SEQ ID NO: 1981904 - DNA, 15 bp, Homo sapiens
cgcagctacccttca

SEQ ID NO: 1981905 - DNA, 15 bp, Homo sapiens
gcagctacccttcac

SEQ ID NO: 1981906 - DNA, 15 bp, Homo sapiens
cagctacccttcact

SEQ ID NO: 1981907 - DNA, 15 bp, Homo sapiens
agctacccttcactg

SEQ ID NO: 1981908 - DNA, 15 bp, Homo sapiens
gctacccttcactgt

SEQ ID NO: 1981909 - DNA, 15 bp, Homo sapiens
ctacccttcactgtc

SEQ ID NO: 1981910 - DNA, 15 bp, Homo sapiens
tacccttcactgtcc

SEQ ID NO: 1981911 - DNA, 15 bp, Homo sapiens
acccttcactgtcct

SEQ ID NO: 1981912 - DNA, 15 bp, Homo sapiens
cccttcactgtcctc

SEQ ID NO: 1981913 - DNA, 15 bp, Homo sapiens
ccttcactgtcctca

SEQ ID NO: 1981914 - DNA, 15 bp, Homo sapiens
cttcactgtcctcac

SEQ ID NO: 1981915 - DNA, 15 bp, Homo sapiens
ttcactgtcctcacc

SEQ ID NO: 1981916 - DNA, 15 bp, Homo sapiens
tcactgtcctcaccg

SEQ ID NO: 1981917 - DNA, 15 bp, Homo sapiens
cactgtcctcaccgt

SEQ ID NO: 1981918 - DNA, 15 bp, Homo sapiens
actgtcctcaccgtg

SEQ ID NO: 1981919 - DNA, 15 bp, Homo sapiens
ctgtcctcaccgtgg

SEQ ID NO: 1981920 - DNA, 15 bp, Homo sapiens
tgtcctcaccgtgga

SEQ ID NO: 1981921 - DNA, 15 bp, Homo sapiens
gtcctcaccgtggac

SEQ ID NO: 1981922 - DNA, 15 bp, Homo sapiens
tcctcaccgtggacc

SEQ ID NO: 1981923 - DNA, 15 bp, Homo sapiens
cctcaccgtggaccc

SEQ ID NO: 1981924 - DNA, 15 bp, Homo sapiens
ctcaccgtggacccc

SEQ ID NO: 1981925 - DNA, 15 bp, Homo sapiens
tcaccgtggacccct

SEQ ID NO: 1981926 - DNA, 15 bp, Homo sapiens
caccgtggacccctc

SEQ ID NO: 1981927 - DNA, 15 bp, Homo sapiens
accgtggacccctca

SEQ ID NO: 1981928 - DNA, 15 bp, Homo sapiens
ccgtggacccctcac

SEQ ID NO: 1981929 - DNA, 15 bp, Homo sapiens
cgtggacccctcacc

SEQ ID NO: 1981930 - DNA, 15 bp, Homo sapiens
gtggacccctcaccc

SEQ ID NO: 1981931 - DNA, 15 bp, Homo sapiens
tggacccctcaccct

SEQ ID NO: 1981932 - DNA, 15 bp, Homo sapiens
ggacccctcaccctc

SEQ ID NO: 1981933 - DNA, 15 bp, Homo sapiens
gacccctcaccctcc

SEQ ID NO: 1981934 - DNA, 15 bp, Homo sapiens
acccctcaccctccc

SEQ ID NO: 1981935 - DNA, 15 bp, Homo sapiens
cccctcaccctccct

SEQ ID NO: 1981936 - DNA, 15 bp, Homo sapiens
ccctcaccctccctc

SEQ ID NO: 1981937 - DNA, 15 bp, Homo sapiens
cctcaccctccctct

SEQ ID NO: 1981938 - DNA, 15 bp, Homo sapiens
ctcaccctccctctg

SEQ ID NO: 1981939 - DNA, 15 bp, Homo sapiens
tcaccctccctctgc

SEQ ID NO: 1981940 - DNA, 15 bp, Homo sapiens
caccctccctctgct

SEQ ID NO: 1981941 - DNA, 15 bp, Homo sapiens
accctccctctgctg

SEQ ID NO: 1981942 - DNA, 15 bp, Homo sapiens
ccctccctctgctga

SEQ ID NO: 1981943 - DNA, 15 bp, Homo sapiens
cctccctctgctgat

SEQ ID NO: 1981944 - DNA, 15 bp, Homo sapiens
ctccctctgctgatc

SEQ ID NO: 1981945 - DNA, 15 bp, Homo sapiens
tccctctgctgatct

SEQ ID NO: 1981946 - DNA, 15 bp, Homo sapiens
ccctctgctgatctg

SEQ ID NO: 1981947 - DNA, 15 bp, Homo sapiens
cctctgctgatctga

SEQ ID NO: 1981948 - DNA, 15 bp, Homo sapiens
ctctgctgatctgaa

SEQ ID NO: 1981949 - DNA, 15 bp, Homo sapiens
tctgctgatctgaat

SEQ ID NO: 1981950 - DNA, 15 bp, Homo sapiens
ctgctgatctgaatc

SEQ ID NO: 1981951 - DNA, 15 bp, Homo sapiens
tgctgatctgaatcc

SEQ ID NO: 1981952 - DNA, 15 bp, Homo sapiens
gctgatctgaatccc

SEQ ID NO: 1981953 - DNA, 15 bp, Homo sapiens
ctgatctgaatccct

SEQ ID NO: 1981954 - DNA, 15 bp, Homo sapiens
tgatctgaatccctc

SEQ ID NO: 1981955 - DNA, 15 bp, Homo sapiens
gatctgaatccctcc

SEQ ID NO: 1981956 - DNA, 15 bp, Homo sapiens
atctgaatccctcca

SEQ ID NO: 1981957 - DNA, 15 bp, Homo sapiens
tctgaatccctccat

SEQ ID NO: 1981958 - DNA, 15 bp, Homo sapiens
ctgaatccctccata

SEQ ID NO: 1981959 - DNA, 15 bp, Homo sapiens
tgaatccctccatag

SEQ ID NO: 1981960 - DNA, 15 bp, Homo sapiens
gaatccctccatagt

SEQ ID NO: 1981961 - DNA, 15 bp, Homo sapiens
aatccctccatagta

SEQ ID NO: 1981962 - DNA, 15 bp, Homo sapiens
atccctccatagtag

SEQ ID NO: 1981963 - DNA, 15 bp, Homo sapiens
tccctccatagtagg

SEQ ID NO: 1981964 - DNA, 15 bp, Homo sapiens
ccctccatagtaggg

SEQ ID NO: 1981965 - DNA, 15 bp, Homo sapiens
cctccatagtagggg

SEQ ID NO: 1981966 - DNA, 15 bp, Homo sapiens
ctccatagtaggggt

SEQ ID NO: 1981967 - DNA, 15 bp, Homo sapiens
tccatagtaggggtg

SEQ ID NO: 1981968 - DNA, 15 bp, Homo sapiens
ccatagtaggggtgg

SEQ ID NO: 1981969 - DNA, 15 bp, Homo sapiens
catagtaggggtgga

SEQ ID NO: 1981970 - DNA, 15 bp, Homo sapiens
atagtaggggtggag

SEQ ID NO: 1981971 - DNA, 15 bp, Homo sapiens
tagtaggggtggaga

SEQ ID NO: 1981972 - DNA, 15 bp, Homo sapiens
agtaggggtggagat

SEQ ID NO: 1981973 - DNA, 15 bp, Homo sapiens
gtaggggtggagatg

SEQ ID NO: 1981974 - DNA, 15 bp, Homo sapiens
taggggtggagatgc

SEQ ID NO: 1981975 - DNA, 15 bp, Homo sapiens
aggggtggagatgcc

SEQ ID NO: 1981976 - DNA, 15 bp, Homo sapiens
ggggtggagatgcca

SEQ ID NO: 1981977 - DNA, 15 bp, Homo sapiens
gggtggagatgccaa

SEQ ID NO: 1981978 - DNA, 15 bp, Homo sapiens
ggtggagatgccaag

SEQ ID NO: 1981979 - DNA, 15 bp, Homo sapiens
gtggagatgccaagg

SEQ ID NO: 1981980 - DNA, 15 bp, Homo sapiens
tggagatgccaaggg

SEQ ID NO: 1981981 - DNA, 15 bp, Homo sapiens
ggagatgccaagggc

SEQ ID NO: 1981982 - DNA, 15 bp, Homo sapiens
gagatgccaagggca

SEQ ID NO: 1981983 - DNA, 15 bp, Homo sapiens
agatgccaagggcac

SEQ ID NO: 1981984 - DNA, 15 bp, Homo sapiens
gatgccaagggcacc

SEQ ID NO: 1981985 - DNA, 15 bp, Homo sapiens
atgccaagggcaccc

SEQ ID NO: 1981986 - DNA, 15 bp, Homo sapiens
tgccaagggcaccca

SEQ ID NO: 1981987 - DNA, 15 bp, Homo sapiens
gccaagggcacccag

SEQ ID NO: 1981988 - DNA, 15 bp, Homo sapiens
ccaagggcacccagg

SEQ ID NO: 1981989 - DNA, 15 bp, Homo sapiens
caagggcacccagga

SEQ ID NO: 1981990 - DNA, 15 bp, Homo sapiens
aagggcacccaggag

SEQ ID NO: 1981991 - DNA, 15 bp, Homo sapiens
agggcacccaggaga

SEQ ID NO: 1981992 - DNA, 15 bp, Homo sapiens
gggcacccaggagag

SEQ ID NO: 1981993 - DNA, 15 bp, Homo sapiens
ggcacccaggagagg

SEQ ID NO: 1981994 - DNA, 15 bp, Homo sapiens
gcacccaggagaggc

SEQ ID NO: 1981995 - DNA, 15 bp, Homo sapiens
cacccaggagaggct

SEQ ID NO: 1981996 - DNA, 15 bp, Homo sapiens
acccaggagaggctc

SEQ ID NO: 1981997 - DNA, 15 bp, Homo sapiens
cccaggagaggctct

SEQ ID NO: 1981998 - DNA, 15 bp, Homo sapiens
ccaggagaggctctc

SEQ ID NO: 1981999 - DNA, 15 bp, Homo sapiens
caggagaggctctcg

SEQ ID NO: 1982000 - DNA, 15 bp, Homo sapiens
aggagaggctctcgg

SEQ ID NO: 1982001 - DNA, 15 bp, Homo sapiens
ggagaggctctcggc

SEQ ID NO: 1982002 - DNA, 15 bp, Homo sapiens
gagaggctctcggca

SEQ ID NO: 1982003 - DNA, 15 bp, Homo sapiens
agaggctctcggcat

SEQ ID NO: 1982004 - DNA, 15 bp, Homo sapiens
gaggctctcggcatc

SEQ ID NO: 1982005 - DNA, 15 bp, Homo sapiens
aggctctcggcatca

SEQ ID NO: 1982006 - DNA, 15 bp, Homo sapiens
ggctctcggcatcag

SEQ ID NO: 1982007 - DNA, 15 bp, Homo sapiens
gctctcggcatcagg

SEQ ID NO: 1982008 - DNA, 15 bp, Homo sapiens
ctctcggcatcagga

SEQ ID NO: 1982009 - DNA, 15 bp, Homo sapiens
tctcggcatcaggaa

SEQ ID NO: 1982010 - DNA, 15 bp, Homo sapiens
ctcggcatcaggaag

SEQ ID NO: 1982011 - DNA, 15 bp, Homo sapiens
tcggcatcaggaagg

SEQ ID NO: 1982012 - DNA, 15 bp, Homo sapiens
cggcatcaggaaggg

SEQ ID NO: 1982013 - DNA, 15 bp, Homo sapiens
ggcatcaggaagggc

SEQ ID NO: 1982014 - DNA, 15 bp, Homo sapiens
gcatcaggaagggcc

SEQ ID NO: 1982015 - DNA, 15 bp, Homo sapiens
catcaggaagggcct

SEQ ID NO: 1982016 - DNA, 15 bp, Homo sapiens
atcaggaagggcctg

SEQ ID NO: 1982017 - DNA, 15 bp, Homo sapiens
tcaggaagggcctgg

SEQ ID NO: 1982018 - DNA, 15 bp, Homo sapiens
caggaagggcctggc

SEQ ID NO: 1982019 - DNA, 15 bp, Homo sapiens
aggaagggcctggcc

SEQ ID NO: 1982020 - DNA, 15 bp, Homo sapiens
ggaagggcctggccc

SEQ ID NO: 1982021 - DNA, 15 bp, Homo sapiens
gaagggcctggccca

SEQ ID NO: 1982022 - DNA, 15 bp, Homo sapiens
aagggcctggcccag

SEQ ID NO: 1982023 - DNA, 15 bp, Homo sapiens
agggcctggcccaga

SEQ ID NO: 1982024 - DNA, 15 bp, Homo sapiens
gggcctggcccagag

SEQ ID NO: 1982025 - DNA, 15 bp, Homo sapiens
ggcctggcccagaga

SEQ ID NO: 1982026 - DNA, 15 bp, Homo sapiens
gcctggcccagagat

SEQ ID NO: 1982027 - DNA, 15 bp, Homo sapiens
cctggcccagagatg

SEQ ID NO: 1982028 - DNA, 15 bp, Homo sapiens
ctggcccagagatgc

SEQ ID NO: 1982029 - DNA, 15 bp, Homo sapiens
tggcccagagatgcc

SEQ ID NO: 1982030 - DNA, 15 bp, Homo sapiens
ggcccagagatgcct

SEQ ID NO: 1982031 - DNA, 15 bp, Homo sapiens
gcccagagatgcctc

SEQ ID NO: 1982032 - DNA, 15 bp, Homo sapiens
cccagagatgcctcc

SEQ ID NO: 1982033 - DNA, 15 bp, Homo sapiens
ccagagatgcctccc

SEQ ID NO: 1982034 - DNA, 15 bp, Homo sapiens
cagagatgcctcccc

SEQ ID NO: 1982035 - DNA, 15 bp, Homo sapiens
agagatgcctcccct

SEQ ID NO: 1982036 - DNA, 15 bp, Homo sapiens
gagatgcctcccctc

SEQ ID NO: 1982037 - DNA, 15 bp, Homo sapiens
agatgcctcccctcc

SEQ ID NO: 1982038 - DNA, 15 bp, Homo sapiens
gatgcctcccctccc

SEQ ID NO: 1982039 - DNA, 15 bp, Homo sapiens
atgcctcccctccct

SEQ ID NO: 1982040 - DNA, 15 bp, Homo sapiens
tgcctcccctccctc

SEQ ID NO: 1982041 - DNA, 15 bp, Homo sapiens
gcctcccctccctcc

SEQ ID NO: 1982042 - DNA, 15 bp, Homo sapiens
cctcccctccctccc

SEQ ID NO: 1982043 - DNA, 15 bp, Homo sapiens
tcccctccctccctg

SEQ ID NO: 1982044 - DNA, 15 bp, Homo sapiens
cccctccctccctgc

SEQ ID NO: 1982045 - DNA, 15 bp, Homo sapiens
ccctccctccctgcc

SEQ ID NO: 1982046 - DNA, 15 bp, Homo sapiens
cctccctccctgccc

SEQ ID NO: 1982047 - DNA, 15 bp, Homo sapiens
ctccctccctgcccc

SEQ ID NO: 1982048 - DNA, 15 bp, Homo sapiens
tccctccctgccccc

SEQ ID NO: 1982049 - DNA, 15 bp, Homo sapiens
ccctccctgccccca

SEQ ID NO: 1982050 - DNA, 15 bp, Homo sapiens
cctccctgcccccag

SEQ ID NO: 1982051 - DNA, 15 bp, Homo sapiens
ctccctgcccccagg

SEQ ID NO: 1982052 - DNA, 15 bp, Homo sapiens
tccctgcccccagga

SEQ ID NO: 1982053 - DNA, 15 bp, Homo sapiens
ccctgcccccaggag

SEQ ID NO: 1982054 - DNA, 15 bp, Homo sapiens
cctgcccccaggagt

SEQ ID NO: 1982055 - DNA, 15 bp, Homo sapiens
ctgcccccaggagtg

SEQ ID NO: 1982056 - DNA, 15 bp, Homo sapiens
tgcccccaggagtgg

SEQ ID NO: 1982057 - DNA, 15 bp, Homo sapiens
gcccccaggagtggt

SEQ ID NO: 1982058 - DNA, 15 bp, Homo sapiens
cccccaggagtggtt

SEQ ID NO: 1982059 - DNA, 15 bp, Homo sapiens
ccccaggagtggttc

SEQ ID NO: 1982060 - DNA, 15 bp, Homo sapiens
cccaggagtggttca

SEQ ID NO: 1982061 - DNA, 15 bp, Homo sapiens
ccaggagtggttcac

SEQ ID NO: 1982062 - DNA, 15 bp, Homo sapiens
caggagtggttcacc

SEQ ID NO: 1982063 - DNA, 15 bp, Homo sapiens
aggagtggttcaccg

SEQ ID NO: 1982064 - DNA, 15 bp, Homo sapiens
ggagtggttcaccgt

SEQ ID NO: 1982065 - DNA, 15 bp, Homo sapiens
gagtggttcaccgtc

SEQ ID NO: 1982066 - DNA, 15 bp, Homo sapiens
agtggttcaccgtct

SEQ ID NO: 1982067 - DNA, 15 bp, Homo sapiens
gtggttcaccgtctt

SEQ ID NO: 1982068 - DNA, 15 bp, Homo sapiens
tggttcaccgtcttg

SEQ ID NO: 1982069 - DNA, 15 bp, Homo sapiens
ggttcaccgtcttgg

SEQ ID NO: 1982070 - DNA, 15 bp, Homo sapiens
gttcaccgtcttgga

SEQ ID NO: 1982071 - DNA, 15 bp, Homo sapiens
ttcaccgtcttggag

SEQ ID NO: 1982072 - DNA, 15 bp, Homo sapiens
tcaccgtcttggagc

SEQ ID NO: 1982073 - DNA, 15 bp, Homo sapiens
caccgtcttggagca

SEQ ID NO: 1982074 - DNA, 15 bp, Homo sapiens
accgtcttggagcat

SEQ ID NO: 1982075 - DNA, 15 bp, Homo sapiens
ccgtcttggagcatt

SEQ ID NO: 1982076 - DNA, 15 bp, Homo sapiens
cgtcttggagcatta

SEQ ID NO: 1982077 - DNA, 15 bp, Homo sapiens
gtcttggagcattac

SEQ ID NO: 1982078 - DNA, 15 bp, Homo sapiens
tcttggagcattacc

SEQ ID NO: 1982079 - DNA, 15 bp, Homo sapiens
cttggagcattaccg

SEQ ID NO: 1982080 - DNA, 15 bp, Homo sapiens
ttggagcattaccgc

SEQ ID NO: 1982081 - DNA, 15 bp, Homo sapiens
tggagcattaccgcc

SEQ ID NO: 1982082 - DNA, 15 bp, Homo sapiens
ggagcattaccgccg

SEQ ID NO: 1982083 - DNA, 15 bp, Homo sapiens
gagcattaccgccgc

SEQ ID NO: 1982084 - DNA, 15 bp, Homo sapiens
agcattaccgccgca

SEQ ID NO: 1982085 - DNA, 15 bp, Homo sapiens
gcattaccgccgcac

SEQ ID NO: 1982086 - DNA, 15 bp, Homo sapiens
cattaccgccgcacc

SEQ ID NO: 1982087 - DNA, 15 bp, Homo sapiens
attaccgccgcaccc

SEQ ID NO: 1982088 - DNA, 15 bp, Homo sapiens
ttaccgccgcaccca

SEQ ID NO: 1982089 - DNA, 15 bp, Homo sapiens
taccgccgcacccac

SEQ ID NO: 1982090 - DNA, 15 bp, Homo sapiens
accgccgcacccact

SEQ ID NO: 1982091 - DNA, 15 bp, Homo sapiens
ccgccgcacccactg

SEQ ID NO: 1982092 - DNA, 15 bp, Homo sapiens
cgccgcacccactgc

SEQ ID NO: 1982093 - DNA, 15 bp, Homo sapiens
gccgcacccactgcg

SEQ ID NO: 1982094 - DNA, 15 bp, Homo sapiens
ccgcacccactgcgt

SEQ ID NO: 1982095 - DNA, 15 bp, Homo sapiens
cgcacccactgcgtg

SEQ ID NO: 1982096 - DNA, 15 bp, Homo sapiens
gcacccactgcgtgg

SEQ ID NO: 1982097 - DNA, 15 bp, Homo sapiens
cacccactgcgtggt

SEQ ID NO: 1982098 - DNA, 15 bp, Homo sapiens
acccactgcgtggtg

SEQ ID NO: 1982099 - DNA, 15 bp, Homo sapiens
cccactgcgtggtgc

SEQ ID NO: 1982100 - DNA, 15 bp, Homo sapiens
ccactgcgtggtgcc

SEQ ID NO: 1982101 - DNA, 15 bp, Homo sapiens
cactgcgtggtgcca

SEQ ID NO: 1982102 - DNA, 15 bp, Homo sapiens
actgcgtggtgccag

SEQ ID NO: 1982103 - DNA, 15 bp, Homo sapiens
ctgcgtggtgccaga

SEQ ID NO: 1982104 - DNA, 15 bp, Homo sapiens
tgcgtggtgccagag

SEQ ID NO: 1982105 - DNA, 15 bp, Homo sapiens
gcgtggtgccagagc

SEQ ID NO: 1982106 - DNA, 15 bp, Homo sapiens
cgtggtgccagagct

SEQ ID NO: 1982107 - DNA, 15 bp, Homo sapiens
gtggtgccagagctc

SEQ ID NO: 1982108 - DNA, 15 bp, Homo sapiens
tggtgccagagctca

SEQ ID NO: 1982109 - DNA, 15 bp, Homo sapiens
ggtgccagagctcat

SEQ ID NO: 1982110 - DNA, 15 bp, Homo sapiens
gtgccagagctcatc

SEQ ID NO: 1982111 - DNA, 15 bp, Homo sapiens
tgccagagctcatca

SEQ ID NO: 1982112 - DNA, 15 bp, Homo sapiens
gccagagctcatcat

SEQ ID NO: 1982113 - DNA, 15 bp, Homo sapiens
ccagagctcatcatt

SEQ ID NO: 1982114 - DNA, 15 bp, Homo sapiens
cagagctcatcattg

SEQ ID NO: 1982115 - DNA, 15 bp, Homo sapiens
agagctcatcattgg

SEQ ID NO: 1982116 - DNA, 15 bp, Homo sapiens
gagctcatcattggc

SEQ ID NO: 1982117 - DNA, 15 bp, Homo sapiens
agctcatcattggca

SEQ ID NO: 1982118 - DNA, 15 bp, Homo sapiens
gctcatcattggcaa

SEQ ID NO: 1982119 - DNA, 15 bp, Homo sapiens
ctcatcattggcaat

SEQ ID NO: 1982120 - DNA, 15 bp, Homo sapiens
tcatcattggcaatg

SEQ ID NO: 1982121 - DNA, 15 bp, Homo sapiens
catcattggcaatgg

SEQ ID NO: 1982122 - DNA, 15 bp, Homo sapiens
atcattggcaatggc

SEQ ID NO: 1982123 - DNA, 15 bp, Homo sapiens
tcattggcaatggct

SEQ ID NO: 1982124 - DNA, 15 bp, Homo sapiens
cattggcaatggcta

SEQ ID NO: 1982125 - DNA, 15 bp, Homo sapiens
attggcaatggctac

SEQ ID NO: 1982126 - DNA, 15 bp, Homo sapiens
ttggcaatggctact

SEQ ID NO: 1982127 - DNA, 15 bp, Homo sapiens
tggcaatggctacta

SEQ ID NO: 1982128 - DNA, 15 bp, Homo sapiens
ggcaatggctactac

SEQ ID NO: 1982129 - DNA, 15 bp, Homo sapiens
gcaatggctactact

SEQ ID NO: 1982130 - DNA, 15 bp, Homo sapiens
caatggctactactt

SEQ ID NO: 1982131 - DNA, 15 bp, Homo sapiens
aatggctactacttc

SEQ ID NO: 1982132 - DNA, 15 bp, Homo sapiens
atggctactacttcc

SEQ ID NO: 1982133 - DNA, 15 bp, Homo sapiens
tggctactacttccg

SEQ ID NO: 1982134 - DNA, 15 bp, Homo sapiens
ggctactacttccgc

SEQ ID NO: 1982135 - DNA, 15 bp, Homo sapiens
gctactacttccgcg

SEQ ID NO: 1982136 - DNA, 15 bp, Homo sapiens
ctactacttccgcgt

SEQ ID NO: 1982137 - DNA, 15 bp, Homo sapiens
tactacttccgcgtc

SEQ ID NO: 1982138 - DNA, 15 bp, Homo sapiens
actacttccgcgtct

SEQ ID NO: 1982139 - DNA, 15 bp, Homo sapiens
ctacttccgcgtctt

SEQ ID NO: 1982140 - DNA, 15 bp, Homo sapiens
tacttccgcgtcttc

SEQ ID NO: 1982141 - DNA, 15 bp, Homo sapiens
acttccgcgtcttca

SEQ ID NO: 1982142 - DNA, 15 bp, Homo sapiens
cttccgcgtcttcag

SEQ ID NO: 1982143 - DNA, 15 bp, Homo sapiens
ttccgcgtcttcagc

SEQ ID NO: 1982144 - DNA, 15 bp, Homo sapiens
tccgcgtcttcagcc

SEQ ID NO: 1982145 - DNA, 15 bp, Homo sapiens
ccgcgtcttcagcca

SEQ ID NO: 1982146 - DNA, 15 bp, Homo sapiens
cgcgtcttcagccag

SEQ ID NO: 1982147 - DNA, 15 bp, Homo sapiens
gcgtcttcagccaga

SEQ ID NO: 1982148 - DNA, 15 bp, Homo sapiens
cgtcttcagccagaa

SEQ ID NO: 1982149 - DNA, 15 bp, Homo sapiens
gtcttcagccagaat

SEQ ID NO: 1982150 - DNA, 15 bp, Homo sapiens
tcttcagccagaata

SEQ ID NO: 1982151 - DNA, 15 bp, Homo sapiens
cttcagccagaatat

SEQ ID NO: 1982152 - DNA, 15 bp, Homo sapiens
ttcagccagaatatg

SEQ ID NO: 1982153 - DNA, 15 bp, Homo sapiens
tcagccagaatatgg

SEQ ID NO: 1982154 - DNA, 15 bp, Homo sapiens
cagccagaatatggt

SEQ ID NO: 1982155 - DNA, 15 bp, Homo sapiens
agccagaatatggtt

SEQ ID NO: 1982156 - DNA, 15 bp, Homo sapiens
gccagaatatggttg

SEQ ID NO: 1982157 - DNA, 15 bp, Homo sapiens
ccagaatatggttgg

SEQ ID NO: 1982158 - DNA, 15 bp, Homo sapiens
cagaatatggttggc

SEQ ID NO: 1982159 - DNA, 15 bp, Homo sapiens
agaatatggttggct

SEQ ID NO: 1982160 - DNA, 15 bp, Homo sapiens
gaatatggttggctt

SEQ ID NO: 1982161 - DNA, 15 bp, Homo sapiens
aatatggttggcttt

SEQ ID NO: 1982162 - DNA, 15 bp, Homo sapiens
atatggttggcttta

SEQ ID NO: 1982163 - DNA, 15 bp, Homo sapiens
tatggttggctttag

SEQ ID NO: 1982164 - DNA, 15 bp, Homo sapiens
atggttggctttagt

SEQ ID NO: 1982165 - DNA, 15 bp, Homo sapiens
tggttggctttagtg

SEQ ID NO: 1982166 - DNA, 15 bp, Homo sapiens
ggttggctttagtga

SEQ ID NO: 1982167 - DNA, 15 bp, Homo sapiens
gttggctttagtgac

SEQ ID NO: 1982168 - DNA, 15 bp, Homo sapiens
ttggctttagtgaca

SEQ ID NO: 1982169 - DNA, 15 bp, Homo sapiens
tggctttagtgacag

SEQ ID NO: 1982170 - DNA, 15 bp, Homo sapiens
ggctttagtgacaga

SEQ ID NO: 1982171 - DNA, 15 bp, Homo sapiens
gctttagtgacagag

SEQ ID NO: 1982172 - DNA, 15 bp, Homo sapiens
ctttagtgacagagc

SEQ ID NO: 1982173 - DNA, 15 bp, Homo sapiens
tttagtgacagagcg

SEQ ID NO: 1982174 - DNA, 15 bp, Homo sapiens
ttagtgacagagcgg

SEQ ID NO: 1982175 - DNA, 15 bp, Homo sapiens
tagtgacagagcggc

SEQ ID NO: 1982176 - DNA, 15 bp, Homo sapiens
agtgacagagcggcc

SEQ ID NO: 1982177 - DNA, 15 bp, Homo sapiens
gtgacagagcggcca

SEQ ID NO: 1982178 - DNA, 15 bp, Homo sapiens
tgacagagcggccac

SEQ ID NO: 1982179 - DNA, 15 bp, Homo sapiens
gacagagcggccacc

SEQ ID NO: 1982180 - DNA, 15 bp, Homo sapiens
acagagcggccacca

SEQ ID NO: 1982181 - DNA, 15 bp, Homo sapiens
cagagcggccaccac

SEQ ID NO: 1982182 - DNA, 15 bp, Homo sapiens
agagcggccaccacc

SEQ ID NO: 1982183 - DNA, 15 bp, Homo sapiens
gagcggccaccacca

SEQ ID NO: 1982184 - DNA, 15 bp, Homo sapiens
agcggccaccaccaa

SEQ ID NO: 1982185 - DNA, 15 bp, Homo sapiens
gcggccaccaccaag

SEQ ID NO: 1982186 - DNA, 15 bp, Homo sapiens
cggccaccaccaagg

SEQ ID NO: 1982187 - DNA, 15 bp, Homo sapiens
ggccaccaccaagga

SEQ ID NO: 1982188 - DNA, 15 bp, Homo sapiens
gccaccaccaaggag

SEQ ID NO: 1982189 - DNA, 15 bp, Homo sapiens
ccaccaccaaggagc

SEQ ID NO: 1982190 - DNA, 15 bp, Homo sapiens
caccaccaaggagcc

SEQ ID NO: 1982191 - DNA, 15 bp, Homo sapiens
accaccaaggagccc

SEQ ID NO: 1982192 - DNA, 15 bp, Homo sapiens
ccaccaaggagcccg

SEQ ID NO: 1982193 - DNA, 15 bp, Homo sapiens
caccaaggagcccgt

SEQ ID NO: 1982194 - DNA, 15 bp, Homo sapiens
accaaggagcccgtc

SEQ ID NO: 1982195 - DNA, 15 bp, Homo sapiens
ccaaggagcccgtct

SEQ ID NO: 1982196 - DNA, 15 bp, Homo sapiens
caaggagcccgtctt

SEQ ID NO: 1982197 - DNA, 15 bp, Homo sapiens
aaggagcccgtcttt

SEQ ID NO: 1982198 - DNA, 15 bp, Homo sapiens
aggagcccgtcttta

SEQ ID NO: 1982199 - DNA, 15 bp, Homo sapiens
ggagcccgtctttat

SEQ ID NO: 1982200 - DNA, 15 bp, Homo sapiens
gagcccgtctttatc

SEQ ID NO: 1982201 - DNA, 15 bp, Homo sapiens
agcccgtctttatcc

SEQ ID NO: 1982202 - DNA, 15 bp, Homo sapiens
gcccgtctttatccc

SEQ ID NO: 1982203 - DNA, 15 bp, Homo sapiens
cccgtctttatcccc

SEQ ID NO: 1982204 - DNA, 15 bp, Homo sapiens
ccgtctttatcccca

SEQ ID NO: 1982205 - DNA, 15 bp, Homo sapiens
cgtctttatccccag

SEQ ID NO: 1982206 - DNA, 15 bp, Homo sapiens
gtctttatccccaga

SEQ ID NO: 1982207 - DNA, 15 bp, Homo sapiens
tctttatccccagac

SEQ ID NO: 1982208 - DNA, 15 bp, Homo sapiens
ctttatccccagacc

SEQ ID NO: 1982209 - DNA, 15 bp, Homo sapiens
tttatccccagacca

SEQ ID NO: 1982210 - DNA, 15 bp, Homo sapiens
ttatccccagaccag

SEQ ID NO: 1982211 - DNA, 15 bp, Homo sapiens
tatccccagaccagg

SEQ ID NO: 1982212 - DNA, 15 bp, Homo sapiens
atccccagaccaggt

SEQ ID NO: 1982213 - DNA, 15 bp, Homo sapiens
tccccagaccaggtg

SEQ ID NO: 1982214 - DNA, 15 bp, Homo sapiens
ccccagaccaggtgc

SEQ ID NO: 1982215 - DNA, 15 bp, Homo sapiens
cccagaccaggtgct

SEQ ID NO: 1982216 - DNA, 15 bp, Homo sapiens
ccagaccaggtgctg

SEQ ID NO: 1982217 - DNA, 15 bp, Homo sapiens
cagaccaggtgctgt

SEQ ID NO: 1982218 - DNA, 15 bp, Homo sapiens
agaccaggtgctgta

SEQ ID NO: 1982219 - DNA, 15 bp, Homo sapiens
gaccaggtgctgtac

SEQ ID NO: 1982220 - DNA, 15 bp, Homo sapiens
accaggtgctgtacc

SEQ ID NO: 1982221 - DNA, 15 bp, Homo sapiens
ccaggtgctgtaccc

SEQ ID NO: 1982222 - DNA, 15 bp, Homo sapiens
caggtgctgtaccct

SEQ ID NO: 1982223 - DNA, 15 bp, Homo sapiens
aggtgctgtaccctc

SEQ ID NO: 1982224 - DNA, 15 bp, Homo sapiens
ggtgctgtaccctca

SEQ ID NO: 1982225 - DNA, 15 bp, Homo sapiens
gtgctgtaccctcat

SEQ ID NO: 1982226 - DNA, 15 bp, Homo sapiens
tgctgtaccctcatt

SEQ ID NO: 1982227 - DNA, 15 bp, Homo sapiens
gctgtaccctcattc

SEQ ID NO: 1982228 - DNA, 15 bp, Homo sapiens
ctgtaccctcattct

SEQ ID NO: 1982229 - DNA, 15 bp, Homo sapiens
tgtaccctcattctt

SEQ ID NO: 1982230 - DNA, 15 bp, Homo sapiens
gtaccctcattcttc

SEQ ID NO: 1982231 - DNA, 15 bp, Homo sapiens
taccctcattcttcc

SEQ ID NO: 1982232 - DNA, 15 bp, Homo sapiens
accctcattcttcca

SEQ ID NO: 1982233 - DNA, 15 bp, Homo sapiens
ccctcattcttccaa

SEQ ID NO: 1982234 - DNA, 15 bp, Homo sapiens
cctcattcttccaac

SEQ ID NO: 1982235 - DNA, 15 bp, Homo sapiens
ctcattcttccaacc

SEQ ID NO: 1982236 - DNA, 15 bp, Homo sapiens
tcattcttccaacca

SEQ ID NO: 1982237 - DNA, 15 bp, Homo sapiens
cattcttccaaccag

SEQ ID NO: 1982238 - DNA, 15 bp, Homo sapiens
attcttccaaccagg

SEQ ID NO: 1982239 - DNA, 15 bp, Homo sapiens
ttcttccaaccaggg

SEQ ID NO: 1982240 - DNA, 15 bp, Homo sapiens
tcttccaaccagggg

SEQ ID NO: 1982241 - DNA, 15 bp, Homo sapiens
cttccaaccaggggc

SEQ ID NO: 1982242 - DNA, 15 bp, Homo sapiens
ttccaaccaggggct

SEQ ID NO: 1982243 - DNA, 15 bp, Homo sapiens
tccaaccaggggctg

SEQ ID NO: 1982244 - DNA, 15 bp, Homo sapiens
ccaaccaggggctgg

SEQ ID NO: 1982245 - DNA, 15 bp, Homo sapiens
caaccaggggctggg

SEQ ID NO: 1982246 - DNA, 15 bp, Homo sapiens
aaccaggggctgggg

SEQ ID NO: 1982247 - DNA, 15 bp, Homo sapiens
accaggggctggggc

SEQ ID NO: 1982248 - DNA, 15 bp, Homo sapiens
ccaggggctggggca

SEQ ID NO: 1982249 - DNA, 15 bp, Homo sapiens
caggggctggggcag

SEQ ID NO: 1982250 - DNA, 15 bp, Homo sapiens
aggggctggggcagg

SEQ ID NO: 1982251 - DNA, 15 bp, Homo sapiens
gggctggggcaggga

SEQ ID NO: 1982252 - DNA, 15 bp, Homo sapiens
ggctggggcagggag

SEQ ID NO: 1982253 - DNA, 15 bp, Homo sapiens
gctggggcagggagg

SEQ ID NO: 1982254 - DNA, 15 bp, Homo sapiens
ctggggcagggaggc

SEQ ID NO: 1982255 - DNA, 15 bp, Homo sapiens
tggggcagggaggct

SEQ ID NO: 1982256 - DNA, 15 bp, Homo sapiens
ggggcagggaggctg

SEQ ID NO: 1982257 - DNA, 15 bp, Homo sapiens
gggcagggaggctgt

SEQ ID NO: 1982258 - DNA, 15 bp, Homo sapiens
ggcagggaggctgtg

SEQ ID NO: 1982259 - DNA, 15 bp, Homo sapiens
gcagggaggctgtgg

SEQ ID NO: 1982260 - DNA, 15 bp, Homo sapiens
cagggaggctgtggg

SEQ ID NO: 1982261 - DNA, 15 bp, Homo sapiens
agggaggctgtggga

SEQ ID NO: 1982262 - DNA, 15 bp, Homo sapiens
gggaggctgtgggaa

SEQ ID NO: 1982263 - DNA, 15 bp, Homo sapiens
ggaggctgtgggaac

SEQ ID NO: 1982264 - DNA, 15 bp, Homo sapiens
gaggctgtgggaaca

SEQ ID NO: 1982265 - DNA, 15 bp, Homo sapiens
aggctgtgggaacag

SEQ ID NO: 1982266 - DNA, 15 bp, Homo sapiens
ggctgtgggaacagg

SEQ ID NO: 1982267 - DNA, 15 bp, Homo sapiens
gctgtgggaacaggg

SEQ ID NO: 1982268 - DNA, 15 bp, Homo sapiens
ctgtgggaacaggga

SEQ ID NO: 1982269 - DNA, 15 bp, Homo sapiens
tgtgggaacagggag

SEQ ID NO: 1982270 - DNA, 15 bp, Homo sapiens
gtgggaacagggaga

SEQ ID NO: 1982271 - DNA, 15 bp, Homo sapiens
tgggaacagggagag

SEQ ID NO: 1982272 - DNA, 15 bp, Homo sapiens
gggaacagggagagg

SEQ ID NO: 1982273 - DNA, 15 bp, Homo sapiens
ggaacagggagaggg

SEQ ID NO: 1982274 - DNA, 15 bp, Homo sapiens
gaacagggagagggg

SEQ ID NO: 1982275 - DNA, 15 bp, Homo sapiens
aacagggagaggggc

SEQ ID NO: 1982276 - DNA, 15 bp, Homo sapiens
acagggagaggggcc

SEQ ID NO: 1982277 - DNA, 15 bp, Homo sapiens
cagggagaggggcct

SEQ ID NO: 1982278 - DNA, 15 bp, Homo sapiens
agggagaggggccta

SEQ ID NO: 1982279 - DNA, 15 bp, Homo sapiens
gggagaggggcctag

SEQ ID NO: 1982280 - DNA, 15 bp, Homo sapiens
ggagaggggcctagc

SEQ ID NO: 1982281 - DNA, 15 bp, Homo sapiens
gagaggggcctagct

SEQ ID NO: 1982282 - DNA, 15 bp, Homo sapiens
agaggggcctagctt

SEQ ID NO: 1982283 - DNA, 15 bp, Homo sapiens
gaggggcctagcttt

SEQ ID NO: 1982284 - DNA, 15 bp, Homo sapiens
aggggcctagctttg

SEQ ID NO: 1982285 - DNA, 15 bp, Homo sapiens
ggggcctagctttgt

SEQ ID NO: 1982286 - DNA, 15 bp, Homo sapiens
gggcctagctttgtg

SEQ ID NO: 1982287 - DNA, 15 bp, Homo sapiens
ggcctagctttgtgt

SEQ ID NO: 1982288 - DNA, 15 bp, Homo sapiens
gcctagctttgtgtg

SEQ ID NO: 1982289 - DNA, 15 bp, Homo sapiens
cctagctttgtgtgg

SEQ ID NO: 1982290 - DNA, 15 bp, Homo sapiens
ctagctttgtgtggc

SEQ ID NO: 1982291 - DNA, 15 bp, Homo sapiens
tagctttgtgtggcc

SEQ ID NO: 1982292 - DNA, 15 bp, Homo sapiens
agctttgtgtggccc

SEQ ID NO: 1982293 - DNA, 15 bp, Homo sapiens
gctttgtgtggccct

SEQ ID NO: 1982294 - DNA, 15 bp, Homo sapiens
ctttgtgtggccctc

SEQ ID NO: 1982295 - DNA, 15 bp, Homo sapiens
tttgtgtggccctct

SEQ ID NO: 1982296 - DNA, 15 bp, Homo sapiens
ttgtgtggccctctc

SEQ ID NO: 1982297 - DNA, 15 bp, Homo sapiens
tgtgtggccctctcg

SEQ ID NO: 1982298 - DNA, 15 bp, Homo sapiens
gtgtggccctctcgg

SEQ ID NO: 1982299 - DNA, 15 bp, Homo sapiens
tgtggccctctcggt

SEQ ID NO: 1982300 - DNA, 15 bp, Homo sapiens
gtggccctctcggta

SEQ ID NO: 1982301 - DNA, 15 bp, Homo sapiens
tggccctctcggtac

SEQ ID NO: 1982302 - DNA, 15 bp, Homo sapiens
ggccctctcggtacc

SEQ ID NO: 1982303 - DNA, 15 bp, Homo sapiens
gccctctcggtacca

SEQ ID NO: 1982304 - DNA, 15 bp, Homo sapiens
ccctctcggtaccaa

SEQ ID NO: 1982305 - DNA, 15 bp, Homo sapiens
cctctcggtaccaag

SEQ ID NO: 1982306 - DNA, 15 bp, Homo sapiens
ctctcggtaccaagt

SEQ ID NO: 1982307 - DNA, 15 bp, Homo sapiens
tctcggtaccaagtc

SEQ ID NO: 1982308 - DNA, 15 bp, Homo sapiens
ctcggtaccaagtcc

SEQ ID NO: 1982309 - DNA, 15 bp, Homo sapiens
tcggtaccaagtcct

SEQ ID NO: 1982310 - DNA, 15 bp, Homo sapiens
cggtaccaagtcctg

SEQ ID NO: 1982311 - DNA, 15 bp, Homo sapiens
ggtaccaagtcctgt

SEQ ID NO: 1982312 - DNA, 15 bp, Homo sapiens
gtaccaagtcctgtc

SEQ ID NO: 1982313 - DNA, 15 bp, Homo sapiens
taccaagtcctgtca

SEQ ID NO: 1982314 - DNA, 15 bp, Homo sapiens
accaagtcctgtcac

SEQ ID NO: 1982315 - DNA, 15 bp, Homo sapiens
ccaagtcctgtcacc

SEQ ID NO: 1982316 - DNA, 15 bp, Homo sapiens
caagtcctgtcacca

SEQ ID NO: 1982317 - DNA, 15 bp, Homo sapiens
aagtcctgtcaccaa

SEQ ID NO: 1982318 - DNA, 15 bp, Homo sapiens
agtcctgtcaccaac

SEQ ID NO: 1982319 - DNA, 15 bp, Homo sapiens
gtcctgtcaccaaca

SEQ ID NO: 1982320 - DNA, 15 bp, Homo sapiens
tcctgtcaccaacag

SEQ ID NO: 1982321 - DNA, 15 bp, Homo sapiens
cctgtcaccaacagg

SEQ ID NO: 1982322 - DNA, 15 bp, Homo sapiens
ctgtcaccaacaggc

SEQ ID NO: 1982323 - DNA, 15 bp, Homo sapiens
tgtcaccaacaggca

SEQ ID NO: 1982324 - DNA, 15 bp, Homo sapiens
gtcaccaacaggcat

SEQ ID NO: 1982325 - DNA, 15 bp, Homo sapiens
tcaccaacaggcatc

SEQ ID NO: 1982326 - DNA, 15 bp, Homo sapiens
caccaacaggcatca

SEQ ID NO: 1982327 - DNA, 15 bp, Homo sapiens
accaacaggcatcac

SEQ ID NO: 1982328 - DNA, 15 bp, Homo sapiens
ccaacaggcatcacc

SEQ ID NO: 1982329 - DNA, 15 bp, Homo sapiens
caacaggcatcacct

SEQ ID NO: 1982330 - DNA, 15 bp, Homo sapiens
aacaggcatcaccta

SEQ ID NO: 1982331 - DNA, 15 bp, Homo sapiens
acaggcatcacctat

SEQ ID NO: 1982332 - DNA, 15 bp, Homo sapiens
caggcatcacctatg

SEQ ID NO: 1982333 - DNA, 15 bp, Homo sapiens
aggcatcacctatga

SEQ ID NO: 1982334 - DNA, 15 bp, Homo sapiens
ggcatcacctatgag

SEQ ID NO: 1982335 - DNA, 15 bp, Homo sapiens
gcatcacctatgagc

SEQ ID NO: 1982336 - DNA, 15 bp, Homo sapiens
catcacctatgagcc

SEQ ID NO: 1982337 - DNA, 15 bp, Homo sapiens
atcacctatgagcca

SEQ ID NO: 1982338 - DNA, 15 bp, Homo sapiens
tcacctatgagccac

SEQ ID NO: 1982339 - DNA, 15 bp, Homo sapiens
cacctatgagccacc

SEQ ID NO: 1982340 - DNA, 15 bp, Homo sapiens
acctatgagccaccc

SEQ ID NO: 1982341 - DNA, 15 bp, Homo sapiens
cctatgagccaccca

SEQ ID NO: 1982342 - DNA, 15 bp, Homo sapiens
ctatgagccacccaa

SEQ ID NO: 1982343 - DNA, 15 bp, Homo sapiens
tatgagccacccaac

SEQ ID NO: 1982344 - DNA, 15 bp, Homo sapiens
atgagccacccaact

SEQ ID NO: 1982345 - DNA, 15 bp, Homo sapiens
tgagccacccaacta

SEQ ID NO: 1982346 - DNA, 15 bp, Homo sapiens
gagccacccaactat

SEQ ID NO: 1982347 - DNA, 15 bp, Homo sapiens
agccacccaactata

SEQ ID NO: 1982348 - DNA, 15 bp, Homo sapiens
gccacccaactataa

SEQ ID NO: 1982349 - DNA, 15 bp, Homo sapiens
ccacccaactataag

SEQ ID NO: 1982350 - DNA, 15 bp, Homo sapiens
cacccaactataagg

SEQ ID NO: 1982351 - DNA, 15 bp, Homo sapiens
acccaactataaggc

SEQ ID NO: 1982352 - DNA, 15 bp, Homo sapiens
cccaactataaggcc

SEQ ID NO: 1982353 - DNA, 15 bp, Homo sapiens
ccaactataaggccc

SEQ ID NO: 1982354 - DNA, 15 bp, Homo sapiens
caactataaggccct

SEQ ID NO: 1982355 - DNA, 15 bp, Homo sapiens
aactataaggccctg

SEQ ID NO: 1982356 - DNA, 15 bp, Homo sapiens
actataaggccctgg

SEQ ID NO: 1982357 - DNA, 15 bp, Homo sapiens
ctataaggccctgga

SEQ ID NO: 1982358 - DNA, 15 bp, Homo sapiens
tataaggccctggac

SEQ ID NO: 1982359 - DNA, 15 bp, Homo sapiens
ataaggccctggact

SEQ ID NO: 1982360 - DNA, 15 bp, Homo sapiens
taaggccctggactt

SEQ ID NO: 1982361 - DNA, 15 bp, Homo sapiens
aaggccctggacttc

SEQ ID NO: 1982362 - DNA, 15 bp, Homo sapiens
aggccctggacttct

SEQ ID NO: 1982363 - DNA, 15 bp, Homo sapiens
ggccctggacttctc

SEQ ID NO: 1982364 - DNA, 15 bp, Homo sapiens
gccctggacttctcc

SEQ ID NO: 1982365 - DNA, 15 bp, Homo sapiens
ccctggacttctccg

SEQ ID NO: 1982366 - DNA, 15 bp, Homo sapiens
cctggacttctccga

SEQ ID NO: 1982367 - DNA, 15 bp, Homo sapiens
ctggacttctccgag

SEQ ID NO: 1982368 - DNA, 15 bp, Homo sapiens
tggacttctccgagg

SEQ ID NO: 1982369 - DNA, 15 bp, Homo sapiens
ggacttctccgaggc

SEQ ID NO: 1982370 - DNA, 15 bp, Homo sapiens
gacttctccgaggcc

SEQ ID NO: 1982371 - DNA, 15 bp, Homo sapiens
acttctccgaggccc

SEQ ID NO: 1982372 - DNA, 15 bp, Homo sapiens
cttctccgaggcccc

SEQ ID NO: 1982373 - DNA, 15 bp, Homo sapiens
ttctccgaggcccca

SEQ ID NO: 1982374 - DNA, 15 bp, Homo sapiens
tctccgaggccccaa

SEQ ID NO: 1982375 - DNA, 15 bp, Homo sapiens
ctccgaggccccaag

SEQ ID NO: 1982376 - DNA, 15 bp, Homo sapiens
tccgaggccccaagc

SEQ ID NO: 1982377 - DNA, 15 bp, Homo sapiens
ccgaggccccaagct

SEQ ID NO: 1982378 - DNA, 15 bp, Homo sapiens
cgaggccccaagctt

SEQ ID NO: 1982379 - DNA, 15 bp, Homo sapiens
gaggccccaagcttc

SEQ ID NO: 1982380 - DNA, 15 bp, Homo sapiens
aggccccaagcttca

SEQ ID NO: 1982381 - DNA, 15 bp, Homo sapiens
ggccccaagcttcac

SEQ ID NO: 1982382 - DNA, 15 bp, Homo sapiens
gccccaagcttcacc

SEQ ID NO: 1982383 - DNA, 15 bp, Homo sapiens
ccccaagcttcaccc

SEQ ID NO: 1982384 - DNA, 15 bp, Homo sapiens
cccaagcttcaccca

SEQ ID NO: 1982385 - DNA, 15 bp, Homo sapiens
ccaagcttcacccag

SEQ ID NO: 1982386 - DNA, 15 bp, Homo sapiens
caagcttcacccagc

SEQ ID NO: 1982387 - DNA, 15 bp, Homo sapiens
aagcttcacccagcc

SEQ ID NO: 1982388 - DNA, 15 bp, Homo sapiens
agcttcacccagccc

SEQ ID NO: 1982389 - DNA, 15 bp, Homo sapiens
gcttcacccagcccc

SEQ ID NO: 1982390 - DNA, 15 bp, Homo sapiens
cttcacccagcccct

SEQ ID NO: 1982391 - DNA, 15 bp, Homo sapiens
ttcacccagcccctg

SEQ ID NO: 1982392 - DNA, 15 bp, Homo sapiens
tcacccagcccctgg

SEQ ID NO: 1982393 - DNA, 15 bp, Homo sapiens
cacccagcccctggt

SEQ ID NO: 1982394 - DNA, 15 bp, Homo sapiens
acccagcccctggtg

SEQ ID NO: 1982395 - DNA, 15 bp, Homo sapiens
cccagcccctggtga

SEQ ID NO: 1982396 - DNA, 15 bp, Homo sapiens
ccagcccctggtgaa

SEQ ID NO: 1982397 - DNA, 15 bp, Homo sapiens
cagcccctggtgaac

SEQ ID NO: 1982398 - DNA, 15 bp, Homo sapiens
agcccctggtgaacc

SEQ ID NO: 1982399 - DNA, 15 bp, Homo sapiens
gcccctggtgaaccg

SEQ ID NO: 1982400 - DNA, 15 bp, Homo sapiens
cccctggtgaaccgc

SEQ ID NO: 1982401 - DNA, 15 bp, Homo sapiens
ccctggtgaaccgct

SEQ ID NO: 1982402 - DNA, 15 bp, Homo sapiens
cctggtgaaccgctc

SEQ ID NO: 1982403 - DNA, 15 bp, Homo sapiens
ctggtgaaccgctcg

SEQ ID NO: 1982404 - DNA, 15 bp, Homo sapiens
tggtgaaccgctcgg

SEQ ID NO: 1982405 - DNA, 15 bp, Homo sapiens
ggtgaaccgctcggt

SEQ ID NO: 1982406 - DNA, 15 bp, Homo sapiens
gtgaaccgctcggtc

SEQ ID NO: 1982407 - DNA, 15 bp, Homo sapiens
tgaaccgctcggtca

SEQ ID NO: 1982408 - DNA, 15 bp, Homo sapiens
gaaccgctcggtcat

SEQ ID NO: 1982409 - DNA, 15 bp, Homo sapiens
aaccgctcggtcatc

SEQ ID NO: 1982410 - DNA, 15 bp, Homo sapiens
accgctcggtcatcg

SEQ ID NO: 1982411 - DNA, 15 bp, Homo sapiens
ccgctcggtcatcgc

SEQ ID NO: 1982412 - DNA, 15 bp, Homo sapiens
cgctcggtcatcgcg

SEQ ID NO: 1982413 - DNA, 15 bp, Homo sapiens
gctcggtcatcgcgg

SEQ ID NO: 1982414 - DNA, 15 bp, Homo sapiens
ctcggtcatcgcggg

SEQ ID NO: 1982415 - DNA, 15 bp, Homo sapiens
tcggtcatcgcgggc

SEQ ID NO: 1982416 - DNA, 15 bp, Homo sapiens
cggtcatcgcgggct

SEQ ID NO: 1982417 - DNA, 15 bp, Homo sapiens
ggtcatcgcgggcta

SEQ ID NO: 1982418 - DNA, 15 bp, Homo sapiens
gtcatcgcgggctac

SEQ ID NO: 1982419 - DNA, 15 bp, Homo sapiens
tcatcgcgggctaca

SEQ ID NO: 1982420 - DNA, 15 bp, Homo sapiens
catcgcgggctacac

SEQ ID NO: 1982421 - DNA, 15 bp, Homo sapiens
atcgcgggctacact

SEQ ID NO: 1982422 - DNA, 15 bp, Homo sapiens
tcgcgggctacactg

SEQ ID NO: 1982423 - DNA, 15 bp, Homo sapiens
cgcgggctacactgc

SEQ ID NO: 1982424 - DNA, 15 bp, Homo sapiens
gcgggctacactgct

SEQ ID NO: 1982425 - DNA, 15 bp, Homo sapiens
cgggctacactgcta

SEQ ID NO: 1982426 - DNA, 15 bp, Homo sapiens
gggctacactgctat

SEQ ID NO: 1982427 - DNA, 15 bp, Homo sapiens
ggctacactgctatg

SEQ ID NO: 1982428 - DNA, 15 bp, Homo sapiens
gctacactgctatgc

SEQ ID NO: 1982429 - DNA, 15 bp, Homo sapiens
ctacactgctatgct

SEQ ID NO: 1982430 - DNA, 15 bp, Homo sapiens
tacactgctatgctc

SEQ ID NO: 1982431 - DNA, 15 bp, Homo sapiens
acactgctatgctct

SEQ ID NO: 1982432 - DNA, 15 bp, Homo sapiens
cactgctatgctctg

SEQ ID NO: 1982433 - DNA, 15 bp, Homo sapiens
actgctatgctctgc

SEQ ID NO: 1982434 - DNA, 15 bp, Homo sapiens
ctgctatgctctgct

SEQ ID NO: 1982435 - DNA, 15 bp, Homo sapiens
tgctatgctctgctg

SEQ ID NO: 1982436 - DNA, 15 bp, Homo sapiens
gctatgctctgctgt

SEQ ID NO: 1982437 - DNA, 15 bp, Homo sapiens
ctatgctctgctgtg

SEQ ID NO: 1982438 - DNA, 15 bp, Homo sapiens
tatgctctgctgtgc

SEQ ID NO: 1982439 - DNA, 15 bp, Homo sapiens
atgctctgctgtgct

SEQ ID NO: 1982440 - DNA, 15 bp, Homo sapiens
tgctctgctgtgctg

SEQ ID NO: 1982441 - DNA, 15 bp, Homo sapiens
gctctgctgtgctgt

SEQ ID NO: 1982442 - DNA, 15 bp, Homo sapiens
ctctgctgtgctgtc

SEQ ID NO: 1982443 - DNA, 15 bp, Homo sapiens
tctgctgtgctgtcc

SEQ ID NO: 1982444 - DNA, 15 bp, Homo sapiens
ctgctgtgctgtccg

SEQ ID NO: 1982445 - DNA, 15 bp, Homo sapiens
tgctgtgctgtccgg

SEQ ID NO: 1982446 - DNA, 15 bp, Homo sapiens
gctgtgctgtccggg

SEQ ID NO: 1982447 - DNA, 15 bp, Homo sapiens
ctgtgctgtccgggg

SEQ ID NO: 1982448 - DNA, 15 bp, Homo sapiens
tgtgctgtccggggt

SEQ ID NO: 1982449 - DNA, 15 bp, Homo sapiens
gtgctgtccggggta

SEQ ID NO: 1982450 - DNA, 15 bp, Homo sapiens
tgctgtccggggtag

SEQ ID NO: 1982451 - DNA, 15 bp, Homo sapiens
gctgtccggggtagc

SEQ ID NO: 1982452 - DNA, 15 bp, Homo sapiens
ctgtccggggtagcc

SEQ ID NO: 1982453 - DNA, 15 bp, Homo sapiens
tgtccggggtagccc

SEQ ID NO: 1982454 - DNA, 15 bp, Homo sapiens
gtccggggtagcccc

SEQ ID NO: 1982455 - DNA, 15 bp, Homo sapiens
tccggggtagcccca

SEQ ID NO: 1982456 - DNA, 15 bp, Homo sapiens
ccggggtagccccaa

SEQ ID NO: 1982457 - DNA, 15 bp, Homo sapiens
cggggtagccccaag

SEQ ID NO: 1982458 - DNA, 15 bp, Homo sapiens
ggggtagccccaagg

SEQ ID NO: 1982459 - DNA, 15 bp, Homo sapiens
gggtagccccaaggt

SEQ ID NO: 1982460 - DNA, 15 bp, Homo sapiens
ggtagccccaaggta

SEQ ID NO: 1982461 - DNA, 15 bp, Homo sapiens
gtagccccaaggtag

SEQ ID NO: 1982462 - DNA, 15 bp, Homo sapiens
tagccccaaggtagg

SEQ ID NO: 1982463 - DNA, 15 bp, Homo sapiens
agccccaaggtaggg

SEQ ID NO: 1982464 - DNA, 15 bp, Homo sapiens
gccccaaggtaggga

SEQ ID NO: 1982465 - DNA, 15 bp, Homo sapiens
ccccaaggtagggaa

SEQ ID NO: 1982466 - DNA, 15 bp, Homo sapiens
cccaaggtagggaac

SEQ ID NO: 1982467 - DNA, 15 bp, Homo sapiens
ccaaggtagggaact

SEQ ID NO: 1982468 - DNA, 15 bp, Homo sapiens
caaggtagggaactt

SEQ ID NO: 1982469 - DNA, 15 bp, Homo sapiens
aaggtagggaacttt

SEQ ID NO: 1982470 - DNA, 15 bp, Homo sapiens
aggtagggaacttta

SEQ ID NO: 1982471 - DNA, 15 bp, Homo sapiens
ggtagggaactttag

SEQ ID NO: 1982472 - DNA, 15 bp, Homo sapiens
gtagggaactttagg

SEQ ID NO: 1982473 - DNA, 15 bp, Homo sapiens
tagggaactttaggc

SEQ ID NO: 1982474 - DNA, 15 bp, Homo sapiens
agggaactttaggcg

SEQ ID NO: 1982475 - DNA, 15 bp, Homo sapiens
gggaactttaggcgc

SEQ ID NO: 1982476 - DNA, 15 bp, Homo sapiens
ggaactttaggcgct

SEQ ID NO: 1982477 - DNA, 15 bp, Homo sapiens
gaactttaggcgctg

SEQ ID NO: 1982478 - DNA, 15 bp, Homo sapiens
aactttaggcgctgg

SEQ ID NO: 1982479 - DNA, 15 bp, Homo sapiens
actttaggcgctggt

SEQ ID NO: 1982480 - DNA, 15 bp, Homo sapiens
ctttaggcgctggtc

SEQ ID NO: 1982481 - DNA, 15 bp, Homo sapiens
tttaggcgctggtcc

SEQ ID NO: 1982482 - DNA, 15 bp, Homo sapiens
ttaggcgctggtcca

SEQ ID NO: 1982483 - DNA, 15 bp, Homo sapiens
taggcgctggtccag

SEQ ID NO: 1982484 - DNA, 15 bp, Homo sapiens
aggcgctggtccagg

SEQ ID NO: 1982485 - DNA, 15 bp, Homo sapiens
ggcgctggtccaggc

SEQ ID NO: 1982486 - DNA, 15 bp, Homo sapiens
gcgctggtccaggcc

SEQ ID NO: 1982487 - DNA, 15 bp, Homo sapiens
cgctggtccaggccg

SEQ ID NO: 1982488 - DNA, 15 bp, Homo sapiens
gctggtccaggccga

SEQ ID NO: 1982489 - DNA, 15 bp, Homo sapiens
ctggtccaggccgac

SEQ ID NO: 1982490 - DNA, 15 bp, Homo sapiens
tggtccaggccgacc

SEQ ID NO: 1982491 - DNA, 15 bp, Homo sapiens
ggtccaggccgacca

SEQ ID NO: 1982492 - DNA, 15 bp, Homo sapiens
gtccaggccgaccag

SEQ ID NO: 1982493 - DNA, 15 bp, Homo sapiens
tccaggccgaccagg

SEQ ID NO: 1982494 - DNA, 15 bp, Homo sapiens
ccaggccgaccagga

SEQ ID NO: 1982495 - DNA, 15 bp, Homo sapiens
caggccgaccaggag

SEQ ID NO: 1982496 - DNA, 15 bp, Homo sapiens
aggccgaccaggagg

SEQ ID NO: 1982497 - DNA, 15 bp, Homo sapiens
ggccgaccaggaggc

SEQ ID NO: 1982498 - DNA, 15 bp, Homo sapiens
gccgaccaggaggca

SEQ ID NO: 1982499 - DNA, 15 bp, Homo sapiens
ccgaccaggaggcag

SEQ ID NO: 1982500 - DNA, 15 bp, Homo sapiens
cgaccaggaggcagg

SEQ ID NO: 1982501 - DNA, 15 bp, Homo sapiens
gaccaggaggcaggg

SEQ ID NO: 1982502 - DNA, 15 bp, Homo sapiens
accaggaggcagggc

SEQ ID NO: 1982503 - DNA, 15 bp, Homo sapiens
ccaggaggcagggct

SEQ ID NO: 1982504 - DNA, 15 bp, Homo sapiens
caggaggcagggctc

SEQ ID NO: 1982505 - DNA, 15 bp, Homo sapiens
aggaggcagggctca

SEQ ID NO: 1982506 - DNA, 15 bp, Homo sapiens
ggaggcagggctcac

SEQ ID NO: 1982507 - DNA, 15 bp, Homo sapiens
gaggcagggctcaca

SEQ ID NO: 1982508 - DNA, 15 bp, Homo sapiens
aggcagggctcacag

SEQ ID NO: 1982509 - DNA, 15 bp, Homo sapiens
ggcagggctcacagg

SEQ ID NO: 1982510 - DNA, 15 bp, Homo sapiens
gcagggctcacaggc

SEQ ID NO: 1982511 - DNA, 15 bp, Homo sapiens
cagggctcacaggcc

SEQ ID NO: 1982512 - DNA, 15 bp, Homo sapiens
agggctcacaggccc

SEQ ID NO: 1982513 - DNA, 15 bp, Homo sapiens
gggctcacaggcccc

SEQ ID NO: 1982514 - DNA, 15 bp, Homo sapiens
ggctcacaggccccg

SEQ ID NO: 1982515 - DNA, 15 bp, Homo sapiens
gctcacaggccccga

SEQ ID NO: 1982516 - DNA, 15 bp, Homo sapiens
ctcacaggccccgac

SEQ ID NO: 1982517 - DNA, 15 bp, Homo sapiens
tcacaggccccgacg

SEQ ID NO: 1982518 - DNA, 15 bp, Homo sapiens
cacaggccccgacgt

SEQ ID NO: 1982519 - DNA, 15 bp, Homo sapiens
acaggccccgacgtt

SEQ ID NO: 1982520 - DNA, 15 bp, Homo sapiens
caggccccgacgttg

SEQ ID NO: 1982521 - DNA, 15 bp, Homo sapiens
aggccccgacgttga

SEQ ID NO: 1982522 - DNA, 15 bp, Homo sapiens
ggccccgacgttgag

SEQ ID NO: 1982523 - DNA, 15 bp, Homo sapiens
gccccgacgttgagc

SEQ ID NO: 1982524 - DNA, 15 bp, Homo sapiens
ccccgacgttgagca

SEQ ID NO: 1982525 - DNA, 15 bp, Homo sapiens
cccgacgttgagcag

SEQ ID NO: 1982526 - DNA, 15 bp, Homo sapiens
ccgacgttgagcagt

SEQ ID NO: 1982527 - DNA, 15 bp, Homo sapiens
cgacgttgagcagtc

SEQ ID NO: 1982528 - DNA, 15 bp, Homo sapiens
gacgttgagcagtcc

SEQ ID NO: 1982529 - DNA, 15 bp, Homo sapiens
acgttgagcagtcct

SEQ ID NO: 1982530 - DNA, 15 bp, Homo sapiens
cgttgagcagtcctc

SEQ ID NO: 1982531 - DNA, 15 bp, Homo sapiens
gttgagcagtcctct

SEQ ID NO: 1982532 - DNA, 15 bp, Homo sapiens
ttgagcagtcctctc

SEQ ID NO: 1982533 - DNA, 15 bp, Homo sapiens
tgagcagtcctctcc

SEQ ID NO: 1982534 - DNA, 15 bp, Homo sapiens
gagcagtcctctccc

SEQ ID NO: 1982535 - DNA, 15 bp, Homo sapiens
agcagtcctctcccc

SEQ ID NO: 1982536 - DNA, 15 bp, Homo sapiens
gcagtcctctcccca

SEQ ID NO: 1982537 - DNA, 15 bp, Homo sapiens
cagtcctctccccag

SEQ ID NO: 1982538 - DNA, 15 bp, Homo sapiens
agtcctctccccagc

SEQ ID NO: 1982539 - DNA, 15 bp, Homo sapiens
gtcctctccccagcc

SEQ ID NO: 1982540 - DNA, 15 bp, Homo sapiens
tcctctccccagcct

SEQ ID NO: 1982541 - DNA, 15 bp, Homo sapiens
cctctccccagcctg

SEQ ID NO: 1982542 - DNA, 15 bp, Homo sapiens
ctctccccagcctgt

SEQ ID NO: 1982543 - DNA, 15 bp, Homo sapiens
tctccccagcctgtc

SEQ ID NO: 1982544 - DNA, 15 bp, Homo sapiens
ctccccagcctgtct

SEQ ID NO: 1982545 - DNA, 15 bp, Homo sapiens
tccccagcctgtctc

SEQ ID NO: 1982546 - DNA, 15 bp, Homo sapiens
ccccagcctgtctcc

SEQ ID NO: 1982547 - DNA, 15 bp, Homo sapiens
cccagcctgtctccc

SEQ ID NO: 1982548 - DNA, 15 bp, Homo sapiens
ccagcctgtctcccc

SEQ ID NO: 1982549 - DNA, 15 bp, Homo sapiens
cagcctgtctcccct

SEQ ID NO: 1982550 - DNA, 15 bp, Homo sapiens
agcctgtctcccctg

SEQ ID NO: 1982551 - DNA, 15 bp, Homo sapiens
gcctgtctcccctgc

SEQ ID NO: 1982552 - DNA, 15 bp, Homo sapiens
cctgtctcccctgct

SEQ ID NO: 1982553 - DNA, 15 bp, Homo sapiens
ctgtctcccctgctt

SEQ ID NO: 1982554 - DNA, 15 bp, Homo sapiens
tgtctcccctgcttt

SEQ ID NO: 1982555 - DNA, 15 bp, Homo sapiens
gtctcccctgctttc

SEQ ID NO: 1982556 - DNA, 15 bp, Homo sapiens
tctcccctgctttct

SEQ ID NO: 1982557 - DNA, 15 bp, Homo sapiens
ctcccctgctttctc

SEQ ID NO: 1982558 - DNA, 15 bp, Homo sapiens
tcccctgctttctct

SEQ ID NO: 1982559 - DNA, 15 bp, Homo sapiens
cccctgctttctctc

SEQ ID NO: 1982560 - DNA, 15 bp, Homo sapiens
ccctgctttctctcc

SEQ ID NO: 1982561 - DNA, 15 bp, Homo sapiens
cctgctttctctcca

SEQ ID NO: 1982562 - DNA, 15 bp, Homo sapiens
ctgctttctctccac

SEQ ID NO: 1982563 - DNA, 15 bp, Homo sapiens
tgctttctctccacc

SEQ ID NO: 1982564 - DNA, 15 bp, Homo sapiens
gctttctctccacct

SEQ ID NO: 1982565 - DNA, 15 bp, Homo sapiens
ctttctctccacctt

SEQ ID NO: 1982566 - DNA, 15 bp, Homo sapiens
tttctctccaccttg

SEQ ID NO: 1982567 - DNA, 15 bp, Homo sapiens
ttctctccaccttgg

SEQ ID NO: 1982568 - DNA, 15 bp, Homo sapiens
tctctccaccttggg

SEQ ID NO: 1982569 - DNA, 15 bp, Homo sapiens
ctctccaccttgggg

SEQ ID NO: 1982570 - DNA, 15 bp, Homo sapiens
tctccaccttggggt

SEQ ID NO: 1982571 - DNA, 15 bp, Homo sapiens
ctccaccttggggtg

SEQ ID NO: 1982572 - DNA, 15 bp, Homo sapiens
tccaccttggggtgt

SEQ ID NO: 1982573 - DNA, 15 bp, Homo sapiens
ctgcagggccaccaa

SEQ ID NO: 1982574 - DNA, 15 bp, Homo sapiens
tgcagggccaccaac

SEQ ID NO: 1982575 - DNA, 15 bp, Homo sapiens
gcagggccaccaact

SEQ ID NO: 1982576 - DNA, 15 bp, Homo sapiens
cagggccaccaactt

SEQ ID NO: 1982577 - DNA, 15 bp, Homo sapiens
agggccaccaactta

SEQ ID NO: 1982578 - DNA, 15 bp, Homo sapiens
gggccaccaacttac

SEQ ID NO: 1982579 - DNA, 15 bp, Homo sapiens
ggccaccaacttaca

SEQ ID NO: 1982580 - DNA, 15 bp, Homo sapiens
gccaccaacttacag

SEQ ID NO: 1982581 - DNA, 15 bp, Homo sapiens
ccaccaacttacagg

SEQ ID NO: 1982582 - DNA, 15 bp, Homo sapiens
caccaacttacaggg

SEQ ID NO: 1982583 - DNA, 15 bp, Homo sapiens
accaacttacagggc

SEQ ID NO: 1982584 - DNA, 15 bp, Homo sapiens
ccaacttacagggcg

SEQ ID NO: 1982585 - DNA, 15 bp, Homo sapiens
caacttacagggcga

SEQ ID NO: 1982586 - DNA, 15 bp, Homo sapiens
aacttacagggcgag

SEQ ID NO: 1982587 - DNA, 15 bp, Homo sapiens
acttacagggcgagg

SEQ ID NO: 1982588 - DNA, 15 bp, Homo sapiens
cttacagggcgaggc

SEQ ID NO: 1982589 - DNA, 15 bp, Homo sapiens
ttacagggcgaggca

SEQ ID NO: 1982590 - DNA, 15 bp, Homo sapiens
tacagggcgaggcac

SEQ ID NO: 1982591 - DNA, 15 bp, Homo sapiens
acagggcgaggcacg

SEQ ID NO: 1982592 - DNA, 15 bp, Homo sapiens
cagggcgaggcacgg

SEQ ID NO: 1982593 - DNA, 15 bp, Homo sapiens
agggcgaggcacggt

SEQ ID NO: 1982594 - DNA, 15 bp, Homo sapiens
gggcgaggcacggtg

SEQ ID NO: 1982595 - DNA, 15 bp, Homo sapiens
ggcgaggcacggtgt

SEQ ID NO: 1982596 - DNA, 15 bp, Homo sapiens
gcgaggcacggtgtg

SEQ ID NO: 1982597 - DNA, 15 bp, Homo sapiens
cgaggcacggtgtga

SEQ ID NO: 1982598 - DNA, 15 bp, Homo sapiens
gaggcacggtgtgag

SEQ ID NO: 1982599 - DNA, 15 bp, Homo sapiens
aggcacggtgtgagt

SEQ ID NO: 1982600 - DNA, 15 bp, Homo sapiens
ggcacggtgtgagtg

SEQ ID NO: 1982601 - DNA, 15 bp, Homo sapiens
gcacggtgtgagtgc

SEQ ID NO: 1982602 - DNA, 15 bp, Homo sapiens
cacggtgtgagtgcc

SEQ ID NO: 1982603 - DNA, 15 bp, Homo sapiens
acggtgtgagtgccg

SEQ ID NO: 1982604 - DNA, 15 bp, Homo sapiens
cggtgtgagtgccgc

SEQ ID NO: 1982605 - DNA, 15 bp, Homo sapiens
ggtgtgagtgccgcc

SEQ ID NO: 1982606 - DNA, 15 bp, Homo sapiens
gtgtgagtgccgcct

SEQ ID NO: 1982607 - DNA, 15 bp, Homo sapiens
tgtgagtgccgcctg

SEQ ID NO: 1982608 - DNA, 15 bp, Homo sapiens
gtgagtgccgcctgg

SEQ ID NO: 1982609 - DNA, 15 bp, Homo sapiens
tgagtgccgcctgga

SEQ ID NO: 1982610 - DNA, 15 bp, Homo sapiens
gagtgccgcctggag

SEQ ID NO: 1982611 - DNA, 15 bp, Homo sapiens
agtgccgcctggagg

SEQ ID NO: 1982612 - DNA, 15 bp, Homo sapiens
gtgccgcctggaggt

SEQ ID NO: 1982613 - DNA, 15 bp, Homo sapiens
tgccgcctggaggtg

SEQ ID NO: 1982614 - DNA, 15 bp, Homo sapiens
gccgcctggaggtgc

SEQ ID NO: 1982615 - DNA, 15 bp, Homo sapiens
ccgcctggaggtgcg

SEQ ID NO: 1982616 - DNA, 15 bp, Homo sapiens
cgcctggaggtgcga

SEQ ID NO: 1982617 - DNA, 15 bp, Homo sapiens
gcctggaggtgcgag

SEQ ID NO: 1982618 - DNA, 15 bp, Homo sapiens
cctggaggtgcgagg

SEQ ID NO: 1982619 - DNA, 15 bp, Homo sapiens
ctggaggtgcgaggt

SEQ ID NO: 1982620 - DNA, 15 bp, Homo sapiens
tggaggtgcgaggtg

SEQ ID NO: 1982621 - DNA, 15 bp, Homo sapiens
ggaggtgcgaggtga

SEQ ID NO: 1982622 - DNA, 15 bp, Homo sapiens
gaggtgcgaggtgag

SEQ ID NO: 1982623 - DNA, 15 bp, Homo sapiens
aggtgcgaggtgagg

SEQ ID NO: 1982624 - DNA, 15 bp, Homo sapiens
ggtgcgaggtgagga

SEQ ID NO: 1982625 - DNA, 15 bp, Homo sapiens
gtgcgaggtgaggag

SEQ ID NO: 1982626 - DNA, 15 bp, Homo sapiens
tgcgaggtgaggagc

SEQ ID NO: 1982627 - DNA, 15 bp, Homo sapiens
gcgaggtgaggagcc

SEQ ID NO: 1982628 - DNA, 15 bp, Homo sapiens
cgaggtgaggagccc

SEQ ID NO: 1982629 - DNA, 15 bp, Homo sapiens
gaggtgaggagccct

SEQ ID NO: 1982630 - DNA, 15 bp, Homo sapiens
aggtgaggagccctc

SEQ ID NO: 1982631 - DNA, 15 bp, Homo sapiens
ggtgaggagccctcg

SEQ ID NO: 1982632 - DNA, 15 bp, Homo sapiens
gtgaggagccctcgg

SEQ ID NO: 1982633 - DNA, 15 bp, Homo sapiens
tgaggagccctcggg

SEQ ID NO: 1982634 - DNA, 15 bp, Homo sapiens
gaggagccctcgggg

SEQ ID NO: 1982635 - DNA, 15 bp, Homo sapiens
aggagccctcggggc

SEQ ID NO: 1982636 - DNA, 15 bp, Homo sapiens
ggagccctcggggcc

SEQ ID NO: 1982637 - DNA, 15 bp, Homo sapiens
gagccctcggggcca

SEQ ID NO: 1982638 - DNA, 15 bp, Homo sapiens
agccctcggggccag

SEQ ID NO: 1982639 - DNA, 15 bp, Homo sapiens
gccctcggggccagg

SEQ ID NO: 1982640 - DNA, 15 bp, Homo sapiens
ccctcggggccaggg

SEQ ID NO: 1982641 - DNA, 15 bp, Homo sapiens
cctcggggccagggc

SEQ ID NO: 1982642 - DNA, 15 bp, Homo sapiens
ctcggggccagggcc

SEQ ID NO: 1982643 - DNA, 15 bp, Homo sapiens
tcggggccagggcct

SEQ ID NO: 1982644 - DNA, 15 bp, Homo sapiens
cggggccagggcctg

SEQ ID NO: 1982645 - DNA, 15 bp, Homo sapiens
ggggccagggcctgg

SEQ ID NO: 1982646 - DNA, 15 bp, Homo sapiens
gggccagggcctggg

SEQ ID NO: 1982647 - DNA, 15 bp, Homo sapiens
ggccagggcctggga

SEQ ID NO: 1982648 - DNA, 15 bp, Homo sapiens
gccagggcctgggag

SEQ ID NO: 1982649 - DNA, 15 bp, Homo sapiens
ccagggcctgggaga

SEQ ID NO: 1982650 - DNA, 15 bp, Homo sapiens
cagggcctgggagat

SEQ ID NO: 1982651 - DNA, 15 bp, Homo sapiens
agggcctgggagatg

SEQ ID NO: 1982652 - DNA, 15 bp, Homo sapiens
gggcctgggagatgg

SEQ ID NO: 1982653 - DNA, 15 bp, Homo sapiens
ggcctgggagatggg

SEQ ID NO: 1982654 - DNA, 15 bp, Homo sapiens
gcctgggagatggga

SEQ ID NO: 1982655 - DNA, 15 bp, Homo sapiens
cctgggagatgggaa

SEQ ID NO: 1982656 - DNA, 15 bp, Homo sapiens
ctgggagatgggaag

SEQ ID NO: 1982657 - DNA, 15 bp, Homo sapiens
tgggagatgggaaga

SEQ ID NO: 1982658 - DNA, 15 bp, Homo sapiens
gggagatgggaagag

SEQ ID NO: 1982659 - DNA, 15 bp, Homo sapiens
ggagatgggaagagc

SEQ ID NO: 1982660 - DNA, 15 bp, Homo sapiens
gagatgggaagagcg

SEQ ID NO: 1982661 - DNA, 15 bp, Homo sapiens
agatgggaagagcgg

SEQ ID NO: 1982662 - DNA, 15 bp, Homo sapiens
gatgggaagagcggg

SEQ ID NO: 1982663 - DNA, 15 bp, Homo sapiens
atgggaagagcgggc

SEQ ID NO: 1982664 - DNA, 15 bp, Homo sapiens
tgggaagagcgggcg

SEQ ID NO: 1982665 - DNA, 15 bp, Homo sapiens
gggaagagcgggcgg

SEQ ID NO: 1982666 - DNA, 15 bp, Homo sapiens
ggaagagcgggcggc

SEQ ID NO: 1982667 - DNA, 15 bp, Homo sapiens
gaagagcgggcggca

SEQ ID NO: 1982668 - DNA, 15 bp, Homo sapiens
aagagcgggcggcag

SEQ ID NO: 1982669 - DNA, 15 bp, Homo sapiens
agagcgggcggcagt

SEQ ID NO: 1982670 - DNA, 15 bp, Homo sapiens
gagcgggcggcagtg

SEQ ID NO: 1982671 - DNA, 15 bp, Homo sapiens
agcgggcggcagtgg

SEQ ID NO: 1982672 - DNA, 15 bp, Homo sapiens
gcgggcggcagtggg

SEQ ID NO: 1982673 - DNA, 15 bp, Homo sapiens
cgggcggcagtgggg

SEQ ID NO: 1982674 - DNA, 15 bp, Homo sapiens
gggcggcagtgggga

SEQ ID NO: 1982675 - DNA, 15 bp, Homo sapiens
ggcggcagtggggac

SEQ ID NO: 1982676 - DNA, 15 bp, Homo sapiens
gcggcagtggggacc

SEQ ID NO: 1982677 - DNA, 15 bp, Homo sapiens
cggcagtggggaccc

SEQ ID NO: 1982678 - DNA, 15 bp, Homo sapiens
ggcagtggggaccct

SEQ ID NO: 1982679 - DNA, 15 bp, Homo sapiens
gcagtggggaccctg

SEQ ID NO: 1982680 - DNA, 15 bp, Homo sapiens
cagtggggaccctgg

SEQ ID NO: 1982681 - DNA, 15 bp, Homo sapiens
agtggggaccctggg

SEQ ID NO: 1982682 - DNA, 15 bp, Homo sapiens
gtggggaccctgggc

SEQ ID NO: 1982683 - DNA, 15 bp, Homo sapiens
tggggaccctgggct

SEQ ID NO: 1982684 - DNA, 15 bp, Homo sapiens
ggggaccctgggctt

SEQ ID NO: 1982685 - DNA, 15 bp, Homo sapiens
gggaccctgggcttt

SEQ ID NO: 1982686 - DNA, 15 bp, Homo sapiens
ggaccctgggctttg

SEQ ID NO: 1982687 - DNA, 15 bp, Homo sapiens
gaccctgggctttgc

SEQ ID NO: 1982688 - DNA, 15 bp, Homo sapiens
accctgggctttgct

SEQ ID NO: 1982689 - DNA, 15 bp, Homo sapiens
ccctgggctttgctc

SEQ ID NO: 1982690 - DNA, 15 bp, Homo sapiens
cctgggctttgctcc

SEQ ID NO: 1982691 - DNA, 15 bp, Homo sapiens
ctgggctttgctccg

SEQ ID NO: 1982692 - DNA, 15 bp, Homo sapiens
tgggctttgctccgt

SEQ ID NO: 1982693 - DNA, 15 bp, Homo sapiens
gggctttgctccgtt

SEQ ID NO: 1982694 - DNA, 15 bp, Homo sapiens
ggctttgctccgttg

SEQ ID NO: 1982695 - DNA, 15 bp, Homo sapiens
gctttgctccgttgt

SEQ ID NO: 1982696 - DNA, 15 bp, Homo sapiens
ctttgctccgttgtc

SEQ ID NO: 1982697 - DNA, 15 bp, Homo sapiens
tttgctccgttgtcc

SEQ ID NO: 1982698 - DNA, 15 bp, Homo sapiens
ttgctccgttgtcct

SEQ ID NO: 1982699 - DNA, 15 bp, Homo sapiens
tgctccgttgtcctc

SEQ ID NO: 1982700 - DNA, 15 bp, Homo sapiens
gctccgttgtcctcg

SEQ ID NO: 1982701 - DNA, 15 bp, Homo sapiens
ctccgttgtcctcgg

SEQ ID NO: 1982702 - DNA, 15 bp, Homo sapiens
tccgttgtcctcggc

SEQ ID NO: 1982703 - DNA, 15 bp, Homo sapiens
ccgttgtcctcggcc

SEQ ID NO: 1982704 - DNA, 15 bp, Homo sapiens
cgttgtcctcggcca

SEQ ID NO: 1982705 - DNA, 15 bp, Homo sapiens
gttgtcctcggccaa

SEQ ID NO: 1982706 - DNA, 15 bp, Homo sapiens
ttgtcctcggccaag

SEQ ID NO: 1982707 - DNA, 15 bp, Homo sapiens
tgtcctcggccaagc

SEQ ID NO: 1982708 - DNA, 15 bp, Homo sapiens
gtcctcggccaagca

SEQ ID NO: 1982709 - DNA, 15 bp, Homo sapiens
tcctcggccaagcac

SEQ ID NO: 1982710 - DNA, 15 bp, Homo sapiens
cctcggccaagcacc

SEQ ID NO: 1982711 - DNA, 15 bp, Homo sapiens
ctcggccaagcacct

SEQ ID NO: 1982712 - DNA, 15 bp, Homo sapiens
tcggccaagcacctg

SEQ ID NO: 1982713 - DNA, 15 bp, Homo sapiens
cggccaagcacctgc

SEQ ID NO: 1982714 - DNA, 15 bp, Homo sapiens
ggccaagcacctgcc

SEQ ID NO: 1982715 - DNA, 15 bp, Homo sapiens
gccaagcacctgccc

SEQ ID NO: 1982716 - DNA, 15 bp, Homo sapiens
ccaagcacctgccct

SEQ ID NO: 1982717 - DNA, 15 bp, Homo sapiens
caagcacctgccctg

SEQ ID NO: 1982718 - DNA, 15 bp, Homo sapiens
aagcacctgccctgg

SEQ ID NO: 1982719 - DNA, 15 bp, Homo sapiens
agcacctgccctggc

SEQ ID NO: 1982720 - DNA, 15 bp, Homo sapiens
gcacctgccctggct

SEQ ID NO: 1982721 - DNA, 15 bp, Homo sapiens
cacctgccctggctg

SEQ ID NO: 1982722 - DNA, 15 bp, Homo sapiens
acctgccctggctgc

SEQ ID NO: 1982723 - DNA, 15 bp, Homo sapiens
cctgccctggctgca

SEQ ID NO: 1982724 - DNA, 15 bp, Homo sapiens
ctgccctggctgcaa

SEQ ID NO: 1982725 - DNA, 15 bp, Homo sapiens
tgccctggctgcaag

SEQ ID NO: 1982726 - DNA, 15 bp, Homo sapiens
gccctggctgcaagg

SEQ ID NO: 1982727 - DNA, 15 bp, Homo sapiens
ccctggctgcaaggg

SEQ ID NO: 1982728 - DNA, 15 bp, Homo sapiens
cctggctgcaagggc

SEQ ID NO: 1982729 - DNA, 15 bp, Homo sapiens
ctggctgcaagggca

SEQ ID NO: 1982730 - DNA, 15 bp, Homo sapiens
tggctgcaagggcac

SEQ ID NO: 1982731 - DNA, 15 bp, Homo sapiens
ggctgcaagggcacg

SEQ ID NO: 1982732 - DNA, 15 bp, Homo sapiens
gctgcaagggcacgg

SEQ ID NO: 1982733 - DNA, 15 bp, Homo sapiens
ctgcaagggcacgga

SEQ ID NO: 1982734 - DNA, 15 bp, Homo sapiens
tgcaagggcacggac

SEQ ID NO: 1982735 - DNA, 15 bp, Homo sapiens
gcaagggcacggacc

SEQ ID NO: 1982736 - DNA, 15 bp, Homo sapiens
caagggcacggaccc

SEQ ID NO: 1982737 - DNA, 15 bp, Homo sapiens
aagggcacggaccct

SEQ ID NO: 1982738 - DNA, 15 bp, Homo sapiens
agggcacggaccctg

SEQ ID NO: 1982739 - DNA, 15 bp, Homo sapiens
gggcacggaccctgc

SEQ ID NO: 1982740 - DNA, 15 bp, Homo sapiens
ggcacggaccctgcc

SEQ ID NO: 1982741 - DNA, 15 bp, Homo sapiens
gcacggaccctgcca

SEQ ID NO: 1982742 - DNA, 15 bp, Homo sapiens
cacggaccctgccac

SEQ ID NO: 1982743 - DNA, 15 bp, Homo sapiens
acggaccctgccacg

SEQ ID NO: 1982744 - DNA, 15 bp, Homo sapiens
cggaccctgccacgc

SEQ ID NO: 1982745 - DNA, 15 bp, Homo sapiens
ggaccctgccacgcc

SEQ ID NO: 1982746 - DNA, 15 bp, Homo sapiens
gaccctgccacgccc

SEQ ID NO: 1982747 - DNA, 15 bp, Homo sapiens
accctgccacgccca

SEQ ID NO: 1982748 - DNA, 15 bp, Homo sapiens
ccctgccacgcccag

SEQ ID NO: 1982749 - DNA, 15 bp, Homo sapiens
cctgccacgcccaga

SEQ ID NO: 1982750 - DNA, 15 bp, Homo sapiens
ctgccacgcccagat

SEQ ID NO: 1982751 - DNA, 15 bp, Homo sapiens
tgccacgcccagatg

SEQ ID NO: 1982752 - DNA, 15 bp, Homo sapiens
gccacgcccagatgg

SEQ ID NO: 1982753 - DNA, 15 bp, Homo sapiens
ccacgcccagatggg

SEQ ID NO: 1982754 - DNA, 15 bp, Homo sapiens
cacgcccagatgggc

SEQ ID NO: 1982755 - DNA, 15 bp, Homo sapiens
acgcccagatgggca

SEQ ID NO: 1982756 - DNA, 15 bp, Homo sapiens
cgcccagatgggcaa

SEQ ID NO: 1982757 - DNA, 15 bp, Homo sapiens
gcccagatgggcaat

SEQ ID NO: 1982758 - DNA, 15 bp, Homo sapiens
cccagatgggcaata

SEQ ID NO: 1982759 - DNA, 15 bp, Homo sapiens
ccagatgggcaatag

SEQ ID NO: 1982760 - DNA, 15 bp, Homo sapiens
cagatgggcaatagc

SEQ ID NO: 1982761 - DNA, 15 bp, Homo sapiens
agatgggcaatagct

SEQ ID NO: 1982762 - DNA, 15 bp, Homo sapiens
gatgggcaatagctt

SEQ ID NO: 1982763 - DNA, 15 bp, Homo sapiens
atgggcaatagcttc

SEQ ID NO: 1982764 - DNA, 15 bp, Homo sapiens
tgggcaatagcttcc

SEQ ID NO: 1982765 - DNA, 15 bp, Homo sapiens
gggcaatagcttcca

SEQ ID NO: 1982766 - DNA, 15 bp, Homo sapiens
ggcaatagcttccag

SEQ ID NO: 1982767 - DNA, 15 bp, Homo sapiens
gcaatagcttccaga

SEQ ID NO: 1982768 - DNA, 15 bp, Homo sapiens
caatagcttccagaa

SEQ ID NO: 1982769 - DNA, 15 bp, Homo sapiens
aatagcttccagaag

SEQ ID NO: 1982770 - DNA, 15 bp, Homo sapiens
atagcttccagaagg

SEQ ID NO: 1982771 - DNA, 15 bp, Homo sapiens
tagcttccagaaggc

SEQ ID NO: 1982772 - DNA, 15 bp, Homo sapiens
agcttccagaaggct

SEQ ID NO: 1982773 - DNA, 15 bp, Homo sapiens
gcttccagaaggctg

SEQ ID NO: 1982774 - DNA, 15 bp, Homo sapiens
cttccagaaggctgg

SEQ ID NO: 1982775 - DNA, 15 bp, Homo sapiens
ttccagaaggctggg

SEQ ID NO: 1982776 - DNA, 15 bp, Homo sapiens
tccagaaggctggga

SEQ ID NO: 1982777 - DNA, 15 bp, Homo sapiens
ccagaaggctgggag

SEQ ID NO: 1982778 - DNA, 15 bp, Homo sapiens
cagaaggctgggagg

SEQ ID NO: 1982779 - DNA, 15 bp, Homo sapiens
agaaggctgggagga

SEQ ID NO: 1982780 - DNA, 15 bp, Homo sapiens
gaaggctgggaggac

SEQ ID NO: 1982781 - DNA, 15 bp, Homo sapiens
aaggctgggaggaca

SEQ ID NO: 1982782 - DNA, 15 bp, Homo sapiens
aggctgggaggacac

SEQ ID NO: 1982783 - DNA, 15 bp, Homo sapiens
ggctgggaggacaca

SEQ ID NO: 1982784 - DNA, 15 bp, Homo sapiens
gctgggaggacacag

SEQ ID NO: 1982785 - DNA, 15 bp, Homo sapiens
ctgggaggacacagt

SEQ ID NO: 1982786 - DNA, 15 bp, Homo sapiens
tgggaggacacagtg

SEQ ID NO: 1982787 - DNA, 15 bp, Homo sapiens
gggaggacacagtga

SEQ ID NO: 1982788 - DNA, 15 bp, Homo sapiens
ggaggacacagtgac

SEQ ID NO: 1982789 - DNA, 15 bp, Homo sapiens
gaggacacagtgaca

SEQ ID NO: 1982790 - DNA, 15 bp, Homo sapiens
aggacacagtgacat

SEQ ID NO: 1982791 - DNA, 15 bp, Homo sapiens
ggacacagtgacatg

SEQ ID NO: 1982792 - DNA, 15 bp, Homo sapiens
gacacagtgacatgg

SEQ ID NO: 1982793 - DNA, 15 bp, Homo sapiens
acacagtgacatggc

SEQ ID NO: 1982794 - DNA, 15 bp, Homo sapiens
cacagtgacatggcc

SEQ ID NO: 1982795 - DNA, 15 bp, Homo sapiens
acagtgacatggcct

SEQ ID NO: 1982796 - DNA, 15 bp, Homo sapiens
cagtgacatggcctc

SEQ ID NO: 1982797 - DNA, 15 bp, Homo sapiens
agtgacatggcctcc

SEQ ID NO: 1982798 - DNA, 15 bp, Homo sapiens
gtgacatggcctcct

SEQ ID NO: 1982799 - DNA, 15 bp, Homo sapiens
tgacatggcctcctc

SEQ ID NO: 1982800 - DNA, 15 bp, Homo sapiens
gacatggcctcctct

SEQ ID NO: 1982801 - DNA, 15 bp, Homo sapiens
acatggcctcctctt

SEQ ID NO: 1982802 - DNA, 15 bp, Homo sapiens
catggcctcctcttc

SEQ ID NO: 1982803 - DNA, 15 bp, Homo sapiens
atggcctcctcttct

SEQ ID NO: 1982804 - DNA, 15 bp, Homo sapiens
tggcctcctcttctg

SEQ ID NO: 1982805 - DNA, 15 bp, Homo sapiens
ggcctcctcttctgc

SEQ ID NO: 1982806 - DNA, 15 bp, Homo sapiens
gcctcctcttctgca

SEQ ID NO: 1982807 - DNA, 15 bp, Homo sapiens
cctcctcttctgcag

SEQ ID NO: 1982808 - DNA, 15 bp, Homo sapiens
ctcctcttctgcagt

SEQ ID NO: 1982809 - DNA, 15 bp, Homo sapiens
tcctcttctgcagtg

SEQ ID NO: 1982810 - DNA, 15 bp, Homo sapiens
cctcttctgcagtgc

SEQ ID NO: 1982811 - DNA, 15 bp, Homo sapiens
ctcttctgcagtgcc

SEQ ID NO: 1982812 - DNA, 15 bp, Homo sapiens
tcttctgcagtgcct

SEQ ID NO: 1982813 - DNA, 15 bp, Homo sapiens
cttctgcagtgcctc

SEQ ID NO: 1982814 - DNA, 15 bp, Homo sapiens
ttctgcagtgcctca

SEQ ID NO: 1982815 - DNA, 15 bp, Homo sapiens
tctgcagtgcctcag

SEQ ID NO: 1982816 - DNA, 15 bp, Homo sapiens
ctgcagtgcctcagt

SEQ ID NO: 1982817 - DNA, 15 bp, Homo sapiens
tgcagtgcctcagtg

SEQ ID NO: 1982818 - DNA, 15 bp, Homo sapiens
gcagtgcctcagtga

SEQ ID NO: 1982819 - DNA, 15 bp, Homo sapiens
cagtgcctcagtgac

SEQ ID NO: 1982820 - DNA, 15 bp, Homo sapiens
agtgcctcagtgacc

SEQ ID NO: 1982821 - DNA, 15 bp, Homo sapiens
gtgcctcagtgacca

SEQ ID NO: 1982822 - DNA, 15 bp, Homo sapiens
tgcctcagtgaccag

SEQ ID NO: 1982823 - DNA, 15 bp, Homo sapiens
gcctcagtgaccagg

SEQ ID NO: 1982824 - DNA, 15 bp, Homo sapiens
cctcagtgaccaggc

SEQ ID NO: 1982825 - DNA, 15 bp, Homo sapiens
ctcagtgaccaggct

SEQ ID NO: 1982826 - DNA, 15 bp, Homo sapiens
tcagtgaccaggctg

SEQ ID NO: 1982827 - DNA, 15 bp, Homo sapiens
cagtgaccaggctgg

SEQ ID NO: 1982828 - DNA, 15 bp, Homo sapiens
agtgaccaggctggc

SEQ ID NO: 1982829 - DNA, 15 bp, Homo sapiens
gtgaccaggctggct

SEQ ID NO: 1982830 - DNA, 15 bp, Homo sapiens
tgaccaggctggctc

SEQ ID NO: 1982831 - DNA, 15 bp, Homo sapiens
gaccaggctggctcc

SEQ ID NO: 1982832 - DNA, 15 bp, Homo sapiens
accaggctggctcct

SEQ ID NO: 1982833 - DNA, 15 bp, Homo sapiens
ccaggctggctcctg

SEQ ID NO: 1982834 - DNA, 15 bp, Homo sapiens
caggctggctcctgg

SEQ ID NO: 1982835 - DNA, 15 bp, Homo sapiens
aggctggctcctggg

SEQ ID NO: 1982836 - DNA, 15 bp, Homo sapiens
ggctggctcctgggg

SEQ ID NO: 1982837 - DNA, 15 bp, Homo sapiens
gctggctcctgggga

SEQ ID NO: 1982838 - DNA, 15 bp, Homo sapiens
ctggctcctggggat

SEQ ID NO: 1982839 - DNA, 15 bp, Homo sapiens
tggctcctggggatg

SEQ ID NO: 1982840 - DNA, 15 bp, Homo sapiens
ggctcctggggatgg

SEQ ID NO: 1982841 - DNA, 15 bp, Homo sapiens
gctcctggggatggc

SEQ ID NO: 1982842 - DNA, 15 bp, Homo sapiens
ctcctggggatggcc

SEQ ID NO: 1982843 - DNA, 15 bp, Homo sapiens
tcctggggatggcca

SEQ ID NO: 1982844 - DNA, 15 bp, Homo sapiens
cctggggatggccag

SEQ ID NO: 1982845 - DNA, 15 bp, Homo sapiens
ctggggatggccagg

SEQ ID NO: 1982846 - DNA, 15 bp, Homo sapiens
tggggatggccaggt

SEQ ID NO: 1982847 - DNA, 15 bp, Homo sapiens
ggggatggccaggta

SEQ ID NO: 1982848 - DNA, 15 bp, Homo sapiens
gggatggccaggtat

SEQ ID NO: 1982849 - DNA, 15 bp, Homo sapiens
ggatggccaggtatg

SEQ ID NO: 1982850 - DNA, 15 bp, Homo sapiens
gatggccaggtatgt

SEQ ID NO: 1982851 - DNA, 15 bp, Homo sapiens
atggccaggtatgta

SEQ ID NO: 1982852 - DNA, 15 bp, Homo sapiens
tggccaggtatgtac

SEQ ID NO: 1982853 - DNA, 15 bp, Homo sapiens
ggccaggtatgtacc

SEQ ID NO: 1982854 - DNA, 15 bp, Homo sapiens
gccaggtatgtacca

SEQ ID NO: 1982855 - DNA, 15 bp, Homo sapiens
ccaggtatgtaccac

SEQ ID NO: 1982856 - DNA, 15 bp, Homo sapiens
caggtatgtaccacc

SEQ ID NO: 1982857 - DNA, 15 bp, Homo sapiens
aggtatgtaccaccc

SEQ ID NO: 1982858 - DNA, 15 bp, Homo sapiens
ggtatgtaccacccg

SEQ ID NO: 1982859 - DNA, 15 bp, Homo sapiens
gtatgtaccacccga

SEQ ID NO: 1982860 - DNA, 15 bp, Homo sapiens
tatgtaccacccgac

SEQ ID NO: 1982861 - DNA, 15 bp, Homo sapiens
atgtaccacccgaca

SEQ ID NO: 1982862 - DNA, 15 bp, Homo sapiens
tgtaccacccgacac

SEQ ID NO: 1982863 - DNA, 15 bp, Homo sapiens
gtaccacccgacacc

SEQ ID NO: 1982864 - DNA, 15 bp, Homo sapiens
taccacccgacaccc

SEQ ID NO: 1982865 - DNA, 15 bp, Homo sapiens
accacccgacaccca

SEQ ID NO: 1982866 - DNA, 15 bp, Homo sapiens
ccacccgacacccag

SEQ ID NO: 1982867 - DNA, 15 bp, Homo sapiens
cacccgacacccagg

SEQ ID NO: 1982868 - DNA, 15 bp, Homo sapiens
acccgacacccaggg

SEQ ID NO: 1982869 - DNA, 15 bp, Homo sapiens
cccgacacccagggc

SEQ ID NO: 1982870 - DNA, 15 bp, Homo sapiens
ccgacacccagggca

SEQ ID NO: 1982871 - DNA, 15 bp, Homo sapiens
cgacacccagggcac

SEQ ID NO: 1982872 - DNA, 15 bp, Homo sapiens
gacacccagggcaca

SEQ ID NO: 1982873 - DNA, 15 bp, Homo sapiens
acacccagggcacaa

SEQ ID NO: 1982874 - DNA, 15 bp, Homo sapiens
cacccagggcacaag

SEQ ID NO: 1982875 - DNA, 15 bp, Homo sapiens
acccagggcacaagt

SEQ ID NO: 1982876 - DNA, 15 bp, Homo sapiens
cccagggcacaagtc

SEQ ID NO: 1982877 - DNA, 15 bp, Homo sapiens
ccagggcacaagtca

SEQ ID NO: 1982878 - DNA, 15 bp, Homo sapiens
cagggcacaagtcag

SEQ ID NO: 1982879 - DNA, 15 bp, Homo sapiens
agggcacaagtcagt

SEQ ID NO: 1982880 - DNA, 15 bp, Homo sapiens
gggcacaagtcagtg

SEQ ID NO: 1982881 - DNA, 15 bp, Homo sapiens
ggcacaagtcagtgg

SEQ ID NO: 1982882 - DNA, 15 bp, Homo sapiens
gcacaagtcagtggc

SEQ ID NO: 1982883 - DNA, 15 bp, Homo sapiens
cacaagtcagtggct

SEQ ID NO: 1982884 - DNA, 15 bp, Homo sapiens
acaagtcagtggctg

SEQ ID NO: 1982885 - DNA, 15 bp, Homo sapiens
caagtcagtggctga

SEQ ID NO: 1982886 - DNA, 15 bp, Homo sapiens
aagtcagtggctgag

SEQ ID NO: 1982887 - DNA, 15 bp, Homo sapiens
agtcagtggctgagc

SEQ ID NO: 1982888 - DNA, 15 bp, Homo sapiens
gtcagtggctgagcc

SEQ ID NO: 1982889 - DNA, 15 bp, Homo sapiens
tcagtggctgagccc

SEQ ID NO: 1982890 - DNA, 15 bp, Homo sapiens
cagtggctgagccct

SEQ ID NO: 1982891 - DNA, 15 bp, Homo sapiens
agtggctgagccctg

SEQ ID NO: 1982892 - DNA, 15 bp, Homo sapiens
gtggctgagccctgg

SEQ ID NO: 1982893 - DNA, 15 bp, Homo sapiens
tggctgagccctggc

SEQ ID NO: 1982894 - DNA, 15 bp, Homo sapiens
ggctgagccctggcc

SEQ ID NO: 1982895 - DNA, 15 bp, Homo sapiens
gctgagccctggccc

SEQ ID NO: 1982896 - DNA, 15 bp, Homo sapiens
ctgagccctggccct

SEQ ID NO: 1982897 - DNA, 15 bp, Homo sapiens
tgagccctggccctt

SEQ ID NO: 1982898 - DNA, 15 bp, Homo sapiens
gagccctggcccttg

SEQ ID NO: 1982899 - DNA, 15 bp, Homo sapiens
agccctggcccttgg

SEQ ID NO: 1982900 - DNA, 15 bp, Homo sapiens
gccctggcccttggt

SEQ ID NO: 1982901 - DNA, 15 bp, Homo sapiens
ccctggcccttggtc

SEQ ID NO: 1982902 - DNA, 15 bp, Homo sapiens
cctggcccttggtcc

SEQ ID NO: 1982903 - DNA, 15 bp, Homo sapiens
ctggcccttggtcct

SEQ ID NO: 1982904 - DNA, 15 bp, Homo sapiens
tggcccttggtcctg

SEQ ID NO: 1982905 - DNA, 15 bp, Homo sapiens
ggcccttggtcctgg

SEQ ID NO: 1982906 - DNA, 15 bp, Homo sapiens
gcccttggtcctggg

SEQ ID NO: 1982907 - DNA, 15 bp, Homo sapiens
cccttggtcctgggg

SEQ ID NO: 1982908 - DNA, 15 bp, Homo sapiens
ccttggtcctggggc

SEQ ID NO: 1982909 - DNA, 15 bp, Homo sapiens
cttggtcctggggca

SEQ ID NO: 1982910 - DNA, 15 bp, Homo sapiens
ttggtcctggggcag

SEQ ID NO: 1982911 - DNA, 15 bp, Homo sapiens
tggtcctggggcagc

SEQ ID NO: 1982912 - DNA, 15 bp, Homo sapiens
ggtcctggggcagcc

SEQ ID NO: 1982913 - DNA, 15 bp, Homo sapiens
gtcctggggcagcca

SEQ ID NO: 1982914 - DNA, 15 bp, Homo sapiens
tcctggggcagccat

SEQ ID NO: 1982915 - DNA, 15 bp, Homo sapiens
cctggggcagccatc

SEQ ID NO: 1982916 - DNA, 15 bp, Homo sapiens
ctggggcagccatca

SEQ ID NO: 1982917 - DNA, 15 bp, Homo sapiens
tggggcagccatcag

SEQ ID NO: 1982918 - DNA, 15 bp, Homo sapiens
ggggcagccatcagt

SEQ ID NO: 1982919 - DNA, 15 bp, Homo sapiens
gggcagccatcagta

SEQ ID NO: 1982920 - DNA, 15 bp, Homo sapiens
ggcagccatcagtaa

SEQ ID NO: 1982921 - DNA, 15 bp, Homo sapiens
gcagccatcagtaaa

SEQ ID NO: 1982922 - DNA, 15 bp, Homo sapiens
cagccatcagtaaat

SEQ ID NO: 1982923 - DNA, 15 bp, Homo sapiens
agccatcagtaaatg

SEQ ID NO: 1982924 - DNA, 15 bp, Homo sapiens
gccatcagtaaatgg

SEQ ID NO: 1982925 - DNA, 15 bp, Homo sapiens
ccatcagtaaatggg

SEQ ID NO: 1982926 - DNA, 15 bp, Homo sapiens
catcagtaaatggga

SEQ ID NO: 1982927 - DNA, 15 bp, Homo sapiens
atcagtaaatgggag

SEQ ID NO: 1982928 - DNA, 15 bp, Homo sapiens
tcagtaaatgggagg

SEQ ID NO: 1982929 - DNA, 15 bp, Homo sapiens
cagtaaatgggaggc

SEQ ID NO: 1982930 - DNA, 15 bp, Homo sapiens
agtaaatgggaggct

SEQ ID NO: 1982931 - DNA, 15 bp, Homo sapiens
gtaaatgggaggctg

SEQ ID NO: 1982932 - DNA, 15 bp, Homo sapiens
taaatgggaggctgt

SEQ ID NO: 1982933 - DNA, 15 bp, Homo sapiens
aaatgggaggctgta

SEQ ID NO: 1982934 - DNA, 15 bp, Homo sapiens
aatgggaggctgtag

SEQ ID NO: 1982935 - DNA, 15 bp, Homo sapiens
atgggaggctgtagg

SEQ ID NO: 1982936 - DNA, 15 bp, Homo sapiens
tgggaggctgtaggg

SEQ ID NO: 1982937 - DNA, 15 bp, Homo sapiens
gggaggctgtagggg

SEQ ID NO: 1982938 - DNA, 15 bp, Homo sapiens
ggaggctgtaggggc

SEQ ID NO: 1982939 - DNA, 15 bp, Homo sapiens
gaggctgtaggggcc

SEQ ID NO: 1982940 - DNA, 15 bp, Homo sapiens
aggctgtaggggccc

SEQ ID NO: 1982941 - DNA, 15 bp, Homo sapiens
ggctgtaggggccct

SEQ ID NO: 1982942 - DNA, 15 bp, Homo sapiens
gctgtaggggccctc

SEQ ID NO: 1982943 - DNA, 15 bp, Homo sapiens
ctgtaggggccctcc

SEQ ID NO: 1982944 - DNA, 15 bp, Homo sapiens
tgtaggggccctcca

SEQ ID NO: 1982945 - DNA, 15 bp, Homo sapiens
gtaggggccctccat

SEQ ID NO: 1982946 - DNA, 15 bp, Homo sapiens
taggggccctccatt

SEQ ID NO: 1982947 - DNA, 15 bp, Homo sapiens
aggggccctccattc

SEQ ID NO: 1982948 - DNA, 15 bp, Homo sapiens
ggggccctccattca

SEQ ID NO: 1982949 - DNA, 15 bp, Homo sapiens
gggccctccattcac

SEQ ID NO: 1982950 - DNA, 15 bp, Homo sapiens
ggccctccattcact

SEQ ID NO: 1982951 - DNA, 15 bp, Homo sapiens
gccctccattcactc

SEQ ID NO: 1982952 - DNA, 15 bp, Homo sapiens
ccctccattcactcg

SEQ ID NO: 1982953 - DNA, 15 bp, Homo sapiens
cctccattcactcgt

SEQ ID NO: 1982954 - DNA, 15 bp, Homo sapiens
ctccattcactcgta

SEQ ID NO: 1982955 - DNA, 15 bp, Homo sapiens
tccattcactcgtaa

SEQ ID NO: 1982956 - DNA, 15 bp, Homo sapiens
ccattcactcgtaag

SEQ ID NO: 1982957 - DNA, 15 bp, Homo sapiens
cattcactcgtaaga

SEQ ID NO: 1982958 - DNA, 15 bp, Homo sapiens
attcactcgtaagat

SEQ ID NO: 1982959 - DNA, 15 bp, Homo sapiens
ttcactcgtaagata

SEQ ID NO: 1982960 - DNA, 15 bp, Homo sapiens
tcactcgtaagataa

SEQ ID NO: 1982961 - DNA, 15 bp, Homo sapiens
cactcgtaagataac

SEQ ID NO: 1982962 - DNA, 15 bp, Homo sapiens
actcgtaagataacc

SEQ ID NO: 1982963 - DNA, 15 bp, Homo sapiens
ctcgtaagataacct

SEQ ID NO: 1982964 - DNA, 15 bp, Homo sapiens
tcgtaagataacctg

SEQ ID NO: 1982965 - DNA, 15 bp, Homo sapiens
cgtaagataacctgt

SEQ ID NO: 1982966 - DNA, 15 bp, Homo sapiens
gtaagataacctgtg

SEQ ID NO: 1982967 - DNA, 15 bp, Homo sapiens
taagataacctgtgt

SEQ ID NO: 1982968 - DNA, 15 bp, Homo sapiens
aagataacctgtgtt

SEQ ID NO: 1982969 - DNA, 15 bp, Homo sapiens
agataacctgtgttg

SEQ ID NO: 1982970 - DNA, 15 bp, Homo sapiens
gataacctgtgttgc

SEQ ID NO: 1982971 - DNA, 15 bp, Homo sapiens
ataacctgtgttgca

SEQ ID NO: 1982972 - DNA, 15 bp, Homo sapiens
taacctgtgttgcag

SEQ ID NO: 1982973 - DNA, 15 bp, Homo sapiens
aacctgtgttgcagg

SEQ ID NO: 1982974 - DNA, 15 bp, Homo sapiens
acctgtgttgcaggt

SEQ ID NO: 1982975 - DNA, 15 bp, Homo sapiens
cctgtgttgcaggta

SEQ ID NO: 1982976 - DNA, 15 bp, Homo sapiens
ctgtgttgcaggtac

SEQ ID NO: 1982977 - DNA, 15 bp, Homo sapiens
tgtgttgcaggtaca

SEQ ID NO: 1982978 - DNA, 15 bp, Homo sapiens
gtgttgcaggtacaa

SEQ ID NO: 1982979 - DNA, 15 bp, Homo sapiens
tgttgcaggtacaac

SEQ ID NO: 1982980 - DNA, 15 bp, Homo sapiens
gttgcaggtacaacc

SEQ ID NO: 1982981 - DNA, 15 bp, Homo sapiens
ttgcaggtacaaccg

SEQ ID NO: 1982982 - DNA, 15 bp, Homo sapiens
tgcaggtacaaccgg

SEQ ID NO: 1982983 - DNA, 15 bp, Homo sapiens
gcaggtacaaccgga

SEQ ID NO: 1982984 - DNA, 15 bp, Homo sapiens
caggtacaaccggat

SEQ ID NO: 1982985 - DNA, 15 bp, Homo sapiens
aggtacaaccggatg

SEQ ID NO: 1982986 - DNA, 15 bp, Homo sapiens
ggtacaaccggatgc

SEQ ID NO: 1982987 - DNA, 15 bp, Homo sapiens
gtacaaccggatgcc

SEQ ID NO: 1982988 - DNA, 15 bp, Homo sapiens
tacaaccggatgcca

SEQ ID NO: 1982989 - DNA, 15 bp, Homo sapiens
acaaccggatgccag

SEQ ID NO: 1982990 - DNA, 15 bp, Homo sapiens
caaccggatgccagc

SEQ ID NO: 1982991 - DNA, 15 bp, Homo sapiens
aaccggatgccagcc

SEQ ID NO: 1982992 - DNA, 15 bp, Homo sapiens
accggatgccagccc

SEQ ID NO: 1982993 - DNA, 15 bp, Homo sapiens
ccggatgccagcccc

SEQ ID NO: 1982994 - DNA, 15 bp, Homo sapiens
cggatgccagccccg

SEQ ID NO: 1982995 - DNA, 15 bp, Homo sapiens
ggatgccagccccgt

SEQ ID NO: 1982996 - DNA, 15 bp, Homo sapiens
gatgccagccccgtg

SEQ ID NO: 1982997 - DNA, 15 bp, Homo sapiens
atgccagccccgtgc

SEQ ID NO: 1982998 - DNA, 15 bp, Homo sapiens
tgccagccccgtgcc

SEQ ID NO: 1982999 - DNA, 15 bp, Homo sapiens
gccagccccgtgcca

SEQ ID NO: 1983000 - DNA, 15 bp, Homo sapiens
ccagccccgtgccag

SEQ ID NO: 1983001 - DNA, 15 bp, Homo sapiens
cagccccgtgccagg

SEQ ID NO: 1983002 - DNA, 15 bp, Homo sapiens
agccccgtgccagga

SEQ ID NO: 1983003 - DNA, 15 bp, Homo sapiens
gccccgtgccaggag

SEQ ID NO: 1983004 - DNA, 15 bp, Homo sapiens
ccccgtgccaggagc

SEQ ID NO: 1983005 - DNA, 15 bp, Homo sapiens
cccgtgccaggagcc

SEQ ID NO: 1983006 - DNA, 15 bp, Homo sapiens
ccgtgccaggagcct

SEQ ID NO: 1983007 - DNA, 15 bp, Homo sapiens
cgtgccaggagcctg

SEQ ID NO: 1983008 - DNA, 15 bp, Homo sapiens
gtgccaggagcctgg

SEQ ID NO: 1983009 - DNA, 15 bp, Homo sapiens
tgccaggagcctgga

SEQ ID NO: 1983010 - DNA, 15 bp, Homo sapiens
gccaggagcctggag

SEQ ID NO: 1983011 - DNA, 15 bp, Homo sapiens
ccaggagcctggagg

SEQ ID NO: 1983012 - DNA, 15 bp, Homo sapiens
caggagcctggaggg

SEQ ID NO: 1983013 - DNA, 15 bp, Homo sapiens
aggagcctggaggga

SEQ ID NO: 1983014 - DNA, 15 bp, Homo sapiens
ggagcctggagggaa

SEQ ID NO: 1983015 - DNA, 15 bp, Homo sapiens
gagcctggagggaag

SEQ ID NO: 1983016 - DNA, 15 bp, Homo sapiens
agcctggagggaagt

SEQ ID NO: 1983017 - DNA, 15 bp, Homo sapiens
gcctggagggaagtt

SEQ ID NO: 1983018 - DNA, 15 bp, Homo sapiens
cctggagggaagttg

SEQ ID NO: 1983019 - DNA, 15 bp, Homo sapiens
ctggagggaagttgg

SEQ ID NO: 1983020 - DNA, 15 bp, Homo sapiens
tggagggaagttggg

SEQ ID NO: 1983021 - DNA, 15 bp, Homo sapiens
ggagggaagttgggg

SEQ ID NO: 1983022 - DNA, 15 bp, Homo sapiens
gagggaagttgggga

SEQ ID NO: 1983023 - DNA, 15 bp, Homo sapiens
agggaagttggggaa

SEQ ID NO: 1983024 - DNA, 15 bp, Homo sapiens
gggaagttggggaaa

SEQ ID NO: 1983025 - DNA, 15 bp, Homo sapiens
ggaagttggggaaac

SEQ ID NO: 1983026 - DNA, 15 bp, Homo sapiens
gaagttggggaaacc

SEQ ID NO: 1983027 - DNA, 15 bp, Homo sapiens
aagttggggaaaccc

SEQ ID NO: 1983028 - DNA, 15 bp, Homo sapiens
agttggggaaacccc

SEQ ID NO: 1983029 - DNA, 15 bp, Homo sapiens
gttggggaaacccct

SEQ ID NO: 1983030 - DNA, 15 bp, Homo sapiens
ttggggaaacccctc

SEQ ID NO: 1983031 - DNA, 15 bp, Homo sapiens
tggggaaacccctcc

SEQ ID NO: 1983032 - DNA, 15 bp, Homo sapiens
ggggaaacccctccc

SEQ ID NO: 1983033 - DNA, 15 bp, Homo sapiens
gggaaacccctccct

SEQ ID NO: 1983034 - DNA, 15 bp, Homo sapiens
ggaaacccctcccta

SEQ ID NO: 1983035 - DNA, 15 bp, Homo sapiens
gaaacccctccctac

SEQ ID NO: 1983036 - DNA, 15 bp, Homo sapiens
aaacccctccctact

SEQ ID NO: 1983037 - DNA, 15 bp, Homo sapiens
aacccctccctactg

SEQ ID NO: 1983038 - DNA, 15 bp, Homo sapiens
acccctccctactgt

SEQ ID NO: 1983039 - DNA, 15 bp, Homo sapiens
cccctccctactgtt

SEQ ID NO: 1983040 - DNA, 15 bp, Homo sapiens
ccctccctactgttg

SEQ ID NO: 1983041 - DNA, 15 bp, Homo sapiens
cctccctactgttgg

SEQ ID NO: 1983042 - DNA, 15 bp, Homo sapiens
ctccctactgttgga

SEQ ID NO: 1983043 - DNA, 15 bp, Homo sapiens
tccctactgttggat

SEQ ID NO: 1983044 - DNA, 15 bp, Homo sapiens
ccctactgttggatg

SEQ ID NO: 1983045 - DNA, 15 bp, Homo sapiens
cctactgttggatgt

SEQ ID NO: 1983046 - DNA, 15 bp, Homo sapiens
ctactgttggatgta

SEQ ID NO: 1983047 - DNA, 15 bp, Homo sapiens
tactgttggatgtat

SEQ ID NO: 1983048 - DNA, 15 bp, Homo sapiens
actgttggatgtatg

SEQ ID NO: 1983049 - DNA, 15 bp, Homo sapiens
ctgttggatgtatgt

SEQ ID NO: 1983050 - DNA, 15 bp, Homo sapiens
tgttggatgtatgtg

SEQ ID NO: 1983051 - DNA, 15 bp, Homo sapiens
gttggatgtatgtgt

SEQ ID NO: 1983052 - DNA, 15 bp, Homo sapiens
ttggatgtatgtgtg

SEQ ID NO: 1983053 - DNA, 15 bp, Homo sapiens
tggatgtatgtgtga

SEQ ID NO: 1983054 - DNA, 15 bp, Homo sapiens
ggatgtatgtgtgac

SEQ ID NO: 1983055 - DNA, 15 bp, Homo sapiens
gatgtatgtgtgaca

SEQ ID NO: 1983056 - DNA, 15 bp, Homo sapiens
atgtatgtgtgacaa

SEQ ID NO: 1983057 - DNA, 15 bp, Homo sapiens
tgtatgtgtgacaag

SEQ ID NO: 1983058 - DNA, 15 bp, Homo sapiens
gtatgtgtgacaagt

SEQ ID NO: 1983059 - DNA, 15 bp, Homo sapiens
tatgtgtgacaagtg

SEQ ID NO: 1983060 - DNA, 15 bp, Homo sapiens
atgtgtgacaagtgt

SEQ ID NO: 1983061 - DNA, 15 bp, Homo sapiens
tgtgtgacaagtgtg

SEQ ID NO: 1983062 - DNA, 15 bp, Homo sapiens
gtgtgacaagtgtgt

SEQ ID NO: 1983063 - DNA, 15 bp, Homo sapiens
tgtgacaagtgtgtc

SEQ ID NO: 1983064 - DNA, 15 bp, Homo sapiens
gtgacaagtgtgtct

SEQ ID NO: 1983065 - DNA, 15 bp, Homo sapiens
tgacaagtgtgtctc

SEQ ID NO: 1983066 - DNA, 15 bp, Homo sapiens
gacaagtgtgtctcc

SEQ ID NO: 1983067 - DNA, 15 bp, Homo sapiens
acaagtgtgtctcct

SEQ ID NO: 1983068 - DNA, 15 bp, Homo sapiens
caagtgtgtctcctg

SEQ ID NO: 1983069 - DNA, 15 bp, Homo sapiens
aagtgtgtctcctgt

SEQ ID NO: 1983070 - DNA, 15 bp, Homo sapiens
agtgtgtctcctgtg

SEQ ID NO: 1983071 - DNA, 15 bp, Homo sapiens
gtgtgtctcctgtgc

SEQ ID NO: 1983072 - DNA, 15 bp, Homo sapiens
tgtgtctcctgtgct

SEQ ID NO: 1983073 - DNA, 15 bp, Homo sapiens
gtgtctcctgtgctg

SEQ ID NO: 1983074 - DNA, 15 bp, Homo sapiens
tgtctcctgtgctgc

SEQ ID NO: 1983075 - DNA, 15 bp, Homo sapiens
gtctcctgtgctgcg

SEQ ID NO: 1983076 - DNA, 15 bp, Homo sapiens
tctcctgtgctgcga

SEQ ID NO: 1983077 - DNA, 15 bp, Homo sapiens
ctcctgtgctgcgat

SEQ ID NO: 1983078 - DNA, 15 bp, Homo sapiens
tcctgtgctgcgatg

SEQ ID NO: 1983079 - DNA, 15 bp, Homo sapiens
cctgtgctgcgatgg

SEQ ID NO: 1983080 - DNA, 15 bp, Homo sapiens
ctgtgctgcgatggg

SEQ ID NO: 1983081 - DNA, 15 bp, Homo sapiens
tgtgctgcgatgggg

SEQ ID NO: 1983082 - DNA, 15 bp, Homo sapiens
gtgctgcgatggggg

SEQ ID NO: 1983083 - DNA, 15 bp, Homo sapiens
tgctgcgatggggga

SEQ ID NO: 1983084 - DNA, 15 bp, Homo sapiens
gctgcgatgggggat

SEQ ID NO: 1983085 - DNA, 15 bp, Homo sapiens
ctgcgatgggggatc

SEQ ID NO: 1983086 - DNA, 15 bp, Homo sapiens
tgcgatgggggatca

SEQ ID NO: 1983087 - DNA, 15 bp, Homo sapiens
gcgatgggggatcag

SEQ ID NO: 1983088 - DNA, 15 bp, Homo sapiens
cgatgggggatcagc

SEQ ID NO: 1983089 - DNA, 15 bp, Homo sapiens
gatgggggatcagca

SEQ ID NO: 1983090 - DNA, 15 bp, Homo sapiens
atgggggatcagcag

SEQ ID NO: 1983091 - DNA, 15 bp, Homo sapiens
tgggggatcagcagg

SEQ ID NO: 1983092 - DNA, 15 bp, Homo sapiens
gggggatcagcaggg

SEQ ID NO: 1983093 - DNA, 15 bp, Homo sapiens
ggggatcagcagggc

SEQ ID NO: 1983094 - DNA, 15 bp, Homo sapiens
gggatcagcagggca

SEQ ID NO: 1983095 - DNA, 15 bp, Homo sapiens
ggatcagcagggcag

SEQ ID NO: 1983096 - DNA, 15 bp, Homo sapiens
gatcagcagggcagt

SEQ ID NO: 1983097 - DNA, 15 bp, Homo sapiens
atcagcagggcagtt

SEQ ID NO: 1983098 - DNA, 15 bp, Homo sapiens
tcagcagggcagttg

SEQ ID NO: 1983099 - DNA, 15 bp, Homo sapiens
cagcagggcagttgt

SEQ ID NO: 1983100 - DNA, 15 bp, Homo sapiens
agcagggcagttgtc

SEQ ID NO: 1983101 - DNA, 15 bp, Homo sapiens
gcagggcagttgtcg

SEQ ID NO: 1983102 - DNA, 15 bp, Homo sapiens
cagggcagttgtcgg

SEQ ID NO: 1983103 - DNA, 15 bp, Homo sapiens
agggcagttgtcggg

SEQ ID NO: 1983104 - DNA, 15 bp, Homo sapiens
gggcagttgtcgggc

SEQ ID NO: 1983105 - DNA, 15 bp, Homo sapiens
ggcagttgtcgggca

SEQ ID NO: 1983106 - DNA, 15 bp, Homo sapiens
gcagttgtcgggcag

SEQ ID NO: 1983107 - DNA, 15 bp, Homo sapiens
cagttgtcgggcagt

SEQ ID NO: 1983108 - DNA, 15 bp, Homo sapiens
agttgtcgggcagtc

SEQ ID NO: 1983109 - DNA, 15 bp, Homo sapiens
gttgtcgggcagtcc

SEQ ID NO: 1983110 - DNA, 15 bp, Homo sapiens
ttgtcgggcagtcct

SEQ ID NO: 1983111 - DNA, 15 bp, Homo sapiens
tgtcgggcagtcctg

SEQ ID NO: 1983112 - DNA, 15 bp, Homo sapiens
gtcgggcagtcctga

SEQ ID NO: 1983113 - DNA, 15 bp, Homo sapiens
tcgggcagtcctgag

SEQ ID NO: 1983114 - DNA, 15 bp, Homo sapiens
cgggcagtcctgagt

SEQ ID NO: 1983115 - DNA, 15 bp, Homo sapiens
gggcagtcctgagtg

SEQ ID NO: 1983116 - DNA, 15 bp, Homo sapiens
ggcagtcctgagtgg

SEQ ID NO: 1983117 - DNA, 15 bp, Homo sapiens
gcagtcctgagtggg

SEQ ID NO: 1983118 - DNA, 15 bp, Homo sapiens
cagtcctgagtgggt

SEQ ID NO: 1983119 - DNA, 15 bp, Homo sapiens
agtcctgagtgggtg

SEQ ID NO: 1983120 - DNA, 15 bp, Homo sapiens
gtcctgagtgggtgt

SEQ ID NO: 1983121 - DNA, 15 bp, Homo sapiens
tcctgagtgggtgtt

SEQ ID NO: 1983122 - DNA, 15 bp, Homo sapiens
cctgagtgggtgttg

SEQ ID NO: 1983123 - DNA, 15 bp, Homo sapiens
ctgagtgggtgttgc

SEQ ID NO: 1983124 - DNA, 15 bp, Homo sapiens
tgagtgggtgttgca

SEQ ID NO: 1983125 - DNA, 15 bp, Homo sapiens
gagtgggtgttgcac

SEQ ID NO: 1983126 - DNA, 15 bp, Homo sapiens
agtgggtgttgcaca

SEQ ID NO: 1983127 - DNA, 15 bp, Homo sapiens
gtgggtgttgcacag

SEQ ID NO: 1983128 - DNA, 15 bp, Homo sapiens
tgggtgttgcacaga

SEQ ID NO: 1983129 - DNA, 15 bp, Homo sapiens
gggtgttgcacagac

SEQ ID NO: 1983130 - DNA, 15 bp, Homo sapiens
ggtgttgcacagact

SEQ ID NO: 1983131 - DNA, 15 bp, Homo sapiens
gtgttgcacagactg

SEQ ID NO: 1983132 - DNA, 15 bp, Homo sapiens
tgttgcacagactgg

SEQ ID NO: 1983133 - DNA, 15 bp, Homo sapiens
gttgcacagactggt

SEQ ID NO: 1983134 - DNA, 15 bp, Homo sapiens
ttgcacagactggtc

SEQ ID NO: 1983135 - DNA, 15 bp, Homo sapiens
tgcacagactggtcc

SEQ ID NO: 1983136 - DNA, 15 bp, Homo sapiens
gcacagactggtcca

SEQ ID NO: 1983137 - DNA, 15 bp, Homo sapiens
cacagactggtccac

SEQ ID NO: 1983138 - DNA, 15 bp, Homo sapiens
acagactggtccaca

SEQ ID NO: 1983139 - DNA, 15 bp, Homo sapiens
cagactggtccacag

SEQ ID NO: 1983140 - DNA, 15 bp, Homo sapiens
agactggtccacagg

SEQ ID NO: 1983141 - DNA, 15 bp, Homo sapiens
gactggtccacaggg

SEQ ID NO: 1983142 - DNA, 15 bp, Homo sapiens
actggtccacagggc

SEQ ID NO: 1983143 - DNA, 15 bp, Homo sapiens
ctggtccacagggct

SEQ ID NO: 1983144 - DNA, 15 bp, Homo sapiens
tggtccacagggctc

SEQ ID NO: 1983145 - DNA, 15 bp, Homo sapiens
ggtccacagggctcc

SEQ ID NO: 1983146 - DNA, 15 bp, Homo sapiens
gtccacagggctcct

SEQ ID NO: 1983147 - DNA, 15 bp, Homo sapiens
tccacagggctcctg

SEQ ID NO: 1983148 - DNA, 15 bp, Homo sapiens
ccacagggctcctga

SEQ ID NO: 1983149 - DNA, 15 bp, Homo sapiens
cacagggctcctgaa

SEQ ID NO: 1983150 - DNA, 15 bp, Homo sapiens
acagggctcctgaag

SEQ ID NO: 1983151 - DNA, 15 bp, Homo sapiens
cagggctcctgaagg

SEQ ID NO: 1983152 - DNA, 15 bp, Homo sapiens
agggctcctgaagga

SEQ ID NO: 1983153 - DNA, 15 bp, Homo sapiens
gggctcctgaaggaa

SEQ ID NO: 1983154 - DNA, 15 bp, Homo sapiens
ggctcctgaaggaag

SEQ ID NO: 1983155 - DNA, 15 bp, Homo sapiens
gctcctgaaggaagc

SEQ ID NO: 1983156 - DNA, 15 bp, Homo sapiens
ctcctgaaggaagcc

SEQ ID NO: 1983157 - DNA, 15 bp, Homo sapiens
tcctgaaggaagccc

SEQ ID NO: 1983158 - DNA, 15 bp, Homo sapiens
cctgaaggaagcccc

SEQ ID NO: 1983159 - DNA, 15 bp, Homo sapiens
ctgaaggaagcccct

SEQ ID NO: 1983160 - DNA, 15 bp, Homo sapiens
tgaaggaagcccctg

SEQ ID NO: 1983161 - DNA, 15 bp, Homo sapiens
gaaggaagcccctgg

SEQ ID NO: 1983162 - DNA, 15 bp, Homo sapiens
aaggaagcccctgga

SEQ ID NO: 1983163 - DNA, 15 bp, Homo sapiens
aggaagcccctggat

SEQ ID NO: 1983164 - DNA, 15 bp, Homo sapiens
ggaagcccctggatc

SEQ ID NO: 1983165 - DNA, 15 bp, Homo sapiens
gaagcccctggatct

SEQ ID NO: 1983166 - DNA, 15 bp, Homo sapiens
aagcccctggatctt

SEQ ID NO: 1983167 - DNA, 15 bp, Homo sapiens
agcccctggatcttt

SEQ ID NO: 1983168 - DNA, 15 bp, Homo sapiens
gcccctggatctttg

SEQ ID NO: 1983169 - DNA, 15 bp, Homo sapiens
cccctggatctttgg

SEQ ID NO: 1983170 - DNA, 15 bp, Homo sapiens
ccctggatctttggg

SEQ ID NO: 1983171 - DNA, 15 bp, Homo sapiens
cctggatctttgggg

SEQ ID NO: 1983172 - DNA, 15 bp, Homo sapiens
ctggatctttggggt

SEQ ID NO: 1983173 - DNA, 15 bp, Homo sapiens
tggatctttggggta

SEQ ID NO: 1983174 - DNA, 15 bp, Homo sapiens
ggatctttggggtaa

SEQ ID NO: 1983175 - DNA, 15 bp, Homo sapiens
gatctttggggtaaa

SEQ ID NO: 1983176 - DNA, 15 bp, Homo sapiens
atctttggggtaaaa

SEQ ID NO: 1983177 - DNA, 15 bp, Homo sapiens
tctttggggtaaaag

SEQ ID NO: 1983178 - DNA, 15 bp, Homo sapiens
ctttggggtaaaagg

SEQ ID NO: 1983179 - DNA, 15 bp, Homo sapiens
tttggggtaaaagga

SEQ ID NO: 1983180 - DNA, 15 bp, Homo sapiens
ttggggtaaaaggag

SEQ ID NO: 1983181 - DNA, 15 bp, Homo sapiens
tggggtaaaaggagg

SEQ ID NO: 1983182 - DNA, 15 bp, Homo sapiens
ggggtaaaaggaggg

SEQ ID NO: 1983183 - DNA, 15 bp, Homo sapiens
gggtaaaaggagggt

SEQ ID NO: 1983184 - DNA, 15 bp, Homo sapiens
ggtaaaaggagggtg

SEQ ID NO: 1983185 - DNA, 15 bp, Homo sapiens
gtaaaaggagggtgg

SEQ ID NO: 1983186 - DNA, 15 bp, Homo sapiens
taaaaggagggtggc

SEQ ID NO: 1983187 - DNA, 15 bp, Homo sapiens
aaaaggagggtggcc

SEQ ID NO: 1983188 - DNA, 15 bp, Homo sapiens
aaaggagggtggcct

SEQ ID NO: 1983189 - DNA, 15 bp, Homo sapiens
aaggagggtggcctc

SEQ ID NO: 1983190 - DNA, 15 bp, Homo sapiens
aggagggtggcctca

SEQ ID NO: 1983191 - DNA, 15 bp, Homo sapiens
ggagggtggcctcaa

SEQ ID NO: 1983192 - DNA, 15 bp, Homo sapiens
gagggtggcctcaag

SEQ ID NO: 1983193 - DNA, 15 bp, Homo sapiens
agggtggcctcaaga

SEQ ID NO: 1983194 - DNA, 15 bp, Homo sapiens
gggtggcctcaagaa

SEQ ID NO: 1983195 - DNA, 15 bp, Homo sapiens
ggtggcctcaagaaa

SEQ ID NO: 1983196 - DNA, 15 bp, Homo sapiens
gtggcctcaagaaac

SEQ ID NO: 1983197 - DNA, 15 bp, Homo sapiens
tggcctcaagaaaca

SEQ ID NO: 1983198 - DNA, 15 bp, Homo sapiens
ggcctcaagaaacaa

SEQ ID NO: 1983199 - DNA, 15 bp, Homo sapiens
gcctcaagaaacaat

SEQ ID NO: 1983200 - DNA, 15 bp, Homo sapiens
cctcaagaaacaatg

SEQ ID NO: 1983201 - DNA, 15 bp, Homo sapiens
ctcaagaaacaatgt

SEQ ID NO: 1983202 - DNA, 15 bp, Homo sapiens
tcaagaaacaatgtc

SEQ ID NO: 1983203 - DNA, 15 bp, Homo sapiens
caagaaacaatgtct

SEQ ID NO: 1983204 - DNA, 15 bp, Homo sapiens
aagaaacaatgtctg

SEQ ID NO: 1983205 - DNA, 15 bp, Homo sapiens
agaaacaatgtctgg

SEQ ID NO: 1983206 - DNA, 15 bp, Homo sapiens
gaaacaatgtctggg

SEQ ID NO: 1983207 - DNA, 15 bp, Homo sapiens
aaacaatgtctgggg

SEQ ID NO: 1983208 - DNA, 15 bp, Homo sapiens
aacaatgtctgggga

SEQ ID NO: 1983209 - DNA, 15 bp, Homo sapiens
acaatgtctggggac

SEQ ID NO: 1983210 - DNA, 15 bp, Homo sapiens
caatgtctggggaca

SEQ ID NO: 1983211 - DNA, 15 bp, Homo sapiens
aatgtctggggacag

SEQ ID NO: 1983212 - DNA, 15 bp, Homo sapiens
atgtctggggacagg

SEQ ID NO: 1983213 - DNA, 15 bp, Homo sapiens
tgtctggggacaggc

SEQ ID NO: 1983214 - DNA, 15 bp, Homo sapiens
gtctggggacaggcc

SEQ ID NO: 1983215 - DNA, 15 bp, Homo sapiens
tctggggacaggcct

SEQ ID NO: 1983216 - DNA, 15 bp, Homo sapiens
ctggggacaggcctt

SEQ ID NO: 1983217 - DNA, 15 bp, Homo sapiens
tggggacaggccttt

SEQ ID NO: 1983218 - DNA, 15 bp, Homo sapiens
ggggacaggcctttc

SEQ ID NO: 1983219 - DNA, 15 bp, Homo sapiens
gggacaggcctttct

SEQ ID NO: 1983220 - DNA, 15 bp, Homo sapiens
ggacaggcctttctg

SEQ ID NO: 1983221 - DNA, 15 bp, Homo sapiens
gacaggcctttctgg

SEQ ID NO: 1983222 - DNA, 15 bp, Homo sapiens
acaggcctttctggc

SEQ ID NO: 1983223 - DNA, 15 bp, Homo sapiens
caggcctttctggcc

SEQ ID NO: 1983224 - DNA, 15 bp, Homo sapiens
aggcctttctggcct

SEQ ID NO: 1983225 - DNA, 15 bp, Homo sapiens
ggcctttctggcctg

SEQ ID NO: 1983226 - DNA, 15 bp, Homo sapiens
gcctttctggcctgc

SEQ ID NO: 1983227 - DNA, 15 bp, Homo sapiens
cctttctggcctgct

SEQ ID NO: 1983228 - DNA, 15 bp, Homo sapiens
ctttctggcctgcta

SEQ ID NO: 1983229 - DNA, 15 bp, Homo sapiens
tttctggcctgctat

SEQ ID NO: 1983230 - DNA, 15 bp, Homo sapiens
ttctggcctgctatg

SEQ ID NO: 1983231 - DNA, 15 bp, Homo sapiens
tctggcctgctatgt

SEQ ID NO: 1983232 - DNA, 15 bp, Homo sapiens
ctggcctgctatgtc

SEQ ID NO: 1983233 - DNA, 15 bp, Homo sapiens
tggcctgctatgtct

SEQ ID NO: 1983234 - DNA, 15 bp, Homo sapiens
ggcctgctatgtctt

SEQ ID NO: 1983235 - DNA, 15 bp, Homo sapiens
gcctgctatgtcttc

SEQ ID NO: 1983236 - DNA, 15 bp, Homo sapiens
cctgctatgtcttcc

SEQ ID NO: 1983237 - DNA, 15 bp, Homo sapiens
ctgctatgtcttccc

SEQ ID NO: 1983238 - DNA, 15 bp, Homo sapiens
tgctatgtcttccca

SEQ ID NO: 1983239 - DNA, 15 bp, Homo sapiens
gctatgtcttcccaa

SEQ ID NO: 1983240 - DNA, 15 bp, Homo sapiens
ctatgtcttcccaat

SEQ ID NO: 1983241 - DNA, 15 bp, Homo sapiens
tatgtcttcccaatg

SEQ ID NO: 1983242 - DNA, 15 bp, Homo sapiens
atgtcttcccaatgt

SEQ ID NO: 1983243 - DNA, 15 bp, Homo sapiens
tgtcttcccaatgtt

SEQ ID NO: 1983244 - DNA, 15 bp, Homo sapiens
gtcttcccaatgttt

SEQ ID NO: 1983245 - DNA, 15 bp, Homo sapiens
tcttcccaatgttta

SEQ ID NO: 1983246 - DNA, 15 bp, Homo sapiens
cttcccaatgtttat

SEQ ID NO: 1983247 - DNA, 15 bp, Homo sapiens
ttcccaatgtttatt

SEQ ID NO: 1983248 - DNA, 15 bp, Homo sapiens
tcccaatgtttattg

SEQ ID NO: 1983249 - DNA, 15 bp, Homo sapiens
cccaatgtttattgg

SEQ ID NO: 1983250 - DNA, 15 bp, Homo sapiens
ccaatgtttattggg

SEQ ID NO: 1983251 - DNA, 15 bp, Homo sapiens
caatgtttattgggc

SEQ ID NO: 1983252 - DNA, 15 bp, Homo sapiens
aatgtttattgggca

SEQ ID NO: 1983253 - DNA, 15 bp, Homo sapiens
atgtttattgggcaa

SEQ ID NO: 1983254 - DNA, 15 bp, Homo sapiens
tgtttattgggcaat

SEQ ID NO: 1983255 - DNA, 15 bp, Homo sapiens
gtttattgggcaata

SEQ ID NO: 1983256 - DNA, 15 bp, Homo sapiens
tttattgggcaataa

SEQ ID NO: 1983257 - DNA, 15 bp, Homo sapiens
ttattgggcaataaa

SEQ ID NO: 1983258 - DNA, 15 bp, Homo sapiens
tattgggcaataaaa

SEQ ID NO: 1983259 - DNA, 15 bp, Homo sapiens
attgggcaataaaag

SEQ ID NO: 1983260 - DNA, 15 bp, Homo sapiens
ttgggcaataaaaga

SEQ ID NO: 1983261 - DNA, 15 bp, Homo sapiens
tgggcaataaaagat

SEQ ID NO: 1983262 - DNA, 15 bp, Homo sapiens
gggcaataaaagata

SEQ ID NO: 1983263 - DNA, 15 bp, Homo sapiens
ggcaataaaagataa

SEQ ID NO: 1983264 - DNA, 15 bp, Homo sapiens
gcaataaaagataag

SEQ ID NO: 1983265 - DNA, 15 bp, Homo sapiens
caataaaagataagt

SEQ ID NO: 1983266 - DNA, 15 bp, Homo sapiens
aataaaagataagtg

SEQ ID NO: 1983267 - DNA, 15 bp, Homo sapiens
ataaaagataagtgc

SEQ ID NO: 1983268 - DNA, 15 bp, Homo sapiens
taaaagataagtgca

SEQ ID NO: 1983269 - DNA, 15 bp, Homo sapiens
aaaagataagtgcag

SEQ ID NO: 1983270 - DNA, 15 bp, Homo sapiens
aaagataagtgcagt

SEQ ID NO: 1983271 - DNA, 15 bp, Homo sapiens
aagataagtgcagtc

SEQ ID NO: 1983272 - DNA, 15 bp, Homo sapiens
agataagtgcagtca

SEQ ID NO: 1983273 - DNA, 15 bp, Homo sapiens
gataagtgcagtcac

SEQ ID NO: 1983274 - DNA, 15 bp, Homo sapiens
ataagtgcagtcaca

SEQ ID NO: 1983275 - DNA, 15 bp, Homo sapiens
taagtgcagtcacag

SEQ ID NO: 1983276 - DNA, 15 bp, Homo sapiens
aagtgcagtcacaga

SEQ ID NO: 1983277 - DNA, 15 bp, Homo sapiens
agtgcagtcacagag

SEQ ID NO: 1983278 - DNA, 15 bp, Homo sapiens
gtgcagtcacagaga

SEQ ID NO: 1983279 - DNA, 15 bp, Homo sapiens
tgcagtcacagagaa

SEQ ID NO: 1983280 - DNA, 15 bp, Homo sapiens
gcagtcacagagaac

SEQ ID NO: 1983281 - DNA, 15 bp, Homo sapiens
cagtcacagagaact

SEQ ID NO: 1983282 - DNA, 15 bp, Homo sapiens
agtcacagagaactc

SEQ ID NO: 1983283 - DNA, 15 bp, Homo sapiens
gtcacagagaactca

SEQ ID NO: 1983284 - DNA, 15 bp, Homo sapiens
tcacagagaactcac

SEQ ID NO: 1983285 - DNA, 15 bp, Homo sapiens
cacagagaactcact

SEQ ID NO: 1983286 - DNA, 15 bp, Homo sapiens
acagagaactcactc

SEQ ID NO: 1983287 - DNA, 15 bp, Homo sapiens
cagagaactcactct

SEQ ID NO: 1983288 - DNA, 15 bp, Homo sapiens
agagaactcactctt

SEQ ID NO: 1983289 - DNA, 15 bp, Homo sapiens
gagaactcactcttc

SEQ ID NO: 1983290 - DNA, 15 bp, Homo sapiens
agaactcactcttct

SEQ ID NO: 1983291 - DNA, 15 bp, Homo sapiens
gaactcactcttctc

SEQ ID NO: 1983292 - DNA, 15 bp, Homo sapiens
aactcactcttctca

SEQ ID NO: 1983293 - DNA, 15 bp, Homo sapiens
actcactcttctcaa

SEQ ID NO: 1983294 - DNA, 15 bp, Homo sapiens
ctcactcttctcaat

SEQ ID NO: 1983295 - DNA, 15 bp, Homo sapiens
tcactcttctcaatt

SEQ ID NO: 1983296 - DNA, 15 bp, Homo sapiens
cactcttctcaattt

SEQ ID NO: 1983297 - DNA, 15 bp, Homo sapiens
actcttctcaatttc

SEQ ID NO: 1983298 - DNA, 15 bp, Homo sapiens
ctcttctcaatttcg

SEQ ID NO: 1983299 - DNA, 15 bp, Homo sapiens
tcttctcaatttcgg

SEQ ID NO: 1983300 - DNA, 15 bp, Homo sapiens
cttctcaatttcggt

SEQ ID NO: 1983301 - DNA, 15 bp, Homo sapiens
ttctcaatttcggtg

SEQ ID NO: 1983302 - DNA, 15 bp, Homo sapiens
tctcaatttcggtgt

SEQ ID NO: 1983303 - DNA, 15 bp, Homo sapiens
ctcaatttcggtgtg

SEQ ID NO: 1983304 - DNA, 15 bp, Homo sapiens
tcaatttcggtgtgc

SEQ ID NO: 1983305 - DNA, 15 bp, Homo sapiens
caatttcggtgtgcc

SEQ ID NO: 1983306 - DNA, 15 bp, Homo sapiens
aatttcggtgtgcct

SEQ ID NO: 1983307 - DNA, 15 bp, Homo sapiens
atttcggtgtgcctg

SEQ ID NO: 1983308 - DNA, 15 bp, Homo sapiens
tttcggtgtgcctgt

SEQ ID NO: 1983309 - DNA, 15 bp, Homo sapiens
ttcggtgtgcctgtt

SEQ ID NO: 1983310 - DNA, 15 bp, Homo sapiens
tcggtgtgcctgttt

SEQ ID NO: 1983311 - DNA, 15 bp, Homo sapiens
cggtgtgcctgtttt

SEQ ID NO: 1983312 - DNA, 15 bp, Homo sapiens
ggtgtgcctgttttc

SEQ ID NO: 1983313 - DNA, 15 bp, Homo sapiens
gtgtgcctgttttca

SEQ ID NO: 1983314 - DNA, 15 bp, Homo sapiens
tgtgcctgttttcat

SEQ ID NO: 1983315 - DNA, 15 bp, Homo sapiens
gtgcctgttttcata

SEQ ID NO: 1983316 - DNA, 15 bp, Homo sapiens
tgcctgttttcataa

SEQ ID NO: 1983317 - DNA, 15 bp, Homo sapiens
gcctgttttcataaa

SEQ ID NO: 1983318 - DNA, 15 bp, Homo sapiens
cctgttttcataaaa

SEQ ID NO: 1983319 - DNA, 15 bp, Homo sapiens
ctgttttcataaaaa

SEQ ID NO: 1983320 - DNA, 15 bp, Homo sapiens
tgttttcataaaaat

SEQ ID NO: 1983321 - DNA, 15 bp, Homo sapiens
gttttcataaaaatg

SEQ ID NO: 1983322 - DNA, 15 bp, Homo sapiens
ttttcataaaaatgc

SEQ ID NO: 1983323 - DNA, 15 bp, Homo sapiens
tttcataaaaatgca

SEQ ID NO: 1983324 - DNA, 15 bp, Homo sapiens
ttcataaaaatgcac

SEQ ID NO: 1983325 - DNA, 15 bp, Homo sapiens
tcataaaaatgcaca

SEQ ID NO: 1983326 - DNA, 15 bp, Homo sapiens
cataaaaatgcacag

SEQ ID NO: 1983327 - DNA, 15 bp, Homo sapiens
ataaaaatgcacagg

SEQ ID NO: 1983328 - DNA, 15 bp, Homo sapiens
taaaaatgcacaggg

SEQ ID NO: 1983329 - DNA, 15 bp, Homo sapiens
aaaaatgcacagggg

SEQ ID NO: 1983330 - DNA, 15 bp, Homo sapiens
aaaatgcacagggga

SEQ ID NO: 1983331 - DNA, 15 bp, Homo sapiens
aaatgcacaggggat

SEQ ID NO: 1983332 - DNA, 15 bp, Homo sapiens
aatgcacaggggatg

SEQ ID NO: 1983333 - DNA, 15 bp, Homo sapiens
atgcacaggggatgg

SEQ ID NO: 1983334 - DNA, 15 bp, Homo sapiens
tgcacaggggatggc

SEQ ID NO: 1983335 - DNA, 15 bp, Homo sapiens
gcacaggggatggcc

SEQ ID NO: 1983336 - DNA, 15 bp, Homo sapiens
cacaggggatggcca

SEQ ID NO: 1983337 - DNA, 15 bp, Homo sapiens
acaggggatggccag

SEQ ID NO: 1983338 - DNA, 15 bp, Homo sapiens
caggggatggccagg

SEQ ID NO: 1983339 - DNA, 15 bp, Homo sapiens
aggggatggccaggt

SEQ ID NO: 1983340 - DNA, 15 bp, Homo sapiens
ggggatggccaggtg

SEQ ID NO: 1983341 - DNA, 15 bp, Homo sapiens
gggatggccaggtgc

SEQ ID NO: 1983342 - DNA, 15 bp, Homo sapiens
ggatggccaggtgcg

SEQ ID NO: 1983343 - DNA, 15 bp, Homo sapiens
gatggccaggtgcgg

SEQ ID NO: 1983344 - DNA, 15 bp, Homo sapiens
atggccaggtgcggt

SEQ ID NO: 1983345 - DNA, 15 bp, Homo sapiens
tggccaggtgcggtg

SEQ ID NO: 1983346 - DNA, 15 bp, Homo sapiens
tggctcatgcctgtt

SEQ ID NO: 1983347 - DNA, 15 bp, Homo sapiens
ggctcatgcctgtta

SEQ ID NO: 1983348 - DNA, 15 bp, Homo sapiens
gctcatgcctgttat

SEQ ID NO: 1983349 - DNA, 15 bp, Homo sapiens
ctcatgcctgttatc

SEQ ID NO: 1983350 - DNA, 15 bp, Homo sapiens
tcatgcctgttatcc

SEQ ID NO: 1983351 - DNA, 15 bp, Homo sapiens
catgcctgttatccc

SEQ ID NO: 1983352 - DNA, 15 bp, Homo sapiens
atgcctgttatccca

SEQ ID NO: 1983353 - DNA, 15 bp, Homo sapiens
tgcctgttatcccag

SEQ ID NO: 1983354 - DNA, 15 bp, Homo sapiens
gcctgttatcccagc

SEQ ID NO: 1983355 - DNA, 15 bp, Homo sapiens
cctgttatcccagca

SEQ ID NO: 1983356 - DNA, 15 bp, Homo sapiens
ctgttatcccagcac

SEQ ID NO: 1983357 - DNA, 15 bp, Homo sapiens
tgttatcccagcact

SEQ ID NO: 1983358 - DNA, 15 bp, Homo sapiens
gttatcccagcactt

SEQ ID NO: 1983359 - DNA, 15 bp, Homo sapiens
ttatcccagcacttt

SEQ ID NO: 1983360 - DNA, 15 bp, Homo sapiens
ttgggaggcggaggc

SEQ ID NO: 1983361 - DNA, 15 bp, Homo sapiens
tgggaggcggaggcg

SEQ ID NO: 1983362 - DNA, 15 bp, Homo sapiens
gggaggcggaggcgg

SEQ ID NO: 1983363 - DNA, 15 bp, Homo sapiens
ggaggcggaggcggg

SEQ ID NO: 1983364 - DNA, 15 bp, Homo sapiens
gaggcggaggcgggc

SEQ ID NO: 1983365 - DNA, 15 bp, Homo sapiens
aggcggaggcgggcc

SEQ ID NO: 1983366 - DNA, 15 bp, Homo sapiens
ggcggaggcgggccg

SEQ ID NO: 1983367 - DNA, 15 bp, Homo sapiens
gcggaggcgggccga

SEQ ID NO: 1983368 - DNA, 15 bp, Homo sapiens
cggaggcgggccgat

SEQ ID NO: 1983369 - DNA, 15 bp, Homo sapiens
ggaggcgggccgatc

SEQ ID NO: 1983370 - DNA, 15 bp, Homo sapiens
gaggcgggccgatca

SEQ ID NO: 1983371 - DNA, 15 bp, Homo sapiens
aggcgggccgatcac

SEQ ID NO: 1983372 - DNA, 15 bp, Homo sapiens
ggcgggccgatcacc

SEQ ID NO: 1983373 - DNA, 15 bp, Homo sapiens
gcgggccgatcacct

SEQ ID NO: 1983374 - DNA, 15 bp, Homo sapiens
cgggccgatcacctg

SEQ ID NO: 1983375 - DNA, 15 bp, Homo sapiens
gggccgatcacctga

SEQ ID NO: 1983376 - DNA, 15 bp, Homo sapiens
ggccgatcacctgag

SEQ ID NO: 1983377 - DNA, 15 bp, Homo sapiens
gccgatcacctgagg

SEQ ID NO: 1983378 - DNA, 15 bp, Homo sapiens
ccgatcacctgaggt

SEQ ID NO: 1983379 - DNA, 15 bp, Homo sapiens
cgatcacctgaggtc

SEQ ID NO: 1983380 - DNA, 15 bp, Homo sapiens
cctgaggtcaggaga

SEQ ID NO: 1983381 - DNA, 15 bp, Homo sapiens
ctgaggtcaggagat

SEQ ID NO: 1983382 - DNA, 15 bp, Homo sapiens
aaattagctgggcaa

SEQ ID NO: 1983383 - DNA, 15 bp, Homo sapiens
aattagctgggcaag

SEQ ID NO: 1983384 - DNA, 15 bp, Homo sapiens
attagctgggcaagg

SEQ ID NO: 1983385 - DNA, 15 bp, Homo sapiens
ttagctgggcaaggt

SEQ ID NO: 1983386 - DNA, 15 bp, Homo sapiens
tagctgggcaaggtg

SEQ ID NO: 1983387 - DNA, 15 bp, Homo sapiens
agctgggcaaggtgg

SEQ ID NO: 1983388 - DNA, 15 bp, Homo sapiens
gctgggcaaggtggc

SEQ ID NO: 1983389 - DNA, 15 bp, Homo sapiens
ctgggcaaggtggcg

SEQ ID NO: 1983390 - DNA, 15 bp, Homo sapiens
tgggcaaggtggcgc

SEQ ID NO: 1983391 - DNA, 15 bp, Homo sapiens
gggcaaggtggcgcg

SEQ ID NO: 1983392 - DNA, 15 bp, Homo sapiens
ggcaaggtggcgcgc

SEQ ID NO: 1983393 - DNA, 15 bp, Homo sapiens
gcaaggtggcgcgcc

SEQ ID NO: 1983394 - DNA, 15 bp, Homo sapiens
caaggtggcgcgcct

SEQ ID NO: 1983395 - DNA, 15 bp, Homo sapiens
aaggtggcgcgccta

SEQ ID NO: 1983396 - DNA, 15 bp, Homo sapiens
aggtggcgcgcctat

SEQ ID NO: 1983397 - DNA, 15 bp, Homo sapiens
ggtggcgcgcctata

SEQ ID NO: 1983398 - DNA, 15 bp, Homo sapiens
gtggcgcgcctataa

SEQ ID NO: 1983399 - DNA, 15 bp, Homo sapiens
tggcgcgcctataat

SEQ ID NO: 1983400 - DNA, 15 bp, Homo sapiens
ggcgcgcctataatc

SEQ ID NO: 1983401 - DNA, 15 bp, Homo sapiens
gcgcgcctataatcc

SEQ ID NO: 1983402 - DNA, 15 bp, Homo sapiens
cgcgcctataatccc

SEQ ID NO: 1983403 - DNA, 15 bp, Homo sapiens
gcgcctataatccca

SEQ ID NO: 1983404 - DNA, 15 bp, Homo sapiens
tataatcccagctat

SEQ ID NO: 1983405 - DNA, 15 bp, Homo sapiens
ataatcccagctatt

SEQ ID NO: 1983406 - DNA, 15 bp, Homo sapiens
taatcccagctattt

SEQ ID NO: 1983407 - DNA, 15 bp, Homo sapiens
aatcccagctatttg

SEQ ID NO: 1983408 - DNA, 15 bp, Homo sapiens
atcccagctatttgg

SEQ ID NO: 1983409 - DNA, 15 bp, Homo sapiens
tcccagctatttgga

SEQ ID NO: 1983410 - DNA, 15 bp, Homo sapiens
cccagctatttggaa

SEQ ID NO: 1983411 - DNA, 15 bp, Homo sapiens
ccagctatttggaag

SEQ ID NO: 1983412 - DNA, 15 bp, Homo sapiens
cagctatttggaagg

SEQ ID NO: 1983413 - DNA, 15 bp, Homo sapiens
agctatttggaaggc

SEQ ID NO: 1983414 - DNA, 15 bp, Homo sapiens
gctatttggaaggct

SEQ ID NO: 1983415 - DNA, 15 bp, Homo sapiens
ctatttggaaggctg

SEQ ID NO: 1983416 - DNA, 15 bp, Homo sapiens
aaggctgaggcagga

SEQ ID NO: 1983417 - DNA, 15 bp, Homo sapiens
gaatcacctgaaccc

SEQ ID NO: 1983418 - DNA, 15 bp, Homo sapiens
aatcacctgaaccca

SEQ ID NO: 1983419 - DNA, 15 bp, Homo sapiens
atcacctgaacccag

SEQ ID NO: 1983420 - DNA, 15 bp, Homo sapiens
tcacctgaacccagg

SEQ ID NO: 1983421 - DNA, 15 bp, Homo sapiens
cacctgaacccagga

SEQ ID NO: 1983422 - DNA, 15 bp, Homo sapiens
acctgaacccaggag

SEQ ID NO: 1983423 - DNA, 15 bp, Homo sapiens
cctgaacccaggagg

SEQ ID NO: 1983424 - DNA, 15 bp, Homo sapiens
ctgaacccaggaggt

SEQ ID NO: 1983425 - DNA, 15 bp, Homo sapiens
tgaacccaggaggta

SEQ ID NO: 1983426 - DNA, 15 bp, Homo sapiens
gaacccaggaggtag

SEQ ID NO: 1983427 - DNA, 15 bp, Homo sapiens
aacccaggaggtaga

SEQ ID NO: 1983428 - DNA, 15 bp, Homo sapiens
acccaggaggtagag

SEQ ID NO: 1983429 - DNA, 15 bp, Homo sapiens
cccaggaggtagagt

SEQ ID NO: 1983430 - DNA, 15 bp, Homo sapiens
ccaggaggtagagtt

SEQ ID NO: 1983431 - DNA, 15 bp, Homo sapiens
caggaggtagagttt

SEQ ID NO: 1983432 - DNA, 15 bp, Homo sapiens
aggaggtagagtttg

SEQ ID NO: 1983433 - DNA, 15 bp, Homo sapiens
ggaggtagagtttga

SEQ ID NO: 1983434 - DNA, 15 bp, Homo sapiens
gaggtagagtttgag

SEQ ID NO: 1983435 - DNA, 15 bp, Homo sapiens
aggtagagtttgagg

SEQ ID NO: 1983436 - DNA, 15 bp, Homo sapiens
ggtagagtttgaggt

SEQ ID NO: 1983437 - DNA, 15 bp, Homo sapiens
tagagtttgaggtgg

SEQ ID NO: 1983438 - DNA, 15 bp, Homo sapiens
agagtttgaggtggg

SEQ ID NO: 1983439 - DNA, 15 bp, Homo sapiens
gagtttgaggtgggc

SEQ ID NO: 1983440 - DNA, 15 bp, Homo sapiens
agtttgaggtgggcc

SEQ ID NO: 1983441 - DNA, 15 bp, Homo sapiens
gtttgaggtgggccg

SEQ ID NO: 1983442 - DNA, 15 bp, Homo sapiens
tttgaggtgggccga

SEQ ID NO: 1983443 - DNA, 15 bp, Homo sapiens
ttgaggtgggccgag

SEQ ID NO: 1983444 - DNA, 15 bp, Homo sapiens
tgaggtgggccgaga

SEQ ID NO: 1983445 - DNA, 15 bp, Homo sapiens
gaggtgggccgagat

SEQ ID NO: 1983446 - DNA, 15 bp, Homo sapiens
aggtgggccgagatc

SEQ ID NO: 1983447 - DNA, 15 bp, Homo sapiens
ggtgggccgagatca

SEQ ID NO: 1983448 - DNA, 15 bp, Homo sapiens
gtgggccgagatcat

SEQ ID NO: 1983449 - DNA, 15 bp, Homo sapiens
tgggccgagatcatg

SEQ ID NO: 1983450 - DNA, 15 bp, Homo sapiens
gggccgagatcatgc

SEQ ID NO: 1983451 - DNA, 15 bp, Homo sapiens
catgccactgcactt

SEQ ID NO: 1983452 - DNA, 15 bp, Homo sapiens
atgccactgcacttc

SEQ ID NO: 1983453 - DNA, 15 bp, Homo sapiens
tgccactgcacttca

SEQ ID NO: 1983454 - DNA, 15 bp, Homo sapiens
gccactgcacttcag

SEQ ID NO: 1983455 - DNA, 15 bp, Homo sapiens
ttcagcctgggtgat

SEQ ID NO: 1983456 - DNA, 15 bp, Homo sapiens
tcagcctgggtgatg

SEQ ID NO: 1983457 - DNA, 15 bp, Homo sapiens
cctgggtgatggagt

SEQ ID NO: 1983458 - DNA, 15 bp, Homo sapiens
ctgggtgatggagtg

SEQ ID NO: 1983459 - DNA, 15 bp, Homo sapiens
tgggtgatggagtga

SEQ ID NO: 1983460 - DNA, 15 bp, Homo sapiens
gggtgatggagtgag

SEQ ID NO: 1983461 - DNA, 15 bp, Homo sapiens
ggtgatggagtgaga

SEQ ID NO: 1983462 - DNA, 15 bp, Homo sapiens
gtgatggagtgagac

SEQ ID NO: 1983463 - DNA, 15 bp, Homo sapiens
gatggagtgagacca

SEQ ID NO: 1983464 - DNA, 15 bp, Homo sapiens
atggagtgagaccat

SEQ ID NO: 1983465 - DNA, 15 bp, Homo sapiens
tggagtgagaccatg

SEQ ID NO: 1983466 - DNA, 15 bp, Homo sapiens
ggagtgagaccatgt

SEQ ID NO: 1983467 - DNA, 15 bp, Homo sapiens
gagtgagaccatgtc

SEQ ID NO: 1983468 - DNA, 15 bp, Homo sapiens
agtgagaccatgtct

SEQ ID NO: 1983469 - DNA, 15 bp, Homo sapiens
gtgagaccatgtctc

SEQ ID NO: 1983470 - DNA, 15 bp, Homo sapiens
tgagaccatgtctca

SEQ ID NO: 1983471 - DNA, 15 bp, Homo sapiens
gagaccatgtctcaa

SEQ ID NO: 1983472 - DNA, 15 bp, Homo sapiens
agaccatgtctcaaa

SEQ ID NO: 1983473 - DNA, 15 bp, Homo sapiens
gaccatgtctcaaaa

SEQ ID NO: 1983474 - DNA, 15 bp, Homo sapiens
accatgtctcaaaaa

SEQ ID NO: 1983475 - DNA, 15 bp, Homo sapiens
ccatgtctcaaaaaa

SEQ ID NO: 1983476 - DNA, 15 bp, Homo sapiens
catgtctcaaaaaaa

SEQ ID NO: 1983477 - DNA, 15 bp, Homo sapiens
atgtctcaaaaaaaa

SEQ ID NO: 1983478 - DNA, 15 bp, Homo sapiens
aaaaaagaaaaaagc

SEQ ID NO: 1983479 - DNA, 15 bp, Homo sapiens
aaaaagaaaaaagcc

SEQ ID NO: 1983480 - DNA, 15 bp, Homo sapiens
aaaagaaaaaagccc

SEQ ID NO: 1983481 - DNA, 15 bp, Homo sapiens
aaagaaaaaagccca

SEQ ID NO: 1983482 - DNA, 15 bp, Homo sapiens
aagaaaaaagcccag

SEQ ID NO: 1983483 - DNA, 15 bp, Homo sapiens
agaaaaaagcccagg

SEQ ID NO: 1983484 - DNA, 15 bp, Homo sapiens
gaaaaaagcccaggg

SEQ ID NO: 1983485 - DNA, 15 bp, Homo sapiens
aaaaaagcccaggga

SEQ ID NO: 1983486 - DNA, 15 bp, Homo sapiens
aaaaagcccagggac

SEQ ID NO: 1983487 - DNA, 15 bp, Homo sapiens
aaaagcccagggaca

SEQ ID NO: 1983488 - DNA, 15 bp, Homo sapiens
aaagcccagggacat

SEQ ID NO: 1983489 - DNA, 15 bp, Homo sapiens
aagcccagggacatt

SEQ ID NO: 1983490 - DNA, 15 bp, Homo sapiens
agcccagggacattg

SEQ ID NO: 1983491 - DNA, 15 bp, Homo sapiens
gcccagggacattga

SEQ ID NO: 1983492 - DNA, 15 bp, Homo sapiens
cccagggacattgat

SEQ ID NO: 1983493 - DNA, 15 bp, Homo sapiens
ccagggacattgatc

SEQ ID NO: 1983494 - DNA, 15 bp, Homo sapiens
cagggacattgatct

SEQ ID NO: 1983495 - DNA, 15 bp, Homo sapiens
agggacattgatctt

SEQ ID NO: 1983496 - DNA, 15 bp, Homo sapiens
gggacattgatcttc

SEQ ID NO: 1983497 - DNA, 15 bp, Homo sapiens
ggacattgatcttca

SEQ ID NO: 1983498 - DNA, 15 bp, Homo sapiens
gacattgatcttcac

SEQ ID NO: 1983499 - DNA, 15 bp, Homo sapiens
acattgatcttcaca

SEQ ID NO: 1983500 - DNA, 15 bp, Homo sapiens
cattgatcttcacag

SEQ ID NO: 1983501 - DNA, 15 bp, Homo sapiens
attgatcttcacagc

SEQ ID NO: 1983502 - DNA, 15 bp, Homo sapiens
ttgatcttcacagca

SEQ ID NO: 1983503 - DNA, 15 bp, Homo sapiens
tgatcttcacagcaa

SEQ ID NO: 1983504 - DNA, 15 bp, Homo sapiens
gatcttcacagcaaa

SEQ ID NO: 1983505 - DNA, 15 bp, Homo sapiens
atcttcacagcaaag

SEQ ID NO: 1983506 - DNA, 15 bp, Homo sapiens
tcttcacagcaaagt

SEQ ID NO: 1983507 - DNA, 15 bp, Homo sapiens
cttcacagcaaagtg

SEQ ID NO: 1983508 - DNA, 15 bp, Homo sapiens
ttcacagcaaagtga

SEQ ID NO: 1983509 - DNA, 15 bp, Homo sapiens
tcacagcaaagtgag

SEQ ID NO: 1983510 - DNA, 15 bp, Homo sapiens
cacagcaaagtgaga

SEQ ID NO: 1983511 - DNA, 15 bp, Homo sapiens
acagcaaagtgagag

SEQ ID NO: 1983512 - DNA, 15 bp, Homo sapiens
cagcaaagtgagagc

SEQ ID NO: 1983513 - DNA, 15 bp, Homo sapiens
agcaaagtgagagca

SEQ ID NO: 1983514 - DNA, 15 bp, Homo sapiens
gcaaagtgagagcag

SEQ ID NO: 1983515 - DNA, 15 bp, Homo sapiens
caaagtgagagcaga

SEQ ID NO: 1983516 - DNA, 15 bp, Homo sapiens
aaagtgagagcagat

SEQ ID NO: 1983517 - DNA, 15 bp, Homo sapiens
aagtgagagcagata

SEQ ID NO: 1983518 - DNA, 15 bp, Homo sapiens
agtgagagcagatac

SEQ ID NO: 1983519 - DNA, 15 bp, Homo sapiens
gtgagagcagatact

SEQ ID NO: 1983520 - DNA, 15 bp, Homo sapiens
tgagagcagatactg

SEQ ID NO: 1983521 - DNA, 15 bp, Homo sapiens
gagagcagatactgt

SEQ ID NO: 1983522 - DNA, 15 bp, Homo sapiens
agagcagatactgtt

SEQ ID NO: 1983523 - DNA, 15 bp, Homo sapiens
gagcagatactgttt

SEQ ID NO: 1983524 - DNA, 15 bp, Homo sapiens
agcagatactgtttt

SEQ ID NO: 1983525 - DNA, 15 bp, Homo sapiens
gcagatactgttttt

SEQ ID NO: 1983526 - DNA, 15 bp, Homo sapiens
cagatactgtttttt

SEQ ID NO: 1983527 - DNA, 15 bp, Homo sapiens
agatactgttttttg

SEQ ID NO: 1983528 - DNA, 15 bp, Homo sapiens
gatactgttttttgt

SEQ ID NO: 1983529 - DNA, 15 bp, Homo sapiens
atactgttttttgtt

SEQ ID NO: 1983530 - DNA, 15 bp, Homo sapiens
tactgttttttgttt

SEQ ID NO: 1983531 - DNA, 15 bp, Homo sapiens
actgttttttgtttt

SEQ ID NO: 1983532 - DNA, 15 bp, Homo sapiens
ctgttttttgttttg

SEQ ID NO: 1983533 - DNA, 15 bp, Homo sapiens
tgttttttgttttgt

SEQ ID NO: 1983534 - DNA, 15 bp, Homo sapiens
gttttttgttttgtt

SEQ ID NO: 1983535 - DNA, 15 bp, Homo sapiens
ttgttttgttttccc

SEQ ID NO: 1983536 - DNA, 15 bp, Homo sapiens
tgttttgttttcccg

SEQ ID NO: 1983537 - DNA, 15 bp, Homo sapiens
gttttgttttcccga

SEQ ID NO: 1983538 - DNA, 15 bp, Homo sapiens
ttttgttttcccgat

SEQ ID NO: 1983539 - DNA, 15 bp, Homo sapiens
tttgttttcccgatg

SEQ ID NO: 1983540 - DNA, 15 bp, Homo sapiens
ttgttttcccgatga

SEQ ID NO: 1983541 - DNA, 15 bp, Homo sapiens
tgttttcccgatgat

SEQ ID NO: 1983542 - DNA, 15 bp, Homo sapiens
gttttcccgatgatt

SEQ ID NO: 1983543 - DNA, 15 bp, Homo sapiens
ttttcccgatgatta

SEQ ID NO: 1983544 - DNA, 15 bp, Homo sapiens
tttcccgatgattaa

SEQ ID NO: 1983545 - DNA, 15 bp, Homo sapiens
ttcccgatgattaaa

SEQ ID NO: 1983546 - DNA, 15 bp, Homo sapiens
tcccgatgattaaac

SEQ ID NO: 1983547 - DNA, 15 bp, Homo sapiens
cccgatgattaaacc

SEQ ID NO: 1983548 - DNA, 15 bp, Homo sapiens
ccgatgattaaacca

SEQ ID NO: 1983549 - DNA, 15 bp, Homo sapiens
cgatgattaaaccag

SEQ ID NO: 1983550 - DNA, 15 bp, Homo sapiens
gatgattaaaccagg

SEQ ID NO: 1983551 - DNA, 15 bp, Homo sapiens
atgattaaaccaggc

SEQ ID NO: 1983552 - DNA, 15 bp, Homo sapiens
tgattaaaccaggcc

SEQ ID NO: 1983553 - DNA, 15 bp, Homo sapiens
gattaaaccaggccc

SEQ ID NO: 1983554 - DNA, 15 bp, Homo sapiens
attaaaccaggccca

SEQ ID NO: 1983555 - DNA, 15 bp, Homo sapiens
ttaaaccaggcccag

SEQ ID NO: 1983556 - DNA, 15 bp, Homo sapiens
taaaccaggcccaga

SEQ ID NO: 1983557 - DNA, 15 bp, Homo sapiens
aaaccaggcccagag

SEQ ID NO: 1983558 - DNA, 15 bp, Homo sapiens
aaccaggcccagagt

SEQ ID NO: 1983559 - DNA, 15 bp, Homo sapiens
accaggcccagagtg

SEQ ID NO: 1983560 - DNA, 15 bp, Homo sapiens
ccaggcccagagtgg

SEQ ID NO: 1983561 - DNA, 15 bp, Homo sapiens
caggcccagagtggt

SEQ ID NO: 1983562 - DNA, 15 bp, Homo sapiens
aggcccagagtggtt

SEQ ID NO: 1983563 - DNA, 15 bp, Homo sapiens
ggcccagagtggttt

SEQ ID NO: 1983564 - DNA, 15 bp, Homo sapiens
gcccagagtggtttc

SEQ ID NO: 1983565 - DNA, 15 bp, Homo sapiens
cccagagtggtttct

SEQ ID NO: 1983566 - DNA, 15 bp, Homo sapiens
ccagagtggtttctg

SEQ ID NO: 1983567 - DNA, 15 bp, Homo sapiens
cagagtggtttctga

SEQ ID NO: 1983568 - DNA, 15 bp, Homo sapiens
agagtggtttctgag

SEQ ID NO: 1983569 - DNA, 15 bp, Homo sapiens
gagtggtttctgagt

SEQ ID NO: 1983570 - DNA, 15 bp, Homo sapiens
agtggtttctgagtt

SEQ ID NO: 1983571 - DNA, 15 bp, Homo sapiens
gtggtttctgagttc

SEQ ID NO: 1983572 - DNA, 15 bp, Homo sapiens
tggtttctgagttca

SEQ ID NO: 1983573 - DNA, 15 bp, Homo sapiens
ggtttctgagttcat

SEQ ID NO: 1983574 - DNA, 15 bp, Homo sapiens
gtttctgagttcata

SEQ ID NO: 1983575 - DNA, 15 bp, Homo sapiens
tttctgagttcataa

SEQ ID NO: 1983576 - DNA, 15 bp, Homo sapiens
ttctgagttcataaa

SEQ ID NO: 1983577 - DNA, 15 bp, Homo sapiens
tctgagttcataaaa

SEQ ID NO: 1983578 - DNA, 15 bp, Homo sapiens
ctgagttcataaaac

SEQ ID NO: 1983579 - DNA, 15 bp, Homo sapiens
tgagttcataaaaca

SEQ ID NO: 1983580 - DNA, 15 bp, Homo sapiens
gagttcataaaacat

SEQ ID NO: 1983581 - DNA, 15 bp, Homo sapiens
agttcataaaacatt

SEQ ID NO: 1983582 - DNA, 15 bp, Homo sapiens
gttcataaaacatta

SEQ ID NO: 1983583 - DNA, 15 bp, Homo sapiens
ttcataaaacattaa

SEQ ID NO: 1983584 - DNA, 15 bp, Homo sapiens
tcataaaacattaac

SEQ ID NO: 1983585 - DNA, 15 bp, Homo sapiens
cataaaacattaacg

SEQ ID NO: 1983586 - DNA, 15 bp, Homo sapiens
ataaaacattaacgc

SEQ ID NO: 1983587 - DNA, 15 bp, Homo sapiens
taaaacattaacgct

SEQ ID NO: 1983588 - DNA, 15 bp, Homo sapiens
aaaacattaacgcta

SEQ ID NO: 1983589 - DNA, 15 bp, Homo sapiens
aaacattaacgctag

SEQ ID NO: 1983590 - DNA, 15 bp, Homo sapiens
aacattaacgctaga

SEQ ID NO: 1983591 - DNA, 15 bp, Homo sapiens
acattaacgctagaa

SEQ ID NO: 1983592 - DNA, 15 bp, Homo sapiens
cattaacgctagaag

SEQ ID NO: 1983593 - DNA, 15 bp, Homo sapiens
attaacgctagaagg

SEQ ID NO: 1983594 - DNA, 15 bp, Homo sapiens
ttaacgctagaagga

SEQ ID NO: 1983595 - DNA, 15 bp, Homo sapiens
taacgctagaaggaa

SEQ ID NO: 1983596 - DNA, 15 bp, Homo sapiens
aacgctagaaggaac

SEQ ID NO: 1983597 - DNA, 15 bp, Homo sapiens
acgctagaaggaacc

SEQ ID NO: 1983598 - DNA, 15 bp, Homo sapiens
cgctagaaggaacct

SEQ ID NO: 1983599 - DNA, 15 bp, Homo sapiens
gctagaaggaacctg

SEQ ID NO: 1983600 - DNA, 15 bp, Homo sapiens
ctagaaggaacctgt

SEQ ID NO: 1983601 - DNA, 15 bp, Homo sapiens
tagaaggaacctgtc

SEQ ID NO: 1983602 - DNA, 15 bp, Homo sapiens
agaaggaacctgtct

SEQ ID NO: 1983603 - DNA, 15 bp, Homo sapiens
gaaggaacctgtctt

SEQ ID NO: 1983604 - DNA, 15 bp, Homo sapiens
aaggaacctgtcttc

SEQ ID NO: 1983605 - DNA, 15 bp, Homo sapiens
aggaacctgtcttcc

SEQ ID NO: 1983606 - DNA, 15 bp, Homo sapiens
ggaacctgtcttccc

SEQ ID NO: 1983607 - DNA, 15 bp, Homo sapiens
gaacctgtcttcccc

SEQ ID NO: 1983608 - DNA, 15 bp, Homo sapiens
aacctgtcttcccct

SEQ ID NO: 1983609 - DNA, 15 bp, Homo sapiens
acctgtcttccccta

SEQ ID NO: 1983610 - DNA, 15 bp, Homo sapiens
cctgtcttcccctac

SEQ ID NO: 1983611 - DNA, 15 bp, Homo sapiens
ctgtcttcccctaca

SEQ ID NO: 1983612 - DNA, 15 bp, Homo sapiens
tgtcttcccctacag

SEQ ID NO: 1983613 - DNA, 15 bp, Homo sapiens
gtcttcccctacagc

SEQ ID NO: 1983614 - DNA, 15 bp, Homo sapiens
tcttcccctacagca

SEQ ID NO: 1983615 - DNA, 15 bp, Homo sapiens
cttcccctacagcat

SEQ ID NO: 1983616 - DNA, 15 bp, Homo sapiens
ttcccctacagcatt

SEQ ID NO: 1983617 - DNA, 15 bp, Homo sapiens
tcccctacagcattc

SEQ ID NO: 1983618 - DNA, 15 bp, Homo sapiens
cccctacagcattca

SEQ ID NO: 1983619 - DNA, 15 bp, Homo sapiens
ccctacagcattcac

SEQ ID NO: 1983620 - DNA, 15 bp, Homo sapiens
cctacagcattcact

SEQ ID NO: 1983621 - DNA, 15 bp, Homo sapiens
ctacagcattcactc

SEQ ID NO: 1983622 - DNA, 15 bp, Homo sapiens
tacagcattcactct

SEQ ID NO: 1983623 - DNA, 15 bp, Homo sapiens
acagcattcactctt

SEQ ID NO: 1983624 - DNA, 15 bp, Homo sapiens
cagcattcactcttc

SEQ ID NO: 1983625 - DNA, 15 bp, Homo sapiens
agcattcactcttca

SEQ ID NO: 1983626 - DNA, 15 bp, Homo sapiens
gcattcactcttcag

SEQ ID NO: 1983627 - DNA, 15 bp, Homo sapiens
cattcactcttcaga

SEQ ID NO: 1983628 - DNA, 15 bp, Homo sapiens
attcactcttcagat

SEQ ID NO: 1983629 - DNA, 15 bp, Homo sapiens
ttcactcttcagatg

SEQ ID NO: 1983630 - DNA, 15 bp, Homo sapiens
tcactcttcagatga

SEQ ID NO: 1983631 - DNA, 15 bp, Homo sapiens
cactcttcagatgat

SEQ ID NO: 1983632 - DNA, 15 bp, Homo sapiens
actcttcagatgatg

SEQ ID NO: 1983633 - DNA, 15 bp, Homo sapiens
ctcttcagatgatga

SEQ ID NO: 1983634 - DNA, 15 bp, Homo sapiens
tcttcagatgatgaa

SEQ ID NO: 1983635 - DNA, 15 bp, Homo sapiens
cttcagatgatgaaa

SEQ ID NO: 1983636 - DNA, 15 bp, Homo sapiens
ttcagatgatgaaac

SEQ ID NO: 1983637 - DNA, 15 bp, Homo sapiens
tcagatgatgaaact

SEQ ID NO: 1983638 - DNA, 15 bp, Homo sapiens
cagatgatgaaactg

SEQ ID NO: 1983639 - DNA, 15 bp, Homo sapiens
agatgatgaaactga

SEQ ID NO: 1983640 - DNA, 15 bp, Homo sapiens
gatgatgaaactgag

SEQ ID NO: 1983641 - DNA, 15 bp, Homo sapiens
atgatgaaactgagc

SEQ ID NO: 1983642 - DNA, 15 bp, Homo sapiens
tgatgaaactgagct

SEQ ID NO: 1983643 - DNA, 15 bp, Homo sapiens
gatgaaactgagctg

SEQ ID NO: 1983644 - DNA, 15 bp, Homo sapiens
atgaaactgagctgt

SEQ ID NO: 1983645 - DNA, 15 bp, Homo sapiens
tgaaactgagctgtg

SEQ ID NO: 1983646 - DNA, 15 bp, Homo sapiens
gaaactgagctgtga

SEQ ID NO: 1983647 - DNA, 15 bp, Homo sapiens
aaactgagctgtgac

SEQ ID NO: 1983648 - DNA, 15 bp, Homo sapiens
aactgagctgtgaca

SEQ ID NO: 1983649 - DNA, 15 bp, Homo sapiens
actgagctgtgacag

SEQ ID NO: 1983650 - DNA, 15 bp, Homo sapiens
ctgagctgtgacagc

SEQ ID NO: 1983651 - DNA, 15 bp, Homo sapiens
tgagctgtgacagcg

SEQ ID NO: 1983652 - DNA, 15 bp, Homo sapiens
gagctgtgacagcgg

SEQ ID NO: 1983653 - DNA, 15 bp, Homo sapiens
agctgtgacagcgga

SEQ ID NO: 1983654 - DNA, 15 bp, Homo sapiens
gctgtgacagcggaa

SEQ ID NO: 1983655 - DNA, 15 bp, Homo sapiens
ctgtgacagcggaaa

SEQ ID NO: 1983656 - DNA, 15 bp, Homo sapiens
tgtgacagcggaaag

SEQ ID NO: 1983657 - DNA, 15 bp, Homo sapiens
gtgacagcggaaagt

SEQ ID NO: 1983658 - DNA, 15 bp, Homo sapiens
tgacagcggaaagtg

SEQ ID NO: 1983659 - DNA, 15 bp, Homo sapiens
gacagcggaaagtgc

SEQ ID NO: 1983660 - DNA, 15 bp, Homo sapiens
acagcggaaagtgca

SEQ ID NO: 1983661 - DNA, 15 bp, Homo sapiens
cagcggaaagtgcat

SEQ ID NO: 1983662 - DNA, 15 bp, Homo sapiens
agcggaaagtgcatt

SEQ ID NO: 1983663 - DNA, 15 bp, Homo sapiens
gcggaaagtgcattt

SEQ ID NO: 1983664 - DNA, 15 bp, Homo sapiens
cggaaagtgcattta

SEQ ID NO: 1983665 - DNA, 15 bp, Homo sapiens
ggaaagtgcatttaa

SEQ ID NO: 1983666 - DNA, 15 bp, Homo sapiens
gaaagtgcatttaac

SEQ ID NO: 1983667 - DNA, 15 bp, Homo sapiens
aaagtgcatttaact

SEQ ID NO: 1983668 - DNA, 15 bp, Homo sapiens
aagtgcatttaactg

SEQ ID NO: 1983669 - DNA, 15 bp, Homo sapiens
agtgcatttaactgg

SEQ ID NO: 1983670 - DNA, 15 bp, Homo sapiens
gtgcatttaactggt

SEQ ID NO: 1983671 - DNA, 15 bp, Homo sapiens
tgcatttaactggtc

SEQ ID NO: 1983672 - DNA, 15 bp, Homo sapiens
gcatttaactggtcc

SEQ ID NO: 1983673 - DNA, 15 bp, Homo sapiens
catttaactggtccc

SEQ ID NO: 1983674 - DNA, 15 bp, Homo sapiens
atttaactggtccca

SEQ ID NO: 1983675 - DNA, 15 bp, Homo sapiens
tttaactggtcccag

SEQ ID NO: 1983676 - DNA, 15 bp, Homo sapiens
ttaactggtcccagg

SEQ ID NO: 1983677 - DNA, 15 bp, Homo sapiens
taactggtcccaggt

SEQ ID NO: 1983678 - DNA, 15 bp, Homo sapiens
aactggtcccaggtg

SEQ ID NO: 1983679 - DNA, 15 bp, Homo sapiens
actggtcccaggtgc

SEQ ID NO: 1983680 - DNA, 15 bp, Homo sapiens
ctggtcccaggtgct

SEQ ID NO: 1983681 - DNA, 15 bp, Homo sapiens
tggtcccaggtgctc

SEQ ID NO: 1983682 - DNA, 15 bp, Homo sapiens
ggtcccaggtgctca

SEQ ID NO: 1983683 - DNA, 15 bp, Homo sapiens
gtcccaggtgctcag

SEQ ID NO: 1983684 - DNA, 15 bp, Homo sapiens
tcccaggtgctcagc

SEQ ID NO: 1983685 - DNA, 15 bp, Homo sapiens
cccaggtgctcagcg

SEQ ID NO: 1983686 - DNA, 15 bp, Homo sapiens
ccaggtgctcagcgt

SEQ ID NO: 1983687 - DNA, 15 bp, Homo sapiens
caggtgctcagcgtg

SEQ ID NO: 1983688 - DNA, 15 bp, Homo sapiens
aggtgctcagcgtga

SEQ ID NO: 1983689 - DNA, 15 bp, Homo sapiens
ggtgctcagcgtgat

SEQ ID NO: 1983690 - DNA, 15 bp, Homo sapiens
gtgctcagcgtgatc

SEQ ID NO: 1983691 - DNA, 15 bp, Homo sapiens
tgctcagcgtgatcc

SEQ ID NO: 1983692 - DNA, 15 bp, Homo sapiens
gctcagcgtgatcct

SEQ ID NO: 1983693 - DNA, 15 bp, Homo sapiens
ctcagcgtgatcctt

SEQ ID NO: 1983694 - DNA, 15 bp, Homo sapiens
tcagcgtgatccttg

SEQ ID NO: 1983695 - DNA, 15 bp, Homo sapiens
cagcgtgatccttgt

SEQ ID NO: 1983696 - DNA, 15 bp, Homo sapiens
agcgtgatccttgtg

SEQ ID NO: 1983697 - DNA, 15 bp, Homo sapiens
gcgtgatccttgtgc

SEQ ID NO: 1983698 - DNA, 15 bp, Homo sapiens
cgtgatccttgtgcc

SEQ ID NO: 1983699 - DNA, 15 bp, Homo sapiens
gtgatccttgtgcca

SEQ ID NO: 1983700 - DNA, 15 bp, Homo sapiens
tgatccttgtgccag

SEQ ID NO: 1983701 - DNA, 15 bp, Homo sapiens
gatccttgtgccagg

SEQ ID NO: 1983702 - DNA, 15 bp, Homo sapiens
atccttgtgccaggg

SEQ ID NO: 1983703 - DNA, 15 bp, Homo sapiens
tccttgtgccagggg

SEQ ID NO: 1983704 - DNA, 15 bp, Homo sapiens
ccttgtgccaggggc

SEQ ID NO: 1983705 - DNA, 15 bp, Homo sapiens
cttgtgccaggggcc

SEQ ID NO: 1983706 - DNA, 15 bp, Homo sapiens
ttgtgccaggggccg

SEQ ID NO: 1983707 - DNA, 15 bp, Homo sapiens
tgtgccaggggccgt

SEQ ID NO: 1983708 - DNA, 15 bp, Homo sapiens
gtgccaggggccgtg

SEQ ID NO: 1983709 - DNA, 15 bp, Homo sapiens
tgccaggggccgtgg

SEQ ID NO: 1983710 - DNA, 15 bp, Homo sapiens
gccaggggccgtggt

SEQ ID NO: 1983711 - DNA, 15 bp, Homo sapiens
ccaggggccgtggtc

SEQ ID NO: 1983712 - DNA, 15 bp, Homo sapiens
caggggccgtggtca

SEQ ID NO: 1983713 - DNA, 15 bp, Homo sapiens
aggggccgtggtcac

SEQ ID NO: 1983714 - DNA, 15 bp, Homo sapiens
ggggccgtggtcaca

SEQ ID NO: 1983715 - DNA, 15 bp, Homo sapiens
gggccgtggtcacaa

SEQ ID NO: 1983716 - DNA, 15 bp, Homo sapiens
ggccgtggtcacaac

SEQ ID NO: 1983717 - DNA, 15 bp, Homo sapiens
gccgtggtcacaacc

SEQ ID NO: 1983718 - DNA, 15 bp, Homo sapiens
ccgtggtcacaaccg

SEQ ID NO: 1983719 - DNA, 15 bp, Homo sapiens
cgtggtcacaaccgc

SEQ ID NO: 1983720 - DNA, 15 bp, Homo sapiens
gtggtcacaaccgcc

SEQ ID NO: 1983721 - DNA, 15 bp, Homo sapiens
tggtcacaaccgcct

SEQ ID NO: 1983722 - DNA, 15 bp, Homo sapiens
ggtcacaaccgcctg

SEQ ID NO: 1983723 - DNA, 15 bp, Homo sapiens
gtcacaaccgcctgg

SEQ ID NO: 1983724 - DNA, 15 bp, Homo sapiens
tcacaaccgcctgga

SEQ ID NO: 1983725 - DNA, 15 bp, Homo sapiens
cacaaccgcctggag

SEQ ID NO: 1983726 - DNA, 15 bp, Homo sapiens
acaaccgcctggagg

SEQ ID NO: 1983727 - DNA, 15 bp, Homo sapiens
caaccgcctggaggt

SEQ ID NO: 1983728 - DNA, 15 bp, Homo sapiens
aaccgcctggaggtg

SEQ ID NO: 1983729 - DNA, 15 bp, Homo sapiens
accgcctggaggtgg

SEQ ID NO: 1983730 - DNA, 15 bp, Homo sapiens
ccgcctggaggtggg

SEQ ID NO: 1983731 - DNA, 15 bp, Homo sapiens
cgcctggaggtgggg

SEQ ID NO: 1983732 - DNA, 15 bp, Homo sapiens
gcctggaggtggggt

SEQ ID NO: 1983733 - DNA, 15 bp, Homo sapiens
cctggaggtggggtg

SEQ ID NO: 1983734 - DNA, 15 bp, Homo sapiens
ctggaggtggggtga

SEQ ID NO: 1983735 - DNA, 15 bp, Homo sapiens
tggaggtggggtgag

SEQ ID NO: 1983736 - DNA, 15 bp, Homo sapiens
ggaggtggggtgagg

SEQ ID NO: 1983737 - DNA, 15 bp, Homo sapiens
gaggtggggtgaggc

SEQ ID NO: 1983738 - DNA, 15 bp, Homo sapiens
aggtggggtgaggca

SEQ ID NO: 1983739 - DNA, 15 bp, Homo sapiens
ggtggggtgaggcag

SEQ ID NO: 1983740 - DNA, 15 bp, Homo sapiens
gtggggtgaggcaga

SEQ ID NO: 1983741 - DNA, 15 bp, Homo sapiens
tggggtgaggcagaa

SEQ ID NO: 1983742 - DNA, 15 bp, Homo sapiens
ggggtgaggcagaat

SEQ ID NO: 1983743 - DNA, 15 bp, Homo sapiens
gggtgaggcagaatc

SEQ ID NO: 1983744 - DNA, 15 bp, Homo sapiens
ggtgaggcagaatct

SEQ ID NO: 1983745 - DNA, 15 bp, Homo sapiens
gtgaggcagaatctc

SEQ ID NO: 1983746 - DNA, 15 bp, Homo sapiens
tgaggcagaatctca

SEQ ID NO: 1983747 - DNA, 15 bp, Homo sapiens
gaggcagaatctcag

SEQ ID NO: 1983748 - DNA, 15 bp, Homo sapiens
aggcagaatctcagt

SEQ ID NO: 1983749 - DNA, 15 bp, Homo sapiens
ggcagaatctcagtg

SEQ ID NO: 1983750 - DNA, 15 bp, Homo sapiens
gcagaatctcagtgt

SEQ ID NO: 1983751 - DNA, 15 bp, Homo sapiens
cagaatctcagtgtt

SEQ ID NO: 1983752 - DNA, 15 bp, Homo sapiens
agaatctcagtgttg

SEQ ID NO: 1983753 - DNA, 15 bp, Homo sapiens
gaatctcagtgttgt

SEQ ID NO: 1983754 - DNA, 15 bp, Homo sapiens
aatctcagtgttgtg

SEQ ID NO: 1983755 - DNA, 15 bp, Homo sapiens
atctcagtgttgtga

SEQ ID NO: 1983756 - DNA, 15 bp, Homo sapiens
tctcagtgttgtgat

SEQ ID NO: 1983757 - DNA, 15 bp, Homo sapiens
ctcagtgttgtgatt

SEQ ID NO: 1983758 - DNA, 15 bp, Homo sapiens
tcagtgttgtgattg

SEQ ID NO: 1983759 - DNA, 15 bp, Homo sapiens
cagtgttgtgattgt

SEQ ID NO: 1983760 - DNA, 15 bp, Homo sapiens
agtgttgtgattgtg

SEQ ID NO: 1983761 - DNA, 15 bp, Homo sapiens
gtgttgtgattgtgc

SEQ ID NO: 1983762 - DNA, 15 bp, Homo sapiens
tgttgtgattgtgct

SEQ ID NO: 1983763 - DNA, 15 bp, Homo sapiens
gttgtgattgtgctg

SEQ ID NO: 1983764 - DNA, 15 bp, Homo sapiens
ttgtgattgtgctgg

SEQ ID NO: 1983765 - DNA, 15 bp, Homo sapiens
tgtgattgtgctggg

SEQ ID NO: 1983766 - DNA, 15 bp, Homo sapiens
gtgattgtgctgggg

SEQ ID NO: 1983767 - DNA, 15 bp, Homo sapiens
tgattgtgctggggt

SEQ ID NO: 1983768 - DNA, 15 bp, Homo sapiens
gattgtgctggggtg

SEQ ID NO: 1983769 - DNA, 15 bp, Homo sapiens
attgtgctggggtgg

SEQ ID NO: 1983770 - DNA, 15 bp, Homo sapiens
ttgtgctggggtgga

SEQ ID NO: 1983771 - DNA, 15 bp, Homo sapiens
tgtgctggggtggag

SEQ ID NO: 1983772 - DNA, 15 bp, Homo sapiens
gtgctggggtggagc

SEQ ID NO: 1983773 - DNA, 15 bp, Homo sapiens
tgctggggtggagct

SEQ ID NO: 1983774 - DNA, 15 bp, Homo sapiens
gctggggtggagctg

SEQ ID NO: 1983775 - DNA, 15 bp, Homo sapiens
ctggggtggagctgc

SEQ ID NO: 1983776 - DNA, 15 bp, Homo sapiens
tggggtggagctgca

SEQ ID NO: 1983777 - DNA, 15 bp, Homo sapiens
ggggtggagctgcac

SEQ ID NO: 1983778 - DNA, 15 bp, Homo sapiens
gggtggagctgcact

SEQ ID NO: 1983779 - DNA, 15 bp, Homo sapiens
ggtggagctgcacta

SEQ ID NO: 1983780 - DNA, 15 bp, Homo sapiens
gtggagctgcactag

SEQ ID NO: 1983781 - DNA, 15 bp, Homo sapiens
tggagctgcactagg

SEQ ID NO: 1983782 - DNA, 15 bp, Homo sapiens
ggagctgcactaggt

SEQ ID NO: 1983783 - DNA, 15 bp, Homo sapiens
gagctgcactaggtg

SEQ ID NO: 1983784 - DNA, 15 bp, Homo sapiens
agctgcactaggtgg

SEQ ID NO: 1983785 - DNA, 15 bp, Homo sapiens
gctgcactaggtggc

SEQ ID NO: 1983786 - DNA, 15 bp, Homo sapiens
ctgcactaggtggct

SEQ ID NO: 1983787 - DNA, 15 bp, Homo sapiens
tgcactaggtggctt

SEQ ID NO: 1983788 - DNA, 15 bp, Homo sapiens
gcactaggtggcttt

SEQ ID NO: 1983789 - DNA, 15 bp, Homo sapiens
cactaggtggctttg

SEQ ID NO: 1983790 - DNA, 15 bp, Homo sapiens
actaggtggctttgg

SEQ ID NO: 1983791 - DNA, 15 bp, Homo sapiens
ctaggtggctttgga

SEQ ID NO: 1983792 - DNA, 15 bp, Homo sapiens
taggtggctttggag

SEQ ID NO: 1983793 - DNA, 15 bp, Homo sapiens
aggtggctttggagt

SEQ ID NO: 1983794 - DNA, 15 bp, Homo sapiens
ggtggctttggagtc

SEQ ID NO: 1983795 - DNA, 15 bp, Homo sapiens
gtggctttggagtcc

SEQ ID NO: 1983796 - DNA, 15 bp, Homo sapiens
tggctttggagtccc

SEQ ID NO: 1983797 - DNA, 15 bp, Homo sapiens
ggctttggagtccca

SEQ ID NO: 1983798 - DNA, 15 bp, Homo sapiens
gctttggagtcccag

SEQ ID NO: 1983799 - DNA, 15 bp, Homo sapiens
ctttggagtcccagc

SEQ ID NO: 1983800 - DNA, 15 bp, Homo sapiens
tttggagtcccagcc

SEQ ID NO: 1983801 - DNA, 15 bp, Homo sapiens
ttggagtcccagcca

SEQ ID NO: 1983802 - DNA, 15 bp, Homo sapiens
tggagtcccagccag

SEQ ID NO: 1983803 - DNA, 15 bp, Homo sapiens
ggagtcccagccagc

SEQ ID NO: 1983804 - DNA, 15 bp, Homo sapiens
gagtcccagccagca

SEQ ID NO: 1983805 - DNA, 15 bp, Homo sapiens
agtcccagccagcaa

SEQ ID NO: 1983806 - DNA, 15 bp, Homo sapiens
gtcccagccagcaat

SEQ ID NO: 1983807 - DNA, 15 bp, Homo sapiens
tcccagccagcaata

SEQ ID NO: 1983808 - DNA, 15 bp, Homo sapiens
cccagccagcaataa

SEQ ID NO: 1983809 - DNA, 15 bp, Homo sapiens
ccagccagcaataag

SEQ ID NO: 1983810 - DNA, 15 bp, Homo sapiens
cagccagcaataagc

SEQ ID NO: 1983811 - DNA, 15 bp, Homo sapiens
agccagcaataagcc

SEQ ID NO: 1983812 - DNA, 15 bp, Homo sapiens
gccagcaataagcca

SEQ ID NO: 1983813 - DNA, 15 bp, Homo sapiens
ccagcaataagccag

SEQ ID NO: 1983814 - DNA, 15 bp, Homo sapiens
cagcaataagccagc

SEQ ID NO: 1983815 - DNA, 15 bp, Homo sapiens
agcaataagccagca

SEQ ID NO: 1983816 - DNA, 15 bp, Homo sapiens
gcaataagccagcag

SEQ ID NO: 1983817 - DNA, 15 bp, Homo sapiens
caataagccagcagc

SEQ ID NO: 1983818 - DNA, 15 bp, Homo sapiens
aataagccagcagcg

SEQ ID NO: 1983819 - DNA, 15 bp, Homo sapiens
ataagccagcagcgg

SEQ ID NO: 1983820 - DNA, 15 bp, Homo sapiens
taagccagcagcggg

SEQ ID NO: 1983821 - DNA, 15 bp, Homo sapiens
aagccagcagcgggt

SEQ ID NO: 1983822 - DNA, 15 bp, Homo sapiens
agccagcagcgggtt

SEQ ID NO: 1983823 - DNA, 15 bp, Homo sapiens
gccagcagcgggttc

SEQ ID NO: 1983824 - DNA, 15 bp, Homo sapiens
ccagcagcgggttca

SEQ ID NO: 1983825 - DNA, 15 bp, Homo sapiens
cagcagcgggttcag

SEQ ID NO: 1983826 - DNA, 15 bp, Homo sapiens
agcagcgggttcaga

SEQ ID NO: 1983827 - DNA, 15 bp, Homo sapiens
gcagcgggttcagac

SEQ ID NO: 1983828 - DNA, 15 bp, Homo sapiens
cagcgggttcagacc

SEQ ID NO: 1983829 - DNA, 15 bp, Homo sapiens
agcgggttcagaccc

SEQ ID NO: 1983830 - DNA, 15 bp, Homo sapiens
gcgggttcagaccca

SEQ ID NO: 1983831 - DNA, 15 bp, Homo sapiens
cgggttcagacccat

SEQ ID NO: 1983832 - DNA, 15 bp, Homo sapiens
gggttcagacccata

SEQ ID NO: 1983833 - DNA, 15 bp, Homo sapiens
ggttcagacccatat

SEQ ID NO: 1983834 - DNA, 15 bp, Homo sapiens
gttcagacccatatc

SEQ ID NO: 1983835 - DNA, 15 bp, Homo sapiens
ttcagacccatatcc

SEQ ID NO: 1983836 - DNA, 15 bp, Homo sapiens
tcagacccatatccc

SEQ ID NO: 1983837 - DNA, 15 bp, Homo sapiens
cagacccatatcccc

SEQ ID NO: 1983838 - DNA, 15 bp, Homo sapiens
agacccatatccccg

SEQ ID NO: 1983839 - DNA, 15 bp, Homo sapiens
gacccatatccccgg

SEQ ID NO: 1983840 - DNA, 15 bp, Homo sapiens
acccatatccccggt

SEQ ID NO: 1983841 - DNA, 15 bp, Homo sapiens
cccatatccccggtg

SEQ ID NO: 1983842 - DNA, 15 bp, Homo sapiens
ccatatccccggtgg

SEQ ID NO: 1983843 - DNA, 15 bp, Homo sapiens
catatccccggtggg

SEQ ID NO: 1983844 - DNA, 15 bp, Homo sapiens
atatccccggtggga

SEQ ID NO: 1983845 - DNA, 15 bp, Homo sapiens
tatccccggtgggag

SEQ ID NO: 1983846 - DNA, 15 bp, Homo sapiens
atccccggtgggaga

SEQ ID NO: 1983847 - DNA, 15 bp, Homo sapiens
tccccggtgggagac

SEQ ID NO: 1983848 - DNA, 15 bp, Homo sapiens
ccccggtgggagaca

SEQ ID NO: 1983849 - DNA, 15 bp, Homo sapiens
cccggtgggagacag

SEQ ID NO: 1983850 - DNA, 15 bp, Homo sapiens
ccggtgggagacagc

SEQ ID NO: 1983851 - DNA, 15 bp, Homo sapiens
cggtgggagacagca

SEQ ID NO: 1983852 - DNA, 15 bp, Homo sapiens
ggtgggagacagcaa

SEQ ID NO: 1983853 - DNA, 15 bp, Homo sapiens
gtgggagacagcaac

SEQ ID NO: 1983854 - DNA, 15 bp, Homo sapiens
tgggagacagcaacc

SEQ ID NO: 1983855 - DNA, 15 bp, Homo sapiens
gggagacagcaaccc

SEQ ID NO: 1983856 - DNA, 15 bp, Homo sapiens
ggagacagcaaccca

SEQ ID NO: 1983857 - DNA, 15 bp, Homo sapiens
gagacagcaacccaa

SEQ ID NO: 1983858 - DNA, 15 bp, Homo sapiens
agacagcaacccaat

SEQ ID NO: 1983859 - DNA, 15 bp, Homo sapiens
gacagcaacccaatc

SEQ ID NO: 1983860 - DNA, 15 bp, Homo sapiens
acagcaacccaatcc

SEQ ID NO: 1983861 - DNA, 15 bp, Homo sapiens
cagcaacccaatcca

SEQ ID NO: 1983862 - DNA, 15 bp, Homo sapiens
agcaacccaatccag

SEQ ID NO: 1983863 - DNA, 15 bp, Homo sapiens
gcaacccaatccagt

SEQ ID NO: 1983864 - DNA, 15 bp, Homo sapiens
caacccaatccagtc

SEQ ID NO: 1983865 - DNA, 15 bp, Homo sapiens
aacccaatccagtcc

SEQ ID NO: 1983866 - DNA, 15 bp, Homo sapiens
acccaatccagtcca

SEQ ID NO: 1983867 - DNA, 15 bp, Homo sapiens
cccaatccagtccag

SEQ ID NO: 1983868 - DNA, 15 bp, Homo sapiens
ccaatccagtccagg

SEQ ID NO: 1983869 - DNA, 15 bp, Homo sapiens
caatccagtccagga

SEQ ID NO: 1983870 - DNA, 15 bp, Homo sapiens
aatccagtccaggac

SEQ ID NO: 1983871 - DNA, 15 bp, Homo sapiens
atccagtccaggacg

SEQ ID NO: 1983872 - DNA, 15 bp, Homo sapiens
tccagtccaggacgc

SEQ ID NO: 1983873 - DNA, 15 bp, Homo sapiens
ccagtccaggacgct

SEQ ID NO: 1983874 - DNA, 15 bp, Homo sapiens
cagtccaggacgctg

SEQ ID NO: 1983875 - DNA, 15 bp, Homo sapiens
agtccaggacgctgg

SEQ ID NO: 1983876 - DNA, 15 bp, Homo sapiens
ccaggacgctgggca

SEQ ID NO: 1983877 - DNA, 15 bp, Homo sapiens
caggacgctgggcac

SEQ ID NO: 1983878 - DNA, 15 bp, Homo sapiens
aggacgctgggcacc

SEQ ID NO: 1983879 - DNA, 15 bp, Homo sapiens
ggacgctgggcacca

SEQ ID NO: 1983880 - DNA, 15 bp, Homo sapiens
gacgctgggcaccag

SEQ ID NO: 1983881 - DNA, 15 bp, Homo sapiens
acgctgggcaccaga

SEQ ID NO: 1983882 - DNA, 15 bp, Homo sapiens
cgctgggcaccagaa

SEQ ID NO: 1983883 - DNA, 15 bp, Homo sapiens
gctgggcaccagaaa

SEQ ID NO: 1983884 - DNA, 15 bp, Homo sapiens
ctgggcaccagaaag

SEQ ID NO: 1983885 - DNA, 15 bp, Homo sapiens
tgggcaccagaaagg

SEQ ID NO: 1983886 - DNA, 15 bp, Homo sapiens
gggcaccagaaaggt

SEQ ID NO: 1983887 - DNA, 15 bp, Homo sapiens
ggcaccagaaaggtg

SEQ ID NO: 1983888 - DNA, 15 bp, Homo sapiens
gcaccagaaaggtgt

SEQ ID NO: 1983889 - DNA, 15 bp, Homo sapiens
caccagaaaggtgtc

SEQ ID NO: 1983890 - DNA, 15 bp, Homo sapiens
accagaaaggtgtca

SEQ ID NO: 1983891 - DNA, 15 bp, Homo sapiens
ccagaaaggtgtcag

SEQ ID NO: 1983892 - DNA, 15 bp, Homo sapiens
cagaaaggtgtcagg

SEQ ID NO: 1983893 - DNA, 15 bp, Homo sapiens
agaaaggtgtcaggg

SEQ ID NO: 1983894 - DNA, 15 bp, Homo sapiens
gaaaggtgtcagggc

SEQ ID NO: 1983895 - DNA, 15 bp, Homo sapiens
aaaggtgtcagggcc

SEQ ID NO: 1983896 - DNA, 15 bp, Homo sapiens
aaggtgtcagggcca

SEQ ID NO: 1983897 - DNA, 15 bp, Homo sapiens
aggtgtcagggccag

SEQ ID NO: 1983898 - DNA, 15 bp, Homo sapiens
ggtgtcagggccagg

SEQ ID NO: 1983899 - DNA, 15 bp, Homo sapiens
gtgtcagggccaggg

SEQ ID NO: 1983900 - DNA, 15 bp, Homo sapiens
tgtcagggccagggc

SEQ ID NO: 1983901 - DNA, 15 bp, Homo sapiens
gtcagggccagggcc

SEQ ID NO: 1983902 - DNA, 15 bp, Homo sapiens
tcagggccagggccc

SEQ ID NO: 1983903 - DNA, 15 bp, Homo sapiens
cagggccagggcccc

SEQ ID NO: 1983904 - DNA, 15 bp, Homo sapiens
agggccagggcccca

SEQ ID NO: 1983905 - DNA, 15 bp, Homo sapiens
gggccagggccccac

SEQ ID NO: 1983906 - DNA, 15 bp, Homo sapiens
ggccagggccccact

SEQ ID NO: 1983907 - DNA, 15 bp, Homo sapiens
gccagggccccactc

SEQ ID NO: 1983908 - DNA, 15 bp, Homo sapiens
ccagggccccactct

SEQ ID NO: 1983909 - DNA, 15 bp, Homo sapiens
cagggccccactctg

SEQ ID NO: 1983910 - DNA, 15 bp, Homo sapiens
agggccccactctgc

SEQ ID NO: 1983911 - DNA, 15 bp, Homo sapiens
gggccccactctgct

SEQ ID NO: 1983912 - DNA, 15 bp, Homo sapiens
ggccccactctgctc

SEQ ID NO: 1983913 - DNA, 15 bp, Homo sapiens
gccccactctgctct

SEQ ID NO: 1983914 - DNA, 15 bp, Homo sapiens
ccccactctgctctc

SEQ ID NO: 1983915 - DNA, 15 bp, Homo sapiens
cccactctgctctca

SEQ ID NO: 1983916 - DNA, 15 bp, Homo sapiens
ccactctgctctcac

SEQ ID NO: 1983917 - DNA, 15 bp, Homo sapiens
cactctgctctcact

SEQ ID NO: 1983918 - DNA, 15 bp, Homo sapiens
actctgctctcactt

SEQ ID NO: 1983919 - DNA, 15 bp, Homo sapiens
ctctgctctcacttc

SEQ ID NO: 1983920 - DNA, 15 bp, Homo sapiens
tctgctctcacttcc

SEQ ID NO: 1983921 - DNA, 15 bp, Homo sapiens
ctgctctcacttccc

SEQ ID NO: 1983922 - DNA, 15 bp, Homo sapiens
tgctctcacttcccc

SEQ ID NO: 1983923 - DNA, 15 bp, Homo sapiens
gctctcacttccccc

SEQ ID NO: 1983924 - DNA, 15 bp, Homo sapiens
ctctcacttccccca

SEQ ID NO: 1983925 - DNA, 15 bp, Homo sapiens
tctcacttcccccat

SEQ ID NO: 1983926 - DNA, 15 bp, Homo sapiens
ctcacttcccccatg

SEQ ID NO: 1983927 - DNA, 15 bp, Homo sapiens
tcacttcccccatgg

SEQ ID NO: 1983928 - DNA, 15 bp, Homo sapiens
cacttcccccatggg

SEQ ID NO: 1983929 - DNA, 15 bp, Homo sapiens
acttcccccatgggg

SEQ ID NO: 1983930 - DNA, 15 bp, Homo sapiens
cttcccccatgggga

SEQ ID NO: 1983931 - DNA, 15 bp, Homo sapiens
ttcccccatggggag

SEQ ID NO: 1983932 - DNA, 15 bp, Homo sapiens
tcccccatggggagc

SEQ ID NO: 1983933 - DNA, 15 bp, Homo sapiens
cccccatggggagcc

SEQ ID NO: 1983934 - DNA, 15 bp, Homo sapiens
ccccatggggagcct

SEQ ID NO: 1983935 - DNA, 15 bp, Homo sapiens
cccatggggagccta

SEQ ID NO: 1983936 - DNA, 15 bp, Homo sapiens
ccatggggagcctaa

SEQ ID NO: 1983937 - DNA, 15 bp, Homo sapiens
catggggagcctaaa

SEQ ID NO: 1983938 - DNA, 15 bp, Homo sapiens
atggggagcctaaat

SEQ ID NO: 1983939 - DNA, 15 bp, Homo sapiens
tggggagcctaaatc

SEQ ID NO: 1983940 - DNA, 15 bp, Homo sapiens
ggggagcctaaatcc

SEQ ID NO: 1983941 - DNA, 15 bp, Homo sapiens
gggagcctaaatccg

SEQ ID NO: 1983942 - DNA, 15 bp, Homo sapiens
ggagcctaaatccga

SEQ ID NO: 1983943 - DNA, 15 bp, Homo sapiens
gagcctaaatccgag

SEQ ID NO: 1983944 - DNA, 15 bp, Homo sapiens
agcctaaatccgagc

SEQ ID NO: 1983945 - DNA, 15 bp, Homo sapiens
gcctaaatccgagca

SEQ ID NO: 1983946 - DNA, 15 bp, Homo sapiens
cctaaatccgagcat

SEQ ID NO: 1983947 - DNA, 15 bp, Homo sapiens
ctaaatccgagcatc

SEQ ID NO: 1983948 - DNA, 15 bp, Homo sapiens
taaatccgagcatct

SEQ ID NO: 1983949 - DNA, 15 bp, Homo sapiens
aaatccgagcatctg

SEQ ID NO: 1983950 - DNA, 15 bp, Homo sapiens
aatccgagcatctgt

SEQ ID NO: 1983951 - DNA, 15 bp, Homo sapiens
atccgagcatctgtt

SEQ ID NO: 1983952 - DNA, 15 bp, Homo sapiens
tccgagcatctgttt

SEQ ID NO: 1983953 - DNA, 15 bp, Homo sapiens
ccgagcatctgtttc

SEQ ID NO: 1983954 - DNA, 15 bp, Homo sapiens
cgagcatctgtttcc

SEQ ID NO: 1983955 - DNA, 15 bp, Homo sapiens
gagcatctgtttcct

SEQ ID NO: 1983956 - DNA, 15 bp, Homo sapiens
agcatctgtttcctt

SEQ ID NO: 1983957 - DNA, 15 bp, Homo sapiens
gcatctgtttccttt

SEQ ID NO: 1983958 - DNA, 15 bp, Homo sapiens
catctgtttcctttt

SEQ ID NO: 1983959 - DNA, 15 bp, Homo sapiens
atctgtttccttttg

SEQ ID NO: 1983960 - DNA, 15 bp, Homo sapiens
tctgtttccttttgg

SEQ ID NO: 1983961 - DNA, 15 bp, Homo sapiens
ctgtttccttttggg

SEQ ID NO: 1983962 - DNA, 15 bp, Homo sapiens
tgtttccttttgggc

SEQ ID NO: 1983963 - DNA, 15 bp, Homo sapiens
gtttccttttgggcg

SEQ ID NO: 1983964 - DNA, 15 bp, Homo sapiens
tttccttttgggcgc

SEQ ID NO: 1983965 - DNA, 15 bp, Homo sapiens
ttccttttgggcgcg

SEQ ID NO: 1983966 - DNA, 15 bp, Homo sapiens
tccttttgggcgcgg

SEQ ID NO: 1983967 - DNA, 15 bp, Homo sapiens
ccttttgggcgcggg

SEQ ID NO: 1983968 - DNA, 15 bp, Homo sapiens
cttttgggcgcggga

SEQ ID NO: 1983969 - DNA, 15 bp, Homo sapiens
ttttgggcgcgggaa

SEQ ID NO: 1983970 - DNA, 15 bp, Homo sapiens
tttgggcgcgggaag

SEQ ID NO: 1983971 - DNA, 15 bp, Homo sapiens
ttgggcgcgggaagc

SEQ ID NO: 1983972 - DNA, 15 bp, Homo sapiens
tgggcgcgggaagcc

SEQ ID NO: 1983973 - DNA, 15 bp, Homo sapiens
gggcgcgggaagcca

SEQ ID NO: 1983974 - DNA, 15 bp, Homo sapiens
ggcgcgggaagccag

SEQ ID NO: 1983975 - DNA, 15 bp, Homo sapiens
gcgcgggaagccagc

SEQ ID NO: 1983976 - DNA, 15 bp, Homo sapiens
cgcgggaagccagca

SEQ ID NO: 1983977 - DNA, 15 bp, Homo sapiens
gcgggaagccagcag

SEQ ID NO: 1983978 - DNA, 15 bp, Homo sapiens
cgggaagccagcagg

SEQ ID NO: 1983979 - DNA, 15 bp, Homo sapiens
gggaagccagcaggt

SEQ ID NO: 1983980 - DNA, 15 bp, Homo sapiens
ggaagccagcaggtc

SEQ ID NO: 1983981 - DNA, 15 bp, Homo sapiens
gaagccagcaggtct

SEQ ID NO: 1983982 - DNA, 15 bp, Homo sapiens
aagccagcaggtctc

SEQ ID NO: 1983983 - DNA, 15 bp, Homo sapiens
agccagcaggtctca

SEQ ID NO: 1983984 - DNA, 15 bp, Homo sapiens
gccagcaggtctcaa

SEQ ID NO: 1983985 - DNA, 15 bp, Homo sapiens
ccagcaggtctcaaa

SEQ ID NO: 1983986 - DNA, 15 bp, Homo sapiens
cagcaggtctcaaat

SEQ ID NO: 1983987 - DNA, 15 bp, Homo sapiens
agcaggtctcaaatt

SEQ ID NO: 1983988 - DNA, 15 bp, Homo sapiens
gcaggtctcaaattc

SEQ ID NO: 1983989 - DNA, 15 bp, Homo sapiens
caggtctcaaattcc

SEQ ID NO: 1983990 - DNA, 15 bp, Homo sapiens
aggtctcaaattccc

SEQ ID NO: 1983991 - DNA, 15 bp, Homo sapiens
ggtctcaaattccct

SEQ ID NO: 1983992 - DNA, 15 bp, Homo sapiens
gtctcaaattccctg

SEQ ID NO: 1983993 - DNA, 15 bp, Homo sapiens
tctcaaattccctga

SEQ ID NO: 1983994 - DNA, 15 bp, Homo sapiens
ctcaaattccctgag

SEQ ID NO: 1983995 - DNA, 15 bp, Homo sapiens
tcaaattccctgaga

SEQ ID NO: 1983996 - DNA, 15 bp, Homo sapiens
caaattccctgagag

SEQ ID NO: 1983997 - DNA, 15 bp, Homo sapiens
aaattccctgagagt

SEQ ID NO: 1983998 - DNA, 15 bp, Homo sapiens
aattccctgagagtg

SEQ ID NO: 1983999 - DNA, 15 bp, Homo sapiens
attccctgagagtgc

SEQ ID NO: 1984000 - DNA, 15 bp, Homo sapiens
ttccctgagagtgca

SEQ ID NO: 1984001 - DNA, 15 bp, Homo sapiens
tccctgagagtgcag

SEQ ID NO: 1984002 - DNA, 15 bp, Homo sapiens
ccctgagagtgcagc

SEQ ID NO: 1984003 - DNA, 15 bp, Homo sapiens
cctgagagtgcagcc

SEQ ID NO: 1984004 - DNA, 15 bp, Homo sapiens
ctgagagtgcagcca

SEQ ID NO: 1984005 - DNA, 15 bp, Homo sapiens
tgagagtgcagccag

SEQ ID NO: 1984006 - DNA, 15 bp, Homo sapiens
gagagtgcagccagg

SEQ ID NO: 1984007 - DNA, 15 bp, Homo sapiens
agagtgcagccaggt

SEQ ID NO: 1984008 - DNA, 15 bp, Homo sapiens
gagtgcagccaggtt

SEQ ID NO: 1984009 - DNA, 15 bp, Homo sapiens
agtgcagccaggttt

SEQ ID NO: 1984010 - DNA, 15 bp, Homo sapiens
gtgcagccaggtttt

SEQ ID NO: 1984011 - DNA, 15 bp, Homo sapiens
tgcagccaggttttt

SEQ ID NO: 1984012 - DNA, 15 bp, Homo sapiens
gcagccaggtttttc

SEQ ID NO: 1984013 - DNA, 15 bp, Homo sapiens
cagccaggtttttcc

SEQ ID NO: 1984014 - DNA, 15 bp, Homo sapiens
agccaggtttttcca

SEQ ID NO: 1984015 - DNA, 15 bp, Homo sapiens
gccaggtttttccag

SEQ ID NO: 1984016 - DNA, 15 bp, Homo sapiens
ccaggtttttccagg

SEQ ID NO: 1984017 - DNA, 15 bp, Homo sapiens
caggtttttccagga

SEQ ID NO: 1984018 - DNA, 15 bp, Homo sapiens
aggtttttccaggac

SEQ ID NO: 1984019 - DNA, 15 bp, Homo sapiens
ggtttttccaggaca

SEQ ID NO: 1984020 - DNA, 15 bp, Homo sapiens
gtttttccaggacag

SEQ ID NO: 1984021 - DNA, 15 bp, Homo sapiens
tttttccaggacaga

SEQ ID NO: 1984022 - DNA, 15 bp, Homo sapiens
ttttccaggacagaa

SEQ ID NO: 1984023 - DNA, 15 bp, Homo sapiens
tttccaggacagaat

SEQ ID NO: 1984024 - DNA, 15 bp, Homo sapiens
ttccaggacagaatt

SEQ ID NO: 1984025 - DNA, 15 bp, Homo sapiens
tccaggacagaattc

SEQ ID NO: 1984026 - DNA, 15 bp, Homo sapiens
ccaggacagaattcc

SEQ ID NO: 1984027 - DNA, 15 bp, Homo sapiens
caggacagaattcca

SEQ ID NO: 1984028 - DNA, 15 bp, Homo sapiens
aggacagaattccat

SEQ ID NO: 1984029 - DNA, 15 bp, Homo sapiens
ggacagaattccatg

SEQ ID NO: 1984030 - DNA, 15 bp, Homo sapiens
gacagaattccatga

SEQ ID NO: 1984031 - DNA, 15 bp, Homo sapiens
acagaattccatgaa

SEQ ID NO: 1984032 - DNA, 15 bp, Homo sapiens
cagaattccatgaag

SEQ ID NO: 1984033 - DNA, 15 bp, Homo sapiens
agaattccatgaagg

SEQ ID NO: 1984034 - DNA, 15 bp, Homo sapiens
gaattccatgaaggc

SEQ ID NO: 1984035 - DNA, 15 bp, Homo sapiens
aattccatgaaggca

SEQ ID NO: 1984036 - DNA, 15 bp, Homo sapiens
attccatgaaggcag

SEQ ID NO: 1984037 - DNA, 15 bp, Homo sapiens
tccatgaaggcagct

SEQ ID NO: 1984038 - DNA, 15 bp, Homo sapiens
ccatgaaggcagctc

SEQ ID NO: 1984039 - DNA, 15 bp, Homo sapiens
catgaaggcagctcc

SEQ ID NO: 1984040 - DNA, 15 bp, Homo sapiens
atgaaggcagctcct

SEQ ID NO: 1984041 - DNA, 15 bp, Homo sapiens
tgaaggcagctccta

SEQ ID NO: 1984042 - DNA, 15 bp, Homo sapiens
gaaggcagctcctag

SEQ ID NO: 1984043 - DNA, 15 bp, Homo sapiens
aaggcagctcctagg

SEQ ID NO: 1984044 - DNA, 15 bp, Homo sapiens
aggcagctcctaggg

SEQ ID NO: 1984045 - DNA, 15 bp, Homo sapiens
ggcagctcctagggg

SEQ ID NO: 1984046 - DNA, 15 bp, Homo sapiens
gcagctcctagggga

SEQ ID NO: 1984047 - DNA, 15 bp, Homo sapiens
cagctcctaggggag

SEQ ID NO: 1984048 - DNA, 15 bp, Homo sapiens
agctcctaggggagc

SEQ ID NO: 1984049 - DNA, 15 bp, Homo sapiens
gctcctaggggagct

SEQ ID NO: 1984050 - DNA, 15 bp, Homo sapiens
ctcctaggggagctt

SEQ ID NO: 1984051 - DNA, 15 bp, Homo sapiens
tcctaggggagcttc

SEQ ID NO: 1984052 - DNA, 15 bp, Homo sapiens
cctaggggagcttct

SEQ ID NO: 1984053 - DNA, 15 bp, Homo sapiens
ctaggggagcttctg

SEQ ID NO: 1984054 - DNA, 15 bp, Homo sapiens
taggggagcttctgg

SEQ ID NO: 1984055 - DNA, 15 bp, Homo sapiens
aggggagcttctggg

SEQ ID NO: 1984056 - DNA, 15 bp, Homo sapiens
ggggagcttctggga

SEQ ID NO: 1984057 - DNA, 15 bp, Homo sapiens
gggagcttctgggag

SEQ ID NO: 1984058 - DNA, 15 bp, Homo sapiens
ggagcttctgggagt

SEQ ID NO: 1984059 - DNA, 15 bp, Homo sapiens
gagcttctgggagtt

SEQ ID NO: 1984060 - DNA, 15 bp, Homo sapiens
agcttctgggagttc

SEQ ID NO: 1984061 - DNA, 15 bp, Homo sapiens
gcttctgggagttct

SEQ ID NO: 1984062 - DNA, 15 bp, Homo sapiens
cttctgggagttcta

SEQ ID NO: 1984063 - DNA, 15 bp, Homo sapiens
ttctgggagttctat

SEQ ID NO: 1984064 - DNA, 15 bp, Homo sapiens
tctgggagttctatg

SEQ ID NO: 1984065 - DNA, 15 bp, Homo sapiens
ctgggagttctatgc

SEQ ID NO: 1984066 - DNA, 15 bp, Homo sapiens
tgggagttctatgca

SEQ ID NO: 1984067 - DNA, 15 bp, Homo sapiens
gggagttctatgcag

SEQ ID NO: 1984068 - DNA, 15 bp, Homo sapiens
ggagttctatgcagt

SEQ ID NO: 1984069 - DNA, 15 bp, Homo sapiens
gagttctatgcagtg

SEQ ID NO: 1984070 - DNA, 15 bp, Homo sapiens
agttctatgcagtgg

SEQ ID NO: 1984071 - DNA, 15 bp, Homo sapiens
gttctatgcagtgga

SEQ ID NO: 1984072 - DNA, 15 bp, Homo sapiens
ttctatgcagtggaa

SEQ ID NO: 1984073 - DNA, 15 bp, Homo sapiens
tctatgcagtggaag

SEQ ID NO: 1984074 - DNA, 15 bp, Homo sapiens
ctatgcagtggaaga

SEQ ID NO: 1984075 - DNA, 15 bp, Homo sapiens
tatgcagtggaagac

SEQ ID NO: 1984076 - DNA, 15 bp, Homo sapiens
atgcagtggaagaca

SEQ ID NO: 1984077 - DNA, 15 bp, Homo sapiens
tgcagtggaagacac

SEQ ID NO: 1984078 - DNA, 15 bp, Homo sapiens
gcagtggaagacact

SEQ ID NO: 1984079 - DNA, 15 bp, Homo sapiens
cagtggaagacactc

SEQ ID NO: 1984080 - DNA, 15 bp, Homo sapiens
agtggaagacactcc

SEQ ID NO: 1984081 - DNA, 15 bp, Homo sapiens
gtggaagacactcct

SEQ ID NO: 1984082 - DNA, 15 bp, Homo sapiens
tggaagacactcctg

SEQ ID NO: 1984083 - DNA, 15 bp, Homo sapiens
ggaagacactcctgg

SEQ ID NO: 1984084 - DNA, 15 bp, Homo sapiens
gaagacactcctggc

SEQ ID NO: 1984085 - DNA, 15 bp, Homo sapiens
aagacactcctggcc

SEQ ID NO: 1984086 - DNA, 15 bp, Homo sapiens
agacactcctggcca

SEQ ID NO: 1984087 - DNA, 15 bp, Homo sapiens
gacactcctggccag

SEQ ID NO: 1984088 - DNA, 15 bp, Homo sapiens
acactcctggccagg

SEQ ID NO: 1984089 - DNA, 15 bp, Homo sapiens
cactcctggccagga

SEQ ID NO: 1984090 - DNA, 15 bp, Homo sapiens
tcctggccaggagtc

SEQ ID NO: 1984091 - DNA, 15 bp, Homo sapiens
cctggccaggagtcc

SEQ ID NO: 1984092 - DNA, 15 bp, Homo sapiens
ctggccaggagtccg

SEQ ID NO: 1984093 - DNA, 15 bp, Homo sapiens
tggccaggagtccgg

SEQ ID NO: 1984094 - DNA, 15 bp, Homo sapiens
ggccaggagtccggg

SEQ ID NO: 1984095 - DNA, 15 bp, Homo sapiens
gccaggagtccgggg

SEQ ID NO: 1984096 - DNA, 15 bp, Homo sapiens
ccaggagtccggggc

SEQ ID NO: 1984097 - DNA, 15 bp, Homo sapiens
caggagtccggggcc

SEQ ID NO: 1984098 - DNA, 15 bp, Homo sapiens
aggagtccggggccc

SEQ ID NO: 1984099 - DNA, 15 bp, Homo sapiens
ggagtccggggccct

SEQ ID NO: 1984100 - DNA, 15 bp, Homo sapiens
gagtccggggccctg

SEQ ID NO: 1984101 - DNA, 15 bp, Homo sapiens
agtccggggccctgt

SEQ ID NO: 1984102 - DNA, 15 bp, Homo sapiens
gtccggggccctgtg

SEQ ID NO: 1984103 - DNA, 15 bp, Homo sapiens
tccggggccctgtgg

SEQ ID NO: 1984104 - DNA, 15 bp, Homo sapiens
ccggggccctgtggg

SEQ ID NO: 1984105 - DNA, 15 bp, Homo sapiens
cggggccctgtggga

SEQ ID NO: 1984106 - DNA, 15 bp, Homo sapiens
ggggccctgtgggag

SEQ ID NO: 1984107 - DNA, 15 bp, Homo sapiens
gggccctgtgggagg

SEQ ID NO: 1984108 - DNA, 15 bp, Homo sapiens
ggccctgtgggaggc

SEQ ID NO: 1984109 - DNA, 15 bp, Homo sapiens
ccctgtgggaggccc

SEQ ID NO: 1984110 - DNA, 15 bp, Homo sapiens
cctgtgggaggccct

SEQ ID NO: 1984111 - DNA, 15 bp, Homo sapiens
ctgtgggaggccctg

SEQ ID NO: 1984112 - DNA, 15 bp, Homo sapiens
tgtgggaggccctgg

SEQ ID NO: 1984113 - DNA, 15 bp, Homo sapiens
gtgggaggccctggc

SEQ ID NO: 1984114 - DNA, 15 bp, Homo sapiens
tgggaggccctggct

SEQ ID NO: 1984115 - DNA, 15 bp, Homo sapiens
gggaggccctggctg

SEQ ID NO: 1984116 - DNA, 15 bp, Homo sapiens
ggaggccctggctga

SEQ ID NO: 1984117 - DNA, 15 bp, Homo sapiens
gaggccctggctgaa

SEQ ID NO: 1984118 - DNA, 15 bp, Homo sapiens
aggccctggctgaat

SEQ ID NO: 1984119 - DNA, 15 bp, Homo sapiens
ggccctggctgaatc

SEQ ID NO: 1984120 - DNA, 15 bp, Homo sapiens
gccctggctgaatca

SEQ ID NO: 1984121 - DNA, 15 bp, Homo sapiens
ccctggctgaatcac

SEQ ID NO: 1984122 - DNA, 15 bp, Homo sapiens
cctggctgaatcacc

SEQ ID NO: 1984123 - DNA, 15 bp, Homo sapiens
ctggctgaatcacca

SEQ ID NO: 1984124 - DNA, 15 bp, Homo sapiens
tggctgaatcaccac

SEQ ID NO: 1984125 - DNA, 15 bp, Homo sapiens
ggctgaatcaccaca

SEQ ID NO: 1984126 - DNA, 15 bp, Homo sapiens
gctgaatcaccacac

SEQ ID NO: 1984127 - DNA, 15 bp, Homo sapiens
ctgaatcaccacacc

SEQ ID NO: 1984128 - DNA, 15 bp, Homo sapiens
tgaatcaccacacct

SEQ ID NO: 1984129 - DNA, 15 bp, Homo sapiens
gaatcaccacacctc

SEQ ID NO: 1984130 - DNA, 15 bp, Homo sapiens
aatcaccacacctct

SEQ ID NO: 1984131 - DNA, 15 bp, Homo sapiens
atcaccacacctctc

SEQ ID NO: 1984132 - DNA, 15 bp, Homo sapiens
tcaccacacctctct

SEQ ID NO: 1984133 - DNA, 15 bp, Homo sapiens
caccacacctctctc

SEQ ID NO: 1984134 - DNA, 15 bp, Homo sapiens
accacacctctctcg

SEQ ID NO: 1984135 - DNA, 15 bp, Homo sapiens
ccacacctctctcga

SEQ ID NO: 1984136 - DNA, 15 bp, Homo sapiens
cacacctctctcgac

SEQ ID NO: 1984137 - DNA, 15 bp, Homo sapiens
acacctctctcgacc

SEQ ID NO: 1984138 - DNA, 15 bp, Homo sapiens
cacctctctcgacca

SEQ ID NO: 1984139 - DNA, 15 bp, Homo sapiens
acctctctcgaccat

SEQ ID NO: 1984140 - DNA, 15 bp, Homo sapiens
cctctctcgaccata

SEQ ID NO: 1984141 - DNA, 15 bp, Homo sapiens
ctctctcgaccatac

SEQ ID NO: 1984142 - DNA, 15 bp, Homo sapiens
tctctcgaccatacc

SEQ ID NO: 1984143 - DNA, 15 bp, Homo sapiens
ctctcgaccataccc

SEQ ID NO: 1984144 - DNA, 15 bp, Homo sapiens
tctcgaccataccca

SEQ ID NO: 1984145 - DNA, 15 bp, Homo sapiens
ctcgaccatacccac

SEQ ID NO: 1984146 - DNA, 15 bp, Homo sapiens
tcgaccatacccacc

SEQ ID NO: 1984147 - DNA, 15 bp, Homo sapiens
cgaccatacccacct

SEQ ID NO: 1984148 - DNA, 15 bp, Homo sapiens
gaccatacccacctg

SEQ ID NO: 1984149 - DNA, 15 bp, Homo sapiens
accatacccacctgt

SEQ ID NO: 1984150 - DNA, 15 bp, Homo sapiens
ccatacccacctgta

SEQ ID NO: 1984151 - DNA, 15 bp, Homo sapiens
catacccacctgtaa

SEQ ID NO: 1984152 - DNA, 15 bp, Homo sapiens
atacccacctgtaag

SEQ ID NO: 1984153 - DNA, 15 bp, Homo sapiens
tacccacctgtaagg

SEQ ID NO: 1984154 - DNA, 15 bp, Homo sapiens
acccacctgtaaggg

SEQ ID NO: 1984155 - DNA, 15 bp, Homo sapiens
cccacctgtaaggga

SEQ ID NO: 1984156 - DNA, 15 bp, Homo sapiens
ccacctgtaagggaa

SEQ ID NO: 1984157 - DNA, 15 bp, Homo sapiens
cacctgtaagggaac

SEQ ID NO: 1984158 - DNA, 15 bp, Homo sapiens
acctgtaagggaacg

SEQ ID NO: 1984159 - DNA, 15 bp, Homo sapiens
cctgtaagggaacgg

SEQ ID NO: 1984160 - DNA, 15 bp, Homo sapiens
ctgtaagggaacgga

SEQ ID NO: 1984161 - DNA, 15 bp, Homo sapiens
tgtaagggaacggag

SEQ ID NO: 1984162 - DNA, 15 bp, Homo sapiens
gtaagggaacggaga

SEQ ID NO: 1984163 - DNA, 15 bp, Homo sapiens
taagggaacggagag

SEQ ID NO: 1984164 - DNA, 15 bp, Homo sapiens
aagggaacggagagg

SEQ ID NO: 1984165 - DNA, 15 bp, Homo sapiens
agggaacggagaggg

SEQ ID NO: 1984166 - DNA, 15 bp, Homo sapiens
gggaacggagagggc

SEQ ID NO: 1984167 - DNA, 15 bp, Homo sapiens
ggaacggagagggcc

SEQ ID NO: 1984168 - DNA, 15 bp, Homo sapiens
gaacggagagggcca

SEQ ID NO: 1984169 - DNA, 15 bp, Homo sapiens
aacggagagggccag

SEQ ID NO: 1984170 - DNA, 15 bp, Homo sapiens
acggagagggccagg

SEQ ID NO: 1984171 - DNA, 15 bp, Homo sapiens
cggagagggccaggg

SEQ ID NO: 1984172 - DNA, 15 bp, Homo sapiens
ggagagggccagggc

SEQ ID NO: 1984173 - DNA, 15 bp, Homo sapiens
gagagggccagggcc

SEQ ID NO: 1984174 - DNA, 15 bp, Homo sapiens
agagggccagggcct

SEQ ID NO: 1984175 - DNA, 15 bp, Homo sapiens
gagggccagggcctt

SEQ ID NO: 1984176 - DNA, 15 bp, Homo sapiens
agggccagggccttg

SEQ ID NO: 1984177 - DNA, 15 bp, Homo sapiens
gggccagggccttgg

SEQ ID NO: 1984178 - DNA, 15 bp, Homo sapiens
ggccagggccttggc

SEQ ID NO: 1984179 - DNA, 15 bp, Homo sapiens
gccagggccttggct

SEQ ID NO: 1984180 - DNA, 15 bp, Homo sapiens
ccagggccttggctt

SEQ ID NO: 1984181 - DNA, 15 bp, Homo sapiens
cagggccttggcttt

SEQ ID NO: 1984182 - DNA, 15 bp, Homo sapiens
agggccttggctttc

SEQ ID NO: 1984183 - DNA, 15 bp, Homo sapiens
gggccttggctttct

SEQ ID NO: 1984184 - DNA, 15 bp, Homo sapiens
ggccttggctttctt

SEQ ID NO: 1984185 - DNA, 15 bp, Homo sapiens
gccttggctttcttt

SEQ ID NO: 1984186 - DNA, 15 bp, Homo sapiens
ccttggctttctttc

SEQ ID NO: 1984187 - DNA, 15 bp, Homo sapiens
cttggctttctttca

SEQ ID NO: 1984188 - DNA, 15 bp, Homo sapiens
ttggctttctttcac

SEQ ID NO: 1984189 - DNA, 15 bp, Homo sapiens
tggctttctttcact

SEQ ID NO: 1984190 - DNA, 15 bp, Homo sapiens
ggctttctttcactt

SEQ ID NO: 1984191 - DNA, 15 bp, Homo sapiens
gctttctttcactta

SEQ ID NO: 1984192 - DNA, 15 bp, Homo sapiens
ctttctttcacttaa

SEQ ID NO: 1984193 - DNA, 15 bp, Homo sapiens
tttctttcacttaat

SEQ ID NO: 1984194 - DNA, 15 bp, Homo sapiens
ttctttcacttaatc

SEQ ID NO: 1984195 - DNA, 15 bp, Homo sapiens
tctttcacttaatct

SEQ ID NO: 1984196 - DNA, 15 bp, Homo sapiens
ctttcacttaatctc

SEQ ID NO: 1984197 - DNA, 15 bp, Homo sapiens
tttcacttaatctca

SEQ ID NO: 1984198 - DNA, 15 bp, Homo sapiens
ttcacttaatctcag

SEQ ID NO: 1984199 - DNA, 15 bp, Homo sapiens
tcacttaatctcagt

SEQ ID NO: 1984200 - DNA, 15 bp, Homo sapiens
cacttaatctcagtt

SEQ ID NO: 1984201 - DNA, 15 bp, Homo sapiens
acttaatctcagttc

SEQ ID NO: 1984202 - DNA, 15 bp, Homo sapiens
cttaatctcagttca

SEQ ID NO: 1984203 - DNA, 15 bp, Homo sapiens
ttaatctcagttcag

SEQ ID NO: 1984204 - DNA, 15 bp, Homo sapiens
taatctcagttcagg

SEQ ID NO: 1984205 - DNA, 15 bp, Homo sapiens
aatctcagttcaggt

SEQ ID NO: 1984206 - DNA, 15 bp, Homo sapiens
atctcagttcaggtg

SEQ ID NO: 1984207 - DNA, 15 bp, Homo sapiens
tctcagttcaggtga

SEQ ID NO: 1984208 - DNA, 15 bp, Homo sapiens
ctcagttcaggtgag

SEQ ID NO: 1984209 - DNA, 15 bp, Homo sapiens
tcagttcaggtgagg

SEQ ID NO: 1984210 - DNA, 15 bp, Homo sapiens
cagttcaggtgagga

SEQ ID NO: 1984211 - DNA, 15 bp, Homo sapiens
agttcaggtgaggac

SEQ ID NO: 1984212 - DNA, 15 bp, Homo sapiens
gttcaggtgaggacg

SEQ ID NO: 1984213 - DNA, 15 bp, Homo sapiens
ttcaggtgaggacgc

SEQ ID NO: 1984214 - DNA, 15 bp, Homo sapiens
tcaggtgaggacgcc

SEQ ID NO: 1984215 - DNA, 15 bp, Homo sapiens
caggtgaggacgccc

SEQ ID NO: 1984216 - DNA, 15 bp, Homo sapiens
aggtgaggacgccca

SEQ ID NO: 1984217 - DNA, 15 bp, Homo sapiens
ggtgaggacgcccag

SEQ ID NO: 1984218 - DNA, 15 bp, Homo sapiens
gtgaggacgcccagt

SEQ ID NO: 1984219 - DNA, 15 bp, Homo sapiens
tgaggacgcccagtc

SEQ ID NO: 1984220 - DNA, 15 bp, Homo sapiens
gaggacgcccagtct

SEQ ID NO: 1984221 - DNA, 15 bp, Homo sapiens
aggacgcccagtctg

SEQ ID NO: 1984222 - DNA, 15 bp, Homo sapiens
ggacgcccagtctgg

SEQ ID NO: 1984223 - DNA, 15 bp, Homo sapiens
gacgcccagtctggc

SEQ ID NO: 1984224 - DNA, 15 bp, Homo sapiens
acgcccagtctggct

SEQ ID NO: 1984225 - DNA, 15 bp, Homo sapiens
cgcccagtctggctg

SEQ ID NO: 1984226 - DNA, 15 bp, Homo sapiens
gcccagtctggctgc

SEQ ID NO: 1984227 - DNA, 15 bp, Homo sapiens
cccagtctggctgct

SEQ ID NO: 1984228 - DNA, 15 bp, Homo sapiens
ccagtctggctgctc

SEQ ID NO: 1984229 - DNA, 15 bp, Homo sapiens
cagtctggctgctcc

SEQ ID NO: 1984230 - DNA, 15 bp, Homo sapiens
agtctggctgctccc

SEQ ID NO: 1984231 - DNA, 15 bp, Homo sapiens
gtctggctgctccct

SEQ ID NO: 1984232 - DNA, 15 bp, Homo sapiens
tctggctgctccctc

SEQ ID NO: 1984233 - DNA, 15 bp, Homo sapiens
ctggctgctccctct

SEQ ID NO: 1984234 - DNA, 15 bp, Homo sapiens
tggctgctccctcta

SEQ ID NO: 1984235 - DNA, 15 bp, Homo sapiens
ggctgctccctctag

SEQ ID NO: 1984236 - DNA, 15 bp, Homo sapiens
gctgctccctctagc

SEQ ID NO: 1984237 - DNA, 15 bp, Homo sapiens
ctgctccctctagca

SEQ ID NO: 1984238 - DNA, 15 bp, Homo sapiens
tgctccctctagcag

SEQ ID NO: 1984239 - DNA, 15 bp, Homo sapiens
gctccctctagcagc

SEQ ID NO: 1984240 - DNA, 15 bp, Homo sapiens
ctccctctagcagcc

SEQ ID NO: 1984241 - DNA, 15 bp, Homo sapiens
tccctctagcagcct

SEQ ID NO: 1984242 - DNA, 15 bp, Homo sapiens
ccctctagcagcctg

SEQ ID NO: 1984243 - DNA, 15 bp, Homo sapiens
cctctagcagcctgt

SEQ ID NO: 1984244 - DNA, 15 bp, Homo sapiens
ctctagcagcctgtt

SEQ ID NO: 1984245 - DNA, 15 bp, Homo sapiens
tctagcagcctgttc

SEQ ID NO: 1984246 - DNA, 15 bp, Homo sapiens
ctagcagcctgttca

SEQ ID NO: 1984247 - DNA, 15 bp, Homo sapiens
tagcagcctgttcat

SEQ ID NO: 1984248 - DNA, 15 bp, Homo sapiens
agcagcctgttcatt

SEQ ID NO: 1984249 - DNA, 15 bp, Homo sapiens
gcagcctgttcattc

SEQ ID NO: 1984250 - DNA, 15 bp, Homo sapiens
cagcctgttcattca

SEQ ID NO: 1984251 - DNA, 15 bp, Homo sapiens
agcctgttcattcat

SEQ ID NO: 1984252 - DNA, 15 bp, Homo sapiens
gcctgttcattcatg

SEQ ID NO: 1984253 - DNA, 15 bp, Homo sapiens
cctgttcattcatgg

SEQ ID NO: 1984254 - DNA, 15 bp, Homo sapiens
ctgttcattcatggc

SEQ ID NO: 1984255 - DNA, 15 bp, Homo sapiens
tgttcattcatggca

SEQ ID NO: 1984256 - DNA, 15 bp, Homo sapiens
gttcattcatggcag

SEQ ID NO: 1984257 - DNA, 15 bp, Homo sapiens
ttcattcatggcagc

SEQ ID NO: 1984258 - DNA, 15 bp, Homo sapiens
tcattcatggcagcc

SEQ ID NO: 1984259 - DNA, 15 bp, Homo sapiens
cattcatggcagccc

SEQ ID NO: 1984260 - DNA, 15 bp, Homo sapiens
attcatggcagccca

SEQ ID NO: 1984261 - DNA, 15 bp, Homo sapiens
ttcatggcagcccag

SEQ ID NO: 1984262 - DNA, 15 bp, Homo sapiens
tcatggcagcccagc

SEQ ID NO: 1984263 - DNA, 15 bp, Homo sapiens
catggcagcccagct

SEQ ID NO: 1984264 - DNA, 15 bp, Homo sapiens
atggcagcccagctc

SEQ ID NO: 1984265 - DNA, 15 bp, Homo sapiens
tggcagcccagctct

SEQ ID NO: 1984266 - DNA, 15 bp, Homo sapiens
ggcagcccagctctc

SEQ ID NO: 1984267 - DNA, 15 bp, Homo sapiens
gcagcccagctctct

SEQ ID NO: 1984268 - DNA, 15 bp, Homo sapiens
cagcccagctctctg

SEQ ID NO: 1984269 - DNA, 15 bp, Homo sapiens
agcccagctctctgc

SEQ ID NO: 1984270 - DNA, 15 bp, Homo sapiens
gcccagctctctgca

SEQ ID NO: 1984271 - DNA, 15 bp, Homo sapiens
cccagctctctgcag

SEQ ID NO: 1984272 - DNA, 15 bp, Homo sapiens
ccagctctctgcagg

SEQ ID NO: 1984273 - DNA, 15 bp, Homo sapiens
cagctctctgcaggg

SEQ ID NO: 1984274 - DNA, 15 bp, Homo sapiens
agctctctgcagggc

SEQ ID NO: 1984275 - DNA, 15 bp, Homo sapiens
gctctctgcagggcc

SEQ ID NO: 1984276 - DNA, 15 bp, Homo sapiens
ctctctgcagggccc

SEQ ID NO: 1984277 - DNA, 15 bp, Homo sapiens
tctctgcagggccct

SEQ ID NO: 1984278 - DNA, 15 bp, Homo sapiens
ctctgcagggccctc

SEQ ID NO: 1984279 - DNA, 15 bp, Homo sapiens
tctgcagggccctca

SEQ ID NO: 1984280 - DNA, 15 bp, Homo sapiens
ctgcagggccctcag

SEQ ID NO: 1984281 - DNA, 15 bp, Homo sapiens
tgcagggccctcagg

SEQ ID NO: 1984282 - DNA, 15 bp, Homo sapiens
gcagggccctcaggt

SEQ ID NO: 1984283 - DNA, 15 bp, Homo sapiens
cagggccctcaggtg

SEQ ID NO: 1984284 - DNA, 15 bp, Homo sapiens
agggccctcaggtgc

SEQ ID NO: 1984285 - DNA, 15 bp, Homo sapiens
gggccctcaggtgcc

SEQ ID NO: 1984286 - DNA, 15 bp, Homo sapiens
ggccctcaggtgccc

SEQ ID NO: 1984287 - DNA, 15 bp, Homo sapiens
gccctcaggtgccca

SEQ ID NO: 1984288 - DNA, 15 bp, Homo sapiens
ccctcaggtgcccag

SEQ ID NO: 1984289 - DNA, 15 bp, Homo sapiens
cctcaggtgcccagg

SEQ ID NO: 1984290 - DNA, 15 bp, Homo sapiens
ctcaggtgcccagga

SEQ ID NO: 1984291 - DNA, 15 bp, Homo sapiens
tcaggtgcccaggaa

SEQ ID NO: 1984292 - DNA, 15 bp, Homo sapiens
caggtgcccaggaag

SEQ ID NO: 1984293 - DNA, 15 bp, Homo sapiens
aggtgcccaggaagg

SEQ ID NO: 1984294 - DNA, 15 bp, Homo sapiens
ggtgcccaggaagga

SEQ ID NO: 1984295 - DNA, 15 bp, Homo sapiens
gtgcccaggaaggaa

SEQ ID NO: 1984296 - DNA, 15 bp, Homo sapiens
tgcccaggaaggaaa

SEQ ID NO: 1984297 - DNA, 15 bp, Homo sapiens
gcccaggaaggaaag

SEQ ID NO: 1984298 - DNA, 15 bp, Homo sapiens
cccaggaaggaaagc

SEQ ID NO: 1984299 - DNA, 15 bp, Homo sapiens
ccaggaaggaaagct

SEQ ID NO: 1984300 - DNA, 15 bp, Homo sapiens
caggaaggaaagctc

SEQ ID NO: 1984301 - DNA, 15 bp, Homo sapiens
aggaaggaaagctcc

SEQ ID NO: 1984302 - DNA, 15 bp, Homo sapiens
tctgctgcctcctcc

SEQ ID NO: 1984303 - DNA, 15 bp, Homo sapiens
ctgctgcctcctcca

SEQ ID NO: 1984304 - DNA, 15 bp, Homo sapiens
tgctgcctcctccac

SEQ ID NO: 1984305 - DNA, 15 bp, Homo sapiens
gctgcctcctccact

SEQ ID NO: 1984306 - DNA, 15 bp, Homo sapiens
ctgcctcctccactc

SEQ ID NO: 1984307 - DNA, 15 bp, Homo sapiens
tgcctcctccactcc

SEQ ID NO: 1984308 - DNA, 15 bp, Homo sapiens
gcctcctccactcca

SEQ ID NO: 1984309 - DNA, 15 bp, Homo sapiens
cctcctccactccaa

SEQ ID NO: 1984310 - DNA, 15 bp, Homo sapiens
ctcctccactccaac

SEQ ID NO: 1984311 - DNA, 15 bp, Homo sapiens
tcctccactccaact

SEQ ID NO: 1984312 - DNA, 15 bp, Homo sapiens
cctccactccaactg

SEQ ID NO: 1984313 - DNA, 15 bp, Homo sapiens
ctccactccaactga

SEQ ID NO: 1984314 - DNA, 15 bp, Homo sapiens
tccactccaactgaa

SEQ ID NO: 1984315 - DNA, 15 bp, Homo sapiens
ccactccaactgaac

SEQ ID NO: 1984316 - DNA, 15 bp, Homo sapiens
cactccaactgaaca

SEQ ID NO: 1984317 - DNA, 15 bp, Homo sapiens
actccaactgaacac

SEQ ID NO: 1984318 - DNA, 15 bp, Homo sapiens
ctccaactgaacact

SEQ ID NO: 1984319 - DNA, 15 bp, Homo sapiens
tccaactgaacactg

SEQ ID NO: 1984320 - DNA, 15 bp, Homo sapiens
ccaactgaacactgt

SEQ ID NO: 1984321 - DNA, 15 bp, Homo sapiens
caactgaacactgtg

SEQ ID NO: 1984322 - DNA, 15 bp, Homo sapiens
aactgaacactgtgt

SEQ ID NO: 1984323 - DNA, 15 bp, Homo sapiens
actgaacactgtgtg

SEQ ID NO: 1984324 - DNA, 15 bp, Homo sapiens
ctgaacactgtgtgg

SEQ ID NO: 1984325 - DNA, 15 bp, Homo sapiens
tgaacactgtgtggc

SEQ ID NO: 1984326 - DNA, 15 bp, Homo sapiens
gaacactgtgtggca

SEQ ID NO: 1984327 - DNA, 15 bp, Homo sapiens
aacactgtgtggcag

SEQ ID NO: 1984328 - DNA, 15 bp, Homo sapiens
acactgtgtggcaga

SEQ ID NO: 1984329 - DNA, 15 bp, Homo sapiens
cactgtgtggcagaa

SEQ ID NO: 1984330 - DNA, 15 bp, Homo sapiens
actgtgtggcagaat

SEQ ID NO: 1984331 - DNA, 15 bp, Homo sapiens
ctgtgtggcagaata

SEQ ID NO: 1984332 - DNA, 15 bp, Homo sapiens
tgtgtggcagaatag

SEQ ID NO: 1984333 - DNA, 15 bp, Homo sapiens
gtgtggcagaatagg

SEQ ID NO: 1984334 - DNA, 15 bp, Homo sapiens
tgtggcagaataggg

SEQ ID NO: 1984335 - DNA, 15 bp, Homo sapiens
gtggcagaatagggg

SEQ ID NO: 1984336 - DNA, 15 bp, Homo sapiens
tggcagaataggggg

SEQ ID NO: 1984337 - DNA, 15 bp, Homo sapiens
ggcagaatagggggc

SEQ ID NO: 1984338 - DNA, 15 bp, Homo sapiens
gcagaatagggggca

SEQ ID NO: 1984339 - DNA, 15 bp, Homo sapiens
cagaatagggggcag

SEQ ID NO: 1984340 - DNA, 15 bp, Homo sapiens
agaatagggggcagg

SEQ ID NO: 1984341 - DNA, 15 bp, Homo sapiens
gaatagggggcaggt

SEQ ID NO: 1984342 - DNA, 15 bp, Homo sapiens
aatagggggcaggtc

SEQ ID NO: 1984343 - DNA, 15 bp, Homo sapiens
atagggggcaggtcg

SEQ ID NO: 1984344 - DNA, 15 bp, Homo sapiens
tagggggcaggtcgc

SEQ ID NO: 1984345 - DNA, 15 bp, Homo sapiens
agggggcaggtcgct

SEQ ID NO: 1984346 - DNA, 15 bp, Homo sapiens
gggggcaggtcgcta

SEQ ID NO: 1984347 - DNA, 15 bp, Homo sapiens
ggggcaggtcgctat

SEQ ID NO: 1984348 - DNA, 15 bp, Homo sapiens
gggcaggtcgctatc

SEQ ID NO: 1984349 - DNA, 15 bp, Homo sapiens
ggcaggtcgctatct

SEQ ID NO: 1984350 - DNA, 15 bp, Homo sapiens
gcaggtcgctatctc

SEQ ID NO: 1984351 - DNA, 15 bp, Homo sapiens
caggtcgctatctca

SEQ ID NO: 1984352 - DNA, 15 bp, Homo sapiens
aggtcgctatctcat

SEQ ID NO: 1984353 - DNA, 15 bp, Homo sapiens
ggtcgctatctcatt

SEQ ID NO: 1984354 - DNA, 15 bp, Homo sapiens
gtcgctatctcatta

SEQ ID NO: 1984355 - DNA, 15 bp, Homo sapiens
tcgctatctcattac

SEQ ID NO: 1984356 - DNA, 15 bp, Homo sapiens
cgctatctcattact

SEQ ID NO: 1984357 - DNA, 15 bp, Homo sapiens
gctatctcattacta

SEQ ID NO: 1984358 - DNA, 15 bp, Homo sapiens
ctatctcattactaa

SEQ ID NO: 1984359 - DNA, 15 bp, Homo sapiens
tatctcattactaac

SEQ ID NO: 1984360 - DNA, 15 bp, Homo sapiens
atctcattactaact

SEQ ID NO: 1984361 - DNA, 15 bp, Homo sapiens
tctcattactaactg

SEQ ID NO: 1984362 - DNA, 15 bp, Homo sapiens
ctcattactaactgt

SEQ ID NO: 1984363 - DNA, 15 bp, Homo sapiens
tcattactaactgtg

SEQ ID NO: 1984364 - DNA, 15 bp, Homo sapiens
cattactaactgtga

SEQ ID NO: 1984365 - DNA, 15 bp, Homo sapiens
attactaactgtgag

SEQ ID NO: 1984366 - DNA, 15 bp, Homo sapiens
ttactaactgtgagg

SEQ ID NO: 1984367 - DNA, 15 bp, Homo sapiens
tactaactgtgaggt

SEQ ID NO: 1984368 - DNA, 15 bp, Homo sapiens
actaactgtgaggtg

SEQ ID NO: 1984369 - DNA, 15 bp, Homo sapiens
ctaactgtgaggtga

SEQ ID NO: 1984370 - DNA, 15 bp, Homo sapiens
taactgtgaggtgag

SEQ ID NO: 1984371 - DNA, 15 bp, Homo sapiens
aactgtgaggtgaga

SEQ ID NO: 1984372 - DNA, 15 bp, Homo sapiens
actgtgaggtgagat

SEQ ID NO: 1984373 - DNA, 15 bp, Homo sapiens
ctgtgaggtgagatt

SEQ ID NO: 1984374 - DNA, 15 bp, Homo sapiens
tgtgaggtgagattg

SEQ ID NO: 1984375 - DNA, 15 bp, Homo sapiens
gtgaggtgagattga

SEQ ID NO: 1984376 - DNA, 15 bp, Homo sapiens
tgaggtgagattgag

SEQ ID NO: 1984377 - DNA, 15 bp, Homo sapiens
gaggtgagattgaga

SEQ ID NO: 1984378 - DNA, 15 bp, Homo sapiens
aggtgagattgagaa

SEQ ID NO: 1984379 - DNA, 15 bp, Homo sapiens
ggtgagattgagaac

SEQ ID NO: 1984380 - DNA, 15 bp, Homo sapiens
gtgagattgagaacc

SEQ ID NO: 1984381 - DNA, 15 bp, Homo sapiens
tgagattgagaaccc

SEQ ID NO: 1984382 - DNA, 15 bp, Homo sapiens
gagattgagaacccg

SEQ ID NO: 1984383 - DNA, 15 bp, Homo sapiens
agattgagaacccgg

SEQ ID NO: 1984384 - DNA, 15 bp, Homo sapiens
gattgagaacccggg

SEQ ID NO: 1984385 - DNA, 15 bp, Homo sapiens
attgagaacccgggc

SEQ ID NO: 1984386 - DNA, 15 bp, Homo sapiens
ttgagaacccgggct

SEQ ID NO: 1984387 - DNA, 15 bp, Homo sapiens
tgagaacccgggctt

SEQ ID NO: 1984388 - DNA, 15 bp, Homo sapiens
gagaacccgggcttt

SEQ ID NO: 1984389 - DNA, 15 bp, Homo sapiens
agaacccgggctttc

SEQ ID NO: 1984390 - DNA, 15 bp, Homo sapiens
gaacccgggctttcc

SEQ ID NO: 1984391 - DNA, 15 bp, Homo sapiens
aacccgggctttcct

SEQ ID NO: 1984392 - DNA, 15 bp, Homo sapiens
acccgggctttcctc

SEQ ID NO: 1984393 - DNA, 15 bp, Homo sapiens
cccgggctttcctcc

SEQ ID NO: 1984394 - DNA, 15 bp, Homo sapiens
ccgggctttcctccc

SEQ ID NO: 1984395 - DNA, 15 bp, Homo sapiens
cgggctttcctcccc

SEQ ID NO: 1984396 - DNA, 15 bp, Homo sapiens
gggctttcctcccct

SEQ ID NO: 1984397 - DNA, 15 bp, Homo sapiens
ggctttcctcccctt

SEQ ID NO: 1984398 - DNA, 15 bp, Homo sapiens
gctttcctccccttc

SEQ ID NO: 1984399 - DNA, 15 bp, Homo sapiens
ctttcctccccttct

SEQ ID NO: 1984400 - DNA, 15 bp, Homo sapiens
tttcctccccttctc

SEQ ID NO: 1984401 - DNA, 15 bp, Homo sapiens
ttcctccccttctct

SEQ ID NO: 1984402 - DNA, 15 bp, Homo sapiens
tcctccccttctctg

SEQ ID NO: 1984403 - DNA, 15 bp, Homo sapiens
cctccccttctctgc

SEQ ID NO: 1984404 - DNA, 15 bp, Homo sapiens
ctccccttctctgca

SEQ ID NO: 1984405 - DNA, 15 bp, Homo sapiens
tccccttctctgcag

SEQ ID NO: 1984406 - DNA, 15 bp, Homo sapiens
ccccttctctgcagt

SEQ ID NO: 1984407 - DNA, 15 bp, Homo sapiens
cccttctctgcagtc

SEQ ID NO: 1984408 - DNA, 15 bp, Homo sapiens
ccttctctgcagtct

SEQ ID NO: 1984409 - DNA, 15 bp, Homo sapiens
cttctctgcagtcta

SEQ ID NO: 1984410 - DNA, 15 bp, Homo sapiens
ttctctgcagtctat

SEQ ID NO: 1984411 - DNA, 15 bp, Homo sapiens
tctctgcagtctatc

SEQ ID NO: 1984412 - DNA, 15 bp, Homo sapiens
ctctgcagtctatct

SEQ ID NO: 1984413 - DNA, 15 bp, Homo sapiens
tctgcagtctatctt

SEQ ID NO: 1984414 - DNA, 15 bp, Homo sapiens
ctgcagtctatcttc

SEQ ID NO: 1984415 - DNA, 15 bp, Homo sapiens
tgcagtctatcttct

SEQ ID NO: 1984416 - DNA, 15 bp, Homo sapiens
gcagtctatcttcta

SEQ ID NO: 1984417 - DNA, 15 bp, Homo sapiens
cagtctatcttctag

SEQ ID NO: 1984418 - DNA, 15 bp, Homo sapiens
agtctatcttctagg

SEQ ID NO: 1984419 - DNA, 15 bp, Homo sapiens
gtctatcttctaggg

SEQ ID NO: 1984420 - DNA, 15 bp, Homo sapiens
tctatcttctagggg

SEQ ID NO: 1984421 - DNA, 15 bp, Homo sapiens
ctatcttctaggggc

SEQ ID NO: 1984422 - DNA, 15 bp, Homo sapiens
tatcttctaggggcc

SEQ ID NO: 1984423 - DNA, 15 bp, Homo sapiens
atcttctaggggcca

SEQ ID NO: 1984424 - DNA, 15 bp, Homo sapiens
tcttctaggggccaa

SEQ ID NO: 1984425 - DNA, 15 bp, Homo sapiens
cttctaggggccaag

SEQ ID NO: 1984426 - DNA, 15 bp, Homo sapiens
ttctaggggccaagc

SEQ ID NO: 1984427 - DNA, 15 bp, Homo sapiens
tctaggggccaagcc

SEQ ID NO: 1984428 - DNA, 15 bp, Homo sapiens
ctaggggccaagcct

SEQ ID NO: 1984429 - DNA, 15 bp, Homo sapiens
taggggccaagcctt

SEQ ID NO: 1984430 - DNA, 15 bp, Homo sapiens
aggggccaagccttc

SEQ ID NO: 1984431 - DNA, 15 bp, Homo sapiens
ggggccaagccttca

SEQ ID NO: 1984432 - DNA, 15 bp, Homo sapiens
gggccaagccttcaa

SEQ ID NO: 1984433 - DNA, 15 bp, Homo sapiens
ggccaagccttcaac

SEQ ID NO: 1984434 - DNA, 15 bp, Homo sapiens
gccaagccttcaacc

SEQ ID NO: 1984435 - DNA, 15 bp, Homo sapiens
ccaagccttcaacca

SEQ ID NO: 1984436 - DNA, 15 bp, Homo sapiens
caagccttcaaccac

SEQ ID NO: 1984437 - DNA, 15 bp, Homo sapiens
aagccttcaaccaca

SEQ ID NO: 1984438 - DNA, 15 bp, Homo sapiens
agccttcaaccacag

SEQ ID NO: 1984439 - DNA, 15 bp, Homo sapiens
gccttcaaccacaga

SEQ ID NO: 1984440 - DNA, 15 bp, Homo sapiens
ccttcaaccacagac

SEQ ID NO: 1984441 - DNA, 15 bp, Homo sapiens
cttcaaccacagact

SEQ ID NO: 1984442 - DNA, 15 bp, Homo sapiens
ttcaaccacagactg

SEQ ID NO: 1984443 - DNA, 15 bp, Homo sapiens
tcaaccacagactgg

SEQ ID NO: 1984444 - DNA, 15 bp, Homo sapiens
caaccacagactggc

SEQ ID NO: 1984445 - DNA, 15 bp, Homo sapiens
aaccacagactggct

SEQ ID NO: 1984446 - DNA, 15 bp, Homo sapiens
accacagactggctt

SEQ ID NO: 1984447 - DNA, 15 bp, Homo sapiens
ccacagactggcttg

SEQ ID NO: 1984448 - DNA, 15 bp, Homo sapiens
cacagactggcttgg

SEQ ID NO: 1984449 - DNA, 15 bp, Homo sapiens
acagactggcttgga

SEQ ID NO: 1984450 - DNA, 15 bp, Homo sapiens
cagactggcttggat

SEQ ID NO: 1984451 - DNA, 15 bp, Homo sapiens
agactggcttggatg

SEQ ID NO: 1984452 - DNA, 15 bp, Homo sapiens
gactggcttggatgg

SEQ ID NO: 1984453 - DNA, 15 bp, Homo sapiens
actggcttggatggc

SEQ ID NO: 1984454 - DNA, 15 bp, Homo sapiens
ctggcttggatggct

SEQ ID NO: 1984455 - DNA, 15 bp, Homo sapiens
tggcttggatggctg

SEQ ID NO: 1984456 - DNA, 15 bp, Homo sapiens
ggcttggatggctgc

SEQ ID NO: 1984457 - DNA, 15 bp, Homo sapiens
gcttggatggctgcc

SEQ ID NO: 1984458 - DNA, 15 bp, Homo sapiens
cttggatggctgccc

SEQ ID NO: 1984459 - DNA, 15 bp, Homo sapiens
ttggatggctgccca

SEQ ID NO: 1984460 - DNA, 15 bp, Homo sapiens
tggatggctgcccag

SEQ ID NO: 1984461 - DNA, 15 bp, Homo sapiens
ggatggctgcccagt

SEQ ID NO: 1984462 - DNA, 15 bp, Homo sapiens
gatggctgcccagtg

SEQ ID NO: 1984463 - DNA, 15 bp, Homo sapiens
atggctgcccagtgg

SEQ ID NO: 1984464 - DNA, 15 bp, Homo sapiens
tggctgcccagtggg

SEQ ID NO: 1984465 - DNA, 15 bp, Homo sapiens
ggctgcccagtgggg

SEQ ID NO: 1984466 - DNA, 15 bp, Homo sapiens
gctgcccagtggggc

SEQ ID NO: 1984467 - DNA, 15 bp, Homo sapiens
ctgcccagtggggct

SEQ ID NO: 1984468 - DNA, 15 bp, Homo sapiens
tgcccagtggggcta

SEQ ID NO: 1984469 - DNA, 15 bp, Homo sapiens
gcccagtggggctat

SEQ ID NO: 1984470 - DNA, 15 bp, Homo sapiens
cccagtggggctatg

SEQ ID NO: 1984471 - DNA, 15 bp, Homo sapiens
ccagtggggctatgc

SEQ ID NO: 1984472 - DNA, 15 bp, Homo sapiens
cagtggggctatgcc

SEQ ID NO: 1984473 - DNA, 15 bp, Homo sapiens
agtggggctatgcca

SEQ ID NO: 1984474 - DNA, 15 bp, Homo sapiens
gtggggctatgccaa

SEQ ID NO: 1984475 - DNA, 15 bp, Homo sapiens
tggggctatgccaag

SEQ ID NO: 1984476 - DNA, 15 bp, Homo sapiens
ggggctatgccaagg

SEQ ID NO: 1984477 - DNA, 15 bp, Homo sapiens
gggctatgccaaggg

SEQ ID NO: 1984478 - DNA, 15 bp, Homo sapiens
ggctatgccaagggc

SEQ ID NO: 1984479 - DNA, 15 bp, Homo sapiens
gctatgccaagggca

SEQ ID NO: 1984480 - DNA, 15 bp, Homo sapiens
ctatgccaagggcag

SEQ ID NO: 1984481 - DNA, 15 bp, Homo sapiens
tatgccaagggcagg

SEQ ID NO: 1984482 - DNA, 15 bp, Homo sapiens
atgccaagggcagga

SEQ ID NO: 1984483 - DNA, 15 bp, Homo sapiens
tgccaagggcaggac

SEQ ID NO: 1984484 - DNA, 15 bp, Homo sapiens
gccaagggcaggacg

SEQ ID NO: 1984485 - DNA, 15 bp, Homo sapiens
ccaagggcaggacga

SEQ ID NO: 1984486 - DNA, 15 bp, Homo sapiens
caagggcaggacgag

SEQ ID NO: 1984487 - DNA, 15 bp, Homo sapiens
aagggcaggacgagg

SEQ ID NO: 1984488 - DNA, 15 bp, Homo sapiens
agggcaggacgagga

SEQ ID NO: 1984489 - DNA, 15 bp, Homo sapiens
gggcaggacgaggaa

SEQ ID NO: 1984490 - DNA, 15 bp, Homo sapiens
ggcaggacgaggaac

SEQ ID NO: 1984491 - DNA, 15 bp, Homo sapiens
gcaggacgaggaaca

SEQ ID NO: 1984492 - DNA, 15 bp, Homo sapiens
caggacgaggaacag

SEQ ID NO: 1984493 - DNA, 15 bp, Homo sapiens
aggacgaggaacagg

SEQ ID NO: 1984494 - DNA, 15 bp, Homo sapiens
ggacgaggaacaggg

SEQ ID NO: 1984495 - DNA, 15 bp, Homo sapiens
gacgaggaacagggc

SEQ ID NO: 1984496 - DNA, 15 bp, Homo sapiens
acgaggaacagggca

SEQ ID NO: 1984497 - DNA, 15 bp, Homo sapiens
cgaggaacagggcag

SEQ ID NO: 1984498 - DNA, 15 bp, Homo sapiens
gaggaacagggcaga

SEQ ID NO: 1984499 - DNA, 15 bp, Homo sapiens
aggaacagggcagag

SEQ ID NO: 1984500 - DNA, 15 bp, Homo sapiens
ggaacagggcagagc

SEQ ID NO: 1984501 - DNA, 15 bp, Homo sapiens
gaacagggcagagca

SEQ ID NO: 1984502 - DNA, 15 bp, Homo sapiens
aacagggcagagcac

SEQ ID NO: 1984503 - DNA, 15 bp, Homo sapiens
acagggcagagcacc

SEQ ID NO: 1984504 - DNA, 15 bp, Homo sapiens
cagggcagagcacct

SEQ ID NO: 1984505 - DNA, 15 bp, Homo sapiens
agggcagagcacctg

SEQ ID NO: 1984506 - DNA, 15 bp, Homo sapiens
gggcagagcacctgg

SEQ ID NO: 1984507 - DNA, 15 bp, Homo sapiens
ggcagagcacctggg

SEQ ID NO: 1984508 - DNA, 15 bp, Homo sapiens
gcagagcacctgggc

SEQ ID NO: 1984509 - DNA, 15 bp, Homo sapiens
cagagcacctgggcg

SEQ ID NO: 1984510 - DNA, 15 bp, Homo sapiens
agagcacctgggcgt

SEQ ID NO: 1984511 - DNA, 15 bp, Homo sapiens
gagcacctgggcgtt

SEQ ID NO: 1984512 - DNA, 15 bp, Homo sapiens
agcacctgggcgttg

SEQ ID NO: 1984513 - DNA, 15 bp, Homo sapiens
gcacctgggcgttgc

SEQ ID NO: 1984514 - DNA, 15 bp, Homo sapiens
cacctgggcgttgct

SEQ ID NO: 1984515 - DNA, 15 bp, Homo sapiens
acctgggcgttgctc

SEQ ID NO: 1984516 - DNA, 15 bp, Homo sapiens
cctgggcgttgctca

SEQ ID NO: 1984517 - DNA, 15 bp, Homo sapiens
ctgggcgttgctcag

SEQ ID NO: 1984518 - DNA, 15 bp, Homo sapiens
tgggcgttgctcagc

SEQ ID NO: 1984519 - DNA, 15 bp, Homo sapiens
gggcgttgctcagca

SEQ ID NO: 1984520 - DNA, 15 bp, Homo sapiens
ggcgttgctcagcaa

SEQ ID NO: 1984521 - DNA, 15 bp, Homo sapiens
gcgttgctcagcaag

SEQ ID NO: 1984522 - DNA, 15 bp, Homo sapiens
cgttgctcagcaaga

SEQ ID NO: 1984523 - DNA, 15 bp, Homo sapiens
gttgctcagcaagat

SEQ ID NO: 1984524 - DNA, 15 bp, Homo sapiens
ttgctcagcaagatc

SEQ ID NO: 1984525 - DNA, 15 bp, Homo sapiens
tgctcagcaagatct

SEQ ID NO: 1984526 - DNA, 15 bp, Homo sapiens
gctcagcaagatctc

SEQ ID NO: 1984527 - DNA, 15 bp, Homo sapiens
ctcagcaagatctca

SEQ ID NO: 1984528 - DNA, 15 bp, Homo sapiens
tcagcaagatctcat

SEQ ID NO: 1984529 - DNA, 15 bp, Homo sapiens
cagcaagatctcatc

SEQ ID NO: 1984530 - DNA, 15 bp, Homo sapiens
agcaagatctcatct

SEQ ID NO: 1984531 - DNA, 15 bp, Homo sapiens
gcaagatctcatctt

SEQ ID NO: 1984532 - DNA, 15 bp, Homo sapiens
caagatctcatcttc

SEQ ID NO: 1984533 - DNA, 15 bp, Homo sapiens
aagatctcatcttca

SEQ ID NO: 1984534 - DNA, 15 bp, Homo sapiens
agatctcatcttcag

SEQ ID NO: 1984535 - DNA, 15 bp, Homo sapiens
gatctcatcttcaga

SEQ ID NO: 1984536 - DNA, 15 bp, Homo sapiens
atctcatcttcagag

SEQ ID NO: 1984537 - DNA, 15 bp, Homo sapiens
tctcatcttcagagg

SEQ ID NO: 1984538 - DNA, 15 bp, Homo sapiens
ctcatcttcagaggc

SEQ ID NO: 1984539 - DNA, 15 bp, Homo sapiens
tcatcttcagaggcc

SEQ ID NO: 1984540 - DNA, 15 bp, Homo sapiens
catcttcagaggcca

SEQ ID NO: 1984541 - DNA, 15 bp, Homo sapiens
atcttcagaggccac

SEQ ID NO: 1984542 - DNA, 15 bp, Homo sapiens
tcttcagaggccacg

SEQ ID NO: 1984543 - DNA, 15 bp, Homo sapiens
cttcagaggccacgg

SEQ ID NO: 1984544 - DNA, 15 bp, Homo sapiens
ttcagaggccacggc

SEQ ID NO: 1984545 - DNA, 15 bp, Homo sapiens
tcagaggccacggcg

SEQ ID NO: 1984546 - DNA, 15 bp, Homo sapiens
cagaggccacggcgc

SEQ ID NO: 1984547 - DNA, 15 bp, Homo sapiens
agaggccacggcgct

SEQ ID NO: 1984548 - DNA, 15 bp, Homo sapiens
gaggccacggcgcta

SEQ ID NO: 1984549 - DNA, 15 bp, Homo sapiens
aggccacggcgctaa

SEQ ID NO: 1984550 - DNA, 15 bp, Homo sapiens
ggccacggcgctaaa

SEQ ID NO: 1984551 - DNA, 15 bp, Homo sapiens
gccacggcgctaaaa

SEQ ID NO: 1984552 - DNA, 15 bp, Homo sapiens
ccacggcgctaaaat

SEQ ID NO: 1984553 - DNA, 15 bp, Homo sapiens
cacggcgctaaaatg

SEQ ID NO: 1984554 - DNA, 15 bp, Homo sapiens
acggcgctaaaatgt

SEQ ID NO: 1984555 - DNA, 15 bp, Homo sapiens
cggcgctaaaatgtg

SEQ ID NO: 1984556 - DNA, 15 bp, Homo sapiens
ggcgctaaaatgtgg

SEQ ID NO: 1984557 - DNA, 15 bp, Homo sapiens
gcgctaaaatgtggt

SEQ ID NO: 1984558 - DNA, 15 bp, Homo sapiens
cgctaaaatgtggtc

SEQ ID NO: 1984559 - DNA, 15 bp, Homo sapiens
gctaaaatgtggtca

SEQ ID NO: 1984560 - DNA, 15 bp, Homo sapiens
ctaaaatgtggtcag

SEQ ID NO: 1984561 - DNA, 15 bp, Homo sapiens
taaaatgtggtcaga

SEQ ID NO: 1984562 - DNA, 15 bp, Homo sapiens
aaaatgtggtcagaa

SEQ ID NO: 1984563 - DNA, 15 bp, Homo sapiens
aaatgtggtcagaag

SEQ ID NO: 1984564 - DNA, 15 bp, Homo sapiens
aatgtggtcagaagt

SEQ ID NO: 1984565 - DNA, 15 bp, Homo sapiens
atgtggtcagaagtc

SEQ ID NO: 1984566 - DNA, 15 bp, Homo sapiens
tgtggtcagaagtct

SEQ ID NO: 1984567 - DNA, 15 bp, Homo sapiens
gtggtcagaagtctg

SEQ ID NO: 1984568 - DNA, 15 bp, Homo sapiens
tggtcagaagtctgc

SEQ ID NO: 1984569 - DNA, 15 bp, Homo sapiens
ggtcagaagtctgct

SEQ ID NO: 1984570 - DNA, 15 bp, Homo sapiens
gtcagaagtctgctc

SEQ ID NO: 1984571 - DNA, 15 bp, Homo sapiens
tcagaagtctgctcc

SEQ ID NO: 1984572 - DNA, 15 bp, Homo sapiens
cagaagtctgctccc

SEQ ID NO: 1984573 - DNA, 15 bp, Homo sapiens
agaagtctgctcccc

SEQ ID NO: 1984574 - DNA, 15 bp, Homo sapiens
gaagtctgctcccca

SEQ ID NO: 1984575 - DNA, 15 bp, Homo sapiens
aagtctgctccccaa

SEQ ID NO: 1984576 - DNA, 15 bp, Homo sapiens
agtctgctccccaag

SEQ ID NO: 1984577 - DNA, 15 bp, Homo sapiens
gtctgctccccaaga

SEQ ID NO: 1984578 - DNA, 15 bp, Homo sapiens
tctgctccccaagaa

SEQ ID NO: 1984579 - DNA, 15 bp, Homo sapiens
ctgctccccaagaag

SEQ ID NO: 1984580 - DNA, 15 bp, Homo sapiens
tgctccccaagaagt

SEQ ID NO: 1984581 - DNA, 15 bp, Homo sapiens
gctccccaagaagta

SEQ ID NO: 1984582 - DNA, 15 bp, Homo sapiens
ctccccaagaagtac

SEQ ID NO: 1984583 - DNA, 15 bp, Homo sapiens
tccccaagaagtact

SEQ ID NO: 1984584 - DNA, 15 bp, Homo sapiens
ccccaagaagtactg

SEQ ID NO: 1984585 - DNA, 15 bp, Homo sapiens
cccaagaagtactga

SEQ ID NO: 1984586 - DNA, 15 bp, Homo sapiens
ccaagaagtactgac

SEQ ID NO: 1984587 - DNA, 15 bp, Homo sapiens
caagaagtactgaca

SEQ ID NO: 1984588 - DNA, 15 bp, Homo sapiens
aagaagtactgacac

SEQ ID NO: 1984589 - DNA, 15 bp, Homo sapiens
agaagtactgacacc

SEQ ID NO: 1984590 - DNA, 15 bp, Homo sapiens
gaagtactgacacct

SEQ ID NO: 1984591 - DNA, 15 bp, Homo sapiens
aagtactgacacctt

SEQ ID NO: 1984592 - DNA, 15 bp, Homo sapiens
agtactgacaccttt

SEQ ID NO: 1984593 - DNA, 15 bp, Homo sapiens
gtactgacacctttg

SEQ ID NO: 1984594 - DNA, 15 bp, Homo sapiens
tactgacacctttgt

SEQ ID NO: 1984595 - DNA, 15 bp, Homo sapiens
actgacacctttgtg

SEQ ID NO: 1984596 - DNA, 15 bp, Homo sapiens
ctgacacctttgtgg

SEQ ID NO: 1984597 - DNA, 15 bp, Homo sapiens
tgacacctttgtggt

SEQ ID NO: 1984598 - DNA, 15 bp, Homo sapiens
gacacctttgtggtc

SEQ ID NO: 1984599 - DNA, 15 bp, Homo sapiens
acacctttgtggtcc

SEQ ID NO: 1984600 - DNA, 15 bp, Homo sapiens
cacctttgtggtcca

SEQ ID NO: 1984601 - DNA, 15 bp, Homo sapiens
acctttgtggtccag

SEQ ID NO: 1984602 - DNA, 15 bp, Homo sapiens
cctttgtggtccaga

SEQ ID NO: 1984603 - DNA, 15 bp, Homo sapiens
ctttgtggtccagaa

SEQ ID NO: 1984604 - DNA, 15 bp, Homo sapiens
tttgtggtccagaaa

SEQ ID NO: 1984605 - DNA, 15 bp, Homo sapiens
ttgtggtccagaaaa

SEQ ID NO: 1984606 - DNA, 15 bp, Homo sapiens
tgtggtccagaaaag

SEQ ID NO: 1984607 - DNA, 15 bp, Homo sapiens
gtggtccagaaaagc

SEQ ID NO: 1984608 - DNA, 15 bp, Homo sapiens
tggtccagaaaagca

SEQ ID NO: 1984609 - DNA, 15 bp, Homo sapiens
ggtccagaaaagcac

SEQ ID NO: 1984610 - DNA, 15 bp, Homo sapiens
gtccagaaaagcact

SEQ ID NO: 1984611 - DNA, 15 bp, Homo sapiens
tccagaaaagcactt

SEQ ID NO: 1984612 - DNA, 15 bp, Homo sapiens
ccagaaaagcactta

SEQ ID NO: 1984613 - DNA, 15 bp, Homo sapiens
cagaaaagcacttag

SEQ ID NO: 1984614 - DNA, 15 bp, Homo sapiens
agaaaagcacttagg

SEQ ID NO: 1984615 - DNA, 15 bp, Homo sapiens
gaaaagcacttaggt

SEQ ID NO: 1984616 - DNA, 15 bp, Homo sapiens
aaaagcacttaggta

SEQ ID NO: 1984617 - DNA, 15 bp, Homo sapiens
aaagcacttaggtag

SEQ ID NO: 1984618 - DNA, 15 bp, Homo sapiens
aagcacttaggtaga

SEQ ID NO: 1984619 - DNA, 15 bp, Homo sapiens
agcacttaggtagac

SEQ ID NO: 1984620 - DNA, 15 bp, Homo sapiens
gcacttaggtagacc

SEQ ID NO: 1984621 - DNA, 15 bp, Homo sapiens
cacttaggtagaccc

SEQ ID NO: 1984622 - DNA, 15 bp, Homo sapiens
acttaggtagacccc

SEQ ID NO: 1984623 - DNA, 15 bp, Homo sapiens
cttaggtagacccct

SEQ ID NO: 1984624 - DNA, 15 bp, Homo sapiens
ttaggtagacccctc

SEQ ID NO: 1984625 - DNA, 15 bp, Homo sapiens
taggtagacccctct

SEQ ID NO: 1984626 - DNA, 15 bp, Homo sapiens
aggtagacccctctc

SEQ ID NO: 1984627 - DNA, 15 bp, Homo sapiens
ggtagacccctctct

SEQ ID NO: 1984628 - DNA, 15 bp, Homo sapiens
gtagacccctctctg

SEQ ID NO: 1984629 - DNA, 15 bp, Homo sapiens
tagacccctctctgg

SEQ ID NO: 1984630 - DNA, 15 bp, Homo sapiens
agacccctctctggg

SEQ ID NO: 1984631 - DNA, 15 bp, Homo sapiens
gacccctctctggga

SEQ ID NO: 1984632 - DNA, 15 bp, Homo sapiens
acccctctctgggat

SEQ ID NO: 1984633 - DNA, 15 bp, Homo sapiens
cccctctctgggatg

SEQ ID NO: 1984634 - DNA, 15 bp, Homo sapiens
ccctctctgggatgg

SEQ ID NO: 1984635 - DNA, 15 bp, Homo sapiens
cctctctgggatggt

SEQ ID NO: 1984636 - DNA, 15 bp, Homo sapiens
ctctctgggatggtc

SEQ ID NO: 1984637 - DNA, 15 bp, Homo sapiens
tctctgggatggtcc

SEQ ID NO: 1984638 - DNA, 15 bp, Homo sapiens
ctctgggatggtcct

SEQ ID NO: 1984639 - DNA, 15 bp, Homo sapiens
tctgggatggtccta

SEQ ID NO: 1984640 - DNA, 15 bp, Homo sapiens
ctgggatggtcctaa

SEQ ID NO: 1984641 - DNA, 15 bp, Homo sapiens
tgggatggtcctaag

SEQ ID NO: 1984642 - DNA, 15 bp, Homo sapiens
gggatggtcctaagg

SEQ ID NO: 1984643 - DNA, 15 bp, Homo sapiens
ggatggtcctaaggt

SEQ ID NO: 1984644 - DNA, 15 bp, Homo sapiens
gatggtcctaaggtc

SEQ ID NO: 1984645 - DNA, 15 bp, Homo sapiens
atggtcctaaggtct

SEQ ID NO: 1984646 - DNA, 15 bp, Homo sapiens
tggtcctaaggtctt

SEQ ID NO: 1984647 - DNA, 15 bp, Homo sapiens
ggtcctaaggtcttt

SEQ ID NO: 1984648 - DNA, 15 bp, Homo sapiens
gtcctaaggtctttg

SEQ ID NO: 1984649 - DNA, 15 bp, Homo sapiens
tcctaaggtctttgg

SEQ ID NO: 1984650 - DNA, 15 bp, Homo sapiens
cctaaggtctttggg

SEQ ID NO: 1984651 - DNA, 15 bp, Homo sapiens
ctaaggtctttgggg

SEQ ID NO: 1984652 - DNA, 15 bp, Homo sapiens
taaggtctttggggt

SEQ ID NO: 1984653 - DNA, 15 bp, Homo sapiens
aaggtctttggggtt

SEQ ID NO: 1984654 - DNA, 15 bp, Homo sapiens
aggtctttggggttg

SEQ ID NO: 1984655 - DNA, 15 bp, Homo sapiens
ggtctttggggttgg

SEQ ID NO: 1984656 - DNA, 15 bp, Homo sapiens
gtctttggggttggc

SEQ ID NO: 1984657 - DNA, 15 bp, Homo sapiens
tctttggggttggct

SEQ ID NO: 1984658 - DNA, 15 bp, Homo sapiens
ctttggggttggcta

SEQ ID NO: 1984659 - DNA, 15 bp, Homo sapiens
tttggggttggctac

SEQ ID NO: 1984660 - DNA, 15 bp, Homo sapiens
ttggggttggctact

SEQ ID NO: 1984661 - DNA, 15 bp, Homo sapiens
tggggttggctactg

SEQ ID NO: 1984662 - DNA, 15 bp, Homo sapiens
ggggttggctactgc

SEQ ID NO: 1984663 - DNA, 15 bp, Homo sapiens
gggttggctactgcc

SEQ ID NO: 1984664 - DNA, 15 bp, Homo sapiens
ggttggctactgccc

SEQ ID NO: 1984665 - DNA, 15 bp, Homo sapiens
gttggctactgccct

SEQ ID NO: 1984666 - DNA, 15 bp, Homo sapiens
ttggctactgcccta

SEQ ID NO: 1984667 - DNA, 15 bp, Homo sapiens
tggctactgccctaa

SEQ ID NO: 1984668 - DNA, 15 bp, Homo sapiens
ggctactgccctaag

SEQ ID NO: 1984669 - DNA, 15 bp, Homo sapiens
gctactgccctaagt

SEQ ID NO: 1984670 - DNA, 15 bp, Homo sapiens
ctactgccctaagtc

SEQ ID NO: 1984671 - DNA, 15 bp, Homo sapiens
tactgccctaagtcc

SEQ ID NO: 1984672 - DNA, 15 bp, Homo sapiens
actgccctaagtcct

SEQ ID NO: 1984673 - DNA, 15 bp, Homo sapiens
ctgccctaagtccta

SEQ ID NO: 1984674 - DNA, 15 bp, Homo sapiens
tgccctaagtcctaa

SEQ ID NO: 1984675 - DNA, 15 bp, Homo sapiens
gccctaagtcctaaa

SEQ ID NO: 1984676 - DNA, 15 bp, Homo sapiens
ccctaagtcctaaat

SEQ ID NO: 1984677 - DNA, 15 bp, Homo sapiens
cctaagtcctaaatt

SEQ ID NO: 1984678 - DNA, 15 bp, Homo sapiens
ctaagtcctaaattg

SEQ ID NO: 1984679 - DNA, 15 bp, Homo sapiens
taagtcctaaattga

SEQ ID NO: 1984680 - DNA, 15 bp, Homo sapiens
aagtcctaaattgaa

SEQ ID NO: 1984681 - DNA, 15 bp, Homo sapiens
agtcctaaattgaaa

SEQ ID NO: 1984682 - DNA, 15 bp, Homo sapiens
gtcctaaattgaaaa

SEQ ID NO: 1984683 - DNA, 15 bp, Homo sapiens
tcctaaattgaaaat

SEQ ID NO: 1984684 - DNA, 15 bp, Homo sapiens
cctaaattgaaaata

SEQ ID NO: 1984685 - DNA, 15 bp, Homo sapiens
ctaaattgaaaatat

SEQ ID NO: 1984686 - DNA, 15 bp, Homo sapiens
taaattgaaaatata

SEQ ID NO: 1984687 - DNA, 15 bp, Homo sapiens
aaattgaaaatatac

SEQ ID NO: 1984688 - DNA, 15 bp, Homo sapiens
aattgaaaatatact

SEQ ID NO: 1984689 - DNA, 15 bp, Homo sapiens
attgaaaatatacta

SEQ ID NO: 1984690 - DNA, 15 bp, Homo sapiens
ttgaaaatatactaa

SEQ ID NO: 1984691 - DNA, 15 bp, Homo sapiens
tgaaaatatactaag

SEQ ID NO: 1984692 - DNA, 15 bp, Homo sapiens
gaaaatatactaagg

SEQ ID NO: 1984693 - DNA, 15 bp, Homo sapiens
aaaatatactaaggg

SEQ ID NO: 1984694 - DNA, 15 bp, Homo sapiens
aaatatactaagggg

SEQ ID NO: 1984695 - DNA, 15 bp, Homo sapiens
aatatactaaggggc

SEQ ID NO: 1984696 - DNA, 15 bp, Homo sapiens
atatactaaggggct

SEQ ID NO: 1984697 - DNA, 15 bp, Homo sapiens
tatactaaggggctg

SEQ ID NO: 1984698 - DNA, 15 bp, Homo sapiens
atactaaggggctgc

SEQ ID NO: 1984699 - DNA, 15 bp, Homo sapiens
tactaaggggctgct

SEQ ID NO: 1984700 - DNA, 15 bp, Homo sapiens
actaaggggctgctg

SEQ ID NO: 1984701 - DNA, 15 bp, Homo sapiens
ctaaggggctgctgg

SEQ ID NO: 1984702 - DNA, 15 bp, Homo sapiens
taaggggctgctggc

SEQ ID NO: 1984703 - DNA, 15 bp, Homo sapiens
aaggggctgctggca

SEQ ID NO: 1984704 - DNA, 15 bp, Homo sapiens
aggggctgctggcag

SEQ ID NO: 1984705 - DNA, 15 bp, Homo sapiens
ggggctgctggcagc

SEQ ID NO: 1984706 - DNA, 15 bp, Homo sapiens
gggctgctggcagcc

SEQ ID NO: 1984707 - DNA, 15 bp, Homo sapiens
ggctgctggcagcct

SEQ ID NO: 1984708 - DNA, 15 bp, Homo sapiens
gctgctggcagcctg

SEQ ID NO: 1984709 - DNA, 15 bp, Homo sapiens
ctgctggcagcctgc

SEQ ID NO: 1984710 - DNA, 15 bp, Homo sapiens
tgctggcagcctgcg

SEQ ID NO: 1984711 - DNA, 15 bp, Homo sapiens
gctggcagcctgcgc

SEQ ID NO: 1984712 - DNA, 15 bp, Homo sapiens
ctggcagcctgcgca

SEQ ID NO: 1984713 - DNA, 15 bp, Homo sapiens
tggcagcctgcgcag

SEQ ID NO: 1984714 - DNA, 15 bp, Homo sapiens
ggcagcctgcgcagc

SEQ ID NO: 1984715 - DNA, 15 bp, Homo sapiens
gcagcctgcgcagcc

SEQ ID NO: 1984716 - DNA, 15 bp, Homo sapiens
cagcctgcgcagcca

SEQ ID NO: 1984717 - DNA, 15 bp, Homo sapiens
agcctgcgcagccat

SEQ ID NO: 1984718 - DNA, 15 bp, Homo sapiens
gcctgcgcagccatt

SEQ ID NO: 1984719 - DNA, 15 bp, Homo sapiens
cctgcgcagccattt

SEQ ID NO: 1984720 - DNA, 15 bp, Homo sapiens
ctgcgcagccatttc

SEQ ID NO: 1984721 - DNA, 15 bp, Homo sapiens
tgcgcagccatttcc

SEQ ID NO: 1984722 - DNA, 15 bp, Homo sapiens
gcgcagccatttcct

SEQ ID NO: 1984723 - DNA, 15 bp, Homo sapiens
cgcagccatttcctg

SEQ ID NO: 1984724 - DNA, 15 bp, Homo sapiens
gcagccatttcctgt

SEQ ID NO: 1984725 - DNA, 15 bp, Homo sapiens
cagccatttcctgtt

SEQ ID NO: 1984726 - DNA, 15 bp, Homo sapiens
agccatttcctgtta

SEQ ID NO: 1984727 - DNA, 15 bp, Homo sapiens
gccatttcctgttaa

SEQ ID NO: 1984728 - DNA, 15 bp, Homo sapiens
ccatttcctgttaaa

SEQ ID NO: 1984729 - DNA, 15 bp, Homo sapiens
catttcctgttaaac

SEQ ID NO: 1984730 - DNA, 15 bp, Homo sapiens
atttcctgttaaacc

SEQ ID NO: 1984731 - DNA, 15 bp, Homo sapiens
tttcctgttaaacca

SEQ ID NO: 1984732 - DNA, 15 bp, Homo sapiens
ttcctgttaaaccaa

SEQ ID NO: 1984733 - DNA, 15 bp, Homo sapiens
tcctgttaaaccaaa

SEQ ID NO: 1984734 - DNA, 15 bp, Homo sapiens
cctgttaaaccaaag

SEQ ID NO: 1984735 - DNA, 15 bp, Homo sapiens
ctgttaaaccaaagc

SEQ ID NO: 1984736 - DNA, 15 bp, Homo sapiens
tgttaaaccaaagct

SEQ ID NO: 1984737 - DNA, 15 bp, Homo sapiens
gttaaaccaaagctg

SEQ ID NO: 1984738 - DNA, 15 bp, Homo sapiens
ttaaaccaaagctgc

SEQ ID NO: 1984739 - DNA, 15 bp, Homo sapiens
taaaccaaagctgcc

SEQ ID NO: 1984740 - DNA, 15 bp, Homo sapiens
aaaccaaagctgccc

SEQ ID NO: 1984741 - DNA, 15 bp, Homo sapiens
aaccaaagctgccca

SEQ ID NO: 1984742 - DNA, 15 bp, Homo sapiens
accaaagctgcccag

SEQ ID NO: 1984743 - DNA, 15 bp, Homo sapiens
ccaaagctgcccagc

SEQ ID NO: 1984744 - DNA, 15 bp, Homo sapiens
caaagctgcccagct

SEQ ID NO: 1984745 - DNA, 15 bp, Homo sapiens
aaagctgcccagcta

SEQ ID NO: 1984746 - DNA, 15 bp, Homo sapiens
aagctgcccagctac

SEQ ID NO: 1984747 - DNA, 15 bp, Homo sapiens
agctgcccagctacg

SEQ ID NO: 1984748 - DNA, 15 bp, Homo sapiens
gctgcccagctacgt

SEQ ID NO: 1984749 - DNA, 15 bp, Homo sapiens
ctgcccagctacgtt

SEQ ID NO: 1984750 - DNA, 15 bp, Homo sapiens
tgcccagctacgttc

SEQ ID NO: 1984751 - DNA, 15 bp, Homo sapiens
gcccagctacgttcc

SEQ ID NO: 1984752 - DNA, 15 bp, Homo sapiens
cccagctacgttcct

SEQ ID NO: 1984753 - DNA, 15 bp, Homo sapiens
ccagctacgttcctg

SEQ ID NO: 1984754 - DNA, 15 bp, Homo sapiens
cagctacgttcctga

SEQ ID NO: 1984755 - DNA, 15 bp, Homo sapiens
agctacgttcctgaa

SEQ ID NO: 1984756 - DNA, 15 bp, Homo sapiens
gctacgttcctgaaa

SEQ ID NO: 1984757 - DNA, 15 bp, Homo sapiens
ctacgttcctgaaag

SEQ ID NO: 1984758 - DNA, 15 bp, Homo sapiens
tacgttcctgaaaga

SEQ ID NO: 1984759 - DNA, 15 bp, Homo sapiens
acgttcctgaaagag

SEQ ID NO: 1984760 - DNA, 15 bp, Homo sapiens
cgttcctgaaagaga

SEQ ID NO: 1984761 - DNA, 15 bp, Homo sapiens
gttcctgaaagagag

SEQ ID NO: 1984762 - DNA, 15 bp, Homo sapiens
ttcctgaaagagagc

SEQ ID NO: 1984763 - DNA, 15 bp, Homo sapiens
tcctgaaagagagct

SEQ ID NO: 1984764 - DNA, 15 bp, Homo sapiens
cctgaaagagagcta

SEQ ID NO: 1984765 - DNA, 15 bp, Homo sapiens
ctgaaagagagctac

SEQ ID NO: 1984766 - DNA, 15 bp, Homo sapiens
tgaaagagagctaca

SEQ ID NO: 1984767 - DNA, 15 bp, Homo sapiens
gaaagagagctacaa

SEQ ID NO: 1984768 - DNA, 15 bp, Homo sapiens
aaagagagctacaac

SEQ ID NO: 1984769 - DNA, 15 bp, Homo sapiens
aagagagctacaacg

SEQ ID NO: 1984770 - DNA, 15 bp, Homo sapiens
agagagctacaacgg

SEQ ID NO: 1984771 - DNA, 15 bp, Homo sapiens
gagagctacaacggc

SEQ ID NO: 1984772 - DNA, 15 bp, Homo sapiens
agagctacaacggct

SEQ ID NO: 1984773 - DNA, 15 bp, Homo sapiens
gagctacaacggcta

SEQ ID NO: 1984774 - DNA, 15 bp, Homo sapiens
agctacaacggctag

SEQ ID NO: 1984775 - DNA, 15 bp, Homo sapiens
gctacaacggctagc

SEQ ID NO: 1984776 - DNA, 15 bp, Homo sapiens
ctacaacggctagcg

SEQ ID NO: 1984777 - DNA, 15 bp, Homo sapiens
tacaacggctagcgg

SEQ ID NO: 1984778 - DNA, 15 bp, Homo sapiens
acaacggctagcgga

SEQ ID NO: 1984779 - DNA, 15 bp, Homo sapiens
caacggctagcggag

SEQ ID NO: 1984780 - DNA, 15 bp, Homo sapiens
aacggctagcggagg

SEQ ID NO: 1984781 - DNA, 15 bp, Homo sapiens
acggctagcggaggg

SEQ ID NO: 1984782 - DNA, 15 bp, Homo sapiens
cggctagcggaggga

SEQ ID NO: 1984783 - DNA, 15 bp, Homo sapiens
ggctagcggagggag

SEQ ID NO: 1984784 - DNA, 15 bp, Homo sapiens
gctagcggagggagg

SEQ ID NO: 1984785 - DNA, 15 bp, Homo sapiens
ctagcggagggaggg

SEQ ID NO: 1984786 - DNA, 15 bp, Homo sapiens
tagcggagggaggga

SEQ ID NO: 1984787 - DNA, 15 bp, Homo sapiens
agcggagggagggag

SEQ ID NO: 1984788 - DNA, 15 bp, Homo sapiens
gcggagggagggaga

SEQ ID NO: 1984789 - DNA, 15 bp, Homo sapiens
cggagggagggagac

SEQ ID NO: 1984790 - DNA, 15 bp, Homo sapiens
ggagggagggagaca

SEQ ID NO: 1984791 - DNA, 15 bp, Homo sapiens
agggagggagacagc

SEQ ID NO: 1984792 - DNA, 15 bp, Homo sapiens
gggagggagacagcc

SEQ ID NO: 1984793 - DNA, 15 bp, Homo sapiens
ggagggagacagcca

SEQ ID NO: 1984794 - DNA, 15 bp, Homo sapiens
gagggagacagccac

SEQ ID NO: 1984795 - DNA, 15 bp, Homo sapiens
agggagacagccacg

SEQ ID NO: 1984796 - DNA, 15 bp, Homo sapiens
gggagacagccacgt

SEQ ID NO: 1984797 - DNA, 15 bp, Homo sapiens
ggagacagccacgtc

SEQ ID NO: 1984798 - DNA, 15 bp, Homo sapiens
gagacagccacgtca

SEQ ID NO: 1984799 - DNA, 15 bp, Homo sapiens
agacagccacgtcag

SEQ ID NO: 1984800 - DNA, 15 bp, Homo sapiens
gacagccacgtcagt

SEQ ID NO: 1984801 - DNA, 15 bp, Homo sapiens
acagccacgtcagtc

SEQ ID NO: 1984802 - DNA, 15 bp, Homo sapiens
cagccacgtcagtca

SEQ ID NO: 1984803 - DNA, 15 bp, Homo sapiens
agccacgtcagtcag

SEQ ID NO: 1984804 - DNA, 15 bp, Homo sapiens
gccacgtcagtcagg

SEQ ID NO: 1984805 - DNA, 15 bp, Homo sapiens
ccacgtcagtcaggc

SEQ ID NO: 1984806 - DNA, 15 bp, Homo sapiens
cacgtcagtcaggca

SEQ ID NO: 1984807 - DNA, 15 bp, Homo sapiens
acgtcagtcaggcat

SEQ ID NO: 1984808 - DNA, 15 bp, Homo sapiens
cgtcagtcaggcatc

SEQ ID NO: 1984809 - DNA, 15 bp, Homo sapiens
gtcagtcaggcatcc

SEQ ID NO: 1984810 - DNA, 15 bp, Homo sapiens
tcagtcaggcatcca

SEQ ID NO: 1984811 - DNA, 15 bp, Homo sapiens
cagtcaggcatccac

SEQ ID NO: 1984812 - DNA, 15 bp, Homo sapiens
agtcaggcatccacc

SEQ ID NO: 1984813 - DNA, 15 bp, Homo sapiens
gtcaggcatccacct

SEQ ID NO: 1984814 - DNA, 15 bp, Homo sapiens
tcaggcatccacctc

SEQ ID NO: 1984815 - DNA, 15 bp, Homo sapiens
caggcatccacctcc

SEQ ID NO: 1984816 - DNA, 15 bp, Homo sapiens
aggcatccacctccc

SEQ ID NO: 1984817 - DNA, 15 bp, Homo sapiens
ggcatccacctcccc

SEQ ID NO: 1984818 - DNA, 15 bp, Homo sapiens
gcatccacctcccct

SEQ ID NO: 1984819 - DNA, 15 bp, Homo sapiens
catccacctcccctg

SEQ ID NO: 1984820 - DNA, 15 bp, Homo sapiens
atccacctcccctga

SEQ ID NO: 1984821 - DNA, 15 bp, Homo sapiens
tccacctcccctgag

SEQ ID NO: 1984822 - DNA, 15 bp, Homo sapiens
ccacctcccctgagg

SEQ ID NO: 1984823 - DNA, 15 bp, Homo sapiens
cacctcccctgaggg

SEQ ID NO: 1984824 - DNA, 15 bp, Homo sapiens
acctcccctgagggt

SEQ ID NO: 1984825 - DNA, 15 bp, Homo sapiens
cctcccctgagggtc

SEQ ID NO: 1984826 - DNA, 15 bp, Homo sapiens
ctcccctgagggtct

SEQ ID NO: 1984827 - DNA, 15 bp, Homo sapiens
tcccctgagggtctg

SEQ ID NO: 1984828 - DNA, 15 bp, Homo sapiens
cccctgagggtctgc

SEQ ID NO: 1984829 - DNA, 15 bp, Homo sapiens
ccctgagggtctgcg

SEQ ID NO: 1984830 - DNA, 15 bp, Homo sapiens
cctgagggtctgcgg

SEQ ID NO: 1984831 - DNA, 15 bp, Homo sapiens
ctgagggtctgcggc

SEQ ID NO: 1984832 - DNA, 15 bp, Homo sapiens
tgagggtctgcggcc

SEQ ID NO: 1984833 - DNA, 15 bp, Homo sapiens
gagggtctgcggcct

SEQ ID NO: 1984834 - DNA, 15 bp, Homo sapiens
agggtctgcggcctg

SEQ ID NO: 1984835 - DNA, 15 bp, Homo sapiens
gggtctgcggcctgg

SEQ ID NO: 1984836 - DNA, 15 bp, Homo sapiens
ggtctgcggcctggc

SEQ ID NO: 1984837 - DNA, 15 bp, Homo sapiens
gtctgcggcctggcc

SEQ ID NO: 1984838 - DNA, 15 bp, Homo sapiens
tctgcggcctggcca

SEQ ID NO: 1984839 - DNA, 15 bp, Homo sapiens
ctgcggcctggccag

SEQ ID NO: 1984840 - DNA, 15 bp, Homo sapiens
tgcggcctggccagg

SEQ ID NO: 1984841 - DNA, 15 bp, Homo sapiens
gcggcctggccaggg

SEQ ID NO: 1984842 - DNA, 15 bp, Homo sapiens
cggcctggccagggt

SEQ ID NO: 1984843 - DNA, 15 bp, Homo sapiens
ggcctggccagggtc

SEQ ID NO: 1984844 - DNA, 15 bp, Homo sapiens
gcctggccagggtct

SEQ ID NO: 1984845 - DNA, 15 bp, Homo sapiens
cctggccagggtctg

SEQ ID NO: 1984846 - DNA, 15 bp, Homo sapiens
ctggccagggtctgt

SEQ ID NO: 1984847 - DNA, 15 bp, Homo sapiens
tggccagggtctgtg

SEQ ID NO: 1984848 - DNA, 15 bp, Homo sapiens
ggccagggtctgtgg

SEQ ID NO: 1984849 - DNA, 15 bp, Homo sapiens
gccagggtctgtggg

SEQ ID NO: 1984850 - DNA, 15 bp, Homo sapiens
ccagggtctgtgggg

SEQ ID NO: 1984851 - DNA, 15 bp, Homo sapiens
cagggtctgtggggc

SEQ ID NO: 1984852 - DNA, 15 bp, Homo sapiens
agggtctgtggggct

SEQ ID NO: 1984853 - DNA, 15 bp, Homo sapiens
gggtctgtggggctt

SEQ ID NO: 1984854 - DNA, 15 bp, Homo sapiens
ggtctgtggggcttc

SEQ ID NO: 1984855 - DNA, 15 bp, Homo sapiens
gtctgtggggcttca

SEQ ID NO: 1984856 - DNA, 15 bp, Homo sapiens
tctgtggggcttcac

SEQ ID NO: 1984857 - DNA, 15 bp, Homo sapiens
ctgtggggcttcaca

SEQ ID NO: 1984858 - DNA, 15 bp, Homo sapiens
tgtggggcttcacac

SEQ ID NO: 1984859 - DNA, 15 bp, Homo sapiens
gtggggcttcacaca

SEQ ID NO: 1984860 - DNA, 15 bp, Homo sapiens
tggggcttcacacat

SEQ ID NO: 1984861 - DNA, 15 bp, Homo sapiens
ggggcttcacacatt

SEQ ID NO: 1984862 - DNA, 15 bp, Homo sapiens
gggcttcacacattt

SEQ ID NO: 1984863 - DNA, 15 bp, Homo sapiens
ggcttcacacatttg

SEQ ID NO: 1984864 - DNA, 15 bp, Homo sapiens
gcttcacacatttgg

SEQ ID NO: 1984865 - DNA, 15 bp, Homo sapiens
cttcacacatttggg

SEQ ID NO: 1984866 - DNA, 15 bp, Homo sapiens
ttcacacatttgggt

SEQ ID NO: 1984867 - DNA, 15 bp, Homo sapiens
tcacacatttgggtc

SEQ ID NO: 1984868 - DNA, 15 bp, Homo sapiens
cacacatttgggtct

SEQ ID NO: 1984869 - DNA, 15 bp, Homo sapiens
acacatttgggtctg

SEQ ID NO: 1984870 - DNA, 15 bp, Homo sapiens
cacatttgggtctgg

SEQ ID NO: 1984871 - DNA, 15 bp, Homo sapiens
acatttgggtctggc

SEQ ID NO: 1984872 - DNA, 15 bp, Homo sapiens
catttgggtctggct

SEQ ID NO: 1984873 - DNA, 15 bp, Homo sapiens
atttgggtctggctc

SEQ ID NO: 1984874 - DNA, 15 bp, Homo sapiens
tttgggtctggctca

SEQ ID NO: 1984875 - DNA, 15 bp, Homo sapiens
ttgggtctggctcag

SEQ ID NO: 1984876 - DNA, 15 bp, Homo sapiens
tgggtctggctcaga

SEQ ID NO: 1984877 - DNA, 15 bp, Homo sapiens
gggtctggctcagag

SEQ ID NO: 1984878 - DNA, 15 bp, Homo sapiens
ggtctggctcagagc

SEQ ID NO: 1984879 - DNA, 15 bp, Homo sapiens
gtctggctcagagcc

SEQ ID NO: 1984880 - DNA, 15 bp, Homo sapiens
tctggctcagagcct

SEQ ID NO: 1984881 - DNA, 15 bp, Homo sapiens
ctggctcagagcctc

SEQ ID NO: 1984882 - DNA, 15 bp, Homo sapiens
tggctcagagcctca

SEQ ID NO: 1984883 - DNA, 15 bp, Homo sapiens
ggctcagagcctcag

SEQ ID NO: 1984884 - DNA, 15 bp, Homo sapiens
gctcagagcctcagg

SEQ ID NO: 1984885 - DNA, 15 bp, Homo sapiens
ctcagagcctcaggg

SEQ ID NO: 1984886 - DNA, 15 bp, Homo sapiens
tcagagcctcaggga

SEQ ID NO: 1984887 - DNA, 15 bp, Homo sapiens
cagagcctcagggag

SEQ ID NO: 1984888 - DNA, 15 bp, Homo sapiens
agagcctcagggaga

SEQ ID NO: 1984889 - DNA, 15 bp, Homo sapiens
gagcctcagggagag

SEQ ID NO: 1984890 - DNA, 15 bp, Homo sapiens
agcctcagggagagg

SEQ ID NO: 1984891 - DNA, 15 bp, Homo sapiens
gcctcagggagagga

SEQ ID NO: 1984892 - DNA, 15 bp, Homo sapiens
cctcagggagaggaa

SEQ ID NO: 1984893 - DNA, 15 bp, Homo sapiens
ctcagggagaggaac

SEQ ID NO: 1984894 - DNA, 15 bp, Homo sapiens
tcagggagaggaacc

SEQ ID NO: 1984895 - DNA, 15 bp, Homo sapiens
cagggagaggaaccc

SEQ ID NO: 1984896 - DNA, 15 bp, Homo sapiens
agggagaggaacccg

SEQ ID NO: 1984897 - DNA, 15 bp, Homo sapiens
gggagaggaacccgg

SEQ ID NO: 1984898 - DNA, 15 bp, Homo sapiens
ggagaggaacccgga

SEQ ID NO: 1984899 - DNA, 15 bp, Homo sapiens
gagaggaacccggac

SEQ ID NO: 1984900 - DNA, 15 bp, Homo sapiens
agaggaacccggaca

SEQ ID NO: 1984901 - DNA, 15 bp, Homo sapiens
gaggaacccggacat

SEQ ID NO: 1984902 - DNA, 15 bp, Homo sapiens
aggaacccggacatc

SEQ ID NO: 1984903 - DNA, 15 bp, Homo sapiens
ggaacccggacatca

SEQ ID NO: 1984904 - DNA, 15 bp, Homo sapiens
gaacccggacatcag

SEQ ID NO: 1984905 - DNA, 15 bp, Homo sapiens
aacccggacatcagg

SEQ ID NO: 1984906 - DNA, 15 bp, Homo sapiens
acccggacatcaggg

SEQ ID NO: 1984907 - DNA, 15 bp, Homo sapiens
cccggacatcaggga

SEQ ID NO: 1984908 - DNA, 15 bp, Homo sapiens
ccggacatcagggaa

SEQ ID NO: 1984909 - DNA, 15 bp, Homo sapiens
cggacatcagggaaa

SEQ ID NO: 1984910 - DNA, 15 bp, Homo sapiens
ggacatcagggaaag

SEQ ID NO: 1984911 - DNA, 15 bp, Homo sapiens
gacatcagggaaaga

SEQ ID NO: 1984912 - DNA, 15 bp, Homo sapiens
acatcagggaaagag

SEQ ID NO: 1984913 - DNA, 15 bp, Homo sapiens
catcagggaaagagg

SEQ ID NO: 1984914 - DNA, 15 bp, Homo sapiens
atcagggaaagagga

SEQ ID NO: 1984915 - DNA, 15 bp, Homo sapiens
tcagggaaagaggag

SEQ ID NO: 1984916 - DNA, 15 bp, Homo sapiens
cagggaaagaggagg

SEQ ID NO: 1984917 - DNA, 15 bp, Homo sapiens
agggaaagaggaggg

SEQ ID NO: 1984918 - DNA, 15 bp, Homo sapiens
gggaaagaggaggga

SEQ ID NO: 1984919 - DNA, 15 bp, Homo sapiens
ggaaagaggagggaa

SEQ ID NO: 1984920 - DNA, 15 bp, Homo sapiens
gaaagaggagggaag

SEQ ID NO: 1984921 - DNA, 15 bp, Homo sapiens
aaagaggagggaagg

SEQ ID NO: 1984922 - DNA, 15 bp, Homo sapiens
aagaggagggaaggc

SEQ ID NO: 1984923 - DNA, 15 bp, Homo sapiens
agaggagggaaggca

SEQ ID NO: 1984924 - DNA, 15 bp, Homo sapiens
gaggagggaaggcac

SEQ ID NO: 1984925 - DNA, 15 bp, Homo sapiens
aggagggaaggcact

SEQ ID NO: 1984926 - DNA, 15 bp, Homo sapiens
ggagggaaggcactt

SEQ ID NO: 1984927 - DNA, 15 bp, Homo sapiens
gagggaaggcacttg

SEQ ID NO: 1984928 - DNA, 15 bp, Homo sapiens
agggaaggcacttgt

SEQ ID NO: 1984929 - DNA, 15 bp, Homo sapiens
gggaaggcacttgtg

SEQ ID NO: 1984930 - DNA, 15 bp, Homo sapiens
ggaaggcacttgtgt

SEQ ID NO: 1984931 - DNA, 15 bp, Homo sapiens
gaaggcacttgtgtg

SEQ ID NO: 1984932 - DNA, 15 bp, Homo sapiens
aaggcacttgtgtga

SEQ ID NO: 1984933 - DNA, 15 bp, Homo sapiens
aggcacttgtgtgag

SEQ ID NO: 1984934 - DNA, 15 bp, Homo sapiens
ggcacttgtgtgagg

SEQ ID NO: 1984935 - DNA, 15 bp, Homo sapiens
gcacttgtgtgagga

SEQ ID NO: 1984936 - DNA, 15 bp, Homo sapiens
cacttgtgtgaggag

SEQ ID NO: 1984937 - DNA, 15 bp, Homo sapiens
acttgtgtgaggagt

SEQ ID NO: 1984938 - DNA, 15 bp, Homo sapiens
cttgtgtgaggagtc

SEQ ID NO: 1984939 - DNA, 15 bp, Homo sapiens
ttgtgtgaggagtca

SEQ ID NO: 1984940 - DNA, 15 bp, Homo sapiens
tgtgtgaggagtcag

SEQ ID NO: 1984941 - DNA, 15 bp, Homo sapiens
gtgtgaggagtcaga

SEQ ID NO: 1984942 - DNA, 15 bp, Homo sapiens
tgtgaggagtcagag

SEQ ID NO: 1984943 - DNA, 15 bp, Homo sapiens
gtgaggagtcagagc

SEQ ID NO: 1984944 - DNA, 15 bp, Homo sapiens
tgaggagtcagagct

SEQ ID NO: 1984945 - DNA, 15 bp, Homo sapiens
gaggagtcagagctg

SEQ ID NO: 1984946 - DNA, 15 bp, Homo sapiens
aggagtcagagctgt

SEQ ID NO: 1984947 - DNA, 15 bp, Homo sapiens
ggagtcagagctgtg

SEQ ID NO: 1984948 - DNA, 15 bp, Homo sapiens
gagtcagagctgtga

SEQ ID NO: 1984949 - DNA, 15 bp, Homo sapiens
agtcagagctgtgaa

SEQ ID NO: 1984950 - DNA, 15 bp, Homo sapiens
gtcagagctgtgaac

SEQ ID NO: 1984951 - DNA, 15 bp, Homo sapiens
tcagagctgtgaacg

SEQ ID NO: 1984952 - DNA, 15 bp, Homo sapiens
cagagctgtgaacgg

SEQ ID NO: 1984953 - DNA, 15 bp, Homo sapiens
agagctgtgaacgga

SEQ ID NO: 1984954 - DNA, 15 bp, Homo sapiens
gagctgtgaacggac

SEQ ID NO: 1984955 - DNA, 15 bp, Homo sapiens
agctgtgaacggacc

SEQ ID NO: 1984956 - DNA, 15 bp, Homo sapiens
gctgtgaacggacct

SEQ ID NO: 1984957 - DNA, 15 bp, Homo sapiens
ctgtgaacggacctg

SEQ ID NO: 1984958 - DNA, 15 bp, Homo sapiens
tgtgaacggacctgg

SEQ ID NO: 1984959 - DNA, 15 bp, Homo sapiens
gtgaacggacctggg

SEQ ID NO: 1984960 - DNA, 15 bp, Homo sapiens
tgaacggacctggga

SEQ ID NO: 1984961 - DNA, 15 bp, Homo sapiens
gaacggacctgggat

SEQ ID NO: 1984962 - DNA, 15 bp, Homo sapiens
aacggacctgggatg

SEQ ID NO: 1984963 - DNA, 15 bp, Homo sapiens
acggacctgggatga

SEQ ID NO: 1984964 - DNA, 15 bp, Homo sapiens
cggacctgggatgat

SEQ ID NO: 1984965 - DNA, 15 bp, Homo sapiens
ggacctgggatgatg

SEQ ID NO: 1984966 - DNA, 15 bp, Homo sapiens
gacctgggatgatgc

SEQ ID NO: 1984967 - DNA, 15 bp, Homo sapiens
acctgggatgatgcg

SEQ ID NO: 1984968 - DNA, 15 bp, Homo sapiens
cctgggatgatgcgc

SEQ ID NO: 1984969 - DNA, 15 bp, Homo sapiens
ctgggatgatgcgct

SEQ ID NO: 1984970 - DNA, 15 bp, Homo sapiens
tgggatgatgcgctg

SEQ ID NO: 1984971 - DNA, 15 bp, Homo sapiens
gggatgatgcgctgg

SEQ ID NO: 1984972 - DNA, 15 bp, Homo sapiens
ggatgatgcgctggc

SEQ ID NO: 1984973 - DNA, 15 bp, Homo sapiens
gatgatgcgctggcc

SEQ ID NO: 1984974 - DNA, 15 bp, Homo sapiens
atgatgcgctggcct

SEQ ID NO: 1984975 - DNA, 15 bp, Homo sapiens
tgatgcgctggcctc

SEQ ID NO: 1984976 - DNA, 15 bp, Homo sapiens
gatgcgctggcctca

SEQ ID NO: 1984977 - DNA, 15 bp, Homo sapiens
atgcgctggcctcag

SEQ ID NO: 1984978 - DNA, 15 bp, Homo sapiens
tgcgctggcctcaga

SEQ ID NO: 1984979 - DNA, 15 bp, Homo sapiens
gcgctggcctcagaa

SEQ ID NO: 1984980 - DNA, 15 bp, Homo sapiens
cgctggcctcagaaa

SEQ ID NO: 1984981 - DNA, 15 bp, Homo sapiens
gctggcctcagaaag

SEQ ID NO: 1984982 - DNA, 15 bp, Homo sapiens
ctggcctcagaaagg

SEQ ID NO: 1984983 - DNA, 15 bp, Homo sapiens
tggcctcagaaagga

SEQ ID NO: 1984984 - DNA, 15 bp, Homo sapiens
ggcctcagaaaggaa

SEQ ID NO: 1984985 - DNA, 15 bp, Homo sapiens
gcctcagaaaggaat

SEQ ID NO: 1984986 - DNA, 15 bp, Homo sapiens
cctcagaaaggaatt

SEQ ID NO: 1984987 - DNA, 15 bp, Homo sapiens
ctcagaaaggaatta

SEQ ID NO: 1984988 - DNA, 15 bp, Homo sapiens
tcagaaaggaattag

SEQ ID NO: 1984989 - DNA, 15 bp, Homo sapiens
cagaaaggaattagc

SEQ ID NO: 1984990 - DNA, 15 bp, Homo sapiens
agaaaggaattagct

SEQ ID NO: 1984991 - DNA, 15 bp, Homo sapiens
gaaaggaattagctt

SEQ ID NO: 1984992 - DNA, 15 bp, Homo sapiens
aaaggaattagctta

SEQ ID NO: 1984993 - DNA, 15 bp, Homo sapiens
aaggaattagcttaa

SEQ ID NO: 1984994 - DNA, 15 bp, Homo sapiens
aggaattagcttaag

SEQ ID NO: 1984995 - DNA, 15 bp, Homo sapiens
ggaattagcttaagg

SEQ ID NO: 1984996 - DNA, 15 bp, Homo sapiens
gaattagcttaagga

SEQ ID NO: 1984997 - DNA, 15 bp, Homo sapiens
aattagcttaaggaa

SEQ ID NO: 1984998 - DNA, 15 bp, Homo sapiens
attagcttaaggaat

SEQ ID NO: 1984999 - DNA, 15 bp, Homo sapiens
ttagcttaaggaatg

SEQ ID NO: 1985000 - DNA, 15 bp, Homo sapiens
tagcttaaggaatgt

SEQ ID NO: 1985001 - DNA, 15 bp, Homo sapiens
agcttaaggaatgtc

SEQ ID NO: 1985002 - DNA, 15 bp, Homo sapiens
gcttaaggaatgtcc

SEQ ID NO: 1985003 - DNA, 15 bp, Homo sapiens
cttaaggaatgtcca

SEQ ID NO: 1985004 - DNA, 15 bp, Homo sapiens
ttaaggaatgtccac

SEQ ID NO: 1985005 - DNA, 15 bp, Homo sapiens
taaggaatgtccact

SEQ ID NO: 1985006 - DNA, 15 bp, Homo sapiens
aaggaatgtccactg

SEQ ID NO: 1985007 - DNA, 15 bp, Homo sapiens
aggaatgtccactga

SEQ ID NO: 1985008 - DNA, 15 bp, Homo sapiens
ggaatgtccactgag

SEQ ID NO: 1985009 - DNA, 15 bp, Homo sapiens
gaatgtccactgaga

SEQ ID NO: 1985010 - DNA, 15 bp, Homo sapiens
aatgtccactgagag

SEQ ID NO: 1985011 - DNA, 15 bp, Homo sapiens
atgtccactgagaga

SEQ ID NO: 1985012 - DNA, 15 bp, Homo sapiens
tgtccactgagagaa

SEQ ID NO: 1985013 - DNA, 15 bp, Homo sapiens
gtccactgagagaaa

SEQ ID NO: 1985014 - DNA, 15 bp, Homo sapiens
tccactgagagaaaa

SEQ ID NO: 1985015 - DNA, 15 bp, Homo sapiens
ccactgagagaaaaa

SEQ ID NO: 1985016 - DNA, 15 bp, Homo sapiens
cactgagagaaaaag

SEQ ID NO: 1985017 - DNA, 15 bp, Homo sapiens
actgagagaaaaagg

SEQ ID NO: 1985018 - DNA, 15 bp, Homo sapiens
ctgagagaaaaaggt

SEQ ID NO: 1985019 - DNA, 15 bp, Homo sapiens
tgagagaaaaaggta

SEQ ID NO: 1985020 - DNA, 15 bp, Homo sapiens
gagagaaaaaggtaa

SEQ ID NO: 1985021 - DNA, 15 bp, Homo sapiens
agagaaaaaggtaac

SEQ ID NO: 1985022 - DNA, 15 bp, Homo sapiens
gagaaaaaggtaaca

SEQ ID NO: 1985023 - DNA, 15 bp, Homo sapiens
agaaaaaggtaacac

SEQ ID NO: 1985024 - DNA, 15 bp, Homo sapiens
gaaaaaggtaacact

SEQ ID NO: 1985025 - DNA, 15 bp, Homo sapiens
aaaaaggtaacactg

SEQ ID NO: 1985026 - DNA, 15 bp, Homo sapiens
aaaaggtaacactgt

SEQ ID NO: 1985027 - DNA, 15 bp, Homo sapiens
aaaggtaacactgtg

SEQ ID NO: 1985028 - DNA, 15 bp, Homo sapiens
aaggtaacactgtgt

SEQ ID NO: 1985029 - DNA, 15 bp, Homo sapiens
aggtaacactgtgtt

SEQ ID NO: 1985030 - DNA, 15 bp, Homo sapiens
ggtaacactgtgtta

SEQ ID NO: 1985031 - DNA, 15 bp, Homo sapiens
gtaacactgtgttaa

SEQ ID NO: 1985032 - DNA, 15 bp, Homo sapiens
taacactgtgttaaa

SEQ ID NO: 1985033 - DNA, 15 bp, Homo sapiens
aacactgtgttaaaa

SEQ ID NO: 1985034 - DNA, 15 bp, Homo sapiens
acactgtgttaaaag

SEQ ID NO: 1985035 - DNA, 15 bp, Homo sapiens
cactgtgttaaaaga

SEQ ID NO: 1985036 - DNA, 15 bp, Homo sapiens
actgtgttaaaagac

SEQ ID NO: 1985037 - DNA, 15 bp, Homo sapiens
ctgtgttaaaagacc

SEQ ID NO: 1985038 - DNA, 15 bp, Homo sapiens
tgtgttaaaagacca

SEQ ID NO: 1985039 - DNA, 15 bp, Homo sapiens
gtgttaaaagaccaa

SEQ ID NO: 1985040 - DNA, 15 bp, Homo sapiens
tgttaaaagaccaag

SEQ ID NO: 1985041 - DNA, 15 bp, Homo sapiens
gttaaaagaccaaga

SEQ ID NO: 1985042 - DNA, 15 bp, Homo sapiens
ttaaaagaccaagag

SEQ ID NO: 1985043 - DNA, 15 bp, Homo sapiens
taaaagaccaagaga

SEQ ID NO: 1985044 - DNA, 15 bp, Homo sapiens
aaaagaccaagagag

SEQ ID NO: 1985045 - DNA, 15 bp, Homo sapiens
aaagaccaagagaga

SEQ ID NO: 1985046 - DNA, 15 bp, Homo sapiens
aagaccaagagagaa

SEQ ID NO: 1985047 - DNA, 15 bp, Homo sapiens
agaccaagagagaaa

SEQ ID NO: 1985048 - DNA, 15 bp, Homo sapiens
gaccaagagagaaaa

SEQ ID NO: 1985049 - DNA, 15 bp, Homo sapiens
accaagagagaaaaa

SEQ ID NO: 1985050 - DNA, 15 bp, Homo sapiens
ccaagagagaaaaaa

SEQ ID NO: 1985051 - DNA, 15 bp, Homo sapiens
gagagaaaaaaaaaa

SEQ ID NO: 1985052 - DNA, 15 bp, Homo sapiens
agagaaaaaaaaaag

SEQ ID NO: 1985053 - DNA, 15 bp, Homo sapiens
gagaaaaaaaaaagt

SEQ ID NO: 1985054 - DNA, 15 bp, Homo sapiens
agaaaaaaaaaagtc

SEQ ID NO: 1985055 - DNA, 15 bp, Homo sapiens
gaaaaaaaaaagtca

SEQ ID NO: 1985056 - DNA, 15 bp, Homo sapiens
aaaaaaaaaagtcag

SEQ ID NO: 1985057 - DNA, 15 bp, Homo sapiens
aaaaaaaaagtcagc

SEQ ID NO: 1985058 - DNA, 15 bp, Homo sapiens
aaaaaaaagtcagct

SEQ ID NO: 1985059 - DNA, 15 bp, Homo sapiens
aaaaaaagtcagctc

SEQ ID NO: 1985060 - DNA, 15 bp, Homo sapiens
aaaaaagtcagctcc

SEQ ID NO: 1985061 - DNA, 15 bp, Homo sapiens
aaaaagtcagctcct

SEQ ID NO: 1985062 - DNA, 15 bp, Homo sapiens
aaaagtcagctccta

SEQ ID NO: 1985063 - DNA, 15 bp, Homo sapiens
aaagtcagctcctat

SEQ ID NO: 1985064 - DNA, 15 bp, Homo sapiens
aagtcagctcctatg

SEQ ID NO: 1985065 - DNA, 15 bp, Homo sapiens
agtcagctcctatgg

SEQ ID NO: 1985066 - DNA, 15 bp, Homo sapiens
gtcagctcctatggt

SEQ ID NO: 1985067 - DNA, 15 bp, Homo sapiens
tcagctcctatggtg

SEQ ID NO: 1985068 - DNA, 15 bp, Homo sapiens
cagctcctatggtgg

SEQ ID NO: 1985069 - DNA, 15 bp, Homo sapiens
agctcctatggtgga

SEQ ID NO: 1985070 - DNA, 15 bp, Homo sapiens
gctcctatggtggaa

SEQ ID NO: 1985071 - DNA, 15 bp, Homo sapiens
ctcctatggtggaat

SEQ ID NO: 1985072 - DNA, 15 bp, Homo sapiens
tcctatggtggaatt

SEQ ID NO: 1985073 - DNA, 15 bp, Homo sapiens
cctatggtggaatta

SEQ ID NO: 1985074 - DNA, 15 bp, Homo sapiens
ctatggtggaattac

SEQ ID NO: 1985075 - DNA, 15 bp, Homo sapiens
tatggtggaattaca

SEQ ID NO: 1985076 - DNA, 15 bp, Homo sapiens
atggtggaattacaa

SEQ ID NO: 1985077 - DNA, 15 bp, Homo sapiens
tggtggaattacaat

SEQ ID NO: 1985078 - DNA, 15 bp, Homo sapiens
ggtggaattacaatg

SEQ ID NO: 1985079 - DNA, 15 bp, Homo sapiens
gtggaattacaatga

SEQ ID NO: 1985080 - DNA, 15 bp, Homo sapiens
tggaattacaatgag

SEQ ID NO: 1985081 - DNA, 15 bp, Homo sapiens
ggaattacaatgagg

SEQ ID NO: 1985082 - DNA, 15 bp, Homo sapiens
gaattacaatgaggg

SEQ ID NO: 1985083 - DNA, 15 bp, Homo sapiens
aattacaatgaggga

SEQ ID NO: 1985084 - DNA, 15 bp, Homo sapiens
attacaatgagggaa

SEQ ID NO: 1985085 - DNA, 15 bp, Homo sapiens
ttacaatgagggaaa

SEQ ID NO: 1985086 - DNA, 15 bp, Homo sapiens
tacaatgagggaaag

SEQ ID NO: 1985087 - DNA, 15 bp, Homo sapiens
acaatgagggaaaga

SEQ ID NO: 1985088 - DNA, 15 bp, Homo sapiens
caatgagggaaagat

SEQ ID NO: 1985089 - DNA, 15 bp, Homo sapiens
aatgagggaaagatg

SEQ ID NO: 1985090 - DNA, 15 bp, Homo sapiens
atgagggaaagatgt

SEQ ID NO: 1985091 - DNA, 15 bp, Homo sapiens
tgagggaaagatgta

SEQ ID NO: 1985092 - DNA, 15 bp, Homo sapiens
gagggaaagatgtat

SEQ ID NO: 1985093 - DNA, 15 bp, Homo sapiens
agggaaagatgtatc

SEQ ID NO: 1985094 - DNA, 15 bp, Homo sapiens
gggaaagatgtatcc

SEQ ID NO: 1985095 - DNA, 15 bp, Homo sapiens
ggaaagatgtatcca

SEQ ID NO: 1985096 - DNA, 15 bp, Homo sapiens
gaaagatgtatccac

SEQ ID NO: 1985097 - DNA, 15 bp, Homo sapiens
aaagatgtatccaca

SEQ ID NO: 1985098 - DNA, 15 bp, Homo sapiens
aagatgtatccacaa

SEQ ID NO: 1985099 - DNA, 15 bp, Homo sapiens
agatgtatccacaag

SEQ ID NO: 1985100 - DNA, 15 bp, Homo sapiens
gatgtatccacaagt

SEQ ID NO: 1985101 - DNA, 15 bp, Homo sapiens
atgtatccacaagtg

SEQ ID NO: 1985102 - DNA, 15 bp, Homo sapiens
tgtatccacaagtgc

SEQ ID NO: 1985103 - DNA, 15 bp, Homo sapiens
gtatccacaagtgct

SEQ ID NO: 1985104 - DNA, 15 bp, Homo sapiens
tatccacaagtgctc

SEQ ID NO: 1985105 - DNA, 15 bp, Homo sapiens
atccacaagtgctcc

SEQ ID NO: 1985106 - DNA, 15 bp, Homo sapiens
tccacaagtgctccc

SEQ ID NO: 1985107 - DNA, 15 bp, Homo sapiens
ccacaagtgctcccc

SEQ ID NO: 1985108 - DNA, 15 bp, Homo sapiens
cacaagtgctcccca

SEQ ID NO: 1985109 - DNA, 15 bp, Homo sapiens
acaagtgctccccaa

SEQ ID NO: 1985110 - DNA, 15 bp, Homo sapiens
caagtgctccccaat

SEQ ID NO: 1985111 - DNA, 15 bp, Homo sapiens
aagtgctccccaatc

SEQ ID NO: 1985112 - DNA, 15 bp, Homo sapiens
agtgctccccaatca

SEQ ID NO: 1985113 - DNA, 15 bp, Homo sapiens
gtgctccccaatcaa

SEQ ID NO: 1985114 - DNA, 15 bp, Homo sapiens
tgctccccaatcaaa

SEQ ID NO: 1985115 - DNA, 15 bp, Homo sapiens
gctccccaatcaaaa

SEQ ID NO: 1985116 - DNA, 15 bp, Homo sapiens
ctccccaatcaaaag

SEQ ID NO: 1985117 - DNA, 15 bp, Homo sapiens
tccccaatcaaaaga

SEQ ID NO: 1985118 - DNA, 15 bp, Homo sapiens
ccccaatcaaaagaa

SEQ ID NO: 1985119 - DNA, 15 bp, Homo sapiens
cccaatcaaaagaaa

SEQ ID NO: 1985120 - DNA, 15 bp, Homo sapiens
ccaatcaaaagaaag

SEQ ID NO: 1985121 - DNA, 15 bp, Homo sapiens
caatcaaaagaaagg

SEQ ID NO: 1985122 - DNA, 15 bp, Homo sapiens
aatcaaaagaaaggg

SEQ ID NO: 1985123 - DNA, 15 bp, Homo sapiens
atcaaaagaaaggga

SEQ ID NO: 1985124 - DNA, 15 bp, Homo sapiens
tcaaaagaaagggaa

SEQ ID NO: 1985125 - DNA, 15 bp, Homo sapiens
caaaagaaagggaat

SEQ ID NO: 1985126 - DNA, 15 bp, Homo sapiens
aaaagaaagggaatg

SEQ ID NO: 1985127 - DNA, 15 bp, Homo sapiens
aaagaaagggaatgg

SEQ ID NO: 1985128 - DNA, 15 bp, Homo sapiens
aagaaagggaatggg

SEQ ID NO: 1985129 - DNA, 15 bp, Homo sapiens
agaaagggaatgggg

SEQ ID NO: 1985130 - DNA, 15 bp, Homo sapiens
gaaagggaatggggc

SEQ ID NO: 1985131 - DNA, 15 bp, Homo sapiens
aaagggaatggggcc

SEQ ID NO: 1985132 - DNA, 15 bp, Homo sapiens
aagggaatggggcct

SEQ ID NO: 1985133 - DNA, 15 bp, Homo sapiens
agggaatggggcctg

SEQ ID NO: 1985134 - DNA, 15 bp, Homo sapiens
gggaatggggcctgt

SEQ ID NO: 1985135 - DNA, 15 bp, Homo sapiens
ggaatggggcctgtg

SEQ ID NO: 1985136 - DNA, 15 bp, Homo sapiens
gaatggggcctgtgg

SEQ ID NO: 1985137 - DNA, 15 bp, Homo sapiens
aatggggcctgtgga

SEQ ID NO: 1985138 - DNA, 15 bp, Homo sapiens
atggggcctgtggag

SEQ ID NO: 1985139 - DNA, 15 bp, Homo sapiens
tggggcctgtggagc

SEQ ID NO: 1985140 - DNA, 15 bp, Homo sapiens
ggggcctgtggagca

SEQ ID NO: 1985141 - DNA, 15 bp, Homo sapiens
gggcctgtggagcag

SEQ ID NO: 1985142 - DNA, 15 bp, Homo sapiens
ggcctgtggagcagg

SEQ ID NO: 1985143 - DNA, 15 bp, Homo sapiens
gcctgtggagcaggg

SEQ ID NO: 1985144 - DNA, 15 bp, Homo sapiens
cctgtggagcagggg

SEQ ID NO: 1985145 - DNA, 15 bp, Homo sapiens
ctgtggagcagggga

SEQ ID NO: 1985146 - DNA, 15 bp, Homo sapiens
tgtggagcaggggac

SEQ ID NO: 1985147 - DNA, 15 bp, Homo sapiens
gtggagcaggggaca

SEQ ID NO: 1985148 - DNA, 15 bp, Homo sapiens
tggagcaggggacag

SEQ ID NO: 1985149 - DNA, 15 bp, Homo sapiens
ggagcaggggacaga

SEQ ID NO: 1985150 - DNA, 15 bp, Homo sapiens
gagcaggggacagag

SEQ ID NO: 1985151 - DNA, 15 bp, Homo sapiens
agcaggggacagagt

SEQ ID NO: 1985152 - DNA, 15 bp, Homo sapiens
gcaggggacagagtg

SEQ ID NO: 1985153 - DNA, 15 bp, Homo sapiens
caggggacagagtgg

SEQ ID NO: 1985154 - DNA, 15 bp, Homo sapiens
aggggacagagtggg

SEQ ID NO: 1985155 - DNA, 15 bp, Homo sapiens
ggggacagagtggga

SEQ ID NO: 1985156 - DNA, 15 bp, Homo sapiens
gggacagagtgggaa

SEQ ID NO: 1985157 - DNA, 15 bp, Homo sapiens
ggacagagtgggaac

SEQ ID NO: 1985158 - DNA, 15 bp, Homo sapiens
gacagagtgggaaca

SEQ ID NO: 1985159 - DNA, 15 bp, Homo sapiens
acagagtgggaacac

SEQ ID NO: 1985160 - DNA, 15 bp, Homo sapiens
cagagtgggaacact

SEQ ID NO: 1985161 - DNA, 15 bp, Homo sapiens
agagtgggaacactc

SEQ ID NO: 1985162 - DNA, 15 bp, Homo sapiens
gagtgggaacactca

SEQ ID NO: 1985163 - DNA, 15 bp, Homo sapiens
agtgggaacactcag

SEQ ID NO: 1985164 - DNA, 15 bp, Homo sapiens
gtgggaacactcaga

SEQ ID NO: 1985165 - DNA, 15 bp, Homo sapiens
tgggaacactcagag

SEQ ID NO: 1985166 - DNA, 15 bp, Homo sapiens
gggaacactcagagg

SEQ ID NO: 1985167 - DNA, 15 bp, Homo sapiens
ggaacactcagagga

SEQ ID NO: 1985168 - DNA, 15 bp, Homo sapiens
gaacactcagaggaa

SEQ ID NO: 1985169 - DNA, 15 bp, Homo sapiens
aacactcagaggaag

SEQ ID NO: 1985170 - DNA, 15 bp, Homo sapiens
acactcagaggaagg

SEQ ID NO: 1985171 - DNA, 15 bp, Homo sapiens
cactcagaggaagga

SEQ ID NO: 1985172 - DNA, 15 bp, Homo sapiens
actcagaggaaggaa

SEQ ID NO: 1985173 - DNA, 15 bp, Homo sapiens
ctcagaggaaggaaa

SEQ ID NO: 1985174 - DNA, 15 bp, Homo sapiens
tcagaggaaggaaaa

SEQ ID NO: 1985175 - DNA, 15 bp, Homo sapiens
cagaggaaggaaaag

SEQ ID NO: 1985176 - DNA, 15 bp, Homo sapiens
agaggaaggaaaaga

SEQ ID NO: 1985177 - DNA, 15 bp, Homo sapiens
gaggaaggaaaagaa

SEQ ID NO: 1985178 - DNA, 15 bp, Homo sapiens
aggaaggaaaagaac

SEQ ID NO: 1985179 - DNA, 15 bp, Homo sapiens
ggaaggaaaagaaca

SEQ ID NO: 1985180 - DNA, 15 bp, Homo sapiens
gaaggaaaagaacag

SEQ ID NO: 1985181 - DNA, 15 bp, Homo sapiens
aaggaaaagaacagg

SEQ ID NO: 1985182 - DNA, 15 bp, Homo sapiens
aggaaaagaacagga

SEQ ID NO: 1985183 - DNA, 15 bp, Homo sapiens
ggaaaagaacaggaa

SEQ ID NO: 1985184 - DNA, 15 bp, Homo sapiens
gaaaagaacaggaag

SEQ ID NO: 1985185 - DNA, 15 bp, Homo sapiens
aaaagaacaggaaga

SEQ ID NO: 1985186 - DNA, 15 bp, Homo sapiens
aaagaacaggaagaa

SEQ ID NO: 1985187 - DNA, 15 bp, Homo sapiens
aagaacaggaagaag

SEQ ID NO: 1985188 - DNA, 15 bp, Homo sapiens
agaacaggaagaaga

SEQ ID NO: 1985189 - DNA, 15 bp, Homo sapiens
gaacaggaagaagaa

SEQ ID NO: 1985190 - DNA, 15 bp, Homo sapiens
aacaggaagaagaat

SEQ ID NO: 1985191 - DNA, 15 bp, Homo sapiens
acaggaagaagaatc

SEQ ID NO: 1985192 - DNA, 15 bp, Homo sapiens
caggaagaagaatcc

SEQ ID NO: 1985193 - DNA, 15 bp, Homo sapiens
aggaagaagaatccg

SEQ ID NO: 1985194 - DNA, 15 bp, Homo sapiens
ggaagaagaatccgc

SEQ ID NO: 1985195 - DNA, 15 bp, Homo sapiens
gaagaagaatccgca

SEQ ID NO: 1985196 - DNA, 15 bp, Homo sapiens
aagaagaatccgcag

SEQ ID NO: 1985197 - DNA, 15 bp, Homo sapiens
agaagaatccgcaga

SEQ ID NO: 1985198 - DNA, 15 bp, Homo sapiens
gaagaatccgcagaa

SEQ ID NO: 1985199 - DNA, 15 bp, Homo sapiens
aagaatccgcagaag

SEQ ID NO: 1985200 - DNA, 15 bp, Homo sapiens
agaatccgcagaaga

SEQ ID NO: 1985201 - DNA, 15 bp, Homo sapiens
gaatccgcagaagaa

SEQ ID NO: 1985202 - DNA, 15 bp, Homo sapiens
aatccgcagaagaaa

SEQ ID NO: 1985203 - DNA, 15 bp, Homo sapiens
atccgcagaagaaaa

SEQ ID NO: 1985204 - DNA, 15 bp, Homo sapiens
tccgcagaagaaaaa

SEQ ID NO: 1985205 - DNA, 15 bp, Homo sapiens
ccgcagaagaaaaag

SEQ ID NO: 1985206 - DNA, 15 bp, Homo sapiens
cgcagaagaaaaagg

SEQ ID NO: 1985207 - DNA, 15 bp, Homo sapiens
gcagaagaaaaaggc

SEQ ID NO: 1985208 - DNA, 15 bp, Homo sapiens
cagaagaaaaaggca

SEQ ID NO: 1985209 - DNA, 15 bp, Homo sapiens
agaagaaaaaggcaa

SEQ ID NO: 1985210 - DNA, 15 bp, Homo sapiens
gaagaaaaaggcaaa

SEQ ID NO: 1985211 - DNA, 15 bp, Homo sapiens
aagaaaaaggcaaat

SEQ ID NO: 1985212 - DNA, 15 bp, Homo sapiens
agaaaaaggcaaata

SEQ ID NO: 1985213 - DNA, 15 bp, Homo sapiens
gaaaaaggcaaataa

SEQ ID NO: 1985214 - DNA, 15 bp, Homo sapiens
aaaaaggcaaataaa

SEQ ID NO: 1985215 - DNA, 15 bp, Homo sapiens
aaaaggcaaataaac

SEQ ID NO: 1985216 - DNA, 15 bp, Homo sapiens
aaaggcaaataaaca

SEQ ID NO: 1985217 - DNA, 15 bp, Homo sapiens
aaggcaaataaacac

SEQ ID NO: 1985218 - DNA, 15 bp, Homo sapiens
aggcaaataaacaca

SEQ ID NO: 1985219 - DNA, 15 bp, Homo sapiens
ggcaaataaacacac

SEQ ID NO: 1985220 - DNA, 15 bp, Homo sapiens
gcaaataaacacact

SEQ ID NO: 1985221 - DNA, 15 bp, Homo sapiens
caaataaacacactc

SEQ ID NO: 1985222 - DNA, 15 bp, Homo sapiens
aaataaacacactcc

SEQ ID NO: 1985223 - DNA, 15 bp, Homo sapiens
aataaacacactcca

SEQ ID NO: 1985224 - DNA, 15 bp, Homo sapiens
ataaacacactccag

SEQ ID NO: 1985225 - DNA, 15 bp, Homo sapiens
taaacacactccaga

SEQ ID NO: 1985226 - DNA, 15 bp, Homo sapiens
aaacacactccagag

SEQ ID NO: 1985227 - DNA, 15 bp, Homo sapiens
aacacactccagaga

SEQ ID NO: 1985228 - DNA, 15 bp, Homo sapiens
acacactccagagag

SEQ ID NO: 1985229 - DNA, 15 bp, Homo sapiens
cacactccagagagg

SEQ ID NO: 1985230 - DNA, 15 bp, Homo sapiens
acactccagagagga

SEQ ID NO: 1985231 - DNA, 15 bp, Homo sapiens
cactccagagaggac

SEQ ID NO: 1985232 - DNA, 15 bp, Homo sapiens
actccagagaggaca

SEQ ID NO: 1985233 - DNA, 15 bp, Homo sapiens
ctccagagaggacag

SEQ ID NO: 1985234 - DNA, 15 bp, Homo sapiens
tccagagaggacaga

SEQ ID NO: 1985235 - DNA, 15 bp, Homo sapiens
ccagagaggacagat

SEQ ID NO: 1985236 - DNA, 15 bp, Homo sapiens
cagagaggacagata

SEQ ID NO: 1985237 - DNA, 15 bp, Homo sapiens
agagaggacagatac

SEQ ID NO: 1985238 - DNA, 15 bp, Homo sapiens
gagaggacagataca

SEQ ID NO: 1985239 - DNA, 15 bp, Homo sapiens
agaggacagatacaa

SEQ ID NO: 1985240 - DNA, 15 bp, Homo sapiens
gaggacagatacaag

SEQ ID NO: 1985241 - DNA, 15 bp, Homo sapiens
aggacagatacaagc

SEQ ID NO: 1985242 - DNA, 15 bp, Homo sapiens
ggacagatacaagct

SEQ ID NO: 1985243 - DNA, 15 bp, Homo sapiens
gacagatacaagcta

SEQ ID NO: 1985244 - DNA, 15 bp, Homo sapiens
acagatacaagctac

SEQ ID NO: 1985245 - DNA, 15 bp, Homo sapiens
cagatacaagctact

SEQ ID NO: 1985246 - DNA, 15 bp, Homo sapiens
agatacaagctactt

SEQ ID NO: 1985247 - DNA, 15 bp, Homo sapiens
gatacaagctactta

SEQ ID NO: 1985248 - DNA, 15 bp, Homo sapiens
atacaagctacttac

SEQ ID NO: 1985249 - DNA, 15 bp, Homo sapiens
tacaagctacttaca

SEQ ID NO: 1985250 - DNA, 15 bp, Homo sapiens
acaagctacttacac

SEQ ID NO: 1985251 - DNA, 15 bp, Homo sapiens
caagctacttacaca

SEQ ID NO: 1985252 - DNA, 15 bp, Homo sapiens
aagctacttacacac

SEQ ID NO: 1985253 - DNA, 15 bp, Homo sapiens
agctacttacacaca

SEQ ID NO: 1985254 - DNA, 15 bp, Homo sapiens
gctacttacacacaa

SEQ ID NO: 1985255 - DNA, 15 bp, Homo sapiens
ctacttacacacaag

SEQ ID NO: 1985256 - DNA, 15 bp, Homo sapiens
tacttacacacaagc

SEQ ID NO: 1985257 - DNA, 15 bp, Homo sapiens
acttacacacaagca

SEQ ID NO: 1985258 - DNA, 15 bp, Homo sapiens
cttacacacaagcac

SEQ ID NO: 1985259 - DNA, 15 bp, Homo sapiens
ttacacacaagcacg

SEQ ID NO: 1985260 - DNA, 15 bp, Homo sapiens
tacacacaagcacgc

SEQ ID NO: 1985261 - DNA, 15 bp, Homo sapiens
acacacaagcacgca

SEQ ID NO: 1985262 - DNA, 15 bp, Homo sapiens
cacacaagcacgcag

SEQ ID NO: 1985263 - DNA, 15 bp, Homo sapiens
acacaagcacgcagg

SEQ ID NO: 1985264 - DNA, 15 bp, Homo sapiens
cacaagcacgcaggc

SEQ ID NO: 1985265 - DNA, 15 bp, Homo sapiens
acaagcacgcaggca

SEQ ID NO: 1985266 - DNA, 15 bp, Homo sapiens
caagcacgcaggcac

SEQ ID NO: 1985267 - DNA, 15 bp, Homo sapiens
aagcacgcaggcacg

SEQ ID NO: 1985268 - DNA, 15 bp, Homo sapiens
agcacgcaggcacgc

SEQ ID NO: 1985269 - DNA, 15 bp, Homo sapiens
gcacgcaggcacgca

SEQ ID NO: 1985270 - DNA, 15 bp, Homo sapiens
cacgcaggcacgcac

SEQ ID NO: 1985271 - DNA, 15 bp, Homo sapiens
acgcaggcacgcacg

SEQ ID NO: 1985272 - DNA, 15 bp, Homo sapiens
cgcaggcacgcacgc

SEQ ID NO: 1985273 - DNA, 15 bp, Homo sapiens
gcaggcacgcacgca

SEQ ID NO: 1985274 - DNA, 15 bp, Homo sapiens
caggcacgcacgcac

SEQ ID NO: 1985275 - DNA, 15 bp, Homo sapiens
aggcacgcacgcacg

SEQ ID NO: 1985276 - DNA, 15 bp, Homo sapiens
ggcacgcacgcacgc

SEQ ID NO: 1985277 - DNA, 15 bp, Homo sapiens
gcacgcacgcacgca

SEQ ID NO: 1985278 - DNA, 15 bp, Homo sapiens
cacgcacgcacgcac

SEQ ID NO: 1985279 - DNA, 15 bp, Homo sapiens
acgcacgcacgcaca

SEQ ID NO: 1985280 - DNA, 15 bp, Homo sapiens
cgcacgcacgcacac

SEQ ID NO: 1985281 - DNA, 15 bp, Homo sapiens
gcacgcacgcacacg

SEQ ID NO: 1985282 - DNA, 15 bp, Homo sapiens
cacgcacgcacacgc

SEQ ID NO: 1985283 - DNA, 15 bp, Homo sapiens
acgcacgcacacgca

SEQ ID NO: 1985284 - DNA, 15 bp, Homo sapiens
cgcacgcacacgcaa

SEQ ID NO: 1985285 - DNA, 15 bp, Homo sapiens
gcacgcacacgcaag

SEQ ID NO: 1985286 - DNA, 15 bp, Homo sapiens
cacgcacacgcaagc

SEQ ID NO: 1985287 - DNA, 15 bp, Homo sapiens
acgcacacgcaagct

SEQ ID NO: 1985288 - DNA, 15 bp, Homo sapiens
cgcacacgcaagctg

SEQ ID NO: 1985289 - DNA, 15 bp, Homo sapiens
gcacacgcaagctgc

SEQ ID NO: 1985290 - DNA, 15 bp, Homo sapiens
cacacgcaagctgca

SEQ ID NO: 1985291 - DNA, 15 bp, Homo sapiens
acacgcaagctgcac

SEQ ID NO: 1985292 - DNA, 15 bp, Homo sapiens
cacgcaagctgcacg

SEQ ID NO: 1985293 - DNA, 15 bp, Homo sapiens
acgcaagctgcacgc

SEQ ID NO: 1985294 - DNA, 15 bp, Homo sapiens
cgcaagctgcacgca

SEQ ID NO: 1985295 - DNA, 15 bp, Homo sapiens
gcaagctgcacgcac

SEQ ID NO: 1985296 - DNA, 15 bp, Homo sapiens
caagctgcacgcaca

SEQ ID NO: 1985297 - DNA, 15 bp, Homo sapiens
aagctgcacgcacac

SEQ ID NO: 1985298 - DNA, 15 bp, Homo sapiens
agctgcacgcacacc

SEQ ID NO: 1985299 - DNA, 15 bp, Homo sapiens
gctgcacgcacacca

SEQ ID NO: 1985300 - DNA, 15 bp, Homo sapiens
ctgcacgcacaccag

SEQ ID NO: 1985301 - DNA, 15 bp, Homo sapiens
tgcacgcacaccaga

SEQ ID NO: 1985302 - DNA, 15 bp, Homo sapiens
gcacgcacaccagaa

SEQ ID NO: 1985303 - DNA, 15 bp, Homo sapiens
cacgcacaccagaaa

SEQ ID NO: 1985304 - DNA, 15 bp, Homo sapiens
acgcacaccagaaag

SEQ ID NO: 1985305 - DNA, 15 bp, Homo sapiens
cgcacaccagaaaga

SEQ ID NO: 1985306 - DNA, 15 bp, Homo sapiens
gcacaccagaaagac

SEQ ID NO: 1985307 - DNA, 15 bp, Homo sapiens
cacaccagaaagaca

SEQ ID NO: 1985308 - DNA, 15 bp, Homo sapiens
acaccagaaagacac

SEQ ID NO: 1985309 - DNA, 15 bp, Homo sapiens
caccagaaagacaca

SEQ ID NO: 1985310 - DNA, 15 bp, Homo sapiens
accagaaagacacaa

SEQ ID NO: 1985311 - DNA, 15 bp, Homo sapiens
ccagaaagacacaag

SEQ ID NO: 1985312 - DNA, 15 bp, Homo sapiens
cagaaagacacaagg

SEQ ID NO: 1985313 - DNA, 15 bp, Homo sapiens
agaaagacacaagga

SEQ ID NO: 1985314 - DNA, 15 bp, Homo sapiens
gaaagacacaaggag

SEQ ID NO: 1985315 - DNA, 15 bp, Homo sapiens
aaagacacaaggaga

SEQ ID NO: 1985316 - DNA, 15 bp, Homo sapiens
aagacacaaggagat

SEQ ID NO: 1985317 - DNA, 15 bp, Homo sapiens
agacacaaggagatc

SEQ ID NO: 1985318 - DNA, 15 bp, Homo sapiens
gacacaaggagatcg

SEQ ID NO: 1985319 - DNA, 15 bp, Homo sapiens
acacaaggagatcgg

SEQ ID NO: 1985320 - DNA, 15 bp, Homo sapiens
cacaaggagatcggc

SEQ ID NO: 1985321 - DNA, 15 bp, Homo sapiens
acaaggagatcggcc

SEQ ID NO: 1985322 - DNA, 15 bp, Homo sapiens
caaggagatcggcca

SEQ ID NO: 1985323 - DNA, 15 bp, Homo sapiens
aaggagatcggccag

SEQ ID NO: 1985324 - DNA, 15 bp, Homo sapiens
aggagatcggccagt

SEQ ID NO: 1985325 - DNA, 15 bp, Homo sapiens
ggagatcggccagtc

SEQ ID NO: 1985326 - DNA, 15 bp, Homo sapiens
gagatcggccagtct

SEQ ID NO: 1985327 - DNA, 15 bp, Homo sapiens
agatcggccagtcta

SEQ ID NO: 1985328 - DNA, 15 bp, Homo sapiens
gatcggccagtctag

SEQ ID NO: 1985329 - DNA, 15 bp, Homo sapiens
atcggccagtctaga

SEQ ID NO: 1985330 - DNA, 15 bp, Homo sapiens
tcggccagtctagac

SEQ ID NO: 1985331 - DNA, 15 bp, Homo sapiens
cggccagtctagact

SEQ ID NO: 1985332 - DNA, 15 bp, Homo sapiens
ggccagtctagactc

SEQ ID NO: 1985333 - DNA, 15 bp, Homo sapiens
gccagtctagactct

SEQ ID NO: 1985334 - DNA, 15 bp, Homo sapiens
ccagtctagactctc

SEQ ID NO: 1985335 - DNA, 15 bp, Homo sapiens
cagtctagactctca

SEQ ID NO: 1985336 - DNA, 15 bp, Homo sapiens
agtctagactctcaa

SEQ ID NO: 1985337 - DNA, 15 bp, Homo sapiens
gtctagactctcaaa

SEQ ID NO: 1985338 - DNA, 15 bp, Homo sapiens
tctagactctcaaag

SEQ ID NO: 1985339 - DNA, 15 bp, Homo sapiens
ctagactctcaaagc

SEQ ID NO: 1985340 - DNA, 15 bp, Homo sapiens
tagactctcaaagca

SEQ ID NO: 1985341 - DNA, 15 bp, Homo sapiens
agactctcaaagcaa

SEQ ID NO: 1985342 - DNA, 15 bp, Homo sapiens
gactctcaaagcaaa

SEQ ID NO: 1985343 - DNA, 15 bp, Homo sapiens
actctcaaagcaaaa

SEQ ID NO: 1985344 - DNA, 15 bp, Homo sapiens
ctctcaaagcaaaac

SEQ ID NO: 1985345 - DNA, 15 bp, Homo sapiens
tctcaaagcaaaacc

SEQ ID NO: 1985346 - DNA, 15 bp, Homo sapiens
ctcaaagcaaaacca

SEQ ID NO: 1985347 - DNA, 15 bp, Homo sapiens
tcaaagcaaaaccac

SEQ ID NO: 1985348 - DNA, 15 bp, Homo sapiens
caaagcaaaaccacc

SEQ ID NO: 1985349 - DNA, 15 bp, Homo sapiens
aaagcaaaaccacca

SEQ ID NO: 1985350 - DNA, 15 bp, Homo sapiens
aagcaaaaccaccaa

SEQ ID NO: 1985351 - DNA, 15 bp, Homo sapiens
agcaaaaccaccaag

SEQ ID NO: 1985352 - DNA, 15 bp, Homo sapiens
gcaaaaccaccaagc

SEQ ID NO: 1985353 - DNA, 15 bp, Homo sapiens
caaaaccaccaagca

SEQ ID NO: 1985354 - DNA, 15 bp, Homo sapiens
aaaaccaccaagcag

SEQ ID NO: 1985355 - DNA, 15 bp, Homo sapiens
aaaccaccaagcaga

SEQ ID NO: 1985356 - DNA, 15 bp, Homo sapiens
aaccaccaagcagaa

SEQ ID NO: 1985357 - DNA, 15 bp, Homo sapiens
accaccaagcagaag

SEQ ID NO: 1985358 - DNA, 15 bp, Homo sapiens
ccaccaagcagaagc

SEQ ID NO: 1985359 - DNA, 15 bp, Homo sapiens
caccaagcagaagca

SEQ ID NO: 1985360 - DNA, 15 bp, Homo sapiens
accaagcagaagcat

SEQ ID NO: 1985361 - DNA, 15 bp, Homo sapiens
ccaagcagaagcata

SEQ ID NO: 1985362 - DNA, 15 bp, Homo sapiens
caagcagaagcatat

SEQ ID NO: 1985363 - DNA, 15 bp, Homo sapiens
aagcagaagcatatc

SEQ ID NO: 1985364 - DNA, 15 bp, Homo sapiens
agcagaagcatatcc

SEQ ID NO: 1985365 - DNA, 15 bp, Homo sapiens
gcagaagcatatcct

SEQ ID NO: 1985366 - DNA, 15 bp, Homo sapiens
cagaagcatatcctg

SEQ ID NO: 1985367 - DNA, 15 bp, Homo sapiens
agaagcatatcctgg

SEQ ID NO: 1985368 - DNA, 15 bp, Homo sapiens
gaagcatatcctggg

SEQ ID NO: 1985369 - DNA, 15 bp, Homo sapiens
aagcatatcctggga

SEQ ID NO: 1985370 - DNA, 15 bp, Homo sapiens
agcatatcctgggaa

SEQ ID NO: 1985371 - DNA, 15 bp, Homo sapiens
gcatatcctgggaat

SEQ ID NO: 1985372 - DNA, 15 bp, Homo sapiens
catatcctgggaata

SEQ ID NO: 1985373 - DNA, 15 bp, Homo sapiens
atatcctgggaatag

SEQ ID NO: 1985374 - DNA, 15 bp, Homo sapiens
tatcctgggaataga

SEQ ID NO: 1985375 - DNA, 15 bp, Homo sapiens
atcctgggaatagag

SEQ ID NO: 1985376 - DNA, 15 bp, Homo sapiens
tcctgggaatagagg

SEQ ID NO: 1985377 - DNA, 15 bp, Homo sapiens
cctgggaatagagga

SEQ ID NO: 1985378 - DNA, 15 bp, Homo sapiens
ctgggaatagaggaa

SEQ ID NO: 1985379 - DNA, 15 bp, Homo sapiens
tgggaatagaggaag

SEQ ID NO: 1985380 - DNA, 15 bp, Homo sapiens
gggaatagaggaagg

SEQ ID NO: 1985381 - DNA, 15 bp, Homo sapiens
ggaatagaggaaggc

SEQ ID NO: 1985382 - DNA, 15 bp, Homo sapiens
gaatagaggaaggca

SEQ ID NO: 1985383 - DNA, 15 bp, Homo sapiens
aatagaggaaggcag

SEQ ID NO: 1985384 - DNA, 15 bp, Homo sapiens
atagaggaaggcaga

SEQ ID NO: 1985385 - DNA, 15 bp, Homo sapiens
tagaggaaggcagag

SEQ ID NO: 1985386 - DNA, 15 bp, Homo sapiens
agaggaaggcagaga

SEQ ID NO: 1985387 - DNA, 15 bp, Homo sapiens
gaggaaggcagagac

SEQ ID NO: 1985388 - DNA, 15 bp, Homo sapiens
aggaaggcagagaca

SEQ ID NO: 1985389 - DNA, 15 bp, Homo sapiens
ggaaggcagagacac

SEQ ID NO: 1985390 - DNA, 15 bp, Homo sapiens
gaaggcagagacact

SEQ ID NO: 1985391 - DNA, 15 bp, Homo sapiens
aaggcagagacactg

SEQ ID NO: 1985392 - DNA, 15 bp, Homo sapiens
aggcagagacactgc

SEQ ID NO: 1985393 - DNA, 15 bp, Homo sapiens
ggcagagacactgca

SEQ ID NO: 1985394 - DNA, 15 bp, Homo sapiens
gcagagacactgcag

SEQ ID NO: 1985395 - DNA, 15 bp, Homo sapiens
cagagacactgcagg

SEQ ID NO: 1985396 - DNA, 15 bp, Homo sapiens
agagacactgcaggg

SEQ ID NO: 1985397 - DNA, 15 bp, Homo sapiens
gagacactgcagggg

SEQ ID NO: 1985398 - DNA, 15 bp, Homo sapiens
agacactgcagggga

SEQ ID NO: 1985399 - DNA, 15 bp, Homo sapiens
gacactgcaggggaa

SEQ ID NO: 1985400 - DNA, 15 bp, Homo sapiens
acactgcaggggaag

SEQ ID NO: 1985401 - DNA, 15 bp, Homo sapiens
cactgcaggggaagg

SEQ ID NO: 1985402 - DNA, 15 bp, Homo sapiens
actgcaggggaaggg

SEQ ID NO: 1985403 - DNA, 15 bp, Homo sapiens
ctgcaggggaagggc

SEQ ID NO: 1985404 - DNA, 15 bp, Homo sapiens
tgcaggggaagggcc

SEQ ID NO: 1985405 - DNA, 15 bp, Homo sapiens
gcaggggaagggcca

SEQ ID NO: 1985406 - DNA, 15 bp, Homo sapiens
caggggaagggccaa

SEQ ID NO: 1985407 - DNA, 15 bp, Homo sapiens
aggggaagggccaag

SEQ ID NO: 1985408 - DNA, 15 bp, Homo sapiens
ggggaagggccaagt

SEQ ID NO: 1985409 - DNA, 15 bp, Homo sapiens
gggaagggccaagtg

SEQ ID NO: 1985410 - DNA, 15 bp, Homo sapiens
ggaagggccaagtga

SEQ ID NO: 1985411 - DNA, 15 bp, Homo sapiens
gaagggccaagtgag

SEQ ID NO: 1985412 - DNA, 15 bp, Homo sapiens
aagggccaagtgaga

SEQ ID NO: 1985413 - DNA, 15 bp, Homo sapiens
agggccaagtgagac

SEQ ID NO: 1985414 - DNA, 15 bp, Homo sapiens
gggccaagtgagacg

SEQ ID NO: 1985415 - DNA, 15 bp, Homo sapiens
ggccaagtgagacgc

SEQ ID NO: 1985416 - DNA, 15 bp, Homo sapiens
gccaagtgagacgct

SEQ ID NO: 1985417 - DNA, 15 bp, Homo sapiens
ccaagtgagacgctc

SEQ ID NO: 1985418 - DNA, 15 bp, Homo sapiens
caagtgagacgctcc

SEQ ID NO: 1985419 - DNA, 15 bp, Homo sapiens
aagtgagacgctccc

SEQ ID NO: 1985420 - DNA, 15 bp, Homo sapiens
agtgagacgctccca

SEQ ID NO: 1985421 - DNA, 15 bp, Homo sapiens
gtgagacgctcccac

SEQ ID NO: 1985422 - DNA, 15 bp, Homo sapiens
tgagacgctcccact

SEQ ID NO: 1985423 - DNA, 15 bp, Homo sapiens
gagacgctcccactc

SEQ ID NO: 1985424 - DNA, 15 bp, Homo sapiens
agacgctcccactca

SEQ ID NO: 1985425 - DNA, 15 bp, Homo sapiens
gacgctcccactcac

SEQ ID NO: 1985426 - DNA, 15 bp, Homo sapiens
acgctcccactcaca

SEQ ID NO: 1985427 - DNA, 15 bp, Homo sapiens
cgctcccactcacac

SEQ ID NO: 1985428 - DNA, 15 bp, Homo sapiens
gctcccactcacact

SEQ ID NO: 1985429 - DNA, 15 bp, Homo sapiens
ctcccactcacactg

SEQ ID NO: 1985430 - DNA, 15 bp, Homo sapiens
tcccactcacactgt

SEQ ID NO: 1985431 - DNA, 15 bp, Homo sapiens
cccactcacactgtg

SEQ ID NO: 1985432 - DNA, 15 bp, Homo sapiens
ccactcacactgtgt

SEQ ID NO: 1985433 - DNA, 15 bp, Homo sapiens
cactcacactgtgtg

SEQ ID NO: 1985434 - DNA, 15 bp, Homo sapiens
actcacactgtgtgg

SEQ ID NO: 1985435 - DNA, 15 bp, Homo sapiens
ctcacactgtgtgga

SEQ ID NO: 1985436 - DNA, 15 bp, Homo sapiens
tcacactgtgtggag

SEQ ID NO: 1985437 - DNA, 15 bp, Homo sapiens
cacactgtgtggagt

SEQ ID NO: 1985438 - DNA, 15 bp, Homo sapiens
acactgtgtggagtc

SEQ ID NO: 1985439 - DNA, 15 bp, Homo sapiens
cactgtgtggagtcc

SEQ ID NO: 1985440 - DNA, 15 bp, Homo sapiens
actgtgtggagtcca

SEQ ID NO: 1985441 - DNA, 15 bp, Homo sapiens
ctgtgtggagtccaa

SEQ ID NO: 1985442 - DNA, 15 bp, Homo sapiens
tgtgtggagtccaac

SEQ ID NO: 1985443 - DNA, 15 bp, Homo sapiens
gtgtggagtccaacg

SEQ ID NO: 1985444 - DNA, 15 bp, Homo sapiens
tgtggagtccaacgg

SEQ ID NO: 1985445 - DNA, 15 bp, Homo sapiens
gtggagtccaacgga

SEQ ID NO: 1985446 - DNA, 15 bp, Homo sapiens
tggagtccaacggat

SEQ ID NO: 1985447 - DNA, 15 bp, Homo sapiens
ggagtccaacggatg

SEQ ID NO: 1985448 - DNA, 15 bp, Homo sapiens
gagtccaacggatgg

SEQ ID NO: 1985449 - DNA, 15 bp, Homo sapiens
agtccaacggatggg

SEQ ID NO: 1985450 - DNA, 15 bp, Homo sapiens
gtccaacggatgggg

SEQ ID NO: 1985451 - DNA, 15 bp, Homo sapiens
tccaacggatggggc

SEQ ID NO: 1985452 - DNA, 15 bp, Homo sapiens
ccaacggatggggca

SEQ ID NO: 1985453 - DNA, 15 bp, Homo sapiens
caacggatggggcag

SEQ ID NO: 1985454 - DNA, 15 bp, Homo sapiens
aacggatggggcagc

SEQ ID NO: 1985455 - DNA, 15 bp, Homo sapiens
acggatggggcagcg

SEQ ID NO: 1985456 - DNA, 15 bp, Homo sapiens
cggatggggcagcgt

SEQ ID NO: 1985457 - DNA, 15 bp, Homo sapiens
ggatggggcagcgtg

SEQ ID NO: 1985458 - DNA, 15 bp, Homo sapiens
gatggggcagcgtgg

SEQ ID NO: 1985459 - DNA, 15 bp, Homo sapiens
atggggcagcgtggc

SEQ ID NO: 1985460 - DNA, 15 bp, Homo sapiens
tggggcagcgtggcc

SEQ ID NO: 1985461 - DNA, 15 bp, Homo sapiens
ggggcagcgtggcca

SEQ ID NO: 1985462 - DNA, 15 bp, Homo sapiens
gggcagcgtggccac

SEQ ID NO: 1985463 - DNA, 15 bp, Homo sapiens
ggcagcgtggccacc

SEQ ID NO: 1985464 - DNA, 15 bp, Homo sapiens
gcagcgtggccacct

SEQ ID NO: 1985465 - DNA, 15 bp, Homo sapiens
cagcgtggccacctg

SEQ ID NO: 1985466 - DNA, 15 bp, Homo sapiens
agcgtggccacctgg

SEQ ID NO: 1985467 - DNA, 15 bp, Homo sapiens
gcgtggccacctggc

SEQ ID NO: 1985468 - DNA, 15 bp, Homo sapiens
cgtggccacctggcc

SEQ ID NO: 1985469 - DNA, 15 bp, Homo sapiens
gtggccacctggcct

SEQ ID NO: 1985470 - DNA, 15 bp, Homo sapiens
tggccacctggcctc

SEQ ID NO: 1985471 - DNA, 15 bp, Homo sapiens
ggccacctggcctcg

SEQ ID NO: 1985472 - DNA, 15 bp, Homo sapiens
gccacctggcctcgc

SEQ ID NO: 1985473 - DNA, 15 bp, Homo sapiens
ccacctggcctcgct

SEQ ID NO: 1985474 - DNA, 15 bp, Homo sapiens
cacctggcctcgctc

SEQ ID NO: 1985475 - DNA, 15 bp, Homo sapiens
acctggcctcgctcc

SEQ ID NO: 1985476 - DNA, 15 bp, Homo sapiens
cctggcctcgctcct

SEQ ID NO: 1985477 - DNA, 15 bp, Homo sapiens
ctggcctcgctcctg

SEQ ID NO: 1985478 - DNA, 15 bp, Homo sapiens
tggcctcgctcctgc

SEQ ID NO: 1985479 - DNA, 15 bp, Homo sapiens
ggcctcgctcctgcc

SEQ ID NO: 1985480 - DNA, 15 bp, Homo sapiens
gcctcgctcctgccc

SEQ ID NO: 1985481 - DNA, 15 bp, Homo sapiens
cctcgctcctgccca

SEQ ID NO: 1985482 - DNA, 15 bp, Homo sapiens
ctcgctcctgcccag

SEQ ID NO: 1985483 - DNA, 15 bp, Homo sapiens
tcgctcctgcccagc

SEQ ID NO: 1985484 - DNA, 15 bp, Homo sapiens
cgctcctgcccagcc

SEQ ID NO: 1985485 - DNA, 15 bp, Homo sapiens
gctcctgcccagcct

SEQ ID NO: 1985486 - DNA, 15 bp, Homo sapiens
ctcctgcccagcctc

SEQ ID NO: 1985487 - DNA, 15 bp, Homo sapiens
tcctgcccagcctcc

SEQ ID NO: 1985488 - DNA, 15 bp, Homo sapiens
cctgcccagcctccc

SEQ ID NO: 1985489 - DNA, 15 bp, Homo sapiens
ctgcccagcctcccc

SEQ ID NO: 1985490 - DNA, 15 bp, Homo sapiens
tgcccagcctccccc

SEQ ID NO: 1985491 - DNA, 15 bp, Homo sapiens
gcccagcctccccca

SEQ ID NO: 1985492 - DNA, 15 bp, Homo sapiens
cccagcctcccccac

SEQ ID NO: 1985493 - DNA, 15 bp, Homo sapiens
ccagcctcccccacg

SEQ ID NO: 1985494 - DNA, 15 bp, Homo sapiens
cagcctcccccacgg

SEQ ID NO: 1985495 - DNA, 15 bp, Homo sapiens
agcctcccccacggg

SEQ ID NO: 1985496 - DNA, 15 bp, Homo sapiens
gcctcccccacgggc

SEQ ID NO: 1985497 - DNA, 15 bp, Homo sapiens
cctcccccacgggct

SEQ ID NO: 1985498 - DNA, 15 bp, Homo sapiens
ctcccccacgggctc

SEQ ID NO: 1985499 - DNA, 15 bp, Homo sapiens
tcccccacgggctcc

SEQ ID NO: 1985500 - DNA, 15 bp, Homo sapiens
cccccacgggctccc

SEQ ID NO: 1985501 - DNA, 15 bp, Homo sapiens
ccccacgggctccct

SEQ ID NO: 1985502 - DNA, 15 bp, Homo sapiens
cccacgggctccctg

SEQ ID NO: 1985503 - DNA, 15 bp, Homo sapiens
ccacgggctccctgg

SEQ ID NO: 1985504 - DNA, 15 bp, Homo sapiens
cacgggctccctggt

SEQ ID NO: 1985505 - DNA, 15 bp, Homo sapiens
acgggctccctggtg

SEQ ID NO: 1985506 - DNA, 15 bp, Homo sapiens
cgggctccctggtgc

SEQ ID NO: 1985507 - DNA, 15 bp, Homo sapiens
gggctccctggtgca

SEQ ID NO: 1985508 - DNA, 15 bp, Homo sapiens
ggctccctggtgcac

SEQ ID NO: 1985509 - DNA, 15 bp, Homo sapiens
gctccctggtgcacc

SEQ ID NO: 1985510 - DNA, 15 bp, Homo sapiens
ctccctggtgcacct

SEQ ID NO: 1985511 - DNA, 15 bp, Homo sapiens
tccctggtgcacctt

SEQ ID NO: 1985512 - DNA, 15 bp, Homo sapiens
ccctggtgcaccttc

SEQ ID NO: 1985513 - DNA, 15 bp, Homo sapiens
cctggtgcaccttca

SEQ ID NO: 1985514 - DNA, 15 bp, Homo sapiens
ctggtgcaccttcac

SEQ ID NO: 1985515 - DNA, 15 bp, Homo sapiens
tggtgcaccttcaca

SEQ ID NO: 1985516 - DNA, 15 bp, Homo sapiens
ggtgcaccttcacag

SEQ ID NO: 1985517 - DNA, 15 bp, Homo sapiens
gtgcaccttcacagc

SEQ ID NO: 1985518 - DNA, 15 bp, Homo sapiens
tgcaccttcacagcg

SEQ ID NO: 1985519 - DNA, 15 bp, Homo sapiens
gcaccttcacagcgc

SEQ ID NO: 1985520 - DNA, 15 bp, Homo sapiens
caccttcacagcgcc

SEQ ID NO: 1985521 - DNA, 15 bp, Homo sapiens
accttcacagcgcca

SEQ ID NO: 1985522 - DNA, 15 bp, Homo sapiens
ccttcacagcgccag

SEQ ID NO: 1985523 - DNA, 15 bp, Homo sapiens
cttcacagcgccagg

SEQ ID NO: 1985524 - DNA, 15 bp, Homo sapiens
ttcacagcgccaggt

SEQ ID NO: 1985525 - DNA, 15 bp, Homo sapiens
tcacagcgccaggtg

SEQ ID NO: 1985526 - DNA, 15 bp, Homo sapiens
cacagcgccaggtgg

SEQ ID NO: 1985527 - DNA, 15 bp, Homo sapiens
acagcgccaggtggt

SEQ ID NO: 1985528 - DNA, 15 bp, Homo sapiens
cagcgccaggtggtc

SEQ ID NO: 1985529 - DNA, 15 bp, Homo sapiens
agcgccaggtggtcg

SEQ ID NO: 1985530 - DNA, 15 bp, Homo sapiens
gcgccaggtggtcgc

SEQ ID NO: 1985531 - DNA, 15 bp, Homo sapiens
cgccaggtggtcgcc

SEQ ID NO: 1985532 - DNA, 15 bp, Homo sapiens
gccaggtggtcgcca

SEQ ID NO: 1985533 - DNA, 15 bp, Homo sapiens
ccaggtggtcgccaa

SEQ ID NO: 1985534 - DNA, 15 bp, Homo sapiens
caggtggtcgccaac

SEQ ID NO: 1985535 - DNA, 15 bp, Homo sapiens
aggtggtcgccaacg

SEQ ID NO: 1985536 - DNA, 15 bp, Homo sapiens
ggtggtcgccaacgt

SEQ ID NO: 1985537 - DNA, 15 bp, Homo sapiens
gtggtcgccaacgtc

SEQ ID NO: 1985538 - DNA, 15 bp, Homo sapiens
tggtcgccaacgtca

SEQ ID NO: 1985539 - DNA, 15 bp, Homo sapiens
ggtcgccaacgtcac

SEQ ID NO: 1985540 - DNA, 15 bp, Homo sapiens
gtcgccaacgtcact

SEQ ID NO: 1985541 - DNA, 15 bp, Homo sapiens
tcgccaacgtcactg

SEQ ID NO: 1985542 - DNA, 15 bp, Homo sapiens
cgccaacgtcactgt

SEQ ID NO: 1985543 - DNA, 15 bp, Homo sapiens
gccaacgtcactgtg

SEQ ID NO: 1985544 - DNA, 15 bp, Homo sapiens
ccaacgtcactgtgc

SEQ ID NO: 1985545 - DNA, 15 bp, Homo sapiens
caacgtcactgtgcc

SEQ ID NO: 1985546 - DNA, 15 bp, Homo sapiens
aacgtcactgtgccc

SEQ ID NO: 1985547 - DNA, 15 bp, Homo sapiens
acgtcactgtgccct

SEQ ID NO: 1985548 - DNA, 15 bp, Homo sapiens
cgtcactgtgccctc

SEQ ID NO: 1985549 - DNA, 15 bp, Homo sapiens
gtcactgtgccctcc

SEQ ID NO: 1985550 - DNA, 15 bp, Homo sapiens
cactgtgccctcccc

SEQ ID NO: 1985551 - DNA, 15 bp, Homo sapiens
actgtgccctcccct

SEQ ID NO: 1985552 - DNA, 15 bp, Homo sapiens
ctgtgccctcccctg

SEQ ID NO: 1985553 - DNA, 15 bp, Homo sapiens
tgtgccctcccctgg

SEQ ID NO: 1985554 - DNA, 15 bp, Homo sapiens
gtgccctcccctggg

SEQ ID NO: 1985555 - DNA, 15 bp, Homo sapiens
tgccctcccctgggg

SEQ ID NO: 1985556 - DNA, 15 bp, Homo sapiens
gccctcccctggggt

SEQ ID NO: 1985557 - DNA, 15 bp, Homo sapiens
ccctcccctggggtt

SEQ ID NO: 1985558 - DNA, 15 bp, Homo sapiens
cctcccctggggttt

SEQ ID NO: 1985559 - DNA, 15 bp, Homo sapiens
ctcccctggggtttc

SEQ ID NO: 1985560 - DNA, 15 bp, Homo sapiens
tcccctggggtttct

SEQ ID NO: 1985561 - DNA, 15 bp, Homo sapiens
cccctggggtttctt

SEQ ID NO: 1985562 - DNA, 15 bp, Homo sapiens
ccctggggtttcttt

SEQ ID NO: 1985563 - DNA, 15 bp, Homo sapiens
cctggggtttctttc

SEQ ID NO: 1985564 - DNA, 15 bp, Homo sapiens
ctggggtttctttcc

SEQ ID NO: 1985565 - DNA, 15 bp, Homo sapiens
tggggtttctttcct

SEQ ID NO: 1985566 - DNA, 15 bp, Homo sapiens
ggggtttctttcctg

SEQ ID NO: 1985567 - DNA, 15 bp, Homo sapiens
gggtttctttcctgg

SEQ ID NO: 1985568 - DNA, 15 bp, Homo sapiens
ggtttctttcctggg

SEQ ID NO: 1985569 - DNA, 15 bp, Homo sapiens
gtttctttcctgggt

SEQ ID NO: 1985570 - DNA, 15 bp, Homo sapiens
ttctttcctgggtcc

SEQ ID NO: 1985571 - DNA, 15 bp, Homo sapiens
tctttcctgggtcca

SEQ ID NO: 1985572 - DNA, 15 bp, Homo sapiens
ctttcctgggtccag

SEQ ID NO: 1985573 - DNA, 15 bp, Homo sapiens
tttcctgggtccagc

SEQ ID NO: 1985574 - DNA, 15 bp, Homo sapiens
ttcctgggtccagct

SEQ ID NO: 1985575 - DNA, 15 bp, Homo sapiens
tcctgggtccagctg

SEQ ID NO: 1985576 - DNA, 15 bp, Homo sapiens
cctgggtccagctgc

SEQ ID NO: 1985577 - DNA, 15 bp, Homo sapiens
ctgggtccagctgct

SEQ ID NO: 1985578 - DNA, 15 bp, Homo sapiens
tgggtccagctgctc

SEQ ID NO: 1985579 - DNA, 15 bp, Homo sapiens
gggtccagctgctcc

SEQ ID NO: 1985580 - DNA, 15 bp, Homo sapiens
ggtccagctgctcca

SEQ ID NO: 1985581 - DNA, 15 bp, Homo sapiens
gtccagctgctccag

SEQ ID NO: 1985582 - DNA, 15 bp, Homo sapiens
tccagctgctccagt

SEQ ID NO: 1985583 - DNA, 15 bp, Homo sapiens
ccagctgctccagtt

SEQ ID NO: 1985584 - DNA, 15 bp, Homo sapiens
cagctgctccagttc

SEQ ID NO: 1985585 - DNA, 15 bp, Homo sapiens
agctgctccagttct

SEQ ID NO: 1985586 - DNA, 15 bp, Homo sapiens
gctgctccagttctc

SEQ ID NO: 1985587 - DNA, 15 bp, Homo sapiens
ctgctccagttctcc

SEQ ID NO: 1985588 - DNA, 15 bp, Homo sapiens
tgctccagttctccc

SEQ ID NO: 1985589 - DNA, 15 bp, Homo sapiens
gctccagttctccct

SEQ ID NO: 1985590 - DNA, 15 bp, Homo sapiens
ctccagttctccctc

SEQ ID NO: 1985591 - DNA, 15 bp, Homo sapiens
tccagttctccctct

SEQ ID NO: 1985592 - DNA, 15 bp, Homo sapiens
ccagttctccctcta

SEQ ID NO: 1985593 - DNA, 15 bp, Homo sapiens
cagttctccctctag

SEQ ID NO: 1985594 - DNA, 15 bp, Homo sapiens
agttctccctctagc

SEQ ID NO: 1985595 - DNA, 15 bp, Homo sapiens
gttctccctctagct

SEQ ID NO: 1985596 - DNA, 15 bp, Homo sapiens
ttctccctctagctc

SEQ ID NO: 1985597 - DNA, 15 bp, Homo sapiens
tctccctctagctcc

SEQ ID NO: 1985598 - DNA, 15 bp, Homo sapiens
ctccctctagctcca

SEQ ID NO: 1985599 - DNA, 15 bp, Homo sapiens
tccctctagctccag

SEQ ID NO: 1985600 - DNA, 15 bp, Homo sapiens
ccctctagctccaga

SEQ ID NO: 1985601 - DNA, 15 bp, Homo sapiens
cctctagctccagag

SEQ ID NO: 1985602 - DNA, 15 bp, Homo sapiens
ctctagctccagagg

SEQ ID NO: 1985603 - DNA, 15 bp, Homo sapiens
tctagctccagaggg

SEQ ID NO: 1985604 - DNA, 15 bp, Homo sapiens
ctagctccagagggc

SEQ ID NO: 1985605 - DNA, 15 bp, Homo sapiens
tagctccagagggcc

SEQ ID NO: 1985606 - DNA, 15 bp, Homo sapiens
agctccagagggccc

SEQ ID NO: 1985607 - DNA, 15 bp, Homo sapiens
gctccagagggccct

SEQ ID NO: 1985608 - DNA, 15 bp, Homo sapiens
ctccagagggccctc

SEQ ID NO: 1985609 - DNA, 15 bp, Homo sapiens
tccagagggccctct

SEQ ID NO: 1985610 - DNA, 15 bp, Homo sapiens
ccagagggccctctc

SEQ ID NO: 1985611 - DNA, 15 bp, Homo sapiens
cagagggccctctct

SEQ ID NO: 1985612 - DNA, 15 bp, Homo sapiens
agagggccctctctc

SEQ ID NO: 1985613 - DNA, 15 bp, Homo sapiens
gagggccctctctca

SEQ ID NO: 1985614 - DNA, 15 bp, Homo sapiens
agggccctctctcat

SEQ ID NO: 1985615 - DNA, 15 bp, Homo sapiens
gggccctctctcatg

SEQ ID NO: 1985616 - DNA, 15 bp, Homo sapiens
ggccctctctcatgc

SEQ ID NO: 1985617 - DNA, 15 bp, Homo sapiens
gccctctctcatgct

SEQ ID NO: 1985618 - DNA, 15 bp, Homo sapiens
ccctctctcatgctt

SEQ ID NO: 1985619 - DNA, 15 bp, Homo sapiens
cctctctcatgcttg

SEQ ID NO: 1985620 - DNA, 15 bp, Homo sapiens
ctctctcatgcttgc

SEQ ID NO: 1985621 - DNA, 15 bp, Homo sapiens
tctctcatgcttgct

SEQ ID NO: 1985622 - DNA, 15 bp, Homo sapiens
ctctcatgcttgctg

SEQ ID NO: 1985623 - DNA, 15 bp, Homo sapiens
tctcatgcttgctgg

SEQ ID NO: 1985624 - DNA, 15 bp, Homo sapiens
ctcatgcttgctggg

SEQ ID NO: 1985625 - DNA, 15 bp, Homo sapiens
tcatgcttgctgggg

SEQ ID NO: 1985626 - DNA, 15 bp, Homo sapiens
catgcttgctgggga

SEQ ID NO: 1985627 - DNA, 15 bp, Homo sapiens
atgcttgctggggaa

SEQ ID NO: 1985628 - DNA, 15 bp, Homo sapiens
tgcttgctggggaag

SEQ ID NO: 1985629 - DNA, 15 bp, Homo sapiens
gcttgctggggaagt

SEQ ID NO: 1985630 - DNA, 15 bp, Homo sapiens
cttgctggggaagta

SEQ ID NO: 1985631 - DNA, 15 bp, Homo sapiens
ttgctggggaagtac

SEQ ID NO: 1985632 - DNA, 15 bp, Homo sapiens
tgctggggaagtact

SEQ ID NO: 1985633 - DNA, 15 bp, Homo sapiens
gctggggaagtactg

SEQ ID NO: 1985634 - DNA, 15 bp, Homo sapiens
ctggggaagtactgg

SEQ ID NO: 1985635 - DNA, 15 bp, Homo sapiens
tggggaagtactggg

SEQ ID NO: 1985636 - DNA, 15 bp, Homo sapiens
ggggaagtactgggg

SEQ ID NO: 1985637 - DNA, 15 bp, Homo sapiens
gggaagtactggggg

SEQ ID NO: 1985638 - DNA, 15 bp, Homo sapiens
ggaagtactgggggc

SEQ ID NO: 1985639 - DNA, 15 bp, Homo sapiens
gaagtactgggggct

SEQ ID NO: 1985640 - DNA, 15 bp, Homo sapiens
aagtactgggggctt

SEQ ID NO: 1985641 - DNA, 15 bp, Homo sapiens
agtactgggggcttg

SEQ ID NO: 1985642 - DNA, 15 bp, Homo sapiens
gtactgggggcttgg

SEQ ID NO: 1985643 - DNA, 15 bp, Homo sapiens
tactgggggcttgga

SEQ ID NO: 1985644 - DNA, 15 bp, Homo sapiens
actgggggcttggac

SEQ ID NO: 1985645 - DNA, 15 bp, Homo sapiens
ctgggggcttggaca

SEQ ID NO: 1985646 - DNA, 15 bp, Homo sapiens
tgggggcttggacat

SEQ ID NO: 1985647 - DNA, 15 bp, Homo sapiens
gggggcttggacatt

SEQ ID NO: 1985648 - DNA, 15 bp, Homo sapiens
ggggcttggacattg

SEQ ID NO: 1985649 - DNA, 15 bp, Homo sapiens
gggcttggacattgg

SEQ ID NO: 1985650 - DNA, 15 bp, Homo sapiens
ggcttggacattggt

SEQ ID NO: 1985651 - DNA, 15 bp, Homo sapiens
gcttggacattggtc

SEQ ID NO: 1985652 - DNA, 15 bp, Homo sapiens
cttggacattggtcc

SEQ ID NO: 1985653 - DNA, 15 bp, Homo sapiens
ttggacattggtcct

SEQ ID NO: 1985654 - DNA, 15 bp, Homo sapiens
tggacattggtcctt

SEQ ID NO: 1985655 - DNA, 15 bp, Homo sapiens
agaggtgggtaacgt

SEQ ID NO: 1985656 - DNA, 15 bp, Homo sapiens
gaggtgggtaacgtt

SEQ ID NO: 1985657 - DNA, 15 bp, Homo sapiens
aggtgggtaacgttt

SEQ ID NO: 1985658 - DNA, 15 bp, Homo sapiens
ggtgggtaacgttta

SEQ ID NO: 1985659 - DNA, 15 bp, Homo sapiens
gtgggtaacgtttag

SEQ ID NO: 1985660 - DNA, 15 bp, Homo sapiens
tgggtaacgtttagg

SEQ ID NO: 1985661 - DNA, 15 bp, Homo sapiens
gggtaacgtttaggg

SEQ ID NO: 1985662 - DNA, 15 bp, Homo sapiens
ggtaacgtttagggg

SEQ ID NO: 1985663 - DNA, 15 bp, Homo sapiens
gtaacgtttaggggt

SEQ ID NO: 1985664 - DNA, 15 bp, Homo sapiens
taacgtttaggggtt

SEQ ID NO: 1985665 - DNA, 15 bp, Homo sapiens
aacgtttaggggttc

SEQ ID NO: 1985666 - DNA, 15 bp, Homo sapiens
acgtttaggggttct

SEQ ID NO: 1985667 - DNA, 15 bp, Homo sapiens
cgtttaggggttctc

SEQ ID NO: 1985668 - DNA, 15 bp, Homo sapiens
gtttaggggttctct

SEQ ID NO: 1985669 - DNA, 15 bp, Homo sapiens
tttaggggttctctc

SEQ ID NO: 1985670 - DNA, 15 bp, Homo sapiens
ttaggggttctctct

SEQ ID NO: 1985671 - DNA, 15 bp, Homo sapiens
taggggttctctctt

SEQ ID NO: 1985672 - DNA, 15 bp, Homo sapiens
aggggttctctcttc

SEQ ID NO: 1985673 - DNA, 15 bp, Homo sapiens
ggggttctctcttcc

SEQ ID NO: 1985674 - DNA, 15 bp, Homo sapiens
gggttctctcttcct

SEQ ID NO: 1985675 - DNA, 15 bp, Homo sapiens
ggttctctcttcctc

SEQ ID NO: 1985676 - DNA, 15 bp, Homo sapiens
gttctctcttcctct

SEQ ID NO: 1985677 - DNA, 15 bp, Homo sapiens
ttctctcttcctctt

SEQ ID NO: 1985678 - DNA, 15 bp, Homo sapiens
tctctcttcctcttc

SEQ ID NO: 1985679 - DNA, 15 bp, Homo sapiens
ctctcttcctcttcc

SEQ ID NO: 1985680 - DNA, 15 bp, Homo sapiens
tctcttcctcttccc

SEQ ID NO: 1985681 - DNA, 15 bp, Homo sapiens
ctcttcctcttccct

SEQ ID NO: 1985682 - DNA, 15 bp, Homo sapiens
tcttcctcttccctc

SEQ ID NO: 1985683 - DNA, 15 bp, Homo sapiens
cttcctcttccctcc

SEQ ID NO: 1985684 - DNA, 15 bp, Homo sapiens
ttcctcttccctccg

SEQ ID NO: 1985685 - DNA, 15 bp, Homo sapiens
tcctcttccctccgt

SEQ ID NO: 1985686 - DNA, 15 bp, Homo sapiens
cctcttccctccgtg

SEQ ID NO: 1985687 - DNA, 15 bp, Homo sapiens
ctcttccctccgtga

SEQ ID NO: 1985688 - DNA, 15 bp, Homo sapiens
tcttccctccgtgac

SEQ ID NO: 1985689 - DNA, 15 bp, Homo sapiens
cttccctccgtgacc

SEQ ID NO: 1985690 - DNA, 15 bp, Homo sapiens
ttccctccgtgaccc

SEQ ID NO: 1985691 - DNA, 15 bp, Homo sapiens
tccctccgtgaccct

SEQ ID NO: 1985692 - DNA, 15 bp, Homo sapiens
ccctccgtgaccctc

SEQ ID NO: 1985693 - DNA, 15 bp, Homo sapiens
cctccgtgaccctcc

SEQ ID NO: 1985694 - DNA, 15 bp, Homo sapiens
ctccgtgaccctcct

SEQ ID NO: 1985695 - DNA, 15 bp, Homo sapiens
tccgtgaccctccta

SEQ ID NO: 1985696 - DNA, 15 bp, Homo sapiens
ccgtgaccctcctaa

SEQ ID NO: 1985697 - DNA, 15 bp, Homo sapiens
cgtgaccctcctaac

SEQ ID NO: 1985698 - DNA, 15 bp, Homo sapiens
gtgaccctcctaact

SEQ ID NO: 1985699 - DNA, 15 bp, Homo sapiens
tgaccctcctaactg

SEQ ID NO: 1985700 - DNA, 15 bp, Homo sapiens
gaccctcctaactgg

SEQ ID NO: 1985701 - DNA, 15 bp, Homo sapiens
accctcctaactggg

SEQ ID NO: 1985702 - DNA, 15 bp, Homo sapiens
ccctcctaactgggg

SEQ ID NO: 1985703 - DNA, 15 bp, Homo sapiens
cctcctaactgggga

SEQ ID NO: 1985704 - DNA, 15 bp, Homo sapiens
ctcctaactggggac

SEQ ID NO: 1985705 - DNA, 15 bp, Homo sapiens
tcctaactggggacg

SEQ ID NO: 1985706 - DNA, 15 bp, Homo sapiens
cctaactggggacga

SEQ ID NO: 1985707 - DNA, 15 bp, Homo sapiens
ctaactggggacgag

SEQ ID NO: 1985708 - DNA, 15 bp, Homo sapiens
taactggggacgagc

SEQ ID NO: 1985709 - DNA, 15 bp, Homo sapiens
aactggggacgagcg

SEQ ID NO: 1985710 - DNA, 15 bp, Homo sapiens
actggggacgagcga

SEQ ID NO: 1985711 - DNA, 15 bp, Homo sapiens
ctggggacgagcgaa

SEQ ID NO: 1985712 - DNA, 15 bp, Homo sapiens
tggggacgagcgaac

SEQ ID NO: 1985713 - DNA, 15 bp, Homo sapiens
ggggacgagcgaacc

SEQ ID NO: 1985714 - DNA, 15 bp, Homo sapiens
gggacgagcgaaccc

SEQ ID NO: 1985715 - DNA, 15 bp, Homo sapiens
ggacgagcgaaccct

SEQ ID NO: 1985716 - DNA, 15 bp, Homo sapiens
gacgagcgaacccta

SEQ ID NO: 1985717 - DNA, 15 bp, Homo sapiens
acgagcgaaccctaa

SEQ ID NO: 1985718 - DNA, 15 bp, Homo sapiens
cgagcgaaccctaag

SEQ ID NO: 1985719 - DNA, 15 bp, Homo sapiens
gagcgaaccctaagg

SEQ ID NO: 1985720 - DNA, 15 bp, Homo sapiens
agcgaaccctaaggc

SEQ ID NO: 1985721 - DNA, 15 bp, Homo sapiens
gcgaaccctaaggcc

SEQ ID NO: 1985722 - DNA, 15 bp, Homo sapiens
cgaaccctaaggcct

SEQ ID NO: 1985723 - DNA, 15 bp, Homo sapiens
gaaccctaaggcctg

SEQ ID NO: 1985724 - DNA, 15 bp, Homo sapiens
aaccctaaggcctgt

SEQ ID NO: 1985725 - DNA, 15 bp, Homo sapiens
accctaaggcctgtc

SEQ ID NO: 1985726 - DNA, 15 bp, Homo sapiens
ccctaaggcctgtct

SEQ ID NO: 1985727 - DNA, 15 bp, Homo sapiens
cctaaggcctgtctt

SEQ ID NO: 1985728 - DNA, 15 bp, Homo sapiens
ctaaggcctgtctta

SEQ ID NO: 1985729 - DNA, 15 bp, Homo sapiens
taaggcctgtcttat

SEQ ID NO: 1985730 - DNA, 15 bp, Homo sapiens
aaggcctgtcttata

SEQ ID NO: 1985731 - DNA, 15 bp, Homo sapiens
aggcctgtcttatat

SEQ ID NO: 1985732 - DNA, 15 bp, Homo sapiens
ggcctgtcttatata

SEQ ID NO: 1985733 - DNA, 15 bp, Homo sapiens
gcctgtcttatatac

SEQ ID NO: 1985734 - DNA, 15 bp, Homo sapiens
cctgtcttatatacc

SEQ ID NO: 1985735 - DNA, 15 bp, Homo sapiens
ctgtcttatataccc

SEQ ID NO: 1985736 - DNA, 15 bp, Homo sapiens
tgtcttatataccct

SEQ ID NO: 1985737 - DNA, 15 bp, Homo sapiens
gtcttatataccctc

SEQ ID NO: 1985738 - DNA, 15 bp, Homo sapiens
tcttatataccctca

SEQ ID NO: 1985739 - DNA, 15 bp, Homo sapiens
cttatataccctcaa

SEQ ID NO: 1985740 - DNA, 15 bp, Homo sapiens
ttatataccctcaat

SEQ ID NO: 1985741 - DNA, 15 bp, Homo sapiens
tatataccctcaata

SEQ ID NO: 1985742 - DNA, 15 bp, Homo sapiens
atataccctcaatag

SEQ ID NO: 1985743 - DNA, 15 bp, Homo sapiens
tataccctcaatagg

SEQ ID NO: 1985744 - DNA, 15 bp, Homo sapiens
ataccctcaatagga

SEQ ID NO: 1985745 - DNA, 15 bp, Homo sapiens
taccctcaataggag

SEQ ID NO: 1985746 - DNA, 15 bp, Homo sapiens
accctcaataggaga

SEQ ID NO: 1985747 - DNA, 15 bp, Homo sapiens
ccctcaataggagaa

SEQ ID NO: 1985748 - DNA, 15 bp, Homo sapiens
cctcaataggagaac

SEQ ID NO: 1985749 - DNA, 15 bp, Homo sapiens
ctcaataggagaacg

SEQ ID NO: 1985750 - DNA, 15 bp, Homo sapiens
tcaataggagaacga

SEQ ID NO: 1985751 - DNA, 15 bp, Homo sapiens
caataggagaacgat

SEQ ID NO: 1985752 - DNA, 15 bp, Homo sapiens
aataggagaacgata

SEQ ID NO: 1985753 - DNA, 15 bp, Homo sapiens
ataggagaacgataa

SEQ ID NO: 1985754 - DNA, 15 bp, Homo sapiens
taggagaacgataac

SEQ ID NO: 1985755 - DNA, 15 bp, Homo sapiens
aggagaacgataaca

SEQ ID NO: 1985756 - DNA, 15 bp, Homo sapiens
ggagaacgataacat

SEQ ID NO: 1985757 - DNA, 15 bp, Homo sapiens
gagaacgataacatt

SEQ ID NO: 1985758 - DNA, 15 bp, Homo sapiens
agaacgataacattc

SEQ ID NO: 1985759 - DNA, 15 bp, Homo sapiens
gaacgataacattcc

SEQ ID NO: 1985760 - DNA, 15 bp, Homo sapiens
aacgataacattccg

SEQ ID NO: 1985761 - DNA, 15 bp, Homo sapiens
acgataacattccgc

SEQ ID NO: 1985762 - DNA, 15 bp, Homo sapiens
cgataacattccgcc

SEQ ID NO: 1985763 - DNA, 15 bp, Homo sapiens
gataacattccgccc

SEQ ID NO: 1985764 - DNA, 15 bp, Homo sapiens
ataacattccgcccc

SEQ ID NO: 1985765 - DNA, 15 bp, Homo sapiens
taacattccgcccct

SEQ ID NO: 1985766 - DNA, 15 bp, Homo sapiens
aacattccgcccctc

SEQ ID NO: 1985767 - DNA, 15 bp, Homo sapiens
acattccgcccctcc

SEQ ID NO: 1985768 - DNA, 15 bp, Homo sapiens
cattccgcccctccc

SEQ ID NO: 1985769 - DNA, 15 bp, Homo sapiens
attccgcccctcccc

SEQ ID NO: 1985770 - DNA, 15 bp, Homo sapiens
ttccgcccctccccc

SEQ ID NO: 1985771 - DNA, 15 bp, Homo sapiens
tccgcccctccccca

SEQ ID NO: 1985772 - DNA, 15 bp, Homo sapiens
ccgcccctcccccag

SEQ ID NO: 1985773 - DNA, 15 bp, Homo sapiens
cgcccctcccccagt

SEQ ID NO: 1985774 - DNA, 15 bp, Homo sapiens
gcccctcccccagtt

SEQ ID NO: 1985775 - DNA, 15 bp, Homo sapiens
cccctcccccagttt

SEQ ID NO: 1985776 - DNA, 15 bp, Homo sapiens
ccctcccccagtttc

SEQ ID NO: 1985777 - DNA, 15 bp, Homo sapiens
cctcccccagtttct

SEQ ID NO: 1985778 - DNA, 15 bp, Homo sapiens
ctcccccagtttctt

SEQ ID NO: 1985779 - DNA, 15 bp, Homo sapiens
tcccccagtttcttc

SEQ ID NO: 1985780 - DNA, 15 bp, Homo sapiens
cccccagtttcttca

SEQ ID NO: 1985781 - DNA, 15 bp, Homo sapiens
ccccagtttcttcag

SEQ ID NO: 1985782 - DNA, 15 bp, Homo sapiens
cccagtttcttcagc

SEQ ID NO: 1985783 - DNA, 15 bp, Homo sapiens
ccagtttcttcagct

SEQ ID NO: 1985784 - DNA, 15 bp, Homo sapiens
cagtttcttcagctt

SEQ ID NO: 1985785 - DNA, 15 bp, Homo sapiens
agtttcttcagcttc

SEQ ID NO: 1985786 - DNA, 15 bp, Homo sapiens
gtttcttcagcttcc

SEQ ID NO: 1985787 - DNA, 15 bp, Homo sapiens
tttcttcagcttcct

SEQ ID NO: 1985788 - DNA, 15 bp, Homo sapiens
ttcttcagcttcctc

SEQ ID NO: 1985789 - DNA, 15 bp, Homo sapiens
tcttcagcttcctct

SEQ ID NO: 1985790 - DNA, 15 bp, Homo sapiens
cttcagcttcctctc

SEQ ID NO: 1985791 - DNA, 15 bp, Homo sapiens
ttcagcttcctctcc

SEQ ID NO: 1985792 - DNA, 15 bp, Homo sapiens
tcagcttcctctcct

SEQ ID NO: 1985793 - DNA, 15 bp, Homo sapiens
cagcttcctctcctg

SEQ ID NO: 1985794 - DNA, 15 bp, Homo sapiens
agcttcctctcctgg

SEQ ID NO: 1985795 - DNA, 15 bp, Homo sapiens
gcttcctctcctgga

SEQ ID NO: 1985796 - DNA, 15 bp, Homo sapiens
cttcctctcctggag

SEQ ID NO: 1985797 - DNA, 15 bp, Homo sapiens
ttcctctcctggagg

SEQ ID NO: 1985798 - DNA, 15 bp, Homo sapiens
tcctctcctggaggg

SEQ ID NO: 1985799 - DNA, 15 bp, Homo sapiens
cctctcctggagggg

SEQ ID NO: 1985800 - DNA, 15 bp, Homo sapiens
ctctcctggaggggg

SEQ ID NO: 1985801 - DNA, 15 bp, Homo sapiens
tctcctggaggggga

SEQ ID NO: 1985802 - DNA, 15 bp, Homo sapiens
ctcctggagggggaa

SEQ ID NO: 1985803 - DNA, 15 bp, Homo sapiens
tcctggagggggaag

SEQ ID NO: 1985804 - DNA, 15 bp, Homo sapiens
cctggagggggaaga

SEQ ID NO: 1985805 - DNA, 15 bp, Homo sapiens
ctggagggggaagag

SEQ ID NO: 1985806 - DNA, 15 bp, Homo sapiens
tggagggggaagagc

SEQ ID NO: 1985807 - DNA, 15 bp, Homo sapiens
ggagggggaagagca

SEQ ID NO: 1985808 - DNA, 15 bp, Homo sapiens
gagggggaagagcag

SEQ ID NO: 1985809 - DNA, 15 bp, Homo sapiens
agggggaagagcaga

SEQ ID NO: 1985810 - DNA, 15 bp, Homo sapiens
gggggaagagcagaa

SEQ ID NO: 1985811 - DNA, 15 bp, Homo sapiens
ggggaagagcagaag

SEQ ID NO: 1985812 - DNA, 15 bp, Homo sapiens
gggaagagcagaaga

SEQ ID NO: 1985813 - DNA, 15 bp, Homo sapiens
ggaagagcagaagaa

SEQ ID NO: 1985814 - DNA, 15 bp, Homo sapiens
gaagagcagaagaaa

SEQ ID NO: 1985815 - DNA, 15 bp, Homo sapiens
aagagcagaagaaag

SEQ ID NO: 1985816 - DNA, 15 bp, Homo sapiens
agagcagaagaaagc

SEQ ID NO: 1985817 - DNA, 15 bp, Homo sapiens
gagcagaagaaagca

SEQ ID NO: 1985818 - DNA, 15 bp, Homo sapiens
agcagaagaaagcaa

SEQ ID NO: 1985819 - DNA, 15 bp, Homo sapiens
gcagaagaaagcaag

SEQ ID NO: 1985820 - DNA, 15 bp, Homo sapiens
cagaagaaagcaagg

SEQ ID NO: 1985821 - DNA, 15 bp, Homo sapiens
agaagaaagcaagga

SEQ ID NO: 1985822 - DNA, 15 bp, Homo sapiens
gaagaaagcaaggaa

SEQ ID NO: 1985823 - DNA, 15 bp, Homo sapiens
aagaaagcaaggaag

SEQ ID NO: 1985824 - DNA, 15 bp, Homo sapiens
agaaagcaaggaagg

SEQ ID NO: 1985825 - DNA, 15 bp, Homo sapiens
gaaagcaaggaaggc

SEQ ID NO: 1985826 - DNA, 15 bp, Homo sapiens
aaagcaaggaaggca

SEQ ID NO: 1985827 - DNA, 15 bp, Homo sapiens
aagcaaggaaggcac

SEQ ID NO: 1985828 - DNA, 15 bp, Homo sapiens
agcaaggaaggcaca

SEQ ID NO: 1985829 - DNA, 15 bp, Homo sapiens
gcaaggaaggcacag

SEQ ID NO: 1985830 - DNA, 15 bp, Homo sapiens
caaggaaggcacagg

SEQ ID NO: 1985831 - DNA, 15 bp, Homo sapiens
aaggaaggcacaggt

SEQ ID NO: 1985832 - DNA, 15 bp, Homo sapiens
aggaaggcacaggtt

SEQ ID NO: 1985833 - DNA, 15 bp, Homo sapiens
ggaaggcacaggttt

SEQ ID NO: 1985834 - DNA, 15 bp, Homo sapiens
gaaggcacaggtttt

SEQ ID NO: 1985835 - DNA, 15 bp, Homo sapiens
aaggcacaggttttc

SEQ ID NO: 1985836 - DNA, 15 bp, Homo sapiens
aggcacaggttttct

SEQ ID NO: 1985837 - DNA, 15 bp, Homo sapiens
ggcacaggttttctt

SEQ ID NO: 1985838 - DNA, 15 bp, Homo sapiens
gcacaggttttctta

SEQ ID NO: 1985839 - DNA, 15 bp, Homo sapiens
cacaggttttcttac

SEQ ID NO: 1985840 - DNA, 15 bp, Homo sapiens
acaggttttcttact

SEQ ID NO: 1985841 - DNA, 15 bp, Homo sapiens
caggttttcttactt

SEQ ID NO: 1985842 - DNA, 15 bp, Homo sapiens
aggttttcttacttt

SEQ ID NO: 1985843 - DNA, 15 bp, Homo sapiens
cttactttctgctcc

SEQ ID NO: 1985844 - DNA, 15 bp, Homo sapiens
ttactttctgctcca

SEQ ID NO: 1985845 - DNA, 15 bp, Homo sapiens
tactttctgctccat

SEQ ID NO: 1985846 - DNA, 15 bp, Homo sapiens
actttctgctccatc

SEQ ID NO: 1985847 - DNA, 15 bp, Homo sapiens
ctttctgctccatcg

SEQ ID NO: 1985848 - DNA, 15 bp, Homo sapiens
tttctgctccatcgt

SEQ ID NO: 1985849 - DNA, 15 bp, Homo sapiens
ttctgctccatcgtc

SEQ ID NO: 1985850 - DNA, 15 bp, Homo sapiens
tctgctccatcgtct

SEQ ID NO: 1985851 - DNA, 15 bp, Homo sapiens
ctgctccatcgtctc

SEQ ID NO: 1985852 - DNA, 15 bp, Homo sapiens
tgctccatcgtctca

SEQ ID NO: 1985853 - DNA, 15 bp, Homo sapiens
gctccatcgtctcat

SEQ ID NO: 1985854 - DNA, 15 bp, Homo sapiens
ctccatcgtctcatc

SEQ ID NO: 1985855 - DNA, 15 bp, Homo sapiens
tccatcgtctcatcc

SEQ ID NO: 1985856 - DNA, 15 bp, Homo sapiens
ccatcgtctcatcct

SEQ ID NO: 1985857 - DNA, 15 bp, Homo sapiens
catcgtctcatcctg

SEQ ID NO: 1985858 - DNA, 15 bp, Homo sapiens
atcgtctcatcctgc

SEQ ID NO: 1985859 - DNA, 15 bp, Homo sapiens
tcgtctcatcctgcc

SEQ ID NO: 1985860 - DNA, 15 bp, Homo sapiens
cgtctcatcctgccc

SEQ ID NO: 1985861 - DNA, 15 bp, Homo sapiens
gtctcatcctgcccc

SEQ ID NO: 1985862 - DNA, 15 bp, Homo sapiens
tctcatcctgccccg

SEQ ID NO: 1985863 - DNA, 15 bp, Homo sapiens
ctcatcctgccccga

SEQ ID NO: 1985864 - DNA, 15 bp, Homo sapiens
tcatcctgccccgag

SEQ ID NO: 1985865 - DNA, 15 bp, Homo sapiens
catcctgccccgaga

SEQ ID NO: 1985866 - DNA, 15 bp, Homo sapiens
atcctgccccgagag

SEQ ID NO: 1985867 - DNA, 15 bp, Homo sapiens
tcctgccccgagagc

SEQ ID NO: 1985868 - DNA, 15 bp, Homo sapiens
cctgccccgagagct

SEQ ID NO: 1985869 - DNA, 15 bp, Homo sapiens
ctgccccgagagctt

SEQ ID NO: 1985870 - DNA, 15 bp, Homo sapiens
tgccccgagagcttc

SEQ ID NO: 1985871 - DNA, 15 bp, Homo sapiens
gccccgagagcttca

SEQ ID NO: 1985872 - DNA, 15 bp, Homo sapiens
ccccgagagcttcaa

SEQ ID NO: 1985873 - DNA, 15 bp, Homo sapiens
cccgagagcttcaag

SEQ ID NO: 1985874 - DNA, 15 bp, Homo sapiens
ccgagagcttcaagt

SEQ ID NO: 1985875 - DNA, 15 bp, Homo sapiens
cgagagcttcaagtg

SEQ ID NO: 1985876 - DNA, 15 bp, Homo sapiens
gagagcttcaagtgc

SEQ ID NO: 1985877 - DNA, 15 bp, Homo sapiens
agagcttcaagtgca

SEQ ID NO: 1985878 - DNA, 15 bp, Homo sapiens
gagcttcaagtgcac

SEQ ID NO: 1985879 - DNA, 15 bp, Homo sapiens
agcttcaagtgcaca

SEQ ID NO: 1985880 - DNA, 15 bp, Homo sapiens
gcttcaagtgcacac

SEQ ID NO: 1985881 - DNA, 15 bp, Homo sapiens
cttcaagtgcacact

SEQ ID NO: 1985882 - DNA, 15 bp, Homo sapiens
ttcaagtgcacactc

SEQ ID NO: 1985883 - DNA, 15 bp, Homo sapiens
tcaagtgcacactca

SEQ ID NO: 1985884 - DNA, 15 bp, Homo sapiens
caagtgcacactcac

SEQ ID NO: 1985885 - DNA, 15 bp, Homo sapiens
aagtgcacactcact

SEQ ID NO: 1985886 - DNA, 15 bp, Homo sapiens
agtgcacactcactg

SEQ ID NO: 1985887 - DNA, 15 bp, Homo sapiens
gtgcacactcactgc

SEQ ID NO: 1985888 - DNA, 15 bp, Homo sapiens
tgcacactcactgca

SEQ ID NO: 1985889 - DNA, 15 bp, Homo sapiens
gcacactcactgcac

SEQ ID NO: 1985890 - DNA, 15 bp, Homo sapiens
cacactcactgcaca

SEQ ID NO: 1985891 - DNA, 15 bp, Homo sapiens
acactcactgcacat

SEQ ID NO: 1985892 - DNA, 15 bp, Homo sapiens
cactcactgcacatc

SEQ ID NO: 1985893 - DNA, 15 bp, Homo sapiens
actcactgcacatct

SEQ ID NO: 1985894 - DNA, 15 bp, Homo sapiens
ctcactgcacatctt

SEQ ID NO: 1985895 - DNA, 15 bp, Homo sapiens
tcactgcacatcttt

SEQ ID NO: 1985896 - DNA, 15 bp, Homo sapiens
cactgcacatctttg

SEQ ID NO: 1985897 - DNA, 15 bp, Homo sapiens
actgcacatctttgt

SEQ ID NO: 1985898 - DNA, 15 bp, Homo sapiens
ctgcacatctttgtg

SEQ ID NO: 1985899 - DNA, 15 bp, Homo sapiens
tgcacatctttgtga

SEQ ID NO: 1985900 - DNA, 15 bp, Homo sapiens
gcacatctttgtgat

SEQ ID NO: 1985901 - DNA, 15 bp, Homo sapiens
cacatctttgtgatg

SEQ ID NO: 1985902 - DNA, 15 bp, Homo sapiens
acatctttgtgatgc

SEQ ID NO: 1985903 - DNA, 15 bp, Homo sapiens
catctttgtgatgcc

SEQ ID NO: 1985904 - DNA, 15 bp, Homo sapiens
atctttgtgatgccc

SEQ ID NO: 1985905 - DNA, 15 bp, Homo sapiens
tctttgtgatgccct

SEQ ID NO: 1985906 - DNA, 15 bp, Homo sapiens
ctttgtgatgcccta

SEQ ID NO: 1985907 - DNA, 15 bp, Homo sapiens
tttgtgatgccctac

SEQ ID NO: 1985908 - DNA, 15 bp, Homo sapiens
ttgtgatgccctaca

SEQ ID NO: 1985909 - DNA, 15 bp, Homo sapiens
tgtgatgccctacaa

SEQ ID NO: 1985910 - DNA, 15 bp, Homo sapiens
gtgatgccctacaac

SEQ ID NO: 1985911 - DNA, 15 bp, Homo sapiens
tgatgccctacaacg

SEQ ID NO: 1985912 - DNA, 15 bp, Homo sapiens
gatgccctacaacgt

SEQ ID NO: 1985913 - DNA, 15 bp, Homo sapiens
atgccctacaacgtc

SEQ ID NO: 1985914 - DNA, 15 bp, Homo sapiens
tgccctacaacgtcg

SEQ ID NO: 1985915 - DNA, 15 bp, Homo sapiens
gccctacaacgtcgt

SEQ ID NO: 1985916 - DNA, 15 bp, Homo sapiens
ccctacaacgtcgtc

SEQ ID NO: 1985917 - DNA, 15 bp, Homo sapiens
cctacaacgtcgtcc

SEQ ID NO: 1985918 - DNA, 15 bp, Homo sapiens
ctacaacgtcgtccc

SEQ ID NO: 1985919 - DNA, 15 bp, Homo sapiens
tacaacgtcgtcccc

SEQ ID NO: 1985920 - DNA, 15 bp, Homo sapiens
acaacgtcgtccccc

SEQ ID NO: 1985921 - DNA, 15 bp, Homo sapiens
caacgtcgtccccca

SEQ ID NO: 1985922 - DNA, 15 bp, Homo sapiens
aacgtcgtcccccat

SEQ ID NO: 1985923 - DNA, 15 bp, Homo sapiens
acgtcgtcccccata

SEQ ID NO: 1985924 - DNA, 15 bp, Homo sapiens
cgtcgtcccccatat

SEQ ID NO: 1985925 - DNA, 15 bp, Homo sapiens
gtcgtcccccatatc

SEQ ID NO: 1985926 - DNA, 15 bp, Homo sapiens
tcgtcccccatatcc

SEQ ID NO: 1985927 - DNA, 15 bp, Homo sapiens
cgtcccccatatcct

SEQ ID NO: 1985928 - DNA, 15 bp, Homo sapiens
gtcccccatatcctg

SEQ ID NO: 1985929 - DNA, 15 bp, Homo sapiens
tcccccatatcctga

SEQ ID NO: 1985930 - DNA, 15 bp, Homo sapiens
cccccatatcctgat

SEQ ID NO: 1985931 - DNA, 15 bp, Homo sapiens
ccccatatcctgatg

SEQ ID NO: 1985932 - DNA, 15 bp, Homo sapiens
cccatatcctgatga

SEQ ID NO: 1985933 - DNA, 15 bp, Homo sapiens
ccatatcctgatgac

SEQ ID NO: 1985934 - DNA, 15 bp, Homo sapiens
catatcctgatgaca

SEQ ID NO: 1985935 - DNA, 15 bp, Homo sapiens
atatcctgatgacac

SEQ ID NO: 1985936 - DNA, 15 bp, Homo sapiens
tatcctgatgacaca

SEQ ID NO: 1985937 - DNA, 15 bp, Homo sapiens
atcctgatgacacag

SEQ ID NO: 1985938 - DNA, 15 bp, Homo sapiens
tcctgatgacacaga

SEQ ID NO: 1985939 - DNA, 15 bp, Homo sapiens
cctgatgacacagac

SEQ ID NO: 1985940 - DNA, 15 bp, Homo sapiens
ctgatgacacagact

SEQ ID NO: 1985941 - DNA, 15 bp, Homo sapiens
tgatgacacagactg

SEQ ID NO: 1985942 - DNA, 15 bp, Homo sapiens
gatgacacagactgc

SEQ ID NO: 1985943 - DNA, 15 bp, Homo sapiens
atgacacagactgcc

SEQ ID NO: 1985944 - DNA, 15 bp, Homo sapiens
tgacacagactgcct

SEQ ID NO: 1985945 - DNA, 15 bp, Homo sapiens
gacacagactgcctt

SEQ ID NO: 1985946 - DNA, 15 bp, Homo sapiens
acacagactgccttt

SEQ ID NO: 1985947 - DNA, 15 bp, Homo sapiens
cacagactgcctttt

SEQ ID NO: 1985948 - DNA, 15 bp, Homo sapiens
acagactgccttttt

SEQ ID NO: 1985949 - DNA, 15 bp, Homo sapiens
cagactgcctttttt

SEQ ID NO: 1985950 - DNA, 15 bp, Homo sapiens
agactgccttttttt

SEQ ID NO: 1985951 - DNA, 15 bp, Homo sapiens
gactgcctttttttt

SEQ ID NO: 1985952 - DNA, 15 bp, Homo sapiens
actgccttttttttt

SEQ ID NO: 1985953 - DNA, 15 bp, Homo sapiens
ctgcctttttttttt

SEQ ID NO: 1985954 - DNA, 15 bp, Homo sapiens
tgcctttttttttta

SEQ ID NO: 1985955 - DNA, 15 bp, Homo sapiens
gccttttttttttat

SEQ ID NO: 1985956 - DNA, 15 bp, Homo sapiens
ccttttttttttatt

SEQ ID NO: 1985957 - DNA, 15 bp, Homo sapiens
cttttttttttattg

SEQ ID NO: 1985958 - DNA, 15 bp, Homo sapiens
ttttttttttattgc

SEQ ID NO: 1985959 - DNA, 15 bp, Homo sapiens
tttttttttattgcc

SEQ ID NO: 1985960 - DNA, 15 bp, Homo sapiens
ttttttttattgccg

SEQ ID NO: 1985961 - DNA, 15 bp, Homo sapiens
tttttttattgccgt

SEQ ID NO: 1985962 - DNA, 15 bp, Homo sapiens
ttttttattgccgtt

SEQ ID NO: 1985963 - DNA, 15 bp, Homo sapiens
tttttattgccgttt

SEQ ID NO: 1985964 - DNA, 15 bp, Homo sapiens
ttttattgccgtttg

SEQ ID NO: 1985965 - DNA, 15 bp, Homo sapiens
tttattgccgtttgc

SEQ ID NO: 1985966 - DNA, 15 bp, Homo sapiens
ttattgccgtttgca

SEQ ID NO: 1985967 - DNA, 15 bp, Homo sapiens
tattgccgtttgcag

SEQ ID NO: 1985968 - DNA, 15 bp, Homo sapiens
attgccgtttgcagt

SEQ ID NO: 1985969 - DNA, 15 bp, Homo sapiens
ttgccgtttgcagtg

SEQ ID NO: 1985970 - DNA, 15 bp, Homo sapiens
tgccgtttgcagtgg

SEQ ID NO: 1985971 - DNA, 15 bp, Homo sapiens
gccgtttgcagtgga

SEQ ID NO: 1985972 - DNA, 15 bp, Homo sapiens
ccgtttgcagtggaa

SEQ ID NO: 1985973 - DNA, 15 bp, Homo sapiens
cgtttgcagtggaaa

SEQ ID NO: 1985974 - DNA, 15 bp, Homo sapiens
gtttgcagtggaaac

SEQ ID NO: 1985975 - DNA, 15 bp, Homo sapiens
tttgcagtggaaacc

SEQ ID NO: 1985976 - DNA, 15 bp, Homo sapiens
ttgcagtggaaaccg

SEQ ID NO: 1985977 - DNA, 15 bp, Homo sapiens
tgcagtggaaaccgt

SEQ ID NO: 1985978 - DNA, 15 bp, Homo sapiens
gcagtggaaaccgtg

SEQ ID NO: 1985979 - DNA, 15 bp, Homo sapiens
cagtggaaaccgtgg

SEQ ID NO: 1985980 - DNA, 15 bp, Homo sapiens
agtggaaaccgtggt

SEQ ID NO: 1985981 - DNA, 15 bp, Homo sapiens
gtggaaaccgtggtt

SEQ ID NO: 1985982 - DNA, 15 bp, Homo sapiens
tggaaaccgtggttc

SEQ ID NO: 1985983 - DNA, 15 bp, Homo sapiens
ggaaaccgtggttct

SEQ ID NO: 1985984 - DNA, 15 bp, Homo sapiens
gaaaccgtggttctg

SEQ ID NO: 1985985 - DNA, 15 bp, Homo sapiens
aaaccgtggttctga

SEQ ID NO: 1985986 - DNA, 15 bp, Homo sapiens
aaccgtggttctgaa

SEQ ID NO: 1985987 - DNA, 15 bp, Homo sapiens
accgtggttctgaaa

SEQ ID NO: 1985988 - DNA, 15 bp, Homo sapiens
ccgtggttctgaaat

SEQ ID NO: 1985989 - DNA, 15 bp, Homo sapiens
cgtggttctgaaata

SEQ ID NO: 1985990 - DNA, 15 bp, Homo sapiens
gtggttctgaaatat

SEQ ID NO: 1985991 - DNA, 15 bp, Homo sapiens
tggttctgaaatatc

SEQ ID NO: 1985992 - DNA, 15 bp, Homo sapiens
ggttctgaaatatct

SEQ ID NO: 1985993 - DNA, 15 bp, Homo sapiens
gttctgaaatatctt

SEQ ID NO: 1985994 - DNA, 15 bp, Homo sapiens
ttctgaaatatcttc

SEQ ID NO: 1985995 - DNA, 15 bp, Homo sapiens
tctgaaatatcttcc

SEQ ID NO: 1985996 - DNA, 15 bp, Homo sapiens
ctgaaatatcttccc

SEQ ID NO: 1985997 - DNA, 15 bp, Homo sapiens
tgaaatatcttcccc

SEQ ID NO: 1985998 - DNA, 15 bp, Homo sapiens
gaaatatcttcccct

SEQ ID NO: 1985999 - DNA, 15 bp, Homo sapiens
aaatatcttcccctt

SEQ ID NO: 1986000 - DNA, 15 bp, Homo sapiens
aatatcttccccttc

SEQ ID NO: 1986001 - DNA, 15 bp, Homo sapiens
atatcttccccttcc

SEQ ID NO: 1986002 - DNA, 15 bp, Homo sapiens
tatcttccccttcct

SEQ ID NO: 1986003 - DNA, 15 bp, Homo sapiens
atcttccccttcctt

SEQ ID NO: 1986004 - DNA, 15 bp, Homo sapiens
tcttccccttccttg

SEQ ID NO: 1986005 - DNA, 15 bp, Homo sapiens
cttccccttccttga

SEQ ID NO: 1986006 - DNA, 15 bp, Homo sapiens
ttccccttccttgat

SEQ ID NO: 1986007 - DNA, 15 bp, Homo sapiens
tccccttccttgata

SEQ ID NO: 1986008 - DNA, 15 bp, Homo sapiens
ccccttccttgataa

SEQ ID NO: 1986009 - DNA, 15 bp, Homo sapiens
cccttccttgataat

SEQ ID NO: 1986010 - DNA, 15 bp, Homo sapiens
ccttccttgataatt

SEQ ID NO: 1986011 - DNA, 15 bp, Homo sapiens
cttccttgataattg

SEQ ID NO: 1986012 - DNA, 15 bp, Homo sapiens
ttccttgataattgc

SEQ ID NO: 1986013 - DNA, 15 bp, Homo sapiens
tccttgataattgca

SEQ ID NO: 1986014 - DNA, 15 bp, Homo sapiens
ccttgataattgcag

SEQ ID NO: 1986015 - DNA, 15 bp, Homo sapiens
cttgataattgcagt

SEQ ID NO: 1986016 - DNA, 15 bp, Homo sapiens
ttgataattgcagtc

SEQ ID NO: 1986017 - DNA, 15 bp, Homo sapiens
tgataattgcagtct

SEQ ID NO: 1986018 - DNA, 15 bp, Homo sapiens
gataattgcagtctc

SEQ ID NO: 1986019 - DNA, 15 bp, Homo sapiens
ataattgcagtctct

SEQ ID NO: 1986020 - DNA, 15 bp, Homo sapiens
taattgcagtctctt

SEQ ID NO: 1986021 - DNA, 15 bp, Homo sapiens
aattgcagtctcttc

SEQ ID NO: 1986022 - DNA, 15 bp, Homo sapiens
attgcagtctcttcc

SEQ ID NO: 1986023 - DNA, 15 bp, Homo sapiens
ttgcagtctcttccc

SEQ ID NO: 1986024 - DNA, 15 bp, Homo sapiens
tgcagtctcttcccc

SEQ ID NO: 1986025 - DNA, 15 bp, Homo sapiens
gcagtctcttccccc

SEQ ID NO: 1986026 - DNA, 15 bp, Homo sapiens
cagtctcttcccccc

SEQ ID NO: 1986027 - DNA, 15 bp, Homo sapiens
agtctcttccccccc

SEQ ID NO: 1986028 - DNA, 15 bp, Homo sapiens
gtctcttcccccccc

SEQ ID NO: 1986029 - DNA, 15 bp, Homo sapiens
tctcttccccccccc

SEQ ID NO: 1986030 - DNA, 15 bp, Homo sapiens
ctcttcccccccccc

SEQ ID NO: 1986031 - DNA, 15 bp, Homo sapiens
tcttcccccccccct

SEQ ID NO: 1986032 - DNA, 15 bp, Homo sapiens
cttcccccccccctt

SEQ ID NO: 1986033 - DNA, 15 bp, Homo sapiens
ttccccccccccttt

SEQ ID NO: 1986034 - DNA, 15 bp, Homo sapiens
tcccccccccctttt

SEQ ID NO: 1986035 - DNA, 15 bp, Homo sapiens
ccccccccccttttt

SEQ ID NO: 1986036 - DNA, 15 bp, Homo sapiens
ccccccccctttttt

SEQ ID NO: 1986037 - DNA, 15 bp, Homo sapiens
ccccccccttttttt

SEQ ID NO: 1986038 - DNA, 15 bp, Homo sapiens
ccccttttttttttg

SEQ ID NO: 1986039 - DNA, 15 bp, Homo sapiens
cccttttttttttgc

SEQ ID NO: 1986040 - DNA, 15 bp, Homo sapiens
ccttttttttttgcc

SEQ ID NO: 1986041 - DNA, 15 bp, Homo sapiens
cttttttttttgcca

SEQ ID NO: 1986042 - DNA, 15 bp, Homo sapiens
ttttttttttgccag

SEQ ID NO: 1986043 - DNA, 15 bp, Homo sapiens
tttttttttgccagc

SEQ ID NO: 1986044 - DNA, 15 bp, Homo sapiens
ttttttttgccagcg

SEQ ID NO: 1986045 - DNA, 15 bp, Homo sapiens
tttttttgccagcgg

SEQ ID NO: 1986046 - DNA, 15 bp, Homo sapiens
ttttttgccagcggt

SEQ ID NO: 1986047 - DNA, 15 bp, Homo sapiens
tttttgccagcggtc

SEQ ID NO: 1986048 - DNA, 15 bp, Homo sapiens
ttttgccagcggtct

SEQ ID NO: 1986049 - DNA, 15 bp, Homo sapiens
tttgccagcggtctg

SEQ ID NO: 1986050 - DNA, 15 bp, Homo sapiens
ttgccagcggtctga

SEQ ID NO: 1986051 - DNA, 15 bp, Homo sapiens
tgccagcggtctgag

SEQ ID NO: 1986052 - DNA, 15 bp, Homo sapiens
gccagcggtctgagg

SEQ ID NO: 1986053 - DNA, 15 bp, Homo sapiens
ccagcggtctgagga

SEQ ID NO: 1986054 - DNA, 15 bp, Homo sapiens
cagcggtctgaggat

SEQ ID NO: 1986055 - DNA, 15 bp, Homo sapiens
agcggtctgaggatg

SEQ ID NO: 1986056 - DNA, 15 bp, Homo sapiens
gcggtctgaggatgt

SEQ ID NO: 1986057 - DNA, 15 bp, Homo sapiens
cggtctgaggatgtg

SEQ ID NO: 1986058 - DNA, 15 bp, Homo sapiens
ggtctgaggatgtga

SEQ ID NO: 1986059 - DNA, 15 bp, Homo sapiens
gtctgaggatgtgat

SEQ ID NO: 1986060 - DNA, 15 bp, Homo sapiens
tctgaggatgtgatg

SEQ ID NO: 1986061 - DNA, 15 bp, Homo sapiens
ctgaggatgtgatgc

SEQ ID NO: 1986062 - DNA, 15 bp, Homo sapiens
tgaggatgtgatgca

SEQ ID NO: 1986063 - DNA, 15 bp, Homo sapiens
gaggatgtgatgcat

SEQ ID NO: 1986064 - DNA, 15 bp, Homo sapiens
aggatgtgatgcatt

SEQ ID NO: 1986065 - DNA, 15 bp, Homo sapiens
ggatgtgatgcattc

SEQ ID NO: 1986066 - DNA, 15 bp, Homo sapiens
gatgtgatgcattct

SEQ ID NO: 1986067 - DNA, 15 bp, Homo sapiens
atgtgatgcattctc

SEQ ID NO: 1986068 - DNA, 15 bp, Homo sapiens
tgtgatgcattctcg

SEQ ID NO: 1986069 - DNA, 15 bp, Homo sapiens
gtgatgcattctcga

SEQ ID NO: 1986070 - DNA, 15 bp, Homo sapiens
tgatgcattctcgag

SEQ ID NO: 1986071 - DNA, 15 bp, Homo sapiens
gatgcattctcgagt

SEQ ID NO: 1986072 - DNA, 15 bp, Homo sapiens
atgcattctcgagtg

SEQ ID NO: 1986073 - DNA, 15 bp, Homo sapiens
tgcattctcgagtga

SEQ ID NO: 1986074 - DNA, 15 bp, Homo sapiens
gcattctcgagtgag

SEQ ID NO: 1986075 - DNA, 15 bp, Homo sapiens
cattctcgagtgaga

SEQ ID NO: 1986076 - DNA, 15 bp, Homo sapiens
attctcgagtgagaa

SEQ ID NO: 1986077 - DNA, 15 bp, Homo sapiens
ttctcgagtgagaat

SEQ ID NO: 1986078 - DNA, 15 bp, Homo sapiens
tctcgagtgagaatg

SEQ ID NO: 1986079 - DNA, 15 bp, Homo sapiens
ctcgagtgagaatgt

SEQ ID NO: 1986080 - DNA, 15 bp, Homo sapiens
tcgagtgagaatgtt

SEQ ID NO: 1986081 - DNA, 15 bp, Homo sapiens
cgagtgagaatgttg

SEQ ID NO: 1986082 - DNA, 15 bp, Homo sapiens
gagtgagaatgttgg

SEQ ID NO: 1986083 - DNA, 15 bp, Homo sapiens
agtgagaatgttggg

SEQ ID NO: 1986084 - DNA, 15 bp, Homo sapiens
gtgagaatgttgggg

SEQ ID NO: 1986085 - DNA, 15 bp, Homo sapiens
tgagaatgttgggga

SEQ ID NO: 1986086 - DNA, 15 bp, Homo sapiens
gagaatgttggggag

SEQ ID NO: 1986087 - DNA, 15 bp, Homo sapiens
agaatgttggggagt

SEQ ID NO: 1986088 - DNA, 15 bp, Homo sapiens
gaatgttggggagta

SEQ ID NO: 1986089 - DNA, 15 bp, Homo sapiens
aatgttggggagtaa

SEQ ID NO: 1986090 - DNA, 15 bp, Homo sapiens
atgttggggagtaaa

SEQ ID NO: 1986091 - DNA, 15 bp, Homo sapiens
tgttggggagtaaag

SEQ ID NO: 1986092 - DNA, 15 bp, Homo sapiens
gttggggagtaaagg

SEQ ID NO: 1986093 - DNA, 15 bp, Homo sapiens
ttggggagtaaaggg

SEQ ID NO: 1986094 - DNA, 15 bp, Homo sapiens
tggggagtaaagggg

SEQ ID NO: 1986095 - DNA, 15 bp, Homo sapiens
ggggagtaaagggga

SEQ ID NO: 1986096 - DNA, 15 bp, Homo sapiens
gggagtaaaggggag

SEQ ID NO: 1986097 - DNA, 15 bp, Homo sapiens
ggagtaaaggggaga

SEQ ID NO: 1986098 - DNA, 15 bp, Homo sapiens
gagtaaaggggagaa

SEQ ID NO: 1986099 - DNA, 15 bp, Homo sapiens
agtaaaggggagaag

SEQ ID NO: 1986100 - DNA, 15 bp, Homo sapiens
gtaaaggggagaagg

SEQ ID NO: 1986101 - DNA, 15 bp, Homo sapiens
taaaggggagaaggg

SEQ ID NO: 1986102 - DNA, 15 bp, Homo sapiens
aaaggggagaagggt

SEQ ID NO: 1986103 - DNA, 15 bp, Homo sapiens
aaggggagaagggtg

SEQ ID NO: 1986104 - DNA, 15 bp, Homo sapiens
aggggagaagggtga

SEQ ID NO: 1986105 - DNA, 15 bp, Homo sapiens
ggggagaagggtgaa

SEQ ID NO: 1986106 - DNA, 15 bp, Homo sapiens
gggagaagggtgaaa

SEQ ID NO: 1986107 - DNA, 15 bp, Homo sapiens
ggagaagggtgaaag

SEQ ID NO: 1986108 - DNA, 15 bp, Homo sapiens
gagaagggtgaaagg

SEQ ID NO: 1986109 - DNA, 15 bp, Homo sapiens
agaagggtgaaagga

SEQ ID NO: 1986110 - DNA, 15 bp, Homo sapiens
gaagggtgaaaggaa

SEQ ID NO: 1986111 - DNA, 15 bp, Homo sapiens
aagggtgaaaggaaa

SEQ ID NO: 1986112 - DNA, 15 bp, Homo sapiens
agggtgaaaggaaag

SEQ ID NO: 1986113 - DNA, 15 bp, Homo sapiens
gggtgaaaggaaagt

SEQ ID NO: 1986114 - DNA, 15 bp, Homo sapiens
ggtgaaaggaaagtg

SEQ ID NO: 1986115 - DNA, 15 bp, Homo sapiens
gtgaaaggaaagtga

SEQ ID NO: 1986116 - DNA, 15 bp, Homo sapiens
tgaaaggaaagtgag

SEQ ID NO: 1986117 - DNA, 15 bp, Homo sapiens
gaaaggaaagtgaga

SEQ ID NO: 1986118 - DNA, 15 bp, Homo sapiens
aaaggaaagtgagaa

SEQ ID NO: 1986119 - DNA, 15 bp, Homo sapiens
aaggaaagtgagaaa

SEQ ID NO: 1986120 - DNA, 15 bp, Homo sapiens
aggaaagtgagaaac

SEQ ID NO: 1986121 - DNA, 15 bp, Homo sapiens
ggaaagtgagaaact

SEQ ID NO: 1986122 - DNA, 15 bp, Homo sapiens
gaaagtgagaaactg

SEQ ID NO: 1986123 - DNA, 15 bp, Homo sapiens
aaagtgagaaactgc

SEQ ID NO: 1986124 - DNA, 15 bp, Homo sapiens
aagtgagaaactgct

SEQ ID NO: 1986125 - DNA, 15 bp, Homo sapiens
agtgagaaactgctt

SEQ ID NO: 1986126 - DNA, 15 bp, Homo sapiens
gtgagaaactgcttc

SEQ ID NO: 1986127 - DNA, 15 bp, Homo sapiens
tgagaaactgcttca

SEQ ID NO: 1986128 - DNA, 15 bp, Homo sapiens
gagaaactgcttcag

SEQ ID NO: 1986129 - DNA, 15 bp, Homo sapiens
agaaactgcttcaga

SEQ ID NO: 1986130 - DNA, 15 bp, Homo sapiens
gaaactgcttcagag

SEQ ID NO: 1986131 - DNA, 15 bp, Homo sapiens
aaactgcttcagagc

SEQ ID NO: 1986132 - DNA, 15 bp, Homo sapiens
aactgcttcagagcc

SEQ ID NO: 1986133 - DNA, 15 bp, Homo sapiens
actgcttcagagcca

SEQ ID NO: 1986134 - DNA, 15 bp, Homo sapiens
ctgcttcagagccac

SEQ ID NO: 1986135 - DNA, 15 bp, Homo sapiens
tgcttcagagccacc

SEQ ID NO: 1986136 - DNA, 15 bp, Homo sapiens
gcttcagagccaccg

SEQ ID NO: 1986137 - DNA, 15 bp, Homo sapiens
cttcagagccaccga

SEQ ID NO: 1986138 - DNA, 15 bp, Homo sapiens
ttcagagccaccgac

SEQ ID NO: 1986139 - DNA, 15 bp, Homo sapiens
tcagagccaccgaca

SEQ ID NO: 1986140 - DNA, 15 bp, Homo sapiens
cagagccaccgacaa

SEQ ID NO: 1986141 - DNA, 15 bp, Homo sapiens
agagccaccgacaac

SEQ ID NO: 1986142 - DNA, 15 bp, Homo sapiens
gagccaccgacaaca

SEQ ID NO: 1986143 - DNA, 15 bp, Homo sapiens
agccaccgacaacag

SEQ ID NO: 1986144 - DNA, 15 bp, Homo sapiens
gccaccgacaacaga

SEQ ID NO: 1986145 - DNA, 15 bp, Homo sapiens
ccaccgacaacagag

SEQ ID NO: 1986146 - DNA, 15 bp, Homo sapiens
caccgacaacagagc

SEQ ID NO: 1986147 - DNA, 15 bp, Homo sapiens
accgacaacagagca

SEQ ID NO: 1986148 - DNA, 15 bp, Homo sapiens
ccgacaacagagcaa

SEQ ID NO: 1986149 - DNA, 15 bp, Homo sapiens
cgacaacagagcaaa

SEQ ID NO: 1986150 - DNA, 15 bp, Homo sapiens
gacaacagagcaaag

SEQ ID NO: 1986151 - DNA, 15 bp, Homo sapiens
acaacagagcaaagc

SEQ ID NO: 1986152 - DNA, 15 bp, Homo sapiens
caacagagcaaagcc

SEQ ID NO: 1986153 - DNA, 15 bp, Homo sapiens
aacagagcaaagcca

SEQ ID NO: 1986154 - DNA, 15 bp, Homo sapiens
acagagcaaagccag

SEQ ID NO: 1986155 - DNA, 15 bp, Homo sapiens
cagagcaaagccagc

SEQ ID NO: 1986156 - DNA, 15 bp, Homo sapiens
agagcaaagccagct

SEQ ID NO: 1986157 - DNA, 15 bp, Homo sapiens
gagcaaagccagctg

SEQ ID NO: 1986158 - DNA, 15 bp, Homo sapiens
agcaaagccagctgg

SEQ ID NO: 1986159 - DNA, 15 bp, Homo sapiens
gcaaagccagctggg

SEQ ID NO: 1986160 - DNA, 15 bp, Homo sapiens
caaagccagctggga

SEQ ID NO: 1986161 - DNA, 15 bp, Homo sapiens
aaagccagctgggat

SEQ ID NO: 1986162 - DNA, 15 bp, Homo sapiens
aagccagctgggatg

SEQ ID NO: 1986163 - DNA, 15 bp, Homo sapiens
agccagctgggatgt

SEQ ID NO: 1986164 - DNA, 15 bp, Homo sapiens
gccagctgggatgtg

SEQ ID NO: 1986165 - DNA, 15 bp, Homo sapiens
ccagctgggatgtgg

SEQ ID NO: 1986166 - DNA, 15 bp, Homo sapiens
cagctgggatgtggt

SEQ ID NO: 1986167 - DNA, 15 bp, Homo sapiens
agctgggatgtggtc

SEQ ID NO: 1986168 - DNA, 15 bp, Homo sapiens
gctgggatgtggtcc

SEQ ID NO: 1986169 - DNA, 15 bp, Homo sapiens
ctgggatgtggtcct

SEQ ID NO: 1986170 - DNA, 15 bp, Homo sapiens
tgggatgtggtcctg

SEQ ID NO: 1986171 - DNA, 15 bp, Homo sapiens
gggatgtggtcctgg

SEQ ID NO: 1986172 - DNA, 15 bp, Homo sapiens
ggatgtggtcctgga

SEQ ID NO: 1986173 - DNA, 15 bp, Homo sapiens
gatgtggtcctggag

SEQ ID NO: 1986174 - DNA, 15 bp, Homo sapiens
atgtggtcctggagc

SEQ ID NO: 1986175 - DNA, 15 bp, Homo sapiens
tgtggtcctggagcg

SEQ ID NO: 1986176 - DNA, 15 bp, Homo sapiens
gtggtcctggagcgg

SEQ ID NO: 1986177 - DNA, 15 bp, Homo sapiens
tggtcctggagcgga

SEQ ID NO: 1986178 - DNA, 15 bp, Homo sapiens
ggtcctggagcggat

SEQ ID NO: 1986179 - DNA, 15 bp, Homo sapiens
gtcctggagcggatc

SEQ ID NO: 1986180 - DNA, 15 bp, Homo sapiens
tcctggagcggatca

SEQ ID NO: 1986181 - DNA, 15 bp, Homo sapiens
cctggagcggatcat

SEQ ID NO: 1986182 - DNA, 15 bp, Homo sapiens
ctggagcggatcatt

SEQ ID NO: 1986183 - DNA, 15 bp, Homo sapiens
tggagcggatcattc

SEQ ID NO: 1986184 - DNA, 15 bp, Homo sapiens
ggagcggatcattct

SEQ ID NO: 1986185 - DNA, 15 bp, Homo sapiens
gagcggatcattctg

SEQ ID NO: 1986186 - DNA, 15 bp, Homo sapiens
agcggatcattctgc

SEQ ID NO: 1986187 - DNA, 15 bp, Homo sapiens
gcggatcattctgct

SEQ ID NO: 1986188 - DNA, 15 bp, Homo sapiens
cggatcattctgcta

SEQ ID NO: 1986189 - DNA, 15 bp, Homo sapiens
ggatcattctgctag

SEQ ID NO: 1986190 - DNA, 15 bp, Homo sapiens
gatcattctgctagt

SEQ ID NO: 1986191 - DNA, 15 bp, Homo sapiens
atcattctgctagtg

SEQ ID NO: 1986192 - DNA, 15 bp, Homo sapiens
tcattctgctagtgt

SEQ ID NO: 1986193 - DNA, 15 bp, Homo sapiens
cattctgctagtgtt

SEQ ID NO: 1986194 - DNA, 15 bp, Homo sapiens
attctgctagtgttt

SEQ ID NO: 1986195 - DNA, 15 bp, Homo sapiens
ttctgctagtgtttg

SEQ ID NO: 1986196 - DNA, 15 bp, Homo sapiens
tctgctagtgtttgt

SEQ ID NO: 1986197 - DNA, 15 bp, Homo sapiens
ctgctagtgtttgtg

SEQ ID NO: 1986198 - DNA, 15 bp, Homo sapiens
tgctagtgtttgtgg

SEQ ID NO: 1986199 - DNA, 15 bp, Homo sapiens
gctagtgtttgtggt

SEQ ID NO: 1986200 - DNA, 15 bp, Homo sapiens
ctagtgtttgtggtt

SEQ ID NO: 1986201 - DNA, 15 bp, Homo sapiens
tagtgtttgtggttg

SEQ ID NO: 1986202 - DNA, 15 bp, Homo sapiens
agtgtttgtggttgt

SEQ ID NO: 1986203 - DNA, 15 bp, Homo sapiens
gtgtttgtggttgtt

SEQ ID NO: 1986204 - DNA, 15 bp, Homo sapiens
tgtttgtggttgttt

SEQ ID NO: 1986205 - DNA, 15 bp, Homo sapiens
gtttgtggttgtttt

SEQ ID NO: 1986206 - DNA, 15 bp, Homo sapiens
tttgtggttgttttt

SEQ ID NO: 1986207 - DNA, 15 bp, Homo sapiens
ttgtggttgtttttg

SEQ ID NO: 1986208 - DNA, 15 bp, Homo sapiens
tgtggttgtttttga

SEQ ID NO: 1986209 - DNA, 15 bp, Homo sapiens
gtggttgtttttgac

SEQ ID NO: 1986210 - DNA, 15 bp, Homo sapiens
tggttgtttttgact

SEQ ID NO: 1986211 - DNA, 15 bp, Homo sapiens
ggttgtttttgactc

SEQ ID NO: 1986212 - DNA, 15 bp, Homo sapiens
gttgtttttgactct

SEQ ID NO: 1986213 - DNA, 15 bp, Homo sapiens
ttgtttttgactctc

SEQ ID NO: 1986214 - DNA, 15 bp, Homo sapiens
tgtttttgactctct

SEQ ID NO: 1986215 - DNA, 15 bp, Homo sapiens
gtttttgactctctc

SEQ ID NO: 1986216 - DNA, 15 bp, Homo sapiens
tttttgactctctcc

SEQ ID NO: 1986217 - DNA, 15 bp, Homo sapiens
ttttgactctctcct

SEQ ID NO: 1986218 - DNA, 15 bp, Homo sapiens
tttgactctctcctg

SEQ ID NO: 1986219 - DNA, 15 bp, Homo sapiens
ttgactctctcctgg

SEQ ID NO: 1986220 - DNA, 15 bp, Homo sapiens
tgactctctcctggt

SEQ ID NO: 1986221 - DNA, 15 bp, Homo sapiens
gactctctcctggtt

SEQ ID NO: 1986222 - DNA, 15 bp, Homo sapiens
actctctcctggttg

SEQ ID NO: 1986223 - DNA, 15 bp, Homo sapiens
ctctctcctggttga

SEQ ID NO: 1986224 - DNA, 15 bp, Homo sapiens
tctctcctggttgac

SEQ ID NO: 1986225 - DNA, 15 bp, Homo sapiens
ctctcctggttgaca

SEQ ID NO: 1986226 - DNA, 15 bp, Homo sapiens
tctcctggttgacaa

SEQ ID NO: 1986227 - DNA, 15 bp, Homo sapiens
ctcctggttgacaag

SEQ ID NO: 1986228 - DNA, 15 bp, Homo sapiens
tcctggttgacaaga

SEQ ID NO: 1986229 - DNA, 15 bp, Homo sapiens
cctggttgacaagag

SEQ ID NO: 1986230 - DNA, 15 bp, Homo sapiens
ctggttgacaagaga

SEQ ID NO: 1986231 - DNA, 15 bp, Homo sapiens
tggttgacaagagaa

SEQ ID NO: 1986232 - DNA, 15 bp, Homo sapiens
ggttgacaagagaac

SEQ ID NO: 1986233 - DNA, 15 bp, Homo sapiens
gttgacaagagaact

SEQ ID NO: 1986234 - DNA, 15 bp, Homo sapiens
ttgacaagagaactt

SEQ ID NO: 1986235 - DNA, 15 bp, Homo sapiens
tgacaagagaacttt

SEQ ID NO: 1986236 - DNA, 15 bp, Homo sapiens
gacaagagaactttc

SEQ ID NO: 1986237 - DNA, 15 bp, Homo sapiens
acaagagaactttca

SEQ ID NO: 1986238 - DNA, 15 bp, Homo sapiens
caagagaactttcat

SEQ ID NO: 1986239 - DNA, 15 bp, Homo sapiens
aagagaactttcatt

SEQ ID NO: 1986240 - DNA, 15 bp, Homo sapiens
agagaactttcattg

SEQ ID NO: 1986241 - DNA, 15 bp, Homo sapiens
gagaactttcattga

SEQ ID NO: 1986242 - DNA, 15 bp, Homo sapiens
agaactttcattgag

SEQ ID NO: 1986243 - DNA, 15 bp, Homo sapiens
gaactttcattgaga

SEQ ID NO: 1986244 - DNA, 15 bp, Homo sapiens
aactttcattgagaa

SEQ ID NO: 1986245 - DNA, 15 bp, Homo sapiens
actttcattgagaat

SEQ ID NO: 1986246 - DNA, 15 bp, Homo sapiens
ctttcattgagaata

SEQ ID NO: 1986247 - DNA, 15 bp, Homo sapiens
tttcattgagaatat

SEQ ID NO: 1986248 - DNA, 15 bp, Homo sapiens
ttcattgagaatatt

SEQ ID NO: 1986249 - DNA, 15 bp, Homo sapiens
tcattgagaatattt

SEQ ID NO: 1986250 - DNA, 15 bp, Homo sapiens
cattgagaatatttg

SEQ ID NO: 1986251 - DNA, 15 bp, Homo sapiens
attgagaatatttgg

SEQ ID NO: 1986252 - DNA, 15 bp, Homo sapiens
ttgagaatatttggg

SEQ ID NO: 1986253 - DNA, 15 bp, Homo sapiens
tgagaatatttggga

SEQ ID NO: 1986254 - DNA, 15 bp, Homo sapiens
gagaatatttgggat

SEQ ID NO: 1986255 - DNA, 15 bp, Homo sapiens
agaatatttgggatg

SEQ ID NO: 1986256 - DNA, 15 bp, Homo sapiens
gaatatttgggatga

SEQ ID NO: 1986257 - DNA, 15 bp, Homo sapiens
aatatttgggatgaa

SEQ ID NO: 1986258 - DNA, 15 bp, Homo sapiens
atatttgggatgaaa

SEQ ID NO: 1986259 - DNA, 15 bp, Homo sapiens
tatttgggatgaaaa

SEQ ID NO: 1986260 - DNA, 15 bp, Homo sapiens
atttgggatgaaaaa

SEQ ID NO: 1986261 - DNA, 15 bp, Homo sapiens
tttgggatgaaaaaa

SEQ ID NO: 1986262 - DNA, 15 bp, Homo sapiens
ttgggatgaaaaaaa

SEQ ID NO: 1986263 - DNA, 15 bp, Homo sapiens
tgggatgaaaaaaaa

SEQ ID NO: 1986264 - DNA, 15 bp, Homo sapiens
gggatgaaaaaaaag

SEQ ID NO: 1986265 - DNA, 15 bp, Homo sapiens
ggatgaaaaaaaagt

SEQ ID NO: 1986266 - DNA, 15 bp, Homo sapiens
gatgaaaaaaaagtt

SEQ ID NO: 1986267 - DNA, 15 bp, Homo sapiens
atgaaaaaaaagttt

SEQ ID NO: 1986268 - DNA, 15 bp, Homo sapiens
tgaaaaaaaagtttt

SEQ ID NO: 1986269 - DNA, 15 bp, Homo sapiens
gaaaaaaaagttttg

SEQ ID NO: 1986270 - DNA, 15 bp, Homo sapiens
aaaaaaaagttttgt

SEQ ID NO: 1986271 - DNA, 15 bp, Homo sapiens
aaaaaaagttttgta

SEQ ID NO: 1986272 - DNA, 15 bp, Homo sapiens
aaaaaagttttgtag

SEQ ID NO: 1986273 - DNA, 15 bp, Homo sapiens
aaaaagttttgtagc

SEQ ID NO: 1986274 - DNA, 15 bp, Homo sapiens
aaaagttttgtagct

SEQ ID NO: 1986275 - DNA, 15 bp, Homo sapiens
aaagttttgtagctt

SEQ ID NO: 1986276 - DNA, 15 bp, Homo sapiens
aagttttgtagcttg

SEQ ID NO: 1986277 - DNA, 15 bp, Homo sapiens
agttttgtagcttga

SEQ ID NO: 1986278 - DNA, 15 bp, Homo sapiens
gttttgtagcttgag

SEQ ID NO: 1986279 - DNA, 15 bp, Homo sapiens
ttttgtagcttgagg

SEQ ID NO: 1986280 - DNA, 15 bp, Homo sapiens
tttgtagcttgagga

SEQ ID NO: 1986281 - DNA, 15 bp, Homo sapiens
ttgtagcttgaggag

SEQ ID NO: 1986282 - DNA, 15 bp, Homo sapiens
tgtagcttgaggagg

SEQ ID NO: 1986283 - DNA, 15 bp, Homo sapiens
gtagcttgaggaggt

SEQ ID NO: 1986284 - DNA, 15 bp, Homo sapiens
tagcttgaggaggtg

SEQ ID NO: 1986285 - DNA, 15 bp, Homo sapiens
agcttgaggaggtga

SEQ ID NO: 1986286 - DNA, 15 bp, Homo sapiens
gcttgaggaggtgac

SEQ ID NO: 1986287 - DNA, 15 bp, Homo sapiens
cttgaggaggtgact

SEQ ID NO: 1986288 - DNA, 15 bp, Homo sapiens
ttgaggaggtgactt

SEQ ID NO: 1986289 - DNA, 15 bp, Homo sapiens
tgaggaggtgacttt

SEQ ID NO: 1986290 - DNA, 15 bp, Homo sapiens
gaggaggtgactttt

SEQ ID NO: 1986291 - DNA, 15 bp, Homo sapiens
aggaggtgacttttt

SEQ ID NO: 1986292 - DNA, 15 bp, Homo sapiens
ggaggtgacttttta

SEQ ID NO: 1986293 - DNA, 15 bp, Homo sapiens
gaggtgactttttat

SEQ ID NO: 1986294 - DNA, 15 bp, Homo sapiens
aggtgactttttatc

SEQ ID NO: 1986295 - DNA, 15 bp, Homo sapiens
ggtgactttttatcg

SEQ ID NO: 1986296 - DNA, 15 bp, Homo sapiens
gtgactttttatcgc

SEQ ID NO: 1986297 - DNA, 15 bp, Homo sapiens
tgactttttatcgcc

SEQ ID NO: 1986298 - DNA, 15 bp, Homo sapiens
gactttttatcgcct

SEQ ID NO: 1986299 - DNA, 15 bp, Homo sapiens
actttttatcgcctg

SEQ ID NO: 1986300 - DNA, 15 bp, Homo sapiens
ctttttatcgcctga

SEQ ID NO: 1986301 - DNA, 15 bp, Homo sapiens
tttttatcgcctgag

SEQ ID NO: 1986302 - DNA, 15 bp, Homo sapiens
ttttatcgcctgagt

SEQ ID NO: 1986303 - DNA, 15 bp, Homo sapiens
tttatcgcctgagtt

SEQ ID NO: 1986304 - DNA, 15 bp, Homo sapiens
ttatcgcctgagttt

SEQ ID NO: 1986305 - DNA, 15 bp, Homo sapiens
tatcgcctgagtttc

SEQ ID NO: 1986306 - DNA, 15 bp, Homo sapiens
atcgcctgagtttca

SEQ ID NO: 1986307 - DNA, 15 bp, Homo sapiens
tcgcctgagtttcac

SEQ ID NO: 1986308 - DNA, 15 bp, Homo sapiens
cgcctgagtttcaca

SEQ ID NO: 1986309 - DNA, 15 bp, Homo sapiens
gcctgagtttcacac

SEQ ID NO: 1986310 - DNA, 15 bp, Homo sapiens
cctgagtttcacaca

SEQ ID NO: 1986311 - DNA, 15 bp, Homo sapiens
ctgagtttcacacaa

SEQ ID NO: 1986312 - DNA, 15 bp, Homo sapiens
tgagtttcacacaat

SEQ ID NO: 1986313 - DNA, 15 bp, Homo sapiens
gagtttcacacaata

SEQ ID NO: 1986314 - DNA, 15 bp, Homo sapiens
agtttcacacaataa

SEQ ID NO: 1986315 - DNA, 15 bp, Homo sapiens
gtttcacacaataaa

SEQ ID NO: 1986316 - DNA, 15 bp, Homo sapiens
tttcacacaataaat

SEQ ID NO: 1986317 - DNA, 15 bp, Homo sapiens
ttcacacaataaatc

SEQ ID NO: 1986318 - DNA, 15 bp, Homo sapiens
tcacacaataaatcc

SEQ ID NO: 1986319 - DNA, 15 bp, Homo sapiens
cacacaataaatcct

SEQ ID NO: 1986320 - DNA, 15 bp, Homo sapiens
acacaataaatcctg

SEQ ID NO: 1986321 - DNA, 15 bp, Homo sapiens
cacaataaatcctgg

SEQ ID NO: 1986322 - DNA, 15 bp, Homo sapiens
acaataaatcctggg

SEQ ID NO: 1986323 - DNA, 15 bp, Homo sapiens
caataaatcctgggg

SEQ ID NO: 1986324 - DNA, 15 bp, Homo sapiens
aataaatcctggggc

SEQ ID NO: 1986325 - DNA, 15 bp, Homo sapiens
ataaatcctggggct

SEQ ID NO: 1986326 - DNA, 15 bp, Homo sapiens
taaatcctggggctg

SEQ ID NO: 1986327 - DNA, 15 bp, Homo sapiens
aaatcctggggctga

SEQ ID NO: 1986328 - DNA, 15 bp, Homo sapiens
aatcctggggctgat

SEQ ID NO: 1986329 - DNA, 15 bp, Homo sapiens
atcctggggctgatt

SEQ ID NO: 1986330 - DNA, 15 bp, Homo sapiens
tcctggggctgatta

SEQ ID NO: 1986331 - DNA, 15 bp, Homo sapiens
cctggggctgattag

SEQ ID NO: 1986332 - DNA, 15 bp, Homo sapiens
ctggggctgattaga

SEQ ID NO: 1986333 - DNA, 15 bp, Homo sapiens
tggggctgattagaa

SEQ ID NO: 1986334 - DNA, 15 bp, Homo sapiens
ggggctgattagaat

SEQ ID NO: 1986335 - DNA, 15 bp, Homo sapiens
gggctgattagaata

SEQ ID NO: 1986336 - DNA, 15 bp, Homo sapiens
ggctgattagaataa

SEQ ID NO: 1986337 - DNA, 15 bp, Homo sapiens
gctgattagaataaa

SEQ ID NO: 1986338 - DNA, 15 bp, Homo sapiens
ctgattagaataaat

SEQ ID NO: 1986339 - DNA, 15 bp, Homo sapiens
tgattagaataaatg

SEQ ID NO: 1986340 - DNA, 15 bp, Homo sapiens
gattagaataaatgc

SEQ ID NO: 1986341 - DNA, 15 bp, Homo sapiens
attagaataaatgca

SEQ ID NO: 1986342 - DNA, 15 bp, Homo sapiens
ttagaataaatgcac

SEQ ID NO: 1986343 - DNA, 15 bp, Homo sapiens
tagaataaatgcaca

SEQ ID NO: 1986344 - DNA, 15 bp, Homo sapiens
agaataaatgcacac

SEQ ID NO: 1986345 - DNA, 15 bp, Homo sapiens
gaataaatgcacaca

SEQ ID NO: 1986346 - DNA, 15 bp, Homo sapiens
aataaatgcacacat

SEQ ID NO: 1986347 - DNA, 15 bp, Homo sapiens
ataaatgcacacata

SEQ ID NO: 1986348 - DNA, 15 bp, Homo sapiens
taaatgcacacatag

SEQ ID NO: 1986349 - DNA, 15 bp, Homo sapiens
aaatgcacacatagc

SEQ ID NO: 1986350 - DNA, 15 bp, Homo sapiens
aatgcacacatagcc

SEQ ID NO: 1986351 - DNA, 15 bp, Homo sapiens
atgcacacatagcct

SEQ ID NO: 1986352 - DNA, 15 bp, Homo sapiens
tgcacacatagcctt

SEQ ID NO: 1986353 - DNA, 15 bp, Homo sapiens
gcacacatagccttt

SEQ ID NO: 1986354 - DNA, 15 bp, Homo sapiens
cacacatagcctttt

SEQ ID NO: 1986355 - DNA, 15 bp, Homo sapiens
acacatagccttttg

SEQ ID NO: 1986356 - DNA, 15 bp, Homo sapiens
cacatagccttttgt

SEQ ID NO: 1986357 - DNA, 15 bp, Homo sapiens
acatagccttttgtc

SEQ ID NO: 1986358 - DNA, 15 bp, Homo sapiens
catagccttttgtca

SEQ ID NO: 1986359 - DNA, 15 bp, Homo sapiens
atagccttttgtcag

SEQ ID NO: 1986360 - DNA, 15 bp, Homo sapiens
tagccttttgtcagt

SEQ ID NO: 1986361 - DNA, 15 bp, Homo sapiens
agccttttgtcagtg

SEQ ID NO: 1986362 - DNA, 15 bp, Homo sapiens
gccttttgtcagtgg

SEQ ID NO: 1986363 - DNA, 15 bp, Homo sapiens
ccttttgtcagtgga

SEQ ID NO: 1986364 - DNA, 15 bp, Homo sapiens
cttttgtcagtggaa

SEQ ID NO: 1986365 - DNA, 15 bp, Homo sapiens
ttttgtcagtggaaa

SEQ ID NO: 1986366 - DNA, 15 bp, Homo sapiens
tttgtcagtggaaat

SEQ ID NO: 1986367 - DNA, 15 bp, Homo sapiens
ttgtcagtggaaatt

SEQ ID NO: 1986368 - DNA, 15 bp, Homo sapiens
tgtcagtggaaattg

SEQ ID NO: 1986369 - DNA, 15 bp, Homo sapiens
gtcagtggaaattgg

SEQ ID NO: 1986370 - DNA, 15 bp, Homo sapiens
tcagtggaaattggt

SEQ ID NO: 1986371 - DNA, 15 bp, Homo sapiens
cagtggaaattggtt

SEQ ID NO: 1986372 - DNA, 15 bp, Homo sapiens
agtggaaattggttt

SEQ ID NO: 1986373 - DNA, 15 bp, Homo sapiens
gtggaaattggttta

SEQ ID NO: 1986374 - DNA, 15 bp, Homo sapiens
tggaaattggtttaa

SEQ ID NO: 1986375 - DNA, 15 bp, Homo sapiens
ggaaattggtttaac

SEQ ID NO: 1986376 - DNA, 15 bp, Homo sapiens
gaaattggtttaact

SEQ ID NO: 1986377 - DNA, 15 bp, Homo sapiens
aaattggtttaactt

SEQ ID NO: 1986378 - DNA, 15 bp, Homo sapiens
aattggtttaacttt

SEQ ID NO: 1986379 - DNA, 15 bp, Homo sapiens
attggtttaactttg

SEQ ID NO: 1986380 - DNA, 15 bp, Homo sapiens
ttggtttaactttgt

SEQ ID NO: 1986381 - DNA, 15 bp, Homo sapiens
tggtttaactttgtg

SEQ ID NO: 1986382 - DNA, 15 bp, Homo sapiens
ggtttaactttgtgt

SEQ ID NO: 1986383 - DNA, 15 bp, Homo sapiens
gtttaactttgtgtt

SEQ ID NO: 1986384 - DNA, 15 bp, Homo sapiens
tttaactttgtgttg

SEQ ID NO: 1986385 - DNA, 15 bp, Homo sapiens
ttaactttgtgttgc

SEQ ID NO: 1986386 - DNA, 15 bp, Homo sapiens
taactttgtgttgct

SEQ ID NO: 1986387 - DNA, 15 bp, Homo sapiens
aactttgtgttgctg

SEQ ID NO: 1986388 - DNA, 15 bp, Homo sapiens
actttgtgttgctgt

SEQ ID NO: 1986389 - DNA, 15 bp, Homo sapiens
ctttgtgttgctgta

SEQ ID NO: 1986390 - DNA, 15 bp, Homo sapiens
tttgtgttgctgtag

SEQ ID NO: 1986391 - DNA, 15 bp, Homo sapiens
ttgtgttgctgtagg

SEQ ID NO: 1986392 - DNA, 15 bp, Homo sapiens
tgtgttgctgtaggt

SEQ ID NO: 1986393 - DNA, 15 bp, Homo sapiens
gtgttgctgtaggta

SEQ ID NO: 1986394 - DNA, 15 bp, Homo sapiens
tgttgctgtaggtag

SEQ ID NO: 1986395 - DNA, 15 bp, Homo sapiens
gttgctgtaggtagt

SEQ ID NO: 1986396 - DNA, 15 bp, Homo sapiens
ttgctgtaggtagtt

SEQ ID NO: 1986397 - DNA, 15 bp, Homo sapiens
tgctgtaggtagttg

SEQ ID NO: 1986398 - DNA, 15 bp, Homo sapiens
gctgtaggtagttgg

SEQ ID NO: 1986399 - DNA, 15 bp, Homo sapiens
ctgtaggtagttggg

SEQ ID NO: 1986400 - DNA, 15 bp, Homo sapiens
tgtaggtagttgggg

SEQ ID NO: 1986401 - DNA, 15 bp, Homo sapiens
gtaggtagttgggga

SEQ ID NO: 1986402 - DNA, 15 bp, Homo sapiens
taggtagttggggat

SEQ ID NO: 1986403 - DNA, 15 bp, Homo sapiens
aggtagttggggatg

SEQ ID NO: 1986404 - DNA, 15 bp, Homo sapiens
ggtagttggggatgg

SEQ ID NO: 1986405 - DNA, 15 bp, Homo sapiens
gtagttggggatggt

SEQ ID NO: 1986406 - DNA, 15 bp, Homo sapiens
tagttggggatggtt

SEQ ID NO: 1986407 - DNA, 15 bp, Homo sapiens
agttggggatggttt

SEQ ID NO: 1986408 - DNA, 15 bp, Homo sapiens
gttggggatggttta

SEQ ID NO: 1986409 - DNA, 15 bp, Homo sapiens
ttggggatggtttaa

SEQ ID NO: 1986410 - DNA, 15 bp, Homo sapiens
tggggatggtttaag

SEQ ID NO: 1986411 - DNA, 15 bp, Homo sapiens
ggggatggtttaagg

SEQ ID NO: 1986412 - DNA, 15 bp, Homo sapiens
gggatggtttaaggg

SEQ ID NO: 1986413 - DNA, 15 bp, Homo sapiens
ggatggtttaaggga

SEQ ID NO: 1986414 - DNA, 15 bp, Homo sapiens
gatggtttaagggat

SEQ ID NO: 1986415 - DNA, 15 bp, Homo sapiens
atggtttaagggatg

SEQ ID NO: 1986416 - DNA, 15 bp, Homo sapiens
tggtttaagggatgc

SEQ ID NO: 1986417 - DNA, 15 bp, Homo sapiens
ggtttaagggatgct

SEQ ID NO: 1986418 - DNA, 15 bp, Homo sapiens
gtttaagggatgctt

SEQ ID NO: 1986419 - DNA, 15 bp, Homo sapiens
tttaagggatgcttt

SEQ ID NO: 1986420 - DNA, 15 bp, Homo sapiens
ttaagggatgctttc

SEQ ID NO: 1986421 - DNA, 15 bp, Homo sapiens
taagggatgctttct

SEQ ID NO: 1986422 - DNA, 15 bp, Homo sapiens
aagggatgctttctg

SEQ ID NO: 1986423 - DNA, 15 bp, Homo sapiens
agggatgctttctgc

SEQ ID NO: 1986424 - DNA, 15 bp, Homo sapiens
gggatgctttctgca

SEQ ID NO: 1986425 - DNA, 15 bp, Homo sapiens
ggatgctttctgcag

SEQ ID NO: 1986426 - DNA, 15 bp, Homo sapiens
gatgctttctgcagc

SEQ ID NO: 1986427 - DNA, 15 bp, Homo sapiens
atgctttctgcagct

SEQ ID NO: 1986428 - DNA, 15 bp, Homo sapiens
tgctttctgcagctg

SEQ ID NO: 1986429 - DNA, 15 bp, Homo sapiens
gctttctgcagctgt

SEQ ID NO: 1986430 - DNA, 15 bp, Homo sapiens
ctttctgcagctgtg

SEQ ID NO: 1986431 - DNA, 15 bp, Homo sapiens
tttctgcagctgtgg

SEQ ID NO: 1986432 - DNA, 15 bp, Homo sapiens
ttctgcagctgtggg

SEQ ID NO: 1986433 - DNA, 15 bp, Homo sapiens
tctgcagctgtgggt

SEQ ID NO: 1986434 - DNA, 15 bp, Homo sapiens
ctgcagctgtgggtg

SEQ ID NO: 1986435 - DNA, 15 bp, Homo sapiens
tgcagctgtgggtgc

SEQ ID NO: 1986436 - DNA, 15 bp, Homo sapiens
gcagctgtgggtgca

SEQ ID NO: 1986437 - DNA, 15 bp, Homo sapiens
cagctgtgggtgcag

SEQ ID NO: 1986438 - DNA, 15 bp, Homo sapiens
agctgtgggtgcagt

SEQ ID NO: 1986439 - DNA, 15 bp, Homo sapiens
gctgtgggtgcagtg

SEQ ID NO: 1986440 - DNA, 15 bp, Homo sapiens
ctgtgggtgcagtgg

SEQ ID NO: 1986441 - DNA, 15 bp, Homo sapiens
tgtgggtgcagtggg

SEQ ID NO: 1986442 - DNA, 15 bp, Homo sapiens
gtgggtgcagtgggc

SEQ ID NO: 1986443 - DNA, 15 bp, Homo sapiens
tgggtgcagtgggct

SEQ ID NO: 1986444 - DNA, 15 bp, Homo sapiens
gggtgcagtgggctt

SEQ ID NO: 1986445 - DNA, 15 bp, Homo sapiens
ggtgcagtgggcttc

SEQ ID NO: 1986446 - DNA, 15 bp, Homo sapiens
gtgcagtgggcttcc

SEQ ID NO: 1986447 - DNA, 15 bp, Homo sapiens
tgcagtgggcttcct

SEQ ID NO: 1986448 - DNA, 15 bp, Homo sapiens
gcagtgggcttcctg

SEQ ID NO: 1986449 - DNA, 15 bp, Homo sapiens
cagtgggcttcctgt

SEQ ID NO: 1986450 - DNA, 15 bp, Homo sapiens
agtgggcttcctgtg

SEQ ID NO: 1986451 - DNA, 15 bp, Homo sapiens
gtgggcttcctgtga

SEQ ID NO: 1986452 - DNA, 15 bp, Homo sapiens
tgggcttcctgtgat

SEQ ID NO: 1986453 - DNA, 15 bp, Homo sapiens
gggcttcctgtgatg

SEQ ID NO: 1986454 - DNA, 15 bp, Homo sapiens
ggcttcctgtgatgg

SEQ ID NO: 1986455 - DNA, 15 bp, Homo sapiens
gcttcctgtgatggg

SEQ ID NO: 1986456 - DNA, 15 bp, Homo sapiens
cttcctgtgatgggg

SEQ ID NO: 1986457 - DNA, 15 bp, Homo sapiens
ttcctgtgatggggg

SEQ ID NO: 1986458 - DNA, 15 bp, Homo sapiens
tcctgtgatggggga

SEQ ID NO: 1986459 - DNA, 15 bp, Homo sapiens
cctgtgatgggggaa

SEQ ID NO: 1986460 - DNA, 15 bp, Homo sapiens
ctgtgatgggggaat

SEQ ID NO: 1986461 - DNA, 15 bp, Homo sapiens
tgtgatgggggaatt

SEQ ID NO: 1986462 - DNA, 15 bp, Homo sapiens
gtgatgggggaattg

SEQ ID NO: 1986463 - DNA, 15 bp, Homo sapiens
tgatgggggaattgt

SEQ ID NO: 1986464 - DNA, 15 bp, Homo sapiens
gatgggggaattgtt

SEQ ID NO: 1986465 - DNA, 15 bp, Homo sapiens
atgggggaattgttt

SEQ ID NO: 1986466 - DNA, 15 bp, Homo sapiens
tgggggaattgttta

SEQ ID NO: 1986467 - DNA, 15 bp, Homo sapiens
gggggaattgtttaa

SEQ ID NO: 1986468 - DNA, 15 bp, Homo sapiens
ggggaattgtttaag

SEQ ID NO: 1986469 - DNA, 15 bp, Homo sapiens
gggaattgtttaaga

SEQ ID NO: 1986470 - DNA, 15 bp, Homo sapiens
ggaattgtttaagat

SEQ ID NO: 1986471 - DNA, 15 bp, Homo sapiens
gaattgtttaagatt

SEQ ID NO: 1986472 - DNA, 15 bp, Homo sapiens
aattgtttaagattg

SEQ ID NO: 1986473 - DNA, 15 bp, Homo sapiens
attgtttaagattga

SEQ ID NO: 1986474 - DNA, 15 bp, Homo sapiens
ttgtttaagattgag

SEQ ID NO: 1986475 - DNA, 15 bp, Homo sapiens
tgtttaagattgagt

SEQ ID NO: 1986476 - DNA, 15 bp, Homo sapiens
gtttaagattgagtc

SEQ ID NO: 1986477 - DNA, 15 bp, Homo sapiens
tttaagattgagtca

SEQ ID NO: 1986478 - DNA, 15 bp, Homo sapiens
ttaagattgagtcaa

SEQ ID NO: 1986479 - DNA, 15 bp, Homo sapiens
taagattgagtcaac

SEQ ID NO: 1986480 - DNA, 15 bp, Homo sapiens
aagattgagtcaacc

SEQ ID NO: 1986481 - DNA, 15 bp, Homo sapiens
agattgagtcaacct

SEQ ID NO: 1986482 - DNA, 15 bp, Homo sapiens
gattgagtcaaccta

SEQ ID NO: 1986483 - DNA, 15 bp, Homo sapiens
attgagtcaacctat

SEQ ID NO: 1986484 - DNA, 15 bp, Homo sapiens
ttgagtcaacctatt

SEQ ID NO: 1986485 - DNA, 15 bp, Homo sapiens
tgagtcaacctattt

SEQ ID NO: 1986486 - DNA, 15 bp, Homo sapiens
gagtcaacctatttt

SEQ ID NO: 1986487 - DNA, 15 bp, Homo sapiens
agtcaacctattttg

SEQ ID NO: 1986488 - DNA, 15 bp, Homo sapiens
gtcaacctattttgt

SEQ ID NO: 1986489 - DNA, 15 bp, Homo sapiens
tcaacctattttgtt

SEQ ID NO: 1986490 - DNA, 15 bp, Homo sapiens
caacctattttgttt

SEQ ID NO: 1986491 - DNA, 15 bp, Homo sapiens
aacctattttgttta

SEQ ID NO: 1986492 - DNA, 15 bp, Homo sapiens
acctattttgtttac

SEQ ID NO: 1986493 - DNA, 15 bp, Homo sapiens
cctattttgtttact

SEQ ID NO: 1986494 - DNA, 15 bp, Homo sapiens
ctattttgtttactg

SEQ ID NO: 1986495 - DNA, 15 bp, Homo sapiens
tattttgtttactgg

SEQ ID NO: 1986496 - DNA, 15 bp, Homo sapiens
attttgtttactgga

SEQ ID NO: 1986497 - DNA, 15 bp, Homo sapiens
ttttgtttactggat

SEQ ID NO: 1986498 - DNA, 15 bp, Homo sapiens
tttgtttactggata

SEQ ID NO: 1986499 - DNA, 15 bp, Homo sapiens
ttgtttactggatat

SEQ ID NO: 1986500 - DNA, 15 bp, Homo sapiens
tgtttactggatata

SEQ ID NO: 1986501 - DNA, 15 bp, Homo sapiens
gtttactggatataa

SEQ ID NO: 1986502 - DNA, 15 bp, Homo sapiens
tttactggatataat

SEQ ID NO: 1986503 - DNA, 15 bp, Homo sapiens
ttactggatataatg

SEQ ID NO: 1986504 - DNA, 15 bp, Homo sapiens
tactggatataatgg

SEQ ID NO: 1986505 - DNA, 15 bp, Homo sapiens
actggatataatggt

SEQ ID NO: 1986506 - DNA, 15 bp, Homo sapiens
ctggatataatggta

SEQ ID NO: 1986507 - DNA, 15 bp, Homo sapiens
tggatataatggtaa

SEQ ID NO: 1986508 - DNA, 15 bp, Homo sapiens
ggatataatggtaaa

SEQ ID NO: 1986509 - DNA, 15 bp, Homo sapiens
gatataatggtaaaa

SEQ ID NO: 1986510 - DNA, 15 bp, Homo sapiens
atataatggtaaaac

SEQ ID NO: 1986511 - DNA, 15 bp, Homo sapiens
tataatggtaaaaca

SEQ ID NO: 1986512 - DNA, 15 bp, Homo sapiens
ataatggtaaaacat

SEQ ID NO: 1986513 - DNA, 15 bp, Homo sapiens
taatggtaaaacatt

SEQ ID NO: 1986514 - DNA, 15 bp, Homo sapiens
aatggtaaaacatta

SEQ ID NO: 1986515 - DNA, 15 bp, Homo sapiens
atggtaaaacattat

SEQ ID NO: 1986516 - DNA, 15 bp, Homo sapiens
tggtaaaacattatg

SEQ ID NO: 1986517 - DNA, 15 bp, Homo sapiens
ggtaaaacattatgg

SEQ ID NO: 1986518 - DNA, 15 bp, Homo sapiens
gtaaaacattatggg

SEQ ID NO: 1986519 - DNA, 15 bp, Homo sapiens
taaaacattatggga

SEQ ID NO: 1986520 - DNA, 15 bp, Homo sapiens
aaaacattatgggag

SEQ ID NO: 1986521 - DNA, 15 bp, Homo sapiens
aaacattatgggagc

SEQ ID NO: 1986522 - DNA, 15 bp, Homo sapiens
aacattatgggagct

SEQ ID NO: 1986523 - DNA, 15 bp, Homo sapiens
acattatgggagctg

SEQ ID NO: 1986524 - DNA, 15 bp, Homo sapiens
cattatgggagctga

SEQ ID NO: 1986525 - DNA, 15 bp, Homo sapiens
attatgggagctgaa

SEQ ID NO: 1986526 - DNA, 15 bp, Homo sapiens
ttatgggagctgaag

SEQ ID NO: 1986527 - DNA, 15 bp, Homo sapiens
tatgggagctgaagg

SEQ ID NO: 1986528 - DNA, 15 bp, Homo sapiens
atgggagctgaaggg

SEQ ID NO: 1986529 - DNA, 15 bp, Homo sapiens
tgggagctgaagggg

SEQ ID NO: 1986530 - DNA, 15 bp, Homo sapiens
gggagctgaaggggt

SEQ ID NO: 1986531 - DNA, 15 bp, Homo sapiens
ggagctgaaggggtg

SEQ ID NO: 1986532 - DNA, 15 bp, Homo sapiens
gagctgaaggggtgg

SEQ ID NO: 1986533 - DNA, 15 bp, Homo sapiens
agctgaaggggtggg

SEQ ID NO: 1986534 - DNA, 15 bp, Homo sapiens
gctgaaggggtgggg

SEQ ID NO: 1986535 - DNA, 15 bp, Homo sapiens
ctgaaggggtggggg

SEQ ID NO: 1986536 - DNA, 15 bp, Homo sapiens
tgaaggggtggggga

SEQ ID NO: 1986537 - DNA, 15 bp, Homo sapiens
gaaggggtgggggaa

SEQ ID NO: 1986538 - DNA, 15 bp, Homo sapiens
aaggggtgggggaag

SEQ ID NO: 1986539 - DNA, 15 bp, Homo sapiens
aggggtgggggaaga

SEQ ID NO: 1986540 - DNA, 15 bp, Homo sapiens
ggggtgggggaagag

SEQ ID NO: 1986541 - DNA, 15 bp, Homo sapiens
gggtgggggaagagc

SEQ ID NO: 1986542 - DNA, 15 bp, Homo sapiens
ggtgggggaagagct

SEQ ID NO: 1986543 - DNA, 15 bp, Homo sapiens
gtgggggaagagctc

SEQ ID NO: 1986544 - DNA, 15 bp, Homo sapiens
tgggggaagagctct

SEQ ID NO: 1986545 - DNA, 15 bp, Homo sapiens
gggggaagagctctt

SEQ ID NO: 1986546 - DNA, 15 bp, Homo sapiens
ggggaagagctcttc

SEQ ID NO: 1986547 - DNA, 15 bp, Homo sapiens
gggaagagctcttct

SEQ ID NO: 1986548 - DNA, 15 bp, Homo sapiens
ggaagagctcttctg

SEQ ID NO: 1986549 - DNA, 15 bp, Homo sapiens
gaagagctcttctgt

SEQ ID NO: 1986550 - DNA, 15 bp, Homo sapiens
aagagctcttctgtt

SEQ ID NO: 1986551 - DNA, 15 bp, Homo sapiens
agagctcttctgtta

SEQ ID NO: 1986552 - DNA, 15 bp, Homo sapiens
gagctcttctgttat

SEQ ID NO: 1986553 - DNA, 15 bp, Homo sapiens
agctcttctgttatt

SEQ ID NO: 1986554 - DNA, 15 bp, Homo sapiens
gctcttctgttattt

SEQ ID NO: 1986555 - DNA, 15 bp, Homo sapiens
ctcttctgttatttg

SEQ ID NO: 1986556 - DNA, 15 bp, Homo sapiens
tcttctgttatttga

SEQ ID NO: 1986557 - DNA, 15 bp, Homo sapiens
cttctgttatttgat

SEQ ID NO: 1986558 - DNA, 15 bp, Homo sapiens
ttctgttatttgatg

SEQ ID NO: 1986559 - DNA, 15 bp, Homo sapiens
tctgttatttgatgc

SEQ ID NO: 1986560 - DNA, 15 bp, Homo sapiens
ctgttatttgatgca

SEQ ID NO: 1986561 - DNA, 15 bp, Homo sapiens
tgttatttgatgcat

SEQ ID NO: 1986562 - DNA, 15 bp, Homo sapiens
gttatttgatgcata

SEQ ID NO: 1986563 - DNA, 15 bp, Homo sapiens
ttatttgatgcataa

SEQ ID NO: 1986564 - DNA, 15 bp, Homo sapiens
tatttgatgcataaa

SEQ ID NO: 1986565 - DNA, 15 bp, Homo sapiens
atttgatgcataaac

SEQ ID NO: 1986566 - DNA, 15 bp, Homo sapiens
tttgatgcataaaca

SEQ ID NO: 1986567 - DNA, 15 bp, Homo sapiens
ttgatgcataaacat

SEQ ID NO: 1986568 - DNA, 15 bp, Homo sapiens
tgatgcataaacatt

SEQ ID NO: 1986569 - DNA, 15 bp, Homo sapiens
gatgcataaacattt

SEQ ID NO: 1986570 - DNA, 15 bp, Homo sapiens
atgcataaacatttc

SEQ ID NO: 1986571 - DNA, 15 bp, Homo sapiens
tgcataaacatttct

SEQ ID NO: 1986572 - DNA, 15 bp, Homo sapiens
gcataaacatttctt

SEQ ID NO: 1986573 - DNA, 15 bp, Homo sapiens
cataaacatttcttt

SEQ ID NO: 1986574 - DNA, 15 bp, Homo sapiens
ataaacatttcttta

SEQ ID NO: 1986575 - DNA, 15 bp, Homo sapiens
taaacatttctttac

SEQ ID NO: 1986576 - DNA, 15 bp, Homo sapiens
aaacatttctttacg

SEQ ID NO: 1986577 - DNA, 15 bp, Homo sapiens
aacatttctttacgg

SEQ ID NO: 1986578 - DNA, 15 bp, Homo sapiens
acatttctttacggg

SEQ ID NO: 1986579 - DNA, 15 bp, Homo sapiens
catttctttacggga

SEQ ID NO: 1986580 - DNA, 15 bp, Homo sapiens
atttctttacgggac

SEQ ID NO: 1986581 - DNA, 15 bp, Homo sapiens
tttctttacgggact

SEQ ID NO: 1986582 - DNA, 15 bp, Homo sapiens
ttctttacgggactc

SEQ ID NO: 1986583 - DNA, 15 bp, Homo sapiens
tctttacgggactca

SEQ ID NO: 1986584 - DNA, 15 bp, Homo sapiens
ctttacgggactcag

SEQ ID NO: 1986585 - DNA, 15 bp, Homo sapiens
tttacgggactcagc

SEQ ID NO: 1986586 - DNA, 15 bp, Homo sapiens
ttacgggactcagcg

SEQ ID NO: 1986587 - DNA, 15 bp, Homo sapiens
tacgggactcagcgt

SEQ ID NO: 1986588 - DNA, 15 bp, Homo sapiens
acgggactcagcgtt

SEQ ID NO: 1986589 - DNA, 15 bp, Homo sapiens
cgggactcagcgttt

SEQ ID NO: 1986590 - DNA, 15 bp, Homo sapiens
gggactcagcgtttc

SEQ ID NO: 1986591 - DNA, 15 bp, Homo sapiens
ggactcagcgtttca

SEQ ID NO: 1986592 - DNA, 15 bp, Homo sapiens
gactcagcgtttcag

SEQ ID NO: 1986593 - DNA, 15 bp, Homo sapiens
actcagcgtttcaga

SEQ ID NO: 1986594 - DNA, 15 bp, Homo sapiens
ctcagcgtttcagac

SEQ ID NO: 1986595 - DNA, 15 bp, Homo sapiens
tcagcgtttcagacc

SEQ ID NO: 1986596 - DNA, 15 bp, Homo sapiens
cagcgtttcagacct

SEQ ID NO: 1986597 - DNA, 15 bp, Homo sapiens
agcgtttcagaccta

SEQ ID NO: 1986598 - DNA, 15 bp, Homo sapiens
gcgtttcagacctac

SEQ ID NO: 1986599 - DNA, 15 bp, Homo sapiens
cgtttcagacctacc

SEQ ID NO: 1986600 - DNA, 15 bp, Homo sapiens
gtttcagacctacct

SEQ ID NO: 1986601 - DNA, 15 bp, Homo sapiens
tttcagacctacctg

SEQ ID NO: 1986602 - DNA, 15 bp, Homo sapiens
ttcagacctacctgg

SEQ ID NO: 1986603 - DNA, 15 bp, Homo sapiens
tcagacctacctgga

SEQ ID NO: 1986604 - DNA, 15 bp, Homo sapiens
cagacctacctggaa

SEQ ID NO: 1986605 - DNA, 15 bp, Homo sapiens
agacctacctggaaa

SEQ ID NO: 1986606 - DNA, 15 bp, Homo sapiens
gacctacctggaaaa

SEQ ID NO: 1986607 - DNA, 15 bp, Homo sapiens
acctacctggaaaat

SEQ ID NO: 1986608 - DNA, 15 bp, Homo sapiens
cctacctggaaaata

SEQ ID NO: 1986609 - DNA, 15 bp, Homo sapiens
ctacctggaaaatat

SEQ ID NO: 1986610 - DNA, 15 bp, Homo sapiens
tacctggaaaatatc

SEQ ID NO: 1986611 - DNA, 15 bp, Homo sapiens
acctggaaaatatct

SEQ ID NO: 1986612 - DNA, 15 bp, Homo sapiens
cctggaaaatatctt

SEQ ID NO: 1986613 - DNA, 15 bp, Homo sapiens
ctggaaaatatcttg

SEQ ID NO: 1986614 - DNA, 15 bp, Homo sapiens
tggaaaatatcttgg

SEQ ID NO: 1986615 - DNA, 15 bp, Homo sapiens
ggaaaatatcttgga

SEQ ID NO: 1986616 - DNA, 15 bp, Homo sapiens
gaaaatatcttggaa

SEQ ID NO: 1986617 - DNA, 15 bp, Homo sapiens
aaaatatcttggaat

SEQ ID NO: 1986618 - DNA, 15 bp, Homo sapiens
aaatatcttggaata

SEQ ID NO: 1986619 - DNA, 15 bp, Homo sapiens
aatatcttggaatag

SEQ ID NO: 1986620 - DNA, 15 bp, Homo sapiens
atatcttggaataga

SEQ ID NO: 1986621 - DNA, 15 bp, Homo sapiens
tatcttggaatagac

SEQ ID NO: 1986622 - DNA, 15 bp, Homo sapiens
atcttggaatagaca

SEQ ID NO: 1986623 - DNA, 15 bp, Homo sapiens
tcttggaatagacag

SEQ ID NO: 1986624 - DNA, 15 bp, Homo sapiens
cttggaatagacaga

SEQ ID NO: 1986625 - DNA, 15 bp, Homo sapiens
ttggaatagacagag

SEQ ID NO: 1986626 - DNA, 15 bp, Homo sapiens
tggaatagacagagg

SEQ ID NO: 1986627 - DNA, 15 bp, Homo sapiens
ggaatagacagagga

SEQ ID NO: 1986628 - DNA, 15 bp, Homo sapiens
gaatagacagaggaa

SEQ ID NO: 1986629 - DNA, 15 bp, Homo sapiens
aatagacagaggaag

SEQ ID NO: 1986630 - DNA, 15 bp, Homo sapiens
atagacagaggaagt

SEQ ID NO: 1986631 - DNA, 15 bp, Homo sapiens
tagacagaggaagtt

SEQ ID NO: 1986632 - DNA, 15 bp, Homo sapiens
agacagaggaagttg

SEQ ID NO: 1986633 - DNA, 15 bp, Homo sapiens
gacagaggaagttga

SEQ ID NO: 1986634 - DNA, 15 bp, Homo sapiens
acagaggaagttgag

SEQ ID NO: 1986635 - DNA, 15 bp, Homo sapiens
cagaggaagttgaga

SEQ ID NO: 1986636 - DNA, 15 bp, Homo sapiens
agaggaagttgagaa

SEQ ID NO: 1986637 - DNA, 15 bp, Homo sapiens
gaggaagttgagaag

SEQ ID NO: 1986638 - DNA, 15 bp, Homo sapiens
aggaagttgagaaga

SEQ ID NO: 1986639 - DNA, 15 bp, Homo sapiens
ggaagttgagaagaa

SEQ ID NO: 1986640 - DNA, 15 bp, Homo sapiens
gaagttgagaagaag

SEQ ID NO: 1986641 - DNA, 15 bp, Homo sapiens
aagttgagaagaagc

SEQ ID NO: 1986642 - DNA, 15 bp, Homo sapiens
agttgagaagaagct

SEQ ID NO: 1986643 - DNA, 15 bp, Homo sapiens
gttgagaagaagcta

SEQ ID NO: 1986644 - DNA, 15 bp, Homo sapiens
ttgagaagaagctat

SEQ ID NO: 1986645 - DNA, 15 bp, Homo sapiens
tgagaagaagctatg

SEQ ID NO: 1986646 - DNA, 15 bp, Homo sapiens
gagaagaagctatgt

SEQ ID NO: 1986647 - DNA, 15 bp, Homo sapiens
agaagaagctatgta

SEQ ID NO: 1986648 - DNA, 15 bp, Homo sapiens
gaagaagctatgtag

SEQ ID NO: 1986649 - DNA, 15 bp, Homo sapiens
aagaagctatgtaga

SEQ ID NO: 1986650 - DNA, 15 bp, Homo sapiens
agaagctatgtagat

SEQ ID NO: 1986651 - DNA, 15 bp, Homo sapiens
gaagctatgtagata

SEQ ID NO: 1986652 - DNA, 15 bp, Homo sapiens
aagctatgtagataa

SEQ ID NO: 1986653 - DNA, 15 bp, Homo sapiens
agctatgtagataaa

SEQ ID NO: 1986654 - DNA, 15 bp, Homo sapiens
gctatgtagataaaa

SEQ ID NO: 1986655 - DNA, 15 bp, Homo sapiens
ctatgtagataaaat

SEQ ID NO: 1986656 - DNA, 15 bp, Homo sapiens
tatgtagataaaata

SEQ ID NO: 1986657 - DNA, 15 bp, Homo sapiens
gtagataaaatagag

SEQ ID NO: 1986658 - DNA, 15 bp, Homo sapiens
tagataaaatagagt

SEQ ID NO: 1986659 - DNA, 15 bp, Homo sapiens
agataaaatagagtt

SEQ ID NO: 1986660 - DNA, 15 bp, Homo sapiens
gataaaatagagtta

SEQ ID NO: 1986661 - DNA, 15 bp, Homo sapiens
ataaaatagagttat

SEQ ID NO: 1986662 - DNA, 15 bp, Homo sapiens
taaaatagagttatg

SEQ ID NO: 1986663 - DNA, 15 bp, Homo sapiens
aaaatagagttatga

SEQ ID NO: 1986664 - DNA, 15 bp, Homo sapiens
aaatagagttatgaa

SEQ ID NO: 1986665 - DNA, 15 bp, Homo sapiens
aatagagttatgaag

SEQ ID NO: 1986666 - DNA, 15 bp, Homo sapiens
atagagttatgaagc

SEQ ID NO: 1986667 - DNA, 15 bp, Homo sapiens
tagagttatgaagct

SEQ ID NO: 1986668 - DNA, 15 bp, Homo sapiens
agagttatgaagctg

SEQ ID NO: 1986669 - DNA, 15 bp, Homo sapiens
gagttatgaagctgt

SEQ ID NO: 1986670 - DNA, 15 bp, Homo sapiens
agttatgaagctgtc

SEQ ID NO: 1986671 - DNA, 15 bp, Homo sapiens
gttatgaagctgtca

SEQ ID NO: 1986672 - DNA, 15 bp, Homo sapiens
ttatgaagctgtcag

SEQ ID NO: 1986673 - DNA, 15 bp, Homo sapiens
tatgaagctgtcaga

SEQ ID NO: 1986674 - DNA, 15 bp, Homo sapiens
atgaagctgtcagag

SEQ ID NO: 1986675 - DNA, 15 bp, Homo sapiens
tgaagctgtcagaga

SEQ ID NO: 1986676 - DNA, 15 bp, Homo sapiens
gaagctgtcagagac

SEQ ID NO: 1986677 - DNA, 15 bp, Homo sapiens
aagctgtcagagact

SEQ ID NO: 1986678 - DNA, 15 bp, Homo sapiens
agctgtcagagactt

SEQ ID NO: 1986679 - DNA, 15 bp, Homo sapiens
gctgtcagagacttg

SEQ ID NO: 1986680 - DNA, 15 bp, Homo sapiens
ctgtcagagacttga

SEQ ID NO: 1986681 - DNA, 15 bp, Homo sapiens
tgtcagagacttgaa

SEQ ID NO: 1986682 - DNA, 15 bp, Homo sapiens
gtcagagacttgaag

SEQ ID NO: 1986683 - DNA, 15 bp, Homo sapiens
tcagagacttgaagg

SEQ ID NO: 1986684 - DNA, 15 bp, Homo sapiens
cagagacttgaagga

SEQ ID NO: 1986685 - DNA, 15 bp, Homo sapiens
agagacttgaaggaa

SEQ ID NO: 1986686 - DNA, 15 bp, Homo sapiens
gagacttgaaggaat

SEQ ID NO: 1986687 - DNA, 15 bp, Homo sapiens
agacttgaaggaatt

SEQ ID NO: 1986688 - DNA, 15 bp, Homo sapiens
gacttgaaggaattg

SEQ ID NO: 1986689 - DNA, 15 bp, Homo sapiens
acttgaaggaattgt

SEQ ID NO: 1986690 - DNA, 15 bp, Homo sapiens
cttgaaggaattgtt

SEQ ID NO: 1986691 - DNA, 15 bp, Homo sapiens
ttgaaggaattgttt

SEQ ID NO: 1986692 - DNA, 15 bp, Homo sapiens
tgaaggaattgtttt

SEQ ID NO: 1986693 - DNA, 15 bp, Homo sapiens
gaaggaattgtttta

SEQ ID NO: 1986694 - DNA, 15 bp, Homo sapiens
aaggaattgttttat

SEQ ID NO: 1986695 - DNA, 15 bp, Homo sapiens
aggaattgttttatc

SEQ ID NO: 1986696 - DNA, 15 bp, Homo sapiens
ggaattgttttatcc

SEQ ID NO: 1986697 - DNA, 15 bp, Homo sapiens
gaattgttttatcca

SEQ ID NO: 1986698 - DNA, 15 bp, Homo sapiens
aattgttttatccat

SEQ ID NO: 1986699 - DNA, 15 bp, Homo sapiens
attgttttatccatt

SEQ ID NO: 1986700 - DNA, 15 bp, Homo sapiens
ttgttttatccattc

SEQ ID NO: 1986701 - DNA, 15 bp, Homo sapiens
tgttttatccattcg

SEQ ID NO: 1986702 - DNA, 15 bp, Homo sapiens
gttttatccattcgt

SEQ ID NO: 1986703 - DNA, 15 bp, Homo sapiens
ttttatccattcgta

SEQ ID NO: 1986704 - DNA, 15 bp, Homo sapiens
tttatccattcgtat

SEQ ID NO: 1986705 - DNA, 15 bp, Homo sapiens
ttatccattcgtatg

SEQ ID NO: 1986706 - DNA, 15 bp, Homo sapiens
tatccattcgtatgc

SEQ ID NO: 1986707 - DNA, 15 bp, Homo sapiens
atccattcgtatgct

SEQ ID NO: 1986708 - DNA, 15 bp, Homo sapiens
tccattcgtatgctt

SEQ ID NO: 1986709 - DNA, 15 bp, Homo sapiens
ccattcgtatgcttc

SEQ ID NO: 1986710 - DNA, 15 bp, Homo sapiens
cattcgtatgcttcc

SEQ ID NO: 1986711 - DNA, 15 bp, Homo sapiens
attcgtatgcttcca

SEQ ID NO: 1986712 - DNA, 15 bp, Homo sapiens
ttcgtatgcttccag

SEQ ID NO: 1986713 - DNA, 15 bp, Homo sapiens
tcgtatgcttccaga

SEQ ID NO: 1986714 - DNA, 15 bp, Homo sapiens
cgtatgcttccagac

SEQ ID NO: 1986715 - DNA, 15 bp, Homo sapiens
gtatgcttccagacc

SEQ ID NO: 1986716 - DNA, 15 bp, Homo sapiens
tatgcttccagaccc

SEQ ID NO: 1986717 - DNA, 15 bp, Homo sapiens
atgcttccagaccca

SEQ ID NO: 1986718 - DNA, 15 bp, Homo sapiens
tgcttccagacccaa

SEQ ID NO: 1986719 - DNA, 15 bp, Homo sapiens
gcttccagacccaaa

SEQ ID NO: 1986720 - DNA, 15 bp, Homo sapiens
cttccagacccaaag

SEQ ID NO: 1986721 - DNA, 15 bp, Homo sapiens
ttccagacccaaagg

SEQ ID NO: 1986722 - DNA, 15 bp, Homo sapiens
tccagacccaaaggc

SEQ ID NO: 1986723 - DNA, 15 bp, Homo sapiens
ccagacccaaaggca

SEQ ID NO: 1986724 - DNA, 15 bp, Homo sapiens
cagacccaaaggcat

SEQ ID NO: 1986725 - DNA, 15 bp, Homo sapiens
agacccaaaggcatc

SEQ ID NO: 1986726 - DNA, 15 bp, Homo sapiens
gacccaaaggcatct

SEQ ID NO: 1986727 - DNA, 15 bp, Homo sapiens
acccaaaggcatcta

SEQ ID NO: 1986728 - DNA, 15 bp, Homo sapiens
cccaaaggcatctaa

SEQ ID NO: 1986729 - DNA, 15 bp, Homo sapiens
ccaaaggcatctaaa

SEQ ID NO: 1986730 - DNA, 15 bp, Homo sapiens
caaaggcatctaaac

SEQ ID NO: 1986731 - DNA, 15 bp, Homo sapiens
aaaggcatctaaact

SEQ ID NO: 1986732 - DNA, 15 bp, Homo sapiens
aaggcatctaaacta

SEQ ID NO: 1986733 - DNA, 15 bp, Homo sapiens
aggcatctaaactaa

SEQ ID NO: 1986734 - DNA, 15 bp, Homo sapiens
ggcatctaaactaaa

SEQ ID NO: 1986735 - DNA, 15 bp, Homo sapiens
gcatctaaactaaac

SEQ ID NO: 1986736 - DNA, 15 bp, Homo sapiens
catctaaactaaact

SEQ ID NO: 1986737 - DNA, 15 bp, Homo sapiens
atctaaactaaacta

SEQ ID NO: 1986738 - DNA, 15 bp, Homo sapiens
tctaaactaaactac

SEQ ID NO: 1986739 - DNA, 15 bp, Homo sapiens
ctaaactaaactact

SEQ ID NO: 1986740 - DNA, 15 bp, Homo sapiens
taaactaaactacta

SEQ ID NO: 1986741 - DNA, 15 bp, Homo sapiens
aaactaaactactaa

SEQ ID NO: 1986742 - DNA, 15 bp, Homo sapiens
aactaaactactaat

SEQ ID NO: 1986743 - DNA, 15 bp, Homo sapiens
actaaactactaatc

SEQ ID NO: 1986744 - DNA, 15 bp, Homo sapiens
ctaaactactaatcc

SEQ ID NO: 1986745 - DNA, 15 bp, Homo sapiens
taaactactaatcca

SEQ ID NO: 1986746 - DNA, 15 bp, Homo sapiens
aaactactaatccat

SEQ ID NO: 1986747 - DNA, 15 bp, Homo sapiens
aactactaatccatc

SEQ ID NO: 1986748 - DNA, 15 bp, Homo sapiens
actactaatccatct

SEQ ID NO: 1986749 - DNA, 15 bp, Homo sapiens
ctactaatccatctg

SEQ ID NO: 1986750 - DNA, 15 bp, Homo sapiens
tactaatccatctga

SEQ ID NO: 1986751 - DNA, 15 bp, Homo sapiens
actaatccatctgaa

SEQ ID NO: 1986752 - DNA, 15 bp, Homo sapiens
ctaatccatctgaag

SEQ ID NO: 1986753 - DNA, 15 bp, Homo sapiens
taatccatctgaagt

SEQ ID NO: 1986754 - DNA, 15 bp, Homo sapiens
aatccatctgaagta

SEQ ID NO: 1986755 - DNA, 15 bp, Homo sapiens
atccatctgaagtat

SEQ ID NO: 1986756 - DNA, 15 bp, Homo sapiens
tccatctgaagtata

SEQ ID NO: 1986757 - DNA, 15 bp, Homo sapiens
ccatctgaagtataa

SEQ ID NO: 1986758 - DNA, 15 bp, Homo sapiens
catctgaagtataat

SEQ ID NO: 1986759 - DNA, 15 bp, Homo sapiens
atctgaagtataatg

SEQ ID NO: 1986760 - DNA, 15 bp, Homo sapiens
tctgaagtataatgt

SEQ ID NO: 1986761 - DNA, 15 bp, Homo sapiens
ctgaagtataatgtt

SEQ ID NO: 1986762 - DNA, 15 bp, Homo sapiens
tgaagtataatgtta

SEQ ID NO: 1986763 - DNA, 15 bp, Homo sapiens
gaagtataatgttac

SEQ ID NO: 1986764 - DNA, 15 bp, Homo sapiens
aagtataatgttact

SEQ ID NO: 1986765 - DNA, 15 bp, Homo sapiens
agtataatgttactg

SEQ ID NO: 1986766 - DNA, 15 bp, Homo sapiens
gtataatgttactgc

SEQ ID NO: 1986767 - DNA, 15 bp, Homo sapiens
tataatgttactgca

SEQ ID NO: 1986768 - DNA, 15 bp, Homo sapiens
ataatgttactgcat

SEQ ID NO: 1986769 - DNA, 15 bp, Homo sapiens
taatgttactgcata

SEQ ID NO: 1986770 - DNA, 15 bp, Homo sapiens
aatgttactgcatat

SEQ ID NO: 1986771 - DNA, 15 bp, Homo sapiens
atgttactgcatata

SEQ ID NO: 1986772 - DNA, 15 bp, Homo sapiens
tgttactgcatataa

SEQ ID NO: 1986773 - DNA, 15 bp, Homo sapiens
gttactgcatataaa

SEQ ID NO: 1986774 - DNA, 15 bp, Homo sapiens
ttactgcatataaaa

SEQ ID NO: 1986775 - DNA, 15 bp, Homo sapiens
tactgcatataaaag

SEQ ID NO: 1986776 - DNA, 15 bp, Homo sapiens
actgcatataaaaga

SEQ ID NO: 1986777 - DNA, 15 bp, Homo sapiens
ctgcatataaaagat

SEQ ID NO: 1986778 - DNA, 15 bp, Homo sapiens
tgcatataaaagatt

SEQ ID NO: 1986779 - DNA, 15 bp, Homo sapiens
gcatataaaagatta

SEQ ID NO: 1986780 - DNA, 15 bp, Homo sapiens
catataaaagattac

SEQ ID NO: 1986781 - DNA, 15 bp, Homo sapiens
atataaaagattaca

SEQ ID NO: 1986782 - DNA, 15 bp, Homo sapiens
tataaaagattacat

SEQ ID NO: 1986783 - DNA, 15 bp, Homo sapiens
ataaaagattacatt

SEQ ID NO: 1986784 - DNA, 15 bp, Homo sapiens
taaaagattacatta

SEQ ID NO: 1986785 - DNA, 15 bp, Homo sapiens
aaaagattacattat

SEQ ID NO: 1986786 - DNA, 15 bp, Homo sapiens
aaagattacattatt

SEQ ID NO: 1986787 - DNA, 15 bp, Homo sapiens
aagattacattattg

SEQ ID NO: 1986788 - DNA, 15 bp, Homo sapiens
agattacattattga

SEQ ID NO: 1986789 - DNA, 15 bp, Homo sapiens
gattacattattgat

SEQ ID NO: 1986790 - DNA, 15 bp, Homo sapiens
attacattattgata

SEQ ID NO: 1986791 - DNA, 15 bp, Homo sapiens
ttacattattgatag

SEQ ID NO: 1986792 - DNA, 15 bp, Homo sapiens
tacattattgataga

SEQ ID NO: 1986793 - DNA, 15 bp, Homo sapiens
acattattgatagag

SEQ ID NO: 1986794 - DNA, 15 bp, Homo sapiens
cattattgatagagc

SEQ ID NO: 1986795 - DNA, 15 bp, Homo sapiens
attattgatagagcg

SEQ ID NO: 1986796 - DNA, 15 bp, Homo sapiens
ttattgatagagcgt

SEQ ID NO: 1986797 - DNA, 15 bp, Homo sapiens
tattgatagagcgtt

SEQ ID NO: 1986798 - DNA, 15 bp, Homo sapiens
attgatagagcgtta

SEQ ID NO: 1986799 - DNA, 15 bp, Homo sapiens
ttgatagagcgttag

SEQ ID NO: 1986800 - DNA, 15 bp, Homo sapiens
tgatagagcgttaga

SEQ ID NO: 1986801 - DNA, 15 bp, Homo sapiens
gatagagcgttagat

SEQ ID NO: 1986802 - DNA, 15 bp, Homo sapiens
atagagcgttagatt

SEQ ID NO: 1986803 - DNA, 15 bp, Homo sapiens
tagagcgttagattt

SEQ ID NO: 1986804 - DNA, 15 bp, Homo sapiens
agagcgttagattta

SEQ ID NO: 1986805 - DNA, 15 bp, Homo sapiens
gagcgttagatttaa

SEQ ID NO: 1986806 - DNA, 15 bp, Homo sapiens
agcgttagatttaaa

SEQ ID NO: 1986807 - DNA, 15 bp, Homo sapiens
gcgttagatttaaaa

SEQ ID NO: 1986808 - DNA, 15 bp, Homo sapiens
cgttagatttaaaac

SEQ ID NO: 1986809 - DNA, 15 bp, Homo sapiens
gttagatttaaaact

SEQ ID NO: 1986810 - DNA, 15 bp, Homo sapiens
ttagatttaaaactt

SEQ ID NO: 1986811 - DNA, 15 bp, Homo sapiens
tagatttaaaacttg

SEQ ID NO: 1986812 - DNA, 15 bp, Homo sapiens
agatttaaaacttgg

SEQ ID NO: 1986813 - DNA, 15 bp, Homo sapiens
gatttaaaacttggt

SEQ ID NO: 1986814 - DNA, 15 bp, Homo sapiens
atttaaaacttggta

SEQ ID NO: 1986815 - DNA, 15 bp, Homo sapiens
tttaaaacttggtag

SEQ ID NO: 1986816 - DNA, 15 bp, Homo sapiens
ttaaaacttggtaga

SEQ ID NO: 1986817 - DNA, 15 bp, Homo sapiens
taaaacttggtagaa

SEQ ID NO: 1986818 - DNA, 15 bp, Homo sapiens
aaaacttggtagaaa

SEQ ID NO: 1986819 - DNA, 15 bp, Homo sapiens
aaacttggtagaaaa

SEQ ID NO: 1986820 - DNA, 15 bp, Homo sapiens
aacttggtagaaaag

SEQ ID NO: 1986821 - DNA, 15 bp, Homo sapiens
acttggtagaaaaga

SEQ ID NO: 1986822 - DNA, 15 bp, Homo sapiens
cttggtagaaaagac

SEQ ID NO: 1986823 - DNA, 15 bp, Homo sapiens
ttggtagaaaagact

SEQ ID NO: 1986824 - DNA, 15 bp, Homo sapiens
tggtagaaaagactc

SEQ ID NO: 1986825 - DNA, 15 bp, Homo sapiens
ggtagaaaagactct

SEQ ID NO: 1986826 - DNA, 15 bp, Homo sapiens
gtagaaaagactctg

SEQ ID NO: 1986827 - DNA, 15 bp, Homo sapiens
tagaaaagactctgt

SEQ ID NO: 1986828 - DNA, 15 bp, Homo sapiens
agaaaagactctgta

SEQ ID NO: 1986829 - DNA, 15 bp, Homo sapiens
gaaaagactctgtaa

SEQ ID NO: 1986830 - DNA, 15 bp, Homo sapiens
aaaagactctgtaat

SEQ ID NO: 1986831 - DNA, 15 bp, Homo sapiens
aaagactctgtaatt

SEQ ID NO: 1986832 - DNA, 15 bp, Homo sapiens
aagactctgtaattt

SEQ ID NO: 1986833 - DNA, 15 bp, Homo sapiens
agactctgtaatttt

SEQ ID NO: 1986834 - DNA, 15 bp, Homo sapiens
gactctgtaatttta

SEQ ID NO: 1986835 - DNA, 15 bp, Homo sapiens
actctgtaattttaa

SEQ ID NO: 1986836 - DNA, 15 bp, Homo sapiens
ctctgtaattttaag

SEQ ID NO: 1986837 - DNA, 15 bp, Homo sapiens
tctgtaattttaaga

SEQ ID NO: 1986838 - DNA, 15 bp, Homo sapiens
ctgtaattttaagaa

SEQ ID NO: 1986839 - DNA, 15 bp, Homo sapiens
tgtaattttaagaaa

SEQ ID NO: 1986840 - DNA, 15 bp, Homo sapiens
gtaattttaagaaag

SEQ ID NO: 1986841 - DNA, 15 bp, Homo sapiens
taattttaagaaagg

SEQ ID NO: 1986842 - DNA, 15 bp, Homo sapiens
aattttaagaaagga

SEQ ID NO: 1986843 - DNA, 15 bp, Homo sapiens
attttaagaaaggat

SEQ ID NO: 1986844 - DNA, 15 bp, Homo sapiens
ttttaagaaaggatt

SEQ ID NO: 1986845 - DNA, 15 bp, Homo sapiens
tttaagaaaggattt

SEQ ID NO: 1986846 - DNA, 15 bp, Homo sapiens
ttaagaaaggattta

SEQ ID NO: 1986847 - DNA, 15 bp, Homo sapiens
taagaaaggatttaa

SEQ ID NO: 1986848 - DNA, 15 bp, Homo sapiens
aagaaaggatttaaa

SEQ ID NO: 1986849 - DNA, 15 bp, Homo sapiens
agaaaggatttaaaa

SEQ ID NO: 1986850 - DNA, 15 bp, Homo sapiens
gaaaggatttaaaag

SEQ ID NO: 1986851 - DNA, 15 bp, Homo sapiens
aaaggatttaaaagg

SEQ ID NO: 1986852 - DNA, 15 bp, Homo sapiens
aaggatttaaaaggc

SEQ ID NO: 1986853 - DNA, 15 bp, Homo sapiens
aggatttaaaaggca

SEQ ID NO: 1986854 - DNA, 15 bp, Homo sapiens
ggatttaaaaggcac

SEQ ID NO: 1986855 - DNA, 15 bp, Homo sapiens
gatttaaaaggcaca

SEQ ID NO: 1986856 - DNA, 15 bp, Homo sapiens
atttaaaaggcacat

SEQ ID NO: 1986857 - DNA, 15 bp, Homo sapiens
tttaaaaggcacata

SEQ ID NO: 1986858 - DNA, 15 bp, Homo sapiens
ttaaaaggcacatag

SEQ ID NO: 1986859 - DNA, 15 bp, Homo sapiens
taaaaggcacataga

SEQ ID NO: 1986860 - DNA, 15 bp, Homo sapiens
aaaaggcacatagaa

SEQ ID NO: 1986861 - DNA, 15 bp, Homo sapiens
aaaggcacatagaag

SEQ ID NO: 1986862 - DNA, 15 bp, Homo sapiens
aaggcacatagaaga

SEQ ID NO: 1986863 - DNA, 15 bp, Homo sapiens
aggcacatagaagac

SEQ ID NO: 1986864 - DNA, 15 bp, Homo sapiens
ggcacatagaagact

SEQ ID NO: 1986865 - DNA, 15 bp, Homo sapiens
gcacatagaagactt

SEQ ID NO: 1986866 - DNA, 15 bp, Homo sapiens
cacatagaagacttc

SEQ ID NO: 1986867 - DNA, 15 bp, Homo sapiens
acatagaagacttcc

SEQ ID NO: 1986868 - DNA, 15 bp, Homo sapiens
catagaagacttcca

SEQ ID NO: 1986869 - DNA, 15 bp, Homo sapiens
atagaagacttccaa

SEQ ID NO: 1986870 - DNA, 15 bp, Homo sapiens
tagaagacttccaaa

SEQ ID NO: 1986871 - DNA, 15 bp, Homo sapiens
agaagacttccaaag

SEQ ID NO: 1986872 - DNA, 15 bp, Homo sapiens
gaagacttccaaagc

SEQ ID NO: 1986873 - DNA, 15 bp, Homo sapiens
aagacttccaaagct

SEQ ID NO: 1986874 - DNA, 15 bp, Homo sapiens
agacttccaaagctg

SEQ ID NO: 1986875 - DNA, 15 bp, Homo sapiens
gacttccaaagctga

SEQ ID NO: 1986876 - DNA, 15 bp, Homo sapiens
acttccaaagctgaa

SEQ ID NO: 1986877 - DNA, 15 bp, Homo sapiens
cttccaaagctgaac

SEQ ID NO: 1986878 - DNA, 15 bp, Homo sapiens
ttccaaagctgaacc

SEQ ID NO: 1986879 - DNA, 15 bp, Homo sapiens
tccaaagctgaacct

SEQ ID NO: 1986880 - DNA, 15 bp, Homo sapiens
ccaaagctgaacctt

SEQ ID NO: 1986881 - DNA, 15 bp, Homo sapiens
caaagctgaaccttg

SEQ ID NO: 1986882 - DNA, 15 bp, Homo sapiens
aaagctgaaccttgt

SEQ ID NO: 1986883 - DNA, 15 bp, Homo sapiens
aagctgaaccttgtg

SEQ ID NO: 1986884 - DNA, 15 bp, Homo sapiens
agctgaaccttgtgg

SEQ ID NO: 1986885 - DNA, 15 bp, Homo sapiens
gctgaaccttgtgga

SEQ ID NO: 1986886 - DNA, 15 bp, Homo sapiens
ctgaaccttgtggac

SEQ ID NO: 1986887 - DNA, 15 bp, Homo sapiens
tgaaccttgtggaca

SEQ ID NO: 1986888 - DNA, 15 bp, Homo sapiens
gaaccttgtggacag

SEQ ID NO: 1986889 - DNA, 15 bp, Homo sapiens
aaccttgtggacagc

SEQ ID NO: 1986890 - DNA, 15 bp, Homo sapiens
accttgtggacagca

SEQ ID NO: 1986891 - DNA, 15 bp, Homo sapiens
ccttgtggacagcag

SEQ ID NO: 1986892 - DNA, 15 bp, Homo sapiens
cttgtggacagcaga

SEQ ID NO: 1986893 - DNA, 15 bp, Homo sapiens
ttgtggacagcagaa

SEQ ID NO: 1986894 - DNA, 15 bp, Homo sapiens
tgtggacagcagaat

SEQ ID NO: 1986895 - DNA, 15 bp, Homo sapiens
gtggacagcagaatc

SEQ ID NO: 1986896 - DNA, 15 bp, Homo sapiens
tggacagcagaatct

SEQ ID NO: 1986897 - DNA, 15 bp, Homo sapiens
ggacagcagaatctg

SEQ ID NO: 1986898 - DNA, 15 bp, Homo sapiens
gacagcagaatctgg

SEQ ID NO: 1986899 - DNA, 15 bp, Homo sapiens
acagcagaatctgga

SEQ ID NO: 1986900 - DNA, 15 bp, Homo sapiens
cagcagaatctggat

SEQ ID NO: 1986901 - DNA, 15 bp, Homo sapiens
agcagaatctggatg

SEQ ID NO: 1986902 - DNA, 15 bp, Homo sapiens
gcagaatctggatgt

SEQ ID NO: 1986903 - DNA, 15 bp, Homo sapiens
cagaatctggatgta

SEQ ID NO: 1986904 - DNA, 15 bp, Homo sapiens
agaatctggatgtag

SEQ ID NO: 1986905 - DNA, 15 bp, Homo sapiens
gaatctggatgtagg

SEQ ID NO: 1986906 - DNA, 15 bp, Homo sapiens
aatctggatgtagga

SEQ ID NO: 1986907 - DNA, 15 bp, Homo sapiens
atctggatgtaggaa

SEQ ID NO: 1986908 - DNA, 15 bp, Homo sapiens
tctggatgtaggaaa

SEQ ID NO: 1986909 - DNA, 15 bp, Homo sapiens
ctggatgtaggaaat

SEQ ID NO: 1986910 - DNA, 15 bp, Homo sapiens
tggatgtaggaaatt

SEQ ID NO: 1986911 - DNA, 15 bp, Homo sapiens
ggatgtaggaaattg

SEQ ID NO: 1986912 - DNA, 15 bp, Homo sapiens
gatgtaggaaattga

SEQ ID NO: 1986913 - DNA, 15 bp, Homo sapiens
atgtaggaaattgaa

SEQ ID NO: 1986914 - DNA, 15 bp, Homo sapiens
tgtaggaaattgaag

SEQ ID NO: 1986915 - DNA, 15 bp, Homo sapiens
gtaggaaattgaagg

SEQ ID NO: 1986916 - DNA, 15 bp, Homo sapiens
taggaaattgaagga

SEQ ID NO: 1986917 - DNA, 15 bp, Homo sapiens
aggaaattgaaggat

SEQ ID NO: 1986918 - DNA, 15 bp, Homo sapiens
ggaaattgaaggatc

SEQ ID NO: 1986919 - DNA, 15 bp, Homo sapiens
gaaattgaaggatcc

SEQ ID NO: 1986920 - DNA, 15 bp, Homo sapiens
aaattgaaggatcca

SEQ ID NO: 1986921 - DNA, 15 bp, Homo sapiens
aattgaaggatccac

SEQ ID NO: 1986922 - DNA, 15 bp, Homo sapiens
attgaaggatccacg

SEQ ID NO: 1986923 - DNA, 15 bp, Homo sapiens
ttgaaggatccacgc

SEQ ID NO: 1986924 - DNA, 15 bp, Homo sapiens
tgaaggatccacgcc

SEQ ID NO: 1986925 - DNA, 15 bp, Homo sapiens
gaaggatccacgccg

SEQ ID NO: 1986926 - DNA, 15 bp, Homo sapiens
aaggatccacgccgc

SEQ ID NO: 1986927 - DNA, 15 bp, Homo sapiens
aggatccacgccgca

SEQ ID NO: 1986928 - DNA, 15 bp, Homo sapiens
ggatccacgccgcaa

SEQ ID NO: 1986929 - DNA, 15 bp, Homo sapiens
gatccacgccgcaat

SEQ ID NO: 1986930 - DNA, 15 bp, Homo sapiens
atccacgccgcaatt

SEQ ID NO: 1986931 - DNA, 15 bp, Homo sapiens
tccacgccgcaattc

SEQ ID NO: 1986932 - DNA, 15 bp, Homo sapiens
ccacgccgcaattct

SEQ ID NO: 1986933 - DNA, 15 bp, Homo sapiens
cacgccgcaattctc

SEQ ID NO: 1986934 - DNA, 15 bp, Homo sapiens
acgccgcaattctcc

SEQ ID NO: 1986935 - DNA, 15 bp, Homo sapiens
cgccgcaattctcct

SEQ ID NO: 1986936 - DNA, 15 bp, Homo sapiens
gccgcaattctcctt

SEQ ID NO: 1986937 - DNA, 15 bp, Homo sapiens
ccgcaattctcctta

SEQ ID NO: 1986938 - DNA, 15 bp, Homo sapiens
cgcaattctccttaa

SEQ ID NO: 1986939 - DNA, 15 bp, Homo sapiens
gcaattctccttaaa

SEQ ID NO: 1986940 - DNA, 15 bp, Homo sapiens
caattctccttaaat

SEQ ID NO: 1986941 - DNA, 15 bp, Homo sapiens
aattctccttaaatt

SEQ ID NO: 1986942 - DNA, 15 bp, Homo sapiens
attctccttaaattt

SEQ ID NO: 1986943 - DNA, 15 bp, Homo sapiens
ttctccttaaatttt

SEQ ID NO: 1986944 - DNA, 15 bp, Homo sapiens
tctccttaaatttta

SEQ ID NO: 1986945 - DNA, 15 bp, Homo sapiens
ctccttaaattttaa

SEQ ID NO: 1986946 - DNA, 15 bp, Homo sapiens
tccttaaattttaaa

SEQ ID NO: 1986947 - DNA, 15 bp, Homo sapiens
ccttaaattttaaaa

SEQ ID NO: 1986948 - DNA, 15 bp, Homo sapiens
cttaaattttaaaaa

SEQ ID NO: 1986949 - DNA, 15 bp, Homo sapiens
ttaaattttaaaaat

SEQ ID NO: 1986950 - DNA, 15 bp, Homo sapiens
taaattttaaaaatt

SEQ ID NO: 1986951 - DNA, 15 bp, Homo sapiens
aaattttaaaaatta

SEQ ID NO: 1986952 - DNA, 15 bp, Homo sapiens
aattttaaaaattaa

SEQ ID NO: 1986953 - DNA, 15 bp, Homo sapiens
attttaaaaattaaa

SEQ ID NO: 1986954 - DNA, 15 bp, Homo sapiens
ttttaaaaattaaaa

SEQ ID NO: 1986955 - DNA, 15 bp, Homo sapiens
tttaaaaattaaaaa

SEQ ID NO: 1986956 - DNA, 15 bp, Homo sapiens
taaaaattaaaaatt

SEQ ID NO: 1986957 - DNA, 15 bp, Homo sapiens
aaaaattaaaaattt

SEQ ID NO: 1986958 - DNA, 15 bp, Homo sapiens
aaaattaaaaatttt

SEQ ID NO: 1986959 - DNA, 15 bp, Homo sapiens
aaattaaaaattttt

SEQ ID NO: 1986960 - DNA, 15 bp, Homo sapiens
aattaaaaatttttt

SEQ ID NO: 1986961 - DNA, 15 bp, Homo sapiens
attaaaaattttttt

SEQ ID NO: 1986962 - DNA, 15 bp, Homo sapiens
ttaaaaatttttttc

SEQ ID NO: 1986963 - DNA, 15 bp, Homo sapiens
taaaaatttttttca

SEQ ID NO: 1986964 - DNA, 15 bp, Homo sapiens
aaaaatttttttcag

SEQ ID NO: 1986965 - DNA, 15 bp, Homo sapiens
aaaatttttttcagt

SEQ ID NO: 1986966 - DNA, 15 bp, Homo sapiens
aaatttttttcagtt

SEQ ID NO: 1986967 - DNA, 15 bp, Homo sapiens
aatttttttcagttt

SEQ ID NO: 1986968 - DNA, 15 bp, Homo sapiens
atttttttcagtttt

SEQ ID NO: 1986969 - DNA, 15 bp, Homo sapiens
tttttttcagttttt

SEQ ID NO: 1986970 - DNA, 15 bp, Homo sapiens
ttttttcagtttttt

SEQ ID NO: 1986971 - DNA, 15 bp, Homo sapiens
tttttcagttttttc

SEQ ID NO: 1986972 - DNA, 15 bp, Homo sapiens
ttttcagttttttct

SEQ ID NO: 1986973 - DNA, 15 bp, Homo sapiens
tttcagttttttctt

SEQ ID NO: 1986974 - DNA, 15 bp, Homo sapiens
ttcagttttttctta

SEQ ID NO: 1986975 - DNA, 15 bp, Homo sapiens
tcagttttttcttaa

SEQ ID NO: 1986976 - DNA, 15 bp, Homo sapiens
cagttttttcttaat

SEQ ID NO: 1986977 - DNA, 15 bp, Homo sapiens
agttttttcttaatt

SEQ ID NO: 1986978 - DNA, 15 bp, Homo sapiens
gttttttcttaattt

SEQ ID NO: 1986979 - DNA, 15 bp, Homo sapiens
ttttttcttaatttt

SEQ ID NO: 1986980 - DNA, 15 bp, Homo sapiens
tttttcttaatttta

SEQ ID NO: 1986981 - DNA, 15 bp, Homo sapiens
ttttcttaattttat

SEQ ID NO: 1986982 - DNA, 15 bp, Homo sapiens
tttcttaattttatt

SEQ ID NO: 1986983 - DNA, 15 bp, Homo sapiens
ttcttaattttattt

SEQ ID NO: 1986984 - DNA, 15 bp, Homo sapiens
tcttaattttatttt

SEQ ID NO: 1986985 - DNA, 15 bp, Homo sapiens
cttaattttattttt

SEQ ID NO: 1986986 - DNA, 15 bp, Homo sapiens
ttaattttatttttt

SEQ ID NO: 1986987 - DNA, 15 bp, Homo sapiens
taattttattttttt

SEQ ID NO: 1986988 - DNA, 15 bp, Homo sapiens
aattttattttttta

SEQ ID NO: 1986989 - DNA, 15 bp, Homo sapiens
attttatttttttac

SEQ ID NO: 1986990 - DNA, 15 bp, Homo sapiens
ttttatttttttact

SEQ ID NO: 1986991 - DNA, 15 bp, Homo sapiens
tttatttttttactt

SEQ ID NO: 1986992 - DNA, 15 bp, Homo sapiens
ttatttttttacttc

SEQ ID NO: 1986993 - DNA, 15 bp, Homo sapiens
tatttttttacttct

SEQ ID NO: 1986994 - DNA, 15 bp, Homo sapiens
atttttttacttctt

SEQ ID NO: 1986995 - DNA, 15 bp, Homo sapiens
tttttttacttctta

SEQ ID NO: 1986996 - DNA, 15 bp, Homo sapiens
ttttttacttcttac

SEQ ID NO: 1986997 - DNA, 15 bp, Homo sapiens
tttttacttcttacc

SEQ ID NO: 1986998 - DNA, 15 bp, Homo sapiens
ttttacttcttacct

SEQ ID NO: 1986999 - DNA, 15 bp, Homo sapiens
tttacttcttacctg

SEQ ID NO: 1987000 - DNA, 15 bp, Homo sapiens
ttacttcttacctgt

SEQ ID NO: 1987001 - DNA, 15 bp, Homo sapiens
tacttcttacctgtt

SEQ ID NO: 1987002 - DNA, 15 bp, Homo sapiens
acttcttacctgttc

SEQ ID NO: 1987003 - DNA, 15 bp, Homo sapiens
cttcttacctgttca

SEQ ID NO: 1987004 - DNA, 15 bp, Homo sapiens
ttcttacctgttcat

SEQ ID NO: 1987005 - DNA, 15 bp, Homo sapiens
tcttacctgttcatc

SEQ ID NO: 1987006 - DNA, 15 bp, Homo sapiens
cttacctgttcatct

SEQ ID NO: 1987007 - DNA, 15 bp, Homo sapiens
ttacctgttcatctc

SEQ ID NO: 1987008 - DNA, 15 bp, Homo sapiens
tacctgttcatctct

SEQ ID NO: 1987009 - DNA, 15 bp, Homo sapiens
acctgttcatctcta

SEQ ID NO: 1987010 - DNA, 15 bp, Homo sapiens
cctgttcatctctag

SEQ ID NO: 1987011 - DNA, 15 bp, Homo sapiens
ctgttcatctctagg

SEQ ID NO: 1987012 - DNA, 15 bp, Homo sapiens
tgttcatctctaggc

SEQ ID NO: 1987013 - DNA, 15 bp, Homo sapiens
gttcatctctaggct

SEQ ID NO: 1987014 - DNA, 15 bp, Homo sapiens
ttcatctctaggctt

SEQ ID NO: 1987015 - DNA, 15 bp, Homo sapiens
tcatctctaggctta

SEQ ID NO: 1987016 - DNA, 15 bp, Homo sapiens
catctctaggcttat

SEQ ID NO: 1987017 - DNA, 15 bp, Homo sapiens
atctctaggcttatt

SEQ ID NO: 1987018 - DNA, 15 bp, Homo sapiens
tctctaggcttattt

SEQ ID NO: 1987019 - DNA, 15 bp, Homo sapiens
ctctaggcttatttg

SEQ ID NO: 1987020 - DNA, 15 bp, Homo sapiens
tctaggcttatttgc

SEQ ID NO: 1987021 - DNA, 15 bp, Homo sapiens
ctaggcttatttgcc

SEQ ID NO: 1987022 - DNA, 15 bp, Homo sapiens
taggcttatttgcca

SEQ ID NO: 1987023 - DNA, 15 bp, Homo sapiens
aggcttatttgccat

SEQ ID NO: 1987024 - DNA, 15 bp, Homo sapiens
ggcttatttgccata

SEQ ID NO: 1987025 - DNA, 15 bp, Homo sapiens
gcttatttgccatat

SEQ ID NO: 1987026 - DNA, 15 bp, Homo sapiens
cttatttgccatatt

SEQ ID NO: 1987027 - DNA, 15 bp, Homo sapiens
ttatttgccatattg

SEQ ID NO: 1987028 - DNA, 15 bp, Homo sapiens
tatttgccatattgg

SEQ ID NO: 1987029 - DNA, 15 bp, Homo sapiens
atttgccatattgga

SEQ ID NO: 1987030 - DNA, 15 bp, Homo sapiens
tttgccatattggaa

SEQ ID NO: 1987031 - DNA, 15 bp, Homo sapiens
ttgccatattggaaa

SEQ ID NO: 1987032 - DNA, 15 bp, Homo sapiens
tgccatattggaaaa

SEQ ID NO: 1987033 - DNA, 15 bp, Homo sapiens
gccatattggaaaaa

SEQ ID NO: 1987034 - DNA, 15 bp, Homo sapiens
ccatattggaaaaag

SEQ ID NO: 1987035 - DNA, 15 bp, Homo sapiens
catattggaaaaaga

SEQ ID NO: 1987036 - DNA, 15 bp, Homo sapiens
atattggaaaaagat

SEQ ID NO: 1987037 - DNA, 15 bp, Homo sapiens
tattggaaaaagata

SEQ ID NO: 1987038 - DNA, 15 bp, Homo sapiens
attggaaaaagatac

SEQ ID NO: 1987039 - DNA, 15 bp, Homo sapiens
ttggaaaaagatact

SEQ ID NO: 1987040 - DNA, 15 bp, Homo sapiens
tggaaaaagatactt

SEQ ID NO: 1987041 - DNA, 15 bp, Homo sapiens
ggaaaaagatactta

SEQ ID NO: 1987042 - DNA, 15 bp, Homo sapiens
gaaaaagatacttaa

SEQ ID NO: 1987043 - DNA, 15 bp, Homo sapiens
aaaaagatacttaag

SEQ ID NO: 1987044 - DNA, 15 bp, Homo sapiens
aaaagatacttaaga

SEQ ID NO: 1987045 - DNA, 15 bp, Homo sapiens
aaagatacttaagag

SEQ ID NO: 1987046 - DNA, 15 bp, Homo sapiens
aagatacttaagaga

SEQ ID NO: 1987047 - DNA, 15 bp, Homo sapiens
agatacttaagagag

SEQ ID NO: 1987048 - DNA, 15 bp, Homo sapiens
gatacttaagagagg

SEQ ID NO: 1987049 - DNA, 15 bp, Homo sapiens
atacttaagagagga

SEQ ID NO: 1987050 - DNA, 15 bp, Homo sapiens
tacttaagagaggaa

SEQ ID NO: 1987051 - DNA, 15 bp, Homo sapiens
acttaagagaggaat

SEQ ID NO: 1987052 - DNA, 15 bp, Homo sapiens
cttaagagaggaatg

SEQ ID NO: 1987053 - DNA, 15 bp, Homo sapiens
ttaagagaggaatga

SEQ ID NO: 1987054 - DNA, 15 bp, Homo sapiens
taagagaggaatgat

SEQ ID NO: 1987055 - DNA, 15 bp, Homo sapiens
aagagaggaatgatt

SEQ ID NO: 1987056 - DNA, 15 bp, Homo sapiens
agagaggaatgattt

SEQ ID NO: 1987057 - DNA, 15 bp, Homo sapiens
gagaggaatgatttt

SEQ ID NO: 1987058 - DNA, 15 bp, Homo sapiens
agaggaatgattttg

SEQ ID NO: 1987059 - DNA, 15 bp, Homo sapiens
gaggaatgattttgg

SEQ ID NO: 1987060 - DNA, 15 bp, Homo sapiens
aggaatgattttggg

SEQ ID NO: 1987061 - DNA, 15 bp, Homo sapiens
ggaatgattttgggc

SEQ ID NO: 1987062 - DNA, 15 bp, Homo sapiens
gaatgattttgggct

SEQ ID NO: 1987063 - DNA, 15 bp, Homo sapiens
aatgattttgggctg

SEQ ID NO: 1987064 - DNA, 15 bp, Homo sapiens
atgattttgggctgg

SEQ ID NO: 1987065 - DNA, 15 bp, Homo sapiens
tgattttgggctggg

SEQ ID NO: 1987066 - DNA, 15 bp, Homo sapiens
gattttgggctgggc

SEQ ID NO: 1987067 - DNA, 15 bp, Homo sapiens
attttgggctgggcg

SEQ ID NO: 1987068 - DNA, 15 bp, Homo sapiens
ttttgggctgggcgc

SEQ ID NO: 1987069 - DNA, 15 bp, Homo sapiens
tttgggctgggcgcg

SEQ ID NO: 1987070 - DNA, 15 bp, Homo sapiens
ttgggctgggcgcgg

SEQ ID NO: 1987071 - DNA, 15 bp, Homo sapiens
tgggctgggcgcggt

SEQ ID NO: 1987072 - DNA, 15 bp, Homo sapiens
gggctgggcgcggtg

SEQ ID NO: 1987073 - DNA, 15 bp, Homo sapiens
ccagcactttgggat

SEQ ID NO: 1987074 - DNA, 15 bp, Homo sapiens
cagcactttgggatg

SEQ ID NO: 1987075 - DNA, 15 bp, Homo sapiens
agcactttgggatgc

SEQ ID NO: 1987076 - DNA, 15 bp, Homo sapiens
gcactttgggatgcc

SEQ ID NO: 1987077 - DNA, 15 bp, Homo sapiens
cactttgggatgcca

SEQ ID NO: 1987078 - DNA, 15 bp, Homo sapiens
catggagaaacctcg

SEQ ID NO: 1987079 - DNA, 15 bp, Homo sapiens
atggagaaacctcgt

SEQ ID NO: 1987080 - DNA, 15 bp, Homo sapiens
tggagaaacctcgtc

SEQ ID NO: 1987081 - DNA, 15 bp, Homo sapiens
ggagaaacctcgtct

SEQ ID NO: 1987082 - DNA, 15 bp, Homo sapiens
gagaaacctcgtctc

SEQ ID NO: 1987083 - DNA, 15 bp, Homo sapiens
agaaacctcgtctct

SEQ ID NO: 1987084 - DNA, 15 bp, Homo sapiens
gaaacctcgtctcta

SEQ ID NO: 1987085 - DNA, 15 bp, Homo sapiens
aaacctcgtctctac

SEQ ID NO: 1987086 - DNA, 15 bp, Homo sapiens
aacctcgtctctact

SEQ ID NO: 1987087 - DNA, 15 bp, Homo sapiens
acctcgtctctacta

SEQ ID NO: 1987088 - DNA, 15 bp, Homo sapiens
cctcgtctctactaa

SEQ ID NO: 1987089 - DNA, 15 bp, Homo sapiens
gaattgcttgaatcc

SEQ ID NO: 1987090 - DNA, 15 bp, Homo sapiens
aattgcttgaatccg

SEQ ID NO: 1987091 - DNA, 15 bp, Homo sapiens
attgcttgaatccgg

SEQ ID NO: 1987092 - DNA, 15 bp, Homo sapiens
ttgcttgaatccggg

SEQ ID NO: 1987093 - DNA, 15 bp, Homo sapiens
tgcttgaatccggga

SEQ ID NO: 1987094 - DNA, 15 bp, Homo sapiens
gcttgaatccgggag

SEQ ID NO: 1987095 - DNA, 15 bp, Homo sapiens
cttgaatccgggagg

SEQ ID NO: 1987096 - DNA, 15 bp, Homo sapiens
ttgaatccgggaggt

SEQ ID NO: 1987097 - DNA, 15 bp, Homo sapiens
tgaatccgggaggtg

SEQ ID NO: 1987098 - DNA, 15 bp, Homo sapiens
gaatccgggaggtgg

SEQ ID NO: 1987099 - DNA, 15 bp, Homo sapiens
aatccgggaggtgga

SEQ ID NO: 1987100 - DNA, 15 bp, Homo sapiens
atccgggaggtggag

SEQ ID NO: 1987101 - DNA, 15 bp, Homo sapiens
tccgggaggtggagg

SEQ ID NO: 1987102 - DNA, 15 bp, Homo sapiens
acaccactgcactct

SEQ ID NO: 1987103 - DNA, 15 bp, Homo sapiens
caccactgcactcta

SEQ ID NO: 1987104 - DNA, 15 bp, Homo sapiens
accactgcactctag

SEQ ID NO: 1987105 - DNA, 15 bp, Homo sapiens
actctagcctgggcg

SEQ ID NO: 1987106 - DNA, 15 bp, Homo sapiens
ctctagcctgggcga

SEQ ID NO: 1987107 - DNA, 15 bp, Homo sapiens
tctagcctgggcgac

SEQ ID NO: 1987108 - DNA, 15 bp, Homo sapiens
ctagcctgggcgaca

SEQ ID NO: 1987109 - DNA, 15 bp, Homo sapiens
tagcctgggcgacag

SEQ ID NO: 1987110 - DNA, 15 bp, Homo sapiens
cagagcgagactctt

SEQ ID NO: 1987111 - DNA, 15 bp, Homo sapiens
agagcgagactcttg

SEQ ID NO: 1987112 - DNA, 15 bp, Homo sapiens
gagcgagactcttgt

SEQ ID NO: 1987113 - DNA, 15 bp, Homo sapiens
agcgagactcttgtc

SEQ ID NO: 1987114 - DNA, 15 bp, Homo sapiens
gcgagactcttgtct

SEQ ID NO: 1987115 - DNA, 15 bp, Homo sapiens
cgagactcttgtctc

SEQ ID NO: 1987116 - DNA, 15 bp, Homo sapiens
gagactcttgtctcc

SEQ ID NO: 1987117 - DNA, 15 bp, Homo sapiens
agactcttgtctcca

SEQ ID NO: 1987118 - DNA, 15 bp, Homo sapiens
gactcttgtctccaa

SEQ ID NO: 1987119 - DNA, 15 bp, Homo sapiens
actcttgtctccaaa

SEQ ID NO: 1987120 - DNA, 15 bp, Homo sapiens
ctcttgtctccaaaa

SEQ ID NO: 1987121 - DNA, 15 bp, Homo sapiens
tcttgtctccaaaaa

SEQ ID NO: 1987122 - DNA, 15 bp, Homo sapiens
cttgtctccaaaaaa

SEQ ID NO: 1987123 - DNA, 15 bp, Homo sapiens
ttgtctccaaaaaaa

SEQ ID NO: 1987124 - DNA, 15 bp, Homo sapiens
tgtctccaaaaaaaa

SEQ ID NO: 1987125 - DNA, 15 bp, Homo sapiens
gtctccaaaaaaaaa

SEQ ID NO: 1987126 - DNA, 15 bp, Homo sapiens
aaaaaaaaaaaggag

SEQ ID NO: 1987127 - DNA, 15 bp, Homo sapiens
aaaaaaaaaaggagg

SEQ ID NO: 1987128 - DNA, 15 bp, Homo sapiens
aaaaaaaaaggagga

SEQ ID NO: 1987129 - DNA, 15 bp, Homo sapiens
aaaaaaaaggaggaa

SEQ ID NO: 1987130 - DNA, 15 bp, Homo sapiens
aaaaaaaggaggaat

SEQ ID NO: 1987131 - DNA, 15 bp, Homo sapiens
aaaaaaggaggaatg

SEQ ID NO: 1987132 - DNA, 15 bp, Homo sapiens
aaaaaggaggaatga

SEQ ID NO: 1987133 - DNA, 15 bp, Homo sapiens
aaaaggaggaatgat

SEQ ID NO: 1987134 - DNA, 15 bp, Homo sapiens
aaaggaggaatgatt

SEQ ID NO: 1987135 - DNA, 15 bp, Homo sapiens
aaggaggaatgattt

SEQ ID NO: 1987136 - DNA, 15 bp, Homo sapiens
aggaggaatgatttt

SEQ ID NO: 1987137 - DNA, 15 bp, Homo sapiens
ggaggaatgattttg

SEQ ID NO: 1987138 - DNA, 15 bp, Homo sapiens
gaggaatgattttga

SEQ ID NO: 1987139 - DNA, 15 bp, Homo sapiens
aggaatgattttgat

SEQ ID NO: 1987140 - DNA, 15 bp, Homo sapiens
ggaatgattttgatt

SEQ ID NO: 1987141 - DNA, 15 bp, Homo sapiens
gaatgattttgatta

SEQ ID NO: 1987142 - DNA, 15 bp, Homo sapiens
aatgattttgattat

SEQ ID NO: 1987143 - DNA, 15 bp, Homo sapiens
atgattttgattata

SEQ ID NO: 1987144 - DNA, 15 bp, Homo sapiens
tgattttgattatat

SEQ ID NO: 1987145 - DNA, 15 bp, Homo sapiens
gattttgattatata

SEQ ID NO: 1987146 - DNA, 15 bp, Homo sapiens
attttgattatatac

SEQ ID NO: 1987147 - DNA, 15 bp, Homo sapiens
ttttgattatatacc

SEQ ID NO: 1987148 - DNA, 15 bp, Homo sapiens
tttgattatataccc

SEQ ID NO: 1987149 - DNA, 15 bp, Homo sapiens
ttgattatataccca

SEQ ID NO: 1987150 - DNA, 15 bp, Homo sapiens
tgattatatacccag

SEQ ID NO: 1987151 - DNA, 15 bp, Homo sapiens
gattatatacccagt

SEQ ID NO: 1987152 - DNA, 15 bp, Homo sapiens
attatatacccagta

SEQ ID NO: 1987153 - DNA, 15 bp, Homo sapiens
tatatacccagtaaa

SEQ ID NO: 1987154 - DNA, 15 bp, Homo sapiens
atatacccagtaaag

SEQ ID NO: 1987155 - DNA, 15 bp, Homo sapiens
tatacccagtaaagc

SEQ ID NO: 1987156 - DNA, 15 bp, Homo sapiens
atacccagtaaagca

SEQ ID NO: 1987157 - DNA, 15 bp, Homo sapiens
tacccagtaaagcaa

SEQ ID NO: 1987158 - DNA, 15 bp, Homo sapiens
acccagtaaagcaag

SEQ ID NO: 1987159 - DNA, 15 bp, Homo sapiens
cccagtaaagcaaga

SEQ ID NO: 1987160 - DNA, 15 bp, Homo sapiens
ccagtaaagcaagaa

SEQ ID NO: 1987161 - DNA, 15 bp, Homo sapiens
cagtaaagcaagaaa

SEQ ID NO: 1987162 - DNA, 15 bp, Homo sapiens
agtaaagcaagaaag

SEQ ID NO: 1987163 - DNA, 15 bp, Homo sapiens
gtaaagcaagaaagt

SEQ ID NO: 1987164 - DNA, 15 bp, Homo sapiens
taaagcaagaaagtg

SEQ ID NO: 1987165 - DNA, 15 bp, Homo sapiens
aaagcaagaaagtgt

SEQ ID NO: 1987166 - DNA, 15 bp, Homo sapiens
aagcaagaaagtgtt

SEQ ID NO: 1987167 - DNA, 15 bp, Homo sapiens
agcaagaaagtgttt

SEQ ID NO: 1987168 - DNA, 15 bp, Homo sapiens
gcaagaaagtgtttc

SEQ ID NO: 1987169 - DNA, 15 bp, Homo sapiens
caagaaagtgtttct

SEQ ID NO: 1987170 - DNA, 15 bp, Homo sapiens
aagaaagtgtttctc

SEQ ID NO: 1987171 - DNA, 15 bp, Homo sapiens
agaaagtgtttctcc

SEQ ID NO: 1987172 - DNA, 15 bp, Homo sapiens
gaaagtgtttctcct

SEQ ID NO: 1987173 - DNA, 15 bp, Homo sapiens
aaagtgtttctcctt

SEQ ID NO: 1987174 - DNA, 15 bp, Homo sapiens
aagtgtttctccttc

SEQ ID NO: 1987175 - DNA, 15 bp, Homo sapiens
agtgtttctccttct

SEQ ID NO: 1987176 - DNA, 15 bp, Homo sapiens
gtgtttctccttctg

SEQ ID NO: 1987177 - DNA, 15 bp, Homo sapiens
tgtttctccttctgt

SEQ ID NO: 1987178 - DNA, 15 bp, Homo sapiens
gtttctccttctgtc

SEQ ID NO: 1987179 - DNA, 15 bp, Homo sapiens
tttctccttctgtcc

SEQ ID NO: 1987180 - DNA, 15 bp, Homo sapiens
ttctccttctgtccc

SEQ ID NO: 1987181 - DNA, 15 bp, Homo sapiens
tctccttctgtccct

SEQ ID NO: 1987182 - DNA, 15 bp, Homo sapiens
ctccttctgtcccta

SEQ ID NO: 1987183 - DNA, 15 bp, Homo sapiens
tccttctgtccctag

SEQ ID NO: 1987184 - DNA, 15 bp, Homo sapiens
ccttctgtccctagc

SEQ ID NO: 1987185 - DNA, 15 bp, Homo sapiens
cttctgtccctagct

SEQ ID NO: 1987186 - DNA, 15 bp, Homo sapiens
ttctgtccctagctt

SEQ ID NO: 1987187 - DNA, 15 bp, Homo sapiens
tctgtccctagcttt

SEQ ID NO: 1987188 - DNA, 15 bp, Homo sapiens
ctgtccctagcttta

SEQ ID NO: 1987189 - DNA, 15 bp, Homo sapiens
tgtccctagctttaa

SEQ ID NO: 1987190 - DNA, 15 bp, Homo sapiens
gtccctagctttaaa

SEQ ID NO: 1987191 - DNA, 15 bp, Homo sapiens
tccctagctttaaaa

SEQ ID NO: 1987192 - DNA, 15 bp, Homo sapiens
ccctagctttaaaag

SEQ ID NO: 1987193 - DNA, 15 bp, Homo sapiens
cctagctttaaaaga

SEQ ID NO: 1987194 - DNA, 15 bp, Homo sapiens
ctagctttaaaagac

SEQ ID NO: 1987195 - DNA, 15 bp, Homo sapiens
tagctttaaaagacc

SEQ ID NO: 1987196 - DNA, 15 bp, Homo sapiens
agctttaaaagacct

SEQ ID NO: 1987197 - DNA, 15 bp, Homo sapiens
gctttaaaagacctt

SEQ ID NO: 1987198 - DNA, 15 bp, Homo sapiens
ctttaaaagacctta

SEQ ID NO: 1987199 - DNA, 15 bp, Homo sapiens
tttaaaagaccttaa

SEQ ID NO: 1987200 - DNA, 15 bp, Homo sapiens
ttaaaagaccttaag

SEQ ID NO: 1987201 - DNA, 15 bp, Homo sapiens
taaaagaccttaagg

SEQ ID NO: 1987202 - DNA, 15 bp, Homo sapiens
aaaagaccttaaggc

SEQ ID NO: 1987203 - DNA, 15 bp, Homo sapiens
aaagaccttaaggct

SEQ ID NO: 1987204 - DNA, 15 bp, Homo sapiens
aagaccttaaggctt

SEQ ID NO: 1987205 - DNA, 15 bp, Homo sapiens
agaccttaaggcttc

SEQ ID NO: 1987206 - DNA, 15 bp, Homo sapiens
gaccttaaggcttcg

SEQ ID NO: 1987207 - DNA, 15 bp, Homo sapiens
accttaaggcttcgt

SEQ ID NO: 1987208 - DNA, 15 bp, Homo sapiens
ccttaaggcttcgtt

SEQ ID NO: 1987209 - DNA, 15 bp, Homo sapiens
cttaaggcttcgttg

SEQ ID NO: 1987210 - DNA, 15 bp, Homo sapiens
ttaaggcttcgttgt

SEQ ID NO: 1987211 - DNA, 15 bp, Homo sapiens
taaggcttcgttgtt

SEQ ID NO: 1987212 - DNA, 15 bp, Homo sapiens
aaggcttcgttgttt

SEQ ID NO: 1987213 - DNA, 15 bp, Homo sapiens
aggcttcgttgtttg

SEQ ID NO: 1987214 - DNA, 15 bp, Homo sapiens
ggcttcgttgtttgt

SEQ ID NO: 1987215 - DNA, 15 bp, Homo sapiens
gcttcgttgtttgtt

SEQ ID NO: 1987216 - DNA, 15 bp, Homo sapiens
cttcgttgtttgtta

SEQ ID NO: 1987217 - DNA, 15 bp, Homo sapiens
ttcgttgtttgttat

SEQ ID NO: 1987218 - DNA, 15 bp, Homo sapiens
tcgttgtttgttatg

SEQ ID NO: 1987219 - DNA, 15 bp, Homo sapiens
cgttgtttgttatgc

SEQ ID NO: 1987220 - DNA, 15 bp, Homo sapiens
gttgtttgttatgca

SEQ ID NO: 1987221 - DNA, 15 bp, Homo sapiens
ttgtttgttatgcat

SEQ ID NO: 1987222 - DNA, 15 bp, Homo sapiens
tgtttgttatgcata

SEQ ID NO: 1987223 - DNA, 15 bp, Homo sapiens
gtttgttatgcatat

SEQ ID NO: 1987224 - DNA, 15 bp, Homo sapiens
tttgttatgcatatt

SEQ ID NO: 1987225 - DNA, 15 bp, Homo sapiens
ttgttatgcatattg

SEQ ID NO: 1987226 - DNA, 15 bp, Homo sapiens
tgttatgcatattgt

SEQ ID NO: 1987227 - DNA, 15 bp, Homo sapiens
gttatgcatattgtg

SEQ ID NO: 1987228 - DNA, 15 bp, Homo sapiens
ttatgcatattgtgg

SEQ ID NO: 1987229 - DNA, 15 bp, Homo sapiens
tatgcatattgtgga

SEQ ID NO: 1987230 - DNA, 15 bp, Homo sapiens
atgcatattgtggaa

SEQ ID NO: 1987231 - DNA, 15 bp, Homo sapiens
tgcatattgtggaat

SEQ ID NO: 1987232 - DNA, 15 bp, Homo sapiens
gcatattgtggaatc

SEQ ID NO: 1987233 - DNA, 15 bp, Homo sapiens
catattgtggaatca

SEQ ID NO: 1987234 - DNA, 15 bp, Homo sapiens
atattgtggaatcaa

SEQ ID NO: 1987235 - DNA, 15 bp, Homo sapiens
tattgtggaatcaaa

SEQ ID NO: 1987236 - DNA, 15 bp, Homo sapiens
attgtggaatcaaac

SEQ ID NO: 1987237 - DNA, 15 bp, Homo sapiens
ttgtggaatcaaact

SEQ ID NO: 1987238 - DNA, 15 bp, Homo sapiens
tgtggaatcaaactc

SEQ ID NO: 1987239 - DNA, 15 bp, Homo sapiens
gtggaatcaaactca

SEQ ID NO: 1987240 - DNA, 15 bp, Homo sapiens
tggaatcaaactcac

SEQ ID NO: 1987241 - DNA, 15 bp, Homo sapiens
ggaatcaaactcacc

SEQ ID NO: 1987242 - DNA, 15 bp, Homo sapiens
gaatcaaactcacca

SEQ ID NO: 1987243 - DNA, 15 bp, Homo sapiens
aatcaaactcaccac

SEQ ID NO: 1987244 - DNA, 15 bp, Homo sapiens
atcaaactcaccacc

SEQ ID NO: 1987245 - DNA, 15 bp, Homo sapiens
tcaaactcaccacca

SEQ ID NO: 1987246 - DNA, 15 bp, Homo sapiens
caaactcaccaccat

SEQ ID NO: 1987247 - DNA, 15 bp, Homo sapiens
aaactcaccaccatc

SEQ ID NO: 1987248 - DNA, 15 bp, Homo sapiens
aactcaccaccatct

SEQ ID NO: 1987249 - DNA, 15 bp, Homo sapiens
actcaccaccatctg

SEQ ID NO: 1987250 - DNA, 15 bp, Homo sapiens
ctcaccaccatctgt

SEQ ID NO: 1987251 - DNA, 15 bp, Homo sapiens
tcaccaccatctgtt

SEQ ID NO: 1987252 - DNA, 15 bp, Homo sapiens
caccaccatctgtta

SEQ ID NO: 1987253 - DNA, 15 bp, Homo sapiens
accaccatctgttaa

SEQ ID NO: 1987254 - DNA, 15 bp, Homo sapiens
ccaccatctgttaaa

SEQ ID NO: 1987255 - DNA, 15 bp, Homo sapiens
caccatctgttaaaa

SEQ ID NO: 1987256 - DNA, 15 bp, Homo sapiens
accatctgttaaaaa

SEQ ID NO: 1987257 - DNA, 15 bp, Homo sapiens
ccatctgttaaaaat

SEQ ID NO: 1987258 - DNA, 15 bp, Homo sapiens
catctgttaaaaatt

SEQ ID NO: 1987259 - DNA, 15 bp, Homo sapiens
atctgttaaaaatta

SEQ ID NO: 1987260 - DNA, 15 bp, Homo sapiens
tctgttaaaaattaa

SEQ ID NO: 1987261 - DNA, 15 bp, Homo sapiens
ctgttaaaaattaag

SEQ ID NO: 1987262 - DNA, 15 bp, Homo sapiens
tgttaaaaattaagg

SEQ ID NO: 1987263 - DNA, 15 bp, Homo sapiens
gttaaaaattaagga

SEQ ID NO: 1987264 - DNA, 15 bp, Homo sapiens
ttaaaaattaaggac

SEQ ID NO: 1987265 - DNA, 15 bp, Homo sapiens
taaaaattaaggaca

SEQ ID NO: 1987266 - DNA, 15 bp, Homo sapiens
aaaaattaaggacat

SEQ ID NO: 1987267 - DNA, 15 bp, Homo sapiens
aaaattaaggacatt

SEQ ID NO: 1987268 - DNA, 15 bp, Homo sapiens
aaattaaggacatta

SEQ ID NO: 1987269 - DNA, 15 bp, Homo sapiens
aattaaggacattag

SEQ ID NO: 1987270 - DNA, 15 bp, Homo sapiens
attaaggacattagt

SEQ ID NO: 1987271 - DNA, 15 bp, Homo sapiens
ttaaggacattagtt

SEQ ID NO: 1987272 - DNA, 15 bp, Homo sapiens
taaggacattagttt

SEQ ID NO: 1987273 - DNA, 15 bp, Homo sapiens
aaggacattagtttt

SEQ ID NO: 1987274 - DNA, 15 bp, Homo sapiens
aggacattagttttt

SEQ ID NO: 1987275 - DNA, 15 bp, Homo sapiens
ggacattagttttta

SEQ ID NO: 1987276 - DNA, 15 bp, Homo sapiens
gacattagtttttaa

SEQ ID NO: 1987277 - DNA, 15 bp, Homo sapiens
acattagtttttaaa

SEQ ID NO: 1987278 - DNA, 15 bp, Homo sapiens
cattagtttttaaaa

SEQ ID NO: 1987279 - DNA, 15 bp, Homo sapiens
attagtttttaaaac

SEQ ID NO: 1987280 - DNA, 15 bp, Homo sapiens
ttagtttttaaaaca

SEQ ID NO: 1987281 - DNA, 15 bp, Homo sapiens
tagtttttaaaacag

SEQ ID NO: 1987282 - DNA, 15 bp, Homo sapiens
agtttttaaaacagc

SEQ ID NO: 1987283 - DNA, 15 bp, Homo sapiens
gtttttaaaacagca

SEQ ID NO: 1987284 - DNA, 15 bp, Homo sapiens
tttttaaaacagcat

SEQ ID NO: 1987285 - DNA, 15 bp, Homo sapiens
ttttaaaacagcatt

SEQ ID NO: 1987286 - DNA, 15 bp, Homo sapiens
tttaaaacagcattt

SEQ ID NO: 1987287 - DNA, 15 bp, Homo sapiens
ttaaaacagcatttt

SEQ ID NO: 1987288 - DNA, 15 bp, Homo sapiens
taaaacagcattttt

SEQ ID NO: 1987289 - DNA, 15 bp, Homo sapiens
aaaacagcatttttc

SEQ ID NO: 1987290 - DNA, 15 bp, Homo sapiens
aaacagcatttttct

SEQ ID NO: 1987291 - DNA, 15 bp, Homo sapiens
aacagcatttttctg

SEQ ID NO: 1987292 - DNA, 15 bp, Homo sapiens
acagcatttttctgc

SEQ ID NO: 1987293 - DNA, 15 bp, Homo sapiens
cagcatttttctgca

SEQ ID NO: 1987294 - DNA, 15 bp, Homo sapiens
agcatttttctgcat

SEQ ID NO: 1987295 - DNA, 15 bp, Homo sapiens
gcatttttctgcatt

SEQ ID NO: 1987296 - DNA, 15 bp, Homo sapiens
catttttctgcattc

SEQ ID NO: 1987297 - DNA, 15 bp, Homo sapiens
atttttctgcattcc

SEQ ID NO: 1987298 - DNA, 15 bp, Homo sapiens
tttttctgcattcct

SEQ ID NO: 1987299 - DNA, 15 bp, Homo sapiens
ttttctgcattcctt

SEQ ID NO: 1987300 - DNA, 15 bp, Homo sapiens
tttctgcattcctta

SEQ ID NO: 1987301 - DNA, 15 bp, Homo sapiens
ttctgcattccttat

SEQ ID NO: 1987302 - DNA, 15 bp, Homo sapiens
tctgcattccttatg

SEQ ID NO: 1987303 - DNA, 15 bp, Homo sapiens
ctgcattccttatgt

SEQ ID NO: 1987304 - DNA, 15 bp, Homo sapiens
tgcattccttatgtt

SEQ ID NO: 1987305 - DNA, 15 bp, Homo sapiens
gcattccttatgttg

SEQ ID NO: 1987306 - DNA, 15 bp, Homo sapiens
cattccttatgttgt

SEQ ID NO: 1987307 - DNA, 15 bp, Homo sapiens
attccttatgttgta

SEQ ID NO: 1987308 - DNA, 15 bp, Homo sapiens
ttccttatgttgtaa

SEQ ID NO: 1987309 - DNA, 15 bp, Homo sapiens
tccttatgttgtaat

SEQ ID NO: 1987310 - DNA, 15 bp, Homo sapiens
ccttatgttgtaatt

SEQ ID NO: 1987311 - DNA, 15 bp, Homo sapiens
cttatgttgtaatta

SEQ ID NO: 1987312 - DNA, 15 bp, Homo sapiens
ttatgttgtaattaa

SEQ ID NO: 1987313 - DNA, 15 bp, Homo sapiens
tatgttgtaattaag

SEQ ID NO: 1987314 - DNA, 15 bp, Homo sapiens
atgttgtaattaaga

SEQ ID NO: 1987315 - DNA, 15 bp, Homo sapiens
tgttgtaattaagag

SEQ ID NO: 1987316 - DNA, 15 bp, Homo sapiens
gttgtaattaagaga

SEQ ID NO: 1987317 - DNA, 15 bp, Homo sapiens
ttgtaattaagagaa

SEQ ID NO: 1987318 - DNA, 15 bp, Homo sapiens
tgtaattaagagaaa

SEQ ID NO: 1987319 - DNA, 15 bp, Homo sapiens
gtaattaagagaaag

SEQ ID NO: 1987320 - DNA, 15 bp, Homo sapiens
taattaagagaaaga

SEQ ID NO: 1987321 - DNA, 15 bp, Homo sapiens
aattaagagaaagat

SEQ ID NO: 1987322 - DNA, 15 bp, Homo sapiens
attaagagaaagata

SEQ ID NO: 1987323 - DNA, 15 bp, Homo sapiens
ttaagagaaagatat

SEQ ID NO: 1987324 - DNA, 15 bp, Homo sapiens
taagagaaagatata

SEQ ID NO: 1987325 - DNA, 15 bp, Homo sapiens
aagagaaagatatat

SEQ ID NO: 1987326 - DNA, 15 bp, Homo sapiens
agagaaagatatata

SEQ ID NO: 1987327 - DNA, 15 bp, Homo sapiens
gagaaagatatatag

SEQ ID NO: 1987328 - DNA, 15 bp, Homo sapiens
agaaagatatatagg

SEQ ID NO: 1987329 - DNA, 15 bp, Homo sapiens
gaaagatatatagga

SEQ ID NO: 1987330 - DNA, 15 bp, Homo sapiens
aaagatatataggag

SEQ ID NO: 1987331 - DNA, 15 bp, Homo sapiens
aagatatataggaga

SEQ ID NO: 1987332 - DNA, 15 bp, Homo sapiens
agatatataggagag

SEQ ID NO: 1987333 - DNA, 15 bp, Homo sapiens
gatatataggagaga

SEQ ID NO: 1987334 - DNA, 15 bp, Homo sapiens
atatataggagagat

SEQ ID NO: 1987335 - DNA, 15 bp, Homo sapiens
tatataggagagatt

SEQ ID NO: 1987336 - DNA, 15 bp, Homo sapiens
atataggagagatta

SEQ ID NO: 1987337 - DNA, 15 bp, Homo sapiens
tataggagagattat

SEQ ID NO: 1987338 - DNA, 15 bp, Homo sapiens
ataggagagattatt

SEQ ID NO: 1987339 - DNA, 15 bp, Homo sapiens
taggagagattattc

SEQ ID NO: 1987340 - DNA, 15 bp, Homo sapiens
aggagagattattcc

SEQ ID NO: 1987341 - DNA, 15 bp, Homo sapiens
ggagagattattcct

SEQ ID NO: 1987342 - DNA, 15 bp, Homo sapiens
gagagattattcctc

SEQ ID NO: 1987343 - DNA, 15 bp, Homo sapiens
agagattattcctca

SEQ ID NO: 1987344 - DNA, 15 bp, Homo sapiens
gagattattcctcac

SEQ ID NO: 1987345 - DNA, 15 bp, Homo sapiens
agattattcctcact

SEQ ID NO: 1987346 - DNA, 15 bp, Homo sapiens
gattattcctcactt

SEQ ID NO: 1987347 - DNA, 15 bp, Homo sapiens
attattcctcacttt

SEQ ID NO: 1987348 - DNA, 15 bp, Homo sapiens
ttattcctcactttt

SEQ ID NO: 1987349 - DNA, 15 bp, Homo sapiens
tattcctcacttttt

SEQ ID NO: 1987350 - DNA, 15 bp, Homo sapiens
attcctcactttttt

SEQ ID NO: 1987351 - DNA, 15 bp, Homo sapiens
ttcctcacttttttt

SEQ ID NO: 1987352 - DNA, 15 bp, Homo sapiens
tcctcactttttttt

SEQ ID NO: 1987353 - DNA, 15 bp, Homo sapiens
cctcacttttttttt

SEQ ID NO: 1987354 - DNA, 15 bp, Homo sapiens
ctcactttttttttt

SEQ ID NO: 1987355 - DNA, 15 bp, Homo sapiens
tcacttttttttttt

SEQ ID NO: 1987356 - DNA, 15 bp, Homo sapiens
cactttttttttttg

SEQ ID NO: 1987357 - DNA, 15 bp, Homo sapiens
actttttttttttga

SEQ ID NO: 1987358 - DNA, 15 bp, Homo sapiens
ttttttttgagacaa

SEQ ID NO: 1987359 - DNA, 15 bp, Homo sapiens
tttttttgagacaag

SEQ ID NO: 1987360 - DNA, 15 bp, Homo sapiens
ttttttgagacaagg

SEQ ID NO: 1987361 - DNA, 15 bp, Homo sapiens
tttttgagacaaggt

SEQ ID NO: 1987362 - DNA, 15 bp, Homo sapiens
ttttgagacaaggtc

SEQ ID NO: 1987363 - DNA, 15 bp, Homo sapiens
tttgagacaaggtct

SEQ ID NO: 1987364 - DNA, 15 bp, Homo sapiens
ttgagacaaggtctt

SEQ ID NO: 1987365 - DNA, 15 bp, Homo sapiens
tgagacaaggtcttg

SEQ ID NO: 1987366 - DNA, 15 bp, Homo sapiens
agacaaggtcttgct

SEQ ID NO: 1987367 - DNA, 15 bp, Homo sapiens
gacaaggtcttgctc

SEQ ID NO: 1987368 - DNA, 15 bp, Homo sapiens
acaaggtcttgctct

SEQ ID NO: 1987369 - DNA, 15 bp, Homo sapiens
caaggtcttgctctg

SEQ ID NO: 1987370 - DNA, 15 bp, Homo sapiens
aaggtcttgctctgt

SEQ ID NO: 1987371 - DNA, 15 bp, Homo sapiens
aggtcttgctctgtc

SEQ ID NO: 1987372 - DNA, 15 bp, Homo sapiens
ggtcttgctctgtcg

SEQ ID NO: 1987373 - DNA, 15 bp, Homo sapiens
tgctctgtcgcccac

SEQ ID NO: 1987374 - DNA, 15 bp, Homo sapiens
gctctgtcgcccacg

SEQ ID NO: 1987375 - DNA, 15 bp, Homo sapiens
ctctgtcgcccacgc

SEQ ID NO: 1987376 - DNA, 15 bp, Homo sapiens
tctgtcgcccacgct

SEQ ID NO: 1987377 - DNA, 15 bp, Homo sapiens
ctgtcgcccacgctg

SEQ ID NO: 1987378 - DNA, 15 bp, Homo sapiens
tgtcgcccacgctgg

SEQ ID NO: 1987379 - DNA, 15 bp, Homo sapiens
gtcgcccacgctgga

SEQ ID NO: 1987380 - DNA, 15 bp, Homo sapiens
tcgcccacgctggag

SEQ ID NO: 1987381 - DNA, 15 bp, Homo sapiens
cgcccacgctggagt

SEQ ID NO: 1987382 - DNA, 15 bp, Homo sapiens
gcccacgctggagtg

SEQ ID NO: 1987383 - DNA, 15 bp, Homo sapiens
cccacgctggagtgc

SEQ ID NO: 1987384 - DNA, 15 bp, Homo sapiens
ccacgctggagtgca

SEQ ID NO: 1987385 - DNA, 15 bp, Homo sapiens
cacgctggagtgcag

SEQ ID NO: 1987386 - DNA, 15 bp, Homo sapiens
acgctggagtgcagt

SEQ ID NO: 1987387 - DNA, 15 bp, Homo sapiens
cgctggagtgcagta

SEQ ID NO: 1987388 - DNA, 15 bp, Homo sapiens
gctggagtgcagtag

SEQ ID NO: 1987389 - DNA, 15 bp, Homo sapiens
ctggagtgcagtagc

SEQ ID NO: 1987390 - DNA, 15 bp, Homo sapiens
tggagtgcagtagct

SEQ ID NO: 1987391 - DNA, 15 bp, Homo sapiens
ggagtgcagtagctt

SEQ ID NO: 1987392 - DNA, 15 bp, Homo sapiens
gagtgcagtagcttg

SEQ ID NO: 1987393 - DNA, 15 bp, Homo sapiens
agtgcagtagcttga

SEQ ID NO: 1987394 - DNA, 15 bp, Homo sapiens
gtgcagtagcttgat

SEQ ID NO: 1987395 - DNA, 15 bp, Homo sapiens
tgcagtagcttgatg

SEQ ID NO: 1987396 - DNA, 15 bp, Homo sapiens
gcagtagcttgatgt

SEQ ID NO: 1987397 - DNA, 15 bp, Homo sapiens
cagtagcttgatgtc

SEQ ID NO: 1987398 - DNA, 15 bp, Homo sapiens
agtagcttgatgtcg

SEQ ID NO: 1987399 - DNA, 15 bp, Homo sapiens
gtagcttgatgtcgg

SEQ ID NO: 1987400 - DNA, 15 bp, Homo sapiens
tagcttgatgtcggt

SEQ ID NO: 1987401 - DNA, 15 bp, Homo sapiens
agcttgatgtcggtt

SEQ ID NO: 1987402 - DNA, 15 bp, Homo sapiens
gcttgatgtcggttc

SEQ ID NO: 1987403 - DNA, 15 bp, Homo sapiens
cttgatgtcggttca

SEQ ID NO: 1987404 - DNA, 15 bp, Homo sapiens
ttgatgtcggttcat

SEQ ID NO: 1987405 - DNA, 15 bp, Homo sapiens
tgatgtcggttcatt

SEQ ID NO: 1987406 - DNA, 15 bp, Homo sapiens
gatgtcggttcattg

SEQ ID NO: 1987407 - DNA, 15 bp, Homo sapiens
atgtcggttcattgc

SEQ ID NO: 1987408 - DNA, 15 bp, Homo sapiens
tgtcggttcattgca

SEQ ID NO: 1987409 - DNA, 15 bp, Homo sapiens
gtcggttcattgcaa

SEQ ID NO: 1987410 - DNA, 15 bp, Homo sapiens
tcggttcattgcaac

SEQ ID NO: 1987411 - DNA, 15 bp, Homo sapiens
cggttcattgcaacc

SEQ ID NO: 1987412 - DNA, 15 bp, Homo sapiens
ggttcattgcaaccc

SEQ ID NO: 1987413 - DNA, 15 bp, Homo sapiens
gttcattgcaacccc

SEQ ID NO: 1987414 - DNA, 15 bp, Homo sapiens
ttcattgcaacccct

SEQ ID NO: 1987415 - DNA, 15 bp, Homo sapiens
tcattgcaacccctg

SEQ ID NO: 1987416 - DNA, 15 bp, Homo sapiens
cattgcaacccctgc

SEQ ID NO: 1987417 - DNA, 15 bp, Homo sapiens
attgcaacccctgct

SEQ ID NO: 1987418 - DNA, 15 bp, Homo sapiens
ttgcaacccctgctt

SEQ ID NO: 1987419 - DNA, 15 bp, Homo sapiens
tgcaacccctgcttc

SEQ ID NO: 1987420 - DNA, 15 bp, Homo sapiens
gcaacccctgcttcc

SEQ ID NO: 1987421 - DNA, 15 bp, Homo sapiens
caacccctgcttccc

SEQ ID NO: 1987422 - DNA, 15 bp, Homo sapiens
aacccctgcttccca

SEQ ID NO: 1987423 - DNA, 15 bp, Homo sapiens
acccctgcttcccac

SEQ ID NO: 1987424 - DNA, 15 bp, Homo sapiens
cccctgcttcccaca

SEQ ID NO: 1987425 - DNA, 15 bp, Homo sapiens
ccctgcttcccacat

SEQ ID NO: 1987426 - DNA, 15 bp, Homo sapiens
cctgcttcccacatt

SEQ ID NO: 1987427 - DNA, 15 bp, Homo sapiens
ctgcttcccacattc

SEQ ID NO: 1987428 - DNA, 15 bp, Homo sapiens
tgcttcccacattca

SEQ ID NO: 1987429 - DNA, 15 bp, Homo sapiens
gcttcccacattcac

SEQ ID NO: 1987430 - DNA, 15 bp, Homo sapiens
cttcccacattcacg

SEQ ID NO: 1987431 - DNA, 15 bp, Homo sapiens
ttcccacattcacgt

SEQ ID NO: 1987432 - DNA, 15 bp, Homo sapiens
tcccacattcacgtg

SEQ ID NO: 1987433 - DNA, 15 bp, Homo sapiens
cccacattcacgtga

SEQ ID NO: 1987434 - DNA, 15 bp, Homo sapiens
ccacattcacgtgat

SEQ ID NO: 1987435 - DNA, 15 bp, Homo sapiens
cacattcacgtgatt

SEQ ID NO: 1987436 - DNA, 15 bp, Homo sapiens
acattcacgtgattc

SEQ ID NO: 1987437 - DNA, 15 bp, Homo sapiens
cattcacgtgattct

SEQ ID NO: 1987438 - DNA, 15 bp, Homo sapiens
attcacgtgattctc

SEQ ID NO: 1987439 - DNA, 15 bp, Homo sapiens
ttcacgtgattctcc

SEQ ID NO: 1987440 - DNA, 15 bp, Homo sapiens
tcacgtgattctcct

SEQ ID NO: 1987441 - DNA, 15 bp, Homo sapiens
cacgtgattctcctg

SEQ ID NO: 1987442 - DNA, 15 bp, Homo sapiens
acgtgattctcctgc

SEQ ID NO: 1987443 - DNA, 15 bp, Homo sapiens
cgtgattctcctgct

SEQ ID NO: 1987444 - DNA, 15 bp, Homo sapiens
gtgattctcctgctt

SEQ ID NO: 1987445 - DNA, 15 bp, Homo sapiens
tgattctcctgcttc

SEQ ID NO: 1987446 - DNA, 15 bp, Homo sapiens
gattctcctgcttca

SEQ ID NO: 1987447 - DNA, 15 bp, Homo sapiens
ttctcctgcttcagt

SEQ ID NO: 1987448 - DNA, 15 bp, Homo sapiens
tctcctgcttcagtc

SEQ ID NO: 1987449 - DNA, 15 bp, Homo sapiens
ctcctgcttcagtct

SEQ ID NO: 1987450 - DNA, 15 bp, Homo sapiens
tcctgcttcagtctc

SEQ ID NO: 1987451 - DNA, 15 bp, Homo sapiens
cctgcttcagtctcc

SEQ ID NO: 1987452 - DNA, 15 bp, Homo sapiens
ctgcttcagtctccc

SEQ ID NO: 1987453 - DNA, 15 bp, Homo sapiens
tgcttcagtctccca

SEQ ID NO: 1987454 - DNA, 15 bp, Homo sapiens
gcttcagtctcccaa

SEQ ID NO: 1987455 - DNA, 15 bp, Homo sapiens
cttcagtctcccaag

SEQ ID NO: 1987456 - DNA, 15 bp, Homo sapiens
ttcagtctcccaagt

SEQ ID NO: 1987457 - DNA, 15 bp, Homo sapiens
tcagtctcccaagta

SEQ ID NO: 1987458 - DNA, 15 bp, Homo sapiens
cagtctcccaagtag

SEQ ID NO: 1987459 - DNA, 15 bp, Homo sapiens
acaggtgtgcaccat

SEQ ID NO: 1987460 - DNA, 15 bp, Homo sapiens
caggtgtgcaccatc

SEQ ID NO: 1987461 - DNA, 15 bp, Homo sapiens
aggtgtgcaccatcg

SEQ ID NO: 1987462 - DNA, 15 bp, Homo sapiens
ggtgtgcaccatcgt

SEQ ID NO: 1987463 - DNA, 15 bp, Homo sapiens
gtgtgcaccatcgtg

SEQ ID NO: 1987464 - DNA, 15 bp, Homo sapiens
tgtgcaccatcgtgc

SEQ ID NO: 1987465 - DNA, 15 bp, Homo sapiens
gtgcaccatcgtgcc

SEQ ID NO: 1987466 - DNA, 15 bp, Homo sapiens
tgcaccatcgtgcct

SEQ ID NO: 1987467 - DNA, 15 bp, Homo sapiens
gcaccatcgtgcctg

SEQ ID NO: 1987468 - DNA, 15 bp, Homo sapiens
caccatcgtgcctgg

SEQ ID NO: 1987469 - DNA, 15 bp, Homo sapiens
accatcgtgcctggc

SEQ ID NO: 1987470 - DNA, 15 bp, Homo sapiens
ccatcgtgcctggct

SEQ ID NO: 1987471 - DNA, 15 bp, Homo sapiens
catcgtgcctggcta

SEQ ID NO: 1987472 - DNA, 15 bp, Homo sapiens
atcgtgcctggctaa

SEQ ID NO: 1987473 - DNA, 15 bp, Homo sapiens
tcgtgcctggctaat

SEQ ID NO: 1987474 - DNA, 15 bp, Homo sapiens
cgtgcctggctaatt

SEQ ID NO: 1987475 - DNA, 15 bp, Homo sapiens
gtgcctggctaattt

SEQ ID NO: 1987476 - DNA, 15 bp, Homo sapiens
caggtgatctgcccc

SEQ ID NO: 1987477 - DNA, 15 bp, Homo sapiens
aggtgatctgccccc

SEQ ID NO: 1987478 - DNA, 15 bp, Homo sapiens
ggtgatctgcccccc

SEQ ID NO: 1987479 - DNA, 15 bp, Homo sapiens
gtgatctgcccccca

SEQ ID NO: 1987480 - DNA, 15 bp, Homo sapiens
tgatctgccccccac

SEQ ID NO: 1987481 - DNA, 15 bp, Homo sapiens
gatctgccccccacc

SEQ ID NO: 1987482 - DNA, 15 bp, Homo sapiens
atctgccccccaccc

SEQ ID NO: 1987483 - DNA, 15 bp, Homo sapiens
tctgccccccacccc

SEQ ID NO: 1987484 - DNA, 15 bp, Homo sapiens
ctgccccccaccccc

SEQ ID NO: 1987485 - DNA, 15 bp, Homo sapiens
tgccccccaccccct

SEQ ID NO: 1987486 - DNA, 15 bp, Homo sapiens
gccccccaccccctg

SEQ ID NO: 1987487 - DNA, 15 bp, Homo sapiens
ccccccaccccctgc

SEQ ID NO: 1987488 - DNA, 15 bp, Homo sapiens
cccccaccccctgct

SEQ ID NO: 1987489 - DNA, 15 bp, Homo sapiens
ccccaccccctgctc

SEQ ID NO: 1987490 - DNA, 15 bp, Homo sapiens
cccaccccctgctcg

SEQ ID NO: 1987491 - DNA, 15 bp, Homo sapiens
ccaccccctgctcgg

SEQ ID NO: 1987492 - DNA, 15 bp, Homo sapiens
caccccctgctcggc

SEQ ID NO: 1987493 - DNA, 15 bp, Homo sapiens
accccctgctcggcc

SEQ ID NO: 1987494 - DNA, 15 bp, Homo sapiens
ccccctgctcggcct

SEQ ID NO: 1987495 - DNA, 15 bp, Homo sapiens
cccctgctcggcctc

SEQ ID NO: 1987496 - DNA, 15 bp, Homo sapiens
ccctgctcggcctcc

SEQ ID NO: 1987497 - DNA, 15 bp, Homo sapiens
cctgctcggcctccc

SEQ ID NO: 1987498 - DNA, 15 bp, Homo sapiens
ctgctcggcctcccg

SEQ ID NO: 1987499 - DNA, 15 bp, Homo sapiens
tgctcggcctcccga

SEQ ID NO: 1987500 - DNA, 15 bp, Homo sapiens
gctcggcctcccgaa

SEQ ID NO: 1987501 - DNA, 15 bp, Homo sapiens
ctcggcctcccgaag

SEQ ID NO: 1987502 - DNA, 15 bp, Homo sapiens
tcggcctcccgaagt

SEQ ID NO: 1987503 - DNA, 15 bp, Homo sapiens
cggcctcccgaagtg

SEQ ID NO: 1987504 - DNA, 15 bp, Homo sapiens
ggcctcccgaagtgc

SEQ ID NO: 1987505 - DNA, 15 bp, Homo sapiens
gcctcccgaagtgct

SEQ ID NO: 1987506 - DNA, 15 bp, Homo sapiens
cctcccgaagtgctg

SEQ ID NO: 1987507 - DNA, 15 bp, Homo sapiens
ctcccgaagtgctgg

SEQ ID NO: 1987508 - DNA, 15 bp, Homo sapiens
tcccgaagtgctggg

SEQ ID NO: 1987509 - DNA, 15 bp, Homo sapiens
cccgaagtgctggga

SEQ ID NO: 1987510 - DNA, 15 bp, Homo sapiens
ccgaagtgctgggat

SEQ ID NO: 1987511 - DNA, 15 bp, Homo sapiens
cgaagtgctgggatt

SEQ ID NO: 1987512 - DNA, 15 bp, Homo sapiens
gaagtgctgggatta

SEQ ID NO: 1987513 - DNA, 15 bp, Homo sapiens
gtgcctggcctattc

SEQ ID NO: 1987514 - DNA, 15 bp, Homo sapiens
tgcctggcctattcc

SEQ ID NO: 1987515 - DNA, 15 bp, Homo sapiens
gcctggcctattcct

SEQ ID NO: 1987516 - DNA, 15 bp, Homo sapiens
cctggcctattcctc

SEQ ID NO: 1987517 - DNA, 15 bp, Homo sapiens
ctggcctattcctca

SEQ ID NO: 1987518 - DNA, 15 bp, Homo sapiens
tggcctattcctcac

SEQ ID NO: 1987519 - DNA, 15 bp, Homo sapiens
gcctattcctcacat

SEQ ID NO: 1987520 - DNA, 15 bp, Homo sapiens
cctattcctcacatt

SEQ ID NO: 1987521 - DNA, 15 bp, Homo sapiens
ctattcctcacattt

SEQ ID NO: 1987522 - DNA, 15 bp, Homo sapiens
tattcctcacatttt

SEQ ID NO: 1987523 - DNA, 15 bp, Homo sapiens
attcctcacattttt

SEQ ID NO: 1987524 - DNA, 15 bp, Homo sapiens
ttcctcacatttttc

SEQ ID NO: 1987525 - DNA, 15 bp, Homo sapiens
tcctcacatttttct

SEQ ID NO: 1987526 - DNA, 15 bp, Homo sapiens
cctcacatttttctc

SEQ ID NO: 1987527 - DNA, 15 bp, Homo sapiens
ctcacatttttctct

SEQ ID NO: 1987528 - DNA, 15 bp, Homo sapiens
tcacatttttctctt

SEQ ID NO: 1987529 - DNA, 15 bp, Homo sapiens
cacatttttctctta

SEQ ID NO: 1987530 - DNA, 15 bp, Homo sapiens
acatttttctcttag

SEQ ID NO: 1987531 - DNA, 15 bp, Homo sapiens
catttttctcttaga

SEQ ID NO: 1987532 - DNA, 15 bp, Homo sapiens
atttttctcttagaa

SEQ ID NO: 1987533 - DNA, 15 bp, Homo sapiens
tttttctcttagaaa

SEQ ID NO: 1987534 - DNA, 15 bp, Homo sapiens
ttttctcttagaaag

SEQ ID NO: 1987535 - DNA, 15 bp, Homo sapiens
tttctcttagaaagt

SEQ ID NO: 1987536 - DNA, 15 bp, Homo sapiens
ttctcttagaaagtt

SEQ ID NO: 1987537 - DNA, 15 bp, Homo sapiens
tctcttagaaagtta

SEQ ID NO: 1987538 - DNA, 15 bp, Homo sapiens
ctcttagaaagttaa

SEQ ID NO: 1987539 - DNA, 15 bp, Homo sapiens
tcttagaaagttaaa

SEQ ID NO: 1987540 - DNA, 15 bp, Homo sapiens
cttagaaagttaaag

SEQ ID NO: 1987541 - DNA, 15 bp, Homo sapiens
ttagaaagttaaagt

SEQ ID NO: 1987542 - DNA, 15 bp, Homo sapiens
tagaaagttaaagtc

SEQ ID NO: 1987543 - DNA, 15 bp, Homo sapiens
agaaagttaaagtct

SEQ ID NO: 1987544 - DNA, 15 bp, Homo sapiens
gaaagttaaagtctc

SEQ ID NO: 1987545 - DNA, 15 bp, Homo sapiens
aaagttaaagtctct

SEQ ID NO: 1987546 - DNA, 15 bp, Homo sapiens
aagttaaagtctctg

SEQ ID NO: 1987547 - DNA, 15 bp, Homo sapiens
agttaaagtctctga

SEQ ID NO: 1987548 - DNA, 15 bp, Homo sapiens
gttaaagtctctgac

SEQ ID NO: 1987549 - DNA, 15 bp, Homo sapiens
ttaaagtctctgacc

SEQ ID NO: 1987550 - DNA, 15 bp, Homo sapiens
taaagtctctgacct

SEQ ID NO: 1987551 - DNA, 15 bp, Homo sapiens
aaagtctctgacctt

SEQ ID NO: 1987552 - DNA, 15 bp, Homo sapiens
aagtctctgaccttg

SEQ ID NO: 1987553 - DNA, 15 bp, Homo sapiens
agtctctgaccttga

SEQ ID NO: 1987554 - DNA, 15 bp, Homo sapiens
gtctctgaccttgag

SEQ ID NO: 1987555 - DNA, 15 bp, Homo sapiens
tctctgaccttgaga

SEQ ID NO: 1987556 - DNA, 15 bp, Homo sapiens
ctctgaccttgagat

SEQ ID NO: 1987557 - DNA, 15 bp, Homo sapiens
tctgaccttgagata

SEQ ID NO: 1987558 - DNA, 15 bp, Homo sapiens
ctgaccttgagatac

SEQ ID NO: 1987559 - DNA, 15 bp, Homo sapiens
tgaccttgagataca

SEQ ID NO: 1987560 - DNA, 15 bp, Homo sapiens
gaccttgagatacaa

SEQ ID NO: 1987561 - DNA, 15 bp, Homo sapiens
accttgagatacaaa

SEQ ID NO: 1987562 - DNA, 15 bp, Homo sapiens
ccttgagatacaaaa

SEQ ID NO: 1987563 - DNA, 15 bp, Homo sapiens
cttgagatacaaaaa

SEQ ID NO: 1987564 - DNA, 15 bp, Homo sapiens
ttgagatacaaaaat

SEQ ID NO: 1987565 - DNA, 15 bp, Homo sapiens
tgagatacaaaaatg

SEQ ID NO: 1987566 - DNA, 15 bp, Homo sapiens
gagatacaaaaatgt

SEQ ID NO: 1987567 - DNA, 15 bp, Homo sapiens
agatacaaaaatgta

SEQ ID NO: 1987568 - DNA, 15 bp, Homo sapiens
gatacaaaaatgtaa

SEQ ID NO: 1987569 - DNA, 15 bp, Homo sapiens
atacaaaaatgtaag

SEQ ID NO: 1987570 - DNA, 15 bp, Homo sapiens
tacaaaaatgtaagg

SEQ ID NO: 1987571 - DNA, 15 bp, Homo sapiens
acaaaaatgtaaggg

SEQ ID NO: 1987572 - DNA, 15 bp, Homo sapiens
caaaaatgtaagggt

SEQ ID NO: 1987573 - DNA, 15 bp, Homo sapiens
aaaaatgtaagggtt

SEQ ID NO: 1987574 - DNA, 15 bp, Homo sapiens
aaaatgtaagggttt

SEQ ID NO: 1987575 - DNA, 15 bp, Homo sapiens
aaatgtaagggtttt

SEQ ID NO: 1987576 - DNA, 15 bp, Homo sapiens
aatgtaagggttttc

SEQ ID NO: 1987577 - DNA, 15 bp, Homo sapiens
atgtaagggttttca

SEQ ID NO: 1987578 - DNA, 15 bp, Homo sapiens
tgtaagggttttcag

SEQ ID NO: 1987579 - DNA, 15 bp, Homo sapiens
gtaagggttttcagt

SEQ ID NO: 1987580 - DNA, 15 bp, Homo sapiens
taagggttttcagtg

SEQ ID NO: 1987581 - DNA, 15 bp, Homo sapiens
aagggttttcagtgt

SEQ ID NO: 1987582 - DNA, 15 bp, Homo sapiens
agggttttcagtgtt

SEQ ID NO: 1987583 - DNA, 15 bp, Homo sapiens
gggttttcagtgttt

SEQ ID NO: 1987584 - DNA, 15 bp, Homo sapiens
ggttttcagtgttta

SEQ ID NO: 1987585 - DNA, 15 bp, Homo sapiens
gttttcagtgtttaa

SEQ ID NO: 1987586 - DNA, 15 bp, Homo sapiens
ttttcagtgtttaac

SEQ ID NO: 1987587 - DNA, 15 bp, Homo sapiens
tttcagtgtttaaca

SEQ ID NO: 1987588 - DNA, 15 bp, Homo sapiens
ttcagtgtttaacat

SEQ ID NO: 1987589 - DNA, 15 bp, Homo sapiens
tcagtgtttaacata

SEQ ID NO: 1987590 - DNA, 15 bp, Homo sapiens
cagtgtttaacataa

SEQ ID NO: 1987591 - DNA, 15 bp, Homo sapiens
agtgtttaacataag

SEQ ID NO: 1987592 - DNA, 15 bp, Homo sapiens
gtgtttaacataagg

SEQ ID NO: 1987593 - DNA, 15 bp, Homo sapiens
tgtttaacataaggt

SEQ ID NO: 1987594 - DNA, 15 bp, Homo sapiens
gtttaacataaggta

SEQ ID NO: 1987595 - DNA, 15 bp, Homo sapiens
tttaacataaggtac

SEQ ID NO: 1987596 - DNA, 15 bp, Homo sapiens
ttaacataaggtact

SEQ ID NO: 1987597 - DNA, 15 bp, Homo sapiens
taacataaggtactt

SEQ ID NO: 1987598 - DNA, 15 bp, Homo sapiens
aacataaggtactta

SEQ ID NO: 1987599 - DNA, 15 bp, Homo sapiens
acataaggtacttat

SEQ ID NO: 1987600 - DNA, 15 bp, Homo sapiens
cataaggtacttata

SEQ ID NO: 1987601 - DNA, 15 bp, Homo sapiens
ataaggtacttatat

SEQ ID NO: 1987602 - DNA, 15 bp, Homo sapiens
taaggtacttatata

SEQ ID NO: 1987603 - DNA, 15 bp, Homo sapiens
aaggtacttatatat

SEQ ID NO: 1987604 - DNA, 15 bp, Homo sapiens
aggtacttatatata

SEQ ID NO: 1987605 - DNA, 15 bp, Homo sapiens
ggtacttatatatat

SEQ ID NO: 1987606 - DNA, 15 bp, Homo sapiens
gtacttatatatatt

SEQ ID NO: 1987607 - DNA, 15 bp, Homo sapiens
tacttatatatatta

SEQ ID NO: 1987608 - DNA, 15 bp, Homo sapiens
acttatatatattat

SEQ ID NO: 1987609 - DNA, 15 bp, Homo sapiens
cttatatatattata

SEQ ID NO: 1987610 - DNA, 15 bp, Homo sapiens
ttatatatattatat

SEQ ID NO: 1987611 - DNA, 15 bp, Homo sapiens
tatatatattatata

SEQ ID NO: 1987612 - DNA, 15 bp, Homo sapiens
atatatattatatat

SEQ ID NO: 1987613 - DNA, 15 bp, Homo sapiens
atatattatatatag

SEQ ID NO: 1987614 - DNA, 15 bp, Homo sapiens
tatattatatatagt

SEQ ID NO: 1987615 - DNA, 15 bp, Homo sapiens
atattatatatagta

SEQ ID NO: 1987616 - DNA, 15 bp, Homo sapiens
tattatatatagtat

SEQ ID NO: 1987617 - DNA, 15 bp, Homo sapiens
attatatatagtata

SEQ ID NO: 1987618 - DNA, 15 bp, Homo sapiens
ttatatatagtatat

SEQ ID NO: 1987619 - DNA, 15 bp, Homo sapiens
tatatatagtatata

SEQ ID NO: 1987620 - DNA, 15 bp, Homo sapiens
atatatagtatatat

SEQ ID NO: 1987621 - DNA, 15 bp, Homo sapiens
tatagtatatatata

SEQ ID NO: 1987622 - DNA, 15 bp, Homo sapiens
atagtatatatataa

SEQ ID NO: 1987623 - DNA, 15 bp, Homo sapiens
tagtatatatataaa

SEQ ID NO: 1987624 - DNA, 15 bp, Homo sapiens
agtatatatataaaa

SEQ ID NO: 1987625 - DNA, 15 bp, Homo sapiens
gtatatatataaaat

SEQ ID NO: 1987626 - DNA, 15 bp, Homo sapiens
atatatataaaataa

SEQ ID NO: 1987627 - DNA, 15 bp, Homo sapiens
tatatataaaataaa

SEQ ID NO: 1987628 - DNA, 15 bp, Homo sapiens
atataaaataaatta

SEQ ID NO: 1987629 - DNA, 15 bp, Homo sapiens
tataaaataaattaa

SEQ ID NO: 1987630 - DNA, 15 bp, Homo sapiens
ataaaataaattaat

SEQ ID NO: 1987631 - DNA, 15 bp, Homo sapiens
taaaataaattaata

SEQ ID NO: 1987632 - DNA, 15 bp, Homo sapiens
aaaataaattaatat

SEQ ID NO: 1987633 - DNA, 15 bp, Homo sapiens
aaataaattaatata

SEQ ID NO: 1987634 - DNA, 15 bp, Homo sapiens
aataaattaatatat

SEQ ID NO: 1987635 - DNA, 15 bp, Homo sapiens
ataaattaatatatt

SEQ ID NO: 1987636 - DNA, 15 bp, Homo sapiens
taaattaatatatta

SEQ ID NO: 1987637 - DNA, 15 bp, Homo sapiens
aaattaatatattaa

SEQ ID NO: 1987638 - DNA, 15 bp, Homo sapiens
aattaatatattaat

SEQ ID NO: 1987639 - DNA, 15 bp, Homo sapiens
attaatatattaatt

SEQ ID NO: 1987640 - DNA, 15 bp, Homo sapiens
ttaatatattaattt

SEQ ID NO: 1987641 - DNA, 15 bp, Homo sapiens
taatatattaattta

SEQ ID NO: 1987642 - DNA, 15 bp, Homo sapiens
aatatattaatttat

SEQ ID NO: 1987643 - DNA, 15 bp, Homo sapiens
atatattaatttatt

SEQ ID NO: 1987644 - DNA, 15 bp, Homo sapiens
tatattaatttatta

SEQ ID NO: 1987645 - DNA, 15 bp, Homo sapiens
atattaatttattat

SEQ ID NO: 1987646 - DNA, 15 bp, Homo sapiens
tattaatttattata

SEQ ID NO: 1987647 - DNA, 15 bp, Homo sapiens
attaatttattatat

SEQ ID NO: 1987648 - DNA, 15 bp, Homo sapiens
ttaatttattatata

SEQ ID NO: 1987649 - DNA, 15 bp, Homo sapiens
taatttattatataa

SEQ ID NO: 1987650 - DNA, 15 bp, Homo sapiens
aatttattatataag

SEQ ID NO: 1987651 - DNA, 15 bp, Homo sapiens
atttattatataagt

SEQ ID NO: 1987652 - DNA, 15 bp, Homo sapiens
tttattatataagtg

SEQ ID NO: 1987653 - DNA, 15 bp, Homo sapiens
ttattatataagtga

SEQ ID NO: 1987654 - DNA, 15 bp, Homo sapiens
tattatataagtgat

SEQ ID NO: 1987655 - DNA, 15 bp, Homo sapiens
attatataagtgata

SEQ ID NO: 1987656 - DNA, 15 bp, Homo sapiens
ttatataagtgataa

SEQ ID NO: 1987657 - DNA, 15 bp, Homo sapiens
tatataagtgataaa

SEQ ID NO: 1987658 - DNA, 15 bp, Homo sapiens
atataagtgataaat

SEQ ID NO: 1987659 - DNA, 15 bp, Homo sapiens
tataagtgataaatg

SEQ ID NO: 1987660 - DNA, 15 bp, Homo sapiens
ataagtgataaatgt

SEQ ID NO: 1987661 - DNA, 15 bp, Homo sapiens
taagtgataaatgtt

SEQ ID NO: 1987662 - DNA, 15 bp, Homo sapiens
aagtgataaatgttt

SEQ ID NO: 1987663 - DNA, 15 bp, Homo sapiens
agtgataaatgttta

SEQ ID NO: 1987664 - DNA, 15 bp, Homo sapiens
gtgataaatgtttaa

SEQ ID NO: 1987665 - DNA, 15 bp, Homo sapiens
tgataaatgtttaat

SEQ ID NO: 1987666 - DNA, 15 bp, Homo sapiens
gataaatgtttaatt

SEQ ID NO: 1987667 - DNA, 15 bp, Homo sapiens
ataaatgtttaattc

SEQ ID NO: 1987668 - DNA, 15 bp, Homo sapiens
taaatgtttaattca

SEQ ID NO: 1987669 - DNA, 15 bp, Homo sapiens
aaatgtttaattcaa

SEQ ID NO: 1987670 - DNA, 15 bp, Homo sapiens
aatgtttaattcaaa

SEQ ID NO: 1987671 - DNA, 15 bp, Homo sapiens
atgtttaattcaaat

SEQ ID NO: 1987672 - DNA, 15 bp, Homo sapiens
tgtttaattcaaatt

SEQ ID NO: 1987673 - DNA, 15 bp, Homo sapiens
gtttaattcaaatta

SEQ ID NO: 1987674 - DNA, 15 bp, Homo sapiens
tttaattcaaattag

SEQ ID NO: 1987675 - DNA, 15 bp, Homo sapiens
ttaattcaaattaga

SEQ ID NO: 1987676 - DNA, 15 bp, Homo sapiens
taattcaaattagag

SEQ ID NO: 1987677 - DNA, 15 bp, Homo sapiens
aattcaaattagagt

SEQ ID NO: 1987678 - DNA, 15 bp, Homo sapiens
attcaaattagagtt

SEQ ID NO: 1987679 - DNA, 15 bp, Homo sapiens
ttcaaattagagttc

SEQ ID NO: 1987680 - DNA, 15 bp, Homo sapiens
tcaaattagagttca

SEQ ID NO: 1987681 - DNA, 15 bp, Homo sapiens
caaattagagttcac

SEQ ID NO: 1987682 - DNA, 15 bp, Homo sapiens
aaattagagttcacc

SEQ ID NO: 1987683 - DNA, 15 bp, Homo sapiens
aattagagttcacct

SEQ ID NO: 1987684 - DNA, 15 bp, Homo sapiens
attagagttcacctt

SEQ ID NO: 1987685 - DNA, 15 bp, Homo sapiens
ttagagttcacctta

SEQ ID NO: 1987686 - DNA, 15 bp, Homo sapiens
tagagttcaccttac

SEQ ID NO: 1987687 - DNA, 15 bp, Homo sapiens
agagttcaccttacg

SEQ ID NO: 1987688 - DNA, 15 bp, Homo sapiens
gagttcaccttacgg

SEQ ID NO: 1987689 - DNA, 15 bp, Homo sapiens
agttcaccttacggt

SEQ ID NO: 1987690 - DNA, 15 bp, Homo sapiens
gttcaccttacggtt

SEQ ID NO: 1987691 - DNA, 15 bp, Homo sapiens
ttcaccttacggttg

SEQ ID NO: 1987692 - DNA, 15 bp, Homo sapiens
tcaccttacggttga

SEQ ID NO: 1987693 - DNA, 15 bp, Homo sapiens
caccttacggttgaa

SEQ ID NO: 1987694 - DNA, 15 bp, Homo sapiens
accttacggttgaaa

SEQ ID NO: 1987695 - DNA, 15 bp, Homo sapiens
ccttacggttgaaaa

SEQ ID NO: 1987696 - DNA, 15 bp, Homo sapiens
cttacggttgaaaat

SEQ ID NO: 1987697 - DNA, 15 bp, Homo sapiens
ttacggttgaaaatg

SEQ ID NO: 1987698 - DNA, 15 bp, Homo sapiens
tacggttgaaaatgt

SEQ ID NO: 1987699 - DNA, 15 bp, Homo sapiens
acggttgaaaatgtc

SEQ ID NO: 1987700 - DNA, 15 bp, Homo sapiens
cggttgaaaatgtct

SEQ ID NO: 1987701 - DNA, 15 bp, Homo sapiens
ggttgaaaatgtctt

SEQ ID NO: 1987702 - DNA, 15 bp, Homo sapiens
gttgaaaatgtcttt

SEQ ID NO: 1987703 - DNA, 15 bp, Homo sapiens
ttgaaaatgtctttt

SEQ ID NO: 1987704 - DNA, 15 bp, Homo sapiens
tgaaaatgtctttta

SEQ ID NO: 1987705 - DNA, 15 bp, Homo sapiens
gaaaatgtcttttag

SEQ ID NO: 1987706 - DNA, 15 bp, Homo sapiens
aaaatgtcttttagt

SEQ ID NO: 1987707 - DNA, 15 bp, Homo sapiens
aaatgtcttttagtc

SEQ ID NO: 1987708 - DNA, 15 bp, Homo sapiens
aatgtcttttagtca

SEQ ID NO: 1987709 - DNA, 15 bp, Homo sapiens
atgtcttttagtcag

SEQ ID NO: 1987710 - DNA, 15 bp, Homo sapiens
tgtcttttagtcaga

SEQ ID NO: 1987711 - DNA, 15 bp, Homo sapiens
gtcttttagtcagaa

SEQ ID NO: 1987712 - DNA, 15 bp, Homo sapiens
tcttttagtcagaaa

SEQ ID NO: 1987713 - DNA, 15 bp, Homo sapiens
cttttagtcagaaaa

SEQ ID NO: 1987714 - DNA, 15 bp, Homo sapiens
ttttagtcagaaaac

SEQ ID NO: 1987715 - DNA, 15 bp, Homo sapiens
tttagtcagaaaact

SEQ ID NO: 1987716 - DNA, 15 bp, Homo sapiens
ttagtcagaaaactg

SEQ ID NO: 1987717 - DNA, 15 bp, Homo sapiens
tagtcagaaaactga

SEQ ID NO: 1987718 - DNA, 15 bp, Homo sapiens
agtcagaaaactgag

SEQ ID NO: 1987719 - DNA, 15 bp, Homo sapiens
gtcagaaaactgagg

SEQ ID NO: 1987720 - DNA, 15 bp, Homo sapiens
tcagaaaactgaggc

SEQ ID NO: 1987721 - DNA, 15 bp, Homo sapiens
cagaaaactgaggca

SEQ ID NO: 1987722 - DNA, 15 bp, Homo sapiens
agaaaactgaggcat

SEQ ID NO: 1987723 - DNA, 15 bp, Homo sapiens
gaaaactgaggcatg

SEQ ID NO: 1987724 - DNA, 15 bp, Homo sapiens
aaaactgaggcatgg

SEQ ID NO: 1987725 - DNA, 15 bp, Homo sapiens
aaactgaggcatggg

SEQ ID NO: 1987726 - DNA, 15 bp, Homo sapiens
aactgaggcatggga

SEQ ID NO: 1987727 - DNA, 15 bp, Homo sapiens
actgaggcatgggaa

SEQ ID NO: 1987728 - DNA, 15 bp, Homo sapiens
ctgaggcatgggaag

SEQ ID NO: 1987729 - DNA, 15 bp, Homo sapiens
tgaggcatgggaagg

SEQ ID NO: 1987730 - DNA, 15 bp, Homo sapiens
gaggcatgggaaggt

SEQ ID NO: 1987731 - DNA, 15 bp, Homo sapiens
aggcatgggaaggtt

SEQ ID NO: 1987732 - DNA, 15 bp, Homo sapiens
ggcatgggaaggtta

SEQ ID NO: 1987733 - DNA, 15 bp, Homo sapiens
gcatgggaaggttaa

SEQ ID NO: 1987734 - DNA, 15 bp, Homo sapiens
catgggaaggttaag

SEQ ID NO: 1987735 - DNA, 15 bp, Homo sapiens
atgggaaggttaagt

SEQ ID NO: 1987736 - DNA, 15 bp, Homo sapiens
tgggaaggttaagtg

SEQ ID NO: 1987737 - DNA, 15 bp, Homo sapiens
gggaaggttaagtga

SEQ ID NO: 1987738 - DNA, 15 bp, Homo sapiens
ggaaggttaagtgac

SEQ ID NO: 1987739 - DNA, 15 bp, Homo sapiens
gaaggttaagtgaca

SEQ ID NO: 1987740 - DNA, 15 bp, Homo sapiens
aaggttaagtgacat

SEQ ID NO: 1987741 - DNA, 15 bp, Homo sapiens
aggttaagtgacata

SEQ ID NO: 1987742 - DNA, 15 bp, Homo sapiens
ggttaagtgacatag

SEQ ID NO: 1987743 - DNA, 15 bp, Homo sapiens
gttaagtgacataga

SEQ ID NO: 1987744 - DNA, 15 bp, Homo sapiens
ttaagtgacatagat

SEQ ID NO: 1987745 - DNA, 15 bp, Homo sapiens
taagtgacatagatc

SEQ ID NO: 1987746 - DNA, 15 bp, Homo sapiens
aagtgacatagatct

SEQ ID NO: 1987747 - DNA, 15 bp, Homo sapiens
agtgacatagatcta

SEQ ID NO: 1987748 - DNA, 15 bp, Homo sapiens
gtgacatagatctaa

SEQ ID NO: 1987749 - DNA, 15 bp, Homo sapiens
tgacatagatctaat

SEQ ID NO: 1987750 - DNA, 15 bp, Homo sapiens
gacatagatctaata

SEQ ID NO: 1987751 - DNA, 15 bp, Homo sapiens
acatagatctaataa

SEQ ID NO: 1987752 - DNA, 15 bp, Homo sapiens
catagatctaataag

SEQ ID NO: 1987753 - DNA, 15 bp, Homo sapiens
atagatctaataaga

SEQ ID NO: 1987754 - DNA, 15 bp, Homo sapiens
tagatctaataagag

SEQ ID NO: 1987755 - DNA, 15 bp, Homo sapiens
agatctaataagagc

SEQ ID NO: 1987756 - DNA, 15 bp, Homo sapiens
gatctaataagagct

SEQ ID NO: 1987757 - DNA, 15 bp, Homo sapiens
atctaataagagctt

SEQ ID NO: 1987758 - DNA, 15 bp, Homo sapiens
tctaataagagcttc

SEQ ID NO: 1987759 - DNA, 15 bp, Homo sapiens
ctaataagagcttca

SEQ ID NO: 1987760 - DNA, 15 bp, Homo sapiens
taataagagcttcag

SEQ ID NO: 1987761 - DNA, 15 bp, Homo sapiens
aataagagcttcagt

SEQ ID NO: 1987762 - DNA, 15 bp, Homo sapiens
ataagagcttcagta

SEQ ID NO: 1987763 - DNA, 15 bp, Homo sapiens
taagagcttcagtat

SEQ ID NO: 1987764 - DNA, 15 bp, Homo sapiens
aagagcttcagtatg

SEQ ID NO: 1987765 - DNA, 15 bp, Homo sapiens
agagcttcagtatga

SEQ ID NO: 1987766 - DNA, 15 bp, Homo sapiens
gagcttcagtatgaa

SEQ ID NO: 1987767 - DNA, 15 bp, Homo sapiens
agcttcagtatgaaa

SEQ ID NO: 1987768 - DNA, 15 bp, Homo sapiens
gcttcagtatgaaaa

SEQ ID NO: 1987769 - DNA, 15 bp, Homo sapiens
cttcagtatgaaaag

SEQ ID NO: 1987770 - DNA, 15 bp, Homo sapiens
ttcagtatgaaaagt

SEQ ID NO: 1987771 - DNA, 15 bp, Homo sapiens
tcagtatgaaaagta

SEQ ID NO: 1987772 - DNA, 15 bp, Homo sapiens
cagtatgaaaagtag

SEQ ID NO: 1987773 - DNA, 15 bp, Homo sapiens
agtatgaaaagtagt

SEQ ID NO: 1987774 - DNA, 15 bp, Homo sapiens
gtatgaaaagtagtg

SEQ ID NO: 1987775 - DNA, 15 bp, Homo sapiens
tatgaaaagtagtga

SEQ ID NO: 1987776 - DNA, 15 bp, Homo sapiens
atgaaaagtagtgaa

SEQ ID NO: 1987777 - DNA, 15 bp, Homo sapiens
tgaaaagtagtgaat

SEQ ID NO: 1987778 - DNA, 15 bp, Homo sapiens
gaaaagtagtgaatg

SEQ ID NO: 1987779 - DNA, 15 bp, Homo sapiens
aaaagtagtgaatgc

SEQ ID NO: 1987780 - DNA, 15 bp, Homo sapiens
aaagtagtgaatgct

SEQ ID NO: 1987781 - DNA, 15 bp, Homo sapiens
aagtagtgaatgctt

SEQ ID NO: 1987782 - DNA, 15 bp, Homo sapiens
agtagtgaatgcttg

SEQ ID NO: 1987783 - DNA, 15 bp, Homo sapiens
gtagtgaatgcttga

SEQ ID NO: 1987784 - DNA, 15 bp, Homo sapiens
tagtgaatgcttgac

SEQ ID NO: 1987785 - DNA, 15 bp, Homo sapiens
agtgaatgcttgacc

SEQ ID NO: 1987786 - DNA, 15 bp, Homo sapiens
gtgaatgcttgacca

SEQ ID NO: 1987787 - DNA, 15 bp, Homo sapiens
tgaatgcttgaccat

SEQ ID NO: 1987788 - DNA, 15 bp, Homo sapiens
gaatgcttgaccatc

SEQ ID NO: 1987789 - DNA, 15 bp, Homo sapiens
aatgcttgaccatca

SEQ ID NO: 1987790 - DNA, 15 bp, Homo sapiens
atgcttgaccatcag

SEQ ID NO: 1987791 - DNA, 15 bp, Homo sapiens
tgcttgaccatcagg

SEQ ID NO: 1987792 - DNA, 15 bp, Homo sapiens
gcttgaccatcaggg

SEQ ID NO: 1987793 - DNA, 15 bp, Homo sapiens
cttgaccatcaggga

SEQ ID NO: 1987794 - DNA, 15 bp, Homo sapiens
ttgaccatcagggag

SEQ ID NO: 1987795 - DNA, 15 bp, Homo sapiens
tgaccatcagggaga

SEQ ID NO: 1987796 - DNA, 15 bp, Homo sapiens
gaccatcagggagat

SEQ ID NO: 1987797 - DNA, 15 bp, Homo sapiens
accatcagggagata

SEQ ID NO: 1987798 - DNA, 15 bp, Homo sapiens
ccatcagggagatac

SEQ ID NO: 1987799 - DNA, 15 bp, Homo sapiens
catcagggagatact

SEQ ID NO: 1987800 - DNA, 15 bp, Homo sapiens
atcagggagatactt

SEQ ID NO: 1987801 - DNA, 15 bp, Homo sapiens
tcagggagatacttt

SEQ ID NO: 1987802 - DNA, 15 bp, Homo sapiens
cagggagatactttt

SEQ ID NO: 1987803 - DNA, 15 bp, Homo sapiens
agggagatacttttc

SEQ ID NO: 1987804 - DNA, 15 bp, Homo sapiens
gggagatacttttcc

SEQ ID NO: 1987805 - DNA, 15 bp, Homo sapiens
ggagatacttttcct

SEQ ID NO: 1987806 - DNA, 15 bp, Homo sapiens
gagatacttttccta

SEQ ID NO: 1987807 - DNA, 15 bp, Homo sapiens
agatacttttcctaa

SEQ ID NO: 1987808 - DNA, 15 bp, Homo sapiens
gatacttttcctaag

SEQ ID NO: 1987809 - DNA, 15 bp, Homo sapiens
atacttttcctaagt

SEQ ID NO: 1987810 - DNA, 15 bp, Homo sapiens
tacttttcctaagta

SEQ ID NO: 1987811 - DNA, 15 bp, Homo sapiens
acttttcctaagtat

SEQ ID NO: 1987812 - DNA, 15 bp, Homo sapiens
cttttcctaagtatc

SEQ ID NO: 1987813 - DNA, 15 bp, Homo sapiens
ttttcctaagtatcc

SEQ ID NO: 1987814 - DNA, 15 bp, Homo sapiens
tttcctaagtatccc

SEQ ID NO: 1987815 - DNA, 15 bp, Homo sapiens
ttcctaagtatccca

SEQ ID NO: 1987816 - DNA, 15 bp, Homo sapiens
tcctaagtatcccat

SEQ ID NO: 1987817 - DNA, 15 bp, Homo sapiens
cctaagtatcccata

SEQ ID NO: 1987818 - DNA, 15 bp, Homo sapiens
ctaagtatcccataa

SEQ ID NO: 1987819 - DNA, 15 bp, Homo sapiens
taagtatcccataaa

SEQ ID NO: 1987820 - DNA, 15 bp, Homo sapiens
aagtatcccataaaa

SEQ ID NO: 1987821 - DNA, 15 bp, Homo sapiens
agtatcccataaaat

SEQ ID NO: 1987822 - DNA, 15 bp, Homo sapiens
gtatcccataaaatt

SEQ ID NO: 1987823 - DNA, 15 bp, Homo sapiens
tatcccataaaattt

SEQ ID NO: 1987824 - DNA, 15 bp, Homo sapiens
atcccataaaatttg

SEQ ID NO: 1987825 - DNA, 15 bp, Homo sapiens
tcccataaaatttgt

SEQ ID NO: 1987826 - DNA, 15 bp, Homo sapiens
cccataaaatttgtt

SEQ ID NO: 1987827 - DNA, 15 bp, Homo sapiens
ccataaaatttgttc

SEQ ID NO: 1987828 - DNA, 15 bp, Homo sapiens
cataaaatttgttct

SEQ ID NO: 1987829 - DNA, 15 bp, Homo sapiens
ataaaatttgttcta

SEQ ID NO: 1987830 - DNA, 15 bp, Homo sapiens
taaaatttgttctaa

SEQ ID NO: 1987831 - DNA, 15 bp, Homo sapiens
aaaatttgttctaat

SEQ ID NO: 1987832 - DNA, 15 bp, Homo sapiens
aaatttgttctaatc

SEQ ID NO: 1987833 - DNA, 15 bp, Homo sapiens
aatttgttctaatcc

SEQ ID NO: 1987834 - DNA, 15 bp, Homo sapiens
atttgttctaatcca

SEQ ID NO: 1987835 - DNA, 15 bp, Homo sapiens
tttgttctaatccat

SEQ ID NO: 1987836 - DNA, 15 bp, Homo sapiens
ttgttctaatccatt

SEQ ID NO: 1987837 - DNA, 15 bp, Homo sapiens
tgttctaatccatta

SEQ ID NO: 1987838 - DNA, 15 bp, Homo sapiens
gttctaatccattaa

SEQ ID NO: 1987839 - DNA, 15 bp, Homo sapiens
ttctaatccattaaa

SEQ ID NO: 1987840 - DNA, 15 bp, Homo sapiens
tctaatccattaaat

SEQ ID NO: 1987841 - DNA, 15 bp, Homo sapiens
ctaatccattaaata

SEQ ID NO: 1987842 - DNA, 15 bp, Homo sapiens
taatccattaaatat

SEQ ID NO: 1987843 - DNA, 15 bp, Homo sapiens
aatccattaaatata

SEQ ID NO: 1987844 - DNA, 15 bp, Homo sapiens
atccattaaatatat

SEQ ID NO: 1987845 - DNA, 15 bp, Homo sapiens
tccattaaatatatt

SEQ ID NO: 1987846 - DNA, 15 bp, Homo sapiens
ccattaaatatattt

SEQ ID NO: 1987847 - DNA, 15 bp, Homo sapiens
cattaaatatattta

SEQ ID NO: 1987848 - DNA, 15 bp, Homo sapiens
attaaatatatttag

SEQ ID NO: 1987849 - DNA, 15 bp, Homo sapiens
ttaaatatatttaga

SEQ ID NO: 1987850 - DNA, 15 bp, Homo sapiens
taaatatatttagaa

SEQ ID NO: 1987851 - DNA, 15 bp, Homo sapiens
aaatatatttagaag

SEQ ID NO: 1987852 - DNA, 15 bp, Homo sapiens
aatatatttagaaga

SEQ ID NO: 1987853 - DNA, 15 bp, Homo sapiens
atatatttagaagac

SEQ ID NO: 1987854 - DNA, 15 bp, Homo sapiens
tatatttagaagact

SEQ ID NO: 1987855 - DNA, 15 bp, Homo sapiens
atatttagaagactt

SEQ ID NO: 1987856 - DNA, 15 bp, Homo sapiens
tatttagaagacttt

SEQ ID NO: 1987857 - DNA, 15 bp, Homo sapiens
atttagaagacttta

SEQ ID NO: 1987858 - DNA, 15 bp, Homo sapiens
tttagaagactttat

SEQ ID NO: 1987859 - DNA, 15 bp, Homo sapiens
ttagaagactttatt

SEQ ID NO: 1987860 - DNA, 15 bp, Homo sapiens
tagaagactttattt

SEQ ID NO: 1987861 - DNA, 15 bp, Homo sapiens
agaagactttatttt

SEQ ID NO: 1987862 - DNA, 15 bp, Homo sapiens
gaagactttatttta

SEQ ID NO: 1987863 - DNA, 15 bp, Homo sapiens
aagactttattttat

SEQ ID NO: 1987864 - DNA, 15 bp, Homo sapiens
agactttattttatt

SEQ ID NO: 1987865 - DNA, 15 bp, Homo sapiens
gactttattttattt

SEQ ID NO: 1987866 - DNA, 15 bp, Homo sapiens
attttatttttttta

SEQ ID NO: 1987867 - DNA, 15 bp, Homo sapiens
ttttattttttttat

SEQ ID NO: 1987868 - DNA, 15 bp, Homo sapiens
tttattttttttatt

SEQ ID NO: 1987869 - DNA, 15 bp, Homo sapiens
ttattttttttattt

SEQ ID NO: 1987870 - DNA, 15 bp, Homo sapiens
tattttttttatttt

SEQ ID NO: 1987871 - DNA, 15 bp, Homo sapiens
ttttttttatttttg

SEQ ID NO: 1987872 - DNA, 15 bp, Homo sapiens
tttttttatttttga

SEQ ID NO: 1987873 - DNA, 15 bp, Homo sapiens
ttttttatttttgag

SEQ ID NO: 1987874 - DNA, 15 bp, Homo sapiens
tttttatttttgaga

SEQ ID NO: 1987875 - DNA, 15 bp, Homo sapiens
ttttatttttgagac

SEQ ID NO: 1987876 - DNA, 15 bp, Homo sapiens
tttatttttgagacg

SEQ ID NO: 1987877 - DNA, 15 bp, Homo sapiens
ttatttttgagacgg

SEQ ID NO: 1987878 - DNA, 15 bp, Homo sapiens
tatttttgagacgga

SEQ ID NO: 1987879 - DNA, 15 bp, Homo sapiens
atttttgagacggag

SEQ ID NO: 1987880 - DNA, 15 bp, Homo sapiens
tgagacggagtttca

SEQ ID NO: 1987881 - DNA, 15 bp, Homo sapiens
gagacggagtttcat

SEQ ID NO: 1987882 - DNA, 15 bp, Homo sapiens
agacggagtttcatg

SEQ ID NO: 1987883 - DNA, 15 bp, Homo sapiens
gacggagtttcatga

SEQ ID NO: 1987884 - DNA, 15 bp, Homo sapiens
acggagtttcatgat

SEQ ID NO: 1987885 - DNA, 15 bp, Homo sapiens
cggagtttcatgatt

SEQ ID NO: 1987886 - DNA, 15 bp, Homo sapiens
ggagtttcatgattc

SEQ ID NO: 1987887 - DNA, 15 bp, Homo sapiens
gagtttcatgattct

SEQ ID NO: 1987888 - DNA, 15 bp, Homo sapiens
agtttcatgattctt

SEQ ID NO: 1987889 - DNA, 15 bp, Homo sapiens
gtttcatgattcttg

SEQ ID NO: 1987890 - DNA, 15 bp, Homo sapiens
tttcatgattcttgc

SEQ ID NO: 1987891 - DNA, 15 bp, Homo sapiens
ttcatgattcttgcc

SEQ ID NO: 1987892 - DNA, 15 bp, Homo sapiens
tcatgattcttgcct

SEQ ID NO: 1987893 - DNA, 15 bp, Homo sapiens
catgattcttgccta

SEQ ID NO: 1987894 - DNA, 15 bp, Homo sapiens
atgattcttgcctag

SEQ ID NO: 1987895 - DNA, 15 bp, Homo sapiens
tgattcttgcctagg

SEQ ID NO: 1987896 - DNA, 15 bp, Homo sapiens
gattcttgcctaggc

SEQ ID NO: 1987897 - DNA, 15 bp, Homo sapiens
attcttgcctaggct

SEQ ID NO: 1987898 - DNA, 15 bp, Homo sapiens
ttcttgcctaggctg

SEQ ID NO: 1987899 - DNA, 15 bp, Homo sapiens
tcttgcctaggctgg

SEQ ID NO: 1987900 - DNA, 15 bp, Homo sapiens
cttgcctaggctgga

SEQ ID NO: 1987901 - DNA, 15 bp, Homo sapiens
taggctggagtgcaa

SEQ ID NO: 1987902 - DNA, 15 bp, Homo sapiens
gctggagtgcaatga

SEQ ID NO: 1987903 - DNA, 15 bp, Homo sapiens
ctggagtgcaatgat

SEQ ID NO: 1987904 - DNA, 15 bp, Homo sapiens
tggagtgcaatgatg

SEQ ID NO: 1987905 - DNA, 15 bp, Homo sapiens
ggagtgcaatgatgc

SEQ ID NO: 1987906 - DNA, 15 bp, Homo sapiens
gagtgcaatgatgcg

SEQ ID NO: 1987907 - DNA, 15 bp, Homo sapiens
agtgcaatgatgcga

SEQ ID NO: 1987908 - DNA, 15 bp, Homo sapiens
gtgcaatgatgcgac

SEQ ID NO: 1987909 - DNA, 15 bp, Homo sapiens
tgcaatgatgcgacc

SEQ ID NO: 1987910 - DNA, 15 bp, Homo sapiens
gcaatgatgcgacct

SEQ ID NO: 1987911 - DNA, 15 bp, Homo sapiens
caatgatgcgacctt

SEQ ID NO: 1987912 - DNA, 15 bp, Homo sapiens
aatgatgcgaccttg

SEQ ID NO: 1987913 - DNA, 15 bp, Homo sapiens
atgatgcgaccttgg

SEQ ID NO: 1987914 - DNA, 15 bp, Homo sapiens
tgatgcgaccttggc

SEQ ID NO: 1987915 - DNA, 15 bp, Homo sapiens
gatgcgaccttggct

SEQ ID NO: 1987916 - DNA, 15 bp, Homo sapiens
atgcgaccttggctt

SEQ ID NO: 1987917 - DNA, 15 bp, Homo sapiens
tgcgaccttggctta

SEQ ID NO: 1987918 - DNA, 15 bp, Homo sapiens
gcgaccttggcttac

SEQ ID NO: 1987919 - DNA, 15 bp, Homo sapiens
cgaccttggcttact

SEQ ID NO: 1987920 - DNA, 15 bp, Homo sapiens
gaccttggcttactg

SEQ ID NO: 1987921 - DNA, 15 bp, Homo sapiens
accttggcttactgc

SEQ ID NO: 1987922 - DNA, 15 bp, Homo sapiens
ccttggcttactgca

SEQ ID NO: 1987923 - DNA, 15 bp, Homo sapiens
tactgcaacctctgc

SEQ ID NO: 1987924 - DNA, 15 bp, Homo sapiens
tcagcctcccaagtg

SEQ ID NO: 1987925 - DNA, 15 bp, Homo sapiens
cagcctcccaagtgg

SEQ ID NO: 1987926 - DNA, 15 bp, Homo sapiens
agcctcccaagtggc

SEQ ID NO: 1987927 - DNA, 15 bp, Homo sapiens
gcctcccaagtggct

SEQ ID NO: 1987928 - DNA, 15 bp, Homo sapiens
cctcccaagtggctg

SEQ ID NO: 1987929 - DNA, 15 bp, Homo sapiens
ctcccaagtggctgg

SEQ ID NO: 1987930 - DNA, 15 bp, Homo sapiens
tcccaagtggctggg

SEQ ID NO: 1987931 - DNA, 15 bp, Homo sapiens
cccaagtggctggga

SEQ ID NO: 1987932 - DNA, 15 bp, Homo sapiens
ccaagtggctgggat

SEQ ID NO: 1987933 - DNA, 15 bp, Homo sapiens
caagtggctgggatt

SEQ ID NO: 1987934 - DNA, 15 bp, Homo sapiens
aagtggctgggatta

SEQ ID NO: 1987935 - DNA, 15 bp, Homo sapiens
gcgcctgccaccact

SEQ ID NO: 1987936 - DNA, 15 bp, Homo sapiens
cgcctgccaccactc

SEQ ID NO: 1987937 - DNA, 15 bp, Homo sapiens
gcctgccaccactcc

SEQ ID NO: 1987938 - DNA, 15 bp, Homo sapiens
cctgccaccactcct

SEQ ID NO: 1987939 - DNA, 15 bp, Homo sapiens
ctgccaccactcctg

SEQ ID NO: 1987940 - DNA, 15 bp, Homo sapiens
tgccaccactcctgg

SEQ ID NO: 1987941 - DNA, 15 bp, Homo sapiens
gccaccactcctgga

SEQ ID NO: 1987942 - DNA, 15 bp, Homo sapiens
ccaccactcctggat

SEQ ID NO: 1987943 - DNA, 15 bp, Homo sapiens
caccactcctggata

SEQ ID NO: 1987944 - DNA, 15 bp, Homo sapiens
accactcctggataa

SEQ ID NO: 1987945 - DNA, 15 bp, Homo sapiens
ccactcctggataac

SEQ ID NO: 1987946 - DNA, 15 bp, Homo sapiens
cactcctggataaca

SEQ ID NO: 1987947 - DNA, 15 bp, Homo sapiens
actcctggataacat

SEQ ID NO: 1987948 - DNA, 15 bp, Homo sapiens
ctcctggataacatt

SEQ ID NO: 1987949 - DNA, 15 bp, Homo sapiens
tcctggataacattt

SEQ ID NO: 1987950 - DNA, 15 bp, Homo sapiens
cctggataacatttg

SEQ ID NO: 1987951 - DNA, 15 bp, Homo sapiens
ctggataacatttgt

SEQ ID NO: 1987952 - DNA, 15 bp, Homo sapiens
tggataacatttgtt

SEQ ID NO: 1987953 - DNA, 15 bp, Homo sapiens
ggataacatttgtta

SEQ ID NO: 1987954 - DNA, 15 bp, Homo sapiens
gataacatttgttat

SEQ ID NO: 1987955 - DNA, 15 bp, Homo sapiens
ataacatttgttatt

SEQ ID NO: 1987956 - DNA, 15 bp, Homo sapiens
taacatttgttattt

SEQ ID NO: 1987957 - DNA, 15 bp, Homo sapiens
aacatttgttatttt

SEQ ID NO: 1987958 - DNA, 15 bp, Homo sapiens
acatttgttattttt

SEQ ID NO: 1987959 - DNA, 15 bp, Homo sapiens
catttgttattttta

SEQ ID NO: 1987960 - DNA, 15 bp, Homo sapiens
atttgttatttttag

SEQ ID NO: 1987961 - DNA, 15 bp, Homo sapiens
tttgttatttttagt

SEQ ID NO: 1987962 - DNA, 15 bp, Homo sapiens
ttgttatttttagta

SEQ ID NO: 1987963 - DNA, 15 bp, Homo sapiens
tgttatttttagtag

SEQ ID NO: 1987964 - DNA, 15 bp, Homo sapiens
gttatttttagtaga

SEQ ID NO: 1987965 - DNA, 15 bp, Homo sapiens
tatttttagtagagt

SEQ ID NO: 1987966 - DNA, 15 bp, Homo sapiens
atttttagtagagtg

SEQ ID NO: 1987967 - DNA, 15 bp, Homo sapiens
tttttagtagagtgc

SEQ ID NO: 1987968 - DNA, 15 bp, Homo sapiens
ttttagtagagtgct

SEQ ID NO: 1987969 - DNA, 15 bp, Homo sapiens
tttagtagagtgctg

SEQ ID NO: 1987970 - DNA, 15 bp, Homo sapiens
ttagtagagtgctga

SEQ ID NO: 1987971 - DNA, 15 bp, Homo sapiens
tagtagagtgctgag

SEQ ID NO: 1987972 - DNA, 15 bp, Homo sapiens
agtagagtgctgaga

SEQ ID NO: 1987973 - DNA, 15 bp, Homo sapiens
gtagagtgctgagat

SEQ ID NO: 1987974 - DNA, 15 bp, Homo sapiens
tagagtgctgagatt

SEQ ID NO: 1987975 - DNA, 15 bp, Homo sapiens
agagtgctgagatta

SEQ ID NO: 1987976 - DNA, 15 bp, Homo sapiens
gagtgctgagattac

SEQ ID NO: 1987977 - DNA, 15 bp, Homo sapiens
acaggcgtgagccat

SEQ ID NO: 1987978 - DNA, 15 bp, Homo sapiens
caggcgtgagccatc

SEQ ID NO: 1987979 - DNA, 15 bp, Homo sapiens
aggcgtgagccatcg

SEQ ID NO: 1987980 - DNA, 15 bp, Homo sapiens
ggcgtgagccatcgc

SEQ ID NO: 1987981 - DNA, 15 bp, Homo sapiens
gcgtgagccatcgct

SEQ ID NO: 1987982 - DNA, 15 bp, Homo sapiens
cgtgagccatcgctt

SEQ ID NO: 1987983 - DNA, 15 bp, Homo sapiens
gtgagccatcgctta

SEQ ID NO: 1987984 - DNA, 15 bp, Homo sapiens
tgagccatcgcttac

SEQ ID NO: 1987985 - DNA, 15 bp, Homo sapiens
gagccatcgcttaca

SEQ ID NO: 1987986 - DNA, 15 bp, Homo sapiens
agccatcgcttacat

SEQ ID NO: 1987987 - DNA, 15 bp, Homo sapiens
gccatcgcttacatt

SEQ ID NO: 1987988 - DNA, 15 bp, Homo sapiens
ccatcgcttacattt

SEQ ID NO: 1987989 - DNA, 15 bp, Homo sapiens
catcgcttacatttt

SEQ ID NO: 1987990 - DNA, 15 bp, Homo sapiens
atcgcttacattttt

SEQ ID NO: 1987991 - DNA, 15 bp, Homo sapiens
tcgcttacattttta

SEQ ID NO: 1987992 - DNA, 15 bp, Homo sapiens
cgcttacatttttat

SEQ ID NO: 1987993 - DNA, 15 bp, Homo sapiens
gcttacatttttatt

SEQ ID NO: 1987994 - DNA, 15 bp, Homo sapiens
cttacatttttattg

SEQ ID NO: 1987995 - DNA, 15 bp, Homo sapiens
ttacatttttattga

SEQ ID NO: 1987996 - DNA, 15 bp, Homo sapiens
tacatttttattgag

SEQ ID NO: 1987997 - DNA, 15 bp, Homo sapiens
acatttttattgagg

SEQ ID NO: 1987998 - DNA, 15 bp, Homo sapiens
catttttattgaggg

SEQ ID NO: 1987999 - DNA, 15 bp, Homo sapiens
atttttattgagggg

SEQ ID NO: 1988000 - DNA, 15 bp, Homo sapiens
tttttattgagggga

SEQ ID NO: 1988001 - DNA, 15 bp, Homo sapiens
ttttattgaggggag

SEQ ID NO: 1988002 - DNA, 15 bp, Homo sapiens
tttattgaggggaga

SEQ ID NO: 1988003 - DNA, 15 bp, Homo sapiens
ttattgaggggagaa

SEQ ID NO: 1988004 - DNA, 15 bp, Homo sapiens
tattgaggggagaaa

SEQ ID NO: 1988005 - DNA, 15 bp, Homo sapiens
attgaggggagaaaa

SEQ ID NO: 1988006 - DNA, 15 bp, Homo sapiens
ttgaggggagaaaaa

SEQ ID NO: 1988007 - DNA, 15 bp, Homo sapiens
tgaggggagaaaaag

SEQ ID NO: 1988008 - DNA, 15 bp, Homo sapiens
gaggggagaaaaagc

SEQ ID NO: 1988009 - DNA, 15 bp, Homo sapiens
aggggagaaaaagcc

SEQ ID NO: 1988010 - DNA, 15 bp, Homo sapiens
ggggagaaaaagccc

SEQ ID NO: 1988011 - DNA, 15 bp, Homo sapiens
gggagaaaaagccct

SEQ ID NO: 1988012 - DNA, 15 bp, Homo sapiens
ggagaaaaagccctg

SEQ ID NO: 1988013 - DNA, 15 bp, Homo sapiens
gagaaaaagccctgc

SEQ ID NO: 1988014 - DNA, 15 bp, Homo sapiens
agaaaaagccctgca

SEQ ID NO: 1988015 - DNA, 15 bp, Homo sapiens
gaaaaagccctgcat

SEQ ID NO: 1988016 - DNA, 15 bp, Homo sapiens
aaaaagccctgcatg

SEQ ID NO: 1988017 - DNA, 15 bp, Homo sapiens
aaaagccctgcatgt

SEQ ID NO: 1988018 - DNA, 15 bp, Homo sapiens
aaagccctgcatgta

SEQ ID NO: 1988019 - DNA, 15 bp, Homo sapiens
aagccctgcatgtac

SEQ ID NO: 1988020 - DNA, 15 bp, Homo sapiens
agccctgcatgtact

SEQ ID NO: 1988021 - DNA, 15 bp, Homo sapiens
gccctgcatgtactg

SEQ ID NO: 1988022 - DNA, 15 bp, Homo sapiens
ccctgcatgtactga

SEQ ID NO: 1988023 - DNA, 15 bp, Homo sapiens
cctgcatgtactgag

SEQ ID NO: 1988024 - DNA, 15 bp, Homo sapiens
ctgcatgtactgaga

SEQ ID NO: 1988025 - DNA, 15 bp, Homo sapiens
tgcatgtactgagag

SEQ ID NO: 1988026 - DNA, 15 bp, Homo sapiens
gcatgtactgagaga

SEQ ID NO: 1988027 - DNA, 15 bp, Homo sapiens
catgtactgagagat

SEQ ID NO: 1988028 - DNA, 15 bp, Homo sapiens
atgtactgagagata

SEQ ID NO: 1988029 - DNA, 15 bp, Homo sapiens
tgtactgagagatag

SEQ ID NO: 1988030 - DNA, 15 bp, Homo sapiens
gtactgagagatagt

SEQ ID NO: 1988031 - DNA, 15 bp, Homo sapiens
tactgagagatagtt

SEQ ID NO: 1988032 - DNA, 15 bp, Homo sapiens
actgagagatagttg

SEQ ID NO: 1988033 - DNA, 15 bp, Homo sapiens
ctgagagatagttgt

SEQ ID NO: 1988034 - DNA, 15 bp, Homo sapiens
tgagagatagttgta

SEQ ID NO: 1988035 - DNA, 15 bp, Homo sapiens
gagagatagttgtat

SEQ ID NO: 1988036 - DNA, 15 bp, Homo sapiens
agagatagttgtata

SEQ ID NO: 1988037 - DNA, 15 bp, Homo sapiens
gagatagttgtataa

SEQ ID NO: 1988038 - DNA, 15 bp, Homo sapiens
agatagttgtataag

SEQ ID NO: 1988039 - DNA, 15 bp, Homo sapiens
gatagttgtataaga

SEQ ID NO: 1988040 - DNA, 15 bp, Homo sapiens
atagttgtataagaa

SEQ ID NO: 1988041 - DNA, 15 bp, Homo sapiens
tagttgtataagaat

SEQ ID NO: 1988042 - DNA, 15 bp, Homo sapiens
agttgtataagaatc

SEQ ID NO: 1988043 - DNA, 15 bp, Homo sapiens
gttgtataagaatct

SEQ ID NO: 1988044 - DNA, 15 bp, Homo sapiens
ttgtataagaatctt

SEQ ID NO: 1988045 - DNA, 15 bp, Homo sapiens
tgtataagaatctta

SEQ ID NO: 1988046 - DNA, 15 bp, Homo sapiens
gtataagaatcttaa

SEQ ID NO: 1988047 - DNA, 15 bp, Homo sapiens
tataagaatcttaag

SEQ ID NO: 1988048 - DNA, 15 bp, Homo sapiens
ataagaatcttaaga

SEQ ID NO: 1988049 - DNA, 15 bp, Homo sapiens
taagaatcttaagag

SEQ ID NO: 1988050 - DNA, 15 bp, Homo sapiens
aagaatcttaagagt

SEQ ID NO: 1988051 - DNA, 15 bp, Homo sapiens
agaatcttaagagtt

SEQ ID NO: 1988052 - DNA, 15 bp, Homo sapiens
gaatcttaagagttg

SEQ ID NO: 1988053 - DNA, 15 bp, Homo sapiens
aatcttaagagttgg

SEQ ID NO: 1988054 - DNA, 15 bp, Homo sapiens
atcttaagagttggc

SEQ ID NO: 1988055 - DNA, 15 bp, Homo sapiens
tcttaagagttggcc

SEQ ID NO: 1988056 - DNA, 15 bp, Homo sapiens
cttaagagttggccg

SEQ ID NO: 1988057 - DNA, 15 bp, Homo sapiens
ttaagagttggccgg

SEQ ID NO: 1988058 - DNA, 15 bp, Homo sapiens
taagagttggccggg

SEQ ID NO: 1988059 - DNA, 15 bp, Homo sapiens
aagagttggccgggc

SEQ ID NO: 1988060 - DNA, 15 bp, Homo sapiens
agagttggccgggcg

SEQ ID NO: 1988061 - DNA, 15 bp, Homo sapiens
gagttggccgggcgc

SEQ ID NO: 1988062 - DNA, 15 bp, Homo sapiens
agttggccgggcgcg

SEQ ID NO: 1988063 - DNA, 15 bp, Homo sapiens
gttggccgggcgcgg

SEQ ID NO: 1988064 - DNA, 15 bp, Homo sapiens
ttggccgggcgcggc

SEQ ID NO: 1988065 - DNA, 15 bp, Homo sapiens
tggccgggcgcggcg

SEQ ID NO: 1988066 - DNA, 15 bp, Homo sapiens
ggccgggcgcggcgg

SEQ ID NO: 1988067 - DNA, 15 bp, Homo sapiens
gccgggcgcggcggc

SEQ ID NO: 1988068 - DNA, 15 bp, Homo sapiens
ccgggcgcggcggct

SEQ ID NO: 1988069 - DNA, 15 bp, Homo sapiens
cgggcgcggcggctc

SEQ ID NO: 1988070 - DNA, 15 bp, Homo sapiens
gggcgcggcggctca

SEQ ID NO: 1988071 - DNA, 15 bp, Homo sapiens
ggcgcggcggctcac

SEQ ID NO: 1988072 - DNA, 15 bp, Homo sapiens
gcgcggcggctcacg

SEQ ID NO: 1988073 - DNA, 15 bp, Homo sapiens
cgcggcggctcacgc

SEQ ID NO: 1988074 - DNA, 15 bp, Homo sapiens
gcggcggctcacgcc

SEQ ID NO: 1988075 - DNA, 15 bp, Homo sapiens
cggcggctcacgcct

SEQ ID NO: 1988076 - DNA, 15 bp, Homo sapiens
ggcggctcacgcctg

SEQ ID NO: 1988077 - DNA, 15 bp, Homo sapiens
gcggctcacgcctgt

SEQ ID NO: 1988078 - DNA, 15 bp, Homo sapiens
cggctcacgcctgtg

SEQ ID NO: 1988079 - DNA, 15 bp, Homo sapiens
ggctcacgcctgtga

SEQ ID NO: 1988080 - DNA, 15 bp, Homo sapiens
gctcacgcctgtgat

SEQ ID NO: 1988081 - DNA, 15 bp, Homo sapiens
ctcacgcctgtgatc

SEQ ID NO: 1988082 - DNA, 15 bp, Homo sapiens
tcacgcctgtgatcc

SEQ ID NO: 1988083 - DNA, 15 bp, Homo sapiens
cacgcctgtgatccc

SEQ ID NO: 1988084 - DNA, 15 bp, Homo sapiens
acgcctgtgatccca

SEQ ID NO: 1988085 - DNA, 15 bp, Homo sapiens
cgcctgtgatcccag

SEQ ID NO: 1988086 - DNA, 15 bp, Homo sapiens
gcctgtgatcccagc

SEQ ID NO: 1988087 - DNA, 15 bp, Homo sapiens
cctgtgatcccagca

SEQ ID NO: 1988088 - DNA, 15 bp, Homo sapiens
ctgtgatcccagcac

SEQ ID NO: 1988089 - DNA, 15 bp, Homo sapiens
tgtgatcccagcact

SEQ ID NO: 1988090 - DNA, 15 bp, Homo sapiens
gtgatcccagcactt

SEQ ID NO: 1988091 - DNA, 15 bp, Homo sapiens
tgatcccagcacttt

SEQ ID NO: 1988092 - DNA, 15 bp, Homo sapiens
gatcccagcactttg

SEQ ID NO: 1988093 - DNA, 15 bp, Homo sapiens
aggccgaggcgggcc

SEQ ID NO: 1988094 - DNA, 15 bp, Homo sapiens
ggccgaggcgggccg

SEQ ID NO: 1988095 - DNA, 15 bp, Homo sapiens
gccgaggcgggccga

SEQ ID NO: 1988096 - DNA, 15 bp, Homo sapiens
ccgaggcgggccgat

SEQ ID NO: 1988097 - DNA, 15 bp, Homo sapiens
cgaggcgggccgatc

SEQ ID NO: 1988098 - DNA, 15 bp, Homo sapiens
gaggcgggccgatca

SEQ ID NO: 1988099 - DNA, 15 bp, Homo sapiens
aggcgggccgatcat

SEQ ID NO: 1988100 - DNA, 15 bp, Homo sapiens
ggcgggccgatcatg

SEQ ID NO: 1988101 - DNA, 15 bp, Homo sapiens
gcgggccgatcatga

SEQ ID NO: 1988102 - DNA, 15 bp, Homo sapiens
cgggccgatcatgag

SEQ ID NO: 1988103 - DNA, 15 bp, Homo sapiens
gggccgatcatgagg

SEQ ID NO: 1988104 - DNA, 15 bp, Homo sapiens
ggccgatcatgaggt

SEQ ID NO: 1988105 - DNA, 15 bp, Homo sapiens
gccgatcatgaggtc

SEQ ID NO: 1988106 - DNA, 15 bp, Homo sapiens
ccgatcatgaggtca

SEQ ID NO: 1988107 - DNA, 15 bp, Homo sapiens
cgatcatgaggtcag

SEQ ID NO: 1988108 - DNA, 15 bp, Homo sapiens
cacagtgaaacccca

SEQ ID NO: 1988109 - DNA, 15 bp, Homo sapiens
acagtgaaaccccat

SEQ ID NO: 1988110 - DNA, 15 bp, Homo sapiens
cagtgaaaccccatc

SEQ ID NO: 1988111 - DNA, 15 bp, Homo sapiens
tgggtgtggtggtgg

SEQ ID NO: 1988112 - DNA, 15 bp, Homo sapiens
gaatggcctgaacct

SEQ ID NO: 1988113 - DNA, 15 bp, Homo sapiens
aatggcctgaacctg

SEQ ID NO: 1988114 - DNA, 15 bp, Homo sapiens
atggcctgaacctgg

SEQ ID NO: 1988115 - DNA, 15 bp, Homo sapiens
tggcctgaacctggg

SEQ ID NO: 1988116 - DNA, 15 bp, Homo sapiens
ggcctgaacctggga

SEQ ID NO: 1988117 - DNA, 15 bp, Homo sapiens
gcctgaacctgggag

SEQ ID NO: 1988118 - DNA, 15 bp, Homo sapiens
ctgaacctgggaggt

SEQ ID NO: 1988119 - DNA, 15 bp, Homo sapiens
cctgggaggtggagc

SEQ ID NO: 1988120 - DNA, 15 bp, Homo sapiens
ctgggaggtggagct

SEQ ID NO: 1988121 - DNA, 15 bp, Homo sapiens
tgggaggtggagctt

SEQ ID NO: 1988122 - DNA, 15 bp, Homo sapiens
gggaggtggagcttg

SEQ ID NO: 1988123 - DNA, 15 bp, Homo sapiens
ggaggtggagcttgc

SEQ ID NO: 1988124 - DNA, 15 bp, Homo sapiens
gaggtggagcttgcg

SEQ ID NO: 1988125 - DNA, 15 bp, Homo sapiens
aggtggagcttgcgg

SEQ ID NO: 1988126 - DNA, 15 bp, Homo sapiens
ggtggagcttgcggt

SEQ ID NO: 1988127 - DNA, 15 bp, Homo sapiens
gtggagcttgcggtg

SEQ ID NO: 1988128 - DNA, 15 bp, Homo sapiens
tggagcttgcggtga

SEQ ID NO: 1988129 - DNA, 15 bp, Homo sapiens
cggtgagccgagatt

SEQ ID NO: 1988130 - DNA, 15 bp, Homo sapiens
ggtgagccgagattg

SEQ ID NO: 1988131 - DNA, 15 bp, Homo sapiens
gagactccatctcag

SEQ ID NO: 1988132 - DNA, 15 bp, Homo sapiens
agactccatctcaga

SEQ ID NO: 1988133 - DNA, 15 bp, Homo sapiens
gactccatctcagaa

SEQ ID NO: 1988134 - DNA, 15 bp, Homo sapiens
aaaaaaaaaagaatc

SEQ ID NO: 1988135 - DNA, 15 bp, Homo sapiens
aaaaaaaaagaatct

SEQ ID NO: 1988136 - DNA, 15 bp, Homo sapiens
aaaaaaaagaatctt

SEQ ID NO: 1988137 - DNA, 15 bp, Homo sapiens
aaaaaaagaatctta

SEQ ID NO: 1988138 - DNA, 15 bp, Homo sapiens
aaaaaagaatcttaa

SEQ ID NO: 1988139 - DNA, 15 bp, Homo sapiens
aaaaagaatcttaat

SEQ ID NO: 1988140 - DNA, 15 bp, Homo sapiens
aaaagaatcttaata

SEQ ID NO: 1988141 - DNA, 15 bp, Homo sapiens
aaagaatcttaatag

SEQ ID NO: 1988142 - DNA, 15 bp, Homo sapiens
aagaatcttaatagt

SEQ ID NO: 1988143 - DNA, 15 bp, Homo sapiens
agaatcttaatagtt

SEQ ID NO: 1988144 - DNA, 15 bp, Homo sapiens
gaatcttaatagttt

SEQ ID NO: 1988145 - DNA, 15 bp, Homo sapiens
aatcttaatagtttc

SEQ ID NO: 1988146 - DNA, 15 bp, Homo sapiens
atcttaatagtttca

SEQ ID NO: 1988147 - DNA, 15 bp, Homo sapiens
tcttaatagtttcaa

SEQ ID NO: 1988148 - DNA, 15 bp, Homo sapiens
cttaatagtttcaac

SEQ ID NO: 1988149 - DNA, 15 bp, Homo sapiens
ttaatagtttcaact

SEQ ID NO: 1988150 - DNA, 15 bp, Homo sapiens
taatagtttcaactg

SEQ ID NO: 1988151 - DNA, 15 bp, Homo sapiens
aatagtttcaactgt

SEQ ID NO: 1988152 - DNA, 15 bp, Homo sapiens
atagtttcaactgtt

SEQ ID NO: 1988153 - DNA, 15 bp, Homo sapiens
tagtttcaactgttt

SEQ ID NO: 1988154 - DNA, 15 bp, Homo sapiens
agtttcaactgttta

SEQ ID NO: 1988155 - DNA, 15 bp, Homo sapiens
gtttcaactgtttat

SEQ ID NO: 1988156 - DNA, 15 bp, Homo sapiens
tttcaactgtttata

SEQ ID NO: 1988157 - DNA, 15 bp, Homo sapiens
ttcaactgtttataa

SEQ ID NO: 1988158 - DNA, 15 bp, Homo sapiens
tcaactgtttataaa

SEQ ID NO: 1988159 - DNA, 15 bp, Homo sapiens
caactgtttataaaa

SEQ ID NO: 1988160 - DNA, 15 bp, Homo sapiens
aactgtttataaaac

SEQ ID NO: 1988161 - DNA, 15 bp, Homo sapiens
actgtttataaaact

SEQ ID NO: 1988162 - DNA, 15 bp, Homo sapiens
ctgtttataaaactt

SEQ ID NO: 1988163 - DNA, 15 bp, Homo sapiens
tgtttataaaacttt

SEQ ID NO: 1988164 - DNA, 15 bp, Homo sapiens
gtttataaaactttt

SEQ ID NO: 1988165 - DNA, 15 bp, Homo sapiens
tttataaaacttttg

SEQ ID NO: 1988166 - DNA, 15 bp, Homo sapiens
ttataaaacttttga

SEQ ID NO: 1988167 - DNA, 15 bp, Homo sapiens
tataaaacttttgaa

SEQ ID NO: 1988168 - DNA, 15 bp, Homo sapiens
ataaaacttttgaat

SEQ ID NO: 1988169 - DNA, 15 bp, Homo sapiens
taaaacttttgaatt

SEQ ID NO: 1988170 - DNA, 15 bp, Homo sapiens
aaaacttttgaattt

SEQ ID NO: 1988171 - DNA, 15 bp, Homo sapiens
aaacttttgaatttt

SEQ ID NO: 1988172 - DNA, 15 bp, Homo sapiens
aacttttgaattttg

SEQ ID NO: 1988173 - DNA, 15 bp, Homo sapiens
acttttgaattttgg

SEQ ID NO: 1988174 - DNA, 15 bp, Homo sapiens
cttttgaattttgga

SEQ ID NO: 1988175 - DNA, 15 bp, Homo sapiens
ttttgaattttggat

SEQ ID NO: 1988176 - DNA, 15 bp, Homo sapiens
tttgaattttggatt

SEQ ID NO: 1988177 - DNA, 15 bp, Homo sapiens
ttgaattttggatta

SEQ ID NO: 1988178 - DNA, 15 bp, Homo sapiens
tgaattttggattat

SEQ ID NO: 1988179 - DNA, 15 bp, Homo sapiens
gaattttggattata

SEQ ID NO: 1988180 - DNA, 15 bp, Homo sapiens
aattttggattatat

SEQ ID NO: 1988181 - DNA, 15 bp, Homo sapiens
attttggattatatt

SEQ ID NO: 1988182 - DNA, 15 bp, Homo sapiens
ttttggattatatta

SEQ ID NO: 1988183 - DNA, 15 bp, Homo sapiens
tttggattatattat

SEQ ID NO: 1988184 - DNA, 15 bp, Homo sapiens
ttggattatattatc

SEQ ID NO: 1988185 - DNA, 15 bp, Homo sapiens
tggattatattatct

SEQ ID NO: 1988186 - DNA, 15 bp, Homo sapiens
ggattatattatctg

SEQ ID NO: 1988187 - DNA, 15 bp, Homo sapiens
gattatattatctgt

SEQ ID NO: 1988188 - DNA, 15 bp, Homo sapiens
attatattatctgta

SEQ ID NO: 1988189 - DNA, 15 bp, Homo sapiens
ttatattatctgtac

SEQ ID NO: 1988190 - DNA, 15 bp, Homo sapiens
tatattatctgtact

SEQ ID NO: 1988191 - DNA, 15 bp, Homo sapiens
atattatctgtactt

SEQ ID NO: 1988192 - DNA, 15 bp, Homo sapiens
tattatctgtacttt

SEQ ID NO: 1988193 - DNA, 15 bp, Homo sapiens
attatctgtactttg

SEQ ID NO: 1988194 - DNA, 15 bp, Homo sapiens
ttatctgtactttgc

SEQ ID NO: 1988195 - DNA, 15 bp, Homo sapiens
tatctgtactttgct

SEQ ID NO: 1988196 - DNA, 15 bp, Homo sapiens
atctgtactttgctt

SEQ ID NO: 1988197 - DNA, 15 bp, Homo sapiens
tctgtactttgcttt

SEQ ID NO: 1988198 - DNA, 15 bp, Homo sapiens
ctgtactttgcttta

SEQ ID NO: 1988199 - DNA, 15 bp, Homo sapiens
tgtactttgctttac

SEQ ID NO: 1988200 - DNA, 15 bp, Homo sapiens
gtactttgctttact

SEQ ID NO: 1988201 - DNA, 15 bp, Homo sapiens
tactttgctttactg

SEQ ID NO: 1988202 - DNA, 15 bp, Homo sapiens
actttgctttactgg

SEQ ID NO: 1988203 - DNA, 15 bp, Homo sapiens
ctttgctttactggg

SEQ ID NO: 1988204 - DNA, 15 bp, Homo sapiens
tttgctttactgggc

SEQ ID NO: 1988205 - DNA, 15 bp, Homo sapiens
ttgctttactgggcc

SEQ ID NO: 1988206 - DNA, 15 bp, Homo sapiens
tgctttactgggccc

SEQ ID NO: 1988207 - DNA, 15 bp, Homo sapiens
gctttactgggccca

SEQ ID NO: 1988208 - DNA, 15 bp, Homo sapiens
ctttactgggcccag

SEQ ID NO: 1988209 - DNA, 15 bp, Homo sapiens
tttactgggcccagg

SEQ ID NO: 1988210 - DNA, 15 bp, Homo sapiens
ttactgggcccaggg

SEQ ID NO: 1988211 - DNA, 15 bp, Homo sapiens
tactgggcccagggg

SEQ ID NO: 1988212 - DNA, 15 bp, Homo sapiens
actgggcccaggggg

SEQ ID NO: 1988213 - DNA, 15 bp, Homo sapiens
ctgggcccaggggga

SEQ ID NO: 1988214 - DNA, 15 bp, Homo sapiens
tgggcccagggggag

SEQ ID NO: 1988215 - DNA, 15 bp, Homo sapiens
gggcccagggggagt

SEQ ID NO: 1988216 - DNA, 15 bp, Homo sapiens
ggcccagggggagtt

SEQ ID NO: 1988217 - DNA, 15 bp, Homo sapiens
gcccagggggagtta

SEQ ID NO: 1988218 - DNA, 15 bp, Homo sapiens
cccagggggagttaa

SEQ ID NO: 1988219 - DNA, 15 bp, Homo sapiens
ccagggggagttaag

SEQ ID NO: 1988220 - DNA, 15 bp, Homo sapiens
cagggggagttaagc

SEQ ID NO: 1988221 - DNA, 15 bp, Homo sapiens
agggggagttaagct

SEQ ID NO: 1988222 - DNA, 15 bp, Homo sapiens
gggggagttaagctt

SEQ ID NO: 1988223 - DNA, 15 bp, Homo sapiens
ggggagttaagcttt

SEQ ID NO: 1988224 - DNA, 15 bp, Homo sapiens
gggagttaagctttc

SEQ ID NO: 1988225 - DNA, 15 bp, Homo sapiens
ggagttaagctttcc

SEQ ID NO: 1988226 - DNA, 15 bp, Homo sapiens
gagttaagctttcct

SEQ ID NO: 1988227 - DNA, 15 bp, Homo sapiens
agttaagctttcctt

SEQ ID NO: 1988228 - DNA, 15 bp, Homo sapiens
gttaagctttccttc

SEQ ID NO: 1988229 - DNA, 15 bp, Homo sapiens
ttaagctttccttct

SEQ ID NO: 1988230 - DNA, 15 bp, Homo sapiens
taagctttccttctt

SEQ ID NO: 1988231 - DNA, 15 bp, Homo sapiens
aagctttccttctta

SEQ ID NO: 1988232 - DNA, 15 bp, Homo sapiens
agctttccttcttat

SEQ ID NO: 1988233 - DNA, 15 bp, Homo sapiens
gctttccttcttatt

SEQ ID NO: 1988234 - DNA, 15 bp, Homo sapiens
ctttccttcttatta

SEQ ID NO: 1988235 - DNA, 15 bp, Homo sapiens
tttccttcttattac

SEQ ID NO: 1988236 - DNA, 15 bp, Homo sapiens
ttccttcttattaca

SEQ ID NO: 1988237 - DNA, 15 bp, Homo sapiens
tccttcttattacag

SEQ ID NO: 1988238 - DNA, 15 bp, Homo sapiens
ccttcttattacagc

SEQ ID NO: 1988239 - DNA, 15 bp, Homo sapiens
cttcttattacagct

SEQ ID NO: 1988240 - DNA, 15 bp, Homo sapiens
ttcttattacagcta

SEQ ID NO: 1988241 - DNA, 15 bp, Homo sapiens
tcttattacagctaa

SEQ ID NO: 1988242 - DNA, 15 bp, Homo sapiens
cttattacagctaag

SEQ ID NO: 1988243 - DNA, 15 bp, Homo sapiens
ttattacagctaaga

SEQ ID NO: 1988244 - DNA, 15 bp, Homo sapiens
tattacagctaagag

SEQ ID NO: 1988245 - DNA, 15 bp, Homo sapiens
attacagctaagagt

SEQ ID NO: 1988246 - DNA, 15 bp, Homo sapiens
ttacagctaagagtt

SEQ ID NO: 1988247 - DNA, 15 bp, Homo sapiens
tacagctaagagttt

SEQ ID NO: 1988248 - DNA, 15 bp, Homo sapiens
acagctaagagtttg

SEQ ID NO: 1988249 - DNA, 15 bp, Homo sapiens
cagctaagagtttgc

SEQ ID NO: 1988250 - DNA, 15 bp, Homo sapiens
agctaagagtttgcc

SEQ ID NO: 1988251 - DNA, 15 bp, Homo sapiens
gctaagagtttgcct

SEQ ID NO: 1988252 - DNA, 15 bp, Homo sapiens
ctaagagtttgcctg

SEQ ID NO: 1988253 - DNA, 15 bp, Homo sapiens
taagagtttgcctgt

SEQ ID NO: 1988254 - DNA, 15 bp, Homo sapiens
aagagtttgcctgtt

SEQ ID NO: 1988255 - DNA, 15 bp, Homo sapiens
agagtttgcctgttg

SEQ ID NO: 1988256 - DNA, 15 bp, Homo sapiens
gagtttgcctgttgg

SEQ ID NO: 1988257 - DNA, 15 bp, Homo sapiens
agtttgcctgttgga

SEQ ID NO: 1988258 - DNA, 15 bp, Homo sapiens
gtttgcctgttggac

SEQ ID NO: 1988259 - DNA, 15 bp, Homo sapiens
tttgcctgttggacc

SEQ ID NO: 1988260 - DNA, 15 bp, Homo sapiens
ttgcctgttggacca

SEQ ID NO: 1988261 - DNA, 15 bp, Homo sapiens
tgcctgttggaccac

SEQ ID NO: 1988262 - DNA, 15 bp, Homo sapiens
gcctgttggaccact

SEQ ID NO: 1988263 - DNA, 15 bp, Homo sapiens
cctgttggaccactt

SEQ ID NO: 1988264 - DNA, 15 bp, Homo sapiens
ctgttggaccactta

SEQ ID NO: 1988265 - DNA, 15 bp, Homo sapiens
tgttggaccacttaa

SEQ ID NO: 1988266 - DNA, 15 bp, Homo sapiens
gttggaccacttaac

SEQ ID NO: 1988267 - DNA, 15 bp, Homo sapiens
ttggaccacttaacg

SEQ ID NO: 1988268 - DNA, 15 bp, Homo sapiens
tggaccacttaacgc

SEQ ID NO: 1988269 - DNA, 15 bp, Homo sapiens
ggaccacttaacgcc

SEQ ID NO: 1988270 - DNA, 15 bp, Homo sapiens
gaccacttaacgccc

SEQ ID NO: 1988271 - DNA, 15 bp, Homo sapiens
accacttaacgcccc

SEQ ID NO: 1988272 - DNA, 15 bp, Homo sapiens
ccacttaacgccccc

SEQ ID NO: 1988273 - DNA, 15 bp, Homo sapiens
cacttaacgccccca

SEQ ID NO: 1988274 - DNA, 15 bp, Homo sapiens
acttaacgcccccag

SEQ ID NO: 1988275 - DNA, 15 bp, Homo sapiens
cttaacgcccccagg

SEQ ID NO: 1988276 - DNA, 15 bp, Homo sapiens
ttaacgcccccaggg

SEQ ID NO: 1988277 - DNA, 15 bp, Homo sapiens
taacgcccccaggga

SEQ ID NO: 1988278 - DNA, 15 bp, Homo sapiens
aacgcccccagggag

SEQ ID NO: 1988279 - DNA, 15 bp, Homo sapiens
acgcccccagggagc

SEQ ID NO: 1988280 - DNA, 15 bp, Homo sapiens
cgcccccagggagca

SEQ ID NO: 1988281 - DNA, 15 bp, Homo sapiens
gcccccagggagcat

SEQ ID NO: 1988282 - DNA, 15 bp, Homo sapiens
cccccagggagcatg

SEQ ID NO: 1988283 - DNA, 15 bp, Homo sapiens
ccccagggagcatgt

SEQ ID NO: 1988284 - DNA, 15 bp, Homo sapiens
cccagggagcatgtg

SEQ ID NO: 1988285 - DNA, 15 bp, Homo sapiens
ccagggagcatgtgc

SEQ ID NO: 1988286 - DNA, 15 bp, Homo sapiens
cagggagcatgtgca

SEQ ID NO: 1988287 - DNA, 15 bp, Homo sapiens
agggagcatgtgcat

SEQ ID NO: 1988288 - DNA, 15 bp, Homo sapiens
gggagcatgtgcatg

SEQ ID NO: 1988289 - DNA, 15 bp, Homo sapiens
ggagcatgtgcatgt

SEQ ID NO: 1988290 - DNA, 15 bp, Homo sapiens
gagcatgtgcatgtc

SEQ ID NO: 1988291 - DNA, 15 bp, Homo sapiens
agcatgtgcatgtct

SEQ ID NO: 1988292 - DNA, 15 bp, Homo sapiens
gcatgtgcatgtcta

SEQ ID NO: 1988293 - DNA, 15 bp, Homo sapiens
catgtgcatgtctaa

SEQ ID NO: 1988294 - DNA, 15 bp, Homo sapiens
atgtgcatgtctaaa

SEQ ID NO: 1988295 - DNA, 15 bp, Homo sapiens
tgtgcatgtctaaag

SEQ ID NO: 1988296 - DNA, 15 bp, Homo sapiens
gtgcatgtctaaaga

SEQ ID NO: 1988297 - DNA, 15 bp, Homo sapiens
tgcatgtctaaagat

SEQ ID NO: 1988298 - DNA, 15 bp, Homo sapiens
gcatgtctaaagatg

SEQ ID NO: 1988299 - DNA, 15 bp, Homo sapiens
catgtctaaagatgg

SEQ ID NO: 1988300 - DNA, 15 bp, Homo sapiens
atgtctaaagatggc

SEQ ID NO: 1988301 - DNA, 15 bp, Homo sapiens
tgtctaaagatggca

SEQ ID NO: 1988302 - DNA, 15 bp, Homo sapiens
gtctaaagatggcaa

SEQ ID NO: 1988303 - DNA, 15 bp, Homo sapiens
tctaaagatggcaac

SEQ ID NO: 1988304 - DNA, 15 bp, Homo sapiens
ctaaagatggcaact

SEQ ID NO: 1988305 - DNA, 15 bp, Homo sapiens
taaagatggcaactc

SEQ ID NO: 1988306 - DNA, 15 bp, Homo sapiens
aaagatggcaactct

SEQ ID NO: 1988307 - DNA, 15 bp, Homo sapiens
aagatggcaactctg

SEQ ID NO: 1988308 - DNA, 15 bp, Homo sapiens
agatggcaactctgt

SEQ ID NO: 1988309 - DNA, 15 bp, Homo sapiens
gatggcaactctgtt

SEQ ID NO: 1988310 - DNA, 15 bp, Homo sapiens
atggcaactctgttt

SEQ ID NO: 1988311 - DNA, 15 bp, Homo sapiens
tggcaactctgttta

SEQ ID NO: 1988312 - DNA, 15 bp, Homo sapiens
ggcaactctgtttat

SEQ ID NO: 1988313 - DNA, 15 bp, Homo sapiens
gcaactctgtttatg

SEQ ID NO: 1988314 - DNA, 15 bp, Homo sapiens
caactctgtttatga

SEQ ID NO: 1988315 - DNA, 15 bp, Homo sapiens
aactctgtttatgat

SEQ ID NO: 1988316 - DNA, 15 bp, Homo sapiens
actctgtttatgatt

SEQ ID NO: 1988317 - DNA, 15 bp, Homo sapiens
ctctgtttatgattg

SEQ ID NO: 1988318 - DNA, 15 bp, Homo sapiens
tctgtttatgattgc

SEQ ID NO: 1988319 - DNA, 15 bp, Homo sapiens
ctgtttatgattgct

SEQ ID NO: 1988320 - DNA, 15 bp, Homo sapiens
tgtttatgattgctg

SEQ ID NO: 1988321 - DNA, 15 bp, Homo sapiens
gtttatgattgctgt

SEQ ID NO: 1988322 - DNA, 15 bp, Homo sapiens
tttatgattgctgtt

SEQ ID NO: 1988323 - DNA, 15 bp, Homo sapiens
ttatgattgctgttt

SEQ ID NO: 1988324 - DNA, 15 bp, Homo sapiens
tatgattgctgtttt

SEQ ID NO: 1988325 - DNA, 15 bp, Homo sapiens
atgattgctgttttg

SEQ ID NO: 1988326 - DNA, 15 bp, Homo sapiens
tgattgctgttttgg

SEQ ID NO: 1988327 - DNA, 15 bp, Homo sapiens
gattgctgttttggt

SEQ ID NO: 1988328 - DNA, 15 bp, Homo sapiens
attgctgttttggtt

SEQ ID NO: 1988329 - DNA, 15 bp, Homo sapiens
ttgctgttttggttg

SEQ ID NO: 1988330 - DNA, 15 bp, Homo sapiens
tgctgttttggttgg

SEQ ID NO: 1988331 - DNA, 15 bp, Homo sapiens
gctgttttggttgga

SEQ ID NO: 1988332 - DNA, 15 bp, Homo sapiens
ctgttttggttggat

SEQ ID NO: 1988333 - DNA, 15 bp, Homo sapiens
tgttttggttggatt

SEQ ID NO: 1988334 - DNA, 15 bp, Homo sapiens
gttttggttggattt

SEQ ID NO: 1988335 - DNA, 15 bp, Homo sapiens
ttttggttggatttc

SEQ ID NO: 1988336 - DNA, 15 bp, Homo sapiens
tttggttggatttct

SEQ ID NO: 1988337 - DNA, 15 bp, Homo sapiens
ttggttggatttcta

SEQ ID NO: 1988338 - DNA, 15 bp, Homo sapiens
tggttggatttctaa

SEQ ID NO: 1988339 - DNA, 15 bp, Homo sapiens
ggttggatttctaat

SEQ ID NO: 1988340 - DNA, 15 bp, Homo sapiens
gttggatttctaata

SEQ ID NO: 1988341 - DNA, 15 bp, Homo sapiens
ttggatttctaatat

SEQ ID NO: 1988342 - DNA, 15 bp, Homo sapiens
tggatttctaatatt

SEQ ID NO: 1988343 - DNA, 15 bp, Homo sapiens
ggatttctaatattc

SEQ ID NO: 1988344 - DNA, 15 bp, Homo sapiens
gatttctaatattcg

SEQ ID NO: 1988345 - DNA, 15 bp, Homo sapiens
atttctaatattcgg

SEQ ID NO: 1988346 - DNA, 15 bp, Homo sapiens
tttctaatattcggt

SEQ ID NO: 1988347 - DNA, 15 bp, Homo sapiens
ttctaatattcggtg

SEQ ID NO: 1988348 - DNA, 15 bp, Homo sapiens
tctaatattcggtgt

SEQ ID NO: 1988349 - DNA, 15 bp, Homo sapiens
ctaatattcggtgtg

SEQ ID NO: 1988350 - DNA, 15 bp, Homo sapiens
taatattcggtgtga

SEQ ID NO: 1988351 - DNA, 15 bp, Homo sapiens
aatattcggtgtgat

SEQ ID NO: 1988352 - DNA, 15 bp, Homo sapiens
atattcggtgtgatt

SEQ ID NO: 1988353 - DNA, 15 bp, Homo sapiens
tattcggtgtgatta

SEQ ID NO: 1988354 - DNA, 15 bp, Homo sapiens
attcggtgtgattaa

SEQ ID NO: 1988355 - DNA, 15 bp, Homo sapiens
ttcggtgtgattaaa

SEQ ID NO: 1988356 - DNA, 15 bp, Homo sapiens
tcggtgtgattaaag

SEQ ID NO: 1988357 - DNA, 15 bp, Homo sapiens
cggtgtgattaaagc

SEQ ID NO: 1988358 - DNA, 15 bp, Homo sapiens
ggtgtgattaaagca

SEQ ID NO: 1988359 - DNA, 15 bp, Homo sapiens
gtgtgattaaagcag

SEQ ID NO: 1988360 - DNA, 15 bp, Homo sapiens
tgtgattaaagcaga

SEQ ID NO: 1988361 - DNA, 15 bp, Homo sapiens
gtgattaaagcagaa

SEQ ID NO: 1988362 - DNA, 15 bp, Homo sapiens
tgattaaagcagaaa

SEQ ID NO: 1988363 - DNA, 15 bp, Homo sapiens
gattaaagcagaaat

SEQ ID NO: 1988364 - DNA, 15 bp, Homo sapiens
attaaagcagaaatg

SEQ ID NO: 1988365 - DNA, 15 bp, Homo sapiens
ttaaagcagaaatgc

SEQ ID NO: 1988366 - DNA, 15 bp, Homo sapiens
taaagcagaaatgca

SEQ ID NO: 1988367 - DNA, 15 bp, Homo sapiens
aaagcagaaatgcat

SEQ ID NO: 1988368 - DNA, 15 bp, Homo sapiens
aagcagaaatgcatt

SEQ ID NO: 1988369 - DNA, 15 bp, Homo sapiens
agcagaaatgcattt

SEQ ID NO: 1988370 - DNA, 15 bp, Homo sapiens
gcagaaatgcatttc

SEQ ID NO: 1988371 - DNA, 15 bp, Homo sapiens
cagaaatgcatttct

SEQ ID NO: 1988372 - DNA, 15 bp, Homo sapiens
agaaatgcatttcta

SEQ ID NO: 1988373 - DNA, 15 bp, Homo sapiens
gaaatgcatttctag

SEQ ID NO: 1988374 - DNA, 15 bp, Homo sapiens
aaatgcatttctagc

SEQ ID NO: 1988375 - DNA, 15 bp, Homo sapiens
aatgcatttctagcc

SEQ ID NO: 1988376 - DNA, 15 bp, Homo sapiens
atgcatttctagcca

SEQ ID NO: 1988377 - DNA, 15 bp, Homo sapiens
tgcatttctagccac

SEQ ID NO: 1988378 - DNA, 15 bp, Homo sapiens
gcatttctagccact

SEQ ID NO: 1988379 - DNA, 15 bp, Homo sapiens
catttctagccactg

SEQ ID NO: 1988380 - DNA, 15 bp, Homo sapiens
atttctagccactgc

SEQ ID NO: 1988381 - DNA, 15 bp, Homo sapiens
tttctagccactgct

SEQ ID NO: 1988382 - DNA, 15 bp, Homo sapiens
ttctagccactgctg

SEQ ID NO: 1988383 - DNA, 15 bp, Homo sapiens
tctagccactgctga

SEQ ID NO: 1988384 - DNA, 15 bp, Homo sapiens
ctagccactgctgat

SEQ ID NO: 1988385 - DNA, 15 bp, Homo sapiens
tagccactgctgatt

SEQ ID NO: 1988386 - DNA, 15 bp, Homo sapiens
agccactgctgatta

SEQ ID NO: 1988387 - DNA, 15 bp, Homo sapiens
gccactgctgattac

SEQ ID NO: 1988388 - DNA, 15 bp, Homo sapiens
ccactgctgattaca

SEQ ID NO: 1988389 - DNA, 15 bp, Homo sapiens
cactgctgattacag

SEQ ID NO: 1988390 - DNA, 15 bp, Homo sapiens
actgctgattacaga

SEQ ID NO: 1988391 - DNA, 15 bp, Homo sapiens
ctgctgattacagac

SEQ ID NO: 1988392 - DNA, 15 bp, Homo sapiens
tgctgattacagaca

SEQ ID NO: 1988393 - DNA, 15 bp, Homo sapiens
gctgattacagacat

SEQ ID NO: 1988394 - DNA, 15 bp, Homo sapiens
ctgattacagacata

SEQ ID NO: 1988395 - DNA, 15 bp, Homo sapiens
tgattacagacatat

SEQ ID NO: 1988396 - DNA, 15 bp, Homo sapiens
gattacagacatatt

SEQ ID NO: 1988397 - DNA, 15 bp, Homo sapiens
attacagacatattg

SEQ ID NO: 1988398 - DNA, 15 bp, Homo sapiens
ttacagacatattgc

SEQ ID NO: 1988399 - DNA, 15 bp, Homo sapiens
tacagacatattgca

SEQ ID NO: 1988400 - DNA, 15 bp, Homo sapiens
acagacatattgcac

SEQ ID NO: 1988401 - DNA, 15 bp, Homo sapiens
cagacatattgcact

SEQ ID NO: 1988402 - DNA, 15 bp, Homo sapiens
agacatattgcactc

SEQ ID NO: 1988403 - DNA, 15 bp, Homo sapiens
gacatattgcactct

SEQ ID NO: 1988404 - DNA, 15 bp, Homo sapiens
acatattgcactctg

SEQ ID NO: 1988405 - DNA, 15 bp, Homo sapiens
catattgcactctga

SEQ ID NO: 1988406 - DNA, 15 bp, Homo sapiens
atattgcactctgat

SEQ ID NO: 1988407 - DNA, 15 bp, Homo sapiens
tattgcactctgatg

SEQ ID NO: 1988408 - DNA, 15 bp, Homo sapiens
attgcactctgatgg

SEQ ID NO: 1988409 - DNA, 15 bp, Homo sapiens
ttgcactctgatggg

SEQ ID NO: 1988410 - DNA, 15 bp, Homo sapiens
tgcactctgatgggt

SEQ ID NO: 1988411 - DNA, 15 bp, Homo sapiens
gcactctgatgggta

SEQ ID NO: 1988412 - DNA, 15 bp, Homo sapiens
cactctgatgggtat

SEQ ID NO: 1988413 - DNA, 15 bp, Homo sapiens
actctgatgggtatc

SEQ ID NO: 1988414 - DNA, 15 bp, Homo sapiens
ctctgatgggtatcg

SEQ ID NO: 1988415 - DNA, 15 bp, Homo sapiens
tctgatgggtatcgc

SEQ ID NO: 1988416 - DNA, 15 bp, Homo sapiens
ctgatgggtatcgct

SEQ ID NO: 1988417 - DNA, 15 bp, Homo sapiens
tgatgggtatcgctt

SEQ ID NO: 1988418 - DNA, 15 bp, Homo sapiens
gatgggtatcgctta

SEQ ID NO: 1988419 - DNA, 15 bp, Homo sapiens
atgggtatcgcttag

SEQ ID NO: 1988420 - DNA, 15 bp, Homo sapiens
tgggtatcgcttagc

SEQ ID NO: 1988421 - DNA, 15 bp, Homo sapiens
gggtatcgcttagca

SEQ ID NO: 1988422 - DNA, 15 bp, Homo sapiens
ggtatcgcttagcaa

SEQ ID NO: 1988423 - DNA, 15 bp, Homo sapiens
gtatcgcttagcaac

SEQ ID NO: 1988424 - DNA, 15 bp, Homo sapiens
tatcgcttagcaact

SEQ ID NO: 1988425 - DNA, 15 bp, Homo sapiens
atcgcttagcaactt

SEQ ID NO: 1988426 - DNA, 15 bp, Homo sapiens
tcgcttagcaactta

SEQ ID NO: 1988427 - DNA, 15 bp, Homo sapiens
cgcttagcaacttag

SEQ ID NO: 1988428 - DNA, 15 bp, Homo sapiens
gcttagcaacttagt

SEQ ID NO: 1988429 - DNA, 15 bp, Homo sapiens
cttagcaacttagtg

SEQ ID NO: 1988430 - DNA, 15 bp, Homo sapiens
ttagcaacttagtgc

SEQ ID NO: 1988431 - DNA, 15 bp, Homo sapiens
tagcaacttagtgca

SEQ ID NO: 1988432 - DNA, 15 bp, Homo sapiens
agcaacttagtgcag

SEQ ID NO: 1988433 - DNA, 15 bp, Homo sapiens
gcaacttagtgcagt

SEQ ID NO: 1988434 - DNA, 15 bp, Homo sapiens
caacttagtgcagta

SEQ ID NO: 1988435 - DNA, 15 bp, Homo sapiens
aacttagtgcagtag

SEQ ID NO: 1988436 - DNA, 15 bp, Homo sapiens
acttagtgcagtaga

SEQ ID NO: 1988437 - DNA, 15 bp, Homo sapiens
cttagtgcagtagac

SEQ ID NO: 1988438 - DNA, 15 bp, Homo sapiens
ttagtgcagtagact

SEQ ID NO: 1988439 - DNA, 15 bp, Homo sapiens
tagtgcagtagactc

SEQ ID NO: 1988440 - DNA, 15 bp, Homo sapiens
agtgcagtagactca

SEQ ID NO: 1988441 - DNA, 15 bp, Homo sapiens
gtgcagtagactcag

SEQ ID NO: 1988442 - DNA, 15 bp, Homo sapiens
tgcagtagactcagt

SEQ ID NO: 1988443 - DNA, 15 bp, Homo sapiens
gcagtagactcagtt

SEQ ID NO: 1988444 - DNA, 15 bp, Homo sapiens
cagtagactcagtta

SEQ ID NO: 1988445 - DNA, 15 bp, Homo sapiens
agtagactcagttaa

SEQ ID NO: 1988446 - DNA, 15 bp, Homo sapiens
gtagactcagttaaa

SEQ ID NO: 1988447 - DNA, 15 bp, Homo sapiens
tagactcagttaaaa

SEQ ID NO: 1988448 - DNA, 15 bp, Homo sapiens
agactcagttaaaag

SEQ ID NO: 1988449 - DNA, 15 bp, Homo sapiens
gactcagttaaaaga

SEQ ID NO: 1988450 - DNA, 15 bp, Homo sapiens
actcagttaaaagaa

SEQ ID NO: 1988451 - DNA, 15 bp, Homo sapiens
ctcagttaaaagaag

SEQ ID NO: 1988452 - DNA, 15 bp, Homo sapiens
tcagttaaaagaagt

SEQ ID NO: 1988453 - DNA, 15 bp, Homo sapiens
cagttaaaagaagtg

SEQ ID NO: 1988454 - DNA, 15 bp, Homo sapiens
agttaaaagaagtgg

SEQ ID NO: 1988455 - DNA, 15 bp, Homo sapiens
gttaaaagaagtgga

SEQ ID NO: 1988456 - DNA, 15 bp, Homo sapiens
ttaaaagaagtggat

SEQ ID NO: 1988457 - DNA, 15 bp, Homo sapiens
taaaagaagtggatg

SEQ ID NO: 1988458 - DNA, 15 bp, Homo sapiens
aaaagaagtggatgt

SEQ ID NO: 1988459 - DNA, 15 bp, Homo sapiens
aaagaagtggatgtg

SEQ ID NO: 1988460 - DNA, 15 bp, Homo sapiens
aagaagtggatgtgt

SEQ ID NO: 1988461 - DNA, 15 bp, Homo sapiens
agaagtggatgtgtg

SEQ ID NO: 1988462 - DNA, 15 bp, Homo sapiens
gaagtggatgtgtgc

SEQ ID NO: 1988463 - DNA, 15 bp, Homo sapiens
aagtggatgtgtgcc

SEQ ID NO: 1988464 - DNA, 15 bp, Homo sapiens
agtggatgtgtgcca

SEQ ID NO: 1988465 - DNA, 15 bp, Homo sapiens
gtggatgtgtgccat

SEQ ID NO: 1988466 - DNA, 15 bp, Homo sapiens
tggatgtgtgccata

SEQ ID NO: 1988467 - DNA, 15 bp, Homo sapiens
ggatgtgtgccatat

SEQ ID NO: 1988468 - DNA, 15 bp, Homo sapiens
gatgtgtgccatatt

SEQ ID NO: 1988469 - DNA, 15 bp, Homo sapiens
atgtgtgccatattg

SEQ ID NO: 1988470 - DNA, 15 bp, Homo sapiens
tgtgtgccatattga

SEQ ID NO: 1988471 - DNA, 15 bp, Homo sapiens
gtgtgccatattgac

SEQ ID NO: 1988472 - DNA, 15 bp, Homo sapiens
tgtgccatattgaca

SEQ ID NO: 1988473 - DNA, 15 bp, Homo sapiens
gtgccatattgacat

SEQ ID NO: 1988474 - DNA, 15 bp, Homo sapiens
tgccatattgacatt

SEQ ID NO: 1988475 - DNA, 15 bp, Homo sapiens
gccatattgacattt

SEQ ID NO: 1988476 - DNA, 15 bp, Homo sapiens
ccatattgacatttt

SEQ ID NO: 1988477 - DNA, 15 bp, Homo sapiens
catattgacattttg

SEQ ID NO: 1988478 - DNA, 15 bp, Homo sapiens
atattgacattttga

SEQ ID NO: 1988479 - DNA, 15 bp, Homo sapiens
tattgacattttgag

SEQ ID NO: 1988480 - DNA, 15 bp, Homo sapiens
attgacattttgagc

SEQ ID NO: 1988481 - DNA, 15 bp, Homo sapiens
ttgacattttgagct

SEQ ID NO: 1988482 - DNA, 15 bp, Homo sapiens
tgacattttgagctc

SEQ ID NO: 1988483 - DNA, 15 bp, Homo sapiens
gacattttgagctca

SEQ ID NO: 1988484 - DNA, 15 bp, Homo sapiens
acattttgagctcac

SEQ ID NO: 1988485 - DNA, 15 bp, Homo sapiens
cattttgagctcaca

SEQ ID NO: 1988486 - DNA, 15 bp, Homo sapiens
attttgagctcacat

SEQ ID NO: 1988487 - DNA, 15 bp, Homo sapiens
ttttgagctcacatt

SEQ ID NO: 1988488 - DNA, 15 bp, Homo sapiens
tttgagctcacattc

SEQ ID NO: 1988489 - DNA, 15 bp, Homo sapiens
ttgagctcacattct

SEQ ID NO: 1988490 - DNA, 15 bp, Homo sapiens
tgagctcacattctt

SEQ ID NO: 1988491 - DNA, 15 bp, Homo sapiens
gagctcacattcttg

SEQ ID NO: 1988492 - DNA, 15 bp, Homo sapiens
agctcacattcttgt

SEQ ID NO: 1988493 - DNA, 15 bp, Homo sapiens
gctcacattcttgtg

SEQ ID NO: 1988494 - DNA, 15 bp, Homo sapiens
ctcacattcttgtgg

SEQ ID NO: 1988495 - DNA, 15 bp, Homo sapiens
tcacattcttgtggg

SEQ ID NO: 1988496 - DNA, 15 bp, Homo sapiens
cacattcttgtgggt

SEQ ID NO: 1988497 - DNA, 15 bp, Homo sapiens
acattcttgtgggta

SEQ ID NO: 1988498 - DNA, 15 bp, Homo sapiens
cattcttgtgggtaa

SEQ ID NO: 1988499 - DNA, 15 bp, Homo sapiens
attcttgtgggtaat

SEQ ID NO: 1988500 - DNA, 15 bp, Homo sapiens
ttcttgtgggtaata

SEQ ID NO: 1988501 - DNA, 15 bp, Homo sapiens
tcttgtgggtaatat

SEQ ID NO: 1988502 - DNA, 15 bp, Homo sapiens
cttgtgggtaatata

SEQ ID NO: 1988503 - DNA, 15 bp, Homo sapiens
ttgtgggtaatataa

SEQ ID NO: 1988504 - DNA, 15 bp, Homo sapiens
tgtgggtaatataaa

SEQ ID NO: 1988505 - DNA, 15 bp, Homo sapiens
gtgggtaatataaaa

SEQ ID NO: 1988506 - DNA, 15 bp, Homo sapiens
tgggtaatataaaat

SEQ ID NO: 1988507 - DNA, 15 bp, Homo sapiens
gggtaatataaaatt

SEQ ID NO: 1988508 - DNA, 15 bp, Homo sapiens
ggtaatataaaattc

SEQ ID NO: 1988509 - DNA, 15 bp, Homo sapiens
gtaatataaaattcc

SEQ ID NO: 1988510 - DNA, 15 bp, Homo sapiens
taatataaaattcct

SEQ ID NO: 1988511 - DNA, 15 bp, Homo sapiens
aatataaaattcctt

SEQ ID NO: 1988512 - DNA, 15 bp, Homo sapiens
atataaaattcctta

SEQ ID NO: 1988513 - DNA, 15 bp, Homo sapiens
tataaaattccttaa

SEQ ID NO: 1988514 - DNA, 15 bp, Homo sapiens
ataaaattccttaac

SEQ ID NO: 1988515 - DNA, 15 bp, Homo sapiens
taaaattccttaacc

SEQ ID NO: 1988516 - DNA, 15 bp, Homo sapiens
aaaattccttaacct

SEQ ID NO: 1988517 - DNA, 15 bp, Homo sapiens
aaattccttaacctg

SEQ ID NO: 1988518 - DNA, 15 bp, Homo sapiens
aattccttaacctga

SEQ ID NO: 1988519 - DNA, 15 bp, Homo sapiens
attccttaacctgat

SEQ ID NO: 1988520 - DNA, 15 bp, Homo sapiens
ttccttaacctgata

SEQ ID NO: 1988521 - DNA, 15 bp, Homo sapiens
tccttaacctgataa

SEQ ID NO: 1988522 - DNA, 15 bp, Homo sapiens
ccttaacctgataat

SEQ ID NO: 1988523 - DNA, 15 bp, Homo sapiens
cttaacctgataata

SEQ ID NO: 1988524 - DNA, 15 bp, Homo sapiens
ttaacctgataatat

SEQ ID NO: 1988525 - DNA, 15 bp, Homo sapiens
taacctgataatatt

SEQ ID NO: 1988526 - DNA, 15 bp, Homo sapiens
aacctgataatattg

SEQ ID NO: 1988527 - DNA, 15 bp, Homo sapiens
acctgataatattgc

SEQ ID NO: 1988528 - DNA, 15 bp, Homo sapiens
cctgataatattgca

SEQ ID NO: 1988529 - DNA, 15 bp, Homo sapiens
ctgataatattgcag

SEQ ID NO: 1988530 - DNA, 15 bp, Homo sapiens
tgataatattgcagc

SEQ ID NO: 1988531 - DNA, 15 bp, Homo sapiens
gataatattgcagct

SEQ ID NO: 1988532 - DNA, 15 bp, Homo sapiens
ataatattgcagcta

SEQ ID NO: 1988533 - DNA, 15 bp, Homo sapiens
taatattgcagctaa

SEQ ID NO: 1988534 - DNA, 15 bp, Homo sapiens
aatattgcagctaaa

SEQ ID NO: 1988535 - DNA, 15 bp, Homo sapiens
atattgcagctaaac

SEQ ID NO: 1988536 - DNA, 15 bp, Homo sapiens
tattgcagctaaacc

SEQ ID NO: 1988537 - DNA, 15 bp, Homo sapiens
attgcagctaaacct

SEQ ID NO: 1988538 - DNA, 15 bp, Homo sapiens
ttgcagctaaaccta

SEQ ID NO: 1988539 - DNA, 15 bp, Homo sapiens
tgcagctaaacctag

SEQ ID NO: 1988540 - DNA, 15 bp, Homo sapiens
gcagctaaacctagt

SEQ ID NO: 1988541 - DNA, 15 bp, Homo sapiens
cagctaaacctagta

SEQ ID NO: 1988542 - DNA, 15 bp, Homo sapiens
agctaaacctagtat

SEQ ID NO: 1988543 - DNA, 15 bp, Homo sapiens
gctaaacctagtatt

SEQ ID NO: 1988544 - DNA, 15 bp, Homo sapiens
ctaaacctagtattt

SEQ ID NO: 1988545 - DNA, 15 bp, Homo sapiens
taaacctagtattta

SEQ ID NO: 1988546 - DNA, 15 bp, Homo sapiens
aaacctagtatttag

SEQ ID NO: 1988547 - DNA, 15 bp, Homo sapiens
aacctagtatttagg

SEQ ID NO: 1988548 - DNA, 15 bp, Homo sapiens
acctagtatttaggg

SEQ ID NO: 1988549 - DNA, 15 bp, Homo sapiens
cctagtatttagggt

SEQ ID NO: 1988550 - DNA, 15 bp, Homo sapiens
ctagtatttagggtc

SEQ ID NO: 1988551 - DNA, 15 bp, Homo sapiens
tagtatttagggtct

SEQ ID NO: 1988552 - DNA, 15 bp, Homo sapiens
agtatttagggtcta

SEQ ID NO: 1988553 - DNA, 15 bp, Homo sapiens
gtatttagggtctaa

SEQ ID NO: 1988554 - DNA, 15 bp, Homo sapiens
tatttagggtctaag

SEQ ID NO: 1988555 - DNA, 15 bp, Homo sapiens
atttagggtctaagt

SEQ ID NO: 1988556 - DNA, 15 bp, Homo sapiens
tttagggtctaagtt

SEQ ID NO: 1988557 - DNA, 15 bp, Homo sapiens
ttagggtctaagttg

SEQ ID NO: 1988558 - DNA, 15 bp, Homo sapiens
tagggtctaagttga

SEQ ID NO: 1988559 - DNA, 15 bp, Homo sapiens
agggtctaagttgaa

SEQ ID NO: 1988560 - DNA, 15 bp, Homo sapiens
gggtctaagttgaat

SEQ ID NO: 1988561 - DNA, 15 bp, Homo sapiens
ggtctaagttgaatg

SEQ ID NO: 1988562 - DNA, 15 bp, Homo sapiens
gtctaagttgaatga

SEQ ID NO: 1988563 - DNA, 15 bp, Homo sapiens
tctaagttgaatgag

SEQ ID NO: 1988564 - DNA, 15 bp, Homo sapiens
ctaagttgaatgagt

SEQ ID NO: 1988565 - DNA, 15 bp, Homo sapiens
taagttgaatgagta

SEQ ID NO: 1988566 - DNA, 15 bp, Homo sapiens
aagttgaatgagtat

SEQ ID NO: 1988567 - DNA, 15 bp, Homo sapiens
agttgaatgagtatt

SEQ ID NO: 1988568 - DNA, 15 bp, Homo sapiens
gttgaatgagtatta

SEQ ID NO: 1988569 - DNA, 15 bp, Homo sapiens
ttgaatgagtattac

SEQ ID NO: 1988570 - DNA, 15 bp, Homo sapiens
tgaatgagtattacc

SEQ ID NO: 1988571 - DNA, 15 bp, Homo sapiens
gaatgagtattacca

SEQ ID NO: 1988572 - DNA, 15 bp, Homo sapiens
aatgagtattaccaa

SEQ ID NO: 1988573 - DNA, 15 bp, Homo sapiens
atgagtattaccaat

SEQ ID NO: 1988574 - DNA, 15 bp, Homo sapiens
tgagtattaccaatt

SEQ ID NO: 1988575 - DNA, 15 bp, Homo sapiens
gagtattaccaattt

SEQ ID NO: 1988576 - DNA, 15 bp, Homo sapiens
agtattaccaatttt

SEQ ID NO: 1988577 - DNA, 15 bp, Homo sapiens
gtattaccaatttta

SEQ ID NO: 1988578 - DNA, 15 bp, Homo sapiens
tattaccaattttag

SEQ ID NO: 1988579 - DNA, 15 bp, Homo sapiens
attaccaattttaga

SEQ ID NO: 1988580 - DNA, 15 bp, Homo sapiens
ttaccaattttagaa

SEQ ID NO: 1988581 - DNA, 15 bp, Homo sapiens
taccaattttagaag

SEQ ID NO: 1988582 - DNA, 15 bp, Homo sapiens
accaattttagaagt

SEQ ID NO: 1988583 - DNA, 15 bp, Homo sapiens
ccaattttagaagta

SEQ ID NO: 1988584 - DNA, 15 bp, Homo sapiens
caattttagaagtaa

SEQ ID NO: 1988585 - DNA, 15 bp, Homo sapiens
aattttagaagtaat

SEQ ID NO: 1988586 - DNA, 15 bp, Homo sapiens
attttagaagtaatc

SEQ ID NO: 1988587 - DNA, 15 bp, Homo sapiens
ttttagaagtaatca

SEQ ID NO: 1988588 - DNA, 15 bp, Homo sapiens
tttagaagtaatcac

SEQ ID NO: 1988589 - DNA, 15 bp, Homo sapiens
ttagaagtaatcacc

SEQ ID NO: 1988590 - DNA, 15 bp, Homo sapiens
tagaagtaatcacct

SEQ ID NO: 1988591 - DNA, 15 bp, Homo sapiens
agaagtaatcacctc

SEQ ID NO: 1988592 - DNA, 15 bp, Homo sapiens
gaagtaatcacctcc

SEQ ID NO: 1988593 - DNA, 15 bp, Homo sapiens
aagtaatcacctcct

SEQ ID NO: 1988594 - DNA, 15 bp, Homo sapiens
agtaatcacctcctt

SEQ ID NO: 1988595 - DNA, 15 bp, Homo sapiens
gtaatcacctccttg

SEQ ID NO: 1988596 - DNA, 15 bp, Homo sapiens
taatcacctccttgg

SEQ ID NO: 1988597 - DNA, 15 bp, Homo sapiens
aatcacctccttggt

SEQ ID NO: 1988598 - DNA, 15 bp, Homo sapiens
atcacctccttggtt

SEQ ID NO: 1988599 - DNA, 15 bp, Homo sapiens
tcacctccttggtta

SEQ ID NO: 1988600 - DNA, 15 bp, Homo sapiens
cacctccttggttag

SEQ ID NO: 1988601 - DNA, 15 bp, Homo sapiens
acctccttggttagg

SEQ ID NO: 1988602 - DNA, 15 bp, Homo sapiens
cctccttggttaggg

SEQ ID NO: 1988603 - DNA, 15 bp, Homo sapiens
ctccttggttaggga

SEQ ID NO: 1988604 - DNA, 15 bp, Homo sapiens
tccttggttagggaa

SEQ ID NO: 1988605 - DNA, 15 bp, Homo sapiens
ccttggttagggaaa

SEQ ID NO: 1988606 - DNA, 15 bp, Homo sapiens
cttggttagggaaat

SEQ ID NO: 1988607 - DNA, 15 bp, Homo sapiens
ttggttagggaaatg

SEQ ID NO: 1988608 - DNA, 15 bp, Homo sapiens
tggttagggaaatga

SEQ ID NO: 1988609 - DNA, 15 bp, Homo sapiens
ggttagggaaatgac

SEQ ID NO: 1988610 - DNA, 15 bp, Homo sapiens
gttagggaaatgaca

SEQ ID NO: 1988611 - DNA, 15 bp, Homo sapiens
ttagggaaatgacag

SEQ ID NO: 1988612 - DNA, 15 bp, Homo sapiens
tagggaaatgacagt

SEQ ID NO: 1988613 - DNA, 15 bp, Homo sapiens
agggaaatgacagtt

SEQ ID NO: 1988614 - DNA, 15 bp, Homo sapiens
gggaaatgacagttg

SEQ ID NO: 1988615 - DNA, 15 bp, Homo sapiens
ggaaatgacagttgc

SEQ ID NO: 1988616 - DNA, 15 bp, Homo sapiens
gaaatgacagttgca

SEQ ID NO: 1988617 - DNA, 15 bp, Homo sapiens
aaatgacagttgcac

SEQ ID NO: 1988618 - DNA, 15 bp, Homo sapiens
aatgacagttgcaca

SEQ ID NO: 1988619 - DNA, 15 bp, Homo sapiens
atgacagttgcacag

SEQ ID NO: 1988620 - DNA, 15 bp, Homo sapiens
tgacagttgcacagg

SEQ ID NO: 1988621 - DNA, 15 bp, Homo sapiens
gacagttgcacaggt

SEQ ID NO: 1988622 - DNA, 15 bp, Homo sapiens
acagttgcacaggtg

SEQ ID NO: 1988623 - DNA, 15 bp, Homo sapiens
cagttgcacaggtgg

SEQ ID NO: 1988624 - DNA, 15 bp, Homo sapiens
agttgcacaggtgga

SEQ ID NO: 1988625 - DNA, 15 bp, Homo sapiens
gttgcacaggtggac

SEQ ID NO: 1988626 - DNA, 15 bp, Homo sapiens
ttgcacaggtggaca

SEQ ID NO: 1988627 - DNA, 15 bp, Homo sapiens
tgcacaggtggacag

SEQ ID NO: 1988628 - DNA, 15 bp, Homo sapiens
gcacaggtggacagc

SEQ ID NO: 1988629 - DNA, 15 bp, Homo sapiens
cacaggtggacagcc

SEQ ID NO: 1988630 - DNA, 15 bp, Homo sapiens
acaggtggacagcca

SEQ ID NO: 1988631 - DNA, 15 bp, Homo sapiens
caggtggacagccag

SEQ ID NO: 1988632 - DNA, 15 bp, Homo sapiens
aggtggacagccaga

SEQ ID NO: 1988633 - DNA, 15 bp, Homo sapiens
ggtggacagccagaa

SEQ ID NO: 1988634 - DNA, 15 bp, Homo sapiens
gtggacagccagaaa

SEQ ID NO: 1988635 - DNA, 15 bp, Homo sapiens
tggacagccagaaag

SEQ ID NO: 1988636 - DNA, 15 bp, Homo sapiens
ggacagccagaaagc

SEQ ID NO: 1988637 - DNA, 15 bp, Homo sapiens
gacagccagaaagct

SEQ ID NO: 1988638 - DNA, 15 bp, Homo sapiens
acagccagaaagctg

SEQ ID NO: 1988639 - DNA, 15 bp, Homo sapiens
cagccagaaagctga

SEQ ID NO: 1988640 - DNA, 15 bp, Homo sapiens
agccagaaagctgaa

SEQ ID NO: 1988641 - DNA, 15 bp, Homo sapiens
gccagaaagctgaat

SEQ ID NO: 1988642 - DNA, 15 bp, Homo sapiens
ccagaaagctgaatg

SEQ ID NO: 1988643 - DNA, 15 bp, Homo sapiens
cagaaagctgaatgt

SEQ ID NO: 1988644 - DNA, 15 bp, Homo sapiens
agaaagctgaatgtt

SEQ ID NO: 1988645 - DNA, 15 bp, Homo sapiens
gaaagctgaatgtta

SEQ ID NO: 1988646 - DNA, 15 bp, Homo sapiens
aaagctgaatgttat

SEQ ID NO: 1988647 - DNA, 15 bp, Homo sapiens
aagctgaatgttatc

SEQ ID NO: 1988648 - DNA, 15 bp, Homo sapiens
agctgaatgttatca

SEQ ID NO: 1988649 - DNA, 15 bp, Homo sapiens
gctgaatgttatcag

SEQ ID NO: 1988650 - DNA, 15 bp, Homo sapiens
ctgaatgttatcagt

SEQ ID NO: 1988651 - DNA, 15 bp, Homo sapiens
tgaatgttatcagtt

SEQ ID NO: 1988652 - DNA, 15 bp, Homo sapiens
gaatgttatcagtta

SEQ ID NO: 1988653 - DNA, 15 bp, Homo sapiens
aatgttatcagttaa

SEQ ID NO: 1988654 - DNA, 15 bp, Homo sapiens
atgttatcagttaaa

SEQ ID NO: 1988655 - DNA, 15 bp, Homo sapiens
tgttatcagttaaat

SEQ ID NO: 1988656 - DNA, 15 bp, Homo sapiens
gttatcagttaaatc

SEQ ID NO: 1988657 - DNA, 15 bp, Homo sapiens
ttatcagttaaatct

SEQ ID NO: 1988658 - DNA, 15 bp, Homo sapiens
tatcagttaaatctt

SEQ ID NO: 1988659 - DNA, 15 bp, Homo sapiens
atcagttaaatctta

SEQ ID NO: 1988660 - DNA, 15 bp, Homo sapiens
tcagttaaatcttac

SEQ ID NO: 1988661 - DNA, 15 bp, Homo sapiens
cagttaaatcttaca

SEQ ID NO: 1988662 - DNA, 15 bp, Homo sapiens
agttaaatcttacat

SEQ ID NO: 1988663 - DNA, 15 bp, Homo sapiens
gttaaatcttacatc

SEQ ID NO: 1988664 - DNA, 15 bp, Homo sapiens
ttaaatcttacatct

SEQ ID NO: 1988665 - DNA, 15 bp, Homo sapiens
taaatcttacatctc

SEQ ID NO: 1988666 - DNA, 15 bp, Homo sapiens
aaatcttacatctct

SEQ ID NO: 1988667 - DNA, 15 bp, Homo sapiens
aatcttacatctctc

SEQ ID NO: 1988668 - DNA, 15 bp, Homo sapiens
atcttacatctctcc

SEQ ID NO: 1988669 - DNA, 15 bp, Homo sapiens
tcttacatctctcct

SEQ ID NO: 1988670 - DNA, 15 bp, Homo sapiens
cttacatctctcctt

SEQ ID NO: 1988671 - DNA, 15 bp, Homo sapiens
ttacatctctcctta

SEQ ID NO: 1988672 - DNA, 15 bp, Homo sapiens
tacatctctccttaa

SEQ ID NO: 1988673 - DNA, 15 bp, Homo sapiens
acatctctccttaac

SEQ ID NO: 1988674 - DNA, 15 bp, Homo sapiens
catctctccttaacc

SEQ ID NO: 1988675 - DNA, 15 bp, Homo sapiens
atctctccttaacct

SEQ ID NO: 1988676 - DNA, 15 bp, Homo sapiens
tctctccttaacctg

SEQ ID NO: 1988677 - DNA, 15 bp, Homo sapiens
ctctccttaacctgc

SEQ ID NO: 1988678 - DNA, 15 bp, Homo sapiens
tctccttaacctgcc

SEQ ID NO: 1988679 - DNA, 15 bp, Homo sapiens
ctccttaacctgcct

SEQ ID NO: 1988680 - DNA, 15 bp, Homo sapiens
tccttaacctgcctt

SEQ ID NO: 1988681 - DNA, 15 bp, Homo sapiens
ccttaacctgccttc

SEQ ID NO: 1988682 - DNA, 15 bp, Homo sapiens
cttaacctgccttcg

SEQ ID NO: 1988683 - DNA, 15 bp, Homo sapiens
ttaacctgccttcgt

SEQ ID NO: 1988684 - DNA, 15 bp, Homo sapiens
taacctgccttcgtg

SEQ ID NO: 1988685 - DNA, 15 bp, Homo sapiens
aacctgccttcgtgg

SEQ ID NO: 1988686 - DNA, 15 bp, Homo sapiens
acctgccttcgtggt

SEQ ID NO: 1988687 - DNA, 15 bp, Homo sapiens
cctgccttcgtggtg

SEQ ID NO: 1988688 - DNA, 15 bp, Homo sapiens
ctgccttcgtggtgc

SEQ ID NO: 1988689 - DNA, 15 bp, Homo sapiens
tgccttcgtggtgcc

SEQ ID NO: 1988690 - DNA, 15 bp, Homo sapiens
gccttcgtggtgcca

SEQ ID NO: 1988691 - DNA, 15 bp, Homo sapiens
ccttcgtggtgccaa

SEQ ID NO: 1988692 - DNA, 15 bp, Homo sapiens
cttcgtggtgccaaa

SEQ ID NO: 1988693 - DNA, 15 bp, Homo sapiens
ttcgtggtgccaaat

SEQ ID NO: 1988694 - DNA, 15 bp, Homo sapiens
tcgtggtgccaaata

SEQ ID NO: 1988695 - DNA, 15 bp, Homo sapiens
cgtggtgccaaatag

SEQ ID NO: 1988696 - DNA, 15 bp, Homo sapiens
gtggtgccaaatagc

SEQ ID NO: 1988697 - DNA, 15 bp, Homo sapiens
tggtgccaaatagca

SEQ ID NO: 1988698 - DNA, 15 bp, Homo sapiens
ggtgccaaatagcaa

SEQ ID NO: 1988699 - DNA, 15 bp, Homo sapiens
gtgccaaatagcaag

SEQ ID NO: 1988700 - DNA, 15 bp, Homo sapiens
tgccaaatagcaagt

SEQ ID NO: 1988701 - DNA, 15 bp, Homo sapiens
gccaaatagcaagtt

SEQ ID NO: 1988702 - DNA, 15 bp, Homo sapiens
ccaaatagcaagttt

SEQ ID NO: 1988703 - DNA, 15 bp, Homo sapiens
caaatagcaagtttc

SEQ ID NO: 1988704 - DNA, 15 bp, Homo sapiens
aaatagcaagtttct

SEQ ID NO: 1988705 - DNA, 15 bp, Homo sapiens
aatagcaagtttcta

SEQ ID NO: 1988706 - DNA, 15 bp, Homo sapiens
atagcaagtttctaa

SEQ ID NO: 1988707 - DNA, 15 bp, Homo sapiens
tagcaagtttctaat

SEQ ID NO: 1988708 - DNA, 15 bp, Homo sapiens
agcaagtttctaatt

SEQ ID NO: 1988709 - DNA, 15 bp, Homo sapiens
gcaagtttctaattg

SEQ ID NO: 1988710 - DNA, 15 bp, Homo sapiens
caagtttctaattga

SEQ ID NO: 1988711 - DNA, 15 bp, Homo sapiens
aagtttctaattgaa

SEQ ID NO: 1988712 - DNA, 15 bp, Homo sapiens
agtttctaattgaaa

SEQ ID NO: 1988713 - DNA, 15 bp, Homo sapiens
gtttctaattgaaac

SEQ ID NO: 1988714 - DNA, 15 bp, Homo sapiens
tttctaattgaaact

SEQ ID NO: 1988715 - DNA, 15 bp, Homo sapiens
ttctaattgaaactg

SEQ ID NO: 1988716 - DNA, 15 bp, Homo sapiens
tctaattgaaactga

SEQ ID NO: 1988717 - DNA, 15 bp, Homo sapiens
ctaattgaaactgac

SEQ ID NO: 1988718 - DNA, 15 bp, Homo sapiens
taattgaaactgaca

SEQ ID NO: 1988719 - DNA, 15 bp, Homo sapiens
aattgaaactgacaa

SEQ ID NO: 1988720 - DNA, 15 bp, Homo sapiens
attgaaactgacaaa

SEQ ID NO: 1988721 - DNA, 15 bp, Homo sapiens
ttgaaactgacaaat

SEQ ID NO: 1988722 - DNA, 15 bp, Homo sapiens
tgaaactgacaaatt

SEQ ID NO: 1988723 - DNA, 15 bp, Homo sapiens
gaaactgacaaattg

SEQ ID NO: 1988724 - DNA, 15 bp, Homo sapiens
aaactgacaaattgt

SEQ ID NO: 1988725 - DNA, 15 bp, Homo sapiens
aactgacaaattgta

SEQ ID NO: 1988726 - DNA, 15 bp, Homo sapiens
actgacaaattgtag

SEQ ID NO: 1988727 - DNA, 15 bp, Homo sapiens
ctgacaaattgtagg

SEQ ID NO: 1988728 - DNA, 15 bp, Homo sapiens
tgacaaattgtaggt

SEQ ID NO: 1988729 - DNA, 15 bp, Homo sapiens
gacaaattgtaggtg

SEQ ID NO: 1988730 - DNA, 15 bp, Homo sapiens
acaaattgtaggtgt

SEQ ID NO: 1988731 - DNA, 15 bp, Homo sapiens
caaattgtaggtgtg

SEQ ID NO: 1988732 - DNA, 15 bp, Homo sapiens
aaattgtaggtgtgt

SEQ ID NO: 1988733 - DNA, 15 bp, Homo sapiens
aattgtaggtgtgta

SEQ ID NO: 1988734 - DNA, 15 bp, Homo sapiens
attgtaggtgtgtag

SEQ ID NO: 1988735 - DNA, 15 bp, Homo sapiens
ttgtaggtgtgtagc

SEQ ID NO: 1988736 - DNA, 15 bp, Homo sapiens
tgtaggtgtgtagct

SEQ ID NO: 1988737 - DNA, 15 bp, Homo sapiens
gtaggtgtgtagctt

SEQ ID NO: 1988738 - DNA, 15 bp, Homo sapiens
taggtgtgtagcttt

SEQ ID NO: 1988739 - DNA, 15 bp, Homo sapiens
aggtgtgtagctttt

SEQ ID NO: 1988740 - DNA, 15 bp, Homo sapiens
ggtgtgtagcttttt

SEQ ID NO: 1988741 - DNA, 15 bp, Homo sapiens
gtgtgtagctttttt

SEQ ID NO: 1988742 - DNA, 15 bp, Homo sapiens
tgtgtagcttttttt

SEQ ID NO: 1988743 - DNA, 15 bp, Homo sapiens
gtgtagctttttttt

SEQ ID NO: 1988744 - DNA, 15 bp, Homo sapiens
tgtagcttttttttt

SEQ ID NO: 1988745 - DNA, 15 bp, Homo sapiens
gtagctttttttttt

SEQ ID NO: 1988746 - DNA, 15 bp, Homo sapiens
tagcttttttttttt

SEQ ID NO: 1988747 - DNA, 15 bp, Homo sapiens
ttgagacagagtttc

SEQ ID NO: 1988748 - DNA, 15 bp, Homo sapiens
tgagacagagtttcg

SEQ ID NO: 1988749 - DNA, 15 bp, Homo sapiens
gagacagagtttcgc

SEQ ID NO: 1988750 - DNA, 15 bp, Homo sapiens
gtttcgctcttgtct

SEQ ID NO: 1988751 - DNA, 15 bp, Homo sapiens
tttcgctcttgtctc

SEQ ID NO: 1988752 - DNA, 15 bp, Homo sapiens
ttcgctcttgtctcc

SEQ ID NO: 1988753 - DNA, 15 bp, Homo sapiens
tcgctcttgtctcct

SEQ ID NO: 1988754 - DNA, 15 bp, Homo sapiens
cgctcttgtctccta

SEQ ID NO: 1988755 - DNA, 15 bp, Homo sapiens
gctcttgtctcctag

SEQ ID NO: 1988756 - DNA, 15 bp, Homo sapiens
ctcttgtctcctagg

SEQ ID NO: 1988757 - DNA, 15 bp, Homo sapiens
tcttgtctcctaggc

SEQ ID NO: 1988758 - DNA, 15 bp, Homo sapiens
cttgtctcctaggct

SEQ ID NO: 1988759 - DNA, 15 bp, Homo sapiens
ttgtctcctaggctg

SEQ ID NO: 1988760 - DNA, 15 bp, Homo sapiens
tgtctcctaggctgg

SEQ ID NO: 1988761 - DNA, 15 bp, Homo sapiens
gtctcctaggctgga

SEQ ID NO: 1988762 - DNA, 15 bp, Homo sapiens
tctcctaggctggag

SEQ ID NO: 1988763 - DNA, 15 bp, Homo sapiens
ctcctaggctggagt

SEQ ID NO: 1988764 - DNA, 15 bp, Homo sapiens
tcctaggctggagtg

SEQ ID NO: 1988765 - DNA, 15 bp, Homo sapiens
ctggagtgcaatggg

SEQ ID NO: 1988766 - DNA, 15 bp, Homo sapiens
tggagtgcaatgggg

SEQ ID NO: 1988767 - DNA, 15 bp, Homo sapiens
ggagtgcaatgggga

SEQ ID NO: 1988768 - DNA, 15 bp, Homo sapiens
gagtgcaatggggag

SEQ ID NO: 1988769 - DNA, 15 bp, Homo sapiens
agtgcaatggggaga

SEQ ID NO: 1988770 - DNA, 15 bp, Homo sapiens
gtgcaatggggagat

SEQ ID NO: 1988771 - DNA, 15 bp, Homo sapiens
tgcaatggggagatc

SEQ ID NO: 1988772 - DNA, 15 bp, Homo sapiens
gcaatggggagatct

SEQ ID NO: 1988773 - DNA, 15 bp, Homo sapiens
caatggggagatctc

SEQ ID NO: 1988774 - DNA, 15 bp, Homo sapiens
aatggggagatctca

SEQ ID NO: 1988775 - DNA, 15 bp, Homo sapiens
atggggagatctcag

SEQ ID NO: 1988776 - DNA, 15 bp, Homo sapiens
tggggagatctcagc

SEQ ID NO: 1988777 - DNA, 15 bp, Homo sapiens
ggggagatctcagca

SEQ ID NO: 1988778 - DNA, 15 bp, Homo sapiens
gggagatctcagcat

SEQ ID NO: 1988779 - DNA, 15 bp, Homo sapiens
ggagatctcagcata

SEQ ID NO: 1988780 - DNA, 15 bp, Homo sapiens
gagatctcagcatac

SEQ ID NO: 1988781 - DNA, 15 bp, Homo sapiens
agatctcagcatact

SEQ ID NO: 1988782 - DNA, 15 bp, Homo sapiens
gatctcagcatactg

SEQ ID NO: 1988783 - DNA, 15 bp, Homo sapiens
atctcagcatactgc

SEQ ID NO: 1988784 - DNA, 15 bp, Homo sapiens
tctcagcatactgca

SEQ ID NO: 1988785 - DNA, 15 bp, Homo sapiens
ctcagcatactgcaa

SEQ ID NO: 1988786 - DNA, 15 bp, Homo sapiens
tcagcatactgcaac

SEQ ID NO: 1988787 - DNA, 15 bp, Homo sapiens
cagcatactgcaacc

SEQ ID NO: 1988788 - DNA, 15 bp, Homo sapiens
agcatactgcaacct

SEQ ID NO: 1988789 - DNA, 15 bp, Homo sapiens
gcatactgcaacctc

SEQ ID NO: 1988790 - DNA, 15 bp, Homo sapiens
catactgcaacctct

SEQ ID NO: 1988791 - DNA, 15 bp, Homo sapiens
atactgcaacctctg

SEQ ID NO: 1988792 - DNA, 15 bp, Homo sapiens
tcctgggttcaagcc

SEQ ID NO: 1988793 - DNA, 15 bp, Homo sapiens
cctgggttcaagcca

SEQ ID NO: 1988794 - DNA, 15 bp, Homo sapiens
ctgggttcaagccat

SEQ ID NO: 1988795 - DNA, 15 bp, Homo sapiens
tgggttcaagccatt

SEQ ID NO: 1988796 - DNA, 15 bp, Homo sapiens
gggttcaagccattc

SEQ ID NO: 1988797 - DNA, 15 bp, Homo sapiens
ggcgcccaccaccac

SEQ ID NO: 1988798 - DNA, 15 bp, Homo sapiens
gcgcccaccaccacg

SEQ ID NO: 1988799 - DNA, 15 bp, Homo sapiens
cgcccaccaccacgc

SEQ ID NO: 1988800 - DNA, 15 bp, Homo sapiens
gcccaccaccacgcc

SEQ ID NO: 1988801 - DNA, 15 bp, Homo sapiens
cccaccaccacgcct

SEQ ID NO: 1988802 - DNA, 15 bp, Homo sapiens
ccaccaccacgcctg

SEQ ID NO: 1988803 - DNA, 15 bp, Homo sapiens
caccaccacgcctgc

SEQ ID NO: 1988804 - DNA, 15 bp, Homo sapiens
accaccacgcctgcc

SEQ ID NO: 1988805 - DNA, 15 bp, Homo sapiens
ccaccacgcctgcct

SEQ ID NO: 1988806 - DNA, 15 bp, Homo sapiens
caccacgcctgccta

SEQ ID NO: 1988807 - DNA, 15 bp, Homo sapiens
accacgcctgcctaa

SEQ ID NO: 1988808 - DNA, 15 bp, Homo sapiens
ccacgcctgcctaat

SEQ ID NO: 1988809 - DNA, 15 bp, Homo sapiens
cacgcctgcctaatt

SEQ ID NO: 1988810 - DNA, 15 bp, Homo sapiens
acgcctgcctaattt

SEQ ID NO: 1988811 - DNA, 15 bp, Homo sapiens
cgcctgcctaatttt

SEQ ID NO: 1988812 - DNA, 15 bp, Homo sapiens
gcctgcctaattttt

SEQ ID NO: 1988813 - DNA, 15 bp, Homo sapiens
cctgcctaatttttg

SEQ ID NO: 1988814 - DNA, 15 bp, Homo sapiens
ctgcctaatttttgt

SEQ ID NO: 1988815 - DNA, 15 bp, Homo sapiens
tgcctaatttttgta

SEQ ID NO: 1988816 - DNA, 15 bp, Homo sapiens
gcctaatttttgtat

SEQ ID NO: 1988817 - DNA, 15 bp, Homo sapiens
cctaatttttgtatt

SEQ ID NO: 1988818 - DNA, 15 bp, Homo sapiens
acgggggtttcaccg

SEQ ID NO: 1988819 - DNA, 15 bp, Homo sapiens
cgggggtttcaccgt

SEQ ID NO: 1988820 - DNA, 15 bp, Homo sapiens
gggggtttcaccgtg

SEQ ID NO: 1988821 - DNA, 15 bp, Homo sapiens
tttcaccgtgttggc

SEQ ID NO: 1988822 - DNA, 15 bp, Homo sapiens
ttcaccgtgttggcc

SEQ ID NO: 1988823 - DNA, 15 bp, Homo sapiens
tcaccgtgttggcca

SEQ ID NO: 1988824 - DNA, 15 bp, Homo sapiens
caccgtgttggccag

SEQ ID NO: 1988825 - DNA, 15 bp, Homo sapiens
accgtgttggccagg

SEQ ID NO: 1988826 - DNA, 15 bp, Homo sapiens
ccgtgttggccaggc

SEQ ID NO: 1988827 - DNA, 15 bp, Homo sapiens
cgtgttggccaggct

SEQ ID NO: 1988828 - DNA, 15 bp, Homo sapiens
gtgttggccaggctg

SEQ ID NO: 1988829 - DNA, 15 bp, Homo sapiens
gccaggctggtctcc

SEQ ID NO: 1988830 - DNA, 15 bp, Homo sapiens
tggtctccaactcct

SEQ ID NO: 1988831 - DNA, 15 bp, Homo sapiens
ggtctccaactcctg

SEQ ID NO: 1988832 - DNA, 15 bp, Homo sapiens
gtctccaactcctgg

SEQ ID NO: 1988833 - DNA, 15 bp, Homo sapiens
tctccaactcctggc

SEQ ID NO: 1988834 - DNA, 15 bp, Homo sapiens
ctccaactcctggct

SEQ ID NO: 1988835 - DNA, 15 bp, Homo sapiens
tccaactcctggctt

SEQ ID NO: 1988836 - DNA, 15 bp, Homo sapiens
ccaactcctggcttc

SEQ ID NO: 1988837 - DNA, 15 bp, Homo sapiens
caactcctggcttca

SEQ ID NO: 1988838 - DNA, 15 bp, Homo sapiens
aactcctggcttcag

SEQ ID NO: 1988839 - DNA, 15 bp, Homo sapiens
actcctggcttcagg

SEQ ID NO: 1988840 - DNA, 15 bp, Homo sapiens
ctcctggcttcaggt

SEQ ID NO: 1988841 - DNA, 15 bp, Homo sapiens
tcctggcttcaggtg

SEQ ID NO: 1988842 - DNA, 15 bp, Homo sapiens
cctggcttcaggtga

SEQ ID NO: 1988843 - DNA, 15 bp, Homo sapiens
ctggcttcaggtgat

SEQ ID NO: 1988844 - DNA, 15 bp, Homo sapiens
tggcttcaggtgatc

SEQ ID NO: 1988845 - DNA, 15 bp, Homo sapiens
ggcttcaggtgatcc

SEQ ID NO: 1988846 - DNA, 15 bp, Homo sapiens
gcttcaggtgatcca

SEQ ID NO: 1988847 - DNA, 15 bp, Homo sapiens
cttcaggtgatccac

SEQ ID NO: 1988848 - DNA, 15 bp, Homo sapiens
ttcaggtgatccacc

SEQ ID NO: 1988849 - DNA, 15 bp, Homo sapiens
tgatccacctgcctt

SEQ ID NO: 1988850 - DNA, 15 bp, Homo sapiens
gatccacctgccttg

SEQ ID NO: 1988851 - DNA, 15 bp, Homo sapiens
atccacctgccttgg

SEQ ID NO: 1988852 - DNA, 15 bp, Homo sapiens
tccacctgccttggc

SEQ ID NO: 1988853 - DNA, 15 bp, Homo sapiens
ccacctgccttggcc

SEQ ID NO: 1988854 - DNA, 15 bp, Homo sapiens
cacctgccttggcct

SEQ ID NO: 1988855 - DNA, 15 bp, Homo sapiens
acctgccttggcctc

SEQ ID NO: 1988856 - DNA, 15 bp, Homo sapiens
caccacgcccggcca

SEQ ID NO: 1988857 - DNA, 15 bp, Homo sapiens
accacgcccggccat

SEQ ID NO: 1988858 - DNA, 15 bp, Homo sapiens
ccacgcccggccatg

SEQ ID NO: 1988859 - DNA, 15 bp, Homo sapiens
cacgcccggccatgt

SEQ ID NO: 1988860 - DNA, 15 bp, Homo sapiens
acgcccggccatgtg

SEQ ID NO: 1988861 - DNA, 15 bp, Homo sapiens
cgcccggccatgtgt

SEQ ID NO: 1988862 - DNA, 15 bp, Homo sapiens
gcccggccatgtgta

SEQ ID NO: 1988863 - DNA, 15 bp, Homo sapiens
cccggccatgtgtag

SEQ ID NO: 1988864 - DNA, 15 bp, Homo sapiens
ccggccatgtgtagc

SEQ ID NO: 1988865 - DNA, 15 bp, Homo sapiens
cggccatgtgtagct

SEQ ID NO: 1988866 - DNA, 15 bp, Homo sapiens
ggccatgtgtagctt

SEQ ID NO: 1988867 - DNA, 15 bp, Homo sapiens
gccatgtgtagcttt

SEQ ID NO: 1988868 - DNA, 15 bp, Homo sapiens
ccatgtgtagctttt

SEQ ID NO: 1988869 - DNA, 15 bp, Homo sapiens
catgtgtagctttta

SEQ ID NO: 1988870 - DNA, 15 bp, Homo sapiens
atgtgtagcttttaa

SEQ ID NO: 1988871 - DNA, 15 bp, Homo sapiens
tgtgtagcttttaat

SEQ ID NO: 1988872 - DNA, 15 bp, Homo sapiens
gtgtagcttttaatt

SEQ ID NO: 1988873 - DNA, 15 bp, Homo sapiens
tgtagcttttaattg

SEQ ID NO: 1988874 - DNA, 15 bp, Homo sapiens
gtagcttttaattgt

SEQ ID NO: 1988875 - DNA, 15 bp, Homo sapiens
tagcttttaattgtg

SEQ ID NO: 1988876 - DNA, 15 bp, Homo sapiens
agcttttaattgtgg

SEQ ID NO: 1988877 - DNA, 15 bp, Homo sapiens
gcttttaattgtggt

SEQ ID NO: 1988878 - DNA, 15 bp, Homo sapiens
cttttaattgtggtt

SEQ ID NO: 1988879 - DNA, 15 bp, Homo sapiens
ttttaattgtggttc

SEQ ID NO: 1988880 - DNA, 15 bp, Homo sapiens
tttaattgtggttca

SEQ ID NO: 1988881 - DNA, 15 bp, Homo sapiens
ttaattgtggttcat

SEQ ID NO: 1988882 - DNA, 15 bp, Homo sapiens
taattgtggttcatt

SEQ ID NO: 1988883 - DNA, 15 bp, Homo sapiens
aattgtggttcatta

SEQ ID NO: 1988884 - DNA, 15 bp, Homo sapiens
attgtggttcattaa

SEQ ID NO: 1988885 - DNA, 15 bp, Homo sapiens
ttgtggttcattaac

SEQ ID NO: 1988886 - DNA, 15 bp, Homo sapiens
tgtggttcattaacc

SEQ ID NO: 1988887 - DNA, 15 bp, Homo sapiens
gtggttcattaaccc

SEQ ID NO: 1988888 - DNA, 15 bp, Homo sapiens
tggttcattaaccca

SEQ ID NO: 1988889 - DNA, 15 bp, Homo sapiens
ggttcattaacccag

SEQ ID NO: 1988890 - DNA, 15 bp, Homo sapiens
gttcattaacccagt

SEQ ID NO: 1988891 - DNA, 15 bp, Homo sapiens
ttcattaacccagtt

SEQ ID NO: 1988892 - DNA, 15 bp, Homo sapiens
tcattaacccagttt

SEQ ID NO: 1988893 - DNA, 15 bp, Homo sapiens
cattaacccagtttc

SEQ ID NO: 1988894 - DNA, 15 bp, Homo sapiens
attaacccagtttct

SEQ ID NO: 1988895 - DNA, 15 bp, Homo sapiens
ttaacccagtttcta

SEQ ID NO: 1988896 - DNA, 15 bp, Homo sapiens
taacccagtttctaa

SEQ ID NO: 1988897 - DNA, 15 bp, Homo sapiens
aacccagtttctaag

SEQ ID NO: 1988898 - DNA, 15 bp, Homo sapiens
acccagtttctaagc

SEQ ID NO: 1988899 - DNA, 15 bp, Homo sapiens
cccagtttctaagca

SEQ ID NO: 1988900 - DNA, 15 bp, Homo sapiens
ccagtttctaagcaa

SEQ ID NO: 1988901 - DNA, 15 bp, Homo sapiens
cagtttctaagcaaa

SEQ ID NO: 1988902 - DNA, 15 bp, Homo sapiens
agtttctaagcaaat

SEQ ID NO: 1988903 - DNA, 15 bp, Homo sapiens
gtttctaagcaaatt

SEQ ID NO: 1988904 - DNA, 15 bp, Homo sapiens
tttctaagcaaatta

SEQ ID NO: 1988905 - DNA, 15 bp, Homo sapiens
ttctaagcaaattag

SEQ ID NO: 1988906 - DNA, 15 bp, Homo sapiens
tctaagcaaattaga

SEQ ID NO: 1988907 - DNA, 15 bp, Homo sapiens
ctaagcaaattagaa

SEQ ID NO: 1988908 - DNA, 15 bp, Homo sapiens
taagcaaattagaac

SEQ ID NO: 1988909 - DNA, 15 bp, Homo sapiens
aagcaaattagaacc

SEQ ID NO: 1988910 - DNA, 15 bp, Homo sapiens
agcaaattagaacct

SEQ ID NO: 1988911 - DNA, 15 bp, Homo sapiens
gcaaattagaacctt

SEQ ID NO: 1988912 - DNA, 15 bp, Homo sapiens
caaattagaaccttc

SEQ ID NO: 1988913 - DNA, 15 bp, Homo sapiens
aaattagaaccttct

SEQ ID NO: 1988914 - DNA, 15 bp, Homo sapiens
aattagaaccttctg

SEQ ID NO: 1988915 - DNA, 15 bp, Homo sapiens
attagaaccttctgt

SEQ ID NO: 1988916 - DNA, 15 bp, Homo sapiens
ttagaaccttctgtg

SEQ ID NO: 1988917 - DNA, 15 bp, Homo sapiens
tagaaccttctgtgt

SEQ ID NO: 1988918 - DNA, 15 bp, Homo sapiens
agaaccttctgtgta

SEQ ID NO: 1988919 - DNA, 15 bp, Homo sapiens
gaaccttctgtgtat

SEQ ID NO: 1988920 - DNA, 15 bp, Homo sapiens
aaccttctgtgtatc

SEQ ID NO: 1988921 - DNA, 15 bp, Homo sapiens
accttctgtgtatct

SEQ ID NO: 1988922 - DNA, 15 bp, Homo sapiens
ccttctgtgtatctc

SEQ ID NO: 1988923 - DNA, 15 bp, Homo sapiens
cttctgtgtatctcc

SEQ ID NO: 1988924 - DNA, 15 bp, Homo sapiens
ttctgtgtatctccc

SEQ ID NO: 1988925 - DNA, 15 bp, Homo sapiens
tctgtgtatctcccc

SEQ ID NO: 1988926 - DNA, 15 bp, Homo sapiens
ctgtgtatctcccct

SEQ ID NO: 1988927 - DNA, 15 bp, Homo sapiens
tgtgtatctccccta

SEQ ID NO: 1988928 - DNA, 15 bp, Homo sapiens
gtgtatctcccctag

SEQ ID NO: 1988929 - DNA, 15 bp, Homo sapiens
tgtatctcccctagt

SEQ ID NO: 1988930 - DNA, 15 bp, Homo sapiens
gtatctcccctagtt

SEQ ID NO: 1988931 - DNA, 15 bp, Homo sapiens
tatctcccctagttc

SEQ ID NO: 1988932 - DNA, 15 bp, Homo sapiens
atctcccctagttct

SEQ ID NO: 1988933 - DNA, 15 bp, Homo sapiens
tctcccctagttctg

SEQ ID NO: 1988934 - DNA, 15 bp, Homo sapiens
ctcccctagttctgt

SEQ ID NO: 1988935 - DNA, 15 bp, Homo sapiens
tcccctagttctgta

SEQ ID NO: 1988936 - DNA, 15 bp, Homo sapiens
cccctagttctgtat

SEQ ID NO: 1988937 - DNA, 15 bp, Homo sapiens
ccctagttctgtatg

SEQ ID NO: 1988938 - DNA, 15 bp, Homo sapiens
cctagttctgtatgc

SEQ ID NO: 1988939 - DNA, 15 bp, Homo sapiens
ctagttctgtatgcc

SEQ ID NO: 1988940 - DNA, 15 bp, Homo sapiens
tagttctgtatgccc

SEQ ID NO: 1988941 - DNA, 15 bp, Homo sapiens
agttctgtatgcccc

SEQ ID NO: 1988942 - DNA, 15 bp, Homo sapiens
gttctgtatgcccca

SEQ ID NO: 1988943 - DNA, 15 bp, Homo sapiens
ttctgtatgccccac

SEQ ID NO: 1988944 - DNA, 15 bp, Homo sapiens
tctgtatgccccact

SEQ ID NO: 1988945 - DNA, 15 bp, Homo sapiens
ctgtatgccccactg

SEQ ID NO: 1988946 - DNA, 15 bp, Homo sapiens
tgtatgccccactgg

SEQ ID NO: 1988947 - DNA, 15 bp, Homo sapiens
gtatgccccactggt

SEQ ID NO: 1988948 - DNA, 15 bp, Homo sapiens
tatgccccactggtt

SEQ ID NO: 1988949 - DNA, 15 bp, Homo sapiens
atgccccactggttc

SEQ ID NO: 1988950 - DNA, 15 bp, Homo sapiens
tgccccactggttcc

SEQ ID NO: 1988951 - DNA, 15 bp, Homo sapiens
gccccactggttcct

SEQ ID NO: 1988952 - DNA, 15 bp, Homo sapiens
ccccactggttcctg

SEQ ID NO: 1988953 - DNA, 15 bp, Homo sapiens
cccactggttcctgt

SEQ ID NO: 1988954 - DNA, 15 bp, Homo sapiens
ccactggttcctgta

SEQ ID NO: 1988955 - DNA, 15 bp, Homo sapiens
cactggttcctgtag

SEQ ID NO: 1988956 - DNA, 15 bp, Homo sapiens
actggttcctgtaga

SEQ ID NO: 1988957 - DNA, 15 bp, Homo sapiens
ctggttcctgtagag

SEQ ID NO: 1988958 - DNA, 15 bp, Homo sapiens
tggttcctgtagagc

SEQ ID NO: 1988959 - DNA, 15 bp, Homo sapiens
ggttcctgtagagct

SEQ ID NO: 1988960 - DNA, 15 bp, Homo sapiens
gttcctgtagagctt

SEQ ID NO: 1988961 - DNA, 15 bp, Homo sapiens
ttcctgtagagcttt

SEQ ID NO: 1988962 - DNA, 15 bp, Homo sapiens
tcctgtagagcttta

SEQ ID NO: 1988963 - DNA, 15 bp, Homo sapiens
cctgtagagctttat

SEQ ID NO: 1988964 - DNA, 15 bp, Homo sapiens
ctgtagagctttatt

SEQ ID NO: 1988965 - DNA, 15 bp, Homo sapiens
tgtagagctttattt

SEQ ID NO: 1988966 - DNA, 15 bp, Homo sapiens
gtagagctttatttc

SEQ ID NO: 1988967 - DNA, 15 bp, Homo sapiens
tagagctttatttct

SEQ ID NO: 1988968 - DNA, 15 bp, Homo sapiens
agagctttatttctg

SEQ ID NO: 1988969 - DNA, 15 bp, Homo sapiens
gagctttatttctga

SEQ ID NO: 1988970 - DNA, 15 bp, Homo sapiens
agctttatttctgaa

SEQ ID NO: 1988971 - DNA, 15 bp, Homo sapiens
gctttatttctgaag

SEQ ID NO: 1988972 - DNA, 15 bp, Homo sapiens
ctttatttctgaagg

SEQ ID NO: 1988973 - DNA, 15 bp, Homo sapiens
tttatttctgaaggg

SEQ ID NO: 1988974 - DNA, 15 bp, Homo sapiens
ttatttctgaaggga

SEQ ID NO: 1988975 - DNA, 15 bp, Homo sapiens
tatttctgaagggaa

SEQ ID NO: 1988976 - DNA, 15 bp, Homo sapiens
atttctgaagggaag

SEQ ID NO: 1988977 - DNA, 15 bp, Homo sapiens
tttctgaagggaagt

SEQ ID NO: 1988978 - DNA, 15 bp, Homo sapiens
ttctgaagggaagta

SEQ ID NO: 1988979 - DNA, 15 bp, Homo sapiens
tctgaagggaagtat

SEQ ID NO: 1988980 - DNA, 15 bp, Homo sapiens
ctgaagggaagtatg

SEQ ID NO: 1988981 - DNA, 15 bp, Homo sapiens
tgaagggaagtatgg

SEQ ID NO: 1988982 - DNA, 15 bp, Homo sapiens
gaagggaagtatggg

SEQ ID NO: 1988983 - DNA, 15 bp, Homo sapiens
aagggaagtatggga

SEQ ID NO: 1988984 - DNA, 15 bp, Homo sapiens
agggaagtatgggaa

SEQ ID NO: 1988985 - DNA, 15 bp, Homo sapiens
gggaagtatgggaaa

SEQ ID NO: 1988986 - DNA, 15 bp, Homo sapiens
ggaagtatgggaaaa

SEQ ID NO: 1988987 - DNA, 15 bp, Homo sapiens
gaagtatgggaaaac

SEQ ID NO: 1988988 - DNA, 15 bp, Homo sapiens
aagtatgggaaaact

SEQ ID NO: 1988989 - DNA, 15 bp, Homo sapiens
agtatgggaaaacta

SEQ ID NO: 1988990 - DNA, 15 bp, Homo sapiens
gtatgggaaaactat

SEQ ID NO: 1988991 - DNA, 15 bp, Homo sapiens
tatgggaaaactatg

SEQ ID NO: 1988992 - DNA, 15 bp, Homo sapiens
atgggaaaactatgg

SEQ ID NO: 1988993 - DNA, 15 bp, Homo sapiens
tgggaaaactatgga

SEQ ID NO: 1988994 - DNA, 15 bp, Homo sapiens
gggaaaactatggat

SEQ ID NO: 1988995 - DNA, 15 bp, Homo sapiens
ggaaaactatggata

SEQ ID NO: 1988996 - DNA, 15 bp, Homo sapiens
gaaaactatggatat

SEQ ID NO: 1988997 - DNA, 15 bp, Homo sapiens
aaaactatggatatt

SEQ ID NO: 1988998 - DNA, 15 bp, Homo sapiens
aaactatggatattt

SEQ ID NO: 1988999 - DNA, 15 bp, Homo sapiens
aactatggatatttg

SEQ ID NO: 1989000 - DNA, 15 bp, Homo sapiens
actatggatatttga

SEQ ID NO: 1989001 - DNA, 15 bp, Homo sapiens
ctatggatatttgaa

SEQ ID NO: 1989002 - DNA, 15 bp, Homo sapiens
tatggatatttgaac

SEQ ID NO: 1989003 - DNA, 15 bp, Homo sapiens
atggatatttgaact

SEQ ID NO: 1989004 - DNA, 15 bp, Homo sapiens
tggatatttgaacta

SEQ ID NO: 1989005 - DNA, 15 bp, Homo sapiens
ggatatttgaactaa

SEQ ID NO: 1989006 - DNA, 15 bp, Homo sapiens
gatatttgaactaaa

SEQ ID NO: 1989007 - DNA, 15 bp, Homo sapiens
atatttgaactaaaa

SEQ ID NO: 1989008 - DNA, 15 bp, Homo sapiens
tatttgaactaaaaa

SEQ ID NO: 1989009 - DNA, 15 bp, Homo sapiens
atttgaactaaaaaa

SEQ ID NO: 1989010 - DNA, 15 bp, Homo sapiens
tttgaactaaaaaaa

SEQ ID NO: 1989011 - DNA, 15 bp, Homo sapiens
ttgaactaaaaaaaa

SEQ ID NO: 1989012 - DNA, 15 bp, Homo sapiens
tgaactaaaaaaaaa

SEQ ID NO: 1989013 - DNA, 15 bp, Homo sapiens
gaactaaaaaaaaaa

SEQ ID NO: 1989014 - DNA, 15 bp, Homo sapiens
aactaaaaaaaaaaa

SEQ ID NO: 1989015 - DNA, 15 bp, Homo sapiens
aaaaaaaagaattaa

SEQ ID NO: 1989016 - DNA, 15 bp, Homo sapiens
aaaaaaagaattaaa

SEQ ID NO: 1989017 - DNA, 15 bp, Homo sapiens
aaaaaagaattaaaa

SEQ ID NO: 1989018 - DNA, 15 bp, Homo sapiens
aaaaagaattaaaaa

SEQ ID NO: 1989019 - DNA, 15 bp, Homo sapiens
aaaagaattaaaaag

SEQ ID NO: 1989020 - DNA, 15 bp, Homo sapiens
aaagaattaaaaaga

SEQ ID NO: 1989021 - DNA, 15 bp, Homo sapiens
aagaattaaaaagaa

SEQ ID NO: 1989022 - DNA, 15 bp, Homo sapiens
agaattaaaaagaac

SEQ ID NO: 1989023 - DNA, 15 bp, Homo sapiens
gaattaaaaagaact

SEQ ID NO: 1989024 - DNA, 15 bp, Homo sapiens
aattaaaaagaactc

SEQ ID NO: 1989025 - DNA, 15 bp, Homo sapiens
attaaaaagaactcc

SEQ ID NO: 1989026 - DNA, 15 bp, Homo sapiens
ttaaaaagaactcca

SEQ ID NO: 1989027 - DNA, 15 bp, Homo sapiens
taaaaagaactccat

SEQ ID NO: 1989028 - DNA, 15 bp, Homo sapiens
aaaaagaactccatc

SEQ ID NO: 1989029 - DNA, 15 bp, Homo sapiens
aaaagaactccatcc

SEQ ID NO: 1989030 - DNA, 15 bp, Homo sapiens
aaagaactccatccc

SEQ ID NO: 1989031 - DNA, 15 bp, Homo sapiens
aagaactccatccca

SEQ ID NO: 1989032 - DNA, 15 bp, Homo sapiens
agaactccatcccaa

SEQ ID NO: 1989033 - DNA, 15 bp, Homo sapiens
gaactccatcccaaa

SEQ ID NO: 1989034 - DNA, 15 bp, Homo sapiens
aactccatcccaaaa

SEQ ID NO: 1989035 - DNA, 15 bp, Homo sapiens
actccatcccaaaat

SEQ ID NO: 1989036 - DNA, 15 bp, Homo sapiens
ctccatcccaaaatg

SEQ ID NO: 1989037 - DNA, 15 bp, Homo sapiens
tccatcccaaaatga

SEQ ID NO: 1989038 - DNA, 15 bp, Homo sapiens
ccatcccaaaatgat

SEQ ID NO: 1989039 - DNA, 15 bp, Homo sapiens
catcccaaaatgatt

SEQ ID NO: 1989040 - DNA, 15 bp, Homo sapiens
atcccaaaatgattt

SEQ ID NO: 1989041 - DNA, 15 bp, Homo sapiens
tcccaaaatgatttg

SEQ ID NO: 1989042 - DNA, 15 bp, Homo sapiens
cccaaaatgatttgt

SEQ ID NO: 1989043 - DNA, 15 bp, Homo sapiens
ccaaaatgatttgtt

SEQ ID NO: 1989044 - DNA, 15 bp, Homo sapiens
caaaatgatttgttg

SEQ ID NO: 1989045 - DNA, 15 bp, Homo sapiens
aaaatgatttgttgt

SEQ ID NO: 1989046 - DNA, 15 bp, Homo sapiens
aaatgatttgttgta

SEQ ID NO: 1989047 - DNA, 15 bp, Homo sapiens
aatgatttgttgtaa

SEQ ID NO: 1989048 - DNA, 15 bp, Homo sapiens
atgatttgttgtaaa

SEQ ID NO: 1989049 - DNA, 15 bp, Homo sapiens
tgatttgttgtaaat

SEQ ID NO: 1989050 - DNA, 15 bp, Homo sapiens
gatttgttgtaaata

SEQ ID NO: 1989051 - DNA, 15 bp, Homo sapiens
atttgttgtaaatat

SEQ ID NO: 1989052 - DNA, 15 bp, Homo sapiens
tttgttgtaaatatg

SEQ ID NO: 1989053 - DNA, 15 bp, Homo sapiens
ttgttgtaaatatgt

SEQ ID NO: 1989054 - DNA, 15 bp, Homo sapiens
tgttgtaaatatgtt

SEQ ID NO: 1989055 - DNA, 15 bp, Homo sapiens
gttgtaaatatgttc

SEQ ID NO: 1989056 - DNA, 15 bp, Homo sapiens
ttgtaaatatgttca

SEQ ID NO: 1989057 - DNA, 15 bp, Homo sapiens
tgtaaatatgttcat

SEQ ID NO: 1989058 - DNA, 15 bp, Homo sapiens
gtaaatatgttcatt

SEQ ID NO: 1989059 - DNA, 15 bp, Homo sapiens
taaatatgttcattt

SEQ ID NO: 1989060 - DNA, 15 bp, Homo sapiens
aaatatgttcattta

SEQ ID NO: 1989061 - DNA, 15 bp, Homo sapiens
aatatgttcatttaa

SEQ ID NO: 1989062 - DNA, 15 bp, Homo sapiens
atatgttcatttaaa

SEQ ID NO: 1989063 - DNA, 15 bp, Homo sapiens
tatgttcatttaaag

SEQ ID NO: 1989064 - DNA, 15 bp, Homo sapiens
atgttcatttaaagc

SEQ ID NO: 1989065 - DNA, 15 bp, Homo sapiens
tgttcatttaaagca

SEQ ID NO: 1989066 - DNA, 15 bp, Homo sapiens
gttcatttaaagcaa

SEQ ID NO: 1989067 - DNA, 15 bp, Homo sapiens
ttcatttaaagcaat

SEQ ID NO: 1989068 - DNA, 15 bp, Homo sapiens
tcatttaaagcaatt

SEQ ID NO: 1989069 - DNA, 15 bp, Homo sapiens
catttaaagcaatta

SEQ ID NO: 1989070 - DNA, 15 bp, Homo sapiens
atttaaagcaattat

SEQ ID NO: 1989071 - DNA, 15 bp, Homo sapiens
tttaaagcaattata

SEQ ID NO: 1989072 - DNA, 15 bp, Homo sapiens
ttaaagcaattatat

SEQ ID NO: 1989073 - DNA, 15 bp, Homo sapiens
taaagcaattatatt

SEQ ID NO: 1989074 - DNA, 15 bp, Homo sapiens
aaagcaattatattt

SEQ ID NO: 1989075 - DNA, 15 bp, Homo sapiens
aagcaattatatttt

SEQ ID NO: 1989076 - DNA, 15 bp, Homo sapiens
agcaattatattttc

SEQ ID NO: 1989077 - DNA, 15 bp, Homo sapiens
gcaattatattttcc

SEQ ID NO: 1989078 - DNA, 15 bp, Homo sapiens
caattatattttcca

SEQ ID NO: 1989079 - DNA, 15 bp, Homo sapiens
aattatattttccat

SEQ ID NO: 1989080 - DNA, 15 bp, Homo sapiens
attatattttccata

SEQ ID NO: 1989081 - DNA, 15 bp, Homo sapiens
ttatattttccatat

SEQ ID NO: 1989082 - DNA, 15 bp, Homo sapiens
tatattttccatatc

SEQ ID NO: 1989083 - DNA, 15 bp, Homo sapiens
atattttccatatct

SEQ ID NO: 1989084 - DNA, 15 bp, Homo sapiens
tattttccatatctg

SEQ ID NO: 1989085 - DNA, 15 bp, Homo sapiens
attttccatatctga

SEQ ID NO: 1989086 - DNA, 15 bp, Homo sapiens
ttttccatatctgat

SEQ ID NO: 1989087 - DNA, 15 bp, Homo sapiens
tttccatatctgatc

SEQ ID NO: 1989088 - DNA, 15 bp, Homo sapiens
ttccatatctgatca

SEQ ID NO: 1989089 - DNA, 15 bp, Homo sapiens
tccatatctgatcaa

SEQ ID NO: 1989090 - DNA, 15 bp, Homo sapiens
ccatatctgatcaag

SEQ ID NO: 1989091 - DNA, 15 bp, Homo sapiens
catatctgatcaagc

SEQ ID NO: 1989092 - DNA, 15 bp, Homo sapiens
atatctgatcaagca

SEQ ID NO: 1989093 - DNA, 15 bp, Homo sapiens
tatctgatcaagcaa

SEQ ID NO: 1989094 - DNA, 15 bp, Homo sapiens
atctgatcaagcaaa

SEQ ID NO: 1989095 - DNA, 15 bp, Homo sapiens
tctgatcaagcaaaa

SEQ ID NO: 1989096 - DNA, 15 bp, Homo sapiens
ctgatcaagcaaaag

SEQ ID NO: 1989097 - DNA, 15 bp, Homo sapiens
tgatcaagcaaaagt

SEQ ID NO: 1989098 - DNA, 15 bp, Homo sapiens
gatcaagcaaaagta

SEQ ID NO: 1989099 - DNA, 15 bp, Homo sapiens
atcaagcaaaagtag

SEQ ID NO: 1989100 - DNA, 15 bp, Homo sapiens
tcaagcaaaagtagt

SEQ ID NO: 1989101 - DNA, 15 bp, Homo sapiens
caagcaaaagtagta

SEQ ID NO: 1989102 - DNA, 15 bp, Homo sapiens
aagcaaaagtagtac

SEQ ID NO: 1989103 - DNA, 15 bp, Homo sapiens
agcaaaagtagtaca

SEQ ID NO: 1989104 - DNA, 15 bp, Homo sapiens
gcaaaagtagtacat

SEQ ID NO: 1989105 - DNA, 15 bp, Homo sapiens
caaaagtagtacata

SEQ ID NO: 1989106 - DNA, 15 bp, Homo sapiens
aaaagtagtacataa

SEQ ID NO: 1989107 - DNA, 15 bp, Homo sapiens
aaagtagtacataaa

SEQ ID NO: 1989108 - DNA, 15 bp, Homo sapiens
aagtagtacataaaa

SEQ ID NO: 1989109 - DNA, 15 bp, Homo sapiens
agtagtacataaaag

SEQ ID NO: 1989110 - DNA, 15 bp, Homo sapiens
gtagtacataaaagc

SEQ ID NO: 1989111 - DNA, 15 bp, Homo sapiens
tagtacataaaagcc

SEQ ID NO: 1989112 - DNA, 15 bp, Homo sapiens
agtacataaaagcca

SEQ ID NO: 1989113 - DNA, 15 bp, Homo sapiens
gtacataaaagccaa

SEQ ID NO: 1989114 - DNA, 15 bp, Homo sapiens
tacataaaagccaaa

SEQ ID NO: 1989115 - DNA, 15 bp, Homo sapiens
acataaaagccaaaa

SEQ ID NO: 1989116 - DNA, 15 bp, Homo sapiens
cataaaagccaaaaa

SEQ ID NO: 1989117 - DNA, 15 bp, Homo sapiens
ataaaagccaaaaaa

SEQ ID NO: 1989118 - DNA, 15 bp, Homo sapiens
taaaagccaaaaaac

SEQ ID NO: 1989119 - DNA, 15 bp, Homo sapiens
aaaagccaaaaaacc

SEQ ID NO: 1989120 - DNA, 15 bp, Homo sapiens
aaagccaaaaaaccc

SEQ ID NO: 1989121 - DNA, 15 bp, Homo sapiens
aagccaaaaaaccca

SEQ ID NO: 1989122 - DNA, 15 bp, Homo sapiens
agccaaaaaacccaa

SEQ ID NO: 1989123 - DNA, 15 bp, Homo sapiens
gccaaaaaacccaat

SEQ ID NO: 1989124 - DNA, 15 bp, Homo sapiens
ccaaaaaacccaatt

SEQ ID NO: 1989125 - DNA, 15 bp, Homo sapiens
caaaaaacccaattt

SEQ ID NO: 1989126 - DNA, 15 bp, Homo sapiens
aaaaaacccaattta

SEQ ID NO: 1989127 - DNA, 15 bp, Homo sapiens
aaaaacccaatttaa

SEQ ID NO: 1989128 - DNA, 15 bp, Homo sapiens
aaaacccaatttaaa

SEQ ID NO: 1989129 - DNA, 15 bp, Homo sapiens
aaacccaatttaaag

SEQ ID NO: 1989130 - DNA, 15 bp, Homo sapiens
aacccaatttaaaga

SEQ ID NO: 1989131 - DNA, 15 bp, Homo sapiens
acccaatttaaagaa

SEQ ID NO: 1989132 - DNA, 15 bp, Homo sapiens
cccaatttaaagaat

SEQ ID NO: 1989133 - DNA, 15 bp, Homo sapiens
ccaatttaaagaata

SEQ ID NO: 1989134 - DNA, 15 bp, Homo sapiens
caatttaaagaatat

SEQ ID NO: 1989135 - DNA, 15 bp, Homo sapiens
aatttaaagaatatg

SEQ ID NO: 1989136 - DNA, 15 bp, Homo sapiens
atttaaagaatatgt

SEQ ID NO: 1989137 - DNA, 15 bp, Homo sapiens
tttaaagaatatgtt

SEQ ID NO: 1989138 - DNA, 15 bp, Homo sapiens
ttaaagaatatgtta

SEQ ID NO: 1989139 - DNA, 15 bp, Homo sapiens
taaagaatatgttat

SEQ ID NO: 1989140 - DNA, 15 bp, Homo sapiens
aaagaatatgttatg

SEQ ID NO: 1989141 - DNA, 15 bp, Homo sapiens
aagaatatgttatgg

SEQ ID NO: 1989142 - DNA, 15 bp, Homo sapiens
agaatatgttatgga

SEQ ID NO: 1989143 - DNA, 15 bp, Homo sapiens
gaatatgttatggaa

SEQ ID NO: 1989144 - DNA, 15 bp, Homo sapiens
aatatgttatggaat

SEQ ID NO: 1989145 - DNA, 15 bp, Homo sapiens
atatgttatggaata

SEQ ID NO: 1989146 - DNA, 15 bp, Homo sapiens
tatgttatggaataa

SEQ ID NO: 1989147 - DNA, 15 bp, Homo sapiens
atgttatggaataaa

SEQ ID NO: 1989148 - DNA, 15 bp, Homo sapiens
tgttatggaataaac

SEQ ID NO: 1989149 - DNA, 15 bp, Homo sapiens
gttatggaataaact

SEQ ID NO: 1989150 - DNA, 15 bp, Homo sapiens
ttatggaataaactc

SEQ ID NO: 1989151 - DNA, 15 bp, Homo sapiens
tatggaataaactct

SEQ ID NO: 1989152 - DNA, 15 bp, Homo sapiens
atggaataaactctg

SEQ ID NO: 1989153 - DNA, 15 bp, Homo sapiens
tggaataaactctga

SEQ ID NO: 1989154 - DNA, 15 bp, Homo sapiens
ggaataaactctgat

SEQ ID NO: 1989155 - DNA, 15 bp, Homo sapiens
gaataaactctgatt

SEQ ID NO: 1989156 - DNA, 15 bp, Homo sapiens
aataaactctgattt

SEQ ID NO: 1989157 - DNA, 15 bp, Homo sapiens
ataaactctgatttt

SEQ ID NO: 1989158 - DNA, 15 bp, Homo sapiens
taaactctgatttta

SEQ ID NO: 1989159 - DNA, 15 bp, Homo sapiens
aaactctgattttag

SEQ ID NO: 1989160 - DNA, 15 bp, Homo sapiens
aactctgattttaga

SEQ ID NO: 1989161 - DNA, 15 bp, Homo sapiens
actctgattttagag

SEQ ID NO: 1989162 - DNA, 15 bp, Homo sapiens
ctctgattttagagg

SEQ ID NO: 1989163 - DNA, 15 bp, Homo sapiens
tctgattttagaggt

SEQ ID NO: 1989164 - DNA, 15 bp, Homo sapiens
ctgattttagaggtt

SEQ ID NO: 1989165 - DNA, 15 bp, Homo sapiens
tgattttagaggttg

SEQ ID NO: 1989166 - DNA, 15 bp, Homo sapiens
gattttagaggttgt

SEQ ID NO: 1989167 - DNA, 15 bp, Homo sapiens
attttagaggttgta

SEQ ID NO: 1989168 - DNA, 15 bp, Homo sapiens
ttttagaggttgtag

SEQ ID NO: 1989169 - DNA, 15 bp, Homo sapiens
tttagaggttgtagt

SEQ ID NO: 1989170 - DNA, 15 bp, Homo sapiens
ttagaggttgtagta

SEQ ID NO: 1989171 - DNA, 15 bp, Homo sapiens
tagaggttgtagtag

SEQ ID NO: 1989172 - DNA, 15 bp, Homo sapiens
agaggttgtagtagc

SEQ ID NO: 1989173 - DNA, 15 bp, Homo sapiens
gaggttgtagtagca

SEQ ID NO: 1989174 - DNA, 15 bp, Homo sapiens
aggttgtagtagcat

SEQ ID NO: 1989175 - DNA, 15 bp, Homo sapiens
ggttgtagtagcata

SEQ ID NO: 1989176 - DNA, 15 bp, Homo sapiens
gttgtagtagcatat

SEQ ID NO: 1989177 - DNA, 15 bp, Homo sapiens
ttgtagtagcatatt

SEQ ID NO: 1989178 - DNA, 15 bp, Homo sapiens
tgtagtagcatattt

SEQ ID NO: 1989179 - DNA, 15 bp, Homo sapiens
gtagtagcatatttg

SEQ ID NO: 1989180 - DNA, 15 bp, Homo sapiens
tagtagcatatttgt

SEQ ID NO: 1989181 - DNA, 15 bp, Homo sapiens
agtagcatatttgtt

SEQ ID NO: 1989182 - DNA, 15 bp, Homo sapiens
gtagcatatttgttg

SEQ ID NO: 1989183 - DNA, 15 bp, Homo sapiens
tagcatatttgttgt

SEQ ID NO: 1989184 - DNA, 15 bp, Homo sapiens
agcatatttgttgtt

SEQ ID NO: 1989185 - DNA, 15 bp, Homo sapiens
gcatatttgttgttc

SEQ ID NO: 1989186 - DNA, 15 bp, Homo sapiens
catatttgttgttct

SEQ ID NO: 1989187 - DNA, 15 bp, Homo sapiens
atatttgttgttctc

SEQ ID NO: 1989188 - DNA, 15 bp, Homo sapiens
tatttgttgttctca

SEQ ID NO: 1989189 - DNA, 15 bp, Homo sapiens
atttgttgttctcat

SEQ ID NO: 1989190 - DNA, 15 bp, Homo sapiens
tttgttgttctcata

SEQ ID NO: 1989191 - DNA, 15 bp, Homo sapiens
ttgttgttctcatac

SEQ ID NO: 1989192 - DNA, 15 bp, Homo sapiens
tgttgttctcataca

SEQ ID NO: 1989193 - DNA, 15 bp, Homo sapiens
gttgttctcatacat

SEQ ID NO: 1989194 - DNA, 15 bp, Homo sapiens
ttgttctcatacatt

SEQ ID NO: 1989195 - DNA, 15 bp, Homo sapiens
tgttctcatacattg

SEQ ID NO: 1989196 - DNA, 15 bp, Homo sapiens
gttctcatacattga

SEQ ID NO: 1989197 - DNA, 15 bp, Homo sapiens
ttctcatacattgag

SEQ ID NO: 1989198 - DNA, 15 bp, Homo sapiens
tctcatacattgagt

SEQ ID NO: 1989199 - DNA, 15 bp, Homo sapiens
ctcatacattgagtg

SEQ ID NO: 1989200 - DNA, 15 bp, Homo sapiens
tcatacattgagtgt

SEQ ID NO: 1989201 - DNA, 15 bp, Homo sapiens
catacattgagtgtt

SEQ ID NO: 1989202 - DNA, 15 bp, Homo sapiens
atacattgagtgttc

SEQ ID NO: 1989203 - DNA, 15 bp, Homo sapiens
tacattgagtgttca

SEQ ID NO: 1989204 - DNA, 15 bp, Homo sapiens
acattgagtgttcat

SEQ ID NO: 1989205 - DNA, 15 bp, Homo sapiens
cattgagtgttcatc

SEQ ID NO: 1989206 - DNA, 15 bp, Homo sapiens
attgagtgttcatct

SEQ ID NO: 1989207 - DNA, 15 bp, Homo sapiens
ttgagtgttcatctg

SEQ ID NO: 1989208 - DNA, 15 bp, Homo sapiens
tgagtgttcatctga

SEQ ID NO: 1989209 - DNA, 15 bp, Homo sapiens
gagtgttcatctgaa

SEQ ID NO: 1989210 - DNA, 15 bp, Homo sapiens
agtgttcatctgaat

SEQ ID NO: 1989211 - DNA, 15 bp, Homo sapiens
gtgttcatctgaatg

SEQ ID NO: 1989212 - DNA, 15 bp, Homo sapiens
tgttcatctgaatgt

SEQ ID NO: 1989213 - DNA, 15 bp, Homo sapiens
gttcatctgaatgta

SEQ ID NO: 1989214 - DNA, 15 bp, Homo sapiens
ttcatctgaatgtac

SEQ ID NO: 1989215 - DNA, 15 bp, Homo sapiens
tcatctgaatgtacg

SEQ ID NO: 1989216 - DNA, 15 bp, Homo sapiens
catctgaatgtacgt

SEQ ID NO: 1989217 - DNA, 15 bp, Homo sapiens
atctgaatgtacgtt

SEQ ID NO: 1989218 - DNA, 15 bp, Homo sapiens
tctgaatgtacgttg

SEQ ID NO: 1989219 - DNA, 15 bp, Homo sapiens
ctgaatgtacgttga

SEQ ID NO: 1989220 - DNA, 15 bp, Homo sapiens
tgaatgtacgttgaa

SEQ ID NO: 1989221 - DNA, 15 bp, Homo sapiens
gaatgtacgttgaat

SEQ ID NO: 1989222 - DNA, 15 bp, Homo sapiens
aatgtacgttgaata

SEQ ID NO: 1989223 - DNA, 15 bp, Homo sapiens
atgtacgttgaatat

SEQ ID NO: 1989224 - DNA, 15 bp, Homo sapiens
tgtacgttgaatatg

SEQ ID NO: 1989225 - DNA, 15 bp, Homo sapiens
gtacgttgaatatgc

SEQ ID NO: 1989226 - DNA, 15 bp, Homo sapiens
tacgttgaatatgcg

SEQ ID NO: 1989227 - DNA, 15 bp, Homo sapiens
acgttgaatatgcgg

SEQ ID NO: 1989228 - DNA, 15 bp, Homo sapiens
cgttgaatatgcggt

SEQ ID NO: 1989229 - DNA, 15 bp, Homo sapiens
gttgaatatgcggtg

SEQ ID NO: 1989230 - DNA, 15 bp, Homo sapiens
ttgaatatgcggtga

SEQ ID NO: 1989231 - DNA, 15 bp, Homo sapiens
tgaatatgcggtgag

SEQ ID NO: 1989232 - DNA, 15 bp, Homo sapiens
gaatatgcggtgagt

SEQ ID NO: 1989233 - DNA, 15 bp, Homo sapiens
aatatgcggtgagtg

SEQ ID NO: 1989234 - DNA, 15 bp, Homo sapiens
atatgcggtgagtga

SEQ ID NO: 1989235 - DNA, 15 bp, Homo sapiens
tatgcggtgagtgat

SEQ ID NO: 1989236 - DNA, 15 bp, Homo sapiens
atgcggtgagtgatt

SEQ ID NO: 1989237 - DNA, 15 bp, Homo sapiens
tgcggtgagtgattc

SEQ ID NO: 1989238 - DNA, 15 bp, Homo sapiens
gcggtgagtgattca

SEQ ID NO: 1989239 - DNA, 15 bp, Homo sapiens
cggtgagtgattcac

SEQ ID NO: 1989240 - DNA, 15 bp, Homo sapiens
ggtgagtgattcaca

SEQ ID NO: 1989241 - DNA, 15 bp, Homo sapiens
gtgagtgattcacag

SEQ ID NO: 1989242 - DNA, 15 bp, Homo sapiens
tgagtgattcacagt

SEQ ID NO: 1989243 - DNA, 15 bp, Homo sapiens
gagtgattcacagta

SEQ ID NO: 1989244 - DNA, 15 bp, Homo sapiens
agtgattcacagtat

SEQ ID NO: 1989245 - DNA, 15 bp, Homo sapiens
gtgattcacagtata

SEQ ID NO: 1989246 - DNA, 15 bp, Homo sapiens
tgattcacagtataa

SEQ ID NO: 1989247 - DNA, 15 bp, Homo sapiens
gattcacagtataaa

SEQ ID NO: 1989248 - DNA, 15 bp, Homo sapiens
attcacagtataaaa

SEQ ID NO: 1989249 - DNA, 15 bp, Homo sapiens
ttcacagtataaaat

SEQ ID NO: 1989250 - DNA, 15 bp, Homo sapiens
tcacagtataaaatg

SEQ ID NO: 1989251 - DNA, 15 bp, Homo sapiens
cacagtataaaatga

SEQ ID NO: 1989252 - DNA, 15 bp, Homo sapiens
acagtataaaatgat

SEQ ID NO: 1989253 - DNA, 15 bp, Homo sapiens
cagtataaaatgatt

SEQ ID NO: 1989254 - DNA, 15 bp, Homo sapiens
agtataaaatgattg

SEQ ID NO: 1989255 - DNA, 15 bp, Homo sapiens
gtataaaatgattgg

SEQ ID NO: 1989256 - DNA, 15 bp, Homo sapiens
tataaaatgattggc

SEQ ID NO: 1989257 - DNA, 15 bp, Homo sapiens
ataaaatgattggca

SEQ ID NO: 1989258 - DNA, 15 bp, Homo sapiens
taaaatgattggcaa

SEQ ID NO: 1989259 - DNA, 15 bp, Homo sapiens
aaaatgattggcaag

SEQ ID NO: 1989260 - DNA, 15 bp, Homo sapiens
aaatgattggcaagt

SEQ ID NO: 1989261 - DNA, 15 bp, Homo sapiens
aatgattggcaagta

SEQ ID NO: 1989262 - DNA, 15 bp, Homo sapiens
atgattggcaagtat

SEQ ID NO: 1989263 - DNA, 15 bp, Homo sapiens
tgattggcaagtatc

SEQ ID NO: 1989264 - DNA, 15 bp, Homo sapiens
gattggcaagtatct

SEQ ID NO: 1989265 - DNA, 15 bp, Homo sapiens
attggcaagtatctt

SEQ ID NO: 1989266 - DNA, 15 bp, Homo sapiens
ttggcaagtatcttc

SEQ ID NO: 1989267 - DNA, 15 bp, Homo sapiens
tggcaagtatcttcg

SEQ ID NO: 1989268 - DNA, 15 bp, Homo sapiens
ggcaagtatcttcga

SEQ ID NO: 1989269 - DNA, 15 bp, Homo sapiens
gcaagtatcttcgaa

SEQ ID NO: 1989270 - DNA, 15 bp, Homo sapiens
caagtatcttcgaaa

SEQ ID NO: 1989271 - DNA, 15 bp, Homo sapiens
aagtatcttcgaaat

SEQ ID NO: 1989272 - DNA, 15 bp, Homo sapiens
agtatcttcgaaatt

SEQ ID NO: 1989273 - DNA, 15 bp, Homo sapiens
gtatcttcgaaatta

SEQ ID NO: 1989274 - DNA, 15 bp, Homo sapiens
tatcttcgaaattac

SEQ ID NO: 1989275 - DNA, 15 bp, Homo sapiens
atcttcgaaattaca

SEQ ID NO: 1989276 - DNA, 15 bp, Homo sapiens
tcttcgaaattacaa

SEQ ID NO: 1989277 - DNA, 15 bp, Homo sapiens
cttcgaaattacaaa

SEQ ID NO: 1989278 - DNA, 15 bp, Homo sapiens
ttcgaaattacaaac

SEQ ID NO: 1989279 - DNA, 15 bp, Homo sapiens
tcgaaattacaaacc

SEQ ID NO: 1989280 - DNA, 15 bp, Homo sapiens
cgaaattacaaacca

SEQ ID NO: 1989281 - DNA, 15 bp, Homo sapiens
gaaattacaaaccac

SEQ ID NO: 1989282 - DNA, 15 bp, Homo sapiens
aaattacaaaccaca

SEQ ID NO: 1989283 - DNA, 15 bp, Homo sapiens
aattacaaaccacat

SEQ ID NO: 1989284 - DNA, 15 bp, Homo sapiens
attacaaaccacata

SEQ ID NO: 1989285 - DNA, 15 bp, Homo sapiens
ttacaaaccacatac

SEQ ID NO: 1989286 - DNA, 15 bp, Homo sapiens
tacaaaccacatact

SEQ ID NO: 1989287 - DNA, 15 bp, Homo sapiens
acaaaccacatactg

SEQ ID NO: 1989288 - DNA, 15 bp, Homo sapiens
caaaccacatactga

SEQ ID NO: 1989289 - DNA, 15 bp, Homo sapiens
aaaccacatactgat

SEQ ID NO: 1989290 - DNA, 15 bp, Homo sapiens
aaccacatactgatt

SEQ ID NO: 1989291 - DNA, 15 bp, Homo sapiens
accacatactgatta

SEQ ID NO: 1989292 - DNA, 15 bp, Homo sapiens
ccacatactgattag

SEQ ID NO: 1989293 - DNA, 15 bp, Homo sapiens
gcctgtgtcctgaat

SEQ ID NO: 1989294 - DNA, 15 bp, Homo sapiens
cctgtgtcctgaatg

SEQ ID NO: 1989295 - DNA, 15 bp, Homo sapiens
ctgtgtcctgaatgg

SEQ ID NO: 1989296 - DNA, 15 bp, Homo sapiens
tgtgtcctgaatggt

SEQ ID NO: 1989297 - DNA, 15 bp, Homo sapiens
gtgtcctgaatggta

SEQ ID NO: 1989298 - DNA, 15 bp, Homo sapiens
tgtcctgaatggtat

SEQ ID NO: 1989299 - DNA, 15 bp, Homo sapiens
gtcctgaatggtatt

SEQ ID NO: 1989300 - DNA, 15 bp, Homo sapiens
tcctgaatggtattg

SEQ ID NO: 1989301 - DNA, 15 bp, Homo sapiens
cctgaatggtattgc

SEQ ID NO: 1989302 - DNA, 15 bp, Homo sapiens
ctgaatggtattgcc

SEQ ID NO: 1989303 - DNA, 15 bp, Homo sapiens
tgaatggtattgcct

SEQ ID NO: 1989304 - DNA, 15 bp, Homo sapiens
gaatggtattgccta

SEQ ID NO: 1989305 - DNA, 15 bp, Homo sapiens
aatggtattgcctag

SEQ ID NO: 1989306 - DNA, 15 bp, Homo sapiens
atggtattgcctagg

SEQ ID NO: 1989307 - DNA, 15 bp, Homo sapiens
tggtattgcctaggt

SEQ ID NO: 1989308 - DNA, 15 bp, Homo sapiens
ggtattgcctaggtt

SEQ ID NO: 1989309 - DNA, 15 bp, Homo sapiens
gtattgcctaggttt

SEQ ID NO: 1989310 - DNA, 15 bp, Homo sapiens
tattgcctaggtttt

SEQ ID NO: 1989311 - DNA, 15 bp, Homo sapiens
attgcctaggttttc

SEQ ID NO: 1989312 - DNA, 15 bp, Homo sapiens
ttgcctaggttttct

SEQ ID NO: 1989313 - DNA, 15 bp, Homo sapiens
tgcctaggttttctt

SEQ ID NO: 1989314 - DNA, 15 bp, Homo sapiens
gcctaggttttcttc

SEQ ID NO: 1989315 - DNA, 15 bp, Homo sapiens
cctaggttttcttct

SEQ ID NO: 1989316 - DNA, 15 bp, Homo sapiens
ctaggttttcttcta

SEQ ID NO: 1989317 - DNA, 15 bp, Homo sapiens
taggttttcttctag

SEQ ID NO: 1989318 - DNA, 15 bp, Homo sapiens
aggttttcttctagg

SEQ ID NO: 1989319 - DNA, 15 bp, Homo sapiens
ggttttcttctaggg

SEQ ID NO: 1989320 - DNA, 15 bp, Homo sapiens
gttttcttctagggt

SEQ ID NO: 1989321 - DNA, 15 bp, Homo sapiens
ttttcttctagggtt

SEQ ID NO: 1989322 - DNA, 15 bp, Homo sapiens
tttcttctagggttt

SEQ ID NO: 1989323 - DNA, 15 bp, Homo sapiens
ttcttctagggtttt

SEQ ID NO: 1989324 - DNA, 15 bp, Homo sapiens
tcttctagggttttt

SEQ ID NO: 1989325 - DNA, 15 bp, Homo sapiens
cttctagggttttta

SEQ ID NO: 1989326 - DNA, 15 bp, Homo sapiens
ttctagggtttttat

SEQ ID NO: 1989327 - DNA, 15 bp, Homo sapiens
tctagggtttttatg

SEQ ID NO: 1989328 - DNA, 15 bp, Homo sapiens
ctagggtttttatgg

SEQ ID NO: 1989329 - DNA, 15 bp, Homo sapiens
tagggtttttatggt

SEQ ID NO: 1989330 - DNA, 15 bp, Homo sapiens
agggtttttatggtt

SEQ ID NO: 1989331 - DNA, 15 bp, Homo sapiens
gggtttttatggttt

SEQ ID NO: 1989332 - DNA, 15 bp, Homo sapiens
ggtttttatggtttt

SEQ ID NO: 1989333 - DNA, 15 bp, Homo sapiens
gtttttatggtttta

SEQ ID NO: 1989334 - DNA, 15 bp, Homo sapiens
tttttatggttttag

SEQ ID NO: 1989335 - DNA, 15 bp, Homo sapiens
ttttatggttttagg

SEQ ID NO: 1989336 - DNA, 15 bp, Homo sapiens
tttatggttttaggt

SEQ ID NO: 1989337 - DNA, 15 bp, Homo sapiens
ttatggttttaggtc

SEQ ID NO: 1989338 - DNA, 15 bp, Homo sapiens
tatggttttaggtct

SEQ ID NO: 1989339 - DNA, 15 bp, Homo sapiens
atggttttaggtctt

SEQ ID NO: 1989340 - DNA, 15 bp, Homo sapiens
tggttttaggtctta

SEQ ID NO: 1989341 - DNA, 15 bp, Homo sapiens
ggttttaggtcttat

SEQ ID NO: 1989342 - DNA, 15 bp, Homo sapiens
gttttaggtcttatg

SEQ ID NO: 1989343 - DNA, 15 bp, Homo sapiens
ttttaggtcttatgt

SEQ ID NO: 1989344 - DNA, 15 bp, Homo sapiens
tttaggtcttatgtt

SEQ ID NO: 1989345 - DNA, 15 bp, Homo sapiens
ttaggtcttatgttt

SEQ ID NO: 1989346 - DNA, 15 bp, Homo sapiens
taggtcttatgttta

SEQ ID NO: 1989347 - DNA, 15 bp, Homo sapiens
aggtcttatgtttaa

SEQ ID NO: 1989348 - DNA, 15 bp, Homo sapiens
ggtcttatgtttaag

SEQ ID NO: 1989349 - DNA, 15 bp, Homo sapiens
gtcttatgtttaagt

SEQ ID NO: 1989350 - DNA, 15 bp, Homo sapiens
tcttatgtttaagtc

SEQ ID NO: 1989351 - DNA, 15 bp, Homo sapiens
cttatgtttaagtct

SEQ ID NO: 1989352 - DNA, 15 bp, Homo sapiens
ttatgtttaagtctt

SEQ ID NO: 1989353 - DNA, 15 bp, Homo sapiens
tatgtttaagtcttt

SEQ ID NO: 1989354 - DNA, 15 bp, Homo sapiens
atgtttaagtcttta

SEQ ID NO: 1989355 - DNA, 15 bp, Homo sapiens
tgtttaagtctttaa

SEQ ID NO: 1989356 - DNA, 15 bp, Homo sapiens
gtttaagtctttaat

SEQ ID NO: 1989357 - DNA, 15 bp, Homo sapiens
ttaagtctttaatca

SEQ ID NO: 1989358 - DNA, 15 bp, Homo sapiens
taagtctttaatcaa

SEQ ID NO: 1989359 - DNA, 15 bp, Homo sapiens
aagtctttaatcaat

SEQ ID NO: 1989360 - DNA, 15 bp, Homo sapiens
agtctttaatcaatc

SEQ ID NO: 1989361 - DNA, 15 bp, Homo sapiens
gtctttaatcaatct

SEQ ID NO: 1989362 - DNA, 15 bp, Homo sapiens
tctttaatcaatctt

SEQ ID NO: 1989363 - DNA, 15 bp, Homo sapiens
ctttaatcaatcttg

SEQ ID NO: 1989364 - DNA, 15 bp, Homo sapiens
tttaatcaatcttga

SEQ ID NO: 1989365 - DNA, 15 bp, Homo sapiens
ttaatcaatcttgag

SEQ ID NO: 1989366 - DNA, 15 bp, Homo sapiens
taatcaatcttgagt

SEQ ID NO: 1989367 - DNA, 15 bp, Homo sapiens
aatcaatcttgagtt

SEQ ID NO: 1989368 - DNA, 15 bp, Homo sapiens
atcaatcttgagtta

SEQ ID NO: 1989369 - DNA, 15 bp, Homo sapiens
tcaatcttgagttaa

SEQ ID NO: 1989370 - DNA, 15 bp, Homo sapiens
caatcttgagttaat

SEQ ID NO: 1989371 - DNA, 15 bp, Homo sapiens
aatcttgagttaatt

SEQ ID NO: 1989372 - DNA, 15 bp, Homo sapiens
atcttgagttaattt

SEQ ID NO: 1989373 - DNA, 15 bp, Homo sapiens
tcttgagttaatttt

SEQ ID NO: 1989374 - DNA, 15 bp, Homo sapiens
tttttgtataaggta

SEQ ID NO: 1989375 - DNA, 15 bp, Homo sapiens
ttttgtataaggtat

SEQ ID NO: 1989376 - DNA, 15 bp, Homo sapiens
tttgtataaggtata

SEQ ID NO: 1989377 - DNA, 15 bp, Homo sapiens
ttgtataaggtataa

SEQ ID NO: 1989378 - DNA, 15 bp, Homo sapiens
tgtataaggtataac

SEQ ID NO: 1989379 - DNA, 15 bp, Homo sapiens
gtataaggtataaca

SEQ ID NO: 1989380 - DNA, 15 bp, Homo sapiens
tataaggtataacaa

SEQ ID NO: 1989381 - DNA, 15 bp, Homo sapiens
ataaggtataacaaa

SEQ ID NO: 1989382 - DNA, 15 bp, Homo sapiens
taaggtataacaaaa

SEQ ID NO: 1989383 - DNA, 15 bp, Homo sapiens
aaggtataacaaaag

SEQ ID NO: 1989384 - DNA, 15 bp, Homo sapiens
aggtataacaaaagg

SEQ ID NO: 1989385 - DNA, 15 bp, Homo sapiens
ggtataacaaaaggg

SEQ ID NO: 1989386 - DNA, 15 bp, Homo sapiens
gtataacaaaagggc

SEQ ID NO: 1989387 - DNA, 15 bp, Homo sapiens
tataacaaaagggcc

SEQ ID NO: 1989388 - DNA, 15 bp, Homo sapiens
ataacaaaagggccc

SEQ ID NO: 1989389 - DNA, 15 bp, Homo sapiens
taacaaaagggccca

SEQ ID NO: 1989390 - DNA, 15 bp, Homo sapiens
aacaaaagggcccag

SEQ ID NO: 1989391 - DNA, 15 bp, Homo sapiens
acaaaagggcccagt

SEQ ID NO: 1989392 - DNA, 15 bp, Homo sapiens
caaaagggcccagtt

SEQ ID NO: 1989393 - DNA, 15 bp, Homo sapiens
aaaagggcccagttt

SEQ ID NO: 1989394 - DNA, 15 bp, Homo sapiens
aaagggcccagtttc

SEQ ID NO: 1989395 - DNA, 15 bp, Homo sapiens
aagggcccagtttca

SEQ ID NO: 1989396 - DNA, 15 bp, Homo sapiens
agggcccagtttcag

SEQ ID NO: 1989397 - DNA, 15 bp, Homo sapiens
gggcccagtttcagt

SEQ ID NO: 1989398 - DNA, 15 bp, Homo sapiens
ggcccagtttcagtt

SEQ ID NO: 1989399 - DNA, 15 bp, Homo sapiens
gcccagtttcagttt

SEQ ID NO: 1989400 - DNA, 15 bp, Homo sapiens
cccagtttcagtttt

SEQ ID NO: 1989401 - DNA, 15 bp, Homo sapiens
ccagtttcagttttc

SEQ ID NO: 1989402 - DNA, 15 bp, Homo sapiens
cagtttcagttttct

SEQ ID NO: 1989403 - DNA, 15 bp, Homo sapiens
agtttcagttttctg

SEQ ID NO: 1989404 - DNA, 15 bp, Homo sapiens
gtttcagttttctgc

SEQ ID NO: 1989405 - DNA, 15 bp, Homo sapiens
tttcagttttctgca

SEQ ID NO: 1989406 - DNA, 15 bp, Homo sapiens
ttcagttttctgcat

SEQ ID NO: 1989407 - DNA, 15 bp, Homo sapiens
tcagttttctgcata

SEQ ID NO: 1989408 - DNA, 15 bp, Homo sapiens
cagttttctgcatat

SEQ ID NO: 1989409 - DNA, 15 bp, Homo sapiens
agttttctgcatatg

SEQ ID NO: 1989410 - DNA, 15 bp, Homo sapiens
gttttctgcatatgg

SEQ ID NO: 1989411 - DNA, 15 bp, Homo sapiens
ttttctgcatatggc

SEQ ID NO: 1989412 - DNA, 15 bp, Homo sapiens
tttctgcatatggct

SEQ ID NO: 1989413 - DNA, 15 bp, Homo sapiens
ttctgcatatggcta

SEQ ID NO: 1989414 - DNA, 15 bp, Homo sapiens
tctgcatatggctag

SEQ ID NO: 1989415 - DNA, 15 bp, Homo sapiens
ctgcatatggctagc

SEQ ID NO: 1989416 - DNA, 15 bp, Homo sapiens
tgcatatggctagcc

SEQ ID NO: 1989417 - DNA, 15 bp, Homo sapiens
gcatatggctagcca

SEQ ID NO: 1989418 - DNA, 15 bp, Homo sapiens
ggctagccagttttg

SEQ ID NO: 1989419 - DNA, 15 bp, Homo sapiens
gctagccagttttgc

SEQ ID NO: 1989420 - DNA, 15 bp, Homo sapiens
ctagccagttttgcc

SEQ ID NO: 1989421 - DNA, 15 bp, Homo sapiens
tagccagttttgcca

SEQ ID NO: 1989422 - DNA, 15 bp, Homo sapiens
agccagttttgccaa

SEQ ID NO: 1989423 - DNA, 15 bp, Homo sapiens
gccagttttgccaac

SEQ ID NO: 1989424 - DNA, 15 bp, Homo sapiens
ccagttttgccaaca

SEQ ID NO: 1989425 - DNA, 15 bp, Homo sapiens
cagttttgccaacat

SEQ ID NO: 1989426 - DNA, 15 bp, Homo sapiens
agttttgccaacatc

SEQ ID NO: 1989427 - DNA, 15 bp, Homo sapiens
gttttgccaacatca

SEQ ID NO: 1989428 - DNA, 15 bp, Homo sapiens
ttttgccaacatcat

SEQ ID NO: 1989429 - DNA, 15 bp, Homo sapiens
tttgccaacatcatt

SEQ ID NO: 1989430 - DNA, 15 bp, Homo sapiens
ttgccaacatcattt

SEQ ID NO: 1989431 - DNA, 15 bp, Homo sapiens
tgccaacatcattta

SEQ ID NO: 1989432 - DNA, 15 bp, Homo sapiens
gccaacatcatttat

SEQ ID NO: 1989433 - DNA, 15 bp, Homo sapiens
ccaacatcatttatt

SEQ ID NO: 1989434 - DNA, 15 bp, Homo sapiens
caacatcatttatta

SEQ ID NO: 1989435 - DNA, 15 bp, Homo sapiens
aacatcatttattaa

SEQ ID NO: 1989436 - DNA, 15 bp, Homo sapiens
acatcatttattaaa

SEQ ID NO: 1989437 - DNA, 15 bp, Homo sapiens
catcatttattaaat

SEQ ID NO: 1989438 - DNA, 15 bp, Homo sapiens
atcatttattaaata

SEQ ID NO: 1989439 - DNA, 15 bp, Homo sapiens
tcatttattaaatag

SEQ ID NO: 1989440 - DNA, 15 bp, Homo sapiens
tccccattgcttgtt

SEQ ID NO: 1989441 - DNA, 15 bp, Homo sapiens
ccccattgcttgttt

SEQ ID NO: 1989442 - DNA, 15 bp, Homo sapiens
cccattgcttgtttt

SEQ ID NO: 1989443 - DNA, 15 bp, Homo sapiens
ccattgcttgttttt

SEQ ID NO: 1989444 - DNA, 15 bp, Homo sapiens
cattgcttgtttttg

SEQ ID NO: 1989445 - DNA, 15 bp, Homo sapiens
attgcttgtttttgt

SEQ ID NO: 1989446 - DNA, 15 bp, Homo sapiens
ttgcttgtttttgtc

SEQ ID NO: 1989447 - DNA, 15 bp, Homo sapiens
tgcttgtttttgtca

SEQ ID NO: 1989448 - DNA, 15 bp, Homo sapiens
gcttgtttttgtcag

SEQ ID NO: 1989449 - DNA, 15 bp, Homo sapiens
cttgtttttgtcagg

SEQ ID NO: 1989450 - DNA, 15 bp, Homo sapiens
ttgtttttgtcaggt

SEQ ID NO: 1989451 - DNA, 15 bp, Homo sapiens
tgtttttgtcaggtt

SEQ ID NO: 1989452 - DNA, 15 bp, Homo sapiens
gtttttgtcaggttt

SEQ ID NO: 1989453 - DNA, 15 bp, Homo sapiens
tttttgtcaggtttg

SEQ ID NO: 1989454 - DNA, 15 bp, Homo sapiens
ttttgtcaggtttgt

SEQ ID NO: 1989455 - DNA, 15 bp, Homo sapiens
tttgtcaggtttgtc

SEQ ID NO: 1989456 - DNA, 15 bp, Homo sapiens
ttgtcaggtttgtca

SEQ ID NO: 1989457 - DNA, 15 bp, Homo sapiens
tgtcaggtttgtcaa

SEQ ID NO: 1989458 - DNA, 15 bp, Homo sapiens
gtcaggtttgtcaaa

SEQ ID NO: 1989459 - DNA, 15 bp, Homo sapiens
tcaggtttgtcaaag

SEQ ID NO: 1989460 - DNA, 15 bp, Homo sapiens
caggtttgtcaaaga

SEQ ID NO: 1989461 - DNA, 15 bp, Homo sapiens
aggtttgtcaaagat

SEQ ID NO: 1989462 - DNA, 15 bp, Homo sapiens
ggtttgtcaaagatc

SEQ ID NO: 1989463 - DNA, 15 bp, Homo sapiens
gtttgtcaaagatca

SEQ ID NO: 1989464 - DNA, 15 bp, Homo sapiens
tttgtcaaagatcag

SEQ ID NO: 1989465 - DNA, 15 bp, Homo sapiens
ttgtcaaagatcaga

SEQ ID NO: 1989466 - DNA, 15 bp, Homo sapiens
tgtcaaagatcagat

SEQ ID NO: 1989467 - DNA, 15 bp, Homo sapiens
gtcaaagatcagatg

SEQ ID NO: 1989468 - DNA, 15 bp, Homo sapiens
tcaaagatcagatgg

SEQ ID NO: 1989469 - DNA, 15 bp, Homo sapiens
caaagatcagatggt

SEQ ID NO: 1989470 - DNA, 15 bp, Homo sapiens
aaagatcagatggtt

SEQ ID NO: 1989471 - DNA, 15 bp, Homo sapiens
aagatcagatggtta

SEQ ID NO: 1989472 - DNA, 15 bp, Homo sapiens
agatcagatggttat

SEQ ID NO: 1989473 - DNA, 15 bp, Homo sapiens
gatcagatggttata

SEQ ID NO: 1989474 - DNA, 15 bp, Homo sapiens
atcagatggttatag

SEQ ID NO: 1989475 - DNA, 15 bp, Homo sapiens
tcagatggttataga

SEQ ID NO: 1989476 - DNA, 15 bp, Homo sapiens
cagatggttatagat

SEQ ID NO: 1989477 - DNA, 15 bp, Homo sapiens
agatggttatagatg

SEQ ID NO: 1989478 - DNA, 15 bp, Homo sapiens
gatggttatagatgt

SEQ ID NO: 1989479 - DNA, 15 bp, Homo sapiens
atggttatagatgtg

SEQ ID NO: 1989480 - DNA, 15 bp, Homo sapiens
tggttatagatgtgt

SEQ ID NO: 1989481 - DNA, 15 bp, Homo sapiens
ggttatagatgtgtg

SEQ ID NO: 1989482 - DNA, 15 bp, Homo sapiens
gttatagatgtgtgg

SEQ ID NO: 1989483 - DNA, 15 bp, Homo sapiens
ttatagatgtgtggt

SEQ ID NO: 1989484 - DNA, 15 bp, Homo sapiens
tatagatgtgtggtg

SEQ ID NO: 1989485 - DNA, 15 bp, Homo sapiens
atagatgtgtggtgt

SEQ ID NO: 1989486 - DNA, 15 bp, Homo sapiens
tagatgtgtggtgtt

SEQ ID NO: 1989487 - DNA, 15 bp, Homo sapiens
agatgtgtggtgtta

SEQ ID NO: 1989488 - DNA, 15 bp, Homo sapiens
gatgtgtggtgttat

SEQ ID NO: 1989489 - DNA, 15 bp, Homo sapiens
atgtgtggtgttatt

SEQ ID NO: 1989490 - DNA, 15 bp, Homo sapiens
tgtgtggtgttattt

SEQ ID NO: 1989491 - DNA, 15 bp, Homo sapiens
gtgtggtgttatttc

SEQ ID NO: 1989492 - DNA, 15 bp, Homo sapiens
tgtggtgttatttct

SEQ ID NO: 1989493 - DNA, 15 bp, Homo sapiens
gtggtgttatttctg

SEQ ID NO: 1989494 - DNA, 15 bp, Homo sapiens
tggtgttatttctga

SEQ ID NO: 1989495 - DNA, 15 bp, Homo sapiens
ggtgttatttctgag

SEQ ID NO: 1989496 - DNA, 15 bp, Homo sapiens
gtgttatttctgagg

SEQ ID NO: 1989497 - DNA, 15 bp, Homo sapiens
tgttatttctgaggt

SEQ ID NO: 1989498 - DNA, 15 bp, Homo sapiens
gttatttctgaggta

SEQ ID NO: 1989499 - DNA, 15 bp, Homo sapiens
ttatttctgaggtat

SEQ ID NO: 1989500 - DNA, 15 bp, Homo sapiens
tatttctgaggtatc

SEQ ID NO: 1989501 - DNA, 15 bp, Homo sapiens
atttctgaggtatct

SEQ ID NO: 1989502 - DNA, 15 bp, Homo sapiens
tttctgaggtatctg

SEQ ID NO: 1989503 - DNA, 15 bp, Homo sapiens
ttctgaggtatctgt

SEQ ID NO: 1989504 - DNA, 15 bp, Homo sapiens
tctgaggtatctgtt

SEQ ID NO: 1989505 - DNA, 15 bp, Homo sapiens
ctgaggtatctgttc

SEQ ID NO: 1989506 - DNA, 15 bp, Homo sapiens
tgaggtatctgttct

SEQ ID NO: 1989507 - DNA, 15 bp, Homo sapiens
gaggtatctgttctg

SEQ ID NO: 1989508 - DNA, 15 bp, Homo sapiens
aggtatctgttctgt

SEQ ID NO: 1989509 - DNA, 15 bp, Homo sapiens
ggtatctgttctgtt

SEQ ID NO: 1989510 - DNA, 15 bp, Homo sapiens
gtatctgttctgttc

SEQ ID NO: 1989511 - DNA, 15 bp, Homo sapiens
tatctgttctgttcc

SEQ ID NO: 1989512 - DNA, 15 bp, Homo sapiens
atctgttctgttcca

SEQ ID NO: 1989513 - DNA, 15 bp, Homo sapiens
ccattggtctatgta

SEQ ID NO: 1989514 - DNA, 15 bp, Homo sapiens
cattggtctatgtat

SEQ ID NO: 1989515 - DNA, 15 bp, Homo sapiens
attggtctatgtatc

SEQ ID NO: 1989516 - DNA, 15 bp, Homo sapiens
ttggtctatgtatct

SEQ ID NO: 1989517 - DNA, 15 bp, Homo sapiens
tggtctatgtatctg

SEQ ID NO: 1989518 - DNA, 15 bp, Homo sapiens
ggtctatgtatctgt

SEQ ID NO: 1989519 - DNA, 15 bp, Homo sapiens
gtctatgtatctgtt

SEQ ID NO: 1989520 - DNA, 15 bp, Homo sapiens
tctatgtatctgttt

SEQ ID NO: 1989521 - DNA, 15 bp, Homo sapiens
ctatgtatctgtttt

SEQ ID NO: 1989522 - DNA, 15 bp, Homo sapiens
tatgtatctgttttg

SEQ ID NO: 1989523 - DNA, 15 bp, Homo sapiens
atgtatctgttttgg

SEQ ID NO: 1989524 - DNA, 15 bp, Homo sapiens
tgtatctgttttggt

SEQ ID NO: 1989525 - DNA, 15 bp, Homo sapiens
gtatctgttttggtt

SEQ ID NO: 1989526 - DNA, 15 bp, Homo sapiens
tatctgttttggttt

SEQ ID NO: 1989527 - DNA, 15 bp, Homo sapiens
atctgttttggtttc

SEQ ID NO: 1989528 - DNA, 15 bp, Homo sapiens
tctgttttggtttca

SEQ ID NO: 1989529 - DNA, 15 bp, Homo sapiens
ctgttttggtttcag

SEQ ID NO: 1989530 - DNA, 15 bp, Homo sapiens
tgttttggtttcagt

SEQ ID NO: 1989531 - DNA, 15 bp, Homo sapiens
gttttggtttcagta

SEQ ID NO: 1989532 - DNA, 15 bp, Homo sapiens
ttttggtttcagtac

SEQ ID NO: 1989533 - DNA, 15 bp, Homo sapiens
tttggtttcagtacc

SEQ ID NO: 1989534 - DNA, 15 bp, Homo sapiens
ttggtttcagtacca

SEQ ID NO: 1989535 - DNA, 15 bp, Homo sapiens
tggtttcagtaccat

SEQ ID NO: 1989536 - DNA, 15 bp, Homo sapiens
ggtttcagtaccatg

SEQ ID NO: 1989537 - DNA, 15 bp, Homo sapiens
gtttcagtaccatgc

SEQ ID NO: 1989538 - DNA, 15 bp, Homo sapiens
tttcagtaccatgct

SEQ ID NO: 1989539 - DNA, 15 bp, Homo sapiens
ttcagtaccatgcta

SEQ ID NO: 1989540 - DNA, 15 bp, Homo sapiens
tcagtaccatgctat

SEQ ID NO: 1989541 - DNA, 15 bp, Homo sapiens
cagtaccatgctatt

SEQ ID NO: 1989542 - DNA, 15 bp, Homo sapiens
agtaccatgctattt

SEQ ID NO: 1989543 - DNA, 15 bp, Homo sapiens
gtaccatgctatttt

SEQ ID NO: 1989544 - DNA, 15 bp, Homo sapiens
taccatgctattttg

SEQ ID NO: 1989545 - DNA, 15 bp, Homo sapiens
accatgctattttgt

SEQ ID NO: 1989546 - DNA, 15 bp, Homo sapiens
ccatgctattttgtt

SEQ ID NO: 1989547 - DNA, 15 bp, Homo sapiens
catgctattttgttt

SEQ ID NO: 1989548 - DNA, 15 bp, Homo sapiens
atgctattttgttta

SEQ ID NO: 1989549 - DNA, 15 bp, Homo sapiens
tgctattttgtttac

SEQ ID NO: 1989550 - DNA, 15 bp, Homo sapiens
gctattttgtttact

SEQ ID NO: 1989551 - DNA, 15 bp, Homo sapiens
tattttgtttactgt

SEQ ID NO: 1989552 - DNA, 15 bp, Homo sapiens
attttgtttactgta

SEQ ID NO: 1989553 - DNA, 15 bp, Homo sapiens
ttttgtttactgtag

SEQ ID NO: 1989554 - DNA, 15 bp, Homo sapiens
tttgtttactgtagc

SEQ ID NO: 1989555 - DNA, 15 bp, Homo sapiens
ttgtttactgtagcc

SEQ ID NO: 1989556 - DNA, 15 bp, Homo sapiens
tgtttactgtagcct

SEQ ID NO: 1989557 - DNA, 15 bp, Homo sapiens
gtttactgtagcctt

SEQ ID NO: 1989558 - DNA, 15 bp, Homo sapiens
tttactgtagccttg

SEQ ID NO: 1989559 - DNA, 15 bp, Homo sapiens
ttactgtagccttgt

SEQ ID NO: 1989560 - DNA, 15 bp, Homo sapiens
tactgtagccttgta

SEQ ID NO: 1989561 - DNA, 15 bp, Homo sapiens
actgtagccttgtag

SEQ ID NO: 1989562 - DNA, 15 bp, Homo sapiens
ctgtagccttgtagt

SEQ ID NO: 1989563 - DNA, 15 bp, Homo sapiens
tgtagccttgtagta

SEQ ID NO: 1989564 - DNA, 15 bp, Homo sapiens
gtagccttgtagtat

SEQ ID NO: 1989565 - DNA, 15 bp, Homo sapiens
tagccttgtagtatg

SEQ ID NO: 1989566 - DNA, 15 bp, Homo sapiens
agccttgtagtatgg

SEQ ID NO: 1989567 - DNA, 15 bp, Homo sapiens
gccttgtagtatggt

SEQ ID NO: 1989568 - DNA, 15 bp, Homo sapiens
ccttgtagtatggtt

SEQ ID NO: 1989569 - DNA, 15 bp, Homo sapiens
cttgtagtatggttt

SEQ ID NO: 1989570 - DNA, 15 bp, Homo sapiens
ttgtagtatggtttg

SEQ ID NO: 1989571 - DNA, 15 bp, Homo sapiens
tgtagtatggtttga

SEQ ID NO: 1989572 - DNA, 15 bp, Homo sapiens
gtagtatggtttgaa

SEQ ID NO: 1989573 - DNA, 15 bp, Homo sapiens
tagtatggtttgaag

SEQ ID NO: 1989574 - DNA, 15 bp, Homo sapiens
agtatggtttgaagt

SEQ ID NO: 1989575 - DNA, 15 bp, Homo sapiens
gtatggtttgaagtc

SEQ ID NO: 1989576 - DNA, 15 bp, Homo sapiens
tatggtttgaagtca

SEQ ID NO: 1989577 - DNA, 15 bp, Homo sapiens
atggtttgaagtcag

SEQ ID NO: 1989578 - DNA, 15 bp, Homo sapiens
tggtttgaagtcagg

SEQ ID NO: 1989579 - DNA, 15 bp, Homo sapiens
ggtttgaagtcaggt

SEQ ID NO: 1989580 - DNA, 15 bp, Homo sapiens
gtttgaagtcaggta

SEQ ID NO: 1989581 - DNA, 15 bp, Homo sapiens
tttgaagtcaggtag

SEQ ID NO: 1989582 - DNA, 15 bp, Homo sapiens
ttgaagtcaggtagt

SEQ ID NO: 1989583 - DNA, 15 bp, Homo sapiens
tgaagtcaggtagtg

SEQ ID NO: 1989584 - DNA, 15 bp, Homo sapiens
gaagtcaggtagtgt

SEQ ID NO: 1989585 - DNA, 15 bp, Homo sapiens
aagtcaggtagtgtg

SEQ ID NO: 1989586 - DNA, 15 bp, Homo sapiens
agtcaggtagtgtga

SEQ ID NO: 1989587 - DNA, 15 bp, Homo sapiens
gtcaggtagtgtgat

SEQ ID NO: 1989588 - DNA, 15 bp, Homo sapiens
tcaggtagtgtgatg

SEQ ID NO: 1989589 - DNA, 15 bp, Homo sapiens
caggtagtgtgatgc

SEQ ID NO: 1989590 - DNA, 15 bp, Homo sapiens
aggtagtgtgatgcc

SEQ ID NO: 1989591 - DNA, 15 bp, Homo sapiens
ggtagtgtgatgcct

SEQ ID NO: 1989592 - DNA, 15 bp, Homo sapiens
gtagtgtgatgcctc

SEQ ID NO: 1989593 - DNA, 15 bp, Homo sapiens
tagtgtgatgcctcc

SEQ ID NO: 1989594 - DNA, 15 bp, Homo sapiens
agtgtgatgcctcca

SEQ ID NO: 1989595 - DNA, 15 bp, Homo sapiens
gtgtgatgcctccag

SEQ ID NO: 1989596 - DNA, 15 bp, Homo sapiens
tgtgatgcctccagc

SEQ ID NO: 1989597 - DNA, 15 bp, Homo sapiens
ccagctttgttcttg

SEQ ID NO: 1989598 - DNA, 15 bp, Homo sapiens
cagctttgttcttgt

SEQ ID NO: 1989599 - DNA, 15 bp, Homo sapiens
agctttgttcttgtt

SEQ ID NO: 1989600 - DNA, 15 bp, Homo sapiens
gctttgttcttgttg

SEQ ID NO: 1989601 - DNA, 15 bp, Homo sapiens
ctttgttcttgttgc

SEQ ID NO: 1989602 - DNA, 15 bp, Homo sapiens
tttgttcttgttgct

SEQ ID NO: 1989603 - DNA, 15 bp, Homo sapiens
ttgttcttgttgctt

SEQ ID NO: 1989604 - DNA, 15 bp, Homo sapiens
tgttcttgttgctta

SEQ ID NO: 1989605 - DNA, 15 bp, Homo sapiens
gttcttgttgcttag

SEQ ID NO: 1989606 - DNA, 15 bp, Homo sapiens
ttcttgttgcttagg

SEQ ID NO: 1989607 - DNA, 15 bp, Homo sapiens
tcttgttgcttagga

SEQ ID NO: 1989608 - DNA, 15 bp, Homo sapiens
cttgttgcttaggat

SEQ ID NO: 1989609 - DNA, 15 bp, Homo sapiens
ttgttgcttaggatt

SEQ ID NO: 1989610 - DNA, 15 bp, Homo sapiens
tgttgcttaggattg

SEQ ID NO: 1989611 - DNA, 15 bp, Homo sapiens
gttgcttaggattgt

SEQ ID NO: 1989612 - DNA, 15 bp, Homo sapiens
ttgcttaggattgtc

SEQ ID NO: 1989613 - DNA, 15 bp, Homo sapiens
tgcttaggattgtct

SEQ ID NO: 1989614 - DNA, 15 bp, Homo sapiens
gcttaggattgtctt

SEQ ID NO: 1989615 - DNA, 15 bp, Homo sapiens
cttaggattgtcttg

SEQ ID NO: 1989616 - DNA, 15 bp, Homo sapiens
ttaggattgtcttgg

SEQ ID NO: 1989617 - DNA, 15 bp, Homo sapiens
taggattgtcttggc

SEQ ID NO: 1989618 - DNA, 15 bp, Homo sapiens
aggattgtcttggct

SEQ ID NO: 1989619 - DNA, 15 bp, Homo sapiens
ggattgtcttggctc

SEQ ID NO: 1989620 - DNA, 15 bp, Homo sapiens
gattgtcttggctct

SEQ ID NO: 1989621 - DNA, 15 bp, Homo sapiens
attgtcttggctcta

SEQ ID NO: 1989622 - DNA, 15 bp, Homo sapiens
ttgtcttggctctac

SEQ ID NO: 1989623 - DNA, 15 bp, Homo sapiens
tgtcttggctctacg

SEQ ID NO: 1989624 - DNA, 15 bp, Homo sapiens
gtcttggctctacgg

SEQ ID NO: 1989625 - DNA, 15 bp, Homo sapiens
tcttggctctacggg

SEQ ID NO: 1989626 - DNA, 15 bp, Homo sapiens
cttggctctacgggc

SEQ ID NO: 1989627 - DNA, 15 bp, Homo sapiens
ttggctctacgggct

SEQ ID NO: 1989628 - DNA, 15 bp, Homo sapiens
tggctctacgggctc

SEQ ID NO: 1989629 - DNA, 15 bp, Homo sapiens
ggctctacgggctct

SEQ ID NO: 1989630 - DNA, 15 bp, Homo sapiens
gctctacgggctctt

SEQ ID NO: 1989631 - DNA, 15 bp, Homo sapiens
ctctacgggctcttt

SEQ ID NO: 1989632 - DNA, 15 bp, Homo sapiens
tctacgggctctttt

SEQ ID NO: 1989633 - DNA, 15 bp, Homo sapiens
ctacgggctcttttt

SEQ ID NO: 1989634 - DNA, 15 bp, Homo sapiens
tacgggctctttttt

SEQ ID NO: 1989635 - DNA, 15 bp, Homo sapiens
acgggctcttttttg

SEQ ID NO: 1989636 - DNA, 15 bp, Homo sapiens
cgggctcttttttgg

SEQ ID NO: 1989637 - DNA, 15 bp, Homo sapiens
gggctcttttttggt

SEQ ID NO: 1989638 - DNA, 15 bp, Homo sapiens
ggctcttttttggtt

SEQ ID NO: 1989639 - DNA, 15 bp, Homo sapiens
gctcttttttggttc

SEQ ID NO: 1989640 - DNA, 15 bp, Homo sapiens
ctcttttttggttcc

SEQ ID NO: 1989641 - DNA, 15 bp, Homo sapiens
tcttttttggttccc

SEQ ID NO: 1989642 - DNA, 15 bp, Homo sapiens
cttttttggttccct

SEQ ID NO: 1989643 - DNA, 15 bp, Homo sapiens
ttttttggttcccta

SEQ ID NO: 1989644 - DNA, 15 bp, Homo sapiens
tttttggttccctat

SEQ ID NO: 1989645 - DNA, 15 bp, Homo sapiens
ttttggttccctatg

SEQ ID NO: 1989646 - DNA, 15 bp, Homo sapiens
tttggttccctatga

SEQ ID NO: 1989647 - DNA, 15 bp, Homo sapiens
ttggttccctatgaa

SEQ ID NO: 1989648 - DNA, 15 bp, Homo sapiens
tggttccctatgaaa

SEQ ID NO: 1989649 - DNA, 15 bp, Homo sapiens
ggttccctatgaaat

SEQ ID NO: 1989650 - DNA, 15 bp, Homo sapiens
gttccctatgaaatt

SEQ ID NO: 1989651 - DNA, 15 bp, Homo sapiens
ttccctatgaaattt

SEQ ID NO: 1989652 - DNA, 15 bp, Homo sapiens
tccctatgaaattta

SEQ ID NO: 1989653 - DNA, 15 bp, Homo sapiens
ccctatgaaatttaa

SEQ ID NO: 1989654 - DNA, 15 bp, Homo sapiens
cctatgaaatttaaa

SEQ ID NO: 1989655 - DNA, 15 bp, Homo sapiens
ctatgaaatttaaag

SEQ ID NO: 1989656 - DNA, 15 bp, Homo sapiens
tatgaaatttaaagt

SEQ ID NO: 1989657 - DNA, 15 bp, Homo sapiens
atgaaatttaaagta

SEQ ID NO: 1989658 - DNA, 15 bp, Homo sapiens
tgaaatttaaagtag

SEQ ID NO: 1989659 - DNA, 15 bp, Homo sapiens
gaaatttaaagtagt

SEQ ID NO: 1989660 - DNA, 15 bp, Homo sapiens
aaatttaaagtagtt

SEQ ID NO: 1989661 - DNA, 15 bp, Homo sapiens
aatttaaagtagttt

SEQ ID NO: 1989662 - DNA, 15 bp, Homo sapiens
atttaaagtagtttt

SEQ ID NO: 1989663 - DNA, 15 bp, Homo sapiens
tttaaagtagttttt

SEQ ID NO: 1989664 - DNA, 15 bp, Homo sapiens
ttaaagtagtttttt

SEQ ID NO: 1989665 - DNA, 15 bp, Homo sapiens
taaagtagttttttc

SEQ ID NO: 1989666 - DNA, 15 bp, Homo sapiens
aaagtagttttttct

SEQ ID NO: 1989667 - DNA, 15 bp, Homo sapiens
aagtagttttttcta

SEQ ID NO: 1989668 - DNA, 15 bp, Homo sapiens
agtagttttttctaa

SEQ ID NO: 1989669 - DNA, 15 bp, Homo sapiens
gtagttttttctaat

SEQ ID NO: 1989670 - DNA, 15 bp, Homo sapiens
tagttttttctaatt

SEQ ID NO: 1989671 - DNA, 15 bp, Homo sapiens
agttttttctaattc

SEQ ID NO: 1989672 - DNA, 15 bp, Homo sapiens
gttttttctaattct

SEQ ID NO: 1989673 - DNA, 15 bp, Homo sapiens
ttttttctaattctg

SEQ ID NO: 1989674 - DNA, 15 bp, Homo sapiens
tttttctaattctgc

SEQ ID NO: 1989675 - DNA, 15 bp, Homo sapiens
ttttctaattctgca

SEQ ID NO: 1989676 - DNA, 15 bp, Homo sapiens
tttctaattctgcaa

SEQ ID NO: 1989677 - DNA, 15 bp, Homo sapiens
ttctaattctgcaag

SEQ ID NO: 1989678 - DNA, 15 bp, Homo sapiens
tctaattctgcaaga

SEQ ID NO: 1989679 - DNA, 15 bp, Homo sapiens
ctaattctgcaagaa

SEQ ID NO: 1989680 - DNA, 15 bp, Homo sapiens
taattctgcaagaaa

SEQ ID NO: 1989681 - DNA, 15 bp, Homo sapiens
aattctgcaagaaag

SEQ ID NO: 1989682 - DNA, 15 bp, Homo sapiens
attctgcaagaaagt

SEQ ID NO: 1989683 - DNA, 15 bp, Homo sapiens
ttctgcaagaaagtc

SEQ ID NO: 1989684 - DNA, 15 bp, Homo sapiens
tctgcaagaaagtca

SEQ ID NO: 1989685 - DNA, 15 bp, Homo sapiens
ctgcaagaaagtcaa

SEQ ID NO: 1989686 - DNA, 15 bp, Homo sapiens
tgcaagaaagtcaat

SEQ ID NO: 1989687 - DNA, 15 bp, Homo sapiens
gcaagaaagtcaatg

SEQ ID NO: 1989688 - DNA, 15 bp, Homo sapiens
caagaaagtcaatgg

SEQ ID NO: 1989689 - DNA, 15 bp, Homo sapiens
aagaaagtcaatggt

SEQ ID NO: 1989690 - DNA, 15 bp, Homo sapiens
agaaagtcaatggta

SEQ ID NO: 1989691 - DNA, 15 bp, Homo sapiens
gaaagtcaatggtag

SEQ ID NO: 1989692 - DNA, 15 bp, Homo sapiens
aaagtcaatggtagc

SEQ ID NO: 1989693 - DNA, 15 bp, Homo sapiens
aagtcaatggtagct

SEQ ID NO: 1989694 - DNA, 15 bp, Homo sapiens
agtcaatggtagctt

SEQ ID NO: 1989695 - DNA, 15 bp, Homo sapiens
gtcaatggtagcttg

SEQ ID NO: 1989696 - DNA, 15 bp, Homo sapiens
tcaatggtagcttga

SEQ ID NO: 1989697 - DNA, 15 bp, Homo sapiens
caatggtagcttgat

SEQ ID NO: 1989698 - DNA, 15 bp, Homo sapiens
aatggtagcttgatg

SEQ ID NO: 1989699 - DNA, 15 bp, Homo sapiens
atggtagcttgatgg

SEQ ID NO: 1989700 - DNA, 15 bp, Homo sapiens
tggtagcttgatggg

SEQ ID NO: 1989701 - DNA, 15 bp, Homo sapiens
ggtagcttgatgggg

SEQ ID NO: 1989702 - DNA, 15 bp, Homo sapiens
gtagcttgatgggga

SEQ ID NO: 1989703 - DNA, 15 bp, Homo sapiens
tagcttgatggggat

SEQ ID NO: 1989704 - DNA, 15 bp, Homo sapiens
agcttgatggggata

SEQ ID NO: 1989705 - DNA, 15 bp, Homo sapiens
gcttgatggggatag

SEQ ID NO: 1989706 - DNA, 15 bp, Homo sapiens
cttgatggggatagt

SEQ ID NO: 1989707 - DNA, 15 bp, Homo sapiens
ttgatggggatagta

SEQ ID NO: 1989708 - DNA, 15 bp, Homo sapiens
tgatggggatagtat

SEQ ID NO: 1989709 - DNA, 15 bp, Homo sapiens
gatggggatagtatt

SEQ ID NO: 1989710 - DNA, 15 bp, Homo sapiens
atggggatagtattg

SEQ ID NO: 1989711 - DNA, 15 bp, Homo sapiens
tggggatagtattga

SEQ ID NO: 1989712 - DNA, 15 bp, Homo sapiens
ggggatagtattgaa

SEQ ID NO: 1989713 - DNA, 15 bp, Homo sapiens
gggatagtattgaat

SEQ ID NO: 1989714 - DNA, 15 bp, Homo sapiens
ggatagtattgaatc

SEQ ID NO: 1989715 - DNA, 15 bp, Homo sapiens
gatagtattgaatct

SEQ ID NO: 1989716 - DNA, 15 bp, Homo sapiens
atagtattgaatcta

SEQ ID NO: 1989717 - DNA, 15 bp, Homo sapiens
tagtattgaatctat

SEQ ID NO: 1989718 - DNA, 15 bp, Homo sapiens
agtattgaatctata

SEQ ID NO: 1989719 - DNA, 15 bp, Homo sapiens
gtattgaatctataa

SEQ ID NO: 1989720 - DNA, 15 bp, Homo sapiens
tattgaatctataaa

SEQ ID NO: 1989721 - DNA, 15 bp, Homo sapiens
attgaatctataaat

SEQ ID NO: 1989722 - DNA, 15 bp, Homo sapiens
ttgaatctataaatt

SEQ ID NO: 1989723 - DNA, 15 bp, Homo sapiens
tgaatctataaatta

SEQ ID NO: 1989724 - DNA, 15 bp, Homo sapiens
gaatctataaattac

SEQ ID NO: 1989725 - DNA, 15 bp, Homo sapiens
aatctataaattact

SEQ ID NO: 1989726 - DNA, 15 bp, Homo sapiens
atctataaattactt

SEQ ID NO: 1989727 - DNA, 15 bp, Homo sapiens
tctataaattacttt

SEQ ID NO: 1989728 - DNA, 15 bp, Homo sapiens
ctataaattactttg

SEQ ID NO: 1989729 - DNA, 15 bp, Homo sapiens
tataaattactttgt

SEQ ID NO: 1989730 - DNA, 15 bp, Homo sapiens
ataaattactttgtg

SEQ ID NO: 1989731 - DNA, 15 bp, Homo sapiens
taaattactttgtgt

SEQ ID NO: 1989732 - DNA, 15 bp, Homo sapiens
aaattactttgtgta

SEQ ID NO: 1989733 - DNA, 15 bp, Homo sapiens
aattactttgtgtag

SEQ ID NO: 1989734 - DNA, 15 bp, Homo sapiens
attactttgtgtagt

SEQ ID NO: 1989735 - DNA, 15 bp, Homo sapiens
ttactttgtgtagta

SEQ ID NO: 1989736 - DNA, 15 bp, Homo sapiens
tactttgtgtagtac

SEQ ID NO: 1989737 - DNA, 15 bp, Homo sapiens
actttgtgtagtaca

SEQ ID NO: 1989738 - DNA, 15 bp, Homo sapiens
ctttgtgtagtacag

SEQ ID NO: 1989739 - DNA, 15 bp, Homo sapiens
tttgtgtagtacagc

SEQ ID NO: 1989740 - DNA, 15 bp, Homo sapiens
ttgtgtagtacagcc

SEQ ID NO: 1989741 - DNA, 15 bp, Homo sapiens
tgtgtagtacagcca

SEQ ID NO: 1989742 - DNA, 15 bp, Homo sapiens
gtgtagtacagccat

SEQ ID NO: 1989743 - DNA, 15 bp, Homo sapiens
tgtagtacagccatt

SEQ ID NO: 1989744 - DNA, 15 bp, Homo sapiens
gtagtacagccattt

SEQ ID NO: 1989745 - DNA, 15 bp, Homo sapiens
tagtacagccatttt

SEQ ID NO: 1989746 - DNA, 15 bp, Homo sapiens
agtacagccattttc

SEQ ID NO: 1989747 - DNA, 15 bp, Homo sapiens
gtacagccattttca

SEQ ID NO: 1989748 - DNA, 15 bp, Homo sapiens
tacagccattttcat

SEQ ID NO: 1989749 - DNA, 15 bp, Homo sapiens
acagccattttcatg

SEQ ID NO: 1989750 - DNA, 15 bp, Homo sapiens
cagccattttcatga

SEQ ID NO: 1989751 - DNA, 15 bp, Homo sapiens
agccattttcatgat

SEQ ID NO: 1989752 - DNA, 15 bp, Homo sapiens
gccattttcatgata

SEQ ID NO: 1989753 - DNA, 15 bp, Homo sapiens
ccattttcatgatat

SEQ ID NO: 1989754 - DNA, 15 bp, Homo sapiens
cattttcatgatatc

SEQ ID NO: 1989755 - DNA, 15 bp, Homo sapiens
attttcatgatatcg

SEQ ID NO: 1989756 - DNA, 15 bp, Homo sapiens
ttttcatgatatcga

SEQ ID NO: 1989757 - DNA, 15 bp, Homo sapiens
tttcatgatatcgat

SEQ ID NO: 1989758 - DNA, 15 bp, Homo sapiens
ttcatgatatcgatt

SEQ ID NO: 1989759 - DNA, 15 bp, Homo sapiens
tcatgatatcgattc

SEQ ID NO: 1989760 - DNA, 15 bp, Homo sapiens
catgatatcgattct

SEQ ID NO: 1989761 - DNA, 15 bp, Homo sapiens
atgatatcgattctt

SEQ ID NO: 1989762 - DNA, 15 bp, Homo sapiens
tgatatcgattcttc

SEQ ID NO: 1989763 - DNA, 15 bp, Homo sapiens
gatatcgattcttcc

SEQ ID NO: 1989764 - DNA, 15 bp, Homo sapiens
atatcgattcttcct

SEQ ID NO: 1989765 - DNA, 15 bp, Homo sapiens
tatcgattcttccta

SEQ ID NO: 1989766 - DNA, 15 bp, Homo sapiens
atcgattcttcctat

SEQ ID NO: 1989767 - DNA, 15 bp, Homo sapiens
tcgattcttcctatt

SEQ ID NO: 1989768 - DNA, 15 bp, Homo sapiens
cgattcttcctattc

SEQ ID NO: 1989769 - DNA, 15 bp, Homo sapiens
gattcttcctattca

SEQ ID NO: 1989770 - DNA, 15 bp, Homo sapiens
attcttcctattcat

SEQ ID NO: 1989771 - DNA, 15 bp, Homo sapiens
ttcttcctattcatg

SEQ ID NO: 1989772 - DNA, 15 bp, Homo sapiens
tcttcctattcatga

SEQ ID NO: 1989773 - DNA, 15 bp, Homo sapiens
cttcctattcatgag

SEQ ID NO: 1989774 - DNA, 15 bp, Homo sapiens
ttcctattcatgagc

SEQ ID NO: 1989775 - DNA, 15 bp, Homo sapiens
tcctattcatgagca

SEQ ID NO: 1989776 - DNA, 15 bp, Homo sapiens
cctattcatgagcat

SEQ ID NO: 1989777 - DNA, 15 bp, Homo sapiens
ctattcatgagcatg

SEQ ID NO: 1989778 - DNA, 15 bp, Homo sapiens
tattcatgagcatgg

SEQ ID NO: 1989779 - DNA, 15 bp, Homo sapiens
attcatgagcatgga

SEQ ID NO: 1989780 - DNA, 15 bp, Homo sapiens
ttcatgagcatggaa

SEQ ID NO: 1989781 - DNA, 15 bp, Homo sapiens
tcatgagcatggaat

SEQ ID NO: 1989782 - DNA, 15 bp, Homo sapiens
catgagcatggaatg

SEQ ID NO: 1989783 - DNA, 15 bp, Homo sapiens
atgagcatggaatgt

SEQ ID NO: 1989784 - DNA, 15 bp, Homo sapiens
tgagcatggaatgtt

SEQ ID NO: 1989785 - DNA, 15 bp, Homo sapiens
gagcatggaatgttt

SEQ ID NO: 1989786 - DNA, 15 bp, Homo sapiens
agcatggaatgtttt

SEQ ID NO: 1989787 - DNA, 15 bp, Homo sapiens
gcatggaatgttttt

SEQ ID NO: 1989788 - DNA, 15 bp, Homo sapiens
catggaatgtttttt

SEQ ID NO: 1989789 - DNA, 15 bp, Homo sapiens
atggaatgttttttc

SEQ ID NO: 1989790 - DNA, 15 bp, Homo sapiens
tggaatgttttttca

SEQ ID NO: 1989791 - DNA, 15 bp, Homo sapiens
ggaatgttttttcat

SEQ ID NO: 1989792 - DNA, 15 bp, Homo sapiens
gaatgttttttcatt

SEQ ID NO: 1989793 - DNA, 15 bp, Homo sapiens
aatgttttttcattt

SEQ ID NO: 1989794 - DNA, 15 bp, Homo sapiens
atgttttttcatttg

SEQ ID NO: 1989795 - DNA, 15 bp, Homo sapiens
tgttttttcatttgt

SEQ ID NO: 1989796 - DNA, 15 bp, Homo sapiens
gttttttcatttgtt

SEQ ID NO: 1989797 - DNA, 15 bp, Homo sapiens
ttttttcatttgttt

SEQ ID NO: 1989798 - DNA, 15 bp, Homo sapiens
tttttcatttgtttg

SEQ ID NO: 1989799 - DNA, 15 bp, Homo sapiens
ttttcatttgtttgt

SEQ ID NO: 1989800 - DNA, 15 bp, Homo sapiens
tttcatttgtttgta

SEQ ID NO: 1989801 - DNA, 15 bp, Homo sapiens
ttcatttgtttgtat

SEQ ID NO: 1989802 - DNA, 15 bp, Homo sapiens
tcatttgtttgtatc

SEQ ID NO: 1989803 - DNA, 15 bp, Homo sapiens
catttgtttgtatcc

SEQ ID NO: 1989804 - DNA, 15 bp, Homo sapiens
atttgtttgtatcct

SEQ ID NO: 1989805 - DNA, 15 bp, Homo sapiens
tttgtttgtatcctc

SEQ ID NO: 1989806 - DNA, 15 bp, Homo sapiens
ttgtttgtatcctct

SEQ ID NO: 1989807 - DNA, 15 bp, Homo sapiens
tgtttgtatcctctt

SEQ ID NO: 1989808 - DNA, 15 bp, Homo sapiens
gtttgtatcctcttt

SEQ ID NO: 1989809 - DNA, 15 bp, Homo sapiens
tttgtatcctctttt

SEQ ID NO: 1989810 - DNA, 15 bp, Homo sapiens
ttgtatcctctttta

SEQ ID NO: 1989811 - DNA, 15 bp, Homo sapiens
tgtatcctcttttat

SEQ ID NO: 1989812 - DNA, 15 bp, Homo sapiens
gtatcctcttttatt

SEQ ID NO: 1989813 - DNA, 15 bp, Homo sapiens
tatcctcttttattt

SEQ ID NO: 1989814 - DNA, 15 bp, Homo sapiens
atcctcttttatttc

SEQ ID NO: 1989815 - DNA, 15 bp, Homo sapiens
tcctcttttatttcc

SEQ ID NO: 1989816 - DNA, 15 bp, Homo sapiens
ctcttttatttcctt

SEQ ID NO: 1989817 - DNA, 15 bp, Homo sapiens
tcttttatttccttg

SEQ ID NO: 1989818 - DNA, 15 bp, Homo sapiens
cttttatttccttga

SEQ ID NO: 1989819 - DNA, 15 bp, Homo sapiens
ttttatttccttgag

SEQ ID NO: 1989820 - DNA, 15 bp, Homo sapiens
tttatttccttgagc

SEQ ID NO: 1989821 - DNA, 15 bp, Homo sapiens
ttatttccttgagca

SEQ ID NO: 1989822 - DNA, 15 bp, Homo sapiens
tatttccttgagcag

SEQ ID NO: 1989823 - DNA, 15 bp, Homo sapiens
atttccttgagcagt

SEQ ID NO: 1989824 - DNA, 15 bp, Homo sapiens
tttccttgagcagtg

SEQ ID NO: 1989825 - DNA, 15 bp, Homo sapiens
ttccttgagcagtga

SEQ ID NO: 1989826 - DNA, 15 bp, Homo sapiens
tccttgagcagtgat

SEQ ID NO: 1989827 - DNA, 15 bp, Homo sapiens
ccttgagcagtgatt

SEQ ID NO: 1989828 - DNA, 15 bp, Homo sapiens
cttgagcagtgattt

SEQ ID NO: 1989829 - DNA, 15 bp, Homo sapiens
ttgagcagtgatttg

SEQ ID NO: 1989830 - DNA, 15 bp, Homo sapiens
tgagcagtgatttgt

SEQ ID NO: 1989831 - DNA, 15 bp, Homo sapiens
gagcagtgatttgta

SEQ ID NO: 1989832 - DNA, 15 bp, Homo sapiens
agcagtgatttgtag

SEQ ID NO: 1989833 - DNA, 15 bp, Homo sapiens
gcagtgatttgtagt

SEQ ID NO: 1989834 - DNA, 15 bp, Homo sapiens
cagtgatttgtagtt

SEQ ID NO: 1989835 - DNA, 15 bp, Homo sapiens
agtgatttgtagttc

SEQ ID NO: 1989836 - DNA, 15 bp, Homo sapiens
gtgatttgtagttct

SEQ ID NO: 1989837 - DNA, 15 bp, Homo sapiens
tgatttgtagttctc

SEQ ID NO: 1989838 - DNA, 15 bp, Homo sapiens
gatttgtagttctcc

SEQ ID NO: 1989839 - DNA, 15 bp, Homo sapiens
atttgtagttctcct

SEQ ID NO: 1989840 - DNA, 15 bp, Homo sapiens
acatcccttgtaagg

SEQ ID NO: 1989841 - DNA, 15 bp, Homo sapiens
catcccttgtaaggt

SEQ ID NO: 1989842 - DNA, 15 bp, Homo sapiens
atcccttgtaaggtg

SEQ ID NO: 1989843 - DNA, 15 bp, Homo sapiens
tcccttgtaaggtgt

SEQ ID NO: 1989844 - DNA, 15 bp, Homo sapiens
cccttgtaaggtgta

SEQ ID NO: 1989845 - DNA, 15 bp, Homo sapiens
ccttgtaaggtgtat

SEQ ID NO: 1989846 - DNA, 15 bp, Homo sapiens
cttgtaaggtgtatt

SEQ ID NO: 1989847 - DNA, 15 bp, Homo sapiens
ttgtaaggtgtattc

SEQ ID NO: 1989848 - DNA, 15 bp, Homo sapiens
tgtaaggtgtattcc

SEQ ID NO: 1989849 - DNA, 15 bp, Homo sapiens
gtaaggtgtattcct

SEQ ID NO: 1989850 - DNA, 15 bp, Homo sapiens
taaggtgtattccta

SEQ ID NO: 1989851 - DNA, 15 bp, Homo sapiens
aaggtgtattcctaa

SEQ ID NO: 1989852 - DNA, 15 bp, Homo sapiens
aggtgtattcctaag

SEQ ID NO: 1989853 - DNA, 15 bp, Homo sapiens
ggtgtattcctaagt

SEQ ID NO: 1989854 - DNA, 15 bp, Homo sapiens
gtgtattcctaagta

SEQ ID NO: 1989855 - DNA, 15 bp, Homo sapiens
tgtattcctaagtat

SEQ ID NO: 1989856 - DNA, 15 bp, Homo sapiens
gtattcctaagtatt

SEQ ID NO: 1989857 - DNA, 15 bp, Homo sapiens
tattcctaagtattt

SEQ ID NO: 1989858 - DNA, 15 bp, Homo sapiens
attcctaagtatttt

SEQ ID NO: 1989859 - DNA, 15 bp, Homo sapiens
ttcctaagtatttta

SEQ ID NO: 1989860 - DNA, 15 bp, Homo sapiens
tcctaagtattttat

SEQ ID NO: 1989861 - DNA, 15 bp, Homo sapiens
cctaagtattttatt

SEQ ID NO: 1989862 - DNA, 15 bp, Homo sapiens
ctaagtattttattc

SEQ ID NO: 1989863 - DNA, 15 bp, Homo sapiens
taagtattttattct

SEQ ID NO: 1989864 - DNA, 15 bp, Homo sapiens
aagtattttattctc

SEQ ID NO: 1989865 - DNA, 15 bp, Homo sapiens
agtattttattctct

SEQ ID NO: 1989866 - DNA, 15 bp, Homo sapiens
ttctctttgtagcaa

SEQ ID NO: 1989867 - DNA, 15 bp, Homo sapiens
tctctttgtagcaat

SEQ ID NO: 1989868 - DNA, 15 bp, Homo sapiens
ctctttgtagcaatt

SEQ ID NO: 1989869 - DNA, 15 bp, Homo sapiens
tctttgtagcaattg

SEQ ID NO: 1989870 - DNA, 15 bp, Homo sapiens
ctttgtagcaattgt

SEQ ID NO: 1989871 - DNA, 15 bp, Homo sapiens
tttgtagcaattgtg

SEQ ID NO: 1989872 - DNA, 15 bp, Homo sapiens
ttgtagcaattgtga

SEQ ID NO: 1989873 - DNA, 15 bp, Homo sapiens
tgtagcaattgtgaa

SEQ ID NO: 1989874 - DNA, 15 bp, Homo sapiens
gtagcaattgtgaat

SEQ ID NO: 1989875 - DNA, 15 bp, Homo sapiens
tagcaattgtgaatg

SEQ ID NO: 1989876 - DNA, 15 bp, Homo sapiens
agcaattgtgaatgg

SEQ ID NO: 1989877 - DNA, 15 bp, Homo sapiens
gcaattgtgaatggg

SEQ ID NO: 1989878 - DNA, 15 bp, Homo sapiens
caattgtgaatggga

SEQ ID NO: 1989879 - DNA, 15 bp, Homo sapiens
aattgtgaatgggaa

SEQ ID NO: 1989880 - DNA, 15 bp, Homo sapiens
attgtgaatgggaat

SEQ ID NO: 1989881 - DNA, 15 bp, Homo sapiens
ttgtgaatgggaatt

SEQ ID NO: 1989882 - DNA, 15 bp, Homo sapiens
tgtgaatgggaattc

SEQ ID NO: 1989883 - DNA, 15 bp, Homo sapiens
gtgaatgggaattca

SEQ ID NO: 1989884 - DNA, 15 bp, Homo sapiens
tgaatgggaattcac

SEQ ID NO: 1989885 - DNA, 15 bp, Homo sapiens
gaatgggaattcact

SEQ ID NO: 1989886 - DNA, 15 bp, Homo sapiens
aatgggaattcactc

SEQ ID NO: 1989887 - DNA, 15 bp, Homo sapiens
atgggaattcactca

SEQ ID NO: 1989888 - DNA, 15 bp, Homo sapiens
tgggaattcactcat

SEQ ID NO: 1989889 - DNA, 15 bp, Homo sapiens
gggaattcactcatg

SEQ ID NO: 1989890 - DNA, 15 bp, Homo sapiens
ggaattcactcatga

SEQ ID NO: 1989891 - DNA, 15 bp, Homo sapiens
gaattcactcatgat

SEQ ID NO: 1989892 - DNA, 15 bp, Homo sapiens
aattcactcatgatt

SEQ ID NO: 1989893 - DNA, 15 bp, Homo sapiens
attcactcatgattt

SEQ ID NO: 1989894 - DNA, 15 bp, Homo sapiens
ctcatgatttggctg

SEQ ID NO: 1989895 - DNA, 15 bp, Homo sapiens
tcatgatttggctgt

SEQ ID NO: 1989896 - DNA, 15 bp, Homo sapiens
catgatttggctgtt

SEQ ID NO: 1989897 - DNA, 15 bp, Homo sapiens
atgatttggctgttt

SEQ ID NO: 1989898 - DNA, 15 bp, Homo sapiens
tgatttggctgtttg

SEQ ID NO: 1989899 - DNA, 15 bp, Homo sapiens
gatttggctgtttgt

SEQ ID NO: 1989900 - DNA, 15 bp, Homo sapiens
atttggctgtttgtc

SEQ ID NO: 1989901 - DNA, 15 bp, Homo sapiens
tttggctgtttgtct

SEQ ID NO: 1989902 - DNA, 15 bp, Homo sapiens
ttggctgtttgtctg

SEQ ID NO: 1989903 - DNA, 15 bp, Homo sapiens
tggctgtttgtctgt

SEQ ID NO: 1989904 - DNA, 15 bp, Homo sapiens
ggctgtttgtctgtt

SEQ ID NO: 1989905 - DNA, 15 bp, Homo sapiens
gctgtttgtctgtta

SEQ ID NO: 1989906 - DNA, 15 bp, Homo sapiens
attttgtatcctgaa

SEQ ID NO: 1989907 - DNA, 15 bp, Homo sapiens
ttttgtatcctgaaa

SEQ ID NO: 1989908 - DNA, 15 bp, Homo sapiens
tttgtatcctgaaac

SEQ ID NO: 1989909 - DNA, 15 bp, Homo sapiens
ttgtatcctgaaact

SEQ ID NO: 1989910 - DNA, 15 bp, Homo sapiens
tgtatcctgaaactt

SEQ ID NO: 1989911 - DNA, 15 bp, Homo sapiens
gtatcctgaaacttt

SEQ ID NO: 1989912 - DNA, 15 bp, Homo sapiens
tatcctgaaactttg

SEQ ID NO: 1989913 - DNA, 15 bp, Homo sapiens
atcctgaaactttgc

SEQ ID NO: 1989914 - DNA, 15 bp, Homo sapiens
tcctgaaactttgct

SEQ ID NO: 1989915 - DNA, 15 bp, Homo sapiens
cctgaaactttgctg

SEQ ID NO: 1989916 - DNA, 15 bp, Homo sapiens
ctgaaactttgctga

SEQ ID NO: 1989917 - DNA, 15 bp, Homo sapiens
tgaaactttgctgaa

SEQ ID NO: 1989918 - DNA, 15 bp, Homo sapiens
gaaactttgctgaag

SEQ ID NO: 1989919 - DNA, 15 bp, Homo sapiens
aaactttgctgaagt

SEQ ID NO: 1989920 - DNA, 15 bp, Homo sapiens
aactttgctgaagtt

SEQ ID NO: 1989921 - DNA, 15 bp, Homo sapiens
tgctgaagttgcttc

SEQ ID NO: 1989922 - DNA, 15 bp, Homo sapiens
gctgaagttgcttct

SEQ ID NO: 1989923 - DNA, 15 bp, Homo sapiens
ctgaagttgcttctc

SEQ ID NO: 1989924 - DNA, 15 bp, Homo sapiens
tgaagttgcttctca

SEQ ID NO: 1989925 - DNA, 15 bp, Homo sapiens
gaagttgcttctcag

SEQ ID NO: 1989926 - DNA, 15 bp, Homo sapiens
aagttgcttctcagc

SEQ ID NO: 1989927 - DNA, 15 bp, Homo sapiens
agttgcttctcagct

SEQ ID NO: 1989928 - DNA, 15 bp, Homo sapiens
gttgcttctcagcta

SEQ ID NO: 1989929 - DNA, 15 bp, Homo sapiens
ttgcttctcagctaa

SEQ ID NO: 1989930 - DNA, 15 bp, Homo sapiens
tgcttctcagctaaa

SEQ ID NO: 1989931 - DNA, 15 bp, Homo sapiens
gcttctcagctaaag

SEQ ID NO: 1989932 - DNA, 15 bp, Homo sapiens
cttctcagctaaagg

SEQ ID NO: 1989933 - DNA, 15 bp, Homo sapiens
ttctcagctaaagga

SEQ ID NO: 1989934 - DNA, 15 bp, Homo sapiens
tctcagctaaaggag

SEQ ID NO: 1989935 - DNA, 15 bp, Homo sapiens
ctcagctaaaggaga

SEQ ID NO: 1989936 - DNA, 15 bp, Homo sapiens
tcagctaaaggagat

SEQ ID NO: 1989937 - DNA, 15 bp, Homo sapiens
cagctaaaggagatt

SEQ ID NO: 1989938 - DNA, 15 bp, Homo sapiens
agctaaaggagattt

SEQ ID NO: 1989939 - DNA, 15 bp, Homo sapiens
gctaaaggagatttt

SEQ ID NO: 1989940 - DNA, 15 bp, Homo sapiens
ctaaaggagattttg

SEQ ID NO: 1989941 - DNA, 15 bp, Homo sapiens
taaaggagattttgg

SEQ ID NO: 1989942 - DNA, 15 bp, Homo sapiens
aaaggagattttggg

SEQ ID NO: 1989943 - DNA, 15 bp, Homo sapiens
tgggctgagacgata

SEQ ID NO: 1989944 - DNA, 15 bp, Homo sapiens
gggctgagacgatag

SEQ ID NO: 1989945 - DNA, 15 bp, Homo sapiens
ggctgagacgatagg

SEQ ID NO: 1989946 - DNA, 15 bp, Homo sapiens
gctgagacgataggg

SEQ ID NO: 1989947 - DNA, 15 bp, Homo sapiens
ctgagacgatagggt

SEQ ID NO: 1989948 - DNA, 15 bp, Homo sapiens
tgagacgatagggtt

SEQ ID NO: 1989949 - DNA, 15 bp, Homo sapiens
gagacgatagggttt

SEQ ID NO: 1989950 - DNA, 15 bp, Homo sapiens
agacgatagggtttt

SEQ ID NO: 1989951 - DNA, 15 bp, Homo sapiens
gacgatagggttttc

SEQ ID NO: 1989952 - DNA, 15 bp, Homo sapiens
acgatagggttttct

SEQ ID NO: 1989953 - DNA, 15 bp, Homo sapiens
cgatagggttttcta

SEQ ID NO: 1989954 - DNA, 15 bp, Homo sapiens
gatagggttttctaa

SEQ ID NO: 1989955 - DNA, 15 bp, Homo sapiens
atagggttttctaaa

SEQ ID NO: 1989956 - DNA, 15 bp, Homo sapiens
tagggttttctaaat

SEQ ID NO: 1989957 - DNA, 15 bp, Homo sapiens
agggttttctaaata

SEQ ID NO: 1989958 - DNA, 15 bp, Homo sapiens
gggttttctaaatat

SEQ ID NO: 1989959 - DNA, 15 bp, Homo sapiens
ggttttctaaatata

SEQ ID NO: 1989960 - DNA, 15 bp, Homo sapiens
gttttctaaatatac

SEQ ID NO: 1989961 - DNA, 15 bp, Homo sapiens
ttttctaaatataca

SEQ ID NO: 1989962 - DNA, 15 bp, Homo sapiens
tttctaaatatacag

SEQ ID NO: 1989963 - DNA, 15 bp, Homo sapiens
ttctaaatatacagt

SEQ ID NO: 1989964 - DNA, 15 bp, Homo sapiens
tctaaatatacagtc

SEQ ID NO: 1989965 - DNA, 15 bp, Homo sapiens
ctaaatatacagtca

SEQ ID NO: 1989966 - DNA, 15 bp, Homo sapiens
taaatatacagtcat

SEQ ID NO: 1989967 - DNA, 15 bp, Homo sapiens
aaatatacagtcatg

SEQ ID NO: 1989968 - DNA, 15 bp, Homo sapiens
aatatacagtcatgt

SEQ ID NO: 1989969 - DNA, 15 bp, Homo sapiens
atatacagtcatgtc

SEQ ID NO: 1989970 - DNA, 15 bp, Homo sapiens
tatacagtcatgtca

SEQ ID NO: 1989971 - DNA, 15 bp, Homo sapiens
atacagtcatgtcat

SEQ ID NO: 1989972 - DNA, 15 bp, Homo sapiens
tacagtcatgtcatc

SEQ ID NO: 1989973 - DNA, 15 bp, Homo sapiens
acagtcatgtcatct

SEQ ID NO: 1989974 - DNA, 15 bp, Homo sapiens
cagtcatgtcatctg

SEQ ID NO: 1989975 - DNA, 15 bp, Homo sapiens
agtcatgtcatctgc

SEQ ID NO: 1989976 - DNA, 15 bp, Homo sapiens
gtcatgtcatctgca

SEQ ID NO: 1989977 - DNA, 15 bp, Homo sapiens
tcatgtcatctgcag

SEQ ID NO: 1989978 - DNA, 15 bp, Homo sapiens
catgtcatctgcaga

SEQ ID NO: 1989979 - DNA, 15 bp, Homo sapiens
atgtcatctgcagac

SEQ ID NO: 1989980 - DNA, 15 bp, Homo sapiens
tgtcatctgcagaca

SEQ ID NO: 1989981 - DNA, 15 bp, Homo sapiens
gtcatctgcagacag

SEQ ID NO: 1989982 - DNA, 15 bp, Homo sapiens
tcatctgcagacaga

SEQ ID NO: 1989983 - DNA, 15 bp, Homo sapiens
catctgcagacagag

SEQ ID NO: 1989984 - DNA, 15 bp, Homo sapiens
atctgcagacagaga

SEQ ID NO: 1989985 - DNA, 15 bp, Homo sapiens
tctgcagacagagac

SEQ ID NO: 1989986 - DNA, 15 bp, Homo sapiens
ctgcagacagagaca

SEQ ID NO: 1989987 - DNA, 15 bp, Homo sapiens
tgcagacagagacag

SEQ ID NO: 1989988 - DNA, 15 bp, Homo sapiens
gcagacagagacagt

SEQ ID NO: 1989989 - DNA, 15 bp, Homo sapiens
cagacagagacagtt

SEQ ID NO: 1989990 - DNA, 15 bp, Homo sapiens
agacagagacagttt

SEQ ID NO: 1989991 - DNA, 15 bp, Homo sapiens
gacagagacagtttg

SEQ ID NO: 1989992 - DNA, 15 bp, Homo sapiens
acagagacagtttga

SEQ ID NO: 1989993 - DNA, 15 bp, Homo sapiens
cagagacagtttgac

SEQ ID NO: 1989994 - DNA, 15 bp, Homo sapiens
agagacagtttgact

SEQ ID NO: 1989995 - DNA, 15 bp, Homo sapiens
gagacagtttgactt

SEQ ID NO: 1989996 - DNA, 15 bp, Homo sapiens
agacagtttgacttc

SEQ ID NO: 1989997 - DNA, 15 bp, Homo sapiens
gacagtttgacttca

SEQ ID NO: 1989998 - DNA, 15 bp, Homo sapiens
acagtttgacttcat

SEQ ID NO: 1989999 - DNA, 15 bp, Homo sapiens
cagtttgacttcatc

SEQ ID NO: 1990000 - DNA, 15 bp, Homo sapiens
agtttgacttcatct

SEQ ID NO: 1990001 - DNA, 15 bp, Homo sapiens
gtttgacttcatctt

SEQ ID NO: 1990002 - DNA, 15 bp, Homo sapiens
tttgacttcatcttt

SEQ ID NO: 1990003 - DNA, 15 bp, Homo sapiens
ttgacttcatctttt

SEQ ID NO: 1990004 - DNA, 15 bp, Homo sapiens
tgacttcatcttttc

SEQ ID NO: 1990005 - DNA, 15 bp, Homo sapiens
gacttcatcttttcc

SEQ ID NO: 1990006 - DNA, 15 bp, Homo sapiens
acttcatcttttcct

SEQ ID NO: 1990007 - DNA, 15 bp, Homo sapiens
cttcatcttttccta

SEQ ID NO: 1990008 - DNA, 15 bp, Homo sapiens
ttcatcttttcctat

SEQ ID NO: 1990009 - DNA, 15 bp, Homo sapiens
tcatcttttcctatt

SEQ ID NO: 1990010 - DNA, 15 bp, Homo sapiens
catcttttcctattc

SEQ ID NO: 1990011 - DNA, 15 bp, Homo sapiens
atcttttcctattca

SEQ ID NO: 1990012 - DNA, 15 bp, Homo sapiens
tcttttcctattcaa

SEQ ID NO: 1990013 - DNA, 15 bp, Homo sapiens
cttttcctattcaaa

SEQ ID NO: 1990014 - DNA, 15 bp, Homo sapiens
ttttcctattcaaat

SEQ ID NO: 1990015 - DNA, 15 bp, Homo sapiens
tttcctattcaaata

SEQ ID NO: 1990016 - DNA, 15 bp, Homo sapiens
ttcctattcaaatac

SEQ ID NO: 1990017 - DNA, 15 bp, Homo sapiens
tcctattcaaatacc

SEQ ID NO: 1990018 - DNA, 15 bp, Homo sapiens
cctattcaaataccc

SEQ ID NO: 1990019 - DNA, 15 bp, Homo sapiens
ctattcaaataccct

SEQ ID NO: 1990020 - DNA, 15 bp, Homo sapiens
tattcaaataccctt

SEQ ID NO: 1990021 - DNA, 15 bp, Homo sapiens
attcaaatacccttt

SEQ ID NO: 1990022 - DNA, 15 bp, Homo sapiens
ttcaaatacccttta

SEQ ID NO: 1990023 - DNA, 15 bp, Homo sapiens
tcaaataccctttat

SEQ ID NO: 1990024 - DNA, 15 bp, Homo sapiens
caaataccctttatt

SEQ ID NO: 1990025 - DNA, 15 bp, Homo sapiens
aaataccctttattt

SEQ ID NO: 1990026 - DNA, 15 bp, Homo sapiens
aataccctttatttt

SEQ ID NO: 1990027 - DNA, 15 bp, Homo sapiens
ataccctttattttt

SEQ ID NO: 1990028 - DNA, 15 bp, Homo sapiens
taccctttatttttt

SEQ ID NO: 1990029 - DNA, 15 bp, Homo sapiens
accctttattttttt

SEQ ID NO: 1990030 - DNA, 15 bp, Homo sapiens
ccctttatttttttc

SEQ ID NO: 1990031 - DNA, 15 bp, Homo sapiens
cctttatttttttct

SEQ ID NO: 1990032 - DNA, 15 bp, Homo sapiens
ctttatttttttctc

SEQ ID NO: 1990033 - DNA, 15 bp, Homo sapiens
tttatttttttctct

SEQ ID NO: 1990034 - DNA, 15 bp, Homo sapiens
ttatttttttctctt

SEQ ID NO: 1990035 - DNA, 15 bp, Homo sapiens
tatttttttctcttg

SEQ ID NO: 1990036 - DNA, 15 bp, Homo sapiens
atttttttctcttgc

SEQ ID NO: 1990037 - DNA, 15 bp, Homo sapiens
tttttttctcttgcc

SEQ ID NO: 1990038 - DNA, 15 bp, Homo sapiens
ttttttctcttgcct

SEQ ID NO: 1990039 - DNA, 15 bp, Homo sapiens
tttttctcttgcctg

SEQ ID NO: 1990040 - DNA, 15 bp, Homo sapiens
ttttctcttgcctga

SEQ ID NO: 1990041 - DNA, 15 bp, Homo sapiens
cagaacttccaatac

SEQ ID NO: 1990042 - DNA, 15 bp, Homo sapiens
agaacttccaatact

SEQ ID NO: 1990043 - DNA, 15 bp, Homo sapiens
gaacttccaatacta

SEQ ID NO: 1990044 - DNA, 15 bp, Homo sapiens
aacttccaatactat

SEQ ID NO: 1990045 - DNA, 15 bp, Homo sapiens
acttccaatactatg

SEQ ID NO: 1990046 - DNA, 15 bp, Homo sapiens
cttccaatactatgt

SEQ ID NO: 1990047 - DNA, 15 bp, Homo sapiens
ttccaatactatgtt

SEQ ID NO: 1990048 - DNA, 15 bp, Homo sapiens
tccaatactatgttg

SEQ ID NO: 1990049 - DNA, 15 bp, Homo sapiens
ccaatactatgttgt

SEQ ID NO: 1990050 - DNA, 15 bp, Homo sapiens
caatactatgttgta

SEQ ID NO: 1990051 - DNA, 15 bp, Homo sapiens
aatactatgttgtat

SEQ ID NO: 1990052 - DNA, 15 bp, Homo sapiens
atactatgttgtata

SEQ ID NO: 1990053 - DNA, 15 bp, Homo sapiens
tactatgttgtatag

SEQ ID NO: 1990054 - DNA, 15 bp, Homo sapiens
actatgttgtatagg

SEQ ID NO: 1990055 - DNA, 15 bp, Homo sapiens
ctatgttgtatagga

SEQ ID NO: 1990056 - DNA, 15 bp, Homo sapiens
tatgttgtataggag

SEQ ID NO: 1990057 - DNA, 15 bp, Homo sapiens
atgttgtataggagt

SEQ ID NO: 1990058 - DNA, 15 bp, Homo sapiens
tgttgtataggagtg

SEQ ID NO: 1990059 - DNA, 15 bp, Homo sapiens
gttgtataggagtgg

SEQ ID NO: 1990060 - DNA, 15 bp, Homo sapiens
ttgtataggagtggt

SEQ ID NO: 1990061 - DNA, 15 bp, Homo sapiens
tgtataggagtggtg

SEQ ID NO: 1990062 - DNA, 15 bp, Homo sapiens
gtataggagtggtga

SEQ ID NO: 1990063 - DNA, 15 bp, Homo sapiens
tataggagtggtgag

SEQ ID NO: 1990064 - DNA, 15 bp, Homo sapiens
ggagtggtgagagaa

SEQ ID NO: 1990065 - DNA, 15 bp, Homo sapiens
gagtggtgagagaag

SEQ ID NO: 1990066 - DNA, 15 bp, Homo sapiens
agtggtgagagaagg

SEQ ID NO: 1990067 - DNA, 15 bp, Homo sapiens
gtggtgagagaaggc

SEQ ID NO: 1990068 - DNA, 15 bp, Homo sapiens
tggtgagagaaggca

SEQ ID NO: 1990069 - DNA, 15 bp, Homo sapiens
ggtgagagaaggcat

SEQ ID NO: 1990070 - DNA, 15 bp, Homo sapiens
gtgagagaaggcatc

SEQ ID NO: 1990071 - DNA, 15 bp, Homo sapiens
tgagagaaggcatcc

SEQ ID NO: 1990072 - DNA, 15 bp, Homo sapiens
gagagaaggcatcct

SEQ ID NO: 1990073 - DNA, 15 bp, Homo sapiens
agagaaggcatcctt

SEQ ID NO: 1990074 - DNA, 15 bp, Homo sapiens
gagaaggcatccttg

SEQ ID NO: 1990075 - DNA, 15 bp, Homo sapiens
agaaggcatccttgt

SEQ ID NO: 1990076 - DNA, 15 bp, Homo sapiens
gaaggcatccttgtc

SEQ ID NO: 1990077 - DNA, 15 bp, Homo sapiens
aaggcatccttgtct

SEQ ID NO: 1990078 - DNA, 15 bp, Homo sapiens
aggcatccttgtctt

SEQ ID NO: 1990079 - DNA, 15 bp, Homo sapiens
ccttgtcttgtgccg

SEQ ID NO: 1990080 - DNA, 15 bp, Homo sapiens
cttgtcttgtgccgg

SEQ ID NO: 1990081 - DNA, 15 bp, Homo sapiens
ttgtcttgtgccggt

SEQ ID NO: 1990082 - DNA, 15 bp, Homo sapiens
tgtcttgtgccggtt

SEQ ID NO: 1990083 - DNA, 15 bp, Homo sapiens
gtcttgtgccggttt

SEQ ID NO: 1990084 - DNA, 15 bp, Homo sapiens
tcttgtgccggtttt

SEQ ID NO: 1990085 - DNA, 15 bp, Homo sapiens
cttgtgccggttttc

SEQ ID NO: 1990086 - DNA, 15 bp, Homo sapiens
ttgtgccggttttca

SEQ ID NO: 1990087 - DNA, 15 bp, Homo sapiens
tgtgccggttttcaa

SEQ ID NO: 1990088 - DNA, 15 bp, Homo sapiens
gtgccggttttcaaa

SEQ ID NO: 1990089 - DNA, 15 bp, Homo sapiens
tgccggttttcaaag

SEQ ID NO: 1990090 - DNA, 15 bp, Homo sapiens
gccggttttcaaagg

SEQ ID NO: 1990091 - DNA, 15 bp, Homo sapiens
ccggttttcaaaggg

SEQ ID NO: 1990092 - DNA, 15 bp, Homo sapiens
cggttttcaaaggga

SEQ ID NO: 1990093 - DNA, 15 bp, Homo sapiens
ggttttcaaagggaa

SEQ ID NO: 1990094 - DNA, 15 bp, Homo sapiens
ttttcaaagggaatg

SEQ ID NO: 1990095 - DNA, 15 bp, Homo sapiens
tttcaaagggaatgc

SEQ ID NO: 1990096 - DNA, 15 bp, Homo sapiens
ttcaaagggaatgct

SEQ ID NO: 1990097 - DNA, 15 bp, Homo sapiens
tcaaagggaatgctt

SEQ ID NO: 1990098 - DNA, 15 bp, Homo sapiens
caaagggaatgcttc

SEQ ID NO: 1990099 - DNA, 15 bp, Homo sapiens
aaagggaatgcttcc

SEQ ID NO: 1990100 - DNA, 15 bp, Homo sapiens
aagggaatgcttcca

SEQ ID NO: 1990101 - DNA, 15 bp, Homo sapiens
agggaatgcttccag

SEQ ID NO: 1990102 - DNA, 15 bp, Homo sapiens
gggaatgcttccagt

SEQ ID NO: 1990103 - DNA, 15 bp, Homo sapiens
ggaatgcttccagtt

SEQ ID NO: 1990104 - DNA, 15 bp, Homo sapiens
gaatgcttccagttt

SEQ ID NO: 1990105 - DNA, 15 bp, Homo sapiens
aatgcttccagtttt

SEQ ID NO: 1990106 - DNA, 15 bp, Homo sapiens
atgcttccagttttt

SEQ ID NO: 1990107 - DNA, 15 bp, Homo sapiens
tgcttccagtttttg

SEQ ID NO: 1990108 - DNA, 15 bp, Homo sapiens
gcttccagtttttgc

SEQ ID NO: 1990109 - DNA, 15 bp, Homo sapiens
cccattcagtatgag

SEQ ID NO: 1990110 - DNA, 15 bp, Homo sapiens
ccattcagtatgagt

SEQ ID NO: 1990111 - DNA, 15 bp, Homo sapiens
cattcagtatgagta

SEQ ID NO: 1990112 - DNA, 15 bp, Homo sapiens
attcagtatgagtat

SEQ ID NO: 1990113 - DNA, 15 bp, Homo sapiens
ttcagtatgagtata

SEQ ID NO: 1990114 - DNA, 15 bp, Homo sapiens
tcagtatgagtatac

SEQ ID NO: 1990115 - DNA, 15 bp, Homo sapiens
cagtatgagtatacc

SEQ ID NO: 1990116 - DNA, 15 bp, Homo sapiens
agtatgagtatacct

SEQ ID NO: 1990117 - DNA, 15 bp, Homo sapiens
gtatgagtataccta

SEQ ID NO: 1990118 - DNA, 15 bp, Homo sapiens
tatgagtatacctat

SEQ ID NO: 1990119 - DNA, 15 bp, Homo sapiens
atgagtatacctatg

SEQ ID NO: 1990120 - DNA, 15 bp, Homo sapiens
tgagtatacctatgt

SEQ ID NO: 1990121 - DNA, 15 bp, Homo sapiens
gagtatacctatgta

SEQ ID NO: 1990122 - DNA, 15 bp, Homo sapiens
agtatacctatgtaa

SEQ ID NO: 1990123 - DNA, 15 bp, Homo sapiens
gtatacctatgtaac

SEQ ID NO: 1990124 - DNA, 15 bp, Homo sapiens
tatacctatgtaaca

SEQ ID NO: 1990125 - DNA, 15 bp, Homo sapiens
atacctatgtaacaa

SEQ ID NO: 1990126 - DNA, 15 bp, Homo sapiens
tacctatgtaacaaa

SEQ ID NO: 1990127 - DNA, 15 bp, Homo sapiens
acctatgtaacaaac

SEQ ID NO: 1990128 - DNA, 15 bp, Homo sapiens
cctatgtaacaaacc

SEQ ID NO: 1990129 - DNA, 15 bp, Homo sapiens
ctatgtaacaaacct

SEQ ID NO: 1990130 - DNA, 15 bp, Homo sapiens
acaaacctgcacatt

SEQ ID NO: 1990131 - DNA, 15 bp, Homo sapiens
caaacctgcacattc

SEQ ID NO: 1990132 - DNA, 15 bp, Homo sapiens
aaacctgcacattct

SEQ ID NO: 1990133 - DNA, 15 bp, Homo sapiens
tgcacatgtatccca

SEQ ID NO: 1990134 - DNA, 15 bp, Homo sapiens
gcacatgtatcccag

SEQ ID NO: 1990135 - DNA, 15 bp, Homo sapiens
cacatgtatcccaga

SEQ ID NO: 1990136 - DNA, 15 bp, Homo sapiens
acatgtatcccagaa

SEQ ID NO: 1990137 - DNA, 15 bp, Homo sapiens
catgtatcccagaac

SEQ ID NO: 1990138 - DNA, 15 bp, Homo sapiens
atgtatcccagaact

SEQ ID NO: 1990139 - DNA, 15 bp, Homo sapiens
tgtatcccagaactt

SEQ ID NO: 1990140 - DNA, 15 bp, Homo sapiens
gtatcccagaactta

SEQ ID NO: 1990141 - DNA, 15 bp, Homo sapiens
tatcccagaacttaa

SEQ ID NO: 1990142 - DNA, 15 bp, Homo sapiens
atcccagaacttaaa

SEQ ID NO: 1990143 - DNA, 15 bp, Homo sapiens
tcccagaacttaaag

SEQ ID NO: 1990144 - DNA, 15 bp, Homo sapiens
ccagaacttaaagta

SEQ ID NO: 1990145 - DNA, 15 bp, Homo sapiens
cagaacttaaagtat

SEQ ID NO: 1990146 - DNA, 15 bp, Homo sapiens
agaacttaaagtatt

SEQ ID NO: 1990147 - DNA, 15 bp, Homo sapiens
gaacttaaagtattt

SEQ ID NO: 1990148 - DNA, 15 bp, Homo sapiens
aacttaaagtattta

SEQ ID NO: 1990149 - DNA, 15 bp, Homo sapiens
acttaaagtatttaa

SEQ ID NO: 1990150 - DNA, 15 bp, Homo sapiens
cttaaagtatttaaa

SEQ ID NO: 1990151 - DNA, 15 bp, Homo sapiens
ttaaagtatttaaaa

SEQ ID NO: 1990152 - DNA, 15 bp, Homo sapiens
taaagtatttaaaaa

SEQ ID NO: 1990153 - DNA, 15 bp, Homo sapiens
aaagtatttaaaaaa

SEQ ID NO: 1990154 - DNA, 15 bp, Homo sapiens
aagtatttaaaaaaa

SEQ ID NO: 1990155 - DNA, 15 bp, Homo sapiens
agtatttaaaaaaaa

SEQ ID NO: 1990156 - DNA, 15 bp, Homo sapiens
gtatttaaaaaaaaa

SEQ ID NO: 1990157 - DNA, 15 bp, Homo sapiens
tatttaaaaaaaaaa

SEQ ID NO: 1990158 - DNA, 15 bp, Homo sapiens
aaaaaaaaaaatcag

SEQ ID NO: 1990159 - DNA, 15 bp, Homo sapiens
aaaaaaaaatcagca

SEQ ID NO: 1990160 - DNA, 15 bp, Homo sapiens
aaaaaaaatcagcat

SEQ ID NO: 1990161 - DNA, 15 bp, Homo sapiens
aaaaaaatcagcatc

SEQ ID NO: 1990162 - DNA, 15 bp, Homo sapiens
aaaaaatcagcatct

SEQ ID NO: 1990163 - DNA, 15 bp, Homo sapiens
aaaaatcagcatctg

SEQ ID NO: 1990164 - DNA, 15 bp, Homo sapiens
aaaatcagcatctgg

SEQ ID NO: 1990165 - DNA, 15 bp, Homo sapiens
aaatcagcatctgga

SEQ ID NO: 1990166 - DNA, 15 bp, Homo sapiens
aatcagcatctggac

SEQ ID NO: 1990167 - DNA, 15 bp, Homo sapiens
atcagcatctggact

SEQ ID NO: 1990168 - DNA, 15 bp, Homo sapiens
tcagcatctggactg

SEQ ID NO: 1990169 - DNA, 15 bp, Homo sapiens
cagcatctggactgc

SEQ ID NO: 1990170 - DNA, 15 bp, Homo sapiens
agcatctggactgca

SEQ ID NO: 1990171 - DNA, 15 bp, Homo sapiens
gcatctggactgcag

SEQ ID NO: 1990172 - DNA, 15 bp, Homo sapiens
catctggactgcagt

SEQ ID NO: 1990173 - DNA, 15 bp, Homo sapiens
atctggactgcagtt

SEQ ID NO: 1990174 - DNA, 15 bp, Homo sapiens
tctggactgcagttg

SEQ ID NO: 1990175 - DNA, 15 bp, Homo sapiens
ctggactgcagttga

SEQ ID NO: 1990176 - DNA, 15 bp, Homo sapiens
tggactgcagttgag

SEQ ID NO: 1990177 - DNA, 15 bp, Homo sapiens
ggactgcagttgagc

SEQ ID NO: 1990178 - DNA, 15 bp, Homo sapiens
gactgcagttgagct

SEQ ID NO: 1990179 - DNA, 15 bp, Homo sapiens
actgcagttgagctc

SEQ ID NO: 1990180 - DNA, 15 bp, Homo sapiens
ctgcagttgagctcc

SEQ ID NO: 1990181 - DNA, 15 bp, Homo sapiens
tgcagttgagctccc

SEQ ID NO: 1990182 - DNA, 15 bp, Homo sapiens
gcagttgagctccct

SEQ ID NO: 1990183 - DNA, 15 bp, Homo sapiens
cagttgagctcccta

SEQ ID NO: 1990184 - DNA, 15 bp, Homo sapiens
agttgagctccctaa

SEQ ID NO: 1990185 - DNA, 15 bp, Homo sapiens
gttgagctccctaaa

SEQ ID NO: 1990186 - DNA, 15 bp, Homo sapiens
ttgagctccctaaag

SEQ ID NO: 1990187 - DNA, 15 bp, Homo sapiens
tgagctccctaaaga

SEQ ID NO: 1990188 - DNA, 15 bp, Homo sapiens
gagctccctaaagat

SEQ ID NO: 1990189 - DNA, 15 bp, Homo sapiens
agctccctaaagatc

SEQ ID NO: 1990190 - DNA, 15 bp, Homo sapiens
gctccctaaagatcc

SEQ ID NO: 1990191 - DNA, 15 bp, Homo sapiens
ctccctaaagatcct

SEQ ID NO: 1990192 - DNA, 15 bp, Homo sapiens
tccctaaagatccta

SEQ ID NO: 1990193 - DNA, 15 bp, Homo sapiens
ccctaaagatcctac

SEQ ID NO: 1990194 - DNA, 15 bp, Homo sapiens
cctaaagatcctaca

SEQ ID NO: 1990195 - DNA, 15 bp, Homo sapiens
ctaaagatcctacaa

SEQ ID NO: 1990196 - DNA, 15 bp, Homo sapiens
taaagatcctacaac

SEQ ID NO: 1990197 - DNA, 15 bp, Homo sapiens
aaagatcctacaaca

SEQ ID NO: 1990198 - DNA, 15 bp, Homo sapiens
aagatcctacaacat

SEQ ID NO: 1990199 - DNA, 15 bp, Homo sapiens
agatcctacaacatt

SEQ ID NO: 1990200 - DNA, 15 bp, Homo sapiens
gatcctacaacattt

SEQ ID NO: 1990201 - DNA, 15 bp, Homo sapiens
atcctacaacatttt

SEQ ID NO: 1990202 - DNA, 15 bp, Homo sapiens
tcctacaacattttt

SEQ ID NO: 1990203 - DNA, 15 bp, Homo sapiens
cctacaacattttta

SEQ ID NO: 1990204 - DNA, 15 bp, Homo sapiens
ctacaacatttttaa

SEQ ID NO: 1990205 - DNA, 15 bp, Homo sapiens
tacaacatttttaag

SEQ ID NO: 1990206 - DNA, 15 bp, Homo sapiens
acaacatttttaaga

SEQ ID NO: 1990207 - DNA, 15 bp, Homo sapiens
caacatttttaagaa

SEQ ID NO: 1990208 - DNA, 15 bp, Homo sapiens
aacatttttaagaat

SEQ ID NO: 1990209 - DNA, 15 bp, Homo sapiens
acatttttaagaatc

SEQ ID NO: 1990210 - DNA, 15 bp, Homo sapiens
catttttaagaatcc

SEQ ID NO: 1990211 - DNA, 15 bp, Homo sapiens
atttttaagaatcca

SEQ ID NO: 1990212 - DNA, 15 bp, Homo sapiens
tttttaagaatccag

SEQ ID NO: 1990213 - DNA, 15 bp, Homo sapiens
ttttaagaatccagt

SEQ ID NO: 1990214 - DNA, 15 bp, Homo sapiens
tttaagaatccagtg

SEQ ID NO: 1990215 - DNA, 15 bp, Homo sapiens
ttaagaatccagtgt

SEQ ID NO: 1990216 - DNA, 15 bp, Homo sapiens
taagaatccagtgta

SEQ ID NO: 1990217 - DNA, 15 bp, Homo sapiens
aagaatccagtgtaa

SEQ ID NO: 1990218 - DNA, 15 bp, Homo sapiens
agaatccagtgtaat

SEQ ID NO: 1990219 - DNA, 15 bp, Homo sapiens
gaatccagtgtaatt

SEQ ID NO: 1990220 - DNA, 15 bp, Homo sapiens
aatccagtgtaattt

SEQ ID NO: 1990221 - DNA, 15 bp, Homo sapiens
atccagtgtaatttg

SEQ ID NO: 1990222 - DNA, 15 bp, Homo sapiens
tccagtgtaatttgt

SEQ ID NO: 1990223 - DNA, 15 bp, Homo sapiens
ccagtgtaatttgtg

SEQ ID NO: 1990224 - DNA, 15 bp, Homo sapiens
cagtgtaatttgtga

SEQ ID NO: 1990225 - DNA, 15 bp, Homo sapiens
agtgtaatttgtgat

SEQ ID NO: 1990226 - DNA, 15 bp, Homo sapiens
gtgtaatttgtgatt

SEQ ID NO: 1990227 - DNA, 15 bp, Homo sapiens
tgtaatttgtgattg

SEQ ID NO: 1990228 - DNA, 15 bp, Homo sapiens
gtaatttgtgattgt

SEQ ID NO: 1990229 - DNA, 15 bp, Homo sapiens
taatttgtgattgtt

SEQ ID NO: 1990230 - DNA, 15 bp, Homo sapiens
aatttgtgattgttt

SEQ ID NO: 1990231 - DNA, 15 bp, Homo sapiens
atttgtgattgtttc

SEQ ID NO: 1990232 - DNA, 15 bp, Homo sapiens
tttgtgattgtttca

SEQ ID NO: 1990233 - DNA, 15 bp, Homo sapiens
ttgtgattgtttcaa

SEQ ID NO: 1990234 - DNA, 15 bp, Homo sapiens
tgtgattgtttcaaa

SEQ ID NO: 1990235 - DNA, 15 bp, Homo sapiens
gtgattgtttcaaat

SEQ ID NO: 1990236 - DNA, 15 bp, Homo sapiens
tgattgtttcaaatc

SEQ ID NO: 1990237 - DNA, 15 bp, Homo sapiens
gattgtttcaaatca

SEQ ID NO: 1990238 - DNA, 15 bp, Homo sapiens
attgtttcaaatcaa

SEQ ID NO: 1990239 - DNA, 15 bp, Homo sapiens
ttgtttcaaatcaaa

SEQ ID NO: 1990240 - DNA, 15 bp, Homo sapiens
tgtttcaaatcaaaa

SEQ ID NO: 1990241 - DNA, 15 bp, Homo sapiens
gtttcaaatcaaaag

SEQ ID NO: 1990242 - DNA, 15 bp, Homo sapiens
tttcaaatcaaaagt

SEQ ID NO: 1990243 - DNA, 15 bp, Homo sapiens
ttcaaatcaaaagtt

SEQ ID NO: 1990244 - DNA, 15 bp, Homo sapiens
tcaaatcaaaagtta

SEQ ID NO: 1990245 - DNA, 15 bp, Homo sapiens
caaatcaaaagttaa

SEQ ID NO: 1990246 - DNA, 15 bp, Homo sapiens
aaatcaaaagttaaa

SEQ ID NO: 1990247 - DNA, 15 bp, Homo sapiens
aatcaaaagttaaag

SEQ ID NO: 1990248 - DNA, 15 bp, Homo sapiens
atcaaaagttaaaga

SEQ ID NO: 1990249 - DNA, 15 bp, Homo sapiens
tcaaaagttaaagaa

SEQ ID NO: 1990250 - DNA, 15 bp, Homo sapiens
caaaagttaaagaaa

SEQ ID NO: 1990251 - DNA, 15 bp, Homo sapiens
aaaagttaaagaaag

SEQ ID NO: 1990252 - DNA, 15 bp, Homo sapiens
aaagttaaagaaagc

SEQ ID NO: 1990253 - DNA, 15 bp, Homo sapiens
aagttaaagaaagca

SEQ ID NO: 1990254 - DNA, 15 bp, Homo sapiens
agttaaagaaagcaa

SEQ ID NO: 1990255 - DNA, 15 bp, Homo sapiens
gttaaagaaagcaac

SEQ ID NO: 1990256 - DNA, 15 bp, Homo sapiens
ttaaagaaagcaaca

SEQ ID NO: 1990257 - DNA, 15 bp, Homo sapiens
taaagaaagcaacaa

SEQ ID NO: 1990258 - DNA, 15 bp, Homo sapiens
aaagaaagcaacaat

SEQ ID NO: 1990259 - DNA, 15 bp, Homo sapiens
aagaaagcaacaatt

SEQ ID NO: 1990260 - DNA, 15 bp, Homo sapiens
agaaagcaacaattc

SEQ ID NO: 1990261 - DNA, 15 bp, Homo sapiens
gaaagcaacaattcc

SEQ ID NO: 1990262 - DNA, 15 bp, Homo sapiens
aaagcaacaattccc

SEQ ID NO: 1990263 - DNA, 15 bp, Homo sapiens
aagcaacaattccca

SEQ ID NO: 1990264 - DNA, 15 bp, Homo sapiens
agcaacaattcccac

SEQ ID NO: 1990265 - DNA, 15 bp, Homo sapiens
gcaacaattcccaca

SEQ ID NO: 1990266 - DNA, 15 bp, Homo sapiens
caacaattcccacaa

SEQ ID NO: 1990267 - DNA, 15 bp, Homo sapiens
aacaattcccacaac

SEQ ID NO: 1990268 - DNA, 15 bp, Homo sapiens
acaattcccacaact

SEQ ID NO: 1990269 - DNA, 15 bp, Homo sapiens
caattcccacaactt

SEQ ID NO: 1990270 - DNA, 15 bp, Homo sapiens
aattcccacaacttc

SEQ ID NO: 1990271 - DNA, 15 bp, Homo sapiens
attcccacaacttct

SEQ ID NO: 1990272 - DNA, 15 bp, Homo sapiens
ttcccacaacttcta

SEQ ID NO: 1990273 - DNA, 15 bp, Homo sapiens
tcccacaacttctag

SEQ ID NO: 1990274 - DNA, 15 bp, Homo sapiens
cccacaacttctagg

SEQ ID NO: 1990275 - DNA, 15 bp, Homo sapiens
ccacaacttctaggc

SEQ ID NO: 1990276 - DNA, 15 bp, Homo sapiens
cacaacttctaggcc

SEQ ID NO: 1990277 - DNA, 15 bp, Homo sapiens
acaacttctaggccc

SEQ ID NO: 1990278 - DNA, 15 bp, Homo sapiens
caacttctaggccca

SEQ ID NO: 1990279 - DNA, 15 bp, Homo sapiens
aacttctaggcccaa

SEQ ID NO: 1990280 - DNA, 15 bp, Homo sapiens
acttctaggcccaaa

SEQ ID NO: 1990281 - DNA, 15 bp, Homo sapiens
cttctaggcccaaaa

SEQ ID NO: 1990282 - DNA, 15 bp, Homo sapiens
ttctaggcccaaaaa

SEQ ID NO: 1990283 - DNA, 15 bp, Homo sapiens
tctaggcccaaaaat

SEQ ID NO: 1990284 - DNA, 15 bp, Homo sapiens
ctaggcccaaaaatt

SEQ ID NO: 1990285 - DNA, 15 bp, Homo sapiens
taggcccaaaaattc

SEQ ID NO: 1990286 - DNA, 15 bp, Homo sapiens
aggcccaaaaattct

SEQ ID NO: 1990287 - DNA, 15 bp, Homo sapiens
ggcccaaaaattctt

SEQ ID NO: 1990288 - DNA, 15 bp, Homo sapiens
gcccaaaaattcttt

SEQ ID NO: 1990289 - DNA, 15 bp, Homo sapiens
cccaaaaattctttc

SEQ ID NO: 1990290 - DNA, 15 bp, Homo sapiens
ccaaaaattctttca

SEQ ID NO: 1990291 - DNA, 15 bp, Homo sapiens
caaaaattctttcag

SEQ ID NO: 1990292 - DNA, 15 bp, Homo sapiens
aaaaattctttcaga

SEQ ID NO: 1990293 - DNA, 15 bp, Homo sapiens
aaaattctttcagaa

SEQ ID NO: 1990294 - DNA, 15 bp, Homo sapiens
aaattctttcagaaa

SEQ ID NO: 1990295 - DNA, 15 bp, Homo sapiens
aattctttcagaaac

SEQ ID NO: 1990296 - DNA, 15 bp, Homo sapiens
attctttcagaaact

SEQ ID NO: 1990297 - DNA, 15 bp, Homo sapiens
ttctttcagaaactt

SEQ ID NO: 1990298 - DNA, 15 bp, Homo sapiens
tctttcagaaacttt

SEQ ID NO: 1990299 - DNA, 15 bp, Homo sapiens
ctttcagaaactttt

SEQ ID NO: 1990300 - DNA, 15 bp, Homo sapiens
tttcagaaactttta

SEQ ID NO: 1990301 - DNA, 15 bp, Homo sapiens
ttcagaaacttttat

SEQ ID NO: 1990302 - DNA, 15 bp, Homo sapiens
tcagaaacttttatg

SEQ ID NO: 1990303 - DNA, 15 bp, Homo sapiens
cagaaacttttatgc

SEQ ID NO: 1990304 - DNA, 15 bp, Homo sapiens
agaaacttttatgct

SEQ ID NO: 1990305 - DNA, 15 bp, Homo sapiens
gaaacttttatgctt

SEQ ID NO: 1990306 - DNA, 15 bp, Homo sapiens
aaacttttatgctta

SEQ ID NO: 1990307 - DNA, 15 bp, Homo sapiens
aacttttatgcttat

SEQ ID NO: 1990308 - DNA, 15 bp, Homo sapiens
acttttatgcttata

SEQ ID NO: 1990309 - DNA, 15 bp, Homo sapiens
cttttatgcttataa

SEQ ID NO: 1990310 - DNA, 15 bp, Homo sapiens
ttttatgcttataac

SEQ ID NO: 1990311 - DNA, 15 bp, Homo sapiens
tttatgcttataaca

SEQ ID NO: 1990312 - DNA, 15 bp, Homo sapiens
ttatgcttataacac

SEQ ID NO: 1990313 - DNA, 15 bp, Homo sapiens
tatgcttataacaca

SEQ ID NO: 1990314 - DNA, 15 bp, Homo sapiens
atgcttataacacaa

SEQ ID NO: 1990315 - DNA, 15 bp, Homo sapiens
tgcttataacacaac

SEQ ID NO: 1990316 - DNA, 15 bp, Homo sapiens
gcttataacacaaca

SEQ ID NO: 1990317 - DNA, 15 bp, Homo sapiens
cttataacacaacat

SEQ ID NO: 1990318 - DNA, 15 bp, Homo sapiens
ttataacacaacata

SEQ ID NO: 1990319 - DNA, 15 bp, Homo sapiens
tataacacaacatat

SEQ ID NO: 1990320 - DNA, 15 bp, Homo sapiens
ataacacaacatata

SEQ ID NO: 1990321 - DNA, 15 bp, Homo sapiens
taacacaacatatac

SEQ ID NO: 1990322 - DNA, 15 bp, Homo sapiens
aacacaacatatacc

SEQ ID NO: 1990323 - DNA, 15 bp, Homo sapiens
acacaacatatacca

SEQ ID NO: 1990324 - DNA, 15 bp, Homo sapiens
cacaacatataccaa

SEQ ID NO: 1990325 - DNA, 15 bp, Homo sapiens
acaacatataccaaa

SEQ ID NO: 1990326 - DNA, 15 bp, Homo sapiens
caacatataccaaaa

SEQ ID NO: 1990327 - DNA, 15 bp, Homo sapiens
aacatataccaaaat

SEQ ID NO: 1990328 - DNA, 15 bp, Homo sapiens
acatataccaaaatt

SEQ ID NO: 1990329 - DNA, 15 bp, Homo sapiens
catataccaaaattt

SEQ ID NO: 1990330 - DNA, 15 bp, Homo sapiens
atataccaaaattta

SEQ ID NO: 1990331 - DNA, 15 bp, Homo sapiens
tataccaaaatttaa

SEQ ID NO: 1990332 - DNA, 15 bp, Homo sapiens
ataccaaaatttaat

SEQ ID NO: 1990333 - DNA, 15 bp, Homo sapiens
taccaaaatttaata

SEQ ID NO: 1990334 - DNA, 15 bp, Homo sapiens
accaaaatttaataa

SEQ ID NO: 1990335 - DNA, 15 bp, Homo sapiens
ccaaaatttaataaa

SEQ ID NO: 1990336 - DNA, 15 bp, Homo sapiens
caaaatttaataaaa

SEQ ID NO: 1990337 - DNA, 15 bp, Homo sapiens
aaaatttaataaaac

SEQ ID NO: 1990338 - DNA, 15 bp, Homo sapiens
aaatttaataaaaca

SEQ ID NO: 1990339 - DNA, 15 bp, Homo sapiens
aatttaataaaacac

SEQ ID NO: 1990340 - DNA, 15 bp, Homo sapiens
atttaataaaacact

SEQ ID NO: 1990341 - DNA, 15 bp, Homo sapiens
tttaataaaacacta

SEQ ID NO: 1990342 - DNA, 15 bp, Homo sapiens
ttaataaaacactaa

SEQ ID NO: 1990343 - DNA, 15 bp, Homo sapiens
taataaaacactaaa

SEQ ID NO: 1990344 - DNA, 15 bp, Homo sapiens
aataaaacactaaat

SEQ ID NO: 1990345 - DNA, 15 bp, Homo sapiens
ataaaacactaaatt

SEQ ID NO: 1990346 - DNA, 15 bp, Homo sapiens
taaaacactaaatta

SEQ ID NO: 1990347 - DNA, 15 bp, Homo sapiens
aaaacactaaattaa

SEQ ID NO: 1990348 - DNA, 15 bp, Homo sapiens
aaacactaaattaaa

SEQ ID NO: 1990349 - DNA, 15 bp, Homo sapiens
aacactaaattaaaa

SEQ ID NO: 1990350 - DNA, 15 bp, Homo sapiens
acactaaattaaaag

SEQ ID NO: 1990351 - DNA, 15 bp, Homo sapiens
cactaaattaaaaga

SEQ ID NO: 1990352 - DNA, 15 bp, Homo sapiens
actaaattaaaagag

SEQ ID NO: 1990353 - DNA, 15 bp, Homo sapiens
ctaaattaaaagagt

SEQ ID NO: 1990354 - DNA, 15 bp, Homo sapiens
taaattaaaagagtg

SEQ ID NO: 1990355 - DNA, 15 bp, Homo sapiens
aaattaaaagagtgc

SEQ ID NO: 1990356 - DNA, 15 bp, Homo sapiens
aattaaaagagtgca

SEQ ID NO: 1990357 - DNA, 15 bp, Homo sapiens
attaaaagagtgcat

SEQ ID NO: 1990358 - DNA, 15 bp, Homo sapiens
ttaaaagagtgcatt

SEQ ID NO: 1990359 - DNA, 15 bp, Homo sapiens
taaaagagtgcattt

SEQ ID NO: 1990360 - DNA, 15 bp, Homo sapiens
aaaagagtgcattta

SEQ ID NO: 1990361 - DNA, 15 bp, Homo sapiens
aaagagtgcatttac

SEQ ID NO: 1990362 - DNA, 15 bp, Homo sapiens
aagagtgcatttacc

SEQ ID NO: 1990363 - DNA, 15 bp, Homo sapiens
agagtgcatttacca

SEQ ID NO: 1990364 - DNA, 15 bp, Homo sapiens
gagtgcatttaccac

SEQ ID NO: 1990365 - DNA, 15 bp, Homo sapiens
agtgcatttaccaca

SEQ ID NO: 1990366 - DNA, 15 bp, Homo sapiens
gtgcatttaccacat

SEQ ID NO: 1990367 - DNA, 15 bp, Homo sapiens
tgcatttaccacatt

SEQ ID NO: 1990368 - DNA, 15 bp, Homo sapiens
gcatttaccacattt

SEQ ID NO: 1990369 - DNA, 15 bp, Homo sapiens
catttaccacattta

SEQ ID NO: 1990370 - DNA, 15 bp, Homo sapiens
atttaccacatttaa

SEQ ID NO: 1990371 - DNA, 15 bp, Homo sapiens
tttaccacatttaac

SEQ ID NO: 1990372 - DNA, 15 bp, Homo sapiens
ttaccacatttaacc

SEQ ID NO: 1990373 - DNA, 15 bp, Homo sapiens
taccacatttaacct

SEQ ID NO: 1990374 - DNA, 15 bp, Homo sapiens
accacatttaaccta

SEQ ID NO: 1990375 - DNA, 15 bp, Homo sapiens
ccacatttaacctag

SEQ ID NO: 1990376 - DNA, 15 bp, Homo sapiens
cacatttaacctagt

SEQ ID NO: 1990377 - DNA, 15 bp, Homo sapiens
acatttaacctagtt

SEQ ID NO: 1990378 - DNA, 15 bp, Homo sapiens
catttaacctagtta

SEQ ID NO: 1990379 - DNA, 15 bp, Homo sapiens
atttaacctagttaa

SEQ ID NO: 1990380 - DNA, 15 bp, Homo sapiens
tttaacctagttaaa

SEQ ID NO: 1990381 - DNA, 15 bp, Homo sapiens
ttaacctagttaaaa

SEQ ID NO: 1990382 - DNA, 15 bp, Homo sapiens
taacctagttaaaaa

SEQ ID NO: 1990383 - DNA, 15 bp, Homo sapiens
aacctagttaaaaaa

SEQ ID NO: 1990384 - DNA, 15 bp, Homo sapiens
acctagttaaaaaaa

SEQ ID NO: 1990385 - DNA, 15 bp, Homo sapiens
cctagttaaaaaaaa

SEQ ID NO: 1990386 - DNA, 15 bp, Homo sapiens
ctagttaaaaaaaaa

SEQ ID NO: 1990387 - DNA, 15 bp, Homo sapiens
tagttaaaaaaaaac

SEQ ID NO: 1990388 - DNA, 15 bp, Homo sapiens
agttaaaaaaaaaca

SEQ ID NO: 1990389 - DNA, 15 bp, Homo sapiens
gttaaaaaaaaacac

SEQ ID NO: 1990390 - DNA, 15 bp, Homo sapiens
ttaaaaaaaaacaca

SEQ ID NO: 1990391 - DNA, 15 bp, Homo sapiens
taaaaaaaaacacaa

SEQ ID NO: 1990392 - DNA, 15 bp, Homo sapiens
aaaaaaaaacacaac

SEQ ID NO: 1990393 - DNA, 15 bp, Homo sapiens
aaaaaaaacacaaca

SEQ ID NO: 1990394 - DNA, 15 bp, Homo sapiens
aaaaaaacacaacaa

SEQ ID NO: 1990395 - DNA, 15 bp, Homo sapiens
aaaaaacacaacaac

SEQ ID NO: 1990396 - DNA, 15 bp, Homo sapiens
aaaaacacaacaacc

SEQ ID NO: 1990397 - DNA, 15 bp, Homo sapiens
aaaacacaacaacca

SEQ ID NO: 1990398 - DNA, 15 bp, Homo sapiens
aaacacaacaaccat

SEQ ID NO: 1990399 - DNA, 15 bp, Homo sapiens
aacacaacaaccatg

SEQ ID NO: 1990400 - DNA, 15 bp, Homo sapiens
acacaacaaccatgt

SEQ ID NO: 1990401 - DNA, 15 bp, Homo sapiens
cacaacaaccatgta

SEQ ID NO: 1990402 - DNA, 15 bp, Homo sapiens
acaacaaccatgtat

SEQ ID NO: 1990403 - DNA, 15 bp, Homo sapiens
caacaaccatgtatt

SEQ ID NO: 1990404 - DNA, 15 bp, Homo sapiens
aacaaccatgtatta

SEQ ID NO: 1990405 - DNA, 15 bp, Homo sapiens
acaaccatgtattag

SEQ ID NO: 1990406 - DNA, 15 bp, Homo sapiens
caaccatgtattagt

SEQ ID NO: 1990407 - DNA, 15 bp, Homo sapiens
aaccatgtattagtt

SEQ ID NO: 1990408 - DNA, 15 bp, Homo sapiens
accatgtattagttt

SEQ ID NO: 1990409 - DNA, 15 bp, Homo sapiens
ccatgtattagtttc

SEQ ID NO: 1990410 - DNA, 15 bp, Homo sapiens
catgtattagtttca

SEQ ID NO: 1990411 - DNA, 15 bp, Homo sapiens
atgtattagtttcat

SEQ ID NO: 1990412 - DNA, 15 bp, Homo sapiens
tgtattagtttcata

SEQ ID NO: 1990413 - DNA, 15 bp, Homo sapiens
gtattagtttcatat

SEQ ID NO: 1990414 - DNA, 15 bp, Homo sapiens
tattagtttcatatg

SEQ ID NO: 1990415 - DNA, 15 bp, Homo sapiens
attagtttcatatgc

SEQ ID NO: 1990416 - DNA, 15 bp, Homo sapiens
ttagtttcatatgca

SEQ ID NO: 1990417 - DNA, 15 bp, Homo sapiens
tagtttcatatgcat

SEQ ID NO: 1990418 - DNA, 15 bp, Homo sapiens
agtttcatatgcata

SEQ ID NO: 1990419 - DNA, 15 bp, Homo sapiens
gtttcatatgcatac

SEQ ID NO: 1990420 - DNA, 15 bp, Homo sapiens
tttcatatgcatacc

SEQ ID NO: 1990421 - DNA, 15 bp, Homo sapiens
ttcatatgcatacca

SEQ ID NO: 1990422 - DNA, 15 bp, Homo sapiens
tcatatgcataccat

SEQ ID NO: 1990423 - DNA, 15 bp, Homo sapiens
catatgcataccata

SEQ ID NO: 1990424 - DNA, 15 bp, Homo sapiens
atatgcataccatat

SEQ ID NO: 1990425 - DNA, 15 bp, Homo sapiens
tatgcataccatatt

SEQ ID NO: 1990426 - DNA, 15 bp, Homo sapiens
atgcataccatattt

SEQ ID NO: 1990427 - DNA, 15 bp, Homo sapiens
tgcataccatatttg

SEQ ID NO: 1990428 - DNA, 15 bp, Homo sapiens
gcataccatatttga

SEQ ID NO: 1990429 - DNA, 15 bp, Homo sapiens
cataccatatttgaa

SEQ ID NO: 1990430 - DNA, 15 bp, Homo sapiens
ataccatatttgaaa

SEQ ID NO: 1990431 - DNA, 15 bp, Homo sapiens
taccatatttgaaag

SEQ ID NO: 1990432 - DNA, 15 bp, Homo sapiens
accatatttgaaagc

SEQ ID NO: 1990433 - DNA, 15 bp, Homo sapiens
ccatatttgaaagcg

SEQ ID NO: 1990434 - DNA, 15 bp, Homo sapiens
catatttgaaagcgt

SEQ ID NO: 1990435 - DNA, 15 bp, Homo sapiens
atatttgaaagcgta

SEQ ID NO: 1990436 - DNA, 15 bp, Homo sapiens
tatttgaaagcgtaa

SEQ ID NO: 1990437 - DNA, 15 bp, Homo sapiens
atttgaaagcgtaat

SEQ ID NO: 1990438 - DNA, 15 bp, Homo sapiens
tttgaaagcgtaatt

SEQ ID NO: 1990439 - DNA, 15 bp, Homo sapiens
ttgaaagcgtaattc

SEQ ID NO: 1990440 - DNA, 15 bp, Homo sapiens
tgaaagcgtaattca

SEQ ID NO: 1990441 - DNA, 15 bp, Homo sapiens
gaaagcgtaattcaa

SEQ ID NO: 1990442 - DNA, 15 bp, Homo sapiens
aaagcgtaattcaat

SEQ ID NO: 1990443 - DNA, 15 bp, Homo sapiens
aagcgtaattcaatt

SEQ ID NO: 1990444 - DNA, 15 bp, Homo sapiens
agcgtaattcaattt

SEQ ID NO: 1990445 - DNA, 15 bp, Homo sapiens
gcgtaattcaatttc

SEQ ID NO: 1990446 - DNA, 15 bp, Homo sapiens
cgtaattcaatttct

SEQ ID NO: 1990447 - DNA, 15 bp, Homo sapiens
gtaattcaatttctc

SEQ ID NO: 1990448 - DNA, 15 bp, Homo sapiens
taattcaatttctct

SEQ ID NO: 1990449 - DNA, 15 bp, Homo sapiens
aattcaatttctcta

SEQ ID NO: 1990450 - DNA, 15 bp, Homo sapiens
attcaatttctctat

SEQ ID NO: 1990451 - DNA, 15 bp, Homo sapiens
ttcaatttctctata

SEQ ID NO: 1990452 - DNA, 15 bp, Homo sapiens
tcaatttctctataa

SEQ ID NO: 1990453 - DNA, 15 bp, Homo sapiens
caatttctctataat

SEQ ID NO: 1990454 - DNA, 15 bp, Homo sapiens
aatttctctataatt

SEQ ID NO: 1990455 - DNA, 15 bp, Homo sapiens
atttctctataattc

SEQ ID NO: 1990456 - DNA, 15 bp, Homo sapiens
tttctctataattca

SEQ ID NO: 1990457 - DNA, 15 bp, Homo sapiens
ttctctataattcag

SEQ ID NO: 1990458 - DNA, 15 bp, Homo sapiens
tctctataattcagc

SEQ ID NO: 1990459 - DNA, 15 bp, Homo sapiens
ctctataattcagcc

SEQ ID NO: 1990460 - DNA, 15 bp, Homo sapiens
tctataattcagccc

SEQ ID NO: 1990461 - DNA, 15 bp, Homo sapiens
ctataattcagccct

SEQ ID NO: 1990462 - DNA, 15 bp, Homo sapiens
tataattcagccctt

SEQ ID NO: 1990463 - DNA, 15 bp, Homo sapiens
ataattcagccctta

SEQ ID NO: 1990464 - DNA, 15 bp, Homo sapiens
taattcagcccttat

SEQ ID NO: 1990465 - DNA, 15 bp, Homo sapiens
aattcagcccttatc

SEQ ID NO: 1990466 - DNA, 15 bp, Homo sapiens
attcagcccttatcc

SEQ ID NO: 1990467 - DNA, 15 bp, Homo sapiens
ttcagcccttatccc

SEQ ID NO: 1990468 - DNA, 15 bp, Homo sapiens
tcagcccttatccct

SEQ ID NO: 1990469 - DNA, 15 bp, Homo sapiens
cagcccttatccctt

SEQ ID NO: 1990470 - DNA, 15 bp, Homo sapiens
agcccttatccctta

SEQ ID NO: 1990471 - DNA, 15 bp, Homo sapiens
gcccttatcccttaa

SEQ ID NO: 1990472 - DNA, 15 bp, Homo sapiens
cccttatcccttaag

SEQ ID NO: 1990473 - DNA, 15 bp, Homo sapiens
ccttatcccttaagt

SEQ ID NO: 1990474 - DNA, 15 bp, Homo sapiens
cttatcccttaagtc

SEQ ID NO: 1990475 - DNA, 15 bp, Homo sapiens
ttatcccttaagtca

SEQ ID NO: 1990476 - DNA, 15 bp, Homo sapiens
tatcccttaagtcag

SEQ ID NO: 1990477 - DNA, 15 bp, Homo sapiens
atcccttaagtcagg

SEQ ID NO: 1990478 - DNA, 15 bp, Homo sapiens
tcccttaagtcaggc

SEQ ID NO: 1990479 - DNA, 15 bp, Homo sapiens
cccttaagtcaggct

SEQ ID NO: 1990480 - DNA, 15 bp, Homo sapiens
ccttaagtcaggctg

SEQ ID NO: 1990481 - DNA, 15 bp, Homo sapiens
cttaagtcaggctgc

SEQ ID NO: 1990482 - DNA, 15 bp, Homo sapiens
ttaagtcaggctgca

SEQ ID NO: 1990483 - DNA, 15 bp, Homo sapiens
taagtcaggctgcac

SEQ ID NO: 1990484 - DNA, 15 bp, Homo sapiens
aagtcaggctgcacc

SEQ ID NO: 1990485 - DNA, 15 bp, Homo sapiens
agtcaggctgcacct

SEQ ID NO: 1990486 - DNA, 15 bp, Homo sapiens
gtcaggctgcaccta

SEQ ID NO: 1990487 - DNA, 15 bp, Homo sapiens
tcaggctgcacctaa

SEQ ID NO: 1990488 - DNA, 15 bp, Homo sapiens
caggctgcacctaac

SEQ ID NO: 1990489 - DNA, 15 bp, Homo sapiens
aggctgcacctaaca

SEQ ID NO: 1990490 - DNA, 15 bp, Homo sapiens
ggctgcacctaacag

SEQ ID NO: 1990491 - DNA, 15 bp, Homo sapiens
gctgcacctaacagc

SEQ ID NO: 1990492 - DNA, 15 bp, Homo sapiens
ctgcacctaacagcc

SEQ ID NO: 1990493 - DNA, 15 bp, Homo sapiens
tgcacctaacagcct

SEQ ID NO: 1990494 - DNA, 15 bp, Homo sapiens
gcacctaacagccta

SEQ ID NO: 1990495 - DNA, 15 bp, Homo sapiens
cacctaacagcctaa

SEQ ID NO: 1990496 - DNA, 15 bp, Homo sapiens
acctaacagcctaat

SEQ ID NO: 1990497 - DNA, 15 bp, Homo sapiens
cctaacagcctaatt

SEQ ID NO: 1990498 - DNA, 15 bp, Homo sapiens
ctaacagcctaattc

SEQ ID NO: 1990499 - DNA, 15 bp, Homo sapiens
taacagcctaattca

SEQ ID NO: 1990500 - DNA, 15 bp, Homo sapiens
aacagcctaattcac

SEQ ID NO: 1990501 - DNA, 15 bp, Homo sapiens
acagcctaattcaca

SEQ ID NO: 1990502 - DNA, 15 bp, Homo sapiens
cagcctaattcacaa

SEQ ID NO: 1990503 - DNA, 15 bp, Homo sapiens
agcctaattcacaaa

SEQ ID NO: 1990504 - DNA, 15 bp, Homo sapiens
gcctaattcacaaac

SEQ ID NO: 1990505 - DNA, 15 bp, Homo sapiens
cctaattcacaaaca

SEQ ID NO: 1990506 - DNA, 15 bp, Homo sapiens
ctaattcacaaacat

SEQ ID NO: 1990507 - DNA, 15 bp, Homo sapiens
taattcacaaacatt

SEQ ID NO: 1990508 - DNA, 15 bp, Homo sapiens
aattcacaaacattg

SEQ ID NO: 1990509 - DNA, 15 bp, Homo sapiens
attcacaaacattga

SEQ ID NO: 1990510 - DNA, 15 bp, Homo sapiens
ttcacaaacattgag

SEQ ID NO: 1990511 - DNA, 15 bp, Homo sapiens
tcacaaacattgagt

SEQ ID NO: 1990512 - DNA, 15 bp, Homo sapiens
cacaaacattgagtt

SEQ ID NO: 1990513 - DNA, 15 bp, Homo sapiens
acaaacattgagttt

SEQ ID NO: 1990514 - DNA, 15 bp, Homo sapiens
caaacattgagtttt

SEQ ID NO: 1990515 - DNA, 15 bp, Homo sapiens
aaacattgagtttta

SEQ ID NO: 1990516 - DNA, 15 bp, Homo sapiens
aacattgagttttaa

SEQ ID NO: 1990517 - DNA, 15 bp, Homo sapiens
acattgagttttaaa

SEQ ID NO: 1990518 - DNA, 15 bp, Homo sapiens
cattgagttttaaac

SEQ ID NO: 1990519 - DNA, 15 bp, Homo sapiens
attgagttttaaacc

SEQ ID NO: 1990520 - DNA, 15 bp, Homo sapiens
ttgagttttaaacca

SEQ ID NO: 1990521 - DNA, 15 bp, Homo sapiens
tgagttttaaaccat

SEQ ID NO: 1990522 - DNA, 15 bp, Homo sapiens
gagttttaaaccata

SEQ ID NO: 1990523 - DNA, 15 bp, Homo sapiens
agttttaaaccatat

SEQ ID NO: 1990524 - DNA, 15 bp, Homo sapiens
gttttaaaccatatt

SEQ ID NO: 1990525 - DNA, 15 bp, Homo sapiens
ttttaaaccatattt

SEQ ID NO: 1990526 - DNA, 15 bp, Homo sapiens
tttaaaccatatttt

SEQ ID NO: 1990527 - DNA, 15 bp, Homo sapiens
ttaaaccatatttta

SEQ ID NO: 1990528 - DNA, 15 bp, Homo sapiens
taaaccatattttag

SEQ ID NO: 1990529 - DNA, 15 bp, Homo sapiens
aaaccatattttagc

SEQ ID NO: 1990530 - DNA, 15 bp, Homo sapiens
aaccatattttagca

SEQ ID NO: 1990531 - DNA, 15 bp, Homo sapiens
accatattttagcat

SEQ ID NO: 1990532 - DNA, 15 bp, Homo sapiens
ccatattttagcatt

SEQ ID NO: 1990533 - DNA, 15 bp, Homo sapiens
catattttagcattt

SEQ ID NO: 1990534 - DNA, 15 bp, Homo sapiens
atattttagcatttt

SEQ ID NO: 1990535 - DNA, 15 bp, Homo sapiens
tattttagcattttt

SEQ ID NO: 1990536 - DNA, 15 bp, Homo sapiens
attttagcatttttc

SEQ ID NO: 1990537 - DNA, 15 bp, Homo sapiens
ttttagcatttttcc

SEQ ID NO: 1990538 - DNA, 15 bp, Homo sapiens
tttagcatttttcca

SEQ ID NO: 1990539 - DNA, 15 bp, Homo sapiens
ttagcatttttccag

SEQ ID NO: 1990540 - DNA, 15 bp, Homo sapiens
tagcatttttccagg

SEQ ID NO: 1990541 - DNA, 15 bp, Homo sapiens
agcatttttccaggt

SEQ ID NO: 1990542 - DNA, 15 bp, Homo sapiens
gcatttttccaggtg

SEQ ID NO: 1990543 - DNA, 15 bp, Homo sapiens
catttttccaggtgt

SEQ ID NO: 1990544 - DNA, 15 bp, Homo sapiens
atttttccaggtgtt

SEQ ID NO: 1990545 - DNA, 15 bp, Homo sapiens
tttttccaggtgttc

SEQ ID NO: 1990546 - DNA, 15 bp, Homo sapiens
ttttccaggtgttca

SEQ ID NO: 1990547 - DNA, 15 bp, Homo sapiens
tttccaggtgttcaa

SEQ ID NO: 1990548 - DNA, 15 bp, Homo sapiens
ttccaggtgttcaaa

SEQ ID NO: 1990549 - DNA, 15 bp, Homo sapiens
tccaggtgttcaaaa

SEQ ID NO: 1990550 - DNA, 15 bp, Homo sapiens
ccaggtgttcaaaaa

SEQ ID NO: 1990551 - DNA, 15 bp, Homo sapiens
caggtgttcaaaaag

SEQ ID NO: 1990552 - DNA, 15 bp, Homo sapiens
aggtgttcaaaaaga

SEQ ID NO: 1990553 - DNA, 15 bp, Homo sapiens
ggtgttcaaaaagaa

SEQ ID NO: 1990554 - DNA, 15 bp, Homo sapiens
gtgttcaaaaagaaa

SEQ ID NO: 1990555 - DNA, 15 bp, Homo sapiens
tgttcaaaaagaaat

SEQ ID NO: 1990556 - DNA, 15 bp, Homo sapiens
gttcaaaaagaaatg

SEQ ID NO: 1990557 - DNA, 15 bp, Homo sapiens
ttcaaaaagaaatgc

SEQ ID NO: 1990558 - DNA, 15 bp, Homo sapiens
tcaaaaagaaatgcc

SEQ ID NO: 1990559 - DNA, 15 bp, Homo sapiens
caaaaagaaatgcca

SEQ ID NO: 1990560 - DNA, 15 bp, Homo sapiens
aaaaagaaatgccaa

SEQ ID NO: 1990561 - DNA, 15 bp, Homo sapiens
aaaagaaatgccaaa

SEQ ID NO: 1990562 - DNA, 15 bp, Homo sapiens
aaagaaatgccaaag

SEQ ID NO: 1990563 - DNA, 15 bp, Homo sapiens
aagaaatgccaaaga

SEQ ID NO: 1990564 - DNA, 15 bp, Homo sapiens
agaaatgccaaagaa

SEQ ID NO: 1990565 - DNA, 15 bp, Homo sapiens
gaaatgccaaagaat

SEQ ID NO: 1990566 - DNA, 15 bp, Homo sapiens
aaatgccaaagaata

SEQ ID NO: 1990567 - DNA, 15 bp, Homo sapiens
aatgccaaagaatac

SEQ ID NO: 1990568 - DNA, 15 bp, Homo sapiens
atgccaaagaatacc

SEQ ID NO: 1990569 - DNA, 15 bp, Homo sapiens
tgccaaagaatacct

SEQ ID NO: 1990570 - DNA, 15 bp, Homo sapiens
gccaaagaataccta

SEQ ID NO: 1990571 - DNA, 15 bp, Homo sapiens
ccaaagaatacctaa

SEQ ID NO: 1990572 - DNA, 15 bp, Homo sapiens
caaagaatacctaaa

SEQ ID NO: 1990573 - DNA, 15 bp, Homo sapiens
aaagaatacctaaaa

SEQ ID NO: 1990574 - DNA, 15 bp, Homo sapiens
aagaatacctaaaaa

SEQ ID NO: 1990575 - DNA, 15 bp, Homo sapiens
agaatacctaaaaat

SEQ ID NO: 1990576 - DNA, 15 bp, Homo sapiens
gaatacctaaaaata

SEQ ID NO: 1990577 - DNA, 15 bp, Homo sapiens
aatacctaaaaatac

SEQ ID NO: 1990578 - DNA, 15 bp, Homo sapiens
atacctaaaaataca

SEQ ID NO: 1990579 - DNA, 15 bp, Homo sapiens
tacctaaaaatacat

SEQ ID NO: 1990580 - DNA, 15 bp, Homo sapiens
acctaaaaatacata

SEQ ID NO: 1990581 - DNA, 15 bp, Homo sapiens
cctaaaaatacatac

SEQ ID NO: 1990582 - DNA, 15 bp, Homo sapiens
ctaaaaatacatacc

SEQ ID NO: 1990583 - DNA, 15 bp, Homo sapiens
taaaaatacatacca

SEQ ID NO: 1990584 - DNA, 15 bp, Homo sapiens
aaaaatacataccat

SEQ ID NO: 1990585 - DNA, 15 bp, Homo sapiens
aaaatacataccatg

SEQ ID NO: 1990586 - DNA, 15 bp, Homo sapiens
aaatacataccatga

SEQ ID NO: 1990587 - DNA, 15 bp, Homo sapiens
aatacataccatgat

SEQ ID NO: 1990588 - DNA, 15 bp, Homo sapiens
atacataccatgatt

SEQ ID NO: 1990589 - DNA, 15 bp, Homo sapiens
tacataccatgattt

SEQ ID NO: 1990590 - DNA, 15 bp, Homo sapiens
acataccatgatttg

SEQ ID NO: 1990591 - DNA, 15 bp, Homo sapiens
cataccatgatttgg

SEQ ID NO: 1990592 - DNA, 15 bp, Homo sapiens
ataccatgatttggt

SEQ ID NO: 1990593 - DNA, 15 bp, Homo sapiens
taccatgatttggtt

SEQ ID NO: 1990594 - DNA, 15 bp, Homo sapiens
accatgatttggtta

SEQ ID NO: 1990595 - DNA, 15 bp, Homo sapiens
ccatgatttggttag

SEQ ID NO: 1990596 - DNA, 15 bp, Homo sapiens
catgatttggttaga

SEQ ID NO: 1990597 - DNA, 15 bp, Homo sapiens
atgatttggttagaa

SEQ ID NO: 1990598 - DNA, 15 bp, Homo sapiens
tgatttggttagaag

SEQ ID NO: 1990599 - DNA, 15 bp, Homo sapiens
gatttggttagaagg

SEQ ID NO: 1990600 - DNA, 15 bp, Homo sapiens
atttggttagaaggg

SEQ ID NO: 1990601 - DNA, 15 bp, Homo sapiens
tttggttagaaggga

SEQ ID NO: 1990602 - DNA, 15 bp, Homo sapiens
ttggttagaagggaa

SEQ ID NO: 1990603 - DNA, 15 bp, Homo sapiens
tggttagaagggaat

SEQ ID NO: 1990604 - DNA, 15 bp, Homo sapiens
ggttagaagggaata

SEQ ID NO: 1990605 - DNA, 15 bp, Homo sapiens
gttagaagggaatag

SEQ ID NO: 1990606 - DNA, 15 bp, Homo sapiens
ttagaagggaatagg

SEQ ID NO: 1990607 - DNA, 15 bp, Homo sapiens
tagaagggaatagga

SEQ ID NO: 1990608 - DNA, 15 bp, Homo sapiens
agaagggaataggaa

SEQ ID NO: 1990609 - DNA, 15 bp, Homo sapiens
gaagggaataggaat

SEQ ID NO: 1990610 - DNA, 15 bp, Homo sapiens
aagggaataggaatg

SEQ ID NO: 1990611 - DNA, 15 bp, Homo sapiens
agggaataggaatgg

SEQ ID NO: 1990612 - DNA, 15 bp, Homo sapiens
gggaataggaatggt

SEQ ID NO: 1990613 - DNA, 15 bp, Homo sapiens
ggaataggaatggta

SEQ ID NO: 1990614 - DNA, 15 bp, Homo sapiens
gaataggaatggtaa

SEQ ID NO: 1990615 - DNA, 15 bp, Homo sapiens
aataggaatggtaaa

SEQ ID NO: 1990616 - DNA, 15 bp, Homo sapiens
ataggaatggtaaac

SEQ ID NO: 1990617 - DNA, 15 bp, Homo sapiens
taggaatggtaaaca

SEQ ID NO: 1990618 - DNA, 15 bp, Homo sapiens
aggaatggtaaacaa

SEQ ID NO: 1990619 - DNA, 15 bp, Homo sapiens
ggaatggtaaacaag

SEQ ID NO: 1990620 - DNA, 15 bp, Homo sapiens
gaatggtaaacaagg

SEQ ID NO: 1990621 - DNA, 15 bp, Homo sapiens
aatggtaaacaaggg

SEQ ID NO: 1990622 - DNA, 15 bp, Homo sapiens
atggtaaacaaggga

SEQ ID NO: 1990623 - DNA, 15 bp, Homo sapiens
tggtaaacaagggac

SEQ ID NO: 1990624 - DNA, 15 bp, Homo sapiens
ggtaaacaagggaca

SEQ ID NO: 1990625 - DNA, 15 bp, Homo sapiens
gtaaacaagggacat

SEQ ID NO: 1990626 - DNA, 15 bp, Homo sapiens
taaacaagggacatt

SEQ ID NO: 1990627 - DNA, 15 bp, Homo sapiens
aaacaagggacattc

SEQ ID NO: 1990628 - DNA, 15 bp, Homo sapiens
aacaagggacattct

SEQ ID NO: 1990629 - DNA, 15 bp, Homo sapiens
acaagggacattctg

SEQ ID NO: 1990630 - DNA, 15 bp, Homo sapiens
caagggacattctgc

SEQ ID NO: 1990631 - DNA, 15 bp, Homo sapiens
aagggacattctgcc

SEQ ID NO: 1990632 - DNA, 15 bp, Homo sapiens
agggacattctgcca

SEQ ID NO: 1990633 - DNA, 15 bp, Homo sapiens
gggacattctgccat

SEQ ID NO: 1990634 - DNA, 15 bp, Homo sapiens
ggacattctgccata

SEQ ID NO: 1990635 - DNA, 15 bp, Homo sapiens
gacattctgccatat

SEQ ID NO: 1990636 - DNA, 15 bp, Homo sapiens
acattctgccatata

SEQ ID NO: 1990637 - DNA, 15 bp, Homo sapiens
cattctgccatataa

SEQ ID NO: 1990638 - DNA, 15 bp, Homo sapiens
attctgccatataag

SEQ ID NO: 1990639 - DNA, 15 bp, Homo sapiens
ttctgccatataaga

SEQ ID NO: 1990640 - DNA, 15 bp, Homo sapiens
tctgccatataagac

SEQ ID NO: 1990641 - DNA, 15 bp, Homo sapiens
ctgccatataagacc

SEQ ID NO: 1990642 - DNA, 15 bp, Homo sapiens
tgccatataagacca

SEQ ID NO: 1990643 - DNA, 15 bp, Homo sapiens
gccatataagaccag

SEQ ID NO: 1990644 - DNA, 15 bp, Homo sapiens
ccatataagaccagt

SEQ ID NO: 1990645 - DNA, 15 bp, Homo sapiens
catataagaccagtt

SEQ ID NO: 1990646 - DNA, 15 bp, Homo sapiens
atataagaccagtta

SEQ ID NO: 1990647 - DNA, 15 bp, Homo sapiens
tataagaccagttac

SEQ ID NO: 1990648 - DNA, 15 bp, Homo sapiens
ataagaccagttacg

SEQ ID NO: 1990649 - DNA, 15 bp, Homo sapiens
taagaccagttacgt

SEQ ID NO: 1990650 - DNA, 15 bp, Homo sapiens
aagaccagttacgtg

SEQ ID NO: 1990651 - DNA, 15 bp, Homo sapiens
agaccagttacgtga

SEQ ID NO: 1990652 - DNA, 15 bp, Homo sapiens
gaccagttacgtgac

SEQ ID NO: 1990653 - DNA, 15 bp, Homo sapiens
accagttacgtgaca

SEQ ID NO: 1990654 - DNA, 15 bp, Homo sapiens
ccagttacgtgacaa

SEQ ID NO: 1990655 - DNA, 15 bp, Homo sapiens
cagttacgtgacaaa

SEQ ID NO: 1990656 - DNA, 15 bp, Homo sapiens
agttacgtgacaaat

SEQ ID NO: 1990657 - DNA, 15 bp, Homo sapiens
gttacgtgacaaata

SEQ ID NO: 1990658 - DNA, 15 bp, Homo sapiens
ttacgtgacaaatac

SEQ ID NO: 1990659 - DNA, 15 bp, Homo sapiens
tacgtgacaaatact

SEQ ID NO: 1990660 - DNA, 15 bp, Homo sapiens
acgtgacaaatactt

SEQ ID NO: 1990661 - DNA, 15 bp, Homo sapiens
cgtgacaaatacttc

SEQ ID NO: 1990662 - DNA, 15 bp, Homo sapiens
gtgacaaatacttct

SEQ ID NO: 1990663 - DNA, 15 bp, Homo sapiens
tgacaaatacttctc

SEQ ID NO: 1990664 - DNA, 15 bp, Homo sapiens
gacaaatacttctct

SEQ ID NO: 1990665 - DNA, 15 bp, Homo sapiens
acaaatacttctctt

SEQ ID NO: 1990666 - DNA, 15 bp, Homo sapiens
caaatacttctcttc

SEQ ID NO: 1990667 - DNA, 15 bp, Homo sapiens
aaatacttctcttca

SEQ ID NO: 1990668 - DNA, 15 bp, Homo sapiens
aatacttctcttcaa

SEQ ID NO: 1990669 - DNA, 15 bp, Homo sapiens
atacttctcttcaag

SEQ ID NO: 1990670 - DNA, 15 bp, Homo sapiens
tacttctcttcaaga

SEQ ID NO: 1990671 - DNA, 15 bp, Homo sapiens
acttctcttcaagat

SEQ ID NO: 1990672 - DNA, 15 bp, Homo sapiens
cttctcttcaagatc

SEQ ID NO: 1990673 - DNA, 15 bp, Homo sapiens
ttctcttcaagatca

SEQ ID NO: 1990674 - DNA, 15 bp, Homo sapiens
tctcttcaagatcat

SEQ ID NO: 1990675 - DNA, 15 bp, Homo sapiens
ctcttcaagatcatg

SEQ ID NO: 1990676 - DNA, 15 bp, Homo sapiens
tcttcaagatcatgg

SEQ ID NO: 1990677 - DNA, 15 bp, Homo sapiens
cttcaagatcatgga

SEQ ID NO: 1990678 - DNA, 15 bp, Homo sapiens
ttcaagatcatggaa

SEQ ID NO: 1990679 - DNA, 15 bp, Homo sapiens
tcaagatcatggaag

SEQ ID NO: 1990680 - DNA, 15 bp, Homo sapiens
caagatcatggaaga

SEQ ID NO: 1990681 - DNA, 15 bp, Homo sapiens
aagatcatggaagat

SEQ ID NO: 1990682 - DNA, 15 bp, Homo sapiens
agatcatggaagatt

SEQ ID NO: 1990683 - DNA, 15 bp, Homo sapiens
gatcatggaagattt

SEQ ID NO: 1990684 - DNA, 15 bp, Homo sapiens
atcatggaagatttt

SEQ ID NO: 1990685 - DNA, 15 bp, Homo sapiens
tcatggaagatttta

SEQ ID NO: 1990686 - DNA, 15 bp, Homo sapiens
catggaagattttat

SEQ ID NO: 1990687 - DNA, 15 bp, Homo sapiens
atggaagattttatt

SEQ ID NO: 1990688 - DNA, 15 bp, Homo sapiens
tggaagattttattt

SEQ ID NO: 1990689 - DNA, 15 bp, Homo sapiens
ggaagattttatttc

SEQ ID NO: 1990690 - DNA, 15 bp, Homo sapiens
gaagattttatttca

SEQ ID NO: 1990691 - DNA, 15 bp, Homo sapiens
aagattttatttcat

SEQ ID NO: 1990692 - DNA, 15 bp, Homo sapiens
agattttatttcata

SEQ ID NO: 1990693 - DNA, 15 bp, Homo sapiens
gattttatttcatat

SEQ ID NO: 1990694 - DNA, 15 bp, Homo sapiens
attttatttcatata

SEQ ID NO: 1990695 - DNA, 15 bp, Homo sapiens
ttttatttcatatat

SEQ ID NO: 1990696 - DNA, 15 bp, Homo sapiens
tttatttcatatatt

SEQ ID NO: 1990697 - DNA, 15 bp, Homo sapiens
ttatttcatatattc

SEQ ID NO: 1990698 - DNA, 15 bp, Homo sapiens
tatttcatatattca

SEQ ID NO: 1990699 - DNA, 15 bp, Homo sapiens
atttcatatattcat

SEQ ID NO: 1990700 - DNA, 15 bp, Homo sapiens
tttcatatattcatt

SEQ ID NO: 1990701 - DNA, 15 bp, Homo sapiens
ttcatatattcattc

SEQ ID NO: 1990702 - DNA, 15 bp, Homo sapiens
tcatatattcattca

SEQ ID NO: 1990703 - DNA, 15 bp, Homo sapiens
catatattcattcat

SEQ ID NO: 1990704 - DNA, 15 bp, Homo sapiens
atatattcattcatt

SEQ ID NO: 1990705 - DNA, 15 bp, Homo sapiens
tatattcattcattc

SEQ ID NO: 1990706 - DNA, 15 bp, Homo sapiens
atattcattcattca

SEQ ID NO: 1990707 - DNA, 15 bp, Homo sapiens
tattcattcattcaa

SEQ ID NO: 1990708 - DNA, 15 bp, Homo sapiens
attcattcaacaaat

SEQ ID NO: 1990709 - DNA, 15 bp, Homo sapiens
ttcattcaacaaata

SEQ ID NO: 1990710 - DNA, 15 bp, Homo sapiens
tcattcaacaaatat

SEQ ID NO: 1990711 - DNA, 15 bp, Homo sapiens
cattcaacaaatatt

SEQ ID NO: 1990712 - DNA, 15 bp, Homo sapiens
ttcaacaaatattta

SEQ ID NO: 1990713 - DNA, 15 bp, Homo sapiens
tcaacaaatatttat

SEQ ID NO: 1990714 - DNA, 15 bp, Homo sapiens
caacaaatatttatt

SEQ ID NO: 1990715 - DNA, 15 bp, Homo sapiens
aacaaatatttattg

SEQ ID NO: 1990716 - DNA, 15 bp, Homo sapiens
acaaatatttattga

SEQ ID NO: 1990717 - DNA, 15 bp, Homo sapiens
aatatttattgagtc

SEQ ID NO: 1990718 - DNA, 15 bp, Homo sapiens
atatttattgagtcc

SEQ ID NO: 1990719 - DNA, 15 bp, Homo sapiens
tatttattgagtccc

SEQ ID NO: 1990720 - DNA, 15 bp, Homo sapiens
atttattgagtccct

SEQ ID NO: 1990721 - DNA, 15 bp, Homo sapiens
tttattgagtccctt

SEQ ID NO: 1990722 - DNA, 15 bp, Homo sapiens
ttattgagtcccttc

SEQ ID NO: 1990723 - DNA, 15 bp, Homo sapiens
tattgagtcccttct

SEQ ID NO: 1990724 - DNA, 15 bp, Homo sapiens
attgagtcccttcta

SEQ ID NO: 1990725 - DNA, 15 bp, Homo sapiens
ttgagtcccttctat

SEQ ID NO: 1990726 - DNA, 15 bp, Homo sapiens
tgagtcccttctatg

SEQ ID NO: 1990727 - DNA, 15 bp, Homo sapiens
gagtcccttctatgt

SEQ ID NO: 1990728 - DNA, 15 bp, Homo sapiens
agtcccttctatgtg

SEQ ID NO: 1990729 - DNA, 15 bp, Homo sapiens
gtcccttctatgtgc

SEQ ID NO: 1990730 - DNA, 15 bp, Homo sapiens
tcccttctatgtgca

SEQ ID NO: 1990731 - DNA, 15 bp, Homo sapiens
cccttctatgtgcaa

SEQ ID NO: 1990732 - DNA, 15 bp, Homo sapiens
ccttctatgtgcaaa

SEQ ID NO: 1990733 - DNA, 15 bp, Homo sapiens
cttctatgtgcaaat

SEQ ID NO: 1990734 - DNA, 15 bp, Homo sapiens
ttctatgtgcaaatc

SEQ ID NO: 1990735 - DNA, 15 bp, Homo sapiens
tctatgtgcaaatca

SEQ ID NO: 1990736 - DNA, 15 bp, Homo sapiens
ctatgtgcaaatcac

SEQ ID NO: 1990737 - DNA, 15 bp, Homo sapiens
tatgtgcaaatcact

SEQ ID NO: 1990738 - DNA, 15 bp, Homo sapiens
atgtgcaaatcacta

SEQ ID NO: 1990739 - DNA, 15 bp, Homo sapiens
tgtgcaaatcactat

SEQ ID NO: 1990740 - DNA, 15 bp, Homo sapiens
gtgcaaatcactatt

SEQ ID NO: 1990741 - DNA, 15 bp, Homo sapiens
tgcaaatcactattc

SEQ ID NO: 1990742 - DNA, 15 bp, Homo sapiens
gcaaatcactattct

SEQ ID NO: 1990743 - DNA, 15 bp, Homo sapiens
caaatcactattctt

SEQ ID NO: 1990744 - DNA, 15 bp, Homo sapiens
aaatcactattcttt

SEQ ID NO: 1990745 - DNA, 15 bp, Homo sapiens
aatcactattctttt

SEQ ID NO: 1990746 - DNA, 15 bp, Homo sapiens
atcactattcttttt

SEQ ID NO: 1990747 - DNA, 15 bp, Homo sapiens
tcactattctttttt

SEQ ID NO: 1990748 - DNA, 15 bp, Homo sapiens
cactattcttttttt

SEQ ID NO: 1990749 - DNA, 15 bp, Homo sapiens
actattctttttttt

SEQ ID NO: 1990750 - DNA, 15 bp, Homo sapiens
ctattcttttttttt

SEQ ID NO: 1990751 - DNA, 15 bp, Homo sapiens
tattctttttttttt

SEQ ID NO: 1990752 - DNA, 15 bp, Homo sapiens
ttcgctctgtcaccc

SEQ ID NO: 1990753 - DNA, 15 bp, Homo sapiens
aggctggagtgcaga

SEQ ID NO: 1990754 - DNA, 15 bp, Homo sapiens
ggctggagtgcagag

SEQ ID NO: 1990755 - DNA, 15 bp, Homo sapiens
gctggagtgcagagg

SEQ ID NO: 1990756 - DNA, 15 bp, Homo sapiens
ctggagtgcagaggc

SEQ ID NO: 1990757 - DNA, 15 bp, Homo sapiens
tggagtgcagaggca

SEQ ID NO: 1990758 - DNA, 15 bp, Homo sapiens
ggagtgcagaggcac

SEQ ID NO: 1990759 - DNA, 15 bp, Homo sapiens
gagtgcagaggcaca

SEQ ID NO: 1990760 - DNA, 15 bp, Homo sapiens
agtgcagaggcacaa

SEQ ID NO: 1990761 - DNA, 15 bp, Homo sapiens
gtgcagaggcacaat

SEQ ID NO: 1990762 - DNA, 15 bp, Homo sapiens
tgcagaggcacaatc

SEQ ID NO: 1990763 - DNA, 15 bp, Homo sapiens
gcagaggcacaatct

SEQ ID NO: 1990764 - DNA, 15 bp, Homo sapiens
cagaggcacaatctt

SEQ ID NO: 1990765 - DNA, 15 bp, Homo sapiens
agaggcacaatcttg

SEQ ID NO: 1990766 - DNA, 15 bp, Homo sapiens
gaggcacaatcttgg

SEQ ID NO: 1990767 - DNA, 15 bp, Homo sapiens
aggcacaatcttggc

SEQ ID NO: 1990768 - DNA, 15 bp, Homo sapiens
aagctccgcctcccg

SEQ ID NO: 1990769 - DNA, 15 bp, Homo sapiens
agctccgcctcccgt

SEQ ID NO: 1990770 - DNA, 15 bp, Homo sapiens
gctccgcctcccgtg

SEQ ID NO: 1990771 - DNA, 15 bp, Homo sapiens
ctccgcctcccgtgt

SEQ ID NO: 1990772 - DNA, 15 bp, Homo sapiens
tccgcctcccgtgtt

SEQ ID NO: 1990773 - DNA, 15 bp, Homo sapiens
ccgcctcccgtgttc

SEQ ID NO: 1990774 - DNA, 15 bp, Homo sapiens
cgcctcccgtgttca

SEQ ID NO: 1990775 - DNA, 15 bp, Homo sapiens
gcctcccgtgttcac

SEQ ID NO: 1990776 - DNA, 15 bp, Homo sapiens
cctcccgtgttcacg

SEQ ID NO: 1990777 - DNA, 15 bp, Homo sapiens
ctcccgtgttcacgc

SEQ ID NO: 1990778 - DNA, 15 bp, Homo sapiens
tcccgtgttcacgcc

SEQ ID NO: 1990779 - DNA, 15 bp, Homo sapiens
cccgtgttcacgcca

SEQ ID NO: 1990780 - DNA, 15 bp, Homo sapiens
ccgtgttcacgccat

SEQ ID NO: 1990781 - DNA, 15 bp, Homo sapiens
cgtgttcacgccatt

SEQ ID NO: 1990782 - DNA, 15 bp, Homo sapiens
gtgttcacgccattc

SEQ ID NO: 1990783 - DNA, 15 bp, Homo sapiens
tgttcacgccattct

SEQ ID NO: 1990784 - DNA, 15 bp, Homo sapiens
acgccattctcctgt

SEQ ID NO: 1990785 - DNA, 15 bp, Homo sapiens
cgccattctcctgtc

SEQ ID NO: 1990786 - DNA, 15 bp, Homo sapiens
gccattctcctgtct

SEQ ID NO: 1990787 - DNA, 15 bp, Homo sapiens
ccattctcctgtctc

SEQ ID NO: 1990788 - DNA, 15 bp, Homo sapiens
cattctcctgtctca

SEQ ID NO: 1990789 - DNA, 15 bp, Homo sapiens
attctcctgtctcag

SEQ ID NO: 1990790 - DNA, 15 bp, Homo sapiens
ttctcctgtctcagc

SEQ ID NO: 1990791 - DNA, 15 bp, Homo sapiens
tctcctgtctcagcc

SEQ ID NO: 1990792 - DNA, 15 bp, Homo sapiens
tcctgtctcagcctc

SEQ ID NO: 1990793 - DNA, 15 bp, Homo sapiens
cctgtctcagcctcc

SEQ ID NO: 1990794 - DNA, 15 bp, Homo sapiens
ctgtctcagcctccc

SEQ ID NO: 1990795 - DNA, 15 bp, Homo sapiens
tgtctcagcctcccg

SEQ ID NO: 1990796 - DNA, 15 bp, Homo sapiens
gtctcagcctcccga

SEQ ID NO: 1990797 - DNA, 15 bp, Homo sapiens
tgggactataggcac

SEQ ID NO: 1990798 - DNA, 15 bp, Homo sapiens
gggactataggcacc

SEQ ID NO: 1990799 - DNA, 15 bp, Homo sapiens
ggactataggcaccc

SEQ ID NO: 1990800 - DNA, 15 bp, Homo sapiens
gactataggcaccca

SEQ ID NO: 1990801 - DNA, 15 bp, Homo sapiens
actataggcacccag

SEQ ID NO: 1990802 - DNA, 15 bp, Homo sapiens
ctataggcacccagc

SEQ ID NO: 1990803 - DNA, 15 bp, Homo sapiens
tataggcacccagct

SEQ ID NO: 1990804 - DNA, 15 bp, Homo sapiens
ataggcacccagctg

SEQ ID NO: 1990805 - DNA, 15 bp, Homo sapiens
taggcacccagctgt

SEQ ID NO: 1990806 - DNA, 15 bp, Homo sapiens
aggcacccagctgtg

SEQ ID NO: 1990807 - DNA, 15 bp, Homo sapiens
ggcacccagctgtgg

SEQ ID NO: 1990808 - DNA, 15 bp, Homo sapiens
gcacccagctgtggg

SEQ ID NO: 1990809 - DNA, 15 bp, Homo sapiens
cacccagctgtgggt

SEQ ID NO: 1990810 - DNA, 15 bp, Homo sapiens
acccagctgtgggtt

SEQ ID NO: 1990811 - DNA, 15 bp, Homo sapiens
cccagctgtgggttt

SEQ ID NO: 1990812 - DNA, 15 bp, Homo sapiens
ccagctgtgggtttg

SEQ ID NO: 1990813 - DNA, 15 bp, Homo sapiens
cagctgtgggtttgt

SEQ ID NO: 1990814 - DNA, 15 bp, Homo sapiens
agctgtgggtttgtt

SEQ ID NO: 1990815 - DNA, 15 bp, Homo sapiens
gctgtgggtttgtta

SEQ ID NO: 1990816 - DNA, 15 bp, Homo sapiens
ctgtgggtttgttat

SEQ ID NO: 1990817 - DNA, 15 bp, Homo sapiens
tgtgggtttgttata

SEQ ID NO: 1990818 - DNA, 15 bp, Homo sapiens
gtgggtttgttataa

SEQ ID NO: 1990819 - DNA, 15 bp, Homo sapiens
tgggtttgttataaa

SEQ ID NO: 1990820 - DNA, 15 bp, Homo sapiens
gggtttgttataaat

SEQ ID NO: 1990821 - DNA, 15 bp, Homo sapiens
ggtttgttataaata

SEQ ID NO: 1990822 - DNA, 15 bp, Homo sapiens
gtttgttataaatag

SEQ ID NO: 1990823 - DNA, 15 bp, Homo sapiens
tttgttataaatagc

SEQ ID NO: 1990824 - DNA, 15 bp, Homo sapiens
ttgttataaatagct

SEQ ID NO: 1990825 - DNA, 15 bp, Homo sapiens
tgttataaatagctc

SEQ ID NO: 1990826 - DNA, 15 bp, Homo sapiens
gttataaatagctct

SEQ ID NO: 1990827 - DNA, 15 bp, Homo sapiens
ttataaatagctctt

SEQ ID NO: 1990828 - DNA, 15 bp, Homo sapiens
tataaatagctctta

SEQ ID NO: 1990829 - DNA, 15 bp, Homo sapiens
tattattttgagatg

SEQ ID NO: 1990830 - DNA, 15 bp, Homo sapiens
attattttgagatgc

SEQ ID NO: 1990831 - DNA, 15 bp, Homo sapiens
ttattttgagatgct

SEQ ID NO: 1990832 - DNA, 15 bp, Homo sapiens
tattttgagatgctc

SEQ ID NO: 1990833 - DNA, 15 bp, Homo sapiens
attttgagatgctct

SEQ ID NO: 1990834 - DNA, 15 bp, Homo sapiens
ttttgagatgctctc

SEQ ID NO: 1990835 - DNA, 15 bp, Homo sapiens
tttgagatgctctcc

SEQ ID NO: 1990836 - DNA, 15 bp, Homo sapiens
ttgagatgctctcca

SEQ ID NO: 1990837 - DNA, 15 bp, Homo sapiens
tgagatgctctccat

SEQ ID NO: 1990838 - DNA, 15 bp, Homo sapiens
gagatgctctccatc

SEQ ID NO: 1990839 - DNA, 15 bp, Homo sapiens
agatgctctccatca

SEQ ID NO: 1990840 - DNA, 15 bp, Homo sapiens
gatgctctccatcag

SEQ ID NO: 1990841 - DNA, 15 bp, Homo sapiens
atgctctccatcagt

SEQ ID NO: 1990842 - DNA, 15 bp, Homo sapiens
tgctctccatcagta

SEQ ID NO: 1990843 - DNA, 15 bp, Homo sapiens
gctctccatcagtac

SEQ ID NO: 1990844 - DNA, 15 bp, Homo sapiens
ctctccatcagtacc

SEQ ID NO: 1990845 - DNA, 15 bp, Homo sapiens
tctccatcagtacct

SEQ ID NO: 1990846 - DNA, 15 bp, Homo sapiens
ctccatcagtaccta

SEQ ID NO: 1990847 - DNA, 15 bp, Homo sapiens
tccatcagtacctag

SEQ ID NO: 1990848 - DNA, 15 bp, Homo sapiens
ccatcagtacctagt

SEQ ID NO: 1990849 - DNA, 15 bp, Homo sapiens
catcagtacctagtt

SEQ ID NO: 1990850 - DNA, 15 bp, Homo sapiens
atcagtacctagttt

SEQ ID NO: 1990851 - DNA, 15 bp, Homo sapiens
tcagtacctagttta

SEQ ID NO: 1990852 - DNA, 15 bp, Homo sapiens
cagtacctagtttat

SEQ ID NO: 1990853 - DNA, 15 bp, Homo sapiens
agtacctagtttatt

SEQ ID NO: 1990854 - DNA, 15 bp, Homo sapiens
gtacctagtttattg

SEQ ID NO: 1990855 - DNA, 15 bp, Homo sapiens
tacctagtttattga

SEQ ID NO: 1990856 - DNA, 15 bp, Homo sapiens
acctagtttattgag

SEQ ID NO: 1990857 - DNA, 15 bp, Homo sapiens
cctagtttattgaga

SEQ ID NO: 1990858 - DNA, 15 bp, Homo sapiens
ctagtttattgagag

SEQ ID NO: 1990859 - DNA, 15 bp, Homo sapiens
tagtttattgagagt

SEQ ID NO: 1990860 - DNA, 15 bp, Homo sapiens
agtttattgagagtt

SEQ ID NO: 1990861 - DNA, 15 bp, Homo sapiens
gtttattgagagttt

SEQ ID NO: 1990862 - DNA, 15 bp, Homo sapiens
tttattgagagtttt

SEQ ID NO: 1990863 - DNA, 15 bp, Homo sapiens
ttattgagagttttt

SEQ ID NO: 1990864 - DNA, 15 bp, Homo sapiens
tattgagagttttta

SEQ ID NO: 1990865 - DNA, 15 bp, Homo sapiens
attgagagtttttat

SEQ ID NO: 1990866 - DNA, 15 bp, Homo sapiens
ttgagagtttttatc

SEQ ID NO: 1990867 - DNA, 15 bp, Homo sapiens
tgagagtttttatca

SEQ ID NO: 1990868 - DNA, 15 bp, Homo sapiens
gagagtttttatcat

SEQ ID NO: 1990869 - DNA, 15 bp, Homo sapiens
agagtttttatcatg

SEQ ID NO: 1990870 - DNA, 15 bp, Homo sapiens
gagtttttatcatga

SEQ ID NO: 1990871 - DNA, 15 bp, Homo sapiens
agtttttatcatgaa

SEQ ID NO: 1990872 - DNA, 15 bp, Homo sapiens
gtttttatcatgaag

SEQ ID NO: 1990873 - DNA, 15 bp, Homo sapiens
tttttatcatgaagg

SEQ ID NO: 1990874 - DNA, 15 bp, Homo sapiens
ttttatcatgaaggg

SEQ ID NO: 1990875 - DNA, 15 bp, Homo sapiens
tttatcatgaagggg

SEQ ID NO: 1990876 - DNA, 15 bp, Homo sapiens
ttatcatgaaggggt

SEQ ID NO: 1990877 - DNA, 15 bp, Homo sapiens
tatcatgaaggggtg

SEQ ID NO: 1990878 - DNA, 15 bp, Homo sapiens
atcatgaaggggtgt

SEQ ID NO: 1990879 - DNA, 15 bp, Homo sapiens
tcatgaaggggtgtt

SEQ ID NO: 1990880 - DNA, 15 bp, Homo sapiens
catgaaggggtgttg

SEQ ID NO: 1990881 - DNA, 15 bp, Homo sapiens
atgaaggggtgttga

SEQ ID NO: 1990882 - DNA, 15 bp, Homo sapiens
tgaaggggtgttgaa

SEQ ID NO: 1990883 - DNA, 15 bp, Homo sapiens
gaaggggtgttgaat

SEQ ID NO: 1990884 - DNA, 15 bp, Homo sapiens
aaggggtgttgaatt

SEQ ID NO: 1990885 - DNA, 15 bp, Homo sapiens
aggggtgttgaattt

SEQ ID NO: 1990886 - DNA, 15 bp, Homo sapiens
ggggtgttgaatttt

SEQ ID NO: 1990887 - DNA, 15 bp, Homo sapiens
gggtgttgaatttta

SEQ ID NO: 1990888 - DNA, 15 bp, Homo sapiens
ggtgttgaattttat

SEQ ID NO: 1990889 - DNA, 15 bp, Homo sapiens
gtgttgaattttatc

SEQ ID NO: 1990890 - DNA, 15 bp, Homo sapiens
tgttgaattttatca

SEQ ID NO: 1990891 - DNA, 15 bp, Homo sapiens
gttgaattttatcaa

SEQ ID NO: 1990892 - DNA, 15 bp, Homo sapiens
ttgaattttatcaaa

SEQ ID NO: 1990893 - DNA, 15 bp, Homo sapiens
tgaattttatcaaag

SEQ ID NO: 1990894 - DNA, 15 bp, Homo sapiens
gaattttatcaaagg

SEQ ID NO: 1990895 - DNA, 15 bp, Homo sapiens
aattttatcaaaggc

SEQ ID NO: 1990896 - DNA, 15 bp, Homo sapiens
attttatcaaaggcc

SEQ ID NO: 1990897 - DNA, 15 bp, Homo sapiens
ttttatcaaaggcct

SEQ ID NO: 1990898 - DNA, 15 bp, Homo sapiens
tttatcaaaggcctt

SEQ ID NO: 1990899 - DNA, 15 bp, Homo sapiens
ttatcaaaggccttt

SEQ ID NO: 1990900 - DNA, 15 bp, Homo sapiens
tatcaaaggcctttt

SEQ ID NO: 1990901 - DNA, 15 bp, Homo sapiens
atcaaaggccttttc

SEQ ID NO: 1990902 - DNA, 15 bp, Homo sapiens
tcaaaggccttttct

SEQ ID NO: 1990903 - DNA, 15 bp, Homo sapiens
caaaggccttttctt

SEQ ID NO: 1990904 - DNA, 15 bp, Homo sapiens
aaaggccttttcttc

SEQ ID NO: 1990905 - DNA, 15 bp, Homo sapiens
aaggccttttcttca

SEQ ID NO: 1990906 - DNA, 15 bp, Homo sapiens
aggccttttcttcat

SEQ ID NO: 1990907 - DNA, 15 bp, Homo sapiens
ggccttttcttcatc

SEQ ID NO: 1990908 - DNA, 15 bp, Homo sapiens
gccttttcttcatct

SEQ ID NO: 1990909 - DNA, 15 bp, Homo sapiens
cttttcttcatctat

SEQ ID NO: 1990910 - DNA, 15 bp, Homo sapiens
ttttcttcatctatt

SEQ ID NO: 1990911 - DNA, 15 bp, Homo sapiens
tttcttcatctattg

SEQ ID NO: 1990912 - DNA, 15 bp, Homo sapiens
ttcttcatctattga

SEQ ID NO: 1990913 - DNA, 15 bp, Homo sapiens
tcttcatctattgag

SEQ ID NO: 1990914 - DNA, 15 bp, Homo sapiens
cttcatctattgaga

SEQ ID NO: 1990915 - DNA, 15 bp, Homo sapiens
ttcatctattgagat

SEQ ID NO: 1990916 - DNA, 15 bp, Homo sapiens
tcatctattgagata

SEQ ID NO: 1990917 - DNA, 15 bp, Homo sapiens
atctattgagataat

SEQ ID NO: 1990918 - DNA, 15 bp, Homo sapiens
tctattgagataatc

SEQ ID NO: 1990919 - DNA, 15 bp, Homo sapiens
ctattgagataatcg

SEQ ID NO: 1990920 - DNA, 15 bp, Homo sapiens
tattgagataatcgt

SEQ ID NO: 1990921 - DNA, 15 bp, Homo sapiens
attgagataatcgtg

SEQ ID NO: 1990922 - DNA, 15 bp, Homo sapiens
ttgagataatcgtgt

SEQ ID NO: 1990923 - DNA, 15 bp, Homo sapiens
tgagataatcgtgtg

SEQ ID NO: 1990924 - DNA, 15 bp, Homo sapiens
gagataatcgtgtgg

SEQ ID NO: 1990925 - DNA, 15 bp, Homo sapiens
agataatcgtgtggt

SEQ ID NO: 1990926 - DNA, 15 bp, Homo sapiens
gataatcgtgtggtt

SEQ ID NO: 1990927 - DNA, 15 bp, Homo sapiens
ataatcgtgtggttt

SEQ ID NO: 1990928 - DNA, 15 bp, Homo sapiens
taatcgtgtggtttt

SEQ ID NO: 1990929 - DNA, 15 bp, Homo sapiens
aatcgtgtggttttt

SEQ ID NO: 1990930 - DNA, 15 bp, Homo sapiens
atcgtgtggtttttg

SEQ ID NO: 1990931 - DNA, 15 bp, Homo sapiens
tcgtgtggtttttgt

SEQ ID NO: 1990932 - DNA, 15 bp, Homo sapiens
cgtgtggtttttgtc

SEQ ID NO: 1990933 - DNA, 15 bp, Homo sapiens
gtgtggtttttgtca

SEQ ID NO: 1990934 - DNA, 15 bp, Homo sapiens
tgtggtttttgtcat

SEQ ID NO: 1990935 - DNA, 15 bp, Homo sapiens
gtggtttttgtcatt

SEQ ID NO: 1990936 - DNA, 15 bp, Homo sapiens
tggtttttgtcattg

SEQ ID NO: 1990937 - DNA, 15 bp, Homo sapiens
ggtttttgtcattgg

SEQ ID NO: 1990938 - DNA, 15 bp, Homo sapiens
gtttttgtcattggt

SEQ ID NO: 1990939 - DNA, 15 bp, Homo sapiens
tttttgtcattggtt

SEQ ID NO: 1990940 - DNA, 15 bp, Homo sapiens
ttttgtcattggttc

SEQ ID NO: 1990941 - DNA, 15 bp, Homo sapiens
tttgtcattggttct

SEQ ID NO: 1990942 - DNA, 15 bp, Homo sapiens
ttgtcattggttctg

SEQ ID NO: 1990943 - DNA, 15 bp, Homo sapiens
tgtcattggttctgt

SEQ ID NO: 1990944 - DNA, 15 bp, Homo sapiens
gtcattggttctgtt

SEQ ID NO: 1990945 - DNA, 15 bp, Homo sapiens
tcattggttctgttt

SEQ ID NO: 1990946 - DNA, 15 bp, Homo sapiens
cattggttctgttta

SEQ ID NO: 1990947 - DNA, 15 bp, Homo sapiens
attggttctgtttat

SEQ ID NO: 1990948 - DNA, 15 bp, Homo sapiens
ttggttctgtttatg

SEQ ID NO: 1990949 - DNA, 15 bp, Homo sapiens
tggttctgtttatgt

SEQ ID NO: 1990950 - DNA, 15 bp, Homo sapiens
ggttctgtttatgtg

SEQ ID NO: 1990951 - DNA, 15 bp, Homo sapiens
gttctgtttatgtga

SEQ ID NO: 1990952 - DNA, 15 bp, Homo sapiens
ttctgtttatgtgat

SEQ ID NO: 1990953 - DNA, 15 bp, Homo sapiens
tctgtttatgtgatg

SEQ ID NO: 1990954 - DNA, 15 bp, Homo sapiens
ctgtttatgtgatgg

SEQ ID NO: 1990955 - DNA, 15 bp, Homo sapiens
tgtttatgtgatgga

SEQ ID NO: 1990956 - DNA, 15 bp, Homo sapiens
gtttatgtgatggat

SEQ ID NO: 1990957 - DNA, 15 bp, Homo sapiens
tttatgtgatggatt

SEQ ID NO: 1990958 - DNA, 15 bp, Homo sapiens
ttatgtgatggatta

SEQ ID NO: 1990959 - DNA, 15 bp, Homo sapiens
tatgtgatggattac

SEQ ID NO: 1990960 - DNA, 15 bp, Homo sapiens
atgtgatggattaca

SEQ ID NO: 1990961 - DNA, 15 bp, Homo sapiens
tgtgatggattacat

SEQ ID NO: 1990962 - DNA, 15 bp, Homo sapiens
gtgatggattacatt

SEQ ID NO: 1990963 - DNA, 15 bp, Homo sapiens
tgatggattacattt

SEQ ID NO: 1990964 - DNA, 15 bp, Homo sapiens
gatggattacattta

SEQ ID NO: 1990965 - DNA, 15 bp, Homo sapiens
atggattacatttat

SEQ ID NO: 1990966 - DNA, 15 bp, Homo sapiens
tggattacatttatt

SEQ ID NO: 1990967 - DNA, 15 bp, Homo sapiens
ggattacatttattg

SEQ ID NO: 1990968 - DNA, 15 bp, Homo sapiens
gattacatttattga

SEQ ID NO: 1990969 - DNA, 15 bp, Homo sapiens
attacatttattgat

SEQ ID NO: 1990970 - DNA, 15 bp, Homo sapiens
ttacatttattgatt

SEQ ID NO: 1990971 - DNA, 15 bp, Homo sapiens
tacatttattgattt

SEQ ID NO: 1990972 - DNA, 15 bp, Homo sapiens
acatttattgattta

SEQ ID NO: 1990973 - DNA, 15 bp, Homo sapiens
catttattgatttac

SEQ ID NO: 1990974 - DNA, 15 bp, Homo sapiens
atttattgatttaca

SEQ ID NO: 1990975 - DNA, 15 bp, Homo sapiens
tttattgatttacat

SEQ ID NO: 1990976 - DNA, 15 bp, Homo sapiens
ttattgatttacata

SEQ ID NO: 1990977 - DNA, 15 bp, Homo sapiens
tattgatttacatat

SEQ ID NO: 1990978 - DNA, 15 bp, Homo sapiens
attgatttacatatg

SEQ ID NO: 1990979 - DNA, 15 bp, Homo sapiens
ttgatttacatatgt

SEQ ID NO: 1990980 - DNA, 15 bp, Homo sapiens
tgatttacatatgtt

SEQ ID NO: 1990981 - DNA, 15 bp, Homo sapiens
gatttacatatgttg

SEQ ID NO: 1990982 - DNA, 15 bp, Homo sapiens
atttacatatgttga

SEQ ID NO: 1990983 - DNA, 15 bp, Homo sapiens
tttacatatgttgag

SEQ ID NO: 1990984 - DNA, 15 bp, Homo sapiens
ttacatatgttgagc

SEQ ID NO: 1990985 - DNA, 15 bp, Homo sapiens
tacatatgttgagcc

SEQ ID NO: 1990986 - DNA, 15 bp, Homo sapiens
acatatgttgagcca

SEQ ID NO: 1990987 - DNA, 15 bp, Homo sapiens
catatgttgagccag

SEQ ID NO: 1990988 - DNA, 15 bp, Homo sapiens
atatgttgagccagc

SEQ ID NO: 1990989 - DNA, 15 bp, Homo sapiens
tatgttgagccagcc

SEQ ID NO: 1990990 - DNA, 15 bp, Homo sapiens
atgttgagccagcct

SEQ ID NO: 1990991 - DNA, 15 bp, Homo sapiens
tgttgagccagcctt

SEQ ID NO: 1990992 - DNA, 15 bp, Homo sapiens
gttgagccagccttg

SEQ ID NO: 1990993 - DNA, 15 bp, Homo sapiens
ttgagccagccttgc

SEQ ID NO: 1990994 - DNA, 15 bp, Homo sapiens
tgagccagccttgca

SEQ ID NO: 1990995 - DNA, 15 bp, Homo sapiens
gagccagccttgcat

SEQ ID NO: 1990996 - DNA, 15 bp, Homo sapiens
agccagccttgcatc

SEQ ID NO: 1990997 - DNA, 15 bp, Homo sapiens
gccagccttgcatcc

SEQ ID NO: 1990998 - DNA, 15 bp, Homo sapiens
ccagccttgcatccc

SEQ ID NO: 1990999 - DNA, 15 bp, Homo sapiens
cagccttgcatccca

SEQ ID NO: 1991000 - DNA, 15 bp, Homo sapiens
agccttgcatcccag

SEQ ID NO: 1991001 - DNA, 15 bp, Homo sapiens
gccttgcatcccagt

SEQ ID NO: 1991002 - DNA, 15 bp, Homo sapiens
ccttgcatcccagtg

SEQ ID NO: 1991003 - DNA, 15 bp, Homo sapiens
cttgcatcccagtga

SEQ ID NO: 1991004 - DNA, 15 bp, Homo sapiens
ttgcatcccagtgat

SEQ ID NO: 1991005 - DNA, 15 bp, Homo sapiens
tgcatcccagtgatg

SEQ ID NO: 1991006 - DNA, 15 bp, Homo sapiens
gcatcccagtgatga

SEQ ID NO: 1991007 - DNA, 15 bp, Homo sapiens
catcccagtgatgaa

SEQ ID NO: 1991008 - DNA, 15 bp, Homo sapiens
atcccagtgatgaag

SEQ ID NO: 1991009 - DNA, 15 bp, Homo sapiens
tcccagtgatgaagc

SEQ ID NO: 1991010 - DNA, 15 bp, Homo sapiens
cccagtgatgaagct

SEQ ID NO: 1991011 - DNA, 15 bp, Homo sapiens
ccagtgatgaagctg

SEQ ID NO: 1991012 - DNA, 15 bp, Homo sapiens
cagtgatgaagctga

SEQ ID NO: 1991013 - DNA, 15 bp, Homo sapiens
agtgatgaagctgac

SEQ ID NO: 1991014 - DNA, 15 bp, Homo sapiens
gtgatgaagctgact

SEQ ID NO: 1991015 - DNA, 15 bp, Homo sapiens
tgatgaagctgactt

SEQ ID NO: 1991016 - DNA, 15 bp, Homo sapiens
gatgaagctgacttg

SEQ ID NO: 1991017 - DNA, 15 bp, Homo sapiens
atgaagctgacttga

SEQ ID NO: 1991018 - DNA, 15 bp, Homo sapiens
tgaagctgacttgat

SEQ ID NO: 1991019 - DNA, 15 bp, Homo sapiens
gaagctgacttgatc

SEQ ID NO: 1991020 - DNA, 15 bp, Homo sapiens
aagctgacttgatca

SEQ ID NO: 1991021 - DNA, 15 bp, Homo sapiens
agctgacttgatcat

SEQ ID NO: 1991022 - DNA, 15 bp, Homo sapiens
gctgacttgatcatg

SEQ ID NO: 1991023 - DNA, 15 bp, Homo sapiens
ctgacttgatcatgg

SEQ ID NO: 1991024 - DNA, 15 bp, Homo sapiens
tgacttgatcatggg

SEQ ID NO: 1991025 - DNA, 15 bp, Homo sapiens
gacttgatcatgggg

SEQ ID NO: 1991026 - DNA, 15 bp, Homo sapiens
acttgatcatggggg

SEQ ID NO: 1991027 - DNA, 15 bp, Homo sapiens
cttgatcatggggga

SEQ ID NO: 1991028 - DNA, 15 bp, Homo sapiens
ttgatcatgggggat

SEQ ID NO: 1991029 - DNA, 15 bp, Homo sapiens
tgatcatgggggata

SEQ ID NO: 1991030 - DNA, 15 bp, Homo sapiens
gatcatgggggataa

SEQ ID NO: 1991031 - DNA, 15 bp, Homo sapiens
atcatgggggataag

SEQ ID NO: 1991032 - DNA, 15 bp, Homo sapiens
tcatgggggataagc

SEQ ID NO: 1991033 - DNA, 15 bp, Homo sapiens
catgggggataagct

SEQ ID NO: 1991034 - DNA, 15 bp, Homo sapiens
atgggggataagctt

SEQ ID NO: 1991035 - DNA, 15 bp, Homo sapiens
tgggggataagcttt

SEQ ID NO: 1991036 - DNA, 15 bp, Homo sapiens
gggggataagctttt

SEQ ID NO: 1991037 - DNA, 15 bp, Homo sapiens
ggggataagcttttt

SEQ ID NO: 1991038 - DNA, 15 bp, Homo sapiens
gggataagctttttg

SEQ ID NO: 1991039 - DNA, 15 bp, Homo sapiens
ggataagctttttgg

SEQ ID NO: 1991040 - DNA, 15 bp, Homo sapiens
gataagctttttggt

SEQ ID NO: 1991041 - DNA, 15 bp, Homo sapiens
ataagctttttggtg

SEQ ID NO: 1991042 - DNA, 15 bp, Homo sapiens
taagctttttggtgt

SEQ ID NO: 1991043 - DNA, 15 bp, Homo sapiens
aagctttttggtgta

SEQ ID NO: 1991044 - DNA, 15 bp, Homo sapiens
agctttttggtgtac

SEQ ID NO: 1991045 - DNA, 15 bp, Homo sapiens
gctttttggtgtact

SEQ ID NO: 1991046 - DNA, 15 bp, Homo sapiens
ctttttggtgtactg

SEQ ID NO: 1991047 - DNA, 15 bp, Homo sapiens
tttttggtgtactgc

SEQ ID NO: 1991048 - DNA, 15 bp, Homo sapiens
ttttggtgtactgct

SEQ ID NO: 1991049 - DNA, 15 bp, Homo sapiens
tttggtgtactgctg

SEQ ID NO: 1991050 - DNA, 15 bp, Homo sapiens
ttggtgtactgctgg

SEQ ID NO: 1991051 - DNA, 15 bp, Homo sapiens
tggtgtactgctgga

SEQ ID NO: 1991052 - DNA, 15 bp, Homo sapiens
ggtgtactgctggat

SEQ ID NO: 1991053 - DNA, 15 bp, Homo sapiens
gtgtactgctggatt

SEQ ID NO: 1991054 - DNA, 15 bp, Homo sapiens
tgtactgctggattc

SEQ ID NO: 1991055 - DNA, 15 bp, Homo sapiens
gtactgctggattcg

SEQ ID NO: 1991056 - DNA, 15 bp, Homo sapiens
tactgctggattcgg

SEQ ID NO: 1991057 - DNA, 15 bp, Homo sapiens
actgctggattcggt

SEQ ID NO: 1991058 - DNA, 15 bp, Homo sapiens
ctgctggattcggtt

SEQ ID NO: 1991059 - DNA, 15 bp, Homo sapiens
tgctggattcggttt

SEQ ID NO: 1991060 - DNA, 15 bp, Homo sapiens
gctggattcggtttg

SEQ ID NO: 1991061 - DNA, 15 bp, Homo sapiens
ctggattcggtttgc

SEQ ID NO: 1991062 - DNA, 15 bp, Homo sapiens
tggattcggtttgcc

SEQ ID NO: 1991063 - DNA, 15 bp, Homo sapiens
ggattcggtttgcca

SEQ ID NO: 1991064 - DNA, 15 bp, Homo sapiens
gattcggtttgccac

SEQ ID NO: 1991065 - DNA, 15 bp, Homo sapiens
attcggtttgccaca

SEQ ID NO: 1991066 - DNA, 15 bp, Homo sapiens
ttcggtttgccacaa

SEQ ID NO: 1991067 - DNA, 15 bp, Homo sapiens
tcggtttgccacaat

SEQ ID NO: 1991068 - DNA, 15 bp, Homo sapiens
cggtttgccacaatt

SEQ ID NO: 1991069 - DNA, 15 bp, Homo sapiens
ggtttgccacaattt

SEQ ID NO: 1991070 - DNA, 15 bp, Homo sapiens
gtttgccacaatttt

SEQ ID NO: 1991071 - DNA, 15 bp, Homo sapiens
tttgccacaatttta

SEQ ID NO: 1991072 - DNA, 15 bp, Homo sapiens
ttgccacaattttat

SEQ ID NO: 1991073 - DNA, 15 bp, Homo sapiens
tgccacaattttatt

SEQ ID NO: 1991074 - DNA, 15 bp, Homo sapiens
gccacaattttattg

SEQ ID NO: 1991075 - DNA, 15 bp, Homo sapiens
ccacaattttattga

SEQ ID NO: 1991076 - DNA, 15 bp, Homo sapiens
cacaattttattgag

SEQ ID NO: 1991077 - DNA, 15 bp, Homo sapiens
acaattttattgagg

SEQ ID NO: 1991078 - DNA, 15 bp, Homo sapiens
caattttattgagga

SEQ ID NO: 1991079 - DNA, 15 bp, Homo sapiens
aattttattgaggat

SEQ ID NO: 1991080 - DNA, 15 bp, Homo sapiens
attttattgaggatt

SEQ ID NO: 1991081 - DNA, 15 bp, Homo sapiens
ttttattgaggattt

SEQ ID NO: 1991082 - DNA, 15 bp, Homo sapiens
tttattgaggatttt

SEQ ID NO: 1991083 - DNA, 15 bp, Homo sapiens
ttattgaggattttc

SEQ ID NO: 1991084 - DNA, 15 bp, Homo sapiens
tattgaggattttca

SEQ ID NO: 1991085 - DNA, 15 bp, Homo sapiens
attgaggattttcac

SEQ ID NO: 1991086 - DNA, 15 bp, Homo sapiens
ttgaggattttcaca

SEQ ID NO: 1991087 - DNA, 15 bp, Homo sapiens
tgaggattttcacag

SEQ ID NO: 1991088 - DNA, 15 bp, Homo sapiens
gaggattttcacaga

SEQ ID NO: 1991089 - DNA, 15 bp, Homo sapiens
aggattttcacagat

SEQ ID NO: 1991090 - DNA, 15 bp, Homo sapiens
ggattttcacagatg

SEQ ID NO: 1991091 - DNA, 15 bp, Homo sapiens
gattttcacagatgc

SEQ ID NO: 1991092 - DNA, 15 bp, Homo sapiens
attttcacagatgct

SEQ ID NO: 1991093 - DNA, 15 bp, Homo sapiens
ttttcacagatgctg

SEQ ID NO: 1991094 - DNA, 15 bp, Homo sapiens
tttcacagatgctga

SEQ ID NO: 1991095 - DNA, 15 bp, Homo sapiens
ttcacagatgctgaa

SEQ ID NO: 1991096 - DNA, 15 bp, Homo sapiens
tcacagatgctgaat

SEQ ID NO: 1991097 - DNA, 15 bp, Homo sapiens
cacagatgctgaatt

SEQ ID NO: 1991098 - DNA, 15 bp, Homo sapiens
acagatgctgaattt

SEQ ID NO: 1991099 - DNA, 15 bp, Homo sapiens
cagatgctgaatttt

SEQ ID NO: 1991100 - DNA, 15 bp, Homo sapiens
agatgctgaattttt

SEQ ID NO: 1991101 - DNA, 15 bp, Homo sapiens
gatgctgaatttttt

SEQ ID NO: 1991102 - DNA, 15 bp, Homo sapiens
atgctgaattttttt

SEQ ID NO: 1991103 - DNA, 15 bp, Homo sapiens
tgctgaatttttttc

SEQ ID NO: 1991104 - DNA, 15 bp, Homo sapiens
gctgaatttttttct

SEQ ID NO: 1991105 - DNA, 15 bp, Homo sapiens
ctgaatttttttctg

SEQ ID NO: 1991106 - DNA, 15 bp, Homo sapiens
tgaatttttttctgg

SEQ ID NO: 1991107 - DNA, 15 bp, Homo sapiens
gaatttttttctggg

SEQ ID NO: 1991108 - DNA, 15 bp, Homo sapiens
aatttttttctggga

SEQ ID NO: 1991109 - DNA, 15 bp, Homo sapiens
atttttttctgggaa

SEQ ID NO: 1991110 - DNA, 15 bp, Homo sapiens
tttttttctgggaag

SEQ ID NO: 1991111 - DNA, 15 bp, Homo sapiens
ttttttctgggaaga

SEQ ID NO: 1991112 - DNA, 15 bp, Homo sapiens
tttttctgggaagaa

SEQ ID NO: 1991113 - DNA, 15 bp, Homo sapiens
ttttctgggaagaat

SEQ ID NO: 1991114 - DNA, 15 bp, Homo sapiens
tttctgggaagaatt

SEQ ID NO: 1991115 - DNA, 15 bp, Homo sapiens
ttctgggaagaattt

SEQ ID NO: 1991116 - DNA, 15 bp, Homo sapiens
tctgggaagaattta

SEQ ID NO: 1991117 - DNA, 15 bp, Homo sapiens
ctgggaagaatttac

SEQ ID NO: 1991118 - DNA, 15 bp, Homo sapiens
tgggaagaatttact

SEQ ID NO: 1991119 - DNA, 15 bp, Homo sapiens
gggaagaatttactt

SEQ ID NO: 1991120 - DNA, 15 bp, Homo sapiens
ggaagaatttacttt

SEQ ID NO: 1991121 - DNA, 15 bp, Homo sapiens
gaagaatttactttg

SEQ ID NO: 1991122 - DNA, 15 bp, Homo sapiens
aagaatttactttga

SEQ ID NO: 1991123 - DNA, 15 bp, Homo sapiens
agaatttactttgac

SEQ ID NO: 1991124 - DNA, 15 bp, Homo sapiens
gaatttactttgact

SEQ ID NO: 1991125 - DNA, 15 bp, Homo sapiens
aatttactttgactt

SEQ ID NO: 1991126 - DNA, 15 bp, Homo sapiens
atttactttgacttt

SEQ ID NO: 1991127 - DNA, 15 bp, Homo sapiens
tttactttgactttt

SEQ ID NO: 1991128 - DNA, 15 bp, Homo sapiens
ttactttgacttttt

SEQ ID NO: 1991129 - DNA, 15 bp, Homo sapiens
tactttgactttttc

SEQ ID NO: 1991130 - DNA, 15 bp, Homo sapiens
actttgactttttca

SEQ ID NO: 1991131 - DNA, 15 bp, Homo sapiens
ctttgactttttcat

SEQ ID NO: 1991132 - DNA, 15 bp, Homo sapiens
tttgactttttcatc

SEQ ID NO: 1991133 - DNA, 15 bp, Homo sapiens
ttgactttttcatcc

SEQ ID NO: 1991134 - DNA, 15 bp, Homo sapiens
tgactttttcatcct

SEQ ID NO: 1991135 - DNA, 15 bp, Homo sapiens
gactttttcatccta

SEQ ID NO: 1991136 - DNA, 15 bp, Homo sapiens
actttttcatcctac

SEQ ID NO: 1991137 - DNA, 15 bp, Homo sapiens
ctttttcatcctaca

SEQ ID NO: 1991138 - DNA, 15 bp, Homo sapiens
tttttcatcctacaa

SEQ ID NO: 1991139 - DNA, 15 bp, Homo sapiens
ttttcatcctacaaa

SEQ ID NO: 1991140 - DNA, 15 bp, Homo sapiens
tttcatcctacaaaa

SEQ ID NO: 1991141 - DNA, 15 bp, Homo sapiens
ttcatcctacaaaaa

SEQ ID NO: 1991142 - DNA, 15 bp, Homo sapiens
tcatcctacaaaaat

SEQ ID NO: 1991143 - DNA, 15 bp, Homo sapiens
catcctacaaaaatt

SEQ ID NO: 1991144 - DNA, 15 bp, Homo sapiens
atcctacaaaaatta

SEQ ID NO: 1991145 - DNA, 15 bp, Homo sapiens
tcctacaaaaattat

SEQ ID NO: 1991146 - DNA, 15 bp, Homo sapiens
cctacaaaaattatt

SEQ ID NO: 1991147 - DNA, 15 bp, Homo sapiens
ctacaaaaattattc

SEQ ID NO: 1991148 - DNA, 15 bp, Homo sapiens
tacaaaaattattct

SEQ ID NO: 1991149 - DNA, 15 bp, Homo sapiens
acaaaaattattctg

SEQ ID NO: 1991150 - DNA, 15 bp, Homo sapiens
caaaaattattctgg

SEQ ID NO: 1991151 - DNA, 15 bp, Homo sapiens
aaaaattattctggt

SEQ ID NO: 1991152 - DNA, 15 bp, Homo sapiens
aaaattattctggtt

SEQ ID NO: 1991153 - DNA, 15 bp, Homo sapiens
aaattattctggttc

SEQ ID NO: 1991154 - DNA, 15 bp, Homo sapiens
aattattctggttct

SEQ ID NO: 1991155 - DNA, 15 bp, Homo sapiens
attattctggttctg

SEQ ID NO: 1991156 - DNA, 15 bp, Homo sapiens
ttattctggttctga

SEQ ID NO: 1991157 - DNA, 15 bp, Homo sapiens
tattctggttctgaa

SEQ ID NO: 1991158 - DNA, 15 bp, Homo sapiens
attctggttctgaag

SEQ ID NO: 1991159 - DNA, 15 bp, Homo sapiens
ttctggttctgaagg

SEQ ID NO: 1991160 - DNA, 15 bp, Homo sapiens
tctggttctgaagga

SEQ ID NO: 1991161 - DNA, 15 bp, Homo sapiens
ctggttctgaaggat

SEQ ID NO: 1991162 - DNA, 15 bp, Homo sapiens
tggttctgaaggatg

SEQ ID NO: 1991163 - DNA, 15 bp, Homo sapiens
ggttctgaaggatgc

SEQ ID NO: 1991164 - DNA, 15 bp, Homo sapiens
gttctgaaggatgca

SEQ ID NO: 1991165 - DNA, 15 bp, Homo sapiens
ttctgaaggatgcag

SEQ ID NO: 1991166 - DNA, 15 bp, Homo sapiens
tctgaaggatgcagg

SEQ ID NO: 1991167 - DNA, 15 bp, Homo sapiens
ctgaaggatgcaggt

SEQ ID NO: 1991168 - DNA, 15 bp, Homo sapiens
tgaaggatgcaggtg

SEQ ID NO: 1991169 - DNA, 15 bp, Homo sapiens
gaaggatgcaggtgt

SEQ ID NO: 1991170 - DNA, 15 bp, Homo sapiens
aaggatgcaggtgtt

SEQ ID NO: 1991171 - DNA, 15 bp, Homo sapiens
aggatgcaggtgttt

SEQ ID NO: 1991172 - DNA, 15 bp, Homo sapiens
ggatgcaggtgtttc

SEQ ID NO: 1991173 - DNA, 15 bp, Homo sapiens
gatgcaggtgtttca

SEQ ID NO: 1991174 - DNA, 15 bp, Homo sapiens
atgcaggtgtttcaa

SEQ ID NO: 1991175 - DNA, 15 bp, Homo sapiens
tgcaggtgtttcaat

SEQ ID NO: 1991176 - DNA, 15 bp, Homo sapiens
gcaggtgtttcaatg

SEQ ID NO: 1991177 - DNA, 15 bp, Homo sapiens
caggtgtttcaatgg

SEQ ID NO: 1991178 - DNA, 15 bp, Homo sapiens
aggtgtttcaatggt

SEQ ID NO: 1991179 - DNA, 15 bp, Homo sapiens
ggtgtttcaatggtg

SEQ ID NO: 1991180 - DNA, 15 bp, Homo sapiens
gtgtttcaatggtgt

SEQ ID NO: 1991181 - DNA, 15 bp, Homo sapiens
tgtttcaatggtgtc

SEQ ID NO: 1991182 - DNA, 15 bp, Homo sapiens
gtttcaatggtgtcc

SEQ ID NO: 1991183 - DNA, 15 bp, Homo sapiens
tttcaatggtgtccc

SEQ ID NO: 1991184 - DNA, 15 bp, Homo sapiens
ttcaatggtgtccca

SEQ ID NO: 1991185 - DNA, 15 bp, Homo sapiens
tcaatggtgtcccat

SEQ ID NO: 1991186 - DNA, 15 bp, Homo sapiens
caatggtgtcccatt

SEQ ID NO: 1991187 - DNA, 15 bp, Homo sapiens
aatggtgtcccatta

SEQ ID NO: 1991188 - DNA, 15 bp, Homo sapiens
atggtgtcccattaa

SEQ ID NO: 1991189 - DNA, 15 bp, Homo sapiens
tggtgtcccattaat

SEQ ID NO: 1991190 - DNA, 15 bp, Homo sapiens
ggtgtcccattaata

SEQ ID NO: 1991191 - DNA, 15 bp, Homo sapiens
gtgtcccattaatat

SEQ ID NO: 1991192 - DNA, 15 bp, Homo sapiens
tgtcccattaatatc

SEQ ID NO: 1991193 - DNA, 15 bp, Homo sapiens
gtcccattaatatcc

SEQ ID NO: 1991194 - DNA, 15 bp, Homo sapiens
tcccattaatatccc

SEQ ID NO: 1991195 - DNA, 15 bp, Homo sapiens
cccattaatatcccc

SEQ ID NO: 1991196 - DNA, 15 bp, Homo sapiens
ccattaatatcccca

SEQ ID NO: 1991197 - DNA, 15 bp, Homo sapiens
cattaatatccccag

SEQ ID NO: 1991198 - DNA, 15 bp, Homo sapiens
attaatatccccagg

SEQ ID NO: 1991199 - DNA, 15 bp, Homo sapiens
ttaatatccccaggc

SEQ ID NO: 1991200 - DNA, 15 bp, Homo sapiens
taatatccccaggct

SEQ ID NO: 1991201 - DNA, 15 bp, Homo sapiens
aatatccccaggctt

SEQ ID NO: 1991202 - DNA, 15 bp, Homo sapiens
atatccccaggctta

SEQ ID NO: 1991203 - DNA, 15 bp, Homo sapiens
tatccccaggcttag

SEQ ID NO: 1991204 - DNA, 15 bp, Homo sapiens
atccccaggcttagc

SEQ ID NO: 1991205 - DNA, 15 bp, Homo sapiens
tccccaggcttagca

SEQ ID NO: 1991206 - DNA, 15 bp, Homo sapiens
ccccaggcttagcac

SEQ ID NO: 1991207 - DNA, 15 bp, Homo sapiens
cccaggcttagcaca

SEQ ID NO: 1991208 - DNA, 15 bp, Homo sapiens
ccaggcttagcacag

SEQ ID NO: 1991209 - DNA, 15 bp, Homo sapiens
caggcttagcacagt

SEQ ID NO: 1991210 - DNA, 15 bp, Homo sapiens
aggcttagcacagtt

SEQ ID NO: 1991211 - DNA, 15 bp, Homo sapiens
ggcttagcacagttc

SEQ ID NO: 1991212 - DNA, 15 bp, Homo sapiens
gcttagcacagttct

SEQ ID NO: 1991213 - DNA, 15 bp, Homo sapiens
cttagcacagttctt

SEQ ID NO: 1991214 - DNA, 15 bp, Homo sapiens
ttagcacagttcttg

SEQ ID NO: 1991215 - DNA, 15 bp, Homo sapiens
tagcacagttcttgc

SEQ ID NO: 1991216 - DNA, 15 bp, Homo sapiens
agcacagttcttgct

SEQ ID NO: 1991217 - DNA, 15 bp, Homo sapiens
gcacagttcttgctt

SEQ ID NO: 1991218 - DNA, 15 bp, Homo sapiens
cacagttcttgcttg

SEQ ID NO: 1991219 - DNA, 15 bp, Homo sapiens
acagttcttgcttgg

SEQ ID NO: 1991220 - DNA, 15 bp, Homo sapiens
cagttcttgcttggt

SEQ ID NO: 1991221 - DNA, 15 bp, Homo sapiens
agttcttgcttggtt

SEQ ID NO: 1991222 - DNA, 15 bp, Homo sapiens
gttcttgcttggtta

SEQ ID NO: 1991223 - DNA, 15 bp, Homo sapiens
ttcttgcttggttat

SEQ ID NO: 1991224 - DNA, 15 bp, Homo sapiens
tcttgcttggttata

SEQ ID NO: 1991225 - DNA, 15 bp, Homo sapiens
cttgcttggttataa

SEQ ID NO: 1991226 - DNA, 15 bp, Homo sapiens
ttgcttggttataat

SEQ ID NO: 1991227 - DNA, 15 bp, Homo sapiens
tgcttggttataata

SEQ ID NO: 1991228 - DNA, 15 bp, Homo sapiens
gcttggttataatag

SEQ ID NO: 1991229 - DNA, 15 bp, Homo sapiens
cttggttataatagg

SEQ ID NO: 1991230 - DNA, 15 bp, Homo sapiens
ttggttataataggc

SEQ ID NO: 1991231 - DNA, 15 bp, Homo sapiens
tggttataataggca

SEQ ID NO: 1991232 - DNA, 15 bp, Homo sapiens
ggttataataggcaa

SEQ ID NO: 1991233 - DNA, 15 bp, Homo sapiens
gttataataggcaat

SEQ ID NO: 1991234 - DNA, 15 bp, Homo sapiens
ttataataggcaatt

SEQ ID NO: 1991235 - DNA, 15 bp, Homo sapiens
tataataggcaatta

SEQ ID NO: 1991236 - DNA, 15 bp, Homo sapiens
ataataggcaattaa

SEQ ID NO: 1991237 - DNA, 15 bp, Homo sapiens
taataggcaattaag

SEQ ID NO: 1991238 - DNA, 15 bp, Homo sapiens
aataggcaattaagt

SEQ ID NO: 1991239 - DNA, 15 bp, Homo sapiens
ataggcaattaagtg

SEQ ID NO: 1991240 - DNA, 15 bp, Homo sapiens
taggcaattaagtgt

SEQ ID NO: 1991241 - DNA, 15 bp, Homo sapiens
aggcaattaagtgtt

SEQ ID NO: 1991242 - DNA, 15 bp, Homo sapiens
ggcaattaagtgttg

SEQ ID NO: 1991243 - DNA, 15 bp, Homo sapiens
gcaattaagtgttga

SEQ ID NO: 1991244 - DNA, 15 bp, Homo sapiens
caattaagtgttgaa

SEQ ID NO: 1991245 - DNA, 15 bp, Homo sapiens
aattaagtgttgaat

SEQ ID NO: 1991246 - DNA, 15 bp, Homo sapiens
attaagtgttgaatg

SEQ ID NO: 1991247 - DNA, 15 bp, Homo sapiens
ttaagtgttgaatga

SEQ ID NO: 1991248 - DNA, 15 bp, Homo sapiens
taagtgttgaatgaa

SEQ ID NO: 1991249 - DNA, 15 bp, Homo sapiens
aagtgttgaatgaat

SEQ ID NO: 1991250 - DNA, 15 bp, Homo sapiens
agtgttgaatgaatg

SEQ ID NO: 1991251 - DNA, 15 bp, Homo sapiens
gtgttgaatgaatga

SEQ ID NO: 1991252 - DNA, 15 bp, Homo sapiens
gttgaatgaatgaaa

SEQ ID NO: 1991253 - DNA, 15 bp, Homo sapiens
ttgaatgaatgaaag

SEQ ID NO: 1991254 - DNA, 15 bp, Homo sapiens
tgaatgaatgaaaga

SEQ ID NO: 1991255 - DNA, 15 bp, Homo sapiens
gaatgaatgaaagaa

SEQ ID NO: 1991256 - DNA, 15 bp, Homo sapiens
aatgaatgaaagaat

SEQ ID NO: 1991257 - DNA, 15 bp, Homo sapiens
atgaatgaaagaatt

SEQ ID NO: 1991258 - DNA, 15 bp, Homo sapiens
tgaatgaaagaattt

SEQ ID NO: 1991259 - DNA, 15 bp, Homo sapiens
gaatgaaagaatttt

SEQ ID NO: 1991260 - DNA, 15 bp, Homo sapiens
aatgaaagaatttta

SEQ ID NO: 1991261 - DNA, 15 bp, Homo sapiens
atgaaagaattttaa

SEQ ID NO: 1991262 - DNA, 15 bp, Homo sapiens
tgaaagaattttaac

SEQ ID NO: 1991263 - DNA, 15 bp, Homo sapiens
gaaagaattttaact

SEQ ID NO: 1991264 - DNA, 15 bp, Homo sapiens
aaagaattttaactt

SEQ ID NO: 1991265 - DNA, 15 bp, Homo sapiens
aagaattttaacttt

SEQ ID NO: 1991266 - DNA, 15 bp, Homo sapiens
agaattttaacttta

SEQ ID NO: 1991267 - DNA, 15 bp, Homo sapiens
gaattttaactttat

SEQ ID NO: 1991268 - DNA, 15 bp, Homo sapiens
aattttaactttatt

SEQ ID NO: 1991269 - DNA, 15 bp, Homo sapiens
attttaactttattc

SEQ ID NO: 1991270 - DNA, 15 bp, Homo sapiens
ttttaactttattct

SEQ ID NO: 1991271 - DNA, 15 bp, Homo sapiens
tttaactttattctg

SEQ ID NO: 1991272 - DNA, 15 bp, Homo sapiens
ttaactttattctgt

SEQ ID NO: 1991273 - DNA, 15 bp, Homo sapiens
taactttattctgtg

SEQ ID NO: 1991274 - DNA, 15 bp, Homo sapiens
aactttattctgtgg

SEQ ID NO: 1991275 - DNA, 15 bp, Homo sapiens
actttattctgtggg

SEQ ID NO: 1991276 - DNA, 15 bp, Homo sapiens
ctttattctgtgggt

SEQ ID NO: 1991277 - DNA, 15 bp, Homo sapiens
tttattctgtgggtt

SEQ ID NO: 1991278 - DNA, 15 bp, Homo sapiens
ttattctgtgggttc

SEQ ID NO: 1991279 - DNA, 15 bp, Homo sapiens
tattctgtgggttca

SEQ ID NO: 1991280 - DNA, 15 bp, Homo sapiens
attctgtgggttcag

SEQ ID NO: 1991281 - DNA, 15 bp, Homo sapiens
ttctgtgggttcagg

SEQ ID NO: 1991282 - DNA, 15 bp, Homo sapiens
tctgtgggttcaggg

SEQ ID NO: 1991283 - DNA, 15 bp, Homo sapiens
ctgtgggttcaggga

SEQ ID NO: 1991284 - DNA, 15 bp, Homo sapiens
tgtgggttcagggag

SEQ ID NO: 1991285 - DNA, 15 bp, Homo sapiens
gtgggttcagggagc

SEQ ID NO: 1991286 - DNA, 15 bp, Homo sapiens
tgggttcagggagct

SEQ ID NO: 1991287 - DNA, 15 bp, Homo sapiens
gggttcagggagctg

SEQ ID NO: 1991288 - DNA, 15 bp, Homo sapiens
ggttcagggagctgt

SEQ ID NO: 1991289 - DNA, 15 bp, Homo sapiens
gttcagggagctgtt

SEQ ID NO: 1991290 - DNA, 15 bp, Homo sapiens
ttcagggagctgttg

SEQ ID NO: 1991291 - DNA, 15 bp, Homo sapiens
tcagggagctgttga

SEQ ID NO: 1991292 - DNA, 15 bp, Homo sapiens
cagggagctgttgaa

SEQ ID NO: 1991293 - DNA, 15 bp, Homo sapiens
agggagctgttgaag

SEQ ID NO: 1991294 - DNA, 15 bp, Homo sapiens
gggagctgttgaaga

SEQ ID NO: 1991295 - DNA, 15 bp, Homo sapiens
ggagctgttgaagag

SEQ ID NO: 1991296 - DNA, 15 bp, Homo sapiens
gagctgttgaagagt

SEQ ID NO: 1991297 - DNA, 15 bp, Homo sapiens
agctgttgaagagta

SEQ ID NO: 1991298 - DNA, 15 bp, Homo sapiens
gctgttgaagagtat

SEQ ID NO: 1991299 - DNA, 15 bp, Homo sapiens
ctgttgaagagtatt

SEQ ID NO: 1991300 - DNA, 15 bp, Homo sapiens
tgttgaagagtatta

SEQ ID NO: 1991301 - DNA, 15 bp, Homo sapiens
gttgaagagtattaa

SEQ ID NO: 1991302 - DNA, 15 bp, Homo sapiens
ttgaagagtattaag

SEQ ID NO: 1991303 - DNA, 15 bp, Homo sapiens
tgaagagtattaagc

SEQ ID NO: 1991304 - DNA, 15 bp, Homo sapiens
gaagagtattaagca

SEQ ID NO: 1991305 - DNA, 15 bp, Homo sapiens
aagagtattaagcaa

SEQ ID NO: 1991306 - DNA, 15 bp, Homo sapiens
agagtattaagcaag

SEQ ID NO: 1991307 - DNA, 15 bp, Homo sapiens
gagtattaagcaagt

SEQ ID NO: 1991308 - DNA, 15 bp, Homo sapiens
agtattaagcaagtg

SEQ ID NO: 1991309 - DNA, 15 bp, Homo sapiens
gtattaagcaagtga

SEQ ID NO: 1991310 - DNA, 15 bp, Homo sapiens
tattaagcaagtgag

SEQ ID NO: 1991311 - DNA, 15 bp, Homo sapiens
attaagcaagtgagt

SEQ ID NO: 1991312 - DNA, 15 bp, Homo sapiens
ttaagcaagtgagtg

SEQ ID NO: 1991313 - DNA, 15 bp, Homo sapiens
taagcaagtgagtgg

SEQ ID NO: 1991314 - DNA, 15 bp, Homo sapiens
aagcaagtgagtggc

SEQ ID NO: 1991315 - DNA, 15 bp, Homo sapiens
agcaagtgagtggca

SEQ ID NO: 1991316 - DNA, 15 bp, Homo sapiens
gcaagtgagtggcat

SEQ ID NO: 1991317 - DNA, 15 bp, Homo sapiens
caagtgagtggcatg

SEQ ID NO: 1991318 - DNA, 15 bp, Homo sapiens
aagtgagtggcatgc

SEQ ID NO: 1991319 - DNA, 15 bp, Homo sapiens
agtgagtggcatgct

SEQ ID NO: 1991320 - DNA, 15 bp, Homo sapiens
gtgagtggcatgctc

SEQ ID NO: 1991321 - DNA, 15 bp, Homo sapiens
tgagtggcatgctca

SEQ ID NO: 1991322 - DNA, 15 bp, Homo sapiens
gagtggcatgctcac

SEQ ID NO: 1991323 - DNA, 15 bp, Homo sapiens
agtggcatgctcaca

SEQ ID NO: 1991324 - DNA, 15 bp, Homo sapiens
gtggcatgctcacat

SEQ ID NO: 1991325 - DNA, 15 bp, Homo sapiens
tggcatgctcacatg

SEQ ID NO: 1991326 - DNA, 15 bp, Homo sapiens
ggcatgctcacatgt

SEQ ID NO: 1991327 - DNA, 15 bp, Homo sapiens
gcatgctcacatgtt

SEQ ID NO: 1991328 - DNA, 15 bp, Homo sapiens
catgctcacatgttc

SEQ ID NO: 1991329 - DNA, 15 bp, Homo sapiens
atgctcacatgttct

SEQ ID NO: 1991330 - DNA, 15 bp, Homo sapiens
tgctcacatgttctg

SEQ ID NO: 1991331 - DNA, 15 bp, Homo sapiens
gctcacatgttctga

SEQ ID NO: 1991332 - DNA, 15 bp, Homo sapiens
ctcacatgttctgaa

SEQ ID NO: 1991333 - DNA, 15 bp, Homo sapiens
tcacatgttctgaag

SEQ ID NO: 1991334 - DNA, 15 bp, Homo sapiens
cacatgttctgaaga

SEQ ID NO: 1991335 - DNA, 15 bp, Homo sapiens
acatgttctgaagag

SEQ ID NO: 1991336 - DNA, 15 bp, Homo sapiens
catgttctgaagagt

SEQ ID NO: 1991337 - DNA, 15 bp, Homo sapiens
atgttctgaagagtg

SEQ ID NO: 1991338 - DNA, 15 bp, Homo sapiens
tgttctgaagagtgt

SEQ ID NO: 1991339 - DNA, 15 bp, Homo sapiens
gttctgaagagtgtt

SEQ ID NO: 1991340 - DNA, 15 bp, Homo sapiens
ttctgaagagtgttt

SEQ ID NO: 1991341 - DNA, 15 bp, Homo sapiens
tctgaagagtgtttc

SEQ ID NO: 1991342 - DNA, 15 bp, Homo sapiens
ctgaagagtgtttcc

SEQ ID NO: 1991343 - DNA, 15 bp, Homo sapiens
tgaagagtgtttcct

SEQ ID NO: 1991344 - DNA, 15 bp, Homo sapiens
gaagagtgtttcctg

SEQ ID NO: 1991345 - DNA, 15 bp, Homo sapiens
aagagtgtttcctgg

SEQ ID NO: 1991346 - DNA, 15 bp, Homo sapiens
agagtgtttcctggt

SEQ ID NO: 1991347 - DNA, 15 bp, Homo sapiens
gagtgtttcctggta

SEQ ID NO: 1991348 - DNA, 15 bp, Homo sapiens
agtgtttcctggtag

SEQ ID NO: 1991349 - DNA, 15 bp, Homo sapiens
gtgtttcctggtagt

SEQ ID NO: 1991350 - DNA, 15 bp, Homo sapiens
tgtttcctggtagtg

SEQ ID NO: 1991351 - DNA, 15 bp, Homo sapiens
gtttcctggtagtga

SEQ ID NO: 1991352 - DNA, 15 bp, Homo sapiens
tttcctggtagtgat

SEQ ID NO: 1991353 - DNA, 15 bp, Homo sapiens
ttcctggtagtgata

SEQ ID NO: 1991354 - DNA, 15 bp, Homo sapiens
tcctggtagtgatat

SEQ ID NO: 1991355 - DNA, 15 bp, Homo sapiens
cctggtagtgatata

SEQ ID NO: 1991356 - DNA, 15 bp, Homo sapiens
ctggtagtgatatag

SEQ ID NO: 1991357 - DNA, 15 bp, Homo sapiens
tggtagtgatataga

SEQ ID NO: 1991358 - DNA, 15 bp, Homo sapiens
ggtagtgatatagaa

SEQ ID NO: 1991359 - DNA, 15 bp, Homo sapiens
gtagtgatatagaag

SEQ ID NO: 1991360 - DNA, 15 bp, Homo sapiens
tagtgatatagaaga

SEQ ID NO: 1991361 - DNA, 15 bp, Homo sapiens
agtgatatagaagat

SEQ ID NO: 1991362 - DNA, 15 bp, Homo sapiens
gtgatatagaagatg

SEQ ID NO: 1991363 - DNA, 15 bp, Homo sapiens
tgatatagaagatgg

SEQ ID NO: 1991364 - DNA, 15 bp, Homo sapiens
gatatagaagatgga

SEQ ID NO: 1991365 - DNA, 15 bp, Homo sapiens
atatagaagatggat

SEQ ID NO: 1991366 - DNA, 15 bp, Homo sapiens
tatagaagatggatt

SEQ ID NO: 1991367 - DNA, 15 bp, Homo sapiens
atagaagatggattt

SEQ ID NO: 1991368 - DNA, 15 bp, Homo sapiens
tagaagatggatttg

SEQ ID NO: 1991369 - DNA, 15 bp, Homo sapiens
agaagatggatttga

SEQ ID NO: 1991370 - DNA, 15 bp, Homo sapiens
gaagatggatttgaa

SEQ ID NO: 1991371 - DNA, 15 bp, Homo sapiens
aagatggatttgaag

SEQ ID NO: 1991372 - DNA, 15 bp, Homo sapiens
agatggatttgaagg

SEQ ID NO: 1991373 - DNA, 15 bp, Homo sapiens
gatggatttgaaggg

SEQ ID NO: 1991374 - DNA, 15 bp, Homo sapiens
atggatttgaaggga

SEQ ID NO: 1991375 - DNA, 15 bp, Homo sapiens
tggatttgaagggac

SEQ ID NO: 1991376 - DNA, 15 bp, Homo sapiens
ggatttgaagggaca

SEQ ID NO: 1991377 - DNA, 15 bp, Homo sapiens
gatttgaagggacag

SEQ ID NO: 1991378 - DNA, 15 bp, Homo sapiens
atttgaagggacagt

SEQ ID NO: 1991379 - DNA, 15 bp, Homo sapiens
tttgaagggacagta

SEQ ID NO: 1991380 - DNA, 15 bp, Homo sapiens
ttgaagggacagtaa

SEQ ID NO: 1991381 - DNA, 15 bp, Homo sapiens
tgaagggacagtaaa

SEQ ID NO: 1991382 - DNA, 15 bp, Homo sapiens
gaagggacagtaaag

SEQ ID NO: 1991383 - DNA, 15 bp, Homo sapiens
aagggacagtaaagg

SEQ ID NO: 1991384 - DNA, 15 bp, Homo sapiens
agggacagtaaaggc

SEQ ID NO: 1991385 - DNA, 15 bp, Homo sapiens
gggacagtaaaggca

SEQ ID NO: 1991386 - DNA, 15 bp, Homo sapiens
ggacagtaaaggcaa

SEQ ID NO: 1991387 - DNA, 15 bp, Homo sapiens
gacagtaaaggcaag

SEQ ID NO: 1991388 - DNA, 15 bp, Homo sapiens
acagtaaaggcaaga

SEQ ID NO: 1991389 - DNA, 15 bp, Homo sapiens
cagtaaaggcaagaa

SEQ ID NO: 1991390 - DNA, 15 bp, Homo sapiens
agtaaaggcaagaat

SEQ ID NO: 1991391 - DNA, 15 bp, Homo sapiens
gtaaaggcaagaata

SEQ ID NO: 1991392 - DNA, 15 bp, Homo sapiens
taaaggcaagaataa

SEQ ID NO: 1991393 - DNA, 15 bp, Homo sapiens
aaaggcaagaataat

SEQ ID NO: 1991394 - DNA, 15 bp, Homo sapiens
aaggcaagaataata

SEQ ID NO: 1991395 - DNA, 15 bp, Homo sapiens
aggcaagaataataa

SEQ ID NO: 1991396 - DNA, 15 bp, Homo sapiens
ggcaagaataataat

SEQ ID NO: 1991397 - DNA, 15 bp, Homo sapiens
gcaagaataataatt

SEQ ID NO: 1991398 - DNA, 15 bp, Homo sapiens
caagaataataatta

SEQ ID NO: 1991399 - DNA, 15 bp, Homo sapiens
agaataataattaag

SEQ ID NO: 1991400 - DNA, 15 bp, Homo sapiens
gaataataattaaga

SEQ ID NO: 1991401 - DNA, 15 bp, Homo sapiens
aataataattaagaa

SEQ ID NO: 1991402 - DNA, 15 bp, Homo sapiens
aataattaagaaatt

SEQ ID NO: 1991403 - DNA, 15 bp, Homo sapiens
ataattaagaaattg

SEQ ID NO: 1991404 - DNA, 15 bp, Homo sapiens
taattaagaaattgt

SEQ ID NO: 1991405 - DNA, 15 bp, Homo sapiens
aattaagaaattgtt

SEQ ID NO: 1991406 - DNA, 15 bp, Homo sapiens
attaagaaattgtta

SEQ ID NO: 1991407 - DNA, 15 bp, Homo sapiens
ttaagaaattgttat

SEQ ID NO: 1991408 - DNA, 15 bp, Homo sapiens
taagaaattgttata

SEQ ID NO: 1991409 - DNA, 15 bp, Homo sapiens
aagaaattgttataa

SEQ ID NO: 1991410 - DNA, 15 bp, Homo sapiens
agaaattgttataat

SEQ ID NO: 1991411 - DNA, 15 bp, Homo sapiens
gaaattgttataata

SEQ ID NO: 1991412 - DNA, 15 bp, Homo sapiens
aaattgttataatag

SEQ ID NO: 1991413 - DNA, 15 bp, Homo sapiens
aattgttataatagg

SEQ ID NO: 1991414 - DNA, 15 bp, Homo sapiens
attgttataataggg

SEQ ID NO: 1991415 - DNA, 15 bp, Homo sapiens
ttgttataataggga

SEQ ID NO: 1991416 - DNA, 15 bp, Homo sapiens
tgttataatagggat

SEQ ID NO: 1991417 - DNA, 15 bp, Homo sapiens
gttataatagggatg

SEQ ID NO: 1991418 - DNA, 15 bp, Homo sapiens
ttataatagggatga

SEQ ID NO: 1991419 - DNA, 15 bp, Homo sapiens
tataatagggatgat

SEQ ID NO: 1991420 - DNA, 15 bp, Homo sapiens
ataatagggatgatc

SEQ ID NO: 1991421 - DNA, 15 bp, Homo sapiens
taatagggatgatct

SEQ ID NO: 1991422 - DNA, 15 bp, Homo sapiens
aatagggatgatctg

SEQ ID NO: 1991423 - DNA, 15 bp, Homo sapiens
atagggatgatctga

SEQ ID NO: 1991424 - DNA, 15 bp, Homo sapiens
tagggatgatctgag

SEQ ID NO: 1991425 - DNA, 15 bp, Homo sapiens
agggatgatctgagc

SEQ ID NO: 1991426 - DNA, 15 bp, Homo sapiens
gggatgatctgagcc

SEQ ID NO: 1991427 - DNA, 15 bp, Homo sapiens
ggatgatctgagcca

SEQ ID NO: 1991428 - DNA, 15 bp, Homo sapiens
gatgatctgagccag

SEQ ID NO: 1991429 - DNA, 15 bp, Homo sapiens
atgatctgagccagg

SEQ ID NO: 1991430 - DNA, 15 bp, Homo sapiens
tgatctgagccaggg

SEQ ID NO: 1991431 - DNA, 15 bp, Homo sapiens
gatctgagccagggt

SEQ ID NO: 1991432 - DNA, 15 bp, Homo sapiens
atctgagccagggta

SEQ ID NO: 1991433 - DNA, 15 bp, Homo sapiens
tctgagccagggtac

SEQ ID NO: 1991434 - DNA, 15 bp, Homo sapiens
ctgagccagggtact

SEQ ID NO: 1991435 - DNA, 15 bp, Homo sapiens
tgagccagggtactc

SEQ ID NO: 1991436 - DNA, 15 bp, Homo sapiens
gagccagggtactca

SEQ ID NO: 1991437 - DNA, 15 bp, Homo sapiens
agccagggtactcat

SEQ ID NO: 1991438 - DNA, 15 bp, Homo sapiens
gccagggtactcatt

SEQ ID NO: 1991439 - DNA, 15 bp, Homo sapiens
ccagggtactcatta

SEQ ID NO: 1991440 - DNA, 15 bp, Homo sapiens
cagggtactcattat

SEQ ID NO: 1991441 - DNA, 15 bp, Homo sapiens
agggtactcattata

SEQ ID NO: 1991442 - DNA, 15 bp, Homo sapiens
gggtactcattatag

SEQ ID NO: 1991443 - DNA, 15 bp, Homo sapiens
ggtactcattatagg

SEQ ID NO: 1991444 - DNA, 15 bp, Homo sapiens
gtactcattatagga

SEQ ID NO: 1991445 - DNA, 15 bp, Homo sapiens
tactcattataggaa

SEQ ID NO: 1991446 - DNA, 15 bp, Homo sapiens
actcattataggaaa

SEQ ID NO: 1991447 - DNA, 15 bp, Homo sapiens
ctcattataggaaat

SEQ ID NO: 1991448 - DNA, 15 bp, Homo sapiens
tcattataggaaatt

SEQ ID NO: 1991449 - DNA, 15 bp, Homo sapiens
cattataggaaatta

SEQ ID NO: 1991450 - DNA, 15 bp, Homo sapiens
attataggaaattag

SEQ ID NO: 1991451 - DNA, 15 bp, Homo sapiens
ttataggaaattagg

SEQ ID NO: 1991452 - DNA, 15 bp, Homo sapiens
tataggaaattaggg

SEQ ID NO: 1991453 - DNA, 15 bp, Homo sapiens
ataggaaattagggg

SEQ ID NO: 1991454 - DNA, 15 bp, Homo sapiens
taggaaattaggggc

SEQ ID NO: 1991455 - DNA, 15 bp, Homo sapiens
aggaaattaggggca

SEQ ID NO: 1991456 - DNA, 15 bp, Homo sapiens
ggaaattaggggcaa

SEQ ID NO: 1991457 - DNA, 15 bp, Homo sapiens
gaaattaggggcaac

SEQ ID NO: 1991458 - DNA, 15 bp, Homo sapiens
aaattaggggcaacc

SEQ ID NO: 1991459 - DNA, 15 bp, Homo sapiens
aattaggggcaacct

SEQ ID NO: 1991460 - DNA, 15 bp, Homo sapiens
attaggggcaacctt

SEQ ID NO: 1991461 - DNA, 15 bp, Homo sapiens
ttaggggcaaccttg

SEQ ID NO: 1991462 - DNA, 15 bp, Homo sapiens
taggggcaaccttgt

SEQ ID NO: 1991463 - DNA, 15 bp, Homo sapiens
aggggcaaccttgtc

SEQ ID NO: 1991464 - DNA, 15 bp, Homo sapiens
ggggcaaccttgtca

SEQ ID NO: 1991465 - DNA, 15 bp, Homo sapiens
gggcaaccttgtcat

SEQ ID NO: 1991466 - DNA, 15 bp, Homo sapiens
ggcaaccttgtcatg

SEQ ID NO: 1991467 - DNA, 15 bp, Homo sapiens
gcaaccttgtcatga

SEQ ID NO: 1991468 - DNA, 15 bp, Homo sapiens
caaccttgtcatgag

SEQ ID NO: 1991469 - DNA, 15 bp, Homo sapiens
aaccttgtcatgaga

SEQ ID NO: 1991470 - DNA, 15 bp, Homo sapiens
accttgtcatgagat

SEQ ID NO: 1991471 - DNA, 15 bp, Homo sapiens
ccttgtcatgagatt

SEQ ID NO: 1991472 - DNA, 15 bp, Homo sapiens
cttgtcatgagattt

SEQ ID NO: 1991473 - DNA, 15 bp, Homo sapiens
ttgtcatgagatttg

SEQ ID NO: 1991474 - DNA, 15 bp, Homo sapiens
tgtcatgagatttgt

SEQ ID NO: 1991475 - DNA, 15 bp, Homo sapiens
gtcatgagatttgtt

SEQ ID NO: 1991476 - DNA, 15 bp, Homo sapiens
tcatgagatttgttt

SEQ ID NO: 1991477 - DNA, 15 bp, Homo sapiens
catgagatttgttta

SEQ ID NO: 1991478 - DNA, 15 bp, Homo sapiens
atgagatttgtttag

SEQ ID NO: 1991479 - DNA, 15 bp, Homo sapiens
tgagatttgtttagg

SEQ ID NO: 1991480 - DNA, 15 bp, Homo sapiens
gagatttgtttagga

SEQ ID NO: 1991481 - DNA, 15 bp, Homo sapiens
agatttgtttaggag

SEQ ID NO: 1991482 - DNA, 15 bp, Homo sapiens
gatttgtttaggaga

SEQ ID NO: 1991483 - DNA, 15 bp, Homo sapiens
atttgtttaggagat

SEQ ID NO: 1991484 - DNA, 15 bp, Homo sapiens
tttgtttaggagatg

SEQ ID NO: 1991485 - DNA, 15 bp, Homo sapiens
ttgtttaggagatga

SEQ ID NO: 1991486 - DNA, 15 bp, Homo sapiens
tgtttaggagatgaa

SEQ ID NO: 1991487 - DNA, 15 bp, Homo sapiens
gtttaggagatgaaa

SEQ ID NO: 1991488 - DNA, 15 bp, Homo sapiens
tttaggagatgaaat

SEQ ID NO: 1991489 - DNA, 15 bp, Homo sapiens
ttaggagatgaaatt

SEQ ID NO: 1991490 - DNA, 15 bp, Homo sapiens
taggagatgaaattg

SEQ ID NO: 1991491 - DNA, 15 bp, Homo sapiens
aggagatgaaattgg

SEQ ID NO: 1991492 - DNA, 15 bp, Homo sapiens
ggagatgaaattgga

SEQ ID NO: 1991493 - DNA, 15 bp, Homo sapiens
gagatgaaattggaa

SEQ ID NO: 1991494 - DNA, 15 bp, Homo sapiens
agatgaaattggaag

SEQ ID NO: 1991495 - DNA, 15 bp, Homo sapiens
gatgaaattggaagg

SEQ ID NO: 1991496 - DNA, 15 bp, Homo sapiens
atgaaattggaaggc

SEQ ID NO: 1991497 - DNA, 15 bp, Homo sapiens
tgaaattggaaggct

SEQ ID NO: 1991498 - DNA, 15 bp, Homo sapiens
gaaattggaaggctt

SEQ ID NO: 1991499 - DNA, 15 bp, Homo sapiens
aaattggaaggcttc

SEQ ID NO: 1991500 - DNA, 15 bp, Homo sapiens
aattggaaggcttca

SEQ ID NO: 1991501 - DNA, 15 bp, Homo sapiens
attggaaggcttcag

SEQ ID NO: 1991502 - DNA, 15 bp, Homo sapiens
ttggaaggcttcaga

SEQ ID NO: 1991503 - DNA, 15 bp, Homo sapiens
tggaaggcttcagat

SEQ ID NO: 1991504 - DNA, 15 bp, Homo sapiens
ggaaggcttcagatg

SEQ ID NO: 1991505 - DNA, 15 bp, Homo sapiens
gaaggcttcagatgg

SEQ ID NO: 1991506 - DNA, 15 bp, Homo sapiens
aaggcttcagatgga

SEQ ID NO: 1991507 - DNA, 15 bp, Homo sapiens
aggcttcagatggat

SEQ ID NO: 1991508 - DNA, 15 bp, Homo sapiens
ggcttcagatggatg

SEQ ID NO: 1991509 - DNA, 15 bp, Homo sapiens
gcttcagatggatga

SEQ ID NO: 1991510 - DNA, 15 bp, Homo sapiens
cttcagatggatgat

SEQ ID NO: 1991511 - DNA, 15 bp, Homo sapiens
ttcagatggatgata

SEQ ID NO: 1991512 - DNA, 15 bp, Homo sapiens
tcagatggatgatag

SEQ ID NO: 1991513 - DNA, 15 bp, Homo sapiens
cagatggatgatagg

SEQ ID NO: 1991514 - DNA, 15 bp, Homo sapiens
agatggatgataggg

SEQ ID NO: 1991515 - DNA, 15 bp, Homo sapiens
gatggatgatagggg

SEQ ID NO: 1991516 - DNA, 15 bp, Homo sapiens
atggatgataggggt

SEQ ID NO: 1991517 - DNA, 15 bp, Homo sapiens
tggatgataggggta

SEQ ID NO: 1991518 - DNA, 15 bp, Homo sapiens
ggatgataggggtaa

SEQ ID NO: 1991519 - DNA, 15 bp, Homo sapiens
gatgataggggtaag

SEQ ID NO: 1991520 - DNA, 15 bp, Homo sapiens
atgataggggtaagg

SEQ ID NO: 1991521 - DNA, 15 bp, Homo sapiens
tgataggggtaagga

SEQ ID NO: 1991522 - DNA, 15 bp, Homo sapiens
gataggggtaaggag

SEQ ID NO: 1991523 - DNA, 15 bp, Homo sapiens
ataggggtaaggagg

SEQ ID NO: 1991524 - DNA, 15 bp, Homo sapiens
taggggtaaggagga

SEQ ID NO: 1991525 - DNA, 15 bp, Homo sapiens
aggggtaaggaggaa

SEQ ID NO: 1991526 - DNA, 15 bp, Homo sapiens
ggggtaaggaggaaa

SEQ ID NO: 1991527 - DNA, 15 bp, Homo sapiens
gggtaaggaggaaag

SEQ ID NO: 1991528 - DNA, 15 bp, Homo sapiens
ggtaaggaggaaagg

SEQ ID NO: 1991529 - DNA, 15 bp, Homo sapiens
gtaaggaggaaagga

SEQ ID NO: 1991530 - DNA, 15 bp, Homo sapiens
taaggaggaaaggag

SEQ ID NO: 1991531 - DNA, 15 bp, Homo sapiens
aaggaggaaaggagg

SEQ ID NO: 1991532 - DNA, 15 bp, Homo sapiens
aggaggaaaggagga

SEQ ID NO: 1991533 - DNA, 15 bp, Homo sapiens
ggaggaaaggaggag

SEQ ID NO: 1991534 - DNA, 15 bp, Homo sapiens
gaggaaaggaggaga

SEQ ID NO: 1991535 - DNA, 15 bp, Homo sapiens
aggaaaggaggagat

SEQ ID NO: 1991536 - DNA, 15 bp, Homo sapiens
ggaaaggaggagatt

SEQ ID NO: 1991537 - DNA, 15 bp, Homo sapiens
gaaaggaggagattt

SEQ ID NO: 1991538 - DNA, 15 bp, Homo sapiens
aaaggaggagattta

SEQ ID NO: 1991539 - DNA, 15 bp, Homo sapiens
aaggaggagatttaa

SEQ ID NO: 1991540 - DNA, 15 bp, Homo sapiens
aggaggagatttaag

SEQ ID NO: 1991541 - DNA, 15 bp, Homo sapiens
ggaggagatttaagt

SEQ ID NO: 1991542 - DNA, 15 bp, Homo sapiens
gaggagatttaagtg

SEQ ID NO: 1991543 - DNA, 15 bp, Homo sapiens
aggagatttaagtga

SEQ ID NO: 1991544 - DNA, 15 bp, Homo sapiens
ggagatttaagtgaa

SEQ ID NO: 1991545 - DNA, 15 bp, Homo sapiens
gagatttaagtgaat

SEQ ID NO: 1991546 - DNA, 15 bp, Homo sapiens
agatttaagtgaata

SEQ ID NO: 1991547 - DNA, 15 bp, Homo sapiens
gatttaagtgaataa

SEQ ID NO: 1991548 - DNA, 15 bp, Homo sapiens
atttaagtgaataag

SEQ ID NO: 1991549 - DNA, 15 bp, Homo sapiens
tttaagtgaataaga

SEQ ID NO: 1991550 - DNA, 15 bp, Homo sapiens
ttaagtgaataagag

SEQ ID NO: 1991551 - DNA, 15 bp, Homo sapiens
taagtgaataagagt

SEQ ID NO: 1991552 - DNA, 15 bp, Homo sapiens
aagtgaataagagtt

SEQ ID NO: 1991553 - DNA, 15 bp, Homo sapiens
agtgaataagagttg

SEQ ID NO: 1991554 - DNA, 15 bp, Homo sapiens
gtgaataagagttga

SEQ ID NO: 1991555 - DNA, 15 bp, Homo sapiens
tgaataagagttgag

SEQ ID NO: 1991556 - DNA, 15 bp, Homo sapiens
gaataagagttgagg

SEQ ID NO: 1991557 - DNA, 15 bp, Homo sapiens
aataagagttgagga

SEQ ID NO: 1991558 - DNA, 15 bp, Homo sapiens
ataagagttgaggag

SEQ ID NO: 1991559 - DNA, 15 bp, Homo sapiens
taagagttgaggaga

SEQ ID NO: 1991560 - DNA, 15 bp, Homo sapiens
aagagttgaggagag

SEQ ID NO: 1991561 - DNA, 15 bp, Homo sapiens
agagttgaggagagg

SEQ ID NO: 1991562 - DNA, 15 bp, Homo sapiens
gagttgaggagaggg

SEQ ID NO: 1991563 - DNA, 15 bp, Homo sapiens
agttgaggagaggga

SEQ ID NO: 1991564 - DNA, 15 bp, Homo sapiens
gttgaggagagggag

SEQ ID NO: 1991565 - DNA, 15 bp, Homo sapiens
ttgaggagagggagg

SEQ ID NO: 1991566 - DNA, 15 bp, Homo sapiens
tgaggagagggagga

SEQ ID NO: 1991567 - DNA, 15 bp, Homo sapiens
aggagagggaggagt

SEQ ID NO: 1991568 - DNA, 15 bp, Homo sapiens
ggagagggaggagtt

SEQ ID NO: 1991569 - DNA, 15 bp, Homo sapiens
agagggaggagttgt

SEQ ID NO: 1991570 - DNA, 15 bp, Homo sapiens
gagggaggagttgta

SEQ ID NO: 1991571 - DNA, 15 bp, Homo sapiens
agggaggagttgtaa

SEQ ID NO: 1991572 - DNA, 15 bp, Homo sapiens
gggaggagttgtaaa

SEQ ID NO: 1991573 - DNA, 15 bp, Homo sapiens
ggaggagttgtaaat

SEQ ID NO: 1991574 - DNA, 15 bp, Homo sapiens
gaggagttgtaaatg

SEQ ID NO: 1991575 - DNA, 15 bp, Homo sapiens
aggagttgtaaatga

SEQ ID NO: 1991576 - DNA, 15 bp, Homo sapiens
ggagttgtaaatgac

SEQ ID NO: 1991577 - DNA, 15 bp, Homo sapiens
gagttgtaaatgaca

SEQ ID NO: 1991578 - DNA, 15 bp, Homo sapiens
agttgtaaatgacaa

SEQ ID NO: 1991579 - DNA, 15 bp, Homo sapiens
gttgtaaatgacaag

SEQ ID NO: 1991580 - DNA, 15 bp, Homo sapiens
ttgtaaatgacaagt

SEQ ID NO: 1991581 - DNA, 15 bp, Homo sapiens
gtaaatgacaagttt

SEQ ID NO: 1991582 - DNA, 15 bp, Homo sapiens
taaatgacaagtttc

SEQ ID NO: 1991583 - DNA, 15 bp, Homo sapiens
aaatgacaagtttct

SEQ ID NO: 1991584 - DNA, 15 bp, Homo sapiens
aatgacaagtttctt

SEQ ID NO: 1991585 - DNA, 15 bp, Homo sapiens
atgacaagtttcttg

SEQ ID NO: 1991586 - DNA, 15 bp, Homo sapiens
tgacaagtttcttgt

SEQ ID NO: 1991587 - DNA, 15 bp, Homo sapiens
gacaagtttcttgtt

SEQ ID NO: 1991588 - DNA, 15 bp, Homo sapiens
acaagtttcttgttt

SEQ ID NO: 1991589 - DNA, 15 bp, Homo sapiens
caagtttcttgttta

SEQ ID NO: 1991590 - DNA, 15 bp, Homo sapiens
aagtttcttgtttat

SEQ ID NO: 1991591 - DNA, 15 bp, Homo sapiens
agtttcttgtttatt

SEQ ID NO: 1991592 - DNA, 15 bp, Homo sapiens
gtttcttgtttattg

SEQ ID NO: 1991593 - DNA, 15 bp, Homo sapiens
tttcttgtttattgt

SEQ ID NO: 1991594 - DNA, 15 bp, Homo sapiens
ttcttgtttattgtt

SEQ ID NO: 1991595 - DNA, 15 bp, Homo sapiens
tcttgtttattgttt

SEQ ID NO: 1991596 - DNA, 15 bp, Homo sapiens
cttgtttattgtttt

SEQ ID NO: 1991597 - DNA, 15 bp, Homo sapiens
ttgtttattgttttg

SEQ ID NO: 1991598 - DNA, 15 bp, Homo sapiens
tgtttattgttttga

SEQ ID NO: 1991599 - DNA, 15 bp, Homo sapiens
gtttattgttttgaa

SEQ ID NO: 1991600 - DNA, 15 bp, Homo sapiens
tttattgttttgaat

SEQ ID NO: 1991601 - DNA, 15 bp, Homo sapiens
ttattgttttgaata

SEQ ID NO: 1991602 - DNA, 15 bp, Homo sapiens
tattgttttgaataa

SEQ ID NO: 1991603 - DNA, 15 bp, Homo sapiens
attgttttgaataaa

SEQ ID NO: 1991604 - DNA, 15 bp, Homo sapiens
ttgttttgaataaag

SEQ ID NO: 1991605 - DNA, 15 bp, Homo sapiens
tgttttgaataaagg

SEQ ID NO: 1991606 - DNA, 15 bp, Homo sapiens
gttttgaataaaggg

SEQ ID NO: 1991607 - DNA, 15 bp, Homo sapiens
ttttgaataaagggg

SEQ ID NO: 1991608 - DNA, 15 bp, Homo sapiens
tttgaataaagggga

SEQ ID NO: 1991609 - DNA, 15 bp, Homo sapiens
ttgaataaaggggaa

SEQ ID NO: 1991610 - DNA, 15 bp, Homo sapiens
tgaataaaggggaaa

SEQ ID NO: 1991611 - DNA, 15 bp, Homo sapiens
gaataaaggggaaaa

SEQ ID NO: 1991612 - DNA, 15 bp, Homo sapiens
aataaaggggaaaat

SEQ ID NO: 1991613 - DNA, 15 bp, Homo sapiens
ataaaggggaaaatt

SEQ ID NO: 1991614 - DNA, 15 bp, Homo sapiens
taaaggggaaaattg

SEQ ID NO: 1991615 - DNA, 15 bp, Homo sapiens
aaaggggaaaattgt

SEQ ID NO: 1991616 - DNA, 15 bp, Homo sapiens
aaggggaaaattgtt

SEQ ID NO: 1991617 - DNA, 15 bp, Homo sapiens
aggggaaaattgttt

SEQ ID NO: 1991618 - DNA, 15 bp, Homo sapiens
ggggaaaattgtttt

SEQ ID NO: 1991619 - DNA, 15 bp, Homo sapiens
gggaaaattgttttc

SEQ ID NO: 1991620 - DNA, 15 bp, Homo sapiens
ggaaaattgttttca

SEQ ID NO: 1991621 - DNA, 15 bp, Homo sapiens
gaaaattgttttcag

SEQ ID NO: 1991622 - DNA, 15 bp, Homo sapiens
aaaattgttttcagt

SEQ ID NO: 1991623 - DNA, 15 bp, Homo sapiens
aaattgttttcagtt

SEQ ID NO: 1991624 - DNA, 15 bp, Homo sapiens
aattgttttcagtta

SEQ ID NO: 1991625 - DNA, 15 bp, Homo sapiens
attgttttcagttat

SEQ ID NO: 1991626 - DNA, 15 bp, Homo sapiens
ttgttttcagttatt

SEQ ID NO: 1991627 - DNA, 15 bp, Homo sapiens
tgttttcagttattc

SEQ ID NO: 1991628 - DNA, 15 bp, Homo sapiens
gttttcagttattca

SEQ ID NO: 1991629 - DNA, 15 bp, Homo sapiens
ttttcagttattcat

SEQ ID NO: 1991630 - DNA, 15 bp, Homo sapiens
tttcagttattcata

SEQ ID NO: 1991631 - DNA, 15 bp, Homo sapiens
ttcagttattcataa

SEQ ID NO: 1991632 - DNA, 15 bp, Homo sapiens
tcagttattcataaa

SEQ ID NO: 1991633 - DNA, 15 bp, Homo sapiens
cagttattcataaag

SEQ ID NO: 1991634 - DNA, 15 bp, Homo sapiens
agttattcataaagg

SEQ ID NO: 1991635 - DNA, 15 bp, Homo sapiens
gttattcataaagga

SEQ ID NO: 1991636 - DNA, 15 bp, Homo sapiens
ttattcataaaggac

SEQ ID NO: 1991637 - DNA, 15 bp, Homo sapiens
tattcataaaggact

SEQ ID NO: 1991638 - DNA, 15 bp, Homo sapiens
attcataaaggactt

SEQ ID NO: 1991639 - DNA, 15 bp, Homo sapiens
ttcataaaggactta

SEQ ID NO: 1991640 - DNA, 15 bp, Homo sapiens
tcataaaggacttaa

SEQ ID NO: 1991641 - DNA, 15 bp, Homo sapiens
cataaaggacttaaa

SEQ ID NO: 1991642 - DNA, 15 bp, Homo sapiens
ataaaggacttaaaa

SEQ ID NO: 1991643 - DNA, 15 bp, Homo sapiens
taaaggacttaaaaa

SEQ ID NO: 1991644 - DNA, 15 bp, Homo sapiens
aaaggacttaaaaat

SEQ ID NO: 1991645 - DNA, 15 bp, Homo sapiens
aaggacttaaaaatg

SEQ ID NO: 1991646 - DNA, 15 bp, Homo sapiens
aggacttaaaaatgg

SEQ ID NO: 1991647 - DNA, 15 bp, Homo sapiens
ggacttaaaaatggg

SEQ ID NO: 1991648 - DNA, 15 bp, Homo sapiens
gacttaaaaatgggc

SEQ ID NO: 1991649 - DNA, 15 bp, Homo sapiens
acttaaaaatgggct

SEQ ID NO: 1991650 - DNA, 15 bp, Homo sapiens
cttaaaaatgggctt

SEQ ID NO: 1991651 - DNA, 15 bp, Homo sapiens
aaaaatgggctttga

SEQ ID NO: 1991652 - DNA, 15 bp, Homo sapiens
aaaatgggctttgat

SEQ ID NO: 1991653 - DNA, 15 bp, Homo sapiens
aaatgggctttgatc

SEQ ID NO: 1991654 - DNA, 15 bp, Homo sapiens
aatgggctttgatcc

SEQ ID NO: 1991655 - DNA, 15 bp, Homo sapiens
atgggctttgatccc

SEQ ID NO: 1991656 - DNA, 15 bp, Homo sapiens
tgggctttgatccca

SEQ ID NO: 1991657 - DNA, 15 bp, Homo sapiens
gggctttgatcccaa

SEQ ID NO: 1991658 - DNA, 15 bp, Homo sapiens
ggctttgatcccaaa

SEQ ID NO: 1991659 - DNA, 15 bp, Homo sapiens
gctttgatcccaaaa

SEQ ID NO: 1991660 - DNA, 15 bp, Homo sapiens
ctttgatcccaaaag

SEQ ID NO: 1991661 - DNA, 15 bp, Homo sapiens
tttgatcccaaaagt

SEQ ID NO: 1991662 - DNA, 15 bp, Homo sapiens
ttgatcccaaaagtt

SEQ ID NO: 1991663 - DNA, 15 bp, Homo sapiens
tgatcccaaaagttg

SEQ ID NO: 1991664 - DNA, 15 bp, Homo sapiens
gatcccaaaagttgt

SEQ ID NO: 1991665 - DNA, 15 bp, Homo sapiens
atcccaaaagttgtt

SEQ ID NO: 1991666 - DNA, 15 bp, Homo sapiens
tcccaaaagttgttt

SEQ ID NO: 1991667 - DNA, 15 bp, Homo sapiens
cccaaaagttgtttt

SEQ ID NO: 1991668 - DNA, 15 bp, Homo sapiens
ccaaaagttgttttg

SEQ ID NO: 1991669 - DNA, 15 bp, Homo sapiens
caaaagttgttttga

SEQ ID NO: 1991670 - DNA, 15 bp, Homo sapiens
aaaagttgttttgaa

SEQ ID NO: 1991671 - DNA, 15 bp, Homo sapiens
aaagttgttttgaag

SEQ ID NO: 1991672 - DNA, 15 bp, Homo sapiens
aagttgttttgaagt

SEQ ID NO: 1991673 - DNA, 15 bp, Homo sapiens
agttgttttgaagtt

SEQ ID NO: 1991674 - DNA, 15 bp, Homo sapiens
gttgttttgaagtta

SEQ ID NO: 1991675 - DNA, 15 bp, Homo sapiens
ttgttttgaagttat

SEQ ID NO: 1991676 - DNA, 15 bp, Homo sapiens
tgttttgaagttatt

SEQ ID NO: 1991677 - DNA, 15 bp, Homo sapiens
gttttgaagttattt

SEQ ID NO: 1991678 - DNA, 15 bp, Homo sapiens
ttttgaagttatttc

SEQ ID NO: 1991679 - DNA, 15 bp, Homo sapiens
tttgaagttatttcc

SEQ ID NO: 1991680 - DNA, 15 bp, Homo sapiens
ttgaagttatttcct

SEQ ID NO: 1991681 - DNA, 15 bp, Homo sapiens
tgaagttatttcctg

SEQ ID NO: 1991682 - DNA, 15 bp, Homo sapiens
gaagttatttcctgc

SEQ ID NO: 1991683 - DNA, 15 bp, Homo sapiens
aagttatttcctgct

SEQ ID NO: 1991684 - DNA, 15 bp, Homo sapiens
agttatttcctgctt

SEQ ID NO: 1991685 - DNA, 15 bp, Homo sapiens
gttatttcctgcttt

SEQ ID NO: 1991686 - DNA, 15 bp, Homo sapiens
ttatttcctgcttta

SEQ ID NO: 1991687 - DNA, 15 bp, Homo sapiens
tatttcctgctttat

SEQ ID NO: 1991688 - DNA, 15 bp, Homo sapiens
atttcctgctttatc

SEQ ID NO: 1991689 - DNA, 15 bp, Homo sapiens
tttcctgctttatct

SEQ ID NO: 1991690 - DNA, 15 bp, Homo sapiens
ttcctgctttatctt

SEQ ID NO: 1991691 - DNA, 15 bp, Homo sapiens
tcctgctttatcttt

SEQ ID NO: 1991692 - DNA, 15 bp, Homo sapiens
cctgctttatctttg

SEQ ID NO: 1991693 - DNA, 15 bp, Homo sapiens
ctgctttatctttgg

SEQ ID NO: 1991694 - DNA, 15 bp, Homo sapiens
tgctttatctttgga

SEQ ID NO: 1991695 - DNA, 15 bp, Homo sapiens
gctttatctttggag

SEQ ID NO: 1991696 - DNA, 15 bp, Homo sapiens
ctttatctttggaga

SEQ ID NO: 1991697 - DNA, 15 bp, Homo sapiens
tttatctttggagac

SEQ ID NO: 1991698 - DNA, 15 bp, Homo sapiens
ttatctttggagacc

SEQ ID NO: 1991699 - DNA, 15 bp, Homo sapiens
tatctttggagaccc

SEQ ID NO: 1991700 - DNA, 15 bp, Homo sapiens
atctttggagaccct

SEQ ID NO: 1991701 - DNA, 15 bp, Homo sapiens
tctttggagaccctt

SEQ ID NO: 1991702 - DNA, 15 bp, Homo sapiens
ctttggagacccttc

SEQ ID NO: 1991703 - DNA, 15 bp, Homo sapiens
tttggagacccttct

SEQ ID NO: 1991704 - DNA, 15 bp, Homo sapiens
ttggagacccttctt

SEQ ID NO: 1991705 - DNA, 15 bp, Homo sapiens
tggagacccttcttc

SEQ ID NO: 1991706 - DNA, 15 bp, Homo sapiens
ggagacccttcttcc

SEQ ID NO: 1991707 - DNA, 15 bp, Homo sapiens
gagacccttcttccc

SEQ ID NO: 1991708 - DNA, 15 bp, Homo sapiens
agacccttcttccca

SEQ ID NO: 1991709 - DNA, 15 bp, Homo sapiens
gacccttcttcccac

SEQ ID NO: 1991710 - DNA, 15 bp, Homo sapiens
acccttcttcccacc

SEQ ID NO: 1991711 - DNA, 15 bp, Homo sapiens
cccttcttcccaccc

SEQ ID NO: 1991712 - DNA, 15 bp, Homo sapiens
ccttcttcccacccc

SEQ ID NO: 1991713 - DNA, 15 bp, Homo sapiens
cttcttcccaccccc

SEQ ID NO: 1991714 - DNA, 15 bp, Homo sapiens
ttcttcccaccccca

SEQ ID NO: 1991715 - DNA, 15 bp, Homo sapiens
tcttcccacccccac

SEQ ID NO: 1991716 - DNA, 15 bp, Homo sapiens
cttcccacccccaca

SEQ ID NO: 1991717 - DNA, 15 bp, Homo sapiens
ttcccacccccacat

SEQ ID NO: 1991718 - DNA, 15 bp, Homo sapiens
tcccacccccacatc

SEQ ID NO: 1991719 - DNA, 15 bp, Homo sapiens
cccacccccacatca

SEQ ID NO: 1991720 - DNA, 15 bp, Homo sapiens
ccacccccacatcaa

SEQ ID NO: 1991721 - DNA, 15 bp, Homo sapiens
cacccccacatcaaa

SEQ ID NO: 1991722 - DNA, 15 bp, Homo sapiens
acccccacatcaaag

SEQ ID NO: 1991723 - DNA, 15 bp, Homo sapiens
cccccacatcaaagc

SEQ ID NO: 1991724 - DNA, 15 bp, Homo sapiens
ccccacatcaaagca

SEQ ID NO: 1991725 - DNA, 15 bp, Homo sapiens
cccacatcaaagcaa

SEQ ID NO: 1991726 - DNA, 15 bp, Homo sapiens
ccacatcaaagcaaa

SEQ ID NO: 1991727 - DNA, 15 bp, Homo sapiens
cacatcaaagcaaat

SEQ ID NO: 1991728 - DNA, 15 bp, Homo sapiens
acatcaaagcaaatg

SEQ ID NO: 1991729 - DNA, 15 bp, Homo sapiens
catcaaagcaaatgc

SEQ ID NO: 1991730 - DNA, 15 bp, Homo sapiens
atcaaagcaaatgcc

SEQ ID NO: 1991731 - DNA, 15 bp, Homo sapiens
tcaaagcaaatgccc

SEQ ID NO: 1991732 - DNA, 15 bp, Homo sapiens
caaagcaaatgccct

SEQ ID NO: 1991733 - DNA, 15 bp, Homo sapiens
aaagcaaatgccctc

SEQ ID NO: 1991734 - DNA, 15 bp, Homo sapiens
aagcaaatgccctca

SEQ ID NO: 1991735 - DNA, 15 bp, Homo sapiens
agcaaatgccctcaa

SEQ ID NO: 1991736 - DNA, 15 bp, Homo sapiens
gcaaatgccctcaac

SEQ ID NO: 1991737 - DNA, 15 bp, Homo sapiens
caaatgccctcaact

SEQ ID NO: 1991738 - DNA, 15 bp, Homo sapiens
aaatgccctcaactg

SEQ ID NO: 1991739 - DNA, 15 bp, Homo sapiens
aatgccctcaactgc

SEQ ID NO: 1991740 - DNA, 15 bp, Homo sapiens
atgccctcaactgct

SEQ ID NO: 1991741 - DNA, 15 bp, Homo sapiens
tgccctcaactgctt

SEQ ID NO: 1991742 - DNA, 15 bp, Homo sapiens
gccctcaactgcttt

SEQ ID NO: 1991743 - DNA, 15 bp, Homo sapiens
ccctcaactgcttta

SEQ ID NO: 1991744 - DNA, 15 bp, Homo sapiens
cctcaactgctttag

SEQ ID NO: 1991745 - DNA, 15 bp, Homo sapiens
ctcaactgctttaga

SEQ ID NO: 1991746 - DNA, 15 bp, Homo sapiens
tcaactgctttagat

SEQ ID NO: 1991747 - DNA, 15 bp, Homo sapiens
caactgctttagatg

SEQ ID NO: 1991748 - DNA, 15 bp, Homo sapiens
aactgctttagatgc

SEQ ID NO: 1991749 - DNA, 15 bp, Homo sapiens
actgctttagatgca

SEQ ID NO: 1991750 - DNA, 15 bp, Homo sapiens
ctgctttagatgcag

SEQ ID NO: 1991751 - DNA, 15 bp, Homo sapiens
tgctttagatgcagt

SEQ ID NO: 1991752 - DNA, 15 bp, Homo sapiens
gctttagatgcagtc

SEQ ID NO: 1991753 - DNA, 15 bp, Homo sapiens
ctttagatgcagtct

SEQ ID NO: 1991754 - DNA, 15 bp, Homo sapiens
tttagatgcagtctt

SEQ ID NO: 1991755 - DNA, 15 bp, Homo sapiens
ttagatgcagtcttg

SEQ ID NO: 1991756 - DNA, 15 bp, Homo sapiens
tagatgcagtcttgc

SEQ ID NO: 1991757 - DNA, 15 bp, Homo sapiens
agatgcagtcttgca

SEQ ID NO: 1991758 - DNA, 15 bp, Homo sapiens
gatgcagtcttgcat

SEQ ID NO: 1991759 - DNA, 15 bp, Homo sapiens
atgcagtcttgcatt

SEQ ID NO: 1991760 - DNA, 15 bp, Homo sapiens
tgcagtcttgcattg

SEQ ID NO: 1991761 - DNA, 15 bp, Homo sapiens
gcagtcttgcattga

SEQ ID NO: 1991762 - DNA, 15 bp, Homo sapiens
cagtcttgcattgaa

SEQ ID NO: 1991763 - DNA, 15 bp, Homo sapiens
agtcttgcattgaaa

SEQ ID NO: 1991764 - DNA, 15 bp, Homo sapiens
gtcttgcattgaaat

SEQ ID NO: 1991765 - DNA, 15 bp, Homo sapiens
tcttgcattgaaata

SEQ ID NO: 1991766 - DNA, 15 bp, Homo sapiens
cttgcattgaaatag

SEQ ID NO: 1991767 - DNA, 15 bp, Homo sapiens
ttgcattgaaatagg

SEQ ID NO: 1991768 - DNA, 15 bp, Homo sapiens
tgcattgaaataggt

SEQ ID NO: 1991769 - DNA, 15 bp, Homo sapiens
gcattgaaataggta

SEQ ID NO: 1991770 - DNA, 15 bp, Homo sapiens
cattgaaataggtat

SEQ ID NO: 1991771 - DNA, 15 bp, Homo sapiens
attgaaataggtatc

SEQ ID NO: 1991772 - DNA, 15 bp, Homo sapiens
ttgaaataggtatca

SEQ ID NO: 1991773 - DNA, 15 bp, Homo sapiens
tgaaataggtatcac

SEQ ID NO: 1991774 - DNA, 15 bp, Homo sapiens
gaaataggtatcaca

SEQ ID NO: 1991775 - DNA, 15 bp, Homo sapiens
aaataggtatcacat

SEQ ID NO: 1991776 - DNA, 15 bp, Homo sapiens
aataggtatcacatt

SEQ ID NO: 1991777 - DNA, 15 bp, Homo sapiens
ataggtatcacattg

SEQ ID NO: 1991778 - DNA, 15 bp, Homo sapiens
taggtatcacattgt

SEQ ID NO: 1991779 - DNA, 15 bp, Homo sapiens
aggtatcacattgtt

SEQ ID NO: 1991780 - DNA, 15 bp, Homo sapiens
ggtatcacattgttt

SEQ ID NO: 1991781 - DNA, 15 bp, Homo sapiens
gtatcacattgtttt

SEQ ID NO: 1991782 - DNA, 15 bp, Homo sapiens
tatcacattgtttta

SEQ ID NO: 1991783 - DNA, 15 bp, Homo sapiens
atcacattgttttat

SEQ ID NO: 1991784 - DNA, 15 bp, Homo sapiens
tcacattgttttatt

SEQ ID NO: 1991785 - DNA, 15 bp, Homo sapiens
cacattgttttattt

SEQ ID NO: 1991786 - DNA, 15 bp, Homo sapiens
acattgttttatttt

SEQ ID NO: 1991787 - DNA, 15 bp, Homo sapiens
cattgttttattttg

SEQ ID NO: 1991788 - DNA, 15 bp, Homo sapiens
attgttttattttgc

SEQ ID NO: 1991789 - DNA, 15 bp, Homo sapiens
ttgttttattttgct

SEQ ID NO: 1991790 - DNA, 15 bp, Homo sapiens
tgttttattttgctt

SEQ ID NO: 1991791 - DNA, 15 bp, Homo sapiens
gttttattttgcttg

SEQ ID NO: 1991792 - DNA, 15 bp, Homo sapiens
ttttattttgcttga

SEQ ID NO: 1991793 - DNA, 15 bp, Homo sapiens
tttattttgcttgaa

SEQ ID NO: 1991794 - DNA, 15 bp, Homo sapiens
ttattttgcttgaat

SEQ ID NO: 1991795 - DNA, 15 bp, Homo sapiens
tattttgcttgaatg

SEQ ID NO: 1991796 - DNA, 15 bp, Homo sapiens
attttgcttgaatgg

SEQ ID NO: 1991797 - DNA, 15 bp, Homo sapiens
ttttgcttgaatggg

SEQ ID NO: 1991798 - DNA, 15 bp, Homo sapiens
tttgcttgaatgggt

SEQ ID NO: 1991799 - DNA, 15 bp, Homo sapiens
ttgcttgaatgggtg

SEQ ID NO: 1991800 - DNA, 15 bp, Homo sapiens
tgcttgaatgggtgc

SEQ ID NO: 1991801 - DNA, 15 bp, Homo sapiens
gcttgaatgggtgct

SEQ ID NO: 1991802 - DNA, 15 bp, Homo sapiens
cttgaatgggtgctg

SEQ ID NO: 1991803 - DNA, 15 bp, Homo sapiens
ttgaatgggtgctgt

SEQ ID NO: 1991804 - DNA, 15 bp, Homo sapiens
tgaatgggtgctgtt

SEQ ID NO: 1991805 - DNA, 15 bp, Homo sapiens
gaatgggtgctgttg

SEQ ID NO: 1991806 - DNA, 15 bp, Homo sapiens
aatgggtgctgttgg

SEQ ID NO: 1991807 - DNA, 15 bp, Homo sapiens
atgggtgctgttggc

SEQ ID NO: 1991808 - DNA, 15 bp, Homo sapiens
tgggtgctgttggct

SEQ ID NO: 1991809 - DNA, 15 bp, Homo sapiens
gggtgctgttggctt

SEQ ID NO: 1991810 - DNA, 15 bp, Homo sapiens
ggtgctgttggctta

SEQ ID NO: 1991811 - DNA, 15 bp, Homo sapiens
gtgctgttggcttaa

SEQ ID NO: 1991812 - DNA, 15 bp, Homo sapiens
tgctgttggcttaaa

SEQ ID NO: 1991813 - DNA, 15 bp, Homo sapiens
gctgttggcttaaac

SEQ ID NO: 1991814 - DNA, 15 bp, Homo sapiens
ctgttggcttaaaca

SEQ ID NO: 1991815 - DNA, 15 bp, Homo sapiens
tgttggcttaaacat

SEQ ID NO: 1991816 - DNA, 15 bp, Homo sapiens
gttggcttaaacatc

SEQ ID NO: 1991817 - DNA, 15 bp, Homo sapiens
ttggcttaaacatct

SEQ ID NO: 1991818 - DNA, 15 bp, Homo sapiens
tggcttaaacatcta

SEQ ID NO: 1991819 - DNA, 15 bp, Homo sapiens
ggcttaaacatctaa

SEQ ID NO: 1991820 - DNA, 15 bp, Homo sapiens
gcttaaacatctaat

SEQ ID NO: 1991821 - DNA, 15 bp, Homo sapiens
cttaaacatctaatt

SEQ ID NO: 1991822 - DNA, 15 bp, Homo sapiens
ttaaacatctaattg

SEQ ID NO: 1991823 - DNA, 15 bp, Homo sapiens
taaacatctaattgc

SEQ ID NO: 1991824 - DNA, 15 bp, Homo sapiens
aaacatctaattgca

SEQ ID NO: 1991825 - DNA, 15 bp, Homo sapiens
aacatctaattgcat

SEQ ID NO: 1991826 - DNA, 15 bp, Homo sapiens
acatctaattgcatc

SEQ ID NO: 1991827 - DNA, 15 bp, Homo sapiens
catctaattgcatct

SEQ ID NO: 1991828 - DNA, 15 bp, Homo sapiens
atctaattgcatctg

SEQ ID NO: 1991829 - DNA, 15 bp, Homo sapiens
tctaattgcatctgc

SEQ ID NO: 1991830 - DNA, 15 bp, Homo sapiens
ctaattgcatctgct

SEQ ID NO: 1991831 - DNA, 15 bp, Homo sapiens
taattgcatctgctt

SEQ ID NO: 1991832 - DNA, 15 bp, Homo sapiens
aattgcatctgcttt

SEQ ID NO: 1991833 - DNA, 15 bp, Homo sapiens
attgcatctgctttg

SEQ ID NO: 1991834 - DNA, 15 bp, Homo sapiens
ttgcatctgctttgt

SEQ ID NO: 1991835 - DNA, 15 bp, Homo sapiens
tgcatctgctttgtc

SEQ ID NO: 1991836 - DNA, 15 bp, Homo sapiens
gcatctgctttgtct

SEQ ID NO: 1991837 - DNA, 15 bp, Homo sapiens
catctgctttgtctt

SEQ ID NO: 1991838 - DNA, 15 bp, Homo sapiens
atctgctttgtcttc

SEQ ID NO: 1991839 - DNA, 15 bp, Homo sapiens
tctgctttgtcttct

SEQ ID NO: 1991840 - DNA, 15 bp, Homo sapiens
ctgctttgtcttctt

SEQ ID NO: 1991841 - DNA, 15 bp, Homo sapiens
tgctttgtcttcttt

SEQ ID NO: 1991842 - DNA, 15 bp, Homo sapiens
gctttgtcttcttta

SEQ ID NO: 1991843 - DNA, 15 bp, Homo sapiens
ctttgtcttctttag

SEQ ID NO: 1991844 - DNA, 15 bp, Homo sapiens
tttgtcttctttagt

SEQ ID NO: 1991845 - DNA, 15 bp, Homo sapiens
ttgtcttctttagtt

SEQ ID NO: 1991846 - DNA, 15 bp, Homo sapiens
tgtcttctttagttg

SEQ ID NO: 1991847 - DNA, 15 bp, Homo sapiens
gtcttctttagttgt

SEQ ID NO: 1991848 - DNA, 15 bp, Homo sapiens
tcttctttagttgtg

SEQ ID NO: 1991849 - DNA, 15 bp, Homo sapiens
cttctttagttgtgt

SEQ ID NO: 1991850 - DNA, 15 bp, Homo sapiens
ttctttagttgtgtc

SEQ ID NO: 1991851 - DNA, 15 bp, Homo sapiens
tctttagttgtgtct

SEQ ID NO: 1991852 - DNA, 15 bp, Homo sapiens
ctttagttgtgtcta

SEQ ID NO: 1991853 - DNA, 15 bp, Homo sapiens
tttagttgtgtctac

SEQ ID NO: 1991854 - DNA, 15 bp, Homo sapiens
ttagttgtgtctact

SEQ ID NO: 1991855 - DNA, 15 bp, Homo sapiens
tagttgtgtctactt

SEQ ID NO: 1991856 - DNA, 15 bp, Homo sapiens
agttgtgtctactta

SEQ ID NO: 1991857 - DNA, 15 bp, Homo sapiens
gttgtgtctacttat

SEQ ID NO: 1991858 - DNA, 15 bp, Homo sapiens
ttgtgtctacttatg

SEQ ID NO: 1991859 - DNA, 15 bp, Homo sapiens
tgtgtctacttatgg

SEQ ID NO: 1991860 - DNA, 15 bp, Homo sapiens
gtgtctacttatggg

SEQ ID NO: 1991861 - DNA, 15 bp, Homo sapiens
tgtctacttatgggc

SEQ ID NO: 1991862 - DNA, 15 bp, Homo sapiens
gtctacttatgggcc

SEQ ID NO: 1991863 - DNA, 15 bp, Homo sapiens
tctacttatgggcca

SEQ ID NO: 1991864 - DNA, 15 bp, Homo sapiens
ctacttatgggccaa

SEQ ID NO: 1991865 - DNA, 15 bp, Homo sapiens
tacttatgggccaaa

SEQ ID NO: 1991866 - DNA, 15 bp, Homo sapiens
acttatgggccaaaa

SEQ ID NO: 1991867 - DNA, 15 bp, Homo sapiens
cttatgggccaaaag

SEQ ID NO: 1991868 - DNA, 15 bp, Homo sapiens
ttatgggccaaaaga

SEQ ID NO: 1991869 - DNA, 15 bp, Homo sapiens
tatgggccaaaagag

SEQ ID NO: 1991870 - DNA, 15 bp, Homo sapiens
atgggccaaaagagc

SEQ ID NO: 1991871 - DNA, 15 bp, Homo sapiens
tgggccaaaagagca

SEQ ID NO: 1991872 - DNA, 15 bp, Homo sapiens
gggccaaaagagcat

SEQ ID NO: 1991873 - DNA, 15 bp, Homo sapiens
ggccaaaagagcatt

SEQ ID NO: 1991874 - DNA, 15 bp, Homo sapiens
gccaaaagagcattt

SEQ ID NO: 1991875 - DNA, 15 bp, Homo sapiens
ccaaaagagcatttc

SEQ ID NO: 1991876 - DNA, 15 bp, Homo sapiens
caaaagagcatttct

SEQ ID NO: 1991877 - DNA, 15 bp, Homo sapiens
aaaagagcatttcta

SEQ ID NO: 1991878 - DNA, 15 bp, Homo sapiens
aaagagcatttctac

SEQ ID NO: 1991879 - DNA, 15 bp, Homo sapiens
aagagcatttctacc

SEQ ID NO: 1991880 - DNA, 15 bp, Homo sapiens
agagcatttctacct

SEQ ID NO: 1991881 - DNA, 15 bp, Homo sapiens
gagcatttctacctc

SEQ ID NO: 1991882 - DNA, 15 bp, Homo sapiens
agcatttctacctct

SEQ ID NO: 1991883 - DNA, 15 bp, Homo sapiens
gcatttctacctctg

SEQ ID NO: 1991884 - DNA, 15 bp, Homo sapiens
catttctacctctgt

SEQ ID NO: 1991885 - DNA, 15 bp, Homo sapiens
atttctacctctgta

SEQ ID NO: 1991886 - DNA, 15 bp, Homo sapiens
tttctacctctgtaa

SEQ ID NO: 1991887 - DNA, 15 bp, Homo sapiens
ttctacctctgtaat

SEQ ID NO: 1991888 - DNA, 15 bp, Homo sapiens
tctacctctgtaatt

SEQ ID NO: 1991889 - DNA, 15 bp, Homo sapiens
ctacctctgtaattt

SEQ ID NO: 1991890 - DNA, 15 bp, Homo sapiens
tacctctgtaatttc

SEQ ID NO: 1991891 - DNA, 15 bp, Homo sapiens
acctctgtaatttca

SEQ ID NO: 1991892 - DNA, 15 bp, Homo sapiens
cctctgtaatttcat

SEQ ID NO: 1991893 - DNA, 15 bp, Homo sapiens
ctctgtaatttcatt

SEQ ID NO: 1991894 - DNA, 15 bp, Homo sapiens
tctgtaatttcattt

SEQ ID NO: 1991895 - DNA, 15 bp, Homo sapiens
ctgtaatttcatttg

SEQ ID NO: 1991896 - DNA, 15 bp, Homo sapiens
tgtaatttcatttgc

SEQ ID NO: 1991897 - DNA, 15 bp, Homo sapiens
gtaatttcatttgca

SEQ ID NO: 1991898 - DNA, 15 bp, Homo sapiens
taatttcatttgcat

SEQ ID NO: 1991899 - DNA, 15 bp, Homo sapiens
aatttcatttgcata

SEQ ID NO: 1991900 - DNA, 15 bp, Homo sapiens
atttcatttgcatat

SEQ ID NO: 1991901 - DNA, 15 bp, Homo sapiens
tttcatttgcatatt

SEQ ID NO: 1991902 - DNA, 15 bp, Homo sapiens
ttcatttgcatattg

SEQ ID NO: 1991903 - DNA, 15 bp, Homo sapiens
tcatttgcatattgg

SEQ ID NO: 1991904 - DNA, 15 bp, Homo sapiens
catttgcatattggt

SEQ ID NO: 1991905 - DNA, 15 bp, Homo sapiens
atttgcatattggtt

SEQ ID NO: 1991906 - DNA, 15 bp, Homo sapiens
tttgcatattggttt

SEQ ID NO: 1991907 - DNA, 15 bp, Homo sapiens
ttgcatattggtttt

SEQ ID NO: 1991908 - DNA, 15 bp, Homo sapiens
tgcatattggttttc

SEQ ID NO: 1991909 - DNA, 15 bp, Homo sapiens
gcatattggttttca

SEQ ID NO: 1991910 - DNA, 15 bp, Homo sapiens
catattggttttcag

SEQ ID NO: 1991911 - DNA, 15 bp, Homo sapiens
atattggttttcaga

SEQ ID NO: 1991912 - DNA, 15 bp, Homo sapiens
tattggttttcagat

SEQ ID NO: 1991913 - DNA, 15 bp, Homo sapiens
attggttttcagata

SEQ ID NO: 1991914 - DNA, 15 bp, Homo sapiens
ttggttttcagataa

SEQ ID NO: 1991915 - DNA, 15 bp, Homo sapiens
tggttttcagataaa

SEQ ID NO: 1991916 - DNA, 15 bp, Homo sapiens
ggttttcagataaat

SEQ ID NO: 1991917 - DNA, 15 bp, Homo sapiens
gttttcagataaatt

SEQ ID NO: 1991918 - DNA, 15 bp, Homo sapiens
ttttcagataaattg

SEQ ID NO: 1991919 - DNA, 15 bp, Homo sapiens
tttcagataaattga

SEQ ID NO: 1991920 - DNA, 15 bp, Homo sapiens
ttcagataaattgaa

SEQ ID NO: 1991921 - DNA, 15 bp, Homo sapiens
tcagataaattgaag

SEQ ID NO: 1991922 - DNA, 15 bp, Homo sapiens
cagataaattgaaga

SEQ ID NO: 1991923 - DNA, 15 bp, Homo sapiens
agataaattgaagat

SEQ ID NO: 1991924 - DNA, 15 bp, Homo sapiens
gataaattgaagatt

SEQ ID NO: 1991925 - DNA, 15 bp, Homo sapiens
ataaattgaagatta

SEQ ID NO: 1991926 - DNA, 15 bp, Homo sapiens
taaattgaagattaa

SEQ ID NO: 1991927 - DNA, 15 bp, Homo sapiens
aaattgaagattaat

SEQ ID NO: 1991928 - DNA, 15 bp, Homo sapiens
aattgaagattaatt

SEQ ID NO: 1991929 - DNA, 15 bp, Homo sapiens
attgaagattaatta

SEQ ID NO: 1991930 - DNA, 15 bp, Homo sapiens
ttgaagattaattat

SEQ ID NO: 1991931 - DNA, 15 bp, Homo sapiens
tgaagattaattata

SEQ ID NO: 1991932 - DNA, 15 bp, Homo sapiens
gaagattaattatat

SEQ ID NO: 1991933 - DNA, 15 bp, Homo sapiens
aagattaattatatg

SEQ ID NO: 1991934 - DNA, 15 bp, Homo sapiens
agattaattatatga

SEQ ID NO: 1991935 - DNA, 15 bp, Homo sapiens
gattaattatatgaa

SEQ ID NO: 1991936 - DNA, 15 bp, Homo sapiens
attaattatatgaag

SEQ ID NO: 1991937 - DNA, 15 bp, Homo sapiens
ttaattatatgaagt

SEQ ID NO: 1991938 - DNA, 15 bp, Homo sapiens
taattatatgaagta

SEQ ID NO: 1991939 - DNA, 15 bp, Homo sapiens
aattatatgaagtat

SEQ ID NO: 1991940 - DNA, 15 bp, Homo sapiens
attatatgaagtata

SEQ ID NO: 1991941 - DNA, 15 bp, Homo sapiens
ttatatgaagtatat

SEQ ID NO: 1991942 - DNA, 15 bp, Homo sapiens
tatatgaagtatatg

SEQ ID NO: 1991943 - DNA, 15 bp, Homo sapiens
atatgaagtatatgg

SEQ ID NO: 1991944 - DNA, 15 bp, Homo sapiens
tatgaagtatatggt

SEQ ID NO: 1991945 - DNA, 15 bp, Homo sapiens
atgaagtatatggtt

SEQ ID NO: 1991946 - DNA, 15 bp, Homo sapiens
tgaagtatatggttt

SEQ ID NO: 1991947 - DNA, 15 bp, Homo sapiens
gaagtatatggtttg

SEQ ID NO: 1991948 - DNA, 15 bp, Homo sapiens
aagtatatggtttgt

SEQ ID NO: 1991949 - DNA, 15 bp, Homo sapiens
agtatatggtttgta

SEQ ID NO: 1991950 - DNA, 15 bp, Homo sapiens
gtatatggtttgtaa

SEQ ID NO: 1991951 - DNA, 15 bp, Homo sapiens
tatatggtttgtaat

SEQ ID NO: 1991952 - DNA, 15 bp, Homo sapiens
atatggtttgtaatc

SEQ ID NO: 1991953 - DNA, 15 bp, Homo sapiens
tatggtttgtaatct

SEQ ID NO: 1991954 - DNA, 15 bp, Homo sapiens
atggtttgtaatctc

SEQ ID NO: 1991955 - DNA, 15 bp, Homo sapiens
tggtttgtaatctca

SEQ ID NO: 1991956 - DNA, 15 bp, Homo sapiens
ggtttgtaatctcaa

SEQ ID NO: 1991957 - DNA, 15 bp, Homo sapiens
gtttgtaatctcaat

SEQ ID NO: 1991958 - DNA, 15 bp, Homo sapiens
tttgtaatctcaatt

SEQ ID NO: 1991959 - DNA, 15 bp, Homo sapiens
ttgtaatctcaattg

SEQ ID NO: 1991960 - DNA, 15 bp, Homo sapiens
tgtaatctcaattga

SEQ ID NO: 1991961 - DNA, 15 bp, Homo sapiens
gtaatctcaattgaa

SEQ ID NO: 1991962 - DNA, 15 bp, Homo sapiens
taatctcaattgaag

SEQ ID NO: 1991963 - DNA, 15 bp, Homo sapiens
aatctcaattgaagg

SEQ ID NO: 1991964 - DNA, 15 bp, Homo sapiens
atctcaattgaaggt

SEQ ID NO: 1991965 - DNA, 15 bp, Homo sapiens
tctcaattgaaggtg

SEQ ID NO: 1991966 - DNA, 15 bp, Homo sapiens
ctcaattgaaggtga

SEQ ID NO: 1991967 - DNA, 15 bp, Homo sapiens
tcaattgaaggtgaa

SEQ ID NO: 1991968 - DNA, 15 bp, Homo sapiens
caattgaaggtgaat

SEQ ID NO: 1991969 - DNA, 15 bp, Homo sapiens
aattgaaggtgaatt

SEQ ID NO: 1991970 - DNA, 15 bp, Homo sapiens
attgaaggtgaattt

SEQ ID NO: 1991971 - DNA, 15 bp, Homo sapiens
ttgaaggtgaatttt

SEQ ID NO: 1991972 - DNA, 15 bp, Homo sapiens
tgaaggtgaattttt

SEQ ID NO: 1991973 - DNA, 15 bp, Homo sapiens
gaaggtgaatttttt

SEQ ID NO: 1991974 - DNA, 15 bp, Homo sapiens
aaggtgaatttttta

SEQ ID NO: 1991975 - DNA, 15 bp, Homo sapiens
aggtgaattttttat

SEQ ID NO: 1991976 - DNA, 15 bp, Homo sapiens
ggtgaattttttatt

SEQ ID NO: 1991977 - DNA, 15 bp, Homo sapiens
gtgaattttttattt

SEQ ID NO: 1991978 - DNA, 15 bp, Homo sapiens
tgaattttttatttt

SEQ ID NO: 1991979 - DNA, 15 bp, Homo sapiens
gaattttttattttc

SEQ ID NO: 1991980 - DNA, 15 bp, Homo sapiens
aattttttattttcc

SEQ ID NO: 1991981 - DNA, 15 bp, Homo sapiens
attttttattttcct

SEQ ID NO: 1991982 - DNA, 15 bp, Homo sapiens
ttttttattttcctg

SEQ ID NO: 1991983 - DNA, 15 bp, Homo sapiens
tttttattttcctgg

SEQ ID NO: 1991984 - DNA, 15 bp, Homo sapiens
ttttattttcctggt

SEQ ID NO: 1991985 - DNA, 15 bp, Homo sapiens
tttattttcctggtt

SEQ ID NO: 1991986 - DNA, 15 bp, Homo sapiens
ttattttcctggttg

SEQ ID NO: 1991987 - DNA, 15 bp, Homo sapiens
tattttcctggttga

SEQ ID NO: 1991988 - DNA, 15 bp, Homo sapiens
attttcctggttgaa

SEQ ID NO: 1991989 - DNA, 15 bp, Homo sapiens
ttttcctggttgaat

SEQ ID NO: 1991990 - DNA, 15 bp, Homo sapiens
tttcctggttgaata

SEQ ID NO: 1991991 - DNA, 15 bp, Homo sapiens
ttcctggttgaatat

SEQ ID NO: 1991992 - DNA, 15 bp, Homo sapiens
tcctggttgaatata

SEQ ID NO: 1991993 - DNA, 15 bp, Homo sapiens
cctggttgaatataa

SEQ ID NO: 1991994 - DNA, 15 bp, Homo sapiens
ctggttgaatataat

SEQ ID NO: 1991995 - DNA, 15 bp, Homo sapiens
tggttgaatataatg

SEQ ID NO: 1991996 - DNA, 15 bp, Homo sapiens
ggttgaatataatgg

SEQ ID NO: 1991997 - DNA, 15 bp, Homo sapiens
gttgaatataatgga

SEQ ID NO: 1991998 - DNA, 15 bp, Homo sapiens
ttgaatataatggaa

SEQ ID NO: 1991999 - DNA, 15 bp, Homo sapiens
tgaatataatggaat

SEQ ID NO: 1992000 - DNA, 15 bp, Homo sapiens
gaatataatggaatc

SEQ ID NO: 1992001 - DNA, 15 bp, Homo sapiens
aatataatggaatca

SEQ ID NO: 1992002 - DNA, 15 bp, Homo sapiens
atataatggaatcat

SEQ ID NO: 1992003 - DNA, 15 bp, Homo sapiens
tataatggaatcatt

SEQ ID NO: 1992004 - DNA, 15 bp, Homo sapiens
ataatggaatcattt

SEQ ID NO: 1992005 - DNA, 15 bp, Homo sapiens
taatggaatcatttt

SEQ ID NO: 1992006 - DNA, 15 bp, Homo sapiens
aatggaatcattttg

SEQ ID NO: 1992007 - DNA, 15 bp, Homo sapiens
atggaatcattttgg

SEQ ID NO: 1992008 - DNA, 15 bp, Homo sapiens
tggaatcattttggt

SEQ ID NO: 1992009 - DNA, 15 bp, Homo sapiens
ggaatcattttggta

SEQ ID NO: 1992010 - DNA, 15 bp, Homo sapiens
gaatcattttggtat

SEQ ID NO: 1992011 - DNA, 15 bp, Homo sapiens
aatcattttggtatg

SEQ ID NO: 1992012 - DNA, 15 bp, Homo sapiens
atcattttggtatgg

SEQ ID NO: 1992013 - DNA, 15 bp, Homo sapiens
tcattttggtatgga

SEQ ID NO: 1992014 - DNA, 15 bp, Homo sapiens
cattttggtatggag

SEQ ID NO: 1992015 - DNA, 15 bp, Homo sapiens
attttggtatggaga

SEQ ID NO: 1992016 - DNA, 15 bp, Homo sapiens
ttttggtatggagaa

SEQ ID NO: 1992017 - DNA, 15 bp, Homo sapiens
tttggtatggagaag

SEQ ID NO: 1992018 - DNA, 15 bp, Homo sapiens
ttggtatggagaaga

SEQ ID NO: 1992019 - DNA, 15 bp, Homo sapiens
tggtatggagaagaa

SEQ ID NO: 1992020 - DNA, 15 bp, Homo sapiens
ggtatggagaagaaa

SEQ ID NO: 1992021 - DNA, 15 bp, Homo sapiens
gtatggagaagaaat

SEQ ID NO: 1992022 - DNA, 15 bp, Homo sapiens
tatggagaagaaatg

SEQ ID NO: 1992023 - DNA, 15 bp, Homo sapiens
atggagaagaaatgg

SEQ ID NO: 1992024 - DNA, 15 bp, Homo sapiens
tggagaagaaatggt

SEQ ID NO: 1992025 - DNA, 15 bp, Homo sapiens
ggagaagaaatggtt

SEQ ID NO: 1992026 - DNA, 15 bp, Homo sapiens
gagaagaaatggtta

SEQ ID NO: 1992027 - DNA, 15 bp, Homo sapiens
agaagaaatggttaa

SEQ ID NO: 1992028 - DNA, 15 bp, Homo sapiens
gaagaaatggttaaa

SEQ ID NO: 1992029 - DNA, 15 bp, Homo sapiens
aagaaatggttaaaa

SEQ ID NO: 1992030 - DNA, 15 bp, Homo sapiens
agaaatggttaaaaa

SEQ ID NO: 1992031 - DNA, 15 bp, Homo sapiens
gaaatggttaaaaat

SEQ ID NO: 1992032 - DNA, 15 bp, Homo sapiens
aaatggttaaaaata

SEQ ID NO: 1992033 - DNA, 15 bp, Homo sapiens
aatggttaaaaatag

SEQ ID NO: 1992034 - DNA, 15 bp, Homo sapiens
atggttaaaaataga

SEQ ID NO: 1992035 - DNA, 15 bp, Homo sapiens
tggttaaaaatagac

SEQ ID NO: 1992036 - DNA, 15 bp, Homo sapiens
ggttaaaaatagacc

SEQ ID NO: 1992037 - DNA, 15 bp, Homo sapiens
gttaaaaatagacca

SEQ ID NO: 1992038 - DNA, 15 bp, Homo sapiens
ttaaaaatagaccag

SEQ ID NO: 1992039 - DNA, 15 bp, Homo sapiens
taaaaatagaccagt

SEQ ID NO: 1992040 - DNA, 15 bp, Homo sapiens
aaaaatagaccagtg

SEQ ID NO: 1992041 - DNA, 15 bp, Homo sapiens
aaaatagaccagtgg

SEQ ID NO: 1992042 - DNA, 15 bp, Homo sapiens
aaatagaccagtggg

SEQ ID NO: 1992043 - DNA, 15 bp, Homo sapiens
aatagaccagtgggt

SEQ ID NO: 1992044 - DNA, 15 bp, Homo sapiens
atagaccagtgggtc

SEQ ID NO: 1992045 - DNA, 15 bp, Homo sapiens
tagaccagtgggtca

SEQ ID NO: 1992046 - DNA, 15 bp, Homo sapiens
agaccagtgggtcat

SEQ ID NO: 1992047 - DNA, 15 bp, Homo sapiens
gaccagtgggtcatc

SEQ ID NO: 1992048 - DNA, 15 bp, Homo sapiens
accagtgggtcatct

SEQ ID NO: 1992049 - DNA, 15 bp, Homo sapiens
ccagtgggtcatctc

SEQ ID NO: 1992050 - DNA, 15 bp, Homo sapiens
cagtgggtcatctca

SEQ ID NO: 1992051 - DNA, 15 bp, Homo sapiens
agtgggtcatctcag

SEQ ID NO: 1992052 - DNA, 15 bp, Homo sapiens
gtgggtcatctcagt

SEQ ID NO: 1992053 - DNA, 15 bp, Homo sapiens
tgggtcatctcagtg

SEQ ID NO: 1992054 - DNA, 15 bp, Homo sapiens
gggtcatctcagtgt

SEQ ID NO: 1992055 - DNA, 15 bp, Homo sapiens
ggtcatctcagtgtg

SEQ ID NO: 1992056 - DNA, 15 bp, Homo sapiens
gtcatctcagtgtga

SEQ ID NO: 1992057 - DNA, 15 bp, Homo sapiens
tcatctcagtgtgaa

SEQ ID NO: 1992058 - DNA, 15 bp, Homo sapiens
catctcagtgtgaaa

SEQ ID NO: 1992059 - DNA, 15 bp, Homo sapiens
atctcagtgtgaaag

SEQ ID NO: 1992060 - DNA, 15 bp, Homo sapiens
tctcagtgtgaaagt

SEQ ID NO: 1992061 - DNA, 15 bp, Homo sapiens
ctcagtgtgaaagtc

SEQ ID NO: 1992062 - DNA, 15 bp, Homo sapiens
tcagtgtgaaagtca

SEQ ID NO: 1992063 - DNA, 15 bp, Homo sapiens
cagtgtgaaagtcaa

SEQ ID NO: 1992064 - DNA, 15 bp, Homo sapiens
agtgtgaaagtcaag

SEQ ID NO: 1992065 - DNA, 15 bp, Homo sapiens
gtgtgaaagtcaaga

SEQ ID NO: 1992066 - DNA, 15 bp, Homo sapiens
tgtgaaagtcaagag

SEQ ID NO: 1992067 - DNA, 15 bp, Homo sapiens
gtgaaagtcaagagg

SEQ ID NO: 1992068 - DNA, 15 bp, Homo sapiens
tgaaagtcaagagga

SEQ ID NO: 1992069 - DNA, 15 bp, Homo sapiens
gaaagtcaagaggac

SEQ ID NO: 1992070 - DNA, 15 bp, Homo sapiens
aaagtcaagaggact

SEQ ID NO: 1992071 - DNA, 15 bp, Homo sapiens
aagtcaagaggactt

SEQ ID NO: 1992072 - DNA, 15 bp, Homo sapiens
agtcaagaggacttc

SEQ ID NO: 1992073 - DNA, 15 bp, Homo sapiens
gtcaagaggacttct

SEQ ID NO: 1992074 - DNA, 15 bp, Homo sapiens
tcaagaggacttcta

SEQ ID NO: 1992075 - DNA, 15 bp, Homo sapiens
caagaggacttctag

SEQ ID NO: 1992076 - DNA, 15 bp, Homo sapiens
aagaggacttctagg

SEQ ID NO: 1992077 - DNA, 15 bp, Homo sapiens
agaggacttctaggc

SEQ ID NO: 1992078 - DNA, 15 bp, Homo sapiens
gaggacttctaggct

SEQ ID NO: 1992079 - DNA, 15 bp, Homo sapiens
aggacttctaggctt

SEQ ID NO: 1992080 - DNA, 15 bp, Homo sapiens
ggacttctaggctta

SEQ ID NO: 1992081 - DNA, 15 bp, Homo sapiens
gacttctaggcttaa

SEQ ID NO: 1992082 - DNA, 15 bp, Homo sapiens
acttctaggcttaag

SEQ ID NO: 1992083 - DNA, 15 bp, Homo sapiens
cttctaggcttaagc

SEQ ID NO: 1992084 - DNA, 15 bp, Homo sapiens
ttctaggcttaagcc

SEQ ID NO: 1992085 - DNA, 15 bp, Homo sapiens
tctaggcttaagcct

SEQ ID NO: 1992086 - DNA, 15 bp, Homo sapiens
ctaggcttaagcctg

SEQ ID NO: 1992087 - DNA, 15 bp, Homo sapiens
taggcttaagcctgg

SEQ ID NO: 1992088 - DNA, 15 bp, Homo sapiens
aggcttaagcctggt

SEQ ID NO: 1992089 - DNA, 15 bp, Homo sapiens
ggcttaagcctggta

SEQ ID NO: 1992090 - DNA, 15 bp, Homo sapiens
gcttaagcctggtag

SEQ ID NO: 1992091 - DNA, 15 bp, Homo sapiens
cttaagcctggtagc

SEQ ID NO: 1992092 - DNA, 15 bp, Homo sapiens
ttaagcctggtagct

SEQ ID NO: 1992093 - DNA, 15 bp, Homo sapiens
taagcctggtagcta

SEQ ID NO: 1992094 - DNA, 15 bp, Homo sapiens
aagcctggtagctaa

SEQ ID NO: 1992095 - DNA, 15 bp, Homo sapiens
agcctggtagctaaa

SEQ ID NO: 1992096 - DNA, 15 bp, Homo sapiens
gcctggtagctaaat

SEQ ID NO: 1992097 - DNA, 15 bp, Homo sapiens
cctggtagctaaatt

SEQ ID NO: 1992098 - DNA, 15 bp, Homo sapiens
ctggtagctaaattt

SEQ ID NO: 1992099 - DNA, 15 bp, Homo sapiens
tggtagctaaatttc

SEQ ID NO: 1992100 - DNA, 15 bp, Homo sapiens
ggtagctaaatttct

SEQ ID NO: 1992101 - DNA, 15 bp, Homo sapiens
gtagctaaatttctg

SEQ ID NO: 1992102 - DNA, 15 bp, Homo sapiens
tagctaaatttctgt

SEQ ID NO: 1992103 - DNA, 15 bp, Homo sapiens
agctaaatttctgtt

SEQ ID NO: 1992104 - DNA, 15 bp, Homo sapiens
gctaaatttctgttg

SEQ ID NO: 1992105 - DNA, 15 bp, Homo sapiens
ctaaatttctgttgg

SEQ ID NO: 1992106 - DNA, 15 bp, Homo sapiens
taaatttctgttggc

SEQ ID NO: 1992107 - DNA, 15 bp, Homo sapiens
aaatttctgttggct

SEQ ID NO: 1992108 - DNA, 15 bp, Homo sapiens
aatttctgttggctc

SEQ ID NO: 1992109 - DNA, 15 bp, Homo sapiens
atttctgttggctct

SEQ ID NO: 1992110 - DNA, 15 bp, Homo sapiens
tttctgttggctcta

SEQ ID NO: 1992111 - DNA, 15 bp, Homo sapiens
ttctgttggctctac

SEQ ID NO: 1992112 - DNA, 15 bp, Homo sapiens
tctgttggctctacc

SEQ ID NO: 1992113 - DNA, 15 bp, Homo sapiens
ctgttggctctaccc

SEQ ID NO: 1992114 - DNA, 15 bp, Homo sapiens
tgttggctctaccct

SEQ ID NO: 1992115 - DNA, 15 bp, Homo sapiens
gttggctctaccctc

SEQ ID NO: 1992116 - DNA, 15 bp, Homo sapiens
ttggctctaccctct

SEQ ID NO: 1992117 - DNA, 15 bp, Homo sapiens
tggctctaccctctt

SEQ ID NO: 1992118 - DNA, 15 bp, Homo sapiens
ggctctaccctcttc

SEQ ID NO: 1992119 - DNA, 15 bp, Homo sapiens
gctctaccctcttca

SEQ ID NO: 1992120 - DNA, 15 bp, Homo sapiens
ctctaccctcttcat

SEQ ID NO: 1992121 - DNA, 15 bp, Homo sapiens
tctaccctcttcatg

SEQ ID NO: 1992122 - DNA, 15 bp, Homo sapiens
ctaccctcttcatga

SEQ ID NO: 1992123 - DNA, 15 bp, Homo sapiens
taccctcttcatgat

SEQ ID NO: 1992124 - DNA, 15 bp, Homo sapiens
accctcttcatgatg

SEQ ID NO: 1992125 - DNA, 15 bp, Homo sapiens
ccctcttcatgatga

SEQ ID NO: 1992126 - DNA, 15 bp, Homo sapiens
cctcttcatgatgag

SEQ ID NO: 1992127 - DNA, 15 bp, Homo sapiens
ctcttcatgatgagt

SEQ ID NO: 1992128 - DNA, 15 bp, Homo sapiens
tcttcatgatgagtc

SEQ ID NO: 1992129 - DNA, 15 bp, Homo sapiens
cttcatgatgagtcc

SEQ ID NO: 1992130 - DNA, 15 bp, Homo sapiens
ttcatgatgagtcca

SEQ ID NO: 1992131 - DNA, 15 bp, Homo sapiens
tcatgatgagtccaa

SEQ ID NO: 1992132 - DNA, 15 bp, Homo sapiens
catgatgagtccaag

SEQ ID NO: 1992133 - DNA, 15 bp, Homo sapiens
atgatgagtccaagt

SEQ ID NO: 1992134 - DNA, 15 bp, Homo sapiens
tgatgagtccaagtt

SEQ ID NO: 1992135 - DNA, 15 bp, Homo sapiens
gatgagtccaagttt

SEQ ID NO: 1992136 - DNA, 15 bp, Homo sapiens
atgagtccaagttta

SEQ ID NO: 1992137 - DNA, 15 bp, Homo sapiens
tgagtccaagtttat

SEQ ID NO: 1992138 - DNA, 15 bp, Homo sapiens
gagtccaagtttatt

SEQ ID NO: 1992139 - DNA, 15 bp, Homo sapiens
agtccaagtttattt

SEQ ID NO: 1992140 - DNA, 15 bp, Homo sapiens
gtccaagtttatttt

SEQ ID NO: 1992141 - DNA, 15 bp, Homo sapiens
tccaagtttattttg

SEQ ID NO: 1992142 - DNA, 15 bp, Homo sapiens
ccaagtttattttga

SEQ ID NO: 1992143 - DNA, 15 bp, Homo sapiens
caagtttattttgat

SEQ ID NO: 1992144 - DNA, 15 bp, Homo sapiens
aagtttattttgatc

SEQ ID NO: 1992145 - DNA, 15 bp, Homo sapiens
agtttattttgatct

SEQ ID NO: 1992146 - DNA, 15 bp, Homo sapiens
gtttattttgatctg

SEQ ID NO: 1992147 - DNA, 15 bp, Homo sapiens
tttattttgatctgc

SEQ ID NO: 1992148 - DNA, 15 bp, Homo sapiens
ttattttgatctgca

SEQ ID NO: 1992149 - DNA, 15 bp, Homo sapiens
tattttgatctgcat

SEQ ID NO: 1992150 - DNA, 15 bp, Homo sapiens
attttgatctgcatc

SEQ ID NO: 1992151 - DNA, 15 bp, Homo sapiens
ttttgatctgcatct

SEQ ID NO: 1992152 - DNA, 15 bp, Homo sapiens
tttgatctgcatctt

SEQ ID NO: 1992153 - DNA, 15 bp, Homo sapiens
ttgatctgcatcttt

SEQ ID NO: 1992154 - DNA, 15 bp, Homo sapiens
tgatctgcatctttc

SEQ ID NO: 1992155 - DNA, 15 bp, Homo sapiens
gatctgcatctttct

SEQ ID NO: 1992156 - DNA, 15 bp, Homo sapiens
atctgcatctttctt

SEQ ID NO: 1992157 - DNA, 15 bp, Homo sapiens
tctgcatctttcttt

SEQ ID NO: 1992158 - DNA, 15 bp, Homo sapiens
ctgcatctttctttt

SEQ ID NO: 1992159 - DNA, 15 bp, Homo sapiens
tgcatctttcttttt

SEQ ID NO: 1992160 - DNA, 15 bp, Homo sapiens
gcatctttctttttt

SEQ ID NO: 1992161 - DNA, 15 bp, Homo sapiens
catctttcttttttt

SEQ ID NO: 1992162 - DNA, 15 bp, Homo sapiens
tctttctttttttta

SEQ ID NO: 1992163 - DNA, 15 bp, Homo sapiens
ctttcttttttttaa

SEQ ID NO: 1992164 - DNA, 15 bp, Homo sapiens
tttcttttttttaat

SEQ ID NO: 1992165 - DNA, 15 bp, Homo sapiens
ttcttttttttaatg

SEQ ID NO: 1992166 - DNA, 15 bp, Homo sapiens
tcttttttttaatga

SEQ ID NO: 1992167 - DNA, 15 bp, Homo sapiens
cttttttttaatgaa

SEQ ID NO: 1992168 - DNA, 15 bp, Homo sapiens
tttttttaatgaatg

SEQ ID NO: 1992169 - DNA, 15 bp, Homo sapiens
ttttttaatgaatga

SEQ ID NO: 1992170 - DNA, 15 bp, Homo sapiens
tttttaatgaatgaa

SEQ ID NO: 1992171 - DNA, 15 bp, Homo sapiens
ttttaatgaatgaaa

SEQ ID NO: 1992172 - DNA, 15 bp, Homo sapiens
tttaatgaatgaaat

SEQ ID NO: 1992173 - DNA, 15 bp, Homo sapiens
ttaatgaatgaaatt

SEQ ID NO: 1992174 - DNA, 15 bp, Homo sapiens
taatgaatgaaattc

SEQ ID NO: 1992175 - DNA, 15 bp, Homo sapiens
aatgaatgaaattct

SEQ ID NO: 1992176 - DNA, 15 bp, Homo sapiens
atgaatgaaattctc

SEQ ID NO: 1992177 - DNA, 15 bp, Homo sapiens
tgaatgaaattctcc

SEQ ID NO: 1992178 - DNA, 15 bp, Homo sapiens
gaatgaaattctcct

SEQ ID NO: 1992179 - DNA, 15 bp, Homo sapiens
aatgaaattctcctt

SEQ ID NO: 1992180 - DNA, 15 bp, Homo sapiens
atgaaattctccttc

SEQ ID NO: 1992181 - DNA, 15 bp, Homo sapiens
tgaaattctccttca

SEQ ID NO: 1992182 - DNA, 15 bp, Homo sapiens
gaaattctccttcat

SEQ ID NO: 1992183 - DNA, 15 bp, Homo sapiens
aaattctccttcatt

SEQ ID NO: 1992184 - DNA, 15 bp, Homo sapiens
aattctccttcattc

SEQ ID NO: 1992185 - DNA, 15 bp, Homo sapiens
attctccttcattca

SEQ ID NO: 1992186 - DNA, 15 bp, Homo sapiens
ttctccttcattcag

SEQ ID NO: 1992187 - DNA, 15 bp, Homo sapiens
tctccttcattcagc

SEQ ID NO: 1992188 - DNA, 15 bp, Homo sapiens
ctccttcattcagcc

SEQ ID NO: 1992189 - DNA, 15 bp, Homo sapiens
tccttcattcagcct

SEQ ID NO: 1992190 - DNA, 15 bp, Homo sapiens
ccttcattcagcctg

SEQ ID NO: 1992191 - DNA, 15 bp, Homo sapiens
cttcattcagcctgg

SEQ ID NO: 1992192 - DNA, 15 bp, Homo sapiens
ttcattcagcctggt

SEQ ID NO: 1992193 - DNA, 15 bp, Homo sapiens
tcattcagcctggta

SEQ ID NO: 1992194 - DNA, 15 bp, Homo sapiens
cattcagcctggtaa

SEQ ID NO: 1992195 - DNA, 15 bp, Homo sapiens
attcagcctggtaag

SEQ ID NO: 1992196 - DNA, 15 bp, Homo sapiens
ttcagcctggtaagt

SEQ ID NO: 1992197 - DNA, 15 bp, Homo sapiens
tcagcctggtaagta

SEQ ID NO: 1992198 - DNA, 15 bp, Homo sapiens
cagcctggtaagtaa

SEQ ID NO: 1992199 - DNA, 15 bp, Homo sapiens
agcctggtaagtaac

SEQ ID NO: 1992200 - DNA, 15 bp, Homo sapiens
gcctggtaagtaacc

SEQ ID NO: 1992201 - DNA, 15 bp, Homo sapiens
cctggtaagtaacct

SEQ ID NO: 1992202 - DNA, 15 bp, Homo sapiens
ctggtaagtaacctg

SEQ ID NO: 1992203 - DNA, 15 bp, Homo sapiens
tggtaagtaacctgg

SEQ ID NO: 1992204 - DNA, 15 bp, Homo sapiens
ggtaagtaacctggc

SEQ ID NO: 1992205 - DNA, 15 bp, Homo sapiens
gtaagtaacctggcc

SEQ ID NO: 1992206 - DNA, 15 bp, Homo sapiens
taagtaacctggcca

SEQ ID NO: 1992207 - DNA, 15 bp, Homo sapiens
aagtaacctggccat

SEQ ID NO: 1992208 - DNA, 15 bp, Homo sapiens
agtaacctggccatt

SEQ ID NO: 1992209 - DNA, 15 bp, Homo sapiens
gtaacctggccatta

SEQ ID NO: 1992210 - DNA, 15 bp, Homo sapiens
taacctggccattag

SEQ ID NO: 1992211 - DNA, 15 bp, Homo sapiens
aacctggccattagt

SEQ ID NO: 1992212 - DNA, 15 bp, Homo sapiens
acctggccattagta

SEQ ID NO: 1992213 - DNA, 15 bp, Homo sapiens
cctggccattagtac

SEQ ID NO: 1992214 - DNA, 15 bp, Homo sapiens
ctggccattagtacg

SEQ ID NO: 1992215 - DNA, 15 bp, Homo sapiens
tggccattagtacgt

SEQ ID NO: 1992216 - DNA, 15 bp, Homo sapiens
ggccattagtacgtg

SEQ ID NO: 1992217 - DNA, 15 bp, Homo sapiens
gccattagtacgtga

SEQ ID NO: 1992218 - DNA, 15 bp, Homo sapiens
ccattagtacgtgac

SEQ ID NO: 1992219 - DNA, 15 bp, Homo sapiens
cattagtacgtgact

SEQ ID NO: 1992220 - DNA, 15 bp, Homo sapiens
attagtacgtgacta

SEQ ID NO: 1992221 - DNA, 15 bp, Homo sapiens
ttagtacgtgactaa

SEQ ID NO: 1992222 - DNA, 15 bp, Homo sapiens
tagtacgtgactaaa

SEQ ID NO: 1992223 - DNA, 15 bp, Homo sapiens
agtacgtgactaaat

SEQ ID NO: 1992224 - DNA, 15 bp, Homo sapiens
gtacgtgactaaata

SEQ ID NO: 1992225 - DNA, 15 bp, Homo sapiens
tacgtgactaaatag

SEQ ID NO: 1992226 - DNA, 15 bp, Homo sapiens
acgtgactaaatagc

SEQ ID NO: 1992227 - DNA, 15 bp, Homo sapiens
cgtgactaaatagct

SEQ ID NO: 1992228 - DNA, 15 bp, Homo sapiens
gtgactaaatagctg

SEQ ID NO: 1992229 - DNA, 15 bp, Homo sapiens
tgactaaatagctga

SEQ ID NO: 1992230 - DNA, 15 bp, Homo sapiens
gactaaatagctgaa

SEQ ID NO: 1992231 - DNA, 15 bp, Homo sapiens
actaaatagctgaag

SEQ ID NO: 1992232 - DNA, 15 bp, Homo sapiens
ctaaatagctgaagc

SEQ ID NO: 1992233 - DNA, 15 bp, Homo sapiens
taaatagctgaagct

SEQ ID NO: 1992234 - DNA, 15 bp, Homo sapiens
aaatagctgaagctt

SEQ ID NO: 1992235 - DNA, 15 bp, Homo sapiens
aatagctgaagcttc

SEQ ID NO: 1992236 - DNA, 15 bp, Homo sapiens
atagctgaagcttct

SEQ ID NO: 1992237 - DNA, 15 bp, Homo sapiens
tagctgaagcttctg

SEQ ID NO: 1992238 - DNA, 15 bp, Homo sapiens
agctgaagcttctgg

SEQ ID NO: 1992239 - DNA, 15 bp, Homo sapiens
gctgaagcttctggc

SEQ ID NO: 1992240 - DNA, 15 bp, Homo sapiens
ctgaagcttctggct

SEQ ID NO: 1992241 - DNA, 15 bp, Homo sapiens
tgaagcttctggctt

SEQ ID NO: 1992242 - DNA, 15 bp, Homo sapiens
gaagcttctggcttg

SEQ ID NO: 1992243 - DNA, 15 bp, Homo sapiens
aagcttctggcttga

SEQ ID NO: 1992244 - DNA, 15 bp, Homo sapiens
agcttctggcttgaa

SEQ ID NO: 1992245 - DNA, 15 bp, Homo sapiens
gcttctggcttgaat

SEQ ID NO: 1992246 - DNA, 15 bp, Homo sapiens
cttctggcttgaatt

SEQ ID NO: 1992247 - DNA, 15 bp, Homo sapiens
ttctggcttgaatta

SEQ ID NO: 1992248 - DNA, 15 bp, Homo sapiens
tctggcttgaattaa

SEQ ID NO: 1992249 - DNA, 15 bp, Homo sapiens
ctggcttgaattaag

SEQ ID NO: 1992250 - DNA, 15 bp, Homo sapiens
tggcttgaattaagt

SEQ ID NO: 1992251 - DNA, 15 bp, Homo sapiens
ggcttgaattaagtt

SEQ ID NO: 1992252 - DNA, 15 bp, Homo sapiens
gcttgaattaagtta

SEQ ID NO: 1992253 - DNA, 15 bp, Homo sapiens
cttgaattaagttat

SEQ ID NO: 1992254 - DNA, 15 bp, Homo sapiens
ttgaattaagttata

SEQ ID NO: 1992255 - DNA, 15 bp, Homo sapiens
tgaattaagttataa

SEQ ID NO: 1992256 - DNA, 15 bp, Homo sapiens
gaattaagttataaa

SEQ ID NO: 1992257 - DNA, 15 bp, Homo sapiens
aattaagttataaac

SEQ ID NO: 1992258 - DNA, 15 bp, Homo sapiens
attaagttataaact

SEQ ID NO: 1992259 - DNA, 15 bp, Homo sapiens
ttaagttataaactt

SEQ ID NO: 1992260 - DNA, 15 bp, Homo sapiens
taagttataaactta

SEQ ID NO: 1992261 - DNA, 15 bp, Homo sapiens
aagttataaacttag

SEQ ID NO: 1992262 - DNA, 15 bp, Homo sapiens
agttataaacttagc

SEQ ID NO: 1992263 - DNA, 15 bp, Homo sapiens
gttataaacttagca

SEQ ID NO: 1992264 - DNA, 15 bp, Homo sapiens
ttataaacttagcac

SEQ ID NO: 1992265 - DNA, 15 bp, Homo sapiens
tataaacttagcaca

SEQ ID NO: 1992266 - DNA, 15 bp, Homo sapiens
ataaacttagcacag

SEQ ID NO: 1992267 - DNA, 15 bp, Homo sapiens
taaacttagcacagt

SEQ ID NO: 1992268 - DNA, 15 bp, Homo sapiens
aaacttagcacagtg

SEQ ID NO: 1992269 - DNA, 15 bp, Homo sapiens
aacttagcacagtgg

SEQ ID NO: 1992270 - DNA, 15 bp, Homo sapiens
acttagcacagtggc

SEQ ID NO: 1992271 - DNA, 15 bp, Homo sapiens
cttagcacagtggca

SEQ ID NO: 1992272 - DNA, 15 bp, Homo sapiens
ttagcacagtggcag

SEQ ID NO: 1992273 - DNA, 15 bp, Homo sapiens
tagcacagtggcagg

SEQ ID NO: 1992274 - DNA, 15 bp, Homo sapiens
agcacagtggcaggt

SEQ ID NO: 1992275 - DNA, 15 bp, Homo sapiens
gcacagtggcaggtg

SEQ ID NO: 1992276 - DNA, 15 bp, Homo sapiens
cacagtggcaggtgc

SEQ ID NO: 1992277 - DNA, 15 bp, Homo sapiens
acagtggcaggtgct

SEQ ID NO: 1992278 - DNA, 15 bp, Homo sapiens
cagtggcaggtgctt

SEQ ID NO: 1992279 - DNA, 15 bp, Homo sapiens
agtggcaggtgcttg

SEQ ID NO: 1992280 - DNA, 15 bp, Homo sapiens
gtggcaggtgcttga

SEQ ID NO: 1992281 - DNA, 15 bp, Homo sapiens
tggcaggtgcttgaa

SEQ ID NO: 1992282 - DNA, 15 bp, Homo sapiens
ggcaggtgcttgaac

SEQ ID NO: 1992283 - DNA, 15 bp, Homo sapiens
gcaggtgcttgaact

SEQ ID NO: 1992284 - DNA, 15 bp, Homo sapiens
caggtgcttgaactg

SEQ ID NO: 1992285 - DNA, 15 bp, Homo sapiens
aggtgcttgaactgc

SEQ ID NO: 1992286 - DNA, 15 bp, Homo sapiens
ggtgcttgaactgcc

SEQ ID NO: 1992287 - DNA, 15 bp, Homo sapiens
gtgcttgaactgcca

SEQ ID NO: 1992288 - DNA, 15 bp, Homo sapiens
tgcttgaactgccat

SEQ ID NO: 1992289 - DNA, 15 bp, Homo sapiens
gcttgaactgccatg

SEQ ID NO: 1992290 - DNA, 15 bp, Homo sapiens
cttgaactgccatgt

SEQ ID NO: 1992291 - DNA, 15 bp, Homo sapiens
ttgaactgccatgtt

SEQ ID NO: 1992292 - DNA, 15 bp, Homo sapiens
tgaactgccatgtta

SEQ ID NO: 1992293 - DNA, 15 bp, Homo sapiens
gaactgccatgttaa

SEQ ID NO: 1992294 - DNA, 15 bp, Homo sapiens
aactgccatgttaaa

SEQ ID NO: 1992295 - DNA, 15 bp, Homo sapiens
actgccatgttaaaa

SEQ ID NO: 1992296 - DNA, 15 bp, Homo sapiens
ctgccatgttaaaac

SEQ ID NO: 1992297 - DNA, 15 bp, Homo sapiens
tgccatgttaaaact

SEQ ID NO: 1992298 - DNA, 15 bp, Homo sapiens
gccatgttaaaacta

SEQ ID NO: 1992299 - DNA, 15 bp, Homo sapiens
ccatgttaaaactag

SEQ ID NO: 1992300 - DNA, 15 bp, Homo sapiens
catgttaaaactagc

SEQ ID NO: 1992301 - DNA, 15 bp, Homo sapiens
atgttaaaactagcg

SEQ ID NO: 1992302 - DNA, 15 bp, Homo sapiens
tgttaaaactagcgc

SEQ ID NO: 1992303 - DNA, 15 bp, Homo sapiens
gttaaaactagcgca

SEQ ID NO: 1992304 - DNA, 15 bp, Homo sapiens
ttaaaactagcgcat

SEQ ID NO: 1992305 - DNA, 15 bp, Homo sapiens
taaaactagcgcata

SEQ ID NO: 1992306 - DNA, 15 bp, Homo sapiens
aaaactagcgcatag

SEQ ID NO: 1992307 - DNA, 15 bp, Homo sapiens
aaactagcgcataga

SEQ ID NO: 1992308 - DNA, 15 bp, Homo sapiens
aactagcgcatagaa

SEQ ID NO: 1992309 - DNA, 15 bp, Homo sapiens
actagcgcatagaat

SEQ ID NO: 1992310 - DNA, 15 bp, Homo sapiens
ctagcgcatagaatc

SEQ ID NO: 1992311 - DNA, 15 bp, Homo sapiens
tagcgcatagaatct

SEQ ID NO: 1992312 - DNA, 15 bp, Homo sapiens
agcgcatagaatctt

SEQ ID NO: 1992313 - DNA, 15 bp, Homo sapiens
gcgcatagaatcttt

SEQ ID NO: 1992314 - DNA, 15 bp, Homo sapiens
cgcatagaatctttg

SEQ ID NO: 1992315 - DNA, 15 bp, Homo sapiens
gcatagaatctttgc

SEQ ID NO: 1992316 - DNA, 15 bp, Homo sapiens
catagaatctttgcc

SEQ ID NO: 1992317 - DNA, 15 bp, Homo sapiens
atagaatctttgcca

SEQ ID NO: 1992318 - DNA, 15 bp, Homo sapiens
tagaatctttgccat

SEQ ID NO: 1992319 - DNA, 15 bp, Homo sapiens
agaatctttgccatt

SEQ ID NO: 1992320 - DNA, 15 bp, Homo sapiens
gaatctttgccattc

SEQ ID NO: 1992321 - DNA, 15 bp, Homo sapiens
aatctttgccattca

SEQ ID NO: 1992322 - DNA, 15 bp, Homo sapiens
atctttgccattcaa

SEQ ID NO: 1992323 - DNA, 15 bp, Homo sapiens
tctttgccattcaaa

SEQ ID NO: 1992324 - DNA, 15 bp, Homo sapiens
ctttgccattcaaaa

SEQ ID NO: 1992325 - DNA, 15 bp, Homo sapiens
tttgccattcaaaaa

SEQ ID NO: 1992326 - DNA, 15 bp, Homo sapiens
ttgccattcaaaaac

SEQ ID NO: 1992327 - DNA, 15 bp, Homo sapiens
tgccattcaaaaact

SEQ ID NO: 1992328 - DNA, 15 bp, Homo sapiens
gccattcaaaaactg

SEQ ID NO: 1992329 - DNA, 15 bp, Homo sapiens
ccattcaaaaactgt

SEQ ID NO: 1992330 - DNA, 15 bp, Homo sapiens
cattcaaaaactgtt

SEQ ID NO: 1992331 - DNA, 15 bp, Homo sapiens
attcaaaaactgttt

SEQ ID NO: 1992332 - DNA, 15 bp, Homo sapiens
ttcaaaaactgtttt

SEQ ID NO: 1992333 - DNA, 15 bp, Homo sapiens
tcaaaaactgttttc

SEQ ID NO: 1992334 - DNA, 15 bp, Homo sapiens
caaaaactgttttct

SEQ ID NO: 1992335 - DNA, 15 bp, Homo sapiens
aaaaactgttttctc

SEQ ID NO: 1992336 - DNA, 15 bp, Homo sapiens
aaaactgttttctca

SEQ ID NO: 1992337 - DNA, 15 bp, Homo sapiens
aaactgttttctcaa

SEQ ID NO: 1992338 - DNA, 15 bp, Homo sapiens
aactgttttctcaat

SEQ ID NO: 1992339 - DNA, 15 bp, Homo sapiens
actgttttctcaatc

SEQ ID NO: 1992340 - DNA, 15 bp, Homo sapiens
ctgttttctcaatcc

SEQ ID NO: 1992341 - DNA, 15 bp, Homo sapiens
tgttttctcaatccc

SEQ ID NO: 1992342 - DNA, 15 bp, Homo sapiens
gttttctcaatccca

SEQ ID NO: 1992343 - DNA, 15 bp, Homo sapiens
ttttctcaatcccat

SEQ ID NO: 1992344 - DNA, 15 bp, Homo sapiens
tttctcaatcccatg

SEQ ID NO: 1992345 - DNA, 15 bp, Homo sapiens
ttctcaatcccatga

SEQ ID NO: 1992346 - DNA, 15 bp, Homo sapiens
tctcaatcccatgaa

SEQ ID NO: 1992347 - DNA, 15 bp, Homo sapiens
ctcaatcccatgaag

SEQ ID NO: 1992348 - DNA, 15 bp, Homo sapiens
tcaatcccatgaagg

SEQ ID NO: 1992349 - DNA, 15 bp, Homo sapiens
caatcccatgaagga

SEQ ID NO: 1992350 - DNA, 15 bp, Homo sapiens
aatcccatgaaggag

SEQ ID NO: 1992351 - DNA, 15 bp, Homo sapiens
atcccatgaaggaga

SEQ ID NO: 1992352 - DNA, 15 bp, Homo sapiens
tcccatgaaggagat

SEQ ID NO: 1992353 - DNA, 15 bp, Homo sapiens
cccatgaaggagatg

SEQ ID NO: 1992354 - DNA, 15 bp, Homo sapiens
ccatgaaggagatga

SEQ ID NO: 1992355 - DNA, 15 bp, Homo sapiens
catgaaggagatgaa

SEQ ID NO: 1992356 - DNA, 15 bp, Homo sapiens
atgaaggagatgaag

SEQ ID NO: 1992357 - DNA, 15 bp, Homo sapiens
tgaaggagatgaagc

SEQ ID NO: 1992358 - DNA, 15 bp, Homo sapiens
gaaggagatgaagcc

SEQ ID NO: 1992359 - DNA, 15 bp, Homo sapiens
aaggagatgaagcct

SEQ ID NO: 1992360 - DNA, 15 bp, Homo sapiens
aggagatgaagccta

SEQ ID NO: 1992361 - DNA, 15 bp, Homo sapiens
ggagatgaagcctac

SEQ ID NO: 1992362 - DNA, 15 bp, Homo sapiens
gagatgaagcctaca

SEQ ID NO: 1992363 - DNA, 15 bp, Homo sapiens
agatgaagcctacat

SEQ ID NO: 1992364 - DNA, 15 bp, Homo sapiens
gatgaagcctacatg

SEQ ID NO: 1992365 - DNA, 15 bp, Homo sapiens
atgaagcctacatgg

SEQ ID NO: 1992366 - DNA, 15 bp, Homo sapiens
tgaagcctacatggg

SEQ ID NO: 1992367 - DNA, 15 bp, Homo sapiens
gaagcctacatggga

SEQ ID NO: 1992368 - DNA, 15 bp, Homo sapiens
aagcctacatgggaa

SEQ ID NO: 1992369 - DNA, 15 bp, Homo sapiens
agcctacatgggaat

SEQ ID NO: 1992370 - DNA, 15 bp, Homo sapiens
gcctacatgggaatc

SEQ ID NO: 1992371 - DNA, 15 bp, Homo sapiens
cctacatgggaatct

SEQ ID NO: 1992372 - DNA, 15 bp, Homo sapiens
ctacatgggaatctt

SEQ ID NO: 1992373 - DNA, 15 bp, Homo sapiens
tacatgggaatcttc

SEQ ID NO: 1992374 - DNA, 15 bp, Homo sapiens
acatgggaatcttca

SEQ ID NO: 1992375 - DNA, 15 bp, Homo sapiens
catgggaatcttcac

SEQ ID NO: 1992376 - DNA, 15 bp, Homo sapiens
atgggaatcttcact

SEQ ID NO: 1992377 - DNA, 15 bp, Homo sapiens
tgggaatcttcactg

SEQ ID NO: 1992378 - DNA, 15 bp, Homo sapiens
gggaatcttcactga

SEQ ID NO: 1992379 - DNA, 15 bp, Homo sapiens
ggaatcttcactgat

SEQ ID NO: 1992380 - DNA, 15 bp, Homo sapiens
gaatcttcactgatt

SEQ ID NO: 1992381 - DNA, 15 bp, Homo sapiens
aatcttcactgattg

SEQ ID NO: 1992382 - DNA, 15 bp, Homo sapiens
atcttcactgattgt

SEQ ID NO: 1992383 - DNA, 15 bp, Homo sapiens
tcttcactgattgtg

SEQ ID NO: 1992384 - DNA, 15 bp, Homo sapiens
cttcactgattgtgc

SEQ ID NO: 1992385 - DNA, 15 bp, Homo sapiens
ttcactgattgtgct

SEQ ID NO: 1992386 - DNA, 15 bp, Homo sapiens
tcactgattgtgctg

SEQ ID NO: 1992387 - DNA, 15 bp, Homo sapiens
cactgattgtgctga

SEQ ID NO: 1992388 - DNA, 15 bp, Homo sapiens
actgattgtgctgac

SEQ ID NO: 1992389 - DNA, 15 bp, Homo sapiens
ctgattgtgctgact

SEQ ID NO: 1992390 - DNA, 15 bp, Homo sapiens
tgattgtgctgactt

SEQ ID NO: 1992391 - DNA, 15 bp, Homo sapiens
gattgtgctgacttt

SEQ ID NO: 1992392 - DNA, 15 bp, Homo sapiens
attgtgctgactttt

SEQ ID NO: 1992393 - DNA, 15 bp, Homo sapiens
ttgtgctgacttttc

SEQ ID NO: 1992394 - DNA, 15 bp, Homo sapiens
tgtgctgacttttct

SEQ ID NO: 1992395 - DNA, 15 bp, Homo sapiens
gtgctgacttttctt

SEQ ID NO: 1992396 - DNA, 15 bp, Homo sapiens
tgctgacttttcttc

SEQ ID NO: 1992397 - DNA, 15 bp, Homo sapiens
gctgacttttcttct

SEQ ID NO: 1992398 - DNA, 15 bp, Homo sapiens
ctgacttttcttcta

SEQ ID NO: 1992399 - DNA, 15 bp, Homo sapiens
tgacttttcttctac

SEQ ID NO: 1992400 - DNA, 15 bp, Homo sapiens
gacttttcttctaca

SEQ ID NO: 1992401 - DNA, 15 bp, Homo sapiens
acttttcttctacaa

SEQ ID NO: 1992402 - DNA, 15 bp, Homo sapiens
cttttcttctacaat

SEQ ID NO: 1992403 - DNA, 15 bp, Homo sapiens
ttttcttctacaatt

SEQ ID NO: 1992404 - DNA, 15 bp, Homo sapiens
tttcttctacaattt

SEQ ID NO: 1992405 - DNA, 15 bp, Homo sapiens
ttcttctacaatttt

SEQ ID NO: 1992406 - DNA, 15 bp, Homo sapiens
tcttctacaattttt

SEQ ID NO: 1992407 - DNA, 15 bp, Homo sapiens
cttctacaattttta

SEQ ID NO: 1992408 - DNA, 15 bp, Homo sapiens
ttctacaatttttag

SEQ ID NO: 1992409 - DNA, 15 bp, Homo sapiens
tctacaatttttagt

SEQ ID NO: 1992410 - DNA, 15 bp, Homo sapiens
ctacaatttttagtt

SEQ ID NO: 1992411 - DNA, 15 bp, Homo sapiens
tacaatttttagttt

SEQ ID NO: 1992412 - DNA, 15 bp, Homo sapiens
acaatttttagttta

SEQ ID NO: 1992413 - DNA, 15 bp, Homo sapiens
caatttttagtttat

SEQ ID NO: 1992414 - DNA, 15 bp, Homo sapiens
aatttttagtttata

SEQ ID NO: 1992415 - DNA, 15 bp, Homo sapiens
atttttagtttataa

SEQ ID NO: 1992416 - DNA, 15 bp, Homo sapiens
tttttagtttataac

SEQ ID NO: 1992417 - DNA, 15 bp, Homo sapiens
ttttagtttataaca

SEQ ID NO: 1992418 - DNA, 15 bp, Homo sapiens
tttagtttataacat

SEQ ID NO: 1992419 - DNA, 15 bp, Homo sapiens
ttagtttataacatg

SEQ ID NO: 1992420 - DNA, 15 bp, Homo sapiens
tagtttataacatgt

SEQ ID NO: 1992421 - DNA, 15 bp, Homo sapiens
agtttataacatgta

SEQ ID NO: 1992422 - DNA, 15 bp, Homo sapiens
gtttataacatgtat

SEQ ID NO: 1992423 - DNA, 15 bp, Homo sapiens
tttataacatgtata

SEQ ID NO: 1992424 - DNA, 15 bp, Homo sapiens
ttataacatgtatag

SEQ ID NO: 1992425 - DNA, 15 bp, Homo sapiens
tataacatgtatagt

SEQ ID NO: 1992426 - DNA, 15 bp, Homo sapiens
ataacatgtatagtt

SEQ ID NO: 1992427 - DNA, 15 bp, Homo sapiens
taacatgtatagttt

SEQ ID NO: 1992428 - DNA, 15 bp, Homo sapiens
aacatgtatagtttg

SEQ ID NO: 1992429 - DNA, 15 bp, Homo sapiens
acatgtatagtttgt

SEQ ID NO: 1992430 - DNA, 15 bp, Homo sapiens
catgtatagtttgtc

SEQ ID NO: 1992431 - DNA, 15 bp, Homo sapiens
atgtatagtttgtca

SEQ ID NO: 1992432 - DNA, 15 bp, Homo sapiens
tgtatagtttgtcaa

SEQ ID NO: 1992433 - DNA, 15 bp, Homo sapiens
gtatagtttgtcaat

SEQ ID NO: 1992434 - DNA, 15 bp, Homo sapiens
tatagtttgtcaatt

SEQ ID NO: 1992435 - DNA, 15 bp, Homo sapiens
atagtttgtcaattg

SEQ ID NO: 1992436 - DNA, 15 bp, Homo sapiens
tagtttgtcaattgt

SEQ ID NO: 1992437 - DNA, 15 bp, Homo sapiens
agtttgtcaattgtg

SEQ ID NO: 1992438 - DNA, 15 bp, Homo sapiens
gtttgtcaattgtgc

SEQ ID NO: 1992439 - DNA, 15 bp, Homo sapiens
tttgtcaattgtgct

SEQ ID NO: 1992440 - DNA, 15 bp, Homo sapiens
ttgtcaattgtgcta

SEQ ID NO: 1992441 - DNA, 15 bp, Homo sapiens
tgtcaattgtgctag

SEQ ID NO: 1992442 - DNA, 15 bp, Homo sapiens
gtcaattgtgctagg

SEQ ID NO: 1992443 - DNA, 15 bp, Homo sapiens
tcaattgtgctagga

SEQ ID NO: 1992444 - DNA, 15 bp, Homo sapiens
caattgtgctaggat

SEQ ID NO: 1992445 - DNA, 15 bp, Homo sapiens
aattgtgctaggata

SEQ ID NO: 1992446 - DNA, 15 bp, Homo sapiens
attgtgctaggatat

SEQ ID NO: 1992447 - DNA, 15 bp, Homo sapiens
ttgtgctaggatatt

SEQ ID NO: 1992448 - DNA, 15 bp, Homo sapiens
tgtgctaggatattt

SEQ ID NO: 1992449 - DNA, 15 bp, Homo sapiens
gtgctaggatatttt

SEQ ID NO: 1992450 - DNA, 15 bp, Homo sapiens
tgctaggatattttg

SEQ ID NO: 1992451 - DNA, 15 bp, Homo sapiens
gctaggatattttgt

SEQ ID NO: 1992452 - DNA, 15 bp, Homo sapiens
ctaggatattttgtt

SEQ ID NO: 1992453 - DNA, 15 bp, Homo sapiens
taggatattttgtta

SEQ ID NO: 1992454 - DNA, 15 bp, Homo sapiens
aggatattttgttaa

SEQ ID NO: 1992455 - DNA, 15 bp, Homo sapiens
ggatattttgttaat

SEQ ID NO: 1992456 - DNA, 15 bp, Homo sapiens
gatattttgttaata

SEQ ID NO: 1992457 - DNA, 15 bp, Homo sapiens
atattttgttaatat

SEQ ID NO: 1992458 - DNA, 15 bp, Homo sapiens
tattttgttaatatg

SEQ ID NO: 1992459 - DNA, 15 bp, Homo sapiens
attttgttaatatgt

SEQ ID NO: 1992460 - DNA, 15 bp, Homo sapiens
ttttgttaatatgtt

SEQ ID NO: 1992461 - DNA, 15 bp, Homo sapiens
tttgttaatatgttc

SEQ ID NO: 1992462 - DNA, 15 bp, Homo sapiens
ttgttaatatgttct

SEQ ID NO: 1992463 - DNA, 15 bp, Homo sapiens
tgttaatatgttctt

SEQ ID NO: 1992464 - DNA, 15 bp, Homo sapiens
gttaatatgttctta

SEQ ID NO: 1992465 - DNA, 15 bp, Homo sapiens
ttaatatgttcttaa

SEQ ID NO: 1992466 - DNA, 15 bp, Homo sapiens
taatatgttcttaaa

SEQ ID NO: 1992467 - DNA, 15 bp, Homo sapiens
aatatgttcttaaaa

SEQ ID NO: 1992468 - DNA, 15 bp, Homo sapiens
atatgttcttaaaaa

SEQ ID NO: 1992469 - DNA, 15 bp, Homo sapiens
tatgttcttaaaaat

SEQ ID NO: 1992470 - DNA, 15 bp, Homo sapiens
atgttcttaaaaatt

SEQ ID NO: 1992471 - DNA, 15 bp, Homo sapiens
tgttcttaaaaattc

SEQ ID NO: 1992472 - DNA, 15 bp, Homo sapiens
gttcttaaaaattca

SEQ ID NO: 1992473 - DNA, 15 bp, Homo sapiens
ttcttaaaaattcaa

SEQ ID NO: 1992474 - DNA, 15 bp, Homo sapiens
tcttaaaaattcaaa

SEQ ID NO: 1992475 - DNA, 15 bp, Homo sapiens
cttaaaaattcaaat

SEQ ID NO: 1992476 - DNA, 15 bp, Homo sapiens
ttaaaaattcaaatc

SEQ ID NO: 1992477 - DNA, 15 bp, Homo sapiens
taaaaattcaaatcc

SEQ ID NO: 1992478 - DNA, 15 bp, Homo sapiens
aaaaattcaaatccc

SEQ ID NO: 1992479 - DNA, 15 bp, Homo sapiens
aaaattcaaatccca

SEQ ID NO: 1992480 - DNA, 15 bp, Homo sapiens
aaattcaaatcccag

SEQ ID NO: 1992481 - DNA, 15 bp, Homo sapiens
aattcaaatcccagg

SEQ ID NO: 1992482 - DNA, 15 bp, Homo sapiens
attcaaatcccaggg

SEQ ID NO: 1992483 - DNA, 15 bp, Homo sapiens
ttcaaatcccagggg

SEQ ID NO: 1992484 - DNA, 15 bp, Homo sapiens
tcaaatcccaggggt

SEQ ID NO: 1992485 - DNA, 15 bp, Homo sapiens
caaatcccaggggta

SEQ ID NO: 1992486 - DNA, 15 bp, Homo sapiens
aaatcccaggggtaa

SEQ ID NO: 1992487 - DNA, 15 bp, Homo sapiens
aatcccaggggtaaa

SEQ ID NO: 1992488 - DNA, 15 bp, Homo sapiens
atcccaggggtaaac

SEQ ID NO: 1992489 - DNA, 15 bp, Homo sapiens
tcccaggggtaaaca

SEQ ID NO: 1992490 - DNA, 15 bp, Homo sapiens
cccaggggtaaacat

SEQ ID NO: 1992491 - DNA, 15 bp, Homo sapiens
ccaggggtaaacatc

SEQ ID NO: 1992492 - DNA, 15 bp, Homo sapiens
caggggtaaacatca

SEQ ID NO: 1992493 - DNA, 15 bp, Homo sapiens
aggggtaaacatcaa

SEQ ID NO: 1992494 - DNA, 15 bp, Homo sapiens
ggggtaaacatcaaa

SEQ ID NO: 1992495 - DNA, 15 bp, Homo sapiens
gggtaaacatcaaat

SEQ ID NO: 1992496 - DNA, 15 bp, Homo sapiens
ggtaaacatcaaata

SEQ ID NO: 1992497 - DNA, 15 bp, Homo sapiens
gtaaacatcaaataa

SEQ ID NO: 1992498 - DNA, 15 bp, Homo sapiens
taaacatcaaataat

SEQ ID NO: 1992499 - DNA, 15 bp, Homo sapiens
aaacatcaaataatt

SEQ ID NO: 1992500 - DNA, 15 bp, Homo sapiens
aacatcaaataattt

SEQ ID NO: 1992501 - DNA, 15 bp, Homo sapiens
acatcaaataattta

SEQ ID NO: 1992502 - DNA, 15 bp, Homo sapiens
catcaaataatttaa

SEQ ID NO: 1992503 - DNA, 15 bp, Homo sapiens
atcaaataatttaat

SEQ ID NO: 1992504 - DNA, 15 bp, Homo sapiens
aataatttaattgtg

SEQ ID NO: 1992505 - DNA, 15 bp, Homo sapiens
ataatttaattgtgc

SEQ ID NO: 1992506 - DNA, 15 bp, Homo sapiens
taatttaattgtgcc

SEQ ID NO: 1992507 - DNA, 15 bp, Homo sapiens
aatttaattgtgcct

SEQ ID NO: 1992508 - DNA, 15 bp, Homo sapiens
atttaattgtgccta

SEQ ID NO: 1992509 - DNA, 15 bp, Homo sapiens
tttaattgtgcctat

SEQ ID NO: 1992510 - DNA, 15 bp, Homo sapiens
ttaattgtgcctatt

SEQ ID NO: 1992511 - DNA, 15 bp, Homo sapiens
taattgtgcctattt

SEQ ID NO: 1992512 - DNA, 15 bp, Homo sapiens
aattgtgcctatttg

SEQ ID NO: 1992513 - DNA, 15 bp, Homo sapiens
attgtgcctatttga

SEQ ID NO: 1992514 - DNA, 15 bp, Homo sapiens
ttgtgcctatttgac

SEQ ID NO: 1992515 - DNA, 15 bp, Homo sapiens
tgtgcctatttgact

SEQ ID NO: 1992516 - DNA, 15 bp, Homo sapiens
gtgcctatttgactt

SEQ ID NO: 1992517 - DNA, 15 bp, Homo sapiens
tgcctatttgacttt

SEQ ID NO: 1992518 - DNA, 15 bp, Homo sapiens
gcctatttgacttta

SEQ ID NO: 1992519 - DNA, 15 bp, Homo sapiens
cctatttgactttat

SEQ ID NO: 1992520 - DNA, 15 bp, Homo sapiens
ctatttgactttatg

SEQ ID NO: 1992521 - DNA, 15 bp, Homo sapiens
tatttgactttatgg

SEQ ID NO: 1992522 - DNA, 15 bp, Homo sapiens
atttgactttatggg

SEQ ID NO: 1992523 - DNA, 15 bp, Homo sapiens
tttgactttatggga

SEQ ID NO: 1992524 - DNA, 15 bp, Homo sapiens
ttgactttatgggag

SEQ ID NO: 1992525 - DNA, 15 bp, Homo sapiens
tgactttatgggaga

SEQ ID NO: 1992526 - DNA, 15 bp, Homo sapiens
gactttatgggagag

SEQ ID NO: 1992527 - DNA, 15 bp, Homo sapiens
actttatgggagagt

SEQ ID NO: 1992528 - DNA, 15 bp, Homo sapiens
ctttatgggagagtt

SEQ ID NO: 1992529 - DNA, 15 bp, Homo sapiens
tttatgggagagtta

SEQ ID NO: 1992530 - DNA, 15 bp, Homo sapiens
ttatgggagagttaa

SEQ ID NO: 1992531 - DNA, 15 bp, Homo sapiens
tatgggagagttaac

SEQ ID NO: 1992532 - DNA, 15 bp, Homo sapiens
atgggagagttaaca

SEQ ID NO: 1992533 - DNA, 15 bp, Homo sapiens
tgggagagttaacaa

SEQ ID NO: 1992534 - DNA, 15 bp, Homo sapiens
gggagagttaacaac

SEQ ID NO: 1992535 - DNA, 15 bp, Homo sapiens
ggagagttaacaacc

SEQ ID NO: 1992536 - DNA, 15 bp, Homo sapiens
gagagttaacaacca

SEQ ID NO: 1992537 - DNA, 15 bp, Homo sapiens
agagttaacaaccat

SEQ ID NO: 1992538 - DNA, 15 bp, Homo sapiens
gagttaacaaccata

SEQ ID NO: 1992539 - DNA, 15 bp, Homo sapiens
agttaacaaccatat

SEQ ID NO: 1992540 - DNA, 15 bp, Homo sapiens
gttaacaaccatatt

SEQ ID NO: 1992541 - DNA, 15 bp, Homo sapiens
ttaacaaccatattt

SEQ ID NO: 1992542 - DNA, 15 bp, Homo sapiens
taacaaccatattta

SEQ ID NO: 1992543 - DNA, 15 bp, Homo sapiens
aacaaccatatttat

SEQ ID NO: 1992544 - DNA, 15 bp, Homo sapiens
acaaccatatttata

SEQ ID NO: 1992545 - DNA, 15 bp, Homo sapiens
caaccatatttatat

SEQ ID NO: 1992546 - DNA, 15 bp, Homo sapiens
aaccatatttatata

SEQ ID NO: 1992547 - DNA, 15 bp, Homo sapiens
accatatttatatat

SEQ ID NO: 1992548 - DNA, 15 bp, Homo sapiens
ccatatttatatata

SEQ ID NO: 1992549 - DNA, 15 bp, Homo sapiens
catatttatatatat

SEQ ID NO: 1992550 - DNA, 15 bp, Homo sapiens
atatttatatatatg

SEQ ID NO: 1992551 - DNA, 15 bp, Homo sapiens
tatttatatatatgg

SEQ ID NO: 1992552 - DNA, 15 bp, Homo sapiens
atttatatatatggt

SEQ ID NO: 1992553 - DNA, 15 bp, Homo sapiens
tttatatatatggtt

SEQ ID NO: 1992554 - DNA, 15 bp, Homo sapiens
ttatatatatggtta

SEQ ID NO: 1992555 - DNA, 15 bp, Homo sapiens
tatatatatggttaa

SEQ ID NO: 1992556 - DNA, 15 bp, Homo sapiens
atatatatggttaaa

SEQ ID NO: 1992557 - DNA, 15 bp, Homo sapiens
tatatatggttaaat

SEQ ID NO: 1992558 - DNA, 15 bp, Homo sapiens
atatatggttaaatg

SEQ ID NO: 1992559 - DNA, 15 bp, Homo sapiens
tatatggttaaatgt

SEQ ID NO: 1992560 - DNA, 15 bp, Homo sapiens
atatggttaaatgtg

SEQ ID NO: 1992561 - DNA, 15 bp, Homo sapiens
tatggttaaatgtgt

SEQ ID NO: 1992562 - DNA, 15 bp, Homo sapiens
atggttaaatgtgta

SEQ ID NO: 1992563 - DNA, 15 bp, Homo sapiens
tggttaaatgtgtat

SEQ ID NO: 1992564 - DNA, 15 bp, Homo sapiens
ggttaaatgtgtata

SEQ ID NO: 1992565 - DNA, 15 bp, Homo sapiens
gttaaatgtgtataa

SEQ ID NO: 1992566 - DNA, 15 bp, Homo sapiens
ttaaatgtgtataat

SEQ ID NO: 1992567 - DNA, 15 bp, Homo sapiens
taaatgtgtataatc

SEQ ID NO: 1992568 - DNA, 15 bp, Homo sapiens
aaatgtgtataatct

SEQ ID NO: 1992569 - DNA, 15 bp, Homo sapiens
aatgtgtataatctt

SEQ ID NO: 1992570 - DNA, 15 bp, Homo sapiens
atgtgtataatcttc

SEQ ID NO: 1992571 - DNA, 15 bp, Homo sapiens
tgtgtataatcttca

SEQ ID NO: 1992572 - DNA, 15 bp, Homo sapiens
gtgtataatcttcat

SEQ ID NO: 1992573 - DNA, 15 bp, Homo sapiens
tgtataatcttcatt

SEQ ID NO: 1992574 - DNA, 15 bp, Homo sapiens
gtataatcttcattc

SEQ ID NO: 1992575 - DNA, 15 bp, Homo sapiens
tataatcttcattct

SEQ ID NO: 1992576 - DNA, 15 bp, Homo sapiens
ataatcttcattctc

SEQ ID NO: 1992577 - DNA, 15 bp, Homo sapiens
taatcttcattctca

SEQ ID NO: 1992578 - DNA, 15 bp, Homo sapiens
aatcttcattctcaa

SEQ ID NO: 1992579 - DNA, 15 bp, Homo sapiens
atcttcattctcaat

SEQ ID NO: 1992580 - DNA, 15 bp, Homo sapiens
tcttcattctcaatc

SEQ ID NO: 1992581 - DNA, 15 bp, Homo sapiens
cttcattctcaatct

SEQ ID NO: 1992582 - DNA, 15 bp, Homo sapiens
ttcattctcaatctt

SEQ ID NO: 1992583 - DNA, 15 bp, Homo sapiens
tcattctcaatcttt

SEQ ID NO: 1992584 - DNA, 15 bp, Homo sapiens
cattctcaatctttc

SEQ ID NO: 1992585 - DNA, 15 bp, Homo sapiens
attctcaatctttca

SEQ ID NO: 1992586 - DNA, 15 bp, Homo sapiens
ttctcaatctttcag

SEQ ID NO: 1992587 - DNA, 15 bp, Homo sapiens
tctcaatctttcaga

SEQ ID NO: 1992588 - DNA, 15 bp, Homo sapiens
ctcaatctttcagaa

SEQ ID NO: 1992589 - DNA, 15 bp, Homo sapiens
tcaatctttcagaat

SEQ ID NO: 1992590 - DNA, 15 bp, Homo sapiens
caatctttcagaatc

SEQ ID NO: 1992591 - DNA, 15 bp, Homo sapiens
aatctttcagaatcc

SEQ ID NO: 1992592 - DNA, 15 bp, Homo sapiens
atctttcagaatcct

SEQ ID NO: 1992593 - DNA, 15 bp, Homo sapiens
tctttcagaatcctt

SEQ ID NO: 1992594 - DNA, 15 bp, Homo sapiens
ctttcagaatcctta

SEQ ID NO: 1992595 - DNA, 15 bp, Homo sapiens
tttcagaatccttat

SEQ ID NO: 1992596 - DNA, 15 bp, Homo sapiens
ttcagaatccttatt

SEQ ID NO: 1992597 - DNA, 15 bp, Homo sapiens
tcagaatccttattt

SEQ ID NO: 1992598 - DNA, 15 bp, Homo sapiens
cagaatccttatttt

SEQ ID NO: 1992599 - DNA, 15 bp, Homo sapiens
agaatccttattttc

SEQ ID NO: 1992600 - DNA, 15 bp, Homo sapiens
gaatccttattttcc

SEQ ID NO: 1992601 - DNA, 15 bp, Homo sapiens
aatccttattttcca

SEQ ID NO: 1992602 - DNA, 15 bp, Homo sapiens
atccttattttccat

SEQ ID NO: 1992603 - DNA, 15 bp, Homo sapiens
tccttattttccatt

SEQ ID NO: 1992604 - DNA, 15 bp, Homo sapiens
ccttattttccattt

SEQ ID NO: 1992605 - DNA, 15 bp, Homo sapiens
cttattttccatttt

SEQ ID NO: 1992606 - DNA, 15 bp, Homo sapiens
ttattttccattttc

SEQ ID NO: 1992607 - DNA, 15 bp, Homo sapiens
tattttccattttca

SEQ ID NO: 1992608 - DNA, 15 bp, Homo sapiens
ttccattttcatttt

SEQ ID NO: 1992609 - DNA, 15 bp, Homo sapiens
tccattttcattttt

SEQ ID NO: 1992610 - DNA, 15 bp, Homo sapiens
ccattttcattttta

SEQ ID NO: 1992611 - DNA, 15 bp, Homo sapiens
cattttcatttttag

SEQ ID NO: 1992612 - DNA, 15 bp, Homo sapiens
attttcatttttagc

SEQ ID NO: 1992613 - DNA, 15 bp, Homo sapiens
ttttcatttttagca

SEQ ID NO: 1992614 - DNA, 15 bp, Homo sapiens
tttcatttttagcat

SEQ ID NO: 1992615 - DNA, 15 bp, Homo sapiens
ttcatttttagcatt

SEQ ID NO: 1992616 - DNA, 15 bp, Homo sapiens
tcatttttagcatta

SEQ ID NO: 1992617 - DNA, 15 bp, Homo sapiens
catttttagcattag

SEQ ID NO: 1992618 - DNA, 15 bp, Homo sapiens
atttttagcattagc

SEQ ID NO: 1992619 - DNA, 15 bp, Homo sapiens
tttttagcattagct

SEQ ID NO: 1992620 - DNA, 15 bp, Homo sapiens
ttttagcattagctg

SEQ ID NO: 1992621 - DNA, 15 bp, Homo sapiens
tttagcattagctgc

SEQ ID NO: 1992622 - DNA, 15 bp, Homo sapiens
ttagcattagctgca

SEQ ID NO: 1992623 - DNA, 15 bp, Homo sapiens
tagcattagctgcat

SEQ ID NO: 1992624 - DNA, 15 bp, Homo sapiens
agcattagctgcatt

SEQ ID NO: 1992625 - DNA, 15 bp, Homo sapiens
gcattagctgcatta

SEQ ID NO: 1992626 - DNA, 15 bp, Homo sapiens
cattagctgcattat

SEQ ID NO: 1992627 - DNA, 15 bp, Homo sapiens
attagctgcattatt

SEQ ID NO: 1992628 - DNA, 15 bp, Homo sapiens
ttagctgcattattt

SEQ ID NO: 1992629 - DNA, 15 bp, Homo sapiens
tagctgcattatttc

SEQ ID NO: 1992630 - DNA, 15 bp, Homo sapiens
agctgcattatttct

SEQ ID NO: 1992631 - DNA, 15 bp, Homo sapiens
gctgcattatttctt

SEQ ID NO: 1992632 - DNA, 15 bp, Homo sapiens
ctgcattatttcttt

SEQ ID NO: 1992633 - DNA, 15 bp, Homo sapiens
tgcattatttcttta

SEQ ID NO: 1992634 - DNA, 15 bp, Homo sapiens
gcattatttctttat

SEQ ID NO: 1992635 - DNA, 15 bp, Homo sapiens
cattatttctttata

SEQ ID NO: 1992636 - DNA, 15 bp, Homo sapiens
attatttctttatac

SEQ ID NO: 1992637 - DNA, 15 bp, Homo sapiens
ttatttctttataca

SEQ ID NO: 1992638 - DNA, 15 bp, Homo sapiens
tatttctttatacaa

SEQ ID NO: 1992639 - DNA, 15 bp, Homo sapiens
atttctttatacaac

SEQ ID NO: 1992640 - DNA, 15 bp, Homo sapiens
tttctttatacaact

SEQ ID NO: 1992641 - DNA, 15 bp, Homo sapiens
ttctttatacaacta

SEQ ID NO: 1992642 - DNA, 15 bp, Homo sapiens
tctttatacaactag

SEQ ID NO: 1992643 - DNA, 15 bp, Homo sapiens
ctttatacaactagg

SEQ ID NO: 1992644 - DNA, 15 bp, Homo sapiens
tttatacaactagga

SEQ ID NO: 1992645 - DNA, 15 bp, Homo sapiens
ttatacaactaggaa

SEQ ID NO: 1992646 - DNA, 15 bp, Homo sapiens
tatacaactaggaaa

SEQ ID NO: 1992647 - DNA, 15 bp, Homo sapiens
atacaactaggaaaa

SEQ ID NO: 1992648 - DNA, 15 bp, Homo sapiens
tacaactaggaaaag

SEQ ID NO: 1992649 - DNA, 15 bp, Homo sapiens
acaactaggaaaagg

SEQ ID NO: 1992650 - DNA, 15 bp, Homo sapiens
caactaggaaaaggg

SEQ ID NO: 1992651 - DNA, 15 bp, Homo sapiens
aactaggaaaaggga

SEQ ID NO: 1992652 - DNA, 15 bp, Homo sapiens
actaggaaaagggat

SEQ ID NO: 1992653 - DNA, 15 bp, Homo sapiens
ctaggaaaagggatt

SEQ ID NO: 1992654 - DNA, 15 bp, Homo sapiens
taggaaaagggatta

SEQ ID NO: 1992655 - DNA, 15 bp, Homo sapiens
aggaaaagggattat

SEQ ID NO: 1992656 - DNA, 15 bp, Homo sapiens
ggaaaagggattatt

SEQ ID NO: 1992657 - DNA, 15 bp, Homo sapiens
gaaaagggattattc

SEQ ID NO: 1992658 - DNA, 15 bp, Homo sapiens
aaaagggattattca

SEQ ID NO: 1992659 - DNA, 15 bp, Homo sapiens
aaagggattattcag

SEQ ID NO: 1992660 - DNA, 15 bp, Homo sapiens
aagggattattcaga

SEQ ID NO: 1992661 - DNA, 15 bp, Homo sapiens
agggattattcagaa

SEQ ID NO: 1992662 - DNA, 15 bp, Homo sapiens
gggattattcagaaa

SEQ ID NO: 1992663 - DNA, 15 bp, Homo sapiens
ggattattcagaaat

SEQ ID NO: 1992664 - DNA, 15 bp, Homo sapiens
gattattcagaaatt

SEQ ID NO: 1992665 - DNA, 15 bp, Homo sapiens
attattcagaaattt

SEQ ID NO: 1992666 - DNA, 15 bp, Homo sapiens
ttattcagaaatttg

SEQ ID NO: 1992667 - DNA, 15 bp, Homo sapiens
tattcagaaatttgg

SEQ ID NO: 1992668 - DNA, 15 bp, Homo sapiens
attcagaaatttggt

SEQ ID NO: 1992669 - DNA, 15 bp, Homo sapiens
ttcagaaatttggtt

SEQ ID NO: 1992670 - DNA, 15 bp, Homo sapiens
tcagaaatttggttg

SEQ ID NO: 1992671 - DNA, 15 bp, Homo sapiens
cagaaatttggttga

SEQ ID NO: 1992672 - DNA, 15 bp, Homo sapiens
agaaatttggttgat

SEQ ID NO: 1992673 - DNA, 15 bp, Homo sapiens
gaaatttggttgatg

SEQ ID NO: 1992674 - DNA, 15 bp, Homo sapiens
aaatttggttgatgg

SEQ ID NO: 1992675 - DNA, 15 bp, Homo sapiens
aatttggttgatggc

SEQ ID NO: 1992676 - DNA, 15 bp, Homo sapiens
atttggttgatggct

SEQ ID NO: 1992677 - DNA, 15 bp, Homo sapiens
tttggttgatggctt

SEQ ID NO: 1992678 - DNA, 15 bp, Homo sapiens
ttggttgatggcttt

SEQ ID NO: 1992679 - DNA, 15 bp, Homo sapiens
tggttgatggctttt

SEQ ID NO: 1992680 - DNA, 15 bp, Homo sapiens
ggttgatggcttttt

SEQ ID NO: 1992681 - DNA, 15 bp, Homo sapiens
gttgatggcttttta

SEQ ID NO: 1992682 - DNA, 15 bp, Homo sapiens
ttgatggctttttat

SEQ ID NO: 1992683 - DNA, 15 bp, Homo sapiens
tgatggctttttatt

SEQ ID NO: 1992684 - DNA, 15 bp, Homo sapiens
gatggctttttattt

SEQ ID NO: 1992685 - DNA, 15 bp, Homo sapiens
atggctttttatttt

SEQ ID NO: 1992686 - DNA, 15 bp, Homo sapiens
tggctttttattttg

SEQ ID NO: 1992687 - DNA, 15 bp, Homo sapiens
ggctttttattttgt

SEQ ID NO: 1992688 - DNA, 15 bp, Homo sapiens
gctttttattttgta

SEQ ID NO: 1992689 - DNA, 15 bp, Homo sapiens
ctttttattttgtag

SEQ ID NO: 1992690 - DNA, 15 bp, Homo sapiens
tttttattttgtaga

SEQ ID NO: 1992691 - DNA, 15 bp, Homo sapiens
ttttattttgtagag

SEQ ID NO: 1992692 - DNA, 15 bp, Homo sapiens
tttattttgtagaga

SEQ ID NO: 1992693 - DNA, 15 bp, Homo sapiens
ttattttgtagagac

SEQ ID NO: 1992694 - DNA, 15 bp, Homo sapiens
tagagacagggtctg

SEQ ID NO: 1992695 - DNA, 15 bp, Homo sapiens
agagacagggtctgt

SEQ ID NO: 1992696 - DNA, 15 bp, Homo sapiens
gagacagggtctgtc

SEQ ID NO: 1992697 - DNA, 15 bp, Homo sapiens
agacagggtctgtct

SEQ ID NO: 1992698 - DNA, 15 bp, Homo sapiens
gacagggtctgtctc

SEQ ID NO: 1992699 - DNA, 15 bp, Homo sapiens
acagggtctgtctct

SEQ ID NO: 1992700 - DNA, 15 bp, Homo sapiens
cagggtctgtctctg

SEQ ID NO: 1992701 - DNA, 15 bp, Homo sapiens
agggtctgtctctgt

SEQ ID NO: 1992702 - DNA, 15 bp, Homo sapiens
gggtctgtctctgtt

SEQ ID NO: 1992703 - DNA, 15 bp, Homo sapiens
ggtctgtctctgtta

SEQ ID NO: 1992704 - DNA, 15 bp, Homo sapiens
gtctgtctctgttac

SEQ ID NO: 1992705 - DNA, 15 bp, Homo sapiens
tctgtctctgttacc

SEQ ID NO: 1992706 - DNA, 15 bp, Homo sapiens
ctgtctctgttaccc

SEQ ID NO: 1992707 - DNA, 15 bp, Homo sapiens
tgtctctgttaccca

SEQ ID NO: 1992708 - DNA, 15 bp, Homo sapiens
gtctctgttacccag

SEQ ID NO: 1992709 - DNA, 15 bp, Homo sapiens
tctctgttacccagc

SEQ ID NO: 1992710 - DNA, 15 bp, Homo sapiens
ctctgttacccagcc

SEQ ID NO: 1992711 - DNA, 15 bp, Homo sapiens
tctgttacccagcct

SEQ ID NO: 1992712 - DNA, 15 bp, Homo sapiens
ctgttacccagccta

SEQ ID NO: 1992713 - DNA, 15 bp, Homo sapiens
tgttacccagcctag

SEQ ID NO: 1992714 - DNA, 15 bp, Homo sapiens
gttacccagcctagt

SEQ ID NO: 1992715 - DNA, 15 bp, Homo sapiens
ttacccagcctagtc

SEQ ID NO: 1992716 - DNA, 15 bp, Homo sapiens
tacccagcctagtct

SEQ ID NO: 1992717 - DNA, 15 bp, Homo sapiens
acccagcctagtctc

SEQ ID NO: 1992718 - DNA, 15 bp, Homo sapiens
cccagcctagtctct

SEQ ID NO: 1992719 - DNA, 15 bp, Homo sapiens
ccagcctagtctcta

SEQ ID NO: 1992720 - DNA, 15 bp, Homo sapiens
cagcctagtctctaa

SEQ ID NO: 1992721 - DNA, 15 bp, Homo sapiens
agcctagtctctaac

SEQ ID NO: 1992722 - DNA, 15 bp, Homo sapiens
gcctagtctctaact

SEQ ID NO: 1992723 - DNA, 15 bp, Homo sapiens
cctagtctctaactt

SEQ ID NO: 1992724 - DNA, 15 bp, Homo sapiens
ctagtctctaacttc

SEQ ID NO: 1992725 - DNA, 15 bp, Homo sapiens
tagtctctaacttct

SEQ ID NO: 1992726 - DNA, 15 bp, Homo sapiens
agtctctaacttcta

SEQ ID NO: 1992727 - DNA, 15 bp, Homo sapiens
gtctctaacttctag

SEQ ID NO: 1992728 - DNA, 15 bp, Homo sapiens
tctctaacttctagt

SEQ ID NO: 1992729 - DNA, 15 bp, Homo sapiens
ctctaacttctagtc

SEQ ID NO: 1992730 - DNA, 15 bp, Homo sapiens
tctaacttctagtct

SEQ ID NO: 1992731 - DNA, 15 bp, Homo sapiens
ctaacttctagtctc

SEQ ID NO: 1992732 - DNA, 15 bp, Homo sapiens
taacttctagtctca

SEQ ID NO: 1992733 - DNA, 15 bp, Homo sapiens
aacttctagtctcaa

SEQ ID NO: 1992734 - DNA, 15 bp, Homo sapiens
acttctagtctcaag

SEQ ID NO: 1992735 - DNA, 15 bp, Homo sapiens
cttctagtctcaagt

SEQ ID NO: 1992736 - DNA, 15 bp, Homo sapiens
ttctagtctcaagtg

SEQ ID NO: 1992737 - DNA, 15 bp, Homo sapiens
tctagtctcaagtgg

SEQ ID NO: 1992738 - DNA, 15 bp, Homo sapiens
ctagtctcaagtggt

SEQ ID NO: 1992739 - DNA, 15 bp, Homo sapiens
tagtctcaagtggtc

SEQ ID NO: 1992740 - DNA, 15 bp, Homo sapiens
agtctcaagtggtct

SEQ ID NO: 1992741 - DNA, 15 bp, Homo sapiens
gtctcaagtggtctt

SEQ ID NO: 1992742 - DNA, 15 bp, Homo sapiens
tctcaagtggtcttt

SEQ ID NO: 1992743 - DNA, 15 bp, Homo sapiens
ctcaagtggtctttc

SEQ ID NO: 1992744 - DNA, 15 bp, Homo sapiens
tcaagtggtctttcc

SEQ ID NO: 1992745 - DNA, 15 bp, Homo sapiens
caagtggtctttcca

SEQ ID NO: 1992746 - DNA, 15 bp, Homo sapiens
aagtggtctttccac

SEQ ID NO: 1992747 - DNA, 15 bp, Homo sapiens
agtggtctttccacc

SEQ ID NO: 1992748 - DNA, 15 bp, Homo sapiens
gtggtctttccacct

SEQ ID NO: 1992749 - DNA, 15 bp, Homo sapiens
tggtctttccacctc

SEQ ID NO: 1992750 - DNA, 15 bp, Homo sapiens
ggtctttccacctca

SEQ ID NO: 1992751 - DNA, 15 bp, Homo sapiens
gtctttccacctcag

SEQ ID NO: 1992752 - DNA, 15 bp, Homo sapiens
tctttccacctcagc

SEQ ID NO: 1992753 - DNA, 15 bp, Homo sapiens
ctttccacctcagcc

SEQ ID NO: 1992754 - DNA, 15 bp, Homo sapiens
tttccacctcagcct

SEQ ID NO: 1992755 - DNA, 15 bp, Homo sapiens
ttccacctcagcctt

SEQ ID NO: 1992756 - DNA, 15 bp, Homo sapiens
tccacctcagccttc

SEQ ID NO: 1992757 - DNA, 15 bp, Homo sapiens
ccacctcagccttcc

SEQ ID NO: 1992758 - DNA, 15 bp, Homo sapiens
cacctcagccttcct

SEQ ID NO: 1992759 - DNA, 15 bp, Homo sapiens
acctcagccttccta

SEQ ID NO: 1992760 - DNA, 15 bp, Homo sapiens
cctcagccttcctag

SEQ ID NO: 1992761 - DNA, 15 bp, Homo sapiens
ctcagccttcctagt

SEQ ID NO: 1992762 - DNA, 15 bp, Homo sapiens
tcagccttcctagtg

SEQ ID NO: 1992763 - DNA, 15 bp, Homo sapiens
cagccttcctagtgt

SEQ ID NO: 1992764 - DNA, 15 bp, Homo sapiens
agccttcctagtgtt

SEQ ID NO: 1992765 - DNA, 15 bp, Homo sapiens
gccttcctagtgttg

SEQ ID NO: 1992766 - DNA, 15 bp, Homo sapiens
ccttcctagtgttgg

SEQ ID NO: 1992767 - DNA, 15 bp, Homo sapiens
cttcctagtgttggg

SEQ ID NO: 1992768 - DNA, 15 bp, Homo sapiens
ttcctagtgttggga

SEQ ID NO: 1992769 - DNA, 15 bp, Homo sapiens
tcctagtgttgggat

SEQ ID NO: 1992770 - DNA, 15 bp, Homo sapiens
cctagtgttgggatt

SEQ ID NO: 1992771 - DNA, 15 bp, Homo sapiens
ctagtgttgggatta

SEQ ID NO: 1992772 - DNA, 15 bp, Homo sapiens
tagtgttgggattac

SEQ ID NO: 1992773 - DNA, 15 bp, Homo sapiens
agtgttgggattaca

SEQ ID NO: 1992774 - DNA, 15 bp, Homo sapiens
gtgttgggattacag

SEQ ID NO: 1992775 - DNA, 15 bp, Homo sapiens
tgttgggattacagg

SEQ ID NO: 1992776 - DNA, 15 bp, Homo sapiens
atgagccaccgcact

SEQ ID NO: 1992777 - DNA, 15 bp, Homo sapiens
tgagccaccgcactg

SEQ ID NO: 1992778 - DNA, 15 bp, Homo sapiens
gagccaccgcactgg

SEQ ID NO: 1992779 - DNA, 15 bp, Homo sapiens
agccaccgcactggc

SEQ ID NO: 1992780 - DNA, 15 bp, Homo sapiens
gccaccgcactggcc

SEQ ID NO: 1992781 - DNA, 15 bp, Homo sapiens
ccaccgcactggcca

SEQ ID NO: 1992782 - DNA, 15 bp, Homo sapiens
caccgcactggccag

SEQ ID NO: 1992783 - DNA, 15 bp, Homo sapiens
accgcactggccaga

SEQ ID NO: 1992784 - DNA, 15 bp, Homo sapiens
ccgcactggccagat

SEQ ID NO: 1992785 - DNA, 15 bp, Homo sapiens
cgcactggccagatg

SEQ ID NO: 1992786 - DNA, 15 bp, Homo sapiens
gcactggccagatgg

SEQ ID NO: 1992787 - DNA, 15 bp, Homo sapiens
cactggccagatggc

SEQ ID NO: 1992788 - DNA, 15 bp, Homo sapiens
actggccagatggca

SEQ ID NO: 1992789 - DNA, 15 bp, Homo sapiens
ctggccagatggcat

SEQ ID NO: 1992790 - DNA, 15 bp, Homo sapiens
tggccagatggcatt

SEQ ID NO: 1992791 - DNA, 15 bp, Homo sapiens
ggccagatggcattt

SEQ ID NO: 1992792 - DNA, 15 bp, Homo sapiens
gccagatggcatttt

SEQ ID NO: 1992793 - DNA, 15 bp, Homo sapiens
ccagatggcatttta

SEQ ID NO: 1992794 - DNA, 15 bp, Homo sapiens
cagatggcattttaa

SEQ ID NO: 1992795 - DNA, 15 bp, Homo sapiens
agatggcattttaaa

SEQ ID NO: 1992796 - DNA, 15 bp, Homo sapiens
gatggcattttaaag

SEQ ID NO: 1992797 - DNA, 15 bp, Homo sapiens
atggcattttaaaga

SEQ ID NO: 1992798 - DNA, 15 bp, Homo sapiens
tggcattttaaagaa

SEQ ID NO: 1992799 - DNA, 15 bp, Homo sapiens
ggcattttaaagaat

SEQ ID NO: 1992800 - DNA, 15 bp, Homo sapiens
gcattttaaagaata

SEQ ID NO: 1992801 - DNA, 15 bp, Homo sapiens
cattttaaagaataa

SEQ ID NO: 1992802 - DNA, 15 bp, Homo sapiens
attttaaagaataat

SEQ ID NO: 1992803 - DNA, 15 bp, Homo sapiens
ttttaaagaataatg

SEQ ID NO: 1992804 - DNA, 15 bp, Homo sapiens
tttaaagaataatgt

SEQ ID NO: 1992805 - DNA, 15 bp, Homo sapiens
ttaaagaataatgtt

SEQ ID NO: 1992806 - DNA, 15 bp, Homo sapiens
taaagaataatgtta

SEQ ID NO: 1992807 - DNA, 15 bp, Homo sapiens
aaagaataatgttag

SEQ ID NO: 1992808 - DNA, 15 bp, Homo sapiens
aagaataatgttagg

SEQ ID NO: 1992809 - DNA, 15 bp, Homo sapiens
agaataatgttagga

SEQ ID NO: 1992810 - DNA, 15 bp, Homo sapiens
gaataatgttaggaa

SEQ ID NO: 1992811 - DNA, 15 bp, Homo sapiens
aataatgttaggaaa

SEQ ID NO: 1992812 - DNA, 15 bp, Homo sapiens
ataatgttaggaaaa

SEQ ID NO: 1992813 - DNA, 15 bp, Homo sapiens
taatgttaggaaaat

SEQ ID NO: 1992814 - DNA, 15 bp, Homo sapiens
aatgttaggaaaata

SEQ ID NO: 1992815 - DNA, 15 bp, Homo sapiens
atgttaggaaaataa

SEQ ID NO: 1992816 - DNA, 15 bp, Homo sapiens
tgttaggaaaataat

SEQ ID NO: 1992817 - DNA, 15 bp, Homo sapiens
gttaggaaaataatt

SEQ ID NO: 1992818 - DNA, 15 bp, Homo sapiens
ttaggaaaataatta

SEQ ID NO: 1992819 - DNA, 15 bp, Homo sapiens
taggaaaataattaa

SEQ ID NO: 1992820 - DNA, 15 bp, Homo sapiens
aggaaaataattaat

SEQ ID NO: 1992821 - DNA, 15 bp, Homo sapiens
ggaaaataattaatt

SEQ ID NO: 1992822 - DNA, 15 bp, Homo sapiens
gaaaataattaattt

SEQ ID NO: 1992823 - DNA, 15 bp, Homo sapiens
aaaataattaatttt

SEQ ID NO: 1992824 - DNA, 15 bp, Homo sapiens
aaataattaattttt

SEQ ID NO: 1992825 - DNA, 15 bp, Homo sapiens
aataattaatttttg

SEQ ID NO: 1992826 - DNA, 15 bp, Homo sapiens
ataattaatttttgc

SEQ ID NO: 1992827 - DNA, 15 bp, Homo sapiens
taattaatttttgca

SEQ ID NO: 1992828 - DNA, 15 bp, Homo sapiens
aattaatttttgcaa

SEQ ID NO: 1992829 - DNA, 15 bp, Homo sapiens
attaatttttgcaag

SEQ ID NO: 1992830 - DNA, 15 bp, Homo sapiens
ttaatttttgcaagt

SEQ ID NO: 1992831 - DNA, 15 bp, Homo sapiens
taatttttgcaagtg

SEQ ID NO: 1992832 - DNA, 15 bp, Homo sapiens
aatttttgcaagtga

SEQ ID NO: 1992833 - DNA, 15 bp, Homo sapiens
atttttgcaagtgaa

SEQ ID NO: 1992834 - DNA, 15 bp, Homo sapiens
tttttgcaagtgaag

SEQ ID NO: 1992835 - DNA, 15 bp, Homo sapiens
ttttgcaagtgaaga

SEQ ID NO: 1992836 - DNA, 15 bp, Homo sapiens
tttgcaagtgaagat

SEQ ID NO: 1992837 - DNA, 15 bp, Homo sapiens
ttgcaagtgaagata

SEQ ID NO: 1992838 - DNA, 15 bp, Homo sapiens
tgcaagtgaagatag

SEQ ID NO: 1992839 - DNA, 15 bp, Homo sapiens
gcaagtgaagatagt

SEQ ID NO: 1992840 - DNA, 15 bp, Homo sapiens
caagtgaagatagtt

SEQ ID NO: 1992841 - DNA, 15 bp, Homo sapiens
aagtgaagatagttg

SEQ ID NO: 1992842 - DNA, 15 bp, Homo sapiens
agtgaagatagttga

SEQ ID NO: 1992843 - DNA, 15 bp, Homo sapiens
gtgaagatagttgaa

SEQ ID NO: 1992844 - DNA, 15 bp, Homo sapiens
tgaagatagttgaaa

SEQ ID NO: 1992845 - DNA, 15 bp, Homo sapiens
gaagatagttgaaat

SEQ ID NO: 1992846 - DNA, 15 bp, Homo sapiens
aagatagttgaaatg

SEQ ID NO: 1992847 - DNA, 15 bp, Homo sapiens
agatagttgaaatgt

SEQ ID NO: 1992848 - DNA, 15 bp, Homo sapiens
gatagttgaaatgtt

SEQ ID NO: 1992849 - DNA, 15 bp, Homo sapiens
atagttgaaatgtta

SEQ ID NO: 1992850 - DNA, 15 bp, Homo sapiens
tagttgaaatgttag

SEQ ID NO: 1992851 - DNA, 15 bp, Homo sapiens
agttgaaatgttagc

SEQ ID NO: 1992852 - DNA, 15 bp, Homo sapiens
gttgaaatgttagct

SEQ ID NO: 1992853 - DNA, 15 bp, Homo sapiens
ttgaaatgttagcta

SEQ ID NO: 1992854 - DNA, 15 bp, Homo sapiens
tgaaatgttagctaa

SEQ ID NO: 1992855 - DNA, 15 bp, Homo sapiens
gaaatgttagctaaa

SEQ ID NO: 1992856 - DNA, 15 bp, Homo sapiens
aaatgttagctaaaa

SEQ ID NO: 1992857 - DNA, 15 bp, Homo sapiens
aatgttagctaaaat

SEQ ID NO: 1992858 - DNA, 15 bp, Homo sapiens
atgttagctaaaatg

SEQ ID NO: 1992859 - DNA, 15 bp, Homo sapiens
tgttagctaaaatga

SEQ ID NO: 1992860 - DNA, 15 bp, Homo sapiens
gttagctaaaatgat

SEQ ID NO: 1992861 - DNA, 15 bp, Homo sapiens
ttagctaaaatgatg

SEQ ID NO: 1992862 - DNA, 15 bp, Homo sapiens
tagctaaaatgatga

SEQ ID NO: 1992863 - DNA, 15 bp, Homo sapiens
agctaaaatgatgac

SEQ ID NO: 1992864 - DNA, 15 bp, Homo sapiens
gctaaaatgatgacc

SEQ ID NO: 1992865 - DNA, 15 bp, Homo sapiens
ctaaaatgatgacct

SEQ ID NO: 1992866 - DNA, 15 bp, Homo sapiens
taaaatgatgaccta

SEQ ID NO: 1992867 - DNA, 15 bp, Homo sapiens
aaaatgatgacctag

SEQ ID NO: 1992868 - DNA, 15 bp, Homo sapiens
aaatgatgacctaga

SEQ ID NO: 1992869 - DNA, 15 bp, Homo sapiens
aatgatgacctagag

SEQ ID NO: 1992870 - DNA, 15 bp, Homo sapiens
atgatgacctagagg

SEQ ID NO: 1992871 - DNA, 15 bp, Homo sapiens
tgatgacctagaggc

SEQ ID NO: 1992872 - DNA, 15 bp, Homo sapiens
gatgacctagaggca

SEQ ID NO: 1992873 - DNA, 15 bp, Homo sapiens
atgacctagaggcag

SEQ ID NO: 1992874 - DNA, 15 bp, Homo sapiens
tgacctagaggcagc

SEQ ID NO: 1992875 - DNA, 15 bp, Homo sapiens
gacctagaggcagct

SEQ ID NO: 1992876 - DNA, 15 bp, Homo sapiens
acctagaggcagctt

SEQ ID NO: 1992877 - DNA, 15 bp, Homo sapiens
cctagaggcagcttg

SEQ ID NO: 1992878 - DNA, 15 bp, Homo sapiens
ctagaggcagcttgt

SEQ ID NO: 1992879 - DNA, 15 bp, Homo sapiens
tagaggcagcttgtt

SEQ ID NO: 1992880 - DNA, 15 bp, Homo sapiens
agaggcagcttgttt

SEQ ID NO: 1992881 - DNA, 15 bp, Homo sapiens
gaggcagcttgtttt

SEQ ID NO: 1992882 - DNA, 15 bp, Homo sapiens
aggcagcttgttttg

SEQ ID NO: 1992883 - DNA, 15 bp, Homo sapiens
ggcagcttgttttgg

SEQ ID NO: 1992884 - DNA, 15 bp, Homo sapiens
gcagcttgttttggt

SEQ ID NO: 1992885 - DNA, 15 bp, Homo sapiens
cagcttgttttggta

SEQ ID NO: 1992886 - DNA, 15 bp, Homo sapiens
agcttgttttggtaa

SEQ ID NO: 1992887 - DNA, 15 bp, Homo sapiens
gcttgttttggtaaa

SEQ ID NO: 1992888 - DNA, 15 bp, Homo sapiens
cttgttttggtaaat

SEQ ID NO: 1992889 - DNA, 15 bp, Homo sapiens
ttgttttggtaaata

SEQ ID NO: 1992890 - DNA, 15 bp, Homo sapiens
tgttttggtaaatat

SEQ ID NO: 1992891 - DNA, 15 bp, Homo sapiens
gttttggtaaatatc

SEQ ID NO: 1992892 - DNA, 15 bp, Homo sapiens
ttttggtaaatatct

SEQ ID NO: 1992893 - DNA, 15 bp, Homo sapiens
tttggtaaatatctt

SEQ ID NO: 1992894 - DNA, 15 bp, Homo sapiens
ttggtaaatatctta

SEQ ID NO: 1992895 - DNA, 15 bp, Homo sapiens
tggtaaatatcttag

SEQ ID NO: 1992896 - DNA, 15 bp, Homo sapiens
ggtaaatatcttagt

SEQ ID NO: 1992897 - DNA, 15 bp, Homo sapiens
gtaaatatcttagtc

SEQ ID NO: 1992898 - DNA, 15 bp, Homo sapiens
taaatatcttagtca

SEQ ID NO: 1992899 - DNA, 15 bp, Homo sapiens
aaatatcttagtcag

SEQ ID NO: 1992900 - DNA, 15 bp, Homo sapiens
aatatcttagtcagt

SEQ ID NO: 1992901 - DNA, 15 bp, Homo sapiens
atatcttagtcagtt

SEQ ID NO: 1992902 - DNA, 15 bp, Homo sapiens
tatcttagtcagttt

SEQ ID NO: 1992903 - DNA, 15 bp, Homo sapiens
atcttagtcagttta

SEQ ID NO: 1992904 - DNA, 15 bp, Homo sapiens
tcttagtcagtttag

SEQ ID NO: 1992905 - DNA, 15 bp, Homo sapiens
cttagtcagtttagg

SEQ ID NO: 1992906 - DNA, 15 bp, Homo sapiens
ttagtcagtttaggc

SEQ ID NO: 1992907 - DNA, 15 bp, Homo sapiens
tagtcagtttaggct

SEQ ID NO: 1992908 - DNA, 15 bp, Homo sapiens
agtcagtttaggctg

SEQ ID NO: 1992909 - DNA, 15 bp, Homo sapiens
gtcagtttaggctgc

SEQ ID NO: 1992910 - DNA, 15 bp, Homo sapiens
tcagtttaggctgct

SEQ ID NO: 1992911 - DNA, 15 bp, Homo sapiens
cagtttaggctgcta

SEQ ID NO: 1992912 - DNA, 15 bp, Homo sapiens
agtttaggctgctat

SEQ ID NO: 1992913 - DNA, 15 bp, Homo sapiens
gtttaggctgctata

SEQ ID NO: 1992914 - DNA, 15 bp, Homo sapiens
tttaggctgctataa

SEQ ID NO: 1992915 - DNA, 15 bp, Homo sapiens
ttaggctgctataac

SEQ ID NO: 1992916 - DNA, 15 bp, Homo sapiens
taggctgctataaca

SEQ ID NO: 1992917 - DNA, 15 bp, Homo sapiens
aggctgctataacaa

SEQ ID NO: 1992918 - DNA, 15 bp, Homo sapiens
ggctgctataacaaa

SEQ ID NO: 1992919 - DNA, 15 bp, Homo sapiens
gctgctataacaaaa

SEQ ID NO: 1992920 - DNA, 15 bp, Homo sapiens
ctgctataacaaaat

SEQ ID NO: 1992921 - DNA, 15 bp, Homo sapiens
tgctataacaaaata

SEQ ID NO: 1992922 - DNA, 15 bp, Homo sapiens
gctataacaaaatac

SEQ ID NO: 1992923 - DNA, 15 bp, Homo sapiens
ctataacaaaatacc

SEQ ID NO: 1992924 - DNA, 15 bp, Homo sapiens
tataacaaaatacca

SEQ ID NO: 1992925 - DNA, 15 bp, Homo sapiens
taacaaaataccata

SEQ ID NO: 1992926 - DNA, 15 bp, Homo sapiens
aacaaaataccatag

SEQ ID NO: 1992927 - DNA, 15 bp, Homo sapiens
acaaaataccataga

SEQ ID NO: 1992928 - DNA, 15 bp, Homo sapiens
caaaataccatagat

SEQ ID NO: 1992929 - DNA, 15 bp, Homo sapiens
aaaataccatagatt

SEQ ID NO: 1992930 - DNA, 15 bp, Homo sapiens
aaataccatagattt

SEQ ID NO: 1992931 - DNA, 15 bp, Homo sapiens
aataccatagatttg

SEQ ID NO: 1992932 - DNA, 15 bp, Homo sapiens
ataccatagatttgg

SEQ ID NO: 1992933 - DNA, 15 bp, Homo sapiens
taccatagatttggt

SEQ ID NO: 1992934 - DNA, 15 bp, Homo sapiens
accatagatttggta

SEQ ID NO: 1992935 - DNA, 15 bp, Homo sapiens
ccatagatttggtag

SEQ ID NO: 1992936 - DNA, 15 bp, Homo sapiens
catagatttggtagt

SEQ ID NO: 1992937 - DNA, 15 bp, Homo sapiens
atagatttggtagtt

SEQ ID NO: 1992938 - DNA, 15 bp, Homo sapiens
tagatttggtagttt

SEQ ID NO: 1992939 - DNA, 15 bp, Homo sapiens
agatttggtagttta

SEQ ID NO: 1992940 - DNA, 15 bp, Homo sapiens
gatttggtagtttat

SEQ ID NO: 1992941 - DNA, 15 bp, Homo sapiens
atttggtagtttata

SEQ ID NO: 1992942 - DNA, 15 bp, Homo sapiens
tttggtagtttataa

SEQ ID NO: 1992943 - DNA, 15 bp, Homo sapiens
ttggtagtttataaa

SEQ ID NO: 1992944 - DNA, 15 bp, Homo sapiens
tggtagtttataaac

SEQ ID NO: 1992945 - DNA, 15 bp, Homo sapiens
ggtagtttataaaca

SEQ ID NO: 1992946 - DNA, 15 bp, Homo sapiens
gtagtttataaacaa

SEQ ID NO: 1992947 - DNA, 15 bp, Homo sapiens
tagtttataaacaac

SEQ ID NO: 1992948 - DNA, 15 bp, Homo sapiens
agtttataaacaaca

SEQ ID NO: 1992949 - DNA, 15 bp, Homo sapiens
gtttataaacaacag

SEQ ID NO: 1992950 - DNA, 15 bp, Homo sapiens
tttataaacaacaga

SEQ ID NO: 1992951 - DNA, 15 bp, Homo sapiens
ttataaacaacagaa

SEQ ID NO: 1992952 - DNA, 15 bp, Homo sapiens
tataaacaacagaaa

SEQ ID NO: 1992953 - DNA, 15 bp, Homo sapiens
ataaacaacagaaac

SEQ ID NO: 1992954 - DNA, 15 bp, Homo sapiens
taaacaacagaaact

SEQ ID NO: 1992955 - DNA, 15 bp, Homo sapiens
aaacaacagaaactt

SEQ ID NO: 1992956 - DNA, 15 bp, Homo sapiens
aacaacagaaactta

SEQ ID NO: 1992957 - DNA, 15 bp, Homo sapiens
tgattctagccttat

SEQ ID NO: 1992958 - DNA, 15 bp, Homo sapiens
gattctagccttata

SEQ ID NO: 1992959 - DNA, 15 bp, Homo sapiens
attctagccttataa

SEQ ID NO: 1992960 - DNA, 15 bp, Homo sapiens
ttctagccttataaa

SEQ ID NO: 1992961 - DNA, 15 bp, Homo sapiens
tctagccttataaaa

SEQ ID NO: 1992962 - DNA, 15 bp, Homo sapiens
ctagccttataaaat

SEQ ID NO: 1992963 - DNA, 15 bp, Homo sapiens
tagccttataaaatc

SEQ ID NO: 1992964 - DNA, 15 bp, Homo sapiens
agccttataaaatca

SEQ ID NO: 1992965 - DNA, 15 bp, Homo sapiens
gccttataaaatcaa

SEQ ID NO: 1992966 - DNA, 15 bp, Homo sapiens
ccttataaaatcaat

SEQ ID NO: 1992967 - DNA, 15 bp, Homo sapiens
cttataaaatcaatt

SEQ ID NO: 1992968 - DNA, 15 bp, Homo sapiens
ttataaaatcaattg

SEQ ID NO: 1992969 - DNA, 15 bp, Homo sapiens
tataaaatcaattgg

SEQ ID NO: 1992970 - DNA, 15 bp, Homo sapiens
ataaaatcaattggg

SEQ ID NO: 1992971 - DNA, 15 bp, Homo sapiens
taaaatcaattgggg

SEQ ID NO: 1992972 - DNA, 15 bp, Homo sapiens
aaaatcaattgggga

SEQ ID NO: 1992973 - DNA, 15 bp, Homo sapiens
aaatcaattggggag

SEQ ID NO: 1992974 - DNA, 15 bp, Homo sapiens
aatcaattggggagt

SEQ ID NO: 1992975 - DNA, 15 bp, Homo sapiens
atcaattggggagtt

SEQ ID NO: 1992976 - DNA, 15 bp, Homo sapiens
tcaattggggagttt

SEQ ID NO: 1992977 - DNA, 15 bp, Homo sapiens
caattggggagttta

SEQ ID NO: 1992978 - DNA, 15 bp, Homo sapiens
aattggggagtttat

SEQ ID NO: 1992979 - DNA, 15 bp, Homo sapiens
attggggagtttata

SEQ ID NO: 1992980 - DNA, 15 bp, Homo sapiens
ttggggagtttatat

SEQ ID NO: 1992981 - DNA, 15 bp, Homo sapiens
tggggagtttatata

SEQ ID NO: 1992982 - DNA, 15 bp, Homo sapiens
ggggagtttatataa

SEQ ID NO: 1992983 - DNA, 15 bp, Homo sapiens
gggagtttatataat

SEQ ID NO: 1992984 - DNA, 15 bp, Homo sapiens
ggagtttatataatc

SEQ ID NO: 1992985 - DNA, 15 bp, Homo sapiens
gagtttatataatct

SEQ ID NO: 1992986 - DNA, 15 bp, Homo sapiens
agtttatataatcta

SEQ ID NO: 1992987 - DNA, 15 bp, Homo sapiens
gtttatataatctat

SEQ ID NO: 1992988 - DNA, 15 bp, Homo sapiens
tttatataatctatt

SEQ ID NO: 1992989 - DNA, 15 bp, Homo sapiens
ttatataatctattt

SEQ ID NO: 1992990 - DNA, 15 bp, Homo sapiens
tatataatctattta

SEQ ID NO: 1992991 - DNA, 15 bp, Homo sapiens
atataatctatttaa

SEQ ID NO: 1992992 - DNA, 15 bp, Homo sapiens
tataatctatttaat

SEQ ID NO: 1992993 - DNA, 15 bp, Homo sapiens
ataatctatttaatc

SEQ ID NO: 1992994 - DNA, 15 bp, Homo sapiens
taatctatttaatct

SEQ ID NO: 1992995 - DNA, 15 bp, Homo sapiens
aatctatttaatctc

SEQ ID NO: 1992996 - DNA, 15 bp, Homo sapiens
atctatttaatctct

SEQ ID NO: 1992997 - DNA, 15 bp, Homo sapiens
tctatttaatctctg

SEQ ID NO: 1992998 - DNA, 15 bp, Homo sapiens
ctatttaatctctgt

SEQ ID NO: 1992999 - DNA, 15 bp, Homo sapiens
tatttaatctctgtg

SEQ ID NO: 1993000 - DNA, 15 bp, Homo sapiens
atttaatctctgtgt

SEQ ID NO: 1993001 - DNA, 15 bp, Homo sapiens
tttaatctctgtgtt

SEQ ID NO: 1993002 - DNA, 15 bp, Homo sapiens
ttaatctctgtgtta

SEQ ID NO: 1993003 - DNA, 15 bp, Homo sapiens
taatctctgtgttaa

SEQ ID NO: 1993004 - DNA, 15 bp, Homo sapiens
aatctctgtgttaac

SEQ ID NO: 1993005 - DNA, 15 bp, Homo sapiens
atctctgtgttaact

SEQ ID NO: 1993006 - DNA, 15 bp, Homo sapiens
tctctgtgttaactg

SEQ ID NO: 1993007 - DNA, 15 bp, Homo sapiens
ctctgtgttaactga

SEQ ID NO: 1993008 - DNA, 15 bp, Homo sapiens
tctgtgttaactgaa

SEQ ID NO: 1993009 - DNA, 15 bp, Homo sapiens
ctgtgttaactgaag

SEQ ID NO: 1993010 - DNA, 15 bp, Homo sapiens
tgtgttaactgaagt

SEQ ID NO: 1993011 - DNA, 15 bp, Homo sapiens
gtgttaactgaagtt

SEQ ID NO: 1993012 - DNA, 15 bp, Homo sapiens
tgttaactgaagttg

SEQ ID NO: 1993013 - DNA, 15 bp, Homo sapiens
gttaactgaagttgt

SEQ ID NO: 1993014 - DNA, 15 bp, Homo sapiens
ttaactgaagttgtg

SEQ ID NO: 1993015 - DNA, 15 bp, Homo sapiens
taactgaagttgtgt

SEQ ID NO: 1993016 - DNA, 15 bp, Homo sapiens
aactgaagttgtgtc

SEQ ID NO: 1993017 - DNA, 15 bp, Homo sapiens
actgaagttgtgtct

SEQ ID NO: 1993018 - DNA, 15 bp, Homo sapiens
ctgaagttgtgtcta

SEQ ID NO: 1993019 - DNA, 15 bp, Homo sapiens
tgaagttgtgtctaa

SEQ ID NO: 1993020 - DNA, 15 bp, Homo sapiens
gaagttgtgtctaat

SEQ ID NO: 1993021 - DNA, 15 bp, Homo sapiens
aagttgtgtctaata

SEQ ID NO: 1993022 - DNA, 15 bp, Homo sapiens
agttgtgtctaatat

SEQ ID NO: 1993023 - DNA, 15 bp, Homo sapiens
gttgtgtctaatatt

SEQ ID NO: 1993024 - DNA, 15 bp, Homo sapiens
ttgtgtctaatattt

SEQ ID NO: 1993025 - DNA, 15 bp, Homo sapiens
tgtgtctaatatttc

SEQ ID NO: 1993026 - DNA, 15 bp, Homo sapiens
gtgtctaatatttca

SEQ ID NO: 1993027 - DNA, 15 bp, Homo sapiens
tgtctaatatttcac

SEQ ID NO: 1993028 - DNA, 15 bp, Homo sapiens
gtctaatatttcacc

SEQ ID NO: 1993029 - DNA, 15 bp, Homo sapiens
tctaatatttcaccc

SEQ ID NO: 1993030 - DNA, 15 bp, Homo sapiens
ctaatatttcacccc

SEQ ID NO: 1993031 - DNA, 15 bp, Homo sapiens
taatatttcacccct

SEQ ID NO: 1993032 - DNA, 15 bp, Homo sapiens
aatatttcaccccta

SEQ ID NO: 1993033 - DNA, 15 bp, Homo sapiens
atatttcacccctaa

SEQ ID NO: 1993034 - DNA, 15 bp, Homo sapiens
tatttcacccctaat

SEQ ID NO: 1993035 - DNA, 15 bp, Homo sapiens
atttcacccctaatg

SEQ ID NO: 1993036 - DNA, 15 bp, Homo sapiens
tttcacccctaatgt

SEQ ID NO: 1993037 - DNA, 15 bp, Homo sapiens
ttcacccctaatgtt

SEQ ID NO: 1993038 - DNA, 15 bp, Homo sapiens
tcacccctaatgttt

SEQ ID NO: 1993039 - DNA, 15 bp, Homo sapiens
cacccctaatgttta

SEQ ID NO: 1993040 - DNA, 15 bp, Homo sapiens
acccctaatgtttat

SEQ ID NO: 1993041 - DNA, 15 bp, Homo sapiens
cccctaatgtttatt

SEQ ID NO: 1993042 - DNA, 15 bp, Homo sapiens
ccctaatgtttattt

SEQ ID NO: 1993043 - DNA, 15 bp, Homo sapiens
cctaatgtttatttc

SEQ ID NO: 1993044 - DNA, 15 bp, Homo sapiens
ctaatgtttatttct

SEQ ID NO: 1993045 - DNA, 15 bp, Homo sapiens
taatgtttatttctt

SEQ ID NO: 1993046 - DNA, 15 bp, Homo sapiens
aatgtttatttcttt

SEQ ID NO: 1993047 - DNA, 15 bp, Homo sapiens
atgtttatttcttta

SEQ ID NO: 1993048 - DNA, 15 bp, Homo sapiens
tgtttatttctttat

SEQ ID NO: 1993049 - DNA, 15 bp, Homo sapiens
gtttatttctttatt

SEQ ID NO: 1993050 - DNA, 15 bp, Homo sapiens
tttatttctttattt

SEQ ID NO: 1993051 - DNA, 15 bp, Homo sapiens
ttatttctttatttt

SEQ ID NO: 1993052 - DNA, 15 bp, Homo sapiens
tatttctttattttt

SEQ ID NO: 1993053 - DNA, 15 bp, Homo sapiens
atttctttatttttt

SEQ ID NO: 1993054 - DNA, 15 bp, Homo sapiens
tttctttattttttc

SEQ ID NO: 1993055 - DNA, 15 bp, Homo sapiens
ttctttattttttca

SEQ ID NO: 1993056 - DNA, 15 bp, Homo sapiens
tctttattttttcat

SEQ ID NO: 1993057 - DNA, 15 bp, Homo sapiens
ctttattttttcatg

SEQ ID NO: 1993058 - DNA, 15 bp, Homo sapiens
tttattttttcatgt

SEQ ID NO: 1993059 - DNA, 15 bp, Homo sapiens
ttattttttcatgtt

SEQ ID NO: 1993060 - DNA, 15 bp, Homo sapiens
tattttttcatgttt

SEQ ID NO: 1993061 - DNA, 15 bp, Homo sapiens
attttttcatgtttt

SEQ ID NO: 1993062 - DNA, 15 bp, Homo sapiens
ttttttcatgttttt

SEQ ID NO: 1993063 - DNA, 15 bp, Homo sapiens
tttttcatgtttttt

SEQ ID NO: 1993064 - DNA, 15 bp, Homo sapiens
ttttcatgttttttt

SEQ ID NO: 1993065 - DNA, 15 bp, Homo sapiens
tttcatgtttttttt

SEQ ID NO: 1993066 - DNA, 15 bp, Homo sapiens
ttcatgttttttttt

SEQ ID NO: 1993067 - DNA, 15 bp, Homo sapiens
tcatgtttttttttc

SEQ ID NO: 1993068 - DNA, 15 bp, Homo sapiens
catgtttttttttct

SEQ ID NO: 1993069 - DNA, 15 bp, Homo sapiens
atgtttttttttctg

SEQ ID NO: 1993070 - DNA, 15 bp, Homo sapiens
tgtttttttttctgt

SEQ ID NO: 1993071 - DNA, 15 bp, Homo sapiens
gtttttttttctgtt

SEQ ID NO: 1993072 - DNA, 15 bp, Homo sapiens
tttttttttctgttt

SEQ ID NO: 1993073 - DNA, 15 bp, Homo sapiens
ttttttttctgtttg

SEQ ID NO: 1993074 - DNA, 15 bp, Homo sapiens
tttttttctgtttgt

SEQ ID NO: 1993075 - DNA, 15 bp, Homo sapiens
ttttttctgtttgtg

SEQ ID NO: 1993076 - DNA, 15 bp, Homo sapiens
tttttctgtttgtgt

SEQ ID NO: 1993077 - DNA, 15 bp, Homo sapiens
ttttctgtttgtgta

SEQ ID NO: 1993078 - DNA, 15 bp, Homo sapiens
tttctgtttgtgtat

SEQ ID NO: 1993079 - DNA, 15 bp, Homo sapiens
ttctgtttgtgtatt

SEQ ID NO: 1993080 - DNA, 15 bp, Homo sapiens
tctgtttgtgtattt

SEQ ID NO: 1993081 - DNA, 15 bp, Homo sapiens
ctgtttgtgtatttc

SEQ ID NO: 1993082 - DNA, 15 bp, Homo sapiens
tgtttgtgtatttcg

SEQ ID NO: 1993083 - DNA, 15 bp, Homo sapiens
gtttgtgtatttcgt

SEQ ID NO: 1993084 - DNA, 15 bp, Homo sapiens
tttgtgtatttcgtt

SEQ ID NO: 1993085 - DNA, 15 bp, Homo sapiens
ttgtgtatttcgttt

SEQ ID NO: 1993086 - DNA, 15 bp, Homo sapiens
tgtgtatttcgtttt

SEQ ID NO: 1993087 - DNA, 15 bp, Homo sapiens
gtgtatttcgttttt

SEQ ID NO: 1993088 - DNA, 15 bp, Homo sapiens
tgtatttcgttttta

SEQ ID NO: 1993089 - DNA, 15 bp, Homo sapiens
gtatttcgtttttat

SEQ ID NO: 1993090 - DNA, 15 bp, Homo sapiens
tatttcgtttttatt

SEQ ID NO: 1993091 - DNA, 15 bp, Homo sapiens
atttcgtttttattt

SEQ ID NO: 1993092 - DNA, 15 bp, Homo sapiens
tttcgtttttatttt

SEQ ID NO: 1993093 - DNA, 15 bp, Homo sapiens
ttcgtttttattttt

SEQ ID NO: 1993094 - DNA, 15 bp, Homo sapiens
tcgtttttatttttt

SEQ ID NO: 1993095 - DNA, 15 bp, Homo sapiens
cgtttttattttttt

SEQ ID NO: 1993096 - DNA, 15 bp, Homo sapiens
gtttttatttttttg

SEQ ID NO: 1993097 - DNA, 15 bp, Homo sapiens
tttttatttttttga

SEQ ID NO: 1993098 - DNA, 15 bp, Homo sapiens
ttttatttttttgag

SEQ ID NO: 1993099 - DNA, 15 bp, Homo sapiens
gacagggtcttactc

SEQ ID NO: 1993100 - DNA, 15 bp, Homo sapiens
acagggtcttactct

SEQ ID NO: 1993101 - DNA, 15 bp, Homo sapiens
cagggtcttactctg

SEQ ID NO: 1993102 - DNA, 15 bp, Homo sapiens
agggtcttactctgt

SEQ ID NO: 1993103 - DNA, 15 bp, Homo sapiens
gggtcttactctgtc

SEQ ID NO: 1993104 - DNA, 15 bp, Homo sapiens
ggtcttactctgtca

SEQ ID NO: 1993105 - DNA, 15 bp, Homo sapiens
gtcttactctgtcat

SEQ ID NO: 1993106 - DNA, 15 bp, Homo sapiens
tcttactctgtcatc

SEQ ID NO: 1993107 - DNA, 15 bp, Homo sapiens
cttactctgtcatcc

SEQ ID NO: 1993108 - DNA, 15 bp, Homo sapiens
ttactctgtcatcca

SEQ ID NO: 1993109 - DNA, 15 bp, Homo sapiens
tactctgtcatccag

SEQ ID NO: 1993110 - DNA, 15 bp, Homo sapiens
actctgtcatccaga

SEQ ID NO: 1993111 - DNA, 15 bp, Homo sapiens
ctctgtcatccagac

SEQ ID NO: 1993112 - DNA, 15 bp, Homo sapiens
tctgtcatccagact

SEQ ID NO: 1993113 - DNA, 15 bp, Homo sapiens
ctgtcatccagactg

SEQ ID NO: 1993114 - DNA, 15 bp, Homo sapiens
tgtcatccagactgg

SEQ ID NO: 1993115 - DNA, 15 bp, Homo sapiens
gtcatccagactgga

SEQ ID NO: 1993116 - DNA, 15 bp, Homo sapiens
tcatccagactggag

SEQ ID NO: 1993117 - DNA, 15 bp, Homo sapiens
catccagactggagt

SEQ ID NO: 1993118 - DNA, 15 bp, Homo sapiens
atccagactggagtg

SEQ ID NO: 1993119 - DNA, 15 bp, Homo sapiens
tccagactggagtgc

SEQ ID NO: 1993120 - DNA, 15 bp, Homo sapiens
cagtggtgtgatcac

SEQ ID NO: 1993121 - DNA, 15 bp, Homo sapiens
agtggtgtgatcact

SEQ ID NO: 1993122 - DNA, 15 bp, Homo sapiens
gtggtgtgatcactg

SEQ ID NO: 1993123 - DNA, 15 bp, Homo sapiens
tggtgtgatcactgt

SEQ ID NO: 1993124 - DNA, 15 bp, Homo sapiens
ggtgtgatcactgtt

SEQ ID NO: 1993125 - DNA, 15 bp, Homo sapiens
gtgtgatcactgttc

SEQ ID NO: 1993126 - DNA, 15 bp, Homo sapiens
tgtgatcactgttca

SEQ ID NO: 1993127 - DNA, 15 bp, Homo sapiens
gtgatcactgttcac

SEQ ID NO: 1993128 - DNA, 15 bp, Homo sapiens
tgatcactgttcact

SEQ ID NO: 1993129 - DNA, 15 bp, Homo sapiens
gatcactgttcactg

SEQ ID NO: 1993130 - DNA, 15 bp, Homo sapiens
atcactgttcactgc

SEQ ID NO: 1993131 - DNA, 15 bp, Homo sapiens
tcactgttcactgca

SEQ ID NO: 1993132 - DNA, 15 bp, Homo sapiens
cactgttcactgcag

SEQ ID NO: 1993133 - DNA, 15 bp, Homo sapiens
actgttcactgcagc

SEQ ID NO: 1993134 - DNA, 15 bp, Homo sapiens
ctgttcactgcagcc

SEQ ID NO: 1993135 - DNA, 15 bp, Homo sapiens
tgttcactgcagcct

SEQ ID NO: 1993136 - DNA, 15 bp, Homo sapiens
ttcactgcagcctta

SEQ ID NO: 1993137 - DNA, 15 bp, Homo sapiens
tcactgcagccttaa

SEQ ID NO: 1993138 - DNA, 15 bp, Homo sapiens
cactgcagccttaac

SEQ ID NO: 1993139 - DNA, 15 bp, Homo sapiens
actgcagccttaacc

SEQ ID NO: 1993140 - DNA, 15 bp, Homo sapiens
ctgcagccttaacct

SEQ ID NO: 1993141 - DNA, 15 bp, Homo sapiens
tgcagccttaacctc

SEQ ID NO: 1993142 - DNA, 15 bp, Homo sapiens
gcagccttaacctcc

SEQ ID NO: 1993143 - DNA, 15 bp, Homo sapiens
cagccttaacctcct

SEQ ID NO: 1993144 - DNA, 15 bp, Homo sapiens
agccttaacctcctg

SEQ ID NO: 1993145 - DNA, 15 bp, Homo sapiens
gccttaacctcctgg

SEQ ID NO: 1993146 - DNA, 15 bp, Homo sapiens
ccttaacctcctggg

SEQ ID NO: 1993147 - DNA, 15 bp, Homo sapiens
cttaacctcctgggc

SEQ ID NO: 1993148 - DNA, 15 bp, Homo sapiens
ttaacctcctgggct

SEQ ID NO: 1993149 - DNA, 15 bp, Homo sapiens
taacctcctgggctc

SEQ ID NO: 1993150 - DNA, 15 bp, Homo sapiens
cctgggctcaagcag

SEQ ID NO: 1993151 - DNA, 15 bp, Homo sapiens
ctgggctcaagcagt

SEQ ID NO: 1993152 - DNA, 15 bp, Homo sapiens
tgggctcaagcagtc

SEQ ID NO: 1993153 - DNA, 15 bp, Homo sapiens
gggctcaagcagtcc

SEQ ID NO: 1993154 - DNA, 15 bp, Homo sapiens
ggctcaagcagtcct

SEQ ID NO: 1993155 - DNA, 15 bp, Homo sapiens
gctcaagcagtcctc

SEQ ID NO: 1993156 - DNA, 15 bp, Homo sapiens
ctcaagcagtcctcc

SEQ ID NO: 1993157 - DNA, 15 bp, Homo sapiens
tcaagcagtcctccc

SEQ ID NO: 1993158 - DNA, 15 bp, Homo sapiens
caagcagtcctccca

SEQ ID NO: 1993159 - DNA, 15 bp, Homo sapiens
aagcagtcctcccac

SEQ ID NO: 1993160 - DNA, 15 bp, Homo sapiens
agcagtcctcccacc

SEQ ID NO: 1993161 - DNA, 15 bp, Homo sapiens
gcagtcctcccacct

SEQ ID NO: 1993162 - DNA, 15 bp, Homo sapiens
cagtcctcccacctt

SEQ ID NO: 1993163 - DNA, 15 bp, Homo sapiens
agtcctcccacctta

SEQ ID NO: 1993164 - DNA, 15 bp, Homo sapiens
gtcctcccaccttag

SEQ ID NO: 1993165 - DNA, 15 bp, Homo sapiens
tcctcccaccttagc

SEQ ID NO: 1993166 - DNA, 15 bp, Homo sapiens
cctcccaccttagcc

SEQ ID NO: 1993167 - DNA, 15 bp, Homo sapiens
ctcccaccttagcct

SEQ ID NO: 1993168 - DNA, 15 bp, Homo sapiens
tcccaccttagcctc

SEQ ID NO: 1993169 - DNA, 15 bp, Homo sapiens
cccaccttagcctct

SEQ ID NO: 1993170 - DNA, 15 bp, Homo sapiens
ccaccttagcctctc

SEQ ID NO: 1993171 - DNA, 15 bp, Homo sapiens
caccttagcctctca

SEQ ID NO: 1993172 - DNA, 15 bp, Homo sapiens
accttagcctctcaa

SEQ ID NO: 1993173 - DNA, 15 bp, Homo sapiens
ccttagcctctcaag

SEQ ID NO: 1993174 - DNA, 15 bp, Homo sapiens
cttagcctctcaagt

SEQ ID NO: 1993175 - DNA, 15 bp, Homo sapiens
ttagcctctcaagta

SEQ ID NO: 1993176 - DNA, 15 bp, Homo sapiens
tagcctctcaagtag

SEQ ID NO: 1993177 - DNA, 15 bp, Homo sapiens
tcaagtagctgggac

SEQ ID NO: 1993178 - DNA, 15 bp, Homo sapiens
actacaggcacatgt

SEQ ID NO: 1993179 - DNA, 15 bp, Homo sapiens
ctacaggcacatgtc

SEQ ID NO: 1993180 - DNA, 15 bp, Homo sapiens
tacaggcacatgtca

SEQ ID NO: 1993181 - DNA, 15 bp, Homo sapiens
acaggcacatgtcac

SEQ ID NO: 1993182 - DNA, 15 bp, Homo sapiens
caggcacatgtcacc

SEQ ID NO: 1993183 - DNA, 15 bp, Homo sapiens
aggcacatgtcacca

SEQ ID NO: 1993184 - DNA, 15 bp, Homo sapiens
ggcacatgtcaccat

SEQ ID NO: 1993185 - DNA, 15 bp, Homo sapiens
gcacatgtcaccatc

SEQ ID NO: 1993186 - DNA, 15 bp, Homo sapiens
cacatgtcaccatcc

SEQ ID NO: 1993187 - DNA, 15 bp, Homo sapiens
acatgtcaccatccc

SEQ ID NO: 1993188 - DNA, 15 bp, Homo sapiens
catgtcaccatccct

SEQ ID NO: 1993189 - DNA, 15 bp, Homo sapiens
atgtcaccatcccta

SEQ ID NO: 1993190 - DNA, 15 bp, Homo sapiens
tgtcaccatccctag

SEQ ID NO: 1993191 - DNA, 15 bp, Homo sapiens
gtcaccatccctagc

SEQ ID NO: 1993192 - DNA, 15 bp, Homo sapiens
tcaccatccctagct

SEQ ID NO: 1993193 - DNA, 15 bp, Homo sapiens
caccatccctagcta

SEQ ID NO: 1993194 - DNA, 15 bp, Homo sapiens
accatccctagctaa

SEQ ID NO: 1993195 - DNA, 15 bp, Homo sapiens
ccatccctagctaat

SEQ ID NO: 1993196 - DNA, 15 bp, Homo sapiens
catccctagctaatt

SEQ ID NO: 1993197 - DNA, 15 bp, Homo sapiens
atccctagctaattt

SEQ ID NO: 1993198 - DNA, 15 bp, Homo sapiens
tccctagctaatttt

SEQ ID NO: 1993199 - DNA, 15 bp, Homo sapiens
ccctagctaattttt

SEQ ID NO: 1993200 - DNA, 15 bp, Homo sapiens
cctagctaattttta

SEQ ID NO: 1993201 - DNA, 15 bp, Homo sapiens
ctagctaatttttaa

SEQ ID NO: 1993202 - DNA, 15 bp, Homo sapiens
tagctaatttttaaa

SEQ ID NO: 1993203 - DNA, 15 bp, Homo sapiens
agctaatttttaaat

SEQ ID NO: 1993204 - DNA, 15 bp, Homo sapiens
ctaatttttaaattt

SEQ ID NO: 1993205 - DNA, 15 bp, Homo sapiens
ttttaaatttttttt

SEQ ID NO: 1993206 - DNA, 15 bp, Homo sapiens
tttaaattttttttg

SEQ ID NO: 1993207 - DNA, 15 bp, Homo sapiens
ttaaattttttttgt

SEQ ID NO: 1993208 - DNA, 15 bp, Homo sapiens
taaattttttttgta

SEQ ID NO: 1993209 - DNA, 15 bp, Homo sapiens
tttttttgtagagac

SEQ ID NO: 1993210 - DNA, 15 bp, Homo sapiens
gacggggtctcacct

SEQ ID NO: 1993211 - DNA, 15 bp, Homo sapiens
acggggtctcacctt

SEQ ID NO: 1993212 - DNA, 15 bp, Homo sapiens
cggggtctcaccttg

SEQ ID NO: 1993213 - DNA, 15 bp, Homo sapiens
ggggtctcaccttgt

SEQ ID NO: 1993214 - DNA, 15 bp, Homo sapiens
gggtctcaccttgtt

SEQ ID NO: 1993215 - DNA, 15 bp, Homo sapiens
ggtctcaccttgttg

SEQ ID NO: 1993216 - DNA, 15 bp, Homo sapiens
gtctcaccttgttgc

SEQ ID NO: 1993217 - DNA, 15 bp, Homo sapiens
tctcaccttgttgcc

SEQ ID NO: 1993218 - DNA, 15 bp, Homo sapiens
ctcaccttgttgccc

SEQ ID NO: 1993219 - DNA, 15 bp, Homo sapiens
tcaccttgttgccca

SEQ ID NO: 1993220 - DNA, 15 bp, Homo sapiens
caccttgttgcccag

SEQ ID NO: 1993221 - DNA, 15 bp, Homo sapiens
accttgttgcccagg

SEQ ID NO: 1993222 - DNA, 15 bp, Homo sapiens
ccttgttgcccaggc

SEQ ID NO: 1993223 - DNA, 15 bp, Homo sapiens
ctggtcttgaactca

SEQ ID NO: 1993224 - DNA, 15 bp, Homo sapiens
tggtcttgaactcat

SEQ ID NO: 1993225 - DNA, 15 bp, Homo sapiens
ggtcttgaactcatg

SEQ ID NO: 1993226 - DNA, 15 bp, Homo sapiens
gtcttgaactcatgg

SEQ ID NO: 1993227 - DNA, 15 bp, Homo sapiens
tcttgaactcatggg

SEQ ID NO: 1993228 - DNA, 15 bp, Homo sapiens
cttgaactcatgggc

SEQ ID NO: 1993229 - DNA, 15 bp, Homo sapiens
ttgaactcatgggct

SEQ ID NO: 1993230 - DNA, 15 bp, Homo sapiens
tgaactcatgggctc

SEQ ID NO: 1993231 - DNA, 15 bp, Homo sapiens
gaactcatgggctca

SEQ ID NO: 1993232 - DNA, 15 bp, Homo sapiens
aactcatgggctcaa

SEQ ID NO: 1993233 - DNA, 15 bp, Homo sapiens
actcatgggctcaaa

SEQ ID NO: 1993234 - DNA, 15 bp, Homo sapiens
ctcatgggctcaaat

SEQ ID NO: 1993235 - DNA, 15 bp, Homo sapiens
tcatgggctcaaatg

SEQ ID NO: 1993236 - DNA, 15 bp, Homo sapiens
catgggctcaaatga

SEQ ID NO: 1993237 - DNA, 15 bp, Homo sapiens
atgggctcaaatgat

SEQ ID NO: 1993238 - DNA, 15 bp, Homo sapiens
tgggctcaaatgatc

SEQ ID NO: 1993239 - DNA, 15 bp, Homo sapiens
gggctcaaatgatct

SEQ ID NO: 1993240 - DNA, 15 bp, Homo sapiens
ggctcaaatgatctt

SEQ ID NO: 1993241 - DNA, 15 bp, Homo sapiens
gctcaaatgatcttc

SEQ ID NO: 1993242 - DNA, 15 bp, Homo sapiens
ctcaaatgatcttct

SEQ ID NO: 1993243 - DNA, 15 bp, Homo sapiens
tcaaatgatcttctt

SEQ ID NO: 1993244 - DNA, 15 bp, Homo sapiens
caaatgatcttcttt

SEQ ID NO: 1993245 - DNA, 15 bp, Homo sapiens
aaatgatcttctttc

SEQ ID NO: 1993246 - DNA, 15 bp, Homo sapiens
aatgatcttctttct

SEQ ID NO: 1993247 - DNA, 15 bp, Homo sapiens
atgatcttctttctt

SEQ ID NO: 1993248 - DNA, 15 bp, Homo sapiens
tgatcttctttcttg

SEQ ID NO: 1993249 - DNA, 15 bp, Homo sapiens
gatcttctttcttgg

SEQ ID NO: 1993250 - DNA, 15 bp, Homo sapiens
atcttctttcttggc

SEQ ID NO: 1993251 - DNA, 15 bp, Homo sapiens
tcttctttcttggct

SEQ ID NO: 1993252 - DNA, 15 bp, Homo sapiens
cttctttcttggctt

SEQ ID NO: 1993253 - DNA, 15 bp, Homo sapiens
ttctttcttggcttc

SEQ ID NO: 1993254 - DNA, 15 bp, Homo sapiens
tctttcttggcttcc

SEQ ID NO: 1993255 - DNA, 15 bp, Homo sapiens
ctttcttggcttcca

SEQ ID NO: 1993256 - DNA, 15 bp, Homo sapiens
tttcttggcttccaa

SEQ ID NO: 1993257 - DNA, 15 bp, Homo sapiens
ttcttggcttccaaa

SEQ ID NO: 1993258 - DNA, 15 bp, Homo sapiens
tcttggcttccaaaa

SEQ ID NO: 1993259 - DNA, 15 bp, Homo sapiens
cttggcttccaaaag

SEQ ID NO: 1993260 - DNA, 15 bp, Homo sapiens
ttggcttccaaaagt

SEQ ID NO: 1993261 - DNA, 15 bp, Homo sapiens
tggcttccaaaagtg

SEQ ID NO: 1993262 - DNA, 15 bp, Homo sapiens
ggcttccaaaagtgc

SEQ ID NO: 1993263 - DNA, 15 bp, Homo sapiens
gcttccaaaagtgct

SEQ ID NO: 1993264 - DNA, 15 bp, Homo sapiens
cttccaaaagtgcta

SEQ ID NO: 1993265 - DNA, 15 bp, Homo sapiens
ttccaaaagtgctag

SEQ ID NO: 1993266 - DNA, 15 bp, Homo sapiens
tccaaaagtgctagg

SEQ ID NO: 1993267 - DNA, 15 bp, Homo sapiens
ccaaaagtgctagga

SEQ ID NO: 1993268 - DNA, 15 bp, Homo sapiens
caaaagtgctaggat

SEQ ID NO: 1993269 - DNA, 15 bp, Homo sapiens
ggcgtgagccactgt

SEQ ID NO: 1993270 - DNA, 15 bp, Homo sapiens
gcgtgagccactgtg

SEQ ID NO: 1993271 - DNA, 15 bp, Homo sapiens
cgtgagccactgtgg

SEQ ID NO: 1993272 - DNA, 15 bp, Homo sapiens
gtgagccactgtggc

SEQ ID NO: 1993273 - DNA, 15 bp, Homo sapiens
tgagccactgtggct

SEQ ID NO: 1993274 - DNA, 15 bp, Homo sapiens
gagccactgtggctg

SEQ ID NO: 1993275 - DNA, 15 bp, Homo sapiens
agccactgtggctgg

SEQ ID NO: 1993276 - DNA, 15 bp, Homo sapiens
gccactgtggctggc

SEQ ID NO: 1993277 - DNA, 15 bp, Homo sapiens
ccactgtggctggcc

SEQ ID NO: 1993278 - DNA, 15 bp, Homo sapiens
cactgtggctggcct

SEQ ID NO: 1993279 - DNA, 15 bp, Homo sapiens
actgtggctggcctc

SEQ ID NO: 1993280 - DNA, 15 bp, Homo sapiens
ctgtggctggcctca

SEQ ID NO: 1993281 - DNA, 15 bp, Homo sapiens
tgtggctggcctcag

SEQ ID NO: 1993282 - DNA, 15 bp, Homo sapiens
gtggctggcctcagt

SEQ ID NO: 1993283 - DNA, 15 bp, Homo sapiens
tggctggcctcagtg

SEQ ID NO: 1993284 - DNA, 15 bp, Homo sapiens
ggctggcctcagtgt

SEQ ID NO: 1993285 - DNA, 15 bp, Homo sapiens
gctggcctcagtgta

SEQ ID NO: 1993286 - DNA, 15 bp, Homo sapiens
ctggcctcagtgtat

SEQ ID NO: 1993287 - DNA, 15 bp, Homo sapiens
tggcctcagtgtatt

SEQ ID NO: 1993288 - DNA, 15 bp, Homo sapiens
ggcctcagtgtattt

SEQ ID NO: 1993289 - DNA, 15 bp, Homo sapiens
gcctcagtgtatttt

SEQ ID NO: 1993290 - DNA, 15 bp, Homo sapiens
cctcagtgtattttt

SEQ ID NO: 1993291 - DNA, 15 bp, Homo sapiens
ctcagtgtattttta

SEQ ID NO: 1993292 - DNA, 15 bp, Homo sapiens
tcagtgtatttttaa

SEQ ID NO: 1993293 - DNA, 15 bp, Homo sapiens
cagtgtatttttaaa

SEQ ID NO: 1993294 - DNA, 15 bp, Homo sapiens
agtgtatttttaaag

SEQ ID NO: 1993295 - DNA, 15 bp, Homo sapiens
gtgtatttttaaaga

SEQ ID NO: 1993296 - DNA, 15 bp, Homo sapiens
tgtatttttaaagac

SEQ ID NO: 1993297 - DNA, 15 bp, Homo sapiens
gtatttttaaagact

SEQ ID NO: 1993298 - DNA, 15 bp, Homo sapiens
tatttttaaagactc

SEQ ID NO: 1993299 - DNA, 15 bp, Homo sapiens
atttttaaagactca

SEQ ID NO: 1993300 - DNA, 15 bp, Homo sapiens
tttttaaagactcat

SEQ ID NO: 1993301 - DNA, 15 bp, Homo sapiens
ttttaaagactcatt

SEQ ID NO: 1993302 - DNA, 15 bp, Homo sapiens
tttaaagactcattt

SEQ ID NO: 1993303 - DNA, 15 bp, Homo sapiens
ttaaagactcatttc

SEQ ID NO: 1993304 - DNA, 15 bp, Homo sapiens
taaagactcatttct

SEQ ID NO: 1993305 - DNA, 15 bp, Homo sapiens
aaagactcatttcta

SEQ ID NO: 1993306 - DNA, 15 bp, Homo sapiens
aagactcatttctag

SEQ ID NO: 1993307 - DNA, 15 bp, Homo sapiens
agactcatttctagg

SEQ ID NO: 1993308 - DNA, 15 bp, Homo sapiens
gactcatttctaggc

SEQ ID NO: 1993309 - DNA, 15 bp, Homo sapiens
actcatttctaggcc

SEQ ID NO: 1993310 - DNA, 15 bp, Homo sapiens
ctcatttctaggcca

SEQ ID NO: 1993311 - DNA, 15 bp, Homo sapiens
tcatttctaggccag

SEQ ID NO: 1993312 - DNA, 15 bp, Homo sapiens
catttctaggccaga

SEQ ID NO: 1993313 - DNA, 15 bp, Homo sapiens
atttctaggccagac

SEQ ID NO: 1993314 - DNA, 15 bp, Homo sapiens
tttctaggccagact

SEQ ID NO: 1993315 - DNA, 15 bp, Homo sapiens
ttctaggccagactt

SEQ ID NO: 1993316 - DNA, 15 bp, Homo sapiens
tctaggccagacttg

SEQ ID NO: 1993317 - DNA, 15 bp, Homo sapiens
ctaggccagacttgg

SEQ ID NO: 1993318 - DNA, 15 bp, Homo sapiens
taggccagacttggt

SEQ ID NO: 1993319 - DNA, 15 bp, Homo sapiens
aggccagacttggtg

SEQ ID NO: 1993320 - DNA, 15 bp, Homo sapiens
ggccagacttggtgg

SEQ ID NO: 1993321 - DNA, 15 bp, Homo sapiens
gccagacttggtggg

SEQ ID NO: 1993322 - DNA, 15 bp, Homo sapiens
ccagacttggtgggt

SEQ ID NO: 1993323 - DNA, 15 bp, Homo sapiens
cagacttggtgggtc

SEQ ID NO: 1993324 - DNA, 15 bp, Homo sapiens
agacttggtgggtca

SEQ ID NO: 1993325 - DNA, 15 bp, Homo sapiens
gacttggtgggtcat

SEQ ID NO: 1993326 - DNA, 15 bp, Homo sapiens
acttggtgggtcatg

SEQ ID NO: 1993327 - DNA, 15 bp, Homo sapiens
cttggtgggtcatgc

SEQ ID NO: 1993328 - DNA, 15 bp, Homo sapiens
ttggtgggtcatgcc

SEQ ID NO: 1993329 - DNA, 15 bp, Homo sapiens
tggtgggtcatgcct

SEQ ID NO: 1993330 - DNA, 15 bp, Homo sapiens
ggtgggtcatgcctg

SEQ ID NO: 1993331 - DNA, 15 bp, Homo sapiens
gtgggtcatgcctgt

SEQ ID NO: 1993332 - DNA, 15 bp, Homo sapiens
tgggtcatgcctgta

SEQ ID NO: 1993333 - DNA, 15 bp, Homo sapiens
gggtcatgcctgtaa

SEQ ID NO: 1993334 - DNA, 15 bp, Homo sapiens
ggtcatgcctgtaat

SEQ ID NO: 1993335 - DNA, 15 bp, Homo sapiens
gtcatgcctgtaatc

SEQ ID NO: 1993336 - DNA, 15 bp, Homo sapiens
atcccagcactttgc

SEQ ID NO: 1993337 - DNA, 15 bp, Homo sapiens
tcccagcactttgcg

SEQ ID NO: 1993338 - DNA, 15 bp, Homo sapiens
cccagcactttgcga

SEQ ID NO: 1993339 - DNA, 15 bp, Homo sapiens
ccagcactttgcgag

SEQ ID NO: 1993340 - DNA, 15 bp, Homo sapiens
cagcactttgcgagg

SEQ ID NO: 1993341 - DNA, 15 bp, Homo sapiens
agcactttgcgaggc

SEQ ID NO: 1993342 - DNA, 15 bp, Homo sapiens
gcactttgcgaggct

SEQ ID NO: 1993343 - DNA, 15 bp, Homo sapiens
cactttgcgaggctg

SEQ ID NO: 1993344 - DNA, 15 bp, Homo sapiens
actttgcgaggctga

SEQ ID NO: 1993345 - DNA, 15 bp, Homo sapiens
ctttgcgaggctgag

SEQ ID NO: 1993346 - DNA, 15 bp, Homo sapiens
tttgcgaggctgagg

SEQ ID NO: 1993347 - DNA, 15 bp, Homo sapiens
ttgcgaggctgaggt

SEQ ID NO: 1993348 - DNA, 15 bp, Homo sapiens
tgcgaggctgaggta

SEQ ID NO: 1993349 - DNA, 15 bp, Homo sapiens
gcgaggctgaggtag

SEQ ID NO: 1993350 - DNA, 15 bp, Homo sapiens
cgaggctgaggtaga

SEQ ID NO: 1993351 - DNA, 15 bp, Homo sapiens
gatggatcacttgaa

SEQ ID NO: 1993352 - DNA, 15 bp, Homo sapiens
atggatcacttgaag

SEQ ID NO: 1993353 - DNA, 15 bp, Homo sapiens
tggatcacttgaagt

SEQ ID NO: 1993354 - DNA, 15 bp, Homo sapiens
ggatcacttgaagtc

SEQ ID NO: 1993355 - DNA, 15 bp, Homo sapiens
gatcacttgaagtcg

SEQ ID NO: 1993356 - DNA, 15 bp, Homo sapiens
atcacttgaagtcga

SEQ ID NO: 1993357 - DNA, 15 bp, Homo sapiens
tcacttgaagtcgag

SEQ ID NO: 1993358 - DNA, 15 bp, Homo sapiens
cacttgaagtcgaga

SEQ ID NO: 1993359 - DNA, 15 bp, Homo sapiens
acttgaagtcgagag

SEQ ID NO: 1993360 - DNA, 15 bp, Homo sapiens
cttgaagtcgagagt

SEQ ID NO: 1993361 - DNA, 15 bp, Homo sapiens
ttgaagtcgagagtt

SEQ ID NO: 1993362 - DNA, 15 bp, Homo sapiens
tgaagtcgagagttt

SEQ ID NO: 1993363 - DNA, 15 bp, Homo sapiens
gaagtcgagagtttg

SEQ ID NO: 1993364 - DNA, 15 bp, Homo sapiens
aagtcgagagtttga

SEQ ID NO: 1993365 - DNA, 15 bp, Homo sapiens
agtcgagagtttgag

SEQ ID NO: 1993366 - DNA, 15 bp, Homo sapiens
gtcgagagtttgaga

SEQ ID NO: 1993367 - DNA, 15 bp, Homo sapiens
tcgagagtttgagac

SEQ ID NO: 1993368 - DNA, 15 bp, Homo sapiens
cgagagtttgagacc

SEQ ID NO: 1993369 - DNA, 15 bp, Homo sapiens
gagagtttgagacca

SEQ ID NO: 1993370 - DNA, 15 bp, Homo sapiens
agagtttgagaccat

SEQ ID NO: 1993371 - DNA, 15 bp, Homo sapiens
gagtttgagaccatc

SEQ ID NO: 1993372 - DNA, 15 bp, Homo sapiens
agtttgagaccatcc

SEQ ID NO: 1993373 - DNA, 15 bp, Homo sapiens
gtttgagaccatcct

SEQ ID NO: 1993374 - DNA, 15 bp, Homo sapiens
tttgagaccatcctg

SEQ ID NO: 1993375 - DNA, 15 bp, Homo sapiens
ttgagaccatcctga

SEQ ID NO: 1993376 - DNA, 15 bp, Homo sapiens
tgagaccatcctgac

SEQ ID NO: 1993377 - DNA, 15 bp, Homo sapiens
gagaccatcctgacc

SEQ ID NO: 1993378 - DNA, 15 bp, Homo sapiens
agaccatcctgacca

SEQ ID NO: 1993379 - DNA, 15 bp, Homo sapiens
gaccatcctgaccaa

SEQ ID NO: 1993380 - DNA, 15 bp, Homo sapiens
accatcctgaccaac

SEQ ID NO: 1993381 - DNA, 15 bp, Homo sapiens
ccatcctgaccaaca

SEQ ID NO: 1993382 - DNA, 15 bp, Homo sapiens
catcctgaccaacat

SEQ ID NO: 1993383 - DNA, 15 bp, Homo sapiens
atcctgaccaacata

SEQ ID NO: 1993384 - DNA, 15 bp, Homo sapiens
tcctgaccaacatag

SEQ ID NO: 1993385 - DNA, 15 bp, Homo sapiens
cctgaccaacatagt

SEQ ID NO: 1993386 - DNA, 15 bp, Homo sapiens
ctgaccaacatagtg

SEQ ID NO: 1993387 - DNA, 15 bp, Homo sapiens
tgaccaacatagtga

SEQ ID NO: 1993388 - DNA, 15 bp, Homo sapiens
gaccaacatagtgac

SEQ ID NO: 1993389 - DNA, 15 bp, Homo sapiens
accaacatagtgaca

SEQ ID NO: 1993390 - DNA, 15 bp, Homo sapiens
ccaacatagtgacac

SEQ ID NO: 1993391 - DNA, 15 bp, Homo sapiens
caacatagtgacacc

SEQ ID NO: 1993392 - DNA, 15 bp, Homo sapiens
aacatagtgacaccg

SEQ ID NO: 1993393 - DNA, 15 bp, Homo sapiens
acatagtgacaccgt

SEQ ID NO: 1993394 - DNA, 15 bp, Homo sapiens
catagtgacaccgtt

SEQ ID NO: 1993395 - DNA, 15 bp, Homo sapiens
atagtgacaccgttt

SEQ ID NO: 1993396 - DNA, 15 bp, Homo sapiens
tagtgacaccgtttc

SEQ ID NO: 1993397 - DNA, 15 bp, Homo sapiens
agtgacaccgtttct

SEQ ID NO: 1993398 - DNA, 15 bp, Homo sapiens
gtgacaccgtttcta

SEQ ID NO: 1993399 - DNA, 15 bp, Homo sapiens
tgacaccgtttctac

SEQ ID NO: 1993400 - DNA, 15 bp, Homo sapiens
gacaccgtttctact

SEQ ID NO: 1993401 - DNA, 15 bp, Homo sapiens
acaccgtttctacta

SEQ ID NO: 1993402 - DNA, 15 bp, Homo sapiens
caccgtttctactaa

SEQ ID NO: 1993403 - DNA, 15 bp, Homo sapiens
accgtttctactaaa

SEQ ID NO: 1993404 - DNA, 15 bp, Homo sapiens
atacaaaaactagct

SEQ ID NO: 1993405 - DNA, 15 bp, Homo sapiens
tacaaaaactagctg

SEQ ID NO: 1993406 - DNA, 15 bp, Homo sapiens
acaaaaactagctgg

SEQ ID NO: 1993407 - DNA, 15 bp, Homo sapiens
caaaaactagctggg

SEQ ID NO: 1993408 - DNA, 15 bp, Homo sapiens
aaaaactagctgggt

SEQ ID NO: 1993409 - DNA, 15 bp, Homo sapiens
aaaactagctgggtg

SEQ ID NO: 1993410 - DNA, 15 bp, Homo sapiens
aaactagctgggtgt

SEQ ID NO: 1993411 - DNA, 15 bp, Homo sapiens
aactagctgggtgtg

SEQ ID NO: 1993412 - DNA, 15 bp, Homo sapiens
actagctgggtgtgg

SEQ ID NO: 1993413 - DNA, 15 bp, Homo sapiens
ctagctgggtgtggt

SEQ ID NO: 1993414 - DNA, 15 bp, Homo sapiens
gggtgtggtggcaga

SEQ ID NO: 1993415 - DNA, 15 bp, Homo sapiens
ggtgtggtggcagac

SEQ ID NO: 1993416 - DNA, 15 bp, Homo sapiens
gtgtggtggcagacg

SEQ ID NO: 1993417 - DNA, 15 bp, Homo sapiens
tgtggtggcagacgc

SEQ ID NO: 1993418 - DNA, 15 bp, Homo sapiens
gtggtggcagacgcc

SEQ ID NO: 1993419 - DNA, 15 bp, Homo sapiens
tggtggcagacgcct

SEQ ID NO: 1993420 - DNA, 15 bp, Homo sapiens
ggtggcagacgcctg

SEQ ID NO: 1993421 - DNA, 15 bp, Homo sapiens
gtggcagacgcctgt

SEQ ID NO: 1993422 - DNA, 15 bp, Homo sapiens
tggcagacgcctgta

SEQ ID NO: 1993423 - DNA, 15 bp, Homo sapiens
ggcagacgcctgtaa

SEQ ID NO: 1993424 - DNA, 15 bp, Homo sapiens
gcagacgcctgtaat

SEQ ID NO: 1993425 - DNA, 15 bp, Homo sapiens
cagacgcctgtaatc

SEQ ID NO: 1993426 - DNA, 15 bp, Homo sapiens
agacgcctgtaatcc

SEQ ID NO: 1993427 - DNA, 15 bp, Homo sapiens
ctactcaggaggccg

SEQ ID NO: 1993428 - DNA, 15 bp, Homo sapiens
tactcaggaggccga

SEQ ID NO: 1993429 - DNA, 15 bp, Homo sapiens
actcaggaggccgag

SEQ ID NO: 1993430 - DNA, 15 bp, Homo sapiens
ctcaggaggccgagg

SEQ ID NO: 1993431 - DNA, 15 bp, Homo sapiens
tcaggaggccgaggc

SEQ ID NO: 1993432 - DNA, 15 bp, Homo sapiens
caggaggccgaggca

SEQ ID NO: 1993433 - DNA, 15 bp, Homo sapiens
aggaggccgaggcag

SEQ ID NO: 1993434 - DNA, 15 bp, Homo sapiens
gaggccgaggcagga

SEQ ID NO: 1993435 - DNA, 15 bp, Homo sapiens
aggccgaggcaggag

SEQ ID NO: 1993436 - DNA, 15 bp, Homo sapiens
ggccgaggcaggaga

SEQ ID NO: 1993437 - DNA, 15 bp, Homo sapiens
gccgaggcaggagaa

SEQ ID NO: 1993438 - DNA, 15 bp, Homo sapiens
ccgaggcaggagaat

SEQ ID NO: 1993439 - DNA, 15 bp, Homo sapiens
cgaggcaggagaatc

SEQ ID NO: 1993440 - DNA, 15 bp, Homo sapiens
gaacccaggaggagg

SEQ ID NO: 1993441 - DNA, 15 bp, Homo sapiens
aacccaggaggagga

SEQ ID NO: 1993442 - DNA, 15 bp, Homo sapiens
acccaggaggaggag

SEQ ID NO: 1993443 - DNA, 15 bp, Homo sapiens
cccaggaggaggagg

SEQ ID NO: 1993444 - DNA, 15 bp, Homo sapiens
ccaggaggaggaggt

SEQ ID NO: 1993445 - DNA, 15 bp, Homo sapiens
caggaggaggaggtt

SEQ ID NO: 1993446 - DNA, 15 bp, Homo sapiens
aggaggaggaggttg

SEQ ID NO: 1993447 - DNA, 15 bp, Homo sapiens
aggttgcagtgagtg

SEQ ID NO: 1993448 - DNA, 15 bp, Homo sapiens
ggttgcagtgagtgg

SEQ ID NO: 1993449 - DNA, 15 bp, Homo sapiens
gttgcagtgagtgga

SEQ ID NO: 1993450 - DNA, 15 bp, Homo sapiens
ttgcagtgagtggag

SEQ ID NO: 1993451 - DNA, 15 bp, Homo sapiens
tgcagtgagtggaga

SEQ ID NO: 1993452 - DNA, 15 bp, Homo sapiens
gcagtgagtggagat

SEQ ID NO: 1993453 - DNA, 15 bp, Homo sapiens
cagtgagtggagatc

SEQ ID NO: 1993454 - DNA, 15 bp, Homo sapiens
agtgagtggagatca

SEQ ID NO: 1993455 - DNA, 15 bp, Homo sapiens
gtgagtggagatcat

SEQ ID NO: 1993456 - DNA, 15 bp, Homo sapiens
tgagtggagatcatg

SEQ ID NO: 1993457 - DNA, 15 bp, Homo sapiens
gagtggagatcatgc

SEQ ID NO: 1993458 - DNA, 15 bp, Homo sapiens
agtggagatcatgcc

SEQ ID NO: 1993459 - DNA, 15 bp, Homo sapiens
gtggagatcatgccg

SEQ ID NO: 1993460 - DNA, 15 bp, Homo sapiens
tggagatcatgccgc

SEQ ID NO: 1993461 - DNA, 15 bp, Homo sapiens
ggagatcatgccgct

SEQ ID NO: 1993462 - DNA, 15 bp, Homo sapiens
gagatcatgccgctg

SEQ ID NO: 1993463 - DNA, 15 bp, Homo sapiens
agatcatgccgctgc

SEQ ID NO: 1993464 - DNA, 15 bp, Homo sapiens
gatcatgccgctgca

SEQ ID NO: 1993465 - DNA, 15 bp, Homo sapiens
atcatgccgctgcat

SEQ ID NO: 1993466 - DNA, 15 bp, Homo sapiens
tcatgccgctgcatt

SEQ ID NO: 1993467 - DNA, 15 bp, Homo sapiens
catgccgctgcattc

SEQ ID NO: 1993468 - DNA, 15 bp, Homo sapiens
atgccgctgcattcc

SEQ ID NO: 1993469 - DNA, 15 bp, Homo sapiens
tgccgctgcattcca

SEQ ID NO: 1993470 - DNA, 15 bp, Homo sapiens
gccgctgcattccag

SEQ ID NO: 1993471 - DNA, 15 bp, Homo sapiens
ccgctgcattccagc

SEQ ID NO: 1993472 - DNA, 15 bp, Homo sapiens
cgctgcattccagcc

SEQ ID NO: 1993473 - DNA, 15 bp, Homo sapiens
gctgcattccagcct

SEQ ID NO: 1993474 - DNA, 15 bp, Homo sapiens
ctgcattccagcctg

SEQ ID NO: 1993475 - DNA, 15 bp, Homo sapiens
cattccagcctgggc

SEQ ID NO: 1993476 - DNA, 15 bp, Homo sapiens
attccagcctgggcc

SEQ ID NO: 1993477 - DNA, 15 bp, Homo sapiens
ttccagcctgggcca

SEQ ID NO: 1993478 - DNA, 15 bp, Homo sapiens
cacagagcaagactt

SEQ ID NO: 1993479 - DNA, 15 bp, Homo sapiens
tcatctcaaaaaaat

SEQ ID NO: 1993480 - DNA, 15 bp, Homo sapiens
catctcaaaaaaata

SEQ ID NO: 1993481 - DNA, 15 bp, Homo sapiens
atctcaaaaaaataa

SEQ ID NO: 1993482 - DNA, 15 bp, Homo sapiens
caaaaaaataaaaag

SEQ ID NO: 1993483 - DNA, 15 bp, Homo sapiens
aaaaaataaaaagac

SEQ ID NO: 1993484 - DNA, 15 bp, Homo sapiens
aaaaataaaaagact

SEQ ID NO: 1993485 - DNA, 15 bp, Homo sapiens
aaaataaaaagactc

SEQ ID NO: 1993486 - DNA, 15 bp, Homo sapiens
aaataaaaagactca

SEQ ID NO: 1993487 - DNA, 15 bp, Homo sapiens
aataaaaagactcat

SEQ ID NO: 1993488 - DNA, 15 bp, Homo sapiens
ataaaaagactcatt

SEQ ID NO: 1993489 - DNA, 15 bp, Homo sapiens
taaaaagactcattt

SEQ ID NO: 1993490 - DNA, 15 bp, Homo sapiens
aaaaagactcatttc

SEQ ID NO: 1993491 - DNA, 15 bp, Homo sapiens
aaaagactcatttct

SEQ ID NO: 1993492 - DNA, 15 bp, Homo sapiens
aaagactcatttctt

SEQ ID NO: 1993493 - DNA, 15 bp, Homo sapiens
aagactcatttctta

SEQ ID NO: 1993494 - DNA, 15 bp, Homo sapiens
agactcatttcttag

SEQ ID NO: 1993495 - DNA, 15 bp, Homo sapiens
gactcatttcttagc

SEQ ID NO: 1993496 - DNA, 15 bp, Homo sapiens
actcatttcttagct

SEQ ID NO: 1993497 - DNA, 15 bp, Homo sapiens
ctcatttcttagctt

SEQ ID NO: 1993498 - DNA, 15 bp, Homo sapiens
tcatttcttagcttt

SEQ ID NO: 1993499 - DNA, 15 bp, Homo sapiens
catttcttagctttt

SEQ ID NO: 1993500 - DNA, 15 bp, Homo sapiens
atttcttagcttttt

SEQ ID NO: 1993501 - DNA, 15 bp, Homo sapiens
tttcttagcttttta

SEQ ID NO: 1993502 - DNA, 15 bp, Homo sapiens
ttcttagctttttaa

SEQ ID NO: 1993503 - DNA, 15 bp, Homo sapiens
tcttagctttttaaa

SEQ ID NO: 1993504 - DNA, 15 bp, Homo sapiens
cttagctttttaaac

SEQ ID NO: 1993505 - DNA, 15 bp, Homo sapiens
ttagctttttaaact

SEQ ID NO: 1993506 - DNA, 15 bp, Homo sapiens
tagctttttaaactt

SEQ ID NO: 1993507 - DNA, 15 bp, Homo sapiens
agctttttaaacttt

SEQ ID NO: 1993508 - DNA, 15 bp, Homo sapiens
gctttttaaactttg

SEQ ID NO: 1993509 - DNA, 15 bp, Homo sapiens
ctttttaaactttgt

SEQ ID NO: 1993510 - DNA, 15 bp, Homo sapiens
tttttaaactttgtt

SEQ ID NO: 1993511 - DNA, 15 bp, Homo sapiens
ttttaaactttgttt

SEQ ID NO: 1993512 - DNA, 15 bp, Homo sapiens
tttaaactttgtttt

SEQ ID NO: 1993513 - DNA, 15 bp, Homo sapiens
ttaaactttgttttc

SEQ ID NO: 1993514 - DNA, 15 bp, Homo sapiens
taaactttgttttct

SEQ ID NO: 1993515 - DNA, 15 bp, Homo sapiens
aaactttgttttctg

SEQ ID NO: 1993516 - DNA, 15 bp, Homo sapiens
aactttgttttctgt

SEQ ID NO: 1993517 - DNA, 15 bp, Homo sapiens
actttgttttctgtt

SEQ ID NO: 1993518 - DNA, 15 bp, Homo sapiens
ctttgttttctgttt

SEQ ID NO: 1993519 - DNA, 15 bp, Homo sapiens
tttgttttctgtttt

SEQ ID NO: 1993520 - DNA, 15 bp, Homo sapiens
ttgttttctgttttg

SEQ ID NO: 1993521 - DNA, 15 bp, Homo sapiens
tgttttctgttttgt

SEQ ID NO: 1993522 - DNA, 15 bp, Homo sapiens
gttttctgttttgtt

SEQ ID NO: 1993523 - DNA, 15 bp, Homo sapiens
ttttctgttttgtta

SEQ ID NO: 1993524 - DNA, 15 bp, Homo sapiens
tttctgttttgttaa

SEQ ID NO: 1993525 - DNA, 15 bp, Homo sapiens
ttctgttttgttaat

SEQ ID NO: 1993526 - DNA, 15 bp, Homo sapiens
tctgttttgttaatt

SEQ ID NO: 1993527 - DNA, 15 bp, Homo sapiens
ctgttttgttaattt

SEQ ID NO: 1993528 - DNA, 15 bp, Homo sapiens
tgttttgttaatttt

SEQ ID NO: 1993529 - DNA, 15 bp, Homo sapiens
gttttgttaattttg

SEQ ID NO: 1993530 - DNA, 15 bp, Homo sapiens
ttttgttaattttgt

SEQ ID NO: 1993531 - DNA, 15 bp, Homo sapiens
tttgttaattttgtt

SEQ ID NO: 1993532 - DNA, 15 bp, Homo sapiens
ttgttaattttgttg

SEQ ID NO: 1993533 - DNA, 15 bp, Homo sapiens
tgttaattttgttgt

SEQ ID NO: 1993534 - DNA, 15 bp, Homo sapiens
gttaattttgttgtt

SEQ ID NO: 1993535 - DNA, 15 bp, Homo sapiens
ttaattttgttgtta

SEQ ID NO: 1993536 - DNA, 15 bp, Homo sapiens
taattttgttgttac

SEQ ID NO: 1993537 - DNA, 15 bp, Homo sapiens
aattttgttgttaca

SEQ ID NO: 1993538 - DNA, 15 bp, Homo sapiens
attttgttgttacat

SEQ ID NO: 1993539 - DNA, 15 bp, Homo sapiens
ttttgttgttacatt

SEQ ID NO: 1993540 - DNA, 15 bp, Homo sapiens
tttgttgttacattt

SEQ ID NO: 1993541 - DNA, 15 bp, Homo sapiens
ttgttgttacatttt

SEQ ID NO: 1993542 - DNA, 15 bp, Homo sapiens
tgttgttacattttc

SEQ ID NO: 1993543 - DNA, 15 bp, Homo sapiens
gttgttacattttct

SEQ ID NO: 1993544 - DNA, 15 bp, Homo sapiens
ttgttacattttctt

SEQ ID NO: 1993545 - DNA, 15 bp, Homo sapiens
tgttacattttcttt

SEQ ID NO: 1993546 - DNA, 15 bp, Homo sapiens
gttacattttctttc

SEQ ID NO: 1993547 - DNA, 15 bp, Homo sapiens
ttacattttctttcc

SEQ ID NO: 1993548 - DNA, 15 bp, Homo sapiens
tacattttctttcct

SEQ ID NO: 1993549 - DNA, 15 bp, Homo sapiens
acattttctttcctt

SEQ ID NO: 1993550 - DNA, 15 bp, Homo sapiens
cattttctttccttg

SEQ ID NO: 1993551 - DNA, 15 bp, Homo sapiens
attttctttccttgg

SEQ ID NO: 1993552 - DNA, 15 bp, Homo sapiens
ttttctttccttggg

SEQ ID NO: 1993553 - DNA, 15 bp, Homo sapiens
tttctttccttgggt

SEQ ID NO: 1993554 - DNA, 15 bp, Homo sapiens
ttctttccttgggtt

SEQ ID NO: 1993555 - DNA, 15 bp, Homo sapiens
tctttccttgggttt

SEQ ID NO: 1993556 - DNA, 15 bp, Homo sapiens
ctttccttgggttta

SEQ ID NO: 1993557 - DNA, 15 bp, Homo sapiens
tttccttgggtttat

SEQ ID NO: 1993558 - DNA, 15 bp, Homo sapiens
ttccttgggtttatt

SEQ ID NO: 1993559 - DNA, 15 bp, Homo sapiens
tccttgggtttattc

SEQ ID NO: 1993560 - DNA, 15 bp, Homo sapiens
ccttgggtttattct

SEQ ID NO: 1993561 - DNA, 15 bp, Homo sapiens
cttgggtttattctg

SEQ ID NO: 1993562 - DNA, 15 bp, Homo sapiens
ttgggtttattctgc

SEQ ID NO: 1993563 - DNA, 15 bp, Homo sapiens
tgggtttattctgct

SEQ ID NO: 1993564 - DNA, 15 bp, Homo sapiens
gggtttattctgcta

SEQ ID NO: 1993565 - DNA, 15 bp, Homo sapiens
ggtttattctgctat

SEQ ID NO: 1993566 - DNA, 15 bp, Homo sapiens
gtttattctgctatg

SEQ ID NO: 1993567 - DNA, 15 bp, Homo sapiens
tttattctgctatgc

SEQ ID NO: 1993568 - DNA, 15 bp, Homo sapiens
ttattctgctatgca

SEQ ID NO: 1993569 - DNA, 15 bp, Homo sapiens
tattctgctatgcat

SEQ ID NO: 1993570 - DNA, 15 bp, Homo sapiens
attctgctatgcatt

SEQ ID NO: 1993571 - DNA, 15 bp, Homo sapiens
ttctgctatgcattt

SEQ ID NO: 1993572 - DNA, 15 bp, Homo sapiens
tctgctatgcatttt

SEQ ID NO: 1993573 - DNA, 15 bp, Homo sapiens
ctgctatgcattttt

SEQ ID NO: 1993574 - DNA, 15 bp, Homo sapiens
tgctatgcatttttc

SEQ ID NO: 1993575 - DNA, 15 bp, Homo sapiens
gctatgcatttttcc

SEQ ID NO: 1993576 - DNA, 15 bp, Homo sapiens
ctatgcatttttccc

SEQ ID NO: 1993577 - DNA, 15 bp, Homo sapiens
tatgcatttttcccc

SEQ ID NO: 1993578 - DNA, 15 bp, Homo sapiens
atgcatttttcccct

SEQ ID NO: 1993579 - DNA, 15 bp, Homo sapiens
tgcatttttccccta

SEQ ID NO: 1993580 - DNA, 15 bp, Homo sapiens
gcatttttcccctaa

SEQ ID NO: 1993581 - DNA, 15 bp, Homo sapiens
catttttcccctaac

SEQ ID NO: 1993582 - DNA, 15 bp, Homo sapiens
atttttcccctaact

SEQ ID NO: 1993583 - DNA, 15 bp, Homo sapiens
tttttcccctaactt

SEQ ID NO: 1993584 - DNA, 15 bp, Homo sapiens
ttttcccctaacttt

SEQ ID NO: 1993585 - DNA, 15 bp, Homo sapiens
tttcccctaactttt

SEQ ID NO: 1993586 - DNA, 15 bp, Homo sapiens
ttcccctaacttttt

SEQ ID NO: 1993587 - DNA, 15 bp, Homo sapiens
tcccctaacttttta

SEQ ID NO: 1993588 - DNA, 15 bp, Homo sapiens
cccctaactttttaa

SEQ ID NO: 1993589 - DNA, 15 bp, Homo sapiens
ccctaactttttaat

SEQ ID NO: 1993590 - DNA, 15 bp, Homo sapiens
cctaactttttaatg

SEQ ID NO: 1993591 - DNA, 15 bp, Homo sapiens
ctaactttttaatgt

SEQ ID NO: 1993592 - DNA, 15 bp, Homo sapiens
taactttttaatgtt

SEQ ID NO: 1993593 - DNA, 15 bp, Homo sapiens
aactttttaatgtta

SEQ ID NO: 1993594 - DNA, 15 bp, Homo sapiens
actttttaatgttac

SEQ ID NO: 1993595 - DNA, 15 bp, Homo sapiens
ctttttaatgttact

SEQ ID NO: 1993596 - DNA, 15 bp, Homo sapiens
ttttaatgttactta

SEQ ID NO: 1993597 - DNA, 15 bp, Homo sapiens
tttaatgttacttat

SEQ ID NO: 1993598 - DNA, 15 bp, Homo sapiens
ttaatgttacttatt

SEQ ID NO: 1993599 - DNA, 15 bp, Homo sapiens
taatgttacttattt

SEQ ID NO: 1993600 - DNA, 15 bp, Homo sapiens
aatgttacttattta

SEQ ID NO: 1993601 - DNA, 15 bp, Homo sapiens
atgttacttatttat

SEQ ID NO: 1993602 - DNA, 15 bp, Homo sapiens
tgttacttatttatt

SEQ ID NO: 1993603 - DNA, 15 bp, Homo sapiens
gttacttatttattt

SEQ ID NO: 1993604 - DNA, 15 bp, Homo sapiens
acttatttatttatt

SEQ ID NO: 1993605 - DNA, 15 bp, Homo sapiens
cttatttatttattt

SEQ ID NO: 1993606 - DNA, 15 bp, Homo sapiens
attttttgagacgga

SEQ ID NO: 1993607 - DNA, 15 bp, Homo sapiens
agacggagtttcact

SEQ ID NO: 1993608 - DNA, 15 bp, Homo sapiens
gacggagtttcactg

SEQ ID NO: 1993609 - DNA, 15 bp, Homo sapiens
acggagtttcactgt

SEQ ID NO: 1993610 - DNA, 15 bp, Homo sapiens
cggagtttcactgtt

SEQ ID NO: 1993611 - DNA, 15 bp, Homo sapiens
ggagtttcactgttg

SEQ ID NO: 1993612 - DNA, 15 bp, Homo sapiens
gagtttcactgttgt

SEQ ID NO: 1993613 - DNA, 15 bp, Homo sapiens
agtttcactgttgtt

SEQ ID NO: 1993614 - DNA, 15 bp, Homo sapiens
gtttcactgttgttg

SEQ ID NO: 1993615 - DNA, 15 bp, Homo sapiens
tttcactgttgttgc

SEQ ID NO: 1993616 - DNA, 15 bp, Homo sapiens
ttcactgttgttgcc

SEQ ID NO: 1993617 - DNA, 15 bp, Homo sapiens
tcactgttgttgccc

SEQ ID NO: 1993618 - DNA, 15 bp, Homo sapiens
cactgttgttgccca

SEQ ID NO: 1993619 - DNA, 15 bp, Homo sapiens
actgttgttgcccag

SEQ ID NO: 1993620 - DNA, 15 bp, Homo sapiens
ctgttgttgcccagg

SEQ ID NO: 1993621 - DNA, 15 bp, Homo sapiens
tgttgttgcccaggc

SEQ ID NO: 1993622 - DNA, 15 bp, Homo sapiens
gttgttgcccaggct

SEQ ID NO: 1993623 - DNA, 15 bp, Homo sapiens
tacagtggcgtgatc

SEQ ID NO: 1993624 - DNA, 15 bp, Homo sapiens
acagtggcgtgatct

SEQ ID NO: 1993625 - DNA, 15 bp, Homo sapiens
cagctcactgcaaca

SEQ ID NO: 1993626 - DNA, 15 bp, Homo sapiens
agctcactgcaacat

SEQ ID NO: 1993627 - DNA, 15 bp, Homo sapiens
gctcactgcaacatt

SEQ ID NO: 1993628 - DNA, 15 bp, Homo sapiens
ctcactgcaacattt

SEQ ID NO: 1993629 - DNA, 15 bp, Homo sapiens
tcactgcaacatttg

SEQ ID NO: 1993630 - DNA, 15 bp, Homo sapiens
cactgcaacatttgc

SEQ ID NO: 1993631 - DNA, 15 bp, Homo sapiens
actgcaacatttgcc

SEQ ID NO: 1993632 - DNA, 15 bp, Homo sapiens
ctgcaacatttgcct

SEQ ID NO: 1993633 - DNA, 15 bp, Homo sapiens
tgcaacatttgcctc

SEQ ID NO: 1993634 - DNA, 15 bp, Homo sapiens
gcaacatttgcctcc

SEQ ID NO: 1993635 - DNA, 15 bp, Homo sapiens
caacatttgcctccc

SEQ ID NO: 1993636 - DNA, 15 bp, Homo sapiens
aacatttgcctcccg

SEQ ID NO: 1993637 - DNA, 15 bp, Homo sapiens
acatttgcctcccga

SEQ ID NO: 1993638 - DNA, 15 bp, Homo sapiens
catttgcctcccgag

SEQ ID NO: 1993639 - DNA, 15 bp, Homo sapiens
atttgcctcccgagt

SEQ ID NO: 1993640 - DNA, 15 bp, Homo sapiens
tttgcctcccgagtt

SEQ ID NO: 1993641 - DNA, 15 bp, Homo sapiens
ttgcctcccgagttc

SEQ ID NO: 1993642 - DNA, 15 bp, Homo sapiens
tgcctcccgagttca

SEQ ID NO: 1993643 - DNA, 15 bp, Homo sapiens
gcctcccgagttcaa

SEQ ID NO: 1993644 - DNA, 15 bp, Homo sapiens
ctcccgagttcaagt

SEQ ID NO: 1993645 - DNA, 15 bp, Homo sapiens
tcccgagttcaagtg

SEQ ID NO: 1993646 - DNA, 15 bp, Homo sapiens
cccgagttcaagtga

SEQ ID NO: 1993647 - DNA, 15 bp, Homo sapiens
ccgagttcaagtgag

SEQ ID NO: 1993648 - DNA, 15 bp, Homo sapiens
cgagttcaagtgagt

SEQ ID NO: 1993649 - DNA, 15 bp, Homo sapiens
gagttcaagtgagtc

SEQ ID NO: 1993650 - DNA, 15 bp, Homo sapiens
agttcaagtgagtct

SEQ ID NO: 1993651 - DNA, 15 bp, Homo sapiens
gttcaagtgagtctc

SEQ ID NO: 1993652 - DNA, 15 bp, Homo sapiens
ttcaagtgagtctcc

SEQ ID NO: 1993653 - DNA, 15 bp, Homo sapiens
tcaagtgagtctcct

SEQ ID NO: 1993654 - DNA, 15 bp, Homo sapiens
caagtgagtctcctg

SEQ ID NO: 1993655 - DNA, 15 bp, Homo sapiens
aagtgagtctcctgc

SEQ ID NO: 1993656 - DNA, 15 bp, Homo sapiens
agtgagtctcctgcc

SEQ ID NO: 1993657 - DNA, 15 bp, Homo sapiens
gtgagtctcctgcct

SEQ ID NO: 1993658 - DNA, 15 bp, Homo sapiens
tgagtctcctgcctc

SEQ ID NO: 1993659 - DNA, 15 bp, Homo sapiens
gagtctcctgcctca

SEQ ID NO: 1993660 - DNA, 15 bp, Homo sapiens
agtctcctgcctcag

SEQ ID NO: 1993661 - DNA, 15 bp, Homo sapiens
gtctcctgcctcagc

SEQ ID NO: 1993662 - DNA, 15 bp, Homo sapiens
ctcctgcctcagcca

SEQ ID NO: 1993663 - DNA, 15 bp, Homo sapiens
tcctgcctcagccac

SEQ ID NO: 1993664 - DNA, 15 bp, Homo sapiens
cctgcctcagccacc

SEQ ID NO: 1993665 - DNA, 15 bp, Homo sapiens
ctgcctcagccaccc

SEQ ID NO: 1993666 - DNA, 15 bp, Homo sapiens
tgcctcagccaccca

SEQ ID NO: 1993667 - DNA, 15 bp, Homo sapiens
gcctcagccacccaa

SEQ ID NO: 1993668 - DNA, 15 bp, Homo sapiens
cctcagccacccaag

SEQ ID NO: 1993669 - DNA, 15 bp, Homo sapiens
ctcagccacccaagt

SEQ ID NO: 1993670 - DNA, 15 bp, Homo sapiens
tcagccacccaagta

SEQ ID NO: 1993671 - DNA, 15 bp, Homo sapiens
cagccacccaagtag

SEQ ID NO: 1993672 - DNA, 15 bp, Homo sapiens
agccacccaagtagc

SEQ ID NO: 1993673 - DNA, 15 bp, Homo sapiens
gccacccaagtagct

SEQ ID NO: 1993674 - DNA, 15 bp, Homo sapiens
ccacccaagtagctg

SEQ ID NO: 1993675 - DNA, 15 bp, Homo sapiens
cacccaagtagctgg

SEQ ID NO: 1993676 - DNA, 15 bp, Homo sapiens
acccaagtagctggg

SEQ ID NO: 1993677 - DNA, 15 bp, Homo sapiens
gggattacaggcgct

SEQ ID NO: 1993678 - DNA, 15 bp, Homo sapiens
ggattacaggcgctc

SEQ ID NO: 1993679 - DNA, 15 bp, Homo sapiens
gattacaggcgctcg

SEQ ID NO: 1993680 - DNA, 15 bp, Homo sapiens
attacaggcgctcgc

SEQ ID NO: 1993681 - DNA, 15 bp, Homo sapiens
ttacaggcgctcgcc

SEQ ID NO: 1993682 - DNA, 15 bp, Homo sapiens
tacaggcgctcgcca

SEQ ID NO: 1993683 - DNA, 15 bp, Homo sapiens
acaggcgctcgccac

SEQ ID NO: 1993684 - DNA, 15 bp, Homo sapiens
caggcgctcgccacc

SEQ ID NO: 1993685 - DNA, 15 bp, Homo sapiens
aggcgctcgccacca

SEQ ID NO: 1993686 - DNA, 15 bp, Homo sapiens
ggcgctcgccaccat

SEQ ID NO: 1993687 - DNA, 15 bp, Homo sapiens
gcgctcgccaccatg

SEQ ID NO: 1993688 - DNA, 15 bp, Homo sapiens
cgctcgccaccatgc

SEQ ID NO: 1993689 - DNA, 15 bp, Homo sapiens
gctcgccaccatgcc

SEQ ID NO: 1993690 - DNA, 15 bp, Homo sapiens
ctcgccaccatgccc

SEQ ID NO: 1993691 - DNA, 15 bp, Homo sapiens
tcgccaccatgcccg

SEQ ID NO: 1993692 - DNA, 15 bp, Homo sapiens
cgccaccatgcccgg

SEQ ID NO: 1993693 - DNA, 15 bp, Homo sapiens
agatgggatttcacc

SEQ ID NO: 1993694 - DNA, 15 bp, Homo sapiens
gatgggatttcacca

SEQ ID NO: 1993695 - DNA, 15 bp, Homo sapiens
atgggatttcaccat

SEQ ID NO: 1993696 - DNA, 15 bp, Homo sapiens
tgggatttcaccatt

SEQ ID NO: 1993697 - DNA, 15 bp, Homo sapiens
gggatttcaccattt

SEQ ID NO: 1993698 - DNA, 15 bp, Homo sapiens
ggatttcaccatttt

SEQ ID NO: 1993699 - DNA, 15 bp, Homo sapiens
gatttcaccattttg

SEQ ID NO: 1993700 - DNA, 15 bp, Homo sapiens
atttcaccattttgg

SEQ ID NO: 1993701 - DNA, 15 bp, Homo sapiens
attttggccaggctg

SEQ ID NO: 1993702 - DNA, 15 bp, Homo sapiens
ttttggccaggctgg

SEQ ID NO: 1993703 - DNA, 15 bp, Homo sapiens
tttggccaggctggt

SEQ ID NO: 1993704 - DNA, 15 bp, Homo sapiens
ggtgatccacctgct

SEQ ID NO: 1993705 - DNA, 15 bp, Homo sapiens
gtgatccacctgctt

SEQ ID NO: 1993706 - DNA, 15 bp, Homo sapiens
aggcatgaaccaccg

SEQ ID NO: 1993707 - DNA, 15 bp, Homo sapiens
ggcatgaaccaccgt

SEQ ID NO: 1993708 - DNA, 15 bp, Homo sapiens
gcatgaaccaccgtg

SEQ ID NO: 1993709 - DNA, 15 bp, Homo sapiens
catgaaccaccgtgc

SEQ ID NO: 1993710 - DNA, 15 bp, Homo sapiens
atgaaccaccgtgcc

SEQ ID NO: 1993711 - DNA, 15 bp, Homo sapiens
ccgtgcctggcctta

SEQ ID NO: 1993712 - DNA, 15 bp, Homo sapiens
cgtgcctggccttaa

SEQ ID NO: 1993713 - DNA, 15 bp, Homo sapiens
gtgcctggccttaat

SEQ ID NO: 1993714 - DNA, 15 bp, Homo sapiens
tgcctggccttaatc

SEQ ID NO: 1993715 - DNA, 15 bp, Homo sapiens
gcctggccttaatct

SEQ ID NO: 1993716 - DNA, 15 bp, Homo sapiens
cctggccttaatctt

SEQ ID NO: 1993717 - DNA, 15 bp, Homo sapiens
ctggccttaatctta

SEQ ID NO: 1993718 - DNA, 15 bp, Homo sapiens
tggccttaatcttat

SEQ ID NO: 1993719 - DNA, 15 bp, Homo sapiens
ggccttaatcttatg

SEQ ID NO: 1993720 - DNA, 15 bp, Homo sapiens
gccttaatcttatgt

SEQ ID NO: 1993721 - DNA, 15 bp, Homo sapiens
ccttaatcttatgtt

SEQ ID NO: 1993722 - DNA, 15 bp, Homo sapiens
cttaatcttatgttt

SEQ ID NO: 1993723 - DNA, 15 bp, Homo sapiens
ttaatcttatgttta

SEQ ID NO: 1993724 - DNA, 15 bp, Homo sapiens
taatcttatgtttaa

SEQ ID NO: 1993725 - DNA, 15 bp, Homo sapiens
aatcttatgtttaaa

SEQ ID NO: 1993726 - DNA, 15 bp, Homo sapiens
atcttatgtttaaat

SEQ ID NO: 1993727 - DNA, 15 bp, Homo sapiens
tcttatgtttaaatg

SEQ ID NO: 1993728 - DNA, 15 bp, Homo sapiens
cttatgtttaaatgt

SEQ ID NO: 1993729 - DNA, 15 bp, Homo sapiens
ttatgtttaaatgtg

SEQ ID NO: 1993730 - DNA, 15 bp, Homo sapiens
tatgtttaaatgtgg

SEQ ID NO: 1993731 - DNA, 15 bp, Homo sapiens
atgtttaaatgtgga

SEQ ID NO: 1993732 - DNA, 15 bp, Homo sapiens
tgtttaaatgtggaa

SEQ ID NO: 1993733 - DNA, 15 bp, Homo sapiens
gtttaaatgtggaaa

SEQ ID NO: 1993734 - DNA, 15 bp, Homo sapiens
tttaaatgtggaaaa

SEQ ID NO: 1993735 - DNA, 15 bp, Homo sapiens
ttaaatgtggaaaaa

SEQ ID NO: 1993736 - DNA, 15 bp, Homo sapiens
taaatgtggaaaaat

SEQ ID NO: 1993737 - DNA, 15 bp, Homo sapiens
aaatgtggaaaaatg

SEQ ID NO: 1993738 - DNA, 15 bp, Homo sapiens
aatgtggaaaaatgc

SEQ ID NO: 1993739 - DNA, 15 bp, Homo sapiens
atgtggaaaaatgca

SEQ ID NO: 1993740 - DNA, 15 bp, Homo sapiens
tgtggaaaaatgcac

SEQ ID NO: 1993741 - DNA, 15 bp, Homo sapiens
gtggaaaaatgcaca

SEQ ID NO: 1993742 - DNA, 15 bp, Homo sapiens
tggaaaaatgcacat

SEQ ID NO: 1993743 - DNA, 15 bp, Homo sapiens
ggaaaaatgcacata

SEQ ID NO: 1993744 - DNA, 15 bp, Homo sapiens
gaaaaatgcacataa

SEQ ID NO: 1993745 - DNA, 15 bp, Homo sapiens
aaaaatgcacataac

SEQ ID NO: 1993746 - DNA, 15 bp, Homo sapiens
aaaatgcacataaca

SEQ ID NO: 1993747 - DNA, 15 bp, Homo sapiens
aaatgcacataacat

SEQ ID NO: 1993748 - DNA, 15 bp, Homo sapiens
aatgcacataacata

SEQ ID NO: 1993749 - DNA, 15 bp, Homo sapiens
atgcacataacataa

SEQ ID NO: 1993750 - DNA, 15 bp, Homo sapiens
tgcacataacataaa

SEQ ID NO: 1993751 - DNA, 15 bp, Homo sapiens
gcacataacataaac

SEQ ID NO: 1993752 - DNA, 15 bp, Homo sapiens
cacataacataaacg

SEQ ID NO: 1993753 - DNA, 15 bp, Homo sapiens
acataacataaacgt

SEQ ID NO: 1993754 - DNA, 15 bp, Homo sapiens
cataacataaacgtt

SEQ ID NO: 1993755 - DNA, 15 bp, Homo sapiens
ataacataaacgtta

SEQ ID NO: 1993756 - DNA, 15 bp, Homo sapiens
taacataaacgttac

SEQ ID NO: 1993757 - DNA, 15 bp, Homo sapiens
aacataaacgttacc

SEQ ID NO: 1993758 - DNA, 15 bp, Homo sapiens
acataaacgttacca

SEQ ID NO: 1993759 - DNA, 15 bp, Homo sapiens
cataaacgttaccat

SEQ ID NO: 1993760 - DNA, 15 bp, Homo sapiens
ataaacgttaccatc

SEQ ID NO: 1993761 - DNA, 15 bp, Homo sapiens
taaacgttaccatct

SEQ ID NO: 1993762 - DNA, 15 bp, Homo sapiens
aaacgttaccatctt

SEQ ID NO: 1993763 - DNA, 15 bp, Homo sapiens
aacgttaccatctta

SEQ ID NO: 1993764 - DNA, 15 bp, Homo sapiens
acgttaccatcttaa

SEQ ID NO: 1993765 - DNA, 15 bp, Homo sapiens
cgttaccatcttaac

SEQ ID NO: 1993766 - DNA, 15 bp, Homo sapiens
gttaccatcttaact

SEQ ID NO: 1993767 - DNA, 15 bp, Homo sapiens
ttaccatcttaactg

SEQ ID NO: 1993768 - DNA, 15 bp, Homo sapiens
taccatcttaactgt

SEQ ID NO: 1993769 - DNA, 15 bp, Homo sapiens
accatcttaactgtt

SEQ ID NO: 1993770 - DNA, 15 bp, Homo sapiens
ccatcttaactgttc

SEQ ID NO: 1993771 - DNA, 15 bp, Homo sapiens
catcttaactgttcc

SEQ ID NO: 1993772 - DNA, 15 bp, Homo sapiens
atcttaactgttcct

SEQ ID NO: 1993773 - DNA, 15 bp, Homo sapiens
tcttaactgttccta

SEQ ID NO: 1993774 - DNA, 15 bp, Homo sapiens
cttaactgttcctaa

SEQ ID NO: 1993775 - DNA, 15 bp, Homo sapiens
ttaactgttcctaag

SEQ ID NO: 1993776 - DNA, 15 bp, Homo sapiens
taactgttcctaagt

SEQ ID NO: 1993777 - DNA, 15 bp, Homo sapiens
aactgttcctaagtg

SEQ ID NO: 1993778 - DNA, 15 bp, Homo sapiens
actgttcctaagtgt

SEQ ID NO: 1993779 - DNA, 15 bp, Homo sapiens
ctgttcctaagtgta

SEQ ID NO: 1993780 - DNA, 15 bp, Homo sapiens
tgttcctaagtgtat

SEQ ID NO: 1993781 - DNA, 15 bp, Homo sapiens
gttcctaagtgtata

SEQ ID NO: 1993782 - DNA, 15 bp, Homo sapiens
ttcctaagtgtatag

SEQ ID NO: 1993783 - DNA, 15 bp, Homo sapiens
tcctaagtgtatagt

SEQ ID NO: 1993784 - DNA, 15 bp, Homo sapiens
cctaagtgtatagtt

SEQ ID NO: 1993785 - DNA, 15 bp, Homo sapiens
ctaagtgtatagttc

SEQ ID NO: 1993786 - DNA, 15 bp, Homo sapiens
taagtgtatagttca

SEQ ID NO: 1993787 - DNA, 15 bp, Homo sapiens
aagtgtatagttcag

SEQ ID NO: 1993788 - DNA, 15 bp, Homo sapiens
agtgtatagttcagt

SEQ ID NO: 1993789 - DNA, 15 bp, Homo sapiens
gtgtatagttcagta

SEQ ID NO: 1993790 - DNA, 15 bp, Homo sapiens
tgtatagttcagtag

SEQ ID NO: 1993791 - DNA, 15 bp, Homo sapiens
gtatagttcagtagt

SEQ ID NO: 1993792 - DNA, 15 bp, Homo sapiens
tatagttcagtagta

SEQ ID NO: 1993793 - DNA, 15 bp, Homo sapiens
atagttcagtagtat

SEQ ID NO: 1993794 - DNA, 15 bp, Homo sapiens
tagttcagtagtatt

SEQ ID NO: 1993795 - DNA, 15 bp, Homo sapiens
agttcagtagtatta

SEQ ID NO: 1993796 - DNA, 15 bp, Homo sapiens
gttcagtagtattaa

SEQ ID NO: 1993797 - DNA, 15 bp, Homo sapiens
ttcagtagtattaag

SEQ ID NO: 1993798 - DNA, 15 bp, Homo sapiens
tcagtagtattaagt

SEQ ID NO: 1993799 - DNA, 15 bp, Homo sapiens
cagtagtattaagta

SEQ ID NO: 1993800 - DNA, 15 bp, Homo sapiens
agtagtattaagtac

SEQ ID NO: 1993801 - DNA, 15 bp, Homo sapiens
gtagtattaagtaca

SEQ ID NO: 1993802 - DNA, 15 bp, Homo sapiens
tagtattaagtacat

SEQ ID NO: 1993803 - DNA, 15 bp, Homo sapiens
agtattaagtacatt

SEQ ID NO: 1993804 - DNA, 15 bp, Homo sapiens
ttaagtacattcacc

SEQ ID NO: 1993805 - DNA, 15 bp, Homo sapiens
taagtacattcacct

SEQ ID NO: 1993806 - DNA, 15 bp, Homo sapiens
aagtacattcacctt

SEQ ID NO: 1993807 - DNA, 15 bp, Homo sapiens
agtacattcaccttg

SEQ ID NO: 1993808 - DNA, 15 bp, Homo sapiens
gtacattcaccttgt

SEQ ID NO: 1993809 - DNA, 15 bp, Homo sapiens
tacattcaccttgtt

SEQ ID NO: 1993810 - DNA, 15 bp, Homo sapiens
acattcaccttgttg

SEQ ID NO: 1993811 - DNA, 15 bp, Homo sapiens
cattcaccttgttgt

SEQ ID NO: 1993812 - DNA, 15 bp, Homo sapiens
attcaccttgttgtg

SEQ ID NO: 1993813 - DNA, 15 bp, Homo sapiens
ttcaccttgttgtgt

SEQ ID NO: 1993814 - DNA, 15 bp, Homo sapiens
tcaccttgttgtgta

SEQ ID NO: 1993815 - DNA, 15 bp, Homo sapiens
caccttgttgtgtaa

SEQ ID NO: 1993816 - DNA, 15 bp, Homo sapiens
accttgttgtgtaac

SEQ ID NO: 1993817 - DNA, 15 bp, Homo sapiens
ccttgttgtgtaacc

SEQ ID NO: 1993818 - DNA, 15 bp, Homo sapiens
cttgttgtgtaacca

SEQ ID NO: 1993819 - DNA, 15 bp, Homo sapiens
ttgttgtgtaaccaa

SEQ ID NO: 1993820 - DNA, 15 bp, Homo sapiens
tgttgtgtaaccaat

SEQ ID NO: 1993821 - DNA, 15 bp, Homo sapiens
gttgtgtaaccaatc

SEQ ID NO: 1993822 - DNA, 15 bp, Homo sapiens
ttgtgtaaccaatct

SEQ ID NO: 1993823 - DNA, 15 bp, Homo sapiens
tgtgtaaccaatcta

SEQ ID NO: 1993824 - DNA, 15 bp, Homo sapiens
gtgtaaccaatctac

SEQ ID NO: 1993825 - DNA, 15 bp, Homo sapiens
tgtaaccaatctaca

SEQ ID NO: 1993826 - DNA, 15 bp, Homo sapiens
gtaaccaatctacag

SEQ ID NO: 1993827 - DNA, 15 bp, Homo sapiens
taaccaatctacaga

SEQ ID NO: 1993828 - DNA, 15 bp, Homo sapiens
aaccaatctacagaa

SEQ ID NO: 1993829 - DNA, 15 bp, Homo sapiens
accaatctacagaac

SEQ ID NO: 1993830 - DNA, 15 bp, Homo sapiens
ccaatctacagaact

SEQ ID NO: 1993831 - DNA, 15 bp, Homo sapiens
caatctacagaactc

SEQ ID NO: 1993832 - DNA, 15 bp, Homo sapiens
aatctacagaactcc

SEQ ID NO: 1993833 - DNA, 15 bp, Homo sapiens
atctacagaactccc

SEQ ID NO: 1993834 - DNA, 15 bp, Homo sapiens
tctacagaactccct

SEQ ID NO: 1993835 - DNA, 15 bp, Homo sapiens
ctacagaactccctt

SEQ ID NO: 1993836 - DNA, 15 bp, Homo sapiens
tacagaactcccttc

SEQ ID NO: 1993837 - DNA, 15 bp, Homo sapiens
acagaactcccttca

SEQ ID NO: 1993838 - DNA, 15 bp, Homo sapiens
cagaactcccttcat

SEQ ID NO: 1993839 - DNA, 15 bp, Homo sapiens
agaactcccttcatc

SEQ ID NO: 1993840 - DNA, 15 bp, Homo sapiens
gaactcccttcatct

SEQ ID NO: 1993841 - DNA, 15 bp, Homo sapiens
aactcccttcatctc

SEQ ID NO: 1993842 - DNA, 15 bp, Homo sapiens
actcccttcatctca

SEQ ID NO: 1993843 - DNA, 15 bp, Homo sapiens
ctcccttcatctcaa

SEQ ID NO: 1993844 - DNA, 15 bp, Homo sapiens
tcccttcatctcaaa

SEQ ID NO: 1993845 - DNA, 15 bp, Homo sapiens
cccttcatctcaaaa

SEQ ID NO: 1993846 - DNA, 15 bp, Homo sapiens
ccttcatctcaaaaa

SEQ ID NO: 1993847 - DNA, 15 bp, Homo sapiens
ttcatctcaaaaaac

SEQ ID NO: 1993848 - DNA, 15 bp, Homo sapiens
tcatctcaaaaaact

SEQ ID NO: 1993849 - DNA, 15 bp, Homo sapiens
catctcaaaaaactg

SEQ ID NO: 1993850 - DNA, 15 bp, Homo sapiens
atctcaaaaaactga

SEQ ID NO: 1993851 - DNA, 15 bp, Homo sapiens
tctcaaaaaactgaa

SEQ ID NO: 1993852 - DNA, 15 bp, Homo sapiens
ctcaaaaaactgaaa

SEQ ID NO: 1993853 - DNA, 15 bp, Homo sapiens
tcaaaaaactgaaac

SEQ ID NO: 1993854 - DNA, 15 bp, Homo sapiens
caaaaaactgaaacc

SEQ ID NO: 1993855 - DNA, 15 bp, Homo sapiens
aaaaaactgaaaccc

SEQ ID NO: 1993856 - DNA, 15 bp, Homo sapiens
aaaaactgaaaccct

SEQ ID NO: 1993857 - DNA, 15 bp, Homo sapiens
aaaactgaaaccctt

SEQ ID NO: 1993858 - DNA, 15 bp, Homo sapiens
aaactgaaacccttt

SEQ ID NO: 1993859 - DNA, 15 bp, Homo sapiens
aactgaaacccttta

SEQ ID NO: 1993860 - DNA, 15 bp, Homo sapiens
actgaaaccctttac

SEQ ID NO: 1993861 - DNA, 15 bp, Homo sapiens
ctgaaaccctttact

SEQ ID NO: 1993862 - DNA, 15 bp, Homo sapiens
tgaaaccctttactc

SEQ ID NO: 1993863 - DNA, 15 bp, Homo sapiens
gaaaccctttactca

SEQ ID NO: 1993864 - DNA, 15 bp, Homo sapiens
aaaccctttactcat

SEQ ID NO: 1993865 - DNA, 15 bp, Homo sapiens
aaccctttactcatt

SEQ ID NO: 1993866 - DNA, 15 bp, Homo sapiens
accctttactcatta

SEQ ID NO: 1993867 - DNA, 15 bp, Homo sapiens
ccctttactcattaa

SEQ ID NO: 1993868 - DNA, 15 bp, Homo sapiens
cctttactcattaaa

SEQ ID NO: 1993869 - DNA, 15 bp, Homo sapiens
ctttactcattaaac

SEQ ID NO: 1993870 - DNA, 15 bp, Homo sapiens
tttactcattaaact

SEQ ID NO: 1993871 - DNA, 15 bp, Homo sapiens
ttactcattaaacta

SEQ ID NO: 1993872 - DNA, 15 bp, Homo sapiens
tactcattaaactag

SEQ ID NO: 1993873 - DNA, 15 bp, Homo sapiens
actcattaaactaga

SEQ ID NO: 1993874 - DNA, 15 bp, Homo sapiens
ctcattaaactagaa

SEQ ID NO: 1993875 - DNA, 15 bp, Homo sapiens
tcattaaactagaac

SEQ ID NO: 1993876 - DNA, 15 bp, Homo sapiens
cattaaactagaact

SEQ ID NO: 1993877 - DNA, 15 bp, Homo sapiens
attaaactagaactt

SEQ ID NO: 1993878 - DNA, 15 bp, Homo sapiens
ttaaactagaacttc

SEQ ID NO: 1993879 - DNA, 15 bp, Homo sapiens
taaactagaacttcc

SEQ ID NO: 1993880 - DNA, 15 bp, Homo sapiens
aaactagaacttccc

SEQ ID NO: 1993881 - DNA, 15 bp, Homo sapiens
aactagaacttccca

SEQ ID NO: 1993882 - DNA, 15 bp, Homo sapiens
actagaacttcccat

SEQ ID NO: 1993883 - DNA, 15 bp, Homo sapiens
ctagaacttcccatt

SEQ ID NO: 1993884 - DNA, 15 bp, Homo sapiens
tagaacttcccattc

SEQ ID NO: 1993885 - DNA, 15 bp, Homo sapiens
agaacttcccattcc

SEQ ID NO: 1993886 - DNA, 15 bp, Homo sapiens
gaacttcccattcct

SEQ ID NO: 1993887 - DNA, 15 bp, Homo sapiens
aacttcccattcctc

SEQ ID NO: 1993888 - DNA, 15 bp, Homo sapiens
acttcccattcctcc

SEQ ID NO: 1993889 - DNA, 15 bp, Homo sapiens
cttcccattcctcca

SEQ ID NO: 1993890 - DNA, 15 bp, Homo sapiens
ttcccattcctccat

SEQ ID NO: 1993891 - DNA, 15 bp, Homo sapiens
tcccattcctccatg

SEQ ID NO: 1993892 - DNA, 15 bp, Homo sapiens
cccattcctccatgt

SEQ ID NO: 1993893 - DNA, 15 bp, Homo sapiens
ccattcctccatgtt

SEQ ID NO: 1993894 - DNA, 15 bp, Homo sapiens
cattcctccatgttc

SEQ ID NO: 1993895 - DNA, 15 bp, Homo sapiens
attcctccatgttcc

SEQ ID NO: 1993896 - DNA, 15 bp, Homo sapiens
ttcctccatgttccc

SEQ ID NO: 1993897 - DNA, 15 bp, Homo sapiens
tcctccatgttccca

SEQ ID NO: 1993898 - DNA, 15 bp, Homo sapiens
cctccatgttcccag

SEQ ID NO: 1993899 - DNA, 15 bp, Homo sapiens
ctccatgttcccagc

SEQ ID NO: 1993900 - DNA, 15 bp, Homo sapiens
tccatgttcccagcc

SEQ ID NO: 1993901 - DNA, 15 bp, Homo sapiens
ccatgttcccagcca

SEQ ID NO: 1993902 - DNA, 15 bp, Homo sapiens
catgttcccagccac

SEQ ID NO: 1993903 - DNA, 15 bp, Homo sapiens
atgttcccagccact

SEQ ID NO: 1993904 - DNA, 15 bp, Homo sapiens
tgttcccagccactg

SEQ ID NO: 1993905 - DNA, 15 bp, Homo sapiens
gttcccagccactgg

SEQ ID NO: 1993906 - DNA, 15 bp, Homo sapiens
ttcccagccactgga

SEQ ID NO: 1993907 - DNA, 15 bp, Homo sapiens
tcccagccactggaa

SEQ ID NO: 1993908 - DNA, 15 bp, Homo sapiens
cccagccactggaaa

SEQ ID NO: 1993909 - DNA, 15 bp, Homo sapiens
ccagccactggaaac

SEQ ID NO: 1993910 - DNA, 15 bp, Homo sapiens
cagccactggaaacc

SEQ ID NO: 1993911 - DNA, 15 bp, Homo sapiens
agccactggaaacca

SEQ ID NO: 1993912 - DNA, 15 bp, Homo sapiens
gccactggaaaccac

SEQ ID NO: 1993913 - DNA, 15 bp, Homo sapiens
ccactggaaaccacc

SEQ ID NO: 1993914 - DNA, 15 bp, Homo sapiens
cactggaaaccacca

SEQ ID NO: 1993915 - DNA, 15 bp, Homo sapiens
actggaaaccaccat

SEQ ID NO: 1993916 - DNA, 15 bp, Homo sapiens
ctggaaaccaccatt

SEQ ID NO: 1993917 - DNA, 15 bp, Homo sapiens
tggaaaccaccattc

SEQ ID NO: 1993918 - DNA, 15 bp, Homo sapiens
ggaaaccaccattct

SEQ ID NO: 1993919 - DNA, 15 bp, Homo sapiens
gaaaccaccattcta

SEQ ID NO: 1993920 - DNA, 15 bp, Homo sapiens
aaaccaccattctac

SEQ ID NO: 1993921 - DNA, 15 bp, Homo sapiens
aaccaccattctact

SEQ ID NO: 1993922 - DNA, 15 bp, Homo sapiens
accaccattctactt

SEQ ID NO: 1993923 - DNA, 15 bp, Homo sapiens
ccaccattctacttt

SEQ ID NO: 1993924 - DNA, 15 bp, Homo sapiens
caccattctactttc

SEQ ID NO: 1993925 - DNA, 15 bp, Homo sapiens
accattctactttct

SEQ ID NO: 1993926 - DNA, 15 bp, Homo sapiens
ccattctactttctg

SEQ ID NO: 1993927 - DNA, 15 bp, Homo sapiens
cattctactttctgt

SEQ ID NO: 1993928 - DNA, 15 bp, Homo sapiens
attctactttctgtt

SEQ ID NO: 1993929 - DNA, 15 bp, Homo sapiens
ttctgtttctatgaa

SEQ ID NO: 1993930 - DNA, 15 bp, Homo sapiens
tctgtttctatgaat

SEQ ID NO: 1993931 - DNA, 15 bp, Homo sapiens
ctgtttctatgaatt

SEQ ID NO: 1993932 - DNA, 15 bp, Homo sapiens
tgtttctatgaattt

SEQ ID NO: 1993933 - DNA, 15 bp, Homo sapiens
gtttctatgaatttg

SEQ ID NO: 1993934 - DNA, 15 bp, Homo sapiens
tttctatgaatttga

SEQ ID NO: 1993935 - DNA, 15 bp, Homo sapiens
ttctatgaatttgac

SEQ ID NO: 1993936 - DNA, 15 bp, Homo sapiens
tatgaatttgactac

SEQ ID NO: 1993937 - DNA, 15 bp, Homo sapiens
atgaatttgactacc

SEQ ID NO: 1993938 - DNA, 15 bp, Homo sapiens
tgaatttgactaccc

SEQ ID NO: 1993939 - DNA, 15 bp, Homo sapiens
gaatttgactaccct

SEQ ID NO: 1993940 - DNA, 15 bp, Homo sapiens
aatttgactaccctg

SEQ ID NO: 1993941 - DNA, 15 bp, Homo sapiens
atttgactaccctgg

SEQ ID NO: 1993942 - DNA, 15 bp, Homo sapiens
tttgactaccctgga

SEQ ID NO: 1993943 - DNA, 15 bp, Homo sapiens
ttgactaccctggat

SEQ ID NO: 1993944 - DNA, 15 bp, Homo sapiens
tgactaccctggata

SEQ ID NO: 1993945 - DNA, 15 bp, Homo sapiens
gactaccctggatac

SEQ ID NO: 1993946 - DNA, 15 bp, Homo sapiens
actaccctggatacc

SEQ ID NO: 1993947 - DNA, 15 bp, Homo sapiens
ctaccctggatacct

SEQ ID NO: 1993948 - DNA, 15 bp, Homo sapiens
taccctggatacctc

SEQ ID NO: 1993949 - DNA, 15 bp, Homo sapiens
accctggatacctca

SEQ ID NO: 1993950 - DNA, 15 bp, Homo sapiens
ccctggatacctcaa

SEQ ID NO: 1993951 - DNA, 15 bp, Homo sapiens
cctggatacctcaaa

SEQ ID NO: 1993952 - DNA, 15 bp, Homo sapiens
ctggatacctcaaat

SEQ ID NO: 1993953 - DNA, 15 bp, Homo sapiens
tggatacctcaaata

SEQ ID NO: 1993954 - DNA, 15 bp, Homo sapiens
ggatacctcaaataa

SEQ ID NO: 1993955 - DNA, 15 bp, Homo sapiens
gatacctcaaataag

SEQ ID NO: 1993956 - DNA, 15 bp, Homo sapiens
atacctcaaataagt

SEQ ID NO: 1993957 - DNA, 15 bp, Homo sapiens
tacctcaaataagtg

SEQ ID NO: 1993958 - DNA, 15 bp, Homo sapiens
acctcaaataagtgg

SEQ ID NO: 1993959 - DNA, 15 bp, Homo sapiens
cctcaaataagtggc

SEQ ID NO: 1993960 - DNA, 15 bp, Homo sapiens
ctcaaataagtggcg

SEQ ID NO: 1993961 - DNA, 15 bp, Homo sapiens
tcaaataagtggcgt

SEQ ID NO: 1993962 - DNA, 15 bp, Homo sapiens
caaataagtggcgtc

SEQ ID NO: 1993963 - DNA, 15 bp, Homo sapiens
aaataagtggcgtca

SEQ ID NO: 1993964 - DNA, 15 bp, Homo sapiens
aataagtggcgtcat

SEQ ID NO: 1993965 - DNA, 15 bp, Homo sapiens
ataagtggcgtcata

SEQ ID NO: 1993966 - DNA, 15 bp, Homo sapiens
taagtggcgtcatac

SEQ ID NO: 1993967 - DNA, 15 bp, Homo sapiens
aagtggcgtcataca

SEQ ID NO: 1993968 - DNA, 15 bp, Homo sapiens
agtggcgtcatacag

SEQ ID NO: 1993969 - DNA, 15 bp, Homo sapiens
gtggcgtcatacagt

SEQ ID NO: 1993970 - DNA, 15 bp, Homo sapiens
tggcgtcatacagta

SEQ ID NO: 1993971 - DNA, 15 bp, Homo sapiens
ggcgtcatacagtat

SEQ ID NO: 1993972 - DNA, 15 bp, Homo sapiens
gcgtcatacagtatt

SEQ ID NO: 1993973 - DNA, 15 bp, Homo sapiens
cgtcatacagtattt

SEQ ID NO: 1993974 - DNA, 15 bp, Homo sapiens
gtcatacagtatttg

SEQ ID NO: 1993975 - DNA, 15 bp, Homo sapiens
atacagtatttgtct

SEQ ID NO: 1993976 - DNA, 15 bp, Homo sapiens
tacagtatttgtctt

SEQ ID NO: 1993977 - DNA, 15 bp, Homo sapiens
acagtatttgtcttt

SEQ ID NO: 1993978 - DNA, 15 bp, Homo sapiens
cagtatttgtctttt

SEQ ID NO: 1993979 - DNA, 15 bp, Homo sapiens
agtatttgtcttttt

SEQ ID NO: 1993980 - DNA, 15 bp, Homo sapiens
gtatttgtcttttta

SEQ ID NO: 1993981 - DNA, 15 bp, Homo sapiens
tatttgtctttttat

SEQ ID NO: 1993982 - DNA, 15 bp, Homo sapiens
atttgtctttttata

SEQ ID NO: 1993983 - DNA, 15 bp, Homo sapiens
tttgtctttttataa

SEQ ID NO: 1993984 - DNA, 15 bp, Homo sapiens
ttgtctttttataac

SEQ ID NO: 1993985 - DNA, 15 bp, Homo sapiens
tgtctttttataact

SEQ ID NO: 1993986 - DNA, 15 bp, Homo sapiens
gtctttttataactg

SEQ ID NO: 1993987 - DNA, 15 bp, Homo sapiens
tctttttataactgg

SEQ ID NO: 1993988 - DNA, 15 bp, Homo sapiens
ctttttataactggc

SEQ ID NO: 1993989 - DNA, 15 bp, Homo sapiens
tttttataactggct

SEQ ID NO: 1993990 - DNA, 15 bp, Homo sapiens
ttttataactggctt

SEQ ID NO: 1993991 - DNA, 15 bp, Homo sapiens
tttataactggcttg

SEQ ID NO: 1993992 - DNA, 15 bp, Homo sapiens
ttataactggcttgt

SEQ ID NO: 1993993 - DNA, 15 bp, Homo sapiens
tataactggcttgtt

SEQ ID NO: 1993994 - DNA, 15 bp, Homo sapiens
ataactggcttgttt

SEQ ID NO: 1993995 - DNA, 15 bp, Homo sapiens
taactggcttgtttc

SEQ ID NO: 1993996 - DNA, 15 bp, Homo sapiens
aactggcttgtttcc

SEQ ID NO: 1993997 - DNA, 15 bp, Homo sapiens
actggcttgtttccg

SEQ ID NO: 1993998 - DNA, 15 bp, Homo sapiens
ctggcttgtttccgt

SEQ ID NO: 1993999 - DNA, 15 bp, Homo sapiens
tggcttgtttccgtt

SEQ ID NO: 1994000 - DNA, 15 bp, Homo sapiens
ggcttgtttccgtta

SEQ ID NO: 1994001 - DNA, 15 bp, Homo sapiens
gcttgtttccgttag

SEQ ID NO: 1994002 - DNA, 15 bp, Homo sapiens
cttgtttccgttagt

SEQ ID NO: 1994003 - DNA, 15 bp, Homo sapiens
ttgtttccgttagtg

SEQ ID NO: 1994004 - DNA, 15 bp, Homo sapiens
tgtttccgttagtgt

SEQ ID NO: 1994005 - DNA, 15 bp, Homo sapiens
gtttccgttagtgta

SEQ ID NO: 1994006 - DNA, 15 bp, Homo sapiens
tttccgttagtgtaa

SEQ ID NO: 1994007 - DNA, 15 bp, Homo sapiens
ttccgttagtgtaat

SEQ ID NO: 1994008 - DNA, 15 bp, Homo sapiens
tccgttagtgtaatg

SEQ ID NO: 1994009 - DNA, 15 bp, Homo sapiens
ccgttagtgtaatgt

SEQ ID NO: 1994010 - DNA, 15 bp, Homo sapiens
cgttagtgtaatgtc

SEQ ID NO: 1994011 - DNA, 15 bp, Homo sapiens
gttagtgtaatgtct

SEQ ID NO: 1994012 - DNA, 15 bp, Homo sapiens
ttagtgtaatgtctt

SEQ ID NO: 1994013 - DNA, 15 bp, Homo sapiens
tagtgtaatgtcttc

SEQ ID NO: 1994014 - DNA, 15 bp, Homo sapiens
agtgtaatgtcttca

SEQ ID NO: 1994015 - DNA, 15 bp, Homo sapiens
gtgtaatgtcttcaa

SEQ ID NO: 1994016 - DNA, 15 bp, Homo sapiens
tgtaatgtcttcaag

SEQ ID NO: 1994017 - DNA, 15 bp, Homo sapiens
gtaatgtcttcaagg

SEQ ID NO: 1994018 - DNA, 15 bp, Homo sapiens
taatgtcttcaaggt

SEQ ID NO: 1994019 - DNA, 15 bp, Homo sapiens
aatgtcttcaaggtt

SEQ ID NO: 1994020 - DNA, 15 bp, Homo sapiens
atgtcttcaaggtta

SEQ ID NO: 1994021 - DNA, 15 bp, Homo sapiens
tgtcttcaaggttaa

SEQ ID NO: 1994022 - DNA, 15 bp, Homo sapiens
gtcttcaaggttaat

SEQ ID NO: 1994023 - DNA, 15 bp, Homo sapiens
tcttcaaggttaatc

SEQ ID NO: 1994024 - DNA, 15 bp, Homo sapiens
cttcaaggttaatcc

SEQ ID NO: 1994025 - DNA, 15 bp, Homo sapiens
ttcaaggttaatcca

SEQ ID NO: 1994026 - DNA, 15 bp, Homo sapiens
tcaaggttaatccac

SEQ ID NO: 1994027 - DNA, 15 bp, Homo sapiens
caaggttaatccaca

SEQ ID NO: 1994028 - DNA, 15 bp, Homo sapiens
aaggttaatccacat

SEQ ID NO: 1994029 - DNA, 15 bp, Homo sapiens
aggttaatccacatt

SEQ ID NO: 1994030 - DNA, 15 bp, Homo sapiens
ggttaatccacattg

SEQ ID NO: 1994031 - DNA, 15 bp, Homo sapiens
gttaatccacattgc

SEQ ID NO: 1994032 - DNA, 15 bp, Homo sapiens
ttaatccacattgca

SEQ ID NO: 1994033 - DNA, 15 bp, Homo sapiens
taatccacattgcag

SEQ ID NO: 1994034 - DNA, 15 bp, Homo sapiens
aatccacattgcagc

SEQ ID NO: 1994035 - DNA, 15 bp, Homo sapiens
atccacattgcagca

SEQ ID NO: 1994036 - DNA, 15 bp, Homo sapiens
tccacattgcagcat

SEQ ID NO: 1994037 - DNA, 15 bp, Homo sapiens
ccacattgcagcata

SEQ ID NO: 1994038 - DNA, 15 bp, Homo sapiens
cacattgcagcatat

SEQ ID NO: 1994039 - DNA, 15 bp, Homo sapiens
acattgcagcatatg

SEQ ID NO: 1994040 - DNA, 15 bp, Homo sapiens
cattgcagcatatgt

SEQ ID NO: 1994041 - DNA, 15 bp, Homo sapiens
attgcagcatatgtc

SEQ ID NO: 1994042 - DNA, 15 bp, Homo sapiens
ttgcagcatatgtca

SEQ ID NO: 1994043 - DNA, 15 bp, Homo sapiens
tgcagcatatgtcag

SEQ ID NO: 1994044 - DNA, 15 bp, Homo sapiens
gcagcatatgtcaga

SEQ ID NO: 1994045 - DNA, 15 bp, Homo sapiens
cagcatatgtcagaa

SEQ ID NO: 1994046 - DNA, 15 bp, Homo sapiens
agcatatgtcagaat

SEQ ID NO: 1994047 - DNA, 15 bp, Homo sapiens
gcatatgtcagaatt

SEQ ID NO: 1994048 - DNA, 15 bp, Homo sapiens
catatgtcagaattt

SEQ ID NO: 1994049 - DNA, 15 bp, Homo sapiens
atatgtcagaatttc

SEQ ID NO: 1994050 - DNA, 15 bp, Homo sapiens
tatgtcagaatttcc

SEQ ID NO: 1994051 - DNA, 15 bp, Homo sapiens
atgtcagaatttcct

SEQ ID NO: 1994052 - DNA, 15 bp, Homo sapiens
tgtcagaatttccta

SEQ ID NO: 1994053 - DNA, 15 bp, Homo sapiens
gtcagaatttcctac

SEQ ID NO: 1994054 - DNA, 15 bp, Homo sapiens
tcagaatttcctacc

SEQ ID NO: 1994055 - DNA, 15 bp, Homo sapiens
cagaatttcctacct

SEQ ID NO: 1994056 - DNA, 15 bp, Homo sapiens
agaatttcctacctt

SEQ ID NO: 1994057 - DNA, 15 bp, Homo sapiens
gaatttcctaccttt

SEQ ID NO: 1994058 - DNA, 15 bp, Homo sapiens
aatttcctacctttt

SEQ ID NO: 1994059 - DNA, 15 bp, Homo sapiens
atttcctacctttta

SEQ ID NO: 1994060 - DNA, 15 bp, Homo sapiens
tttcctaccttttaa

SEQ ID NO: 1994061 - DNA, 15 bp, Homo sapiens
ttcctaccttttaaa

SEQ ID NO: 1994062 - DNA, 15 bp, Homo sapiens
tcctaccttttaaag

SEQ ID NO: 1994063 - DNA, 15 bp, Homo sapiens
cctaccttttaaagg

SEQ ID NO: 1994064 - DNA, 15 bp, Homo sapiens
ctaccttttaaaggc

SEQ ID NO: 1994065 - DNA, 15 bp, Homo sapiens
taccttttaaaggct

SEQ ID NO: 1994066 - DNA, 15 bp, Homo sapiens
accttttaaaggctg

SEQ ID NO: 1994067 - DNA, 15 bp, Homo sapiens
ccttttaaaggctga

SEQ ID NO: 1994068 - DNA, 15 bp, Homo sapiens
cttttaaaggctgaa

SEQ ID NO: 1994069 - DNA, 15 bp, Homo sapiens
ttttaaaggctgaat

SEQ ID NO: 1994070 - DNA, 15 bp, Homo sapiens
tttaaaggctgaata

SEQ ID NO: 1994071 - DNA, 15 bp, Homo sapiens
ttaaaggctgaataa

SEQ ID NO: 1994072 - DNA, 15 bp, Homo sapiens
taaaggctgaataat

SEQ ID NO: 1994073 - DNA, 15 bp, Homo sapiens
aaaggctgaataata

SEQ ID NO: 1994074 - DNA, 15 bp, Homo sapiens
gctgaataatattct

SEQ ID NO: 1994075 - DNA, 15 bp, Homo sapiens
ctgaataatattctg

SEQ ID NO: 1994076 - DNA, 15 bp, Homo sapiens
tgaataatattctgt

SEQ ID NO: 1994077 - DNA, 15 bp, Homo sapiens
gaataatattctgtt

SEQ ID NO: 1994078 - DNA, 15 bp, Homo sapiens
aataatattctgtta

SEQ ID NO: 1994079 - DNA, 15 bp, Homo sapiens
taatattctgttatt

SEQ ID NO: 1994080 - DNA, 15 bp, Homo sapiens
aatattctgttattt

SEQ ID NO: 1994081 - DNA, 15 bp, Homo sapiens
atattctgttatttg

SEQ ID NO: 1994082 - DNA, 15 bp, Homo sapiens
tattctgttatttgt

SEQ ID NO: 1994083 - DNA, 15 bp, Homo sapiens
attctgttatttgtg

SEQ ID NO: 1994084 - DNA, 15 bp, Homo sapiens
ttctgttatttgtgt

SEQ ID NO: 1994085 - DNA, 15 bp, Homo sapiens
tctgttatttgtgta

SEQ ID NO: 1994086 - DNA, 15 bp, Homo sapiens
ctgttatttgtgtaa

SEQ ID NO: 1994087 - DNA, 15 bp, Homo sapiens
tgttatttgtgtaaa

SEQ ID NO: 1994088 - DNA, 15 bp, Homo sapiens
gttatttgtgtaaac

SEQ ID NO: 1994089 - DNA, 15 bp, Homo sapiens
ttatttgtgtaaacc

SEQ ID NO: 1994090 - DNA, 15 bp, Homo sapiens
tatttgtgtaaacca

SEQ ID NO: 1994091 - DNA, 15 bp, Homo sapiens
atttgtgtaaaccac

SEQ ID NO: 1994092 - DNA, 15 bp, Homo sapiens
tttgtgtaaaccaca

SEQ ID NO: 1994093 - DNA, 15 bp, Homo sapiens
ttgtgtaaaccacat

SEQ ID NO: 1994094 - DNA, 15 bp, Homo sapiens
tgtgtaaaccacatt

SEQ ID NO: 1994095 - DNA, 15 bp, Homo sapiens
gtgtaaaccacattt

SEQ ID NO: 1994096 - DNA, 15 bp, Homo sapiens
tgtaaaccacatttt

SEQ ID NO: 1994097 - DNA, 15 bp, Homo sapiens
gtaaaccacattttc

SEQ ID NO: 1994098 - DNA, 15 bp, Homo sapiens
taaaccacattttct

SEQ ID NO: 1994099 - DNA, 15 bp, Homo sapiens
aaaccacattttctt

SEQ ID NO: 1994100 - DNA, 15 bp, Homo sapiens
aaccacattttcttt

SEQ ID NO: 1994101 - DNA, 15 bp, Homo sapiens
tttctttatccattc

SEQ ID NO: 1994102 - DNA, 15 bp, Homo sapiens
tctttatccattcag

SEQ ID NO: 1994103 - DNA, 15 bp, Homo sapiens
ctttatccattcagg

SEQ ID NO: 1994104 - DNA, 15 bp, Homo sapiens
tttatccattcagga

SEQ ID NO: 1994105 - DNA, 15 bp, Homo sapiens
ttatccattcaggac

SEQ ID NO: 1994106 - DNA, 15 bp, Homo sapiens
tatccattcaggaca

SEQ ID NO: 1994107 - DNA, 15 bp, Homo sapiens
atccattcaggacat

SEQ ID NO: 1994108 - DNA, 15 bp, Homo sapiens
tccattcaggacatt

SEQ ID NO: 1994109 - DNA, 15 bp, Homo sapiens
ccattcaggacattt

SEQ ID NO: 1994110 - DNA, 15 bp, Homo sapiens
cattcaggacatttg

SEQ ID NO: 1994111 - DNA, 15 bp, Homo sapiens
attcaggacatttgg

SEQ ID NO: 1994112 - DNA, 15 bp, Homo sapiens
ttcaggacatttggg

SEQ ID NO: 1994113 - DNA, 15 bp, Homo sapiens
tcaggacatttgggt

SEQ ID NO: 1994114 - DNA, 15 bp, Homo sapiens
caggacatttgggtt

SEQ ID NO: 1994115 - DNA, 15 bp, Homo sapiens
aggacatttgggtta

SEQ ID NO: 1994116 - DNA, 15 bp, Homo sapiens
ggacatttgggttac

SEQ ID NO: 1994117 - DNA, 15 bp, Homo sapiens
gacatttgggttact

SEQ ID NO: 1994118 - DNA, 15 bp, Homo sapiens
acatttgggttactt

SEQ ID NO: 1994119 - DNA, 15 bp, Homo sapiens
catttgggttacttt

SEQ ID NO: 1994120 - DNA, 15 bp, Homo sapiens
atttgggttactttc

SEQ ID NO: 1994121 - DNA, 15 bp, Homo sapiens
tttgggttactttca

SEQ ID NO: 1994122 - DNA, 15 bp, Homo sapiens
ttgggttactttcac

SEQ ID NO: 1994123 - DNA, 15 bp, Homo sapiens
tgggttactttcacc

SEQ ID NO: 1994124 - DNA, 15 bp, Homo sapiens
gggttactttcacct

SEQ ID NO: 1994125 - DNA, 15 bp, Homo sapiens
ggttactttcacctt

SEQ ID NO: 1994126 - DNA, 15 bp, Homo sapiens
gttactttcaccttt

SEQ ID NO: 1994127 - DNA, 15 bp, Homo sapiens
ttactttcacctttt

SEQ ID NO: 1994128 - DNA, 15 bp, Homo sapiens
tactttcaccttttg

SEQ ID NO: 1994129 - DNA, 15 bp, Homo sapiens
actttcaccttttgg

SEQ ID NO: 1994130 - DNA, 15 bp, Homo sapiens
ctttcaccttttggt

SEQ ID NO: 1994131 - DNA, 15 bp, Homo sapiens
tttcaccttttggtt

SEQ ID NO: 1994132 - DNA, 15 bp, Homo sapiens
ttcaccttttggtta

SEQ ID NO: 1994133 - DNA, 15 bp, Homo sapiens
tcaccttttggttat

SEQ ID NO: 1994134 - DNA, 15 bp, Homo sapiens
caccttttggttatt

SEQ ID NO: 1994135 - DNA, 15 bp, Homo sapiens
accttttggttattg

SEQ ID NO: 1994136 - DNA, 15 bp, Homo sapiens
ccttttggttattgt

SEQ ID NO: 1994137 - DNA, 15 bp, Homo sapiens
cttttggttattgta

SEQ ID NO: 1994138 - DNA, 15 bp, Homo sapiens
ttttggttattgtaa

SEQ ID NO: 1994139 - DNA, 15 bp, Homo sapiens
tttggttattgtaaa

SEQ ID NO: 1994140 - DNA, 15 bp, Homo sapiens
ttggttattgtaaat

SEQ ID NO: 1994141 - DNA, 15 bp, Homo sapiens
tggttattgtaaata

SEQ ID NO: 1994142 - DNA, 15 bp, Homo sapiens
ggttattgtaaataa

SEQ ID NO: 1994143 - DNA, 15 bp, Homo sapiens
gttattgtaaataat

SEQ ID NO: 1994144 - DNA, 15 bp, Homo sapiens
ttattgtaaataatg

SEQ ID NO: 1994145 - DNA, 15 bp, Homo sapiens
tattgtaaataatgc

SEQ ID NO: 1994146 - DNA, 15 bp, Homo sapiens
gtaaataatgctgcc

SEQ ID NO: 1994147 - DNA, 15 bp, Homo sapiens
taaataatgctgcca

SEQ ID NO: 1994148 - DNA, 15 bp, Homo sapiens
aaataatgctgccat

SEQ ID NO: 1994149 - DNA, 15 bp, Homo sapiens
aataatgctgccatg

SEQ ID NO: 1994150 - DNA, 15 bp, Homo sapiens
ataatgctgccatga

SEQ ID NO: 1994151 - DNA, 15 bp, Homo sapiens
taatgctgccatgaa

SEQ ID NO: 1994152 - DNA, 15 bp, Homo sapiens
aatgctgccatgaac

SEQ ID NO: 1994153 - DNA, 15 bp, Homo sapiens
atgctgccatgaaca

SEQ ID NO: 1994154 - DNA, 15 bp, Homo sapiens
tgctgccatgaacat

SEQ ID NO: 1994155 - DNA, 15 bp, Homo sapiens
gctgccatgaacatg

SEQ ID NO: 1994156 - DNA, 15 bp, Homo sapiens
ctgccatgaacatgg

SEQ ID NO: 1994157 - DNA, 15 bp, Homo sapiens
tgccatgaacatggg

SEQ ID NO: 1994158 - DNA, 15 bp, Homo sapiens
gccatgaacatgggt

SEQ ID NO: 1994159 - DNA, 15 bp, Homo sapiens
ccatgaacatgggtg

SEQ ID NO: 1994160 - DNA, 15 bp, Homo sapiens
catgaacatgggtgt

SEQ ID NO: 1994161 - DNA, 15 bp, Homo sapiens
atgaacatgggtgtg

SEQ ID NO: 1994162 - DNA, 15 bp, Homo sapiens
tgaacatgggtgtgc

SEQ ID NO: 1994163 - DNA, 15 bp, Homo sapiens
gaacatgggtgtgca

SEQ ID NO: 1994164 - DNA, 15 bp, Homo sapiens
aacatgggtgtgcag

SEQ ID NO: 1994165 - DNA, 15 bp, Homo sapiens
acatgggtgtgcaga

SEQ ID NO: 1994166 - DNA, 15 bp, Homo sapiens
catgggtgtgcagat

SEQ ID NO: 1994167 - DNA, 15 bp, Homo sapiens
atgggtgtgcagata

SEQ ID NO: 1994168 - DNA, 15 bp, Homo sapiens
tgggtgtgcagatac

SEQ ID NO: 1994169 - DNA, 15 bp, Homo sapiens
gggtgtgcagatacc

SEQ ID NO: 1994170 - DNA, 15 bp, Homo sapiens
ggtgtgcagatacca

SEQ ID NO: 1994171 - DNA, 15 bp, Homo sapiens
gtgtgcagataccac

SEQ ID NO: 1994172 - DNA, 15 bp, Homo sapiens
tgtgcagataccact

SEQ ID NO: 1994173 - DNA, 15 bp, Homo sapiens
gtgcagataccactt

SEQ ID NO: 1994174 - DNA, 15 bp, Homo sapiens
tgcagataccacttc

SEQ ID NO: 1994175 - DNA, 15 bp, Homo sapiens
gcagataccacttca

SEQ ID NO: 1994176 - DNA, 15 bp, Homo sapiens
cagataccacttcaa

SEQ ID NO: 1994177 - DNA, 15 bp, Homo sapiens
agataccacttcaag

SEQ ID NO: 1994178 - DNA, 15 bp, Homo sapiens
gataccacttcaaga

SEQ ID NO: 1994179 - DNA, 15 bp, Homo sapiens
ataccacttcaagac

SEQ ID NO: 1994180 - DNA, 15 bp, Homo sapiens
taccacttcaagacc

SEQ ID NO: 1994181 - DNA, 15 bp, Homo sapiens
accacttcaagaccc

SEQ ID NO: 1994182 - DNA, 15 bp, Homo sapiens
ccacttcaagaccct

SEQ ID NO: 1994183 - DNA, 15 bp, Homo sapiens
cacttcaagaccctg

SEQ ID NO: 1994184 - DNA, 15 bp, Homo sapiens
acttcaagaccctgc

SEQ ID NO: 1994185 - DNA, 15 bp, Homo sapiens
cttcaagaccctgct

SEQ ID NO: 1994186 - DNA, 15 bp, Homo sapiens
ttcaagaccctgctt

SEQ ID NO: 1994187 - DNA, 15 bp, Homo sapiens
tcaagaccctgcttt

SEQ ID NO: 1994188 - DNA, 15 bp, Homo sapiens
caagaccctgctttc

SEQ ID NO: 1994189 - DNA, 15 bp, Homo sapiens
aagaccctgctttca

SEQ ID NO: 1994190 - DNA, 15 bp, Homo sapiens
agaccctgctttcag

SEQ ID NO: 1994191 - DNA, 15 bp, Homo sapiens
gaccctgctttcagt

SEQ ID NO: 1994192 - DNA, 15 bp, Homo sapiens
accctgctttcagtt

SEQ ID NO: 1994193 - DNA, 15 bp, Homo sapiens
ccctgctttcagttc

SEQ ID NO: 1994194 - DNA, 15 bp, Homo sapiens
cctgctttcagttct

SEQ ID NO: 1994195 - DNA, 15 bp, Homo sapiens
ctgctttcagttctt

SEQ ID NO: 1994196 - DNA, 15 bp, Homo sapiens
tgctttcagttcttt

SEQ ID NO: 1994197 - DNA, 15 bp, Homo sapiens
gctttcagttctttt

SEQ ID NO: 1994198 - DNA, 15 bp, Homo sapiens
ctttcagttcttttg

SEQ ID NO: 1994199 - DNA, 15 bp, Homo sapiens
tttcagttcttttgc

SEQ ID NO: 1994200 - DNA, 15 bp, Homo sapiens
ttcagttcttttgca

SEQ ID NO: 1994201 - DNA, 15 bp, Homo sapiens
tcagttcttttgcat

SEQ ID NO: 1994202 - DNA, 15 bp, Homo sapiens
cagttcttttgcata

SEQ ID NO: 1994203 - DNA, 15 bp, Homo sapiens
agttcttttgcatat

SEQ ID NO: 1994204 - DNA, 15 bp, Homo sapiens
gttcttttgcatatg

SEQ ID NO: 1994205 - DNA, 15 bp, Homo sapiens
ttcttttgcatatgt

SEQ ID NO: 1994206 - DNA, 15 bp, Homo sapiens
tcttttgcatatgta

SEQ ID NO: 1994207 - DNA, 15 bp, Homo sapiens
cttttgcatatgtac

SEQ ID NO: 1994208 - DNA, 15 bp, Homo sapiens
ttttgcatatgtacc

SEQ ID NO: 1994209 - DNA, 15 bp, Homo sapiens
tttgcatatgtacct

SEQ ID NO: 1994210 - DNA, 15 bp, Homo sapiens
ttgcatatgtaccta

SEQ ID NO: 1994211 - DNA, 15 bp, Homo sapiens
tgcatatgtacctag

SEQ ID NO: 1994212 - DNA, 15 bp, Homo sapiens
gcatatgtacctaga

SEQ ID NO: 1994213 - DNA, 15 bp, Homo sapiens
catatgtacctagaa

SEQ ID NO: 1994214 - DNA, 15 bp, Homo sapiens
atatgtacctagaag

SEQ ID NO: 1994215 - DNA, 15 bp, Homo sapiens
tatgtacctagaagt

SEQ ID NO: 1994216 - DNA, 15 bp, Homo sapiens
atgtacctagaagta

SEQ ID NO: 1994217 - DNA, 15 bp, Homo sapiens
tgtacctagaagtag

SEQ ID NO: 1994218 - DNA, 15 bp, Homo sapiens
gtacctagaagtagg

SEQ ID NO: 1994219 - DNA, 15 bp, Homo sapiens
tacctagaagtaggg

SEQ ID NO: 1994220 - DNA, 15 bp, Homo sapiens
acctagaagtagggt

SEQ ID NO: 1994221 - DNA, 15 bp, Homo sapiens
cctagaagtagggtt

SEQ ID NO: 1994222 - DNA, 15 bp, Homo sapiens
ctagaagtagggttg

SEQ ID NO: 1994223 - DNA, 15 bp, Homo sapiens
tagaagtagggttgc

SEQ ID NO: 1994224 - DNA, 15 bp, Homo sapiens
agaagtagggttgct

SEQ ID NO: 1994225 - DNA, 15 bp, Homo sapiens
gaagtagggttgctg

SEQ ID NO: 1994226 - DNA, 15 bp, Homo sapiens
aagtagggttgctgg

SEQ ID NO: 1994227 - DNA, 15 bp, Homo sapiens
agtagggttgctgga

SEQ ID NO: 1994228 - DNA, 15 bp, Homo sapiens
gtagggttgctggat

SEQ ID NO: 1994229 - DNA, 15 bp, Homo sapiens
tagggttgctggatc

SEQ ID NO: 1994230 - DNA, 15 bp, Homo sapiens
agggttgctggatca

SEQ ID NO: 1994231 - DNA, 15 bp, Homo sapiens
gggttgctggatcat

SEQ ID NO: 1994232 - DNA, 15 bp, Homo sapiens
ggttgctggatcata

SEQ ID NO: 1994233 - DNA, 15 bp, Homo sapiens
gttgctggatcatat

SEQ ID NO: 1994234 - DNA, 15 bp, Homo sapiens
ttgctggatcatatg

SEQ ID NO: 1994235 - DNA, 15 bp, Homo sapiens
tgctggatcatatgg

SEQ ID NO: 1994236 - DNA, 15 bp, Homo sapiens
gctggatcatatggt

SEQ ID NO: 1994237 - DNA, 15 bp, Homo sapiens
ctggatcatatggta

SEQ ID NO: 1994238 - DNA, 15 bp, Homo sapiens
tggatcatatggtaa

SEQ ID NO: 1994239 - DNA, 15 bp, Homo sapiens
ggatcatatggtaat

SEQ ID NO: 1994240 - DNA, 15 bp, Homo sapiens
gatcatatggtaatt

SEQ ID NO: 1994241 - DNA, 15 bp, Homo sapiens
atcatatggtaattc

SEQ ID NO: 1994242 - DNA, 15 bp, Homo sapiens
tcatatggtaattct

SEQ ID NO: 1994243 - DNA, 15 bp, Homo sapiens
catatggtaattcta

SEQ ID NO: 1994244 - DNA, 15 bp, Homo sapiens
atatggtaattctat

SEQ ID NO: 1994245 - DNA, 15 bp, Homo sapiens
tatggtaattctatt

SEQ ID NO: 1994246 - DNA, 15 bp, Homo sapiens
atggtaattctattt

SEQ ID NO: 1994247 - DNA, 15 bp, Homo sapiens
tggtaattctatttg

SEQ ID NO: 1994248 - DNA, 15 bp, Homo sapiens
ggtaattctatttgt

SEQ ID NO: 1994249 - DNA, 15 bp, Homo sapiens
gtaattctatttgta

SEQ ID NO: 1994250 - DNA, 15 bp, Homo sapiens
taattctatttgtaa

SEQ ID NO: 1994251 - DNA, 15 bp, Homo sapiens
aattctatttgtaat

SEQ ID NO: 1994252 - DNA, 15 bp, Homo sapiens
attctatttgtaata

SEQ ID NO: 1994253 - DNA, 15 bp, Homo sapiens
ttctatttgtaatat

SEQ ID NO: 1994254 - DNA, 15 bp, Homo sapiens
tctatttgtaatatg

SEQ ID NO: 1994255 - DNA, 15 bp, Homo sapiens
ctatttgtaatatgt

SEQ ID NO: 1994256 - DNA, 15 bp, Homo sapiens
tatttgtaatatgtt

SEQ ID NO: 1994257 - DNA, 15 bp, Homo sapiens
atttgtaatatgttg

SEQ ID NO: 1994258 - DNA, 15 bp, Homo sapiens
tttgtaatatgttga

SEQ ID NO: 1994259 - DNA, 15 bp, Homo sapiens
ttgtaatatgttgag

SEQ ID NO: 1994260 - DNA, 15 bp, Homo sapiens
tgtaatatgttgagg

SEQ ID NO: 1994261 - DNA, 15 bp, Homo sapiens
gtaatatgttgagga

SEQ ID NO: 1994262 - DNA, 15 bp, Homo sapiens
taatatgttgaggaa

SEQ ID NO: 1994263 - DNA, 15 bp, Homo sapiens
aatatgttgaggaac

SEQ ID NO: 1994264 - DNA, 15 bp, Homo sapiens
atatgttgaggaact

SEQ ID NO: 1994265 - DNA, 15 bp, Homo sapiens
tatgttgaggaactg

SEQ ID NO: 1994266 - DNA, 15 bp, Homo sapiens
atgttgaggaactgt

SEQ ID NO: 1994267 - DNA, 15 bp, Homo sapiens
tgttgaggaactgtt

SEQ ID NO: 1994268 - DNA, 15 bp, Homo sapiens
gttgaggaactgttt

SEQ ID NO: 1994269 - DNA, 15 bp, Homo sapiens
ttgaggaactgtttt

SEQ ID NO: 1994270 - DNA, 15 bp, Homo sapiens
tgaggaactgtttta

SEQ ID NO: 1994271 - DNA, 15 bp, Homo sapiens
gaggaactgttttac

SEQ ID NO: 1994272 - DNA, 15 bp, Homo sapiens
aggaactgttttact

SEQ ID NO: 1994273 - DNA, 15 bp, Homo sapiens
ggaactgttttactg

SEQ ID NO: 1994274 - DNA, 15 bp, Homo sapiens
gaactgttttactgt

SEQ ID NO: 1994275 - DNA, 15 bp, Homo sapiens
aactgttttactgtt

SEQ ID NO: 1994276 - DNA, 15 bp, Homo sapiens
actgttttactgttt

SEQ ID NO: 1994277 - DNA, 15 bp, Homo sapiens
ctgttttactgtttt

SEQ ID NO: 1994278 - DNA, 15 bp, Homo sapiens
tgttttactgttttc

SEQ ID NO: 1994279 - DNA, 15 bp, Homo sapiens
gttttactgttttcc

SEQ ID NO: 1994280 - DNA, 15 bp, Homo sapiens
ttttactgttttcca

SEQ ID NO: 1994281 - DNA, 15 bp, Homo sapiens
tttactgttttccat

SEQ ID NO: 1994282 - DNA, 15 bp, Homo sapiens
ttactgttttccata

SEQ ID NO: 1994283 - DNA, 15 bp, Homo sapiens
actgttttccatagg

SEQ ID NO: 1994284 - DNA, 15 bp, Homo sapiens
ctgttttccataggt

SEQ ID NO: 1994285 - DNA, 15 bp, Homo sapiens
tgttttccataggta

SEQ ID NO: 1994286 - DNA, 15 bp, Homo sapiens
gttttccataggtat

SEQ ID NO: 1994287 - DNA, 15 bp, Homo sapiens
ttttccataggtata

SEQ ID NO: 1994288 - DNA, 15 bp, Homo sapiens
tttccataggtatat

SEQ ID NO: 1994289 - DNA, 15 bp, Homo sapiens
ttccataggtatatg

SEQ ID NO: 1994290 - DNA, 15 bp, Homo sapiens
tccataggtatatgc

SEQ ID NO: 1994291 - DNA, 15 bp, Homo sapiens
ccataggtatatgca

SEQ ID NO: 1994292 - DNA, 15 bp, Homo sapiens
cataggtatatgcac

SEQ ID NO: 1994293 - DNA, 15 bp, Homo sapiens
ataggtatatgcact

SEQ ID NO: 1994294 - DNA, 15 bp, Homo sapiens
taggtatatgcacta

SEQ ID NO: 1994295 - DNA, 15 bp, Homo sapiens
aggtatatgcactat

SEQ ID NO: 1994296 - DNA, 15 bp, Homo sapiens
ggtatatgcactatt

SEQ ID NO: 1994297 - DNA, 15 bp, Homo sapiens
gtatatgcactattt

SEQ ID NO: 1994298 - DNA, 15 bp, Homo sapiens
tatatgcactatttt

SEQ ID NO: 1994299 - DNA, 15 bp, Homo sapiens
atatgcactatttta

SEQ ID NO: 1994300 - DNA, 15 bp, Homo sapiens
tatgcactattttac

SEQ ID NO: 1994301 - DNA, 15 bp, Homo sapiens
atgcactattttact

SEQ ID NO: 1994302 - DNA, 15 bp, Homo sapiens
tgcactattttactt

SEQ ID NO: 1994303 - DNA, 15 bp, Homo sapiens
gcactattttacttt

SEQ ID NO: 1994304 - DNA, 15 bp, Homo sapiens
cactattttactttc

SEQ ID NO: 1994305 - DNA, 15 bp, Homo sapiens
actattttactttcc

SEQ ID NO: 1994306 - DNA, 15 bp, Homo sapiens
ctattttactttccc

SEQ ID NO: 1994307 - DNA, 15 bp, Homo sapiens
tattttactttccca

SEQ ID NO: 1994308 - DNA, 15 bp, Homo sapiens
attttactttcccat

SEQ ID NO: 1994309 - DNA, 15 bp, Homo sapiens
ttttactttcccatc

SEQ ID NO: 1994310 - DNA, 15 bp, Homo sapiens
tttactttcccatca

SEQ ID NO: 1994311 - DNA, 15 bp, Homo sapiens
ttactttcccatcag

SEQ ID NO: 1994312 - DNA, 15 bp, Homo sapiens
tactttcccatcagt

SEQ ID NO: 1994313 - DNA, 15 bp, Homo sapiens
actttcccatcagta

SEQ ID NO: 1994314 - DNA, 15 bp, Homo sapiens
ctttcccatcagtag

SEQ ID NO: 1994315 - DNA, 15 bp, Homo sapiens
tttcccatcagtagt

SEQ ID NO: 1994316 - DNA, 15 bp, Homo sapiens
ttcccatcagtagtg

SEQ ID NO: 1994317 - DNA, 15 bp, Homo sapiens
tcccatcagtagtgc

SEQ ID NO: 1994318 - DNA, 15 bp, Homo sapiens
cccatcagtagtgca

SEQ ID NO: 1994319 - DNA, 15 bp, Homo sapiens
ccatcagtagtgcac

SEQ ID NO: 1994320 - DNA, 15 bp, Homo sapiens
catcagtagtgcaca

SEQ ID NO: 1994321 - DNA, 15 bp, Homo sapiens
atcagtagtgcacaa

SEQ ID NO: 1994322 - DNA, 15 bp, Homo sapiens
tcagtagtgcacaag

SEQ ID NO: 1994323 - DNA, 15 bp, Homo sapiens
cagtagtgcacaagg

SEQ ID NO: 1994324 - DNA, 15 bp, Homo sapiens
agtagtgcacaaggg

SEQ ID NO: 1994325 - DNA, 15 bp, Homo sapiens
gtagtgcacaagggt

SEQ ID NO: 1994326 - DNA, 15 bp, Homo sapiens
tagtgcacaagggtt

SEQ ID NO: 1994327 - DNA, 15 bp, Homo sapiens
agtgcacaagggttc

SEQ ID NO: 1994328 - DNA, 15 bp, Homo sapiens
gtgcacaagggttcc

SEQ ID NO: 1994329 - DNA, 15 bp, Homo sapiens
ttccaatttctccat

SEQ ID NO: 1994330 - DNA, 15 bp, Homo sapiens
tccaatttctccata

SEQ ID NO: 1994331 - DNA, 15 bp, Homo sapiens
ccaatttctccatat

SEQ ID NO: 1994332 - DNA, 15 bp, Homo sapiens
caatttctccatatc

SEQ ID NO: 1994333 - DNA, 15 bp, Homo sapiens
aatttctccatatcc

SEQ ID NO: 1994334 - DNA, 15 bp, Homo sapiens
atttctccatatcct

SEQ ID NO: 1994335 - DNA, 15 bp, Homo sapiens
tttctccatatcctc

SEQ ID NO: 1994336 - DNA, 15 bp, Homo sapiens
ttctccatatcctca

SEQ ID NO: 1994337 - DNA, 15 bp, Homo sapiens
tctccatatcctcat

SEQ ID NO: 1994338 - DNA, 15 bp, Homo sapiens
ctccatatcctcatt

SEQ ID NO: 1994339 - DNA, 15 bp, Homo sapiens
tccatatcctcattt

SEQ ID NO: 1994340 - DNA, 15 bp, Homo sapiens
ccatatcctcattta

SEQ ID NO: 1994341 - DNA, 15 bp, Homo sapiens
catatcctcatttac

SEQ ID NO: 1994342 - DNA, 15 bp, Homo sapiens
atatcctcatttacg

SEQ ID NO: 1994343 - DNA, 15 bp, Homo sapiens
tatcctcatttacgt

SEQ ID NO: 1994344 - DNA, 15 bp, Homo sapiens
atcctcatttacgtt

SEQ ID NO: 1994345 - DNA, 15 bp, Homo sapiens
tcctcatttacgttt

SEQ ID NO: 1994346 - DNA, 15 bp, Homo sapiens
cctcatttacgtttg

SEQ ID NO: 1994347 - DNA, 15 bp, Homo sapiens
ctcatttacgtttgt

SEQ ID NO: 1994348 - DNA, 15 bp, Homo sapiens
tcatttacgtttgtt

SEQ ID NO: 1994349 - DNA, 15 bp, Homo sapiens
catttacgtttgtta

SEQ ID NO: 1994350 - DNA, 15 bp, Homo sapiens
atttacgtttgttat

SEQ ID NO: 1994351 - DNA, 15 bp, Homo sapiens
tttacgtttgttatt

SEQ ID NO: 1994352 - DNA, 15 bp, Homo sapiens
ttacgtttgttattt

SEQ ID NO: 1994353 - DNA, 15 bp, Homo sapiens
tacgtttgttatttt

SEQ ID NO: 1994354 - DNA, 15 bp, Homo sapiens
acgtttgttattttg

SEQ ID NO: 1994355 - DNA, 15 bp, Homo sapiens
cgtttgttattttgt

SEQ ID NO: 1994356 - DNA, 15 bp, Homo sapiens
gtttgttattttgtg

SEQ ID NO: 1994357 - DNA, 15 bp, Homo sapiens
tttgttattttgtgt

SEQ ID NO: 1994358 - DNA, 15 bp, Homo sapiens
ttgttattttgtgtc

SEQ ID NO: 1994359 - DNA, 15 bp, Homo sapiens
tgttattttgtgtct

SEQ ID NO: 1994360 - DNA, 15 bp, Homo sapiens
gttattttgtgtctt

SEQ ID NO: 1994361 - DNA, 15 bp, Homo sapiens
ttattttgtgtcttt

SEQ ID NO: 1994362 - DNA, 15 bp, Homo sapiens
tattttgtgtctttt

SEQ ID NO: 1994363 - DNA, 15 bp, Homo sapiens
attttgtgtcttttt

SEQ ID NO: 1994364 - DNA, 15 bp, Homo sapiens
ttttgtgtctttttt

SEQ ID NO: 1994365 - DNA, 15 bp, Homo sapiens
tttgtgtcttttttt

SEQ ID NO: 1994366 - DNA, 15 bp, Homo sapiens
ttgtgtctttttttt

SEQ ID NO: 1994367 - DNA, 15 bp, Homo sapiens
tgtgtcttttttttt

SEQ ID NO: 1994368 - DNA, 15 bp, Homo sapiens
gtgtcttttttttta

SEQ ID NO: 1994369 - DNA, 15 bp, Homo sapiens
tgtctttttttttat

SEQ ID NO: 1994370 - DNA, 15 bp, Homo sapiens
gtctttttttttatt

SEQ ID NO: 1994371 - DNA, 15 bp, Homo sapiens
tctttttttttattt

SEQ ID NO: 1994372 - DNA, 15 bp, Homo sapiens
ctttttttttatttt

SEQ ID NO: 1994373 - DNA, 15 bp, Homo sapiens
ttttttttatttttt

SEQ ID NO: 1994374 - DNA, 15 bp, Homo sapiens
ttttttatttttttg

SEQ ID NO: 1994375 - DNA, 15 bp, Homo sapiens
ctgttgcccaggctt

SEQ ID NO: 1994376 - DNA, 15 bp, Homo sapiens
tgttgcccaggcttg

SEQ ID NO: 1994377 - DNA, 15 bp, Homo sapiens
gttgcccaggcttga

SEQ ID NO: 1994378 - DNA, 15 bp, Homo sapiens
ttgcccaggcttgaa

SEQ ID NO: 1994379 - DNA, 15 bp, Homo sapiens
tgcccaggcttgaat

SEQ ID NO: 1994380 - DNA, 15 bp, Homo sapiens
gcccaggcttgaatg

SEQ ID NO: 1994381 - DNA, 15 bp, Homo sapiens
cccaggcttgaatgc

SEQ ID NO: 1994382 - DNA, 15 bp, Homo sapiens
ccaggcttgaatgca

SEQ ID NO: 1994383 - DNA, 15 bp, Homo sapiens
caggcttgaatgcag

SEQ ID NO: 1994384 - DNA, 15 bp, Homo sapiens
aggcttgaatgcagt

SEQ ID NO: 1994385 - DNA, 15 bp, Homo sapiens
ggcttgaatgcagta

SEQ ID NO: 1994386 - DNA, 15 bp, Homo sapiens
gcttgaatgcagtag

SEQ ID NO: 1994387 - DNA, 15 bp, Homo sapiens
cttgaatgcagtagt

SEQ ID NO: 1994388 - DNA, 15 bp, Homo sapiens
ttgaatgcagtagtg

SEQ ID NO: 1994389 - DNA, 15 bp, Homo sapiens
tgaatgcagtagtgt

SEQ ID NO: 1994390 - DNA, 15 bp, Homo sapiens
gaatgcagtagtgtg

SEQ ID NO: 1994391 - DNA, 15 bp, Homo sapiens
aatgcagtagtgtga

SEQ ID NO: 1994392 - DNA, 15 bp, Homo sapiens
atgcagtagtgtgat

SEQ ID NO: 1994393 - DNA, 15 bp, Homo sapiens
gcagtagtgtgatct

SEQ ID NO: 1994394 - DNA, 15 bp, Homo sapiens
cagtagtgtgatctg

SEQ ID NO: 1994395 - DNA, 15 bp, Homo sapiens
agtagtgtgatctgg

SEQ ID NO: 1994396 - DNA, 15 bp, Homo sapiens
gtagtgtgatctggg

SEQ ID NO: 1994397 - DNA, 15 bp, Homo sapiens
tagtgtgatctgggc

SEQ ID NO: 1994398 - DNA, 15 bp, Homo sapiens
agtgtgatctgggct

SEQ ID NO: 1994399 - DNA, 15 bp, Homo sapiens
gtgtgatctgggctc

SEQ ID NO: 1994400 - DNA, 15 bp, Homo sapiens
tgatctgggctcacc

SEQ ID NO: 1994401 - DNA, 15 bp, Homo sapiens
gatctgggctcaccg

SEQ ID NO: 1994402 - DNA, 15 bp, Homo sapiens
atctgggctcaccgc

SEQ ID NO: 1994403 - DNA, 15 bp, Homo sapiens
tctgggctcaccgca

SEQ ID NO: 1994404 - DNA, 15 bp, Homo sapiens
ctgggctcaccgcaa

SEQ ID NO: 1994405 - DNA, 15 bp, Homo sapiens
tgggctcaccgcaac

SEQ ID NO: 1994406 - DNA, 15 bp, Homo sapiens
gggctcaccgcaacc

SEQ ID NO: 1994407 - DNA, 15 bp, Homo sapiens
gctcaccgcaacctc

SEQ ID NO: 1994408 - DNA, 15 bp, Homo sapiens
ctcaccgcaacctcc

SEQ ID NO: 1994409 - DNA, 15 bp, Homo sapiens
tcaccgcaacctccg

SEQ ID NO: 1994410 - DNA, 15 bp, Homo sapiens
caccgcaacctccgc

SEQ ID NO: 1994411 - DNA, 15 bp, Homo sapiens
accgcaacctccgcc

SEQ ID NO: 1994412 - DNA, 15 bp, Homo sapiens
ccgcaacctccgcct

SEQ ID NO: 1994413 - DNA, 15 bp, Homo sapiens
cgcaacctccgcctc

SEQ ID NO: 1994414 - DNA, 15 bp, Homo sapiens
gttcaagcgattctg

SEQ ID NO: 1994415 - DNA, 15 bp, Homo sapiens
ttcaagcgattctgc

SEQ ID NO: 1994416 - DNA, 15 bp, Homo sapiens
tcaagcgattctgct

SEQ ID NO: 1994417 - DNA, 15 bp, Homo sapiens
caagcgattctgctg

SEQ ID NO: 1994418 - DNA, 15 bp, Homo sapiens
aagcgattctgctgc

SEQ ID NO: 1994419 - DNA, 15 bp, Homo sapiens
agcgattctgctgcc

SEQ ID NO: 1994420 - DNA, 15 bp, Homo sapiens
gcgattctgctgcct

SEQ ID NO: 1994421 - DNA, 15 bp, Homo sapiens
cgattctgctgcctt

SEQ ID NO: 1994422 - DNA, 15 bp, Homo sapiens
gattctgctgccttg

SEQ ID NO: 1994423 - DNA, 15 bp, Homo sapiens
attctgctgccttgg

SEQ ID NO: 1994424 - DNA, 15 bp, Homo sapiens
ttctgctgccttggc

SEQ ID NO: 1994425 - DNA, 15 bp, Homo sapiens
tctgctgccttggcc

SEQ ID NO: 1994426 - DNA, 15 bp, Homo sapiens
ctgctgccttggcct

SEQ ID NO: 1994427 - DNA, 15 bp, Homo sapiens
tgctgccttggcctc

SEQ ID NO: 1994428 - DNA, 15 bp, Homo sapiens
gctgccttggcctcc

SEQ ID NO: 1994429 - DNA, 15 bp, Homo sapiens
tgccttggcctccct

SEQ ID NO: 1994430 - DNA, 15 bp, Homo sapiens
gccttggcctcccta

SEQ ID NO: 1994431 - DNA, 15 bp, Homo sapiens
ccttggcctccctag

SEQ ID NO: 1994432 - DNA, 15 bp, Homo sapiens
cttggcctccctagt

SEQ ID NO: 1994433 - DNA, 15 bp, Homo sapiens
ttggcctccctagta

SEQ ID NO: 1994434 - DNA, 15 bp, Homo sapiens
tggcctccctagtag

SEQ ID NO: 1994435 - DNA, 15 bp, Homo sapiens
ggcctccctagtagc

SEQ ID NO: 1994436 - DNA, 15 bp, Homo sapiens
gcctccctagtagct

SEQ ID NO: 1994437 - DNA, 15 bp, Homo sapiens
cctccctagtagctg

SEQ ID NO: 1994438 - DNA, 15 bp, Homo sapiens
ctccctagtagctgg

SEQ ID NO: 1994439 - DNA, 15 bp, Homo sapiens
tccctagtagctggg

SEQ ID NO: 1994440 - DNA, 15 bp, Homo sapiens
ccctagtagctggga

SEQ ID NO: 1994441 - DNA, 15 bp, Homo sapiens
cctagtagctgggac

SEQ ID NO: 1994442 - DNA, 15 bp, Homo sapiens
ctagtagctgggact

SEQ ID NO: 1994443 - DNA, 15 bp, Homo sapiens
tagtagctgggacta

SEQ ID NO: 1994444 - DNA, 15 bp, Homo sapiens
ctgggactactggca

SEQ ID NO: 1994445 - DNA, 15 bp, Homo sapiens
tgggactactggcac

SEQ ID NO: 1994446 - DNA, 15 bp, Homo sapiens
gggactactggcacc

SEQ ID NO: 1994447 - DNA, 15 bp, Homo sapiens
ggactactggcacct

SEQ ID NO: 1994448 - DNA, 15 bp, Homo sapiens
gactactggcacctg

SEQ ID NO: 1994449 - DNA, 15 bp, Homo sapiens
actactggcacctgc

SEQ ID NO: 1994450 - DNA, 15 bp, Homo sapiens
ctactggcacctgcc

SEQ ID NO: 1994451 - DNA, 15 bp, Homo sapiens
tactggcacctgcca

SEQ ID NO: 1994452 - DNA, 15 bp, Homo sapiens
actggcacctgccac

SEQ ID NO: 1994453 - DNA, 15 bp, Homo sapiens
ctggcacctgccacc

SEQ ID NO: 1994454 - DNA, 15 bp, Homo sapiens
ggcacctgccaccat

SEQ ID NO: 1994455 - DNA, 15 bp, Homo sapiens
gcacctgccaccatg

SEQ ID NO: 1994456 - DNA, 15 bp, Homo sapiens
cacctgccaccatgt

SEQ ID NO: 1994457 - DNA, 15 bp, Homo sapiens
acctgccaccatgtc

SEQ ID NO: 1994458 - DNA, 15 bp, Homo sapiens
cctgccaccatgtct

SEQ ID NO: 1994459 - DNA, 15 bp, Homo sapiens
ctgccaccatgtctg

SEQ ID NO: 1994460 - DNA, 15 bp, Homo sapiens
tgccaccatgtctgg

SEQ ID NO: 1994461 - DNA, 15 bp, Homo sapiens
gccaccatgtctggc

SEQ ID NO: 1994462 - DNA, 15 bp, Homo sapiens
ccaccatgtctggct

SEQ ID NO: 1994463 - DNA, 15 bp, Homo sapiens
caccatgtctggcta

SEQ ID NO: 1994464 - DNA, 15 bp, Homo sapiens
accatgtctggctaa

SEQ ID NO: 1994465 - DNA, 15 bp, Homo sapiens
ccatgtctggctaat

SEQ ID NO: 1994466 - DNA, 15 bp, Homo sapiens
catgtctggctaatt

SEQ ID NO: 1994467 - DNA, 15 bp, Homo sapiens
atgtctggctaattt

SEQ ID NO: 1994468 - DNA, 15 bp, Homo sapiens
tgtctggctaatttt

SEQ ID NO: 1994469 - DNA, 15 bp, Homo sapiens
gtctggctaattttt

SEQ ID NO: 1994470 - DNA, 15 bp, Homo sapiens
tctggctaatttttg

SEQ ID NO: 1994471 - DNA, 15 bp, Homo sapiens
gagatggggtttcgc

SEQ ID NO: 1994472 - DNA, 15 bp, Homo sapiens
agatggggtttcgcc

SEQ ID NO: 1994473 - DNA, 15 bp, Homo sapiens
gatggggtttcgcca

SEQ ID NO: 1994474 - DNA, 15 bp, Homo sapiens
atggggtttcgccat

SEQ ID NO: 1994475 - DNA, 15 bp, Homo sapiens
tggggtttcgccatg

SEQ ID NO: 1994476 - DNA, 15 bp, Homo sapiens
tcaagtgatctgcct

SEQ ID NO: 1994477 - DNA, 15 bp, Homo sapiens
caagtgatctgcctg

SEQ ID NO: 1994478 - DNA, 15 bp, Homo sapiens
aagtgatctgcctgc

SEQ ID NO: 1994479 - DNA, 15 bp, Homo sapiens
agtgatctgcctgcc

SEQ ID NO: 1994480 - DNA, 15 bp, Homo sapiens
ctcggcctcccaaaa

SEQ ID NO: 1994481 - DNA, 15 bp, Homo sapiens
tcggcctcccaaaat

SEQ ID NO: 1994482 - DNA, 15 bp, Homo sapiens
cggcctcccaaaatg

SEQ ID NO: 1994483 - DNA, 15 bp, Homo sapiens
ctcccaaaatgttgg

SEQ ID NO: 1994484 - DNA, 15 bp, Homo sapiens
tcccaaaatgttggg

SEQ ID NO: 1994485 - DNA, 15 bp, Homo sapiens
cccaaaatgttggga

SEQ ID NO: 1994486 - DNA, 15 bp, Homo sapiens
ccaaaatgttgggat

SEQ ID NO: 1994487 - DNA, 15 bp, Homo sapiens
caaaatgttgggatt

SEQ ID NO: 1994488 - DNA, 15 bp, Homo sapiens
aaaatgttgggatta

SEQ ID NO: 1994489 - DNA, 15 bp, Homo sapiens
aaatgttgggattac

SEQ ID NO: 1994490 - DNA, 15 bp, Homo sapiens
aatgttgggattaca

SEQ ID NO: 1994491 - DNA, 15 bp, Homo sapiens
atgttgggattacag

SEQ ID NO: 1994492 - DNA, 15 bp, Homo sapiens
catgagccactgcgt

SEQ ID NO: 1994493 - DNA, 15 bp, Homo sapiens
atgagccactgcgtc

SEQ ID NO: 1994494 - DNA, 15 bp, Homo sapiens
tgagccactgcgtct

SEQ ID NO: 1994495 - DNA, 15 bp, Homo sapiens
gagccactgcgtctg

SEQ ID NO: 1994496 - DNA, 15 bp, Homo sapiens
agccactgcgtctgg

SEQ ID NO: 1994497 - DNA, 15 bp, Homo sapiens
gccactgcgtctggc

SEQ ID NO: 1994498 - DNA, 15 bp, Homo sapiens
ccactgcgtctggcc

SEQ ID NO: 1994499 - DNA, 15 bp, Homo sapiens
cactgcgtctggcct

SEQ ID NO: 1994500 - DNA, 15 bp, Homo sapiens
actgcgtctggcctt

SEQ ID NO: 1994501 - DNA, 15 bp, Homo sapiens
ctgcgtctggcctta

SEQ ID NO: 1994502 - DNA, 15 bp, Homo sapiens
tgcgtctggccttat

SEQ ID NO: 1994503 - DNA, 15 bp, Homo sapiens
gcgtctggccttatt

SEQ ID NO: 1994504 - DNA, 15 bp, Homo sapiens
cgtctggccttattt

SEQ ID NO: 1994505 - DNA, 15 bp, Homo sapiens
gtctggccttatttc

SEQ ID NO: 1994506 - DNA, 15 bp, Homo sapiens
tctggccttatttca

SEQ ID NO: 1994507 - DNA, 15 bp, Homo sapiens
ctggccttatttcat

SEQ ID NO: 1994508 - DNA, 15 bp, Homo sapiens
tggccttatttcatg

SEQ ID NO: 1994509 - DNA, 15 bp, Homo sapiens
ggccttatttcatgt

SEQ ID NO: 1994510 - DNA, 15 bp, Homo sapiens
gccttatttcatgtc

SEQ ID NO: 1994511 - DNA, 15 bp, Homo sapiens
ccttatttcatgtct

SEQ ID NO: 1994512 - DNA, 15 bp, Homo sapiens
cttatttcatgtctc

SEQ ID NO: 1994513 - DNA, 15 bp, Homo sapiens
ttatttcatgtctct

SEQ ID NO: 1994514 - DNA, 15 bp, Homo sapiens
tatttcatgtctctt

SEQ ID NO: 1994515 - DNA, 15 bp, Homo sapiens
atttcatgtctcttt

SEQ ID NO: 1994516 - DNA, 15 bp, Homo sapiens
tttcatgtctctttt

SEQ ID NO: 1994517 - DNA, 15 bp, Homo sapiens
ttcatgtctcttttt

SEQ ID NO: 1994518 - DNA, 15 bp, Homo sapiens
tcatgtctctttttg

SEQ ID NO: 1994519 - DNA, 15 bp, Homo sapiens
catgtctctttttga

SEQ ID NO: 1994520 - DNA, 15 bp, Homo sapiens
atgtctctttttgat

SEQ ID NO: 1994521 - DNA, 15 bp, Homo sapiens
tgtctctttttgata

SEQ ID NO: 1994522 - DNA, 15 bp, Homo sapiens
gtctctttttgatag

SEQ ID NO: 1994523 - DNA, 15 bp, Homo sapiens
tctctttttgatagt

SEQ ID NO: 1994524 - DNA, 15 bp, Homo sapiens
ctctttttgatagta

SEQ ID NO: 1994525 - DNA, 15 bp, Homo sapiens
tctttttgatagtag

SEQ ID NO: 1994526 - DNA, 15 bp, Homo sapiens
ctttttgatagtagc

SEQ ID NO: 1994527 - DNA, 15 bp, Homo sapiens
tttttgatagtagcc

SEQ ID NO: 1994528 - DNA, 15 bp, Homo sapiens
ttttgatagtagcca

SEQ ID NO: 1994529 - DNA, 15 bp, Homo sapiens
tttgatagtagccat

SEQ ID NO: 1994530 - DNA, 15 bp, Homo sapiens
ttgatagtagccatc

SEQ ID NO: 1994531 - DNA, 15 bp, Homo sapiens
tgatagtagccatcc

SEQ ID NO: 1994532 - DNA, 15 bp, Homo sapiens
gatagtagccatcct

SEQ ID NO: 1994533 - DNA, 15 bp, Homo sapiens
atagtagccatccta

SEQ ID NO: 1994534 - DNA, 15 bp, Homo sapiens
tagtagccatcctaa

SEQ ID NO: 1994535 - DNA, 15 bp, Homo sapiens
agtagccatcctaat

SEQ ID NO: 1994536 - DNA, 15 bp, Homo sapiens
gtagccatcctaatg

SEQ ID NO: 1994537 - DNA, 15 bp, Homo sapiens
tagccatcctaatga

SEQ ID NO: 1994538 - DNA, 15 bp, Homo sapiens
agccatcctaatgag

SEQ ID NO: 1994539 - DNA, 15 bp, Homo sapiens
gccatcctaatgagt

SEQ ID NO: 1994540 - DNA, 15 bp, Homo sapiens
ccatcctaatgagtg

SEQ ID NO: 1994541 - DNA, 15 bp, Homo sapiens
catcctaatgagtgt

SEQ ID NO: 1994542 - DNA, 15 bp, Homo sapiens
atcctaatgagtgtt

SEQ ID NO: 1994543 - DNA, 15 bp, Homo sapiens
tcctaatgagtgtta

SEQ ID NO: 1994544 - DNA, 15 bp, Homo sapiens
cctaatgagtgttag

SEQ ID NO: 1994545 - DNA, 15 bp, Homo sapiens
ctaatgagtgttagg

SEQ ID NO: 1994546 - DNA, 15 bp, Homo sapiens
taatgagtgttaggt

SEQ ID NO: 1994547 - DNA, 15 bp, Homo sapiens
aatgagtgttaggtg

SEQ ID NO: 1994548 - DNA, 15 bp, Homo sapiens
atgagtgttaggtgg

SEQ ID NO: 1994549 - DNA, 15 bp, Homo sapiens
tgagtgttaggtggt

SEQ ID NO: 1994550 - DNA, 15 bp, Homo sapiens
gagtgttaggtggtt

SEQ ID NO: 1994551 - DNA, 15 bp, Homo sapiens
agtgttaggtggttt

SEQ ID NO: 1994552 - DNA, 15 bp, Homo sapiens
gtgttaggtggtttt

SEQ ID NO: 1994553 - DNA, 15 bp, Homo sapiens
tgttaggtggtttta

SEQ ID NO: 1994554 - DNA, 15 bp, Homo sapiens
gttaggtggttttat

SEQ ID NO: 1994555 - DNA, 15 bp, Homo sapiens
ttaggtggttttatg

SEQ ID NO: 1994556 - DNA, 15 bp, Homo sapiens
taggtggttttatga

SEQ ID NO: 1994557 - DNA, 15 bp, Homo sapiens
aggtggttttatgac

SEQ ID NO: 1994558 - DNA, 15 bp, Homo sapiens
ggtggttttatgact

SEQ ID NO: 1994559 - DNA, 15 bp, Homo sapiens
gtggttttatgactt

SEQ ID NO: 1994560 - DNA, 15 bp, Homo sapiens
tggttttatgacttt

SEQ ID NO: 1994561 - DNA, 15 bp, Homo sapiens
ggttttatgactttt

SEQ ID NO: 1994562 - DNA, 15 bp, Homo sapiens
gttttatgacttttt

SEQ ID NO: 1994563 - DNA, 15 bp, Homo sapiens
ttttatgactttttg

SEQ ID NO: 1994564 - DNA, 15 bp, Homo sapiens
tttatgactttttgg

SEQ ID NO: 1994565 - DNA, 15 bp, Homo sapiens
ttatgactttttggt

SEQ ID NO: 1994566 - DNA, 15 bp, Homo sapiens
tatgactttttggtt

SEQ ID NO: 1994567 - DNA, 15 bp, Homo sapiens
atgactttttggttt

SEQ ID NO: 1994568 - DNA, 15 bp, Homo sapiens
tgactttttggtttt

SEQ ID NO: 1994569 - DNA, 15 bp, Homo sapiens
gactttttggttttt

SEQ ID NO: 1994570 - DNA, 15 bp, Homo sapiens
actttttggtttttt

SEQ ID NO: 1994571 - DNA, 15 bp, Homo sapiens
ctttttggttttttt

SEQ ID NO: 1994572 - DNA, 15 bp, Homo sapiens
tttttggtttttttt

SEQ ID NO: 1994573 - DNA, 15 bp, Homo sapiens
ttttggttttttttt

SEQ ID NO: 1994574 - DNA, 15 bp, Homo sapiens
tttggttttttttta

SEQ ID NO: 1994575 - DNA, 15 bp, Homo sapiens
ttggtttttttttaa

SEQ ID NO: 1994576 - DNA, 15 bp, Homo sapiens
tggtttttttttaat

SEQ ID NO: 1994577 - DNA, 15 bp, Homo sapiens
ggtttttttttaata

SEQ ID NO: 1994578 - DNA, 15 bp, Homo sapiens
gtttttttttaatag

SEQ ID NO: 1994579 - DNA, 15 bp, Homo sapiens
tttttttttaataga

SEQ ID NO: 1994580 - DNA, 15 bp, Homo sapiens
ttttttttaatagag

SEQ ID NO: 1994581 - DNA, 15 bp, Homo sapiens
tttttttaatagagg

SEQ ID NO: 1994582 - DNA, 15 bp, Homo sapiens
ttttttaatagaggt

SEQ ID NO: 1994583 - DNA, 15 bp, Homo sapiens
tttttaatagaggtt

SEQ ID NO: 1994584 - DNA, 15 bp, Homo sapiens
ttttaatagaggttt

SEQ ID NO: 1994585 - DNA, 15 bp, Homo sapiens
tttaatagaggtttt

SEQ ID NO: 1994586 - DNA, 15 bp, Homo sapiens
ttaatagaggttttt

SEQ ID NO: 1994587 - DNA, 15 bp, Homo sapiens
taatagaggtttttg

SEQ ID NO: 1994588 - DNA, 15 bp, Homo sapiens
aatagaggtttttgc

SEQ ID NO: 1994589 - DNA, 15 bp, Homo sapiens
atagaggtttttgct

SEQ ID NO: 1994590 - DNA, 15 bp, Homo sapiens
tagaggtttttgctc

SEQ ID NO: 1994591 - DNA, 15 bp, Homo sapiens
agaggtttttgctct

SEQ ID NO: 1994592 - DNA, 15 bp, Homo sapiens
gaggtttttgctctg

SEQ ID NO: 1994593 - DNA, 15 bp, Homo sapiens
aggtttttgctctgt

SEQ ID NO: 1994594 - DNA, 15 bp, Homo sapiens
ggtttttgctctgtc

SEQ ID NO: 1994595 - DNA, 15 bp, Homo sapiens
gtttttgctctgtca

SEQ ID NO: 1994596 - DNA, 15 bp, Homo sapiens
tttttgctctgtcat

SEQ ID NO: 1994597 - DNA, 15 bp, Homo sapiens
ttttgctctgtcatg

SEQ ID NO: 1994598 - DNA, 15 bp, Homo sapiens
tttgctctgtcatgc

SEQ ID NO: 1994599 - DNA, 15 bp, Homo sapiens
ttgctctgtcatgca

SEQ ID NO: 1994600 - DNA, 15 bp, Homo sapiens
tgctctgtcatgcag

SEQ ID NO: 1994601 - DNA, 15 bp, Homo sapiens
gctctgtcatgcaga

SEQ ID NO: 1994602 - DNA, 15 bp, Homo sapiens
ctctgtcatgcagac

SEQ ID NO: 1994603 - DNA, 15 bp, Homo sapiens
tctgtcatgcagact

SEQ ID NO: 1994604 - DNA, 15 bp, Homo sapiens
ctgtcatgcagacta

SEQ ID NO: 1994605 - DNA, 15 bp, Homo sapiens
tgtcatgcagactag

SEQ ID NO: 1994606 - DNA, 15 bp, Homo sapiens
gtcatgcagactaga

SEQ ID NO: 1994607 - DNA, 15 bp, Homo sapiens
tcatgcagactagag

SEQ ID NO: 1994608 - DNA, 15 bp, Homo sapiens
catgcagactagagt

SEQ ID NO: 1994609 - DNA, 15 bp, Homo sapiens
atgcagactagagta

SEQ ID NO: 1994610 - DNA, 15 bp, Homo sapiens
tgcagactagagtac

SEQ ID NO: 1994611 - DNA, 15 bp, Homo sapiens
gcagactagagtaca

SEQ ID NO: 1994612 - DNA, 15 bp, Homo sapiens
cagactagagtacag

SEQ ID NO: 1994613 - DNA, 15 bp, Homo sapiens
agactagagtacagt

SEQ ID NO: 1994614 - DNA, 15 bp, Homo sapiens
gactagagtacagta

SEQ ID NO: 1994615 - DNA, 15 bp, Homo sapiens
actagagtacagtat

SEQ ID NO: 1994616 - DNA, 15 bp, Homo sapiens
ctagagtacagtatc

SEQ ID NO: 1994617 - DNA, 15 bp, Homo sapiens
tagagtacagtatca

SEQ ID NO: 1994618 - DNA, 15 bp, Homo sapiens
agagtacagtatcat

SEQ ID NO: 1994619 - DNA, 15 bp, Homo sapiens
gagtacagtatcatg

SEQ ID NO: 1994620 - DNA, 15 bp, Homo sapiens
agtacagtatcatga

SEQ ID NO: 1994621 - DNA, 15 bp, Homo sapiens
gtacagtatcatgag

SEQ ID NO: 1994622 - DNA, 15 bp, Homo sapiens
tacagtatcatgagc

SEQ ID NO: 1994623 - DNA, 15 bp, Homo sapiens
acagtatcatgagca

SEQ ID NO: 1994624 - DNA, 15 bp, Homo sapiens
cagtatcatgagcat

SEQ ID NO: 1994625 - DNA, 15 bp, Homo sapiens
agtatcatgagcata

SEQ ID NO: 1994626 - DNA, 15 bp, Homo sapiens
gtatcatgagcatag

SEQ ID NO: 1994627 - DNA, 15 bp, Homo sapiens
tatcatgagcatagc

SEQ ID NO: 1994628 - DNA, 15 bp, Homo sapiens
atcatgagcatagct

SEQ ID NO: 1994629 - DNA, 15 bp, Homo sapiens
tcatgagcatagctc

SEQ ID NO: 1994630 - DNA, 15 bp, Homo sapiens
catgagcatagctca

SEQ ID NO: 1994631 - DNA, 15 bp, Homo sapiens
atgagcatagctcac

SEQ ID NO: 1994632 - DNA, 15 bp, Homo sapiens
tgagcatagctcact

SEQ ID NO: 1994633 - DNA, 15 bp, Homo sapiens
gagcatagctcactg

SEQ ID NO: 1994634 - DNA, 15 bp, Homo sapiens
agcatagctcactgc

SEQ ID NO: 1994635 - DNA, 15 bp, Homo sapiens
gcatagctcactgca

SEQ ID NO: 1994636 - DNA, 15 bp, Homo sapiens
ctcactgcatcttcg

SEQ ID NO: 1994637 - DNA, 15 bp, Homo sapiens
tcactgcatcttcga

SEQ ID NO: 1994638 - DNA, 15 bp, Homo sapiens
cactgcatcttcgaa

SEQ ID NO: 1994639 - DNA, 15 bp, Homo sapiens
actgcatcttcgaac

SEQ ID NO: 1994640 - DNA, 15 bp, Homo sapiens
ctgcatcttcgaact

SEQ ID NO: 1994641 - DNA, 15 bp, Homo sapiens
tgcatcttcgaactc

SEQ ID NO: 1994642 - DNA, 15 bp, Homo sapiens
gcatcttcgaactct

SEQ ID NO: 1994643 - DNA, 15 bp, Homo sapiens
catcttcgaactctt

SEQ ID NO: 1994644 - DNA, 15 bp, Homo sapiens
atcttcgaactcttg

SEQ ID NO: 1994645 - DNA, 15 bp, Homo sapiens
tcttcgaactcttgg

SEQ ID NO: 1994646 - DNA, 15 bp, Homo sapiens
cttcgaactcttgga

SEQ ID NO: 1994647 - DNA, 15 bp, Homo sapiens
ttcgaactcttggac

SEQ ID NO: 1994648 - DNA, 15 bp, Homo sapiens
tcttggactcaagca

SEQ ID NO: 1994649 - DNA, 15 bp, Homo sapiens
cttggactcaagcaa

SEQ ID NO: 1994650 - DNA, 15 bp, Homo sapiens
ttggactcaagcaat

SEQ ID NO: 1994651 - DNA, 15 bp, Homo sapiens
tggactcaagcaatc

SEQ ID NO: 1994652 - DNA, 15 bp, Homo sapiens
ggactcaagcaatct

SEQ ID NO: 1994653 - DNA, 15 bp, Homo sapiens
gactcaagcaatctt

SEQ ID NO: 1994654 - DNA, 15 bp, Homo sapiens
actcaagcaatcttc

SEQ ID NO: 1994655 - DNA, 15 bp, Homo sapiens
aatcttcctgcctta

SEQ ID NO: 1994656 - DNA, 15 bp, Homo sapiens
atcttcctgccttag

SEQ ID NO: 1994657 - DNA, 15 bp, Homo sapiens
tcttcctgccttagc

SEQ ID NO: 1994658 - DNA, 15 bp, Homo sapiens
cttcctgccttagcc

SEQ ID NO: 1994659 - DNA, 15 bp, Homo sapiens
ttcctgccttagcct

SEQ ID NO: 1994660 - DNA, 15 bp, Homo sapiens
ctgccttagcctccc

SEQ ID NO: 1994661 - DNA, 15 bp, Homo sapiens
tgccttagcctcccc

SEQ ID NO: 1994662 - DNA, 15 bp, Homo sapiens
gccttagcctcccca

SEQ ID NO: 1994663 - DNA, 15 bp, Homo sapiens
ccttagcctccccaa

SEQ ID NO: 1994664 - DNA, 15 bp, Homo sapiens
cttagcctccccaaa

SEQ ID NO: 1994665 - DNA, 15 bp, Homo sapiens
ttagcctccccaaag

SEQ ID NO: 1994666 - DNA, 15 bp, Homo sapiens
tagcctccccaaagt

SEQ ID NO: 1994667 - DNA, 15 bp, Homo sapiens
agcctccccaaagtg

SEQ ID NO: 1994668 - DNA, 15 bp, Homo sapiens
gcctccccaaagtgc

SEQ ID NO: 1994669 - DNA, 15 bp, Homo sapiens
cctccccaaagtgct

SEQ ID NO: 1994670 - DNA, 15 bp, Homo sapiens
ctccccaaagtgctg

SEQ ID NO: 1994671 - DNA, 15 bp, Homo sapiens
tccccaaagtgctgg

SEQ ID NO: 1994672 - DNA, 15 bp, Homo sapiens
ccccaaagtgctggg

SEQ ID NO: 1994673 - DNA, 15 bp, Homo sapiens
tgggattataagtgg

SEQ ID NO: 1994674 - DNA, 15 bp, Homo sapiens
gggattataagtgga

SEQ ID NO: 1994675 - DNA, 15 bp, Homo sapiens
ggattataagtggaa

SEQ ID NO: 1994676 - DNA, 15 bp, Homo sapiens
gattataagtggaag

SEQ ID NO: 1994677 - DNA, 15 bp, Homo sapiens
attataagtggaagc

SEQ ID NO: 1994678 - DNA, 15 bp, Homo sapiens
ttataagtggaagcc

SEQ ID NO: 1994679 - DNA, 15 bp, Homo sapiens
tataagtggaagcca

SEQ ID NO: 1994680 - DNA, 15 bp, Homo sapiens
ataagtggaagccac

SEQ ID NO: 1994681 - DNA, 15 bp, Homo sapiens
taagtggaagccact

SEQ ID NO: 1994682 - DNA, 15 bp, Homo sapiens
aagtggaagccactg

SEQ ID NO: 1994683 - DNA, 15 bp, Homo sapiens
agtggaagccactgt

SEQ ID NO: 1994684 - DNA, 15 bp, Homo sapiens
gtggaagccactgta

SEQ ID NO: 1994685 - DNA, 15 bp, Homo sapiens
tggaagccactgtac

SEQ ID NO: 1994686 - DNA, 15 bp, Homo sapiens
ggaagccactgtacc

SEQ ID NO: 1994687 - DNA, 15 bp, Homo sapiens
gaagccactgtacct

SEQ ID NO: 1994688 - DNA, 15 bp, Homo sapiens
aagccactgtaccta

SEQ ID NO: 1994689 - DNA, 15 bp, Homo sapiens
agccactgtacctag

SEQ ID NO: 1994690 - DNA, 15 bp, Homo sapiens
gccactgtacctagc

SEQ ID NO: 1994691 - DNA, 15 bp, Homo sapiens
ccactgtacctagca

SEQ ID NO: 1994692 - DNA, 15 bp, Homo sapiens
cactgtacctagcac

SEQ ID NO: 1994693 - DNA, 15 bp, Homo sapiens
actgtacctagcacg

SEQ ID NO: 1994694 - DNA, 15 bp, Homo sapiens
ctgtacctagcacgt

SEQ ID NO: 1994695 - DNA, 15 bp, Homo sapiens
tgtacctagcacgtt

SEQ ID NO: 1994696 - DNA, 15 bp, Homo sapiens
gtacctagcacgttt

SEQ ID NO: 1994697 - DNA, 15 bp, Homo sapiens
tacctagcacgtttt

SEQ ID NO: 1994698 - DNA, 15 bp, Homo sapiens
acctagcacgttttc

SEQ ID NO: 1994699 - DNA, 15 bp, Homo sapiens
cctagcacgttttct

SEQ ID NO: 1994700 - DNA, 15 bp, Homo sapiens
ctagcacgttttctg

SEQ ID NO: 1994701 - DNA, 15 bp, Homo sapiens
tagcacgttttctga

SEQ ID NO: 1994702 - DNA, 15 bp, Homo sapiens
agcacgttttctgac

SEQ ID NO: 1994703 - DNA, 15 bp, Homo sapiens
gcacgttttctgact

SEQ ID NO: 1994704 - DNA, 15 bp, Homo sapiens
cacgttttctgactt

SEQ ID NO: 1994705 - DNA, 15 bp, Homo sapiens
acgttttctgacttt

SEQ ID NO: 1994706 - DNA, 15 bp, Homo sapiens
cgttttctgactttt

SEQ ID NO: 1994707 - DNA, 15 bp, Homo sapiens
gttttctgactttta

SEQ ID NO: 1994708 - DNA, 15 bp, Homo sapiens
ttttctgacttttag

SEQ ID NO: 1994709 - DNA, 15 bp, Homo sapiens
tttctgacttttaga

SEQ ID NO: 1994710 - DNA, 15 bp, Homo sapiens
ttctgacttttagag

SEQ ID NO: 1994711 - DNA, 15 bp, Homo sapiens
tctgacttttagagt

SEQ ID NO: 1994712 - DNA, 15 bp, Homo sapiens
ctgacttttagagtt

SEQ ID NO: 1994713 - DNA, 15 bp, Homo sapiens
tgacttttagagtta

SEQ ID NO: 1994714 - DNA, 15 bp, Homo sapiens
gacttttagagttat

SEQ ID NO: 1994715 - DNA, 15 bp, Homo sapiens
acttttagagttata

SEQ ID NO: 1994716 - DNA, 15 bp, Homo sapiens
cttttagagttatat

SEQ ID NO: 1994717 - DNA, 15 bp, Homo sapiens
ttttagagttatatt

SEQ ID NO: 1994718 - DNA, 15 bp, Homo sapiens
tttagagttatattt

SEQ ID NO: 1994719 - DNA, 15 bp, Homo sapiens
ttagagttatattta

SEQ ID NO: 1994720 - DNA, 15 bp, Homo sapiens
tagagttatatttaa

SEQ ID NO: 1994721 - DNA, 15 bp, Homo sapiens
agagttatatttaag

SEQ ID NO: 1994722 - DNA, 15 bp, Homo sapiens
gagttatatttaagc

SEQ ID NO: 1994723 - DNA, 15 bp, Homo sapiens
agttatatttaagct

SEQ ID NO: 1994724 - DNA, 15 bp, Homo sapiens
gttatatttaagctc

SEQ ID NO: 1994725 - DNA, 15 bp, Homo sapiens
ttatatttaagctca

SEQ ID NO: 1994726 - DNA, 15 bp, Homo sapiens
tatatttaagctcat

SEQ ID NO: 1994727 - DNA, 15 bp, Homo sapiens
atatttaagctcatc

SEQ ID NO: 1994728 - DNA, 15 bp, Homo sapiens
tatttaagctcatca

SEQ ID NO: 1994729 - DNA, 15 bp, Homo sapiens
atttaagctcatcag

SEQ ID NO: 1994730 - DNA, 15 bp, Homo sapiens
tttaagctcatcagt

SEQ ID NO: 1994731 - DNA, 15 bp, Homo sapiens
ttaagctcatcagtt

SEQ ID NO: 1994732 - DNA, 15 bp, Homo sapiens
taagctcatcagttt

SEQ ID NO: 1994733 - DNA, 15 bp, Homo sapiens
aagctcatcagtttt

SEQ ID NO: 1994734 - DNA, 15 bp, Homo sapiens
agctcatcagttttg

SEQ ID NO: 1994735 - DNA, 15 bp, Homo sapiens
gctcatcagttttga

SEQ ID NO: 1994736 - DNA, 15 bp, Homo sapiens
ctcatcagttttgaa

SEQ ID NO: 1994737 - DNA, 15 bp, Homo sapiens
tcatcagttttgaat

SEQ ID NO: 1994738 - DNA, 15 bp, Homo sapiens
catcagttttgaata

SEQ ID NO: 1994739 - DNA, 15 bp, Homo sapiens
atcagttttgaatat

SEQ ID NO: 1994740 - DNA, 15 bp, Homo sapiens
tcagttttgaatatt

SEQ ID NO: 1994741 - DNA, 15 bp, Homo sapiens
cagttttgaatattt

SEQ ID NO: 1994742 - DNA, 15 bp, Homo sapiens
agttttgaatatttc

SEQ ID NO: 1994743 - DNA, 15 bp, Homo sapiens
gttttgaatatttca

SEQ ID NO: 1994744 - DNA, 15 bp, Homo sapiens
ttttgaatatttcat

SEQ ID NO: 1994745 - DNA, 15 bp, Homo sapiens
tttgaatatttcatt

SEQ ID NO: 1994746 - DNA, 15 bp, Homo sapiens
ttgaatatttcattt

SEQ ID NO: 1994747 - DNA, 15 bp, Homo sapiens
tgaatatttcatttg

SEQ ID NO: 1994748 - DNA, 15 bp, Homo sapiens
gaatatttcatttga

SEQ ID NO: 1994749 - DNA, 15 bp, Homo sapiens
aatatttcatttgat

SEQ ID NO: 1994750 - DNA, 15 bp, Homo sapiens
atatttcatttgatt

SEQ ID NO: 1994751 - DNA, 15 bp, Homo sapiens
tatttcatttgattg

SEQ ID NO: 1994752 - DNA, 15 bp, Homo sapiens
atttcatttgattgt

SEQ ID NO: 1994753 - DNA, 15 bp, Homo sapiens
tttcatttgattgta

SEQ ID NO: 1994754 - DNA, 15 bp, Homo sapiens
ttcatttgattgtaa

SEQ ID NO: 1994755 - DNA, 15 bp, Homo sapiens
tcatttgattgtaag

SEQ ID NO: 1994756 - DNA, 15 bp, Homo sapiens
catttgattgtaagt

SEQ ID NO: 1994757 - DNA, 15 bp, Homo sapiens
atttgattgtaagta

SEQ ID NO: 1994758 - DNA, 15 bp, Homo sapiens
tttgattgtaagtat

SEQ ID NO: 1994759 - DNA, 15 bp, Homo sapiens
ttgattgtaagtatt

SEQ ID NO: 1994760 - DNA, 15 bp, Homo sapiens
tgattgtaagtattc

SEQ ID NO: 1994761 - DNA, 15 bp, Homo sapiens
gattgtaagtattca

SEQ ID NO: 1994762 - DNA, 15 bp, Homo sapiens
attgtaagtattcaa

SEQ ID NO: 1994763 - DNA, 15 bp, Homo sapiens
ttgtaagtattcaaa

SEQ ID NO: 1994764 - DNA, 15 bp, Homo sapiens
tgtaagtattcaaag

SEQ ID NO: 1994765 - DNA, 15 bp, Homo sapiens
gtaagtattcaaagt

SEQ ID NO: 1994766 - DNA, 15 bp, Homo sapiens
taagtattcaaagtt

SEQ ID NO: 1994767 - DNA, 15 bp, Homo sapiens
aagtattcaaagtta

SEQ ID NO: 1994768 - DNA, 15 bp, Homo sapiens
agtattcaaagttat

SEQ ID NO: 1994769 - DNA, 15 bp, Homo sapiens
gtattcaaagttata

SEQ ID NO: 1994770 - DNA, 15 bp, Homo sapiens
tattcaaagttataa

SEQ ID NO: 1994771 - DNA, 15 bp, Homo sapiens
attcaaagttataaa

SEQ ID NO: 1994772 - DNA, 15 bp, Homo sapiens
ttcaaagttataaat

SEQ ID NO: 1994773 - DNA, 15 bp, Homo sapiens
tcaaagttataaatt

SEQ ID NO: 1994774 - DNA, 15 bp, Homo sapiens
caaagttataaattt

SEQ ID NO: 1994775 - DNA, 15 bp, Homo sapiens
aaagttataaattta

SEQ ID NO: 1994776 - DNA, 15 bp, Homo sapiens
aagttataaatttat

SEQ ID NO: 1994777 - DNA, 15 bp, Homo sapiens
agttataaatttatt

SEQ ID NO: 1994778 - DNA, 15 bp, Homo sapiens
gttataaatttatta

SEQ ID NO: 1994779 - DNA, 15 bp, Homo sapiens
ttataaatttattaa

SEQ ID NO: 1994780 - DNA, 15 bp, Homo sapiens
tataaatttattaaa

SEQ ID NO: 1994781 - DNA, 15 bp, Homo sapiens
ataaatttattaaat

SEQ ID NO: 1994782 - DNA, 15 bp, Homo sapiens
taaatttattaaatg

SEQ ID NO: 1994783 - DNA, 15 bp, Homo sapiens
aaatttattaaatgc

SEQ ID NO: 1994784 - DNA, 15 bp, Homo sapiens
aatttattaaatgct

SEQ ID NO: 1994785 - DNA, 15 bp, Homo sapiens
atttattaaatgctg

SEQ ID NO: 1994786 - DNA, 15 bp, Homo sapiens
tttattaaatgctgc

SEQ ID NO: 1994787 - DNA, 15 bp, Homo sapiens
ttattaaatgctgct

SEQ ID NO: 1994788 - DNA, 15 bp, Homo sapiens
tattaaatgctgctt

SEQ ID NO: 1994789 - DNA, 15 bp, Homo sapiens
attaaatgctgcttt

SEQ ID NO: 1994790 - DNA, 15 bp, Homo sapiens
ttaaatgctgcttta

SEQ ID NO: 1994791 - DNA, 15 bp, Homo sapiens
taaatgctgctttaa

SEQ ID NO: 1994792 - DNA, 15 bp, Homo sapiens
aaatgctgctttaat

SEQ ID NO: 1994793 - DNA, 15 bp, Homo sapiens
aatgctgctttaatt

SEQ ID NO: 1994794 - DNA, 15 bp, Homo sapiens
atgctgctttaattg

SEQ ID NO: 1994795 - DNA, 15 bp, Homo sapiens
tgctgctttaattgt

SEQ ID NO: 1994796 - DNA, 15 bp, Homo sapiens
gctgctttaattgta

SEQ ID NO: 1994797 - DNA, 15 bp, Homo sapiens
ctgctttaattgtat

SEQ ID NO: 1994798 - DNA, 15 bp, Homo sapiens
tgctttaattgtatc

SEQ ID NO: 1994799 - DNA, 15 bp, Homo sapiens
gctttaattgtatcc

SEQ ID NO: 1994800 - DNA, 15 bp, Homo sapiens
ctttaattgtatcct

SEQ ID NO: 1994801 - DNA, 15 bp, Homo sapiens
tttaattgtatccta

SEQ ID NO: 1994802 - DNA, 15 bp, Homo sapiens
ttaattgtatcctac

SEQ ID NO: 1994803 - DNA, 15 bp, Homo sapiens
taattgtatcctaca

SEQ ID NO: 1994804 - DNA, 15 bp, Homo sapiens
aattgtatcctacaa

SEQ ID NO: 1994805 - DNA, 15 bp, Homo sapiens
attgtatcctacaag

SEQ ID NO: 1994806 - DNA, 15 bp, Homo sapiens
ttgtatcctacaagt

SEQ ID NO: 1994807 - DNA, 15 bp, Homo sapiens
tgtatcctacaagtt

SEQ ID NO: 1994808 - DNA, 15 bp, Homo sapiens
gtatcctacaagttt

SEQ ID NO: 1994809 - DNA, 15 bp, Homo sapiens
tatcctacaagtttc

SEQ ID NO: 1994810 - DNA, 15 bp, Homo sapiens
atcctacaagtttca

SEQ ID NO: 1994811 - DNA, 15 bp, Homo sapiens
tcctacaagtttcaa

SEQ ID NO: 1994812 - DNA, 15 bp, Homo sapiens
cctacaagtttcaat

SEQ ID NO: 1994813 - DNA, 15 bp, Homo sapiens
ctacaagtttcaata

SEQ ID NO: 1994814 - DNA, 15 bp, Homo sapiens
tacaagtttcaataa

SEQ ID NO: 1994815 - DNA, 15 bp, Homo sapiens
acaagtttcaataat

SEQ ID NO: 1994816 - DNA, 15 bp, Homo sapiens
caagtttcaataatt

SEQ ID NO: 1994817 - DNA, 15 bp, Homo sapiens
aagtttcaataattg

SEQ ID NO: 1994818 - DNA, 15 bp, Homo sapiens
agtttcaataattgg

SEQ ID NO: 1994819 - DNA, 15 bp, Homo sapiens
gtttcaataattggc

SEQ ID NO: 1994820 - DNA, 15 bp, Homo sapiens
tttcaataattggct

SEQ ID NO: 1994821 - DNA, 15 bp, Homo sapiens
ttcaataattggctt

SEQ ID NO: 1994822 - DNA, 15 bp, Homo sapiens
tcaataattggcttt

SEQ ID NO: 1994823 - DNA, 15 bp, Homo sapiens
caataattggctttt

SEQ ID NO: 1994824 - DNA, 15 bp, Homo sapiens
aataattggcttttt

SEQ ID NO: 1994825 - DNA, 15 bp, Homo sapiens
ataattggcttttta

SEQ ID NO: 1994826 - DNA, 15 bp, Homo sapiens
taattggctttttat

SEQ ID NO: 1994827 - DNA, 15 bp, Homo sapiens
aattggctttttatt

SEQ ID NO: 1994828 - DNA, 15 bp, Homo sapiens
attggctttttattt

SEQ ID NO: 1994829 - DNA, 15 bp, Homo sapiens
ttggctttttatttt

SEQ ID NO: 1994830 - DNA, 15 bp, Homo sapiens
tggctttttattttt

SEQ ID NO: 1994831 - DNA, 15 bp, Homo sapiens
ggctttttatttttc

SEQ ID NO: 1994832 - DNA, 15 bp, Homo sapiens
gctttttatttttca

SEQ ID NO: 1994833 - DNA, 15 bp, Homo sapiens
ctttttatttttcaa

SEQ ID NO: 1994834 - DNA, 15 bp, Homo sapiens
tttttatttttcaat

SEQ ID NO: 1994835 - DNA, 15 bp, Homo sapiens
ttttatttttcaatt

SEQ ID NO: 1994836 - DNA, 15 bp, Homo sapiens
tttatttttcaattt

SEQ ID NO: 1994837 - DNA, 15 bp, Homo sapiens
ttatttttcaatttc

SEQ ID NO: 1994838 - DNA, 15 bp, Homo sapiens
tatttttcaatttca

SEQ ID NO: 1994839 - DNA, 15 bp, Homo sapiens
atttttcaatttcat

SEQ ID NO: 1994840 - DNA, 15 bp, Homo sapiens
tttttcaatttcata

SEQ ID NO: 1994841 - DNA, 15 bp, Homo sapiens
ttttcaatttcatat

SEQ ID NO: 1994842 - DNA, 15 bp, Homo sapiens
tttcaatttcatatt

SEQ ID NO: 1994843 - DNA, 15 bp, Homo sapiens
ttcaatttcatattt

SEQ ID NO: 1994844 - DNA, 15 bp, Homo sapiens
tcaatttcatatttc

SEQ ID NO: 1994845 - DNA, 15 bp, Homo sapiens
caatttcatatttcc

SEQ ID NO: 1994846 - DNA, 15 bp, Homo sapiens
aatttcatatttcca

SEQ ID NO: 1994847 - DNA, 15 bp, Homo sapiens
atttcatatttccat

SEQ ID NO: 1994848 - DNA, 15 bp, Homo sapiens
tttcatatttccata

SEQ ID NO: 1994849 - DNA, 15 bp, Homo sapiens
ttcatatttccatat

SEQ ID NO: 1994850 - DNA, 15 bp, Homo sapiens
tcatatttccatata

SEQ ID NO: 1994851 - DNA, 15 bp, Homo sapiens
catatttccatataa

SEQ ID NO: 1994852 - DNA, 15 bp, Homo sapiens
atatttccatataat

SEQ ID NO: 1994853 - DNA, 15 bp, Homo sapiens
tatttccatataatg

SEQ ID NO: 1994854 - DNA, 15 bp, Homo sapiens
atttccatataatgt

SEQ ID NO: 1994855 - DNA, 15 bp, Homo sapiens
tttccatataatgtt

SEQ ID NO: 1994856 - DNA, 15 bp, Homo sapiens
ttccatataatgttt

SEQ ID NO: 1994857 - DNA, 15 bp, Homo sapiens
tccatataatgtttt

SEQ ID NO: 1994858 - DNA, 15 bp, Homo sapiens
ccatataatgttttc

SEQ ID NO: 1994859 - DNA, 15 bp, Homo sapiens
catataatgttttca

SEQ ID NO: 1994860 - DNA, 15 bp, Homo sapiens
atataatgttttcaa

SEQ ID NO: 1994861 - DNA, 15 bp, Homo sapiens
tataatgttttcaat

SEQ ID NO: 1994862 - DNA, 15 bp, Homo sapiens
ataatgttttcaatt

SEQ ID NO: 1994863 - DNA, 15 bp, Homo sapiens
taatgttttcaatta

SEQ ID NO: 1994864 - DNA, 15 bp, Homo sapiens
aatgttttcaattat

SEQ ID NO: 1994865 - DNA, 15 bp, Homo sapiens
atgttttcaattatg

SEQ ID NO: 1994866 - DNA, 15 bp, Homo sapiens
tgttttcaattatga

SEQ ID NO: 1994867 - DNA, 15 bp, Homo sapiens
gttttcaattatgat

SEQ ID NO: 1994868 - DNA, 15 bp, Homo sapiens
ttttcaattatgatt

SEQ ID NO: 1994869 - DNA, 15 bp, Homo sapiens
tttcaattatgattt

SEQ ID NO: 1994870 - DNA, 15 bp, Homo sapiens
ttcaattatgatttc

SEQ ID NO: 1994871 - DNA, 15 bp, Homo sapiens
tcaattatgatttct

SEQ ID NO: 1994872 - DNA, 15 bp, Homo sapiens
caattatgatttctc

SEQ ID NO: 1994873 - DNA, 15 bp, Homo sapiens
aattatgatttctcc

SEQ ID NO: 1994874 - DNA, 15 bp, Homo sapiens
attatgatttctcct

SEQ ID NO: 1994875 - DNA, 15 bp, Homo sapiens
ttatgatttctcctt

SEQ ID NO: 1994876 - DNA, 15 bp, Homo sapiens
tatgatttctccttt

SEQ ID NO: 1994877 - DNA, 15 bp, Homo sapiens
atgatttctcctttc

SEQ ID NO: 1994878 - DNA, 15 bp, Homo sapiens
tgatttctcctttca

SEQ ID NO: 1994879 - DNA, 15 bp, Homo sapiens
gatttctcctttcac

SEQ ID NO: 1994880 - DNA, 15 bp, Homo sapiens
atttctcctttcacc

SEQ ID NO: 1994881 - DNA, 15 bp, Homo sapiens
tttctcctttcacct

SEQ ID NO: 1994882 - DNA, 15 bp, Homo sapiens
ttctcctttcaccta

SEQ ID NO: 1994883 - DNA, 15 bp, Homo sapiens
tctcctttcacctag

SEQ ID NO: 1994884 - DNA, 15 bp, Homo sapiens
ctcctttcacctaga

SEQ ID NO: 1994885 - DNA, 15 bp, Homo sapiens
tcctttcacctagag

SEQ ID NO: 1994886 - DNA, 15 bp, Homo sapiens
cctttcacctagagt

SEQ ID NO: 1994887 - DNA, 15 bp, Homo sapiens
ctttcacctagagtg

SEQ ID NO: 1994888 - DNA, 15 bp, Homo sapiens
tttcacctagagtgt

SEQ ID NO: 1994889 - DNA, 15 bp, Homo sapiens
ttcacctagagtgtt

SEQ ID NO: 1994890 - DNA, 15 bp, Homo sapiens
tcacctagagtgttt

SEQ ID NO: 1994891 - DNA, 15 bp, Homo sapiens
cacctagagtgtttc

SEQ ID NO: 1994892 - DNA, 15 bp, Homo sapiens
acctagagtgtttca

SEQ ID NO: 1994893 - DNA, 15 bp, Homo sapiens
cctagagtgtttcat

SEQ ID NO: 1994894 - DNA, 15 bp, Homo sapiens
ctagagtgtttcata

SEQ ID NO: 1994895 - DNA, 15 bp, Homo sapiens
tagagtgtttcatat

SEQ ID NO: 1994896 - DNA, 15 bp, Homo sapiens
agagtgtttcatatg

SEQ ID NO: 1994897 - DNA, 15 bp, Homo sapiens
gagtgtttcatatga

SEQ ID NO: 1994898 - DNA, 15 bp, Homo sapiens
agtgtttcatatgaa

SEQ ID NO: 1994899 - DNA, 15 bp, Homo sapiens
gtgtttcatatgaat

SEQ ID NO: 1994900 - DNA, 15 bp, Homo sapiens
tgtttcatatgaata

SEQ ID NO: 1994901 - DNA, 15 bp, Homo sapiens
gtttcatatgaatat

SEQ ID NO: 1994902 - DNA, 15 bp, Homo sapiens
tttcatatgaatatg

SEQ ID NO: 1994903 - DNA, 15 bp, Homo sapiens
ttcatatgaatatga

SEQ ID NO: 1994904 - DNA, 15 bp, Homo sapiens
tcatatgaatatgaa

SEQ ID NO: 1994905 - DNA, 15 bp, Homo sapiens
catatgaatatgaaa

SEQ ID NO: 1994906 - DNA, 15 bp, Homo sapiens
atatgaatatgaaac

SEQ ID NO: 1994907 - DNA, 15 bp, Homo sapiens
tatgaatatgaaaca

SEQ ID NO: 1994908 - DNA, 15 bp, Homo sapiens
atgaatatgaaacat

SEQ ID NO: 1994909 - DNA, 15 bp, Homo sapiens
tgaatatgaaacatg

SEQ ID NO: 1994910 - DNA, 15 bp, Homo sapiens
gaatatgaaacatgt

SEQ ID NO: 1994911 - DNA, 15 bp, Homo sapiens
aatatgaaacatgtt

SEQ ID NO: 1994912 - DNA, 15 bp, Homo sapiens
atatgaaacatgtta

SEQ ID NO: 1994913 - DNA, 15 bp, Homo sapiens
tatgaaacatgttat

SEQ ID NO: 1994914 - DNA, 15 bp, Homo sapiens
atgaaacatgttatg

SEQ ID NO: 1994915 - DNA, 15 bp, Homo sapiens
tgaaacatgttatgg

SEQ ID NO: 1994916 - DNA, 15 bp, Homo sapiens
gaaacatgttatggt

SEQ ID NO: 1994917 - DNA, 15 bp, Homo sapiens
aaacatgttatggtt

SEQ ID NO: 1994918 - DNA, 15 bp, Homo sapiens
aacatgttatggttt

SEQ ID NO: 1994919 - DNA, 15 bp, Homo sapiens
acatgttatggttta

SEQ ID NO: 1994920 - DNA, 15 bp, Homo sapiens
catgttatggtttat

SEQ ID NO: 1994921 - DNA, 15 bp, Homo sapiens
atgttatggtttata

SEQ ID NO: 1994922 - DNA, 15 bp, Homo sapiens
tgttatggtttatat

SEQ ID NO: 1994923 - DNA, 15 bp, Homo sapiens
gttatggtttatatg

SEQ ID NO: 1994924 - DNA, 15 bp, Homo sapiens
ttatggtttatatgt

SEQ ID NO: 1994925 - DNA, 15 bp, Homo sapiens
tatggtttatatgtt

SEQ ID NO: 1994926 - DNA, 15 bp, Homo sapiens
atggtttatatgtta

SEQ ID NO: 1994927 - DNA, 15 bp, Homo sapiens
tggtttatatgttac

SEQ ID NO: 1994928 - DNA, 15 bp, Homo sapiens
ggtttatatgttacc

SEQ ID NO: 1994929 - DNA, 15 bp, Homo sapiens
gtttatatgttacca

SEQ ID NO: 1994930 - DNA, 15 bp, Homo sapiens
tttatatgttaccag

SEQ ID NO: 1994931 - DNA, 15 bp, Homo sapiens
ttatatgttaccagt

SEQ ID NO: 1994932 - DNA, 15 bp, Homo sapiens
tatatgttaccagta

SEQ ID NO: 1994933 - DNA, 15 bp, Homo sapiens
atatgttaccagtaa

SEQ ID NO: 1994934 - DNA, 15 bp, Homo sapiens
tatgttaccagtaat

SEQ ID NO: 1994935 - DNA, 15 bp, Homo sapiens
atgttaccagtaatt

SEQ ID NO: 1994936 - DNA, 15 bp, Homo sapiens
tgttaccagtaattt

SEQ ID NO: 1994937 - DNA, 15 bp, Homo sapiens
gttaccagtaatttc

SEQ ID NO: 1994938 - DNA, 15 bp, Homo sapiens
ttaccagtaatttca

SEQ ID NO: 1994939 - DNA, 15 bp, Homo sapiens
taccagtaatttcaa

SEQ ID NO: 1994940 - DNA, 15 bp, Homo sapiens
accagtaatttcaaa

SEQ ID NO: 1994941 - DNA, 15 bp, Homo sapiens
ccagtaatttcaaat

SEQ ID NO: 1994942 - DNA, 15 bp, Homo sapiens
cagtaatttcaaatt

SEQ ID NO: 1994943 - DNA, 15 bp, Homo sapiens
agtaatttcaaattt

SEQ ID NO: 1994944 - DNA, 15 bp, Homo sapiens
gtaatttcaaatttg

SEQ ID NO: 1994945 - DNA, 15 bp, Homo sapiens
taatttcaaatttga

SEQ ID NO: 1994946 - DNA, 15 bp, Homo sapiens
aatttcaaatttgaa

SEQ ID NO: 1994947 - DNA, 15 bp, Homo sapiens
atttcaaatttgaac

SEQ ID NO: 1994948 - DNA, 15 bp, Homo sapiens
tttcaaatttgaact

SEQ ID NO: 1994949 - DNA, 15 bp, Homo sapiens
ttcaaatttgaactt

SEQ ID NO: 1994950 - DNA, 15 bp, Homo sapiens
tcaaatttgaactta

SEQ ID NO: 1994951 - DNA, 15 bp, Homo sapiens
caaatttgaacttag

SEQ ID NO: 1994952 - DNA, 15 bp, Homo sapiens
aaatttgaacttagc

SEQ ID NO: 1994953 - DNA, 15 bp, Homo sapiens
aatttgaacttagct

SEQ ID NO: 1994954 - DNA, 15 bp, Homo sapiens
atttgaacttagctt

SEQ ID NO: 1994955 - DNA, 15 bp, Homo sapiens
tttgaacttagcttt

SEQ ID NO: 1994956 - DNA, 15 bp, Homo sapiens
ttgaacttagcttta

SEQ ID NO: 1994957 - DNA, 15 bp, Homo sapiens
tgaacttagctttat

SEQ ID NO: 1994958 - DNA, 15 bp, Homo sapiens
gaacttagctttatg

SEQ ID NO: 1994959 - DNA, 15 bp, Homo sapiens
aacttagctttatga

SEQ ID NO: 1994960 - DNA, 15 bp, Homo sapiens
acttagctttatgac

SEQ ID NO: 1994961 - DNA, 15 bp, Homo sapiens
cttagctttatgacc

SEQ ID NO: 1994962 - DNA, 15 bp, Homo sapiens
ttagctttatgacct

SEQ ID NO: 1994963 - DNA, 15 bp, Homo sapiens
tagctttatgacctt

SEQ ID NO: 1994964 - DNA, 15 bp, Homo sapiens
agctttatgaccttg

SEQ ID NO: 1994965 - DNA, 15 bp, Homo sapiens
gctttatgaccttga

SEQ ID NO: 1994966 - DNA, 15 bp, Homo sapiens
ctttatgaccttgaa

SEQ ID NO: 1994967 - DNA, 15 bp, Homo sapiens
tttatgaccttgaac

SEQ ID NO: 1994968 - DNA, 15 bp, Homo sapiens
ttatgaccttgaaca

SEQ ID NO: 1994969 - DNA, 15 bp, Homo sapiens
tatgaccttgaacat

SEQ ID NO: 1994970 - DNA, 15 bp, Homo sapiens
atgaccttgaacata

SEQ ID NO: 1994971 - DNA, 15 bp, Homo sapiens
gaccttgaacatatt

SEQ ID NO: 1994972 - DNA, 15 bp, Homo sapiens
accttgaacatattt

SEQ ID NO: 1994973 - DNA, 15 bp, Homo sapiens
ccttgaacatattta

SEQ ID NO: 1994974 - DNA, 15 bp, Homo sapiens
cttgaacatatttat

SEQ ID NO: 1994975 - DNA, 15 bp, Homo sapiens
ttgaacatatttatt

SEQ ID NO: 1994976 - DNA, 15 bp, Homo sapiens
tgaacatatttatta

SEQ ID NO: 1994977 - DNA, 15 bp, Homo sapiens
gaacatatttattag

SEQ ID NO: 1994978 - DNA, 15 bp, Homo sapiens
aacatatttattagt

SEQ ID NO: 1994979 - DNA, 15 bp, Homo sapiens
acatatttattagtt

SEQ ID NO: 1994980 - DNA, 15 bp, Homo sapiens
catatttattagtta

SEQ ID NO: 1994981 - DNA, 15 bp, Homo sapiens
atatttattagttat

SEQ ID NO: 1994982 - DNA, 15 bp, Homo sapiens
tatttattagttatt

SEQ ID NO: 1994983 - DNA, 15 bp, Homo sapiens
atttattagttattt

SEQ ID NO: 1994984 - DNA, 15 bp, Homo sapiens
tttattagttattta

SEQ ID NO: 1994985 - DNA, 15 bp, Homo sapiens
ttattagttatttat

SEQ ID NO: 1994986 - DNA, 15 bp, Homo sapiens
tattagttatttatt

SEQ ID NO: 1994987 - DNA, 15 bp, Homo sapiens
attagttatttattg

SEQ ID NO: 1994988 - DNA, 15 bp, Homo sapiens
ttagttatttattgt

SEQ ID NO: 1994989 - DNA, 15 bp, Homo sapiens
tagttatttattgtt

SEQ ID NO: 1994990 - DNA, 15 bp, Homo sapiens
agttatttattgtta

SEQ ID NO: 1994991 - DNA, 15 bp, Homo sapiens
gttatttattgttat

SEQ ID NO: 1994992 - DNA, 15 bp, Homo sapiens
ttatttattgttatg

SEQ ID NO: 1994993 - DNA, 15 bp, Homo sapiens
tatttattgttatgt

SEQ ID NO: 1994994 - DNA, 15 bp, Homo sapiens
atttattgttatgtt

SEQ ID NO: 1994995 - DNA, 15 bp, Homo sapiens
tttattgttatgtta

SEQ ID NO: 1994996 - DNA, 15 bp, Homo sapiens
ttattgttatgttat

SEQ ID NO: 1994997 - DNA, 15 bp, Homo sapiens
tattgttatgttata

SEQ ID NO: 1994998 - DNA, 15 bp, Homo sapiens
attgttatgttataa

SEQ ID NO: 1994999 - DNA, 15 bp, Homo sapiens
ttgttatgttataaa

SEQ ID NO: 1995000 - DNA, 15 bp, Homo sapiens
tgttatgttataaat

SEQ ID NO: 1995001 - DNA, 15 bp, Homo sapiens
gttatgttataaatt

SEQ ID NO: 1995002 - DNA, 15 bp, Homo sapiens
ttatgttataaatta

SEQ ID NO: 1995003 - DNA, 15 bp, Homo sapiens
tatgttataaattat

SEQ ID NO: 1995004 - DNA, 15 bp, Homo sapiens
atgttataaattatt

SEQ ID NO: 1995005 - DNA, 15 bp, Homo sapiens
tgttataaattattc

SEQ ID NO: 1995006 - DNA, 15 bp, Homo sapiens
gttataaattattcc

SEQ ID NO: 1995007 - DNA, 15 bp, Homo sapiens
ttataaattattccc

SEQ ID NO: 1995008 - DNA, 15 bp, Homo sapiens
tataaattattccca

SEQ ID NO: 1995009 - DNA, 15 bp, Homo sapiens
ataaattattcccaa

SEQ ID NO: 1995010 - DNA, 15 bp, Homo sapiens
taaattattcccaaa

SEQ ID NO: 1995011 - DNA, 15 bp, Homo sapiens
aaattattcccaaat

SEQ ID NO: 1995012 - DNA, 15 bp, Homo sapiens
aattattcccaaatg

SEQ ID NO: 1995013 - DNA, 15 bp, Homo sapiens
attattcccaaatgt

SEQ ID NO: 1995014 - DNA, 15 bp, Homo sapiens
ttattcccaaatgta

SEQ ID NO: 1995015 - DNA, 15 bp, Homo sapiens
tattcccaaatgtag

SEQ ID NO: 1995016 - DNA, 15 bp, Homo sapiens
attcccaaatgtagc

SEQ ID NO: 1995017 - DNA, 15 bp, Homo sapiens
ttcccaaatgtagcc

SEQ ID NO: 1995018 - DNA, 15 bp, Homo sapiens
tcccaaatgtagccg

SEQ ID NO: 1995019 - DNA, 15 bp, Homo sapiens
cccaaatgtagccgt

SEQ ID NO: 1995020 - DNA, 15 bp, Homo sapiens
ccaaatgtagccgtt

SEQ ID NO: 1995021 - DNA, 15 bp, Homo sapiens
caaatgtagccgttt

SEQ ID NO: 1995022 - DNA, 15 bp, Homo sapiens
aaatgtagccgtttt

SEQ ID NO: 1995023 - DNA, 15 bp, Homo sapiens
aatgtagccgttttg

SEQ ID NO: 1995024 - DNA, 15 bp, Homo sapiens
atgtagccgttttgt

SEQ ID NO: 1995025 - DNA, 15 bp, Homo sapiens
tgtagccgttttgta

SEQ ID NO: 1995026 - DNA, 15 bp, Homo sapiens
gtagccgttttgtac

SEQ ID NO: 1995027 - DNA, 15 bp, Homo sapiens
tagccgttttgtaca

SEQ ID NO: 1995028 - DNA, 15 bp, Homo sapiens
agccgttttgtacaa

SEQ ID NO: 1995029 - DNA, 15 bp, Homo sapiens
gccgttttgtacaac

SEQ ID NO: 1995030 - DNA, 15 bp, Homo sapiens
ccgttttgtacaaca

SEQ ID NO: 1995031 - DNA, 15 bp, Homo sapiens
cgttttgtacaacaa

SEQ ID NO: 1995032 - DNA, 15 bp, Homo sapiens
gttttgtacaacaaa

SEQ ID NO: 1995033 - DNA, 15 bp, Homo sapiens
ttttgtacaacaaac

SEQ ID NO: 1995034 - DNA, 15 bp, Homo sapiens
tttgtacaacaaaca

SEQ ID NO: 1995035 - DNA, 15 bp, Homo sapiens
ttgtacaacaaacat

SEQ ID NO: 1995036 - DNA, 15 bp, Homo sapiens
tgtacaacaaacatt

SEQ ID NO: 1995037 - DNA, 15 bp, Homo sapiens
gtacaacaaacattt

SEQ ID NO: 1995038 - DNA, 15 bp, Homo sapiens
tacaacaaacattta

SEQ ID NO: 1995039 - DNA, 15 bp, Homo sapiens
acaacaaacatttat

SEQ ID NO: 1995040 - DNA, 15 bp, Homo sapiens
aacaaacatttatta

SEQ ID NO: 1995041 - DNA, 15 bp, Homo sapiens
aacatttattatcac

SEQ ID NO: 1995042 - DNA, 15 bp, Homo sapiens
acatttattatcaca

SEQ ID NO: 1995043 - DNA, 15 bp, Homo sapiens
catttattatcacat

SEQ ID NO: 1995044 - DNA, 15 bp, Homo sapiens
atttattatcacata

SEQ ID NO: 1995045 - DNA, 15 bp, Homo sapiens
tttattatcacataa

SEQ ID NO: 1995046 - DNA, 15 bp, Homo sapiens
ttattatcacataaa

SEQ ID NO: 1995047 - DNA, 15 bp, Homo sapiens
tattatcacataaag

SEQ ID NO: 1995048 - DNA, 15 bp, Homo sapiens
attatcacataaagt

SEQ ID NO: 1995049 - DNA, 15 bp, Homo sapiens
ttatcacataaagtt

SEQ ID NO: 1995050 - DNA, 15 bp, Homo sapiens
tatcacataaagttt

SEQ ID NO: 1995051 - DNA, 15 bp, Homo sapiens
atcacataaagtttc

SEQ ID NO: 1995052 - DNA, 15 bp, Homo sapiens
tcacataaagtttct

SEQ ID NO: 1995053 - DNA, 15 bp, Homo sapiens
cacataaagtttctg

SEQ ID NO: 1995054 - DNA, 15 bp, Homo sapiens
acataaagtttctgt

SEQ ID NO: 1995055 - DNA, 15 bp, Homo sapiens
cataaagtttctgtc

SEQ ID NO: 1995056 - DNA, 15 bp, Homo sapiens
ataaagtttctgtcc

SEQ ID NO: 1995057 - DNA, 15 bp, Homo sapiens
taaagtttctgtcca

SEQ ID NO: 1995058 - DNA, 15 bp, Homo sapiens
aaagtttctgtccat

SEQ ID NO: 1995059 - DNA, 15 bp, Homo sapiens
aagtttctgtccatc

SEQ ID NO: 1995060 - DNA, 15 bp, Homo sapiens
agtttctgtccatct

SEQ ID NO: 1995061 - DNA, 15 bp, Homo sapiens
gtttctgtccatctg

SEQ ID NO: 1995062 - DNA, 15 bp, Homo sapiens
tttctgtccatctga

SEQ ID NO: 1995063 - DNA, 15 bp, Homo sapiens
ttctgtccatctgaa

SEQ ID NO: 1995064 - DNA, 15 bp, Homo sapiens
tctgtccatctgaaa

SEQ ID NO: 1995065 - DNA, 15 bp, Homo sapiens
ctgtccatctgaaat

SEQ ID NO: 1995066 - DNA, 15 bp, Homo sapiens
tgtccatctgaaatc

SEQ ID NO: 1995067 - DNA, 15 bp, Homo sapiens
gtccatctgaaatcc

SEQ ID NO: 1995068 - DNA, 15 bp, Homo sapiens
tccatctgaaatcca

SEQ ID NO: 1995069 - DNA, 15 bp, Homo sapiens
ccatctgaaatccat

SEQ ID NO: 1995070 - DNA, 15 bp, Homo sapiens
catctgaaatccatt

SEQ ID NO: 1995071 - DNA, 15 bp, Homo sapiens
atctgaaatccatta

SEQ ID NO: 1995072 - DNA, 15 bp, Homo sapiens
tctgaaatccattag

SEQ ID NO: 1995073 - DNA, 15 bp, Homo sapiens
ctgaaatccattagt

SEQ ID NO: 1995074 - DNA, 15 bp, Homo sapiens
tgaaatccattagtg

SEQ ID NO: 1995075 - DNA, 15 bp, Homo sapiens
gaaatccattagtgg

SEQ ID NO: 1995076 - DNA, 15 bp, Homo sapiens
aaatccattagtggc

SEQ ID NO: 1995077 - DNA, 15 bp, Homo sapiens
aatccattagtggct

SEQ ID NO: 1995078 - DNA, 15 bp, Homo sapiens
atccattagtggctg

SEQ ID NO: 1995079 - DNA, 15 bp, Homo sapiens
tccattagtggctga

SEQ ID NO: 1995080 - DNA, 15 bp, Homo sapiens
ccattagtggctgaa

SEQ ID NO: 1995081 - DNA, 15 bp, Homo sapiens
cattagtggctgaac

SEQ ID NO: 1995082 - DNA, 15 bp, Homo sapiens
attagtggctgaact

SEQ ID NO: 1995083 - DNA, 15 bp, Homo sapiens
ttagtggctgaactg

SEQ ID NO: 1995084 - DNA, 15 bp, Homo sapiens
tagtggctgaactga

SEQ ID NO: 1995085 - DNA, 15 bp, Homo sapiens
agtggctgaactgag

SEQ ID NO: 1995086 - DNA, 15 bp, Homo sapiens
gtggctgaactgagt

SEQ ID NO: 1995087 - DNA, 15 bp, Homo sapiens
tggctgaactgagtg

SEQ ID NO: 1995088 - DNA, 15 bp, Homo sapiens
ggctgaactgagtgt

SEQ ID NO: 1995089 - DNA, 15 bp, Homo sapiens
gctgaactgagtgtt

SEQ ID NO: 1995090 - DNA, 15 bp, Homo sapiens
ctgaactgagtgttt

SEQ ID NO: 1995091 - DNA, 15 bp, Homo sapiens
tgaactgagtgtttc

SEQ ID NO: 1995092 - DNA, 15 bp, Homo sapiens
gaactgagtgtttct

SEQ ID NO: 1995093 - DNA, 15 bp, Homo sapiens
aactgagtgtttctg

SEQ ID NO: 1995094 - DNA, 15 bp, Homo sapiens
actgagtgtttctgg

SEQ ID NO: 1995095 - DNA, 15 bp, Homo sapiens
ctgagtgtttctggc

SEQ ID NO: 1995096 - DNA, 15 bp, Homo sapiens
tgagtgtttctggct

SEQ ID NO: 1995097 - DNA, 15 bp, Homo sapiens
gagtgtttctggctc

SEQ ID NO: 1995098 - DNA, 15 bp, Homo sapiens
agtgtttctggctca

SEQ ID NO: 1995099 - DNA, 15 bp, Homo sapiens
gtgtttctggctcag

SEQ ID NO: 1995100 - DNA, 15 bp, Homo sapiens
tgtttctggctcaga

SEQ ID NO: 1995101 - DNA, 15 bp, Homo sapiens
gtttctggctcagag

SEQ ID NO: 1995102 - DNA, 15 bp, Homo sapiens
tttctggctcagagt

SEQ ID NO: 1995103 - DNA, 15 bp, Homo sapiens
ttctggctcagagtc

SEQ ID NO: 1995104 - DNA, 15 bp, Homo sapiens
tctggctcagagtct

SEQ ID NO: 1995105 - DNA, 15 bp, Homo sapiens
ctggctcagagtctt

SEQ ID NO: 1995106 - DNA, 15 bp, Homo sapiens
tggctcagagtcttt

SEQ ID NO: 1995107 - DNA, 15 bp, Homo sapiens
ggctcagagtctttc

SEQ ID NO: 1995108 - DNA, 15 bp, Homo sapiens
gctcagagtctttca

SEQ ID NO: 1995109 - DNA, 15 bp, Homo sapiens
ctcagagtctttcat

SEQ ID NO: 1995110 - DNA, 15 bp, Homo sapiens
tcagagtctttcatg

SEQ ID NO: 1995111 - DNA, 15 bp, Homo sapiens
cagagtctttcatga

SEQ ID NO: 1995112 - DNA, 15 bp, Homo sapiens
agagtctttcatgaa

SEQ ID NO: 1995113 - DNA, 15 bp, Homo sapiens
gagtctttcatgaag

SEQ ID NO: 1995114 - DNA, 15 bp, Homo sapiens
agtctttcatgaagc

SEQ ID NO: 1995115 - DNA, 15 bp, Homo sapiens
gtctttcatgaagct

SEQ ID NO: 1995116 - DNA, 15 bp, Homo sapiens
tctttcatgaagctg

SEQ ID NO: 1995117 - DNA, 15 bp, Homo sapiens
ctttcatgaagctgc

SEQ ID NO: 1995118 - DNA, 15 bp, Homo sapiens
tttcatgaagctgca

SEQ ID NO: 1995119 - DNA, 15 bp, Homo sapiens
ttcatgaagctgcag

SEQ ID NO: 1995120 - DNA, 15 bp, Homo sapiens
tcatgaagctgcagt

SEQ ID NO: 1995121 - DNA, 15 bp, Homo sapiens
catgaagctgcagtg

SEQ ID NO: 1995122 - DNA, 15 bp, Homo sapiens
atgaagctgcagtga

SEQ ID NO: 1995123 - DNA, 15 bp, Homo sapiens
tgaagctgcagtgac

SEQ ID NO: 1995124 - DNA, 15 bp, Homo sapiens
gaagctgcagtgaca

SEQ ID NO: 1995125 - DNA, 15 bp, Homo sapiens
aagctgcagtgacag

SEQ ID NO: 1995126 - DNA, 15 bp, Homo sapiens
agctgcagtgacagt

SEQ ID NO: 1995127 - DNA, 15 bp, Homo sapiens
gctgcagtgacagtc

SEQ ID NO: 1995128 - DNA, 15 bp, Homo sapiens
ctgcagtgacagtct

SEQ ID NO: 1995129 - DNA, 15 bp, Homo sapiens
tgcagtgacagtctt

SEQ ID NO: 1995130 - DNA, 15 bp, Homo sapiens
gcagtgacagtcttg

SEQ ID NO: 1995131 - DNA, 15 bp, Homo sapiens
cagtgacagtcttgg

SEQ ID NO: 1995132 - DNA, 15 bp, Homo sapiens
agtgacagtcttggc

SEQ ID NO: 1995133 - DNA, 15 bp, Homo sapiens
gtgacagtcttggct

SEQ ID NO: 1995134 - DNA, 15 bp, Homo sapiens
tgacagtcttggctg

SEQ ID NO: 1995135 - DNA, 15 bp, Homo sapiens
gacagtcttggctgg

SEQ ID NO: 1995136 - DNA, 15 bp, Homo sapiens
acagtcttggctggg

SEQ ID NO: 1995137 - DNA, 15 bp, Homo sapiens
cagtcttggctgggt

SEQ ID NO: 1995138 - DNA, 15 bp, Homo sapiens
agtcttggctgggtc

SEQ ID NO: 1995139 - DNA, 15 bp, Homo sapiens
gtcttggctgggtct

SEQ ID NO: 1995140 - DNA, 15 bp, Homo sapiens
tcttggctgggtctg

SEQ ID NO: 1995141 - DNA, 15 bp, Homo sapiens
cttggctgggtctgt

SEQ ID NO: 1995142 - DNA, 15 bp, Homo sapiens
ttggctgggtctgta

SEQ ID NO: 1995143 - DNA, 15 bp, Homo sapiens
tggctgggtctgtag

SEQ ID NO: 1995144 - DNA, 15 bp, Homo sapiens
ggctgggtctgtagt

SEQ ID NO: 1995145 - DNA, 15 bp, Homo sapiens
gctgggtctgtagta

SEQ ID NO: 1995146 - DNA, 15 bp, Homo sapiens
ctgggtctgtagtaa

SEQ ID NO: 1995147 - DNA, 15 bp, Homo sapiens
tgggtctgtagtaat

SEQ ID NO: 1995148 - DNA, 15 bp, Homo sapiens
gggtctgtagtaatc

SEQ ID NO: 1995149 - DNA, 15 bp, Homo sapiens
ggtctgtagtaatct

SEQ ID NO: 1995150 - DNA, 15 bp, Homo sapiens
gtctgtagtaatctg

SEQ ID NO: 1995151 - DNA, 15 bp, Homo sapiens
tctgtagtaatctga

SEQ ID NO: 1995152 - DNA, 15 bp, Homo sapiens
ctgtagtaatctgaa

SEQ ID NO: 1995153 - DNA, 15 bp, Homo sapiens
tgtagtaatctgaag

SEQ ID NO: 1995154 - DNA, 15 bp, Homo sapiens
gtagtaatctgaagg

SEQ ID NO: 1995155 - DNA, 15 bp, Homo sapiens
tagtaatctgaaggc

SEQ ID NO: 1995156 - DNA, 15 bp, Homo sapiens
agtaatctgaaggct

SEQ ID NO: 1995157 - DNA, 15 bp, Homo sapiens
gtaatctgaaggctt

SEQ ID NO: 1995158 - DNA, 15 bp, Homo sapiens
taatctgaaggcttg

SEQ ID NO: 1995159 - DNA, 15 bp, Homo sapiens
aatctgaaggcttga

SEQ ID NO: 1995160 - DNA, 15 bp, Homo sapiens
atctgaaggcttgac

SEQ ID NO: 1995161 - DNA, 15 bp, Homo sapiens
tctgaaggcttgact

SEQ ID NO: 1995162 - DNA, 15 bp, Homo sapiens
ctgaaggcttgactg

SEQ ID NO: 1995163 - DNA, 15 bp, Homo sapiens
tgaaggcttgactgg

SEQ ID NO: 1995164 - DNA, 15 bp, Homo sapiens
gaaggcttgactggg

SEQ ID NO: 1995165 - DNA, 15 bp, Homo sapiens
aaggcttgactgggg

SEQ ID NO: 1995166 - DNA, 15 bp, Homo sapiens
aggcttgactggggg

SEQ ID NO: 1995167 - DNA, 15 bp, Homo sapiens
ggcttgactgggggt

SEQ ID NO: 1995168 - DNA, 15 bp, Homo sapiens
gcttgactgggggta

SEQ ID NO: 1995169 - DNA, 15 bp, Homo sapiens
cttgactgggggtag

SEQ ID NO: 1995170 - DNA, 15 bp, Homo sapiens
ttgactgggggtaga

SEQ ID NO: 1995171 - DNA, 15 bp, Homo sapiens
tgactgggggtagag

SEQ ID NO: 1995172 - DNA, 15 bp, Homo sapiens
gactgggggtagagc

SEQ ID NO: 1995173 - DNA, 15 bp, Homo sapiens
actgggggtagagca

SEQ ID NO: 1995174 - DNA, 15 bp, Homo sapiens
ctgggggtagagcat

SEQ ID NO: 1995175 - DNA, 15 bp, Homo sapiens
tgggggtagagcatt

SEQ ID NO: 1995176 - DNA, 15 bp, Homo sapiens
gggggtagagcattt

SEQ ID NO: 1995177 - DNA, 15 bp, Homo sapiens
ggggtagagcatttg

SEQ ID NO: 1995178 - DNA, 15 bp, Homo sapiens
gggtagagcatttgc

SEQ ID NO: 1995179 - DNA, 15 bp, Homo sapiens
ggtagagcatttgct

SEQ ID NO: 1995180 - DNA, 15 bp, Homo sapiens
gtagagcatttgctt

SEQ ID NO: 1995181 - DNA, 15 bp, Homo sapiens
tagagcatttgcttc

SEQ ID NO: 1995182 - DNA, 15 bp, Homo sapiens
agagcatttgcttcc

SEQ ID NO: 1995183 - DNA, 15 bp, Homo sapiens
gagcatttgcttcca

SEQ ID NO: 1995184 - DNA, 15 bp, Homo sapiens
agcatttgcttccaa

SEQ ID NO: 1995185 - DNA, 15 bp, Homo sapiens
gcatttgcttccaag

SEQ ID NO: 1995186 - DNA, 15 bp, Homo sapiens
catttgcttccaagt

SEQ ID NO: 1995187 - DNA, 15 bp, Homo sapiens
atttgcttccaagta

SEQ ID NO: 1995188 - DNA, 15 bp, Homo sapiens
tttgcttccaagtaa

SEQ ID NO: 1995189 - DNA, 15 bp, Homo sapiens
ttgcttccaagtaaa

SEQ ID NO: 1995190 - DNA, 15 bp, Homo sapiens
tgcttccaagtaaat

SEQ ID NO: 1995191 - DNA, 15 bp, Homo sapiens
gcttccaagtaaatt

SEQ ID NO: 1995192 - DNA, 15 bp, Homo sapiens
cttccaagtaaattc

SEQ ID NO: 1995193 - DNA, 15 bp, Homo sapiens
ttccaagtaaattca

SEQ ID NO: 1995194 - DNA, 15 bp, Homo sapiens
tccaagtaaattcac

SEQ ID NO: 1995195 - DNA, 15 bp, Homo sapiens
ccaagtaaattcact

SEQ ID NO: 1995196 - DNA, 15 bp, Homo sapiens
caagtaaattcactt

SEQ ID NO: 1995197 - DNA, 15 bp, Homo sapiens
aagtaaattcactta

SEQ ID NO: 1995198 - DNA, 15 bp, Homo sapiens
agtaaattcacttac

SEQ ID NO: 1995199 - DNA, 15 bp, Homo sapiens
gtaaattcacttaca

SEQ ID NO: 1995200 - DNA, 15 bp, Homo sapiens
taaattcacttacat

SEQ ID NO: 1995201 - DNA, 15 bp, Homo sapiens
aaattcacttacata

SEQ ID NO: 1995202 - DNA, 15 bp, Homo sapiens
aattcacttacatag

SEQ ID NO: 1995203 - DNA, 15 bp, Homo sapiens
attcacttacatagc

SEQ ID NO: 1995204 - DNA, 15 bp, Homo sapiens
ttcacttacatagct

SEQ ID NO: 1995205 - DNA, 15 bp, Homo sapiens
tcacttacatagctt

SEQ ID NO: 1995206 - DNA, 15 bp, Homo sapiens
cacttacatagcttt

SEQ ID NO: 1995207 - DNA, 15 bp, Homo sapiens
acttacatagctttt

SEQ ID NO: 1995208 - DNA, 15 bp, Homo sapiens
cttacatagcttttg

SEQ ID NO: 1995209 - DNA, 15 bp, Homo sapiens
ttacatagcttttgg

SEQ ID NO: 1995210 - DNA, 15 bp, Homo sapiens
tacatagcttttggc

SEQ ID NO: 1995211 - DNA, 15 bp, Homo sapiens
acatagcttttggca

SEQ ID NO: 1995212 - DNA, 15 bp, Homo sapiens
catagcttttggcag

SEQ ID NO: 1995213 - DNA, 15 bp, Homo sapiens
atagcttttggcagg

SEQ ID NO: 1995214 - DNA, 15 bp, Homo sapiens
tagcttttggcagga

SEQ ID NO: 1995215 - DNA, 15 bp, Homo sapiens
agcttttggcaggag

SEQ ID NO: 1995216 - DNA, 15 bp, Homo sapiens
gcttttggcaggagg

SEQ ID NO: 1995217 - DNA, 15 bp, Homo sapiens
cttttggcaggaggc

SEQ ID NO: 1995218 - DNA, 15 bp, Homo sapiens
ttttggcaggaggcc

SEQ ID NO: 1995219 - DNA, 15 bp, Homo sapiens
tttggcaggaggcct

SEQ ID NO: 1995220 - DNA, 15 bp, Homo sapiens
ttggcaggaggcctc

SEQ ID NO: 1995221 - DNA, 15 bp, Homo sapiens
tggcaggaggcctca

SEQ ID NO: 1995222 - DNA, 15 bp, Homo sapiens
ggcaggaggcctcag

SEQ ID NO: 1995223 - DNA, 15 bp, Homo sapiens
gcaggaggcctcagt

SEQ ID NO: 1995224 - DNA, 15 bp, Homo sapiens
caggaggcctcagtt

SEQ ID NO: 1995225 - DNA, 15 bp, Homo sapiens
aggaggcctcagttc

SEQ ID NO: 1995226 - DNA, 15 bp, Homo sapiens
ggaggcctcagttct

SEQ ID NO: 1995227 - DNA, 15 bp, Homo sapiens
gaggcctcagttctt

SEQ ID NO: 1995228 - DNA, 15 bp, Homo sapiens
aggcctcagttcttt

SEQ ID NO: 1995229 - DNA, 15 bp, Homo sapiens
ggcctcagttctttg

SEQ ID NO: 1995230 - DNA, 15 bp, Homo sapiens
gcctcagttctttgc

SEQ ID NO: 1995231 - DNA, 15 bp, Homo sapiens
cctcagttctttgct

SEQ ID NO: 1995232 - DNA, 15 bp, Homo sapiens
ctcagttctttgctg

SEQ ID NO: 1995233 - DNA, 15 bp, Homo sapiens
tcagttctttgctgg

SEQ ID NO: 1995234 - DNA, 15 bp, Homo sapiens
cagttctttgctggc

SEQ ID NO: 1995235 - DNA, 15 bp, Homo sapiens
agttctttgctggcc

SEQ ID NO: 1995236 - DNA, 15 bp, Homo sapiens
gttctttgctggcca

SEQ ID NO: 1995237 - DNA, 15 bp, Homo sapiens
ttctttgctggccat

SEQ ID NO: 1995238 - DNA, 15 bp, Homo sapiens
tctttgctggccatt

SEQ ID NO: 1995239 - DNA, 15 bp, Homo sapiens
ctttgctggccattt

SEQ ID NO: 1995240 - DNA, 15 bp, Homo sapiens
tttgctggccatttg

SEQ ID NO: 1995241 - DNA, 15 bp, Homo sapiens
ttgctggccatttgt

SEQ ID NO: 1995242 - DNA, 15 bp, Homo sapiens
tgctggccatttgta

SEQ ID NO: 1995243 - DNA, 15 bp, Homo sapiens
gctggccatttgtaa

SEQ ID NO: 1995244 - DNA, 15 bp, Homo sapiens
ctggccatttgtaag

SEQ ID NO: 1995245 - DNA, 15 bp, Homo sapiens
tggccatttgtaaga

SEQ ID NO: 1995246 - DNA, 15 bp, Homo sapiens
ggccatttgtaagag

SEQ ID NO: 1995247 - DNA, 15 bp, Homo sapiens
gccatttgtaagagg

SEQ ID NO: 1995248 - DNA, 15 bp, Homo sapiens
ccatttgtaagaggt

SEQ ID NO: 1995249 - DNA, 15 bp, Homo sapiens
catttgtaagaggtc

SEQ ID NO: 1995250 - DNA, 15 bp, Homo sapiens
atttgtaagaggtct

SEQ ID NO: 1995251 - DNA, 15 bp, Homo sapiens
tttgtaagaggtctc

SEQ ID NO: 1995252 - DNA, 15 bp, Homo sapiens
ttgtaagaggtctca

SEQ ID NO: 1995253 - DNA, 15 bp, Homo sapiens
tgtaagaggtctcag

SEQ ID NO: 1995254 - DNA, 15 bp, Homo sapiens
gtaagaggtctcagt

SEQ ID NO: 1995255 - DNA, 15 bp, Homo sapiens
taagaggtctcagtt

SEQ ID NO: 1995256 - DNA, 15 bp, Homo sapiens
aagaggtctcagttc

SEQ ID NO: 1995257 - DNA, 15 bp, Homo sapiens
agaggtctcagttcc

SEQ ID NO: 1995258 - DNA, 15 bp, Homo sapiens
gaggtctcagttcct

SEQ ID NO: 1995259 - DNA, 15 bp, Homo sapiens
aggtctcagttcctt

SEQ ID NO: 1995260 - DNA, 15 bp, Homo sapiens
ggtctcagttccttt

SEQ ID NO: 1995261 - DNA, 15 bp, Homo sapiens
gtctcagttcctttc

SEQ ID NO: 1995262 - DNA, 15 bp, Homo sapiens
tctcagttcctttct

SEQ ID NO: 1995263 - DNA, 15 bp, Homo sapiens
ctcagttcctttcta

SEQ ID NO: 1995264 - DNA, 15 bp, Homo sapiens
tcagttcctttctac

SEQ ID NO: 1995265 - DNA, 15 bp, Homo sapiens
cagttcctttctact

SEQ ID NO: 1995266 - DNA, 15 bp, Homo sapiens
agttcctttctactt

SEQ ID NO: 1995267 - DNA, 15 bp, Homo sapiens
gttcctttctacttg

SEQ ID NO: 1995268 - DNA, 15 bp, Homo sapiens
ttcctttctacttgg

SEQ ID NO: 1995269 - DNA, 15 bp, Homo sapiens
tcctttctacttggg

SEQ ID NO: 1995270 - DNA, 15 bp, Homo sapiens
cctttctacttgggc

SEQ ID NO: 1995271 - DNA, 15 bp, Homo sapiens
ctttctacttgggct

SEQ ID NO: 1995272 - DNA, 15 bp, Homo sapiens
tttctacttgggctt

SEQ ID NO: 1995273 - DNA, 15 bp, Homo sapiens
ttctacttgggcttc

SEQ ID NO: 1995274 - DNA, 15 bp, Homo sapiens
tctacttgggcttct

SEQ ID NO: 1995275 - DNA, 15 bp, Homo sapiens
ctacttgggcttctc

SEQ ID NO: 1995276 - DNA, 15 bp, Homo sapiens
tacttgggcttctcc

SEQ ID NO: 1995277 - DNA, 15 bp, Homo sapiens
acttgggcttctcca

SEQ ID NO: 1995278 - DNA, 15 bp, Homo sapiens
cttgggcttctccat

SEQ ID NO: 1995279 - DNA, 15 bp, Homo sapiens
ttgggcttctccatc

SEQ ID NO: 1995280 - DNA, 15 bp, Homo sapiens
tgggcttctccatct

SEQ ID NO: 1995281 - DNA, 15 bp, Homo sapiens
gggcttctccatctg

SEQ ID NO: 1995282 - DNA, 15 bp, Homo sapiens
ggcttctccatctgg

SEQ ID NO: 1995283 - DNA, 15 bp, Homo sapiens
gcttctccatctggc

SEQ ID NO: 1995284 - DNA, 15 bp, Homo sapiens
cttctccatctggct

SEQ ID NO: 1995285 - DNA, 15 bp, Homo sapiens
ttctccatctggctg

SEQ ID NO: 1995286 - DNA, 15 bp, Homo sapiens
tctccatctggctgc

SEQ ID NO: 1995287 - DNA, 15 bp, Homo sapiens
ctccatctggctgct

SEQ ID NO: 1995288 - DNA, 15 bp, Homo sapiens
tccatctggctgctt

SEQ ID NO: 1995289 - DNA, 15 bp, Homo sapiens
ccatctggctgcttg

SEQ ID NO: 1995290 - DNA, 15 bp, Homo sapiens
catctggctgcttgt

SEQ ID NO: 1995291 - DNA, 15 bp, Homo sapiens
atctggctgcttgta

SEQ ID NO: 1995292 - DNA, 15 bp, Homo sapiens
tctggctgcttgtaa

SEQ ID NO: 1995293 - DNA, 15 bp, Homo sapiens
ctggctgcttgtaat

SEQ ID NO: 1995294 - DNA, 15 bp, Homo sapiens
tggctgcttgtaatg

SEQ ID NO: 1995295 - DNA, 15 bp, Homo sapiens
ggctgcttgtaatgt

SEQ ID NO: 1995296 - DNA, 15 bp, Homo sapiens
gctgcttgtaatgtg

SEQ ID NO: 1995297 - DNA, 15 bp, Homo sapiens
ctgcttgtaatgtgg

SEQ ID NO: 1995298 - DNA, 15 bp, Homo sapiens
tgcttgtaatgtggc

SEQ ID NO: 1995299 - DNA, 15 bp, Homo sapiens
gcttgtaatgtggca

SEQ ID NO: 1995300 - DNA, 15 bp, Homo sapiens
cttgtaatgtggcag

SEQ ID NO: 1995301 - DNA, 15 bp, Homo sapiens
ttgtaatgtggcagc

SEQ ID NO: 1995302 - DNA, 15 bp, Homo sapiens
tgtaatgtggcagct

SEQ ID NO: 1995303 - DNA, 15 bp, Homo sapiens
gtaatgtggcagctg

SEQ ID NO: 1995304 - DNA, 15 bp, Homo sapiens
taatgtggcagctga

SEQ ID NO: 1995305 - DNA, 15 bp, Homo sapiens
aatgtggcagctgac

SEQ ID NO: 1995306 - DNA, 15 bp, Homo sapiens
atgtggcagctgacg

SEQ ID NO: 1995307 - DNA, 15 bp, Homo sapiens
tgtggcagctgacgt

SEQ ID NO: 1995308 - DNA, 15 bp, Homo sapiens
gtggcagctgacgtc

SEQ ID NO: 1995309 - DNA, 15 bp, Homo sapiens
tggcagctgacgtct

SEQ ID NO: 1995310 - DNA, 15 bp, Homo sapiens
ggcagctgacgtctc

SEQ ID NO: 1995311 - DNA, 15 bp, Homo sapiens
gcagctgacgtctcc

SEQ ID NO: 1995312 - DNA, 15 bp, Homo sapiens
cagctgacgtctccc

SEQ ID NO: 1995313 - DNA, 15 bp, Homo sapiens
agctgacgtctccca

SEQ ID NO: 1995314 - DNA, 15 bp, Homo sapiens
gctgacgtctcccag

SEQ ID NO: 1995315 - DNA, 15 bp, Homo sapiens
ctgacgtctcccaga

SEQ ID NO: 1995316 - DNA, 15 bp, Homo sapiens
tgacgtctcccagag

SEQ ID NO: 1995317 - DNA, 15 bp, Homo sapiens
gacgtctcccagagt

SEQ ID NO: 1995318 - DNA, 15 bp, Homo sapiens
acgtctcccagagtg

SEQ ID NO: 1995319 - DNA, 15 bp, Homo sapiens
cgtctcccagagtga

SEQ ID NO: 1995320 - DNA, 15 bp, Homo sapiens
gtctcccagagtgag

SEQ ID NO: 1995321 - DNA, 15 bp, Homo sapiens
tctcccagagtgagt

SEQ ID NO: 1995322 - DNA, 15 bp, Homo sapiens
ctcccagagtgagtg

SEQ ID NO: 1995323 - DNA, 15 bp, Homo sapiens
tcccagagtgagtga

SEQ ID NO: 1995324 - DNA, 15 bp, Homo sapiens
cccagagtgagtgat

SEQ ID NO: 1995325 - DNA, 15 bp, Homo sapiens
ccagagtgagtgatc

SEQ ID NO: 1995326 - DNA, 15 bp, Homo sapiens
cagagtgagtgatct

SEQ ID NO: 1995327 - DNA, 15 bp, Homo sapiens
agagtgagtgatctg

SEQ ID NO: 1995328 - DNA, 15 bp, Homo sapiens
gagtgagtgatctga

SEQ ID NO: 1995329 - DNA, 15 bp, Homo sapiens
agtgagtgatctgag

SEQ ID NO: 1995330 - DNA, 15 bp, Homo sapiens
gtgagtgatctgaga

SEQ ID NO: 1995331 - DNA, 15 bp, Homo sapiens
tgagtgatctgagag

SEQ ID NO: 1995332 - DNA, 15 bp, Homo sapiens
gagtgatctgagaga

SEQ ID NO: 1995333 - DNA, 15 bp, Homo sapiens
agtgatctgagagaa

SEQ ID NO: 1995334 - DNA, 15 bp, Homo sapiens
gtgatctgagagaat

SEQ ID NO: 1995335 - DNA, 15 bp, Homo sapiens
tgatctgagagaatc

SEQ ID NO: 1995336 - DNA, 15 bp, Homo sapiens
gatctgagagaatca

SEQ ID NO: 1995337 - DNA, 15 bp, Homo sapiens
atctgagagaatcaa

SEQ ID NO: 1995338 - DNA, 15 bp, Homo sapiens
tctgagagaatcaaa

SEQ ID NO: 1995339 - DNA, 15 bp, Homo sapiens
ctgagagaatcaaaa

SEQ ID NO: 1995340 - DNA, 15 bp, Homo sapiens
tgagagaatcaaaag

SEQ ID NO: 1995341 - DNA, 15 bp, Homo sapiens
gagagaatcaaaagc

SEQ ID NO: 1995342 - DNA, 15 bp, Homo sapiens
agagaatcaaaagcc

SEQ ID NO: 1995343 - DNA, 15 bp, Homo sapiens
gagaatcaaaagcca

SEQ ID NO: 1995344 - DNA, 15 bp, Homo sapiens
agaatcaaaagccac

SEQ ID NO: 1995345 - DNA, 15 bp, Homo sapiens
gaatcaaaagccaca

SEQ ID NO: 1995346 - DNA, 15 bp, Homo sapiens
aatcaaaagccacat

SEQ ID NO: 1995347 - DNA, 15 bp, Homo sapiens
atcaaaagccacatt

SEQ ID NO: 1995348 - DNA, 15 bp, Homo sapiens
tcaaaagccacattc

SEQ ID NO: 1995349 - DNA, 15 bp, Homo sapiens
caaaagccacattct

SEQ ID NO: 1995350 - DNA, 15 bp, Homo sapiens
aaaagccacattctt

SEQ ID NO: 1995351 - DNA, 15 bp, Homo sapiens
aaagccacattcttt

SEQ ID NO: 1995352 - DNA, 15 bp, Homo sapiens
aagccacattctttc

SEQ ID NO: 1995353 - DNA, 15 bp, Homo sapiens
agccacattctttca

SEQ ID NO: 1995354 - DNA, 15 bp, Homo sapiens
gccacattctttcat

SEQ ID NO: 1995355 - DNA, 15 bp, Homo sapiens
ccacattctttcatg

SEQ ID NO: 1995356 - DNA, 15 bp, Homo sapiens
cacattctttcatga

SEQ ID NO: 1995357 - DNA, 15 bp, Homo sapiens
acattctttcatgat

SEQ ID NO: 1995358 - DNA, 15 bp, Homo sapiens
cattctttcatgatc

SEQ ID NO: 1995359 - DNA, 15 bp, Homo sapiens
attctttcatgatcc

SEQ ID NO: 1995360 - DNA, 15 bp, Homo sapiens
ttctttcatgatcct

SEQ ID NO: 1995361 - DNA, 15 bp, Homo sapiens
tctttcatgatcctt

SEQ ID NO: 1995362 - DNA, 15 bp, Homo sapiens
ctttcatgatcctta

SEQ ID NO: 1995363 - DNA, 15 bp, Homo sapiens
tttcatgatccttag

SEQ ID NO: 1995364 - DNA, 15 bp, Homo sapiens
ttcatgatccttaga

SEQ ID NO: 1995365 - DNA, 15 bp, Homo sapiens
tcatgatccttagaa

SEQ ID NO: 1995366 - DNA, 15 bp, Homo sapiens
catgatccttagaag

SEQ ID NO: 1995367 - DNA, 15 bp, Homo sapiens
atgatccttagaagt

SEQ ID NO: 1995368 - DNA, 15 bp, Homo sapiens
tgatccttagaagtt

SEQ ID NO: 1995369 - DNA, 15 bp, Homo sapiens
gatccttagaagtta

SEQ ID NO: 1995370 - DNA, 15 bp, Homo sapiens
atccttagaagttac

SEQ ID NO: 1995371 - DNA, 15 bp, Homo sapiens
tccttagaagttaca

SEQ ID NO: 1995372 - DNA, 15 bp, Homo sapiens
ccttagaagttacat

SEQ ID NO: 1995373 - DNA, 15 bp, Homo sapiens
cttagaagttacata

SEQ ID NO: 1995374 - DNA, 15 bp, Homo sapiens
ttagaagttacatac

SEQ ID NO: 1995375 - DNA, 15 bp, Homo sapiens
tagaagttacatacc

SEQ ID NO: 1995376 - DNA, 15 bp, Homo sapiens
agaagttacatacct

SEQ ID NO: 1995377 - DNA, 15 bp, Homo sapiens
gaagttacatacctt

SEQ ID NO: 1995378 - DNA, 15 bp, Homo sapiens
aagttacataccttc

SEQ ID NO: 1995379 - DNA, 15 bp, Homo sapiens
agttacataccttcc

SEQ ID NO: 1995380 - DNA, 15 bp, Homo sapiens
gttacataccttcct

SEQ ID NO: 1995381 - DNA, 15 bp, Homo sapiens
ttacataccttcctg

SEQ ID NO: 1995382 - DNA, 15 bp, Homo sapiens
tacataccttcctgc

SEQ ID NO: 1995383 - DNA, 15 bp, Homo sapiens
acataccttcctgct

SEQ ID NO: 1995384 - DNA, 15 bp, Homo sapiens
cataccttcctgctt

SEQ ID NO: 1995385 - DNA, 15 bp, Homo sapiens
ataccttcctgcttg

SEQ ID NO: 1995386 - DNA, 15 bp, Homo sapiens
taccttcctgcttgc

SEQ ID NO: 1995387 - DNA, 15 bp, Homo sapiens
accttcctgcttgcc

SEQ ID NO: 1995388 - DNA, 15 bp, Homo sapiens
ccttcctgcttgccg

SEQ ID NO: 1995389 - DNA, 15 bp, Homo sapiens
cttcctgcttgccgt

SEQ ID NO: 1995390 - DNA, 15 bp, Homo sapiens
ttcctgcttgccgta

SEQ ID NO: 1995391 - DNA, 15 bp, Homo sapiens
tcctgcttgccgtat

SEQ ID NO: 1995392 - DNA, 15 bp, Homo sapiens
cctgcttgccgtata

SEQ ID NO: 1995393 - DNA, 15 bp, Homo sapiens
ctgcttgccgtataa

SEQ ID NO: 1995394 - DNA, 15 bp, Homo sapiens
tgcttgccgtataat

SEQ ID NO: 1995395 - DNA, 15 bp, Homo sapiens
gcttgccgtataata

SEQ ID NO: 1995396 - DNA, 15 bp, Homo sapiens
cttgccgtataatat

SEQ ID NO: 1995397 - DNA, 15 bp, Homo sapiens
ttgccgtataatatt

SEQ ID NO: 1995398 - DNA, 15 bp, Homo sapiens
tgccgtataatattg

SEQ ID NO: 1995399 - DNA, 15 bp, Homo sapiens
gccgtataatattgg

SEQ ID NO: 1995400 - DNA, 15 bp, Homo sapiens
ccgtataatattggt

SEQ ID NO: 1995401 - DNA, 15 bp, Homo sapiens
cgtataatattggtt

SEQ ID NO: 1995402 - DNA, 15 bp, Homo sapiens
gtataatattggtta

SEQ ID NO: 1995403 - DNA, 15 bp, Homo sapiens
tataatattggttat

SEQ ID NO: 1995404 - DNA, 15 bp, Homo sapiens
ataatattggttatg

SEQ ID NO: 1995405 - DNA, 15 bp, Homo sapiens
taatattggttatgc

SEQ ID NO: 1995406 - DNA, 15 bp, Homo sapiens
aatattggttatgca

SEQ ID NO: 1995407 - DNA, 15 bp, Homo sapiens
atattggttatgcag

SEQ ID NO: 1995408 - DNA, 15 bp, Homo sapiens
tattggttatgcaga

SEQ ID NO: 1995409 - DNA, 15 bp, Homo sapiens
attggttatgcagaa

SEQ ID NO: 1995410 - DNA, 15 bp, Homo sapiens
ttggttatgcagaac

SEQ ID NO: 1995411 - DNA, 15 bp, Homo sapiens
tggttatgcagaaca

SEQ ID NO: 1995412 - DNA, 15 bp, Homo sapiens
ggttatgcagaacaa

SEQ ID NO: 1995413 - DNA, 15 bp, Homo sapiens
gttatgcagaacaac

SEQ ID NO: 1995414 - DNA, 15 bp, Homo sapiens
ttatgcagaacaacc

SEQ ID NO: 1995415 - DNA, 15 bp, Homo sapiens
tatgcagaacaaccc

SEQ ID NO: 1995416 - DNA, 15 bp, Homo sapiens
atgcagaacaacccg

SEQ ID NO: 1995417 - DNA, 15 bp, Homo sapiens
tgcagaacaacccga

SEQ ID NO: 1995418 - DNA, 15 bp, Homo sapiens
gcagaacaacccgaa

SEQ ID NO: 1995419 - DNA, 15 bp, Homo sapiens
cagaacaacccgaat

SEQ ID NO: 1995420 - DNA, 15 bp, Homo sapiens
agaacaacccgaata

SEQ ID NO: 1995421 - DNA, 15 bp, Homo sapiens
gaacaacccgaatac

SEQ ID NO: 1995422 - DNA, 15 bp, Homo sapiens
aacaacccgaatacc

SEQ ID NO: 1995423 - DNA, 15 bp, Homo sapiens
acaacccgaatacca

SEQ ID NO: 1995424 - DNA, 15 bp, Homo sapiens
caacccgaataccag

SEQ ID NO: 1995425 - DNA, 15 bp, Homo sapiens
aacccgaataccaga

SEQ ID NO: 1995426 - DNA, 15 bp, Homo sapiens
acccgaataccagat

SEQ ID NO: 1995427 - DNA, 15 bp, Homo sapiens
cccgaataccagatg

SEQ ID NO: 1995428 - DNA, 15 bp, Homo sapiens
ccgaataccagatga

SEQ ID NO: 1995429 - DNA, 15 bp, Homo sapiens
cgaataccagatgag

SEQ ID NO: 1995430 - DNA, 15 bp, Homo sapiens
gaataccagatgaga

SEQ ID NO: 1995431 - DNA, 15 bp, Homo sapiens
aataccagatgagag

SEQ ID NO: 1995432 - DNA, 15 bp, Homo sapiens
ataccagatgagaga

SEQ ID NO: 1995433 - DNA, 15 bp, Homo sapiens
taccagatgagagag

SEQ ID NO: 1995434 - DNA, 15 bp, Homo sapiens
accagatgagagagg

SEQ ID NO: 1995435 - DNA, 15 bp, Homo sapiens
ccagatgagagagga

SEQ ID NO: 1995436 - DNA, 15 bp, Homo sapiens
cagatgagagaggat

SEQ ID NO: 1995437 - DNA, 15 bp, Homo sapiens
agatgagagaggatg

SEQ ID NO: 1995438 - DNA, 15 bp, Homo sapiens
gatgagagaggatga

SEQ ID NO: 1995439 - DNA, 15 bp, Homo sapiens
atgagagaggatgac

SEQ ID NO: 1995440 - DNA, 15 bp, Homo sapiens
tgagagaggatgaca

SEQ ID NO: 1995441 - DNA, 15 bp, Homo sapiens
gagagaggatgacac

SEQ ID NO: 1995442 - DNA, 15 bp, Homo sapiens
agagaggatgacaca

SEQ ID NO: 1995443 - DNA, 15 bp, Homo sapiens
gagaggatgacacac

SEQ ID NO: 1995444 - DNA, 15 bp, Homo sapiens
agaggatgacacacg

SEQ ID NO: 1995445 - DNA, 15 bp, Homo sapiens
gaggatgacacacgg

SEQ ID NO: 1995446 - DNA, 15 bp, Homo sapiens
aggatgacacacggg

SEQ ID NO: 1995447 - DNA, 15 bp, Homo sapiens
ggatgacacacgggt

SEQ ID NO: 1995448 - DNA, 15 bp, Homo sapiens
gatgacacacgggtg

SEQ ID NO: 1995449 - DNA, 15 bp, Homo sapiens
atgacacacgggtgt

SEQ ID NO: 1995450 - DNA, 15 bp, Homo sapiens
tgacacacgggtgtg

SEQ ID NO: 1995451 - DNA, 15 bp, Homo sapiens
gacacacgggtgtgg

SEQ ID NO: 1995452 - DNA, 15 bp, Homo sapiens
acacacgggtgtgga

SEQ ID NO: 1995453 - DNA, 15 bp, Homo sapiens
cacacgggtgtggat

SEQ ID NO: 1995454 - DNA, 15 bp, Homo sapiens
acacgggtgtggata

SEQ ID NO: 1995455 - DNA, 15 bp, Homo sapiens
cacgggtgtggatat

SEQ ID NO: 1995456 - DNA, 15 bp, Homo sapiens
acgggtgtggatatc

SEQ ID NO: 1995457 - DNA, 15 bp, Homo sapiens
cgggtgtggatatca

SEQ ID NO: 1995458 - DNA, 15 bp, Homo sapiens
gggtgtggatatcag

SEQ ID NO: 1995459 - DNA, 15 bp, Homo sapiens
ggtgtggatatcaga

SEQ ID NO: 1995460 - DNA, 15 bp, Homo sapiens
gtgtggatatcagaa

SEQ ID NO: 1995461 - DNA, 15 bp, Homo sapiens
tgtggatatcagaat

SEQ ID NO: 1995462 - DNA, 15 bp, Homo sapiens
gtggatatcagaatg

SEQ ID NO: 1995463 - DNA, 15 bp, Homo sapiens
tggatatcagaatgt

SEQ ID NO: 1995464 - DNA, 15 bp, Homo sapiens
ggatatcagaatgta

SEQ ID NO: 1995465 - DNA, 15 bp, Homo sapiens
gatatcagaatgtag

SEQ ID NO: 1995466 - DNA, 15 bp, Homo sapiens
atatcagaatgtagg

SEQ ID NO: 1995467 - DNA, 15 bp, Homo sapiens
tatcagaatgtagga

SEQ ID NO: 1995468 - DNA, 15 bp, Homo sapiens
atcagaatgtaggaa

SEQ ID NO: 1995469 - DNA, 15 bp, Homo sapiens
tcagaatgtaggaat

SEQ ID NO: 1995470 - DNA, 15 bp, Homo sapiens
cagaatgtaggaata

SEQ ID NO: 1995471 - DNA, 15 bp, Homo sapiens
agaatgtaggaatac

SEQ ID NO: 1995472 - DNA, 15 bp, Homo sapiens
gaatgtaggaatact

SEQ ID NO: 1995473 - DNA, 15 bp, Homo sapiens
aatgtaggaatactt

SEQ ID NO: 1995474 - DNA, 15 bp, Homo sapiens
atgtaggaatacttg

SEQ ID NO: 1995475 - DNA, 15 bp, Homo sapiens
tgtaggaatacttgc

SEQ ID NO: 1995476 - DNA, 15 bp, Homo sapiens
gtaggaatacttgca

SEQ ID NO: 1995477 - DNA, 15 bp, Homo sapiens
taggaatacttgcag

SEQ ID NO: 1995478 - DNA, 15 bp, Homo sapiens
aggaatacttgcaga

SEQ ID NO: 1995479 - DNA, 15 bp, Homo sapiens
ggaatacttgcagac

SEQ ID NO: 1995480 - DNA, 15 bp, Homo sapiens
gaatacttgcagacc

SEQ ID NO: 1995481 - DNA, 15 bp, Homo sapiens
aatacttgcagacca

SEQ ID NO: 1995482 - DNA, 15 bp, Homo sapiens
atacttgcagaccat

SEQ ID NO: 1995483 - DNA, 15 bp, Homo sapiens
tacttgcagaccatc

SEQ ID NO: 1995484 - DNA, 15 bp, Homo sapiens
acttgcagaccatct

SEQ ID NO: 1995485 - DNA, 15 bp, Homo sapiens
cttgcagaccatctt

SEQ ID NO: 1995486 - DNA, 15 bp, Homo sapiens
ttgcagaccatcttg

SEQ ID NO: 1995487 - DNA, 15 bp, Homo sapiens
tgcagaccatcttgg

SEQ ID NO: 1995488 - DNA, 15 bp, Homo sapiens
gcagaccatcttgga

SEQ ID NO: 1995489 - DNA, 15 bp, Homo sapiens
cagaccatcttggag

SEQ ID NO: 1995490 - DNA, 15 bp, Homo sapiens
agaccatcttggagt

SEQ ID NO: 1995491 - DNA, 15 bp, Homo sapiens
gaccatcttggagtc

SEQ ID NO: 1995492 - DNA, 15 bp, Homo sapiens
accatcttggagtct

SEQ ID NO: 1995493 - DNA, 15 bp, Homo sapiens
ccatcttggagtctg

SEQ ID NO: 1995494 - DNA, 15 bp, Homo sapiens
catcttggagtctgg

SEQ ID NO: 1995495 - DNA, 15 bp, Homo sapiens
atcttggagtctggc

SEQ ID NO: 1995496 - DNA, 15 bp, Homo sapiens
tcttggagtctggct

SEQ ID NO: 1995497 - DNA, 15 bp, Homo sapiens
cttggagtctggcta

SEQ ID NO: 1995498 - DNA, 15 bp, Homo sapiens
ttggagtctggctac

SEQ ID NO: 1995499 - DNA, 15 bp, Homo sapiens
tggagtctggctacc

SEQ ID NO: 1995500 - DNA, 15 bp, Homo sapiens
ggagtctggctacca

SEQ ID NO: 1995501 - DNA, 15 bp, Homo sapiens
gagtctggctaccat

SEQ ID NO: 1995502 - DNA, 15 bp, Homo sapiens
agtctggctaccata

SEQ ID NO: 1995503 - DNA, 15 bp, Homo sapiens
gtctggctaccataa

SEQ ID NO: 1995504 - DNA, 15 bp, Homo sapiens
tctggctaccataag

SEQ ID NO: 1995505 - DNA, 15 bp, Homo sapiens
ctggctaccataagc

SEQ ID NO: 1995506 - DNA, 15 bp, Homo sapiens
tggctaccataagca

SEQ ID NO: 1995507 - DNA, 15 bp, Homo sapiens
ggctaccataagcat

SEQ ID NO: 1995508 - DNA, 15 bp, Homo sapiens
gctaccataagcata

SEQ ID NO: 1995509 - DNA, 15 bp, Homo sapiens
ctaccataagcatac

SEQ ID NO: 1995510 - DNA, 15 bp, Homo sapiens
taccataagcataca

SEQ ID NO: 1995511 - DNA, 15 bp, Homo sapiens
accataagcatacag

SEQ ID NO: 1995512 - DNA, 15 bp, Homo sapiens
ccataagcatacagt

SEQ ID NO: 1995513 - DNA, 15 bp, Homo sapiens
cataagcatacagtc

SEQ ID NO: 1995514 - DNA, 15 bp, Homo sapiens
ataagcatacagtcc

SEQ ID NO: 1995515 - DNA, 15 bp, Homo sapiens
taagcatacagtcca

SEQ ID NO: 1995516 - DNA, 15 bp, Homo sapiens
aagcatacagtccat

SEQ ID NO: 1995517 - DNA, 15 bp, Homo sapiens
agcatacagtccatt

SEQ ID NO: 1995518 - DNA, 15 bp, Homo sapiens
gcatacagtccattt

SEQ ID NO: 1995519 - DNA, 15 bp, Homo sapiens
catacagtccatttt

SEQ ID NO: 1995520 - DNA, 15 bp, Homo sapiens
atacagtccattttt

SEQ ID NO: 1995521 - DNA, 15 bp, Homo sapiens
tacagtccattttta

SEQ ID NO: 1995522 - DNA, 15 bp, Homo sapiens
acagtccatttttat

SEQ ID NO: 1995523 - DNA, 15 bp, Homo sapiens
cagtccatttttata

SEQ ID NO: 1995524 - DNA, 15 bp, Homo sapiens
agtccatttttataa

SEQ ID NO: 1995525 - DNA, 15 bp, Homo sapiens
gtccatttttataaa

SEQ ID NO: 1995526 - DNA, 15 bp, Homo sapiens
tccatttttataaag

SEQ ID NO: 1995527 - DNA, 15 bp, Homo sapiens
ccatttttataaagt

SEQ ID NO: 1995528 - DNA, 15 bp, Homo sapiens
catttttataaagtt

SEQ ID NO: 1995529 - DNA, 15 bp, Homo sapiens
atttttataaagttt

SEQ ID NO: 1995530 - DNA, 15 bp, Homo sapiens
tttttataaagtttt

SEQ ID NO: 1995531 - DNA, 15 bp, Homo sapiens
ttttataaagttttc

SEQ ID NO: 1995532 - DNA, 15 bp, Homo sapiens
tttataaagttttca

SEQ ID NO: 1995533 - DNA, 15 bp, Homo sapiens
ttataaagttttcat

SEQ ID NO: 1995534 - DNA, 15 bp, Homo sapiens
tataaagttttcatg

SEQ ID NO: 1995535 - DNA, 15 bp, Homo sapiens
ataaagttttcatgt

SEQ ID NO: 1995536 - DNA, 15 bp, Homo sapiens
taaagttttcatgtc

SEQ ID NO: 1995537 - DNA, 15 bp, Homo sapiens
aaagttttcatgtct

SEQ ID NO: 1995538 - DNA, 15 bp, Homo sapiens
aagttttcatgtctt

SEQ ID NO: 1995539 - DNA, 15 bp, Homo sapiens
agttttcatgtcttc

SEQ ID NO: 1995540 - DNA, 15 bp, Homo sapiens
gttttcatgtcttct

SEQ ID NO: 1995541 - DNA, 15 bp, Homo sapiens
ttttcatgtcttctt

SEQ ID NO: 1995542 - DNA, 15 bp, Homo sapiens
tttcatgtcttcttg

SEQ ID NO: 1995543 - DNA, 15 bp, Homo sapiens
ttcatgtcttcttga

SEQ ID NO: 1995544 - DNA, 15 bp, Homo sapiens
tcatgtcttcttgaa

SEQ ID NO: 1995545 - DNA, 15 bp, Homo sapiens
catgtcttcttgaaa

SEQ ID NO: 1995546 - DNA, 15 bp, Homo sapiens
atgtcttcttgaaaa

SEQ ID NO: 1995547 - DNA, 15 bp, Homo sapiens
tgtcttcttgaaaat

SEQ ID NO: 1995548 - DNA, 15 bp, Homo sapiens
gtcttcttgaaaatg

SEQ ID NO: 1995549 - DNA, 15 bp, Homo sapiens
tcttcttgaaaatga

SEQ ID NO: 1995550 - DNA, 15 bp, Homo sapiens
cttcttgaaaatgat

SEQ ID NO: 1995551 - DNA, 15 bp, Homo sapiens
ttcttgaaaatgata

SEQ ID NO: 1995552 - DNA, 15 bp, Homo sapiens
tcttgaaaatgatat

SEQ ID NO: 1995553 - DNA, 15 bp, Homo sapiens
cttgaaaatgatatg

SEQ ID NO: 1995554 - DNA, 15 bp, Homo sapiens
ttgaaaatgatatgt

SEQ ID NO: 1995555 - DNA, 15 bp, Homo sapiens
tgaaaatgatatgta

SEQ ID NO: 1995556 - DNA, 15 bp, Homo sapiens
gaaaatgatatgtag

SEQ ID NO: 1995557 - DNA, 15 bp, Homo sapiens
aaaatgatatgtagt

SEQ ID NO: 1995558 - DNA, 15 bp, Homo sapiens
aaatgatatgtagtc

SEQ ID NO: 1995559 - DNA, 15 bp, Homo sapiens
aatgatatgtagtcc

SEQ ID NO: 1995560 - DNA, 15 bp, Homo sapiens
atgatatgtagtccc

SEQ ID NO: 1995561 - DNA, 15 bp, Homo sapiens
tgatatgtagtccca

SEQ ID NO: 1995562 - DNA, 15 bp, Homo sapiens
gatatgtagtcccaa

SEQ ID NO: 1995563 - DNA, 15 bp, Homo sapiens
atatgtagtcccaag

SEQ ID NO: 1995564 - DNA, 15 bp, Homo sapiens
tatgtagtcccaagt

SEQ ID NO: 1995565 - DNA, 15 bp, Homo sapiens
atgtagtcccaagtt

SEQ ID NO: 1995566 - DNA, 15 bp, Homo sapiens
tgtagtcccaagttc

SEQ ID NO: 1995567 - DNA, 15 bp, Homo sapiens
gtagtcccaagttct

SEQ ID NO: 1995568 - DNA, 15 bp, Homo sapiens
tagtcccaagttctt

SEQ ID NO: 1995569 - DNA, 15 bp, Homo sapiens
agtcccaagttcttg

SEQ ID NO: 1995570 - DNA, 15 bp, Homo sapiens
gtcccaagttcttga

SEQ ID NO: 1995571 - DNA, 15 bp, Homo sapiens
tcccaagttcttgag

SEQ ID NO: 1995572 - DNA, 15 bp, Homo sapiens
cccaagttcttgagt

SEQ ID NO: 1995573 - DNA, 15 bp, Homo sapiens
ccaagttcttgagtg

SEQ ID NO: 1995574 - DNA, 15 bp, Homo sapiens
caagttcttgagtgt

SEQ ID NO: 1995575 - DNA, 15 bp, Homo sapiens
aagttcttgagtgtg

SEQ ID NO: 1995576 - DNA, 15 bp, Homo sapiens
agttcttgagtgtga

SEQ ID NO: 1995577 - DNA, 15 bp, Homo sapiens
gttcttgagtgtgat

SEQ ID NO: 1995578 - DNA, 15 bp, Homo sapiens
ttcttgagtgtgatt

SEQ ID NO: 1995579 - DNA, 15 bp, Homo sapiens
tcttgagtgtgattt

SEQ ID NO: 1995580 - DNA, 15 bp, Homo sapiens
cttgagtgtgatttt

SEQ ID NO: 1995581 - DNA, 15 bp, Homo sapiens
ttgagtgtgattttt

SEQ ID NO: 1995582 - DNA, 15 bp, Homo sapiens
tgagtgtgattttta

SEQ ID NO: 1995583 - DNA, 15 bp, Homo sapiens
gagtgtgatttttac

SEQ ID NO: 1995584 - DNA, 15 bp, Homo sapiens
agtgtgatttttaca

SEQ ID NO: 1995585 - DNA, 15 bp, Homo sapiens
gtgtgatttttacat

SEQ ID NO: 1995586 - DNA, 15 bp, Homo sapiens
tgtgatttttacata

SEQ ID NO: 1995587 - DNA, 15 bp, Homo sapiens
gtgatttttacatag

SEQ ID NO: 1995588 - DNA, 15 bp, Homo sapiens
tgatttttacatagg

SEQ ID NO: 1995589 - DNA, 15 bp, Homo sapiens
gatttttacatagga

SEQ ID NO: 1995590 - DNA, 15 bp, Homo sapiens
atttttacataggag

SEQ ID NO: 1995591 - DNA, 15 bp, Homo sapiens
tttttacataggagt

SEQ ID NO: 1995592 - DNA, 15 bp, Homo sapiens
ttttacataggagtt

SEQ ID NO: 1995593 - DNA, 15 bp, Homo sapiens
tttacataggagttt

SEQ ID NO: 1995594 - DNA, 15 bp, Homo sapiens
ttacataggagtttg

SEQ ID NO: 1995595 - DNA, 15 bp, Homo sapiens
tacataggagtttga

SEQ ID NO: 1995596 - DNA, 15 bp, Homo sapiens
acataggagtttgat

SEQ ID NO: 1995597 - DNA, 15 bp, Homo sapiens
cataggagtttgatc

SEQ ID NO: 1995598 - DNA, 15 bp, Homo sapiens
ataggagtttgatca

SEQ ID NO: 1995599 - DNA, 15 bp, Homo sapiens
taggagtttgatcaa

SEQ ID NO: 1995600 - DNA, 15 bp, Homo sapiens
aggagtttgatcaag

SEQ ID NO: 1995601 - DNA, 15 bp, Homo sapiens
ggagtttgatcaagt

SEQ ID NO: 1995602 - DNA, 15 bp, Homo sapiens
gagtttgatcaagtt

SEQ ID NO: 1995603 - DNA, 15 bp, Homo sapiens
agtttgatcaagttt

SEQ ID NO: 1995604 - DNA, 15 bp, Homo sapiens
gtttgatcaagttta

SEQ ID NO: 1995605 - DNA, 15 bp, Homo sapiens
tttgatcaagtttat

SEQ ID NO: 1995606 - DNA, 15 bp, Homo sapiens
ttgatcaagtttatt

SEQ ID NO: 1995607 - DNA, 15 bp, Homo sapiens
tgatcaagtttatta

SEQ ID NO: 1995608 - DNA, 15 bp, Homo sapiens
gatcaagtttattaa

SEQ ID NO: 1995609 - DNA, 15 bp, Homo sapiens
atcaagtttattaag

SEQ ID NO: 1995610 - DNA, 15 bp, Homo sapiens
tcaagtttattaagc

SEQ ID NO: 1995611 - DNA, 15 bp, Homo sapiens
caagtttattaagca

SEQ ID NO: 1995612 - DNA, 15 bp, Homo sapiens
aagtttattaagcag

SEQ ID NO: 1995613 - DNA, 15 bp, Homo sapiens
agtttattaagcagt

SEQ ID NO: 1995614 - DNA, 15 bp, Homo sapiens
gtttattaagcagtt

SEQ ID NO: 1995615 - DNA, 15 bp, Homo sapiens
tttattaagcagttc

SEQ ID NO: 1995616 - DNA, 15 bp, Homo sapiens
ttattaagcagttca

SEQ ID NO: 1995617 - DNA, 15 bp, Homo sapiens
tattaagcagttcaa

SEQ ID NO: 1995618 - DNA, 15 bp, Homo sapiens
attaagcagttcaac

SEQ ID NO: 1995619 - DNA, 15 bp, Homo sapiens
ttaagcagttcaact

SEQ ID NO: 1995620 - DNA, 15 bp, Homo sapiens
taagcagttcaactc

SEQ ID NO: 1995621 - DNA, 15 bp, Homo sapiens
aagcagttcaactct

SEQ ID NO: 1995622 - DNA, 15 bp, Homo sapiens
agcagttcaactctt

SEQ ID NO: 1995623 - DNA, 15 bp, Homo sapiens
gcagttcaactcttc

SEQ ID NO: 1995624 - DNA, 15 bp, Homo sapiens
cagttcaactcttct

SEQ ID NO: 1995625 - DNA, 15 bp, Homo sapiens
agttcaactcttcta

SEQ ID NO: 1995626 - DNA, 15 bp, Homo sapiens
gttcaactcttctaa

SEQ ID NO: 1995627 - DNA, 15 bp, Homo sapiens
ttcaactcttctaaa

SEQ ID NO: 1995628 - DNA, 15 bp, Homo sapiens
tcaactcttctaaat

SEQ ID NO: 1995629 - DNA, 15 bp, Homo sapiens
caactcttctaaatt

SEQ ID NO: 1995630 - DNA, 15 bp, Homo sapiens
aactcttctaaattc

SEQ ID NO: 1995631 - DNA, 15 bp, Homo sapiens
actcttctaaattct

SEQ ID NO: 1995632 - DNA, 15 bp, Homo sapiens
ctcttctaaattctg

SEQ ID NO: 1995633 - DNA, 15 bp, Homo sapiens
tcttctaaattctga

SEQ ID NO: 1995634 - DNA, 15 bp, Homo sapiens
cttctaaattctgat

SEQ ID NO: 1995635 - DNA, 15 bp, Homo sapiens
ttctaaattctgatt

SEQ ID NO: 1995636 - DNA, 15 bp, Homo sapiens
tctaaattctgattc

SEQ ID NO: 1995637 - DNA, 15 bp, Homo sapiens
ctaaattctgattct

SEQ ID NO: 1995638 - DNA, 15 bp, Homo sapiens
taaattctgattctt

SEQ ID NO: 1995639 - DNA, 15 bp, Homo sapiens
aaattctgattcttt

SEQ ID NO: 1995640 - DNA, 15 bp, Homo sapiens
aattctgattctttt

SEQ ID NO: 1995641 - DNA, 15 bp, Homo sapiens
attctgattcttttt

SEQ ID NO: 1995642 - DNA, 15 bp, Homo sapiens
ttctgattctttttt

SEQ ID NO: 1995643 - DNA, 15 bp, Homo sapiens
tctgattcttttttg

SEQ ID NO: 1995644 - DNA, 15 bp, Homo sapiens
ctgattcttttttgt

SEQ ID NO: 1995645 - DNA, 15 bp, Homo sapiens
tgattcttttttgtc

SEQ ID NO: 1995646 - DNA, 15 bp, Homo sapiens
gattcttttttgtct

SEQ ID NO: 1995647 - DNA, 15 bp, Homo sapiens
attcttttttgtctg

SEQ ID NO: 1995648 - DNA, 15 bp, Homo sapiens
ttcttttttgtctgc

SEQ ID NO: 1995649 - DNA, 15 bp, Homo sapiens
tcttttttgtctgct

SEQ ID NO: 1995650 - DNA, 15 bp, Homo sapiens
cttttttgtctgcta

SEQ ID NO: 1995651 - DNA, 15 bp, Homo sapiens
ttttttgtctgctag

SEQ ID NO: 1995652 - DNA, 15 bp, Homo sapiens
tttttgtctgctaga

SEQ ID NO: 1995653 - DNA, 15 bp, Homo sapiens
ttttgtctgctagat

SEQ ID NO: 1995654 - DNA, 15 bp, Homo sapiens
tttgtctgctagatc

SEQ ID NO: 1995655 - DNA, 15 bp, Homo sapiens
ttgtctgctagatct

SEQ ID NO: 1995656 - DNA, 15 bp, Homo sapiens
tgtctgctagatctt

SEQ ID NO: 1995657 - DNA, 15 bp, Homo sapiens
gtctgctagatctta

SEQ ID NO: 1995658 - DNA, 15 bp, Homo sapiens
tctgctagatcttac

SEQ ID NO: 1995659 - DNA, 15 bp, Homo sapiens
ctgctagatcttact

SEQ ID NO: 1995660 - DNA, 15 bp, Homo sapiens
tgctagatcttacta

SEQ ID NO: 1995661 - DNA, 15 bp, Homo sapiens
gctagatcttactac

SEQ ID NO: 1995662 - DNA, 15 bp, Homo sapiens
ctagatcttactact

SEQ ID NO: 1995663 - DNA, 15 bp, Homo sapiens
tagatcttactactg

SEQ ID NO: 1995664 - DNA, 15 bp, Homo sapiens
agatcttactactga

SEQ ID NO: 1995665 - DNA, 15 bp, Homo sapiens
gatcttactactgag

SEQ ID NO: 1995666 - DNA, 15 bp, Homo sapiens
atcttactactgaga

SEQ ID NO: 1995667 - DNA, 15 bp, Homo sapiens
tcttactactgagaa

SEQ ID NO: 1995668 - DNA, 15 bp, Homo sapiens
cttactactgagaaa

SEQ ID NO: 1995669 - DNA, 15 bp, Homo sapiens
ttactactgagaaag

SEQ ID NO: 1995670 - DNA, 15 bp, Homo sapiens
tactactgagaaagg

SEQ ID NO: 1995671 - DNA, 15 bp, Homo sapiens
actactgagaaaggt

SEQ ID NO: 1995672 - DNA, 15 bp, Homo sapiens
ctactgagaaaggta

SEQ ID NO: 1995673 - DNA, 15 bp, Homo sapiens
tactgagaaaggtaa

SEQ ID NO: 1995674 - DNA, 15 bp, Homo sapiens
actgagaaaggtaag

SEQ ID NO: 1995675 - DNA, 15 bp, Homo sapiens
ctgagaaaggtaagt

SEQ ID NO: 1995676 - DNA, 15 bp, Homo sapiens
tgagaaaggtaagtt

SEQ ID NO: 1995677 - DNA, 15 bp, Homo sapiens
gagaaaggtaagtta

SEQ ID NO: 1995678 - DNA, 15 bp, Homo sapiens
agaaaggtaagttag

SEQ ID NO: 1995679 - DNA, 15 bp, Homo sapiens
gaaaggtaagttagg

SEQ ID NO: 1995680 - DNA, 15 bp, Homo sapiens
aaaggtaagttagga

SEQ ID NO: 1995681 - DNA, 15 bp, Homo sapiens
aaggtaagttaggaa

SEQ ID NO: 1995682 - DNA, 15 bp, Homo sapiens
aggtaagttaggaaa

SEQ ID NO: 1995683 - DNA, 15 bp, Homo sapiens
ggtaagttaggaaat

SEQ ID NO: 1995684 - DNA, 15 bp, Homo sapiens
gtaagttaggaaatc

SEQ ID NO: 1995685 - DNA, 15 bp, Homo sapiens
taagttaggaaatct

SEQ ID NO: 1995686 - DNA, 15 bp, Homo sapiens
aagttaggaaatctt

SEQ ID NO: 1995687 - DNA, 15 bp, Homo sapiens
agttaggaaatcttt

SEQ ID NO: 1995688 - DNA, 15 bp, Homo sapiens
gttaggaaatctttc

SEQ ID NO: 1995689 - DNA, 15 bp, Homo sapiens
ttaggaaatctttca

SEQ ID NO: 1995690 - DNA, 15 bp, Homo sapiens
taggaaatctttcac

SEQ ID NO: 1995691 - DNA, 15 bp, Homo sapiens
aggaaatctttcact

SEQ ID NO: 1995692 - DNA, 15 bp, Homo sapiens
ggaaatctttcactg

SEQ ID NO: 1995693 - DNA, 15 bp, Homo sapiens
gaaatctttcactga

SEQ ID NO: 1995694 - DNA, 15 bp, Homo sapiens
aaatctttcactgaa

SEQ ID NO: 1995695 - DNA, 15 bp, Homo sapiens
aatctttcactgaat

SEQ ID NO: 1995696 - DNA, 15 bp, Homo sapiens
atctttcactgaatt

SEQ ID NO: 1995697 - DNA, 15 bp, Homo sapiens
tctttcactgaatta

SEQ ID NO: 1995698 - DNA, 15 bp, Homo sapiens
ctttcactgaattag

SEQ ID NO: 1995699 - DNA, 15 bp, Homo sapiens
tttcactgaattagt

SEQ ID NO: 1995700 - DNA, 15 bp, Homo sapiens
ttcactgaattagta

SEQ ID NO: 1995701 - DNA, 15 bp, Homo sapiens
tcactgaattagtat

SEQ ID NO: 1995702 - DNA, 15 bp, Homo sapiens
cactgaattagtatg

SEQ ID NO: 1995703 - DNA, 15 bp, Homo sapiens
actgaattagtatgt

SEQ ID NO: 1995704 - DNA, 15 bp, Homo sapiens
ctgaattagtatgtt

SEQ ID NO: 1995705 - DNA, 15 bp, Homo sapiens
tgaattagtatgttt

SEQ ID NO: 1995706 - DNA, 15 bp, Homo sapiens
gaattagtatgttta

SEQ ID NO: 1995707 - DNA, 15 bp, Homo sapiens
aattagtatgtttat

SEQ ID NO: 1995708 - DNA, 15 bp, Homo sapiens
attagtatgtttatg

SEQ ID NO: 1995709 - DNA, 15 bp, Homo sapiens
ttagtatgtttatgc

SEQ ID NO: 1995710 - DNA, 15 bp, Homo sapiens
tagtatgtttatgct

SEQ ID NO: 1995711 - DNA, 15 bp, Homo sapiens
agtatgtttatgctt

SEQ ID NO: 1995712 - DNA, 15 bp, Homo sapiens
gtatgtttatgcttt

SEQ ID NO: 1995713 - DNA, 15 bp, Homo sapiens
tatgtttatgctttt

SEQ ID NO: 1995714 - DNA, 15 bp, Homo sapiens
atgtttatgcttttt

SEQ ID NO: 1995715 - DNA, 15 bp, Homo sapiens
tgtttatgctttttt

SEQ ID NO: 1995716 - DNA, 15 bp, Homo sapiens
gtttatgcttttttc

SEQ ID NO: 1995717 - DNA, 15 bp, Homo sapiens
tttatgcttttttct

SEQ ID NO: 1995718 - DNA, 15 bp, Homo sapiens
ttatgcttttttctt

SEQ ID NO: 1995719 - DNA, 15 bp, Homo sapiens
tatgcttttttcttg

SEQ ID NO: 1995720 - DNA, 15 bp, Homo sapiens
atgcttttttcttgc

SEQ ID NO: 1995721 - DNA, 15 bp, Homo sapiens
tgcttttttcttgca

SEQ ID NO: 1995722 - DNA, 15 bp, Homo sapiens
gcttttttcttgcag

SEQ ID NO: 1995723 - DNA, 15 bp, Homo sapiens
cttttttcttgcaga

SEQ ID NO: 1995724 - DNA, 15 bp, Homo sapiens
ttttttcttgcagat

SEQ ID NO: 1995725 - DNA, 15 bp, Homo sapiens
tttttcttgcagatg

SEQ ID NO: 1995726 - DNA, 15 bp, Homo sapiens
ttttcttgcagatgt

SEQ ID NO: 1995727 - DNA, 15 bp, Homo sapiens
tttcttgcagatgtg

SEQ ID NO: 1995728 - DNA, 15 bp, Homo sapiens
ttcttgcagatgtgt

SEQ ID NO: 1995729 - DNA, 15 bp, Homo sapiens
tcttgcagatgtgtc

SEQ ID NO: 1995730 - DNA, 15 bp, Homo sapiens
cttgcagatgtgtca

SEQ ID NO: 1995731 - DNA, 15 bp, Homo sapiens
ttgcagatgtgtcag

SEQ ID NO: 1995732 - DNA, 15 bp, Homo sapiens
tgcagatgtgtcagt

SEQ ID NO: 1995733 - DNA, 15 bp, Homo sapiens
gcagatgtgtcagtt

SEQ ID NO: 1995734 - DNA, 15 bp, Homo sapiens
cagatgtgtcagttt

SEQ ID NO: 1995735 - DNA, 15 bp, Homo sapiens
agatgtgtcagtttt

SEQ ID NO: 1995736 - DNA, 15 bp, Homo sapiens
gatgtgtcagttttg

SEQ ID NO: 1995737 - DNA, 15 bp, Homo sapiens
atgtgtcagttttgt

SEQ ID NO: 1995738 - DNA, 15 bp, Homo sapiens
tgtgtcagttttgtg

SEQ ID NO: 1995739 - DNA, 15 bp, Homo sapiens
gtgtcagttttgtgt

SEQ ID NO: 1995740 - DNA, 15 bp, Homo sapiens
tgtcagttttgtgtg

SEQ ID NO: 1995741 - DNA, 15 bp, Homo sapiens
gtcagttttgtgtgt

SEQ ID NO: 1995742 - DNA, 15 bp, Homo sapiens
tcagttttgtgtgtg

SEQ ID NO: 1995743 - DNA, 15 bp, Homo sapiens
cagttttgtgtgtgt

SEQ ID NO: 1995744 - DNA, 15 bp, Homo sapiens
agttttgtgtgtgtg

SEQ ID NO: 1995745 - DNA, 15 bp, Homo sapiens
tttgtgtgtgtgtta

SEQ ID NO: 1995746 - DNA, 15 bp, Homo sapiens
ttgtgtgtgtgttat

SEQ ID NO: 1995747 - DNA, 15 bp, Homo sapiens
tgtgtgtgtgttatt

SEQ ID NO: 1995748 - DNA, 15 bp, Homo sapiens
gtgtgtgtgttatta

SEQ ID NO: 1995749 - DNA, 15 bp, Homo sapiens
tgtgtgtgttattag

SEQ ID NO: 1995750 - DNA, 15 bp, Homo sapiens
gtgtgtgttattagg

SEQ ID NO: 1995751 - DNA, 15 bp, Homo sapiens
tgtgtgttattaggt

SEQ ID NO: 1995752 - DNA, 15 bp, Homo sapiens
gtgtgttattaggtg

SEQ ID NO: 1995753 - DNA, 15 bp, Homo sapiens
tgtgttattaggtgc

SEQ ID NO: 1995754 - DNA, 15 bp, Homo sapiens
gtgttattaggtgca

SEQ ID NO: 1995755 - DNA, 15 bp, Homo sapiens
tgttattaggtgcat

SEQ ID NO: 1995756 - DNA, 15 bp, Homo sapiens
gttattaggtgcata

SEQ ID NO: 1995757 - DNA, 15 bp, Homo sapiens
ttattaggtgcatag

SEQ ID NO: 1995758 - DNA, 15 bp, Homo sapiens
tattaggtgcataga

SEQ ID NO: 1995759 - DNA, 15 bp, Homo sapiens
attaggtgcatagag

SEQ ID NO: 1995760 - DNA, 15 bp, Homo sapiens
ttaggtgcatagagg

SEQ ID NO: 1995761 - DNA, 15 bp, Homo sapiens
taggtgcatagaggc

SEQ ID NO: 1995762 - DNA, 15 bp, Homo sapiens
aggtgcatagaggct

SEQ ID NO: 1995763 - DNA, 15 bp, Homo sapiens
ggtgcatagaggctt

SEQ ID NO: 1995764 - DNA, 15 bp, Homo sapiens
gtgcatagaggctta

SEQ ID NO: 1995765 - DNA, 15 bp, Homo sapiens
tgcatagaggcttac

SEQ ID NO: 1995766 - DNA, 15 bp, Homo sapiens
gcatagaggcttaca

SEQ ID NO: 1995767 - DNA, 15 bp, Homo sapiens
catagaggcttacaa

SEQ ID NO: 1995768 - DNA, 15 bp, Homo sapiens
atagaggcttacaat

SEQ ID NO: 1995769 - DNA, 15 bp, Homo sapiens
tagaggcttacaata

SEQ ID NO: 1995770 - DNA, 15 bp, Homo sapiens
agaggcttacaatat

SEQ ID NO: 1995771 - DNA, 15 bp, Homo sapiens
gaggcttacaatatc

SEQ ID NO: 1995772 - DNA, 15 bp, Homo sapiens
aggcttacaatatct

SEQ ID NO: 1995773 - DNA, 15 bp, Homo sapiens
ggcttacaatatctt

SEQ ID NO: 1995774 - DNA, 15 bp, Homo sapiens
gcttacaatatctta

SEQ ID NO: 1995775 - DNA, 15 bp, Homo sapiens
cttacaatatcttac

SEQ ID NO: 1995776 - DNA, 15 bp, Homo sapiens
ttacaatatcttaca

SEQ ID NO: 1995777 - DNA, 15 bp, Homo sapiens
tacaatatcttacag

SEQ ID NO: 1995778 - DNA, 15 bp, Homo sapiens
acaatatcttacagt

SEQ ID NO: 1995779 - DNA, 15 bp, Homo sapiens
caatatcttacagtt

SEQ ID NO: 1995780 - DNA, 15 bp, Homo sapiens
aatatcttacagttg

SEQ ID NO: 1995781 - DNA, 15 bp, Homo sapiens
atatcttacagttga

SEQ ID NO: 1995782 - DNA, 15 bp, Homo sapiens
tatcttacagttgat

SEQ ID NO: 1995783 - DNA, 15 bp, Homo sapiens
atcttacagttgatt

SEQ ID NO: 1995784 - DNA, 15 bp, Homo sapiens
tcttacagttgattt

SEQ ID NO: 1995785 - DNA, 15 bp, Homo sapiens
cttacagttgatttg

SEQ ID NO: 1995786 - DNA, 15 bp, Homo sapiens
ttacagttgatttga

SEQ ID NO: 1995787 - DNA, 15 bp, Homo sapiens
tacagttgatttgag

SEQ ID NO: 1995788 - DNA, 15 bp, Homo sapiens
acagttgatttgagt

SEQ ID NO: 1995789 - DNA, 15 bp, Homo sapiens
cagttgatttgagtc

SEQ ID NO: 1995790 - DNA, 15 bp, Homo sapiens
agttgatttgagtcc

SEQ ID NO: 1995791 - DNA, 15 bp, Homo sapiens
gttgatttgagtcct

SEQ ID NO: 1995792 - DNA, 15 bp, Homo sapiens
ttgatttgagtcctg

SEQ ID NO: 1995793 - DNA, 15 bp, Homo sapiens
tgatttgagtcctgt

SEQ ID NO: 1995794 - DNA, 15 bp, Homo sapiens
gatttgagtcctgta

SEQ ID NO: 1995795 - DNA, 15 bp, Homo sapiens
atttgagtcctgtat

SEQ ID NO: 1995796 - DNA, 15 bp, Homo sapiens
tttgagtcctgtatc

SEQ ID NO: 1995797 - DNA, 15 bp, Homo sapiens
ttgagtcctgtatca

SEQ ID NO: 1995798 - DNA, 15 bp, Homo sapiens
tgagtcctgtatcat

SEQ ID NO: 1995799 - DNA, 15 bp, Homo sapiens
gagtcctgtatcatc

SEQ ID NO: 1995800 - DNA, 15 bp, Homo sapiens
agtcctgtatcatca

SEQ ID NO: 1995801 - DNA, 15 bp, Homo sapiens
gtcctgtatcatcat

SEQ ID NO: 1995802 - DNA, 15 bp, Homo sapiens
tcctgtatcatcatg

SEQ ID NO: 1995803 - DNA, 15 bp, Homo sapiens
cctgtatcatcatgt

SEQ ID NO: 1995804 - DNA, 15 bp, Homo sapiens
ctgtatcatcatgta

SEQ ID NO: 1995805 - DNA, 15 bp, Homo sapiens
tgtatcatcatgtag

SEQ ID NO: 1995806 - DNA, 15 bp, Homo sapiens
gtatcatcatgtagt

SEQ ID NO: 1995807 - DNA, 15 bp, Homo sapiens
tatcatcatgtagtg

SEQ ID NO: 1995808 - DNA, 15 bp, Homo sapiens
atcatcatgtagtgc

SEQ ID NO: 1995809 - DNA, 15 bp, Homo sapiens
tcatcatgtagtgcc

SEQ ID NO: 1995810 - DNA, 15 bp, Homo sapiens
catcatgtagtgccc

SEQ ID NO: 1995811 - DNA, 15 bp, Homo sapiens
atcatgtagtgcccc

SEQ ID NO: 1995812 - DNA, 15 bp, Homo sapiens
tcatgtagtgcccct

SEQ ID NO: 1995813 - DNA, 15 bp, Homo sapiens
catgtagtgcccctc

SEQ ID NO: 1995814 - DNA, 15 bp, Homo sapiens
atgtagtgcccctct

SEQ ID NO: 1995815 - DNA, 15 bp, Homo sapiens
tgtagtgcccctctt

SEQ ID NO: 1995816 - DNA, 15 bp, Homo sapiens
gtagtgcccctcttg

SEQ ID NO: 1995817 - DNA, 15 bp, Homo sapiens
tagtgcccctcttga

SEQ ID NO: 1995818 - DNA, 15 bp, Homo sapiens
agtgcccctcttgat

SEQ ID NO: 1995819 - DNA, 15 bp, Homo sapiens
gtgcccctcttgatc

SEQ ID NO: 1995820 - DNA, 15 bp, Homo sapiens
tgcccctcttgatct

SEQ ID NO: 1995821 - DNA, 15 bp, Homo sapiens
gcccctcttgatctc

SEQ ID NO: 1995822 - DNA, 15 bp, Homo sapiens
cccctcttgatctct

SEQ ID NO: 1995823 - DNA, 15 bp, Homo sapiens
ccctcttgatctcta

SEQ ID NO: 1995824 - DNA, 15 bp, Homo sapiens
cctcttgatctctag

SEQ ID NO: 1995825 - DNA, 15 bp, Homo sapiens
ctcttgatctctagt

SEQ ID NO: 1995826 - DNA, 15 bp, Homo sapiens
tcttgatctctagtc

SEQ ID NO: 1995827 - DNA, 15 bp, Homo sapiens
cttgatctctagtcc

SEQ ID NO: 1995828 - DNA, 15 bp, Homo sapiens
ttgatctctagtcct

SEQ ID NO: 1995829 - DNA, 15 bp, Homo sapiens
tgatctctagtcctt

SEQ ID NO: 1995830 - DNA, 15 bp, Homo sapiens
gatctctagtccttt

SEQ ID NO: 1995831 - DNA, 15 bp, Homo sapiens
atctctagtcctttt

SEQ ID NO: 1995832 - DNA, 15 bp, Homo sapiens
tctctagtccttttt

SEQ ID NO: 1995833 - DNA, 15 bp, Homo sapiens
ctctagtccttttta

SEQ ID NO: 1995834 - DNA, 15 bp, Homo sapiens
tctagtcctttttat

SEQ ID NO: 1995835 - DNA, 15 bp, Homo sapiens
ctagtcctttttatc

SEQ ID NO: 1995836 - DNA, 15 bp, Homo sapiens
tagtcctttttatct

SEQ ID NO: 1995837 - DNA, 15 bp, Homo sapiens
agtcctttttatctt

SEQ ID NO: 1995838 - DNA, 15 bp, Homo sapiens
gtcctttttatctta

SEQ ID NO: 1995839 - DNA, 15 bp, Homo sapiens
tcctttttatcttag

SEQ ID NO: 1995840 - DNA, 15 bp, Homo sapiens
cctttttatcttagt

SEQ ID NO: 1995841 - DNA, 15 bp, Homo sapiens
ctttttatcttagtc

SEQ ID NO: 1995842 - DNA, 15 bp, Homo sapiens
tttttatcttagtcc

SEQ ID NO: 1995843 - DNA, 15 bp, Homo sapiens
ttttatcttagtcca

SEQ ID NO: 1995844 - DNA, 15 bp, Homo sapiens
tttatcttagtccac

SEQ ID NO: 1995845 - DNA, 15 bp, Homo sapiens
ttatcttagtccact

SEQ ID NO: 1995846 - DNA, 15 bp, Homo sapiens
tatcttagtccactc

SEQ ID NO: 1995847 - DNA, 15 bp, Homo sapiens
atcttagtccactcc

SEQ ID NO: 1995848 - DNA, 15 bp, Homo sapiens
tcttagtccactcca

SEQ ID NO: 1995849 - DNA, 15 bp, Homo sapiens
cttagtccactccag

SEQ ID NO: 1995850 - DNA, 15 bp, Homo sapiens
ttagtccactccagt

SEQ ID NO: 1995851 - DNA, 15 bp, Homo sapiens
tagtccactccagtt

SEQ ID NO: 1995852 - DNA, 15 bp, Homo sapiens
agtccactccagttt

SEQ ID NO: 1995853 - DNA, 15 bp, Homo sapiens
gtccactccagtttt

SEQ ID NO: 1995854 - DNA, 15 bp, Homo sapiens
tccactccagttttc

SEQ ID NO: 1995855 - DNA, 15 bp, Homo sapiens
ccactccagttttct

SEQ ID NO: 1995856 - DNA, 15 bp, Homo sapiens
cactccagttttctc

SEQ ID NO: 1995857 - DNA, 15 bp, Homo sapiens
actccagttttctct

SEQ ID NO: 1995858 - DNA, 15 bp, Homo sapiens
ctccagttttctctt

SEQ ID NO: 1995859 - DNA, 15 bp, Homo sapiens
tccagttttctcttg

SEQ ID NO: 1995860 - DNA, 15 bp, Homo sapiens
ccagttttctcttgt

SEQ ID NO: 1995861 - DNA, 15 bp, Homo sapiens
cagttttctcttgtt

SEQ ID NO: 1995862 - DNA, 15 bp, Homo sapiens
agttttctcttgttt

SEQ ID NO: 1995863 - DNA, 15 bp, Homo sapiens
gttttctcttgtttc

SEQ ID NO: 1995864 - DNA, 15 bp, Homo sapiens
ttttctcttgtttct

SEQ ID NO: 1995865 - DNA, 15 bp, Homo sapiens
tttctcttgtttcta

SEQ ID NO: 1995866 - DNA, 15 bp, Homo sapiens
ttctcttgtttctat

SEQ ID NO: 1995867 - DNA, 15 bp, Homo sapiens
tctcttgtttctatt

SEQ ID NO: 1995868 - DNA, 15 bp, Homo sapiens
ctcttgtttctattt

SEQ ID NO: 1995869 - DNA, 15 bp, Homo sapiens
tcttgtttctatttg

SEQ ID NO: 1995870 - DNA, 15 bp, Homo sapiens
cttgtttctatttgc

SEQ ID NO: 1995871 - DNA, 15 bp, Homo sapiens
ttgtttctatttgcc

SEQ ID NO: 1995872 - DNA, 15 bp, Homo sapiens
tgtttctatttgcct

SEQ ID NO: 1995873 - DNA, 15 bp, Homo sapiens
gtttctatttgcctg

SEQ ID NO: 1995874 - DNA, 15 bp, Homo sapiens
tttctatttgcctga

SEQ ID NO: 1995875 - DNA, 15 bp, Homo sapiens
ttctatttgcctgat

SEQ ID NO: 1995876 - DNA, 15 bp, Homo sapiens
tctatttgcctgata

SEQ ID NO: 1995877 - DNA, 15 bp, Homo sapiens
ctatttgcctgatag

SEQ ID NO: 1995878 - DNA, 15 bp, Homo sapiens
tatttgcctgataga

SEQ ID NO: 1995879 - DNA, 15 bp, Homo sapiens
atttgcctgatagat

SEQ ID NO: 1995880 - DNA, 15 bp, Homo sapiens
tttgcctgatagatc

SEQ ID NO: 1995881 - DNA, 15 bp, Homo sapiens
ttgcctgatagatct

SEQ ID NO: 1995882 - DNA, 15 bp, Homo sapiens
tgcctgatagatctt

SEQ ID NO: 1995883 - DNA, 15 bp, Homo sapiens
gcctgatagatcttt

SEQ ID NO: 1995884 - DNA, 15 bp, Homo sapiens
cctgatagatctttt

SEQ ID NO: 1995885 - DNA, 15 bp, Homo sapiens
ctgatagatcttttt

SEQ ID NO: 1995886 - DNA, 15 bp, Homo sapiens
tgatagatctttttc

SEQ ID NO: 1995887 - DNA, 15 bp, Homo sapiens
gatagatctttttcc

SEQ ID NO: 1995888 - DNA, 15 bp, Homo sapiens
atagatctttttcca

SEQ ID NO: 1995889 - DNA, 15 bp, Homo sapiens
tagatctttttccat

SEQ ID NO: 1995890 - DNA, 15 bp, Homo sapiens
agatctttttccatt

SEQ ID NO: 1995891 - DNA, 15 bp, Homo sapiens
gatctttttccattt

SEQ ID NO: 1995892 - DNA, 15 bp, Homo sapiens
atctttttccatttc

SEQ ID NO: 1995893 - DNA, 15 bp, Homo sapiens
tctttttccatttct

SEQ ID NO: 1995894 - DNA, 15 bp, Homo sapiens
ctttttccatttctt

SEQ ID NO: 1995895 - DNA, 15 bp, Homo sapiens
tttttccatttctta

SEQ ID NO: 1995896 - DNA, 15 bp, Homo sapiens
ttttccatttcttaa

SEQ ID NO: 1995897 - DNA, 15 bp, Homo sapiens
tttccatttcttaac

SEQ ID NO: 1995898 - DNA, 15 bp, Homo sapiens
ttccatttcttaact

SEQ ID NO: 1995899 - DNA, 15 bp, Homo sapiens
tccatttcttaacta

SEQ ID NO: 1995900 - DNA, 15 bp, Homo sapiens
ccatttcttaactat

SEQ ID NO: 1995901 - DNA, 15 bp, Homo sapiens
catttcttaactatc

SEQ ID NO: 1995902 - DNA, 15 bp, Homo sapiens
atttcttaactatca

SEQ ID NO: 1995903 - DNA, 15 bp, Homo sapiens
tttcttaactatcaa

SEQ ID NO: 1995904 - DNA, 15 bp, Homo sapiens
ttcttaactatcaat

SEQ ID NO: 1995905 - DNA, 15 bp, Homo sapiens
tcttaactatcaata

SEQ ID NO: 1995906 - DNA, 15 bp, Homo sapiens
cttaactatcaatat

SEQ ID NO: 1995907 - DNA, 15 bp, Homo sapiens
ttaactatcaatatt

SEQ ID NO: 1995908 - DNA, 15 bp, Homo sapiens
taactatcaatattt

SEQ ID NO: 1995909 - DNA, 15 bp, Homo sapiens
aactatcaatatttc

SEQ ID NO: 1995910 - DNA, 15 bp, Homo sapiens
actatcaatatttct

SEQ ID NO: 1995911 - DNA, 15 bp, Homo sapiens
ctatcaatatttctg

SEQ ID NO: 1995912 - DNA, 15 bp, Homo sapiens
tatcaatatttctgt

SEQ ID NO: 1995913 - DNA, 15 bp, Homo sapiens
atcaatatttctgtg

SEQ ID NO: 1995914 - DNA, 15 bp, Homo sapiens
tcaatatttctgtgc

SEQ ID NO: 1995915 - DNA, 15 bp, Homo sapiens
caatatttctgtgcc

SEQ ID NO: 1995916 - DNA, 15 bp, Homo sapiens
aatatttctgtgcct

SEQ ID NO: 1995917 - DNA, 15 bp, Homo sapiens
atatttctgtgcctg

SEQ ID NO: 1995918 - DNA, 15 bp, Homo sapiens
tatttctgtgcctgt

SEQ ID NO: 1995919 - DNA, 15 bp, Homo sapiens
atttctgtgcctgta

SEQ ID NO: 1995920 - DNA, 15 bp, Homo sapiens
tttctgtgcctgtat

SEQ ID NO: 1995921 - DNA, 15 bp, Homo sapiens
ttctgtgcctgtatg

SEQ ID NO: 1995922 - DNA, 15 bp, Homo sapiens
tctgtgcctgtatgc

SEQ ID NO: 1995923 - DNA, 15 bp, Homo sapiens
ctgtgcctgtatgct

SEQ ID NO: 1995924 - DNA, 15 bp, Homo sapiens
tgtgcctgtatgctt

SEQ ID NO: 1995925 - DNA, 15 bp, Homo sapiens
gtgcctgtatgcttt

SEQ ID NO: 1995926 - DNA, 15 bp, Homo sapiens
tgcctgtatgcttta

SEQ ID NO: 1995927 - DNA, 15 bp, Homo sapiens
gcctgtatgctttat

SEQ ID NO: 1995928 - DNA, 15 bp, Homo sapiens
cctgtatgctttatg

SEQ ID NO: 1995929 - DNA, 15 bp, Homo sapiens
ctgtatgctttatgt

SEQ ID NO: 1995930 - DNA, 15 bp, Homo sapiens
tgtatgctttatgtt

SEQ ID NO: 1995931 - DNA, 15 bp, Homo sapiens
gtatgctttatgttt

SEQ ID NO: 1995932 - DNA, 15 bp, Homo sapiens
tatgctttatgtttg

SEQ ID NO: 1995933 - DNA, 15 bp, Homo sapiens
atgctttatgtttgt

SEQ ID NO: 1995934 - DNA, 15 bp, Homo sapiens
tgctttatgtttgtc

SEQ ID NO: 1995935 - DNA, 15 bp, Homo sapiens
gctttatgtttgtct

SEQ ID NO: 1995936 - DNA, 15 bp, Homo sapiens
ctttatgtttgtctc

SEQ ID NO: 1995937 - DNA, 15 bp, Homo sapiens
tttatgtttgtctct

SEQ ID NO: 1995938 - DNA, 15 bp, Homo sapiens
ttatgtttgtctctt

SEQ ID NO: 1995939 - DNA, 15 bp, Homo sapiens
tatgtttgtctctta

SEQ ID NO: 1995940 - DNA, 15 bp, Homo sapiens
atgtttgtctcttat

SEQ ID NO: 1995941 - DNA, 15 bp, Homo sapiens
tgtttgtctcttata

SEQ ID NO: 1995942 - DNA, 15 bp, Homo sapiens
gtttgtctcttataa

SEQ ID NO: 1995943 - DNA, 15 bp, Homo sapiens
tttgtctcttataaa

SEQ ID NO: 1995944 - DNA, 15 bp, Homo sapiens
ttgtctcttataaac

SEQ ID NO: 1995945 - DNA, 15 bp, Homo sapiens
tgtctcttataaaca

SEQ ID NO: 1995946 - DNA, 15 bp, Homo sapiens
gtctcttataaacag

SEQ ID NO: 1995947 - DNA, 15 bp, Homo sapiens
tctcttataaacagt

SEQ ID NO: 1995948 - DNA, 15 bp, Homo sapiens
ctcttataaacagtt

SEQ ID NO: 1995949 - DNA, 15 bp, Homo sapiens
tcttataaacagttc

SEQ ID NO: 1995950 - DNA, 15 bp, Homo sapiens
cttataaacagttca

SEQ ID NO: 1995951 - DNA, 15 bp, Homo sapiens
ttataaacagttcat

SEQ ID NO: 1995952 - DNA, 15 bp, Homo sapiens
tataaacagttcatg

SEQ ID NO: 1995953 - DNA, 15 bp, Homo sapiens
ataaacagttcatgg

SEQ ID NO: 1995954 - DNA, 15 bp, Homo sapiens
taaacagttcatggg

SEQ ID NO: 1995955 - DNA, 15 bp, Homo sapiens
aaacagttcatggga

SEQ ID NO: 1995956 - DNA, 15 bp, Homo sapiens
aacagttcatgggaa

SEQ ID NO: 1995957 - DNA, 15 bp, Homo sapiens
acagttcatgggaaa

SEQ ID NO: 1995958 - DNA, 15 bp, Homo sapiens
cagttcatgggaaac

SEQ ID NO: 1995959 - DNA, 15 bp, Homo sapiens
agttcatgggaaacc

SEQ ID NO: 1995960 - DNA, 15 bp, Homo sapiens
gttcatgggaaacca

SEQ ID NO: 1995961 - DNA, 15 bp, Homo sapiens
ttcatgggaaaccag

SEQ ID NO: 1995962 - DNA, 15 bp, Homo sapiens
tcatgggaaaccagt

SEQ ID NO: 1995963 - DNA, 15 bp, Homo sapiens
catgggaaaccagtc

SEQ ID NO: 1995964 - DNA, 15 bp, Homo sapiens
atgggaaaccagtct

SEQ ID NO: 1995965 - DNA, 15 bp, Homo sapiens
tgggaaaccagtctg

SEQ ID NO: 1995966 - DNA, 15 bp, Homo sapiens
gggaaaccagtctga

SEQ ID NO: 1995967 - DNA, 15 bp, Homo sapiens
ggaaaccagtctgat

SEQ ID NO: 1995968 - DNA, 15 bp, Homo sapiens
gaaaccagtctgatg

SEQ ID NO: 1995969 - DNA, 15 bp, Homo sapiens
aaaccagtctgatgg

SEQ ID NO: 1995970 - DNA, 15 bp, Homo sapiens
aaccagtctgatggt

SEQ ID NO: 1995971 - DNA, 15 bp, Homo sapiens
accagtctgatggtt

SEQ ID NO: 1995972 - DNA, 15 bp, Homo sapiens
ccagtctgatggttt

SEQ ID NO: 1995973 - DNA, 15 bp, Homo sapiens
cagtctgatggtttt

SEQ ID NO: 1995974 - DNA, 15 bp, Homo sapiens
agtctgatggttttt

SEQ ID NO: 1995975 - DNA, 15 bp, Homo sapiens
gtctgatggtttttt

SEQ ID NO: 1995976 - DNA, 15 bp, Homo sapiens
tctgatggttttttt

SEQ ID NO: 1995977 - DNA, 15 bp, Homo sapiens
ctgatggtttttttt

SEQ ID NO: 1995978 - DNA, 15 bp, Homo sapiens
tgatggttttttttt

SEQ ID NO: 1995979 - DNA, 15 bp, Homo sapiens
gatggtttttttttc

SEQ ID NO: 1995980 - DNA, 15 bp, Homo sapiens
atggtttttttttct

SEQ ID NO: 1995981 - DNA, 15 bp, Homo sapiens
tggtttttttttctt

SEQ ID NO: 1995982 - DNA, 15 bp, Homo sapiens
ggtttttttttcttc

SEQ ID NO: 1995983 - DNA, 15 bp, Homo sapiens
gtttttttttcttct

SEQ ID NO: 1995984 - DNA, 15 bp, Homo sapiens
tttttttttcttctg

SEQ ID NO: 1995985 - DNA, 15 bp, Homo sapiens
ttttttttcttctgc

SEQ ID NO: 1995986 - DNA, 15 bp, Homo sapiens
tttttttcttctgcc

SEQ ID NO: 1995987 - DNA, 15 bp, Homo sapiens
ttttttcttctgcct

SEQ ID NO: 1995988 - DNA, 15 bp, Homo sapiens
tttttcttctgcctg

SEQ ID NO: 1995989 - DNA, 15 bp, Homo sapiens
ttttcttctgcctgg

SEQ ID NO: 1995990 - DNA, 15 bp, Homo sapiens
tttcttctgcctgga

SEQ ID NO: 1995991 - DNA, 15 bp, Homo sapiens
ttcttctgcctggag

SEQ ID NO: 1995992 - DNA, 15 bp, Homo sapiens
tcttctgcctggaga

SEQ ID NO: 1995993 - DNA, 15 bp, Homo sapiens
cttctgcctggagag

SEQ ID NO: 1995994 - DNA, 15 bp, Homo sapiens
ttctgcctggagagt

SEQ ID NO: 1995995 - DNA, 15 bp, Homo sapiens
tctgcctggagagtt

SEQ ID NO: 1995996 - DNA, 15 bp, Homo sapiens
ctgcctggagagttt

SEQ ID NO: 1995997 - DNA, 15 bp, Homo sapiens
tgcctggagagttta

SEQ ID NO: 1995998 - DNA, 15 bp, Homo sapiens
gcctggagagtttag

SEQ ID NO: 1995999 - DNA, 15 bp, Homo sapiens
cctggagagtttagt

SEQ ID NO: 1996000 - DNA, 15 bp, Homo sapiens
ctggagagtttagtt

SEQ ID NO: 1996001 - DNA, 15 bp, Homo sapiens
tggagagtttagttc

SEQ ID NO: 1996002 - DNA, 15 bp, Homo sapiens
ggagagtttagttca

SEQ ID NO: 1996003 - DNA, 15 bp, Homo sapiens
gagagtttagttcat

SEQ ID NO: 1996004 - DNA, 15 bp, Homo sapiens
agagtttagttcatt

SEQ ID NO: 1996005 - DNA, 15 bp, Homo sapiens
gagtttagttcattt

SEQ ID NO: 1996006 - DNA, 15 bp, Homo sapiens
agtttagttcattta

SEQ ID NO: 1996007 - DNA, 15 bp, Homo sapiens
gtttagttcatttac

SEQ ID NO: 1996008 - DNA, 15 bp, Homo sapiens
tttagttcatttaca

SEQ ID NO: 1996009 - DNA, 15 bp, Homo sapiens
ttagttcatttacat

SEQ ID NO: 1996010 - DNA, 15 bp, Homo sapiens
tagttcatttacatt

SEQ ID NO: 1996011 - DNA, 15 bp, Homo sapiens
agttcatttacattc

SEQ ID NO: 1996012 - DNA, 15 bp, Homo sapiens
gttcatttacattca

SEQ ID NO: 1996013 - DNA, 15 bp, Homo sapiens
ttcatttacattcat

SEQ ID NO: 1996014 - DNA, 15 bp, Homo sapiens
tcatttacattcatt

SEQ ID NO: 1996015 - DNA, 15 bp, Homo sapiens
catttacattcattg

SEQ ID NO: 1996016 - DNA, 15 bp, Homo sapiens
atttacattcattgt

SEQ ID NO: 1996017 - DNA, 15 bp, Homo sapiens
tttacattcattgtg

SEQ ID NO: 1996018 - DNA, 15 bp, Homo sapiens
ttacattcattgtga

SEQ ID NO: 1996019 - DNA, 15 bp, Homo sapiens
tacattcattgtgat

SEQ ID NO: 1996020 - DNA, 15 bp, Homo sapiens
acattcattgtgatg

SEQ ID NO: 1996021 - DNA, 15 bp, Homo sapiens
cattcattgtgatga

SEQ ID NO: 1996022 - DNA, 15 bp, Homo sapiens
attcattgtgatgac

SEQ ID NO: 1996023 - DNA, 15 bp, Homo sapiens
ttcattgtgatgact

SEQ ID NO: 1996024 - DNA, 15 bp, Homo sapiens
tcattgtgatgactg

SEQ ID NO: 1996025 - DNA, 15 bp, Homo sapiens
cattgtgatgactga

SEQ ID NO: 1996026 - DNA, 15 bp, Homo sapiens
attgtgatgactgac

SEQ ID NO: 1996027 - DNA, 15 bp, Homo sapiens
ttgtgatgactgaca

SEQ ID NO: 1996028 - DNA, 15 bp, Homo sapiens
tgtgatgactgacat

SEQ ID NO: 1996029 - DNA, 15 bp, Homo sapiens
gtgatgactgacatc

SEQ ID NO: 1996030 - DNA, 15 bp, Homo sapiens
tgatgactgacatct

SEQ ID NO: 1996031 - DNA, 15 bp, Homo sapiens
gatgactgacatctt

SEQ ID NO: 1996032 - DNA, 15 bp, Homo sapiens
atgactgacatcttt

SEQ ID NO: 1996033 - DNA, 15 bp, Homo sapiens
tgactgacatctttg

SEQ ID NO: 1996034 - DNA, 15 bp, Homo sapiens
gactgacatctttgg

SEQ ID NO: 1996035 - DNA, 15 bp, Homo sapiens
actgacatctttgga

SEQ ID NO: 1996036 - DNA, 15 bp, Homo sapiens
ctgacatctttggat

SEQ ID NO: 1996037 - DNA, 15 bp, Homo sapiens
tgacatctttggatt

SEQ ID NO: 1996038 - DNA, 15 bp, Homo sapiens
gacatctttggattc

SEQ ID NO: 1996039 - DNA, 15 bp, Homo sapiens
acatctttggattcc

SEQ ID NO: 1996040 - DNA, 15 bp, Homo sapiens
catctttggattcct

SEQ ID NO: 1996041 - DNA, 15 bp, Homo sapiens
atctttggattcctt

SEQ ID NO: 1996042 - DNA, 15 bp, Homo sapiens
tctttggattccttt

SEQ ID NO: 1996043 - DNA, 15 bp, Homo sapiens
ctttggattcctttc

SEQ ID NO: 1996044 - DNA, 15 bp, Homo sapiens
tttggattcctttct

SEQ ID NO: 1996045 - DNA, 15 bp, Homo sapiens
ttggattcctttctg

SEQ ID NO: 1996046 - DNA, 15 bp, Homo sapiens
tggattcctttctgc

SEQ ID NO: 1996047 - DNA, 15 bp, Homo sapiens
ggattcctttctgcc

SEQ ID NO: 1996048 - DNA, 15 bp, Homo sapiens
gattcctttctgcca

SEQ ID NO: 1996049 - DNA, 15 bp, Homo sapiens
attcctttctgccat

SEQ ID NO: 1996050 - DNA, 15 bp, Homo sapiens
ttcctttctgccatt

SEQ ID NO: 1996051 - DNA, 15 bp, Homo sapiens
tcctttctgccattt

SEQ ID NO: 1996052 - DNA, 15 bp, Homo sapiens
cctttctgccatttt

SEQ ID NO: 1996053 - DNA, 15 bp, Homo sapiens
ctttctgccattttc

SEQ ID NO: 1996054 - DNA, 15 bp, Homo sapiens
tttctgccattttct

SEQ ID NO: 1996055 - DNA, 15 bp, Homo sapiens
ttctgccattttctt

SEQ ID NO: 1996056 - DNA, 15 bp, Homo sapiens
tctgccattttcttt

SEQ ID NO: 1996057 - DNA, 15 bp, Homo sapiens
ctgccattttctttt

SEQ ID NO: 1996058 - DNA, 15 bp, Homo sapiens
tgccattttcttttt

SEQ ID NO: 1996059 - DNA, 15 bp, Homo sapiens
gccattttcttttta

SEQ ID NO: 1996060 - DNA, 15 bp, Homo sapiens
ccattttctttttaa

SEQ ID NO: 1996061 - DNA, 15 bp, Homo sapiens
cattttctttttaaa

SEQ ID NO: 1996062 - DNA, 15 bp, Homo sapiens
attttctttttaaaa

SEQ ID NO: 1996063 - DNA, 15 bp, Homo sapiens
ttttctttttaaaat

SEQ ID NO: 1996064 - DNA, 15 bp, Homo sapiens
tttctttttaaaatt

SEQ ID NO: 1996065 - DNA, 15 bp, Homo sapiens
ttctttttaaaattt

SEQ ID NO: 1996066 - DNA, 15 bp, Homo sapiens
tctttttaaaattta

SEQ ID NO: 1996067 - DNA, 15 bp, Homo sapiens
ctttttaaaatttaa

SEQ ID NO: 1996068 - DNA, 15 bp, Homo sapiens
tttttaaaatttaat

SEQ ID NO: 1996069 - DNA, 15 bp, Homo sapiens
ttttaaaatttaatc

SEQ ID NO: 1996070 - DNA, 15 bp, Homo sapiens
tttaaaatttaatct

SEQ ID NO: 1996071 - DNA, 15 bp, Homo sapiens
ttaaaatttaatcta

SEQ ID NO: 1996072 - DNA, 15 bp, Homo sapiens
taaaatttaatctaa

SEQ ID NO: 1996073 - DNA, 15 bp, Homo sapiens
aatttaatctaatta

SEQ ID NO: 1996074 - DNA, 15 bp, Homo sapiens
atttaatctaattat

SEQ ID NO: 1996075 - DNA, 15 bp, Homo sapiens
tttaatctaattatt

SEQ ID NO: 1996076 - DNA, 15 bp, Homo sapiens
ttaatctaattatta

SEQ ID NO: 1996077 - DNA, 15 bp, Homo sapiens
taatctaattattat

SEQ ID NO: 1996078 - DNA, 15 bp, Homo sapiens
aatctaattattatt

SEQ ID NO: 1996079 - DNA, 15 bp, Homo sapiens
atctaattattatta

SEQ ID NO: 1996080 - DNA, 15 bp, Homo sapiens
tctaattattattac

SEQ ID NO: 1996081 - DNA, 15 bp, Homo sapiens
ctaattattattact

SEQ ID NO: 1996082 - DNA, 15 bp, Homo sapiens
taattattattactt

SEQ ID NO: 1996083 - DNA, 15 bp, Homo sapiens
aattattattacttt

SEQ ID NO: 1996084 - DNA, 15 bp, Homo sapiens
attattattactttt

SEQ ID NO: 1996085 - DNA, 15 bp, Homo sapiens
ttattattacttttt

SEQ ID NO: 1996086 - DNA, 15 bp, Homo sapiens
tattattactttttt

SEQ ID NO: 1996087 - DNA, 15 bp, Homo sapiens
attattacttttttg

SEQ ID NO: 1996088 - DNA, 15 bp, Homo sapiens
ttattacttttttga

SEQ ID NO: 1996089 - DNA, 15 bp, Homo sapiens
tattacttttttgaa

SEQ ID NO: 1996090 - DNA, 15 bp, Homo sapiens
attacttttttgaaa

SEQ ID NO: 1996091 - DNA, 15 bp, Homo sapiens
ttacttttttgaaac

SEQ ID NO: 1996092 - DNA, 15 bp, Homo sapiens
tacttttttgaaaca

SEQ ID NO: 1996093 - DNA, 15 bp, Homo sapiens
acttttttgaaacag

SEQ ID NO: 1996094 - DNA, 15 bp, Homo sapiens
cttttttgaaacagg

SEQ ID NO: 1996095 - DNA, 15 bp, Homo sapiens
ttttttgaaacaggg

SEQ ID NO: 1996096 - DNA, 15 bp, Homo sapiens
tttttgaaacagggg

SEQ ID NO: 1996097 - DNA, 15 bp, Homo sapiens
ttttgaaacaggggt

SEQ ID NO: 1996098 - DNA, 15 bp, Homo sapiens
tttgaaacaggggtc

SEQ ID NO: 1996099 - DNA, 15 bp, Homo sapiens
ttgaaacaggggtct

SEQ ID NO: 1996100 - DNA, 15 bp, Homo sapiens
tgaaacaggggtctt

SEQ ID NO: 1996101 - DNA, 15 bp, Homo sapiens
gaaacaggggtcttt

SEQ ID NO: 1996102 - DNA, 15 bp, Homo sapiens
aaacaggggtctttc

SEQ ID NO: 1996103 - DNA, 15 bp, Homo sapiens
aacaggggtctttct

SEQ ID NO: 1996104 - DNA, 15 bp, Homo sapiens
acaggggtctttctc

SEQ ID NO: 1996105 - DNA, 15 bp, Homo sapiens
caggggtctttctct

SEQ ID NO: 1996106 - DNA, 15 bp, Homo sapiens
aggggtctttctctg

SEQ ID NO: 1996107 - DNA, 15 bp, Homo sapiens
ggggtctttctctgt

SEQ ID NO: 1996108 - DNA, 15 bp, Homo sapiens
gggtctttctctgtt

SEQ ID NO: 1996109 - DNA, 15 bp, Homo sapiens
ggtctttctctgttg

SEQ ID NO: 1996110 - DNA, 15 bp, Homo sapiens
gtctttctctgttgc

SEQ ID NO: 1996111 - DNA, 15 bp, Homo sapiens
tctttctctgttgcc

SEQ ID NO: 1996112 - DNA, 15 bp, Homo sapiens
ctttctctgttgccc

SEQ ID NO: 1996113 - DNA, 15 bp, Homo sapiens
tttctctgttgccct

SEQ ID NO: 1996114 - DNA, 15 bp, Homo sapiens
ttctctgttgcccta

SEQ ID NO: 1996115 - DNA, 15 bp, Homo sapiens
tctctgttgccctaa

SEQ ID NO: 1996116 - DNA, 15 bp, Homo sapiens
ctctgttgccctaac

SEQ ID NO: 1996117 - DNA, 15 bp, Homo sapiens
tctgttgccctaact

SEQ ID NO: 1996118 - DNA, 15 bp, Homo sapiens
ctgttgccctaactt

SEQ ID NO: 1996119 - DNA, 15 bp, Homo sapiens
tgttgccctaacttg

SEQ ID NO: 1996120 - DNA, 15 bp, Homo sapiens
gttgccctaacttga

SEQ ID NO: 1996121 - DNA, 15 bp, Homo sapiens
ttgccctaacttgag

SEQ ID NO: 1996122 - DNA, 15 bp, Homo sapiens
tgccctaacttgagt

SEQ ID NO: 1996123 - DNA, 15 bp, Homo sapiens
gccctaacttgagtc

SEQ ID NO: 1996124 - DNA, 15 bp, Homo sapiens
ccctaacttgagtcc

SEQ ID NO: 1996125 - DNA, 15 bp, Homo sapiens
cctaacttgagtcca

SEQ ID NO: 1996126 - DNA, 15 bp, Homo sapiens
ctaacttgagtccag

SEQ ID NO: 1996127 - DNA, 15 bp, Homo sapiens
taacttgagtccagt

SEQ ID NO: 1996128 - DNA, 15 bp, Homo sapiens
aacttgagtccagtg

SEQ ID NO: 1996129 - DNA, 15 bp, Homo sapiens
acttgagtccagtgg

SEQ ID NO: 1996130 - DNA, 15 bp, Homo sapiens
cttgagtccagtggt

SEQ ID NO: 1996131 - DNA, 15 bp, Homo sapiens
ttgagtccagtggtg

SEQ ID NO: 1996132 - DNA, 15 bp, Homo sapiens
tgagtccagtggtgt

SEQ ID NO: 1996133 - DNA, 15 bp, Homo sapiens
gagtccagtggtgtg

SEQ ID NO: 1996134 - DNA, 15 bp, Homo sapiens
agtccagtggtgtga

SEQ ID NO: 1996135 - DNA, 15 bp, Homo sapiens
gtccagtggtgtgat

SEQ ID NO: 1996136 - DNA, 15 bp, Homo sapiens
tccagtggtgtgatc

SEQ ID NO: 1996137 - DNA, 15 bp, Homo sapiens
ccagtggtgtgatca

SEQ ID NO: 1996138 - DNA, 15 bp, Homo sapiens
agtggtgtgatcatg

SEQ ID NO: 1996139 - DNA, 15 bp, Homo sapiens
gtggtgtgatcatgg

SEQ ID NO: 1996140 - DNA, 15 bp, Homo sapiens
tggtgtgatcatggc

SEQ ID NO: 1996141 - DNA, 15 bp, Homo sapiens
ggtgtgatcatggct

SEQ ID NO: 1996142 - DNA, 15 bp, Homo sapiens
gtgtgatcatggctc

SEQ ID NO: 1996143 - DNA, 15 bp, Homo sapiens
tgtgatcatggctca

SEQ ID NO: 1996144 - DNA, 15 bp, Homo sapiens
gtgatcatggctcac

SEQ ID NO: 1996145 - DNA, 15 bp, Homo sapiens
catggctcactgcaa

SEQ ID NO: 1996146 - DNA, 15 bp, Homo sapiens
ctctgtctcctgggc

SEQ ID NO: 1996147 - DNA, 15 bp, Homo sapiens
tctgtctcctgggct

SEQ ID NO: 1996148 - DNA, 15 bp, Homo sapiens
ctgtctcctgggctc

SEQ ID NO: 1996149 - DNA, 15 bp, Homo sapiens
tgtctcctgggctca

SEQ ID NO: 1996150 - DNA, 15 bp, Homo sapiens
gtctcctgggctcaa

SEQ ID NO: 1996151 - DNA, 15 bp, Homo sapiens
aagtgatcctcccag

SEQ ID NO: 1996152 - DNA, 15 bp, Homo sapiens
agtgatcctcccagc

SEQ ID NO: 1996153 - DNA, 15 bp, Homo sapiens
gtgatcctcccagct

SEQ ID NO: 1996154 - DNA, 15 bp, Homo sapiens
tgatcctcccagctc

SEQ ID NO: 1996155 - DNA, 15 bp, Homo sapiens
gatcctcccagctca

SEQ ID NO: 1996156 - DNA, 15 bp, Homo sapiens
atcctcccagctcag

SEQ ID NO: 1996157 - DNA, 15 bp, Homo sapiens
tcctcccagctcagc

SEQ ID NO: 1996158 - DNA, 15 bp, Homo sapiens
cctcccagctcagcc

SEQ ID NO: 1996159 - DNA, 15 bp, Homo sapiens
ctcccagctcagcct

SEQ ID NO: 1996160 - DNA, 15 bp, Homo sapiens
tcccagctcagcctc

SEQ ID NO: 1996161 - DNA, 15 bp, Homo sapiens
agctcagcctcctaa

SEQ ID NO: 1996162 - DNA, 15 bp, Homo sapiens
gctcagcctcctaag

SEQ ID NO: 1996163 - DNA, 15 bp, Homo sapiens
tcctaagtagctgga

SEQ ID NO: 1996164 - DNA, 15 bp, Homo sapiens
cctaagtagctggaa

SEQ ID NO: 1996165 - DNA, 15 bp, Homo sapiens
ctaagtagctggaac

SEQ ID NO: 1996166 - DNA, 15 bp, Homo sapiens
taagtagctggaact

SEQ ID NO: 1996167 - DNA, 15 bp, Homo sapiens
aagtagctggaacta

SEQ ID NO: 1996168 - DNA, 15 bp, Homo sapiens
agtagctggaactat

SEQ ID NO: 1996169 - DNA, 15 bp, Homo sapiens
gtagctggaactata

SEQ ID NO: 1996170 - DNA, 15 bp, Homo sapiens
tagctggaactatag

SEQ ID NO: 1996171 - DNA, 15 bp, Homo sapiens
agctggaactatagg

SEQ ID NO: 1996172 - DNA, 15 bp, Homo sapiens
gctggaactataggc

SEQ ID NO: 1996173 - DNA, 15 bp, Homo sapiens
ctggaactataggca

SEQ ID NO: 1996174 - DNA, 15 bp, Homo sapiens
tggaactataggcat

SEQ ID NO: 1996175 - DNA, 15 bp, Homo sapiens
ggaactataggcatg

SEQ ID NO: 1996176 - DNA, 15 bp, Homo sapiens
gaactataggcatgt

SEQ ID NO: 1996177 - DNA, 15 bp, Homo sapiens
aactataggcatgtg

SEQ ID NO: 1996178 - DNA, 15 bp, Homo sapiens
ataggcatgtgccat

SEQ ID NO: 1996179 - DNA, 15 bp, Homo sapiens
taggcatgtgccatc

SEQ ID NO: 1996180 - DNA, 15 bp, Homo sapiens
aggcatgtgccatct

SEQ ID NO: 1996181 - DNA, 15 bp, Homo sapiens
ggcatgtgccatctt

SEQ ID NO: 1996182 - DNA, 15 bp, Homo sapiens
gcatgtgccatcttg

SEQ ID NO: 1996183 - DNA, 15 bp, Homo sapiens
catgtgccatcttgt

SEQ ID NO: 1996184 - DNA, 15 bp, Homo sapiens
atgtgccatcttgtc

SEQ ID NO: 1996185 - DNA, 15 bp, Homo sapiens
tgtgccatcttgtct

SEQ ID NO: 1996186 - DNA, 15 bp, Homo sapiens
gtgccatcttgtcta

SEQ ID NO: 1996187 - DNA, 15 bp, Homo sapiens
tgccatcttgtctag

SEQ ID NO: 1996188 - DNA, 15 bp, Homo sapiens
gccatcttgtctaga

SEQ ID NO: 1996189 - DNA, 15 bp, Homo sapiens
ccatcttgtctagat

SEQ ID NO: 1996190 - DNA, 15 bp, Homo sapiens
catcttgtctagata

SEQ ID NO: 1996191 - DNA, 15 bp, Homo sapiens
atcttgtctagataa

SEQ ID NO: 1996192 - DNA, 15 bp, Homo sapiens
tcttgtctagataat

SEQ ID NO: 1996193 - DNA, 15 bp, Homo sapiens
cttgtctagataatt

SEQ ID NO: 1996194 - DNA, 15 bp, Homo sapiens
ttgtctagataatta

SEQ ID NO: 1996195 - DNA, 15 bp, Homo sapiens
tgtctagataattaa

SEQ ID NO: 1996196 - DNA, 15 bp, Homo sapiens
gtctagataattaaa

SEQ ID NO: 1996197 - DNA, 15 bp, Homo sapiens
tctagataattaaaa

SEQ ID NO: 1996198 - DNA, 15 bp, Homo sapiens
ctagataattaaaaa

SEQ ID NO: 1996199 - DNA, 15 bp, Homo sapiens
tagataattaaaaaa

SEQ ID NO: 1996200 - DNA, 15 bp, Homo sapiens
agataattaaaaaac

SEQ ID NO: 1996201 - DNA, 15 bp, Homo sapiens
gataattaaaaaaca

SEQ ID NO: 1996202 - DNA, 15 bp, Homo sapiens
ataattaaaaaacat

SEQ ID NO: 1996203 - DNA, 15 bp, Homo sapiens
taattaaaaaacatt

SEQ ID NO: 1996204 - DNA, 15 bp, Homo sapiens
aattaaaaaacattt

SEQ ID NO: 1996205 - DNA, 15 bp, Homo sapiens
attaaaaaacatttt

SEQ ID NO: 1996206 - DNA, 15 bp, Homo sapiens
ttaaaaaacattttt

SEQ ID NO: 1996207 - DNA, 15 bp, Homo sapiens
taaaaaacatttttt

SEQ ID NO: 1996208 - DNA, 15 bp, Homo sapiens
aaaaaacattttttt

SEQ ID NO: 1996209 - DNA, 15 bp, Homo sapiens
aaaaacatttttttt

SEQ ID NO: 1996210 - DNA, 15 bp, Homo sapiens
aaaacattttttttt

SEQ ID NO: 1996211 - DNA, 15 bp, Homo sapiens
attttttttttttgt

SEQ ID NO: 1996212 - DNA, 15 bp, Homo sapiens
tttttttgtagggac

SEQ ID NO: 1996213 - DNA, 15 bp, Homo sapiens
ttttttgtagggaca

SEQ ID NO: 1996214 - DNA, 15 bp, Homo sapiens
tttttgtagggacag

SEQ ID NO: 1996215 - DNA, 15 bp, Homo sapiens
ttttgtagggacagc

SEQ ID NO: 1996216 - DNA, 15 bp, Homo sapiens
tttgtagggacagca

SEQ ID NO: 1996217 - DNA, 15 bp, Homo sapiens
ttgtagggacagcat

SEQ ID NO: 1996218 - DNA, 15 bp, Homo sapiens
tgtagggacagcatc

SEQ ID NO: 1996219 - DNA, 15 bp, Homo sapiens
gtagggacagcatct

SEQ ID NO: 1996220 - DNA, 15 bp, Homo sapiens
tagggacagcatctt

SEQ ID NO: 1996221 - DNA, 15 bp, Homo sapiens
agggacagcatctta

SEQ ID NO: 1996222 - DNA, 15 bp, Homo sapiens
gggacagcatcttac

SEQ ID NO: 1996223 - DNA, 15 bp, Homo sapiens
ggacagcatcttact

SEQ ID NO: 1996224 - DNA, 15 bp, Homo sapiens
gacagcatcttactg

SEQ ID NO: 1996225 - DNA, 15 bp, Homo sapiens
acagcatcttactgt

SEQ ID NO: 1996226 - DNA, 15 bp, Homo sapiens
cagcatcttactgtg

SEQ ID NO: 1996227 - DNA, 15 bp, Homo sapiens
agcatcttactgtgt

SEQ ID NO: 1996228 - DNA, 15 bp, Homo sapiens
gcatcttactgtgtt

SEQ ID NO: 1996229 - DNA, 15 bp, Homo sapiens
catcttactgtgttt

SEQ ID NO: 1996230 - DNA, 15 bp, Homo sapiens
atcttactgtgtttc

SEQ ID NO: 1996231 - DNA, 15 bp, Homo sapiens
tcttactgtgtttcc

SEQ ID NO: 1996232 - DNA, 15 bp, Homo sapiens
cttactgtgtttccc

SEQ ID NO: 1996233 - DNA, 15 bp, Homo sapiens
ttactgtgtttccca

SEQ ID NO: 1996234 - DNA, 15 bp, Homo sapiens
tactgtgtttcccag

SEQ ID NO: 1996235 - DNA, 15 bp, Homo sapiens
actgtgtttcccagg

SEQ ID NO: 1996236 - DNA, 15 bp, Homo sapiens
ctgtgtttcccaggg

SEQ ID NO: 1996237 - DNA, 15 bp, Homo sapiens
tgtgtttcccagggg

SEQ ID NO: 1996238 - DNA, 15 bp, Homo sapiens
gtgtttcccaggggc

SEQ ID NO: 1996239 - DNA, 15 bp, Homo sapiens
tgtttcccaggggct

SEQ ID NO: 1996240 - DNA, 15 bp, Homo sapiens
gtttcccaggggcta

SEQ ID NO: 1996241 - DNA, 15 bp, Homo sapiens
tttcccaggggctag

SEQ ID NO: 1996242 - DNA, 15 bp, Homo sapiens
ttcccaggggctagt

SEQ ID NO: 1996243 - DNA, 15 bp, Homo sapiens
tcccaggggctagtc

SEQ ID NO: 1996244 - DNA, 15 bp, Homo sapiens
cccaggggctagtct

SEQ ID NO: 1996245 - DNA, 15 bp, Homo sapiens
ccaggggctagtctt

SEQ ID NO: 1996246 - DNA, 15 bp, Homo sapiens
caggggctagtcttg

SEQ ID NO: 1996247 - DNA, 15 bp, Homo sapiens
aggggctagtcttga

SEQ ID NO: 1996248 - DNA, 15 bp, Homo sapiens
ggggctagtcttgaa

SEQ ID NO: 1996249 - DNA, 15 bp, Homo sapiens
gggctagtcttgaac

SEQ ID NO: 1996250 - DNA, 15 bp, Homo sapiens
ctcctgagctcaagc

SEQ ID NO: 1996251 - DNA, 15 bp, Homo sapiens
tcctgagctcaagcg

SEQ ID NO: 1996252 - DNA, 15 bp, Homo sapiens
cctgagctcaagcga

SEQ ID NO: 1996253 - DNA, 15 bp, Homo sapiens
ctgagctcaagcgat

SEQ ID NO: 1996254 - DNA, 15 bp, Homo sapiens
tgagctcaagcgatc

SEQ ID NO: 1996255 - DNA, 15 bp, Homo sapiens
gagctcaagcgatcc

SEQ ID NO: 1996256 - DNA, 15 bp, Homo sapiens
agctcaagcgatcca

SEQ ID NO: 1996257 - DNA, 15 bp, Homo sapiens
tcaagcgatccacct

SEQ ID NO: 1996258 - DNA, 15 bp, Homo sapiens
caagcgatccacctg

SEQ ID NO: 1996259 - DNA, 15 bp, Homo sapiens
aagcgatccacctgc

SEQ ID NO: 1996260 - DNA, 15 bp, Homo sapiens
agcgatccacctgcc

SEQ ID NO: 1996261 - DNA, 15 bp, Homo sapiens
cacctgcctcagctt

SEQ ID NO: 1996262 - DNA, 15 bp, Homo sapiens
acctgcctcagcttc

SEQ ID NO: 1996263 - DNA, 15 bp, Homo sapiens
ctgcctcagcttccc

SEQ ID NO: 1996264 - DNA, 15 bp, Homo sapiens
agcttcccaaagtgt

SEQ ID NO: 1996265 - DNA, 15 bp, Homo sapiens
ttcccaaagtgttgt

SEQ ID NO: 1996266 - DNA, 15 bp, Homo sapiens
tcccaaagtgttgtg

SEQ ID NO: 1996267 - DNA, 15 bp, Homo sapiens
cccaaagtgttgtga

SEQ ID NO: 1996268 - DNA, 15 bp, Homo sapiens
ccaaagtgttgtgat

SEQ ID NO: 1996269 - DNA, 15 bp, Homo sapiens
caaagtgttgtgatt

SEQ ID NO: 1996270 - DNA, 15 bp, Homo sapiens
aaagtgttgtgatta

SEQ ID NO: 1996271 - DNA, 15 bp, Homo sapiens
aagtgttgtgattac

SEQ ID NO: 1996272 - DNA, 15 bp, Homo sapiens
agtgttgtgattaca

SEQ ID NO: 1996273 - DNA, 15 bp, Homo sapiens
gtgttgtgattacag

SEQ ID NO: 1996274 - DNA, 15 bp, Homo sapiens
tgttgtgattacagg

SEQ ID NO: 1996275 - DNA, 15 bp, Homo sapiens
gttgtgattacaggt

SEQ ID NO: 1996276 - DNA, 15 bp, Homo sapiens
ttgtgattacaggtg

SEQ ID NO: 1996277 - DNA, 15 bp, Homo sapiens
tgtgattacaggtgt

SEQ ID NO: 1996278 - DNA, 15 bp, Homo sapiens
gtgattacaggtgtg

SEQ ID NO: 1996279 - DNA, 15 bp, Homo sapiens
tgattacaggtgtga

SEQ ID NO: 1996280 - DNA, 15 bp, Homo sapiens
aggtgtgaaccacca

SEQ ID NO: 1996281 - DNA, 15 bp, Homo sapiens
ggtgtgaaccaccac

SEQ ID NO: 1996282 - DNA, 15 bp, Homo sapiens
gtgtgaaccaccacc

SEQ ID NO: 1996283 - DNA, 15 bp, Homo sapiens
tgtgaaccaccaccc

SEQ ID NO: 1996284 - DNA, 15 bp, Homo sapiens
gtgaaccaccacccc

SEQ ID NO: 1996285 - DNA, 15 bp, Homo sapiens
tgaaccaccaccccc

SEQ ID NO: 1996286 - DNA, 15 bp, Homo sapiens
ctcctatcctcaagt

SEQ ID NO: 1996287 - DNA, 15 bp, Homo sapiens
tcctatcctcaagtg

SEQ ID NO: 1996288 - DNA, 15 bp, Homo sapiens
cctatcctcaagtga

SEQ ID NO: 1996289 - DNA, 15 bp, Homo sapiens
ctatcctcaagtgat

SEQ ID NO: 1996290 - DNA, 15 bp, Homo sapiens
tatcctcaagtgatc

SEQ ID NO: 1996291 - DNA, 15 bp, Homo sapiens
atcctcaagtgatcc

SEQ ID NO: 1996292 - DNA, 15 bp, Homo sapiens
tcctcaagtgatccg

SEQ ID NO: 1996293 - DNA, 15 bp, Homo sapiens
aagtgatccgcccat

SEQ ID NO: 1996294 - DNA, 15 bp, Homo sapiens
agtgatccgcccatt

SEQ ID NO: 1996295 - DNA, 15 bp, Homo sapiens
gtgatccgcccattt

SEQ ID NO: 1996296 - DNA, 15 bp, Homo sapiens
tgatccgcccatttt

SEQ ID NO: 1996297 - DNA, 15 bp, Homo sapiens
gatccgcccatttta

SEQ ID NO: 1996298 - DNA, 15 bp, Homo sapiens
atccgcccattttag

SEQ ID NO: 1996299 - DNA, 15 bp, Homo sapiens
tccgcccattttagc

SEQ ID NO: 1996300 - DNA, 15 bp, Homo sapiens
ccgcccattttagcc

SEQ ID NO: 1996301 - DNA, 15 bp, Homo sapiens
cgcccattttagcct

SEQ ID NO: 1996302 - DNA, 15 bp, Homo sapiens
gcccattttagcctc

SEQ ID NO: 1996303 - DNA, 15 bp, Homo sapiens
cccattttagcctcc

SEQ ID NO: 1996304 - DNA, 15 bp, Homo sapiens
ccattttagcctccc

SEQ ID NO: 1996305 - DNA, 15 bp, Homo sapiens
cattttagcctccca

SEQ ID NO: 1996306 - DNA, 15 bp, Homo sapiens
attttagcctcccaa

SEQ ID NO: 1996307 - DNA, 15 bp, Homo sapiens
ttttagcctcccaaa

SEQ ID NO: 1996308 - DNA, 15 bp, Homo sapiens
tttagcctcccaaac

SEQ ID NO: 1996309 - DNA, 15 bp, Homo sapiens
ttagcctcccaaact

SEQ ID NO: 1996310 - DNA, 15 bp, Homo sapiens
tagcctcccaaactc

SEQ ID NO: 1996311 - DNA, 15 bp, Homo sapiens
agcctcccaaactcc

SEQ ID NO: 1996312 - DNA, 15 bp, Homo sapiens
gcctcccaaactcct

SEQ ID NO: 1996313 - DNA, 15 bp, Homo sapiens
cctcccaaactcctg

SEQ ID NO: 1996314 - DNA, 15 bp, Homo sapiens
ctcccaaactcctgg

SEQ ID NO: 1996315 - DNA, 15 bp, Homo sapiens
tcccaaactcctggg

SEQ ID NO: 1996316 - DNA, 15 bp, Homo sapiens
cccaaactcctggga

SEQ ID NO: 1996317 - DNA, 15 bp, Homo sapiens
ccaaactcctgggat

SEQ ID NO: 1996318 - DNA, 15 bp, Homo sapiens
caaactcctgggatt

SEQ ID NO: 1996319 - DNA, 15 bp, Homo sapiens
aaactcctgggatta

SEQ ID NO: 1996320 - DNA, 15 bp, Homo sapiens
aactcctgggattac

SEQ ID NO: 1996321 - DNA, 15 bp, Homo sapiens
actcctgggattaca

SEQ ID NO: 1996322 - DNA, 15 bp, Homo sapiens
tcctgggattacaga

SEQ ID NO: 1996323 - DNA, 15 bp, Homo sapiens
cctgggattacagat

SEQ ID NO: 1996324 - DNA, 15 bp, Homo sapiens
gattacagatgtgaa

SEQ ID NO: 1996325 - DNA, 15 bp, Homo sapiens
attacagatgtgaac

SEQ ID NO: 1996326 - DNA, 15 bp, Homo sapiens
ttacagatgtgaacc

SEQ ID NO: 1996327 - DNA, 15 bp, Homo sapiens
tacagatgtgaacca

SEQ ID NO: 1996328 - DNA, 15 bp, Homo sapiens
acagatgtgaaccac

SEQ ID NO: 1996329 - DNA, 15 bp, Homo sapiens
cagatgtgaaccact

SEQ ID NO: 1996330 - DNA, 15 bp, Homo sapiens
agatgtgaaccactg

SEQ ID NO: 1996331 - DNA, 15 bp, Homo sapiens
gatgtgaaccactgt

SEQ ID NO: 1996332 - DNA, 15 bp, Homo sapiens
atgtgaaccactgtg

SEQ ID NO: 1996333 - DNA, 15 bp, Homo sapiens
tgtgaaccactgtgc

SEQ ID NO: 1996334 - DNA, 15 bp, Homo sapiens
tgaaccactgtgcct

SEQ ID NO: 1996335 - DNA, 15 bp, Homo sapiens
gaaccactgtgcctg

SEQ ID NO: 1996336 - DNA, 15 bp, Homo sapiens
aaccactgtgcctgc

SEQ ID NO: 1996337 - DNA, 15 bp, Homo sapiens
accactgtgcctgcc

SEQ ID NO: 1996338 - DNA, 15 bp, Homo sapiens
ccactgtgcctgccc

SEQ ID NO: 1996339 - DNA, 15 bp, Homo sapiens
cactgtgcctgccct

SEQ ID NO: 1996340 - DNA, 15 bp, Homo sapiens
actgtgcctgcccta

SEQ ID NO: 1996341 - DNA, 15 bp, Homo sapiens
ctgtgcctgccctaa

SEQ ID NO: 1996342 - DNA, 15 bp, Homo sapiens
tgtgcctgccctaag

SEQ ID NO: 1996343 - DNA, 15 bp, Homo sapiens
gtgcctgccctaagc

SEQ ID NO: 1996344 - DNA, 15 bp, Homo sapiens
tgcctgccctaagca

SEQ ID NO: 1996345 - DNA, 15 bp, Homo sapiens
gcctgccctaagcat

SEQ ID NO: 1996346 - DNA, 15 bp, Homo sapiens
cctgccctaagcata

SEQ ID NO: 1996347 - DNA, 15 bp, Homo sapiens
ctgccctaagcataa

SEQ ID NO: 1996348 - DNA, 15 bp, Homo sapiens
tgccctaagcataat

SEQ ID NO: 1996349 - DNA, 15 bp, Homo sapiens
gccctaagcataata

SEQ ID NO: 1996350 - DNA, 15 bp, Homo sapiens
ccctaagcataatat

SEQ ID NO: 1996351 - DNA, 15 bp, Homo sapiens
cctaagcataatatt

SEQ ID NO: 1996352 - DNA, 15 bp, Homo sapiens
ctaagcataatattt

SEQ ID NO: 1996353 - DNA, 15 bp, Homo sapiens
taagcataatatttt

SEQ ID NO: 1996354 - DNA, 15 bp, Homo sapiens
aagcataatatttta

SEQ ID NO: 1996355 - DNA, 15 bp, Homo sapiens
agcataatattttaa

SEQ ID NO: 1996356 - DNA, 15 bp, Homo sapiens
gcataatattttaaa

SEQ ID NO: 1996357 - DNA, 15 bp, Homo sapiens
cataatattttaaat

SEQ ID NO: 1996358 - DNA, 15 bp, Homo sapiens
ataatattttaaatt

SEQ ID NO: 1996359 - DNA, 15 bp, Homo sapiens
taatattttaaattt

SEQ ID NO: 1996360 - DNA, 15 bp, Homo sapiens
aatattttaaatttt

SEQ ID NO: 1996361 - DNA, 15 bp, Homo sapiens
atattttaaattttc

SEQ ID NO: 1996362 - DNA, 15 bp, Homo sapiens
tattttaaattttct

SEQ ID NO: 1996363 - DNA, 15 bp, Homo sapiens
attttaaattttctt

SEQ ID NO: 1996364 - DNA, 15 bp, Homo sapiens
ttttaaattttctta

SEQ ID NO: 1996365 - DNA, 15 bp, Homo sapiens
tttaaattttcttat

SEQ ID NO: 1996366 - DNA, 15 bp, Homo sapiens
ttaaattttcttatt

SEQ ID NO: 1996367 - DNA, 15 bp, Homo sapiens
taaattttcttattg

SEQ ID NO: 1996368 - DNA, 15 bp, Homo sapiens
aaattttcttattga

SEQ ID NO: 1996369 - DNA, 15 bp, Homo sapiens
aattttcttattgac

SEQ ID NO: 1996370 - DNA, 15 bp, Homo sapiens
attttcttattgacc

SEQ ID NO: 1996371 - DNA, 15 bp, Homo sapiens
ttttcttattgaccg

SEQ ID NO: 1996372 - DNA, 15 bp, Homo sapiens
tttcttattgaccgt

SEQ ID NO: 1996373 - DNA, 15 bp, Homo sapiens
ttcttattgaccgtt

SEQ ID NO: 1996374 - DNA, 15 bp, Homo sapiens
tcttattgaccgttg

SEQ ID NO: 1996375 - DNA, 15 bp, Homo sapiens
cttattgaccgttga

SEQ ID NO: 1996376 - DNA, 15 bp, Homo sapiens
ttattgaccgttgac

SEQ ID NO: 1996377 - DNA, 15 bp, Homo sapiens
tattgaccgttgacc

SEQ ID NO: 1996378 - DNA, 15 bp, Homo sapiens
attgaccgttgacca

SEQ ID NO: 1996379 - DNA, 15 bp, Homo sapiens
ttgaccgttgaccat

SEQ ID NO: 1996380 - DNA, 15 bp, Homo sapiens
tgaccgttgaccata

SEQ ID NO: 1996381 - DNA, 15 bp, Homo sapiens
gaccgttgaccatat

SEQ ID NO: 1996382 - DNA, 15 bp, Homo sapiens
accgttgaccatatt

SEQ ID NO: 1996383 - DNA, 15 bp, Homo sapiens
ccgttgaccatattc

SEQ ID NO: 1996384 - DNA, 15 bp, Homo sapiens
cgttgaccatattcc

SEQ ID NO: 1996385 - DNA, 15 bp, Homo sapiens
gttgaccatattcca

SEQ ID NO: 1996386 - DNA, 15 bp, Homo sapiens
ttgaccatattccaa

SEQ ID NO: 1996387 - DNA, 15 bp, Homo sapiens
tgaccatattccaaa

SEQ ID NO: 1996388 - DNA, 15 bp, Homo sapiens
gaccatattccaaaa

SEQ ID NO: 1996389 - DNA, 15 bp, Homo sapiens
accatattccaaaat

SEQ ID NO: 1996390 - DNA, 15 bp, Homo sapiens
ccatattccaaaatt

SEQ ID NO: 1996391 - DNA, 15 bp, Homo sapiens
catattccaaaattg

SEQ ID NO: 1996392 - DNA, 15 bp, Homo sapiens
atattccaaaattgt

SEQ ID NO: 1996393 - DNA, 15 bp, Homo sapiens
tattccaaaattgtg

SEQ ID NO: 1996394 - DNA, 15 bp, Homo sapiens
attccaaaattgtgg

SEQ ID NO: 1996395 - DNA, 15 bp, Homo sapiens
ttccaaaattgtgga

SEQ ID NO: 1996396 - DNA, 15 bp, Homo sapiens
tccaaaattgtggag

SEQ ID NO: 1996397 - DNA, 15 bp, Homo sapiens
ccaaaattgtggaga

SEQ ID NO: 1996398 - DNA, 15 bp, Homo sapiens
caaaattgtggagac

SEQ ID NO: 1996399 - DNA, 15 bp, Homo sapiens
aaaattgtggagaca

SEQ ID NO: 1996400 - DNA, 15 bp, Homo sapiens
aaattgtggagacag

SEQ ID NO: 1996401 - DNA, 15 bp, Homo sapiens
aattgtggagacagt

SEQ ID NO: 1996402 - DNA, 15 bp, Homo sapiens
attgtggagacagtg

SEQ ID NO: 1996403 - DNA, 15 bp, Homo sapiens
ttgtggagacagtgt

SEQ ID NO: 1996404 - DNA, 15 bp, Homo sapiens
tgtggagacagtgtt

SEQ ID NO: 1996405 - DNA, 15 bp, Homo sapiens
gtggagacagtgttt

SEQ ID NO: 1996406 - DNA, 15 bp, Homo sapiens
tggagacagtgttta

SEQ ID NO: 1996407 - DNA, 15 bp, Homo sapiens
ggagacagtgtttat

SEQ ID NO: 1996408 - DNA, 15 bp, Homo sapiens
gagacagtgtttata

SEQ ID NO: 1996409 - DNA, 15 bp, Homo sapiens
agacagtgtttataa

SEQ ID NO: 1996410 - DNA, 15 bp, Homo sapiens
gacagtgtttataag

SEQ ID NO: 1996411 - DNA, 15 bp, Homo sapiens
acagtgtttataagt

SEQ ID NO: 1996412 - DNA, 15 bp, Homo sapiens
cagtgtttataagtt

SEQ ID NO: 1996413 - DNA, 15 bp, Homo sapiens
agtgtttataagttt

SEQ ID NO: 1996414 - DNA, 15 bp, Homo sapiens
gtgtttataagtttt

SEQ ID NO: 1996415 - DNA, 15 bp, Homo sapiens
tgtttataagttttc

SEQ ID NO: 1996416 - DNA, 15 bp, Homo sapiens
gtttataagttttct

SEQ ID NO: 1996417 - DNA, 15 bp, Homo sapiens
tttataagttttcta

SEQ ID NO: 1996418 - DNA, 15 bp, Homo sapiens
ttataagttttctac

SEQ ID NO: 1996419 - DNA, 15 bp, Homo sapiens
tataagttttctact

SEQ ID NO: 1996420 - DNA, 15 bp, Homo sapiens
ataagttttctactt

SEQ ID NO: 1996421 - DNA, 15 bp, Homo sapiens
taagttttctactta

SEQ ID NO: 1996422 - DNA, 15 bp, Homo sapiens
aagttttctacttaa

SEQ ID NO: 1996423 - DNA, 15 bp, Homo sapiens
agttttctacttaaa

SEQ ID NO: 1996424 - DNA, 15 bp, Homo sapiens
gttttctacttaaaa

SEQ ID NO: 1996425 - DNA, 15 bp, Homo sapiens
ttttctacttaaaat

SEQ ID NO: 1996426 - DNA, 15 bp, Homo sapiens
tttctacttaaaatc

SEQ ID NO: 1996427 - DNA, 15 bp, Homo sapiens
ttctacttaaaatcg

SEQ ID NO: 1996428 - DNA, 15 bp, Homo sapiens
tctacttaaaatcga

SEQ ID NO: 1996429 - DNA, 15 bp, Homo sapiens
ctacttaaaatcgaa

SEQ ID NO: 1996430 - DNA, 15 bp, Homo sapiens
tacttaaaatcgaag

SEQ ID NO: 1996431 - DNA, 15 bp, Homo sapiens
acttaaaatcgaagg

SEQ ID NO: 1996432 - DNA, 15 bp, Homo sapiens
cttaaaatcgaaggt

SEQ ID NO: 1996433 - DNA, 15 bp, Homo sapiens
ttaaaatcgaaggtg

SEQ ID NO: 1996434 - DNA, 15 bp, Homo sapiens
taaaatcgaaggtga

SEQ ID NO: 1996435 - DNA, 15 bp, Homo sapiens
aaaatcgaaggtgag

SEQ ID NO: 1996436 - DNA, 15 bp, Homo sapiens
aaatcgaaggtgagc

SEQ ID NO: 1996437 - DNA, 15 bp, Homo sapiens
aatcgaaggtgagct

SEQ ID NO: 1996438 - DNA, 15 bp, Homo sapiens
atcgaaggtgagcta

SEQ ID NO: 1996439 - DNA, 15 bp, Homo sapiens
tcgaaggtgagctag

SEQ ID NO: 1996440 - DNA, 15 bp, Homo sapiens
cgaaggtgagctagt

SEQ ID NO: 1996441 - DNA, 15 bp, Homo sapiens
gaaggtgagctagtt

SEQ ID NO: 1996442 - DNA, 15 bp, Homo sapiens
aaggtgagctagttg

SEQ ID NO: 1996443 - DNA, 15 bp, Homo sapiens
aggtgagctagttgt

SEQ ID NO: 1996444 - DNA, 15 bp, Homo sapiens
ggtgagctagttgtt

SEQ ID NO: 1996445 - DNA, 15 bp, Homo sapiens
gtgagctagttgttt

SEQ ID NO: 1996446 - DNA, 15 bp, Homo sapiens
tgagctagttgtttt

SEQ ID NO: 1996447 - DNA, 15 bp, Homo sapiens
gagctagttgtttta

SEQ ID NO: 1996448 - DNA, 15 bp, Homo sapiens
agctagttgttttag

SEQ ID NO: 1996449 - DNA, 15 bp, Homo sapiens
gctagttgttttagc

SEQ ID NO: 1996450 - DNA, 15 bp, Homo sapiens
ctagttgttttagca

SEQ ID NO: 1996451 - DNA, 15 bp, Homo sapiens
tagttgttttagcat

SEQ ID NO: 1996452 - DNA, 15 bp, Homo sapiens
agttgttttagcatg

SEQ ID NO: 1996453 - DNA, 15 bp, Homo sapiens
gttgttttagcatgg

SEQ ID NO: 1996454 - DNA, 15 bp, Homo sapiens
ttgttttagcatggt

SEQ ID NO: 1996455 - DNA, 15 bp, Homo sapiens
tgttttagcatggta

SEQ ID NO: 1996456 - DNA, 15 bp, Homo sapiens
gttttagcatggtat

SEQ ID NO: 1996457 - DNA, 15 bp, Homo sapiens
ttttagcatggtatt

SEQ ID NO: 1996458 - DNA, 15 bp, Homo sapiens
tttagcatggtattt

SEQ ID NO: 1996459 - DNA, 15 bp, Homo sapiens
ttagcatggtatttt

SEQ ID NO: 1996460 - DNA, 15 bp, Homo sapiens
tagcatggtattttc

SEQ ID NO: 1996461 - DNA, 15 bp, Homo sapiens
agcatggtattttcc

SEQ ID NO: 1996462 - DNA, 15 bp, Homo sapiens
gcatggtattttccg

SEQ ID NO: 1996463 - DNA, 15 bp, Homo sapiens
catggtattttccgt

SEQ ID NO: 1996464 - DNA, 15 bp, Homo sapiens
atggtattttccgtt

SEQ ID NO: 1996465 - DNA, 15 bp, Homo sapiens
tggtattttccgtta

SEQ ID NO: 1996466 - DNA, 15 bp, Homo sapiens
ggtattttccgttaa

SEQ ID NO: 1996467 - DNA, 15 bp, Homo sapiens
gtattttccgttaac

SEQ ID NO: 1996468 - DNA, 15 bp, Homo sapiens
tattttccgttaact

SEQ ID NO: 1996469 - DNA, 15 bp, Homo sapiens
attttccgttaactt

SEQ ID NO: 1996470 - DNA, 15 bp, Homo sapiens
ttttccgttaacttg

SEQ ID NO: 1996471 - DNA, 15 bp, Homo sapiens
tttccgttaacttgt

SEQ ID NO: 1996472 - DNA, 15 bp, Homo sapiens
ttccgttaacttgtg

SEQ ID NO: 1996473 - DNA, 15 bp, Homo sapiens
tccgttaacttgtga

SEQ ID NO: 1996474 - DNA, 15 bp, Homo sapiens
ccgttaacttgtgat

SEQ ID NO: 1996475 - DNA, 15 bp, Homo sapiens
cgttaacttgtgata

SEQ ID NO: 1996476 - DNA, 15 bp, Homo sapiens
gttaacttgtgatat

SEQ ID NO: 1996477 - DNA, 15 bp, Homo sapiens
ttaacttgtgatatg

SEQ ID NO: 1996478 - DNA, 15 bp, Homo sapiens
taacttgtgatatgc

SEQ ID NO: 1996479 - DNA, 15 bp, Homo sapiens
aacttgtgatatgct

SEQ ID NO: 1996480 - DNA, 15 bp, Homo sapiens
acttgtgatatgcta

SEQ ID NO: 1996481 - DNA, 15 bp, Homo sapiens
cttgtgatatgctat

SEQ ID NO: 1996482 - DNA, 15 bp, Homo sapiens
ttgtgatatgctatt

SEQ ID NO: 1996483 - DNA, 15 bp, Homo sapiens
tgtgatatgctattg

SEQ ID NO: 1996484 - DNA, 15 bp, Homo sapiens
gtgatatgctattgt

SEQ ID NO: 1996485 - DNA, 15 bp, Homo sapiens
tgatatgctattgtt

SEQ ID NO: 1996486 - DNA, 15 bp, Homo sapiens
gatatgctattgttc

SEQ ID NO: 1996487 - DNA, 15 bp, Homo sapiens
atatgctattgttca

SEQ ID NO: 1996488 - DNA, 15 bp, Homo sapiens
tatgctattgttcat

SEQ ID NO: 1996489 - DNA, 15 bp, Homo sapiens
atgctattgttcatg

SEQ ID NO: 1996490 - DNA, 15 bp, Homo sapiens
tgctattgttcatgt

SEQ ID NO: 1996491 - DNA, 15 bp, Homo sapiens
gctattgttcatgtg

SEQ ID NO: 1996492 - DNA, 15 bp, Homo sapiens
ctattgttcatgtgt

SEQ ID NO: 1996493 - DNA, 15 bp, Homo sapiens
tattgttcatgtgta

SEQ ID NO: 1996494 - DNA, 15 bp, Homo sapiens
attgttcatgtgtaa

SEQ ID NO: 1996495 - DNA, 15 bp, Homo sapiens
ttgttcatgtgtaaa

SEQ ID NO: 1996496 - DNA, 15 bp, Homo sapiens
tgttcatgtgtaaaa

SEQ ID NO: 1996497 - DNA, 15 bp, Homo sapiens
gttcatgtgtaaaat

SEQ ID NO: 1996498 - DNA, 15 bp, Homo sapiens
catgtgtaaaatgga

SEQ ID NO: 1996499 - DNA, 15 bp, Homo sapiens
atgtgtaaaatggag

SEQ ID NO: 1996500 - DNA, 15 bp, Homo sapiens
tgtgtaaaatggagt

SEQ ID NO: 1996501 - DNA, 15 bp, Homo sapiens
gtgtaaaatggagtg

SEQ ID NO: 1996502 - DNA, 15 bp, Homo sapiens
tgtaaaatggagtga

SEQ ID NO: 1996503 - DNA, 15 bp, Homo sapiens
gtaaaatggagtgaa

SEQ ID NO: 1996504 - DNA, 15 bp, Homo sapiens
taaaatggagtgaaa

SEQ ID NO: 1996505 - DNA, 15 bp, Homo sapiens
aaaatggagtgaaag

SEQ ID NO: 1996506 - DNA, 15 bp, Homo sapiens
aaatggagtgaaaga

SEQ ID NO: 1996507 - DNA, 15 bp, Homo sapiens
aatggagtgaaagag

SEQ ID NO: 1996508 - DNA, 15 bp, Homo sapiens
atggagtgaaagagc

SEQ ID NO: 1996509 - DNA, 15 bp, Homo sapiens
tggagtgaaagagca

SEQ ID NO: 1996510 - DNA, 15 bp, Homo sapiens
ggagtgaaagagcaa

SEQ ID NO: 1996511 - DNA, 15 bp, Homo sapiens
gagtgaaagagcaaa

SEQ ID NO: 1996512 - DNA, 15 bp, Homo sapiens
agtgaaagagcaaaa

SEQ ID NO: 1996513 - DNA, 15 bp, Homo sapiens
gtgaaagagcaaaag

SEQ ID NO: 1996514 - DNA, 15 bp, Homo sapiens
tgaaagagcaaaaga

SEQ ID NO: 1996515 - DNA, 15 bp, Homo sapiens
gaaagagcaaaagag

SEQ ID NO: 1996516 - DNA, 15 bp, Homo sapiens
aaagagcaaaagagc

SEQ ID NO: 1996517 - DNA, 15 bp, Homo sapiens
aagagcaaaagagct

SEQ ID NO: 1996518 - DNA, 15 bp, Homo sapiens
agagcaaaagagctg

SEQ ID NO: 1996519 - DNA, 15 bp, Homo sapiens
gagcaaaagagctgt

SEQ ID NO: 1996520 - DNA, 15 bp, Homo sapiens
agcaaaagagctgtt

SEQ ID NO: 1996521 - DNA, 15 bp, Homo sapiens
gcaaaagagctgtta

SEQ ID NO: 1996522 - DNA, 15 bp, Homo sapiens
caaaagagctgttac

SEQ ID NO: 1996523 - DNA, 15 bp, Homo sapiens
aaaagagctgttaca

SEQ ID NO: 1996524 - DNA, 15 bp, Homo sapiens
aaagagctgttacat

SEQ ID NO: 1996525 - DNA, 15 bp, Homo sapiens
aagagctgttacata

SEQ ID NO: 1996526 - DNA, 15 bp, Homo sapiens
agagctgttacatag

SEQ ID NO: 1996527 - DNA, 15 bp, Homo sapiens
gagctgttacatagg

SEQ ID NO: 1996528 - DNA, 15 bp, Homo sapiens
agctgttacatagga

SEQ ID NO: 1996529 - DNA, 15 bp, Homo sapiens
gctgttacataggat

SEQ ID NO: 1996530 - DNA, 15 bp, Homo sapiens
ctgttacataggatg

SEQ ID NO: 1996531 - DNA, 15 bp, Homo sapiens
tgttacataggatga

SEQ ID NO: 1996532 - DNA, 15 bp, Homo sapiens
gttacataggatgat

SEQ ID NO: 1996533 - DNA, 15 bp, Homo sapiens
ttacataggatgatg

SEQ ID NO: 1996534 - DNA, 15 bp, Homo sapiens
tacataggatgatgg

SEQ ID NO: 1996535 - DNA, 15 bp, Homo sapiens
acataggatgatgga

SEQ ID NO: 1996536 - DNA, 15 bp, Homo sapiens
cataggatgatggaa

SEQ ID NO: 1996537 - DNA, 15 bp, Homo sapiens
ataggatgatggaac

SEQ ID NO: 1996538 - DNA, 15 bp, Homo sapiens
taggatgatggaact

SEQ ID NO: 1996539 - DNA, 15 bp, Homo sapiens
aggatgatggaactg

SEQ ID NO: 1996540 - DNA, 15 bp, Homo sapiens
ggatgatggaactgg

SEQ ID NO: 1996541 - DNA, 15 bp, Homo sapiens
gatgatggaactggg

SEQ ID NO: 1996542 - DNA, 15 bp, Homo sapiens
atgatggaactggga

SEQ ID NO: 1996543 - DNA, 15 bp, Homo sapiens
tgatggaactgggaa

SEQ ID NO: 1996544 - DNA, 15 bp, Homo sapiens
gatggaactgggaag

SEQ ID NO: 1996545 - DNA, 15 bp, Homo sapiens
atggaactgggaaga

SEQ ID NO: 1996546 - DNA, 15 bp, Homo sapiens
tggaactgggaagat

SEQ ID NO: 1996547 - DNA, 15 bp, Homo sapiens
ggaactgggaagatg

SEQ ID NO: 1996548 - DNA, 15 bp, Homo sapiens
gaactgggaagatgg

SEQ ID NO: 1996549 - DNA, 15 bp, Homo sapiens
aactgggaagatggg

SEQ ID NO: 1996550 - DNA, 15 bp, Homo sapiens
actgggaagatgggc

SEQ ID NO: 1996551 - DNA, 15 bp, Homo sapiens
ctgggaagatgggca

SEQ ID NO: 1996552 - DNA, 15 bp, Homo sapiens
tgggaagatgggcaa

SEQ ID NO: 1996553 - DNA, 15 bp, Homo sapiens
gggaagatgggcaaa

SEQ ID NO: 1996554 - DNA, 15 bp, Homo sapiens
ggaagatgggcaaat

SEQ ID NO: 1996555 - DNA, 15 bp, Homo sapiens
gaagatgggcaaatt

SEQ ID NO: 1996556 - DNA, 15 bp, Homo sapiens
aagatgggcaaattt

SEQ ID NO: 1996557 - DNA, 15 bp, Homo sapiens
agatgggcaaatttt

SEQ ID NO: 1996558 - DNA, 15 bp, Homo sapiens
gatgggcaaatttta

SEQ ID NO: 1996559 - DNA, 15 bp, Homo sapiens
atgggcaaattttaa

SEQ ID NO: 1996560 - DNA, 15 bp, Homo sapiens
tgggcaaattttaaa

SEQ ID NO: 1996561 - DNA, 15 bp, Homo sapiens
gggcaaattttaaac

SEQ ID NO: 1996562 - DNA, 15 bp, Homo sapiens
ggcaaattttaaact

SEQ ID NO: 1996563 - DNA, 15 bp, Homo sapiens
gcaaattttaaactt

SEQ ID NO: 1996564 - DNA, 15 bp, Homo sapiens
caaattttaaacttt

SEQ ID NO: 1996565 - DNA, 15 bp, Homo sapiens
aaattttaaactttt

SEQ ID NO: 1996566 - DNA, 15 bp, Homo sapiens
aattttaaacttttc

SEQ ID NO: 1996567 - DNA, 15 bp, Homo sapiens
attttaaacttttct

SEQ ID NO: 1996568 - DNA, 15 bp, Homo sapiens
ttttaaacttttctt

SEQ ID NO: 1996569 - DNA, 15 bp, Homo sapiens
tttaaacttttcttg

SEQ ID NO: 1996570 - DNA, 15 bp, Homo sapiens
ttaaacttttcttga

SEQ ID NO: 1996571 - DNA, 15 bp, Homo sapiens
taaacttttcttgaa

SEQ ID NO: 1996572 - DNA, 15 bp, Homo sapiens
aaacttttcttgaat

SEQ ID NO: 1996573 - DNA, 15 bp, Homo sapiens
aacttttcttgaatc

SEQ ID NO: 1996574 - DNA, 15 bp, Homo sapiens
acttttcttgaatca

SEQ ID NO: 1996575 - DNA, 15 bp, Homo sapiens
cttttcttgaatcag

SEQ ID NO: 1996576 - DNA, 15 bp, Homo sapiens
ttttcttgaatcagt

SEQ ID NO: 1996577 - DNA, 15 bp, Homo sapiens
tttcttgaatcagtt

SEQ ID NO: 1996578 - DNA, 15 bp, Homo sapiens
ttcttgaatcagttt

SEQ ID NO: 1996579 - DNA, 15 bp, Homo sapiens
tcttgaatcagtttt

SEQ ID NO: 1996580 - DNA, 15 bp, Homo sapiens
cttgaatcagttttt

SEQ ID NO: 1996581 - DNA, 15 bp, Homo sapiens
ttgaatcagtttttt

SEQ ID NO: 1996582 - DNA, 15 bp, Homo sapiens
tgaatcagttttttc

SEQ ID NO: 1996583 - DNA, 15 bp, Homo sapiens
gaatcagttttttcc

SEQ ID NO: 1996584 - DNA, 15 bp, Homo sapiens
aatcagttttttcca

SEQ ID NO: 1996585 - DNA, 15 bp, Homo sapiens
atcagttttttccag

SEQ ID NO: 1996586 - DNA, 15 bp, Homo sapiens
tcagttttttccagt

SEQ ID NO: 1996587 - DNA, 15 bp, Homo sapiens
cagttttttccagtg

SEQ ID NO: 1996588 - DNA, 15 bp, Homo sapiens
agttttttccagtgg

SEQ ID NO: 1996589 - DNA, 15 bp, Homo sapiens
gttttttccagtggt

SEQ ID NO: 1996590 - DNA, 15 bp, Homo sapiens
ttttttccagtggtc

SEQ ID NO: 1996591 - DNA, 15 bp, Homo sapiens
tttttccagtggtct

SEQ ID NO: 1996592 - DNA, 15 bp, Homo sapiens
ttttccagtggtctt

SEQ ID NO: 1996593 - DNA, 15 bp, Homo sapiens
tttccagtggtctta

SEQ ID NO: 1996594 - DNA, 15 bp, Homo sapiens
ttccagtggtcttat

SEQ ID NO: 1996595 - DNA, 15 bp, Homo sapiens
tccagtggtcttatt

SEQ ID NO: 1996596 - DNA, 15 bp, Homo sapiens
ccagtggtcttatta

SEQ ID NO: 1996597 - DNA, 15 bp, Homo sapiens
cagtggtcttattac

SEQ ID NO: 1996598 - DNA, 15 bp, Homo sapiens
agtggtcttattact

SEQ ID NO: 1996599 - DNA, 15 bp, Homo sapiens
gtggtcttattactt

SEQ ID NO: 1996600 - DNA, 15 bp, Homo sapiens
tggtcttattacttt

SEQ ID NO: 1996601 - DNA, 15 bp, Homo sapiens
ggtcttattactttg

SEQ ID NO: 1996602 - DNA, 15 bp, Homo sapiens
gtcttattactttga

SEQ ID NO: 1996603 - DNA, 15 bp, Homo sapiens
tcttattactttgac

SEQ ID NO: 1996604 - DNA, 15 bp, Homo sapiens
cttattactttgact

SEQ ID NO: 1996605 - DNA, 15 bp, Homo sapiens
ttattactttgactg

SEQ ID NO: 1996606 - DNA, 15 bp, Homo sapiens
tattactttgactgc

SEQ ID NO: 1996607 - DNA, 15 bp, Homo sapiens
attactttgactgca

SEQ ID NO: 1996608 - DNA, 15 bp, Homo sapiens
ttactttgactgcaa

SEQ ID NO: 1996609 - DNA, 15 bp, Homo sapiens
tactttgactgcaaa

SEQ ID NO: 1996610 - DNA, 15 bp, Homo sapiens
actttgactgcaaat

SEQ ID NO: 1996611 - DNA, 15 bp, Homo sapiens
ctttgactgcaaatt

SEQ ID NO: 1996612 - DNA, 15 bp, Homo sapiens
tttgactgcaaatta

SEQ ID NO: 1996613 - DNA, 15 bp, Homo sapiens
ttgactgcaaattac

SEQ ID NO: 1996614 - DNA, 15 bp, Homo sapiens
tgactgcaaattacc

SEQ ID NO: 1996615 - DNA, 15 bp, Homo sapiens
gactgcaaattacca

SEQ ID NO: 1996616 - DNA, 15 bp, Homo sapiens
actgcaaattaccag

SEQ ID NO: 1996617 - DNA, 15 bp, Homo sapiens
ctgcaaattaccagt

SEQ ID NO: 1996618 - DNA, 15 bp, Homo sapiens
tgcaaattaccagta

SEQ ID NO: 1996619 - DNA, 15 bp, Homo sapiens
gcaaattaccagtat

SEQ ID NO: 1996620 - DNA, 15 bp, Homo sapiens
caaattaccagtata

SEQ ID NO: 1996621 - DNA, 15 bp, Homo sapiens
aaattaccagtatat

SEQ ID NO: 1996622 - DNA, 15 bp, Homo sapiens
aattaccagtatatc

SEQ ID NO: 1996623 - DNA, 15 bp, Homo sapiens
attaccagtatatca

SEQ ID NO: 1996624 - DNA, 15 bp, Homo sapiens
ttaccagtatatcag

SEQ ID NO: 1996625 - DNA, 15 bp, Homo sapiens
taccagtatatcagc

SEQ ID NO: 1996626 - DNA, 15 bp, Homo sapiens
accagtatatcagcc

SEQ ID NO: 1996627 - DNA, 15 bp, Homo sapiens
ccagtatatcagcca

SEQ ID NO: 1996628 - DNA, 15 bp, Homo sapiens
cagtatatcagccac

SEQ ID NO: 1996629 - DNA, 15 bp, Homo sapiens
agtatatcagccaca

SEQ ID NO: 1996630 - DNA, 15 bp, Homo sapiens
gtatatcagccacac

SEQ ID NO: 1996631 - DNA, 15 bp, Homo sapiens
tatatcagccacacc

SEQ ID NO: 1996632 - DNA, 15 bp, Homo sapiens
atatcagccacaccc

SEQ ID NO: 1996633 - DNA, 15 bp, Homo sapiens
tatcagccacaccca

SEQ ID NO: 1996634 - DNA, 15 bp, Homo sapiens
atcagccacacccat

SEQ ID NO: 1996635 - DNA, 15 bp, Homo sapiens
tcagccacacccatg

SEQ ID NO: 1996636 - DNA, 15 bp, Homo sapiens
cagccacacccatga

SEQ ID NO: 1996637 - DNA, 15 bp, Homo sapiens
agccacacccatgac

SEQ ID NO: 1996638 - DNA, 15 bp, Homo sapiens
gccacacccatgact

SEQ ID NO: 1996639 - DNA, 15 bp, Homo sapiens
ccacacccatgactg

SEQ ID NO: 1996640 - DNA, 15 bp, Homo sapiens
cacacccatgactga

SEQ ID NO: 1996641 - DNA, 15 bp, Homo sapiens
acacccatgactgaa

SEQ ID NO: 1996642 - DNA, 15 bp, Homo sapiens
cacccatgactgaat

SEQ ID NO: 1996643 - DNA, 15 bp, Homo sapiens
acccatgactgaatg

SEQ ID NO: 1996644 - DNA, 15 bp, Homo sapiens
cccatgactgaatgg

SEQ ID NO: 1996645 - DNA, 15 bp, Homo sapiens
ccatgactgaatggt

SEQ ID NO: 1996646 - DNA, 15 bp, Homo sapiens
catgactgaatggtg

SEQ ID NO: 1996647 - DNA, 15 bp, Homo sapiens
atgactgaatggtgg

SEQ ID NO: 1996648 - DNA, 15 bp, Homo sapiens
tgactgaatggtggg

SEQ ID NO: 1996649 - DNA, 15 bp, Homo sapiens
gactgaatggtgggg

SEQ ID NO: 1996650 - DNA, 15 bp, Homo sapiens
actgaatggtggggc

SEQ ID NO: 1996651 - DNA, 15 bp, Homo sapiens
ctgaatggtggggcg

SEQ ID NO: 1996652 - DNA, 15 bp, Homo sapiens
tgaatggtggggcgt

SEQ ID NO: 1996653 - DNA, 15 bp, Homo sapiens
gaatggtggggcgtg

SEQ ID NO: 1996654 - DNA, 15 bp, Homo sapiens
aatggtggggcgtgg

SEQ ID NO: 1996655 - DNA, 15 bp, Homo sapiens
atggtggggcgtggg

SEQ ID NO: 1996656 - DNA, 15 bp, Homo sapiens
ggtggggcgtggggt

SEQ ID NO: 1996657 - DNA, 15 bp, Homo sapiens
gtggggcgtggggtc

SEQ ID NO: 1996658 - DNA, 15 bp, Homo sapiens
tggggcgtggggtca

SEQ ID NO: 1996659 - DNA, 15 bp, Homo sapiens
ggggcgtggggtcat

SEQ ID NO: 1996660 - DNA, 15 bp, Homo sapiens
gggcgtggggtcata

SEQ ID NO: 1996661 - DNA, 15 bp, Homo sapiens
ggcgtggggtcatat

SEQ ID NO: 1996662 - DNA, 15 bp, Homo sapiens
gcgtggggtcatata

SEQ ID NO: 1996663 - DNA, 15 bp, Homo sapiens
cgtggggtcatatat

SEQ ID NO: 1996664 - DNA, 15 bp, Homo sapiens
gtggggtcatatatt

SEQ ID NO: 1996665 - DNA, 15 bp, Homo sapiens
tggggtcatatattg

SEQ ID NO: 1996666 - DNA, 15 bp, Homo sapiens
ggggtcatatattgc

SEQ ID NO: 1996667 - DNA, 15 bp, Homo sapiens
gggtcatatattgcc

SEQ ID NO: 1996668 - DNA, 15 bp, Homo sapiens
ggtcatatattgcct

SEQ ID NO: 1996669 - DNA, 15 bp, Homo sapiens
gtcatatattgcctt

SEQ ID NO: 1996670 - DNA, 15 bp, Homo sapiens
tcatatattgccttg

SEQ ID NO: 1996671 - DNA, 15 bp, Homo sapiens
catatattgccttgt

SEQ ID NO: 1996672 - DNA, 15 bp, Homo sapiens
atatattgccttgtt

SEQ ID NO: 1996673 - DNA, 15 bp, Homo sapiens
tatattgccttgttc

SEQ ID NO: 1996674 - DNA, 15 bp, Homo sapiens
atattgccttgttca

SEQ ID NO: 1996675 - DNA, 15 bp, Homo sapiens
tattgccttgttcag

SEQ ID NO: 1996676 - DNA, 15 bp, Homo sapiens
attgccttgttcagt

SEQ ID NO: 1996677 - DNA, 15 bp, Homo sapiens
ttgccttgttcagtt

SEQ ID NO: 1996678 - DNA, 15 bp, Homo sapiens
tgccttgttcagttt

SEQ ID NO: 1996679 - DNA, 15 bp, Homo sapiens
gccttgttcagtttc

SEQ ID NO: 1996680 - DNA, 15 bp, Homo sapiens
ccttgttcagtttca

SEQ ID NO: 1996681 - DNA, 15 bp, Homo sapiens
cttgttcagtttcac

SEQ ID NO: 1996682 - DNA, 15 bp, Homo sapiens
ttgttcagtttcaca

SEQ ID NO: 1996683 - DNA, 15 bp, Homo sapiens
tgttcagtttcacag

SEQ ID NO: 1996684 - DNA, 15 bp, Homo sapiens
gttcagtttcacagc

SEQ ID NO: 1996685 - DNA, 15 bp, Homo sapiens
ttcagtttcacagct

SEQ ID NO: 1996686 - DNA, 15 bp, Homo sapiens
tcagtttcacagctt

SEQ ID NO: 1996687 - DNA, 15 bp, Homo sapiens
cagtttcacagcttt

SEQ ID NO: 1996688 - DNA, 15 bp, Homo sapiens
agtttcacagctttt

SEQ ID NO: 1996689 - DNA, 15 bp, Homo sapiens
gtttcacagcttttc

SEQ ID NO: 1996690 - DNA, 15 bp, Homo sapiens
tttcacagcttttct

SEQ ID NO: 1996691 - DNA, 15 bp, Homo sapiens
ttcacagcttttctc

SEQ ID NO: 1996692 - DNA, 15 bp, Homo sapiens
tcacagcttttctcc

SEQ ID NO: 1996693 - DNA, 15 bp, Homo sapiens
cacagcttttctcca

SEQ ID NO: 1996694 - DNA, 15 bp, Homo sapiens
acagcttttctccat

SEQ ID NO: 1996695 - DNA, 15 bp, Homo sapiens
cagcttttctccatt

SEQ ID NO: 1996696 - DNA, 15 bp, Homo sapiens
agcttttctccatta

SEQ ID NO: 1996697 - DNA, 15 bp, Homo sapiens
gcttttctccattaa

SEQ ID NO: 1996698 - DNA, 15 bp, Homo sapiens
cttttctccattaac

SEQ ID NO: 1996699 - DNA, 15 bp, Homo sapiens
ttttctccattaaca

SEQ ID NO: 1996700 - DNA, 15 bp, Homo sapiens
tttctccattaacat

SEQ ID NO: 1996701 - DNA, 15 bp, Homo sapiens
ttctccattaacatt

SEQ ID NO: 1996702 - DNA, 15 bp, Homo sapiens
tctccattaacattt

SEQ ID NO: 1996703 - DNA, 15 bp, Homo sapiens
ctccattaacatttg

SEQ ID NO: 1996704 - DNA, 15 bp, Homo sapiens
tccattaacatttgt

SEQ ID NO: 1996705 - DNA, 15 bp, Homo sapiens
ccattaacatttgta

SEQ ID NO: 1996706 - DNA, 15 bp, Homo sapiens
cattaacatttgtaa

SEQ ID NO: 1996707 - DNA, 15 bp, Homo sapiens
attaacatttgtaat

SEQ ID NO: 1996708 - DNA, 15 bp, Homo sapiens
ttaacatttgtaatt

SEQ ID NO: 1996709 - DNA, 15 bp, Homo sapiens
taacatttgtaattg

SEQ ID NO: 1996710 - DNA, 15 bp, Homo sapiens
aacatttgtaattga

SEQ ID NO: 1996711 - DNA, 15 bp, Homo sapiens
acatttgtaattgag

SEQ ID NO: 1996712 - DNA, 15 bp, Homo sapiens
catttgtaattgaga

SEQ ID NO: 1996713 - DNA, 15 bp, Homo sapiens
atttgtaattgagag

SEQ ID NO: 1996714 - DNA, 15 bp, Homo sapiens
tttgtaattgagagg

SEQ ID NO: 1996715 - DNA, 15 bp, Homo sapiens
ttgtaattgagaggt

SEQ ID NO: 1996716 - DNA, 15 bp, Homo sapiens
tgtaattgagaggta

SEQ ID NO: 1996717 - DNA, 15 bp, Homo sapiens
gtaattgagaggtaa

SEQ ID NO: 1996718 - DNA, 15 bp, Homo sapiens
taattgagaggtaat

SEQ ID NO: 1996719 - DNA, 15 bp, Homo sapiens
aattgagaggtaata

SEQ ID NO: 1996720 - DNA, 15 bp, Homo sapiens
attgagaggtaataa

SEQ ID NO: 1996721 - DNA, 15 bp, Homo sapiens
ttgagaggtaataat

SEQ ID NO: 1996722 - DNA, 15 bp, Homo sapiens
tgagaggtaataatg

SEQ ID NO: 1996723 - DNA, 15 bp, Homo sapiens
gagaggtaataatga

SEQ ID NO: 1996724 - DNA, 15 bp, Homo sapiens
agaggtaataatgaa

SEQ ID NO: 1996725 - DNA, 15 bp, Homo sapiens
gaggtaataatgaat

SEQ ID NO: 1996726 - DNA, 15 bp, Homo sapiens
aggtaataatgaatg

SEQ ID NO: 1996727 - DNA, 15 bp, Homo sapiens
ggtaataatgaatgt

SEQ ID NO: 1996728 - DNA, 15 bp, Homo sapiens
gtaataatgaatgta

SEQ ID NO: 1996729 - DNA, 15 bp, Homo sapiens
taataatgaatgtat

SEQ ID NO: 1996730 - DNA, 15 bp, Homo sapiens
aataatgaatgtatt

SEQ ID NO: 1996731 - DNA, 15 bp, Homo sapiens
ataatgaatgtattt

SEQ ID NO: 1996732 - DNA, 15 bp, Homo sapiens
taatgaatgtatttt

SEQ ID NO: 1996733 - DNA, 15 bp, Homo sapiens
aatgaatgtattttg

SEQ ID NO: 1996734 - DNA, 15 bp, Homo sapiens
atgaatgtattttgg

SEQ ID NO: 1996735 - DNA, 15 bp, Homo sapiens
tgaatgtattttgga

SEQ ID NO: 1996736 - DNA, 15 bp, Homo sapiens
gaatgtattttggag

SEQ ID NO: 1996737 - DNA, 15 bp, Homo sapiens
aatgtattttggaga

SEQ ID NO: 1996738 - DNA, 15 bp, Homo sapiens
atgtattttggagaa

SEQ ID NO: 1996739 - DNA, 15 bp, Homo sapiens
tgtattttggagaat

SEQ ID NO: 1996740 - DNA, 15 bp, Homo sapiens
gtattttggagaatg

SEQ ID NO: 1996741 - DNA, 15 bp, Homo sapiens
tattttggagaatga

SEQ ID NO: 1996742 - DNA, 15 bp, Homo sapiens
attttggagaatgat

SEQ ID NO: 1996743 - DNA, 15 bp, Homo sapiens
ttttggagaatgatt

SEQ ID NO: 1996744 - DNA, 15 bp, Homo sapiens
tttggagaatgatta

SEQ ID NO: 1996745 - DNA, 15 bp, Homo sapiens
ttggagaatgattac

SEQ ID NO: 1996746 - DNA, 15 bp, Homo sapiens
tggagaatgattacc

SEQ ID NO: 1996747 - DNA, 15 bp, Homo sapiens
ggagaatgattaccg

SEQ ID NO: 1996748 - DNA, 15 bp, Homo sapiens
gagaatgattaccga

SEQ ID NO: 1996749 - DNA, 15 bp, Homo sapiens
agaatgattaccgat

SEQ ID NO: 1996750 - DNA, 15 bp, Homo sapiens
gaatgattaccgata

SEQ ID NO: 1996751 - DNA, 15 bp, Homo sapiens
aatgattaccgatat

SEQ ID NO: 1996752 - DNA, 15 bp, Homo sapiens
atgattaccgatatt

SEQ ID NO: 1996753 - DNA, 15 bp, Homo sapiens
tgattaccgatatta

SEQ ID NO: 1996754 - DNA, 15 bp, Homo sapiens
gattaccgatattat

SEQ ID NO: 1996755 - DNA, 15 bp, Homo sapiens
attaccgatattatt

SEQ ID NO: 1996756 - DNA, 15 bp, Homo sapiens
ttaccgatattattg

SEQ ID NO: 1996757 - DNA, 15 bp, Homo sapiens
taccgatattattgg

SEQ ID NO: 1996758 - DNA, 15 bp, Homo sapiens
accgatattattggc

SEQ ID NO: 1996759 - DNA, 15 bp, Homo sapiens
ccgatattattggcc

SEQ ID NO: 1996760 - DNA, 15 bp, Homo sapiens
cgatattattggcct

SEQ ID NO: 1996761 - DNA, 15 bp, Homo sapiens
gatattattggcctc

SEQ ID NO: 1996762 - DNA, 15 bp, Homo sapiens
atattattggcctct

SEQ ID NO: 1996763 - DNA, 15 bp, Homo sapiens
tattattggcctctg

SEQ ID NO: 1996764 - DNA, 15 bp, Homo sapiens
attattggcctctgt

SEQ ID NO: 1996765 - DNA, 15 bp, Homo sapiens
ttattggcctctgtt

SEQ ID NO: 1996766 - DNA, 15 bp, Homo sapiens
tattggcctctgttt

SEQ ID NO: 1996767 - DNA, 15 bp, Homo sapiens
attggcctctgtttg

SEQ ID NO: 1996768 - DNA, 15 bp, Homo sapiens
ttggcctctgtttga

SEQ ID NO: 1996769 - DNA, 15 bp, Homo sapiens
tggcctctgtttgat

SEQ ID NO: 1996770 - DNA, 15 bp, Homo sapiens
ggcctctgtttgatt

SEQ ID NO: 1996771 - DNA, 15 bp, Homo sapiens
gcctctgtttgattt

SEQ ID NO: 1996772 - DNA, 15 bp, Homo sapiens
cctctgtttgattta

SEQ ID NO: 1996773 - DNA, 15 bp, Homo sapiens
ctctgtttgatttaa

SEQ ID NO: 1996774 - DNA, 15 bp, Homo sapiens
tctgtttgatttaat

SEQ ID NO: 1996775 - DNA, 15 bp, Homo sapiens
ctgtttgatttaata

SEQ ID NO: 1996776 - DNA, 15 bp, Homo sapiens
tgtttgatttaatac

SEQ ID NO: 1996777 - DNA, 15 bp, Homo sapiens
gtttgatttaatact

SEQ ID NO: 1996778 - DNA, 15 bp, Homo sapiens
tttgatttaatactc

SEQ ID NO: 1996779 - DNA, 15 bp, Homo sapiens
ttgatttaatactct

SEQ ID NO: 1996780 - DNA, 15 bp, Homo sapiens
tgatttaatactctt

SEQ ID NO: 1996781 - DNA, 15 bp, Homo sapiens
gatttaatactcttt

SEQ ID NO: 1996782 - DNA, 15 bp, Homo sapiens
atttaatactctttg

SEQ ID NO: 1996783 - DNA, 15 bp, Homo sapiens
tttaatactctttga

SEQ ID NO: 1996784 - DNA, 15 bp, Homo sapiens
ttaatactctttgaa

SEQ ID NO: 1996785 - DNA, 15 bp, Homo sapiens
taatactctttgaag

SEQ ID NO: 1996786 - DNA, 15 bp, Homo sapiens
aatactctttgaaga

SEQ ID NO: 1996787 - DNA, 15 bp, Homo sapiens
atactctttgaagat

SEQ ID NO: 1996788 - DNA, 15 bp, Homo sapiens
tactctttgaagata

SEQ ID NO: 1996789 - DNA, 15 bp, Homo sapiens
actctttgaagatag

SEQ ID NO: 1996790 - DNA, 15 bp, Homo sapiens
ctctttgaagatagc

SEQ ID NO: 1996791 - DNA, 15 bp, Homo sapiens
tctttgaagatagcc

SEQ ID NO: 1996792 - DNA, 15 bp, Homo sapiens
ctttgaagatagcct

SEQ ID NO: 1996793 - DNA, 15 bp, Homo sapiens
tttgaagatagccta

SEQ ID NO: 1996794 - DNA, 15 bp, Homo sapiens
ttgaagatagcctaa

SEQ ID NO: 1996795 - DNA, 15 bp, Homo sapiens
tgaagatagcctaat

SEQ ID NO: 1996796 - DNA, 15 bp, Homo sapiens
gaagatagcctaatt

SEQ ID NO: 1996797 - DNA, 15 bp, Homo sapiens
aagatagcctaattg

SEQ ID NO: 1996798 - DNA, 15 bp, Homo sapiens
agatagcctaattga

SEQ ID NO: 1996799 - DNA, 15 bp, Homo sapiens
gatagcctaattgaa

SEQ ID NO: 1996800 - DNA, 15 bp, Homo sapiens
atagcctaattgaaa

SEQ ID NO: 1996801 - DNA, 15 bp, Homo sapiens
tagcctaattgaaat

SEQ ID NO: 1996802 - DNA, 15 bp, Homo sapiens
agcctaattgaaatg

SEQ ID NO: 1996803 - DNA, 15 bp, Homo sapiens
gcctaattgaaatgc

SEQ ID NO: 1996804 - DNA, 15 bp, Homo sapiens
cctaattgaaatgct

SEQ ID NO: 1996805 - DNA, 15 bp, Homo sapiens
ctaattgaaatgcta

SEQ ID NO: 1996806 - DNA, 15 bp, Homo sapiens
taattgaaatgctaa

SEQ ID NO: 1996807 - DNA, 15 bp, Homo sapiens
aattgaaatgctaat

SEQ ID NO: 1996808 - DNA, 15 bp, Homo sapiens
attgaaatgctaata

SEQ ID NO: 1996809 - DNA, 15 bp, Homo sapiens
ttgaaatgctaataa

SEQ ID NO: 1996810 - DNA, 15 bp, Homo sapiens
tgaaatgctaataag

SEQ ID NO: 1996811 - DNA, 15 bp, Homo sapiens
gaaatgctaataagt

SEQ ID NO: 1996812 - DNA, 15 bp, Homo sapiens
aaatgctaataagtg

SEQ ID NO: 1996813 - DNA, 15 bp, Homo sapiens
aatgctaataagtgg

SEQ ID NO: 1996814 - DNA, 15 bp, Homo sapiens
atgctaataagtggg

SEQ ID NO: 1996815 - DNA, 15 bp, Homo sapiens
tgctaataagtgggc

SEQ ID NO: 1996816 - DNA, 15 bp, Homo sapiens
gctaataagtgggcc

SEQ ID NO: 1996817 - DNA, 15 bp, Homo sapiens
ctaataagtgggcct

SEQ ID NO: 1996818 - DNA, 15 bp, Homo sapiens
taataagtgggccta

SEQ ID NO: 1996819 - DNA, 15 bp, Homo sapiens
aataagtgggcctag

SEQ ID NO: 1996820 - DNA, 15 bp, Homo sapiens
ataagtgggcctagt

SEQ ID NO: 1996821 - DNA, 15 bp, Homo sapiens
taagtgggcctagta

SEQ ID NO: 1996822 - DNA, 15 bp, Homo sapiens
aagtgggcctagtat

SEQ ID NO: 1996823 - DNA, 15 bp, Homo sapiens
agtgggcctagtata

SEQ ID NO: 1996824 - DNA, 15 bp, Homo sapiens
gtgggcctagtataa

SEQ ID NO: 1996825 - DNA, 15 bp, Homo sapiens
tgggcctagtataac

SEQ ID NO: 1996826 - DNA, 15 bp, Homo sapiens
gggcctagtataact

SEQ ID NO: 1996827 - DNA, 15 bp, Homo sapiens
ggcctagtataactt

SEQ ID NO: 1996828 - DNA, 15 bp, Homo sapiens
gcctagtataactta

SEQ ID NO: 1996829 - DNA, 15 bp, Homo sapiens
cctagtataacttat

SEQ ID NO: 1996830 - DNA, 15 bp, Homo sapiens
ctagtataacttatg

SEQ ID NO: 1996831 - DNA, 15 bp, Homo sapiens
tagtataacttatgt

SEQ ID NO: 1996832 - DNA, 15 bp, Homo sapiens
agtataacttatgta

SEQ ID NO: 1996833 - DNA, 15 bp, Homo sapiens
gtataacttatgtaa

SEQ ID NO: 1996834 - DNA, 15 bp, Homo sapiens
tataacttatgtaat

SEQ ID NO: 1996835 - DNA, 15 bp, Homo sapiens
ataacttatgtaatg

SEQ ID NO: 1996836 - DNA, 15 bp, Homo sapiens
taacttatgtaatgc

SEQ ID NO: 1996837 - DNA, 15 bp, Homo sapiens
aacttatgtaatgca

SEQ ID NO: 1996838 - DNA, 15 bp, Homo sapiens
acttatgtaatgcat

SEQ ID NO: 1996839 - DNA, 15 bp, Homo sapiens
cttatgtaatgcata

SEQ ID NO: 1996840 - DNA, 15 bp, Homo sapiens
ttatgtaatgcataa

SEQ ID NO: 1996841 - DNA, 15 bp, Homo sapiens
tatgtaatgcataaa

SEQ ID NO: 1996842 - DNA, 15 bp, Homo sapiens
atgtaatgcataaaa

SEQ ID NO: 1996843 - DNA, 15 bp, Homo sapiens
tgtaatgcataaaat

SEQ ID NO: 1996844 - DNA, 15 bp, Homo sapiens
gtaatgcataaaatg

SEQ ID NO: 1996845 - DNA, 15 bp, Homo sapiens
taatgcataaaatgt

SEQ ID NO: 1996846 - DNA, 15 bp, Homo sapiens
aatgcataaaatgta

SEQ ID NO: 1996847 - DNA, 15 bp, Homo sapiens
atgcataaaatgtat

SEQ ID NO: 1996848 - DNA, 15 bp, Homo sapiens
tgcataaaatgtata

SEQ ID NO: 1996849 - DNA, 15 bp, Homo sapiens
gcataaaatgtatat

SEQ ID NO: 1996850 - DNA, 15 bp, Homo sapiens
cataaaatgtatatt

SEQ ID NO: 1996851 - DNA, 15 bp, Homo sapiens
ataaaatgtatatta

SEQ ID NO: 1996852 - DNA, 15 bp, Homo sapiens
taaaatgtatattat

SEQ ID NO: 1996853 - DNA, 15 bp, Homo sapiens
aaaatgtatattatc

SEQ ID NO: 1996854 - DNA, 15 bp, Homo sapiens
aaatgtatattatct

SEQ ID NO: 1996855 - DNA, 15 bp, Homo sapiens
aatgtatattatctt

SEQ ID NO: 1996856 - DNA, 15 bp, Homo sapiens
atgtatattatcttg

SEQ ID NO: 1996857 - DNA, 15 bp, Homo sapiens
tgtatattatcttgc

SEQ ID NO: 1996858 - DNA, 15 bp, Homo sapiens
gtatattatcttgcc

SEQ ID NO: 1996859 - DNA, 15 bp, Homo sapiens
tatattatcttgccg

SEQ ID NO: 1996860 - DNA, 15 bp, Homo sapiens
atattatcttgccgt

SEQ ID NO: 1996861 - DNA, 15 bp, Homo sapiens
tattatcttgccgtg

SEQ ID NO: 1996862 - DNA, 15 bp, Homo sapiens
attatcttgccgtgc

SEQ ID NO: 1996863 - DNA, 15 bp, Homo sapiens
ttatcttgccgtgct

SEQ ID NO: 1996864 - DNA, 15 bp, Homo sapiens
tatcttgccgtgctc

SEQ ID NO: 1996865 - DNA, 15 bp, Homo sapiens
atcttgccgtgctct

SEQ ID NO: 1996866 - DNA, 15 bp, Homo sapiens
tcttgccgtgctcta

SEQ ID NO: 1996867 - DNA, 15 bp, Homo sapiens
cttgccgtgctctac

SEQ ID NO: 1996868 - DNA, 15 bp, Homo sapiens
ttgccgtgctctact

SEQ ID NO: 1996869 - DNA, 15 bp, Homo sapiens
tgccgtgctctactg

SEQ ID NO: 1996870 - DNA, 15 bp, Homo sapiens
gccgtgctctactgt

SEQ ID NO: 1996871 - DNA, 15 bp, Homo sapiens
ccgtgctctactgtt

SEQ ID NO: 1996872 - DNA, 15 bp, Homo sapiens
cgtgctctactgttg

SEQ ID NO: 1996873 - DNA, 15 bp, Homo sapiens
gtgctctactgttga

SEQ ID NO: 1996874 - DNA, 15 bp, Homo sapiens
tgctctactgttgaa

SEQ ID NO: 1996875 - DNA, 15 bp, Homo sapiens
gctctactgttgaaa

SEQ ID NO: 1996876 - DNA, 15 bp, Homo sapiens
ctctactgttgaaaa

SEQ ID NO: 1996877 - DNA, 15 bp, Homo sapiens
tctactgttgaaaaa

SEQ ID NO: 1996878 - DNA, 15 bp, Homo sapiens
ctactgttgaaaaat

SEQ ID NO: 1996879 - DNA, 15 bp, Homo sapiens
tactgttgaaaaatg

SEQ ID NO: 1996880 - DNA, 15 bp, Homo sapiens
actgttgaaaaatgt

SEQ ID NO: 1996881 - DNA, 15 bp, Homo sapiens
ctgttgaaaaatgtg

SEQ ID NO: 1996882 - DNA, 15 bp, Homo sapiens
tgttgaaaaatgtgt

SEQ ID NO: 1996883 - DNA, 15 bp, Homo sapiens
gttgaaaaatgtgta

SEQ ID NO: 1996884 - DNA, 15 bp, Homo sapiens
ttgaaaaatgtgtat

SEQ ID NO: 1996885 - DNA, 15 bp, Homo sapiens
tgaaaaatgtgtatg

SEQ ID NO: 1996886 - DNA, 15 bp, Homo sapiens
gaaaaatgtgtatgc

SEQ ID NO: 1996887 - DNA, 15 bp, Homo sapiens
aaaaatgtgtatgct

SEQ ID NO: 1996888 - DNA, 15 bp, Homo sapiens
aaaatgtgtatgctt

SEQ ID NO: 1996889 - DNA, 15 bp, Homo sapiens
aaatgtgtatgcttt

SEQ ID NO: 1996890 - DNA, 15 bp, Homo sapiens
aatgtgtatgctttt

SEQ ID NO: 1996891 - DNA, 15 bp, Homo sapiens
atgtgtatgcttttt

SEQ ID NO: 1996892 - DNA, 15 bp, Homo sapiens
tgtgtatgctttttc

SEQ ID NO: 1996893 - DNA, 15 bp, Homo sapiens
gtgtatgctttttca

SEQ ID NO: 1996894 - DNA, 15 bp, Homo sapiens
tgtatgctttttcat

SEQ ID NO: 1996895 - DNA, 15 bp, Homo sapiens
gtatgctttttcatt

SEQ ID NO: 1996896 - DNA, 15 bp, Homo sapiens
tatgctttttcatta

SEQ ID NO: 1996897 - DNA, 15 bp, Homo sapiens
atgctttttcattaa

SEQ ID NO: 1996898 - DNA, 15 bp, Homo sapiens
tgctttttcattaaa

SEQ ID NO: 1996899 - DNA, 15 bp, Homo sapiens
gctttttcattaaat

SEQ ID NO: 1996900 - DNA, 15 bp, Homo sapiens
ctttttcattaaatt

SEQ ID NO: 1996901 - DNA, 15 bp, Homo sapiens
tttttcattaaattt

SEQ ID NO: 1996902 - DNA, 15 bp, Homo sapiens
ttttcattaaattta

SEQ ID NO: 1996903 - DNA, 15 bp, Homo sapiens
tttcattaaatttac

SEQ ID NO: 1996904 - DNA, 15 bp, Homo sapiens
ttcattaaatttact

SEQ ID NO: 1996905 - DNA, 15 bp, Homo sapiens
tcattaaatttacta

SEQ ID NO: 1996906 - DNA, 15 bp, Homo sapiens
cattaaatttactat

SEQ ID NO: 1996907 - DNA, 15 bp, Homo sapiens
attaaatttactatt

SEQ ID NO: 1996908 - DNA, 15 bp, Homo sapiens
ttaaatttactattt

SEQ ID NO: 1996909 - DNA, 15 bp, Homo sapiens
taaatttactattta

SEQ ID NO: 1996910 - DNA, 15 bp, Homo sapiens
aaatttactatttaa

SEQ ID NO: 1996911 - DNA, 15 bp, Homo sapiens
aatttactatttaaa

SEQ ID NO: 1996912 - DNA, 15 bp, Homo sapiens
atttactatttaaaa

SEQ ID NO: 1996913 - DNA, 15 bp, Homo sapiens
tttactatttaaaaa

SEQ ID NO: 1996914 - DNA, 15 bp, Homo sapiens
ttactatttaaaaag

SEQ ID NO: 1996915 - DNA, 15 bp, Homo sapiens
tactatttaaaaagt

SEQ ID NO: 1996916 - DNA, 15 bp, Homo sapiens
actatttaaaaagta

SEQ ID NO: 1996917 - DNA, 15 bp, Homo sapiens
ctatttaaaaagtaa

SEQ ID NO: 1996918 - DNA, 15 bp, Homo sapiens
tatttaaaaagtaat

SEQ ID NO: 1996919 - DNA, 15 bp, Homo sapiens
tttaaaaagtaatgc

SEQ ID NO: 1996920 - DNA, 15 bp, Homo sapiens
ttaaaaagtaatgct

SEQ ID NO: 1996921 - DNA, 15 bp, Homo sapiens
taaaaagtaatgcta

SEQ ID NO: 1996922 - DNA, 15 bp, Homo sapiens
aaaaagtaatgctat

SEQ ID NO: 1996923 - DNA, 15 bp, Homo sapiens
aaaagtaatgctatt

SEQ ID NO: 1996924 - DNA, 15 bp, Homo sapiens
aaagtaatgctattt

SEQ ID NO: 1996925 - DNA, 15 bp, Homo sapiens
aagtaatgctattta

SEQ ID NO: 1996926 - DNA, 15 bp, Homo sapiens
agtaatgctatttat

SEQ ID NO: 1996927 - DNA, 15 bp, Homo sapiens
gtaatgctatttata

SEQ ID NO: 1996928 - DNA, 15 bp, Homo sapiens
taatgctatttatat

SEQ ID NO: 1996929 - DNA, 15 bp, Homo sapiens
aatgctatttatatt

SEQ ID NO: 1996930 - DNA, 15 bp, Homo sapiens
atgctatttatatta

SEQ ID NO: 1996931 - DNA, 15 bp, Homo sapiens
tgctatttatattat

SEQ ID NO: 1996932 - DNA, 15 bp, Homo sapiens
gctatttatattatt

SEQ ID NO: 1996933 - DNA, 15 bp, Homo sapiens
ctatttatattattg

SEQ ID NO: 1996934 - DNA, 15 bp, Homo sapiens
tatttatattattga

SEQ ID NO: 1996935 - DNA, 15 bp, Homo sapiens
atttatattattgaa

SEQ ID NO: 1996936 - DNA, 15 bp, Homo sapiens
tttatattattgaac

SEQ ID NO: 1996937 - DNA, 15 bp, Homo sapiens
ttatattattgaaca

SEQ ID NO: 1996938 - DNA, 15 bp, Homo sapiens
tatattattgaacaa

SEQ ID NO: 1996939 - DNA, 15 bp, Homo sapiens
atattattgaacaat

SEQ ID NO: 1996940 - DNA, 15 bp, Homo sapiens
tattattgaacaatt

SEQ ID NO: 1996941 - DNA, 15 bp, Homo sapiens
attattgaacaattg

SEQ ID NO: 1996942 - DNA, 15 bp, Homo sapiens
ttattgaacaattgt

SEQ ID NO: 1996943 - DNA, 15 bp, Homo sapiens
tattgaacaattgtt

SEQ ID NO: 1996944 - DNA, 15 bp, Homo sapiens
attgaacaattgttt

SEQ ID NO: 1996945 - DNA, 15 bp, Homo sapiens
ttgaacaattgtttt

SEQ ID NO: 1996946 - DNA, 15 bp, Homo sapiens
tgaacaattgtttta

SEQ ID NO: 1996947 - DNA, 15 bp, Homo sapiens
gaacaattgttttat

SEQ ID NO: 1996948 - DNA, 15 bp, Homo sapiens
aacaattgttttatt

SEQ ID NO: 1996949 - DNA, 15 bp, Homo sapiens
acaattgttttattt

SEQ ID NO: 1996950 - DNA, 15 bp, Homo sapiens
caattgttttatttc

SEQ ID NO: 1996951 - DNA, 15 bp, Homo sapiens
aattgttttatttcc

SEQ ID NO: 1996952 - DNA, 15 bp, Homo sapiens
attgttttatttcct

SEQ ID NO: 1996953 - DNA, 15 bp, Homo sapiens
ttgttttatttcctt

SEQ ID NO: 1996954 - DNA, 15 bp, Homo sapiens
tgttttatttccttc

SEQ ID NO: 1996955 - DNA, 15 bp, Homo sapiens
gttttatttccttca

SEQ ID NO: 1996956 - DNA, 15 bp, Homo sapiens
ttttatttccttcag

SEQ ID NO: 1996957 - DNA, 15 bp, Homo sapiens
tttatttccttcagt

SEQ ID NO: 1996958 - DNA, 15 bp, Homo sapiens
ttatttccttcagtg

SEQ ID NO: 1996959 - DNA, 15 bp, Homo sapiens
tatttccttcagtga

SEQ ID NO: 1996960 - DNA, 15 bp, Homo sapiens
atttccttcagtgat

SEQ ID NO: 1996961 - DNA, 15 bp, Homo sapiens
tttccttcagtgatt

SEQ ID NO: 1996962 - DNA, 15 bp, Homo sapiens
ttccttcagtgattt

SEQ ID NO: 1996963 - DNA, 15 bp, Homo sapiens
tccttcagtgatttt

SEQ ID NO: 1996964 - DNA, 15 bp, Homo sapiens
ccttcagtgatttta

SEQ ID NO: 1996965 - DNA, 15 bp, Homo sapiens
cttcagtgattttac

SEQ ID NO: 1996966 - DNA, 15 bp, Homo sapiens
ttcagtgattttaca

SEQ ID NO: 1996967 - DNA, 15 bp, Homo sapiens
tcagtgattttacag

SEQ ID NO: 1996968 - DNA, 15 bp, Homo sapiens
cagtgattttacaga

SEQ ID NO: 1996969 - DNA, 15 bp, Homo sapiens
agtgattttacagat

SEQ ID NO: 1996970 - DNA, 15 bp, Homo sapiens
gtgattttacagatg

SEQ ID NO: 1996971 - DNA, 15 bp, Homo sapiens
tgattttacagatgt

SEQ ID NO: 1996972 - DNA, 15 bp, Homo sapiens
gattttacagatgtt

SEQ ID NO: 1996973 - DNA, 15 bp, Homo sapiens
attttacagatgttt

SEQ ID NO: 1996974 - DNA, 15 bp, Homo sapiens
ttttacagatgtttc

SEQ ID NO: 1996975 - DNA, 15 bp, Homo sapiens
tttacagatgtttct

SEQ ID NO: 1996976 - DNA, 15 bp, Homo sapiens
ttacagatgtttctt

SEQ ID NO: 1996977 - DNA, 15 bp, Homo sapiens
tacagatgtttcttg

SEQ ID NO: 1996978 - DNA, 15 bp, Homo sapiens
acagatgtttcttga

SEQ ID NO: 1996979 - DNA, 15 bp, Homo sapiens
cagatgtttcttgat

SEQ ID NO: 1996980 - DNA, 15 bp, Homo sapiens
agatgtttcttgatt

SEQ ID NO: 1996981 - DNA, 15 bp, Homo sapiens
gatgtttcttgattc

SEQ ID NO: 1996982 - DNA, 15 bp, Homo sapiens
atgtttcttgattct

SEQ ID NO: 1996983 - DNA, 15 bp, Homo sapiens
tgtttcttgattctt

SEQ ID NO: 1996984 - DNA, 15 bp, Homo sapiens
gtttcttgattctta

SEQ ID NO: 1996985 - DNA, 15 bp, Homo sapiens
tttcttgattcttac

SEQ ID NO: 1996986 - DNA, 15 bp, Homo sapiens
ttcttgattcttact

SEQ ID NO: 1996987 - DNA, 15 bp, Homo sapiens
tcttgattcttactt

SEQ ID NO: 1996988 - DNA, 15 bp, Homo sapiens
cttgattcttacttt

SEQ ID NO: 1996989 - DNA, 15 bp, Homo sapiens
ttgattcttactttt

SEQ ID NO: 1996990 - DNA, 15 bp, Homo sapiens
tgattcttactttta

SEQ ID NO: 1996991 - DNA, 15 bp, Homo sapiens
gattcttacttttaa

SEQ ID NO: 1996992 - DNA, 15 bp, Homo sapiens
attcttacttttaaa

SEQ ID NO: 1996993 - DNA, 15 bp, Homo sapiens
ttcttacttttaaat

SEQ ID NO: 1996994 - DNA, 15 bp, Homo sapiens
tcttacttttaaatc

SEQ ID NO: 1996995 - DNA, 15 bp, Homo sapiens
cttacttttaaatca

SEQ ID NO: 1996996 - DNA, 15 bp, Homo sapiens
ttacttttaaatcaa

SEQ ID NO: 1996997 - DNA, 15 bp, Homo sapiens
tacttttaaatcaaa

SEQ ID NO: 1996998 - DNA, 15 bp, Homo sapiens
acttttaaatcaaag

SEQ ID NO: 1996999 - DNA, 15 bp, Homo sapiens
cttttaaatcaaagt

SEQ ID NO: 1997000 - DNA, 15 bp, Homo sapiens
ttttaaatcaaagta

SEQ ID NO: 1997001 - DNA, 15 bp, Homo sapiens
tttaaatcaaagtaa

SEQ ID NO: 1997002 - DNA, 15 bp, Homo sapiens
ttaaatcaaagtaaa

SEQ ID NO: 1997003 - DNA, 15 bp, Homo sapiens
taaatcaaagtaaat

SEQ ID NO: 1997004 - DNA, 15 bp, Homo sapiens
aaatcaaagtaaatt

SEQ ID NO: 1997005 - DNA, 15 bp, Homo sapiens
aatcaaagtaaattg

SEQ ID NO: 1997006 - DNA, 15 bp, Homo sapiens
atcaaagtaaattga

SEQ ID NO: 1997007 - DNA, 15 bp, Homo sapiens
tcaaagtaaattgag

SEQ ID NO: 1997008 - DNA, 15 bp, Homo sapiens
caaagtaaattgagg

SEQ ID NO: 1997009 - DNA, 15 bp, Homo sapiens
aaagtaaattgaggc

SEQ ID NO: 1997010 - DNA, 15 bp, Homo sapiens
aagtaaattgaggca

SEQ ID NO: 1997011 - DNA, 15 bp, Homo sapiens
agtaaattgaggcag

SEQ ID NO: 1997012 - DNA, 15 bp, Homo sapiens
gtaaattgaggcagt

SEQ ID NO: 1997013 - DNA, 15 bp, Homo sapiens
taaattgaggcagtt

SEQ ID NO: 1997014 - DNA, 15 bp, Homo sapiens
aaattgaggcagttt

SEQ ID NO: 1997015 - DNA, 15 bp, Homo sapiens
aattgaggcagttta

SEQ ID NO: 1997016 - DNA, 15 bp, Homo sapiens
attgaggcagtttaa

SEQ ID NO: 1997017 - DNA, 15 bp, Homo sapiens
ttgaggcagtttaag

SEQ ID NO: 1997018 - DNA, 15 bp, Homo sapiens
tgaggcagtttaaga

SEQ ID NO: 1997019 - DNA, 15 bp, Homo sapiens
gaggcagtttaagaa

SEQ ID NO: 1997020 - DNA, 15 bp, Homo sapiens
aggcagtttaagaag

SEQ ID NO: 1997021 - DNA, 15 bp, Homo sapiens
ggcagtttaagaaga

SEQ ID NO: 1997022 - DNA, 15 bp, Homo sapiens
gcagtttaagaagaa

SEQ ID NO: 1997023 - DNA, 15 bp, Homo sapiens
cagtttaagaagaac

SEQ ID NO: 1997024 - DNA, 15 bp, Homo sapiens
agtttaagaagaacg

SEQ ID NO: 1997025 - DNA, 15 bp, Homo sapiens
gtttaagaagaacgg

SEQ ID NO: 1997026 - DNA, 15 bp, Homo sapiens
tttaagaagaacgga

SEQ ID NO: 1997027 - DNA, 15 bp, Homo sapiens
ttaagaagaacggag

SEQ ID NO: 1997028 - DNA, 15 bp, Homo sapiens
taagaagaacggagc

SEQ ID NO: 1997029 - DNA, 15 bp, Homo sapiens
aagaagaacggagct

SEQ ID NO: 1997030 - DNA, 15 bp, Homo sapiens
agaagaacggagctc

SEQ ID NO: 1997031 - DNA, 15 bp, Homo sapiens
gaagaacggagctca

SEQ ID NO: 1997032 - DNA, 15 bp, Homo sapiens
aagaacggagctcac

SEQ ID NO: 1997033 - DNA, 15 bp, Homo sapiens
agaacggagctcaca

SEQ ID NO: 1997034 - DNA, 15 bp, Homo sapiens
gaacggagctcacaa

SEQ ID NO: 1997035 - DNA, 15 bp, Homo sapiens
aacggagctcacaag

SEQ ID NO: 1997036 - DNA, 15 bp, Homo sapiens
acggagctcacaagt

SEQ ID NO: 1997037 - DNA, 15 bp, Homo sapiens
cggagctcacaagta

SEQ ID NO: 1997038 - DNA, 15 bp, Homo sapiens
ggagctcacaagtat

SEQ ID NO: 1997039 - DNA, 15 bp, Homo sapiens
gagctcacaagtata

SEQ ID NO: 1997040 - DNA, 15 bp, Homo sapiens
agctcacaagtatac

SEQ ID NO: 1997041 - DNA, 15 bp, Homo sapiens
gctcacaagtatacg

SEQ ID NO: 1997042 - DNA, 15 bp, Homo sapiens
ctcacaagtatacgt

SEQ ID NO: 1997043 - DNA, 15 bp, Homo sapiens
tcacaagtatacgtt

SEQ ID NO: 1997044 - DNA, 15 bp, Homo sapiens
cacaagtatacgttt

SEQ ID NO: 1997045 - DNA, 15 bp, Homo sapiens
acaagtatacgtttg

SEQ ID NO: 1997046 - DNA, 15 bp, Homo sapiens
caagtatacgtttgt

SEQ ID NO: 1997047 - DNA, 15 bp, Homo sapiens
aagtatacgtttgtt

SEQ ID NO: 1997048 - DNA, 15 bp, Homo sapiens
agtatacgtttgtta

SEQ ID NO: 1997049 - DNA, 15 bp, Homo sapiens
gtatacgtttgttat

SEQ ID NO: 1997050 - DNA, 15 bp, Homo sapiens
tatacgtttgttata

SEQ ID NO: 1997051 - DNA, 15 bp, Homo sapiens
atacgtttgttatac

SEQ ID NO: 1997052 - DNA, 15 bp, Homo sapiens
tacgtttgttataca

SEQ ID NO: 1997053 - DNA, 15 bp, Homo sapiens
acgtttgttatacat

SEQ ID NO: 1997054 - DNA, 15 bp, Homo sapiens
cgtttgttatacata

SEQ ID NO: 1997055 - DNA, 15 bp, Homo sapiens
gtttgttatacatag

SEQ ID NO: 1997056 - DNA, 15 bp, Homo sapiens
tttgttatacatagt

SEQ ID NO: 1997057 - DNA, 15 bp, Homo sapiens
ttgttatacatagtt

SEQ ID NO: 1997058 - DNA, 15 bp, Homo sapiens
tgttatacatagttg

SEQ ID NO: 1997059 - DNA, 15 bp, Homo sapiens
gttatacatagttgg

SEQ ID NO: 1997060 - DNA, 15 bp, Homo sapiens
ttatacatagttgga

SEQ ID NO: 1997061 - DNA, 15 bp, Homo sapiens
tatacatagttggaa

SEQ ID NO: 1997062 - DNA, 15 bp, Homo sapiens
atacatagttggaat

SEQ ID NO: 1997063 - DNA, 15 bp, Homo sapiens
tacatagttggaata

SEQ ID NO: 1997064 - DNA, 15 bp, Homo sapiens
acatagttggaatat

SEQ ID NO: 1997065 - DNA, 15 bp, Homo sapiens
catagttggaatatt

SEQ ID NO: 1997066 - DNA, 15 bp, Homo sapiens
atagttggaatattt

SEQ ID NO: 1997067 - DNA, 15 bp, Homo sapiens
tagttggaatattta

SEQ ID NO: 1997068 - DNA, 15 bp, Homo sapiens
agttggaatatttaa

SEQ ID NO: 1997069 - DNA, 15 bp, Homo sapiens
gttggaatatttaag

SEQ ID NO: 1997070 - DNA, 15 bp, Homo sapiens
ttggaatatttaagt

SEQ ID NO: 1997071 - DNA, 15 bp, Homo sapiens
tggaatatttaagtg

SEQ ID NO: 1997072 - DNA, 15 bp, Homo sapiens
ggaatatttaagtga

SEQ ID NO: 1997073 - DNA, 15 bp, Homo sapiens
gaatatttaagtgaa

SEQ ID NO: 1997074 - DNA, 15 bp, Homo sapiens
aatatttaagtgaaa

SEQ ID NO: 1997075 - DNA, 15 bp, Homo sapiens
atatttaagtgaaag

SEQ ID NO: 1997076 - DNA, 15 bp, Homo sapiens
tatttaagtgaaaga

SEQ ID NO: 1997077 - DNA, 15 bp, Homo sapiens
atttaagtgaaagaa

SEQ ID NO: 1997078 - DNA, 15 bp, Homo sapiens
tttaagtgaaagaaa

SEQ ID NO: 1997079 - DNA, 15 bp, Homo sapiens
ttaagtgaaagaaaa

SEQ ID NO: 1997080 - DNA, 15 bp, Homo sapiens
taagtgaaagaaaaa

SEQ ID NO: 1997081 - DNA, 15 bp, Homo sapiens
aagtgaaagaaaaat

SEQ ID NO: 1997082 - DNA, 15 bp, Homo sapiens
agtgaaagaaaaata

SEQ ID NO: 1997083 - DNA, 15 bp, Homo sapiens
gtgaaagaaaaatac

SEQ ID NO: 1997084 - DNA, 15 bp, Homo sapiens
tgaaagaaaaatact

SEQ ID NO: 1997085 - DNA, 15 bp, Homo sapiens
gaaagaaaaatactt

SEQ ID NO: 1997086 - DNA, 15 bp, Homo sapiens
aaagaaaaatactta

SEQ ID NO: 1997087 - DNA, 15 bp, Homo sapiens
aagaaaaatacttac

SEQ ID NO: 1997088 - DNA, 15 bp, Homo sapiens
agaaaaatacttacc

SEQ ID NO: 1997089 - DNA, 15 bp, Homo sapiens
gaaaaatacttacca

SEQ ID NO: 1997090 - DNA, 15 bp, Homo sapiens
aaaaatacttaccaa

SEQ ID NO: 1997091 - DNA, 15 bp, Homo sapiens
aaaatacttaccaat

SEQ ID NO: 1997092 - DNA, 15 bp, Homo sapiens
aaatacttaccaata

SEQ ID NO: 1997093 - DNA, 15 bp, Homo sapiens
aatacttaccaatat

SEQ ID NO: 1997094 - DNA, 15 bp, Homo sapiens
atacttaccaatatg

SEQ ID NO: 1997095 - DNA, 15 bp, Homo sapiens
tacttaccaatatgt

SEQ ID NO: 1997096 - DNA, 15 bp, Homo sapiens
acttaccaatatgtt

SEQ ID NO: 1997097 - DNA, 15 bp, Homo sapiens
cttaccaatatgtta

SEQ ID NO: 1997098 - DNA, 15 bp, Homo sapiens
ttaccaatatgttat

SEQ ID NO: 1997099 - DNA, 15 bp, Homo sapiens
taccaatatgttatg

SEQ ID NO: 1997100 - DNA, 15 bp, Homo sapiens
accaatatgttatga

SEQ ID NO: 1997101 - DNA, 15 bp, Homo sapiens
ccaatatgttatgag

SEQ ID NO: 1997102 - DNA, 15 bp, Homo sapiens
caatatgttatgagt

SEQ ID NO: 1997103 - DNA, 15 bp, Homo sapiens
aatatgttatgagtg

SEQ ID NO: 1997104 - DNA, 15 bp, Homo sapiens
atatgttatgagtgc

SEQ ID NO: 1997105 - DNA, 15 bp, Homo sapiens
tatgttatgagtgca

SEQ ID NO: 1997106 - DNA, 15 bp, Homo sapiens
atgttatgagtgcaa

SEQ ID NO: 1997107 - DNA, 15 bp, Homo sapiens
tgttatgagtgcaat

SEQ ID NO: 1997108 - DNA, 15 bp, Homo sapiens
gttatgagtgcaatt

SEQ ID NO: 1997109 - DNA, 15 bp, Homo sapiens
ttatgagtgcaattt

SEQ ID NO: 1997110 - DNA, 15 bp, Homo sapiens
tatgagtgcaatttt

SEQ ID NO: 1997111 - DNA, 15 bp, Homo sapiens
atgagtgcaattttg

SEQ ID NO: 1997112 - DNA, 15 bp, Homo sapiens
tgagtgcaattttgt

SEQ ID NO: 1997113 - DNA, 15 bp, Homo sapiens
gagtgcaattttgta

SEQ ID NO: 1997114 - DNA, 15 bp, Homo sapiens
agtgcaattttgtag

SEQ ID NO: 1997115 - DNA, 15 bp, Homo sapiens
gtgcaattttgtaga

SEQ ID NO: 1997116 - DNA, 15 bp, Homo sapiens
tgcaattttgtagaa

SEQ ID NO: 1997117 - DNA, 15 bp, Homo sapiens
gcaattttgtagaat

SEQ ID NO: 1997118 - DNA, 15 bp, Homo sapiens
caattttgtagaatt

SEQ ID NO: 1997119 - DNA, 15 bp, Homo sapiens
aattttgtagaattt

SEQ ID NO: 1997120 - DNA, 15 bp, Homo sapiens
attttgtagaatttg

SEQ ID NO: 1997121 - DNA, 15 bp, Homo sapiens
ttttgtagaatttga

SEQ ID NO: 1997122 - DNA, 15 bp, Homo sapiens
tttgtagaatttgag

SEQ ID NO: 1997123 - DNA, 15 bp, Homo sapiens
ttgtagaatttgagg

SEQ ID NO: 1997124 - DNA, 15 bp, Homo sapiens
tgtagaatttgagga

SEQ ID NO: 1997125 - DNA, 15 bp, Homo sapiens
gtagaatttgaggaa

SEQ ID NO: 1997126 - DNA, 15 bp, Homo sapiens
tagaatttgaggaat

SEQ ID NO: 1997127 - DNA, 15 bp, Homo sapiens
agaatttgaggaatc

SEQ ID NO: 1997128 - DNA, 15 bp, Homo sapiens
gaatttgaggaatct

SEQ ID NO: 1997129 - DNA, 15 bp, Homo sapiens
aatttgaggaatctt

SEQ ID NO: 1997130 - DNA, 15 bp, Homo sapiens
atttgaggaatctta

SEQ ID NO: 1997131 - DNA, 15 bp, Homo sapiens
tttgaggaatcttaa

SEQ ID NO: 1997132 - DNA, 15 bp, Homo sapiens
ttgaggaatcttaag

SEQ ID NO: 1997133 - DNA, 15 bp, Homo sapiens
tgaggaatcttaagt

SEQ ID NO: 1997134 - DNA, 15 bp, Homo sapiens
gaggaatcttaagta

SEQ ID NO: 1997135 - DNA, 15 bp, Homo sapiens
aggaatcttaagtat

SEQ ID NO: 1997136 - DNA, 15 bp, Homo sapiens
ggaatcttaagtatt

SEQ ID NO: 1997137 - DNA, 15 bp, Homo sapiens
gaatcttaagtattt

SEQ ID NO: 1997138 - DNA, 15 bp, Homo sapiens
aatcttaagtatttt

SEQ ID NO: 1997139 - DNA, 15 bp, Homo sapiens
atcttaagtattttt

SEQ ID NO: 1997140 - DNA, 15 bp, Homo sapiens
tcttaagtatttttg

SEQ ID NO: 1997141 - DNA, 15 bp, Homo sapiens
cttaagtatttttgt

SEQ ID NO: 1997142 - DNA, 15 bp, Homo sapiens
ttaagtatttttgtt

SEQ ID NO: 1997143 - DNA, 15 bp, Homo sapiens
taagtatttttgttc

SEQ ID NO: 1997144 - DNA, 15 bp, Homo sapiens
aagtatttttgttcc

SEQ ID NO: 1997145 - DNA, 15 bp, Homo sapiens
agtatttttgttcct

SEQ ID NO: 1997146 - DNA, 15 bp, Homo sapiens
gtatttttgttcctg

SEQ ID NO: 1997147 - DNA, 15 bp, Homo sapiens
tatttttgttcctgt

SEQ ID NO: 1997148 - DNA, 15 bp, Homo sapiens
atttttgttcctgtg

SEQ ID NO: 1997149 - DNA, 15 bp, Homo sapiens
tttttgttcctgtga

SEQ ID NO: 1997150 - DNA, 15 bp, Homo sapiens
ttttgttcctgtgaa

SEQ ID NO: 1997151 - DNA, 15 bp, Homo sapiens
tttgttcctgtgaat

SEQ ID NO: 1997152 - DNA, 15 bp, Homo sapiens
ttgttcctgtgaata

SEQ ID NO: 1997153 - DNA, 15 bp, Homo sapiens
tgttcctgtgaatat

SEQ ID NO: 1997154 - DNA, 15 bp, Homo sapiens
gttcctgtgaatatg

SEQ ID NO: 1997155 - DNA, 15 bp, Homo sapiens
ttcctgtgaatatga

SEQ ID NO: 1997156 - DNA, 15 bp, Homo sapiens
tcctgtgaatatgac

SEQ ID NO: 1997157 - DNA, 15 bp, Homo sapiens
cctgtgaatatgact

SEQ ID NO: 1997158 - DNA, 15 bp, Homo sapiens
ctgtgaatatgacta

SEQ ID NO: 1997159 - DNA, 15 bp, Homo sapiens
tgtgaatatgactat

SEQ ID NO: 1997160 - DNA, 15 bp, Homo sapiens
gtgaatatgactatt

SEQ ID NO: 1997161 - DNA, 15 bp, Homo sapiens
tgaatatgactatta

SEQ ID NO: 1997162 - DNA, 15 bp, Homo sapiens
gaatatgactattat

SEQ ID NO: 1997163 - DNA, 15 bp, Homo sapiens
aatatgactattatt

SEQ ID NO: 1997164 - DNA, 15 bp, Homo sapiens
atatgactattattt

SEQ ID NO: 1997165 - DNA, 15 bp, Homo sapiens
tatgactattattta

SEQ ID NO: 1997166 - DNA, 15 bp, Homo sapiens
atgactattatttaa

SEQ ID NO: 1997167 - DNA, 15 bp, Homo sapiens
tgactattatttaaa

SEQ ID NO: 1997168 - DNA, 15 bp, Homo sapiens
gactattatttaaaa

SEQ ID NO: 1997169 - DNA, 15 bp, Homo sapiens
actattatttaaaag

SEQ ID NO: 1997170 - DNA, 15 bp, Homo sapiens
ctattatttaaaaga

SEQ ID NO: 1997171 - DNA, 15 bp, Homo sapiens
tattatttaaaagat

SEQ ID NO: 1997172 - DNA, 15 bp, Homo sapiens
attatttaaaagatt

SEQ ID NO: 1997173 - DNA, 15 bp, Homo sapiens
ttatttaaaagattt

SEQ ID NO: 1997174 - DNA, 15 bp, Homo sapiens
tatttaaaagattta

SEQ ID NO: 1997175 - DNA, 15 bp, Homo sapiens
atttaaaagatttaa

SEQ ID NO: 1997176 - DNA, 15 bp, Homo sapiens
tttaaaagatttaat

SEQ ID NO: 1997177 - DNA, 15 bp, Homo sapiens
ttaaaagatttaata

SEQ ID NO: 1997178 - DNA, 15 bp, Homo sapiens
taaaagatttaatac

SEQ ID NO: 1997179 - DNA, 15 bp, Homo sapiens
aaaagatttaatact

SEQ ID NO: 1997180 - DNA, 15 bp, Homo sapiens
aaagatttaatactt

SEQ ID NO: 1997181 - DNA, 15 bp, Homo sapiens
aagatttaatacttc

SEQ ID NO: 1997182 - DNA, 15 bp, Homo sapiens
agatttaatacttct

SEQ ID NO: 1997183 - DNA, 15 bp, Homo sapiens
gatttaatacttctt

SEQ ID NO: 1997184 - DNA, 15 bp, Homo sapiens
atttaatacttctta

SEQ ID NO: 1997185 - DNA, 15 bp, Homo sapiens
tttaatacttcttag

SEQ ID NO: 1997186 - DNA, 15 bp, Homo sapiens
ttaatacttcttaga

SEQ ID NO: 1997187 - DNA, 15 bp, Homo sapiens
taatacttcttagat

SEQ ID NO: 1997188 - DNA, 15 bp, Homo sapiens
aatacttcttagatt

SEQ ID NO: 1997189 - DNA, 15 bp, Homo sapiens
atacttcttagattt

SEQ ID NO: 1997190 - DNA, 15 bp, Homo sapiens
tacttcttagatttt

SEQ ID NO: 1997191 - DNA, 15 bp, Homo sapiens
acttcttagattttt

SEQ ID NO: 1997192 - DNA, 15 bp, Homo sapiens
cttcttagattttta

SEQ ID NO: 1997193 - DNA, 15 bp, Homo sapiens
ttcttagatttttat

SEQ ID NO: 1997194 - DNA, 15 bp, Homo sapiens
tcttagatttttatt

SEQ ID NO: 1997195 - DNA, 15 bp, Homo sapiens
cttagatttttattt

SEQ ID NO: 1997196 - DNA, 15 bp, Homo sapiens
ttagatttttatttg

SEQ ID NO: 1997197 - DNA, 15 bp, Homo sapiens
tagatttttatttgt

SEQ ID NO: 1997198 - DNA, 15 bp, Homo sapiens
agatttttatttgtt

SEQ ID NO: 1997199 - DNA, 15 bp, Homo sapiens
gatttttatttgtta

SEQ ID NO: 1997200 - DNA, 15 bp, Homo sapiens
atttttatttgttag

SEQ ID NO: 1997201 - DNA, 15 bp, Homo sapiens
tttttatttgttaga

SEQ ID NO: 1997202 - DNA, 15 bp, Homo sapiens
ttttatttgttagag

SEQ ID NO: 1997203 - DNA, 15 bp, Homo sapiens
tttatttgttagagt

SEQ ID NO: 1997204 - DNA, 15 bp, Homo sapiens
ttatttgttagagtt

SEQ ID NO: 1997205 - DNA, 15 bp, Homo sapiens
tatttgttagagtta

SEQ ID NO: 1997206 - DNA, 15 bp, Homo sapiens
atttgttagagttaa

SEQ ID NO: 1997207 - DNA, 15 bp, Homo sapiens
tttgttagagttaac

SEQ ID NO: 1997208 - DNA, 15 bp, Homo sapiens
ttgttagagttaaca

SEQ ID NO: 1997209 - DNA, 15 bp, Homo sapiens
tgttagagttaacat

SEQ ID NO: 1997210 - DNA, 15 bp, Homo sapiens
gttagagttaacatc

SEQ ID NO: 1997211 - DNA, 15 bp, Homo sapiens
ttagagttaacatct

SEQ ID NO: 1997212 - DNA, 15 bp, Homo sapiens
tagagttaacatctg

SEQ ID NO: 1997213 - DNA, 15 bp, Homo sapiens
agagttaacatctgt

SEQ ID NO: 1997214 - DNA, 15 bp, Homo sapiens
gagttaacatctgta

SEQ ID NO: 1997215 - DNA, 15 bp, Homo sapiens
agttaacatctgtat

SEQ ID NO: 1997216 - DNA, 15 bp, Homo sapiens
gttaacatctgtatt

SEQ ID NO: 1997217 - DNA, 15 bp, Homo sapiens
ttaacatctgtattg

SEQ ID NO: 1997218 - DNA, 15 bp, Homo sapiens
taacatctgtattgt

SEQ ID NO: 1997219 - DNA, 15 bp, Homo sapiens
aacatctgtattgtt

SEQ ID NO: 1997220 - DNA, 15 bp, Homo sapiens
acatctgtattgttt

SEQ ID NO: 1997221 - DNA, 15 bp, Homo sapiens
catctgtattgtttg

SEQ ID NO: 1997222 - DNA, 15 bp, Homo sapiens
atctgtattgtttgg

SEQ ID NO: 1997223 - DNA, 15 bp, Homo sapiens
tctgtattgtttggt

SEQ ID NO: 1997224 - DNA, 15 bp, Homo sapiens
ctgtattgtttggtt

SEQ ID NO: 1997225 - DNA, 15 bp, Homo sapiens
tgtattgtttggtta

SEQ ID NO: 1997226 - DNA, 15 bp, Homo sapiens
gtattgtttggttag

SEQ ID NO: 1997227 - DNA, 15 bp, Homo sapiens
tattgtttggttagc

SEQ ID NO: 1997228 - DNA, 15 bp, Homo sapiens
attgtttggttagcc

SEQ ID NO: 1997229 - DNA, 15 bp, Homo sapiens
ttgtttggttagcct

SEQ ID NO: 1997230 - DNA, 15 bp, Homo sapiens
tgtttggttagccta

SEQ ID NO: 1997231 - DNA, 15 bp, Homo sapiens
gtttggttagcctat

SEQ ID NO: 1997232 - DNA, 15 bp, Homo sapiens
tttggttagcctata

SEQ ID NO: 1997233 - DNA, 15 bp, Homo sapiens
ttggttagcctataa

SEQ ID NO: 1997234 - DNA, 15 bp, Homo sapiens
tggttagcctataaa

SEQ ID NO: 1997235 - DNA, 15 bp, Homo sapiens
ggttagcctataaac

SEQ ID NO: 1997236 - DNA, 15 bp, Homo sapiens
gttagcctataaaca

SEQ ID NO: 1997237 - DNA, 15 bp, Homo sapiens
ttagcctataaacaa

SEQ ID NO: 1997238 - DNA, 15 bp, Homo sapiens
tagcctataaacaag

SEQ ID NO: 1997239 - DNA, 15 bp, Homo sapiens
agcctataaacaaga

SEQ ID NO: 1997240 - DNA, 15 bp, Homo sapiens
gcctataaacaagaa

SEQ ID NO: 1997241 - DNA, 15 bp, Homo sapiens
cctataaacaagaaa

SEQ ID NO: 1997242 - DNA, 15 bp, Homo sapiens
ctataaacaagaaat

SEQ ID NO: 1997243 - DNA, 15 bp, Homo sapiens
tataaacaagaaata

SEQ ID NO: 1997244 - DNA, 15 bp, Homo sapiens
ataaacaagaaatag

SEQ ID NO: 1997245 - DNA, 15 bp, Homo sapiens
taaacaagaaatagg

SEQ ID NO: 1997246 - DNA, 15 bp, Homo sapiens
aaacaagaaataggc

SEQ ID NO: 1997247 - DNA, 15 bp, Homo sapiens
aacaagaaataggca

SEQ ID NO: 1997248 - DNA, 15 bp, Homo sapiens
acaagaaataggcat

SEQ ID NO: 1997249 - DNA, 15 bp, Homo sapiens
caagaaataggcatt

SEQ ID NO: 1997250 - DNA, 15 bp, Homo sapiens
aagaaataggcattg

SEQ ID NO: 1997251 - DNA, 15 bp, Homo sapiens
agaaataggcattgt

SEQ ID NO: 1997252 - DNA, 15 bp, Homo sapiens
gaaataggcattgta

SEQ ID NO: 1997253 - DNA, 15 bp, Homo sapiens
aaataggcattgtaa

SEQ ID NO: 1997254 - DNA, 15 bp, Homo sapiens
aataggcattgtaat

SEQ ID NO: 1997255 - DNA, 15 bp, Homo sapiens
ataggcattgtaatg

SEQ ID NO: 1997256 - DNA, 15 bp, Homo sapiens
taggcattgtaatgt

SEQ ID NO: 1997257 - DNA, 15 bp, Homo sapiens
aggcattgtaatgtg

SEQ ID NO: 1997258 - DNA, 15 bp, Homo sapiens
ggcattgtaatgtga

SEQ ID NO: 1997259 - DNA, 15 bp, Homo sapiens
gcattgtaatgtgaa

SEQ ID NO: 1997260 - DNA, 15 bp, Homo sapiens
cattgtaatgtgaat

SEQ ID NO: 1997261 - DNA, 15 bp, Homo sapiens
attgtaatgtgaatt

SEQ ID NO: 1997262 - DNA, 15 bp, Homo sapiens
ttgtaatgtgaattc

SEQ ID NO: 1997263 - DNA, 15 bp, Homo sapiens
tgtaatgtgaattca

SEQ ID NO: 1997264 - DNA, 15 bp, Homo sapiens
gtaatgtgaattcac

SEQ ID NO: 1997265 - DNA, 15 bp, Homo sapiens
taatgtgaattcaca

SEQ ID NO: 1997266 - DNA, 15 bp, Homo sapiens
aatgtgaattcacag

SEQ ID NO: 1997267 - DNA, 15 bp, Homo sapiens
atgtgaattcacagg

SEQ ID NO: 1997268 - DNA, 15 bp, Homo sapiens
tgtgaattcacaggt

SEQ ID NO: 1997269 - DNA, 15 bp, Homo sapiens
gtgaattcacaggtt

SEQ ID NO: 1997270 - DNA, 15 bp, Homo sapiens
tgaattcacaggttt

SEQ ID NO: 1997271 - DNA, 15 bp, Homo sapiens
gaattcacaggtttt

SEQ ID NO: 1997272 - DNA, 15 bp, Homo sapiens
aattcacaggttttt

SEQ ID NO: 1997273 - DNA, 15 bp, Homo sapiens
attcacaggtttttg

SEQ ID NO: 1997274 - DNA, 15 bp, Homo sapiens
ttcacaggtttttgt

SEQ ID NO: 1997275 - DNA, 15 bp, Homo sapiens
tcacaggtttttgtg

SEQ ID NO: 1997276 - DNA, 15 bp, Homo sapiens
cacaggtttttgtga

SEQ ID NO: 1997277 - DNA, 15 bp, Homo sapiens
acaggtttttgtgaa

SEQ ID NO: 1997278 - DNA, 15 bp, Homo sapiens
caggtttttgtgaag

SEQ ID NO: 1997279 - DNA, 15 bp, Homo sapiens
aggtttttgtgaagt

SEQ ID NO: 1997280 - DNA, 15 bp, Homo sapiens
ggtttttgtgaagtc

SEQ ID NO: 1997281 - DNA, 15 bp, Homo sapiens
gtttttgtgaagtct

SEQ ID NO: 1997282 - DNA, 15 bp, Homo sapiens
tttttgtgaagtctg

SEQ ID NO: 1997283 - DNA, 15 bp, Homo sapiens
ttttgtgaagtctgt

SEQ ID NO: 1997284 - DNA, 15 bp, Homo sapiens
tttgtgaagtctgtt

SEQ ID NO: 1997285 - DNA, 15 bp, Homo sapiens
ttgtgaagtctgttt

SEQ ID NO: 1997286 - DNA, 15 bp, Homo sapiens
tgtgaagtctgttta

SEQ ID NO: 1997287 - DNA, 15 bp, Homo sapiens
gtgaagtctgtttat

SEQ ID NO: 1997288 - DNA, 15 bp, Homo sapiens
tgaagtctgtttatg

SEQ ID NO: 1997289 - DNA, 15 bp, Homo sapiens
gaagtctgtttatgt

SEQ ID NO: 1997290 - DNA, 15 bp, Homo sapiens
aagtctgtttatgta

SEQ ID NO: 1997291 - DNA, 15 bp, Homo sapiens
agtctgtttatgtac

SEQ ID NO: 1997292 - DNA, 15 bp, Homo sapiens
gtctgtttatgtact

SEQ ID NO: 1997293 - DNA, 15 bp, Homo sapiens
tctgtttatgtactg

SEQ ID NO: 1997294 - DNA, 15 bp, Homo sapiens
ctgtttatgtactgt

SEQ ID NO: 1997295 - DNA, 15 bp, Homo sapiens
tgtttatgtactgtc

SEQ ID NO: 1997296 - DNA, 15 bp, Homo sapiens
gtttatgtactgtcc

SEQ ID NO: 1997297 - DNA, 15 bp, Homo sapiens
tttatgtactgtccc

SEQ ID NO: 1997298 - DNA, 15 bp, Homo sapiens
ttatgtactgtccct

SEQ ID NO: 1997299 - DNA, 15 bp, Homo sapiens
tatgtactgtcccta

SEQ ID NO: 1997300 - DNA, 15 bp, Homo sapiens
atgtactgtccctat

SEQ ID NO: 1997301 - DNA, 15 bp, Homo sapiens
tgtactgtccctatg

SEQ ID NO: 1997302 - DNA, 15 bp, Homo sapiens
gtactgtccctatgt

SEQ ID NO: 1997303 - DNA, 15 bp, Homo sapiens
tactgtccctatgtt

SEQ ID NO: 1997304 - DNA, 15 bp, Homo sapiens
actgtccctatgttt

SEQ ID NO: 1997305 - DNA, 15 bp, Homo sapiens
ctgtccctatgtttc

SEQ ID NO: 1997306 - DNA, 15 bp, Homo sapiens
tgtccctatgtttca

SEQ ID NO: 1997307 - DNA, 15 bp, Homo sapiens
gtccctatgtttcag

SEQ ID NO: 1997308 - DNA, 15 bp, Homo sapiens
tccctatgtttcagt

SEQ ID NO: 1997309 - DNA, 15 bp, Homo sapiens
ccctatgtttcagtg

SEQ ID NO: 1997310 - DNA, 15 bp, Homo sapiens
cctatgtttcagtgt

SEQ ID NO: 1997311 - DNA, 15 bp, Homo sapiens
ctatgtttcagtgta

SEQ ID NO: 1997312 - DNA, 15 bp, Homo sapiens
tatgtttcagtgtat

SEQ ID NO: 1997313 - DNA, 15 bp, Homo sapiens
atgtttcagtgtatt

SEQ ID NO: 1997314 - DNA, 15 bp, Homo sapiens
tgtttcagtgtattt

SEQ ID NO: 1997315 - DNA, 15 bp, Homo sapiens
gtttcagtgtatttg

SEQ ID NO: 1997316 - DNA, 15 bp, Homo sapiens
tttcagtgtatttgc

SEQ ID NO: 1997317 - DNA, 15 bp, Homo sapiens
ttcagtgtatttgca

SEQ ID NO: 1997318 - DNA, 15 bp, Homo sapiens
tcagtgtatttgcat

SEQ ID NO: 1997319 - DNA, 15 bp, Homo sapiens
cagtgtatttgcatc

SEQ ID NO: 1997320 - DNA, 15 bp, Homo sapiens
agtgtatttgcatct

SEQ ID NO: 1997321 - DNA, 15 bp, Homo sapiens
gtgtatttgcatctg

SEQ ID NO: 1997322 - DNA, 15 bp, Homo sapiens
tgtatttgcatctga

SEQ ID NO: 1997323 - DNA, 15 bp, Homo sapiens
gtatttgcatctgag

SEQ ID NO: 1997324 - DNA, 15 bp, Homo sapiens
tatttgcatctgaga

SEQ ID NO: 1997325 - DNA, 15 bp, Homo sapiens
atttgcatctgagag

SEQ ID NO: 1997326 - DNA, 15 bp, Homo sapiens
tttgcatctgagagt

SEQ ID NO: 1997327 - DNA, 15 bp, Homo sapiens
ttgcatctgagagtg

SEQ ID NO: 1997328 - DNA, 15 bp, Homo sapiens
tgcatctgagagtgc

SEQ ID NO: 1997329 - DNA, 15 bp, Homo sapiens
gcatctgagagtgct

SEQ ID NO: 1997330 - DNA, 15 bp, Homo sapiens
catctgagagtgctt

SEQ ID NO: 1997331 - DNA, 15 bp, Homo sapiens
atctgagagtgcttg

SEQ ID NO: 1997332 - DNA, 15 bp, Homo sapiens
tctgagagtgcttgg

SEQ ID NO: 1997333 - DNA, 15 bp, Homo sapiens
ctgagagtgcttgga

SEQ ID NO: 1997334 - DNA, 15 bp, Homo sapiens
tgagagtgcttggat

SEQ ID NO: 1997335 - DNA, 15 bp, Homo sapiens
gagagtgcttggatt

SEQ ID NO: 1997336 - DNA, 15 bp, Homo sapiens
agagtgcttggattg

SEQ ID NO: 1997337 - DNA, 15 bp, Homo sapiens
gagtgcttggattgc

SEQ ID NO: 1997338 - DNA, 15 bp, Homo sapiens
agtgcttggattgca

SEQ ID NO: 1997339 - DNA, 15 bp, Homo sapiens
gtgcttggattgcag

SEQ ID NO: 1997340 - DNA, 15 bp, Homo sapiens
tgcttggattgcagt

SEQ ID NO: 1997341 - DNA, 15 bp, Homo sapiens
gcttggattgcagtt

SEQ ID NO: 1997342 - DNA, 15 bp, Homo sapiens
cttggattgcagtta

SEQ ID NO: 1997343 - DNA, 15 bp, Homo sapiens
ttggattgcagttac

SEQ ID NO: 1997344 - DNA, 15 bp, Homo sapiens
tggattgcagttaca

SEQ ID NO: 1997345 - DNA, 15 bp, Homo sapiens
ggattgcagttacag

SEQ ID NO: 1997346 - DNA, 15 bp, Homo sapiens
gattgcagttacaga

SEQ ID NO: 1997347 - DNA, 15 bp, Homo sapiens
attgcagttacagaa

SEQ ID NO: 1997348 - DNA, 15 bp, Homo sapiens
ttgcagttacagaat

SEQ ID NO: 1997349 - DNA, 15 bp, Homo sapiens
tgcagttacagaatt

SEQ ID NO: 1997350 - DNA, 15 bp, Homo sapiens
gcagttacagaattg

SEQ ID NO: 1997351 - DNA, 15 bp, Homo sapiens
cagttacagaattga

SEQ ID NO: 1997352 - DNA, 15 bp, Homo sapiens
agttacagaattgag

SEQ ID NO: 1997353 - DNA, 15 bp, Homo sapiens
gttacagaattgagc

SEQ ID NO: 1997354 - DNA, 15 bp, Homo sapiens
ttacagaattgagcg

SEQ ID NO: 1997355 - DNA, 15 bp, Homo sapiens
tacagaattgagcgt

SEQ ID NO: 1997356 - DNA, 15 bp, Homo sapiens
acagaattgagcgta

SEQ ID NO: 1997357 - DNA, 15 bp, Homo sapiens
cagaattgagcgtag

SEQ ID NO: 1997358 - DNA, 15 bp, Homo sapiens
agaattgagcgtagc

SEQ ID NO: 1997359 - DNA, 15 bp, Homo sapiens
gaattgagcgtagca

SEQ ID NO: 1997360 - DNA, 15 bp, Homo sapiens
aattgagcgtagcat

SEQ ID NO: 1997361 - DNA, 15 bp, Homo sapiens
attgagcgtagcata

SEQ ID NO: 1997362 - DNA, 15 bp, Homo sapiens
ttgagcgtagcatac

SEQ ID NO: 1997363 - DNA, 15 bp, Homo sapiens
tgagcgtagcataca

SEQ ID NO: 1997364 - DNA, 15 bp, Homo sapiens
gagcgtagcatacaa

SEQ ID NO: 1997365 - DNA, 15 bp, Homo sapiens
agcgtagcatacaat

SEQ ID NO: 1997366 - DNA, 15 bp, Homo sapiens
gcgtagcatacaatt

SEQ ID NO: 1997367 - DNA, 15 bp, Homo sapiens
cgtagcatacaattg

SEQ ID NO: 1997368 - DNA, 15 bp, Homo sapiens
gtagcatacaattgt

SEQ ID NO: 1997369 - DNA, 15 bp, Homo sapiens
tagcatacaattgta

SEQ ID NO: 1997370 - DNA, 15 bp, Homo sapiens
agcatacaattgtac

SEQ ID NO: 1997371 - DNA, 15 bp, Homo sapiens
gcatacaattgtaca

SEQ ID NO: 1997372 - DNA, 15 bp, Homo sapiens
catacaattgtacac

SEQ ID NO: 1997373 - DNA, 15 bp, Homo sapiens
atacaattgtacaca

SEQ ID NO: 1997374 - DNA, 15 bp, Homo sapiens
tacaattgtacacat

SEQ ID NO: 1997375 - DNA, 15 bp, Homo sapiens
acaattgtacacatt

SEQ ID NO: 1997376 - DNA, 15 bp, Homo sapiens
caattgtacacattt

SEQ ID NO: 1997377 - DNA, 15 bp, Homo sapiens
aattgtacacatttt

SEQ ID NO: 1997378 - DNA, 15 bp, Homo sapiens
attgtacacattttt

SEQ ID NO: 1997379 - DNA, 15 bp, Homo sapiens
ttgtacacatttttg

SEQ ID NO: 1997380 - DNA, 15 bp, Homo sapiens
tgtacacatttttgt

SEQ ID NO: 1997381 - DNA, 15 bp, Homo sapiens
gtacacatttttgtt

SEQ ID NO: 1997382 - DNA, 15 bp, Homo sapiens
tacacatttttgttc

SEQ ID NO: 1997383 - DNA, 15 bp, Homo sapiens
acacatttttgttct

SEQ ID NO: 1997384 - DNA, 15 bp, Homo sapiens
cacatttttgttctt

SEQ ID NO: 1997385 - DNA, 15 bp, Homo sapiens
atttttgttctttgc

SEQ ID NO: 1997386 - DNA, 15 bp, Homo sapiens
tttttgttctttgcc

SEQ ID NO: 1997387 - DNA, 15 bp, Homo sapiens
ttttgttctttgcca

SEQ ID NO: 1997388 - DNA, 15 bp, Homo sapiens
tttgttctttgccat

SEQ ID NO: 1997389 - DNA, 15 bp, Homo sapiens
ttgttctttgccatc

SEQ ID NO: 1997390 - DNA, 15 bp, Homo sapiens
tgttctttgccatct

SEQ ID NO: 1997391 - DNA, 15 bp, Homo sapiens
gttctttgccatctt

SEQ ID NO: 1997392 - DNA, 15 bp, Homo sapiens
ttctttgccatcttg

SEQ ID NO: 1997393 - DNA, 15 bp, Homo sapiens
tctttgccatcttgc

SEQ ID NO: 1997394 - DNA, 15 bp, Homo sapiens
ctttgccatcttgct

SEQ ID NO: 1997395 - DNA, 15 bp, Homo sapiens
tttgccatcttgctc

SEQ ID NO: 1997396 - DNA, 15 bp, Homo sapiens
ttgccatcttgctca

SEQ ID NO: 1997397 - DNA, 15 bp, Homo sapiens
tgccatcttgctcag

SEQ ID NO: 1997398 - DNA, 15 bp, Homo sapiens
gccatcttgctcagt

SEQ ID NO: 1997399 - DNA, 15 bp, Homo sapiens
ccatcttgctcagtg

SEQ ID NO: 1997400 - DNA, 15 bp, Homo sapiens
catcttgctcagtgt

SEQ ID NO: 1997401 - DNA, 15 bp, Homo sapiens
atcttgctcagtgtt

SEQ ID NO: 1997402 - DNA, 15 bp, Homo sapiens
tcttgctcagtgtta

SEQ ID NO: 1997403 - DNA, 15 bp, Homo sapiens
cttgctcagtgttat

SEQ ID NO: 1997404 - DNA, 15 bp, Homo sapiens
ttgctcagtgttatt

SEQ ID NO: 1997405 - DNA, 15 bp, Homo sapiens
tgctcagtgttatta

SEQ ID NO: 1997406 - DNA, 15 bp, Homo sapiens
gctcagtgttattaa

SEQ ID NO: 1997407 - DNA, 15 bp, Homo sapiens
ctcagtgttattaaa

SEQ ID NO: 1997408 - DNA, 15 bp, Homo sapiens
tcagtgttattaaaa

SEQ ID NO: 1997409 - DNA, 15 bp, Homo sapiens
cagtgttattaaaat

SEQ ID NO: 1997410 - DNA, 15 bp, Homo sapiens
agtgttattaaaatt

SEQ ID NO: 1997411 - DNA, 15 bp, Homo sapiens
gtgttattaaaattc

SEQ ID NO: 1997412 - DNA, 15 bp, Homo sapiens
tgttattaaaattct

SEQ ID NO: 1997413 - DNA, 15 bp, Homo sapiens
gttattaaaattctt

SEQ ID NO: 1997414 - DNA, 15 bp, Homo sapiens
ttattaaaattctta

SEQ ID NO: 1997415 - DNA, 15 bp, Homo sapiens
tattaaaattcttat

SEQ ID NO: 1997416 - DNA, 15 bp, Homo sapiens
attaaaattcttatc

SEQ ID NO: 1997417 - DNA, 15 bp, Homo sapiens
ttaaaattcttatcc

SEQ ID NO: 1997418 - DNA, 15 bp, Homo sapiens
taaaattcttatccg

SEQ ID NO: 1997419 - DNA, 15 bp, Homo sapiens
aaaattcttatccgc

SEQ ID NO: 1997420 - DNA, 15 bp, Homo sapiens
aaattcttatccgca

SEQ ID NO: 1997421 - DNA, 15 bp, Homo sapiens
aattcttatccgcat

SEQ ID NO: 1997422 - DNA, 15 bp, Homo sapiens
attcttatccgcatg

SEQ ID NO: 1997423 - DNA, 15 bp, Homo sapiens
ttcttatccgcatgt

SEQ ID NO: 1997424 - DNA, 15 bp, Homo sapiens
tcttatccgcatgta

SEQ ID NO: 1997425 - DNA, 15 bp, Homo sapiens
cttatccgcatgtag

SEQ ID NO: 1997426 - DNA, 15 bp, Homo sapiens
ttatccgcatgtagt

SEQ ID NO: 1997427 - DNA, 15 bp, Homo sapiens
tatccgcatgtagtt

SEQ ID NO: 1997428 - DNA, 15 bp, Homo sapiens
atccgcatgtagtta

SEQ ID NO: 1997429 - DNA, 15 bp, Homo sapiens
tccgcatgtagttat

SEQ ID NO: 1997430 - DNA, 15 bp, Homo sapiens
ccgcatgtagttatc

SEQ ID NO: 1997431 - DNA, 15 bp, Homo sapiens
cgcatgtagttatca

SEQ ID NO: 1997432 - DNA, 15 bp, Homo sapiens
gcatgtagttatcaa

SEQ ID NO: 1997433 - DNA, 15 bp, Homo sapiens
catgtagttatcaag

SEQ ID NO: 1997434 - DNA, 15 bp, Homo sapiens
atgtagttatcaaga

SEQ ID NO: 1997435 - DNA, 15 bp, Homo sapiens
tgtagttatcaagac

SEQ ID NO: 1997436 - DNA, 15 bp, Homo sapiens
gtagttatcaagact

SEQ ID NO: 1997437 - DNA, 15 bp, Homo sapiens
tagttatcaagactg

SEQ ID NO: 1997438 - DNA, 15 bp, Homo sapiens
agttatcaagactgt

SEQ ID NO: 1997439 - DNA, 15 bp, Homo sapiens
gttatcaagactgtt

SEQ ID NO: 1997440 - DNA, 15 bp, Homo sapiens
ttatcaagactgtta

SEQ ID NO: 1997441 - DNA, 15 bp, Homo sapiens
tatcaagactgttag

SEQ ID NO: 1997442 - DNA, 15 bp, Homo sapiens
atcaagactgttagg

SEQ ID NO: 1997443 - DNA, 15 bp, Homo sapiens
tcaagactgttaggt

SEQ ID NO: 1997444 - DNA, 15 bp, Homo sapiens
caagactgttaggtg

SEQ ID NO: 1997445 - DNA, 15 bp, Homo sapiens
aagactgttaggtga

SEQ ID NO: 1997446 - DNA, 15 bp, Homo sapiens
agactgttaggtgaa

SEQ ID NO: 1997447 - DNA, 15 bp, Homo sapiens
gactgttaggtgaaa

SEQ ID NO: 1997448 - DNA, 15 bp, Homo sapiens
actgttaggtgaaat

SEQ ID NO: 1997449 - DNA, 15 bp, Homo sapiens
ctgttaggtgaaata

SEQ ID NO: 1997450 - DNA, 15 bp, Homo sapiens
tgttaggtgaaatag

SEQ ID NO: 1997451 - DNA, 15 bp, Homo sapiens
gttaggtgaaatagt

SEQ ID NO: 1997452 - DNA, 15 bp, Homo sapiens
ttaggtgaaatagta

SEQ ID NO: 1997453 - DNA, 15 bp, Homo sapiens
taggtgaaatagtaa

SEQ ID NO: 1997454 - DNA, 15 bp, Homo sapiens
aggtgaaatagtaat

SEQ ID NO: 1997455 - DNA, 15 bp, Homo sapiens
ggtgaaatagtaatg

SEQ ID NO: 1997456 - DNA, 15 bp, Homo sapiens
gtgaaatagtaatgt

SEQ ID NO: 1997457 - DNA, 15 bp, Homo sapiens
tgaaatagtaatgtg

SEQ ID NO: 1997458 - DNA, 15 bp, Homo sapiens
gaaatagtaatgtgg

SEQ ID NO: 1997459 - DNA, 15 bp, Homo sapiens
aaatagtaatgtgga

SEQ ID NO: 1997460 - DNA, 15 bp, Homo sapiens
aatagtaatgtggaa

SEQ ID NO: 1997461 - DNA, 15 bp, Homo sapiens
atagtaatgtggaac

SEQ ID NO: 1997462 - DNA, 15 bp, Homo sapiens
tagtaatgtggaaca

SEQ ID NO: 1997463 - DNA, 15 bp, Homo sapiens
agtaatgtggaacag

SEQ ID NO: 1997464 - DNA, 15 bp, Homo sapiens
gtaatgtggaacagc

SEQ ID NO: 1997465 - DNA, 15 bp, Homo sapiens
taatgtggaacagca

SEQ ID NO: 1997466 - DNA, 15 bp, Homo sapiens
aatgtggaacagcat

SEQ ID NO: 1997467 - DNA, 15 bp, Homo sapiens
atgtggaacagcata

SEQ ID NO: 1997468 - DNA, 15 bp, Homo sapiens
tgtggaacagcatac

SEQ ID NO: 1997469 - DNA, 15 bp, Homo sapiens
gtggaacagcatacc

SEQ ID NO: 1997470 - DNA, 15 bp, Homo sapiens
tggaacagcatacct

SEQ ID NO: 1997471 - DNA, 15 bp, Homo sapiens
ggaacagcataccta

SEQ ID NO: 1997472 - DNA, 15 bp, Homo sapiens
gaacagcatacctac

SEQ ID NO: 1997473 - DNA, 15 bp, Homo sapiens
aacagcatacctaca

SEQ ID NO: 1997474 - DNA, 15 bp, Homo sapiens
acagcatacctacag

SEQ ID NO: 1997475 - DNA, 15 bp, Homo sapiens
cagcatacctacagg

SEQ ID NO: 1997476 - DNA, 15 bp, Homo sapiens
agcatacctacagga

SEQ ID NO: 1997477 - DNA, 15 bp, Homo sapiens
gcatacctacaggat

SEQ ID NO: 1997478 - DNA, 15 bp, Homo sapiens
catacctacaggata

SEQ ID NO: 1997479 - DNA, 15 bp, Homo sapiens
atacctacaggatag

SEQ ID NO: 1997480 - DNA, 15 bp, Homo sapiens
tacctacaggatagc

SEQ ID NO: 1997481 - DNA, 15 bp, Homo sapiens
acctacaggatagct

SEQ ID NO: 1997482 - DNA, 15 bp, Homo sapiens
cctacaggatagctt

SEQ ID NO: 1997483 - DNA, 15 bp, Homo sapiens
ctacaggatagctta

SEQ ID NO: 1997484 - DNA, 15 bp, Homo sapiens
tacaggatagcttat

SEQ ID NO: 1997485 - DNA, 15 bp, Homo sapiens
acaggatagcttatc

SEQ ID NO: 1997486 - DNA, 15 bp, Homo sapiens
caggatagcttatcc

SEQ ID NO: 1997487 - DNA, 15 bp, Homo sapiens
aggatagcttatcca

SEQ ID NO: 1997488 - DNA, 15 bp, Homo sapiens
ggatagcttatccat

SEQ ID NO: 1997489 - DNA, 15 bp, Homo sapiens
gatagcttatccatt

SEQ ID NO: 1997490 - DNA, 15 bp, Homo sapiens
atagcttatccattg

SEQ ID NO: 1997491 - DNA, 15 bp, Homo sapiens
tagcttatccattga

SEQ ID NO: 1997492 - DNA, 15 bp, Homo sapiens
agcttatccattgat

SEQ ID NO: 1997493 - DNA, 15 bp, Homo sapiens
gcttatccattgatt

SEQ ID NO: 1997494 - DNA, 15 bp, Homo sapiens
cttatccattgattg

SEQ ID NO: 1997495 - DNA, 15 bp, Homo sapiens
ttatccattgattgt

SEQ ID NO: 1997496 - DNA, 15 bp, Homo sapiens
tatccattgattgtg

SEQ ID NO: 1997497 - DNA, 15 bp, Homo sapiens
atccattgattgtgt

SEQ ID NO: 1997498 - DNA, 15 bp, Homo sapiens
tccattgattgtgtg

SEQ ID NO: 1997499 - DNA, 15 bp, Homo sapiens
ccattgattgtgtgt

SEQ ID NO: 1997500 - DNA, 15 bp, Homo sapiens
cattgattgtgtgtt

SEQ ID NO: 1997501 - DNA, 15 bp, Homo sapiens
attgattgtgtgtta

SEQ ID NO: 1997502 - DNA, 15 bp, Homo sapiens
ttgattgtgtgttaa

SEQ ID NO: 1997503 - DNA, 15 bp, Homo sapiens
tgattgtgtgttaat

SEQ ID NO: 1997504 - DNA, 15 bp, Homo sapiens
gattgtgtgttaatt

SEQ ID NO: 1997505 - DNA, 15 bp, Homo sapiens
attgtgtgttaattg

SEQ ID NO: 1997506 - DNA, 15 bp, Homo sapiens
ttgtgtgttaattgt

SEQ ID NO: 1997507 - DNA, 15 bp, Homo sapiens
tgtgtgttaattgta

SEQ ID NO: 1997508 - DNA, 15 bp, Homo sapiens
gtgtgttaattgtaa

SEQ ID NO: 1997509 - DNA, 15 bp, Homo sapiens
tgtgttaattgtaaa

SEQ ID NO: 1997510 - DNA, 15 bp, Homo sapiens
gtgttaattgtaaag

SEQ ID NO: 1997511 - DNA, 15 bp, Homo sapiens
tgttaattgtaaagt

SEQ ID NO: 1997512 - DNA, 15 bp, Homo sapiens
gttaattgtaaagta

SEQ ID NO: 1997513 - DNA, 15 bp, Homo sapiens
ttaattgtaaagtat

SEQ ID NO: 1997514 - DNA, 15 bp, Homo sapiens
taattgtaaagtata

SEQ ID NO: 1997515 - DNA, 15 bp, Homo sapiens
aattgtaaagtatat

SEQ ID NO: 1997516 - DNA, 15 bp, Homo sapiens
attgtaaagtatata

SEQ ID NO: 1997517 - DNA, 15 bp, Homo sapiens
ttgtaaagtatatat

SEQ ID NO: 1997518 - DNA, 15 bp, Homo sapiens
tgtaaagtatatatt

SEQ ID NO: 1997519 - DNA, 15 bp, Homo sapiens
gtaaagtatatattt

SEQ ID NO: 1997520 - DNA, 15 bp, Homo sapiens
taaagtatatattta

SEQ ID NO: 1997521 - DNA, 15 bp, Homo sapiens
aaagtatatatttac

SEQ ID NO: 1997522 - DNA, 15 bp, Homo sapiens
aagtatatatttaca

SEQ ID NO: 1997523 - DNA, 15 bp, Homo sapiens
agtatatatttacaa

SEQ ID NO: 1997524 - DNA, 15 bp, Homo sapiens
gtatatatttacaaa

SEQ ID NO: 1997525 - DNA, 15 bp, Homo sapiens
tatatatttacaaag

SEQ ID NO: 1997526 - DNA, 15 bp, Homo sapiens
atatatttacaaagt

SEQ ID NO: 1997527 - DNA, 15 bp, Homo sapiens
tatatttacaaagta

SEQ ID NO: 1997528 - DNA, 15 bp, Homo sapiens
atatttacaaagtag

SEQ ID NO: 1997529 - DNA, 15 bp, Homo sapiens
tatttacaaagtaga

SEQ ID NO: 1997530 - DNA, 15 bp, Homo sapiens
atttacaaagtagag

SEQ ID NO: 1997531 - DNA, 15 bp, Homo sapiens
tttacaaagtagaga

SEQ ID NO: 1997532 - DNA, 15 bp, Homo sapiens
ttacaaagtagagat

SEQ ID NO: 1997533 - DNA, 15 bp, Homo sapiens
tacaaagtagagatt

SEQ ID NO: 1997534 - DNA, 15 bp, Homo sapiens
acaaagtagagattt

SEQ ID NO: 1997535 - DNA, 15 bp, Homo sapiens
caaagtagagatttc

SEQ ID NO: 1997536 - DNA, 15 bp, Homo sapiens
aaagtagagatttca

SEQ ID NO: 1997537 - DNA, 15 bp, Homo sapiens
aagtagagatttcac

SEQ ID NO: 1997538 - DNA, 15 bp, Homo sapiens
agtagagatttcact

SEQ ID NO: 1997539 - DNA, 15 bp, Homo sapiens
gtagagatttcactg

SEQ ID NO: 1997540 - DNA, 15 bp, Homo sapiens
tagagatttcactgt

SEQ ID NO: 1997541 - DNA, 15 bp, Homo sapiens
agagatttcactgtt

SEQ ID NO: 1997542 - DNA, 15 bp, Homo sapiens
gagatttcactgtta

SEQ ID NO: 1997543 - DNA, 15 bp, Homo sapiens
agatttcactgttaa

SEQ ID NO: 1997544 - DNA, 15 bp, Homo sapiens
gatttcactgttaac

SEQ ID NO: 1997545 - DNA, 15 bp, Homo sapiens
atttcactgttaaca

SEQ ID NO: 1997546 - DNA, 15 bp, Homo sapiens
tttcactgttaacac

SEQ ID NO: 1997547 - DNA, 15 bp, Homo sapiens
ttcactgttaacacc

SEQ ID NO: 1997548 - DNA, 15 bp, Homo sapiens
tcactgttaacaccg

SEQ ID NO: 1997549 - DNA, 15 bp, Homo sapiens
cactgttaacaccga

SEQ ID NO: 1997550 - DNA, 15 bp, Homo sapiens
actgttaacaccgaa

SEQ ID NO: 1997551 - DNA, 15 bp, Homo sapiens
ctgttaacaccgaag

SEQ ID NO: 1997552 - DNA, 15 bp, Homo sapiens
tgttaacaccgaagt

SEQ ID NO: 1997553 - DNA, 15 bp, Homo sapiens
gttaacaccgaagtt

SEQ ID NO: 1997554 - DNA, 15 bp, Homo sapiens
ttaacaccgaagtta

SEQ ID NO: 1997555 - DNA, 15 bp, Homo sapiens
taacaccgaagttat

SEQ ID NO: 1997556 - DNA, 15 bp, Homo sapiens
aacaccgaagttatc

SEQ ID NO: 1997557 - DNA, 15 bp, Homo sapiens
acaccgaagttatca

SEQ ID NO: 1997558 - DNA, 15 bp, Homo sapiens
caccgaagttatcaa

SEQ ID NO: 1997559 - DNA, 15 bp, Homo sapiens
accgaagttatcaaa

SEQ ID NO: 1997560 - DNA, 15 bp, Homo sapiens
ccgaagttatcaaac

SEQ ID NO: 1997561 - DNA, 15 bp, Homo sapiens
cgaagttatcaaact

SEQ ID NO: 1997562 - DNA, 15 bp, Homo sapiens
gaagttatcaaactt

SEQ ID NO: 1997563 - DNA, 15 bp, Homo sapiens
aagttatcaaacttg

SEQ ID NO: 1997564 - DNA, 15 bp, Homo sapiens
agttatcaaacttgg

SEQ ID NO: 1997565 - DNA, 15 bp, Homo sapiens
gttatcaaacttggt

SEQ ID NO: 1997566 - DNA, 15 bp, Homo sapiens
ttatcaaacttggtg

SEQ ID NO: 1997567 - DNA, 15 bp, Homo sapiens
tatcaaacttggtgt

SEQ ID NO: 1997568 - DNA, 15 bp, Homo sapiens
atcaaacttggtgtc

SEQ ID NO: 1997569 - DNA, 15 bp, Homo sapiens
tcaaacttggtgtca

SEQ ID NO: 1997570 - DNA, 15 bp, Homo sapiens
caaacttggtgtcaa

SEQ ID NO: 1997571 - DNA, 15 bp, Homo sapiens
aaacttggtgtcaat

SEQ ID NO: 1997572 - DNA, 15 bp, Homo sapiens
aacttggtgtcaata

SEQ ID NO: 1997573 - DNA, 15 bp, Homo sapiens
acttggtgtcaataa

SEQ ID NO: 1997574 - DNA, 15 bp, Homo sapiens
cttggtgtcaataac

SEQ ID NO: 1997575 - DNA, 15 bp, Homo sapiens
ttggtgtcaataaca

SEQ ID NO: 1997576 - DNA, 15 bp, Homo sapiens
tggtgtcaataacag

SEQ ID NO: 1997577 - DNA, 15 bp, Homo sapiens
ggtgtcaataacagg

SEQ ID NO: 1997578 - DNA, 15 bp, Homo sapiens
gtgtcaataacagga

SEQ ID NO: 1997579 - DNA, 15 bp, Homo sapiens
tgtcaataacaggac

SEQ ID NO: 1997580 - DNA, 15 bp, Homo sapiens
gtcaataacaggacc

SEQ ID NO: 1997581 - DNA, 15 bp, Homo sapiens
tcaataacaggacca

SEQ ID NO: 1997582 - DNA, 15 bp, Homo sapiens
caataacaggaccac

SEQ ID NO: 1997583 - DNA, 15 bp, Homo sapiens
aataacaggaccacc

SEQ ID NO: 1997584 - DNA, 15 bp, Homo sapiens
ataacaggaccacct

SEQ ID NO: 1997585 - DNA, 15 bp, Homo sapiens
taacaggaccacctg

SEQ ID NO: 1997586 - DNA, 15 bp, Homo sapiens
aacaggaccacctgg

SEQ ID NO: 1997587 - DNA, 15 bp, Homo sapiens
acaggaccacctggc

SEQ ID NO: 1997588 - DNA, 15 bp, Homo sapiens
caggaccacctggcc

SEQ ID NO: 1997589 - DNA, 15 bp, Homo sapiens
aggaccacctggcct

SEQ ID NO: 1997590 - DNA, 15 bp, Homo sapiens
ggaccacctggcctt

SEQ ID NO: 1997591 - DNA, 15 bp, Homo sapiens
gaccacctggcctta

SEQ ID NO: 1997592 - DNA, 15 bp, Homo sapiens
accacctggccttat

SEQ ID NO: 1997593 - DNA, 15 bp, Homo sapiens
ccacctggccttatg

SEQ ID NO: 1997594 - DNA, 15 bp, Homo sapiens
cacctggccttatgt

SEQ ID NO: 1997595 - DNA, 15 bp, Homo sapiens
acctggccttatgtt

SEQ ID NO: 1997596 - DNA, 15 bp, Homo sapiens
cctggccttatgttc

SEQ ID NO: 1997597 - DNA, 15 bp, Homo sapiens
ctggccttatgttct

SEQ ID NO: 1997598 - DNA, 15 bp, Homo sapiens
tggccttatgttctc

SEQ ID NO: 1997599 - DNA, 15 bp, Homo sapiens
ggccttatgttctca

SEQ ID NO: 1997600 - DNA, 15 bp, Homo sapiens
gccttatgttctcat

SEQ ID NO: 1997601 - DNA, 15 bp, Homo sapiens
ccttatgttctcatg

SEQ ID NO: 1997602 - DNA, 15 bp, Homo sapiens
cttatgttctcatgg

SEQ ID NO: 1997603 - DNA, 15 bp, Homo sapiens
ttatgttctcatggt

SEQ ID NO: 1997604 - DNA, 15 bp, Homo sapiens
tatgttctcatggtg

SEQ ID NO: 1997605 - DNA, 15 bp, Homo sapiens
atgttctcatggtgt

SEQ ID NO: 1997606 - DNA, 15 bp, Homo sapiens
tgttctcatggtgtg

SEQ ID NO: 1997607 - DNA, 15 bp, Homo sapiens
gttctcatggtgtga

SEQ ID NO: 1997608 - DNA, 15 bp, Homo sapiens
ttctcatggtgtgat

SEQ ID NO: 1997609 - DNA, 15 bp, Homo sapiens
tctcatggtgtgatg

SEQ ID NO: 1997610 - DNA, 15 bp, Homo sapiens
ctcatggtgtgatgt

SEQ ID NO: 1997611 - DNA, 15 bp, Homo sapiens
tcatggtgtgatgta

SEQ ID NO: 1997612 - DNA, 15 bp, Homo sapiens
catggtgtgatgtaa

SEQ ID NO: 1997613 - DNA, 15 bp, Homo sapiens
atggtgtgatgtaat

SEQ ID NO: 1997614 - DNA, 15 bp, Homo sapiens
tggtgtgatgtaata

SEQ ID NO: 1997615 - DNA, 15 bp, Homo sapiens
ggtgtgatgtaatat

SEQ ID NO: 1997616 - DNA, 15 bp, Homo sapiens
gtgtgatgtaatata

SEQ ID NO: 1997617 - DNA, 15 bp, Homo sapiens
tgtgatgtaatataa

SEQ ID NO: 1997618 - DNA, 15 bp, Homo sapiens
gtgatgtaatataac

SEQ ID NO: 1997619 - DNA, 15 bp, Homo sapiens
tgatgtaatataacc

SEQ ID NO: 1997620 - DNA, 15 bp, Homo sapiens
gatgtaatataacct

SEQ ID NO: 1997621 - DNA, 15 bp, Homo sapiens
atgtaatataaccta

SEQ ID NO: 1997622 - DNA, 15 bp, Homo sapiens
tgtaatataacctat

SEQ ID NO: 1997623 - DNA, 15 bp, Homo sapiens
gtaatataacctata

SEQ ID NO: 1997624 - DNA, 15 bp, Homo sapiens
taatataacctatag

SEQ ID NO: 1997625 - DNA, 15 bp, Homo sapiens
aatataacctatagt

SEQ ID NO: 1997626 - DNA, 15 bp, Homo sapiens
atataacctatagtg

SEQ ID NO: 1997627 - DNA, 15 bp, Homo sapiens
tataacctatagtga

SEQ ID NO: 1997628 - DNA, 15 bp, Homo sapiens
ataacctatagtgaa

SEQ ID NO: 1997629 - DNA, 15 bp, Homo sapiens
taacctatagtgaat

SEQ ID NO: 1997630 - DNA, 15 bp, Homo sapiens
aacctatagtgaatc

SEQ ID NO: 1997631 - DNA, 15 bp, Homo sapiens
acctatagtgaatcc

SEQ ID NO: 1997632 - DNA, 15 bp, Homo sapiens
cctatagtgaatccc

SEQ ID NO: 1997633 - DNA, 15 bp, Homo sapiens
ctatagtgaatcccc

SEQ ID NO: 1997634 - DNA, 15 bp, Homo sapiens
tatagtgaatcccct

SEQ ID NO: 1997635 - DNA, 15 bp, Homo sapiens
atagtgaatccccta

SEQ ID NO: 1997636 - DNA, 15 bp, Homo sapiens
tagtgaatcccctaa

SEQ ID NO: 1997637 - DNA, 15 bp, Homo sapiens
agtgaatcccctaaa

SEQ ID NO: 1997638 - DNA, 15 bp, Homo sapiens
gtgaatcccctaaac

SEQ ID NO: 1997639 - DNA, 15 bp, Homo sapiens
tgaatcccctaaact

SEQ ID NO: 1997640 - DNA, 15 bp, Homo sapiens
gaatcccctaaactg

SEQ ID NO: 1997641 - DNA, 15 bp, Homo sapiens
aatcccctaaactgt

SEQ ID NO: 1997642 - DNA, 15 bp, Homo sapiens
atcccctaaactgtt

SEQ ID NO: 1997643 - DNA, 15 bp, Homo sapiens
tcccctaaactgttt

SEQ ID NO: 1997644 - DNA, 15 bp, Homo sapiens
cccctaaactgttta

SEQ ID NO: 1997645 - DNA, 15 bp, Homo sapiens
ccctaaactgtttaa

SEQ ID NO: 1997646 - DNA, 15 bp, Homo sapiens
cctaaactgtttaac

SEQ ID NO: 1997647 - DNA, 15 bp, Homo sapiens
ctaaactgtttaacc

SEQ ID NO: 1997648 - DNA, 15 bp, Homo sapiens
taaactgtttaacct

SEQ ID NO: 1997649 - DNA, 15 bp, Homo sapiens
aaactgtttaacctc

SEQ ID NO: 1997650 - DNA, 15 bp, Homo sapiens
aactgtttaacctca

SEQ ID NO: 1997651 - DNA, 15 bp, Homo sapiens
actgtttaacctcaa

SEQ ID NO: 1997652 - DNA, 15 bp, Homo sapiens
ctgtttaacctcaat

SEQ ID NO: 1997653 - DNA, 15 bp, Homo sapiens
tgtttaacctcaatc

SEQ ID NO: 1997654 - DNA, 15 bp, Homo sapiens
gtttaacctcaatct

SEQ ID NO: 1997655 - DNA, 15 bp, Homo sapiens
tttaacctcaatcta

SEQ ID NO: 1997656 - DNA, 15 bp, Homo sapiens
ttaacctcaatctaa

SEQ ID NO: 1997657 - DNA, 15 bp, Homo sapiens
taacctcaatctaat

SEQ ID NO: 1997658 - DNA, 15 bp, Homo sapiens
aacctcaatctaatc

SEQ ID NO: 1997659 - DNA, 15 bp, Homo sapiens
acctcaatctaatca

SEQ ID NO: 1997660 - DNA, 15 bp, Homo sapiens
cctcaatctaatcag

SEQ ID NO: 1997661 - DNA, 15 bp, Homo sapiens
ctcaatctaatcaga

SEQ ID NO: 1997662 - DNA, 15 bp, Homo sapiens
tcaatctaatcagac

SEQ ID NO: 1997663 - DNA, 15 bp, Homo sapiens
caatctaatcagacc

SEQ ID NO: 1997664 - DNA, 15 bp, Homo sapiens
aatctaatcagacca

SEQ ID NO: 1997665 - DNA, 15 bp, Homo sapiens
atctaatcagaccat

SEQ ID NO: 1997666 - DNA, 15 bp, Homo sapiens
tctaatcagaccatt

SEQ ID NO: 1997667 - DNA, 15 bp, Homo sapiens
ctaatcagaccatta

SEQ ID NO: 1997668 - DNA, 15 bp, Homo sapiens
taatcagaccattag

SEQ ID NO: 1997669 - DNA, 15 bp, Homo sapiens
aatcagaccattagg

SEQ ID NO: 1997670 - DNA, 15 bp, Homo sapiens
atcagaccattaggt

SEQ ID NO: 1997671 - DNA, 15 bp, Homo sapiens
tcagaccattaggtt

SEQ ID NO: 1997672 - DNA, 15 bp, Homo sapiens
cagaccattaggttt

SEQ ID NO: 1997673 - DNA, 15 bp, Homo sapiens
agaccattaggttta

SEQ ID NO: 1997674 - DNA, 15 bp, Homo sapiens
gaccattaggtttaa

SEQ ID NO: 1997675 - DNA, 15 bp, Homo sapiens
accattaggtttaaa

SEQ ID NO: 1997676 - DNA, 15 bp, Homo sapiens
ccattaggtttaaat

SEQ ID NO: 1997677 - DNA, 15 bp, Homo sapiens
cattaggtttaaatt

SEQ ID NO: 1997678 - DNA, 15 bp, Homo sapiens
attaggtttaaattt

SEQ ID NO: 1997679 - DNA, 15 bp, Homo sapiens
ttaggtttaaatttt

SEQ ID NO: 1997680 - DNA, 15 bp, Homo sapiens
taggtttaaatttta

SEQ ID NO: 1997681 - DNA, 15 bp, Homo sapiens
aggtttaaattttag

SEQ ID NO: 1997682 - DNA, 15 bp, Homo sapiens
ggtttaaattttagc

SEQ ID NO: 1997683 - DNA, 15 bp, Homo sapiens
gtttaaattttagct

SEQ ID NO: 1997684 - DNA, 15 bp, Homo sapiens
tttaaattttagctt

SEQ ID NO: 1997685 - DNA, 15 bp, Homo sapiens
ttaaattttagctta

SEQ ID NO: 1997686 - DNA, 15 bp, Homo sapiens
taaattttagcttac

SEQ ID NO: 1997687 - DNA, 15 bp, Homo sapiens
aaattttagcttaca

SEQ ID NO: 1997688 - DNA, 15 bp, Homo sapiens
aattttagcttacag

SEQ ID NO: 1997689 - DNA, 15 bp, Homo sapiens
attttagcttacaga

SEQ ID NO: 1997690 - DNA, 15 bp, Homo sapiens
ttttagcttacagaa

SEQ ID NO: 1997691 - DNA, 15 bp, Homo sapiens
tttagcttacagaaa

SEQ ID NO: 1997692 - DNA, 15 bp, Homo sapiens
ttagcttacagaaaa

SEQ ID NO: 1997693 - DNA, 15 bp, Homo sapiens
tagcttacagaaaat

SEQ ID NO: 1997694 - DNA, 15 bp, Homo sapiens
agcttacagaaaata

SEQ ID NO: 1997695 - DNA, 15 bp, Homo sapiens
gcttacagaaaatat

SEQ ID NO: 1997696 - DNA, 15 bp, Homo sapiens
cttacagaaaatata

SEQ ID NO: 1997697 - DNA, 15 bp, Homo sapiens
ttacagaaaatatac

SEQ ID NO: 1997698 - DNA, 15 bp, Homo sapiens
tacagaaaatataca

SEQ ID NO: 1997699 - DNA, 15 bp, Homo sapiens
cagaaaatatacagg

SEQ ID NO: 1997700 - DNA, 15 bp, Homo sapiens
agaaaatatacaggc

SEQ ID NO: 1997701 - DNA, 15 bp, Homo sapiens
gaaaatatacaggcc

SEQ ID NO: 1997702 - DNA, 15 bp, Homo sapiens
aaaatatacaggccg

SEQ ID NO: 1997703 - DNA, 15 bp, Homo sapiens
aaatatacaggccgg

SEQ ID NO: 1997704 - DNA, 15 bp, Homo sapiens
aatatacaggccggg

SEQ ID NO: 1997705 - DNA, 15 bp, Homo sapiens
atatacaggccgggc

SEQ ID NO: 1997706 - DNA, 15 bp, Homo sapiens
tatacaggccgggca

SEQ ID NO: 1997707 - DNA, 15 bp, Homo sapiens
atacaggccgggcac

SEQ ID NO: 1997708 - DNA, 15 bp, Homo sapiens
tacaggccgggcacc

SEQ ID NO: 1997709 - DNA, 15 bp, Homo sapiens
acaggccgggcacca

SEQ ID NO: 1997710 - DNA, 15 bp, Homo sapiens
caggccgggcaccat

SEQ ID NO: 1997711 - DNA, 15 bp, Homo sapiens
aggccgggcaccatg

SEQ ID NO: 1997712 - DNA, 15 bp, Homo sapiens
ggccgggcaccatgg

SEQ ID NO: 1997713 - DNA, 15 bp, Homo sapiens
gccgggcaccatggc

SEQ ID NO: 1997714 - DNA, 15 bp, Homo sapiens
ccgggcaccatggct

SEQ ID NO: 1997715 - DNA, 15 bp, Homo sapiens
cgggcaccatggctc

SEQ ID NO: 1997716 - DNA, 15 bp, Homo sapiens
gggcaccatggctca

SEQ ID NO: 1997717 - DNA, 15 bp, Homo sapiens
ggcaccatggctcac

SEQ ID NO: 1997718 - DNA, 15 bp, Homo sapiens
gcaccatggctcacg

SEQ ID NO: 1997719 - DNA, 15 bp, Homo sapiens
caccatggctcacgc

SEQ ID NO: 1997720 - DNA, 15 bp, Homo sapiens
atggctcacgcctgg

SEQ ID NO: 1997721 - DNA, 15 bp, Homo sapiens
tggctcacgcctgga

SEQ ID NO: 1997722 - DNA, 15 bp, Homo sapiens
ggctcacgcctggaa

SEQ ID NO: 1997723 - DNA, 15 bp, Homo sapiens
gctcacgcctggaat

SEQ ID NO: 1997724 - DNA, 15 bp, Homo sapiens
ctcacgcctggaatc

SEQ ID NO: 1997725 - DNA, 15 bp, Homo sapiens
tcacgcctggaatcc

SEQ ID NO: 1997726 - DNA, 15 bp, Homo sapiens
cacgcctggaatccc

SEQ ID NO: 1997727 - DNA, 15 bp, Homo sapiens
acgcctggaatccca

SEQ ID NO: 1997728 - DNA, 15 bp, Homo sapiens
cgcctggaatcccag

SEQ ID NO: 1997729 - DNA, 15 bp, Homo sapiens
ctttgggagatcgag

SEQ ID NO: 1997730 - DNA, 15 bp, Homo sapiens
tttgggagatcgaga

SEQ ID NO: 1997731 - DNA, 15 bp, Homo sapiens
ttgggagatcgagac

SEQ ID NO: 1997732 - DNA, 15 bp, Homo sapiens
tgggagatcgagaca

SEQ ID NO: 1997733 - DNA, 15 bp, Homo sapiens
gggagatcgagacag

SEQ ID NO: 1997734 - DNA, 15 bp, Homo sapiens
ggagatcgagacagg

SEQ ID NO: 1997735 - DNA, 15 bp, Homo sapiens
gagatcgagacaggc

SEQ ID NO: 1997736 - DNA, 15 bp, Homo sapiens
agatcgagacaggcg

SEQ ID NO: 1997737 - DNA, 15 bp, Homo sapiens
gatcgagacaggcgg

SEQ ID NO: 1997738 - DNA, 15 bp, Homo sapiens
atcgagacaggcgga

SEQ ID NO: 1997739 - DNA, 15 bp, Homo sapiens
tcgagacaggcggag

SEQ ID NO: 1997740 - DNA, 15 bp, Homo sapiens
cgagacaggcggaga

SEQ ID NO: 1997741 - DNA, 15 bp, Homo sapiens
gagacaggcggagag

SEQ ID NO: 1997742 - DNA, 15 bp, Homo sapiens
agacaggcggagagc

SEQ ID NO: 1997743 - DNA, 15 bp, Homo sapiens
gacaggcggagagct

SEQ ID NO: 1997744 - DNA, 15 bp, Homo sapiens
acaggcggagagctt

SEQ ID NO: 1997745 - DNA, 15 bp, Homo sapiens
caggcggagagcttg

SEQ ID NO: 1997746 - DNA, 15 bp, Homo sapiens
aggcggagagcttga

SEQ ID NO: 1997747 - DNA, 15 bp, Homo sapiens
ggcggagagcttgag

SEQ ID NO: 1997748 - DNA, 15 bp, Homo sapiens
gcggagagcttgagg

SEQ ID NO: 1997749 - DNA, 15 bp, Homo sapiens
cggagagcttgaggt

SEQ ID NO: 1997750 - DNA, 15 bp, Homo sapiens
ggagagcttgaggtc

SEQ ID NO: 1997751 - DNA, 15 bp, Homo sapiens
gagagcttgaggtca

SEQ ID NO: 1997752 - DNA, 15 bp, Homo sapiens
agagcttgaggtcag

SEQ ID NO: 1997753 - DNA, 15 bp, Homo sapiens
gagcttgaggtcagg

SEQ ID NO: 1997754 - DNA, 15 bp, Homo sapiens
agcttgaggtcagga

SEQ ID NO: 1997755 - DNA, 15 bp, Homo sapiens
gcttgaggtcaggaa

SEQ ID NO: 1997756 - DNA, 15 bp, Homo sapiens
cttgaggtcaggaat

SEQ ID NO: 1997757 - DNA, 15 bp, Homo sapiens
ttgaggtcaggaatc

SEQ ID NO: 1997758 - DNA, 15 bp, Homo sapiens
tgaggtcaggaatcc

SEQ ID NO: 1997759 - DNA, 15 bp, Homo sapiens
gaggtcaggaatcca

SEQ ID NO: 1997760 - DNA, 15 bp, Homo sapiens
aggtcaggaatccaa

SEQ ID NO: 1997761 - DNA, 15 bp, Homo sapiens
ggtcaggaatccaag

SEQ ID NO: 1997762 - DNA, 15 bp, Homo sapiens
gtcaggaatccaaga

SEQ ID NO: 1997763 - DNA, 15 bp, Homo sapiens
tcaggaatccaagac

SEQ ID NO: 1997764 - DNA, 15 bp, Homo sapiens
caggaatccaagacc

SEQ ID NO: 1997765 - DNA, 15 bp, Homo sapiens
aggaatccaagacca

SEQ ID NO: 1997766 - DNA, 15 bp, Homo sapiens
ggaatccaagaccag

SEQ ID NO: 1997767 - DNA, 15 bp, Homo sapiens
gaatccaagaccagc

SEQ ID NO: 1997768 - DNA, 15 bp, Homo sapiens
aatccaagaccagcc

SEQ ID NO: 1997769 - DNA, 15 bp, Homo sapiens
atccaagaccagcct

SEQ ID NO: 1997770 - DNA, 15 bp, Homo sapiens
tccaagaccagcctg

SEQ ID NO: 1997771 - DNA, 15 bp, Homo sapiens
ccaagaccagcctgg

SEQ ID NO: 1997772 - DNA, 15 bp, Homo sapiens
tggcaaaaccccata

SEQ ID NO: 1997773 - DNA, 15 bp, Homo sapiens
ggcaaaaccccatat

SEQ ID NO: 1997774 - DNA, 15 bp, Homo sapiens
gcaaaaccccatatc

SEQ ID NO: 1997775 - DNA, 15 bp, Homo sapiens
caaaaccccatatct

SEQ ID NO: 1997776 - DNA, 15 bp, Homo sapiens
aaaaccccatatctg

SEQ ID NO: 1997777 - DNA, 15 bp, Homo sapiens
aaaccccatatctgc

SEQ ID NO: 1997778 - DNA, 15 bp, Homo sapiens
aaccccatatctgct

SEQ ID NO: 1997779 - DNA, 15 bp, Homo sapiens
accccatatctgcta

SEQ ID NO: 1997780 - DNA, 15 bp, Homo sapiens
ccccatatctgctaa

SEQ ID NO: 1997781 - DNA, 15 bp, Homo sapiens
cccatatctgctaaa

SEQ ID NO: 1997782 - DNA, 15 bp, Homo sapiens
ccatatctgctaaaa

SEQ ID NO: 1997783 - DNA, 15 bp, Homo sapiens
catatctgctaaaaa

SEQ ID NO: 1997784 - DNA, 15 bp, Homo sapiens
atatctgctaaaaat

SEQ ID NO: 1997785 - DNA, 15 bp, Homo sapiens
tatctgctaaaaata

SEQ ID NO: 1997786 - DNA, 15 bp, Homo sapiens
atctgctaaaaatac

SEQ ID NO: 1997787 - DNA, 15 bp, Homo sapiens
tctgctaaaaataca

SEQ ID NO: 1997788 - DNA, 15 bp, Homo sapiens
ctgctaaaaatacaa

SEQ ID NO: 1997789 - DNA, 15 bp, Homo sapiens
tgctaaaaatacaaa

SEQ ID NO: 1997790 - DNA, 15 bp, Homo sapiens
gctaaaaatacaaaa

SEQ ID NO: 1997791 - DNA, 15 bp, Homo sapiens
aaaaattagccagat

SEQ ID NO: 1997792 - DNA, 15 bp, Homo sapiens
aattagccagatgtg

SEQ ID NO: 1997793 - DNA, 15 bp, Homo sapiens
attagccagatgtgg

SEQ ID NO: 1997794 - DNA, 15 bp, Homo sapiens
ttagccagatgtggt

SEQ ID NO: 1997795 - DNA, 15 bp, Homo sapiens
gccagatgtggtggc

SEQ ID NO: 1997796 - DNA, 15 bp, Homo sapiens
ccagatgtggtggca

SEQ ID NO: 1997797 - DNA, 15 bp, Homo sapiens
cagatgtggtggcac

SEQ ID NO: 1997798 - DNA, 15 bp, Homo sapiens
agatgtggtggcaca

SEQ ID NO: 1997799 - DNA, 15 bp, Homo sapiens
gatgtggtggcacat

SEQ ID NO: 1997800 - DNA, 15 bp, Homo sapiens
atgtggtggcacatg

SEQ ID NO: 1997801 - DNA, 15 bp, Homo sapiens
tgtggtggcacatgt

SEQ ID NO: 1997802 - DNA, 15 bp, Homo sapiens
gtggtggcacatgtc

SEQ ID NO: 1997803 - DNA, 15 bp, Homo sapiens
tggtggcacatgtct

SEQ ID NO: 1997804 - DNA, 15 bp, Homo sapiens
ggtggcacatgtctg

SEQ ID NO: 1997805 - DNA, 15 bp, Homo sapiens
gtggcacatgtctgt

SEQ ID NO: 1997806 - DNA, 15 bp, Homo sapiens
tggcacatgtctgta

SEQ ID NO: 1997807 - DNA, 15 bp, Homo sapiens
ggcacatgtctgtag

SEQ ID NO: 1997808 - DNA, 15 bp, Homo sapiens
gcacatgtctgtagt

SEQ ID NO: 1997809 - DNA, 15 bp, Homo sapiens
cacatgtctgtagtc

SEQ ID NO: 1997810 - DNA, 15 bp, Homo sapiens
acatgtctgtagtcc

SEQ ID NO: 1997811 - DNA, 15 bp, Homo sapiens
catgtctgtagtccc

SEQ ID NO: 1997812 - DNA, 15 bp, Homo sapiens
atgtctgtagtccca

SEQ ID NO: 1997813 - DNA, 15 bp, Homo sapiens
tgtctgtagtcccag

SEQ ID NO: 1997814 - DNA, 15 bp, Homo sapiens
tgaggcaggagaacc

SEQ ID NO: 1997815 - DNA, 15 bp, Homo sapiens
gaggcaggagaacca

SEQ ID NO: 1997816 - DNA, 15 bp, Homo sapiens
aggcaggagaaccac

SEQ ID NO: 1997817 - DNA, 15 bp, Homo sapiens
ggcaggagaaccact

SEQ ID NO: 1997818 - DNA, 15 bp, Homo sapiens
gcaggagaaccactt

SEQ ID NO: 1997819 - DNA, 15 bp, Homo sapiens
caggagaaccacttg

SEQ ID NO: 1997820 - DNA, 15 bp, Homo sapiens
aggagaaccacttga

SEQ ID NO: 1997821 - DNA, 15 bp, Homo sapiens
ggagaaccacttgaa

SEQ ID NO: 1997822 - DNA, 15 bp, Homo sapiens
gagaaccacttgaaa

SEQ ID NO: 1997823 - DNA, 15 bp, Homo sapiens
agaaccacttgaaac

SEQ ID NO: 1997824 - DNA, 15 bp, Homo sapiens
gaaccacttgaaacc

SEQ ID NO: 1997825 - DNA, 15 bp, Homo sapiens
aaccacttgaaacca

SEQ ID NO: 1997826 - DNA, 15 bp, Homo sapiens
accacttgaaaccag

SEQ ID NO: 1997827 - DNA, 15 bp, Homo sapiens
ccacttgaaaccagg

SEQ ID NO: 1997828 - DNA, 15 bp, Homo sapiens
cacttgaaaccagga

SEQ ID NO: 1997829 - DNA, 15 bp, Homo sapiens
acttgaaaccaggag

SEQ ID NO: 1997830 - DNA, 15 bp, Homo sapiens
cttgaaaccaggagg

SEQ ID NO: 1997831 - DNA, 15 bp, Homo sapiens
ttgaaaccaggaggc

SEQ ID NO: 1997832 - DNA, 15 bp, Homo sapiens
tgaaaccaggaggca

SEQ ID NO: 1997833 - DNA, 15 bp, Homo sapiens
gaaaccaggaggcag

SEQ ID NO: 1997834 - DNA, 15 bp, Homo sapiens
aaaccaggaggcaga

SEQ ID NO: 1997835 - DNA, 15 bp, Homo sapiens
ggaggcagaggttgg

SEQ ID NO: 1997836 - DNA, 15 bp, Homo sapiens
gaggcagaggttgga

SEQ ID NO: 1997837 - DNA, 15 bp, Homo sapiens
aggcagaggttggag

SEQ ID NO: 1997838 - DNA, 15 bp, Homo sapiens
ggcagaggttggagt

SEQ ID NO: 1997839 - DNA, 15 bp, Homo sapiens
gcagaggttggagtg

SEQ ID NO: 1997840 - DNA, 15 bp, Homo sapiens
cagaggttggagtga

SEQ ID NO: 1997841 - DNA, 15 bp, Homo sapiens
agaggttggagtgag

SEQ ID NO: 1997842 - DNA, 15 bp, Homo sapiens
gaggttggagtgagc

SEQ ID NO: 1997843 - DNA, 15 bp, Homo sapiens
aggttggagtgagcc

SEQ ID NO: 1997844 - DNA, 15 bp, Homo sapiens
ggttggagtgagcca

SEQ ID NO: 1997845 - DNA, 15 bp, Homo sapiens
gttggagtgagccaa

SEQ ID NO: 1997846 - DNA, 15 bp, Homo sapiens
ttggagtgagccaag

SEQ ID NO: 1997847 - DNA, 15 bp, Homo sapiens
tggagtgagccaaga

SEQ ID NO: 1997848 - DNA, 15 bp, Homo sapiens
ggagtgagccaagat

SEQ ID NO: 1997849 - DNA, 15 bp, Homo sapiens
gagtgagccaagatt

SEQ ID NO: 1997850 - DNA, 15 bp, Homo sapiens
ctgggccacagagcg

SEQ ID NO: 1997851 - DNA, 15 bp, Homo sapiens
tgggccacagagcga

SEQ ID NO: 1997852 - DNA, 15 bp, Homo sapiens
gggccacagagcgag

SEQ ID NO: 1997853 - DNA, 15 bp, Homo sapiens
ggccacagagcgaga

SEQ ID NO: 1997854 - DNA, 15 bp, Homo sapiens
gccacagagcgagac

SEQ ID NO: 1997855 - DNA, 15 bp, Homo sapiens
ccacagagcgagact

SEQ ID NO: 1997856 - DNA, 15 bp, Homo sapiens
cacagagcgagactc

SEQ ID NO: 1997857 - DNA, 15 bp, Homo sapiens
aaaaaaaaaaagaac

SEQ ID NO: 1997858 - DNA, 15 bp, Homo sapiens
aaaaaaaaaagaacg

SEQ ID NO: 1997859 - DNA, 15 bp, Homo sapiens
aaaaaaaaagaacga

SEQ ID NO: 1997860 - DNA, 15 bp, Homo sapiens
aaaaaaaagaacgaa

SEQ ID NO: 1997861 - DNA, 15 bp, Homo sapiens
aaaaaaagaacgaaa

SEQ ID NO: 1997862 - DNA, 15 bp, Homo sapiens
aaaaaagaacgaaaa

SEQ ID NO: 1997863 - DNA, 15 bp, Homo sapiens
aaaaagaacgaaaat

SEQ ID NO: 1997864 - DNA, 15 bp, Homo sapiens
aaaagaacgaaaata

SEQ ID NO: 1997865 - DNA, 15 bp, Homo sapiens
aaagaacgaaaatat

SEQ ID NO: 1997866 - DNA, 15 bp, Homo sapiens
aagaacgaaaatata

SEQ ID NO: 1997867 - DNA, 15 bp, Homo sapiens
agaacgaaaatatac

SEQ ID NO: 1997868 - DNA, 15 bp, Homo sapiens
gaacgaaaatataca

SEQ ID NO: 1997869 - DNA, 15 bp, Homo sapiens
aacgaaaatatacaa

SEQ ID NO: 1997870 - DNA, 15 bp, Homo sapiens
acgaaaatatacaat

SEQ ID NO: 1997871 - DNA, 15 bp, Homo sapiens
cgaaaatatacaata

SEQ ID NO: 1997872 - DNA, 15 bp, Homo sapiens
gaaaatatacaatac

SEQ ID NO: 1997873 - DNA, 15 bp, Homo sapiens
aaaatatacaataca

SEQ ID NO: 1997874 - DNA, 15 bp, Homo sapiens
aaatatacaatacag

SEQ ID NO: 1997875 - DNA, 15 bp, Homo sapiens
aatatacaatacagt

SEQ ID NO: 1997876 - DNA, 15 bp, Homo sapiens
atatacaatacagta

SEQ ID NO: 1997877 - DNA, 15 bp, Homo sapiens
tatacaatacagtaa

SEQ ID NO: 1997878 - DNA, 15 bp, Homo sapiens
atacaatacagtaac

SEQ ID NO: 1997879 - DNA, 15 bp, Homo sapiens
tacaatacagtaact

SEQ ID NO: 1997880 - DNA, 15 bp, Homo sapiens
acaatacagtaacta

SEQ ID NO: 1997881 - DNA, 15 bp, Homo sapiens
caatacagtaactag

SEQ ID NO: 1997882 - DNA, 15 bp, Homo sapiens
aatacagtaactaga

SEQ ID NO: 1997883 - DNA, 15 bp, Homo sapiens
atacagtaactagaa

SEQ ID NO: 1997884 - DNA, 15 bp, Homo sapiens
tacagtaactagaag

SEQ ID NO: 1997885 - DNA, 15 bp, Homo sapiens
acagtaactagaaga

SEQ ID NO: 1997886 - DNA, 15 bp, Homo sapiens
cagtaactagaagag

SEQ ID NO: 1997887 - DNA, 15 bp, Homo sapiens
agtaactagaagagc

SEQ ID NO: 1997888 - DNA, 15 bp, Homo sapiens
gtaactagaagagca

SEQ ID NO: 1997889 - DNA, 15 bp, Homo sapiens
taactagaagagcaa

SEQ ID NO: 1997890 - DNA, 15 bp, Homo sapiens
aactagaagagcaaa

SEQ ID NO: 1997891 - DNA, 15 bp, Homo sapiens
actagaagagcaaat

SEQ ID NO: 1997892 - DNA, 15 bp, Homo sapiens
ctagaagagcaaatc

SEQ ID NO: 1997893 - DNA, 15 bp, Homo sapiens
tagaagagcaaatca

SEQ ID NO: 1997894 - DNA, 15 bp, Homo sapiens
agaagagcaaatcaa

SEQ ID NO: 1997895 - DNA, 15 bp, Homo sapiens
gaagagcaaatcaac

SEQ ID NO: 1997896 - DNA, 15 bp, Homo sapiens
aagagcaaatcaacc

SEQ ID NO: 1997897 - DNA, 15 bp, Homo sapiens
agagcaaatcaacct

SEQ ID NO: 1997898 - DNA, 15 bp, Homo sapiens
gagcaaatcaaccta

SEQ ID NO: 1997899 - DNA, 15 bp, Homo sapiens
agcaaatcaacctat

SEQ ID NO: 1997900 - DNA, 15 bp, Homo sapiens
gcaaatcaacctatg

SEQ ID NO: 1997901 - DNA, 15 bp, Homo sapiens
caaatcaacctatgt

SEQ ID NO: 1997902 - DNA, 15 bp, Homo sapiens
aaatcaacctatgtc

SEQ ID NO: 1997903 - DNA, 15 bp, Homo sapiens
aatcaacctatgtca

SEQ ID NO: 1997904 - DNA, 15 bp, Homo sapiens
atcaacctatgtcac

SEQ ID NO: 1997905 - DNA, 15 bp, Homo sapiens
tcaacctatgtcact

SEQ ID NO: 1997906 - DNA, 15 bp, Homo sapiens
caacctatgtcactg

SEQ ID NO: 1997907 - DNA, 15 bp, Homo sapiens
aacctatgtcactgg

SEQ ID NO: 1997908 - DNA, 15 bp, Homo sapiens
acctatgtcactgga

SEQ ID NO: 1997909 - DNA, 15 bp, Homo sapiens
cctatgtcactggaa

SEQ ID NO: 1997910 - DNA, 15 bp, Homo sapiens
ctatgtcactggaaa

SEQ ID NO: 1997911 - DNA, 15 bp, Homo sapiens
tatgtcactggaaaa

SEQ ID NO: 1997912 - DNA, 15 bp, Homo sapiens
atgtcactggaaaat

SEQ ID NO: 1997913 - DNA, 15 bp, Homo sapiens
tgtcactggaaaata

SEQ ID NO: 1997914 - DNA, 15 bp, Homo sapiens
gtcactggaaaataa

SEQ ID NO: 1997915 - DNA, 15 bp, Homo sapiens
tcactggaaaataat

SEQ ID NO: 1997916 - DNA, 15 bp, Homo sapiens
cactggaaaataatt

SEQ ID NO: 1997917 - DNA, 15 bp, Homo sapiens
actggaaaataatta

SEQ ID NO: 1997918 - DNA, 15 bp, Homo sapiens
ctggaaaataattaa

SEQ ID NO: 1997919 - DNA, 15 bp, Homo sapiens
tggaaaataattaaa

SEQ ID NO: 1997920 - DNA, 15 bp, Homo sapiens
ggaaaataattaaat

SEQ ID NO: 1997921 - DNA, 15 bp, Homo sapiens
gaaaataattaaatc

SEQ ID NO: 1997922 - DNA, 15 bp, Homo sapiens
aaaataattaaatca

SEQ ID NO: 1997923 - DNA, 15 bp, Homo sapiens
aaataattaaatcaa

SEQ ID NO: 1997924 - DNA, 15 bp, Homo sapiens
aataattaaatcaag

SEQ ID NO: 1997925 - DNA, 15 bp, Homo sapiens
ataattaaatcaagg

SEQ ID NO: 1997926 - DNA, 15 bp, Homo sapiens
taattaaatcaagga

SEQ ID NO: 1997927 - DNA, 15 bp, Homo sapiens
aattaaatcaaggat

SEQ ID NO: 1997928 - DNA, 15 bp, Homo sapiens
attaaatcaaggata

SEQ ID NO: 1997929 - DNA, 15 bp, Homo sapiens
ttaaatcaaggatat

SEQ ID NO: 1997930 - DNA, 15 bp, Homo sapiens
taaatcaaggatatg

SEQ ID NO: 1997931 - DNA, 15 bp, Homo sapiens
aaatcaaggatatgg

SEQ ID NO: 1997932 - DNA, 15 bp, Homo sapiens
aatcaaggatatgga

SEQ ID NO: 1997933 - DNA, 15 bp, Homo sapiens
atcaaggatatggaa

SEQ ID NO: 1997934 - DNA, 15 bp, Homo sapiens
tcaaggatatggaac

SEQ ID NO: 1997935 - DNA, 15 bp, Homo sapiens
caaggatatggaaca

SEQ ID NO: 1997936 - DNA, 15 bp, Homo sapiens
aaggatatggaacat

SEQ ID NO: 1997937 - DNA, 15 bp, Homo sapiens
aggatatggaacatt

SEQ ID NO: 1997938 - DNA, 15 bp, Homo sapiens
ggatatggaacattc

SEQ ID NO: 1997939 - DNA, 15 bp, Homo sapiens
gatatggaacattct

SEQ ID NO: 1997940 - DNA, 15 bp, Homo sapiens
atatggaacattctg

SEQ ID NO: 1997941 - DNA, 15 bp, Homo sapiens
tatggaacattctgt

SEQ ID NO: 1997942 - DNA, 15 bp, Homo sapiens
atggaacattctgta

SEQ ID NO: 1997943 - DNA, 15 bp, Homo sapiens
tggaacattctgtaa

SEQ ID NO: 1997944 - DNA, 15 bp, Homo sapiens
ggaacattctgtaag

SEQ ID NO: 1997945 - DNA, 15 bp, Homo sapiens
gaacattctgtaagg

SEQ ID NO: 1997946 - DNA, 15 bp, Homo sapiens
aacattctgtaaggc

SEQ ID NO: 1997947 - DNA, 15 bp, Homo sapiens
acattctgtaaggca

SEQ ID NO: 1997948 - DNA, 15 bp, Homo sapiens
cattctgtaaggcag

SEQ ID NO: 1997949 - DNA, 15 bp, Homo sapiens
attctgtaaggcagc

SEQ ID NO: 1997950 - DNA, 15 bp, Homo sapiens
ttctgtaaggcagct

SEQ ID NO: 1997951 - DNA, 15 bp, Homo sapiens
tctgtaaggcagctg

SEQ ID NO: 1997952 - DNA, 15 bp, Homo sapiens
ctgtaaggcagctgg

SEQ ID NO: 1997953 - DNA, 15 bp, Homo sapiens
tgtaaggcagctggc

SEQ ID NO: 1997954 - DNA, 15 bp, Homo sapiens
gtaaggcagctggcc

SEQ ID NO: 1997955 - DNA, 15 bp, Homo sapiens
taaggcagctggccc

SEQ ID NO: 1997956 - DNA, 15 bp, Homo sapiens
aaggcagctggccca

SEQ ID NO: 1997957 - DNA, 15 bp, Homo sapiens
aggcagctggcccac

SEQ ID NO: 1997958 - DNA, 15 bp, Homo sapiens
ggcagctggcccact

SEQ ID NO: 1997959 - DNA, 15 bp, Homo sapiens
gcagctggcccactt

SEQ ID NO: 1997960 - DNA, 15 bp, Homo sapiens
cagctggcccactta

SEQ ID NO: 1997961 - DNA, 15 bp, Homo sapiens
agctggcccacttaa

SEQ ID NO: 1997962 - DNA, 15 bp, Homo sapiens
gctggcccacttaaa

SEQ ID NO: 1997963 - DNA, 15 bp, Homo sapiens
ctggcccacttaaag

SEQ ID NO: 1997964 - DNA, 15 bp, Homo sapiens
tggcccacttaaagt

SEQ ID NO: 1997965 - DNA, 15 bp, Homo sapiens
ggcccacttaaagtc

SEQ ID NO: 1997966 - DNA, 15 bp, Homo sapiens
gcccacttaaagtca

SEQ ID NO: 1997967 - DNA, 15 bp, Homo sapiens
cccacttaaagtcat

SEQ ID NO: 1997968 - DNA, 15 bp, Homo sapiens
ccacttaaagtcatg

SEQ ID NO: 1997969 - DNA, 15 bp, Homo sapiens
cacttaaagtcatgg

SEQ ID NO: 1997970 - DNA, 15 bp, Homo sapiens
acttaaagtcatggg

SEQ ID NO: 1997971 - DNA, 15 bp, Homo sapiens
cttaaagtcatggga

SEQ ID NO: 1997972 - DNA, 15 bp, Homo sapiens
ttaaagtcatgggaa

SEQ ID NO: 1997973 - DNA, 15 bp, Homo sapiens
taaagtcatgggaaa

SEQ ID NO: 1997974 - DNA, 15 bp, Homo sapiens
aaagtcatgggaaat

SEQ ID NO: 1997975 - DNA, 15 bp, Homo sapiens
aagtcatgggaaata

SEQ ID NO: 1997976 - DNA, 15 bp, Homo sapiens
agtcatgggaaataa

SEQ ID NO: 1997977 - DNA, 15 bp, Homo sapiens
gtcatgggaaataag

SEQ ID NO: 1997978 - DNA, 15 bp, Homo sapiens
tcatgggaaataaga

SEQ ID NO: 1997979 - DNA, 15 bp, Homo sapiens
catgggaaataagag

SEQ ID NO: 1997980 - DNA, 15 bp, Homo sapiens
atgggaaataagagt

SEQ ID NO: 1997981 - DNA, 15 bp, Homo sapiens
tgggaaataagagtg

SEQ ID NO: 1997982 - DNA, 15 bp, Homo sapiens
gggaaataagagtgg

SEQ ID NO: 1997983 - DNA, 15 bp, Homo sapiens
ggaaataagagtggt

SEQ ID NO: 1997984 - DNA, 15 bp, Homo sapiens
gaaataagagtggtg

SEQ ID NO: 1997985 - DNA, 15 bp, Homo sapiens
aaataagagtggtga

SEQ ID NO: 1997986 - DNA, 15 bp, Homo sapiens
aataagagtggtgaa

SEQ ID NO: 1997987 - DNA, 15 bp, Homo sapiens
ataagagtggtgaat

SEQ ID NO: 1997988 - DNA, 15 bp, Homo sapiens
taagagtggtgaata

SEQ ID NO: 1997989 - DNA, 15 bp, Homo sapiens
aagagtggtgaatat

SEQ ID NO: 1997990 - DNA, 15 bp, Homo sapiens
agagtggtgaatatg

SEQ ID NO: 1997991 - DNA, 15 bp, Homo sapiens
gagtggtgaatatgg

SEQ ID NO: 1997992 - DNA, 15 bp, Homo sapiens
agtggtgaatatggg

SEQ ID NO: 1997993 - DNA, 15 bp, Homo sapiens
gtggtgaatatgggc

SEQ ID NO: 1997994 - DNA, 15 bp, Homo sapiens
tggtgaatatgggcc

SEQ ID NO: 1997995 - DNA, 15 bp, Homo sapiens
ggtgaatatgggcca

SEQ ID NO: 1997996 - DNA, 15 bp, Homo sapiens
gtgaatatgggccag

SEQ ID NO: 1997997 - DNA, 15 bp, Homo sapiens
tgaatatgggccagg

SEQ ID NO: 1997998 - DNA, 15 bp, Homo sapiens
gaatatgggccaggc

SEQ ID NO: 1997999 - DNA, 15 bp, Homo sapiens
aatatgggccaggcg

SEQ ID NO: 1998000 - DNA, 15 bp, Homo sapiens
atatgggccaggcgt

SEQ ID NO: 1998001 - DNA, 15 bp, Homo sapiens
tatgggccaggcgta

SEQ ID NO: 1998002 - DNA, 15 bp, Homo sapiens
atgggccaggcgtag

SEQ ID NO: 1998003 - DNA, 15 bp, Homo sapiens
tgggccaggcgtagt

SEQ ID NO: 1998004 - DNA, 15 bp, Homo sapiens
gggccaggcgtagtg

SEQ ID NO: 1998005 - DNA, 15 bp, Homo sapiens
ggccaggcgtagtgg

SEQ ID NO: 1998006 - DNA, 15 bp, Homo sapiens
gccaggcgtagtggc

SEQ ID NO: 1998007 - DNA, 15 bp, Homo sapiens
ccaggcgtagtggct

SEQ ID NO: 1998008 - DNA, 15 bp, Homo sapiens
caggcgtagtggctc

SEQ ID NO: 1998009 - DNA, 15 bp, Homo sapiens
aggcgtagtggctca

SEQ ID NO: 1998010 - DNA, 15 bp, Homo sapiens
ggcgtagtggctcac

SEQ ID NO: 1998011 - DNA, 15 bp, Homo sapiens
gcgtagtggctcacg

SEQ ID NO: 1998012 - DNA, 15 bp, Homo sapiens
cgtagtggctcacgc

SEQ ID NO: 1998013 - DNA, 15 bp, Homo sapiens
gtagtggctcacgcc

SEQ ID NO: 1998014 - DNA, 15 bp, Homo sapiens
tagtggctcacgcct

SEQ ID NO: 1998015 - DNA, 15 bp, Homo sapiens
ggagggcggatcact

SEQ ID NO: 1998016 - DNA, 15 bp, Homo sapiens
gagggcggatcactt

SEQ ID NO: 1998017 - DNA, 15 bp, Homo sapiens
agggcggatcacttg

SEQ ID NO: 1998018 - DNA, 15 bp, Homo sapiens
agcctagccaacatg

SEQ ID NO: 1998019 - DNA, 15 bp, Homo sapiens
gcctagccaacatgg

SEQ ID NO: 1998020 - DNA, 15 bp, Homo sapiens
cctagccaacatggc

SEQ ID NO: 1998021 - DNA, 15 bp, Homo sapiens
ctagccaacatggca

SEQ ID NO: 1998022 - DNA, 15 bp, Homo sapiens
tagccaacatggcaa

SEQ ID NO: 1998023 - DNA, 15 bp, Homo sapiens
agccaacatggcaaa

SEQ ID NO: 1998024 - DNA, 15 bp, Homo sapiens
catggcaaaaccccg

SEQ ID NO: 1998025 - DNA, 15 bp, Homo sapiens
atggcaaaaccccgt

SEQ ID NO: 1998026 - DNA, 15 bp, Homo sapiens
tggcaaaaccccgtc

SEQ ID NO: 1998027 - DNA, 15 bp, Homo sapiens
ggcaaaaccccgtct

SEQ ID NO: 1998028 - DNA, 15 bp, Homo sapiens
gcaaaaccccgtctc

SEQ ID NO: 1998029 - DNA, 15 bp, Homo sapiens
caaaaccccgtctct

SEQ ID NO: 1998030 - DNA, 15 bp, Homo sapiens
taatcccagctatta

SEQ ID NO: 1998031 - DNA, 15 bp, Homo sapiens
aatcccagctattag

SEQ ID NO: 1998032 - DNA, 15 bp, Homo sapiens
atcccagctattagg

SEQ ID NO: 1998033 - DNA, 15 bp, Homo sapiens
tcccagctattaggg

SEQ ID NO: 1998034 - DNA, 15 bp, Homo sapiens
cccagctattaggga

SEQ ID NO: 1998035 - DNA, 15 bp, Homo sapiens
ccagctattagggag

SEQ ID NO: 1998036 - DNA, 15 bp, Homo sapiens
cagctattagggagg

SEQ ID NO: 1998037 - DNA, 15 bp, Homo sapiens
agctattagggaggc

SEQ ID NO: 1998038 - DNA, 15 bp, Homo sapiens
gctattagggaggct

SEQ ID NO: 1998039 - DNA, 15 bp, Homo sapiens
ctattagggaggctg

SEQ ID NO: 1998040 - DNA, 15 bp, Homo sapiens
tattagggaggctga

SEQ ID NO: 1998041 - DNA, 15 bp, Homo sapiens
attagggaggctgag

SEQ ID NO: 1998042 - DNA, 15 bp, Homo sapiens
aggagaattgcttta

SEQ ID NO: 1998043 - DNA, 15 bp, Homo sapiens
ggagaattgctttaa

SEQ ID NO: 1998044 - DNA, 15 bp, Homo sapiens
gagaattgctttaac

SEQ ID NO: 1998045 - DNA, 15 bp, Homo sapiens
agaattgctttaacc

SEQ ID NO: 1998046 - DNA, 15 bp, Homo sapiens
gaattgctttaaccc

SEQ ID NO: 1998047 - DNA, 15 bp, Homo sapiens
aattgctttaaccct

SEQ ID NO: 1998048 - DNA, 15 bp, Homo sapiens
attgctttaaccctg

SEQ ID NO: 1998049 - DNA, 15 bp, Homo sapiens
ttgctttaaccctgg

SEQ ID NO: 1998050 - DNA, 15 bp, Homo sapiens
tgctttaaccctgga

SEQ ID NO: 1998051 - DNA, 15 bp, Homo sapiens
gctttaaccctggag

SEQ ID NO: 1998052 - DNA, 15 bp, Homo sapiens
ctttaaccctggagg

SEQ ID NO: 1998053 - DNA, 15 bp, Homo sapiens
tttaaccctggaggt

SEQ ID NO: 1998054 - DNA, 15 bp, Homo sapiens
ttaaccctggaggtg

SEQ ID NO: 1998055 - DNA, 15 bp, Homo sapiens
taaccctggaggtgg

SEQ ID NO: 1998056 - DNA, 15 bp, Homo sapiens
aaccctggaggtgga

SEQ ID NO: 1998057 - DNA, 15 bp, Homo sapiens
accctggaggtggaa

SEQ ID NO: 1998058 - DNA, 15 bp, Homo sapiens
ccctggaggtggaag

SEQ ID NO: 1998059 - DNA, 15 bp, Homo sapiens
cctggaggtggaagt

SEQ ID NO: 1998060 - DNA, 15 bp, Homo sapiens
ctggaggtggaagtt

SEQ ID NO: 1998061 - DNA, 15 bp, Homo sapiens
tggaggtggaagttg

SEQ ID NO: 1998062 - DNA, 15 bp, Homo sapiens
aagttgcagtgagct

SEQ ID NO: 1998063 - DNA, 15 bp, Homo sapiens
agttgcagtgagctg

SEQ ID NO: 1998064 - DNA, 15 bp, Homo sapiens
tgagctgagattgcg

SEQ ID NO: 1998065 - DNA, 15 bp, Homo sapiens
gagctgagattgcgc

SEQ ID NO: 1998066 - DNA, 15 bp, Homo sapiens
agctgagattgcgcc

SEQ ID NO: 1998067 - DNA, 15 bp, Homo sapiens
gctgagattgcgccc

SEQ ID NO: 1998068 - DNA, 15 bp, Homo sapiens
ctgagattgcgccct

SEQ ID NO: 1998069 - DNA, 15 bp, Homo sapiens
tgagattgcgccctt

SEQ ID NO: 1998070 - DNA, 15 bp, Homo sapiens
gagattgcgcccttg

SEQ ID NO: 1998071 - DNA, 15 bp, Homo sapiens
agattgcgcccttgc

SEQ ID NO: 1998072 - DNA, 15 bp, Homo sapiens
gattgcgcccttgca

SEQ ID NO: 1998073 - DNA, 15 bp, Homo sapiens
attgcgcccttgcat

SEQ ID NO: 1998074 - DNA, 15 bp, Homo sapiens
ttgcgcccttgcata

SEQ ID NO: 1998075 - DNA, 15 bp, Homo sapiens
tgcgcccttgcatag

SEQ ID NO: 1998076 - DNA, 15 bp, Homo sapiens
gcgcccttgcataga

SEQ ID NO: 1998077 - DNA, 15 bp, Homo sapiens
cgcccttgcatagaa

SEQ ID NO: 1998078 - DNA, 15 bp, Homo sapiens
gcccttgcatagaat

SEQ ID NO: 1998079 - DNA, 15 bp, Homo sapiens
cccttgcatagaata

SEQ ID NO: 1998080 - DNA, 15 bp, Homo sapiens
ccttgcatagaatag

SEQ ID NO: 1998081 - DNA, 15 bp, Homo sapiens
cttgcatagaatagt

SEQ ID NO: 1998082 - DNA, 15 bp, Homo sapiens
ttgcatagaatagtg

SEQ ID NO: 1998083 - DNA, 15 bp, Homo sapiens
tgcatagaatagtga

SEQ ID NO: 1998084 - DNA, 15 bp, Homo sapiens
gcatagaatagtgaa

SEQ ID NO: 1998085 - DNA, 15 bp, Homo sapiens
catagaatagtgaaa

SEQ ID NO: 1998086 - DNA, 15 bp, Homo sapiens
atagaatagtgaaac

SEQ ID NO: 1998087 - DNA, 15 bp, Homo sapiens
tagaatagtgaaact

SEQ ID NO: 1998088 - DNA, 15 bp, Homo sapiens
agaatagtgaaacta

SEQ ID NO: 1998089 - DNA, 15 bp, Homo sapiens
gaatagtgaaactaa

SEQ ID NO: 1998090 - DNA, 15 bp, Homo sapiens
aatagtgaaactaag

SEQ ID NO: 1998091 - DNA, 15 bp, Homo sapiens
atagtgaaactaagg

SEQ ID NO: 1998092 - DNA, 15 bp, Homo sapiens
tagtgaaactaagga

SEQ ID NO: 1998093 - DNA, 15 bp, Homo sapiens
agtgaaactaaggaa

SEQ ID NO: 1998094 - DNA, 15 bp, Homo sapiens
gtgaaactaaggaaa

SEQ ID NO: 1998095 - DNA, 15 bp, Homo sapiens
tgaaactaaggaaac

SEQ ID NO: 1998096 - DNA, 15 bp, Homo sapiens
gaaactaaggaaaca

SEQ ID NO: 1998097 - DNA, 15 bp, Homo sapiens
aaactaaggaaacat

SEQ ID NO: 1998098 - DNA, 15 bp, Homo sapiens
aactaaggaaacatc

SEQ ID NO: 1998099 - DNA, 15 bp, Homo sapiens
actaaggaaacatca

SEQ ID NO: 1998100 - DNA, 15 bp, Homo sapiens
ctaaggaaacatcat

SEQ ID NO: 1998101 - DNA, 15 bp, Homo sapiens
taaggaaacatcatg

SEQ ID NO: 1998102 - DNA, 15 bp, Homo sapiens
aaggaaacatcatgt

SEQ ID NO: 1998103 - DNA, 15 bp, Homo sapiens
aggaaacatcatgtt

SEQ ID NO: 1998104 - DNA, 15 bp, Homo sapiens
ggaaacatcatgttg

SEQ ID NO: 1998105 - DNA, 15 bp, Homo sapiens
gaaacatcatgttgt

SEQ ID NO: 1998106 - DNA, 15 bp, Homo sapiens
aaacatcatgttgta

SEQ ID NO: 1998107 - DNA, 15 bp, Homo sapiens
aacatcatgttgtaa

SEQ ID NO: 1998108 - DNA, 15 bp, Homo sapiens
acatcatgttgtaat

SEQ ID NO: 1998109 - DNA, 15 bp, Homo sapiens
catcatgttgtaatc

SEQ ID NO: 1998110 - DNA, 15 bp, Homo sapiens
atcatgttgtaatcg

SEQ ID NO: 1998111 - DNA, 15 bp, Homo sapiens
tcatgttgtaatcgg

SEQ ID NO: 1998112 - DNA, 15 bp, Homo sapiens
catgttgtaatcggt

SEQ ID NO: 1998113 - DNA, 15 bp, Homo sapiens
atgttgtaatcggtg

SEQ ID NO: 1998114 - DNA, 15 bp, Homo sapiens
tgttgtaatcggtga

SEQ ID NO: 1998115 - DNA, 15 bp, Homo sapiens
gttgtaatcggtgaa

SEQ ID NO: 1998116 - DNA, 15 bp, Homo sapiens
ttgtaatcggtgaac

SEQ ID NO: 1998117 - DNA, 15 bp, Homo sapiens
tgtaatcggtgaact

SEQ ID NO: 1998118 - DNA, 15 bp, Homo sapiens
gtaatcggtgaactt

SEQ ID NO: 1998119 - DNA, 15 bp, Homo sapiens
taatcggtgaacttt

SEQ ID NO: 1998120 - DNA, 15 bp, Homo sapiens
aatcggtgaactttt

SEQ ID NO: 1998121 - DNA, 15 bp, Homo sapiens
atcggtgaacttttt

SEQ ID NO: 1998122 - DNA, 15 bp, Homo sapiens
tcggtgaactttttt

SEQ ID NO: 1998123 - DNA, 15 bp, Homo sapiens
cggtgaacttttttg

SEQ ID NO: 1998124 - DNA, 15 bp, Homo sapiens
ggtgaacttttttgg

SEQ ID NO: 1998125 - DNA, 15 bp, Homo sapiens
gtgaacttttttgga

SEQ ID NO: 1998126 - DNA, 15 bp, Homo sapiens
tgaacttttttggat

SEQ ID NO: 1998127 - DNA, 15 bp, Homo sapiens
gaacttttttggatc

SEQ ID NO: 1998128 - DNA, 15 bp, Homo sapiens
aacttttttggatcc

SEQ ID NO: 1998129 - DNA, 15 bp, Homo sapiens
acttttttggatcct

SEQ ID NO: 1998130 - DNA, 15 bp, Homo sapiens
cttttttggatcctt

SEQ ID NO: 1998131 - DNA, 15 bp, Homo sapiens
ttttttggatcctta

SEQ ID NO: 1998132 - DNA, 15 bp, Homo sapiens
tttttggatccttat

SEQ ID NO: 1998133 - DNA, 15 bp, Homo sapiens
ttttggatccttatt

SEQ ID NO: 1998134 - DNA, 15 bp, Homo sapiens
tttggatccttattg

SEQ ID NO: 1998135 - DNA, 15 bp, Homo sapiens
ttggatccttattga

SEQ ID NO: 1998136 - DNA, 15 bp, Homo sapiens
tggatccttattgaa

SEQ ID NO: 1998137 - DNA, 15 bp, Homo sapiens
ggatccttattgaat

SEQ ID NO: 1998138 - DNA, 15 bp, Homo sapiens
gatccttattgaata

SEQ ID NO: 1998139 - DNA, 15 bp, Homo sapiens
atccttattgaataa

SEQ ID NO: 1998140 - DNA, 15 bp, Homo sapiens
tccttattgaataaa

SEQ ID NO: 1998141 - DNA, 15 bp, Homo sapiens
ccttattgaataaaa

SEQ ID NO: 1998142 - DNA, 15 bp, Homo sapiens
cttattgaataaaaa

SEQ ID NO: 1998143 - DNA, 15 bp, Homo sapiens
tattgaataaaaatg

SEQ ID NO: 1998144 - DNA, 15 bp, Homo sapiens
attgaataaaaatgc

SEQ ID NO: 1998145 - DNA, 15 bp, Homo sapiens
ttgaataaaaatgcc

SEQ ID NO: 1998146 - DNA, 15 bp, Homo sapiens
tgaataaaaatgcct

SEQ ID NO: 1998147 - DNA, 15 bp, Homo sapiens
gaataaaaatgccta

SEQ ID NO: 1998148 - DNA, 15 bp, Homo sapiens
aataaaaatgcctat

SEQ ID NO: 1998149 - DNA, 15 bp, Homo sapiens
ataaaaatgcctatg

SEQ ID NO: 1998150 - DNA, 15 bp, Homo sapiens
taaaaatgcctatga

SEQ ID NO: 1998151 - DNA, 15 bp, Homo sapiens
aaaaatgcctatgaa

SEQ ID NO: 1998152 - DNA, 15 bp, Homo sapiens
aaaatgcctatgaaa

SEQ ID NO: 1998153 - DNA, 15 bp, Homo sapiens
aaatgcctatgaaag

SEQ ID NO: 1998154 - DNA, 15 bp, Homo sapiens
aatgcctatgaaaga

SEQ ID NO: 1998155 - DNA, 15 bp, Homo sapiens
atgcctatgaaagac

SEQ ID NO: 1998156 - DNA, 15 bp, Homo sapiens
tgcctatgaaagaca

SEQ ID NO: 1998157 - DNA, 15 bp, Homo sapiens
gcctatgaaagacat

SEQ ID NO: 1998158 - DNA, 15 bp, Homo sapiens
cctatgaaagacatt

SEQ ID NO: 1998159 - DNA, 15 bp, Homo sapiens
ctatgaaagacattt

SEQ ID NO: 1998160 - DNA, 15 bp, Homo sapiens
tatgaaagacatttt

SEQ ID NO: 1998161 - DNA, 15 bp, Homo sapiens
atgaaagacattttg

SEQ ID NO: 1998162 - DNA, 15 bp, Homo sapiens
tgaaagacattttgg

SEQ ID NO: 1998163 - DNA, 15 bp, Homo sapiens
gaaagacattttggg

SEQ ID NO: 1998164 - DNA, 15 bp, Homo sapiens
aaagacattttgggg

SEQ ID NO: 1998165 - DNA, 15 bp, Homo sapiens
aagacattttggggg

SEQ ID NO: 1998166 - DNA, 15 bp, Homo sapiens
agacattttgggggc

SEQ ID NO: 1998167 - DNA, 15 bp, Homo sapiens
gacattttgggggca

SEQ ID NO: 1998168 - DNA, 15 bp, Homo sapiens
acattttgggggcag

SEQ ID NO: 1998169 - DNA, 15 bp, Homo sapiens
cattttgggggcagt

SEQ ID NO: 1998170 - DNA, 15 bp, Homo sapiens
attttgggggcagtg

SEQ ID NO: 1998171 - DNA, 15 bp, Homo sapiens
ttttgggggcagtgg

SEQ ID NO: 1998172 - DNA, 15 bp, Homo sapiens
tttgggggcagtggt

SEQ ID NO: 1998173 - DNA, 15 bp, Homo sapiens
ttgggggcagtggtg

SEQ ID NO: 1998174 - DNA, 15 bp, Homo sapiens
tgggggcagtggtga

SEQ ID NO: 1998175 - DNA, 15 bp, Homo sapiens
gggggcagtggtgaa

SEQ ID NO: 1998176 - DNA, 15 bp, Homo sapiens
ggggcagtggtgaaa

SEQ ID NO: 1998177 - DNA, 15 bp, Homo sapiens
gggcagtggtgaaat

SEQ ID NO: 1998178 - DNA, 15 bp, Homo sapiens
ggcagtggtgaaatt

SEQ ID NO: 1998179 - DNA, 15 bp, Homo sapiens
gcagtggtgaaattt

SEQ ID NO: 1998180 - DNA, 15 bp, Homo sapiens
cagtggtgaaatttg

SEQ ID NO: 1998181 - DNA, 15 bp, Homo sapiens
agtggtgaaatttga

SEQ ID NO: 1998182 - DNA, 15 bp, Homo sapiens
gtggtgaaatttgaa

SEQ ID NO: 1998183 - DNA, 15 bp, Homo sapiens
tggtgaaatttgaat

SEQ ID NO: 1998184 - DNA, 15 bp, Homo sapiens
ggtgaaatttgaatt

SEQ ID NO: 1998185 - DNA, 15 bp, Homo sapiens
gtgaaatttgaattc

SEQ ID NO: 1998186 - DNA, 15 bp, Homo sapiens
tgaaatttgaattca

SEQ ID NO: 1998187 - DNA, 15 bp, Homo sapiens
gaaatttgaattcag

SEQ ID NO: 1998188 - DNA, 15 bp, Homo sapiens
aaatttgaattcaga

SEQ ID NO: 1998189 - DNA, 15 bp, Homo sapiens
aatttgaattcagac

SEQ ID NO: 1998190 - DNA, 15 bp, Homo sapiens
atttgaattcagact

SEQ ID NO: 1998191 - DNA, 15 bp, Homo sapiens
tttgaattcagactt

SEQ ID NO: 1998192 - DNA, 15 bp, Homo sapiens
ttgaattcagacttg

SEQ ID NO: 1998193 - DNA, 15 bp, Homo sapiens
tgaattcagacttgg

SEQ ID NO: 1998194 - DNA, 15 bp, Homo sapiens
gaattcagacttggt

SEQ ID NO: 1998195 - DNA, 15 bp, Homo sapiens
aattcagacttggta

SEQ ID NO: 1998196 - DNA, 15 bp, Homo sapiens
attcagacttggtat

SEQ ID NO: 1998197 - DNA, 15 bp, Homo sapiens
ttcagacttggtatt

SEQ ID NO: 1998198 - DNA, 15 bp, Homo sapiens
tcagacttggtatta

SEQ ID NO: 1998199 - DNA, 15 bp, Homo sapiens
cagacttggtattag

SEQ ID NO: 1998200 - DNA, 15 bp, Homo sapiens
agacttggtattaga

SEQ ID NO: 1998201 - DNA, 15 bp, Homo sapiens
gacttggtattagat

SEQ ID NO: 1998202 - DNA, 15 bp, Homo sapiens
acttggtattagatg

SEQ ID NO: 1998203 - DNA, 15 bp, Homo sapiens
cttggtattagatga

SEQ ID NO: 1998204 - DNA, 15 bp, Homo sapiens
ttggtattagatgat

SEQ ID NO: 1998205 - DNA, 15 bp, Homo sapiens
tggtattagatgata

SEQ ID NO: 1998206 - DNA, 15 bp, Homo sapiens
ggtattagatgatac

SEQ ID NO: 1998207 - DNA, 15 bp, Homo sapiens
gtattagatgataca

SEQ ID NO: 1998208 - DNA, 15 bp, Homo sapiens
tattagatgatacaa

SEQ ID NO: 1998209 - DNA, 15 bp, Homo sapiens
attagatgatacaag

SEQ ID NO: 1998210 - DNA, 15 bp, Homo sapiens
ttagatgatacaagg

SEQ ID NO: 1998211 - DNA, 15 bp, Homo sapiens
tagatgatacaaggg

SEQ ID NO: 1998212 - DNA, 15 bp, Homo sapiens
agatgatacaaggga

SEQ ID NO: 1998213 - DNA, 15 bp, Homo sapiens
gatgatacaagggaa

SEQ ID NO: 1998214 - DNA, 15 bp, Homo sapiens
atgatacaagggaat

SEQ ID NO: 1998215 - DNA, 15 bp, Homo sapiens
tgatacaagggaatt

SEQ ID NO: 1998216 - DNA, 15 bp, Homo sapiens
gatacaagggaattg

SEQ ID NO: 1998217 - DNA, 15 bp, Homo sapiens
atacaagggaattgt

SEQ ID NO: 1998218 - DNA, 15 bp, Homo sapiens
tacaagggaattgtt

SEQ ID NO: 1998219 - DNA, 15 bp, Homo sapiens
acaagggaattgttt

SEQ ID NO: 1998220 - DNA, 15 bp, Homo sapiens
caagggaattgttta

SEQ ID NO: 1998221 - DNA, 15 bp, Homo sapiens
aagggaattgtttat

SEQ ID NO: 1998222 - DNA, 15 bp, Homo sapiens
agggaattgtttatt

SEQ ID NO: 1998223 - DNA, 15 bp, Homo sapiens
gggaattgtttattt

SEQ ID NO: 1998224 - DNA, 15 bp, Homo sapiens
ggaattgtttatttt

SEQ ID NO: 1998225 - DNA, 15 bp, Homo sapiens
gaattgtttattttt

SEQ ID NO: 1998226 - DNA, 15 bp, Homo sapiens
aattgtttatttttc

SEQ ID NO: 1998227 - DNA, 15 bp, Homo sapiens
attgtttatttttcc

SEQ ID NO: 1998228 - DNA, 15 bp, Homo sapiens
ttgtttatttttcct

SEQ ID NO: 1998229 - DNA, 15 bp, Homo sapiens
tgtttatttttcctt

SEQ ID NO: 1998230 - DNA, 15 bp, Homo sapiens
gtttatttttccttg

SEQ ID NO: 1998231 - DNA, 15 bp, Homo sapiens
tttatttttccttgg

SEQ ID NO: 1998232 - DNA, 15 bp, Homo sapiens
ttatttttccttggt

SEQ ID NO: 1998233 - DNA, 15 bp, Homo sapiens
tatttttccttggtg

SEQ ID NO: 1998234 - DNA, 15 bp, Homo sapiens
atttttccttggtgt

SEQ ID NO: 1998235 - DNA, 15 bp, Homo sapiens
tttttccttggtgtg

SEQ ID NO: 1998236 - DNA, 15 bp, Homo sapiens
ttttccttggtgtgt

SEQ ID NO: 1998237 - DNA, 15 bp, Homo sapiens
tttccttggtgtgtt

SEQ ID NO: 1998238 - DNA, 15 bp, Homo sapiens
ttccttggtgtgtta

SEQ ID NO: 1998239 - DNA, 15 bp, Homo sapiens
tccttggtgtgttaa

SEQ ID NO: 1998240 - DNA, 15 bp, Homo sapiens
ccttggtgtgttaat

SEQ ID NO: 1998241 - DNA, 15 bp, Homo sapiens
cttggtgtgttaatt

SEQ ID NO: 1998242 - DNA, 15 bp, Homo sapiens
ttggtgtgttaattg

SEQ ID NO: 1998243 - DNA, 15 bp, Homo sapiens
tggtgtgttaattgt

SEQ ID NO: 1998244 - DNA, 15 bp, Homo sapiens
ggtgtgttaattgta

SEQ ID NO: 1998245 - DNA, 15 bp, Homo sapiens
gtgtgttaattgtat

SEQ ID NO: 1998246 - DNA, 15 bp, Homo sapiens
tgtgttaattgtatt

SEQ ID NO: 1998247 - DNA, 15 bp, Homo sapiens
gtgttaattgtattg

SEQ ID NO: 1998248 - DNA, 15 bp, Homo sapiens
tgttaattgtattga

SEQ ID NO: 1998249 - DNA, 15 bp, Homo sapiens
gttaattgtattgaa

SEQ ID NO: 1998250 - DNA, 15 bp, Homo sapiens
ttaattgtattgaag

SEQ ID NO: 1998251 - DNA, 15 bp, Homo sapiens
taattgtattgaagt

SEQ ID NO: 1998252 - DNA, 15 bp, Homo sapiens
aattgtattgaagtt

SEQ ID NO: 1998253 - DNA, 15 bp, Homo sapiens
attgtattgaagtta

SEQ ID NO: 1998254 - DNA, 15 bp, Homo sapiens
ttgtattgaagttac

SEQ ID NO: 1998255 - DNA, 15 bp, Homo sapiens
tgtattgaagttaca

SEQ ID NO: 1998256 - DNA, 15 bp, Homo sapiens
gtattgaagttacat

SEQ ID NO: 1998257 - DNA, 15 bp, Homo sapiens
tattgaagttacatt

SEQ ID NO: 1998258 - DNA, 15 bp, Homo sapiens
attgaagttacatta

SEQ ID NO: 1998259 - DNA, 15 bp, Homo sapiens
ttgaagttacattag

SEQ ID NO: 1998260 - DNA, 15 bp, Homo sapiens
tgaagttacattaga

SEQ ID NO: 1998261 - DNA, 15 bp, Homo sapiens
gaagttacattagag

SEQ ID NO: 1998262 - DNA, 15 bp, Homo sapiens
aagttacattagaga

SEQ ID NO: 1998263 - DNA, 15 bp, Homo sapiens
agttacattagagaa

SEQ ID NO: 1998264 - DNA, 15 bp, Homo sapiens
gttacattagagaaa

SEQ ID NO: 1998265 - DNA, 15 bp, Homo sapiens
ttacattagagaaaa

SEQ ID NO: 1998266 - DNA, 15 bp, Homo sapiens
tacattagagaaaat

SEQ ID NO: 1998267 - DNA, 15 bp, Homo sapiens
acattagagaaaatt

SEQ ID NO: 1998268 - DNA, 15 bp, Homo sapiens
cattagagaaaattc

SEQ ID NO: 1998269 - DNA, 15 bp, Homo sapiens
attagagaaaattct

SEQ ID NO: 1998270 - DNA, 15 bp, Homo sapiens
ttagagaaaattctt

SEQ ID NO: 1998271 - DNA, 15 bp, Homo sapiens
tagagaaaattcttt

SEQ ID NO: 1998272 - DNA, 15 bp, Homo sapiens
agagaaaattctttt

SEQ ID NO: 1998273 - DNA, 15 bp, Homo sapiens
gagaaaattctttta

SEQ ID NO: 1998274 - DNA, 15 bp, Homo sapiens
agaaaattcttttaa

SEQ ID NO: 1998275 - DNA, 15 bp, Homo sapiens
gaaaattcttttaag

SEQ ID NO: 1998276 - DNA, 15 bp, Homo sapiens
aaaattcttttaaga

SEQ ID NO: 1998277 - DNA, 15 bp, Homo sapiens
aaattcttttaagag

SEQ ID NO: 1998278 - DNA, 15 bp, Homo sapiens
aattcttttaagaga

SEQ ID NO: 1998279 - DNA, 15 bp, Homo sapiens
attcttttaagagat

SEQ ID NO: 1998280 - DNA, 15 bp, Homo sapiens
ttcttttaagagatg

SEQ ID NO: 1998281 - DNA, 15 bp, Homo sapiens
tcttttaagagatgc

SEQ ID NO: 1998282 - DNA, 15 bp, Homo sapiens
cttttaagagatgcc

SEQ ID NO: 1998283 - DNA, 15 bp, Homo sapiens
ttttaagagatgcca

SEQ ID NO: 1998284 - DNA, 15 bp, Homo sapiens
tttaagagatgccaa

SEQ ID NO: 1998285 - DNA, 15 bp, Homo sapiens
ttaagagatgccaag

SEQ ID NO: 1998286 - DNA, 15 bp, Homo sapiens
taagagatgccaagg

SEQ ID NO: 1998287 - DNA, 15 bp, Homo sapiens
aagagatgccaaggc

SEQ ID NO: 1998288 - DNA, 15 bp, Homo sapiens
agagatgccaaggca

SEQ ID NO: 1998289 - DNA, 15 bp, Homo sapiens
gagatgccaaggcac

SEQ ID NO: 1998290 - DNA, 15 bp, Homo sapiens
agatgccaaggcaca

SEQ ID NO: 1998291 - DNA, 15 bp, Homo sapiens
gatgccaaggcacat

SEQ ID NO: 1998292 - DNA, 15 bp, Homo sapiens
atgccaaggcacatg

SEQ ID NO: 1998293 - DNA, 15 bp, Homo sapiens
tgccaaggcacatgg

SEQ ID NO: 1998294 - DNA, 15 bp, Homo sapiens
gccaaggcacatggg

SEQ ID NO: 1998295 - DNA, 15 bp, Homo sapiens
ccaaggcacatgggg

SEQ ID NO: 1998296 - DNA, 15 bp, Homo sapiens
caaggcacatggggt

SEQ ID NO: 1998297 - DNA, 15 bp, Homo sapiens
aaggcacatggggtg

SEQ ID NO: 1998298 - DNA, 15 bp, Homo sapiens
aggcacatggggtga

SEQ ID NO: 1998299 - DNA, 15 bp, Homo sapiens
ggcacatggggtgaa

SEQ ID NO: 1998300 - DNA, 15 bp, Homo sapiens
gcacatggggtgaag

SEQ ID NO: 1998301 - DNA, 15 bp, Homo sapiens
cacatggggtgaagt

SEQ ID NO: 1998302 - DNA, 15 bp, Homo sapiens
acatggggtgaagta

SEQ ID NO: 1998303 - DNA, 15 bp, Homo sapiens
catggggtgaagtat

SEQ ID NO: 1998304 - DNA, 15 bp, Homo sapiens
atggggtgaagtatt

SEQ ID NO: 1998305 - DNA, 15 bp, Homo sapiens
tggggtgaagtattc

SEQ ID NO: 1998306 - DNA, 15 bp, Homo sapiens
ggggtgaagtattct

SEQ ID NO: 1998307 - DNA, 15 bp, Homo sapiens
gggtgaagtattcta

SEQ ID NO: 1998308 - DNA, 15 bp, Homo sapiens
ggtgaagtattctat

SEQ ID NO: 1998309 - DNA, 15 bp, Homo sapiens
gtgaagtattctatt

SEQ ID NO: 1998310 - DNA, 15 bp, Homo sapiens
tgaagtattctattt

SEQ ID NO: 1998311 - DNA, 15 bp, Homo sapiens
gaagtattctattta

SEQ ID NO: 1998312 - DNA, 15 bp, Homo sapiens
aagtattctatttat

SEQ ID NO: 1998313 - DNA, 15 bp, Homo sapiens
agtattctatttata

SEQ ID NO: 1998314 - DNA, 15 bp, Homo sapiens
gtattctatttataa

SEQ ID NO: 1998315 - DNA, 15 bp, Homo sapiens
tattctatttataat

SEQ ID NO: 1998316 - DNA, 15 bp, Homo sapiens
attctatttataatt

SEQ ID NO: 1998317 - DNA, 15 bp, Homo sapiens
ttctatttataattt

SEQ ID NO: 1998318 - DNA, 15 bp, Homo sapiens
tctatttataattta

SEQ ID NO: 1998319 - DNA, 15 bp, Homo sapiens
ctatttataatttac

SEQ ID NO: 1998320 - DNA, 15 bp, Homo sapiens
tatttataatttact

SEQ ID NO: 1998321 - DNA, 15 bp, Homo sapiens
atttataatttactt

SEQ ID NO: 1998322 - DNA, 15 bp, Homo sapiens
tttataatttacttt

SEQ ID NO: 1998323 - DNA, 15 bp, Homo sapiens
ttataatttactttg

SEQ ID NO: 1998324 - DNA, 15 bp, Homo sapiens
tataatttactttga

SEQ ID NO: 1998325 - DNA, 15 bp, Homo sapiens
ataatttactttgaa

SEQ ID NO: 1998326 - DNA, 15 bp, Homo sapiens
taatttactttgaaa

SEQ ID NO: 1998327 - DNA, 15 bp, Homo sapiens
aatttactttgaaaa

SEQ ID NO: 1998328 - DNA, 15 bp, Homo sapiens
atttactttgaaaag

SEQ ID NO: 1998329 - DNA, 15 bp, Homo sapiens
tttactttgaaaaga

SEQ ID NO: 1998330 - DNA, 15 bp, Homo sapiens
ttactttgaaaagat

SEQ ID NO: 1998331 - DNA, 15 bp, Homo sapiens
tactttgaaaagatt

SEQ ID NO: 1998332 - DNA, 15 bp, Homo sapiens
actttgaaaagattt

SEQ ID NO: 1998333 - DNA, 15 bp, Homo sapiens
ctttgaaaagatttc

SEQ ID NO: 1998334 - DNA, 15 bp, Homo sapiens
tttgaaaagatttca

SEQ ID NO: 1998335 - DNA, 15 bp, Homo sapiens
ttgaaaagatttcaa

SEQ ID NO: 1998336 - DNA, 15 bp, Homo sapiens
tgaaaagatttcaac

SEQ ID NO: 1998337 - DNA, 15 bp, Homo sapiens
gaaaagatttcaacc

SEQ ID NO: 1998338 - DNA, 15 bp, Homo sapiens
aaaagatttcaacca

SEQ ID NO: 1998339 - DNA, 15 bp, Homo sapiens
aaagatttcaaccaa

SEQ ID NO: 1998340 - DNA, 15 bp, Homo sapiens
aagatttcaaccaaa

SEQ ID NO: 1998341 - DNA, 15 bp, Homo sapiens
agatttcaaccaaaa

SEQ ID NO: 1998342 - DNA, 15 bp, Homo sapiens
gatttcaaccaaaat

SEQ ID NO: 1998343 - DNA, 15 bp, Homo sapiens
atttcaaccaaaata

SEQ ID NO: 1998344 - DNA, 15 bp, Homo sapiens
tttcaaccaaaataa

SEQ ID NO: 1998345 - DNA, 15 bp, Homo sapiens
ttcaaccaaaataaa

SEQ ID NO: 1998346 - DNA, 15 bp, Homo sapiens
tcaaccaaaataaaa

SEQ ID NO: 1998347 - DNA, 15 bp, Homo sapiens
caaccaaaataaaat

SEQ ID NO: 1998348 - DNA, 15 bp, Homo sapiens
aaccaaaataaaatt

SEQ ID NO: 1998349 - DNA, 15 bp, Homo sapiens
accaaaataaaatta

SEQ ID NO: 1998350 - DNA, 15 bp, Homo sapiens
ccaaaataaaattac

SEQ ID NO: 1998351 - DNA, 15 bp, Homo sapiens
caaaataaaattact

SEQ ID NO: 1998352 - DNA, 15 bp, Homo sapiens
aaaataaaattactt

SEQ ID NO: 1998353 - DNA, 15 bp, Homo sapiens
aaataaaattacttt

SEQ ID NO: 1998354 - DNA, 15 bp, Homo sapiens
aataaaattactttg

SEQ ID NO: 1998355 - DNA, 15 bp, Homo sapiens
ataaaattactttga

SEQ ID NO: 1998356 - DNA, 15 bp, Homo sapiens
taaaattactttgag

SEQ ID NO: 1998357 - DNA, 15 bp, Homo sapiens
aaaattactttgagt

SEQ ID NO: 1998358 - DNA, 15 bp, Homo sapiens
aaattactttgagta

SEQ ID NO: 1998359 - DNA, 15 bp, Homo sapiens
aattactttgagtag

SEQ ID NO: 1998360 - DNA, 15 bp, Homo sapiens
attactttgagtagg

SEQ ID NO: 1998361 - DNA, 15 bp, Homo sapiens
ttactttgagtaggt

SEQ ID NO: 1998362 - DNA, 15 bp, Homo sapiens
tactttgagtaggta

SEQ ID NO: 1998363 - DNA, 15 bp, Homo sapiens
actttgagtaggtag

SEQ ID NO: 1998364 - DNA, 15 bp, Homo sapiens
ctttgagtaggtagt

SEQ ID NO: 1998365 - DNA, 15 bp, Homo sapiens
tttgagtaggtagtg

SEQ ID NO: 1998366 - DNA, 15 bp, Homo sapiens
ttgagtaggtagtgt

SEQ ID NO: 1998367 - DNA, 15 bp, Homo sapiens
tgagtaggtagtgtc

SEQ ID NO: 1998368 - DNA, 15 bp, Homo sapiens
gagtaggtagtgtct

SEQ ID NO: 1998369 - DNA, 15 bp, Homo sapiens
agtaggtagtgtctg

SEQ ID NO: 1998370 - DNA, 15 bp, Homo sapiens
gtaggtagtgtctgt

SEQ ID NO: 1998371 - DNA, 15 bp, Homo sapiens
taggtagtgtctgtt

SEQ ID NO: 1998372 - DNA, 15 bp, Homo sapiens
aggtagtgtctgttt

SEQ ID NO: 1998373 - DNA, 15 bp, Homo sapiens
ggtagtgtctgtttt

SEQ ID NO: 1998374 - DNA, 15 bp, Homo sapiens
gtagtgtctgttttg

SEQ ID NO: 1998375 - DNA, 15 bp, Homo sapiens
tagtgtctgttttgg

SEQ ID NO: 1998376 - DNA, 15 bp, Homo sapiens
agtgtctgttttggt

SEQ ID NO: 1998377 - DNA, 15 bp, Homo sapiens
gtgtctgttttggtc

SEQ ID NO: 1998378 - DNA, 15 bp, Homo sapiens
tgtctgttttggtca

SEQ ID NO: 1998379 - DNA, 15 bp, Homo sapiens
gtctgttttggtcag

SEQ ID NO: 1998380 - DNA, 15 bp, Homo sapiens
tctgttttggtcagt

SEQ ID NO: 1998381 - DNA, 15 bp, Homo sapiens
ctgttttggtcagtc

SEQ ID NO: 1998382 - DNA, 15 bp, Homo sapiens
tgttttggtcagtct

SEQ ID NO: 1998383 - DNA, 15 bp, Homo sapiens
gttttggtcagtctg

SEQ ID NO: 1998384 - DNA, 15 bp, Homo sapiens
ttttggtcagtctgc

SEQ ID NO: 1998385 - DNA, 15 bp, Homo sapiens
tttggtcagtctgca

SEQ ID NO: 1998386 - DNA, 15 bp, Homo sapiens
ttggtcagtctgcac

SEQ ID NO: 1998387 - DNA, 15 bp, Homo sapiens
tggtcagtctgcaca

SEQ ID NO: 1998388 - DNA, 15 bp, Homo sapiens
ggtcagtctgcacaa

SEQ ID NO: 1998389 - DNA, 15 bp, Homo sapiens
gtcagtctgcacaaa

SEQ ID NO: 1998390 - DNA, 15 bp, Homo sapiens
tcagtctgcacaaaa

SEQ ID NO: 1998391 - DNA, 15 bp, Homo sapiens
cagtctgcacaaaag

SEQ ID NO: 1998392 - DNA, 15 bp, Homo sapiens
agtctgcacaaaagc

SEQ ID NO: 1998393 - DNA, 15 bp, Homo sapiens
gtctgcacaaaagca

SEQ ID NO: 1998394 - DNA, 15 bp, Homo sapiens
tctgcacaaaagcaa

SEQ ID NO: 1998395 - DNA, 15 bp, Homo sapiens
ctgcacaaaagcaag

SEQ ID NO: 1998396 - DNA, 15 bp, Homo sapiens
tgcacaaaagcaagt

SEQ ID NO: 1998397 - DNA, 15 bp, Homo sapiens
gcacaaaagcaagtg

SEQ ID NO: 1998398 - DNA, 15 bp, Homo sapiens
cacaaaagcaagtgt

SEQ ID NO: 1998399 - DNA, 15 bp, Homo sapiens
acaaaagcaagtgtg

SEQ ID NO: 1998400 - DNA, 15 bp, Homo sapiens
caaaagcaagtgtga

SEQ ID NO: 1998401 - DNA, 15 bp, Homo sapiens
aaaagcaagtgtgat

SEQ ID NO: 1998402 - DNA, 15 bp, Homo sapiens
aaagcaagtgtgatg

SEQ ID NO: 1998403 - DNA, 15 bp, Homo sapiens
aagcaagtgtgatgg

SEQ ID NO: 1998404 - DNA, 15 bp, Homo sapiens
agcaagtgtgatggc

SEQ ID NO: 1998405 - DNA, 15 bp, Homo sapiens
gcaagtgtgatggct

SEQ ID NO: 1998406 - DNA, 15 bp, Homo sapiens
caagtgtgatggctc

SEQ ID NO: 1998407 - DNA, 15 bp, Homo sapiens
aagtgtgatggctca

SEQ ID NO: 1998408 - DNA, 15 bp, Homo sapiens
agtgtgatggctcac

SEQ ID NO: 1998409 - DNA, 15 bp, Homo sapiens
gtgtgatggctcacc

SEQ ID NO: 1998410 - DNA, 15 bp, Homo sapiens
tgtgatggctcaccc

SEQ ID NO: 1998411 - DNA, 15 bp, Homo sapiens
gtgatggctcaccca

SEQ ID NO: 1998412 - DNA, 15 bp, Homo sapiens
tgatggctcacccag

SEQ ID NO: 1998413 - DNA, 15 bp, Homo sapiens
gatggctcacccagg

SEQ ID NO: 1998414 - DNA, 15 bp, Homo sapiens
atggctcacccagga

SEQ ID NO: 1998415 - DNA, 15 bp, Homo sapiens
tggctcacccaggaa

SEQ ID NO: 1998416 - DNA, 15 bp, Homo sapiens
ggctcacccaggaat

SEQ ID NO: 1998417 - DNA, 15 bp, Homo sapiens
gctcacccaggaatt

SEQ ID NO: 1998418 - DNA, 15 bp, Homo sapiens
ctcacccaggaattt

SEQ ID NO: 1998419 - DNA, 15 bp, Homo sapiens
tcacccaggaattta

SEQ ID NO: 1998420 - DNA, 15 bp, Homo sapiens
cacccaggaatttac

SEQ ID NO: 1998421 - DNA, 15 bp, Homo sapiens
acccaggaatttact

SEQ ID NO: 1998422 - DNA, 15 bp, Homo sapiens
cccaggaatttactt

SEQ ID NO: 1998423 - DNA, 15 bp, Homo sapiens
ccaggaatttactta

SEQ ID NO: 1998424 - DNA, 15 bp, Homo sapiens
caggaatttacttaa

SEQ ID NO: 1998425 - DNA, 15 bp, Homo sapiens
aggaatttacttaaa

SEQ ID NO: 1998426 - DNA, 15 bp, Homo sapiens
ggaatttacttaaat

SEQ ID NO: 1998427 - DNA, 15 bp, Homo sapiens
gaatttacttaaatg

SEQ ID NO: 1998428 - DNA, 15 bp, Homo sapiens
aatttacttaaatgt

SEQ ID NO: 1998429 - DNA, 15 bp, Homo sapiens
atttacttaaatgtc

SEQ ID NO: 1998430 - DNA, 15 bp, Homo sapiens
tttacttaaatgtca

SEQ ID NO: 1998431 - DNA, 15 bp, Homo sapiens
ttacttaaatgtcaa

SEQ ID NO: 1998432 - DNA, 15 bp, Homo sapiens
tacttaaatgtcaag

SEQ ID NO: 1998433 - DNA, 15 bp, Homo sapiens
acttaaatgtcaaga

SEQ ID NO: 1998434 - DNA, 15 bp, Homo sapiens
cttaaatgtcaagac

SEQ ID NO: 1998435 - DNA, 15 bp, Homo sapiens
ttaaatgtcaagaca

SEQ ID NO: 1998436 - DNA, 15 bp, Homo sapiens
taaatgtcaagacag

SEQ ID NO: 1998437 - DNA, 15 bp, Homo sapiens
aaatgtcaagacaga

SEQ ID NO: 1998438 - DNA, 15 bp, Homo sapiens
aatgtcaagacagat

SEQ ID NO: 1998439 - DNA, 15 bp, Homo sapiens
atgtcaagacagatg

SEQ ID NO: 1998440 - DNA, 15 bp, Homo sapiens
tgtcaagacagatga

SEQ ID NO: 1998441 - DNA, 15 bp, Homo sapiens
gtcaagacagatgac

SEQ ID NO: 1998442 - DNA, 15 bp, Homo sapiens
tcaagacagatgaca

SEQ ID NO: 1998443 - DNA, 15 bp, Homo sapiens
caagacagatgacac

SEQ ID NO: 1998444 - DNA, 15 bp, Homo sapiens
aagacagatgacaca

SEQ ID NO: 1998445 - DNA, 15 bp, Homo sapiens
agacagatgacacaa

SEQ ID NO: 1998446 - DNA, 15 bp, Homo sapiens
gacagatgacacaat

SEQ ID NO: 1998447 - DNA, 15 bp, Homo sapiens
acagatgacacaatg

SEQ ID NO: 1998448 - DNA, 15 bp, Homo sapiens
cagatgacacaatgc

SEQ ID NO: 1998449 - DNA, 15 bp, Homo sapiens
agatgacacaatgca

SEQ ID NO: 1998450 - DNA, 15 bp, Homo sapiens
gatgacacaatgcac

SEQ ID NO: 1998451 - DNA, 15 bp, Homo sapiens
atgacacaatgcact

SEQ ID NO: 1998452 - DNA, 15 bp, Homo sapiens
tgacacaatgcactc

SEQ ID NO: 1998453 - DNA, 15 bp, Homo sapiens
gacacaatgcactca

SEQ ID NO: 1998454 - DNA, 15 bp, Homo sapiens
acacaatgcactcat

SEQ ID NO: 1998455 - DNA, 15 bp, Homo sapiens
cacaatgcactcatc

SEQ ID NO: 1998456 - DNA, 15 bp, Homo sapiens
acaatgcactcatca

SEQ ID NO: 1998457 - DNA, 15 bp, Homo sapiens
caatgcactcatcaa

SEQ ID NO: 1998458 - DNA, 15 bp, Homo sapiens
aatgcactcatcaat

SEQ ID NO: 1998459 - DNA, 15 bp, Homo sapiens
atgcactcatcaatc

SEQ ID NO: 1998460 - DNA, 15 bp, Homo sapiens
tgcactcatcaatca

SEQ ID NO: 1998461 - DNA, 15 bp, Homo sapiens
gcactcatcaatcaa

SEQ ID NO: 1998462 - DNA, 15 bp, Homo sapiens
cactcatcaatcaat

SEQ ID NO: 1998463 - DNA, 15 bp, Homo sapiens
actcatcaatcaata

SEQ ID NO: 1998464 - DNA, 15 bp, Homo sapiens
ctcatcaatcaatat

SEQ ID NO: 1998465 - DNA, 15 bp, Homo sapiens
tcatcaatcaatatg

SEQ ID NO: 1998466 - DNA, 15 bp, Homo sapiens
catcaatcaatatga

SEQ ID NO: 1998467 - DNA, 15 bp, Homo sapiens
atcaatcaatatgaa

SEQ ID NO: 1998468 - DNA, 15 bp, Homo sapiens
tcaatcaatatgaat

SEQ ID NO: 1998469 - DNA, 15 bp, Homo sapiens
caatcaatatgaatt

SEQ ID NO: 1998470 - DNA, 15 bp, Homo sapiens
aatcaatatgaatta

SEQ ID NO: 1998471 - DNA, 15 bp, Homo sapiens
atcaatatgaattaa

SEQ ID NO: 1998472 - DNA, 15 bp, Homo sapiens
tcaatatgaattaag

SEQ ID NO: 1998473 - DNA, 15 bp, Homo sapiens
caatatgaattaagt

SEQ ID NO: 1998474 - DNA, 15 bp, Homo sapiens
aatatgaattaagtc

SEQ ID NO: 1998475 - DNA, 15 bp, Homo sapiens
atatgaattaagtcg

SEQ ID NO: 1998476 - DNA, 15 bp, Homo sapiens
tatgaattaagtcga

SEQ ID NO: 1998477 - DNA, 15 bp, Homo sapiens
atgaattaagtcgat

SEQ ID NO: 1998478 - DNA, 15 bp, Homo sapiens
tgaattaagtcgatt

SEQ ID NO: 1998479 - DNA, 15 bp, Homo sapiens
gaattaagtcgattc

SEQ ID NO: 1998480 - DNA, 15 bp, Homo sapiens
aattaagtcgattct

SEQ ID NO: 1998481 - DNA, 15 bp, Homo sapiens
attaagtcgattctg

SEQ ID NO: 1998482 - DNA, 15 bp, Homo sapiens
ttaagtcgattctgt

SEQ ID NO: 1998483 - DNA, 15 bp, Homo sapiens
taagtcgattctgta

SEQ ID NO: 1998484 - DNA, 15 bp, Homo sapiens
aagtcgattctgtaa

SEQ ID NO: 1998485 - DNA, 15 bp, Homo sapiens
agtcgattctgtaat

SEQ ID NO: 1998486 - DNA, 15 bp, Homo sapiens
gtcgattctgtaatt

SEQ ID NO: 1998487 - DNA, 15 bp, Homo sapiens
tcgattctgtaattg

SEQ ID NO: 1998488 - DNA, 15 bp, Homo sapiens
cgattctgtaattgt

SEQ ID NO: 1998489 - DNA, 15 bp, Homo sapiens
gattctgtaattgta

SEQ ID NO: 1998490 - DNA, 15 bp, Homo sapiens
attctgtaattgtag

SEQ ID NO: 1998491 - DNA, 15 bp, Homo sapiens
ttctgtaattgtaga

SEQ ID NO: 1998492 - DNA, 15 bp, Homo sapiens
tctgtaattgtagaa

SEQ ID NO: 1998493 - DNA, 15 bp, Homo sapiens
ctgtaattgtagaac

SEQ ID NO: 1998494 - DNA, 15 bp, Homo sapiens
tgtaattgtagaact

SEQ ID NO: 1998495 - DNA, 15 bp, Homo sapiens
gtaattgtagaactc

SEQ ID NO: 1998496 - DNA, 15 bp, Homo sapiens
taattgtagaactca

SEQ ID NO: 1998497 - DNA, 15 bp, Homo sapiens
aattgtagaactcac

SEQ ID NO: 1998498 - DNA, 15 bp, Homo sapiens
attgtagaactcaca

SEQ ID NO: 1998499 - DNA, 15 bp, Homo sapiens
ttgtagaactcacag

SEQ ID NO: 1998500 - DNA, 15 bp, Homo sapiens
tgtagaactcacagc

SEQ ID NO: 1998501 - DNA, 15 bp, Homo sapiens
gtagaactcacagca

SEQ ID NO: 1998502 - DNA, 15 bp, Homo sapiens
tagaactcacagcaa

SEQ ID NO: 1998503 - DNA, 15 bp, Homo sapiens
agaactcacagcaaa

SEQ ID NO: 1998504 - DNA, 15 bp, Homo sapiens
gaactcacagcaaac

SEQ ID NO: 1998505 - DNA, 15 bp, Homo sapiens
aactcacagcaaact

SEQ ID NO: 1998506 - DNA, 15 bp, Homo sapiens
actcacagcaaactg

SEQ ID NO: 1998507 - DNA, 15 bp, Homo sapiens
ctcacagcaaactgg

SEQ ID NO: 1998508 - DNA, 15 bp, Homo sapiens
tcacagcaaactggg

SEQ ID NO: 1998509 - DNA, 15 bp, Homo sapiens
cacagcaaactgggg

SEQ ID NO: 1998510 - DNA, 15 bp, Homo sapiens
acagcaaactgggga

SEQ ID NO: 1998511 - DNA, 15 bp, Homo sapiens
cagcaaactggggat

SEQ ID NO: 1998512 - DNA, 15 bp, Homo sapiens
agcaaactggggatt

SEQ ID NO: 1998513 - DNA, 15 bp, Homo sapiens
gcaaactggggattc

SEQ ID NO: 1998514 - DNA, 15 bp, Homo sapiens
caaactggggattcc

SEQ ID NO: 1998515 - DNA, 15 bp, Homo sapiens
aaactggggattccc

SEQ ID NO: 1998516 - DNA, 15 bp, Homo sapiens
aactggggattccca

SEQ ID NO: 1998517 - DNA, 15 bp, Homo sapiens
actggggattcccag

SEQ ID NO: 1998518 - DNA, 15 bp, Homo sapiens
ctggggattcccagg

SEQ ID NO: 1998519 - DNA, 15 bp, Homo sapiens
tggggattcccaggg

SEQ ID NO: 1998520 - DNA, 15 bp, Homo sapiens
ggggattcccaggga

SEQ ID NO: 1998521 - DNA, 15 bp, Homo sapiens
gggattcccagggaa

SEQ ID NO: 1998522 - DNA, 15 bp, Homo sapiens
ggattcccagggaag

SEQ ID NO: 1998523 - DNA, 15 bp, Homo sapiens
gattcccagggaagg

SEQ ID NO: 1998524 - DNA, 15 bp, Homo sapiens
attcccagggaaggg

SEQ ID NO: 1998525 - DNA, 15 bp, Homo sapiens
ttcccagggaagggc

SEQ ID NO: 1998526 - DNA, 15 bp, Homo sapiens
tcccagggaagggct

SEQ ID NO: 1998527 - DNA, 15 bp, Homo sapiens
cccagggaagggctc

SEQ ID NO: 1998528 - DNA, 15 bp, Homo sapiens
ccagggaagggctcg

SEQ ID NO: 1998529 - DNA, 15 bp, Homo sapiens
cagggaagggctcgt

SEQ ID NO: 1998530 - DNA, 15 bp, Homo sapiens
agggaagggctcgtt

SEQ ID NO: 1998531 - DNA, 15 bp, Homo sapiens
gggaagggctcgttt

SEQ ID NO: 1998532 - DNA, 15 bp, Homo sapiens
ggaagggctcgtttg

SEQ ID NO: 1998533 - DNA, 15 bp, Homo sapiens
gaagggctcgtttgg

SEQ ID NO: 1998534 - DNA, 15 bp, Homo sapiens
aagggctcgtttggt

SEQ ID NO: 1998535 - DNA, 15 bp, Homo sapiens
agggctcgtttggtg

SEQ ID NO: 1998536 - DNA, 15 bp, Homo sapiens
gggctcgtttggtga

SEQ ID NO: 1998537 - DNA, 15 bp, Homo sapiens
ggctcgtttggtgaa

SEQ ID NO: 1998538 - DNA, 15 bp, Homo sapiens
gctcgtttggtgaac

SEQ ID NO: 1998539 - DNA, 15 bp, Homo sapiens
ctcgtttggtgaaca

SEQ ID NO: 1998540 - DNA, 15 bp, Homo sapiens
tcgtttggtgaacaa

SEQ ID NO: 1998541 - DNA, 15 bp, Homo sapiens
cgtttggtgaacaag

SEQ ID NO: 1998542 - DNA, 15 bp, Homo sapiens
gtttggtgaacaaga

SEQ ID NO: 1998543 - DNA, 15 bp, Homo sapiens
tttggtgaacaagag

SEQ ID NO: 1998544 - DNA, 15 bp, Homo sapiens
ttggtgaacaagaga

SEQ ID NO: 1998545 - DNA, 15 bp, Homo sapiens
tggtgaacaagagag

SEQ ID NO: 1998546 - DNA, 15 bp, Homo sapiens
ggtgaacaagagagc

SEQ ID NO: 1998547 - DNA, 15 bp, Homo sapiens
gtgaacaagagagca

SEQ ID NO: 1998548 - DNA, 15 bp, Homo sapiens
tgaacaagagagcaa

SEQ ID NO: 1998549 - DNA, 15 bp, Homo sapiens
acaagagagcaagca

SEQ ID NO: 1998550 - DNA, 15 bp, Homo sapiens
caagagagcaagcag

SEQ ID NO: 1998551 - DNA, 15 bp, Homo sapiens
aagagagcaagcagg

SEQ ID NO: 1998552 - DNA, 15 bp, Homo sapiens
agagagcaagcagga

SEQ ID NO: 1998553 - DNA, 15 bp, Homo sapiens
gagagcaagcaggaa

SEQ ID NO: 1998554 - DNA, 15 bp, Homo sapiens
agagcaagcaggaat

SEQ ID NO: 1998555 - DNA, 15 bp, Homo sapiens
gagcaagcaggaatg

SEQ ID NO: 1998556 - DNA, 15 bp, Homo sapiens
agcaagcaggaatgg

SEQ ID NO: 1998557 - DNA, 15 bp, Homo sapiens
gcaagcaggaatggg

SEQ ID NO: 1998558 - DNA, 15 bp, Homo sapiens
caagcaggaatggga

SEQ ID NO: 1998559 - DNA, 15 bp, Homo sapiens
aagcaggaatgggag

SEQ ID NO: 1998560 - DNA, 15 bp, Homo sapiens
agcaggaatgggagg

SEQ ID NO: 1998561 - DNA, 15 bp, Homo sapiens
gcaggaatgggagga

SEQ ID NO: 1998562 - DNA, 15 bp, Homo sapiens
caggaatgggaggac

SEQ ID NO: 1998563 - DNA, 15 bp, Homo sapiens
aggaatgggaggact

SEQ ID NO: 1998564 - DNA, 15 bp, Homo sapiens
ggaatgggaggactg

SEQ ID NO: 1998565 - DNA, 15 bp, Homo sapiens
gaatgggaggactgg

SEQ ID NO: 1998566 - DNA, 15 bp, Homo sapiens
aatgggaggactggt

SEQ ID NO: 1998567 - DNA, 15 bp, Homo sapiens
atgggaggactggta

SEQ ID NO: 1998568 - DNA, 15 bp, Homo sapiens
tgggaggactggtaa

SEQ ID NO: 1998569 - DNA, 15 bp, Homo sapiens
gggaggactggtaag

SEQ ID NO: 1998570 - DNA, 15 bp, Homo sapiens
ggaggactggtaagg

SEQ ID NO: 1998571 - DNA, 15 bp, Homo sapiens
gaggactggtaagga

SEQ ID NO: 1998572 - DNA, 15 bp, Homo sapiens
aggactggtaaggat

SEQ ID NO: 1998573 - DNA, 15 bp, Homo sapiens
ggactggtaaggatg

SEQ ID NO: 1998574 - DNA, 15 bp, Homo sapiens
gactggtaaggatgg

SEQ ID NO: 1998575 - DNA, 15 bp, Homo sapiens
actggtaaggatggc

SEQ ID NO: 1998576 - DNA, 15 bp, Homo sapiens
ctggtaaggatggca

SEQ ID NO: 1998577 - DNA, 15 bp, Homo sapiens
tggtaaggatggcag

SEQ ID NO: 1998578 - DNA, 15 bp, Homo sapiens
ggtaaggatggcagg

SEQ ID NO: 1998579 - DNA, 15 bp, Homo sapiens
gtaaggatggcaggg

SEQ ID NO: 1998580 - DNA, 15 bp, Homo sapiens
taaggatggcagggg

SEQ ID NO: 1998581 - DNA, 15 bp, Homo sapiens
aaggatggcaggggg

SEQ ID NO: 1998582 - DNA, 15 bp, Homo sapiens
aggatggcaggggga

SEQ ID NO: 1998583 - DNA, 15 bp, Homo sapiens
ggatggcagggggat

SEQ ID NO: 1998584 - DNA, 15 bp, Homo sapiens
gatggcagggggatt

SEQ ID NO: 1998585 - DNA, 15 bp, Homo sapiens
atggcagggggattg

SEQ ID NO: 1998586 - DNA, 15 bp, Homo sapiens
tggcagggggattga

SEQ ID NO: 1998587 - DNA, 15 bp, Homo sapiens
ggcagggggattgaa

SEQ ID NO: 1998588 - DNA, 15 bp, Homo sapiens
gcagggggattgaac

SEQ ID NO: 1998589 - DNA, 15 bp, Homo sapiens
cagggggattgaact

SEQ ID NO: 1998590 - DNA, 15 bp, Homo sapiens
agggggattgaactt

SEQ ID NO: 1998591 - DNA, 15 bp, Homo sapiens
gggggattgaacttt

SEQ ID NO: 1998592 - DNA, 15 bp, Homo sapiens
ggggattgaacttta

SEQ ID NO: 1998593 - DNA, 15 bp, Homo sapiens
gggattgaactttaa

SEQ ID NO: 1998594 - DNA, 15 bp, Homo sapiens
ggattgaactttaat

SEQ ID NO: 1998595 - DNA, 15 bp, Homo sapiens
gattgaactttaatt

SEQ ID NO: 1998596 - DNA, 15 bp, Homo sapiens
attgaactttaattg

SEQ ID NO: 1998597 - DNA, 15 bp, Homo sapiens
ttgaactttaattgt

SEQ ID NO: 1998598 - DNA, 15 bp, Homo sapiens
tgaactttaattgtg

SEQ ID NO: 1998599 - DNA, 15 bp, Homo sapiens
gaactttaattgtga

SEQ ID NO: 1998600 - DNA, 15 bp, Homo sapiens
aactttaattgtgat

SEQ ID NO: 1998601 - DNA, 15 bp, Homo sapiens
actttaattgtgatt

SEQ ID NO: 1998602 - DNA, 15 bp, Homo sapiens
ctttaattgtgatta

SEQ ID NO: 1998603 - DNA, 15 bp, Homo sapiens
tttaattgtgattat

SEQ ID NO: 1998604 - DNA, 15 bp, Homo sapiens
ttaattgtgattatg

SEQ ID NO: 1998605 - DNA, 15 bp, Homo sapiens
taattgtgattatgg

SEQ ID NO: 1998606 - DNA, 15 bp, Homo sapiens
aattgtgattatggg

SEQ ID NO: 1998607 - DNA, 15 bp, Homo sapiens
attgtgattatgggg

SEQ ID NO: 1998608 - DNA, 15 bp, Homo sapiens
ttgtgattatggggt

SEQ ID NO: 1998609 - DNA, 15 bp, Homo sapiens
tgtgattatggggtc

SEQ ID NO: 1998610 - DNA, 15 bp, Homo sapiens
gtgattatggggtca

SEQ ID NO: 1998611 - DNA, 15 bp, Homo sapiens
tgattatggggtcag

SEQ ID NO: 1998612 - DNA, 15 bp, Homo sapiens
gattatggggtcaga

SEQ ID NO: 1998613 - DNA, 15 bp, Homo sapiens
attatggggtcagag

SEQ ID NO: 1998614 - DNA, 15 bp, Homo sapiens
ttatggggtcagaga

SEQ ID NO: 1998615 - DNA, 15 bp, Homo sapiens
tatggggtcagagat

SEQ ID NO: 1998616 - DNA, 15 bp, Homo sapiens
atggggtcagagatg

SEQ ID NO: 1998617 - DNA, 15 bp, Homo sapiens
tggggtcagagatgg

SEQ ID NO: 1998618 - DNA, 15 bp, Homo sapiens
ggggtcagagatgga

SEQ ID NO: 1998619 - DNA, 15 bp, Homo sapiens
gggtcagagatggaa

SEQ ID NO: 1998620 - DNA, 15 bp, Homo sapiens
ggtcagagatggaac

SEQ ID NO: 1998621 - DNA, 15 bp, Homo sapiens
gtcagagatggaacc

SEQ ID NO: 1998622 - DNA, 15 bp, Homo sapiens
tcagagatggaacca

SEQ ID NO: 1998623 - DNA, 15 bp, Homo sapiens
cagagatggaaccat

SEQ ID NO: 1998624 - DNA, 15 bp, Homo sapiens
agagatggaaccatc

SEQ ID NO: 1998625 - DNA, 15 bp, Homo sapiens
gagatggaaccatcc

SEQ ID NO: 1998626 - DNA, 15 bp, Homo sapiens
agatggaaccatcct

SEQ ID NO: 1998627 - DNA, 15 bp, Homo sapiens
gatggaaccatcctc

SEQ ID NO: 1998628 - DNA, 15 bp, Homo sapiens
atggaaccatcctct

SEQ ID NO: 1998629 - DNA, 15 bp, Homo sapiens
tggaaccatcctctt

SEQ ID NO: 1998630 - DNA, 15 bp, Homo sapiens
ggaaccatcctcttt

SEQ ID NO: 1998631 - DNA, 15 bp, Homo sapiens
gaaccatcctcttta

SEQ ID NO: 1998632 - DNA, 15 bp, Homo sapiens
aaccatcctctttat

SEQ ID NO: 1998633 - DNA, 15 bp, Homo sapiens
accatcctctttatt

SEQ ID NO: 1998634 - DNA, 15 bp, Homo sapiens
ccatcctctttatta

SEQ ID NO: 1998635 - DNA, 15 bp, Homo sapiens
catcctctttattaa

SEQ ID NO: 1998636 - DNA, 15 bp, Homo sapiens
atcctctttattaaa

SEQ ID NO: 1998637 - DNA, 15 bp, Homo sapiens
tcctctttattaaac

SEQ ID NO: 1998638 - DNA, 15 bp, Homo sapiens
cctctttattaaact

SEQ ID NO: 1998639 - DNA, 15 bp, Homo sapiens
ctctttattaaacta

SEQ ID NO: 1998640 - DNA, 15 bp, Homo sapiens
tctttattaaactat

SEQ ID NO: 1998641 - DNA, 15 bp, Homo sapiens
ctttattaaactatc

SEQ ID NO: 1998642 - DNA, 15 bp, Homo sapiens
tttattaaactatct

SEQ ID NO: 1998643 - DNA, 15 bp, Homo sapiens
ttattaaactatcta

SEQ ID NO: 1998644 - DNA, 15 bp, Homo sapiens
tattaaactatctat

SEQ ID NO: 1998645 - DNA, 15 bp, Homo sapiens
attaaactatctata

SEQ ID NO: 1998646 - DNA, 15 bp, Homo sapiens
ttaaactatctatag

SEQ ID NO: 1998647 - DNA, 15 bp, Homo sapiens
taaactatctataga

SEQ ID NO: 1998648 - DNA, 15 bp, Homo sapiens
aaactatctatagac

SEQ ID NO: 1998649 - DNA, 15 bp, Homo sapiens
aactatctatagaca

SEQ ID NO: 1998650 - DNA, 15 bp, Homo sapiens
actatctatagacag

SEQ ID NO: 1998651 - DNA, 15 bp, Homo sapiens
ctatctatagacaga

SEQ ID NO: 1998652 - DNA, 15 bp, Homo sapiens
tatctatagacagat

SEQ ID NO: 1998653 - DNA, 15 bp, Homo sapiens
atctatagacagatg

SEQ ID NO: 1998654 - DNA, 15 bp, Homo sapiens
tctatagacagatgt

SEQ ID NO: 1998655 - DNA, 15 bp, Homo sapiens
ctatagacagatgta

SEQ ID NO: 1998656 - DNA, 15 bp, Homo sapiens
tatagacagatgtag

SEQ ID NO: 1998657 - DNA, 15 bp, Homo sapiens
atagacagatgtagc

SEQ ID NO: 1998658 - DNA, 15 bp, Homo sapiens
tagacagatgtagca

SEQ ID NO: 1998659 - DNA, 15 bp, Homo sapiens
agacagatgtagcaa

SEQ ID NO: 1998660 - DNA, 15 bp, Homo sapiens
gacagatgtagcaaa

SEQ ID NO: 1998661 - DNA, 15 bp, Homo sapiens
acagatgtagcaaat

SEQ ID NO: 1998662 - DNA, 15 bp, Homo sapiens
cagatgtagcaaata

SEQ ID NO: 1998663 - DNA, 15 bp, Homo sapiens
agatgtagcaaatat

SEQ ID NO: 1998664 - DNA, 15 bp, Homo sapiens
gatgtagcaaatatg

SEQ ID NO: 1998665 - DNA, 15 bp, Homo sapiens
atgtagcaaatatga

SEQ ID NO: 1998666 - DNA, 15 bp, Homo sapiens
tgtagcaaatatgat

SEQ ID NO: 1998667 - DNA, 15 bp, Homo sapiens
gtagcaaatatgatg

SEQ ID NO: 1998668 - DNA, 15 bp, Homo sapiens
tagcaaatatgatga

SEQ ID NO: 1998669 - DNA, 15 bp, Homo sapiens
agcaaatatgatgaa

SEQ ID NO: 1998670 - DNA, 15 bp, Homo sapiens
gcaaatatgatgaaa

SEQ ID NO: 1998671 - DNA, 15 bp, Homo sapiens
caaatatgatgaaac

SEQ ID NO: 1998672 - DNA, 15 bp, Homo sapiens
aaatatgatgaaacg

SEQ ID NO: 1998673 - DNA, 15 bp, Homo sapiens
aatatgatgaaacgt

SEQ ID NO: 1998674 - DNA, 15 bp, Homo sapiens
atatgatgaaacgtt

SEQ ID NO: 1998675 - DNA, 15 bp, Homo sapiens
tatgatgaaacgtta

SEQ ID NO: 1998676 - DNA, 15 bp, Homo sapiens
atgatgaaacgttaa

SEQ ID NO: 1998677 - DNA, 15 bp, Homo sapiens
tgatgaaacgttaac

SEQ ID NO: 1998678 - DNA, 15 bp, Homo sapiens
gatgaaacgttaaca

SEQ ID NO: 1998679 - DNA, 15 bp, Homo sapiens
atgaaacgttaacag

SEQ ID NO: 1998680 - DNA, 15 bp, Homo sapiens
tgaaacgttaacagt

SEQ ID NO: 1998681 - DNA, 15 bp, Homo sapiens
gaaacgttaacagtt

SEQ ID NO: 1998682 - DNA, 15 bp, Homo sapiens
aaacgttaacagttg

SEQ ID NO: 1998683 - DNA, 15 bp, Homo sapiens
aacgttaacagttgt

SEQ ID NO: 1998684 - DNA, 15 bp, Homo sapiens
acgttaacagttgtt

SEQ ID NO: 1998685 - DNA, 15 bp, Homo sapiens
cgttaacagttgtta

SEQ ID NO: 1998686 - DNA, 15 bp, Homo sapiens
gttaacagttgttaa

SEQ ID NO: 1998687 - DNA, 15 bp, Homo sapiens
ttaacagttgttaaa

SEQ ID NO: 1998688 - DNA, 15 bp, Homo sapiens
taacagttgttaaat

SEQ ID NO: 1998689 - DNA, 15 bp, Homo sapiens
aacagttgttaaatc

SEQ ID NO: 1998690 - DNA, 15 bp, Homo sapiens
acagttgttaaatct

SEQ ID NO: 1998691 - DNA, 15 bp, Homo sapiens
cagttgttaaatcta

SEQ ID NO: 1998692 - DNA, 15 bp, Homo sapiens
agttgttaaatctag

SEQ ID NO: 1998693 - DNA, 15 bp, Homo sapiens
gttgttaaatctagg

SEQ ID NO: 1998694 - DNA, 15 bp, Homo sapiens
ttgttaaatctaggt

SEQ ID NO: 1998695 - DNA, 15 bp, Homo sapiens
tgttaaatctaggtg

SEQ ID NO: 1998696 - DNA, 15 bp, Homo sapiens
gttaaatctaggtgg

SEQ ID NO: 1998697 - DNA, 15 bp, Homo sapiens
ttaaatctaggtggt

SEQ ID NO: 1998698 - DNA, 15 bp, Homo sapiens
taaatctaggtggtg

SEQ ID NO: 1998699 - DNA, 15 bp, Homo sapiens
aaatctaggtggtgt

SEQ ID NO: 1998700 - DNA, 15 bp, Homo sapiens
aatctaggtggtgtg

SEQ ID NO: 1998701 - DNA, 15 bp, Homo sapiens
atctaggtggtgtgt

SEQ ID NO: 1998702 - DNA, 15 bp, Homo sapiens
tctaggtggtgtgta

SEQ ID NO: 1998703 - DNA, 15 bp, Homo sapiens
ctaggtggtgtgtat

SEQ ID NO: 1998704 - DNA, 15 bp, Homo sapiens
taggtggtgtgtatg

SEQ ID NO: 1998705 - DNA, 15 bp, Homo sapiens
aggtggtgtgtatgt

SEQ ID NO: 1998706 - DNA, 15 bp, Homo sapiens
ggtggtgtgtatgta

SEQ ID NO: 1998707 - DNA, 15 bp, Homo sapiens
gtggtgtgtatgtaa

SEQ ID NO: 1998708 - DNA, 15 bp, Homo sapiens
tggtgtgtatgtaag

SEQ ID NO: 1998709 - DNA, 15 bp, Homo sapiens
ggtgtgtatgtaagg

SEQ ID NO: 1998710 - DNA, 15 bp, Homo sapiens
gtgtgtatgtaaggt

SEQ ID NO: 1998711 - DNA, 15 bp, Homo sapiens
tgtgtatgtaaggtg

SEQ ID NO: 1998712 - DNA, 15 bp, Homo sapiens
gtgtatgtaaggtgt

SEQ ID NO: 1998713 - DNA, 15 bp, Homo sapiens
tgtatgtaaggtgtt

SEQ ID NO: 1998714 - DNA, 15 bp, Homo sapiens
gtatgtaaggtgttc

SEQ ID NO: 1998715 - DNA, 15 bp, Homo sapiens
tatgtaaggtgttca

SEQ ID NO: 1998716 - DNA, 15 bp, Homo sapiens
atgtaaggtgttcat

SEQ ID NO: 1998717 - DNA, 15 bp, Homo sapiens
tgtaaggtgttcatt

SEQ ID NO: 1998718 - DNA, 15 bp, Homo sapiens
gtaaggtgttcatta

SEQ ID NO: 1998719 - DNA, 15 bp, Homo sapiens
taaggtgttcattat

SEQ ID NO: 1998720 - DNA, 15 bp, Homo sapiens
aaggtgttcattatt

SEQ ID NO: 1998721 - DNA, 15 bp, Homo sapiens
aggtgttcattattt

SEQ ID NO: 1998722 - DNA, 15 bp, Homo sapiens
ggtgttcattatttt

SEQ ID NO: 1998723 - DNA, 15 bp, Homo sapiens
gtgttcattattttt

SEQ ID NO: 1998724 - DNA, 15 bp, Homo sapiens
tgttcattatttttg

SEQ ID NO: 1998725 - DNA, 15 bp, Homo sapiens
gttcattatttttgt

SEQ ID NO: 1998726 - DNA, 15 bp, Homo sapiens
ttcattatttttgtt

SEQ ID NO: 1998727 - DNA, 15 bp, Homo sapiens
tcattatttttgttc

SEQ ID NO: 1998728 - DNA, 15 bp, Homo sapiens
cattatttttgttct

SEQ ID NO: 1998729 - DNA, 15 bp, Homo sapiens
attatttttgttctg

SEQ ID NO: 1998730 - DNA, 15 bp, Homo sapiens
ttatttttgttctgt

SEQ ID NO: 1998731 - DNA, 15 bp, Homo sapiens
tatttttgttctgtg

SEQ ID NO: 1998732 - DNA, 15 bp, Homo sapiens
atttttgttctgtgt

SEQ ID NO: 1998733 - DNA, 15 bp, Homo sapiens
tttttgttctgtgtg

SEQ ID NO: 1998734 - DNA, 15 bp, Homo sapiens
ttttgttctgtgtgt

SEQ ID NO: 1998735 - DNA, 15 bp, Homo sapiens
tttgttctgtgtgtg

SEQ ID NO: 1998736 - DNA, 15 bp, Homo sapiens
ttgttctgtgtgtgt

SEQ ID NO: 1998737 - DNA, 15 bp, Homo sapiens
tgttctgtgtgtgtg

SEQ ID NO: 1998738 - DNA, 15 bp, Homo sapiens
gttctgtgtgtgtgt

SEQ ID NO: 1998739 - DNA, 15 bp, Homo sapiens
ttctgtgtgtgtgtt

SEQ ID NO: 1998740 - DNA, 15 bp, Homo sapiens
tctgtgtgtgtgttt

SEQ ID NO: 1998741 - DNA, 15 bp, Homo sapiens
ctgtgtgtgtgtttg

SEQ ID NO: 1998742 - DNA, 15 bp, Homo sapiens
tgtgtgtgtgtttga

SEQ ID NO: 1998743 - DNA, 15 bp, Homo sapiens
gtgtgtgtgtttgaa

SEQ ID NO: 1998744 - DNA, 15 bp, Homo sapiens
tgtgtgtgtttgaaa

SEQ ID NO: 1998745 - DNA, 15 bp, Homo sapiens
gtgtgtgtttgaaaa

SEQ ID NO: 1998746 - DNA, 15 bp, Homo sapiens
tgtgtgtttgaaaat

SEQ ID NO: 1998747 - DNA, 15 bp, Homo sapiens
gtgtgtttgaaaatt

SEQ ID NO: 1998748 - DNA, 15 bp, Homo sapiens
tgtgtttgaaaattt

SEQ ID NO: 1998749 - DNA, 15 bp, Homo sapiens
gtgtttgaaaatttt

SEQ ID NO: 1998750 - DNA, 15 bp, Homo sapiens
tgtttgaaaattttc

SEQ ID NO: 1998751 - DNA, 15 bp, Homo sapiens
gtttgaaaattttca

SEQ ID NO: 1998752 - DNA, 15 bp, Homo sapiens
tttgaaaattttcat

SEQ ID NO: 1998753 - DNA, 15 bp, Homo sapiens
ttgaaaattttcata

SEQ ID NO: 1998754 - DNA, 15 bp, Homo sapiens
tgaaaattttcataa

SEQ ID NO: 1998755 - DNA, 15 bp, Homo sapiens
gaaaattttcataat

SEQ ID NO: 1998756 - DNA, 15 bp, Homo sapiens
aaaattttcataata

SEQ ID NO: 1998757 - DNA, 15 bp, Homo sapiens
aaattttcataatag

SEQ ID NO: 1998758 - DNA, 15 bp, Homo sapiens
aattttcataataga

SEQ ID NO: 1998759 - DNA, 15 bp, Homo sapiens
attttcataatagaa

SEQ ID NO: 1998760 - DNA, 15 bp, Homo sapiens
ttttcataatagaaa

SEQ ID NO: 1998761 - DNA, 15 bp, Homo sapiens
tttcataatagaaaa

SEQ ID NO: 1998762 - DNA, 15 bp, Homo sapiens
ttcataatagaaaat

SEQ ID NO: 1998763 - DNA, 15 bp, Homo sapiens
tcataatagaaaatg

SEQ ID NO: 1998764 - DNA, 15 bp, Homo sapiens
cataatagaaaatgt

SEQ ID NO: 1998765 - DNA, 15 bp, Homo sapiens
ataatagaaaatgtt

SEQ ID NO: 1998766 - DNA, 15 bp, Homo sapiens
taatagaaaatgttt

SEQ ID NO: 1998767 - DNA, 15 bp, Homo sapiens
aatagaaaatgttta

SEQ ID NO: 1998768 - DNA, 15 bp, Homo sapiens
atagaaaatgtttac

SEQ ID NO: 1998769 - DNA, 15 bp, Homo sapiens
tagaaaatgtttaca

SEQ ID NO: 1998770 - DNA, 15 bp, Homo sapiens
agaaaatgtttacag

SEQ ID NO: 1998771 - DNA, 15 bp, Homo sapiens
gaaaatgtttacagg

SEQ ID NO: 1998772 - DNA, 15 bp, Homo sapiens
aaaatgtttacaggt

SEQ ID NO: 1998773 - DNA, 15 bp, Homo sapiens
aaatgtttacaggta

SEQ ID NO: 1998774 - DNA, 15 bp, Homo sapiens
aatgtttacaggtaa

SEQ ID NO: 1998775 - DNA, 15 bp, Homo sapiens
atgtttacaggtaaa

SEQ ID NO: 1998776 - DNA, 15 bp, Homo sapiens
tgtttacaggtaaaa

SEQ ID NO: 1998777 - DNA, 15 bp, Homo sapiens
gtttacaggtaaaat

SEQ ID NO: 1998778 - DNA, 15 bp, Homo sapiens
tttacaggtaaaatt

SEQ ID NO: 1998779 - DNA, 15 bp, Homo sapiens
ttacaggtaaaatta

SEQ ID NO: 1998780 - DNA, 15 bp, Homo sapiens
tacaggtaaaattaa

SEQ ID NO: 1998781 - DNA, 15 bp, Homo sapiens
acaggtaaaattaaa

SEQ ID NO: 1998782 - DNA, 15 bp, Homo sapiens
caggtaaaattaaag

SEQ ID NO: 1998783 - DNA, 15 bp, Homo sapiens
aggtaaaattaaagt

SEQ ID NO: 1998784 - DNA, 15 bp, Homo sapiens
ggtaaaattaaagtt

SEQ ID NO: 1998785 - DNA, 15 bp, Homo sapiens
gtaaaattaaagttt

SEQ ID NO: 1998786 - DNA, 15 bp, Homo sapiens
taaaattaaagttta

SEQ ID NO: 1998787 - DNA, 15 bp, Homo sapiens
aaaattaaagtttag

SEQ ID NO: 1998788 - DNA, 15 bp, Homo sapiens
aaattaaagtttaga

SEQ ID NO: 1998789 - DNA, 15 bp, Homo sapiens
aattaaagtttagaa

SEQ ID NO: 1998790 - DNA, 15 bp, Homo sapiens
attaaagtttagaat

SEQ ID NO: 1998791 - DNA, 15 bp, Homo sapiens
ttaaagtttagaata

SEQ ID NO: 1998792 - DNA, 15 bp, Homo sapiens
taaagtttagaataa

SEQ ID NO: 1998793 - DNA, 15 bp, Homo sapiens
aaagtttagaataat

SEQ ID NO: 1998794 - DNA, 15 bp, Homo sapiens
aagtttagaataatg

SEQ ID NO: 1998795 - DNA, 15 bp, Homo sapiens
agtttagaataatgt

SEQ ID NO: 1998796 - DNA, 15 bp, Homo sapiens
gtttagaataatgtg

SEQ ID NO: 1998797 - DNA, 15 bp, Homo sapiens
tttagaataatgtga

SEQ ID NO: 1998798 - DNA, 15 bp, Homo sapiens
ttagaataatgtgat

SEQ ID NO: 1998799 - DNA, 15 bp, Homo sapiens
tagaataatgtgatt

SEQ ID NO: 1998800 - DNA, 15 bp, Homo sapiens
agaataatgtgatta

SEQ ID NO: 1998801 - DNA, 15 bp, Homo sapiens
gaataatgtgattat

SEQ ID NO: 1998802 - DNA, 15 bp, Homo sapiens
aataatgtgattatt

SEQ ID NO: 1998803 - DNA, 15 bp, Homo sapiens
ataatgtgattattt

SEQ ID NO: 1998804 - DNA, 15 bp, Homo sapiens
taatgtgattatttc

SEQ ID NO: 1998805 - DNA, 15 bp, Homo sapiens
aatgtgattatttct

SEQ ID NO: 1998806 - DNA, 15 bp, Homo sapiens
atgtgattatttcta

SEQ ID NO: 1998807 - DNA, 15 bp, Homo sapiens
tgtgattatttctat

SEQ ID NO: 1998808 - DNA, 15 bp, Homo sapiens
gtgattatttctatt

SEQ ID NO: 1998809 - DNA, 15 bp, Homo sapiens
tgattatttctattt

SEQ ID NO: 1998810 - DNA, 15 bp, Homo sapiens
gattatttctatttt

SEQ ID NO: 1998811 - DNA, 15 bp, Homo sapiens
attatttctatttta

SEQ ID NO: 1998812 - DNA, 15 bp, Homo sapiens
ttatttctattttag

SEQ ID NO: 1998813 - DNA, 15 bp, Homo sapiens
tatttctattttagc

SEQ ID NO: 1998814 - DNA, 15 bp, Homo sapiens
atttctattttagca

SEQ ID NO: 1998815 - DNA, 15 bp, Homo sapiens
tttctattttagcaa

SEQ ID NO: 1998816 - DNA, 15 bp, Homo sapiens
ttctattttagcaac

SEQ ID NO: 1998817 - DNA, 15 bp, Homo sapiens
tctattttagcaacc

SEQ ID NO: 1998818 - DNA, 15 bp, Homo sapiens
ctattttagcaacca

SEQ ID NO: 1998819 - DNA, 15 bp, Homo sapiens
tattttagcaaccaa

SEQ ID NO: 1998820 - DNA, 15 bp, Homo sapiens
attttagcaaccaaa

SEQ ID NO: 1998821 - DNA, 15 bp, Homo sapiens
ttttagcaaccaaag

SEQ ID NO: 1998822 - DNA, 15 bp, Homo sapiens
tttagcaaccaaagg

SEQ ID NO: 1998823 - DNA, 15 bp, Homo sapiens
ttagcaaccaaagga

SEQ ID NO: 1998824 - DNA, 15 bp, Homo sapiens
tagcaaccaaaggac

SEQ ID NO: 1998825 - DNA, 15 bp, Homo sapiens
agcaaccaaaggaca

SEQ ID NO: 1998826 - DNA, 15 bp, Homo sapiens
gcaaccaaaggacac

SEQ ID NO: 1998827 - DNA, 15 bp, Homo sapiens
caaccaaaggacaca

SEQ ID NO: 1998828 - DNA, 15 bp, Homo sapiens
aaccaaaggacacaa

SEQ ID NO: 1998829 - DNA, 15 bp, Homo sapiens
accaaaggacacaat

SEQ ID NO: 1998830 - DNA, 15 bp, Homo sapiens
ccaaaggacacaatg

SEQ ID NO: 1998831 - DNA, 15 bp, Homo sapiens
caaaggacacaatga

SEQ ID NO: 1998832 - DNA, 15 bp, Homo sapiens
aaaggacacaatgag

SEQ ID NO: 1998833 - DNA, 15 bp, Homo sapiens
aaggacacaatgaga

SEQ ID NO: 1998834 - DNA, 15 bp, Homo sapiens
aggacacaatgagat

SEQ ID NO: 1998835 - DNA, 15 bp, Homo sapiens
ggacacaatgagatt

SEQ ID NO: 1998836 - DNA, 15 bp, Homo sapiens
gacacaatgagatta

SEQ ID NO: 1998837 - DNA, 15 bp, Homo sapiens
acacaatgagattag

SEQ ID NO: 1998838 - DNA, 15 bp, Homo sapiens
cacaatgagattaga

SEQ ID NO: 1998839 - DNA, 15 bp, Homo sapiens
acaatgagattagat

SEQ ID NO: 1998840 - DNA, 15 bp, Homo sapiens
caatgagattagatg

SEQ ID NO: 1998841 - DNA, 15 bp, Homo sapiens
aatgagattagatga

SEQ ID NO: 1998842 - DNA, 15 bp, Homo sapiens
atgagattagatgaa

SEQ ID NO: 1998843 - DNA, 15 bp, Homo sapiens
tgagattagatgaaa

SEQ ID NO: 1998844 - DNA, 15 bp, Homo sapiens
gagattagatgaaac

SEQ ID NO: 1998845 - DNA, 15 bp, Homo sapiens
agattagatgaaacg

SEQ ID NO: 1998846 - DNA, 15 bp, Homo sapiens
gattagatgaaacga

SEQ ID NO: 1998847 - DNA, 15 bp, Homo sapiens
attagatgaaacgat

SEQ ID NO: 1998848 - DNA, 15 bp, Homo sapiens
ttagatgaaacgatg

SEQ ID NO: 1998849 - DNA, 15 bp, Homo sapiens
tagatgaaacgatgc

SEQ ID NO: 1998850 - DNA, 15 bp, Homo sapiens
agatgaaacgatgct

SEQ ID NO: 1998851 - DNA, 15 bp, Homo sapiens
gatgaaacgatgctg

SEQ ID NO: 1998852 - DNA, 15 bp, Homo sapiens
atgaaacgatgctgg

SEQ ID NO: 1998853 - DNA, 15 bp, Homo sapiens
tgaaacgatgctggt

SEQ ID NO: 1998854 - DNA, 15 bp, Homo sapiens
gaaacgatgctggtc

SEQ ID NO: 1998855 - DNA, 15 bp, Homo sapiens
aaacgatgctggtca

SEQ ID NO: 1998856 - DNA, 15 bp, Homo sapiens
aacgatgctggtcaa

SEQ ID NO: 1998857 - DNA, 15 bp, Homo sapiens
acgatgctggtcaaa

SEQ ID NO: 1998858 - DNA, 15 bp, Homo sapiens
cgatgctggtcaaac

SEQ ID NO: 1998859 - DNA, 15 bp, Homo sapiens
gatgctggtcaaaca

SEQ ID NO: 1998860 - DNA, 15 bp, Homo sapiens
atgctggtcaaacag

SEQ ID NO: 1998861 - DNA, 15 bp, Homo sapiens
tgctggtcaaacagt

SEQ ID NO: 1998862 - DNA, 15 bp, Homo sapiens
gctggtcaaacagtt

SEQ ID NO: 1998863 - DNA, 15 bp, Homo sapiens
ctggtcaaacagttg

SEQ ID NO: 1998864 - DNA, 15 bp, Homo sapiens
tggtcaaacagttgc

SEQ ID NO: 1998865 - DNA, 15 bp, Homo sapiens
ggtcaaacagttgct

SEQ ID NO: 1998866 - DNA, 15 bp, Homo sapiens
gtcaaacagttgctg

SEQ ID NO: 1998867 - DNA, 15 bp, Homo sapiens
tcaaacagttgctgc

SEQ ID NO: 1998868 - DNA, 15 bp, Homo sapiens
caaacagttgctgcc

SEQ ID NO: 1998869 - DNA, 15 bp, Homo sapiens
aaacagttgctgcca

SEQ ID NO: 1998870 - DNA, 15 bp, Homo sapiens
aacagttgctgccag

SEQ ID NO: 1998871 - DNA, 15 bp, Homo sapiens
acagttgctgccaga

SEQ ID NO: 1998872 - DNA, 15 bp, Homo sapiens
agttgctgccagaaa

SEQ ID NO: 1998873 - DNA, 15 bp, Homo sapiens
gttgctgccagaaat

SEQ ID NO: 1998874 - DNA, 15 bp, Homo sapiens
ttgctgccagaaatc

SEQ ID NO: 1998875 - DNA, 15 bp, Homo sapiens
tgctgccagaaatct

SEQ ID NO: 1998876 - DNA, 15 bp, Homo sapiens
gctgccagaaatctg

SEQ ID NO: 1998877 - DNA, 15 bp, Homo sapiens
ctgccagaaatctgc

SEQ ID NO: 1998878 - DNA, 15 bp, Homo sapiens
tgccagaaatctgcc

SEQ ID NO: 1998879 - DNA, 15 bp, Homo sapiens
gccagaaatctgcca

SEQ ID NO: 1998880 - DNA, 15 bp, Homo sapiens
ccagaaatctgccat

SEQ ID NO: 1998881 - DNA, 15 bp, Homo sapiens
cagaaatctgccatt

SEQ ID NO: 1998882 - DNA, 15 bp, Homo sapiens
agaaatctgccattt

SEQ ID NO: 1998883 - DNA, 15 bp, Homo sapiens
gaaatctgccatttt

SEQ ID NO: 1998884 - DNA, 15 bp, Homo sapiens
aaatctgccattttc

SEQ ID NO: 1998885 - DNA, 15 bp, Homo sapiens
aatctgccattttct

SEQ ID NO: 1998886 - DNA, 15 bp, Homo sapiens
atctgccattttctt

SEQ ID NO: 1998887 - DNA, 15 bp, Homo sapiens
tctgccattttcttc

SEQ ID NO: 1998888 - DNA, 15 bp, Homo sapiens
ctgccattttcttca

SEQ ID NO: 1998889 - DNA, 15 bp, Homo sapiens
tgccattttcttcac

SEQ ID NO: 1998890 - DNA, 15 bp, Homo sapiens
gccattttcttcaca

SEQ ID NO: 1998891 - DNA, 15 bp, Homo sapiens
ccattttcttcacac

SEQ ID NO: 1998892 - DNA, 15 bp, Homo sapiens
cattttcttcacacc

SEQ ID NO: 1998893 - DNA, 15 bp, Homo sapiens
attttcttcacacct

SEQ ID NO: 1998894 - DNA, 15 bp, Homo sapiens
ttttcttcacacctg

SEQ ID NO: 1998895 - DNA, 15 bp, Homo sapiens
tttcttcacacctgt

SEQ ID NO: 1998896 - DNA, 15 bp, Homo sapiens
ttcttcacacctgtc

SEQ ID NO: 1998897 - DNA, 15 bp, Homo sapiens
tcttcacacctgtcg

SEQ ID NO: 1998898 - DNA, 15 bp, Homo sapiens
cttcacacctgtcgt

SEQ ID NO: 1998899 - DNA, 15 bp, Homo sapiens
ttcacacctgtcgtg

SEQ ID NO: 1998900 - DNA, 15 bp, Homo sapiens
tcacacctgtcgtga

SEQ ID NO: 1998901 - DNA, 15 bp, Homo sapiens
cacacctgtcgtgaa

SEQ ID NO: 1998902 - DNA, 15 bp, Homo sapiens
acacctgtcgtgaag

SEQ ID NO: 1998903 - DNA, 15 bp, Homo sapiens
cacctgtcgtgaagg

SEQ ID NO: 1998904 - DNA, 15 bp, Homo sapiens
acctgtcgtgaagga

SEQ ID NO: 1998905 - DNA, 15 bp, Homo sapiens
cctgtcgtgaaggaa

SEQ ID NO: 1998906 - DNA, 15 bp, Homo sapiens
ctgtcgtgaaggaaa

SEQ ID NO: 1998907 - DNA, 15 bp, Homo sapiens
tgtcgtgaaggaaac

SEQ ID NO: 1998908 - DNA, 15 bp, Homo sapiens
gtcgtgaaggaaacc

SEQ ID NO: 1998909 - DNA, 15 bp, Homo sapiens
tcgtgaaggaaacca

SEQ ID NO: 1998910 - DNA, 15 bp, Homo sapiens
cgtgaaggaaaccag

SEQ ID NO: 1998911 - DNA, 15 bp, Homo sapiens
gtgaaggaaaccagc

SEQ ID NO: 1998912 - DNA, 15 bp, Homo sapiens
tgaaggaaaccagca

SEQ ID NO: 1998913 - DNA, 15 bp, Homo sapiens
gaaggaaaccagcat

SEQ ID NO: 1998914 - DNA, 15 bp, Homo sapiens
aaggaaaccagcatg

SEQ ID NO: 1998915 - DNA, 15 bp, Homo sapiens
aggaaaccagcatgc

SEQ ID NO: 1998916 - DNA, 15 bp, Homo sapiens
ggaaaccagcatgca

SEQ ID NO: 1998917 - DNA, 15 bp, Homo sapiens
gaaaccagcatgcag

SEQ ID NO: 1998918 - DNA, 15 bp, Homo sapiens
aaaccagcatgcagc

SEQ ID NO: 1998919 - DNA, 15 bp, Homo sapiens
aaccagcatgcagct

SEQ ID NO: 1998920 - DNA, 15 bp, Homo sapiens
accagcatgcagctg

SEQ ID NO: 1998921 - DNA, 15 bp, Homo sapiens
ccagcatgcagctga

SEQ ID NO: 1998922 - DNA, 15 bp, Homo sapiens
cagcatgcagctgaa

SEQ ID NO: 1998923 - DNA, 15 bp, Homo sapiens
agcatgcagctgaac

SEQ ID NO: 1998924 - DNA, 15 bp, Homo sapiens
gcatgcagctgaact

SEQ ID NO: 1998925 - DNA, 15 bp, Homo sapiens
catgcagctgaactt

SEQ ID NO: 1998926 - DNA, 15 bp, Homo sapiens
atgcagctgaacttc

SEQ ID NO: 1998927 - DNA, 15 bp, Homo sapiens
tgcagctgaacttcg

SEQ ID NO: 1998928 - DNA, 15 bp, Homo sapiens
gcagctgaacttcgg

SEQ ID NO: 1998929 - DNA, 15 bp, Homo sapiens
cagctgaacttcgga

SEQ ID NO: 1998930 - DNA, 15 bp, Homo sapiens
agctgaacttcggaa

SEQ ID NO: 1998931 - DNA, 15 bp, Homo sapiens
gctgaacttcggaat

SEQ ID NO: 1998932 - DNA, 15 bp, Homo sapiens
ctgaacttcggaatt

SEQ ID NO: 1998933 - DNA, 15 bp, Homo sapiens
tgaacttcggaattc

SEQ ID NO: 1998934 - DNA, 15 bp, Homo sapiens
gaacttcggaattct

SEQ ID NO: 1998935 - DNA, 15 bp, Homo sapiens
aacttcggaattctg

SEQ ID NO: 1998936 - DNA, 15 bp, Homo sapiens
acttcggaattctgc

SEQ ID NO: 1998937 - DNA, 15 bp, Homo sapiens
cttcggaattctgcc

SEQ ID NO: 1998938 - DNA, 15 bp, Homo sapiens
ttcggaattctgcct

SEQ ID NO: 1998939 - DNA, 15 bp, Homo sapiens
tcggaattctgcctc

SEQ ID NO: 1998940 - DNA, 15 bp, Homo sapiens
cggaattctgcctct

SEQ ID NO: 1998941 - DNA, 15 bp, Homo sapiens
ggaattctgcctctg

SEQ ID NO: 1998942 - DNA, 15 bp, Homo sapiens
gaattctgcctctgg

SEQ ID NO: 1998943 - DNA, 15 bp, Homo sapiens
aattctgcctctggg

SEQ ID NO: 1998944 - DNA, 15 bp, Homo sapiens
attctgcctctgggg

SEQ ID NO: 1998945 - DNA, 15 bp, Homo sapiens
ttctgcctctggggt

SEQ ID NO: 1998946 - DNA, 15 bp, Homo sapiens
tctgcctctggggtt

SEQ ID NO: 1998947 - DNA, 15 bp, Homo sapiens
ctgcctctggggttt

SEQ ID NO: 1998948 - DNA, 15 bp, Homo sapiens
tgcctctggggtttt

SEQ ID NO: 1998949 - DNA, 15 bp, Homo sapiens
gcctctggggtttta

SEQ ID NO: 1998950 - DNA, 15 bp, Homo sapiens
cctctggggttttat

SEQ ID NO: 1998951 - DNA, 15 bp, Homo sapiens
ctctggggttttatt

SEQ ID NO: 1998952 - DNA, 15 bp, Homo sapiens
tctggggttttattt

SEQ ID NO: 1998953 - DNA, 15 bp, Homo sapiens
ctggggttttatttt

SEQ ID NO: 1998954 - DNA, 15 bp, Homo sapiens
tggggttttattttc

SEQ ID NO: 1998955 - DNA, 15 bp, Homo sapiens
ggggttttattttct

SEQ ID NO: 1998956 - DNA, 15 bp, Homo sapiens
gggttttattttctc

SEQ ID NO: 1998957 - DNA, 15 bp, Homo sapiens
ggttttattttctct

SEQ ID NO: 1998958 - DNA, 15 bp, Homo sapiens
gttttattttctctc

SEQ ID NO: 1998959 - DNA, 15 bp, Homo sapiens
ttttattttctctca

SEQ ID NO: 1998960 - DNA, 15 bp, Homo sapiens
tttattttctctcag

SEQ ID NO: 1998961 - DNA, 15 bp, Homo sapiens
ttattttctctcagc

SEQ ID NO: 1998962 - DNA, 15 bp, Homo sapiens
tattttctctcagct

SEQ ID NO: 1998963 - DNA, 15 bp, Homo sapiens
attttctctcagctg

SEQ ID NO: 1998964 - DNA, 15 bp, Homo sapiens
ttttctctcagctgc

SEQ ID NO: 1998965 - DNA, 15 bp, Homo sapiens
tttctctcagctgca

SEQ ID NO: 1998966 - DNA, 15 bp, Homo sapiens
ttctctcagctgcaa

SEQ ID NO: 1998967 - DNA, 15 bp, Homo sapiens
tctctcagctgcaac

SEQ ID NO: 1998968 - DNA, 15 bp, Homo sapiens
ctctcagctgcaaca

SEQ ID NO: 1998969 - DNA, 15 bp, Homo sapiens
tctcagctgcaacaa

SEQ ID NO: 1998970 - DNA, 15 bp, Homo sapiens
ctcagctgcaacaac

SEQ ID NO: 1998971 - DNA, 15 bp, Homo sapiens
tcagctgcaacaact

SEQ ID NO: 1998972 - DNA, 15 bp, Homo sapiens
cagctgcaacaactt

SEQ ID NO: 1998973 - DNA, 15 bp, Homo sapiens
agctgcaacaacttc

SEQ ID NO: 1998974 - DNA, 15 bp, Homo sapiens
gctgcaacaacttca

SEQ ID NO: 1998975 - DNA, 15 bp, Homo sapiens
ctgcaacaacttcaa

SEQ ID NO: 1998976 - DNA, 15 bp, Homo sapiens
tgcaacaacttcaat

SEQ ID NO: 1998977 - DNA, 15 bp, Homo sapiens
gcaacaacttcaatg

SEQ ID NO: 1998978 - DNA, 15 bp, Homo sapiens
caacaacttcaatgc

SEQ ID NO: 1998979 - DNA, 15 bp, Homo sapiens
aacaacttcaatgca

SEQ ID NO: 1998980 - DNA, 15 bp, Homo sapiens
acaacttcaatgcag

SEQ ID NO: 1998981 - DNA, 15 bp, Homo sapiens
caacttcaatgcagt

SEQ ID NO: 1998982 - DNA, 15 bp, Homo sapiens
aacttcaatgcagtc

SEQ ID NO: 1998983 - DNA, 15 bp, Homo sapiens
acttcaatgcagtct

SEQ ID NO: 1998984 - DNA, 15 bp, Homo sapiens
cttcaatgcagtctt

SEQ ID NO: 1998985 - DNA, 15 bp, Homo sapiens
ttcaatgcagtcttt

SEQ ID NO: 1998986 - DNA, 15 bp, Homo sapiens
tcaatgcagtcttta

SEQ ID NO: 1998987 - DNA, 15 bp, Homo sapiens
caatgcagtctttag

SEQ ID NO: 1998988 - DNA, 15 bp, Homo sapiens
aatgcagtctttagt

SEQ ID NO: 1998989 - DNA, 15 bp, Homo sapiens
atgcagtctttagtc

SEQ ID NO: 1998990 - DNA, 15 bp, Homo sapiens
tgcagtctttagtcg

SEQ ID NO: 1998991 - DNA, 15 bp, Homo sapiens
gcagtctttagtcgc

SEQ ID NO: 1998992 - DNA, 15 bp, Homo sapiens
cagtctttagtcgca

SEQ ID NO: 1998993 - DNA, 15 bp, Homo sapiens
agtctttagtcgcat

SEQ ID NO: 1998994 - DNA, 15 bp, Homo sapiens
gtctttagtcgcatt

SEQ ID NO: 1998995 - DNA, 15 bp, Homo sapiens
tctttagtcgcattt

SEQ ID NO: 1998996 - DNA, 15 bp, Homo sapiens
ctttagtcgcatttc

SEQ ID NO: 1998997 - DNA, 15 bp, Homo sapiens
tttagtcgcatttct

SEQ ID NO: 1998998 - DNA, 15 bp, Homo sapiens
ttagtcgcatttcta

SEQ ID NO: 1998999 - DNA, 15 bp, Homo sapiens
tagtcgcatttctac

SEQ ID NO: 1999000 - DNA, 15 bp, Homo sapiens
agtcgcatttctacc

SEQ ID NO: 1999001 - DNA, 15 bp, Homo sapiens
gtcgcatttctacca

SEQ ID NO: 1999002 - DNA, 15 bp, Homo sapiens
tcgcatttctaccag

SEQ ID NO: 1999003 - DNA, 15 bp, Homo sapiens
cgcatttctaccagg

SEQ ID NO: 1999004 - DNA, 15 bp, Homo sapiens
gcatttctaccaggt

SEQ ID NO: 1999005 - DNA, 15 bp, Homo sapiens
catttctaccaggtt

SEQ ID NO: 1999006 - DNA, 15 bp, Homo sapiens
atttctaccaggtta

SEQ ID NO: 1999007 - DNA, 15 bp, Homo sapiens
tttctaccaggttag

SEQ ID NO: 1999008 - DNA, 15 bp, Homo sapiens
ttctaccaggttagt

SEQ ID NO: 1999009 - DNA, 15 bp, Homo sapiens
tctaccaggttagtg

SEQ ID NO: 1999010 - DNA, 15 bp, Homo sapiens
ctaccaggttagtgt

SEQ ID NO: 1999011 - DNA, 15 bp, Homo sapiens
taccaggttagtgtg

SEQ ID NO: 1999012 - DNA, 15 bp, Homo sapiens
accaggttagtgtgt

SEQ ID NO: 1999013 - DNA, 15 bp, Homo sapiens
ccaggttagtgtgta

SEQ ID NO: 1999014 - DNA, 15 bp, Homo sapiens
caggttagtgtgtaa

SEQ ID NO: 1999015 - DNA, 15 bp, Homo sapiens
aggttagtgtgtaaa

SEQ ID NO: 1999016 - DNA, 15 bp, Homo sapiens
ggttagtgtgtaaat

SEQ ID NO: 1999017 - DNA, 15 bp, Homo sapiens
gttagtgtgtaaatc

SEQ ID NO: 1999018 - DNA, 15 bp, Homo sapiens
ttagtgtgtaaatcc

SEQ ID NO: 1999019 - DNA, 15 bp, Homo sapiens
tagtgtgtaaatcca

SEQ ID NO: 1999020 - DNA, 15 bp, Homo sapiens
agtgtgtaaatccac

SEQ ID NO: 1999021 - DNA, 15 bp, Homo sapiens
gtgtgtaaatccaca

SEQ ID NO: 1999022 - DNA, 15 bp, Homo sapiens
tgtgtaaatccacat

SEQ ID NO: 1999023 - DNA, 15 bp, Homo sapiens
gtgtaaatccacatg

SEQ ID NO: 1999024 - DNA, 15 bp, Homo sapiens
tgtaaatccacatgg

SEQ ID NO: 1999025 - DNA, 15 bp, Homo sapiens
gtaaatccacatggg

SEQ ID NO: 1999026 - DNA, 15 bp, Homo sapiens
taaatccacatggga

SEQ ID NO: 1999027 - DNA, 15 bp, Homo sapiens
aaatccacatgggac

SEQ ID NO: 1999028 - DNA, 15 bp, Homo sapiens
aatccacatgggact

SEQ ID NO: 1999029 - DNA, 15 bp, Homo sapiens
atccacatgggacta

SEQ ID NO: 1999030 - DNA, 15 bp, Homo sapiens
tccacatgggactac

SEQ ID NO: 1999031 - DNA, 15 bp, Homo sapiens
ccacatgggactact

SEQ ID NO: 1999032 - DNA, 15 bp, Homo sapiens
cacatgggactactg

SEQ ID NO: 1999033 - DNA, 15 bp, Homo sapiens
acatgggactactga

SEQ ID NO: 1999034 - DNA, 15 bp, Homo sapiens
catgggactactgaa

SEQ ID NO: 1999035 - DNA, 15 bp, Homo sapiens
atgggactactgaag

SEQ ID NO: 1999036 - DNA, 15 bp, Homo sapiens
tgggactactgaagt

SEQ ID NO: 1999037 - DNA, 15 bp, Homo sapiens
gggactactgaagta

SEQ ID NO: 1999038 - DNA, 15 bp, Homo sapiens
ggactactgaagtaa

SEQ ID NO: 1999039 - DNA, 15 bp, Homo sapiens
gactactgaagtaat

SEQ ID NO: 1999040 - DNA, 15 bp, Homo sapiens
actactgaagtaata

SEQ ID NO: 1999041 - DNA, 15 bp, Homo sapiens
ctactgaagtaatat

SEQ ID NO: 1999042 - DNA, 15 bp, Homo sapiens
tactgaagtaatatg

SEQ ID NO: 1999043 - DNA, 15 bp, Homo sapiens
actgaagtaatatga

SEQ ID NO: 1999044 - DNA, 15 bp, Homo sapiens
ctgaagtaatatgaa

SEQ ID NO: 1999045 - DNA, 15 bp, Homo sapiens
tgaagtaatatgaat

SEQ ID NO: 1999046 - DNA, 15 bp, Homo sapiens
gaagtaatatgaata

SEQ ID NO: 1999047 - DNA, 15 bp, Homo sapiens
aagtaatatgaatat

SEQ ID NO: 1999048 - DNA, 15 bp, Homo sapiens
agtaatatgaatatt

SEQ ID NO: 1999049 - DNA, 15 bp, Homo sapiens
gtaatatgaatatta

SEQ ID NO: 1999050 - DNA, 15 bp, Homo sapiens
taatatgaatattag

SEQ ID NO: 1999051 - DNA, 15 bp, Homo sapiens
aatatgaatattaga

SEQ ID NO: 1999052 - DNA, 15 bp, Homo sapiens
atatgaatattagaa

SEQ ID NO: 1999053 - DNA, 15 bp, Homo sapiens
tatgaatattagaag

SEQ ID NO: 1999054 - DNA, 15 bp, Homo sapiens
atgaatattagaagt

SEQ ID NO: 1999055 - DNA, 15 bp, Homo sapiens
tgaatattagaagtt

SEQ ID NO: 1999056 - DNA, 15 bp, Homo sapiens
gaatattagaagttt

SEQ ID NO: 1999057 - DNA, 15 bp, Homo sapiens
aatattagaagtttt

SEQ ID NO: 1999058 - DNA, 15 bp, Homo sapiens
atattagaagttttg

SEQ ID NO: 1999059 - DNA, 15 bp, Homo sapiens
tattagaagttttgt

SEQ ID NO: 1999060 - DNA, 15 bp, Homo sapiens
attagaagttttgtt

SEQ ID NO: 1999061 - DNA, 15 bp, Homo sapiens
ttagaagttttgttt

SEQ ID NO: 1999062 - DNA, 15 bp, Homo sapiens
tagaagttttgtttt

SEQ ID NO: 1999063 - DNA, 15 bp, Homo sapiens
agaagttttgttttt

SEQ ID NO: 1999064 - DNA, 15 bp, Homo sapiens
gaagttttgtttttt

SEQ ID NO: 1999065 - DNA, 15 bp, Homo sapiens
aagttttgttttttg

SEQ ID NO: 1999066 - DNA, 15 bp, Homo sapiens
agttttgttttttgt

SEQ ID NO: 1999067 - DNA, 15 bp, Homo sapiens
gttttgttttttgtc

SEQ ID NO: 1999068 - DNA, 15 bp, Homo sapiens
ttttgttttttgtct

SEQ ID NO: 1999069 - DNA, 15 bp, Homo sapiens
tttgttttttgtcta

SEQ ID NO: 1999070 - DNA, 15 bp, Homo sapiens
ttgttttttgtctac

SEQ ID NO: 1999071 - DNA, 15 bp, Homo sapiens
tgttttttgtctaca

SEQ ID NO: 1999072 - DNA, 15 bp, Homo sapiens
gttttttgtctacat

SEQ ID NO: 1999073 - DNA, 15 bp, Homo sapiens
ttttttgtctacata

SEQ ID NO: 1999074 - DNA, 15 bp, Homo sapiens
tttttgtctacataa

SEQ ID NO: 1999075 - DNA, 15 bp, Homo sapiens
ttttgtctacataaa

SEQ ID NO: 1999076 - DNA, 15 bp, Homo sapiens
tttgtctacataaaa

SEQ ID NO: 1999077 - DNA, 15 bp, Homo sapiens
ttgtctacataaaaa

SEQ ID NO: 1999078 - DNA, 15 bp, Homo sapiens
tgtctacataaaaat

SEQ ID NO: 1999079 - DNA, 15 bp, Homo sapiens
gtctacataaaaata

SEQ ID NO: 1999080 - DNA, 15 bp, Homo sapiens
tctacataaaaataa

SEQ ID NO: 1999081 - DNA, 15 bp, Homo sapiens
ctacataaaaataaa

SEQ ID NO: 1999082 - DNA, 15 bp, Homo sapiens
acataaaaataaaaa

SEQ ID NO: 1999083 - DNA, 15 bp, Homo sapiens
cataaaaataaaaag

SEQ ID NO: 1999084 - DNA, 15 bp, Homo sapiens
ataaaaataaaaagt

SEQ ID NO: 1999085 - DNA, 15 bp, Homo sapiens
taaaaataaaaagtt

SEQ ID NO: 1999086 - DNA, 15 bp, Homo sapiens
aaaaataaaaagtta

SEQ ID NO: 1999087 - DNA, 15 bp, Homo sapiens
aaaataaaaagttaa

SEQ ID NO: 1999088 - DNA, 15 bp, Homo sapiens
aaataaaaagttaat

SEQ ID NO: 1999089 - DNA, 15 bp, Homo sapiens
aataaaaagttaatg

SEQ ID NO: 1999090 - DNA, 15 bp, Homo sapiens
ataaaaagttaatgg

SEQ ID NO: 1999091 - DNA, 15 bp, Homo sapiens
taaaaagttaatgga

SEQ ID NO: 1999092 - DNA, 15 bp, Homo sapiens
aaaaagttaatggaa

SEQ ID NO: 1999093 - DNA, 15 bp, Homo sapiens
aaaagttaatggaaa

SEQ ID NO: 1999094 - DNA, 15 bp, Homo sapiens
aaagttaatggaaat

SEQ ID NO: 1999095 - DNA, 15 bp, Homo sapiens
aagttaatggaaatg

SEQ ID NO: 1999096 - DNA, 15 bp, Homo sapiens
agttaatggaaatga

SEQ ID NO: 1999097 - DNA, 15 bp, Homo sapiens
gttaatggaaatgag

SEQ ID NO: 1999098 - DNA, 15 bp, Homo sapiens
ttaatggaaatgagg

SEQ ID NO: 1999099 - DNA, 15 bp, Homo sapiens
taatggaaatgaggt

SEQ ID NO: 1999100 - DNA, 15 bp, Homo sapiens
aatggaaatgaggtt

SEQ ID NO: 1999101 - DNA, 15 bp, Homo sapiens
atggaaatgaggttt

SEQ ID NO: 1999102 - DNA, 15 bp, Homo sapiens
tggaaatgaggtttt

SEQ ID NO: 1999103 - DNA, 15 bp, Homo sapiens
ggaaatgaggttttt

SEQ ID NO: 1999104 - DNA, 15 bp, Homo sapiens
gaaatgaggtttttt

SEQ ID NO: 1999105 - DNA, 15 bp, Homo sapiens
aaatgaggttttttt

SEQ ID NO: 1999106 - DNA, 15 bp, Homo sapiens
aatgaggtttttttg

SEQ ID NO: 1999107 - DNA, 15 bp, Homo sapiens
atgaggtttttttgt

SEQ ID NO: 1999108 - DNA, 15 bp, Homo sapiens
tgaggtttttttgtt

SEQ ID NO: 1999109 - DNA, 15 bp, Homo sapiens
gaggtttttttgttt

SEQ ID NO: 1999110 - DNA, 15 bp, Homo sapiens
aggtttttttgtttt

SEQ ID NO: 1999111 - DNA, 15 bp, Homo sapiens
ggtttttttgttttt

SEQ ID NO: 1999112 - DNA, 15 bp, Homo sapiens
gtttttttgtttttg

SEQ ID NO: 1999113 - DNA, 15 bp, Homo sapiens
ttgtttttgagacaa

SEQ ID NO: 1999114 - DNA, 15 bp, Homo sapiens
tgtttttgagacaag

SEQ ID NO: 1999115 - DNA, 15 bp, Homo sapiens
gtttttgagacaagt

SEQ ID NO: 1999116 - DNA, 15 bp, Homo sapiens
tttttgagacaagtt

SEQ ID NO: 1999117 - DNA, 15 bp, Homo sapiens
ttgagacaagttctt

SEQ ID NO: 1999118 - DNA, 15 bp, Homo sapiens
tgagacaagttcttt

SEQ ID NO: 1999119 - DNA, 15 bp, Homo sapiens
gagacaagttctttt

SEQ ID NO: 1999120 - DNA, 15 bp, Homo sapiens
agacaagttcttttg

SEQ ID NO: 1999121 - DNA, 15 bp, Homo sapiens
gacaagttcttttgc

SEQ ID NO: 1999122 - DNA, 15 bp, Homo sapiens
acaagttcttttgcc

SEQ ID NO: 1999123 - DNA, 15 bp, Homo sapiens
caagttcttttgccc

SEQ ID NO: 1999124 - DNA, 15 bp, Homo sapiens
aagttcttttgcccc

SEQ ID NO: 1999125 - DNA, 15 bp, Homo sapiens
agttcttttgcccct

SEQ ID NO: 1999126 - DNA, 15 bp, Homo sapiens
gttcttttgcccctc

SEQ ID NO: 1999127 - DNA, 15 bp, Homo sapiens
ttcttttgcccctca

SEQ ID NO: 1999128 - DNA, 15 bp, Homo sapiens
tcttttgcccctcac

SEQ ID NO: 1999129 - DNA, 15 bp, Homo sapiens
cttttgcccctcaca

SEQ ID NO: 1999130 - DNA, 15 bp, Homo sapiens
ttttgcccctcacag

SEQ ID NO: 1999131 - DNA, 15 bp, Homo sapiens
tttgcccctcacagc

SEQ ID NO: 1999132 - DNA, 15 bp, Homo sapiens
ttgcccctcacagca

SEQ ID NO: 1999133 - DNA, 15 bp, Homo sapiens
tgcccctcacagcag

SEQ ID NO: 1999134 - DNA, 15 bp, Homo sapiens
gcccctcacagcagc

SEQ ID NO: 1999135 - DNA, 15 bp, Homo sapiens
cccctcacagcagct

SEQ ID NO: 1999136 - DNA, 15 bp, Homo sapiens
ccctcacagcagctt

SEQ ID NO: 1999137 - DNA, 15 bp, Homo sapiens
cctcacagcagcttt

SEQ ID NO: 1999138 - DNA, 15 bp, Homo sapiens
ctcacagcagctttg

SEQ ID NO: 1999139 - DNA, 15 bp, Homo sapiens
tcacagcagctttga

SEQ ID NO: 1999140 - DNA, 15 bp, Homo sapiens
cacagcagctttgac

SEQ ID NO: 1999141 - DNA, 15 bp, Homo sapiens
acagcagctttgacc

SEQ ID NO: 1999142 - DNA, 15 bp, Homo sapiens
cagcagctttgacct

SEQ ID NO: 1999143 - DNA, 15 bp, Homo sapiens
agcagctttgacctc

SEQ ID NO: 1999144 - DNA, 15 bp, Homo sapiens
cagctttgacctccc

SEQ ID NO: 1999145 - DNA, 15 bp, Homo sapiens
agctttgacctccca

SEQ ID NO: 1999146 - DNA, 15 bp, Homo sapiens
gctttgacctcccag

SEQ ID NO: 1999147 - DNA, 15 bp, Homo sapiens
ctttgacctcccagg

SEQ ID NO: 1999148 - DNA, 15 bp, Homo sapiens
tttgacctcccaggc

SEQ ID NO: 1999149 - DNA, 15 bp, Homo sapiens
ttgacctcccaggct

SEQ ID NO: 1999150 - DNA, 15 bp, Homo sapiens
tgacctcccaggctt

SEQ ID NO: 1999151 - DNA, 15 bp, Homo sapiens
gacctcccaggctta

SEQ ID NO: 1999152 - DNA, 15 bp, Homo sapiens
acctcccaggcttag

SEQ ID NO: 1999153 - DNA, 15 bp, Homo sapiens
cctcccaggcttagg

SEQ ID NO: 1999154 - DNA, 15 bp, Homo sapiens
ctcccaggcttaggt

SEQ ID NO: 1999155 - DNA, 15 bp, Homo sapiens
tcccaggcttaggtg

SEQ ID NO: 1999156 - DNA, 15 bp, Homo sapiens
cccaggcttaggtga

SEQ ID NO: 1999157 - DNA, 15 bp, Homo sapiens
ccaggcttaggtgat

SEQ ID NO: 1999158 - DNA, 15 bp, Homo sapiens
caggcttaggtgatc

SEQ ID NO: 1999159 - DNA, 15 bp, Homo sapiens
aggcttaggtgatcc

SEQ ID NO: 1999160 - DNA, 15 bp, Homo sapiens
ggcttaggtgatcct

SEQ ID NO: 1999161 - DNA, 15 bp, Homo sapiens
gcttaggtgatcctc

SEQ ID NO: 1999162 - DNA, 15 bp, Homo sapiens
cttaggtgatcctcc

SEQ ID NO: 1999163 - DNA, 15 bp, Homo sapiens
ttaggtgatcctcct

SEQ ID NO: 1999164 - DNA, 15 bp, Homo sapiens
taggtgatcctccta

SEQ ID NO: 1999165 - DNA, 15 bp, Homo sapiens
aggtgatcctcctac

SEQ ID NO: 1999166 - DNA, 15 bp, Homo sapiens
gatcctcctacctca

SEQ ID NO: 1999167 - DNA, 15 bp, Homo sapiens
atcctcctacctcag

SEQ ID NO: 1999168 - DNA, 15 bp, Homo sapiens
tcctcctacctcagc

SEQ ID NO: 1999169 - DNA, 15 bp, Homo sapiens
cctcctacctcagcc

SEQ ID NO: 1999170 - DNA, 15 bp, Homo sapiens
ctcctacctcagcct

SEQ ID NO: 1999171 - DNA, 15 bp, Homo sapiens
tcctacctcagcctc

SEQ ID NO: 1999172 - DNA, 15 bp, Homo sapiens
cctacctcagcctcc

SEQ ID NO: 1999173 - DNA, 15 bp, Homo sapiens
ctacctcagcctcca

SEQ ID NO: 1999174 - DNA, 15 bp, Homo sapiens
tacctcagcctccag

SEQ ID NO: 1999175 - DNA, 15 bp, Homo sapiens
ctcagcctccagaga

SEQ ID NO: 1999176 - DNA, 15 bp, Homo sapiens
tcagcctccagagaa

SEQ ID NO: 1999177 - DNA, 15 bp, Homo sapiens
cagcctccagagaaa

SEQ ID NO: 1999178 - DNA, 15 bp, Homo sapiens
agcctccagagaaat

SEQ ID NO: 1999179 - DNA, 15 bp, Homo sapiens
gcctccagagaaatg

SEQ ID NO: 1999180 - DNA, 15 bp, Homo sapiens
cctccagagaaatga

SEQ ID NO: 1999181 - DNA, 15 bp, Homo sapiens
ctccagagaaatgag

SEQ ID NO: 1999182 - DNA, 15 bp, Homo sapiens
tccagagaaatgagt

SEQ ID NO: 1999183 - DNA, 15 bp, Homo sapiens
ccagagaaatgagtt

SEQ ID NO: 1999184 - DNA, 15 bp, Homo sapiens
cagagaaatgagttt

SEQ ID NO: 1999185 - DNA, 15 bp, Homo sapiens
agagaaatgagtttg

SEQ ID NO: 1999186 - DNA, 15 bp, Homo sapiens
gagaaatgagtttgt

SEQ ID NO: 1999187 - DNA, 15 bp, Homo sapiens
agaaatgagtttgtc

SEQ ID NO: 1999188 - DNA, 15 bp, Homo sapiens
gaaatgagtttgtct

SEQ ID NO: 1999189 - DNA, 15 bp, Homo sapiens
aaatgagtttgtctg

SEQ ID NO: 1999190 - DNA, 15 bp, Homo sapiens
aatgagtttgtctgg

SEQ ID NO: 1999191 - DNA, 15 bp, Homo sapiens
atgagtttgtctggg

SEQ ID NO: 1999192 - DNA, 15 bp, Homo sapiens
tgagtttgtctgggc

SEQ ID NO: 1999193 - DNA, 15 bp, Homo sapiens
gagtttgtctgggct

SEQ ID NO: 1999194 - DNA, 15 bp, Homo sapiens
agtttgtctgggctt

SEQ ID NO: 1999195 - DNA, 15 bp, Homo sapiens
gtttgtctgggcttg

SEQ ID NO: 1999196 - DNA, 15 bp, Homo sapiens
tttgtctgggcttgc

SEQ ID NO: 1999197 - DNA, 15 bp, Homo sapiens
ttgtctgggcttgcg

SEQ ID NO: 1999198 - DNA, 15 bp, Homo sapiens
tgtctgggcttgcgt

SEQ ID NO: 1999199 - DNA, 15 bp, Homo sapiens
gtctgggcttgcgta

SEQ ID NO: 1999200 - DNA, 15 bp, Homo sapiens
tctgggcttgcgtag

SEQ ID NO: 1999201 - DNA, 15 bp, Homo sapiens
ctgggcttgcgtaga

SEQ ID NO: 1999202 - DNA, 15 bp, Homo sapiens
tgggcttgcgtagaa

SEQ ID NO: 1999203 - DNA, 15 bp, Homo sapiens
gggcttgcgtagaaa

SEQ ID NO: 1999204 - DNA, 15 bp, Homo sapiens
ggcttgcgtagaaat

SEQ ID NO: 1999205 - DNA, 15 bp, Homo sapiens
gcttgcgtagaaatt

SEQ ID NO: 1999206 - DNA, 15 bp, Homo sapiens
cttgcgtagaaattt

SEQ ID NO: 1999207 - DNA, 15 bp, Homo sapiens
ttgcgtagaaatttt

SEQ ID NO: 1999208 - DNA, 15 bp, Homo sapiens
tgcgtagaaatttta

SEQ ID NO: 1999209 - DNA, 15 bp, Homo sapiens
gcgtagaaattttat

SEQ ID NO: 1999210 - DNA, 15 bp, Homo sapiens
cgtagaaattttatg

SEQ ID NO: 1999211 - DNA, 15 bp, Homo sapiens
gtagaaattttatgc

SEQ ID NO: 1999212 - DNA, 15 bp, Homo sapiens
tagaaattttatgca

SEQ ID NO: 1999213 - DNA, 15 bp, Homo sapiens
agaaattttatgcat

SEQ ID NO: 1999214 - DNA, 15 bp, Homo sapiens
gaaattttatgcatt

SEQ ID NO: 1999215 - DNA, 15 bp, Homo sapiens
aattttatgcattaa

SEQ ID NO: 1999216 - DNA, 15 bp, Homo sapiens
attttatgcattaat

SEQ ID NO: 1999217 - DNA, 15 bp, Homo sapiens
ttttatgcattaata

SEQ ID NO: 1999218 - DNA, 15 bp, Homo sapiens
tttatgcattaatat

SEQ ID NO: 1999219 - DNA, 15 bp, Homo sapiens
ttatgcattaatatc

SEQ ID NO: 1999220 - DNA, 15 bp, Homo sapiens
tatgcattaatatct

SEQ ID NO: 1999221 - DNA, 15 bp, Homo sapiens
atgcattaatatctt

SEQ ID NO: 1999222 - DNA, 15 bp, Homo sapiens
tgcattaatatcttt

SEQ ID NO: 1999223 - DNA, 15 bp, Homo sapiens
gcattaatatctttg

SEQ ID NO: 1999224 - DNA, 15 bp, Homo sapiens
cattaatatctttga

SEQ ID NO: 1999225 - DNA, 15 bp, Homo sapiens
attaatatctttgac

SEQ ID NO: 1999226 - DNA, 15 bp, Homo sapiens
ttaatatctttgaca

SEQ ID NO: 1999227 - DNA, 15 bp, Homo sapiens
taatatctttgacat

SEQ ID NO: 1999228 - DNA, 15 bp, Homo sapiens
aatatctttgacatt

SEQ ID NO: 1999229 - DNA, 15 bp, Homo sapiens
atatctttgacattt

SEQ ID NO: 1999230 - DNA, 15 bp, Homo sapiens
tatctttgacatttt

SEQ ID NO: 1999231 - DNA, 15 bp, Homo sapiens
atctttgacatttta

SEQ ID NO: 1999232 - DNA, 15 bp, Homo sapiens
tctttgacattttaa

SEQ ID NO: 1999233 - DNA, 15 bp, Homo sapiens
ctttgacattttaat

SEQ ID NO: 1999234 - DNA, 15 bp, Homo sapiens
tttgacattttaatt

SEQ ID NO: 1999235 - DNA, 15 bp, Homo sapiens
ttgacattttaattg

SEQ ID NO: 1999236 - DNA, 15 bp, Homo sapiens
tgacattttaattgc

SEQ ID NO: 1999237 - DNA, 15 bp, Homo sapiens
gacattttaattgcg

SEQ ID NO: 1999238 - DNA, 15 bp, Homo sapiens
acattttaattgcgt

SEQ ID NO: 1999239 - DNA, 15 bp, Homo sapiens
cattttaattgcgta

SEQ ID NO: 1999240 - DNA, 15 bp, Homo sapiens
attttaattgcgtaa

SEQ ID NO: 1999241 - DNA, 15 bp, Homo sapiens
ttttaattgcgtaat

SEQ ID NO: 1999242 - DNA, 15 bp, Homo sapiens
tttaattgcgtaata

SEQ ID NO: 1999243 - DNA, 15 bp, Homo sapiens
ttaattgcgtaatat

SEQ ID NO: 1999244 - DNA, 15 bp, Homo sapiens
taattgcgtaatatt

SEQ ID NO: 1999245 - DNA, 15 bp, Homo sapiens
aattgcgtaatattg

SEQ ID NO: 1999246 - DNA, 15 bp, Homo sapiens
attgcgtaatattgt

SEQ ID NO: 1999247 - DNA, 15 bp, Homo sapiens
ttgcgtaatattgtg

SEQ ID NO: 1999248 - DNA, 15 bp, Homo sapiens
tgcgtaatattgtga

SEQ ID NO: 1999249 - DNA, 15 bp, Homo sapiens
gcgtaatattgtgat

SEQ ID NO: 1999250 - DNA, 15 bp, Homo sapiens
cgtaatattgtgata

SEQ ID NO: 1999251 - DNA, 15 bp, Homo sapiens
gtaatattgtgatat

SEQ ID NO: 1999252 - DNA, 15 bp, Homo sapiens
taatattgtgatatt

SEQ ID NO: 1999253 - DNA, 15 bp, Homo sapiens
aatattgtgatattg

SEQ ID NO: 1999254 - DNA, 15 bp, Homo sapiens
atattgtgatattga

SEQ ID NO: 1999255 - DNA, 15 bp, Homo sapiens
tattgtgatattgat

SEQ ID NO: 1999256 - DNA, 15 bp, Homo sapiens
attgtgatattgata

SEQ ID NO: 1999257 - DNA, 15 bp, Homo sapiens
ttgtgatattgatat

SEQ ID NO: 1999258 - DNA, 15 bp, Homo sapiens
tgtgatattgatatg

SEQ ID NO: 1999259 - DNA, 15 bp, Homo sapiens
gtgatattgatatgt

SEQ ID NO: 1999260 - DNA, 15 bp, Homo sapiens
tgatattgatatgtg

SEQ ID NO: 1999261 - DNA, 15 bp, Homo sapiens
gatattgatatgtgc

SEQ ID NO: 1999262 - DNA, 15 bp, Homo sapiens
atattgatatgtgca

SEQ ID NO: 1999263 - DNA, 15 bp, Homo sapiens
tattgatatgtgcaa

SEQ ID NO: 1999264 - DNA, 15 bp, Homo sapiens
attgatatgtgcaat

SEQ ID NO: 1999265 - DNA, 15 bp, Homo sapiens
ttgatatgtgcaatt

SEQ ID NO: 1999266 - DNA, 15 bp, Homo sapiens
tgatatgtgcaatta

SEQ ID NO: 1999267 - DNA, 15 bp, Homo sapiens
gatatgtgcaattaa

SEQ ID NO: 1999268 - DNA, 15 bp, Homo sapiens
atatgtgcaattaaa

SEQ ID NO: 1999269 - DNA, 15 bp, Homo sapiens
tatgtgcaattaaat

SEQ ID NO: 1999270 - DNA, 15 bp, Homo sapiens
atgtgcaattaaata

SEQ ID NO: 1999271 - DNA, 15 bp, Homo sapiens
tgtgcaattaaataa

SEQ ID NO: 1999272 - DNA, 15 bp, Homo sapiens
gtgcaattaaataag

SEQ ID NO: 1999273 - DNA, 15 bp, Homo sapiens
tgcaattaaataaga

SEQ ID NO: 1999274 - DNA, 15 bp, Homo sapiens
gcaattaaataagag

SEQ ID NO: 1999275 - DNA, 15 bp, Homo sapiens
caattaaataagagc

SEQ ID NO: 1999276 - DNA, 15 bp, Homo sapiens
aattaaataagagca

SEQ ID NO: 1999277 - DNA, 15 bp, Homo sapiens
attaaataagagcac

SEQ ID NO: 1999278 - DNA, 15 bp, Homo sapiens
ttaaataagagcact

SEQ ID NO: 1999279 - DNA, 15 bp, Homo sapiens
taaataagagcactg

SEQ ID NO: 1999280 - DNA, 15 bp, Homo sapiens
aaataagagcactgt

SEQ ID NO: 1999281 - DNA, 15 bp, Homo sapiens
aataagagcactgtt

SEQ ID NO: 1999282 - DNA, 15 bp, Homo sapiens
ataagagcactgtta

SEQ ID NO: 1999283 - DNA, 15 bp, Homo sapiens
taagagcactgttat

SEQ ID NO: 1999284 - DNA, 15 bp, Homo sapiens
aagagcactgttatg

SEQ ID NO: 1999285 - DNA, 15 bp, Homo sapiens
agagcactgttatga

SEQ ID NO: 1999286 - DNA, 15 bp, Homo sapiens
gagcactgttatgaa

SEQ ID NO: 1999287 - DNA, 15 bp, Homo sapiens
agcactgttatgaat

SEQ ID NO: 1999288 - DNA, 15 bp, Homo sapiens
gcactgttatgaatg

SEQ ID NO: 1999289 - DNA, 15 bp, Homo sapiens
cactgttatgaatgt

SEQ ID NO: 1999290 - DNA, 15 bp, Homo sapiens
actgttatgaatgtg

SEQ ID NO: 1999291 - DNA, 15 bp, Homo sapiens
ctgttatgaatgtga

SEQ ID NO: 1999292 - DNA, 15 bp, Homo sapiens
tgttatgaatgtgaa

SEQ ID NO: 1999293 - DNA, 15 bp, Homo sapiens
gttatgaatgtgaaa

SEQ ID NO: 1999294 - DNA, 15 bp, Homo sapiens
ttatgaatgtgaaag

SEQ ID NO: 1999295 - DNA, 15 bp, Homo sapiens
tatgaatgtgaaagt

SEQ ID NO: 1999296 - DNA, 15 bp, Homo sapiens
atgaatgtgaaagtc

SEQ ID NO: 1999297 - DNA, 15 bp, Homo sapiens
tgaatgtgaaagtct

SEQ ID NO: 1999298 - DNA, 15 bp, Homo sapiens
gaatgtgaaagtcta

SEQ ID NO: 1999299 - DNA, 15 bp, Homo sapiens
aatgtgaaagtctaa

SEQ ID NO: 1999300 - DNA, 15 bp, Homo sapiens
atgtgaaagtctaaa

SEQ ID NO: 1999301 - DNA, 15 bp, Homo sapiens
tgtgaaagtctaaat

SEQ ID NO: 1999302 - DNA, 15 bp, Homo sapiens
gtgaaagtctaaatt

SEQ ID NO: 1999303 - DNA, 15 bp, Homo sapiens
tgaaagtctaaattt

SEQ ID NO: 1999304 - DNA, 15 bp, Homo sapiens
gaaagtctaaatttc

SEQ ID NO: 1999305 - DNA, 15 bp, Homo sapiens
aaagtctaaatttca

SEQ ID NO: 1999306 - DNA, 15 bp, Homo sapiens
aagtctaaatttcag

SEQ ID NO: 1999307 - DNA, 15 bp, Homo sapiens
agtctaaatttcaga

SEQ ID NO: 1999308 - DNA, 15 bp, Homo sapiens
gtctaaatttcagat

SEQ ID NO: 1999309 - DNA, 15 bp, Homo sapiens
tctaaatttcagata

SEQ ID NO: 1999310 - DNA, 15 bp, Homo sapiens
ctaaatttcagataa

SEQ ID NO: 1999311 - DNA, 15 bp, Homo sapiens
taaatttcagataaa

SEQ ID NO: 1999312 - DNA, 15 bp, Homo sapiens
aaatttcagataaaa

SEQ ID NO: 1999313 - DNA, 15 bp, Homo sapiens
aatttcagataaaaa

SEQ ID NO: 1999314 - DNA, 15 bp, Homo sapiens
atttcagataaaaat

SEQ ID NO: 1999315 - DNA, 15 bp, Homo sapiens
tttcagataaaaata

SEQ ID NO: 1999316 - DNA, 15 bp, Homo sapiens
ttcagataaaaatat

SEQ ID NO: 1999317 - DNA, 15 bp, Homo sapiens
tcagataaaaatatc

SEQ ID NO: 1999318 - DNA, 15 bp, Homo sapiens
cagataaaaatatct

SEQ ID NO: 1999319 - DNA, 15 bp, Homo sapiens
agataaaaatatctg

SEQ ID NO: 1999320 - DNA, 15 bp, Homo sapiens
gataaaaatatctgc

SEQ ID NO: 1999321 - DNA, 15 bp, Homo sapiens
ataaaaatatctgcc

SEQ ID NO: 1999322 - DNA, 15 bp, Homo sapiens
taaaaatatctgccg

SEQ ID NO: 1999323 - DNA, 15 bp, Homo sapiens
aaaaatatctgccgt

SEQ ID NO: 1999324 - DNA, 15 bp, Homo sapiens
aaaatatctgccgtg

SEQ ID NO: 1999325 - DNA, 15 bp, Homo sapiens
aaatatctgccgtga

SEQ ID NO: 1999326 - DNA, 15 bp, Homo sapiens
aatatctgccgtgag

SEQ ID NO: 1999327 - DNA, 15 bp, Homo sapiens
atatctgccgtgagc

SEQ ID NO: 1999328 - DNA, 15 bp, Homo sapiens
tatctgccgtgagca

SEQ ID NO: 1999329 - DNA, 15 bp, Homo sapiens
atctgccgtgagcag

SEQ ID NO: 1999330 - DNA, 15 bp, Homo sapiens
tctgccgtgagcagg

SEQ ID NO: 1999331 - DNA, 15 bp, Homo sapiens
ctgccgtgagcaggc

SEQ ID NO: 1999332 - DNA, 15 bp, Homo sapiens
tgccgtgagcaggct

SEQ ID NO: 1999333 - DNA, 15 bp, Homo sapiens
gccgtgagcaggctt

SEQ ID NO: 1999334 - DNA, 15 bp, Homo sapiens
ccgtgagcaggcttt

SEQ ID NO: 1999335 - DNA, 15 bp, Homo sapiens
cgtgagcaggcttta

SEQ ID NO: 1999336 - DNA, 15 bp, Homo sapiens
gtgagcaggctttaa

SEQ ID NO: 1999337 - DNA, 15 bp, Homo sapiens
tgagcaggctttaaa

SEQ ID NO: 1999338 - DNA, 15 bp, Homo sapiens
gagcaggctttaaaa

SEQ ID NO: 1999339 - DNA, 15 bp, Homo sapiens
agcaggctttaaaaa

SEQ ID NO: 1999340 - DNA, 15 bp, Homo sapiens
gcaggctttaaaaaa

SEQ ID NO: 1999341 - DNA, 15 bp, Homo sapiens
caggctttaaaaaac

SEQ ID NO: 1999342 - DNA, 15 bp, Homo sapiens
aggctttaaaaaaca

SEQ ID NO: 1999343 - DNA, 15 bp, Homo sapiens
ggctttaaaaaacaa

SEQ ID NO: 1999344 - DNA, 15 bp, Homo sapiens
gctttaaaaaacaat

SEQ ID NO: 1999345 - DNA, 15 bp, Homo sapiens
ctttaaaaaacaata

SEQ ID NO: 1999346 - DNA, 15 bp, Homo sapiens
tttaaaaaacaatac

SEQ ID NO: 1999347 - DNA, 15 bp, Homo sapiens
ttaaaaaacaatact

SEQ ID NO: 1999348 - DNA, 15 bp, Homo sapiens
taaaaaacaatacta

SEQ ID NO: 1999349 - DNA, 15 bp, Homo sapiens
aaaaaacaatactag

SEQ ID NO: 1999350 - DNA, 15 bp, Homo sapiens
aaaaacaatactagg

SEQ ID NO: 1999351 - DNA, 15 bp, Homo sapiens
aaaacaatactaggt

SEQ ID NO: 1999352 - DNA, 15 bp, Homo sapiens
aaacaatactaggta

SEQ ID NO: 1999353 - DNA, 15 bp, Homo sapiens
aacaatactaggtat

SEQ ID NO: 1999354 - DNA, 15 bp, Homo sapiens
acaatactaggtatg

SEQ ID NO: 1999355 - DNA, 15 bp, Homo sapiens
caatactaggtatga

SEQ ID NO: 1999356 - DNA, 15 bp, Homo sapiens
aatactaggtatgaa

SEQ ID NO: 1999357 - DNA, 15 bp, Homo sapiens
atactaggtatgaac

SEQ ID NO: 1999358 - DNA, 15 bp, Homo sapiens
tactaggtatgaact

SEQ ID NO: 1999359 - DNA, 15 bp, Homo sapiens
actaggtatgaactt

SEQ ID NO: 1999360 - DNA, 15 bp, Homo sapiens
ctaggtatgaacttt

SEQ ID NO: 1999361 - DNA, 15 bp, Homo sapiens
taggtatgaactttt

SEQ ID NO: 1999362 - DNA, 15 bp, Homo sapiens
aggtatgaacttttg

SEQ ID NO: 1999363 - DNA, 15 bp, Homo sapiens
ggtatgaacttttgg

SEQ ID NO: 1999364 - DNA, 15 bp, Homo sapiens
gtatgaacttttggt

SEQ ID NO: 1999365 - DNA, 15 bp, Homo sapiens
tatgaacttttggtt

SEQ ID NO: 1999366 - DNA, 15 bp, Homo sapiens
atgaacttttggttt

SEQ ID NO: 1999367 - DNA, 15 bp, Homo sapiens
tgaacttttggtttg

SEQ ID NO: 1999368 - DNA, 15 bp, Homo sapiens
gaacttttggtttgg

SEQ ID NO: 1999369 - DNA, 15 bp, Homo sapiens
aacttttggtttggc

SEQ ID NO: 1999370 - DNA, 15 bp, Homo sapiens
acttttggtttggct

SEQ ID NO: 1999371 - DNA, 15 bp, Homo sapiens
cttttggtttggctt

SEQ ID NO: 1999372 - DNA, 15 bp, Homo sapiens
ttttggtttggcttt

SEQ ID NO: 1999373 - DNA, 15 bp, Homo sapiens
tttggtttggctttt

SEQ ID NO: 1999374 - DNA, 15 bp, Homo sapiens
ttggtttggcttttt

SEQ ID NO: 1999375 - DNA, 15 bp, Homo sapiens
tggtttggcttttta

SEQ ID NO: 1999376 - DNA, 15 bp, Homo sapiens
ggtttggctttttaa

SEQ ID NO: 1999377 - DNA, 15 bp, Homo sapiens
gtttggctttttaaa

SEQ ID NO: 1999378 - DNA, 15 bp, Homo sapiens
tttggctttttaaac

SEQ ID NO: 1999379 - DNA, 15 bp, Homo sapiens
ttggctttttaaaca

SEQ ID NO: 1999380 - DNA, 15 bp, Homo sapiens
tggctttttaaacat

SEQ ID NO: 1999381 - DNA, 15 bp, Homo sapiens
ggctttttaaacata

SEQ ID NO: 1999382 - DNA, 15 bp, Homo sapiens
gctttttaaacatat

SEQ ID NO: 1999383 - DNA, 15 bp, Homo sapiens
ctttttaaacatatt

SEQ ID NO: 1999384 - DNA, 15 bp, Homo sapiens
tttttaaacatatta

SEQ ID NO: 1999385 - DNA, 15 bp, Homo sapiens
ttttaaacatattat

SEQ ID NO: 1999386 - DNA, 15 bp, Homo sapiens
tttaaacatattatc

SEQ ID NO: 1999387 - DNA, 15 bp, Homo sapiens
ttaaacatattatcc

SEQ ID NO: 1999388 - DNA, 15 bp, Homo sapiens
taaacatattatccc

SEQ ID NO: 1999389 - DNA, 15 bp, Homo sapiens
aaacatattatccct

SEQ ID NO: 1999390 - DNA, 15 bp, Homo sapiens
aacatattatccctt

SEQ ID NO: 1999391 - DNA, 15 bp, Homo sapiens
acatattatcccttt

SEQ ID NO: 1999392 - DNA, 15 bp, Homo sapiens
catattatcccttta

SEQ ID NO: 1999393 - DNA, 15 bp, Homo sapiens
atattatccctttaa

SEQ ID NO: 1999394 - DNA, 15 bp, Homo sapiens
tattatccctttaaa

SEQ ID NO: 1999395 - DNA, 15 bp, Homo sapiens
attatccctttaaat

SEQ ID NO: 1999396 - DNA, 15 bp, Homo sapiens
ttatccctttaaatg

SEQ ID NO: 1999397 - DNA, 15 bp, Homo sapiens
tatccctttaaatga

SEQ ID NO: 1999398 - DNA, 15 bp, Homo sapiens
atccctttaaatgaa

SEQ ID NO: 1999399 - DNA, 15 bp, Homo sapiens
tccctttaaatgaaa

SEQ ID NO: 1999400 - DNA, 15 bp, Homo sapiens
ccctttaaatgaaac

SEQ ID NO: 1999401 - DNA, 15 bp, Homo sapiens
cctttaaatgaaact

SEQ ID NO: 1999402 - DNA, 15 bp, Homo sapiens
ctttaaatgaaacta

SEQ ID NO: 1999403 - DNA, 15 bp, Homo sapiens
tttaaatgaaactac

SEQ ID NO: 1999404 - DNA, 15 bp, Homo sapiens
ttaaatgaaactacc

SEQ ID NO: 1999405 - DNA, 15 bp, Homo sapiens
taaatgaaactaccc

SEQ ID NO: 1999406 - DNA, 15 bp, Homo sapiens
aaatgaaactaccca

SEQ ID NO: 1999407 - DNA, 15 bp, Homo sapiens
aatgaaactacccaa

SEQ ID NO: 1999408 - DNA, 15 bp, Homo sapiens
atgaaactacccaat

SEQ ID NO: 1999409 - DNA, 15 bp, Homo sapiens
tgaaactacccaatt

SEQ ID NO: 1999410 - DNA, 15 bp, Homo sapiens
gaaactacccaatta

SEQ ID NO: 1999411 - DNA, 15 bp, Homo sapiens
aaactacccaattag

SEQ ID NO: 1999412 - DNA, 15 bp, Homo sapiens
aactacccaattaga

SEQ ID NO: 1999413 - DNA, 15 bp, Homo sapiens
actacccaattagat

SEQ ID NO: 1999414 - DNA, 15 bp, Homo sapiens
ctacccaattagatg

SEQ ID NO: 1999415 - DNA, 15 bp, Homo sapiens
tacccaattagatgg

SEQ ID NO: 1999416 - DNA, 15 bp, Homo sapiens
acccaattagatgga

SEQ ID NO: 1999417 - DNA, 15 bp, Homo sapiens
cccaattagatggaa

SEQ ID NO: 1999418 - DNA, 15 bp, Homo sapiens
ccaattagatggaat

SEQ ID NO: 1999419 - DNA, 15 bp, Homo sapiens
caattagatggaata

SEQ ID NO: 1999420 - DNA, 15 bp, Homo sapiens
aattagatggaataa

SEQ ID NO: 1999421 - DNA, 15 bp, Homo sapiens
attagatggaataat

SEQ ID NO: 1999422 - DNA, 15 bp, Homo sapiens
ttagatggaataatt

SEQ ID NO: 1999423 - DNA, 15 bp, Homo sapiens
tagatggaataatta

SEQ ID NO: 1999424 - DNA, 15 bp, Homo sapiens
agatggaataattaa

SEQ ID NO: 1999425 - DNA, 15 bp, Homo sapiens
gatggaataattaat

SEQ ID NO: 1999426 - DNA, 15 bp, Homo sapiens
atggaataattaatg

SEQ ID NO: 1999427 - DNA, 15 bp, Homo sapiens
tggaataattaatga

SEQ ID NO: 1999428 - DNA, 15 bp, Homo sapiens
ggaataattaatgag

SEQ ID NO: 1999429 - DNA, 15 bp, Homo sapiens
gaataattaatgaga

SEQ ID NO: 1999430 - DNA, 15 bp, Homo sapiens
aataattaatgagag

SEQ ID NO: 1999431 - DNA, 15 bp, Homo sapiens
ataattaatgagagt

SEQ ID NO: 1999432 - DNA, 15 bp, Homo sapiens
taattaatgagagta

SEQ ID NO: 1999433 - DNA, 15 bp, Homo sapiens
aattaatgagagtag

SEQ ID NO: 1999434 - DNA, 15 bp, Homo sapiens
attaatgagagtagt

SEQ ID NO: 1999435 - DNA, 15 bp, Homo sapiens
ttaatgagagtagtc

SEQ ID NO: 1999436 - DNA, 15 bp, Homo sapiens
taatgagagtagtca

SEQ ID NO: 1999437 - DNA, 15 bp, Homo sapiens
aatgagagtagtcag

SEQ ID NO: 1999438 - DNA, 15 bp, Homo sapiens
atgagagtagtcaga

SEQ ID NO: 1999439 - DNA, 15 bp, Homo sapiens
tgagagtagtcagaa

SEQ ID NO: 1999440 - DNA, 15 bp, Homo sapiens
gagagtagtcagaat

SEQ ID NO: 1999441 - DNA, 15 bp, Homo sapiens
agagtagtcagaatt

SEQ ID NO: 1999442 - DNA, 15 bp, Homo sapiens
gagtagtcagaattc

SEQ ID NO: 1999443 - DNA, 15 bp, Homo sapiens
agtagtcagaattca

SEQ ID NO: 1999444 - DNA, 15 bp, Homo sapiens
gtagtcagaattcaa

SEQ ID NO: 1999445 - DNA, 15 bp, Homo sapiens
tagtcagaattcaaa

SEQ ID NO: 1999446 - DNA, 15 bp, Homo sapiens
agtcagaattcaaat

SEQ ID NO: 1999447 - DNA, 15 bp, Homo sapiens
gtcagaattcaaata

SEQ ID NO: 1999448 - DNA, 15 bp, Homo sapiens
tcagaattcaaatac

SEQ ID NO: 1999449 - DNA, 15 bp, Homo sapiens
cagaattcaaatact

SEQ ID NO: 1999450 - DNA, 15 bp, Homo sapiens
agaattcaaatactt

SEQ ID NO: 1999451 - DNA, 15 bp, Homo sapiens
gaattcaaatacttt

SEQ ID NO: 1999452 - DNA, 15 bp, Homo sapiens
aattcaaatactttc

SEQ ID NO: 1999453 - DNA, 15 bp, Homo sapiens
attcaaatactttca

SEQ ID NO: 1999454 - DNA, 15 bp, Homo sapiens
ttcaaatactttcac

SEQ ID NO: 1999455 - DNA, 15 bp, Homo sapiens
tcaaatactttcaca

SEQ ID NO: 1999456 - DNA, 15 bp, Homo sapiens
caaatactttcacaa

SEQ ID NO: 1999457 - DNA, 15 bp, Homo sapiens
aaatactttcacaac

SEQ ID NO: 1999458 - DNA, 15 bp, Homo sapiens
aatactttcacaact

SEQ ID NO: 1999459 - DNA, 15 bp, Homo sapiens
atactttcacaactc

SEQ ID NO: 1999460 - DNA, 15 bp, Homo sapiens
tactttcacaactct

SEQ ID NO: 1999461 - DNA, 15 bp, Homo sapiens
actttcacaactcta

SEQ ID NO: 1999462 - DNA, 15 bp, Homo sapiens
ctttcacaactctac

SEQ ID NO: 1999463 - DNA, 15 bp, Homo sapiens
tttcacaactctacc

SEQ ID NO: 1999464 - DNA, 15 bp, Homo sapiens
ttcacaactctaccc

SEQ ID NO: 1999465 - DNA, 15 bp, Homo sapiens
tcacaactctaccct

SEQ ID NO: 1999466 - DNA, 15 bp, Homo sapiens
cacaactctaccctt

SEQ ID NO: 1999467 - DNA, 15 bp, Homo sapiens
acaactctacccttt

SEQ ID NO: 1999468 - DNA, 15 bp, Homo sapiens
caactctacccttta

SEQ ID NO: 1999469 - DNA, 15 bp, Homo sapiens
aactctaccctttat

SEQ ID NO: 1999470 - DNA, 15 bp, Homo sapiens
actctaccctttatc

SEQ ID NO: 1999471 - DNA, 15 bp, Homo sapiens
ctctaccctttatca

SEQ ID NO: 1999472 - DNA, 15 bp, Homo sapiens
tctaccctttatcac

SEQ ID NO: 1999473 - DNA, 15 bp, Homo sapiens
ctaccctttatcaca

SEQ ID NO: 1999474 - DNA, 15 bp, Homo sapiens
taccctttatcacaa

SEQ ID NO: 1999475 - DNA, 15 bp, Homo sapiens
accctttatcacaag

SEQ ID NO: 1999476 - DNA, 15 bp, Homo sapiens
ccctttatcacaaga

SEQ ID NO: 1999477 - DNA, 15 bp, Homo sapiens
cctttatcacaagat

SEQ ID NO: 1999478 - DNA, 15 bp, Homo sapiens
ctttatcacaagatt

SEQ ID NO: 1999479 - DNA, 15 bp, Homo sapiens
tttatcacaagattt

SEQ ID NO: 1999480 - DNA, 15 bp, Homo sapiens
ttatcacaagatttt

SEQ ID NO: 1999481 - DNA, 15 bp, Homo sapiens
tatcacaagatttta

SEQ ID NO: 1999482 - DNA, 15 bp, Homo sapiens
atcacaagattttag

SEQ ID NO: 1999483 - DNA, 15 bp, Homo sapiens
tcacaagattttagg

SEQ ID NO: 1999484 - DNA, 15 bp, Homo sapiens
cacaagattttaggt

SEQ ID NO: 1999485 - DNA, 15 bp, Homo sapiens
acaagattttaggtt

SEQ ID NO: 1999486 - DNA, 15 bp, Homo sapiens
caagattttaggtta

SEQ ID NO: 1999487 - DNA, 15 bp, Homo sapiens
aagattttaggttac

SEQ ID NO: 1999488 - DNA, 15 bp, Homo sapiens
agattttaggttacc

SEQ ID NO: 1999489 - DNA, 15 bp, Homo sapiens
gattttaggttacca

SEQ ID NO: 1999490 - DNA, 15 bp, Homo sapiens
attttaggttaccaa

SEQ ID NO: 1999491 - DNA, 15 bp, Homo sapiens
ttttaggttaccaaa

SEQ ID NO: 1999492 - DNA, 15 bp, Homo sapiens
tttaggttaccaaaa

SEQ ID NO: 1999493 - DNA, 15 bp, Homo sapiens
ttaggttaccaaaaa

SEQ ID NO: 1999494 - DNA, 15 bp, Homo sapiens
taggttaccaaaaaa

SEQ ID NO: 1999495 - DNA, 15 bp, Homo sapiens
aggttaccaaaaaac

SEQ ID NO: 1999496 - DNA, 15 bp, Homo sapiens
ggttaccaaaaaaca

SEQ ID NO: 1999497 - DNA, 15 bp, Homo sapiens
gttaccaaaaaacaa

SEQ ID NO: 1999498 - DNA, 15 bp, Homo sapiens
ttaccaaaaaacaaa

SEQ ID NO: 1999499 - DNA, 15 bp, Homo sapiens
taccaaaaaacaaaa

SEQ ID NO: 1999500 - DNA, 15 bp, Homo sapiens
accaaaaaacaaaac

SEQ ID NO: 1999501 - DNA, 15 bp, Homo sapiens
ccaaaaaacaaaaca

SEQ ID NO: 1999502 - DNA, 15 bp, Homo sapiens
caaaaaacaaaacaa

SEQ ID NO: 1999503 - DNA, 15 bp, Homo sapiens
aaaaaacaaaacaaa

SEQ ID NO: 1999504 - DNA, 15 bp, Homo sapiens
aaacaaaacaaaaac

SEQ ID NO: 1999505 - DNA, 15 bp, Homo sapiens
aacaaaacaaaaaca

SEQ ID NO: 1999506 - DNA, 15 bp, Homo sapiens
acaaaacaaaaacaa

SEQ ID NO: 1999507 - DNA, 15 bp, Homo sapiens
caaaacaaaaacaaa

SEQ ID NO: 1999508 - DNA, 15 bp, Homo sapiens
caaaaacaaaaaaac

SEQ ID NO: 1999509 - DNA, 15 bp, Homo sapiens
aaaacaaaaaaacct

SEQ ID NO: 1999510 - DNA, 15 bp, Homo sapiens
aaacaaaaaaaccta

SEQ ID NO: 1999511 - DNA, 15 bp, Homo sapiens
aacaaaaaaacctaa

SEQ ID NO: 1999512 - DNA, 15 bp, Homo sapiens
acaaaaaaacctaag

SEQ ID NO: 1999513 - DNA, 15 bp, Homo sapiens
caaaaaaacctaagt

SEQ ID NO: 1999514 - DNA, 15 bp, Homo sapiens
aaaaaaacctaagtg

SEQ ID NO: 1999515 - DNA, 15 bp, Homo sapiens
aaaaaacctaagtga

SEQ ID NO: 1999516 - DNA, 15 bp, Homo sapiens
aaaaacctaagtgat

SEQ ID NO: 1999517 - DNA, 15 bp, Homo sapiens
aaaacctaagtgatg

SEQ ID NO: 1999518 - DNA, 15 bp, Homo sapiens
aaacctaagtgatgt

SEQ ID NO: 1999519 - DNA, 15 bp, Homo sapiens
aacctaagtgatgtg

SEQ ID NO: 1999520 - DNA, 15 bp, Homo sapiens
acctaagtgatgtga

SEQ ID NO: 1999521 - DNA, 15 bp, Homo sapiens
cctaagtgatgtgaa

SEQ ID NO: 1999522 - DNA, 15 bp, Homo sapiens
ctaagtgatgtgaaa

SEQ ID NO: 1999523 - DNA, 15 bp, Homo sapiens
taagtgatgtgaaaa

SEQ ID NO: 1999524 - DNA, 15 bp, Homo sapiens
aagtgatgtgaaaac

SEQ ID NO: 1999525 - DNA, 15 bp, Homo sapiens
agtgatgtgaaaaca

SEQ ID NO: 1999526 - DNA, 15 bp, Homo sapiens
gtgatgtgaaaacac

SEQ ID NO: 1999527 - DNA, 15 bp, Homo sapiens
tgatgtgaaaacaca

SEQ ID NO: 1999528 - DNA, 15 bp, Homo sapiens
gatgtgaaaacacaa

SEQ ID NO: 1999529 - DNA, 15 bp, Homo sapiens
atgtgaaaacacaag

SEQ ID NO: 1999530 - DNA, 15 bp, Homo sapiens
tgtgaaaacacaagg

SEQ ID NO: 1999531 - DNA, 15 bp, Homo sapiens
gtgaaaacacaagga

SEQ ID NO: 1999532 - DNA, 15 bp, Homo sapiens
tgaaaacacaaggag

SEQ ID NO: 1999533 - DNA, 15 bp, Homo sapiens
gaaaacacaaggagg

SEQ ID NO: 1999534 - DNA, 15 bp, Homo sapiens
aaaacacaaggaggt

SEQ ID NO: 1999535 - DNA, 15 bp, Homo sapiens
aaacacaaggaggtg

SEQ ID NO: 1999536 - DNA, 15 bp, Homo sapiens
aacacaaggaggtga

SEQ ID NO: 1999537 - DNA, 15 bp, Homo sapiens
acacaaggaggtgaa

SEQ ID NO: 1999538 - DNA, 15 bp, Homo sapiens
cacaaggaggtgaat

SEQ ID NO: 1999539 - DNA, 15 bp, Homo sapiens
acaaggaggtgaata

SEQ ID NO: 1999540 - DNA, 15 bp, Homo sapiens
caaggaggtgaataa

SEQ ID NO: 1999541 - DNA, 15 bp, Homo sapiens
aaggaggtgaataat

SEQ ID NO: 1999542 - DNA, 15 bp, Homo sapiens
aggaggtgaataatt

SEQ ID NO: 1999543 - DNA, 15 bp, Homo sapiens
ggaggtgaataattg

SEQ ID NO: 1999544 - DNA, 15 bp, Homo sapiens
gaggtgaataattgc

SEQ ID NO: 1999545 - DNA, 15 bp, Homo sapiens
aggtgaataattgca

SEQ ID NO: 1999546 - DNA, 15 bp, Homo sapiens
ggtgaataattgcaa

SEQ ID NO: 1999547 - DNA, 15 bp, Homo sapiens
gtgaataattgcaaa

SEQ ID NO: 1999548 - DNA, 15 bp, Homo sapiens
tgaataattgcaaag

SEQ ID NO: 1999549 - DNA, 15 bp, Homo sapiens
gaataattgcaaagt

SEQ ID NO: 1999550 - DNA, 15 bp, Homo sapiens
aataattgcaaagta

SEQ ID NO: 1999551 - DNA, 15 bp, Homo sapiens
ataattgcaaagtag

SEQ ID NO: 1999552 - DNA, 15 bp, Homo sapiens
taattgcaaagtaga

SEQ ID NO: 1999553 - DNA, 15 bp, Homo sapiens
aattgcaaagtagaa

SEQ ID NO: 1999554 - DNA, 15 bp, Homo sapiens
attgcaaagtagaat

SEQ ID NO: 1999555 - DNA, 15 bp, Homo sapiens
ttgcaaagtagaatt

SEQ ID NO: 1999556 - DNA, 15 bp, Homo sapiens
tgcaaagtagaattc

SEQ ID NO: 1999557 - DNA, 15 bp, Homo sapiens
gcaaagtagaattct

SEQ ID NO: 1999558 - DNA, 15 bp, Homo sapiens
caaagtagaattctc

SEQ ID NO: 1999559 - DNA, 15 bp, Homo sapiens
aaagtagaattctcc

SEQ ID NO: 1999560 - DNA, 15 bp, Homo sapiens
aagtagaattctcca

SEQ ID NO: 1999561 - DNA, 15 bp, Homo sapiens
agtagaattctccag

SEQ ID NO: 1999562 - DNA, 15 bp, Homo sapiens
gtagaattctccaga

SEQ ID NO: 1999563 - DNA, 15 bp, Homo sapiens
tagaattctccagaa

SEQ ID NO: 1999564 - DNA, 15 bp, Homo sapiens
agaattctccagaaa

SEQ ID NO: 1999565 - DNA, 15 bp, Homo sapiens
gaattctccagaaag

SEQ ID NO: 1999566 - DNA, 15 bp, Homo sapiens
aattctccagaaagt

SEQ ID NO: 1999567 - DNA, 15 bp, Homo sapiens
attctccagaaagtg

SEQ ID NO: 1999568 - DNA, 15 bp, Homo sapiens
ttctccagaaagtgg

SEQ ID NO: 1999569 - DNA, 15 bp, Homo sapiens
tctccagaaagtgga

SEQ ID NO: 1999570 - DNA, 15 bp, Homo sapiens
ctccagaaagtggac

SEQ ID NO: 1999571 - DNA, 15 bp, Homo sapiens
tccagaaagtggact

SEQ ID NO: 1999572 - DNA, 15 bp, Homo sapiens
ccagaaagtggacta

SEQ ID NO: 1999573 - DNA, 15 bp, Homo sapiens
cagaaagtggactac

SEQ ID NO: 1999574 - DNA, 15 bp, Homo sapiens
agaaagtggactaca

SEQ ID NO: 1999575 - DNA, 15 bp, Homo sapiens
gaaagtggactacat

SEQ ID NO: 1999576 - DNA, 15 bp, Homo sapiens
aaagtggactacatt

SEQ ID NO: 1999577 - DNA, 15 bp, Homo sapiens
aagtggactacattt

SEQ ID NO: 1999578 - DNA, 15 bp, Homo sapiens
agtggactacatttt

SEQ ID NO: 1999579 - DNA, 15 bp, Homo sapiens
gtggactacatttta

SEQ ID NO: 1999580 - DNA, 15 bp, Homo sapiens
tggactacattttaa

SEQ ID NO: 1999581 - DNA, 15 bp, Homo sapiens
ggactacattttaaa

SEQ ID NO: 1999582 - DNA, 15 bp, Homo sapiens
gactacattttaaat

SEQ ID NO: 1999583 - DNA, 15 bp, Homo sapiens
actacattttaaatg

SEQ ID NO: 1999584 - DNA, 15 bp, Homo sapiens
ctacattttaaatgt

SEQ ID NO: 1999585 - DNA, 15 bp, Homo sapiens
tacattttaaatgta

SEQ ID NO: 1999586 - DNA, 15 bp, Homo sapiens
acattttaaatgtat

SEQ ID NO: 1999587 - DNA, 15 bp, Homo sapiens
cattttaaatgtatg

SEQ ID NO: 1999588 - DNA, 15 bp, Homo sapiens
attttaaatgtatgt

SEQ ID NO: 1999589 - DNA, 15 bp, Homo sapiens
ttttaaatgtatgta

SEQ ID NO: 1999590 - DNA, 15 bp, Homo sapiens
tttaaatgtatgtaa

SEQ ID NO: 1999591 - DNA, 15 bp, Homo sapiens
ttaaatgtatgtaaa

SEQ ID NO: 1999592 - DNA, 15 bp, Homo sapiens
taaatgtatgtaaaa

SEQ ID NO: 1999593 - DNA, 15 bp, Homo sapiens
aaatgtatgtaaaat

SEQ ID NO: 1999594 - DNA, 15 bp, Homo sapiens
aatgtatgtaaaata

SEQ ID NO: 1999595 - DNA, 15 bp, Homo sapiens
atgtatgtaaaatac

SEQ ID NO: 1999596 - DNA, 15 bp, Homo sapiens
tgtatgtaaaatact

SEQ ID NO: 1999597 - DNA, 15 bp, Homo sapiens
gtatgtaaaatactg

SEQ ID NO: 1999598 - DNA, 15 bp, Homo sapiens
tatgtaaaatactgc

SEQ ID NO: 1999599 - DNA, 15 bp, Homo sapiens
atgtaaaatactgcc

SEQ ID NO: 1999600 - DNA, 15 bp, Homo sapiens
tgtaaaatactgcca

SEQ ID NO: 1999601 - DNA, 15 bp, Homo sapiens
gtaaaatactgccat

SEQ ID NO: 1999602 - DNA, 15 bp, Homo sapiens
taaaatactgccatt

SEQ ID NO: 1999603 - DNA, 15 bp, Homo sapiens
aaaatactgccattt

SEQ ID NO: 1999604 - DNA, 15 bp, Homo sapiens
aaatactgccattta

SEQ ID NO: 1999605 - DNA, 15 bp, Homo sapiens
aatactgccatttat

SEQ ID NO: 1999606 - DNA, 15 bp, Homo sapiens
atactgccatttatt

SEQ ID NO: 1999607 - DNA, 15 bp, Homo sapiens
tactgccatttattg

SEQ ID NO: 1999608 - DNA, 15 bp, Homo sapiens
actgccatttattga

SEQ ID NO: 1999609 - DNA, 15 bp, Homo sapiens
ctgccatttattgag

SEQ ID NO: 1999610 - DNA, 15 bp, Homo sapiens
tgccatttattgagt

SEQ ID NO: 1999611 - DNA, 15 bp, Homo sapiens
gccatttattgagta

SEQ ID NO: 1999612 - DNA, 15 bp, Homo sapiens
ccatttattgagtat

SEQ ID NO: 1999613 - DNA, 15 bp, Homo sapiens
catttattgagtatt

SEQ ID NO: 1999614 - DNA, 15 bp, Homo sapiens
atttattgagtattt

SEQ ID NO: 1999615 - DNA, 15 bp, Homo sapiens
tttattgagtattta

SEQ ID NO: 1999616 - DNA, 15 bp, Homo sapiens
ttattgagtatttat

SEQ ID NO: 1999617 - DNA, 15 bp, Homo sapiens
tattgagtatttata

SEQ ID NO: 1999618 - DNA, 15 bp, Homo sapiens
attgagtatttatag

SEQ ID NO: 1999619 - DNA, 15 bp, Homo sapiens
ttgagtatttatagc

SEQ ID NO: 1999620 - DNA, 15 bp, Homo sapiens
tgagtatttatagca

SEQ ID NO: 1999621 - DNA, 15 bp, Homo sapiens
gagtatttatagcat

SEQ ID NO: 1999622 - DNA, 15 bp, Homo sapiens
agtatttatagcatt

SEQ ID NO: 1999623 - DNA, 15 bp, Homo sapiens
gtatttatagcattt

SEQ ID NO: 1999624 - DNA, 15 bp, Homo sapiens
tatttatagcatttc

SEQ ID NO: 1999625 - DNA, 15 bp, Homo sapiens
atttatagcatttcc

SEQ ID NO: 1999626 - DNA, 15 bp, Homo sapiens
ttatagcatttcctt

SEQ ID NO: 1999627 - DNA, 15 bp, Homo sapiens
tatagcatttccttt

SEQ ID NO: 1999628 - DNA, 15 bp, Homo sapiens
atagcatttcctttg

SEQ ID NO: 1999629 - DNA, 15 bp, Homo sapiens
tagcatttcctttgc

SEQ ID NO: 1999630 - DNA, 15 bp, Homo sapiens
agcatttcctttgct

SEQ ID NO: 1999631 - DNA, 15 bp, Homo sapiens
gcatttcctttgctg

SEQ ID NO: 1999632 - DNA, 15 bp, Homo sapiens
catttcctttgctgt

SEQ ID NO: 1999633 - DNA, 15 bp, Homo sapiens
atttcctttgctgtc

SEQ ID NO: 1999634 - DNA, 15 bp, Homo sapiens
tttcctttgctgtct

SEQ ID NO: 1999635 - DNA, 15 bp, Homo sapiens
ttcctttgctgtctc

SEQ ID NO: 1999636 - DNA, 15 bp, Homo sapiens
tcctttgctgtctca

SEQ ID NO: 1999637 - DNA, 15 bp, Homo sapiens
cctttgctgtctcat

SEQ ID NO: 1999638 - DNA, 15 bp, Homo sapiens
ctttgctgtctcatc

SEQ ID NO: 1999639 - DNA, 15 bp, Homo sapiens
tttgctgtctcatcc

SEQ ID NO: 1999640 - DNA, 15 bp, Homo sapiens
ttgctgtctcatcct

SEQ ID NO: 1999641 - DNA, 15 bp, Homo sapiens
tgctgtctcatcctc

SEQ ID NO: 1999642 - DNA, 15 bp, Homo sapiens
gctgtctcatcctca

SEQ ID NO: 1999643 - DNA, 15 bp, Homo sapiens
ctgtctcatcctcac

SEQ ID NO: 1999644 - DNA, 15 bp, Homo sapiens
tgtctcatcctcaca

SEQ ID NO: 1999645 - DNA, 15 bp, Homo sapiens
gtctcatcctcacag

SEQ ID NO: 1999646 - DNA, 15 bp, Homo sapiens
tctcatcctcacagt

SEQ ID NO: 1999647 - DNA, 15 bp, Homo sapiens
ctcatcctcacagta

SEQ ID NO: 1999648 - DNA, 15 bp, Homo sapiens
tcatcctcacagtaa

SEQ ID NO: 1999649 - DNA, 15 bp, Homo sapiens
catcctcacagtaac

SEQ ID NO: 1999650 - DNA, 15 bp, Homo sapiens
atcctcacagtaacc

SEQ ID NO: 1999651 - DNA, 15 bp, Homo sapiens
tcctcacagtaacct

SEQ ID NO: 1999652 - DNA, 15 bp, Homo sapiens
cctcacagtaacctt

SEQ ID NO: 1999653 - DNA, 15 bp, Homo sapiens
ctcacagtaaccttg

SEQ ID NO: 1999654 - DNA, 15 bp, Homo sapiens
tcacagtaaccttga

SEQ ID NO: 1999655 - DNA, 15 bp, Homo sapiens
cacagtaaccttgat

SEQ ID NO: 1999656 - DNA, 15 bp, Homo sapiens
acagtaaccttgatg

SEQ ID NO: 1999657 - DNA, 15 bp, Homo sapiens
cagtaaccttgatga

SEQ ID NO: 1999658 - DNA, 15 bp, Homo sapiens
agtaaccttgatgat

SEQ ID NO: 1999659 - DNA, 15 bp, Homo sapiens
gtaaccttgatgata

SEQ ID NO: 1999660 - DNA, 15 bp, Homo sapiens
taaccttgatgatac

SEQ ID NO: 1999661 - DNA, 15 bp, Homo sapiens
aaccttgatgatact

SEQ ID NO: 1999662 - DNA, 15 bp, Homo sapiens
accttgatgatactt

SEQ ID NO: 1999663 - DNA, 15 bp, Homo sapiens
ccttgatgatacttc

SEQ ID NO: 1999664 - DNA, 15 bp, Homo sapiens
cttgatgatacttcc

SEQ ID NO: 1999665 - DNA, 15 bp, Homo sapiens
ttgatgatacttccc

SEQ ID NO: 1999666 - DNA, 15 bp, Homo sapiens
tgatgatacttccct

SEQ ID NO: 1999667 - DNA, 15 bp, Homo sapiens
gatgatacttccctc

SEQ ID NO: 1999668 - DNA, 15 bp, Homo sapiens
atgatacttccctca

SEQ ID NO: 1999669 - DNA, 15 bp, Homo sapiens
tgatacttccctcat

SEQ ID NO: 1999670 - DNA, 15 bp, Homo sapiens
gatacttccctcatt

SEQ ID NO: 1999671 - DNA, 15 bp, Homo sapiens
atacttccctcattt

SEQ ID NO: 1999672 - DNA, 15 bp, Homo sapiens
tacttccctcatttt

SEQ ID NO: 1999673 - DNA, 15 bp, Homo sapiens
acttccctcatttta

SEQ ID NO: 1999674 - DNA, 15 bp, Homo sapiens
cttccctcattttac

SEQ ID NO: 1999675 - DNA, 15 bp, Homo sapiens
ttccctcattttaca

SEQ ID NO: 1999676 - DNA, 15 bp, Homo sapiens
tccctcattttacag

SEQ ID NO: 1999677 - DNA, 15 bp, Homo sapiens
ccctcattttacagg

SEQ ID NO: 1999678 - DNA, 15 bp, Homo sapiens
cctcattttacaggt

SEQ ID NO: 1999679 - DNA, 15 bp, Homo sapiens
ctcattttacaggtg

SEQ ID NO: 1999680 - DNA, 15 bp, Homo sapiens
tcattttacaggtga

SEQ ID NO: 1999681 - DNA, 15 bp, Homo sapiens
attttacaggtgagc

SEQ ID NO: 1999682 - DNA, 15 bp, Homo sapiens
ttttacaggtgagca

SEQ ID NO: 1999683 - DNA, 15 bp, Homo sapiens
tttacaggtgagcaa

SEQ ID NO: 1999684 - DNA, 15 bp, Homo sapiens
ttacaggtgagcaaa

SEQ ID NO: 1999685 - DNA, 15 bp, Homo sapiens
tacaggtgagcaaac

SEQ ID NO: 1999686 - DNA, 15 bp, Homo sapiens
acaggtgagcaaact

SEQ ID NO: 1999687 - DNA, 15 bp, Homo sapiens
caggtgagcaaacta

SEQ ID NO: 1999688 - DNA, 15 bp, Homo sapiens
aggtgagcaaactaa

SEQ ID NO: 1999689 - DNA, 15 bp, Homo sapiens
ggtgagcaaactaat

SEQ ID NO: 1999690 - DNA, 15 bp, Homo sapiens
gtgagcaaactaata

SEQ ID NO: 1999691 - DNA, 15 bp, Homo sapiens
tgagcaaactaatac

SEQ ID NO: 1999692 - DNA, 15 bp, Homo sapiens
gagcaaactaatact

SEQ ID NO: 1999693 - DNA, 15 bp, Homo sapiens
agcaaactaatactc

SEQ ID NO: 1999694 - DNA, 15 bp, Homo sapiens
gcaaactaatactca

SEQ ID NO: 1999695 - DNA, 15 bp, Homo sapiens
caaactaatactcaa

SEQ ID NO: 1999696 - DNA, 15 bp, Homo sapiens
aaactaatactcaaa

SEQ ID NO: 1999697 - DNA, 15 bp, Homo sapiens
aactaatactcaaaa

SEQ ID NO: 1999698 - DNA, 15 bp, Homo sapiens
actaatactcaaaaa

SEQ ID NO: 1999699 - DNA, 15 bp, Homo sapiens
ctaatactcaaaaaa

SEQ ID NO: 1999700 - DNA, 15 bp, Homo sapiens
taatactcaaaaaag

SEQ ID NO: 1999701 - DNA, 15 bp, Homo sapiens
aatactcaaaaaagt

SEQ ID NO: 1999702 - DNA, 15 bp, Homo sapiens
atactcaaaaaagtt

SEQ ID NO: 1999703 - DNA, 15 bp, Homo sapiens
tactcaaaaaagttc

SEQ ID NO: 1999704 - DNA, 15 bp, Homo sapiens
actcaaaaaagttca

SEQ ID NO: 1999705 - DNA, 15 bp, Homo sapiens
ctcaaaaaagttcag

SEQ ID NO: 1999706 - DNA, 15 bp, Homo sapiens
tcaaaaaagttcagg

SEQ ID NO: 1999707 - DNA, 15 bp, Homo sapiens
caaaaaagttcaggt

SEQ ID NO: 1999708 - DNA, 15 bp, Homo sapiens
aaaaaagttcaggtg

SEQ ID NO: 1999709 - DNA, 15 bp, Homo sapiens
aaaaagttcaggtga

SEQ ID NO: 1999710 - DNA, 15 bp, Homo sapiens
aaaagttcaggtgat

SEQ ID NO: 1999711 - DNA, 15 bp, Homo sapiens
aaagttcaggtgatg

SEQ ID NO: 1999712 - DNA, 15 bp, Homo sapiens
aagttcaggtgatgt

SEQ ID NO: 1999713 - DNA, 15 bp, Homo sapiens
agttcaggtgatgtg

SEQ ID NO: 1999714 - DNA, 15 bp, Homo sapiens
gttcaggtgatgtgc

SEQ ID NO: 1999715 - DNA, 15 bp, Homo sapiens
ttcaggtgatgtgcc

SEQ ID NO: 1999716 - DNA, 15 bp, Homo sapiens
tcaggtgatgtgcca

SEQ ID NO: 1999717 - DNA, 15 bp, Homo sapiens
caggtgatgtgccaa

SEQ ID NO: 1999718 - DNA, 15 bp, Homo sapiens
aggtgatgtgccaaa

SEQ ID NO: 1999719 - DNA, 15 bp, Homo sapiens
ggtgatgtgccaaat

SEQ ID NO: 1999720 - DNA, 15 bp, Homo sapiens
gtgatgtgccaaata

SEQ ID NO: 1999721 - DNA, 15 bp, Homo sapiens
tgatgtgccaaataa

SEQ ID NO: 1999722 - DNA, 15 bp, Homo sapiens
gatgtgccaaataat

SEQ ID NO: 1999723 - DNA, 15 bp, Homo sapiens
atgtgccaaataatg

SEQ ID NO: 1999724 - DNA, 15 bp, Homo sapiens
tgtgccaaataatgg

SEQ ID NO: 1999725 - DNA, 15 bp, Homo sapiens
gtgccaaataatgga

SEQ ID NO: 1999726 - DNA, 15 bp, Homo sapiens
tgccaaataatggag

SEQ ID NO: 1999727 - DNA, 15 bp, Homo sapiens
gccaaataatggagg

SEQ ID NO: 1999728 - DNA, 15 bp, Homo sapiens
ccaaataatggagga

SEQ ID NO: 1999729 - DNA, 15 bp, Homo sapiens
caaataatggaggac

SEQ ID NO: 1999730 - DNA, 15 bp, Homo sapiens
aaataatggaggacc

SEQ ID NO: 1999731 - DNA, 15 bp, Homo sapiens
aataatggaggaccc

SEQ ID NO: 1999732 - DNA, 15 bp, Homo sapiens
ataatggaggaccca

SEQ ID NO: 1999733 - DNA, 15 bp, Homo sapiens
taatggaggacccaa

SEQ ID NO: 1999734 - DNA, 15 bp, Homo sapiens
aatggaggacccaaa

SEQ ID NO: 1999735 - DNA, 15 bp, Homo sapiens
atggaggacccaaaa

SEQ ID NO: 1999736 - DNA, 15 bp, Homo sapiens
tggaggacccaaaat

SEQ ID NO: 1999737 - DNA, 15 bp, Homo sapiens
ggaggacccaaaatt

SEQ ID NO: 1999738 - DNA, 15 bp, Homo sapiens
gaggacccaaaattt

SEQ ID NO: 1999739 - DNA, 15 bp, Homo sapiens
aggacccaaaatttc

SEQ ID NO: 1999740 - DNA, 15 bp, Homo sapiens
ggacccaaaatttct

SEQ ID NO: 1999741 - DNA, 15 bp, Homo sapiens
gacccaaaatttcta

SEQ ID NO: 1999742 - DNA, 15 bp, Homo sapiens
acccaaaatttctaa

SEQ ID NO: 1999743 - DNA, 15 bp, Homo sapiens
cccaaaatttctaag

SEQ ID NO: 1999744 - DNA, 15 bp, Homo sapiens
ccaaaatttctaagt

SEQ ID NO: 1999745 - DNA, 15 bp, Homo sapiens
caaaatttctaagtc

SEQ ID NO: 1999746 - DNA, 15 bp, Homo sapiens
aaaatttctaagtca

SEQ ID NO: 1999747 - DNA, 15 bp, Homo sapiens
aaatttctaagtcag

SEQ ID NO: 1999748 - DNA, 15 bp, Homo sapiens
aatttctaagtcagg

SEQ ID NO: 1999749 - DNA, 15 bp, Homo sapiens
atttctaagtcaggc

SEQ ID NO: 1999750 - DNA, 15 bp, Homo sapiens
tttctaagtcaggct

SEQ ID NO: 1999751 - DNA, 15 bp, Homo sapiens
ttctaagtcaggctg

SEQ ID NO: 1999752 - DNA, 15 bp, Homo sapiens
tctaagtcaggctgg

SEQ ID NO: 1999753 - DNA, 15 bp, Homo sapiens
ctaagtcaggctggc

SEQ ID NO: 1999754 - DNA, 15 bp, Homo sapiens
taagtcaggctggct

SEQ ID NO: 1999755 - DNA, 15 bp, Homo sapiens
aagtcaggctggctt

SEQ ID NO: 1999756 - DNA, 15 bp, Homo sapiens
agtcaggctggcttc

SEQ ID NO: 1999757 - DNA, 15 bp, Homo sapiens
gtcaggctggcttca

SEQ ID NO: 1999758 - DNA, 15 bp, Homo sapiens
tcaggctggcttcag

SEQ ID NO: 1999759 - DNA, 15 bp, Homo sapiens
caggctggcttcaga

SEQ ID NO: 1999760 - DNA, 15 bp, Homo sapiens
aggctggcttcagaa

SEQ ID NO: 1999761 - DNA, 15 bp, Homo sapiens
ggctggcttcagaat

SEQ ID NO: 1999762 - DNA, 15 bp, Homo sapiens
gctggcttcagaatt

SEQ ID NO: 1999763 - DNA, 15 bp, Homo sapiens
ctggcttcagaattt

SEQ ID NO: 1999764 - DNA, 15 bp, Homo sapiens
tggcttcagaattta

SEQ ID NO: 1999765 - DNA, 15 bp, Homo sapiens
ggcttcagaatttat

SEQ ID NO: 1999766 - DNA, 15 bp, Homo sapiens
gcttcagaatttata

SEQ ID NO: 1999767 - DNA, 15 bp, Homo sapiens
cttcagaatttatat

SEQ ID NO: 1999768 - DNA, 15 bp, Homo sapiens
ttcagaatttatatt

SEQ ID NO: 1999769 - DNA, 15 bp, Homo sapiens
tcagaatttatatta

SEQ ID NO: 1999770 - DNA, 15 bp, Homo sapiens
cagaatttatattag

SEQ ID NO: 1999771 - DNA, 15 bp, Homo sapiens
agaatttatattagt

SEQ ID NO: 1999772 - DNA, 15 bp, Homo sapiens
gaatttatattagtt

SEQ ID NO: 1999773 - DNA, 15 bp, Homo sapiens
aatttatattagttt

SEQ ID NO: 1999774 - DNA, 15 bp, Homo sapiens
atttatattagtttc

SEQ ID NO: 1999775 - DNA, 15 bp, Homo sapiens
tttatattagtttca

SEQ ID NO: 1999776 - DNA, 15 bp, Homo sapiens
ttatattagtttcac

SEQ ID NO: 1999777 - DNA, 15 bp, Homo sapiens
tatattagtttcact

SEQ ID NO: 1999778 - DNA, 15 bp, Homo sapiens
atattagtttcacta

SEQ ID NO: 1999779 - DNA, 15 bp, Homo sapiens
tattagtttcactat

SEQ ID NO: 1999780 - DNA, 15 bp, Homo sapiens
attagtttcactata

SEQ ID NO: 1999781 - DNA, 15 bp, Homo sapiens
ttagtttcactatac

SEQ ID NO: 1999782 - DNA, 15 bp, Homo sapiens
tagtttcactatacc

SEQ ID NO: 1999783 - DNA, 15 bp, Homo sapiens
agtttcactatacca

SEQ ID NO: 1999784 - DNA, 15 bp, Homo sapiens
gtttcactataccag

SEQ ID NO: 1999785 - DNA, 15 bp, Homo sapiens
tttcactataccaga

SEQ ID NO: 1999786 - DNA, 15 bp, Homo sapiens
ttcactataccagat

SEQ ID NO: 1999787 - DNA, 15 bp, Homo sapiens
tcactataccagatt

SEQ ID NO: 1999788 - DNA, 15 bp, Homo sapiens
cactataccagattg

SEQ ID NO: 1999789 - DNA, 15 bp, Homo sapiens
actataccagattgc

SEQ ID NO: 1999790 - DNA, 15 bp, Homo sapiens
ctataccagattgct

SEQ ID NO: 1999791 - DNA, 15 bp, Homo sapiens
tataccagattgctt

SEQ ID NO: 1999792 - DNA, 15 bp, Homo sapiens
ataccagattgcttc

SEQ ID NO: 1999793 - DNA, 15 bp, Homo sapiens
taccagattgcttcc

SEQ ID NO: 1999794 - DNA, 15 bp, Homo sapiens
accagattgcttccc

SEQ ID NO: 1999795 - DNA, 15 bp, Homo sapiens
ccagattgcttccct

SEQ ID NO: 1999796 - DNA, 15 bp, Homo sapiens
cagattgcttcccta

SEQ ID NO: 1999797 - DNA, 15 bp, Homo sapiens
agattgcttccctat

SEQ ID NO: 1999798 - DNA, 15 bp, Homo sapiens
gattgcttccctatc

SEQ ID NO: 1999799 - DNA, 15 bp, Homo sapiens
attgcttccctatct

SEQ ID NO: 1999800 - DNA, 15 bp, Homo sapiens
ttgcttccctatcta

SEQ ID NO: 1999801 - DNA, 15 bp, Homo sapiens
tgcttccctatctat

SEQ ID NO: 1999802 - DNA, 15 bp, Homo sapiens
gcttccctatctatt

SEQ ID NO: 1999803 - DNA, 15 bp, Homo sapiens
cttccctatctattt

SEQ ID NO: 1999804 - DNA, 15 bp, Homo sapiens
ttccctatctatttt

SEQ ID NO: 1999805 - DNA, 15 bp, Homo sapiens
tccctatctatttta

SEQ ID NO: 1999806 - DNA, 15 bp, Homo sapiens
ccctatctattttag

SEQ ID NO: 1999807 - DNA, 15 bp, Homo sapiens
cctatctattttagc

SEQ ID NO: 1999808 - DNA, 15 bp, Homo sapiens
ctatctattttagcc

SEQ ID NO: 1999809 - DNA, 15 bp, Homo sapiens
tatctattttagcca

SEQ ID NO: 1999810 - DNA, 15 bp, Homo sapiens
atctattttagccac

SEQ ID NO: 1999811 - DNA, 15 bp, Homo sapiens
tctattttagccaca

SEQ ID NO: 1999812 - DNA, 15 bp, Homo sapiens
ctattttagccacat

SEQ ID NO: 1999813 - DNA, 15 bp, Homo sapiens
tattttagccacatt

SEQ ID NO: 1999814 - DNA, 15 bp, Homo sapiens
attttagccacattt

SEQ ID NO: 1999815 - DNA, 15 bp, Homo sapiens
ttttagccacatttt

SEQ ID NO: 1999816 - DNA, 15 bp, Homo sapiens
tttagccacattttg

SEQ ID NO: 1999817 - DNA, 15 bp, Homo sapiens
ttagccacattttga

SEQ ID NO: 1999818 - DNA, 15 bp, Homo sapiens
tagccacattttgat

SEQ ID NO: 1999819 - DNA, 15 bp, Homo sapiens
agccacattttgatg

SEQ ID NO: 1999820 - DNA, 15 bp, Homo sapiens
gccacattttgatga

SEQ ID NO: 1999821 - DNA, 15 bp, Homo sapiens
ccacattttgatgaa

SEQ ID NO: 1999822 - DNA, 15 bp, Homo sapiens
cacattttgatgaaa

SEQ ID NO: 1999823 - DNA, 15 bp, Homo sapiens
acattttgatgaaat

SEQ ID NO: 1999824 - DNA, 15 bp, Homo sapiens
cattttgatgaaatc

SEQ ID NO: 1999825 - DNA, 15 bp, Homo sapiens
attttgatgaaatct

SEQ ID NO: 1999826 - DNA, 15 bp, Homo sapiens
ttttgatgaaatctg

SEQ ID NO: 1999827 - DNA, 15 bp, Homo sapiens
tttgatgaaatctgt

SEQ ID NO: 1999828 - DNA, 15 bp, Homo sapiens
ttgatgaaatctgtt

SEQ ID NO: 1999829 - DNA, 15 bp, Homo sapiens
tgatgaaatctgttt

SEQ ID NO: 1999830 - DNA, 15 bp, Homo sapiens
gatgaaatctgtttt

SEQ ID NO: 1999831 - DNA, 15 bp, Homo sapiens
atgaaatctgtttta

SEQ ID NO: 1999832 - DNA, 15 bp, Homo sapiens
tgaaatctgttttat

SEQ ID NO: 1999833 - DNA, 15 bp, Homo sapiens
gaaatctgttttata

SEQ ID NO: 1999834 - DNA, 15 bp, Homo sapiens
aaatctgttttataa

SEQ ID NO: 1999835 - DNA, 15 bp, Homo sapiens
aatctgttttataaa

SEQ ID NO: 1999836 - DNA, 15 bp, Homo sapiens
atctgttttataaaa

SEQ ID NO: 1999837 - DNA, 15 bp, Homo sapiens
tctgttttataaaat

SEQ ID NO: 1999838 - DNA, 15 bp, Homo sapiens
ctgttttataaaata

SEQ ID NO: 1999839 - DNA, 15 bp, Homo sapiens
tgttttataaaatat

SEQ ID NO: 1999840 - DNA, 15 bp, Homo sapiens
gttttataaaatata

SEQ ID NO: 1999841 - DNA, 15 bp, Homo sapiens
ttttataaaatatac

SEQ ID NO: 1999842 - DNA, 15 bp, Homo sapiens
tttataaaatatact

SEQ ID NO: 1999843 - DNA, 15 bp, Homo sapiens
ttataaaatatactt

SEQ ID NO: 1999844 - DNA, 15 bp, Homo sapiens
tataaaatatacttc

SEQ ID NO: 1999845 - DNA, 15 bp, Homo sapiens
ataaaatatacttct

SEQ ID NO: 1999846 - DNA, 15 bp, Homo sapiens
taaaatatacttctg

SEQ ID NO: 1999847 - DNA, 15 bp, Homo sapiens
aaaatatacttctgt

SEQ ID NO: 1999848 - DNA, 15 bp, Homo sapiens
aaatatacttctgtt

SEQ ID NO: 1999849 - DNA, 15 bp, Homo sapiens
aatatacttctgttt

SEQ ID NO: 1999850 - DNA, 15 bp, Homo sapiens
atatacttctgtttt

SEQ ID NO: 1999851 - DNA, 15 bp, Homo sapiens
tatacttctgttttt

SEQ ID NO: 1999852 - DNA, 15 bp, Homo sapiens
atacttctgttttta

SEQ ID NO: 1999853 - DNA, 15 bp, Homo sapiens
tacttctgtttttaa

SEQ ID NO: 1999854 - DNA, 15 bp, Homo sapiens
acttctgtttttaaa

SEQ ID NO: 1999855 - DNA, 15 bp, Homo sapiens
cttctgtttttaaag

SEQ ID NO: 1999856 - DNA, 15 bp, Homo sapiens
ttctgtttttaaaga

SEQ ID NO: 1999857 - DNA, 15 bp, Homo sapiens
tctgtttttaaagat

SEQ ID NO: 1999858 - DNA, 15 bp, Homo sapiens
ctgtttttaaagatg

SEQ ID NO: 1999859 - DNA, 15 bp, Homo sapiens
tgtttttaaagatgt

SEQ ID NO: 1999860 - DNA, 15 bp, Homo sapiens
gtttttaaagatgta

SEQ ID NO: 1999861 - DNA, 15 bp, Homo sapiens
tttttaaagatgtat

SEQ ID NO: 1999862 - DNA, 15 bp, Homo sapiens
ttttaaagatgtatc

SEQ ID NO: 1999863 - DNA, 15 bp, Homo sapiens
tttaaagatgtatca

SEQ ID NO: 1999864 - DNA, 15 bp, Homo sapiens
ttaaagatgtatcaa

SEQ ID NO: 1999865 - DNA, 15 bp, Homo sapiens
taaagatgtatcaaa

SEQ ID NO: 1999866 - DNA, 15 bp, Homo sapiens
aaagatgtatcaaaa

SEQ ID NO: 1999867 - DNA, 15 bp, Homo sapiens
aagatgtatcaaaaa

SEQ ID NO: 1999868 - DNA, 15 bp, Homo sapiens
agatgtatcaaaaat

SEQ ID NO: 1999869 - DNA, 15 bp, Homo sapiens
gatgtatcaaaaata

SEQ ID NO: 1999870 - DNA, 15 bp, Homo sapiens
atgtatcaaaaatat

SEQ ID NO: 1999871 - DNA, 15 bp, Homo sapiens
tgtatcaaaaatata

SEQ ID NO: 1999872 - DNA, 15 bp, Homo sapiens
gtatcaaaaatataa

SEQ ID NO: 1999873 - DNA, 15 bp, Homo sapiens
tatcaaaaatataat

SEQ ID NO: 1999874 - DNA, 15 bp, Homo sapiens
atcaaaaatataatt

SEQ ID NO: 1999875 - DNA, 15 bp, Homo sapiens
tcaaaaatataattt

SEQ ID NO: 1999876 - DNA, 15 bp, Homo sapiens
caaaaatataattta

SEQ ID NO: 1999877 - DNA, 15 bp, Homo sapiens
aaaaatataatttaa

SEQ ID NO: 1999878 - DNA, 15 bp, Homo sapiens
aaaatataatttaag

SEQ ID NO: 1999879 - DNA, 15 bp, Homo sapiens
aaatataatttaagc

SEQ ID NO: 1999880 - DNA, 15 bp, Homo sapiens
aatataatttaagct

SEQ ID NO: 1999881 - DNA, 15 bp, Homo sapiens
atataatttaagctt

SEQ ID NO: 1999882 - DNA, 15 bp, Homo sapiens
tataatttaagcttt

SEQ ID NO: 1999883 - DNA, 15 bp, Homo sapiens
ataatttaagctttt

SEQ ID NO: 1999884 - DNA, 15 bp, Homo sapiens
taatttaagctttta

SEQ ID NO: 1999885 - DNA, 15 bp, Homo sapiens
aatttaagcttttat

SEQ ID NO: 1999886 - DNA, 15 bp, Homo sapiens
atttaagcttttatt

SEQ ID NO: 1999887 - DNA, 15 bp, Homo sapiens
tttaagcttttattg

SEQ ID NO: 1999888 - DNA, 15 bp, Homo sapiens
ttaagcttttattga

SEQ ID NO: 1999889 - DNA, 15 bp, Homo sapiens
taagcttttattgat

SEQ ID NO: 1999890 - DNA, 15 bp, Homo sapiens
aagcttttattgatg

SEQ ID NO: 1999891 - DNA, 15 bp, Homo sapiens
agcttttattgatga

SEQ ID NO: 1999892 - DNA, 15 bp, Homo sapiens
gcttttattgatgac

SEQ ID NO: 1999893 - DNA, 15 bp, Homo sapiens
cttttattgatgact

SEQ ID NO: 1999894 - DNA, 15 bp, Homo sapiens
ttttattgatgactc

SEQ ID NO: 1999895 - DNA, 15 bp, Homo sapiens
tttattgatgactca

SEQ ID NO: 1999896 - DNA, 15 bp, Homo sapiens
ttattgatgactcaa

SEQ ID NO: 1999897 - DNA, 15 bp, Homo sapiens
tattgatgactcaaa

SEQ ID NO: 1999898 - DNA, 15 bp, Homo sapiens
attgatgactcaaaa

SEQ ID NO: 1999899 - DNA, 15 bp, Homo sapiens
ttgatgactcaaaat

SEQ ID NO: 1999900 - DNA, 15 bp, Homo sapiens
tgatgactcaaaatc

SEQ ID NO: 1999901 - DNA, 15 bp, Homo sapiens
gatgactcaaaatca

SEQ ID NO: 1999902 - DNA, 15 bp, Homo sapiens
atgactcaaaatcat

SEQ ID NO: 1999903 - DNA, 15 bp, Homo sapiens
tgactcaaaatcatc

SEQ ID NO: 1999904 - DNA, 15 bp, Homo sapiens
gactcaaaatcatcc

SEQ ID NO: 1999905 - DNA, 15 bp, Homo sapiens
actcaaaatcatcct

SEQ ID NO: 1999906 - DNA, 15 bp, Homo sapiens
ctcaaaatcatcctg

SEQ ID NO: 1999907 - DNA, 15 bp, Homo sapiens
tcaaaatcatcctga

SEQ ID NO: 1999908 - DNA, 15 bp, Homo sapiens
caaaatcatcctgag

SEQ ID NO: 1999909 - DNA, 15 bp, Homo sapiens
aaaatcatcctgagc

SEQ ID NO: 1999910 - DNA, 15 bp, Homo sapiens
aaatcatcctgagca

SEQ ID NO: 1999911 - DNA, 15 bp, Homo sapiens
aatcatcctgagcat

SEQ ID NO: 1999912 - DNA, 15 bp, Homo sapiens
atcatcctgagcatt

SEQ ID NO: 1999913 - DNA, 15 bp, Homo sapiens
tcatcctgagcatta

SEQ ID NO: 1999914 - DNA, 15 bp, Homo sapiens
catcctgagcattag

SEQ ID NO: 1999915 - DNA, 15 bp, Homo sapiens
atcctgagcattagt

SEQ ID NO: 1999916 - DNA, 15 bp, Homo sapiens
tcctgagcattagtt

SEQ ID NO: 1999917 - DNA, 15 bp, Homo sapiens
cctgagcattagttg

SEQ ID NO: 1999918 - DNA, 15 bp, Homo sapiens
ctgagcattagttgt

SEQ ID NO: 1999919 - DNA, 15 bp, Homo sapiens
tgagcattagttgtg

SEQ ID NO: 1999920 - DNA, 15 bp, Homo sapiens
gagcattagttgtga

SEQ ID NO: 1999921 - DNA, 15 bp, Homo sapiens
agcattagttgtgat

SEQ ID NO: 1999922 - DNA, 15 bp, Homo sapiens
gcattagttgtgata

SEQ ID NO: 1999923 - DNA, 15 bp, Homo sapiens
cattagttgtgatat

SEQ ID NO: 1999924 - DNA, 15 bp, Homo sapiens
attagttgtgatatg

SEQ ID NO: 1999925 - DNA, 15 bp, Homo sapiens
ttagttgtgatatgc

SEQ ID NO: 1999926 - DNA, 15 bp, Homo sapiens
tagttgtgatatgct

SEQ ID NO: 1999927 - DNA, 15 bp, Homo sapiens
agttgtgatatgcta

SEQ ID NO: 1999928 - DNA, 15 bp, Homo sapiens
gttgtgatatgctac

SEQ ID NO: 1999929 - DNA, 15 bp, Homo sapiens
ttgtgatatgctacc

SEQ ID NO: 1999930 - DNA, 15 bp, Homo sapiens
tgtgatatgctacct

SEQ ID NO: 1999931 - DNA, 15 bp, Homo sapiens
gtgatatgctaccta

SEQ ID NO: 1999932 - DNA, 15 bp, Homo sapiens
tgatatgctacctac

SEQ ID NO: 1999933 - DNA, 15 bp, Homo sapiens
gatatgctacctaca

SEQ ID NO: 1999934 - DNA, 15 bp, Homo sapiens
atatgctacctacag

SEQ ID NO: 1999935 - DNA, 15 bp, Homo sapiens
tatgctacctacagg

SEQ ID NO: 1999936 - DNA, 15 bp, Homo sapiens
atgctacctacaggt

SEQ ID NO: 1999937 - DNA, 15 bp, Homo sapiens
tgctacctacaggtg

SEQ ID NO: 1999938 - DNA, 15 bp, Homo sapiens
gctacctacaggtgg

SEQ ID NO: 1999939 - DNA, 15 bp, Homo sapiens
ctacctacaggtgga

SEQ ID NO: 1999940 - DNA, 15 bp, Homo sapiens
tacctacaggtggag

SEQ ID NO: 1999941 - DNA, 15 bp, Homo sapiens
acctacaggtggaga

SEQ ID NO: 1999942 - DNA, 15 bp, Homo sapiens
cctacaggtggagaa

SEQ ID NO: 1999943 - DNA, 15 bp, Homo sapiens
ctacaggtggagaaa

SEQ ID NO: 1999944 - DNA, 15 bp, Homo sapiens
tacaggtggagaaat

SEQ ID NO: 1999945 - DNA, 15 bp, Homo sapiens
acaggtggagaaatt

SEQ ID NO: 1999946 - DNA, 15 bp, Homo sapiens
caggtggagaaatta

SEQ ID NO: 1999947 - DNA, 15 bp, Homo sapiens
aggtggagaaattag

SEQ ID NO: 1999948 - DNA, 15 bp, Homo sapiens
ggtggagaaattagt

SEQ ID NO: 1999949 - DNA, 15 bp, Homo sapiens
gtggagaaattagta

SEQ ID NO: 1999950 - DNA, 15 bp, Homo sapiens
tggagaaattagtat

SEQ ID NO: 1999951 - DNA, 15 bp, Homo sapiens
ggagaaattagtata

SEQ ID NO: 1999952 - DNA, 15 bp, Homo sapiens
gagaaattagtatag

SEQ ID NO: 1999953 - DNA, 15 bp, Homo sapiens
agaaattagtatagg

SEQ ID NO: 1999954 - DNA, 15 bp, Homo sapiens
gaaattagtataggt

SEQ ID NO: 1999955 - DNA, 15 bp, Homo sapiens
aaattagtataggta

SEQ ID NO: 1999956 - DNA, 15 bp, Homo sapiens
aattagtataggtag

SEQ ID NO: 1999957 - DNA, 15 bp, Homo sapiens
attagtataggtagt

SEQ ID NO: 1999958 - DNA, 15 bp, Homo sapiens
ttagtataggtagtg

SEQ ID NO: 1999959 - DNA, 15 bp, Homo sapiens
tagtataggtagtgc

SEQ ID NO: 1999960 - DNA, 15 bp, Homo sapiens
agtataggtagtgct

SEQ ID NO: 1999961 - DNA, 15 bp, Homo sapiens
gtataggtagtgctc

SEQ ID NO: 1999962 - DNA, 15 bp, Homo sapiens
tataggtagtgctct

SEQ ID NO: 1999963 - DNA, 15 bp, Homo sapiens
ataggtagtgctcta

SEQ ID NO: 1999964 - DNA, 15 bp, Homo sapiens
taggtagtgctctat

SEQ ID NO: 1999965 - DNA, 15 bp, Homo sapiens
aggtagtgctctatg

SEQ ID NO: 1999966 - DNA, 15 bp, Homo sapiens
ggtagtgctctatgg

SEQ ID NO: 1999967 - DNA, 15 bp, Homo sapiens
gtagtgctctatggg

SEQ ID NO: 1999968 - DNA, 15 bp, Homo sapiens
tagtgctctatggga

SEQ ID NO: 1999969 - DNA, 15 bp, Homo sapiens
agtgctctatgggat

SEQ ID NO: 1999970 - DNA, 15 bp, Homo sapiens
gtgctctatgggata

SEQ ID NO: 1999971 - DNA, 15 bp, Homo sapiens
tgctctatgggatag

SEQ ID NO: 1999972 - DNA, 15 bp, Homo sapiens
gctctatgggataga

SEQ ID NO: 1999973 - DNA, 15 bp, Homo sapiens
ctctatgggatagaa

SEQ ID NO: 1999974 - DNA, 15 bp, Homo sapiens
tctatgggatagaat

SEQ ID NO: 1999975 - DNA, 15 bp, Homo sapiens
ctatgggatagaatt

SEQ ID NO: 1999976 - DNA, 15 bp, Homo sapiens
tatgggatagaatta

SEQ ID NO: 1999977 - DNA, 15 bp, Homo sapiens
atgggatagaattat

SEQ ID NO: 1999978 - DNA, 15 bp, Homo sapiens
tgggatagaattata

SEQ ID NO: 1999979 - DNA, 15 bp, Homo sapiens
gggatagaattataa

SEQ ID NO: 1999980 - DNA, 15 bp, Homo sapiens
ggatagaattataag

SEQ ID NO: 1999981 - DNA, 15 bp, Homo sapiens
gatagaattataagt

SEQ ID NO: 1999982 - DNA, 15 bp, Homo sapiens
atagaattataagtg

SEQ ID NO: 1999983 - DNA, 15 bp, Homo sapiens
tagaattataagtga

SEQ ID NO: 1999984 - DNA, 15 bp, Homo sapiens
agaattataagtgac

SEQ ID NO: 1999985 - DNA, 15 bp, Homo sapiens
gaattataagtgaca

SEQ ID NO: 1999986 - DNA, 15 bp, Homo sapiens
aattataagtgacag

SEQ ID NO: 1999987 - DNA, 15 bp, Homo sapiens
attataagtgacagt

SEQ ID NO: 1999988 - DNA, 15 bp, Homo sapiens
ttataagtgacagta

SEQ ID NO: 1999989 - DNA, 15 bp, Homo sapiens
tataagtgacagtag

SEQ ID NO: 1999990 - DNA, 15 bp, Homo sapiens
ataagtgacagtagc

SEQ ID NO: 1999991 - DNA, 15 bp, Homo sapiens
taagtgacagtagca

SEQ ID NO: 1999992 - DNA, 15 bp, Homo sapiens
aagtgacagtagcaa

SEQ ID NO: 1999993 - DNA, 15 bp, Homo sapiens
agtgacagtagcaag

SEQ ID NO: 1999994 - DNA, 15 bp, Homo sapiens
gtgacagtagcaagt

SEQ ID NO: 1999995 - DNA, 15 bp, Homo sapiens
tgacagtagcaagta

SEQ ID NO: 1999996 - DNA, 15 bp, Homo sapiens
gacagtagcaagtag

SEQ ID NO: 1999997 - DNA, 15 bp, Homo sapiens
acagtagcaagtagc

SEQ ID NO: 1999998 - DNA, 15 bp, Homo sapiens
cagtagcaagtagct

SEQ ID NO: 1999999 - DNA, 15 bp, Homo sapiens
agtagcaagtagctg

SEQ ID NO: 2000000 - DNA, 15 bp, Homo sapiens
gtagcaagtagctgc

SEQ ID NO: 2000001 - DNA, 15 bp, Homo sapiens
tagcaagtagctgca

SEQ ID NO: 2000002 - DNA, 15 bp, Homo sapiens
agcaagtagctgcaa

SEQ ID NO: 2000003 - DNA, 15 bp, Homo sapiens
gcaagtagctgcaaa

SEQ ID NO: 2000004 - DNA, 15 bp, Homo sapiens
caagtagctgcaaat

SEQ ID NO: 2000005 - DNA, 15 bp, Homo sapiens
aagtagctgcaaatt

SEQ ID NO: 2000006 - DNA, 15 bp, Homo sapiens
agtagctgcaaattg

SEQ ID NO: 2000007 - DNA, 15 bp, Homo sapiens
gtagctgcaaattgt

SEQ ID NO: 2000008 - DNA, 15 bp, Homo sapiens
tagctgcaaattgtt

SEQ ID NO: 2000009 - DNA, 15 bp, Homo sapiens
agctgcaaattgttg

SEQ ID NO: 2000010 - DNA, 15 bp, Homo sapiens
gctgcaaattgttgt

SEQ ID NO: 2000011 - DNA, 15 bp, Homo sapiens
ctgcaaattgttgtt

SEQ ID NO: 2000012 - DNA, 15 bp, Homo sapiens
tgcaaattgttgtta

SEQ ID NO: 2000013 - DNA, 15 bp, Homo sapiens
gcaaattgttgttat

SEQ ID NO: 2000014 - DNA, 15 bp, Homo sapiens
caaattgttgttatg

SEQ ID NO: 2000015 - DNA, 15 bp, Homo sapiens
aaattgttgttatgc

SEQ ID NO: 2000016 - DNA, 15 bp, Homo sapiens
aattgttgttatgca

SEQ ID NO: 2000017 - DNA, 15 bp, Homo sapiens
ttgttgttatgcaca

SEQ ID NO: 2000018 - DNA, 15 bp, Homo sapiens
tgttgttatgcacat

SEQ ID NO: 2000019 - DNA, 15 bp, Homo sapiens
gttgttatgcacatg

SEQ ID NO: 2000020 - DNA, 15 bp, Homo sapiens
ttgttatgcacatga

SEQ ID NO: 2000021 - DNA, 15 bp, Homo sapiens
tgttatgcacatgat

SEQ ID NO: 2000022 - DNA, 15 bp, Homo sapiens
gttatgcacatgatt

SEQ ID NO: 2000023 - DNA, 15 bp, Homo sapiens
ttatgcacatgattt

SEQ ID NO: 2000024 - DNA, 15 bp, Homo sapiens
tatgcacatgatttg

SEQ ID NO: 2000025 - DNA, 15 bp, Homo sapiens
atgcacatgatttgc

SEQ ID NO: 2000026 - DNA, 15 bp, Homo sapiens
tgcacatgatttgcc

SEQ ID NO: 2000027 - DNA, 15 bp, Homo sapiens
gcacatgatttgcct

SEQ ID NO: 2000028 - DNA, 15 bp, Homo sapiens
cacatgatttgcctt

SEQ ID NO: 2000029 - DNA, 15 bp, Homo sapiens
acatgatttgccttt

SEQ ID NO: 2000030 - DNA, 15 bp, Homo sapiens
catgatttgcctttc

SEQ ID NO: 2000031 - DNA, 15 bp, Homo sapiens
atgatttgcctttct

SEQ ID NO: 2000032 - DNA, 15 bp, Homo sapiens
tgatttgcctttcta

SEQ ID NO: 2000033 - DNA, 15 bp, Homo sapiens
gatttgcctttctaa

SEQ ID NO: 2000034 - DNA, 15 bp, Homo sapiens
atttgcctttctaag

SEQ ID NO: 2000035 - DNA, 15 bp, Homo sapiens
tttgcctttctaagg

SEQ ID NO: 2000036 - DNA, 15 bp, Homo sapiens
ttgcctttctaaggc

SEQ ID NO: 2000037 - DNA, 15 bp, Homo sapiens
tgcctttctaaggca

SEQ ID NO: 2000038 - DNA, 15 bp, Homo sapiens
gcctttctaaggcaa

SEQ ID NO: 2000039 - DNA, 15 bp, Homo sapiens
cctttctaaggcaag

SEQ ID NO: 2000040 - DNA, 15 bp, Homo sapiens
ctttctaaggcaagt

SEQ ID NO: 2000041 - DNA, 15 bp, Homo sapiens
tttctaaggcaagta

SEQ ID NO: 2000042 - DNA, 15 bp, Homo sapiens
ttctaaggcaagtaa

SEQ ID NO: 2000043 - DNA, 15 bp, Homo sapiens
tctaaggcaagtaaa

SEQ ID NO: 2000044 - DNA, 15 bp, Homo sapiens
ctaaggcaagtaaag

SEQ ID NO: 2000045 - DNA, 15 bp, Homo sapiens
taaggcaagtaaagt

SEQ ID NO: 2000046 - DNA, 15 bp, Homo sapiens
aaggcaagtaaagtc

SEQ ID NO: 2000047 - DNA, 15 bp, Homo sapiens
aggcaagtaaagtca

SEQ ID NO: 2000048 - DNA, 15 bp, Homo sapiens
ggcaagtaaagtcag

SEQ ID NO: 2000049 - DNA, 15 bp, Homo sapiens
gcaagtaaagtcaga

SEQ ID NO: 2000050 - DNA, 15 bp, Homo sapiens
caagtaaagtcagat

SEQ ID NO: 2000051 - DNA, 15 bp, Homo sapiens
aagtaaagtcagatg

SEQ ID NO: 2000052 - DNA, 15 bp, Homo sapiens
agtaaagtcagatgg

SEQ ID NO: 2000053 - DNA, 15 bp, Homo sapiens
gtaaagtcagatggg

SEQ ID NO: 2000054 - DNA, 15 bp, Homo sapiens
taaagtcagatgggt

SEQ ID NO: 2000055 - DNA, 15 bp, Homo sapiens
aaagtcagatgggtt

SEQ ID NO: 2000056 - DNA, 15 bp, Homo sapiens
aagtcagatgggtta

SEQ ID NO: 2000057 - DNA, 15 bp, Homo sapiens
agtcagatgggttat

SEQ ID NO: 2000058 - DNA, 15 bp, Homo sapiens
gtcagatgggttatt

SEQ ID NO: 2000059 - DNA, 15 bp, Homo sapiens
tcagatgggttatta

SEQ ID NO: 2000060 - DNA, 15 bp, Homo sapiens
cagatgggttattaa

SEQ ID NO: 2000061 - DNA, 15 bp, Homo sapiens
agatgggttattaac

SEQ ID NO: 2000062 - DNA, 15 bp, Homo sapiens
gatgggttattaact

SEQ ID NO: 2000063 - DNA, 15 bp, Homo sapiens
atgggttattaactt

SEQ ID NO: 2000064 - DNA, 15 bp, Homo sapiens
tgggttattaactta

SEQ ID NO: 2000065 - DNA, 15 bp, Homo sapiens
gggttattaacttaa

SEQ ID NO: 2000066 - DNA, 15 bp, Homo sapiens
ggttattaacttaat

SEQ ID NO: 2000067 - DNA, 15 bp, Homo sapiens
gttattaacttaatt

SEQ ID NO: 2000068 - DNA, 15 bp, Homo sapiens
ttattaacttaatta

SEQ ID NO: 2000069 - DNA, 15 bp, Homo sapiens
tattaacttaattag

SEQ ID NO: 2000070 - DNA, 15 bp, Homo sapiens
attaacttaattaga

SEQ ID NO: 2000071 - DNA, 15 bp, Homo sapiens
ttaacttaattagaa

SEQ ID NO: 2000072 - DNA, 15 bp, Homo sapiens
taacttaattagaaa

SEQ ID NO: 2000073 - DNA, 15 bp, Homo sapiens
aacttaattagaaac

SEQ ID NO: 2000074 - DNA, 15 bp, Homo sapiens
acttaattagaaact

SEQ ID NO: 2000075 - DNA, 15 bp, Homo sapiens
cttaattagaaacta

SEQ ID NO: 2000076 - DNA, 15 bp, Homo sapiens
ttaattagaaactat

SEQ ID NO: 2000077 - DNA, 15 bp, Homo sapiens
taattagaaactata

SEQ ID NO: 2000078 - DNA, 15 bp, Homo sapiens
aattagaaactatag

SEQ ID NO: 2000079 - DNA, 15 bp, Homo sapiens
attagaaactatagc

SEQ ID NO: 2000080 - DNA, 15 bp, Homo sapiens
ttagaaactatagca

SEQ ID NO: 2000081 - DNA, 15 bp, Homo sapiens
tagaaactatagcac

SEQ ID NO: 2000082 - DNA, 15 bp, Homo sapiens
agaaactatagcaca

SEQ ID NO: 2000083 - DNA, 15 bp, Homo sapiens
gaaactatagcacaa

SEQ ID NO: 2000084 - DNA, 15 bp, Homo sapiens
aaactatagcacaaa

SEQ ID NO: 2000085 - DNA, 15 bp, Homo sapiens
aactatagcacaaat

SEQ ID NO: 2000086 - DNA, 15 bp, Homo sapiens
actatagcacaaatt

SEQ ID NO: 2000087 - DNA, 15 bp, Homo sapiens
ctatagcacaaatta

SEQ ID NO: 2000088 - DNA, 15 bp, Homo sapiens
tatagcacaaattat

SEQ ID NO: 2000089 - DNA, 15 bp, Homo sapiens
atagcacaaattatt

SEQ ID NO: 2000090 - DNA, 15 bp, Homo sapiens
tagcacaaattattt

SEQ ID NO: 2000091 - DNA, 15 bp, Homo sapiens
agcacaaattattta

SEQ ID NO: 2000092 - DNA, 15 bp, Homo sapiens
gcacaaattatttag

SEQ ID NO: 2000093 - DNA, 15 bp, Homo sapiens
cacaaattatttagt

SEQ ID NO: 2000094 - DNA, 15 bp, Homo sapiens
acaaattatttagtg

SEQ ID NO: 2000095 - DNA, 15 bp, Homo sapiens
caaattatttagtga

SEQ ID NO: 2000096 - DNA, 15 bp, Homo sapiens
aaattatttagtgat

SEQ ID NO: 2000097 - DNA, 15 bp, Homo sapiens
aattatttagtgatt

SEQ ID NO: 2000098 - DNA, 15 bp, Homo sapiens
attatttagtgattc

SEQ ID NO: 2000099 - DNA, 15 bp, Homo sapiens
ttatttagtgattcg

SEQ ID NO: 2000100 - DNA, 15 bp, Homo sapiens
tatttagtgattcgt

SEQ ID NO: 2000101 - DNA, 15 bp, Homo sapiens
atttagtgattcgtg

SEQ ID NO: 2000102 - DNA, 15 bp, Homo sapiens
tttagtgattcgtga

SEQ ID NO: 2000103 - DNA, 15 bp, Homo sapiens
ttagtgattcgtgaa

SEQ ID NO: 2000104 - DNA, 15 bp, Homo sapiens
tagtgattcgtgaat

SEQ ID NO: 2000105 - DNA, 15 bp, Homo sapiens
agtgattcgtgaatc

SEQ ID NO: 2000106 - DNA, 15 bp, Homo sapiens
gtgattcgtgaatcg

SEQ ID NO: 2000107 - DNA, 15 bp, Homo sapiens
tgattcgtgaatcga

SEQ ID NO: 2000108 - DNA, 15 bp, Homo sapiens
gattcgtgaatcgaa

SEQ ID NO: 2000109 - DNA, 15 bp, Homo sapiens
attcgtgaatcgaag

SEQ ID NO: 2000110 - DNA, 15 bp, Homo sapiens
ttcgtgaatcgaaga

SEQ ID NO: 2000111 - DNA, 15 bp, Homo sapiens
tcgtgaatcgaagac

SEQ ID NO: 2000112 - DNA, 15 bp, Homo sapiens
cgtgaatcgaagact

SEQ ID NO: 2000113 - DNA, 15 bp, Homo sapiens
gtgaatcgaagacta

SEQ ID NO: 2000114 - DNA, 15 bp, Homo sapiens
tgaatcgaagactaa

SEQ ID NO: 2000115 - DNA, 15 bp, Homo sapiens
gaatcgaagactaat

SEQ ID NO: 2000116 - DNA, 15 bp, Homo sapiens
aatcgaagactaata

SEQ ID NO: 2000117 - DNA, 15 bp, Homo sapiens
atcgaagactaatac

SEQ ID NO: 2000118 - DNA, 15 bp, Homo sapiens
tcgaagactaatacc

SEQ ID NO: 2000119 - DNA, 15 bp, Homo sapiens
cgaagactaataccg

SEQ ID NO: 2000120 - DNA, 15 bp, Homo sapiens
gaagactaataccga

SEQ ID NO: 2000121 - DNA, 15 bp, Homo sapiens
aagactaataccgaa

SEQ ID NO: 2000122 - DNA, 15 bp, Homo sapiens
agactaataccgaat

SEQ ID NO: 2000123 - DNA, 15 bp, Homo sapiens
gactaataccgaata

SEQ ID NO: 2000124 - DNA, 15 bp, Homo sapiens
actaataccgaatag

SEQ ID NO: 2000125 - DNA, 15 bp, Homo sapiens
ctaataccgaataga

SEQ ID NO: 2000126 - DNA, 15 bp, Homo sapiens
taataccgaatagag

SEQ ID NO: 2000127 - DNA, 15 bp, Homo sapiens
aataccgaatagaga

SEQ ID NO: 2000128 - DNA, 15 bp, Homo sapiens
ataccgaatagagaa

SEQ ID NO: 2000129 - DNA, 15 bp, Homo sapiens
taccgaatagagaaa

SEQ ID NO: 2000130 - DNA, 15 bp, Homo sapiens
accgaatagagaaaa

SEQ ID NO: 2000131 - DNA, 15 bp, Homo sapiens
ccgaatagagaaaaa

SEQ ID NO: 2000132 - DNA, 15 bp, Homo sapiens
cgaatagagaaaaac

SEQ ID NO: 2000133 - DNA, 15 bp, Homo sapiens
gaatagagaaaaaca

SEQ ID NO: 2000134 - DNA, 15 bp, Homo sapiens
aatagagaaaaacaa

SEQ ID NO: 2000135 - DNA, 15 bp, Homo sapiens
atagagaaaaacaat

SEQ ID NO: 2000136 - DNA, 15 bp, Homo sapiens
tagagaaaaacaatc

SEQ ID NO: 2000137 - DNA, 15 bp, Homo sapiens
agagaaaaacaatcc

SEQ ID NO: 2000138 - DNA, 15 bp, Homo sapiens
gagaaaaacaatcct

SEQ ID NO: 2000139 - DNA, 15 bp, Homo sapiens
agaaaaacaatcctc

SEQ ID NO: 2000140 - DNA, 15 bp, Homo sapiens
gaaaaacaatcctct

SEQ ID NO: 2000141 - DNA, 15 bp, Homo sapiens
aaaaacaatcctctt

SEQ ID NO: 2000142 - DNA, 15 bp, Homo sapiens
aaaacaatcctcttt

SEQ ID NO: 2000143 - DNA, 15 bp, Homo sapiens
aaacaatcctctttg

SEQ ID NO: 2000144 - DNA, 15 bp, Homo sapiens
aacaatcctctttgt

SEQ ID NO: 2000145 - DNA, 15 bp, Homo sapiens
acaatcctctttgtt

SEQ ID NO: 2000146 - DNA, 15 bp, Homo sapiens
caatcctctttgttg

SEQ ID NO: 2000147 - DNA, 15 bp, Homo sapiens
aatcctctttgttgg

SEQ ID NO: 2000148 - DNA, 15 bp, Homo sapiens
atcctctttgttggt

SEQ ID NO: 2000149 - DNA, 15 bp, Homo sapiens
tcctctttgttggtg

SEQ ID NO: 2000150 - DNA, 15 bp, Homo sapiens
cctctttgttggtgc

SEQ ID NO: 2000151 - DNA, 15 bp, Homo sapiens
ctctttgttggtgcc

SEQ ID NO: 2000152 - DNA, 15 bp, Homo sapiens
tctttgttggtgcct

SEQ ID NO: 2000153 - DNA, 15 bp, Homo sapiens
ctttgttggtgcctg

SEQ ID NO: 2000154 - DNA, 15 bp, Homo sapiens
tttgttggtgcctgc

SEQ ID NO: 2000155 - DNA, 15 bp, Homo sapiens
ttgttggtgcctgca

SEQ ID NO: 2000156 - DNA, 15 bp, Homo sapiens
tgttggtgcctgcat

SEQ ID NO: 2000157 - DNA, 15 bp, Homo sapiens
gttggtgcctgcatc

SEQ ID NO: 2000158 - DNA, 15 bp, Homo sapiens
ttggtgcctgcatct

SEQ ID NO: 2000159 - DNA, 15 bp, Homo sapiens
tggtgcctgcatctt

SEQ ID NO: 2000160 - DNA, 15 bp, Homo sapiens
ggtgcctgcatcttt

SEQ ID NO: 2000161 - DNA, 15 bp, Homo sapiens
gtgcctgcatctttg

SEQ ID NO: 2000162 - DNA, 15 bp, Homo sapiens
tgcctgcatctttgg

SEQ ID NO: 2000163 - DNA, 15 bp, Homo sapiens
gcctgcatctttggc

SEQ ID NO: 2000164 - DNA, 15 bp, Homo sapiens
cctgcatctttggct

SEQ ID NO: 2000165 - DNA, 15 bp, Homo sapiens
ctgcatctttggctc

SEQ ID NO: 2000166 - DNA, 15 bp, Homo sapiens
tgcatctttggctcg

SEQ ID NO: 2000167 - DNA, 15 bp, Homo sapiens
gcatctttggctcgt

SEQ ID NO: 2000168 - DNA, 15 bp, Homo sapiens
catctttggctcgtc

SEQ ID NO: 2000169 - DNA, 15 bp, Homo sapiens
atctttggctcgtca

SEQ ID NO: 2000170 - DNA, 15 bp, Homo sapiens
tctttggctcgtcag

SEQ ID NO: 2000171 - DNA, 15 bp, Homo sapiens
ctttggctcgtcagt

SEQ ID NO: 2000172 - DNA, 15 bp, Homo sapiens
tttggctcgtcagtg

SEQ ID NO: 2000173 - DNA, 15 bp, Homo sapiens
ttggctcgtcagtgt

SEQ ID NO: 2000174 - DNA, 15 bp, Homo sapiens
tggctcgtcagtgtt

SEQ ID NO: 2000175 - DNA, 15 bp, Homo sapiens
ggctcgtcagtgttg

SEQ ID NO: 2000176 - DNA, 15 bp, Homo sapiens
gctcgtcagtgttgt

SEQ ID NO: 2000177 - DNA, 15 bp, Homo sapiens
ctcgtcagtgttgta

SEQ ID NO: 2000178 - DNA, 15 bp, Homo sapiens
tcgtcagtgttgtac

SEQ ID NO: 2000179 - DNA, 15 bp, Homo sapiens
cgtcagtgttgtacg

SEQ ID NO: 2000180 - DNA, 15 bp, Homo sapiens
gtcagtgttgtacga

SEQ ID NO: 2000181 - DNA, 15 bp, Homo sapiens
tcagtgttgtacgaa

SEQ ID NO: 2000182 - DNA, 15 bp, Homo sapiens
cagtgttgtacgaac

SEQ ID NO: 2000183 - DNA, 15 bp, Homo sapiens
agtgttgtacgaaca

SEQ ID NO: 2000184 - DNA, 15 bp, Homo sapiens
gtgttgtacgaacag

SEQ ID NO: 2000185 - DNA, 15 bp, Homo sapiens
tgttgtacgaacagt

SEQ ID NO: 2000186 - DNA, 15 bp, Homo sapiens
gttgtacgaacagtg

SEQ ID NO: 2000187 - DNA, 15 bp, Homo sapiens
ttgtacgaacagtgg

SEQ ID NO: 2000188 - DNA, 15 bp, Homo sapiens
tgtacgaacagtgga

SEQ ID NO: 2000189 - DNA, 15 bp, Homo sapiens
gtacgaacagtggac

SEQ ID NO: 2000190 - DNA, 15 bp, Homo sapiens
tacgaacagtggact

SEQ ID NO: 2000191 - DNA, 15 bp, Homo sapiens
acgaacagtggactt

SEQ ID NO: 2000192 - DNA, 15 bp, Homo sapiens
cgaacagtggacttt

SEQ ID NO: 2000193 - DNA, 15 bp, Homo sapiens
gaacagtggactttg

SEQ ID NO: 2000194 - DNA, 15 bp, Homo sapiens
aacagtggactttga

SEQ ID NO: 2000195 - DNA, 15 bp, Homo sapiens
acagtggactttgat

SEQ ID NO: 2000196 - DNA, 15 bp, Homo sapiens
cagtggactttgatt

SEQ ID NO: 2000197 - DNA, 15 bp, Homo sapiens
agtggactttgatta

SEQ ID NO: 2000198 - DNA, 15 bp, Homo sapiens
gtggactttgattat

SEQ ID NO: 2000199 - DNA, 15 bp, Homo sapiens
tggactttgattatt

SEQ ID NO: 2000200 - DNA, 15 bp, Homo sapiens
ggactttgattattc

SEQ ID NO: 2000201 - DNA, 15 bp, Homo sapiens
gactttgattattca

SEQ ID NO: 2000202 - DNA, 15 bp, Homo sapiens
actttgattattcag

SEQ ID NO: 2000203 - DNA, 15 bp, Homo sapiens
ctttgattattcaga

SEQ ID NO: 2000204 - DNA, 15 bp, Homo sapiens
tttgattattcagat

SEQ ID NO: 2000205 - DNA, 15 bp, Homo sapiens
ttgattattcagatt

SEQ ID NO: 2000206 - DNA, 15 bp, Homo sapiens
tgattattcagattt

SEQ ID NO: 2000207 - DNA, 15 bp, Homo sapiens
gattattcagattta

SEQ ID NO: 2000208 - DNA, 15 bp, Homo sapiens
attattcagatttac

SEQ ID NO: 2000209 - DNA, 15 bp, Homo sapiens
ttattcagatttact

SEQ ID NO: 2000210 - DNA, 15 bp, Homo sapiens
tattcagatttactg

SEQ ID NO: 2000211 - DNA, 15 bp, Homo sapiens
attcagatttactga

SEQ ID NO: 2000212 - DNA, 15 bp, Homo sapiens
ttcagatttactgat

SEQ ID NO: 2000213 - DNA, 15 bp, Homo sapiens
tcagatttactgatt

SEQ ID NO: 2000214 - DNA, 15 bp, Homo sapiens
cagatttactgattc

SEQ ID NO: 2000215 - DNA, 15 bp, Homo sapiens
agatttactgattcc

SEQ ID NO: 2000216 - DNA, 15 bp, Homo sapiens
gatttactgattcct

SEQ ID NO: 2000217 - DNA, 15 bp, Homo sapiens
atttactgattcctt

SEQ ID NO: 2000218 - DNA, 15 bp, Homo sapiens
tttactgattccttt

SEQ ID NO: 2000219 - DNA, 15 bp, Homo sapiens
ttactgattcctttg

SEQ ID NO: 2000220 - DNA, 15 bp, Homo sapiens
tactgattcctttgt

SEQ ID NO: 2000221 - DNA, 15 bp, Homo sapiens
actgattcctttgtt

SEQ ID NO: 2000222 - DNA, 15 bp, Homo sapiens
ctgattcctttgttg

SEQ ID NO: 2000223 - DNA, 15 bp, Homo sapiens
tgattcctttgttgt

SEQ ID NO: 2000224 - DNA, 15 bp, Homo sapiens
gattcctttgttgtt

SEQ ID NO: 2000225 - DNA, 15 bp, Homo sapiens
attcctttgttgttt

SEQ ID NO: 2000226 - DNA, 15 bp, Homo sapiens
ttcctttgttgtttt

SEQ ID NO: 2000227 - DNA, 15 bp, Homo sapiens
tcctttgttgttttc

SEQ ID NO: 2000228 - DNA, 15 bp, Homo sapiens
ctttgttgttttcca

SEQ ID NO: 2000229 - DNA, 15 bp, Homo sapiens
tttgttgttttccag

SEQ ID NO: 2000230 - DNA, 15 bp, Homo sapiens
ttgttgttttccagc

SEQ ID NO: 2000231 - DNA, 15 bp, Homo sapiens
tgttgttttccagca

SEQ ID NO: 2000232 - DNA, 15 bp, Homo sapiens
gttgttttccagcag

SEQ ID NO: 2000233 - DNA, 15 bp, Homo sapiens
ttgttttccagcagg

SEQ ID NO: 2000234 - DNA, 15 bp, Homo sapiens
tgttttccagcaggt

SEQ ID NO: 2000235 - DNA, 15 bp, Homo sapiens
gttttccagcaggtg

SEQ ID NO: 2000236 - DNA, 15 bp, Homo sapiens
ttttccagcaggtgt

SEQ ID NO: 2000237 - DNA, 15 bp, Homo sapiens
tttccagcaggtgtg

SEQ ID NO: 2000238 - DNA, 15 bp, Homo sapiens
ttccagcaggtgtga

SEQ ID NO: 2000239 - DNA, 15 bp, Homo sapiens
tccagcaggtgtgaa

SEQ ID NO: 2000240 - DNA, 15 bp, Homo sapiens
ccagcaggtgtgaaa

SEQ ID NO: 2000241 - DNA, 15 bp, Homo sapiens
cagcaggtgtgaaag

SEQ ID NO: 2000242 - DNA, 15 bp, Homo sapiens
agcaggtgtgaaaga

SEQ ID NO: 2000243 - DNA, 15 bp, Homo sapiens
gcaggtgtgaaagac

SEQ ID NO: 2000244 - DNA, 15 bp, Homo sapiens
caggtgtgaaagaca

SEQ ID NO: 2000245 - DNA, 15 bp, Homo sapiens
aggtgtgaaagacaa

SEQ ID NO: 2000246 - DNA, 15 bp, Homo sapiens
ggtgtgaaagacaac

SEQ ID NO: 2000247 - DNA, 15 bp, Homo sapiens
gtgtgaaagacaaca

SEQ ID NO: 2000248 - DNA, 15 bp, Homo sapiens
tgtgaaagacaacat

SEQ ID NO: 2000249 - DNA, 15 bp, Homo sapiens
gtgaaagacaacata

SEQ ID NO: 2000250 - DNA, 15 bp, Homo sapiens
tgaaagacaacatac

SEQ ID NO: 2000251 - DNA, 15 bp, Homo sapiens
gaaagacaacataca

SEQ ID NO: 2000252 - DNA, 15 bp, Homo sapiens
aaagacaacatacat

SEQ ID NO: 2000253 - DNA, 15 bp, Homo sapiens
aagacaacatacatc

SEQ ID NO: 2000254 - DNA, 15 bp, Homo sapiens
agacaacatacatca

SEQ ID NO: 2000255 - DNA, 15 bp, Homo sapiens
gacaacatacatcac

SEQ ID NO: 2000256 - DNA, 15 bp, Homo sapiens
acaacatacatcacc

SEQ ID NO: 2000257 - DNA, 15 bp, Homo sapiens
caacatacatcacca

SEQ ID NO: 2000258 - DNA, 15 bp, Homo sapiens
aacatacatcaccat

SEQ ID NO: 2000259 - DNA, 15 bp, Homo sapiens
acatacatcaccatt

SEQ ID NO: 2000260 - DNA, 15 bp, Homo sapiens
catacatcaccattt

SEQ ID NO: 2000261 - DNA, 15 bp, Homo sapiens
atacatcaccatttg

SEQ ID NO: 2000262 - DNA, 15 bp, Homo sapiens
tacatcaccatttga

SEQ ID NO: 2000263 - DNA, 15 bp, Homo sapiens
acatcaccatttgag

SEQ ID NO: 2000264 - DNA, 15 bp, Homo sapiens
catcaccatttgaga

SEQ ID NO: 2000265 - DNA, 15 bp, Homo sapiens
atcaccatttgagaa

SEQ ID NO: 2000266 - DNA, 15 bp, Homo sapiens
tcaccatttgagaat

SEQ ID NO: 2000267 - DNA, 15 bp, Homo sapiens
caccatttgagaatt

SEQ ID NO: 2000268 - DNA, 15 bp, Homo sapiens
accatttgagaattt

SEQ ID NO: 2000269 - DNA, 15 bp, Homo sapiens
ccatttgagaatttg

SEQ ID NO: 2000270 - DNA, 15 bp, Homo sapiens
catttgagaatttgt

SEQ ID NO: 2000271 - DNA, 15 bp, Homo sapiens
atttgagaatttgtg

SEQ ID NO: 2000272 - DNA, 15 bp, Homo sapiens
tttgagaatttgtgt

SEQ ID NO: 2000273 - DNA, 15 bp, Homo sapiens
ttgagaatttgtgtt

SEQ ID NO: 2000274 - DNA, 15 bp, Homo sapiens
tgagaatttgtgtta

SEQ ID NO: 2000275 - DNA, 15 bp, Homo sapiens
gagaatttgtgttac

SEQ ID NO: 2000276 - DNA, 15 bp, Homo sapiens
agaatttgtgttacg

SEQ ID NO: 2000277 - DNA, 15 bp, Homo sapiens
gaatttgtgttacgg

SEQ ID NO: 2000278 - DNA, 15 bp, Homo sapiens
aatttgtgttacggt

SEQ ID NO: 2000279 - DNA, 15 bp, Homo sapiens
atttgtgttacggtt

SEQ ID NO: 2000280 - DNA, 15 bp, Homo sapiens
tttgtgttacggttt

SEQ ID NO: 2000281 - DNA, 15 bp, Homo sapiens
ttgtgttacggtttt

SEQ ID NO: 2000282 - DNA, 15 bp, Homo sapiens
tgtgttacggttttt

SEQ ID NO: 2000283 - DNA, 15 bp, Homo sapiens
gtgttacggtttttt

SEQ ID NO: 2000284 - DNA, 15 bp, Homo sapiens
tgttacggttttttg

SEQ ID NO: 2000285 - DNA, 15 bp, Homo sapiens
gttacggttttttgg

SEQ ID NO: 2000286 - DNA, 15 bp, Homo sapiens
ttacggttttttggg

SEQ ID NO: 2000287 - DNA, 15 bp, Homo sapiens
tacggttttttgggg

SEQ ID NO: 2000288 - DNA, 15 bp, Homo sapiens
acggttttttggggg

SEQ ID NO: 2000289 - DNA, 15 bp, Homo sapiens
cggttttttggggga

SEQ ID NO: 2000290 - DNA, 15 bp, Homo sapiens
ggttttttgggggaa

SEQ ID NO: 2000291 - DNA, 15 bp, Homo sapiens
gttttttgggggaat

SEQ ID NO: 2000292 - DNA, 15 bp, Homo sapiens
ttttttgggggaatt

SEQ ID NO: 2000293 - DNA, 15 bp, Homo sapiens
tttttgggggaattg

SEQ ID NO: 2000294 - DNA, 15 bp, Homo sapiens
ttttgggggaattga

SEQ ID NO: 2000295 - DNA, 15 bp, Homo sapiens
tttgggggaattgat

SEQ ID NO: 2000296 - DNA, 15 bp, Homo sapiens
ttgggggaattgatt

SEQ ID NO: 2000297 - DNA, 15 bp, Homo sapiens
tgggggaattgatta

SEQ ID NO: 2000298 - DNA, 15 bp, Homo sapiens
gggggaattgattaa

SEQ ID NO: 2000299 - DNA, 15 bp, Homo sapiens
ggggaattgattaac

SEQ ID NO: 2000300 - DNA, 15 bp, Homo sapiens
gggaattgattaact

SEQ ID NO: 2000301 - DNA, 15 bp, Homo sapiens
ggaattgattaactt

SEQ ID NO: 2000302 - DNA, 15 bp, Homo sapiens
gaattgattaacttc

SEQ ID NO: 2000303 - DNA, 15 bp, Homo sapiens
aattgattaacttca

SEQ ID NO: 2000304 - DNA, 15 bp, Homo sapiens
attgattaacttcag

SEQ ID NO: 2000305 - DNA, 15 bp, Homo sapiens
ttgattaacttcaga

SEQ ID NO: 2000306 - DNA, 15 bp, Homo sapiens
tgattaacttcagag

SEQ ID NO: 2000307 - DNA, 15 bp, Homo sapiens
gattaacttcagagt

SEQ ID NO: 2000308 - DNA, 15 bp, Homo sapiens
attaacttcagagtc

SEQ ID NO: 2000309 - DNA, 15 bp, Homo sapiens
ttaacttcagagtcc

SEQ ID NO: 2000310 - DNA, 15 bp, Homo sapiens
taacttcagagtcct

SEQ ID NO: 2000311 - DNA, 15 bp, Homo sapiens
aacttcagagtcctg

SEQ ID NO: 2000312 - DNA, 15 bp, Homo sapiens
acttcagagtcctgc

SEQ ID NO: 2000313 - DNA, 15 bp, Homo sapiens
cttcagagtcctgca

SEQ ID NO: 2000314 - DNA, 15 bp, Homo sapiens
ttcagagtcctgcaa

SEQ ID NO: 2000315 - DNA, 15 bp, Homo sapiens
tcagagtcctgcaat

SEQ ID NO: 2000316 - DNA, 15 bp, Homo sapiens
cagagtcctgcaatc

SEQ ID NO: 2000317 - DNA, 15 bp, Homo sapiens
agagtcctgcaatct

SEQ ID NO: 2000318 - DNA, 15 bp, Homo sapiens
gagtcctgcaatctt

SEQ ID NO: 2000319 - DNA, 15 bp, Homo sapiens
agtcctgcaatcttt

SEQ ID NO: 2000320 - DNA, 15 bp, Homo sapiens
gtcctgcaatctttt

SEQ ID NO: 2000321 - DNA, 15 bp, Homo sapiens
tcctgcaatcttttt

SEQ ID NO: 2000322 - DNA, 15 bp, Homo sapiens
cctgcaatcttttta

SEQ ID NO: 2000323 - DNA, 15 bp, Homo sapiens
ctgcaatctttttaa

SEQ ID NO: 2000324 - DNA, 15 bp, Homo sapiens
tgcaatctttttaat

SEQ ID NO: 2000325 - DNA, 15 bp, Homo sapiens
gcaatctttttaatc

SEQ ID NO: 2000326 - DNA, 15 bp, Homo sapiens
caatctttttaatca

SEQ ID NO: 2000327 - DNA, 15 bp, Homo sapiens
aatctttttaatcaa

SEQ ID NO: 2000328 - DNA, 15 bp, Homo sapiens
atctttttaatcaac

SEQ ID NO: 2000329 - DNA, 15 bp, Homo sapiens
tctttttaatcaaca

SEQ ID NO: 2000330 - DNA, 15 bp, Homo sapiens
ctttttaatcaacaa

SEQ ID NO: 2000331 - DNA, 15 bp, Homo sapiens
tttttaatcaacaat

SEQ ID NO: 2000332 - DNA, 15 bp, Homo sapiens
ttttaatcaacaatg

SEQ ID NO: 2000333 - DNA, 15 bp, Homo sapiens
tttaatcaacaatga

SEQ ID NO: 2000334 - DNA, 15 bp, Homo sapiens
ttaatcaacaatgac

SEQ ID NO: 2000335 - DNA, 15 bp, Homo sapiens
taatcaacaatgaca

SEQ ID NO: 2000336 - DNA, 15 bp, Homo sapiens
aatcaacaatgacat

SEQ ID NO: 2000337 - DNA, 15 bp, Homo sapiens
atcaacaatgacatt

SEQ ID NO: 2000338 - DNA, 15 bp, Homo sapiens
tcaacaatgacattt

SEQ ID NO: 2000339 - DNA, 15 bp, Homo sapiens
caacaatgacatttc

SEQ ID NO: 2000340 - DNA, 15 bp, Homo sapiens
aacaatgacatttct

SEQ ID NO: 2000341 - DNA, 15 bp, Homo sapiens
acaatgacatttcta

SEQ ID NO: 2000342 - DNA, 15 bp, Homo sapiens
caatgacatttctat

SEQ ID NO: 2000343 - DNA, 15 bp, Homo sapiens
aatgacatttctata

SEQ ID NO: 2000344 - DNA, 15 bp, Homo sapiens
atgacatttctataa

SEQ ID NO: 2000345 - DNA, 15 bp, Homo sapiens
tgacatttctataat

SEQ ID NO: 2000346 - DNA, 15 bp, Homo sapiens
gacatttctataatt

SEQ ID NO: 2000347 - DNA, 15 bp, Homo sapiens
acatttctataatta

SEQ ID NO: 2000348 - DNA, 15 bp, Homo sapiens
catttctataattaa

SEQ ID NO: 2000349 - DNA, 15 bp, Homo sapiens
atttctataattaag

SEQ ID NO: 2000350 - DNA, 15 bp, Homo sapiens
tttctataattaaga

SEQ ID NO: 2000351 - DNA, 15 bp, Homo sapiens
ttctataattaagat

SEQ ID NO: 2000352 - DNA, 15 bp, Homo sapiens
tctataattaagatc

SEQ ID NO: 2000353 - DNA, 15 bp, Homo sapiens
ctataattaagatcc

SEQ ID NO: 2000354 - DNA, 15 bp, Homo sapiens
tataattaagatcct

SEQ ID NO: 2000355 - DNA, 15 bp, Homo sapiens
ataattaagatccta

SEQ ID NO: 2000356 - DNA, 15 bp, Homo sapiens
taattaagatcctag

SEQ ID NO: 2000357 - DNA, 15 bp, Homo sapiens
aattaagatcctagg

SEQ ID NO: 2000358 - DNA, 15 bp, Homo sapiens
attaagatcctaggc

SEQ ID NO: 2000359 - DNA, 15 bp, Homo sapiens
ttaagatcctaggca

SEQ ID NO: 2000360 - DNA, 15 bp, Homo sapiens
taagatcctaggcag

SEQ ID NO: 2000361 - DNA, 15 bp, Homo sapiens
aagatcctaggcagc

SEQ ID NO: 2000362 - DNA, 15 bp, Homo sapiens
agatcctaggcagca

SEQ ID NO: 2000363 - DNA, 15 bp, Homo sapiens
gatcctaggcagcaa

SEQ ID NO: 2000364 - DNA, 15 bp, Homo sapiens
atcctaggcagcaat

SEQ ID NO: 2000365 - DNA, 15 bp, Homo sapiens
tcctaggcagcaata

SEQ ID NO: 2000366 - DNA, 15 bp, Homo sapiens
cctaggcagcaatat

SEQ ID NO: 2000367 - DNA, 15 bp, Homo sapiens
ctaggcagcaatatt

SEQ ID NO: 2000368 - DNA, 15 bp, Homo sapiens
taggcagcaatattt

SEQ ID NO: 2000369 - DNA, 15 bp, Homo sapiens
aggcagcaatatttt

SEQ ID NO: 2000370 - DNA, 15 bp, Homo sapiens
ggcagcaatattttt

SEQ ID NO: 2000371 - DNA, 15 bp, Homo sapiens
gcagcaatatttttc

SEQ ID NO: 2000372 - DNA, 15 bp, Homo sapiens
cagcaatatttttca

SEQ ID NO: 2000373 - DNA, 15 bp, Homo sapiens
agcaatatttttcaa

SEQ ID NO: 2000374 - DNA, 15 bp, Homo sapiens
gcaatatttttcaac

SEQ ID NO: 2000375 - DNA, 15 bp, Homo sapiens
caatatttttcaacc

SEQ ID NO: 2000376 - DNA, 15 bp, Homo sapiens
aatatttttcaacct

SEQ ID NO: 2000377 - DNA, 15 bp, Homo sapiens
atatttttcaacctc

SEQ ID NO: 2000378 - DNA, 15 bp, Homo sapiens
tatttttcaacctca

SEQ ID NO: 2000379 - DNA, 15 bp, Homo sapiens
atttttcaacctcaa

SEQ ID NO: 2000380 - DNA, 15 bp, Homo sapiens
tttttcaacctcaat

SEQ ID NO: 2000381 - DNA, 15 bp, Homo sapiens
ttttcaacctcaatg

SEQ ID NO: 2000382 - DNA, 15 bp, Homo sapiens
tttcaacctcaatgc

SEQ ID NO: 2000383 - DNA, 15 bp, Homo sapiens
ttcaacctcaatgca

SEQ ID NO: 2000384 - DNA, 15 bp, Homo sapiens
tcaacctcaatgcaa

SEQ ID NO: 2000385 - DNA, 15 bp, Homo sapiens
caacctcaatgcaat

SEQ ID NO: 2000386 - DNA, 15 bp, Homo sapiens
aacctcaatgcaatt

SEQ ID NO: 2000387 - DNA, 15 bp, Homo sapiens
acctcaatgcaattc

SEQ ID NO: 2000388 - DNA, 15 bp, Homo sapiens
cctcaatgcaattct

SEQ ID NO: 2000389 - DNA, 15 bp, Homo sapiens
ctcaatgcaattctt

SEQ ID NO: 2000390 - DNA, 15 bp, Homo sapiens
tcaatgcaattcttg

SEQ ID NO: 2000391 - DNA, 15 bp, Homo sapiens
caatgcaattcttga

SEQ ID NO: 2000392 - DNA, 15 bp, Homo sapiens
aatgcaattcttgat

SEQ ID NO: 2000393 - DNA, 15 bp, Homo sapiens
atgcaattcttgatc

SEQ ID NO: 2000394 - DNA, 15 bp, Homo sapiens
tgcaattcttgatcc

SEQ ID NO: 2000395 - DNA, 15 bp, Homo sapiens
gcaattcttgatcca

SEQ ID NO: 2000396 - DNA, 15 bp, Homo sapiens
caattcttgatccaa

SEQ ID NO: 2000397 - DNA, 15 bp, Homo sapiens
aattcttgatccaaa

SEQ ID NO: 2000398 - DNA, 15 bp, Homo sapiens
attcttgatccaaag

SEQ ID NO: 2000399 - DNA, 15 bp, Homo sapiens
ttcttgatccaaaga

SEQ ID NO: 2000400 - DNA, 15 bp, Homo sapiens
tcttgatccaaagaa

SEQ ID NO: 2000401 - DNA, 15 bp, Homo sapiens
cttgatccaaagaaa

SEQ ID NO: 2000402 - DNA, 15 bp, Homo sapiens
ttgatccaaagaaaa

SEQ ID NO: 2000403 - DNA, 15 bp, Homo sapiens
tgatccaaagaaaat

SEQ ID NO: 2000404 - DNA, 15 bp, Homo sapiens
gatccaaagaaaatt

SEQ ID NO: 2000405 - DNA, 15 bp, Homo sapiens
atccaaagaaaatta

SEQ ID NO: 2000406 - DNA, 15 bp, Homo sapiens
tccaaagaaaattaa

SEQ ID NO: 2000407 - DNA, 15 bp, Homo sapiens
ccaaagaaaattaaa

SEQ ID NO: 2000408 - DNA, 15 bp, Homo sapiens
caaagaaaattaaag

SEQ ID NO: 2000409 - DNA, 15 bp, Homo sapiens
aaagaaaattaaagt

SEQ ID NO: 2000410 - DNA, 15 bp, Homo sapiens
aagaaaattaaagtt

SEQ ID NO: 2000411 - DNA, 15 bp, Homo sapiens
agaaaattaaagttt

SEQ ID NO: 2000412 - DNA, 15 bp, Homo sapiens
gaaaattaaagtttt

SEQ ID NO: 2000413 - DNA, 15 bp, Homo sapiens
aaaattaaagtttta

SEQ ID NO: 2000414 - DNA, 15 bp, Homo sapiens
aaattaaagttttat

SEQ ID NO: 2000415 - DNA, 15 bp, Homo sapiens
aattaaagttttatt

SEQ ID NO: 2000416 - DNA, 15 bp, Homo sapiens
attaaagttttattt

SEQ ID NO: 2000417 - DNA, 15 bp, Homo sapiens
ttaaagttttattta

SEQ ID NO: 2000418 - DNA, 15 bp, Homo sapiens
taaagttttatttaa

SEQ ID NO: 2000419 - DNA, 15 bp, Homo sapiens
aaagttttatttaat

SEQ ID NO: 2000420 - DNA, 15 bp, Homo sapiens
aagttttatttaatg

SEQ ID NO: 2000421 - DNA, 15 bp, Homo sapiens
agttttatttaatgg

SEQ ID NO: 2000422 - DNA, 15 bp, Homo sapiens
gttttatttaatggt

SEQ ID NO: 2000423 - DNA, 15 bp, Homo sapiens
ttttatttaatggta

SEQ ID NO: 2000424 - DNA, 15 bp, Homo sapiens
tttatttaatggtat

SEQ ID NO: 2000425 - DNA, 15 bp, Homo sapiens
ttatttaatggtata

SEQ ID NO: 2000426 - DNA, 15 bp, Homo sapiens
tatttaatggtatat

SEQ ID NO: 2000427 - DNA, 15 bp, Homo sapiens
atttaatggtatatt

SEQ ID NO: 2000428 - DNA, 15 bp, Homo sapiens
tttaatggtatatta

SEQ ID NO: 2000429 - DNA, 15 bp, Homo sapiens
ttaatggtatattat

SEQ ID NO: 2000430 - DNA, 15 bp, Homo sapiens
taatggtatattatt

SEQ ID NO: 2000431 - DNA, 15 bp, Homo sapiens
aatggtatattattg

SEQ ID NO: 2000432 - DNA, 15 bp, Homo sapiens
atggtatattattga

SEQ ID NO: 2000433 - DNA, 15 bp, Homo sapiens
tggtatattattgat

SEQ ID NO: 2000434 - DNA, 15 bp, Homo sapiens
ggtatattattgata

SEQ ID NO: 2000435 - DNA, 15 bp, Homo sapiens
gtatattattgataa

SEQ ID NO: 2000436 - DNA, 15 bp, Homo sapiens
tatattattgataat

SEQ ID NO: 2000437 - DNA, 15 bp, Homo sapiens
atattattgataatc

SEQ ID NO: 2000438 - DNA, 15 bp, Homo sapiens
tattattgataatct

SEQ ID NO: 2000439 - DNA, 15 bp, Homo sapiens
attattgataatctt

SEQ ID NO: 2000440 - DNA, 15 bp, Homo sapiens
ttattgataatcttg

SEQ ID NO: 2000441 - DNA, 15 bp, Homo sapiens
tattgataatcttgg

SEQ ID NO: 2000442 - DNA, 15 bp, Homo sapiens
attgataatcttggg

SEQ ID NO: 2000443 - DNA, 15 bp, Homo sapiens
ttgataatcttgggt

SEQ ID NO: 2000444 - DNA, 15 bp, Homo sapiens
tgataatcttgggta

SEQ ID NO: 2000445 - DNA, 15 bp, Homo sapiens
gataatcttgggtaa

SEQ ID NO: 2000446 - DNA, 15 bp, Homo sapiens
ataatcttgggtaat

SEQ ID NO: 2000447 - DNA, 15 bp, Homo sapiens
taatcttgggtaata

SEQ ID NO: 2000448 - DNA, 15 bp, Homo sapiens
aatcttgggtaatat

SEQ ID NO: 2000449 - DNA, 15 bp, Homo sapiens
atcttgggtaatatt

SEQ ID NO: 2000450 - DNA, 15 bp, Homo sapiens
tcttgggtaatattt

SEQ ID NO: 2000451 - DNA, 15 bp, Homo sapiens
cttgggtaatattta

SEQ ID NO: 2000452 - DNA, 15 bp, Homo sapiens
ttgggtaatatttac

SEQ ID NO: 2000453 - DNA, 15 bp, Homo sapiens
tgggtaatatttaca

SEQ ID NO: 2000454 - DNA, 15 bp, Homo sapiens
gggtaatatttacat

SEQ ID NO: 2000455 - DNA, 15 bp, Homo sapiens
ggtaatatttacatg

SEQ ID NO: 2000456 - DNA, 15 bp, Homo sapiens
gtaatatttacatga

SEQ ID NO: 2000457 - DNA, 15 bp, Homo sapiens
taatatttacatgat

SEQ ID NO: 2000458 - DNA, 15 bp, Homo sapiens
aatatttacatgata

SEQ ID NO: 2000459 - DNA, 15 bp, Homo sapiens
atatttacatgatag

SEQ ID NO: 2000460 - DNA, 15 bp, Homo sapiens
tatttacatgataga

SEQ ID NO: 2000461 - DNA, 15 bp, Homo sapiens
atttacatgatagaa

SEQ ID NO: 2000462 - DNA, 15 bp, Homo sapiens
tttacatgatagaaa

SEQ ID NO: 2000463 - DNA, 15 bp, Homo sapiens
ttacatgatagaaaa

SEQ ID NO: 2000464 - DNA, 15 bp, Homo sapiens
tacatgatagaaaaa

SEQ ID NO: 2000465 - DNA, 15 bp, Homo sapiens
acatgatagaaaaat

SEQ ID NO: 2000466 - DNA, 15 bp, Homo sapiens
catgatagaaaaatg

SEQ ID NO: 2000467 - DNA, 15 bp, Homo sapiens
atgatagaaaaatgt

SEQ ID NO: 2000468 - DNA, 15 bp, Homo sapiens
tgatagaaaaatgtt

SEQ ID NO: 2000469 - DNA, 15 bp, Homo sapiens
gatagaaaaatgttt

SEQ ID NO: 2000470 - DNA, 15 bp, Homo sapiens
atagaaaaatgtttt

SEQ ID NO: 2000471 - DNA, 15 bp, Homo sapiens
tagaaaaatgttttc

SEQ ID NO: 2000472 - DNA, 15 bp, Homo sapiens
agaaaaatgttttca

SEQ ID NO: 2000473 - DNA, 15 bp, Homo sapiens
gaaaaatgttttcat

SEQ ID NO: 2000474 - DNA, 15 bp, Homo sapiens
aaaaatgttttcatg

SEQ ID NO: 2000475 - DNA, 15 bp, Homo sapiens
aaaatgttttcatga

SEQ ID NO: 2000476 - DNA, 15 bp, Homo sapiens
aaatgttttcatgaa

SEQ ID NO: 2000477 - DNA, 15 bp, Homo sapiens
aatgttttcatgaaa

SEQ ID NO: 2000478 - DNA, 15 bp, Homo sapiens
atgttttcatgaaat

SEQ ID NO: 2000479 - DNA, 15 bp, Homo sapiens
tgttttcatgaaatc

SEQ ID NO: 2000480 - DNA, 15 bp, Homo sapiens
gttttcatgaaatct

SEQ ID NO: 2000481 - DNA, 15 bp, Homo sapiens
ttttcatgaaatctt

SEQ ID NO: 2000482 - DNA, 15 bp, Homo sapiens
tttcatgaaatcttt

SEQ ID NO: 2000483 - DNA, 15 bp, Homo sapiens
ttcatgaaatctttt

SEQ ID NO: 2000484 - DNA, 15 bp, Homo sapiens
tcatgaaatcttttg

SEQ ID NO: 2000485 - DNA, 15 bp, Homo sapiens
catgaaatcttttga

SEQ ID NO: 2000486 - DNA, 15 bp, Homo sapiens
atgaaatcttttgag

SEQ ID NO: 2000487 - DNA, 15 bp, Homo sapiens
tgaaatcttttgagc

SEQ ID NO: 2000488 - DNA, 15 bp, Homo sapiens
gaaatcttttgagca

SEQ ID NO: 2000489 - DNA, 15 bp, Homo sapiens
aaatcttttgagcag

SEQ ID NO: 2000490 - DNA, 15 bp, Homo sapiens
aatcttttgagcagt

SEQ ID NO: 2000491 - DNA, 15 bp, Homo sapiens
atcttttgagcagta

SEQ ID NO: 2000492 - DNA, 15 bp, Homo sapiens
tcttttgagcagtaa

SEQ ID NO: 2000493 - DNA, 15 bp, Homo sapiens
cttttgagcagtaac

SEQ ID NO: 2000494 - DNA, 15 bp, Homo sapiens
ttttgagcagtaacg

SEQ ID NO: 2000495 - DNA, 15 bp, Homo sapiens
tttgagcagtaacgt

SEQ ID NO: 2000496 - DNA, 15 bp, Homo sapiens
ttgagcagtaacgtt

SEQ ID NO: 2000497 - DNA, 15 bp, Homo sapiens
tgagcagtaacgttt

SEQ ID NO: 2000498 - DNA, 15 bp, Homo sapiens
gagcagtaacgtttt

SEQ ID NO: 2000499 - DNA, 15 bp, Homo sapiens
agcagtaacgtttta

SEQ ID NO: 2000500 - DNA, 15 bp, Homo sapiens
gcagtaacgttttat

SEQ ID NO: 2000501 - DNA, 15 bp, Homo sapiens
cagtaacgttttata

SEQ ID NO: 2000502 - DNA, 15 bp, Homo sapiens
agtaacgttttatat

SEQ ID NO: 2000503 - DNA, 15 bp, Homo sapiens
gtaacgttttatatt

SEQ ID NO: 2000504 - DNA, 15 bp, Homo sapiens
taacgttttatatta

SEQ ID NO: 2000505 - DNA, 15 bp, Homo sapiens
aacgttttatattat

SEQ ID NO: 2000506 - DNA, 15 bp, Homo sapiens
acgttttatattatg

SEQ ID NO: 2000507 - DNA, 15 bp, Homo sapiens
cgttttatattatga

SEQ ID NO: 2000508 - DNA, 15 bp, Homo sapiens
gttttatattatgaa

SEQ ID NO: 2000509 - DNA, 15 bp, Homo sapiens
ttttatattatgaat

SEQ ID NO: 2000510 - DNA, 15 bp, Homo sapiens
tttatattatgaata

SEQ ID NO: 2000511 - DNA, 15 bp, Homo sapiens
ttatattatgaataa

SEQ ID NO: 2000512 - DNA, 15 bp, Homo sapiens
tatattatgaataat

SEQ ID NO: 2000513 - DNA, 15 bp, Homo sapiens
atattatgaataata

SEQ ID NO: 2000514 - DNA, 15 bp, Homo sapiens
tattatgaataataa

SEQ ID NO: 2000515 - DNA, 15 bp, Homo sapiens
attatgaataataat

SEQ ID NO: 2000516 - DNA, 15 bp, Homo sapiens
ttatgaataataata

SEQ ID NO: 2000517 - DNA, 15 bp, Homo sapiens
tatgaataataatac

SEQ ID NO: 2000518 - DNA, 15 bp, Homo sapiens
atgaataataataca

SEQ ID NO: 2000519 - DNA, 15 bp, Homo sapiens
tgaataataatacag

SEQ ID NO: 2000520 - DNA, 15 bp, Homo sapiens
gaataataatacagt

SEQ ID NO: 2000521 - DNA, 15 bp, Homo sapiens
aataataatacagtg

SEQ ID NO: 2000522 - DNA, 15 bp, Homo sapiens
ataataatacagtgg

SEQ ID NO: 2000523 - DNA, 15 bp, Homo sapiens
taataatacagtggt

SEQ ID NO: 2000524 - DNA, 15 bp, Homo sapiens
aataatacagtggtt

SEQ ID NO: 2000525 - DNA, 15 bp, Homo sapiens
ataatacagtggttg

SEQ ID NO: 2000526 - DNA, 15 bp, Homo sapiens
taatacagtggttga

SEQ ID NO: 2000527 - DNA, 15 bp, Homo sapiens
aatacagtggttgag

SEQ ID NO: 2000528 - DNA, 15 bp, Homo sapiens
atacagtggttgagt

SEQ ID NO: 2000529 - DNA, 15 bp, Homo sapiens
tacagtggttgagtc

SEQ ID NO: 2000530 - DNA, 15 bp, Homo sapiens
acagtggttgagtca

SEQ ID NO: 2000531 - DNA, 15 bp, Homo sapiens
cagtggttgagtcag

SEQ ID NO: 2000532 - DNA, 15 bp, Homo sapiens
agtggttgagtcagc

SEQ ID NO: 2000533 - DNA, 15 bp, Homo sapiens
gtggttgagtcagca

SEQ ID NO: 2000534 - DNA, 15 bp, Homo sapiens
tggttgagtcagcaa

SEQ ID NO: 2000535 - DNA, 15 bp, Homo sapiens
ggttgagtcagcaag

SEQ ID NO: 2000536 - DNA, 15 bp, Homo sapiens
gttgagtcagcaagg

SEQ ID NO: 2000537 - DNA, 15 bp, Homo sapiens
ttgagtcagcaaggt

SEQ ID NO: 2000538 - DNA, 15 bp, Homo sapiens
tgagtcagcaaggta

SEQ ID NO: 2000539 - DNA, 15 bp, Homo sapiens
gagtcagcaaggtaa

SEQ ID NO: 2000540 - DNA, 15 bp, Homo sapiens
agtcagcaaggtaac

SEQ ID NO: 2000541 - DNA, 15 bp, Homo sapiens
gtcagcaaggtaaca

SEQ ID NO: 2000542 - DNA, 15 bp, Homo sapiens
tcagcaaggtaacaa

SEQ ID NO: 2000543 - DNA, 15 bp, Homo sapiens
cagcaaggtaacaaa

SEQ ID NO: 2000544 - DNA, 15 bp, Homo sapiens
agcaaggtaacaaac

SEQ ID NO: 2000545 - DNA, 15 bp, Homo sapiens
gcaaggtaacaaaca

SEQ ID NO: 2000546 - DNA, 15 bp, Homo sapiens
caaggtaacaaacac

SEQ ID NO: 2000547 - DNA, 15 bp, Homo sapiens
aaggtaacaaacacc

SEQ ID NO: 2000548 - DNA, 15 bp, Homo sapiens
aggtaacaaacacct

SEQ ID NO: 2000549 - DNA, 15 bp, Homo sapiens
ggtaacaaacaccta

SEQ ID NO: 2000550 - DNA, 15 bp, Homo sapiens
gtaacaaacacctag

SEQ ID NO: 2000551 - DNA, 15 bp, Homo sapiens
taacaaacacctaga

SEQ ID NO: 2000552 - DNA, 15 bp, Homo sapiens
aacaaacacctagag

SEQ ID NO: 2000553 - DNA, 15 bp, Homo sapiens
acaaacacctagaga

SEQ ID NO: 2000554 - DNA, 15 bp, Homo sapiens
caaacacctagagag

SEQ ID NO: 2000555 - DNA, 15 bp, Homo sapiens
aaacacctagagagt

SEQ ID NO: 2000556 - DNA, 15 bp, Homo sapiens
aacacctagagagta

SEQ ID NO: 2000557 - DNA, 15 bp, Homo sapiens
acacctagagagtag

SEQ ID NO: 2000558 - DNA, 15 bp, Homo sapiens
cacctagagagtagg

SEQ ID NO: 2000559 - DNA, 15 bp, Homo sapiens
acctagagagtagga

SEQ ID NO: 2000560 - DNA, 15 bp, Homo sapiens
cctagagagtaggag

SEQ ID NO: 2000561 - DNA, 15 bp, Homo sapiens
ctagagagtaggagg

SEQ ID NO: 2000562 - DNA, 15 bp, Homo sapiens
tagagagtaggaggg

SEQ ID NO: 2000563 - DNA, 15 bp, Homo sapiens
agagagtaggagggt

SEQ ID NO: 2000564 - DNA, 15 bp, Homo sapiens
gagagtaggagggtg

SEQ ID NO: 2000565 - DNA, 15 bp, Homo sapiens
agagtaggagggtgg

SEQ ID NO: 2000566 - DNA, 15 bp, Homo sapiens
gagtaggagggtgga

SEQ ID NO: 2000567 - DNA, 15 bp, Homo sapiens
agtaggagggtggaa

SEQ ID NO: 2000568 - DNA, 15 bp, Homo sapiens
gtaggagggtggaaa

SEQ ID NO: 2000569 - DNA, 15 bp, Homo sapiens
taggagggtggaaaa

SEQ ID NO: 2000570 - DNA, 15 bp, Homo sapiens
aggagggtggaaaat

SEQ ID NO: 2000571 - DNA, 15 bp, Homo sapiens
ggagggtggaaaatt

SEQ ID NO: 2000572 - DNA, 15 bp, Homo sapiens
gagggtggaaaattg

SEQ ID NO: 2000573 - DNA, 15 bp, Homo sapiens
agggtggaaaattgt

SEQ ID NO: 2000574 - DNA, 15 bp, Homo sapiens
gggtggaaaattgta

SEQ ID NO: 2000575 - DNA, 15 bp, Homo sapiens
ggtggaaaattgtat

SEQ ID NO: 2000576 - DNA, 15 bp, Homo sapiens
gtggaaaattgtatt

SEQ ID NO: 2000577 - DNA, 15 bp, Homo sapiens
tggaaaattgtattt

SEQ ID NO: 2000578 - DNA, 15 bp, Homo sapiens
ggaaaattgtattta

SEQ ID NO: 2000579 - DNA, 15 bp, Homo sapiens
gaaaattgtatttaa

SEQ ID NO: 2000580 - DNA, 15 bp, Homo sapiens
aaaattgtatttaat

SEQ ID NO: 2000581 - DNA, 15 bp, Homo sapiens
aaattgtatttaata

SEQ ID NO: 2000582 - DNA, 15 bp, Homo sapiens
aattgtatttaataa

SEQ ID NO: 2000583 - DNA, 15 bp, Homo sapiens
attgtatttaataaa

SEQ ID NO: 2000584 - DNA, 15 bp, Homo sapiens
ttgtatttaataaaa

SEQ ID NO: 2000585 - DNA, 15 bp, Homo sapiens
tgtatttaataaaaa

SEQ ID NO: 2000586 - DNA, 15 bp, Homo sapiens
gtatttaataaaaaa

SEQ ID NO: 2000587 - DNA, 15 bp, Homo sapiens
tatttaataaaaaac

SEQ ID NO: 2000588 - DNA, 15 bp, Homo sapiens
atttaataaaaaacg

SEQ ID NO: 2000589 - DNA, 15 bp, Homo sapiens
tttaataaaaaacgc

SEQ ID NO: 2000590 - DNA, 15 bp, Homo sapiens
ttaataaaaaacgca

SEQ ID NO: 2000591 - DNA, 15 bp, Homo sapiens
taataaaaaacgcaa

SEQ ID NO: 2000592 - DNA, 15 bp, Homo sapiens
aataaaaaacgcaaa

SEQ ID NO: 2000593 - DNA, 15 bp, Homo sapiens
ataaaaaacgcaaac

SEQ ID NO: 2000594 - DNA, 15 bp, Homo sapiens
taaaaaacgcaaacc

SEQ ID NO: 2000595 - DNA, 15 bp, Homo sapiens
aaaaaacgcaaaccc

SEQ ID NO: 2000596 - DNA, 15 bp, Homo sapiens
aaaaacgcaaaccct

SEQ ID NO: 2000597 - DNA, 15 bp, Homo sapiens
aaaacgcaaaccctt

SEQ ID NO: 2000598 - DNA, 15 bp, Homo sapiens
aaacgcaaacccttt

SEQ ID NO: 2000599 - DNA, 15 bp, Homo sapiens
aacgcaaaccctttt

SEQ ID NO: 2000600 - DNA, 15 bp, Homo sapiens
acgcaaacccttttc

SEQ ID NO: 2000601 - DNA, 15 bp, Homo sapiens
cgcaaacccttttca

SEQ ID NO: 2000602 - DNA, 15 bp, Homo sapiens
gcaaacccttttcat

SEQ ID NO: 2000603 - DNA, 15 bp, Homo sapiens
caaacccttttcatt

SEQ ID NO: 2000604 - DNA, 15 bp, Homo sapiens
aaacccttttcattt

SEQ ID NO: 2000605 - DNA, 15 bp, Homo sapiens
aacccttttcattta

SEQ ID NO: 2000606 - DNA, 15 bp, Homo sapiens
acccttttcatttag

SEQ ID NO: 2000607 - DNA, 15 bp, Homo sapiens
cccttttcatttagg

SEQ ID NO: 2000608 - DNA, 15 bp, Homo sapiens
ccttttcatttaggt

SEQ ID NO: 2000609 - DNA, 15 bp, Homo sapiens
cttttcatttaggtg

SEQ ID NO: 2000610 - DNA, 15 bp, Homo sapiens
ttttcatttaggtga

SEQ ID NO: 2000611 - DNA, 15 bp, Homo sapiens
tttcatttaggtgac

SEQ ID NO: 2000612 - DNA, 15 bp, Homo sapiens
ttcatttaggtgact

SEQ ID NO: 2000613 - DNA, 15 bp, Homo sapiens
tcatttaggtgactg

SEQ ID NO: 2000614 - DNA, 15 bp, Homo sapiens
catttaggtgactgc

SEQ ID NO: 2000615 - DNA, 15 bp, Homo sapiens
atttaggtgactgct

SEQ ID NO: 2000616 - DNA, 15 bp, Homo sapiens
tttaggtgactgcta

SEQ ID NO: 2000617 - DNA, 15 bp, Homo sapiens
ttaggtgactgctag

SEQ ID NO: 2000618 - DNA, 15 bp, Homo sapiens
taggtgactgctagg

SEQ ID NO: 2000619 - DNA, 15 bp, Homo sapiens
aggtgactgctaggc

SEQ ID NO: 2000620 - DNA, 15 bp, Homo sapiens
ggtgactgctaggcc

SEQ ID NO: 2000621 - DNA, 15 bp, Homo sapiens
gtgactgctaggccg

SEQ ID NO: 2000622 - DNA, 15 bp, Homo sapiens
tgactgctaggccgg

SEQ ID NO: 2000623 - DNA, 15 bp, Homo sapiens
gactgctaggccggc

SEQ ID NO: 2000624 - DNA, 15 bp, Homo sapiens
actgctaggccggcc

SEQ ID NO: 2000625 - DNA, 15 bp, Homo sapiens
ctgctaggccggcct

SEQ ID NO: 2000626 - DNA, 15 bp, Homo sapiens
tgctaggccggcctt

SEQ ID NO: 2000627 - DNA, 15 bp, Homo sapiens
gctaggccggcctta

SEQ ID NO: 2000628 - DNA, 15 bp, Homo sapiens
ctaggccggccttac

SEQ ID NO: 2000629 - DNA, 15 bp, Homo sapiens
taggccggccttact

SEQ ID NO: 2000630 - DNA, 15 bp, Homo sapiens
aggccggccttacta

SEQ ID NO: 2000631 - DNA, 15 bp, Homo sapiens
ggccggccttactat

SEQ ID NO: 2000632 - DNA, 15 bp, Homo sapiens
gccggccttactatt

SEQ ID NO: 2000633 - DNA, 15 bp, Homo sapiens
ccggccttactattt

SEQ ID NO: 2000634 - DNA, 15 bp, Homo sapiens
cggccttactatttg

SEQ ID NO: 2000635 - DNA, 15 bp, Homo sapiens
ggccttactatttga

SEQ ID NO: 2000636 - DNA, 15 bp, Homo sapiens
gccttactatttgaa

SEQ ID NO: 2000637 - DNA, 15 bp, Homo sapiens
ccttactatttgaaa

SEQ ID NO: 2000638 - DNA, 15 bp, Homo sapiens
cttactatttgaaac

SEQ ID NO: 2000639 - DNA, 15 bp, Homo sapiens
ttactatttgaaaca

SEQ ID NO: 2000640 - DNA, 15 bp, Homo sapiens
tactatttgaaacac

SEQ ID NO: 2000641 - DNA, 15 bp, Homo sapiens
actatttgaaacacc

SEQ ID NO: 2000642 - DNA, 15 bp, Homo sapiens
ctatttgaaacacct

SEQ ID NO: 2000643 - DNA, 15 bp, Homo sapiens
tatttgaaacacctg

SEQ ID NO: 2000644 - DNA, 15 bp, Homo sapiens
atttgaaacacctgt

SEQ ID NO: 2000645 - DNA, 15 bp, Homo sapiens
tttgaaacacctgtt

SEQ ID NO: 2000646 - DNA, 15 bp, Homo sapiens
ttgaaacacctgtta

SEQ ID NO: 2000647 - DNA, 15 bp, Homo sapiens
tgaaacacctgttaa

SEQ ID NO: 2000648 - DNA, 15 bp, Homo sapiens
gaaacacctgttaaa

SEQ ID NO: 2000649 - DNA, 15 bp, Homo sapiens
aaacacctgttaaat

SEQ ID NO: 2000650 - DNA, 15 bp, Homo sapiens
aacacctgttaaatt

SEQ ID NO: 2000651 - DNA, 15 bp, Homo sapiens
acacctgttaaatta

SEQ ID NO: 2000652 - DNA, 15 bp, Homo sapiens
cacctgttaaattaa

SEQ ID NO: 2000653 - DNA, 15 bp, Homo sapiens
acctgttaaattaaa

SEQ ID NO: 2000654 - DNA, 15 bp, Homo sapiens
cctgttaaattaaag

SEQ ID NO: 2000655 - DNA, 15 bp, Homo sapiens
ctgttaaattaaagg

SEQ ID NO: 2000656 - DNA, 15 bp, Homo sapiens
tgttaaattaaaggt

SEQ ID NO: 2000657 - DNA, 15 bp, Homo sapiens
gttaaattaaaggta

SEQ ID NO: 2000658 - DNA, 15 bp, Homo sapiens
ttaaattaaaggtag

SEQ ID NO: 2000659 - DNA, 15 bp, Homo sapiens
taaattaaaggtaga

SEQ ID NO: 2000660 - DNA, 15 bp, Homo sapiens
aaattaaaggtagaa

SEQ ID NO: 2000661 - DNA, 15 bp, Homo sapiens
aattaaaggtagaaa

SEQ ID NO: 2000662 - DNA, 15 bp, Homo sapiens
attaaaggtagaaag

SEQ ID NO: 2000663 - DNA, 15 bp, Homo sapiens
ttaaaggtagaaagt

SEQ ID NO: 2000664 - DNA, 15 bp, Homo sapiens
taaaggtagaaagtg

SEQ ID NO: 2000665 - DNA, 15 bp, Homo sapiens
aaaggtagaaagtgg

SEQ ID NO: 2000666 - DNA, 15 bp, Homo sapiens
aaggtagaaagtggt

SEQ ID NO: 2000667 - DNA, 15 bp, Homo sapiens
aggtagaaagtggta

SEQ ID NO: 2000668 - DNA, 15 bp, Homo sapiens
ggtagaaagtggtac

SEQ ID NO: 2000669 - DNA, 15 bp, Homo sapiens
gtagaaagtggtaca

SEQ ID NO: 2000670 - DNA, 15 bp, Homo sapiens
tagaaagtggtacaa

SEQ ID NO: 2000671 - DNA, 15 bp, Homo sapiens
agaaagtggtacaaa

SEQ ID NO: 2000672 - DNA, 15 bp, Homo sapiens
gaaagtggtacaaaa

SEQ ID NO: 2000673 - DNA, 15 bp, Homo sapiens
aaagtggtacaaaaa

SEQ ID NO: 2000674 - DNA, 15 bp, Homo sapiens
aagtggtacaaaaaa

SEQ ID NO: 2000675 - DNA, 15 bp, Homo sapiens
agtggtacaaaaaaa

SEQ ID NO: 2000676 - DNA, 15 bp, Homo sapiens
gtggtacaaaaaaac

SEQ ID NO: 2000677 - DNA, 15 bp, Homo sapiens
tggtacaaaaaaacc

SEQ ID NO: 2000678 - DNA, 15 bp, Homo sapiens
ggtacaaaaaaaccc

SEQ ID NO: 2000679 - DNA, 15 bp, Homo sapiens
gtacaaaaaaaccca

SEQ ID NO: 2000680 - DNA, 15 bp, Homo sapiens
tacaaaaaaacccaa

SEQ ID NO: 2000681 - DNA, 15 bp, Homo sapiens
acaaaaaaacccaaa

SEQ ID NO: 2000682 - DNA, 15 bp, Homo sapiens
caaaaaaacccaaat

SEQ ID NO: 2000683 - DNA, 15 bp, Homo sapiens
aaaaaaacccaaatg

SEQ ID NO: 2000684 - DNA, 15 bp, Homo sapiens
aaaaaacccaaatgt

SEQ ID NO: 2000685 - DNA, 15 bp, Homo sapiens
aaaaacccaaatgtc

SEQ ID NO: 2000686 - DNA, 15 bp, Homo sapiens
aaaacccaaatgtct

SEQ ID NO: 2000687 - DNA, 15 bp, Homo sapiens
aaacccaaatgtctt

SEQ ID NO: 2000688 - DNA, 15 bp, Homo sapiens
aacccaaatgtcttg

SEQ ID NO: 2000689 - DNA, 15 bp, Homo sapiens
acccaaatgtcttgt

SEQ ID NO: 2000690 - DNA, 15 bp, Homo sapiens
cccaaatgtcttgta

SEQ ID NO: 2000691 - DNA, 15 bp, Homo sapiens
ccaaatgtcttgtag

SEQ ID NO: 2000692 - DNA, 15 bp, Homo sapiens
caaatgtcttgtagt

SEQ ID NO: 2000693 - DNA, 15 bp, Homo sapiens
aaatgtcttgtagtc

SEQ ID NO: 2000694 - DNA, 15 bp, Homo sapiens
aatgtcttgtagtct

SEQ ID NO: 2000695 - DNA, 15 bp, Homo sapiens
atgtcttgtagtcta

SEQ ID NO: 2000696 - DNA, 15 bp, Homo sapiens
tgtcttgtagtctat

SEQ ID NO: 2000697 - DNA, 15 bp, Homo sapiens
gtcttgtagtctatc

SEQ ID NO: 2000698 - DNA, 15 bp, Homo sapiens
tcttgtagtctatca

SEQ ID NO: 2000699 - DNA, 15 bp, Homo sapiens
cttgtagtctatcaa

SEQ ID NO: 2000700 - DNA, 15 bp, Homo sapiens
ttgtagtctatcaat

SEQ ID NO: 2000701 - DNA, 15 bp, Homo sapiens
tgtagtctatcaatg

SEQ ID NO: 2000702 - DNA, 15 bp, Homo sapiens
gtagtctatcaatgc

SEQ ID NO: 2000703 - DNA, 15 bp, Homo sapiens
tagtctatcaatgca

SEQ ID NO: 2000704 - DNA, 15 bp, Homo sapiens
agtctatcaatgcat

SEQ ID NO: 2000705 - DNA, 15 bp, Homo sapiens
gtctatcaatgcatg

SEQ ID NO: 2000706 - DNA, 15 bp, Homo sapiens
tctatcaatgcatga

SEQ ID NO: 2000707 - DNA, 15 bp, Homo sapiens
ctatcaatgcatgaa

SEQ ID NO: 2000708 - DNA, 15 bp, Homo sapiens
tatcaatgcatgaac

SEQ ID NO: 2000709 - DNA, 15 bp, Homo sapiens
atcaatgcatgaact

SEQ ID NO: 2000710 - DNA, 15 bp, Homo sapiens
tcaatgcatgaactg

SEQ ID NO: 2000711 - DNA, 15 bp, Homo sapiens
caatgcatgaactgc

SEQ ID NO: 2000712 - DNA, 15 bp, Homo sapiens
aatgcatgaactgcc

SEQ ID NO: 2000713 - DNA, 15 bp, Homo sapiens
atgcatgaactgcct

SEQ ID NO: 2000714 - DNA, 15 bp, Homo sapiens
tgcatgaactgcctt

SEQ ID NO: 2000715 - DNA, 15 bp, Homo sapiens
gcatgaactgcctta

SEQ ID NO: 2000716 - DNA, 15 bp, Homo sapiens
catgaactgccttat

SEQ ID NO: 2000717 - DNA, 15 bp, Homo sapiens
atgaactgccttata

SEQ ID NO: 2000718 - DNA, 15 bp, Homo sapiens
tgaactgccttatag

SEQ ID NO: 2000719 - DNA, 15 bp, Homo sapiens
gaactgccttataga

SEQ ID NO: 2000720 - DNA, 15 bp, Homo sapiens
aactgccttatagaa

SEQ ID NO: 2000721 - DNA, 15 bp, Homo sapiens
actgccttatagaac

SEQ ID NO: 2000722 - DNA, 15 bp, Homo sapiens
ctgccttatagaaca

SEQ ID NO: 2000723 - DNA, 15 bp, Homo sapiens
tgccttatagaacac

SEQ ID NO: 2000724 - DNA, 15 bp, Homo sapiens
gccttatagaacaca

SEQ ID NO: 2000725 - DNA, 15 bp, Homo sapiens
ccttatagaacacaa

SEQ ID NO: 2000726 - DNA, 15 bp, Homo sapiens
cttatagaacacaac

SEQ ID NO: 2000727 - DNA, 15 bp, Homo sapiens
ttatagaacacaaca

SEQ ID NO: 2000728 - DNA, 15 bp, Homo sapiens
tatagaacacaacaa

SEQ ID NO: 2000729 - DNA, 15 bp, Homo sapiens
atagaacacaacaaa

SEQ ID NO: 2000730 - DNA, 15 bp, Homo sapiens
tagaacacaacaaat

SEQ ID NO: 2000731 - DNA, 15 bp, Homo sapiens
agaacacaacaaatg

SEQ ID NO: 2000732 - DNA, 15 bp, Homo sapiens
gaacacaacaaatgt

SEQ ID NO: 2000733 - DNA, 15 bp, Homo sapiens
aacacaacaaatgtg

SEQ ID NO: 2000734 - DNA, 15 bp, Homo sapiens
acacaacaaatgtgc

SEQ ID NO: 2000735 - DNA, 15 bp, Homo sapiens
cacaacaaatgtgcc

SEQ ID NO: 2000736 - DNA, 15 bp, Homo sapiens
acaacaaatgtgcca

SEQ ID NO: 2000737 - DNA, 15 bp, Homo sapiens
caacaaatgtgccac

SEQ ID NO: 2000738 - DNA, 15 bp, Homo sapiens
aacaaatgtgccacc

SEQ ID NO: 2000739 - DNA, 15 bp, Homo sapiens
acaaatgtgccacct

SEQ ID NO: 2000740 - DNA, 15 bp, Homo sapiens
caaatgtgccacctt

SEQ ID NO: 2000741 - DNA, 15 bp, Homo sapiens
aaatgtgccaccttg

SEQ ID NO: 2000742 - DNA, 15 bp, Homo sapiens
aatgtgccaccttgg

SEQ ID NO: 2000743 - DNA, 15 bp, Homo sapiens
atgtgccaccttgga

SEQ ID NO: 2000744 - DNA, 15 bp, Homo sapiens
tgtgccaccttggaa

SEQ ID NO: 2000745 - DNA, 15 bp, Homo sapiens
gtgccaccttggaaa

SEQ ID NO: 2000746 - DNA, 15 bp, Homo sapiens
tgccaccttggaaaa

SEQ ID NO: 2000747 - DNA, 15 bp, Homo sapiens
gccaccttggaaaat

SEQ ID NO: 2000748 - DNA, 15 bp, Homo sapiens
ccaccttggaaaatt

SEQ ID NO: 2000749 - DNA, 15 bp, Homo sapiens
caccttggaaaattc

SEQ ID NO: 2000750 - DNA, 15 bp, Homo sapiens
accttggaaaattct

SEQ ID NO: 2000751 - DNA, 15 bp, Homo sapiens
ccttggaaaattcta

SEQ ID NO: 2000752 - DNA, 15 bp, Homo sapiens
cttggaaaattctag

SEQ ID NO: 2000753 - DNA, 15 bp, Homo sapiens
ttggaaaattctaga

SEQ ID NO: 2000754 - DNA, 15 bp, Homo sapiens
tggaaaattctagaa

SEQ ID NO: 2000755 - DNA, 15 bp, Homo sapiens
ggaaaattctagaaa

SEQ ID NO: 2000756 - DNA, 15 bp, Homo sapiens
gaaaattctagaaaa

SEQ ID NO: 2000757 - DNA, 15 bp, Homo sapiens
aaaattctagaaaat

SEQ ID NO: 2000758 - DNA, 15 bp, Homo sapiens
aaattctagaaaatt

SEQ ID NO: 2000759 - DNA, 15 bp, Homo sapiens
aattctagaaaattt

SEQ ID NO: 2000760 - DNA, 15 bp, Homo sapiens
attctagaaaatttc

SEQ ID NO: 2000761 - DNA, 15 bp, Homo sapiens
ttctagaaaatttct

SEQ ID NO: 2000762 - DNA, 15 bp, Homo sapiens
tctagaaaatttcta

SEQ ID NO: 2000763 - DNA, 15 bp, Homo sapiens
ctagaaaatttctag

SEQ ID NO: 2000764 - DNA, 15 bp, Homo sapiens
tagaaaatttctagt

SEQ ID NO: 2000765 - DNA, 15 bp, Homo sapiens
agaaaatttctagtc

SEQ ID NO: 2000766 - DNA, 15 bp, Homo sapiens
gaaaatttctagtca

SEQ ID NO: 2000767 - DNA, 15 bp, Homo sapiens
aaaatttctagtcac

SEQ ID NO: 2000768 - DNA, 15 bp, Homo sapiens
aaatttctagtcacc

SEQ ID NO: 2000769 - DNA, 15 bp, Homo sapiens
aatttctagtcacca

SEQ ID NO: 2000770 - DNA, 15 bp, Homo sapiens
atttctagtcaccaa

SEQ ID NO: 2000771 - DNA, 15 bp, Homo sapiens
tttctagtcaccaaa

SEQ ID NO: 2000772 - DNA, 15 bp, Homo sapiens
ttctagtcaccaaag

SEQ ID NO: 2000773 - DNA, 15 bp, Homo sapiens
tctagtcaccaaagg

SEQ ID NO: 2000774 - DNA, 15 bp, Homo sapiens
ctagtcaccaaaggt

SEQ ID NO: 2000775 - DNA, 15 bp, Homo sapiens
tagtcaccaaaggtt

SEQ ID NO: 2000776 - DNA, 15 bp, Homo sapiens
agtcaccaaaggttt

SEQ ID NO: 2000777 - DNA, 15 bp, Homo sapiens
gtcaccaaaggtttt

SEQ ID NO: 2000778 - DNA, 15 bp, Homo sapiens
tcaccaaaggtttta

SEQ ID NO: 2000779 - DNA, 15 bp, Homo sapiens
caccaaaggttttac

SEQ ID NO: 2000780 - DNA, 15 bp, Homo sapiens
accaaaggttttact

SEQ ID NO: 2000781 - DNA, 15 bp, Homo sapiens
ccaaaggttttactt

SEQ ID NO: 2000782 - DNA, 15 bp, Homo sapiens
caaaggttttacttt

SEQ ID NO: 2000783 - DNA, 15 bp, Homo sapiens
aaaggttttacttta

SEQ ID NO: 2000784 - DNA, 15 bp, Homo sapiens
aaggttttactttat

SEQ ID NO: 2000785 - DNA, 15 bp, Homo sapiens
aggttttactttatg

SEQ ID NO: 2000786 - DNA, 15 bp, Homo sapiens
ggttttactttatgg

SEQ ID NO: 2000787 - DNA, 15 bp, Homo sapiens
gttttactttatggg

SEQ ID NO: 2000788 - DNA, 15 bp, Homo sapiens
ttttactttatggga

SEQ ID NO: 2000789 - DNA, 15 bp, Homo sapiens
tttactttatgggat

SEQ ID NO: 2000790 - DNA, 15 bp, Homo sapiens
ttactttatgggatt

SEQ ID NO: 2000791 - DNA, 15 bp, Homo sapiens
tactttatgggattt

SEQ ID NO: 2000792 - DNA, 15 bp, Homo sapiens
actttatgggatttt

SEQ ID NO: 2000793 - DNA, 15 bp, Homo sapiens
ctttatgggattttg

SEQ ID NO: 2000794 - DNA, 15 bp, Homo sapiens
tttatgggattttgc

SEQ ID NO: 2000795 - DNA, 15 bp, Homo sapiens
ttatgggattttgca

SEQ ID NO: 2000796 - DNA, 15 bp, Homo sapiens
tatgggattttgcag

SEQ ID NO: 2000797 - DNA, 15 bp, Homo sapiens
atgggattttgcagc

SEQ ID NO: 2000798 - DNA, 15 bp, Homo sapiens
tgggattttgcagca

SEQ ID NO: 2000799 - DNA, 15 bp, Homo sapiens
gggattttgcagcat

SEQ ID NO: 2000800 - DNA, 15 bp, Homo sapiens
ggattttgcagcatt

SEQ ID NO: 2000801 - DNA, 15 bp, Homo sapiens
gattttgcagcatta

SEQ ID NO: 2000802 - DNA, 15 bp, Homo sapiens
attttgcagcattag

SEQ ID NO: 2000803 - DNA, 15 bp, Homo sapiens
ttttgcagcattagc

SEQ ID NO: 2000804 - DNA, 15 bp, Homo sapiens
tttgcagcattagca

SEQ ID NO: 2000805 - DNA, 15 bp, Homo sapiens
ttgcagcattagcac

SEQ ID NO: 2000806 - DNA, 15 bp, Homo sapiens
tgcagcattagcaca

SEQ ID NO: 2000807 - DNA, 15 bp, Homo sapiens
gcagcattagcacat

SEQ ID NO: 2000808 - DNA, 15 bp, Homo sapiens
cagcattagcacatg

SEQ ID NO: 2000809 - DNA, 15 bp, Homo sapiens
agcattagcacatgt

SEQ ID NO: 2000810 - DNA, 15 bp, Homo sapiens
gcattagcacatgta

SEQ ID NO: 2000811 - DNA, 15 bp, Homo sapiens
cattagcacatgtaa

SEQ ID NO: 2000812 - DNA, 15 bp, Homo sapiens
attagcacatgtaaa

SEQ ID NO: 2000813 - DNA, 15 bp, Homo sapiens
ttagcacatgtaaaa

SEQ ID NO: 2000814 - DNA, 15 bp, Homo sapiens
tagcacatgtaaaaa

SEQ ID NO: 2000815 - DNA, 15 bp, Homo sapiens
agcacatgtaaaaat

SEQ ID NO: 2000816 - DNA, 15 bp, Homo sapiens
gcacatgtaaaaata

SEQ ID NO: 2000817 - DNA, 15 bp, Homo sapiens
cacatgtaaaaataa

SEQ ID NO: 2000818 - DNA, 15 bp, Homo sapiens
acatgtaaaaataag

SEQ ID NO: 2000819 - DNA, 15 bp, Homo sapiens
catgtaaaaataagc

SEQ ID NO: 2000820 - DNA, 15 bp, Homo sapiens
atgtaaaaataagca

SEQ ID NO: 2000821 - DNA, 15 bp, Homo sapiens
tgtaaaaataagcaa

SEQ ID NO: 2000822 - DNA, 15 bp, Homo sapiens
gtaaaaataagcaac

SEQ ID NO: 2000823 - DNA, 15 bp, Homo sapiens
taaaaataagcaact

SEQ ID NO: 2000824 - DNA, 15 bp, Homo sapiens
aaaaataagcaactt

SEQ ID NO: 2000825 - DNA, 15 bp, Homo sapiens
aaaataagcaacttt

SEQ ID NO: 2000826 - DNA, 15 bp, Homo sapiens
aaataagcaactttt

SEQ ID NO: 2000827 - DNA, 15 bp, Homo sapiens
aataagcaacttttg

SEQ ID NO: 2000828 - DNA, 15 bp, Homo sapiens
ataagcaacttttgt

SEQ ID NO: 2000829 - DNA, 15 bp, Homo sapiens
taagcaacttttgtt

SEQ ID NO: 2000830 - DNA, 15 bp, Homo sapiens
aagcaacttttgttt

SEQ ID NO: 2000831 - DNA, 15 bp, Homo sapiens
agcaacttttgttta

SEQ ID NO: 2000832 - DNA, 15 bp, Homo sapiens
gcaacttttgtttat

SEQ ID NO: 2000833 - DNA, 15 bp, Homo sapiens
caacttttgtttatt

SEQ ID NO: 2000834 - DNA, 15 bp, Homo sapiens
aacttttgtttattt

SEQ ID NO: 2000835 - DNA, 15 bp, Homo sapiens
acttttgtttatttc

SEQ ID NO: 2000836 - DNA, 15 bp, Homo sapiens
cttttgtttatttcc

SEQ ID NO: 2000837 - DNA, 15 bp, Homo sapiens
ttttgtttatttcct

SEQ ID NO: 2000838 - DNA, 15 bp, Homo sapiens
tttgtttatttcctg

SEQ ID NO: 2000839 - DNA, 15 bp, Homo sapiens
ttgtttatttcctga

SEQ ID NO: 2000840 - DNA, 15 bp, Homo sapiens
tgtttatttcctgaa

SEQ ID NO: 2000841 - DNA, 15 bp, Homo sapiens
gtttatttcctgaat

SEQ ID NO: 2000842 - DNA, 15 bp, Homo sapiens
tttatttcctgaatc

SEQ ID NO: 2000843 - DNA, 15 bp, Homo sapiens
ttatttcctgaatct

SEQ ID NO: 2000844 - DNA, 15 bp, Homo sapiens
tatttcctgaatcta

SEQ ID NO: 2000845 - DNA, 15 bp, Homo sapiens
atttcctgaatctag

SEQ ID NO: 2000846 - DNA, 15 bp, Homo sapiens
tttcctgaatctagt

SEQ ID NO: 2000847 - DNA, 15 bp, Homo sapiens
ttcctgaatctagtt

SEQ ID NO: 2000848 - DNA, 15 bp, Homo sapiens
tcctgaatctagttc

SEQ ID NO: 2000849 - DNA, 15 bp, Homo sapiens
cctgaatctagttca

SEQ ID NO: 2000850 - DNA, 15 bp, Homo sapiens
ctgaatctagttcac

SEQ ID NO: 2000851 - DNA, 15 bp, Homo sapiens
tgaatctagttcact

SEQ ID NO: 2000852 - DNA, 15 bp, Homo sapiens
gaatctagttcactg

SEQ ID NO: 2000853 - DNA, 15 bp, Homo sapiens
aatctagttcactgt

SEQ ID NO: 2000854 - DNA, 15 bp, Homo sapiens
atctagttcactgtt

SEQ ID NO: 2000855 - DNA, 15 bp, Homo sapiens
tctagttcactgttg

SEQ ID NO: 2000856 - DNA, 15 bp, Homo sapiens
ctagttcactgttgc

SEQ ID NO: 2000857 - DNA, 15 bp, Homo sapiens
tagttcactgttgcc

SEQ ID NO: 2000858 - DNA, 15 bp, Homo sapiens
agttcactgttgcca

SEQ ID NO: 2000859 - DNA, 15 bp, Homo sapiens
gttcactgttgccag

SEQ ID NO: 2000860 - DNA, 15 bp, Homo sapiens
ttcactgttgccaga

SEQ ID NO: 2000861 - DNA, 15 bp, Homo sapiens
tcactgttgccagaa

SEQ ID NO: 2000862 - DNA, 15 bp, Homo sapiens
cactgttgccagaat

SEQ ID NO: 2000863 - DNA, 15 bp, Homo sapiens
actgttgccagaata

SEQ ID NO: 2000864 - DNA, 15 bp, Homo sapiens
ctgttgccagaatag

SEQ ID NO: 2000865 - DNA, 15 bp, Homo sapiens
tgttgccagaataga

SEQ ID NO: 2000866 - DNA, 15 bp, Homo sapiens
gttgccagaatagaa

SEQ ID NO: 2000867 - DNA, 15 bp, Homo sapiens
ttgccagaatagaaa

SEQ ID NO: 2000868 - DNA, 15 bp, Homo sapiens
tgccagaatagaaac

SEQ ID NO: 2000869 - DNA, 15 bp, Homo sapiens
gccagaatagaaacc

SEQ ID NO: 2000870 - DNA, 15 bp, Homo sapiens
ccagaatagaaacca

SEQ ID NO: 2000871 - DNA, 15 bp, Homo sapiens
cagaatagaaaccaa

SEQ ID NO: 2000872 - DNA, 15 bp, Homo sapiens
agaatagaaaccaag

SEQ ID NO: 2000873 - DNA, 15 bp, Homo sapiens
gaatagaaaccaagt

SEQ ID NO: 2000874 - DNA, 15 bp, Homo sapiens
aatagaaaccaagtg

SEQ ID NO: 2000875 - DNA, 15 bp, Homo sapiens
atagaaaccaagtgt

SEQ ID NO: 2000876 - DNA, 15 bp, Homo sapiens
tagaaaccaagtgtc

SEQ ID NO: 2000877 - DNA, 15 bp, Homo sapiens
agaaaccaagtgtct

SEQ ID NO: 2000878 - DNA, 15 bp, Homo sapiens
gaaaccaagtgtcta

SEQ ID NO: 2000879 - DNA, 15 bp, Homo sapiens
aaaccaagtgtctaa

SEQ ID NO: 2000880 - DNA, 15 bp, Homo sapiens
aaccaagtgtctaaa

SEQ ID NO: 2000881 - DNA, 15 bp, Homo sapiens
accaagtgtctaaaa

SEQ ID NO: 2000882 - DNA, 15 bp, Homo sapiens
ccaagtgtctaaaat

SEQ ID NO: 2000883 - DNA, 15 bp, Homo sapiens
caagtgtctaaaatt

SEQ ID NO: 2000884 - DNA, 15 bp, Homo sapiens
aagtgtctaaaattt

SEQ ID NO: 2000885 - DNA, 15 bp, Homo sapiens
agtgtctaaaatttt

SEQ ID NO: 2000886 - DNA, 15 bp, Homo sapiens
gtgtctaaaatttta

SEQ ID NO: 2000887 - DNA, 15 bp, Homo sapiens
tgtctaaaattttat

SEQ ID NO: 2000888 - DNA, 15 bp, Homo sapiens
gtctaaaattttatt

SEQ ID NO: 2000889 - DNA, 15 bp, Homo sapiens
ctaaaattttattag

SEQ ID NO: 2000890 - DNA, 15 bp, Homo sapiens
taaaattttattagc

SEQ ID NO: 2000891 - DNA, 15 bp, Homo sapiens
aaaattttattagct

SEQ ID NO: 2000892 - DNA, 15 bp, Homo sapiens
aaattttattagctt

SEQ ID NO: 2000893 - DNA, 15 bp, Homo sapiens
aattttattagcttt

SEQ ID NO: 2000894 - DNA, 15 bp, Homo sapiens
attttattagctttc

SEQ ID NO: 2000895 - DNA, 15 bp, Homo sapiens
ttttattagctttca

SEQ ID NO: 2000896 - DNA, 15 bp, Homo sapiens
tttattagctttcag

SEQ ID NO: 2000897 - DNA, 15 bp, Homo sapiens
ttattagctttcaga

SEQ ID NO: 2000898 - DNA, 15 bp, Homo sapiens
tattagctttcagag

SEQ ID NO: 2000899 - DNA, 15 bp, Homo sapiens
attagctttcagagg

SEQ ID NO: 2000900 - DNA, 15 bp, Homo sapiens
ttagctttcagagga

SEQ ID NO: 2000901 - DNA, 15 bp, Homo sapiens
tagctttcagaggac

SEQ ID NO: 2000902 - DNA, 15 bp, Homo sapiens
agctttcagaggaca

SEQ ID NO: 2000903 - DNA, 15 bp, Homo sapiens
gctttcagaggacag

SEQ ID NO: 2000904 - DNA, 15 bp, Homo sapiens
ctttcagaggacaga

SEQ ID NO: 2000905 - DNA, 15 bp, Homo sapiens
tttcagaggacagac

SEQ ID NO: 2000906 - DNA, 15 bp, Homo sapiens
ttcagaggacagacc

SEQ ID NO: 2000907 - DNA, 15 bp, Homo sapiens
tcagaggacagacca

SEQ ID NO: 2000908 - DNA, 15 bp, Homo sapiens
cagaggacagaccac

SEQ ID NO: 2000909 - DNA, 15 bp, Homo sapiens
agaggacagaccact

SEQ ID NO: 2000910 - DNA, 15 bp, Homo sapiens
gaggacagaccactc

SEQ ID NO: 2000911 - DNA, 15 bp, Homo sapiens
aggacagaccactca

SEQ ID NO: 2000912 - DNA, 15 bp, Homo sapiens
ggacagaccactcag

SEQ ID NO: 2000913 - DNA, 15 bp, Homo sapiens
gacagaccactcaga

SEQ ID NO: 2000914 - DNA, 15 bp, Homo sapiens
acagaccactcagaa

SEQ ID NO: 2000915 - DNA, 15 bp, Homo sapiens
cagaccactcagaaa

SEQ ID NO: 2000916 - DNA, 15 bp, Homo sapiens
agaccactcagaaat

SEQ ID NO: 2000917 - DNA, 15 bp, Homo sapiens
gaccactcagaaatg

SEQ ID NO: 2000918 - DNA, 15 bp, Homo sapiens
accactcagaaatgg

SEQ ID NO: 2000919 - DNA, 15 bp, Homo sapiens
ccactcagaaatggc

SEQ ID NO: 2000920 - DNA, 15 bp, Homo sapiens
ctcagaaatggcatc

SEQ ID NO: 2000921 - DNA, 15 bp, Homo sapiens
tcagaaatggcatct

SEQ ID NO: 2000922 - DNA, 15 bp, Homo sapiens
cagaaatggcatctg

SEQ ID NO: 2000923 - DNA, 15 bp, Homo sapiens
agaaatggcatctgt

SEQ ID NO: 2000924 - DNA, 15 bp, Homo sapiens
gaaatggcatctgtg

SEQ ID NO: 2000925 - DNA, 15 bp, Homo sapiens
aaatggcatctgtga

SEQ ID NO: 2000926 - DNA, 15 bp, Homo sapiens
aatggcatctgtgaa

SEQ ID NO: 2000927 - DNA, 15 bp, Homo sapiens
atggcatctgtgaaa

SEQ ID NO: 2000928 - DNA, 15 bp, Homo sapiens
tggcatctgtgaaat

SEQ ID NO: 2000929 - DNA, 15 bp, Homo sapiens
ggcatctgtgaaata

SEQ ID NO: 2000930 - DNA, 15 bp, Homo sapiens
gcatctgtgaaataa

SEQ ID NO: 2000931 - DNA, 15 bp, Homo sapiens
catctgtgaaataac

SEQ ID NO: 2000932 - DNA, 15 bp, Homo sapiens
atctgtgaaataaca

SEQ ID NO: 2000933 - DNA, 15 bp, Homo sapiens
tctgtgaaataacat

SEQ ID NO: 2000934 - DNA, 15 bp, Homo sapiens
ctgtgaaataacatt

SEQ ID NO: 2000935 - DNA, 15 bp, Homo sapiens
tgtgaaataacattg

SEQ ID NO: 2000936 - DNA, 15 bp, Homo sapiens
gtgaaataacattgt

SEQ ID NO: 2000937 - DNA, 15 bp, Homo sapiens
tgaaataacattgtt

SEQ ID NO: 2000938 - DNA, 15 bp, Homo sapiens
gaaataacattgttt

SEQ ID NO: 2000939 - DNA, 15 bp, Homo sapiens
aaataacattgtttc

SEQ ID NO: 2000940 - DNA, 15 bp, Homo sapiens
aataacattgtttca

SEQ ID NO: 2000941 - DNA, 15 bp, Homo sapiens
ataacattgtttcag

SEQ ID NO: 2000942 - DNA, 15 bp, Homo sapiens
taacattgtttcaga

SEQ ID NO: 2000943 - DNA, 15 bp, Homo sapiens
aacattgtttcagac

SEQ ID NO: 2000944 - DNA, 15 bp, Homo sapiens
acattgtttcagaca

SEQ ID NO: 2000945 - DNA, 15 bp, Homo sapiens
cattgtttcagacaa

SEQ ID NO: 2000946 - DNA, 15 bp, Homo sapiens
attgtttcagacaac

SEQ ID NO: 2000947 - DNA, 15 bp, Homo sapiens
ttgtttcagacaact

SEQ ID NO: 2000948 - DNA, 15 bp, Homo sapiens
tgtttcagacaactg

SEQ ID NO: 2000949 - DNA, 15 bp, Homo sapiens
gtttcagacaactgc

SEQ ID NO: 2000950 - DNA, 15 bp, Homo sapiens
tttcagacaactgca

SEQ ID NO: 2000951 - DNA, 15 bp, Homo sapiens
ttcagacaactgcat

SEQ ID NO: 2000952 - DNA, 15 bp, Homo sapiens
tcagacaactgcatt

SEQ ID NO: 2000953 - DNA, 15 bp, Homo sapiens
cagacaactgcattt

SEQ ID NO: 2000954 - DNA, 15 bp, Homo sapiens
agacaactgcatttt

SEQ ID NO: 2000955 - DNA, 15 bp, Homo sapiens
gacaactgcattttc

SEQ ID NO: 2000956 - DNA, 15 bp, Homo sapiens
acaactgcattttca

SEQ ID NO: 2000957 - DNA, 15 bp, Homo sapiens
caactgcattttcag

SEQ ID NO: 2000958 - DNA, 15 bp, Homo sapiens
aactgcattttcagt

SEQ ID NO: 2000959 - DNA, 15 bp, Homo sapiens
actgcattttcagtt

SEQ ID NO: 2000960 - DNA, 15 bp, Homo sapiens
ctgcattttcagttc

SEQ ID NO: 2000961 - DNA, 15 bp, Homo sapiens
tgcattttcagttcc

SEQ ID NO: 2000962 - DNA, 15 bp, Homo sapiens
gcattttcagttcca

SEQ ID NO: 2000963 - DNA, 15 bp, Homo sapiens
cattttcagttccat

SEQ ID NO: 2000964 - DNA, 15 bp, Homo sapiens
attttcagttccatt

SEQ ID NO: 2000965 - DNA, 15 bp, Homo sapiens
ttttcagttccattt

SEQ ID NO: 2000966 - DNA, 15 bp, Homo sapiens
tttcagttccattta

SEQ ID NO: 2000967 - DNA, 15 bp, Homo sapiens
ttcagttccatttag

SEQ ID NO: 2000968 - DNA, 15 bp, Homo sapiens
tcagttccatttagc

SEQ ID NO: 2000969 - DNA, 15 bp, Homo sapiens
cagttccatttagct

SEQ ID NO: 2000970 - DNA, 15 bp, Homo sapiens
agttccatttagctt

SEQ ID NO: 2000971 - DNA, 15 bp, Homo sapiens
gttccatttagcttg

SEQ ID NO: 2000972 - DNA, 15 bp, Homo sapiens
ttccatttagcttgt

SEQ ID NO: 2000973 - DNA, 15 bp, Homo sapiens
tccatttagcttgtg

SEQ ID NO: 2000974 - DNA, 15 bp, Homo sapiens
ccatttagcttgtgt

SEQ ID NO: 2000975 - DNA, 15 bp, Homo sapiens
catttagcttgtgtc

SEQ ID NO: 2000976 - DNA, 15 bp, Homo sapiens
atttagcttgtgtca

SEQ ID NO: 2000977 - DNA, 15 bp, Homo sapiens
tttagcttgtgtcag

SEQ ID NO: 2000978 - DNA, 15 bp, Homo sapiens
ttagcttgtgtcaga

SEQ ID NO: 2000979 - DNA, 15 bp, Homo sapiens
tagcttgtgtcagaa

SEQ ID NO: 2000980 - DNA, 15 bp, Homo sapiens
agcttgtgtcagaaa

SEQ ID NO: 2000981 - DNA, 15 bp, Homo sapiens
gcttgtgtcagaaat

SEQ ID NO: 2000982 - DNA, 15 bp, Homo sapiens
cttgtgtcagaaata

SEQ ID NO: 2000983 - DNA, 15 bp, Homo sapiens
ttgtgtcagaaatag

SEQ ID NO: 2000984 - DNA, 15 bp, Homo sapiens
tgtgtcagaaatagg

SEQ ID NO: 2000985 - DNA, 15 bp, Homo sapiens
gtgtcagaaatagga

SEQ ID NO: 2000986 - DNA, 15 bp, Homo sapiens
tgtcagaaataggag

SEQ ID NO: 2000987 - DNA, 15 bp, Homo sapiens
gtcagaaataggagc

SEQ ID NO: 2000988 - DNA, 15 bp, Homo sapiens
tcagaaataggagct

SEQ ID NO: 2000989 - DNA, 15 bp, Homo sapiens
cagaaataggagctg

SEQ ID NO: 2000990 - DNA, 15 bp, Homo sapiens
agaaataggagctga

SEQ ID NO: 2000991 - DNA, 15 bp, Homo sapiens
gaaataggagctgat

SEQ ID NO: 2000992 - DNA, 15 bp, Homo sapiens
aaataggagctgatc

SEQ ID NO: 2000993 - DNA, 15 bp, Homo sapiens
aataggagctgatct

SEQ ID NO: 2000994 - DNA, 15 bp, Homo sapiens
ataggagctgatctt

SEQ ID NO: 2000995 - DNA, 15 bp, Homo sapiens
taggagctgatctta

SEQ ID NO: 2000996 - DNA, 15 bp, Homo sapiens
aggagctgatcttac

SEQ ID NO: 2000997 - DNA, 15 bp, Homo sapiens
ggagctgatcttact

SEQ ID NO: 2000998 - DNA, 15 bp, Homo sapiens
gagctgatcttactg

SEQ ID NO: 2000999 - DNA, 15 bp, Homo sapiens
agctgatcttactga

SEQ ID NO: 2001000 - DNA, 15 bp, Homo sapiens
gctgatcttactgaa

SEQ ID NO: 2001001 - DNA, 15 bp, Homo sapiens
ctgatcttactgaag

SEQ ID NO: 2001002 - DNA, 15 bp, Homo sapiens
tgatcttactgaagg

SEQ ID NO: 2001003 - DNA, 15 bp, Homo sapiens
gatcttactgaagga

SEQ ID NO: 2001004 - DNA, 15 bp, Homo sapiens
atcttactgaaggat

SEQ ID NO: 2001005 - DNA, 15 bp, Homo sapiens
tcttactgaaggatc

SEQ ID NO: 2001006 - DNA, 15 bp, Homo sapiens
cttactgaaggatca

SEQ ID NO: 2001007 - DNA, 15 bp, Homo sapiens
ttactgaaggatcac

SEQ ID NO: 2001008 - DNA, 15 bp, Homo sapiens
tactgaaggatcact

SEQ ID NO: 2001009 - DNA, 15 bp, Homo sapiens
actgaaggatcactc

SEQ ID NO: 2001010 - DNA, 15 bp, Homo sapiens
ctgaaggatcactca

SEQ ID NO: 2001011 - DNA, 15 bp, Homo sapiens
tgaaggatcactcac

SEQ ID NO: 2001012 - DNA, 15 bp, Homo sapiens
gaaggatcactcacc

SEQ ID NO: 2001013 - DNA, 15 bp, Homo sapiens
aaggatcactcacct

SEQ ID NO: 2001014 - DNA, 15 bp, Homo sapiens
aggatcactcaccta

SEQ ID NO: 2001015 - DNA, 15 bp, Homo sapiens
ggatcactcacctaa

SEQ ID NO: 2001016 - DNA, 15 bp, Homo sapiens
gatcactcacctaaa

SEQ ID NO: 2001017 - DNA, 15 bp, Homo sapiens
atcactcacctaaaa

SEQ ID NO: 2001018 - DNA, 15 bp, Homo sapiens
tcactcacctaaaag

SEQ ID NO: 2001019 - DNA, 15 bp, Homo sapiens
cactcacctaaaaga

SEQ ID NO: 2001020 - DNA, 15 bp, Homo sapiens
actcacctaaaagac

SEQ ID NO: 2001021 - DNA, 15 bp, Homo sapiens
ctcacctaaaagacc

SEQ ID NO: 2001022 - DNA, 15 bp, Homo sapiens
tcacctaaaagacca

SEQ ID NO: 2001023 - DNA, 15 bp, Homo sapiens
cacctaaaagaccat

SEQ ID NO: 2001024 - DNA, 15 bp, Homo sapiens
acctaaaagaccatt

SEQ ID NO: 2001025 - DNA, 15 bp, Homo sapiens
cctaaaagaccatta

SEQ ID NO: 2001026 - DNA, 15 bp, Homo sapiens
ctaaaagaccattat

SEQ ID NO: 2001027 - DNA, 15 bp, Homo sapiens
taaaagaccattatg

SEQ ID NO: 2001028 - DNA, 15 bp, Homo sapiens
aaaagaccattatga

SEQ ID NO: 2001029 - DNA, 15 bp, Homo sapiens
aaagaccattatgat

SEQ ID NO: 2001030 - DNA, 15 bp, Homo sapiens
aagaccattatgatg

SEQ ID NO: 2001031 - DNA, 15 bp, Homo sapiens
agaccattatgatgg

SEQ ID NO: 2001032 - DNA, 15 bp, Homo sapiens
gaccattatgatggt

SEQ ID NO: 2001033 - DNA, 15 bp, Homo sapiens
accattatgatggtt

SEQ ID NO: 2001034 - DNA, 15 bp, Homo sapiens
ccattatgatggttt

SEQ ID NO: 2001035 - DNA, 15 bp, Homo sapiens
cattatgatggttta

SEQ ID NO: 2001036 - DNA, 15 bp, Homo sapiens
attatgatggtttag

SEQ ID NO: 2001037 - DNA, 15 bp, Homo sapiens
ttatgatggtttagt

SEQ ID NO: 2001038 - DNA, 15 bp, Homo sapiens
tatgatggtttagtt

SEQ ID NO: 2001039 - DNA, 15 bp, Homo sapiens
atgatggtttagttt

SEQ ID NO: 2001040 - DNA, 15 bp, Homo sapiens
tgatggtttagttta

SEQ ID NO: 2001041 - DNA, 15 bp, Homo sapiens
gatggtttagtttag

SEQ ID NO: 2001042 - DNA, 15 bp, Homo sapiens
atggtttagtttagg

SEQ ID NO: 2001043 - DNA, 15 bp, Homo sapiens
tggtttagtttaggt

SEQ ID NO: 2001044 - DNA, 15 bp, Homo sapiens
ggtttagtttaggtt

SEQ ID NO: 2001045 - DNA, 15 bp, Homo sapiens
gtttagtttaggttg

SEQ ID NO: 2001046 - DNA, 15 bp, Homo sapiens
tttagtttaggttgg

SEQ ID NO: 2001047 - DNA, 15 bp, Homo sapiens
ttagtttaggttgga

SEQ ID NO: 2001048 - DNA, 15 bp, Homo sapiens
tagtttaggttggaa

SEQ ID NO: 2001049 - DNA, 15 bp, Homo sapiens
agtttaggttggaac

SEQ ID NO: 2001050 - DNA, 15 bp, Homo sapiens
gtttaggttggaaca

SEQ ID NO: 2001051 - DNA, 15 bp, Homo sapiens
tttaggttggaacat

SEQ ID NO: 2001052 - DNA, 15 bp, Homo sapiens
ttaggttggaacatc

SEQ ID NO: 2001053 - DNA, 15 bp, Homo sapiens
taggttggaacatct

SEQ ID NO: 2001054 - DNA, 15 bp, Homo sapiens
aggttggaacatctt

SEQ ID NO: 2001055 - DNA, 15 bp, Homo sapiens
ggttggaacatctta

SEQ ID NO: 2001056 - DNA, 15 bp, Homo sapiens
gttggaacatcttat

SEQ ID NO: 2001057 - DNA, 15 bp, Homo sapiens
ttggaacatcttatg

SEQ ID NO: 2001058 - DNA, 15 bp, Homo sapiens
tggaacatcttatgc

SEQ ID NO: 2001059 - DNA, 15 bp, Homo sapiens
ggaacatcttatgct

SEQ ID NO: 2001060 - DNA, 15 bp, Homo sapiens
gaacatcttatgctg

SEQ ID NO: 2001061 - DNA, 15 bp, Homo sapiens
aacatcttatgctgt

SEQ ID NO: 2001062 - DNA, 15 bp, Homo sapiens
acatcttatgctgtc

SEQ ID NO: 2001063 - DNA, 15 bp, Homo sapiens
catcttatgctgtca

SEQ ID NO: 2001064 - DNA, 15 bp, Homo sapiens
atcttatgctgtcat

SEQ ID NO: 2001065 - DNA, 15 bp, Homo sapiens
tcttatgctgtcatc

SEQ ID NO: 2001066 - DNA, 15 bp, Homo sapiens
cttatgctgtcatcg

SEQ ID NO: 2001067 - DNA, 15 bp, Homo sapiens
ttatgctgtcatcgt

SEQ ID NO: 2001068 - DNA, 15 bp, Homo sapiens
tatgctgtcatcgtc

SEQ ID NO: 2001069 - DNA, 15 bp, Homo sapiens
atgctgtcatcgtca

SEQ ID NO: 2001070 - DNA, 15 bp, Homo sapiens
tgctgtcatcgtcat

SEQ ID NO: 2001071 - DNA, 15 bp, Homo sapiens
gctgtcatcgtcata

SEQ ID NO: 2001072 - DNA, 15 bp, Homo sapiens
ctgtcatcgtcatag

SEQ ID NO: 2001073 - DNA, 15 bp, Homo sapiens
tgtcatcgtcatagt

SEQ ID NO: 2001074 - DNA, 15 bp, Homo sapiens
gtcatcgtcatagta

SEQ ID NO: 2001075 - DNA, 15 bp, Homo sapiens
tcatcgtcatagtat

SEQ ID NO: 2001076 - DNA, 15 bp, Homo sapiens
catcgtcatagtatt

SEQ ID NO: 2001077 - DNA, 15 bp, Homo sapiens
atcgtcatagtatta

SEQ ID NO: 2001078 - DNA, 15 bp, Homo sapiens
tcgtcatagtattag

SEQ ID NO: 2001079 - DNA, 15 bp, Homo sapiens
cgtcatagtattagg

SEQ ID NO: 2001080 - DNA, 15 bp, Homo sapiens
gtcatagtattaggt

SEQ ID NO: 2001081 - DNA, 15 bp, Homo sapiens
tcatagtattaggtg

SEQ ID NO: 2001082 - DNA, 15 bp, Homo sapiens
catagtattaggtga

SEQ ID NO: 2001083 - DNA, 15 bp, Homo sapiens
atagtattaggtgac

SEQ ID NO: 2001084 - DNA, 15 bp, Homo sapiens
tagtattaggtgact

SEQ ID NO: 2001085 - DNA, 15 bp, Homo sapiens
agtattaggtgactt

SEQ ID NO: 2001086 - DNA, 15 bp, Homo sapiens
gtattaggtgactta

SEQ ID NO: 2001087 - DNA, 15 bp, Homo sapiens
tattaggtgacttaa

SEQ ID NO: 2001088 - DNA, 15 bp, Homo sapiens
attaggtgacttaaa

SEQ ID NO: 2001089 - DNA, 15 bp, Homo sapiens
ttaggtgacttaaaa

SEQ ID NO: 2001090 - DNA, 15 bp, Homo sapiens
taggtgacttaaaat

SEQ ID NO: 2001091 - DNA, 15 bp, Homo sapiens
aggtgacttaaaata

SEQ ID NO: 2001092 - DNA, 15 bp, Homo sapiens
ggtgacttaaaatat

SEQ ID NO: 2001093 - DNA, 15 bp, Homo sapiens
gtgacttaaaatatg

SEQ ID NO: 2001094 - DNA, 15 bp, Homo sapiens
tgacttaaaatatgt

SEQ ID NO: 2001095 - DNA, 15 bp, Homo sapiens
gacttaaaatatgtg

SEQ ID NO: 2001096 - DNA, 15 bp, Homo sapiens
acttaaaatatgtgt

SEQ ID NO: 2001097 - DNA, 15 bp, Homo sapiens
cttaaaatatgtgtg

SEQ ID NO: 2001098 - DNA, 15 bp, Homo sapiens
ttaaaatatgtgtgt

SEQ ID NO: 2001099 - DNA, 15 bp, Homo sapiens
taaaatatgtgtgtg

SEQ ID NO: 2001100 - DNA, 15 bp, Homo sapiens
aaaatatgtgtgtgg

SEQ ID NO: 2001101 - DNA, 15 bp, Homo sapiens
aaatatgtgtgtggc

SEQ ID NO: 2001102 - DNA, 15 bp, Homo sapiens
aatatgtgtgtggct

SEQ ID NO: 2001103 - DNA, 15 bp, Homo sapiens
atatgtgtgtggctt

SEQ ID NO: 2001104 - DNA, 15 bp, Homo sapiens
tatgtgtgtggcttg

SEQ ID NO: 2001105 - DNA, 15 bp, Homo sapiens
atgtgtgtggcttga

SEQ ID NO: 2001106 - DNA, 15 bp, Homo sapiens
tgtgtgtggcttgaa

SEQ ID NO: 2001107 - DNA, 15 bp, Homo sapiens
tgtggcttgaatggt

SEQ ID NO: 2001108 - DNA, 15 bp, Homo sapiens
gtggcttgaatggta

SEQ ID NO: 2001109 - DNA, 15 bp, Homo sapiens
tggcttgaatggtag

SEQ ID NO: 2001110 - DNA, 15 bp, Homo sapiens
ggcttgaatggtagt

SEQ ID NO: 2001111 - DNA, 15 bp, Homo sapiens
gcttgaatggtagtt

SEQ ID NO: 2001112 - DNA, 15 bp, Homo sapiens
cttgaatggtagttc

SEQ ID NO: 2001113 - DNA, 15 bp, Homo sapiens
ttgaatggtagttct

SEQ ID NO: 2001114 - DNA, 15 bp, Homo sapiens
tgaatggtagttctt

SEQ ID NO: 2001115 - DNA, 15 bp, Homo sapiens
gaatggtagttcttt

SEQ ID NO: 2001116 - DNA, 15 bp, Homo sapiens
aatggtagttctttc

SEQ ID NO: 2001117 - DNA, 15 bp, Homo sapiens
atggtagttctttct

SEQ ID NO: 2001118 - DNA, 15 bp, Homo sapiens
tggtagttctttcta

SEQ ID NO: 2001119 - DNA, 15 bp, Homo sapiens
ggtagttctttctaa

SEQ ID NO: 2001120 - DNA, 15 bp, Homo sapiens
gtagttctttctaaa

SEQ ID NO: 2001121 - DNA, 15 bp, Homo sapiens
tagttctttctaaag

SEQ ID NO: 2001122 - DNA, 15 bp, Homo sapiens
agttctttctaaaga

SEQ ID NO: 2001123 - DNA, 15 bp, Homo sapiens
gttctttctaaagat

SEQ ID NO: 2001124 - DNA, 15 bp, Homo sapiens
ttctttctaaagatt

SEQ ID NO: 2001125 - DNA, 15 bp, Homo sapiens
tctttctaaagattg

SEQ ID NO: 2001126 - DNA, 15 bp, Homo sapiens
ctttctaaagattga

SEQ ID NO: 2001127 - DNA, 15 bp, Homo sapiens
tttctaaagattgat

SEQ ID NO: 2001128 - DNA, 15 bp, Homo sapiens
ttctaaagattgatc

SEQ ID NO: 2001129 - DNA, 15 bp, Homo sapiens
tctaaagattgatct

SEQ ID NO: 2001130 - DNA, 15 bp, Homo sapiens
ctaaagattgatctt

SEQ ID NO: 2001131 - DNA, 15 bp, Homo sapiens
taaagattgatctta

SEQ ID NO: 2001132 - DNA, 15 bp, Homo sapiens
aaagattgatcttat

SEQ ID NO: 2001133 - DNA, 15 bp, Homo sapiens
aagattgatcttatg

SEQ ID NO: 2001134 - DNA, 15 bp, Homo sapiens
agattgatcttatgt

SEQ ID NO: 2001135 - DNA, 15 bp, Homo sapiens
gattgatcttatgtt

SEQ ID NO: 2001136 - DNA, 15 bp, Homo sapiens
attgatcttatgttt

SEQ ID NO: 2001137 - DNA, 15 bp, Homo sapiens
ttgatcttatgtttt

SEQ ID NO: 2001138 - DNA, 15 bp, Homo sapiens
tgatcttatgtttta

SEQ ID NO: 2001139 - DNA, 15 bp, Homo sapiens
gatcttatgttttat

SEQ ID NO: 2001140 - DNA, 15 bp, Homo sapiens
atcttatgttttata

SEQ ID NO: 2001141 - DNA, 15 bp, Homo sapiens
tcttatgttttatat

SEQ ID NO: 2001142 - DNA, 15 bp, Homo sapiens
cttatgttttatata

SEQ ID NO: 2001143 - DNA, 15 bp, Homo sapiens
ttatgttttatatat

SEQ ID NO: 2001144 - DNA, 15 bp, Homo sapiens
tatgttttatatata

SEQ ID NO: 2001145 - DNA, 15 bp, Homo sapiens
atgttttatatataa

SEQ ID NO: 2001146 - DNA, 15 bp, Homo sapiens
tgttttatatataat

SEQ ID NO: 2001147 - DNA, 15 bp, Homo sapiens
gttttatatataata

SEQ ID NO: 2001148 - DNA, 15 bp, Homo sapiens
ttttatatataatag

SEQ ID NO: 2001149 - DNA, 15 bp, Homo sapiens
tttatatataataga

SEQ ID NO: 2001150 - DNA, 15 bp, Homo sapiens
ttatatataatagat

SEQ ID NO: 2001151 - DNA, 15 bp, Homo sapiens
tatatataatagatg

SEQ ID NO: 2001152 - DNA, 15 bp, Homo sapiens
atatataatagatga

SEQ ID NO: 2001153 - DNA, 15 bp, Homo sapiens
tatataatagatgaa

SEQ ID NO: 2001154 - DNA, 15 bp, Homo sapiens
atataatagatgaat

SEQ ID NO: 2001155 - DNA, 15 bp, Homo sapiens
tataatagatgaatc

SEQ ID NO: 2001156 - DNA, 15 bp, Homo sapiens
ataatagatgaatca

SEQ ID NO: 2001157 - DNA, 15 bp, Homo sapiens
taatagatgaatcag

SEQ ID NO: 2001158 - DNA, 15 bp, Homo sapiens
aatagatgaatcagt

SEQ ID NO: 2001159 - DNA, 15 bp, Homo sapiens
atagatgaatcagta

SEQ ID NO: 2001160 - DNA, 15 bp, Homo sapiens
tagatgaatcagtat

SEQ ID NO: 2001161 - DNA, 15 bp, Homo sapiens
agatgaatcagtatc

SEQ ID NO: 2001162 - DNA, 15 bp, Homo sapiens
gatgaatcagtatca

SEQ ID NO: 2001163 - DNA, 15 bp, Homo sapiens
atgaatcagtatcat

SEQ ID NO: 2001164 - DNA, 15 bp, Homo sapiens
tgaatcagtatcatg

SEQ ID NO: 2001165 - DNA, 15 bp, Homo sapiens
gaatcagtatcatga

SEQ ID NO: 2001166 - DNA, 15 bp, Homo sapiens
aatcagtatcatgaa

SEQ ID NO: 2001167 - DNA, 15 bp, Homo sapiens
atcagtatcatgaag

SEQ ID NO: 2001168 - DNA, 15 bp, Homo sapiens
tcagtatcatgaaga

SEQ ID NO: 2001169 - DNA, 15 bp, Homo sapiens
cagtatcatgaagat

SEQ ID NO: 2001170 - DNA, 15 bp, Homo sapiens
agtatcatgaagatg

SEQ ID NO: 2001171 - DNA, 15 bp, Homo sapiens
gtatcatgaagatgt

SEQ ID NO: 2001172 - DNA, 15 bp, Homo sapiens
tatcatgaagatgtt

SEQ ID NO: 2001173 - DNA, 15 bp, Homo sapiens
atcatgaagatgttt

SEQ ID NO: 2001174 - DNA, 15 bp, Homo sapiens
tcatgaagatgtttc

SEQ ID NO: 2001175 - DNA, 15 bp, Homo sapiens
catgaagatgtttcg

SEQ ID NO: 2001176 - DNA, 15 bp, Homo sapiens
atgaagatgtttcgt

SEQ ID NO: 2001177 - DNA, 15 bp, Homo sapiens
tgaagatgtttcgtg

SEQ ID NO: 2001178 - DNA, 15 bp, Homo sapiens
gaagatgtttcgtgt

SEQ ID NO: 2001179 - DNA, 15 bp, Homo sapiens
aagatgtttcgtgtt

SEQ ID NO: 2001180 - DNA, 15 bp, Homo sapiens
agatgtttcgtgttt

SEQ ID NO: 2001181 - DNA, 15 bp, Homo sapiens
gatgtttcgtgtttg

SEQ ID NO: 2001182 - DNA, 15 bp, Homo sapiens
atgtttcgtgtttgt

SEQ ID NO: 2001183 - DNA, 15 bp, Homo sapiens
tgtttcgtgtttgtc

SEQ ID NO: 2001184 - DNA, 15 bp, Homo sapiens
gtttcgtgtttgtcc

SEQ ID NO: 2001185 - DNA, 15 bp, Homo sapiens
tttcgtgtttgtcca

SEQ ID NO: 2001186 - DNA, 15 bp, Homo sapiens
ttcgtgtttgtccat

SEQ ID NO: 2001187 - DNA, 15 bp, Homo sapiens
tcgtgtttgtccatt

SEQ ID NO: 2001188 - DNA, 15 bp, Homo sapiens
cgtgtttgtccattc

SEQ ID NO: 2001189 - DNA, 15 bp, Homo sapiens
gtgtttgtccattct

SEQ ID NO: 2001190 - DNA, 15 bp, Homo sapiens
tgtttgtccattctc

SEQ ID NO: 2001191 - DNA, 15 bp, Homo sapiens
gtttgtccattctcc

SEQ ID NO: 2001192 - DNA, 15 bp, Homo sapiens
tttgtccattctccc

SEQ ID NO: 2001193 - DNA, 15 bp, Homo sapiens
ttgtccattctcccc

SEQ ID NO: 2001194 - DNA, 15 bp, Homo sapiens
tgtccattctccccg

SEQ ID NO: 2001195 - DNA, 15 bp, Homo sapiens
gtccattctccccgt

SEQ ID NO: 2001196 - DNA, 15 bp, Homo sapiens
tccattctccccgtc

SEQ ID NO: 2001197 - DNA, 15 bp, Homo sapiens
ccattctccccgtca

SEQ ID NO: 2001198 - DNA, 15 bp, Homo sapiens
cattctccccgtcaa

SEQ ID NO: 2001199 - DNA, 15 bp, Homo sapiens
attctccccgtcaat

SEQ ID NO: 2001200 - DNA, 15 bp, Homo sapiens
ttctccccgtcaatg

SEQ ID NO: 2001201 - DNA, 15 bp, Homo sapiens
tctccccgtcaatgt

SEQ ID NO: 2001202 - DNA, 15 bp, Homo sapiens
ctccccgtcaatgtt

SEQ ID NO: 2001203 - DNA, 15 bp, Homo sapiens
tccccgtcaatgttt

SEQ ID NO: 2001204 - DNA, 15 bp, Homo sapiens
ccccgtcaatgtttc

SEQ ID NO: 2001205 - DNA, 15 bp, Homo sapiens
cccgtcaatgtttct

SEQ ID NO: 2001206 - DNA, 15 bp, Homo sapiens
ccgtcaatgtttctc

SEQ ID NO: 2001207 - DNA, 15 bp, Homo sapiens
cgtcaatgtttctcc

SEQ ID NO: 2001208 - DNA, 15 bp, Homo sapiens
gtcaatgtttctcct

SEQ ID NO: 2001209 - DNA, 15 bp, Homo sapiens
tcaatgtttctcctt

SEQ ID NO: 2001210 - DNA, 15 bp, Homo sapiens
caatgtttctccttt

SEQ ID NO: 2001211 - DNA, 15 bp, Homo sapiens
aatgtttctccttta

SEQ ID NO: 2001212 - DNA, 15 bp, Homo sapiens
atgtttctcctttaa

SEQ ID NO: 2001213 - DNA, 15 bp, Homo sapiens
tgtttctcctttaag

SEQ ID NO: 2001214 - DNA, 15 bp, Homo sapiens
gtttctcctttaaga

SEQ ID NO: 2001215 - DNA, 15 bp, Homo sapiens
tttctcctttaagat

SEQ ID NO: 2001216 - DNA, 15 bp, Homo sapiens
ttctcctttaagatt

SEQ ID NO: 2001217 - DNA, 15 bp, Homo sapiens
tctcctttaagatta

SEQ ID NO: 2001218 - DNA, 15 bp, Homo sapiens
ctcctttaagattaa

SEQ ID NO: 2001219 - DNA, 15 bp, Homo sapiens
tcctttaagattaag

SEQ ID NO: 2001220 - DNA, 15 bp, Homo sapiens
cctttaagattaaga

SEQ ID NO: 2001221 - DNA, 15 bp, Homo sapiens
ctttaagattaagat

SEQ ID NO: 2001222 - DNA, 15 bp, Homo sapiens
tttaagattaagatt

SEQ ID NO: 2001223 - DNA, 15 bp, Homo sapiens
ttaagattaagattt

SEQ ID NO: 2001224 - DNA, 15 bp, Homo sapiens
taagattaagatttg

SEQ ID NO: 2001225 - DNA, 15 bp, Homo sapiens
aagattaagatttgg

SEQ ID NO: 2001226 - DNA, 15 bp, Homo sapiens
agattaagatttggt

SEQ ID NO: 2001227 - DNA, 15 bp, Homo sapiens
gattaagatttggtt

SEQ ID NO: 2001228 - DNA, 15 bp, Homo sapiens
attaagatttggttt

SEQ ID NO: 2001229 - DNA, 15 bp, Homo sapiens
ttaagatttggtttt

SEQ ID NO: 2001230 - DNA, 15 bp, Homo sapiens
taagatttggttttt

SEQ ID NO: 2001231 - DNA, 15 bp, Homo sapiens
aagatttggttttta

SEQ ID NO: 2001232 - DNA, 15 bp, Homo sapiens
agatttggtttttat

SEQ ID NO: 2001233 - DNA, 15 bp, Homo sapiens
gatttggtttttata

SEQ ID NO: 2001234 - DNA, 15 bp, Homo sapiens
atttggtttttatat

SEQ ID NO: 2001235 - DNA, 15 bp, Homo sapiens
tttggtttttatatt

SEQ ID NO: 2001236 - DNA, 15 bp, Homo sapiens
ttggtttttatattt

SEQ ID NO: 2001237 - DNA, 15 bp, Homo sapiens
tggtttttatatttc

SEQ ID NO: 2001238 - DNA, 15 bp, Homo sapiens
ggtttttatatttct

SEQ ID NO: 2001239 - DNA, 15 bp, Homo sapiens
gtttttatatttctg

SEQ ID NO: 2001240 - DNA, 15 bp, Homo sapiens
tttttatatttctga

SEQ ID NO: 2001241 - DNA, 15 bp, Homo sapiens
ttttatatttctgac

SEQ ID NO: 2001242 - DNA, 15 bp, Homo sapiens
tttatatttctgacc

SEQ ID NO: 2001243 - DNA, 15 bp, Homo sapiens
ttatatttctgacct

SEQ ID NO: 2001244 - DNA, 15 bp, Homo sapiens
tatatttctgacctt

SEQ ID NO: 2001245 - DNA, 15 bp, Homo sapiens
atatttctgaccttt

SEQ ID NO: 2001246 - DNA, 15 bp, Homo sapiens
tatttctgaccttta

SEQ ID NO: 2001247 - DNA, 15 bp, Homo sapiens
atttctgacctttac

SEQ ID NO: 2001248 - DNA, 15 bp, Homo sapiens
tttctgacctttact

SEQ ID NO: 2001249 - DNA, 15 bp, Homo sapiens
ttctgacctttactt

SEQ ID NO: 2001250 - DNA, 15 bp, Homo sapiens
tctgacctttacttt

SEQ ID NO: 2001251 - DNA, 15 bp, Homo sapiens
ctgacctttactttt

SEQ ID NO: 2001252 - DNA, 15 bp, Homo sapiens
tgacctttacttttc

SEQ ID NO: 2001253 - DNA, 15 bp, Homo sapiens
gacctttacttttct

SEQ ID NO: 2001254 - DNA, 15 bp, Homo sapiens
acctttacttttctt

SEQ ID NO: 2001255 - DNA, 15 bp, Homo sapiens
cctttacttttcttt

SEQ ID NO: 2001256 - DNA, 15 bp, Homo sapiens
ctttacttttcttta

SEQ ID NO: 2001257 - DNA, 15 bp, Homo sapiens
tttacttttctttag

SEQ ID NO: 2001258 - DNA, 15 bp, Homo sapiens
ttacttttctttagg

SEQ ID NO: 2001259 - DNA, 15 bp, Homo sapiens
tacttttctttaggg

SEQ ID NO: 2001260 - DNA, 15 bp, Homo sapiens
acttttctttagggg

SEQ ID NO: 2001261 - DNA, 15 bp, Homo sapiens
cttttctttagggga

SEQ ID NO: 2001262 - DNA, 15 bp, Homo sapiens
ttttctttaggggaa

SEQ ID NO: 2001263 - DNA, 15 bp, Homo sapiens
tttctttaggggaag

SEQ ID NO: 2001264 - DNA, 15 bp, Homo sapiens
ttctttaggggaaga

SEQ ID NO: 2001265 - DNA, 15 bp, Homo sapiens
tctttaggggaagat

SEQ ID NO: 2001266 - DNA, 15 bp, Homo sapiens
ctttaggggaagata

SEQ ID NO: 2001267 - DNA, 15 bp, Homo sapiens
tttaggggaagatag

SEQ ID NO: 2001268 - DNA, 15 bp, Homo sapiens
ttaggggaagatagg

SEQ ID NO: 2001269 - DNA, 15 bp, Homo sapiens
taggggaagataggc

SEQ ID NO: 2001270 - DNA, 15 bp, Homo sapiens
aggggaagataggct

SEQ ID NO: 2001271 - DNA, 15 bp, Homo sapiens
ggggaagataggcta

SEQ ID NO: 2001272 - DNA, 15 bp, Homo sapiens
gggaagataggctat

SEQ ID NO: 2001273 - DNA, 15 bp, Homo sapiens
ggaagataggctata

SEQ ID NO: 2001274 - DNA, 15 bp, Homo sapiens
gaagataggctatag

SEQ ID NO: 2001275 - DNA, 15 bp, Homo sapiens
aagataggctataga

SEQ ID NO: 2001276 - DNA, 15 bp, Homo sapiens
agataggctatagat

SEQ ID NO: 2001277 - DNA, 15 bp, Homo sapiens
gataggctatagatt

SEQ ID NO: 2001278 - DNA, 15 bp, Homo sapiens
ataggctatagattt

SEQ ID NO: 2001279 - DNA, 15 bp, Homo sapiens
taggctatagattta

SEQ ID NO: 2001280 - DNA, 15 bp, Homo sapiens
aggctatagatttat

SEQ ID NO: 2001281 - DNA, 15 bp, Homo sapiens
ggctatagatttatt

SEQ ID NO: 2001282 - DNA, 15 bp, Homo sapiens
gctatagatttattt

SEQ ID NO: 2001283 - DNA, 15 bp, Homo sapiens
ctatagatttattta

SEQ ID NO: 2001284 - DNA, 15 bp, Homo sapiens
tatagatttatttat

SEQ ID NO: 2001285 - DNA, 15 bp, Homo sapiens
atagatttatttatt

SEQ ID NO: 2001286 - DNA, 15 bp, Homo sapiens
tagatttatttattt

SEQ ID NO: 2001287 - DNA, 15 bp, Homo sapiens
agatttatttatttt

SEQ ID NO: 2001288 - DNA, 15 bp, Homo sapiens
gatttatttatttta

SEQ ID NO: 2001289 - DNA, 15 bp, Homo sapiens
atttatttattttat

SEQ ID NO: 2001290 - DNA, 15 bp, Homo sapiens
tttatttattttatg

SEQ ID NO: 2001291 - DNA, 15 bp, Homo sapiens
ttatttattttatgt

SEQ ID NO: 2001292 - DNA, 15 bp, Homo sapiens
ttattttatgttttt

SEQ ID NO: 2001293 - DNA, 15 bp, Homo sapiens
tattttatgtttttg

SEQ ID NO: 2001294 - DNA, 15 bp, Homo sapiens
attttatgtttttga

SEQ ID NO: 2001295 - DNA, 15 bp, Homo sapiens
ttttatgtttttgag

SEQ ID NO: 2001296 - DNA, 15 bp, Homo sapiens
tttatgtttttgaga

SEQ ID NO: 2001297 - DNA, 15 bp, Homo sapiens
ttatgtttttgagac

SEQ ID NO: 2001298 - DNA, 15 bp, Homo sapiens
tatgtttttgagaca

SEQ ID NO: 2001299 - DNA, 15 bp, Homo sapiens
atgtttttgagacac

SEQ ID NO: 2001300 - DNA, 15 bp, Homo sapiens
tgtttttgagacaca

SEQ ID NO: 2001301 - DNA, 15 bp, Homo sapiens
gtttttgagacacag

SEQ ID NO: 2001302 - DNA, 15 bp, Homo sapiens
tgagacacagtctct

SEQ ID NO: 2001303 - DNA, 15 bp, Homo sapiens
gagacacagtctctc

SEQ ID NO: 2001304 - DNA, 15 bp, Homo sapiens
agacacagtctctct

SEQ ID NO: 2001305 - DNA, 15 bp, Homo sapiens
gacacagtctctctc

SEQ ID NO: 2001306 - DNA, 15 bp, Homo sapiens
acacagtctctctct

SEQ ID NO: 2001307 - DNA, 15 bp, Homo sapiens
cacagtctctctctg

SEQ ID NO: 2001308 - DNA, 15 bp, Homo sapiens
acagtctctctctgt

SEQ ID NO: 2001309 - DNA, 15 bp, Homo sapiens
ctctctctgtcacct

SEQ ID NO: 2001310 - DNA, 15 bp, Homo sapiens
tctctctgtcaccta

SEQ ID NO: 2001311 - DNA, 15 bp, Homo sapiens
ctctctgtcacctag

SEQ ID NO: 2001312 - DNA, 15 bp, Homo sapiens
tctctgtcacctagt

SEQ ID NO: 2001313 - DNA, 15 bp, Homo sapiens
ctctgtcacctagtc

SEQ ID NO: 2001314 - DNA, 15 bp, Homo sapiens
tctgtcacctagtct

SEQ ID NO: 2001315 - DNA, 15 bp, Homo sapiens
ctgtcacctagtctg

SEQ ID NO: 2001316 - DNA, 15 bp, Homo sapiens
tgtcacctagtctgg

SEQ ID NO: 2001317 - DNA, 15 bp, Homo sapiens
gtcacctagtctgga

SEQ ID NO: 2001318 - DNA, 15 bp, Homo sapiens
tcacctagtctggag

SEQ ID NO: 2001319 - DNA, 15 bp, Homo sapiens
cacctagtctggagt

SEQ ID NO: 2001320 - DNA, 15 bp, Homo sapiens
acctagtctggagtg

SEQ ID NO: 2001321 - DNA, 15 bp, Homo sapiens
cctagtctggagtgc

SEQ ID NO: 2001322 - DNA, 15 bp, Homo sapiens
ctagtctggagtgca

SEQ ID NO: 2001323 - DNA, 15 bp, Homo sapiens
tagtctggagtgcag

SEQ ID NO: 2001324 - DNA, 15 bp, Homo sapiens
agtctggagtgcagt

SEQ ID NO: 2001325 - DNA, 15 bp, Homo sapiens
gtctggagtgcagtg

SEQ ID NO: 2001326 - DNA, 15 bp, Homo sapiens
tctggagtgcagtga

SEQ ID NO: 2001327 - DNA, 15 bp, Homo sapiens
ctggagtgcagtgat

SEQ ID NO: 2001328 - DNA, 15 bp, Homo sapiens
tggagtgcagtgatg

SEQ ID NO: 2001329 - DNA, 15 bp, Homo sapiens
ggagtgcagtgatgt

SEQ ID NO: 2001330 - DNA, 15 bp, Homo sapiens
gagtgcagtgatgtg

SEQ ID NO: 2001331 - DNA, 15 bp, Homo sapiens
agtgcagtgatgtga

SEQ ID NO: 2001332 - DNA, 15 bp, Homo sapiens
gtgcagtgatgtgaa

SEQ ID NO: 2001333 - DNA, 15 bp, Homo sapiens
tgcagtgatgtgaac

SEQ ID NO: 2001334 - DNA, 15 bp, Homo sapiens
gcagtgatgtgaaca

SEQ ID NO: 2001335 - DNA, 15 bp, Homo sapiens
cagtgatgtgaacat

SEQ ID NO: 2001336 - DNA, 15 bp, Homo sapiens
agtgatgtgaacatg

SEQ ID NO: 2001337 - DNA, 15 bp, Homo sapiens
gtgatgtgaacatgt

SEQ ID NO: 2001338 - DNA, 15 bp, Homo sapiens
tgatgtgaacatgtc

SEQ ID NO: 2001339 - DNA, 15 bp, Homo sapiens
gatgtgaacatgtct

SEQ ID NO: 2001340 - DNA, 15 bp, Homo sapiens
atgtgaacatgtctc

SEQ ID NO: 2001341 - DNA, 15 bp, Homo sapiens
tgtgaacatgtctca

SEQ ID NO: 2001342 - DNA, 15 bp, Homo sapiens
gtgaacatgtctcac

SEQ ID NO: 2001343 - DNA, 15 bp, Homo sapiens
tgaacatgtctcact

SEQ ID NO: 2001344 - DNA, 15 bp, Homo sapiens
gaacatgtctcactg

SEQ ID NO: 2001345 - DNA, 15 bp, Homo sapiens
aacatgtctcactgc

SEQ ID NO: 2001346 - DNA, 15 bp, Homo sapiens
acatgtctcactgca

SEQ ID NO: 2001347 - DNA, 15 bp, Homo sapiens
catgtctcactgcag

SEQ ID NO: 2001348 - DNA, 15 bp, Homo sapiens
atgtctcactgcagc

SEQ ID NO: 2001349 - DNA, 15 bp, Homo sapiens
tgtctcactgcagcc

SEQ ID NO: 2001350 - DNA, 15 bp, Homo sapiens
gtctcactgcagcct

SEQ ID NO: 2001351 - DNA, 15 bp, Homo sapiens
tctcactgcagcctc

SEQ ID NO: 2001352 - DNA, 15 bp, Homo sapiens
tcctgggctcaagag

SEQ ID NO: 2001353 - DNA, 15 bp, Homo sapiens
cctgggctcaagaga

SEQ ID NO: 2001354 - DNA, 15 bp, Homo sapiens
ctgggctcaagagat

SEQ ID NO: 2001355 - DNA, 15 bp, Homo sapiens
tgggctcaagagatc

SEQ ID NO: 2001356 - DNA, 15 bp, Homo sapiens
gggctcaagagatcc

SEQ ID NO: 2001357 - DNA, 15 bp, Homo sapiens
ggctcaagagatcct

SEQ ID NO: 2001358 - DNA, 15 bp, Homo sapiens
gctcaagagatcctc

SEQ ID NO: 2001359 - DNA, 15 bp, Homo sapiens
ctcaagagatcctcc

SEQ ID NO: 2001360 - DNA, 15 bp, Homo sapiens
tcaagagatcctccc

SEQ ID NO: 2001361 - DNA, 15 bp, Homo sapiens
caagagatcctccca

SEQ ID NO: 2001362 - DNA, 15 bp, Homo sapiens
aagagatcctcccac

SEQ ID NO: 2001363 - DNA, 15 bp, Homo sapiens
agagatcctcccacc

SEQ ID NO: 2001364 - DNA, 15 bp, Homo sapiens
gagatcctcccacct

SEQ ID NO: 2001365 - DNA, 15 bp, Homo sapiens
agatcctcccacctc

SEQ ID NO: 2001366 - DNA, 15 bp, Homo sapiens
gggactacaggcacg

SEQ ID NO: 2001367 - DNA, 15 bp, Homo sapiens
ggactacaggcacgt

SEQ ID NO: 2001368 - DNA, 15 bp, Homo sapiens
gactacaggcacgtg

SEQ ID NO: 2001369 - DNA, 15 bp, Homo sapiens
actacaggcacgtgc

SEQ ID NO: 2001370 - DNA, 15 bp, Homo sapiens
tacaggcacgtgcca

SEQ ID NO: 2001371 - DNA, 15 bp, Homo sapiens
acaggcacgtgccac

SEQ ID NO: 2001372 - DNA, 15 bp, Homo sapiens
caggcacgtgccacc

SEQ ID NO: 2001373 - DNA, 15 bp, Homo sapiens
aggcacgtgccacca

SEQ ID NO: 2001374 - DNA, 15 bp, Homo sapiens
ggcacgtgccaccat

SEQ ID NO: 2001375 - DNA, 15 bp, Homo sapiens
gcacgtgccaccatg

SEQ ID NO: 2001376 - DNA, 15 bp, Homo sapiens
cacgtgccaccatgc

SEQ ID NO: 2001377 - DNA, 15 bp, Homo sapiens
acgtgccaccatgcc

SEQ ID NO: 2001378 - DNA, 15 bp, Homo sapiens
cgtgccaccatgccc

SEQ ID NO: 2001379 - DNA, 15 bp, Homo sapiens
accatgcccggctag

SEQ ID NO: 2001380 - DNA, 15 bp, Homo sapiens
ccatgcccggctagt

SEQ ID NO: 2001381 - DNA, 15 bp, Homo sapiens
catgcccggctagtt

SEQ ID NO: 2001382 - DNA, 15 bp, Homo sapiens
atgcccggctagttt

SEQ ID NO: 2001383 - DNA, 15 bp, Homo sapiens
tgcccggctagtttc

SEQ ID NO: 2001384 - DNA, 15 bp, Homo sapiens
gcccggctagtttct

SEQ ID NO: 2001385 - DNA, 15 bp, Homo sapiens
cccggctagtttctt

SEQ ID NO: 2001386 - DNA, 15 bp, Homo sapiens
ccggctagtttcttt

SEQ ID NO: 2001387 - DNA, 15 bp, Homo sapiens
cggctagtttcttta

SEQ ID NO: 2001388 - DNA, 15 bp, Homo sapiens
ggctagtttctttaa

SEQ ID NO: 2001389 - DNA, 15 bp, Homo sapiens
gctagtttctttaat

SEQ ID NO: 2001390 - DNA, 15 bp, Homo sapiens
ctagtttctttaatt

SEQ ID NO: 2001391 - DNA, 15 bp, Homo sapiens
tagtttctttaattt

SEQ ID NO: 2001392 - DNA, 15 bp, Homo sapiens
agtttctttaatttt

SEQ ID NO: 2001393 - DNA, 15 bp, Homo sapiens
gtttctttaattttt

SEQ ID NO: 2001394 - DNA, 15 bp, Homo sapiens
tttctttaatttttt

SEQ ID NO: 2001395 - DNA, 15 bp, Homo sapiens
ttctttaattttttt

SEQ ID NO: 2001396 - DNA, 15 bp, Homo sapiens
tctttaatttttttg

SEQ ID NO: 2001397 - DNA, 15 bp, Homo sapiens
ctttaatttttttgt

SEQ ID NO: 2001398 - DNA, 15 bp, Homo sapiens
tttaatttttttgta

SEQ ID NO: 2001399 - DNA, 15 bp, Homo sapiens
ttaatttttttgtag

SEQ ID NO: 2001400 - DNA, 15 bp, Homo sapiens
taatttttttgtaga

SEQ ID NO: 2001401 - DNA, 15 bp, Homo sapiens
aatttttttgtagag

SEQ ID NO: 2001402 - DNA, 15 bp, Homo sapiens
atttttttgtagaga

SEQ ID NO: 2001403 - DNA, 15 bp, Homo sapiens
tagagacggggtctt

SEQ ID NO: 2001404 - DNA, 15 bp, Homo sapiens
agagacggggtcttg

SEQ ID NO: 2001405 - DNA, 15 bp, Homo sapiens
gagacggggtcttgc

SEQ ID NO: 2001406 - DNA, 15 bp, Homo sapiens
agacggggtcttgcc

SEQ ID NO: 2001407 - DNA, 15 bp, Homo sapiens
gacggggtcttgcca

SEQ ID NO: 2001408 - DNA, 15 bp, Homo sapiens
acggggtcttgccat

SEQ ID NO: 2001409 - DNA, 15 bp, Homo sapiens
cggggtcttgccatg

SEQ ID NO: 2001410 - DNA, 15 bp, Homo sapiens
ggggtcttgccatgt

SEQ ID NO: 2001411 - DNA, 15 bp, Homo sapiens
gggtcttgccatgtt

SEQ ID NO: 2001412 - DNA, 15 bp, Homo sapiens
gtcttgccatgttgc

SEQ ID NO: 2001413 - DNA, 15 bp, Homo sapiens
tcttgccatgttgcc

SEQ ID NO: 2001414 - DNA, 15 bp, Homo sapiens
cttgccatgttgccc

SEQ ID NO: 2001415 - DNA, 15 bp, Homo sapiens
atgttgcccaggctt

SEQ ID NO: 2001416 - DNA, 15 bp, Homo sapiens
gttgcccaggcttgt

SEQ ID NO: 2001417 - DNA, 15 bp, Homo sapiens
ttgcccaggcttgtc

SEQ ID NO: 2001418 - DNA, 15 bp, Homo sapiens
tgcccaggcttgtct

SEQ ID NO: 2001419 - DNA, 15 bp, Homo sapiens
gcccaggcttgtctt

SEQ ID NO: 2001420 - DNA, 15 bp, Homo sapiens
ccaggcttgtcttga

SEQ ID NO: 2001421 - DNA, 15 bp, Homo sapiens
caggcttgtcttgaa

SEQ ID NO: 2001422 - DNA, 15 bp, Homo sapiens
aggcttgtcttgaac

SEQ ID NO: 2001423 - DNA, 15 bp, Homo sapiens
ggcttgtcttgaacc

SEQ ID NO: 2001424 - DNA, 15 bp, Homo sapiens
gcttgtcttgaaccc

SEQ ID NO: 2001425 - DNA, 15 bp, Homo sapiens
cttgtcttgaacccc

SEQ ID NO: 2001426 - DNA, 15 bp, Homo sapiens
ttgtcttgaacccct

SEQ ID NO: 2001427 - DNA, 15 bp, Homo sapiens
tgtcttgaacccctg

SEQ ID NO: 2001428 - DNA, 15 bp, Homo sapiens
cccctgggctcaagg

SEQ ID NO: 2001429 - DNA, 15 bp, Homo sapiens
ccctgggctcaaggg

SEQ ID NO: 2001430 - DNA, 15 bp, Homo sapiens
cctgggctcaaggga

SEQ ID NO: 2001431 - DNA, 15 bp, Homo sapiens
ctgggctcaagggat

SEQ ID NO: 2001432 - DNA, 15 bp, Homo sapiens
gggctcaagggatcc

SEQ ID NO: 2001433 - DNA, 15 bp, Homo sapiens
ggctcaagggatcct

SEQ ID NO: 2001434 - DNA, 15 bp, Homo sapiens
gctcaagggatcctc

SEQ ID NO: 2001435 - DNA, 15 bp, Homo sapiens
ctcaagggatcctcc

SEQ ID NO: 2001436 - DNA, 15 bp, Homo sapiens
tcaagggatcctcct

SEQ ID NO: 2001437 - DNA, 15 bp, Homo sapiens
caagggatcctcctg

SEQ ID NO: 2001438 - DNA, 15 bp, Homo sapiens
aagggatcctcctgc

SEQ ID NO: 2001439 - DNA, 15 bp, Homo sapiens
agggatcctcctgcc

SEQ ID NO: 2001440 - DNA, 15 bp, Homo sapiens
gggatcctcctgcct

SEQ ID NO: 2001441 - DNA, 15 bp, Homo sapiens
ggatcctcctgcctt

SEQ ID NO: 2001442 - DNA, 15 bp, Homo sapiens
aagtgttgggattac

SEQ ID NO: 2001443 - DNA, 15 bp, Homo sapiens
gttgggattacagga

SEQ ID NO: 2001444 - DNA, 15 bp, Homo sapiens
ttgggattacaggat

SEQ ID NO: 2001445 - DNA, 15 bp, Homo sapiens
tgggattacaggatg

SEQ ID NO: 2001446 - DNA, 15 bp, Homo sapiens
gggattacaggatgt

SEQ ID NO: 2001447 - DNA, 15 bp, Homo sapiens
ggattacaggatgtg

SEQ ID NO: 2001448 - DNA, 15 bp, Homo sapiens
gattacaggatgtga

SEQ ID NO: 2001449 - DNA, 15 bp, Homo sapiens
attacaggatgtgag

SEQ ID NO: 2001450 - DNA, 15 bp, Homo sapiens
ttacaggatgtgagc

SEQ ID NO: 2001451 - DNA, 15 bp, Homo sapiens
tacaggatgtgagct

SEQ ID NO: 2001452 - DNA, 15 bp, Homo sapiens
acaggatgtgagcta

SEQ ID NO: 2001453 - DNA, 15 bp, Homo sapiens
caggatgtgagctac

SEQ ID NO: 2001454 - DNA, 15 bp, Homo sapiens
aggatgtgagctacc

SEQ ID NO: 2001455 - DNA, 15 bp, Homo sapiens
ggatgtgagctacca

SEQ ID NO: 2001456 - DNA, 15 bp, Homo sapiens
gatgtgagctaccat

SEQ ID NO: 2001457 - DNA, 15 bp, Homo sapiens
atgtgagctaccatg

SEQ ID NO: 2001458 - DNA, 15 bp, Homo sapiens
tgtgagctaccatgc

SEQ ID NO: 2001459 - DNA, 15 bp, Homo sapiens
gtgagctaccatgcc

SEQ ID NO: 2001460 - DNA, 15 bp, Homo sapiens
tgagctaccatgcct

SEQ ID NO: 2001461 - DNA, 15 bp, Homo sapiens
gagctaccatgcctg

SEQ ID NO: 2001462 - DNA, 15 bp, Homo sapiens
agctaccatgcctgg

SEQ ID NO: 2001463 - DNA, 15 bp, Homo sapiens
taccatgcctggctg

SEQ ID NO: 2001464 - DNA, 15 bp, Homo sapiens
accatgcctggctgg

SEQ ID NO: 2001465 - DNA, 15 bp, Homo sapiens
ccatgcctggctggc

SEQ ID NO: 2001466 - DNA, 15 bp, Homo sapiens
catgcctggctggct

SEQ ID NO: 2001467 - DNA, 15 bp, Homo sapiens
atgcctggctggcta

SEQ ID NO: 2001468 - DNA, 15 bp, Homo sapiens
tgcctggctggctat

SEQ ID NO: 2001469 - DNA, 15 bp, Homo sapiens
gcctggctggctata

SEQ ID NO: 2001470 - DNA, 15 bp, Homo sapiens
cctggctggctataa

SEQ ID NO: 2001471 - DNA, 15 bp, Homo sapiens
ctggctggctataaa

SEQ ID NO: 2001472 - DNA, 15 bp, Homo sapiens
tggctggctataaat

SEQ ID NO: 2001473 - DNA, 15 bp, Homo sapiens
ggctggctataaatc

SEQ ID NO: 2001474 - DNA, 15 bp, Homo sapiens
gctggctataaatct

SEQ ID NO: 2001475 - DNA, 15 bp, Homo sapiens
ctggctataaatctt

SEQ ID NO: 2001476 - DNA, 15 bp, Homo sapiens
tggctataaatctta

SEQ ID NO: 2001477 - DNA, 15 bp, Homo sapiens
ggctataaatcttaa

SEQ ID NO: 2001478 - DNA, 15 bp, Homo sapiens
gctataaatcttaag

SEQ ID NO: 2001479 - DNA, 15 bp, Homo sapiens
ctataaatcttaaga

SEQ ID NO: 2001480 - DNA, 15 bp, Homo sapiens
tataaatcttaagat

SEQ ID NO: 2001481 - DNA, 15 bp, Homo sapiens
ataaatcttaagata

SEQ ID NO: 2001482 - DNA, 15 bp, Homo sapiens
taaatcttaagatag

SEQ ID NO: 2001483 - DNA, 15 bp, Homo sapiens
aaatcttaagatagc

SEQ ID NO: 2001484 - DNA, 15 bp, Homo sapiens
aatcttaagatagct

SEQ ID NO: 2001485 - DNA, 15 bp, Homo sapiens
atcttaagatagctt

SEQ ID NO: 2001486 - DNA, 15 bp, Homo sapiens
tcttaagatagcttt

SEQ ID NO: 2001487 - DNA, 15 bp, Homo sapiens
cttaagatagcttta

SEQ ID NO: 2001488 - DNA, 15 bp, Homo sapiens
ttaagatagctttat

SEQ ID NO: 2001489 - DNA, 15 bp, Homo sapiens
taagatagctttatt

SEQ ID NO: 2001490 - DNA, 15 bp, Homo sapiens
aagatagctttattt

SEQ ID NO: 2001491 - DNA, 15 bp, Homo sapiens
agatagctttatttt

SEQ ID NO: 2001492 - DNA, 15 bp, Homo sapiens
gatagctttattttt

SEQ ID NO: 2001493 - DNA, 15 bp, Homo sapiens
atagctttatttttc

SEQ ID NO: 2001494 - DNA, 15 bp, Homo sapiens
tagctttatttttct

SEQ ID NO: 2001495 - DNA, 15 bp, Homo sapiens
agctttatttttctc

SEQ ID NO: 2001496 - DNA, 15 bp, Homo sapiens
gctttatttttctct

SEQ ID NO: 2001497 - DNA, 15 bp, Homo sapiens
ctttatttttctctg

SEQ ID NO: 2001498 - DNA, 15 bp, Homo sapiens
tttatttttctctgg

SEQ ID NO: 2001499 - DNA, 15 bp, Homo sapiens
ttatttttctctggg

SEQ ID NO: 2001500 - DNA, 15 bp, Homo sapiens
tatttttctctggga

SEQ ID NO: 2001501 - DNA, 15 bp, Homo sapiens
atttttctctgggag

SEQ ID NO: 2001502 - DNA, 15 bp, Homo sapiens
tttttctctgggagt

SEQ ID NO: 2001503 - DNA, 15 bp, Homo sapiens
ttttctctgggagta

SEQ ID NO: 2001504 - DNA, 15 bp, Homo sapiens
tttctctgggagtat

SEQ ID NO: 2001505 - DNA, 15 bp, Homo sapiens
ttctctgggagtata

SEQ ID NO: 2001506 - DNA, 15 bp, Homo sapiens
tctctgggagtatac

SEQ ID NO: 2001507 - DNA, 15 bp, Homo sapiens
ctctgggagtatacc

SEQ ID NO: 2001508 - DNA, 15 bp, Homo sapiens
tctgggagtatacca

SEQ ID NO: 2001509 - DNA, 15 bp, Homo sapiens
ctgggagtataccat

SEQ ID NO: 2001510 - DNA, 15 bp, Homo sapiens
tgggagtataccatt

SEQ ID NO: 2001511 - DNA, 15 bp, Homo sapiens
gggagtataccattt

SEQ ID NO: 2001512 - DNA, 15 bp, Homo sapiens
ggagtataccatttt

SEQ ID NO: 2001513 - DNA, 15 bp, Homo sapiens
gagtataccattttc

SEQ ID NO: 2001514 - DNA, 15 bp, Homo sapiens
agtataccattttct

SEQ ID NO: 2001515 - DNA, 15 bp, Homo sapiens
gtataccattttctg

SEQ ID NO: 2001516 - DNA, 15 bp, Homo sapiens
tataccattttctgt

SEQ ID NO: 2001517 - DNA, 15 bp, Homo sapiens
ataccattttctgtg

SEQ ID NO: 2001518 - DNA, 15 bp, Homo sapiens
taccattttctgtgg

SEQ ID NO: 2001519 - DNA, 15 bp, Homo sapiens
accattttctgtggc

SEQ ID NO: 2001520 - DNA, 15 bp, Homo sapiens
ccattttctgtggct

SEQ ID NO: 2001521 - DNA, 15 bp, Homo sapiens
cattttctgtggctt

SEQ ID NO: 2001522 - DNA, 15 bp, Homo sapiens
attttctgtggctta

SEQ ID NO: 2001523 - DNA, 15 bp, Homo sapiens
ttttctgtggcttat

SEQ ID NO: 2001524 - DNA, 15 bp, Homo sapiens
tttctgtggcttata

SEQ ID NO: 2001525 - DNA, 15 bp, Homo sapiens
ttctgtggcttatag

SEQ ID NO: 2001526 - DNA, 15 bp, Homo sapiens
tctgtggcttatagt

SEQ ID NO: 2001527 - DNA, 15 bp, Homo sapiens
ctgtggcttatagta

SEQ ID NO: 2001528 - DNA, 15 bp, Homo sapiens
tgtggcttatagtat

SEQ ID NO: 2001529 - DNA, 15 bp, Homo sapiens
gtggcttatagtatt

SEQ ID NO: 2001530 - DNA, 15 bp, Homo sapiens
tggcttatagtattt

SEQ ID NO: 2001531 - DNA, 15 bp, Homo sapiens
ggcttatagtattta

SEQ ID NO: 2001532 - DNA, 15 bp, Homo sapiens
gcttatagtatttat

SEQ ID NO: 2001533 - DNA, 15 bp, Homo sapiens
cttatagtatttatg

SEQ ID NO: 2001534 - DNA, 15 bp, Homo sapiens
ttatagtatttatgt

SEQ ID NO: 2001535 - DNA, 15 bp, Homo sapiens
tatagtatttatgta

SEQ ID NO: 2001536 - DNA, 15 bp, Homo sapiens
atagtatttatgtag

SEQ ID NO: 2001537 - DNA, 15 bp, Homo sapiens
tagtatttatgtagc

SEQ ID NO: 2001538 - DNA, 15 bp, Homo sapiens
agtatttatgtagcg

SEQ ID NO: 2001539 - DNA, 15 bp, Homo sapiens
gtatttatgtagcgg

SEQ ID NO: 2001540 - DNA, 15 bp, Homo sapiens
tatttatgtagcgga

SEQ ID NO: 2001541 - DNA, 15 bp, Homo sapiens
atttatgtagcggag

SEQ ID NO: 2001542 - DNA, 15 bp, Homo sapiens
tttatgtagcggagt

SEQ ID NO: 2001543 - DNA, 15 bp, Homo sapiens
ttatgtagcggagta

SEQ ID NO: 2001544 - DNA, 15 bp, Homo sapiens
tatgtagcggagtaa

SEQ ID NO: 2001545 - DNA, 15 bp, Homo sapiens
atgtagcggagtaac

SEQ ID NO: 2001546 - DNA, 15 bp, Homo sapiens
tgtagcggagtaact

SEQ ID NO: 2001547 - DNA, 15 bp, Homo sapiens
gtagcggagtaactg

SEQ ID NO: 2001548 - DNA, 15 bp, Homo sapiens
tagcggagtaactgc

SEQ ID NO: 2001549 - DNA, 15 bp, Homo sapiens
agcggagtaactgct

SEQ ID NO: 2001550 - DNA, 15 bp, Homo sapiens
gcggagtaactgctt

SEQ ID NO: 2001551 - DNA, 15 bp, Homo sapiens
cggagtaactgcttt

SEQ ID NO: 2001552 - DNA, 15 bp, Homo sapiens
ggagtaactgctttc

SEQ ID NO: 2001553 - DNA, 15 bp, Homo sapiens
gagtaactgctttct

SEQ ID NO: 2001554 - DNA, 15 bp, Homo sapiens
agtaactgctttctc

SEQ ID NO: 2001555 - DNA, 15 bp, Homo sapiens
gtaactgctttctcc

SEQ ID NO: 2001556 - DNA, 15 bp, Homo sapiens
taactgctttctcca

SEQ ID NO: 2001557 - DNA, 15 bp, Homo sapiens
aactgctttctccac

SEQ ID NO: 2001558 - DNA, 15 bp, Homo sapiens
actgctttctccaca

SEQ ID NO: 2001559 - DNA, 15 bp, Homo sapiens
ctgctttctccacag

SEQ ID NO: 2001560 - DNA, 15 bp, Homo sapiens
tgctttctccacaga

SEQ ID NO: 2001561 - DNA, 15 bp, Homo sapiens
gctttctccacagaa

SEQ ID NO: 2001562 - DNA, 15 bp, Homo sapiens
ctttctccacagaat

SEQ ID NO: 2001563 - DNA, 15 bp, Homo sapiens
tttctccacagaatt

SEQ ID NO: 2001564 - DNA, 15 bp, Homo sapiens
ttctccacagaatta

SEQ ID NO: 2001565 - DNA, 15 bp, Homo sapiens
tctccacagaattac

SEQ ID NO: 2001566 - DNA, 15 bp, Homo sapiens
ctccacagaattact

SEQ ID NO: 2001567 - DNA, 15 bp, Homo sapiens
tccacagaattactc

SEQ ID NO: 2001568 - DNA, 15 bp, Homo sapiens
ccacagaattactcc

SEQ ID NO: 2001569 - DNA, 15 bp, Homo sapiens
cacagaattactcca

SEQ ID NO: 2001570 - DNA, 15 bp, Homo sapiens
acagaattactccac

SEQ ID NO: 2001571 - DNA, 15 bp, Homo sapiens
cagaattactccaca

SEQ ID NO: 2001572 - DNA, 15 bp, Homo sapiens
agaattactccacaa

SEQ ID NO: 2001573 - DNA, 15 bp, Homo sapiens
gaattactccacaaa

SEQ ID NO: 2001574 - DNA, 15 bp, Homo sapiens
aattactccacaaat

SEQ ID NO: 2001575 - DNA, 15 bp, Homo sapiens
attactccacaaatg

SEQ ID NO: 2001576 - DNA, 15 bp, Homo sapiens
ttactccacaaatgc

SEQ ID NO: 2001577 - DNA, 15 bp, Homo sapiens
tactccacaaatgca

SEQ ID NO: 2001578 - DNA, 15 bp, Homo sapiens
actccacaaatgcag

SEQ ID NO: 2001579 - DNA, 15 bp, Homo sapiens
ctccacaaatgcagt

SEQ ID NO: 2001580 - DNA, 15 bp, Homo sapiens
tccacaaatgcagtt

SEQ ID NO: 2001581 - DNA, 15 bp, Homo sapiens
ccacaaatgcagttg

SEQ ID NO: 2001582 - DNA, 15 bp, Homo sapiens
cacaaatgcagttga

SEQ ID NO: 2001583 - DNA, 15 bp, Homo sapiens
acaaatgcagttgat

SEQ ID NO: 2001584 - DNA, 15 bp, Homo sapiens
caaatgcagttgatc

SEQ ID NO: 2001585 - DNA, 15 bp, Homo sapiens
aaatgcagttgatct

SEQ ID NO: 2001586 - DNA, 15 bp, Homo sapiens
aatgcagttgatcta

SEQ ID NO: 2001587 - DNA, 15 bp, Homo sapiens
atgcagttgatctag

SEQ ID NO: 2001588 - DNA, 15 bp, Homo sapiens
tgcagttgatctagt

SEQ ID NO: 2001589 - DNA, 15 bp, Homo sapiens
gcagttgatctagtt

SEQ ID NO: 2001590 - DNA, 15 bp, Homo sapiens
cagttgatctagttg

SEQ ID NO: 2001591 - DNA, 15 bp, Homo sapiens
agttgatctagttgt

SEQ ID NO: 2001592 - DNA, 15 bp, Homo sapiens
gttgatctagttgtt

SEQ ID NO: 2001593 - DNA, 15 bp, Homo sapiens
ttgatctagttgttt

SEQ ID NO: 2001594 - DNA, 15 bp, Homo sapiens
tgatctagttgtttt

SEQ ID NO: 2001595 - DNA, 15 bp, Homo sapiens
gatctagttgttttg

SEQ ID NO: 2001596 - DNA, 15 bp, Homo sapiens
atctagttgttttgt

SEQ ID NO: 2001597 - DNA, 15 bp, Homo sapiens
tctagttgttttgta

SEQ ID NO: 2001598 - DNA, 15 bp, Homo sapiens
ctagttgttttgtag

SEQ ID NO: 2001599 - DNA, 15 bp, Homo sapiens
tagttgttttgtagt

SEQ ID NO: 2001600 - DNA, 15 bp, Homo sapiens
agttgttttgtagtg

SEQ ID NO: 2001601 - DNA, 15 bp, Homo sapiens
gttgttttgtagtga

SEQ ID NO: 2001602 - DNA, 15 bp, Homo sapiens
ttgttttgtagtgag

SEQ ID NO: 2001603 - DNA, 15 bp, Homo sapiens
tgttttgtagtgaga

SEQ ID NO: 2001604 - DNA, 15 bp, Homo sapiens
gttttgtagtgagaa

SEQ ID NO: 2001605 - DNA, 15 bp, Homo sapiens
ttttgtagtgagaag

SEQ ID NO: 2001606 - DNA, 15 bp, Homo sapiens
tttgtagtgagaagg

SEQ ID NO: 2001607 - DNA, 15 bp, Homo sapiens
ttgtagtgagaaggt

SEQ ID NO: 2001608 - DNA, 15 bp, Homo sapiens
tgtagtgagaaggtg

SEQ ID NO: 2001609 - DNA, 15 bp, Homo sapiens
gtagtgagaaggtgc

SEQ ID NO: 2001610 - DNA, 15 bp, Homo sapiens
tagtgagaaggtgct

SEQ ID NO: 2001611 - DNA, 15 bp, Homo sapiens
agtgagaaggtgctt

SEQ ID NO: 2001612 - DNA, 15 bp, Homo sapiens
gtgagaaggtgcttc

SEQ ID NO: 2001613 - DNA, 15 bp, Homo sapiens
tgagaaggtgcttca

SEQ ID NO: 2001614 - DNA, 15 bp, Homo sapiens
gagaaggtgcttcag

SEQ ID NO: 2001615 - DNA, 15 bp, Homo sapiens
agaaggtgcttcaga

SEQ ID NO: 2001616 - DNA, 15 bp, Homo sapiens
gaaggtgcttcagaa

SEQ ID NO: 2001617 - DNA, 15 bp, Homo sapiens
aaggtgcttcagaat

SEQ ID NO: 2001618 - DNA, 15 bp, Homo sapiens
aggtgcttcagaata

SEQ ID NO: 2001619 - DNA, 15 bp, Homo sapiens
ggtgcttcagaatat

SEQ ID NO: 2001620 - DNA, 15 bp, Homo sapiens
gtgcttcagaatatc

SEQ ID NO: 2001621 - DNA, 15 bp, Homo sapiens
tgcttcagaatatct

SEQ ID NO: 2001622 - DNA, 15 bp, Homo sapiens
gcttcagaatatctc

SEQ ID NO: 2001623 - DNA, 15 bp, Homo sapiens
cttcagaatatctca

SEQ ID NO: 2001624 - DNA, 15 bp, Homo sapiens
ttcagaatatctcat

SEQ ID NO: 2001625 - DNA, 15 bp, Homo sapiens
tcagaatatctcatt

SEQ ID NO: 2001626 - DNA, 15 bp, Homo sapiens
cagaatatctcattt

SEQ ID NO: 2001627 - DNA, 15 bp, Homo sapiens
agaatatctcatttg

SEQ ID NO: 2001628 - DNA, 15 bp, Homo sapiens
gaatatctcatttga

SEQ ID NO: 2001629 - DNA, 15 bp, Homo sapiens
aatatctcatttgat

SEQ ID NO: 2001630 - DNA, 15 bp, Homo sapiens
atatctcatttgata

SEQ ID NO: 2001631 - DNA, 15 bp, Homo sapiens
tatctcatttgatat

SEQ ID NO: 2001632 - DNA, 15 bp, Homo sapiens
atctcatttgatata

SEQ ID NO: 2001633 - DNA, 15 bp, Homo sapiens
tctcatttgatatac

SEQ ID NO: 2001634 - DNA, 15 bp, Homo sapiens
ctcatttgatatacc

SEQ ID NO: 2001635 - DNA, 15 bp, Homo sapiens
tcatttgatatacca

SEQ ID NO: 2001636 - DNA, 15 bp, Homo sapiens
catttgatataccac

SEQ ID NO: 2001637 - DNA, 15 bp, Homo sapiens
atttgatataccacc

SEQ ID NO: 2001638 - DNA, 15 bp, Homo sapiens
tttgatataccacca

SEQ ID NO: 2001639 - DNA, 15 bp, Homo sapiens
ttgatataccaccag

SEQ ID NO: 2001640 - DNA, 15 bp, Homo sapiens
tgatataccaccaga

SEQ ID NO: 2001641 - DNA, 15 bp, Homo sapiens
gatataccaccagaa

SEQ ID NO: 2001642 - DNA, 15 bp, Homo sapiens
atataccaccagaag

SEQ ID NO: 2001643 - DNA, 15 bp, Homo sapiens
tataccaccagaagc

SEQ ID NO: 2001644 - DNA, 15 bp, Homo sapiens
ataccaccagaagca

SEQ ID NO: 2001645 - DNA, 15 bp, Homo sapiens
taccaccagaagcag

SEQ ID NO: 2001646 - DNA, 15 bp, Homo sapiens
accaccagaagcaga

SEQ ID NO: 2001647 - DNA, 15 bp, Homo sapiens
ccaccagaagcagaa

SEQ ID NO: 2001648 - DNA, 15 bp, Homo sapiens
caccagaagcagaaa

SEQ ID NO: 2001649 - DNA, 15 bp, Homo sapiens
accagaagcagaaaa

SEQ ID NO: 2001650 - DNA, 15 bp, Homo sapiens
ccagaagcagaaaac

SEQ ID NO: 2001651 - DNA, 15 bp, Homo sapiens
cagaagcagaaaact

SEQ ID NO: 2001652 - DNA, 15 bp, Homo sapiens
agaagcagaaaactc

SEQ ID NO: 2001653 - DNA, 15 bp, Homo sapiens
gaagcagaaaactca

SEQ ID NO: 2001654 - DNA, 15 bp, Homo sapiens
aagcagaaaactcaa

SEQ ID NO: 2001655 - DNA, 15 bp, Homo sapiens
agcagaaaactcaat

SEQ ID NO: 2001656 - DNA, 15 bp, Homo sapiens
gcagaaaactcaatg

SEQ ID NO: 2001657 - DNA, 15 bp, Homo sapiens
cagaaaactcaatga

SEQ ID NO: 2001658 - DNA, 15 bp, Homo sapiens
agaaaactcaatgac

SEQ ID NO: 2001659 - DNA, 15 bp, Homo sapiens
gaaaactcaatgact

SEQ ID NO: 2001660 - DNA, 15 bp, Homo sapiens
aaaactcaatgactt

SEQ ID NO: 2001661 - DNA, 15 bp, Homo sapiens
aaactcaatgacttt

SEQ ID NO: 2001662 - DNA, 15 bp, Homo sapiens
aactcaatgacttta

SEQ ID NO: 2001663 - DNA, 15 bp, Homo sapiens
actcaatgactttaa

SEQ ID NO: 2001664 - DNA, 15 bp, Homo sapiens
ctcaatgactttaaa

SEQ ID NO: 2001665 - DNA, 15 bp, Homo sapiens
tcaatgactttaaaa

SEQ ID NO: 2001666 - DNA, 15 bp, Homo sapiens
caatgactttaaaag

SEQ ID NO: 2001667 - DNA, 15 bp, Homo sapiens
aatgactttaaaagt

SEQ ID NO: 2001668 - DNA, 15 bp, Homo sapiens
atgactttaaaagtc

SEQ ID NO: 2001669 - DNA, 15 bp, Homo sapiens
tgactttaaaagtca

SEQ ID NO: 2001670 - DNA, 15 bp, Homo sapiens
gactttaaaagtcat

SEQ ID NO: 2001671 - DNA, 15 bp, Homo sapiens
actttaaaagtcatt

SEQ ID NO: 2001672 - DNA, 15 bp, Homo sapiens
ctttaaaagtcattt

SEQ ID NO: 2001673 - DNA, 15 bp, Homo sapiens
tttaaaagtcatttg

SEQ ID NO: 2001674 - DNA, 15 bp, Homo sapiens
ttaaaagtcatttgg

SEQ ID NO: 2001675 - DNA, 15 bp, Homo sapiens
taaaagtcatttggt

SEQ ID NO: 2001676 - DNA, 15 bp, Homo sapiens
aaaagtcatttggtt

SEQ ID NO: 2001677 - DNA, 15 bp, Homo sapiens
aaagtcatttggttc

SEQ ID NO: 2001678 - DNA, 15 bp, Homo sapiens
aagtcatttggttct

SEQ ID NO: 2001679 - DNA, 15 bp, Homo sapiens
agtcatttggttctt

SEQ ID NO: 2001680 - DNA, 15 bp, Homo sapiens
gtcatttggttcttt

SEQ ID NO: 2001681 - DNA, 15 bp, Homo sapiens
tcatttggttcttta

SEQ ID NO: 2001682 - DNA, 15 bp, Homo sapiens
catttggttctttac

SEQ ID NO: 2001683 - DNA, 15 bp, Homo sapiens
atttggttctttaca

SEQ ID NO: 2001684 - DNA, 15 bp, Homo sapiens
tttggttctttacag

SEQ ID NO: 2001685 - DNA, 15 bp, Homo sapiens
ttggttctttacagt

SEQ ID NO: 2001686 - DNA, 15 bp, Homo sapiens
tggttctttacagtt

SEQ ID NO: 2001687 - DNA, 15 bp, Homo sapiens
ggttctttacagttt

SEQ ID NO: 2001688 - DNA, 15 bp, Homo sapiens
gttctttacagttta

SEQ ID NO: 2001689 - DNA, 15 bp, Homo sapiens
ttctttacagtttac

SEQ ID NO: 2001690 - DNA, 15 bp, Homo sapiens
tctttacagtttact

SEQ ID NO: 2001691 - DNA, 15 bp, Homo sapiens
ctttacagtttacta

SEQ ID NO: 2001692 - DNA, 15 bp, Homo sapiens
tttacagtttactat

SEQ ID NO: 2001693 - DNA, 15 bp, Homo sapiens
ttacagtttactatt

SEQ ID NO: 2001694 - DNA, 15 bp, Homo sapiens
tacagtttactattt

SEQ ID NO: 2001695 - DNA, 15 bp, Homo sapiens
acagtttactatttg

SEQ ID NO: 2001696 - DNA, 15 bp, Homo sapiens
cagtttactatttgg

SEQ ID NO: 2001697 - DNA, 15 bp, Homo sapiens
agtttactatttggt

SEQ ID NO: 2001698 - DNA, 15 bp, Homo sapiens
gtttactatttggtt

SEQ ID NO: 2001699 - DNA, 15 bp, Homo sapiens
tttactatttggttc

SEQ ID NO: 2001700 - DNA, 15 bp, Homo sapiens
ttactatttggttcc

SEQ ID NO: 2001701 - DNA, 15 bp, Homo sapiens
tactatttggttcca

SEQ ID NO: 2001702 - DNA, 15 bp, Homo sapiens
actatttggttccat

SEQ ID NO: 2001703 - DNA, 15 bp, Homo sapiens
ctatttggttccata

SEQ ID NO: 2001704 - DNA, 15 bp, Homo sapiens
tatttggttccatac

SEQ ID NO: 2001705 - DNA, 15 bp, Homo sapiens
atttggttccataca

SEQ ID NO: 2001706 - DNA, 15 bp, Homo sapiens
tttggttccatacaa

SEQ ID NO: 2001707 - DNA, 15 bp, Homo sapiens
ttggttccatacaaa

SEQ ID NO: 2001708 - DNA, 15 bp, Homo sapiens
tggttccatacaaat

SEQ ID NO: 2001709 - DNA, 15 bp, Homo sapiens
ggttccatacaaatc

SEQ ID NO: 2001710 - DNA, 15 bp, Homo sapiens
gttccatacaaatct

SEQ ID NO: 2001711 - DNA, 15 bp, Homo sapiens
ttccatacaaatctg

SEQ ID NO: 2001712 - DNA, 15 bp, Homo sapiens
tccatacaaatctgt

SEQ ID NO: 2001713 - DNA, 15 bp, Homo sapiens
ccatacaaatctgtt

SEQ ID NO: 2001714 - DNA, 15 bp, Homo sapiens
catacaaatctgttc

SEQ ID NO: 2001715 - DNA, 15 bp, Homo sapiens
atacaaatctgttcg

SEQ ID NO: 2001716 - DNA, 15 bp, Homo sapiens
tacaaatctgttcgt

SEQ ID NO: 2001717 - DNA, 15 bp, Homo sapiens
acaaatctgttcgtt

SEQ ID NO: 2001718 - DNA, 15 bp, Homo sapiens
caaatctgttcgtta

SEQ ID NO: 2001719 - DNA, 15 bp, Homo sapiens
aaatctgttcgttat

SEQ ID NO: 2001720 - DNA, 15 bp, Homo sapiens
aatctgttcgttatg

SEQ ID NO: 2001721 - DNA, 15 bp, Homo sapiens
atctgttcgttatgg

SEQ ID NO: 2001722 - DNA, 15 bp, Homo sapiens
tctgttcgttatggt

SEQ ID NO: 2001723 - DNA, 15 bp, Homo sapiens
ctgttcgttatggtt

SEQ ID NO: 2001724 - DNA, 15 bp, Homo sapiens
tgttcgttatggttt

SEQ ID NO: 2001725 - DNA, 15 bp, Homo sapiens
gttcgttatggtttc

SEQ ID NO: 2001726 - DNA, 15 bp, Homo sapiens
ttcgttatggtttct

SEQ ID NO: 2001727 - DNA, 15 bp, Homo sapiens
tcgttatggtttctt

SEQ ID NO: 2001728 - DNA, 15 bp, Homo sapiens
cgttatggtttctta

SEQ ID NO: 2001729 - DNA, 15 bp, Homo sapiens
gttatggtttcttac

SEQ ID NO: 2001730 - DNA, 15 bp, Homo sapiens
ttatggtttcttact

SEQ ID NO: 2001731 - DNA, 15 bp, Homo sapiens
tatggtttcttactc

SEQ ID NO: 2001732 - DNA, 15 bp, Homo sapiens
atggtttcttactct

SEQ ID NO: 2001733 - DNA, 15 bp, Homo sapiens
tggtttcttactctt

SEQ ID NO: 2001734 - DNA, 15 bp, Homo sapiens
ggtttcttactcttt

SEQ ID NO: 2001735 - DNA, 15 bp, Homo sapiens
gtttcttactctttt

SEQ ID NO: 2001736 - DNA, 15 bp, Homo sapiens
tttcttactcttttt

SEQ ID NO: 2001737 - DNA, 15 bp, Homo sapiens
ttcttactctttttt

SEQ ID NO: 2001738 - DNA, 15 bp, Homo sapiens
tcttactcttttttt

SEQ ID NO: 2001739 - DNA, 15 bp, Homo sapiens
cttactcttttttta

SEQ ID NO: 2001740 - DNA, 15 bp, Homo sapiens
ttactctttttttaa

SEQ ID NO: 2001741 - DNA, 15 bp, Homo sapiens
tactctttttttaaa

SEQ ID NO: 2001742 - DNA, 15 bp, Homo sapiens
actctttttttaaaa

SEQ ID NO: 2001743 - DNA, 15 bp, Homo sapiens
ctctttttttaaaaa

SEQ ID NO: 2001744 - DNA, 15 bp, Homo sapiens
tctttttttaaaaat

SEQ ID NO: 2001745 - DNA, 15 bp, Homo sapiens
ctttttttaaaaata

SEQ ID NO: 2001746 - DNA, 15 bp, Homo sapiens
tttttttaaaaatag

SEQ ID NO: 2001747 - DNA, 15 bp, Homo sapiens
ttttttaaaaatagt

SEQ ID NO: 2001748 - DNA, 15 bp, Homo sapiens
tttttaaaaatagtt

SEQ ID NO: 2001749 - DNA, 15 bp, Homo sapiens
ttttaaaaatagttt

SEQ ID NO: 2001750 - DNA, 15 bp, Homo sapiens
tttaaaaatagtttt

SEQ ID NO: 2001751 - DNA, 15 bp, Homo sapiens
ttaaaaatagttttc

SEQ ID NO: 2001752 - DNA, 15 bp, Homo sapiens
taaaaatagttttca

SEQ ID NO: 2001753 - DNA, 15 bp, Homo sapiens
aaaaatagttttcag

SEQ ID NO: 2001754 - DNA, 15 bp, Homo sapiens
aaaatagttttcagt

SEQ ID NO: 2001755 - DNA, 15 bp, Homo sapiens
aaatagttttcagtt

SEQ ID NO: 2001756 - DNA, 15 bp, Homo sapiens
aatagttttcagttt

SEQ ID NO: 2001757 - DNA, 15 bp, Homo sapiens
atagttttcagtttt

SEQ ID NO: 2001758 - DNA, 15 bp, Homo sapiens
tagttttcagttttt

SEQ ID NO: 2001759 - DNA, 15 bp, Homo sapiens
agttttcagtttttt

SEQ ID NO: 2001760 - DNA, 15 bp, Homo sapiens
gttttcagttttttt

SEQ ID NO: 2001761 - DNA, 15 bp, Homo sapiens
ttttcagttttttta

SEQ ID NO: 2001762 - DNA, 15 bp, Homo sapiens
tttcagtttttttat

SEQ ID NO: 2001763 - DNA, 15 bp, Homo sapiens
ttcagtttttttata

SEQ ID NO: 2001764 - DNA, 15 bp, Homo sapiens
tcagtttttttatat

SEQ ID NO: 2001765 - DNA, 15 bp, Homo sapiens
cagtttttttatatg

SEQ ID NO: 2001766 - DNA, 15 bp, Homo sapiens
agtttttttatatgt

SEQ ID NO: 2001767 - DNA, 15 bp, Homo sapiens
gtttttttatatgtc

SEQ ID NO: 2001768 - DNA, 15 bp, Homo sapiens
tttttttatatgtct

SEQ ID NO: 2001769 - DNA, 15 bp, Homo sapiens
ttttttatatgtctc

SEQ ID NO: 2001770 - DNA, 15 bp, Homo sapiens
tttttatatgtctct

SEQ ID NO: 2001771 - DNA, 15 bp, Homo sapiens
ttttatatgtctctg

SEQ ID NO: 2001772 - DNA, 15 bp, Homo sapiens
tttatatgtctctga

SEQ ID NO: 2001773 - DNA, 15 bp, Homo sapiens
ttatatgtctctgat

SEQ ID NO: 2001774 - DNA, 15 bp, Homo sapiens
tatatgtctctgatc

SEQ ID NO: 2001775 - DNA, 15 bp, Homo sapiens
atatgtctctgatca

SEQ ID NO: 2001776 - DNA, 15 bp, Homo sapiens
tatgtctctgatcat

SEQ ID NO: 2001777 - DNA, 15 bp, Homo sapiens
atgtctctgatcatt

SEQ ID NO: 2001778 - DNA, 15 bp, Homo sapiens
tgtctctgatcattt

SEQ ID NO: 2001779 - DNA, 15 bp, Homo sapiens
gtctctgatcattta

SEQ ID NO: 2001780 - DNA, 15 bp, Homo sapiens
tctctgatcatttaa

SEQ ID NO: 2001781 - DNA, 15 bp, Homo sapiens
tctgatcatttaaaa

SEQ ID NO: 2001782 - DNA, 15 bp, Homo sapiens
ctgatcatttaaaac

SEQ ID NO: 2001783 - DNA, 15 bp, Homo sapiens
tgatcatttaaaacg

SEQ ID NO: 2001784 - DNA, 15 bp, Homo sapiens
gatcatttaaaacgt

SEQ ID NO: 2001785 - DNA, 15 bp, Homo sapiens
atcatttaaaacgta

SEQ ID NO: 2001786 - DNA, 15 bp, Homo sapiens
tcatttaaaacgtat

SEQ ID NO: 2001787 - DNA, 15 bp, Homo sapiens
catttaaaacgtatt

SEQ ID NO: 2001788 - DNA, 15 bp, Homo sapiens
atttaaaacgtattt

SEQ ID NO: 2001789 - DNA, 15 bp, Homo sapiens
tttaaaacgtatttt

SEQ ID NO: 2001790 - DNA, 15 bp, Homo sapiens
ttaaaacgtatttta

SEQ ID NO: 2001791 - DNA, 15 bp, Homo sapiens
taaaacgtattttac

SEQ ID NO: 2001792 - DNA, 15 bp, Homo sapiens
aaaacgtattttacg

SEQ ID NO: 2001793 - DNA, 15 bp, Homo sapiens
aaacgtattttacgt

SEQ ID NO: 2001794 - DNA, 15 bp, Homo sapiens
aacgtattttacgtt

SEQ ID NO: 2001795 - DNA, 15 bp, Homo sapiens
acgtattttacgttc

SEQ ID NO: 2001796 - DNA, 15 bp, Homo sapiens
cgtattttacgttct

SEQ ID NO: 2001797 - DNA, 15 bp, Homo sapiens
gtattttacgttctc

SEQ ID NO: 2001798 - DNA, 15 bp, Homo sapiens
tattttacgttctct

SEQ ID NO: 2001799 - DNA, 15 bp, Homo sapiens
attttacgttctctt

SEQ ID NO: 2001800 - DNA, 15 bp, Homo sapiens
ttttacgttctcttt

SEQ ID NO: 2001801 - DNA, 15 bp, Homo sapiens
tttacgttctcttta

SEQ ID NO: 2001802 - DNA, 15 bp, Homo sapiens
ttacgttctctttag

SEQ ID NO: 2001803 - DNA, 15 bp, Homo sapiens
tacgttctctttagt

SEQ ID NO: 2001804 - DNA, 15 bp, Homo sapiens
acgttctctttagta

SEQ ID NO: 2001805 - DNA, 15 bp, Homo sapiens
cgttctctttagtat

SEQ ID NO: 2001806 - DNA, 15 bp, Homo sapiens
gttctctttagtatt

SEQ ID NO: 2001807 - DNA, 15 bp, Homo sapiens
ttctctttagtattg

SEQ ID NO: 2001808 - DNA, 15 bp, Homo sapiens
tctctttagtattgt

SEQ ID NO: 2001809 - DNA, 15 bp, Homo sapiens
ctctttagtattgtt

SEQ ID NO: 2001810 - DNA, 15 bp, Homo sapiens
tctttagtattgttt

SEQ ID NO: 2001811 - DNA, 15 bp, Homo sapiens
ctttagtattgttta

SEQ ID NO: 2001812 - DNA, 15 bp, Homo sapiens
tttagtattgtttaa

SEQ ID NO: 2001813 - DNA, 15 bp, Homo sapiens
ttagtattgtttaat

SEQ ID NO: 2001814 - DNA, 15 bp, Homo sapiens
tagtattgtttaata

SEQ ID NO: 2001815 - DNA, 15 bp, Homo sapiens
agtattgtttaatat

SEQ ID NO: 2001816 - DNA, 15 bp, Homo sapiens
gtattgtttaatatt

SEQ ID NO: 2001817 - DNA, 15 bp, Homo sapiens
tattgtttaatattg

SEQ ID NO: 2001818 - DNA, 15 bp, Homo sapiens
attgtttaatattga

SEQ ID NO: 2001819 - DNA, 15 bp, Homo sapiens
ttgtttaatattgat

SEQ ID NO: 2001820 - DNA, 15 bp, Homo sapiens
tgtttaatattgatt

SEQ ID NO: 2001821 - DNA, 15 bp, Homo sapiens
gtttaatattgattt

SEQ ID NO: 2001822 - DNA, 15 bp, Homo sapiens
tttaatattgatttg

SEQ ID NO: 2001823 - DNA, 15 bp, Homo sapiens
ttaatattgatttgt

SEQ ID NO: 2001824 - DNA, 15 bp, Homo sapiens
taatattgatttgtt

SEQ ID NO: 2001825 - DNA, 15 bp, Homo sapiens
aatattgatttgttt

SEQ ID NO: 2001826 - DNA, 15 bp, Homo sapiens
atattgatttgtttg

SEQ ID NO: 2001827 - DNA, 15 bp, Homo sapiens
tattgatttgtttgt

SEQ ID NO: 2001828 - DNA, 15 bp, Homo sapiens
attgatttgtttgtg

SEQ ID NO: 2001829 - DNA, 15 bp, Homo sapiens
ttgatttgtttgtgc

SEQ ID NO: 2001830 - DNA, 15 bp, Homo sapiens
tgatttgtttgtgct

SEQ ID NO: 2001831 - DNA, 15 bp, Homo sapiens
gatttgtttgtgctg

SEQ ID NO: 2001832 - DNA, 15 bp, Homo sapiens
atttgtttgtgctga

SEQ ID NO: 2001833 - DNA, 15 bp, Homo sapiens
tttgtttgtgctgat

SEQ ID NO: 2001834 - DNA, 15 bp, Homo sapiens
ttgtttgtgctgatt

SEQ ID NO: 2001835 - DNA, 15 bp, Homo sapiens
tgtttgtgctgattc

SEQ ID NO: 2001836 - DNA, 15 bp, Homo sapiens
gtttgtgctgattca

SEQ ID NO: 2001837 - DNA, 15 bp, Homo sapiens
tttgtgctgattcat

SEQ ID NO: 2001838 - DNA, 15 bp, Homo sapiens
ttgtgctgattcatt

SEQ ID NO: 2001839 - DNA, 15 bp, Homo sapiens
tgtgctgattcattc

SEQ ID NO: 2001840 - DNA, 15 bp, Homo sapiens
gtgctgattcattca

SEQ ID NO: 2001841 - DNA, 15 bp, Homo sapiens
tgctgattcattcat

SEQ ID NO: 2001842 - DNA, 15 bp, Homo sapiens
gctgattcattcata

SEQ ID NO: 2001843 - DNA, 15 bp, Homo sapiens
ctgattcattcatag

SEQ ID NO: 2001844 - DNA, 15 bp, Homo sapiens
tgattcattcatagt

SEQ ID NO: 2001845 - DNA, 15 bp, Homo sapiens
gattcattcatagtg

SEQ ID NO: 2001846 - DNA, 15 bp, Homo sapiens
attcattcatagtga

SEQ ID NO: 2001847 - DNA, 15 bp, Homo sapiens
ttcattcatagtgaa

SEQ ID NO: 2001848 - DNA, 15 bp, Homo sapiens
tcattcatagtgaat

SEQ ID NO: 2001849 - DNA, 15 bp, Homo sapiens
cattcatagtgaatt

SEQ ID NO: 2001850 - DNA, 15 bp, Homo sapiens
attcatagtgaattg

SEQ ID NO: 2001851 - DNA, 15 bp, Homo sapiens
ttcatagtgaattgt

SEQ ID NO: 2001852 - DNA, 15 bp, Homo sapiens
tcatagtgaattgtt

SEQ ID NO: 2001853 - DNA, 15 bp, Homo sapiens
catagtgaattgttt

SEQ ID NO: 2001854 - DNA, 15 bp, Homo sapiens
atagtgaattgtttc

SEQ ID NO: 2001855 - DNA, 15 bp, Homo sapiens
tagtgaattgtttca

SEQ ID NO: 2001856 - DNA, 15 bp, Homo sapiens
agtgaattgtttcat

SEQ ID NO: 2001857 - DNA, 15 bp, Homo sapiens
gtgaattgtttcatc

SEQ ID NO: 2001858 - DNA, 15 bp, Homo sapiens
tgaattgtttcatct

SEQ ID NO: 2001859 - DNA, 15 bp, Homo sapiens
gaattgtttcatctc

SEQ ID NO: 2001860 - DNA, 15 bp, Homo sapiens
aattgtttcatctca

SEQ ID NO: 2001861 - DNA, 15 bp, Homo sapiens
attgtttcatctcag

SEQ ID NO: 2001862 - DNA, 15 bp, Homo sapiens
ttgtttcatctcagt

SEQ ID NO: 2001863 - DNA, 15 bp, Homo sapiens
tgtttcatctcagtt

SEQ ID NO: 2001864 - DNA, 15 bp, Homo sapiens
gtttcatctcagttt

SEQ ID NO: 2001865 - DNA, 15 bp, Homo sapiens
tttcatctcagtttt

SEQ ID NO: 2001866 - DNA, 15 bp, Homo sapiens
ttcatctcagttttg

SEQ ID NO: 2001867 - DNA, 15 bp, Homo sapiens
tcatctcagttttgg

SEQ ID NO: 2001868 - DNA, 15 bp, Homo sapiens
catctcagttttgga

SEQ ID NO: 2001869 - DNA, 15 bp, Homo sapiens
atctcagttttggaa

SEQ ID NO: 2001870 - DNA, 15 bp, Homo sapiens
tctcagttttggaat

SEQ ID NO: 2001871 - DNA, 15 bp, Homo sapiens
ctcagttttggaatc

SEQ ID NO: 2001872 - DNA, 15 bp, Homo sapiens
tcagttttggaatcc

SEQ ID NO: 2001873 - DNA, 15 bp, Homo sapiens
cagttttggaatcct

SEQ ID NO: 2001874 - DNA, 15 bp, Homo sapiens
agttttggaatcctt

SEQ ID NO: 2001875 - DNA, 15 bp, Homo sapiens
gttttggaatccttg

SEQ ID NO: 2001876 - DNA, 15 bp, Homo sapiens
ttttggaatccttga

SEQ ID NO: 2001877 - DNA, 15 bp, Homo sapiens
tttggaatccttgat

SEQ ID NO: 2001878 - DNA, 15 bp, Homo sapiens
ttggaatccttgatt

SEQ ID NO: 2001879 - DNA, 15 bp, Homo sapiens
tggaatccttgattg

SEQ ID NO: 2001880 - DNA, 15 bp, Homo sapiens
ggaatccttgattgc

SEQ ID NO: 2001881 - DNA, 15 bp, Homo sapiens
gaatccttgattgca

SEQ ID NO: 2001882 - DNA, 15 bp, Homo sapiens
aatccttgattgcaa

SEQ ID NO: 2001883 - DNA, 15 bp, Homo sapiens
atccttgattgcaaa

SEQ ID NO: 2001884 - DNA, 15 bp, Homo sapiens
tccttgattgcaaag

SEQ ID NO: 2001885 - DNA, 15 bp, Homo sapiens
ccttgattgcaaagt

SEQ ID NO: 2001886 - DNA, 15 bp, Homo sapiens
cttgattgcaaagtt

SEQ ID NO: 2001887 - DNA, 15 bp, Homo sapiens
ttgattgcaaagtta

SEQ ID NO: 2001888 - DNA, 15 bp, Homo sapiens
tgattgcaaagttat

SEQ ID NO: 2001889 - DNA, 15 bp, Homo sapiens
gattgcaaagttatc

SEQ ID NO: 2001890 - DNA, 15 bp, Homo sapiens
attgcaaagttatct

SEQ ID NO: 2001891 - DNA, 15 bp, Homo sapiens
ttgcaaagttatctt

SEQ ID NO: 2001892 - DNA, 15 bp, Homo sapiens
tgcaaagttatcttt

SEQ ID NO: 2001893 - DNA, 15 bp, Homo sapiens
gcaaagttatcttta

SEQ ID NO: 2001894 - DNA, 15 bp, Homo sapiens
caaagttatctttag

SEQ ID NO: 2001895 - DNA, 15 bp, Homo sapiens
aaagttatctttagt

SEQ ID NO: 2001896 - DNA, 15 bp, Homo sapiens
aagttatctttagtg

SEQ ID NO: 2001897 - DNA, 15 bp, Homo sapiens
agttatctttagtgt

SEQ ID NO: 2001898 - DNA, 15 bp, Homo sapiens
gttatctttagtgtg

SEQ ID NO: 2001899 - DNA, 15 bp, Homo sapiens
ttatctttagtgtgg

SEQ ID NO: 2001900 - DNA, 15 bp, Homo sapiens
tatctttagtgtggc

SEQ ID NO: 2001901 - DNA, 15 bp, Homo sapiens
atctttagtgtggcc

SEQ ID NO: 2001902 - DNA, 15 bp, Homo sapiens
tctttagtgtggcct

SEQ ID NO: 2001903 - DNA, 15 bp, Homo sapiens
ctttagtgtggcctg

SEQ ID NO: 2001904 - DNA, 15 bp, Homo sapiens
tttagtgtggcctgt

SEQ ID NO: 2001905 - DNA, 15 bp, Homo sapiens
ttagtgtggcctgta

SEQ ID NO: 2001906 - DNA, 15 bp, Homo sapiens
tagtgtggcctgtat

SEQ ID NO: 2001907 - DNA, 15 bp, Homo sapiens
agtgtggcctgtatt

SEQ ID NO: 2001908 - DNA, 15 bp, Homo sapiens
gtgtggcctgtattt

SEQ ID NO: 2001909 - DNA, 15 bp, Homo sapiens
tgtggcctgtatttt

SEQ ID NO: 2001910 - DNA, 15 bp, Homo sapiens
gtggcctgtattttc

SEQ ID NO: 2001911 - DNA, 15 bp, Homo sapiens
tggcctgtattttct

SEQ ID NO: 2001912 - DNA, 15 bp, Homo sapiens
ggcctgtattttctt

SEQ ID NO: 2001913 - DNA, 15 bp, Homo sapiens
gcctgtattttcttt

SEQ ID NO: 2001914 - DNA, 15 bp, Homo sapiens
cctgtattttctttg

SEQ ID NO: 2001915 - DNA, 15 bp, Homo sapiens
ctgtattttctttga

SEQ ID NO: 2001916 - DNA, 15 bp, Homo sapiens
tgtattttctttgag

SEQ ID NO: 2001917 - DNA, 15 bp, Homo sapiens
gtattttctttgaga

SEQ ID NO: 2001918 - DNA, 15 bp, Homo sapiens
tattttctttgagaa

SEQ ID NO: 2001919 - DNA, 15 bp, Homo sapiens
attttctttgagaat

SEQ ID NO: 2001920 - DNA, 15 bp, Homo sapiens
ttttctttgagaatc

SEQ ID NO: 2001921 - DNA, 15 bp, Homo sapiens
tttctttgagaatcc

SEQ ID NO: 2001922 - DNA, 15 bp, Homo sapiens
ttctttgagaatcct

SEQ ID NO: 2001923 - DNA, 15 bp, Homo sapiens
tctttgagaatcctt

SEQ ID NO: 2001924 - DNA, 15 bp, Homo sapiens
ctttgagaatccttg

SEQ ID NO: 2001925 - DNA, 15 bp, Homo sapiens
tttgagaatccttgt

SEQ ID NO: 2001926 - DNA, 15 bp, Homo sapiens
ttgagaatccttgta

SEQ ID NO: 2001927 - DNA, 15 bp, Homo sapiens
tgagaatccttgtag

SEQ ID NO: 2001928 - DNA, 15 bp, Homo sapiens
gagaatccttgtagc

SEQ ID NO: 2001929 - DNA, 15 bp, Homo sapiens
agaatccttgtagcc

SEQ ID NO: 2001930 - DNA, 15 bp, Homo sapiens
gaatccttgtagcct

SEQ ID NO: 2001931 - DNA, 15 bp, Homo sapiens
aatccttgtagcctt

SEQ ID NO: 2001932 - DNA, 15 bp, Homo sapiens
atccttgtagccttg

SEQ ID NO: 2001933 - DNA, 15 bp, Homo sapiens
tccttgtagccttgg

SEQ ID NO: 2001934 - DNA, 15 bp, Homo sapiens
ccttgtagccttggg

SEQ ID NO: 2001935 - DNA, 15 bp, Homo sapiens
cttgtagccttgggc

SEQ ID NO: 2001936 - DNA, 15 bp, Homo sapiens
ttgtagccttgggct

SEQ ID NO: 2001937 - DNA, 15 bp, Homo sapiens
tgtagccttgggctg

SEQ ID NO: 2001938 - DNA, 15 bp, Homo sapiens
gtagccttgggctga

SEQ ID NO: 2001939 - DNA, 15 bp, Homo sapiens
tagccttgggctgag

SEQ ID NO: 2001940 - DNA, 15 bp, Homo sapiens
agccttgggctgagg

SEQ ID NO: 2001941 - DNA, 15 bp, Homo sapiens
gccttgggctgaggg

SEQ ID NO: 2001942 - DNA, 15 bp, Homo sapiens
ccttgggctgaggga

SEQ ID NO: 2001943 - DNA, 15 bp, Homo sapiens
cttgggctgagggag

SEQ ID NO: 2001944 - DNA, 15 bp, Homo sapiens
ttgggctgagggagt

SEQ ID NO: 2001945 - DNA, 15 bp, Homo sapiens
tgggctgagggagtg

SEQ ID NO: 2001946 - DNA, 15 bp, Homo sapiens
gggctgagggagtgt

SEQ ID NO: 2001947 - DNA, 15 bp, Homo sapiens
ggctgagggagtgtt

SEQ ID NO: 2001948 - DNA, 15 bp, Homo sapiens
gctgagggagtgttc

SEQ ID NO: 2001949 - DNA, 15 bp, Homo sapiens
ctgagggagtgttct

SEQ ID NO: 2001950 - DNA, 15 bp, Homo sapiens
tgagggagtgttcta

SEQ ID NO: 2001951 - DNA, 15 bp, Homo sapiens
gagggagtgttctag

SEQ ID NO: 2001952 - DNA, 15 bp, Homo sapiens
agggagtgttctagt

SEQ ID NO: 2001953 - DNA, 15 bp, Homo sapiens
gggagtgttctagtg

SEQ ID NO: 2001954 - DNA, 15 bp, Homo sapiens
ggagtgttctagtga

SEQ ID NO: 2001955 - DNA, 15 bp, Homo sapiens
gagtgttctagtgat

SEQ ID NO: 2001956 - DNA, 15 bp, Homo sapiens
agtgttctagtgatg

SEQ ID NO: 2001957 - DNA, 15 bp, Homo sapiens
gtgttctagtgatgg

SEQ ID NO: 2001958 - DNA, 15 bp, Homo sapiens
tgttctagtgatggt

SEQ ID NO: 2001959 - DNA, 15 bp, Homo sapiens
gttctagtgatggtt

SEQ ID NO: 2001960 - DNA, 15 bp, Homo sapiens
ttctagtgatggttt

SEQ ID NO: 2001961 - DNA, 15 bp, Homo sapiens
tctagtgatggtttt

SEQ ID NO: 2001962 - DNA, 15 bp, Homo sapiens
ctagtgatggttttg

SEQ ID NO: 2001963 - DNA, 15 bp, Homo sapiens
tagtgatggttttgc

SEQ ID NO: 2001964 - DNA, 15 bp, Homo sapiens
agtgatggttttgca

SEQ ID NO: 2001965 - DNA, 15 bp, Homo sapiens
gtgatggttttgcat

SEQ ID NO: 2001966 - DNA, 15 bp, Homo sapiens
tgatggttttgcatt

SEQ ID NO: 2001967 - DNA, 15 bp, Homo sapiens
gatggttttgcattt

SEQ ID NO: 2001968 - DNA, 15 bp, Homo sapiens
atggttttgcatttg

SEQ ID NO: 2001969 - DNA, 15 bp, Homo sapiens
tggttttgcatttgc

SEQ ID NO: 2001970 - DNA, 15 bp, Homo sapiens
ggttttgcatttgca

SEQ ID NO: 2001971 - DNA, 15 bp, Homo sapiens
gttttgcatttgcat

SEQ ID NO: 2001972 - DNA, 15 bp, Homo sapiens
ttttgcatttgcatt

SEQ ID NO: 2001973 - DNA, 15 bp, Homo sapiens
tttgcatttgcattt

SEQ ID NO: 2001974 - DNA, 15 bp, Homo sapiens
ttgcatttgcatttg

SEQ ID NO: 2001975 - DNA, 15 bp, Homo sapiens
tgcatttgcatttgc

SEQ ID NO: 2001976 - DNA, 15 bp, Homo sapiens
gcatttgcatttgcc

SEQ ID NO: 2001977 - DNA, 15 bp, Homo sapiens
catttgcatttgcca

SEQ ID NO: 2001978 - DNA, 15 bp, Homo sapiens
atttgcatttgccag

SEQ ID NO: 2001979 - DNA, 15 bp, Homo sapiens
tttgcatttgccagg

SEQ ID NO: 2001980 - DNA, 15 bp, Homo sapiens
ttgcatttgccaggt

SEQ ID NO: 2001981 - DNA, 15 bp, Homo sapiens
tgcatttgccaggtg

SEQ ID NO: 2001982 - DNA, 15 bp, Homo sapiens
gcatttgccaggtgc

SEQ ID NO: 2001983 - DNA, 15 bp, Homo sapiens
catttgccaggtgcc

SEQ ID NO: 2001984 - DNA, 15 bp, Homo sapiens
atttgccaggtgccc

SEQ ID NO: 2001985 - DNA, 15 bp, Homo sapiens
tttgccaggtgccca

SEQ ID NO: 2001986 - DNA, 15 bp, Homo sapiens
ttgccaggtgcccag

SEQ ID NO: 2001987 - DNA, 15 bp, Homo sapiens
tgccaggtgcccagt

SEQ ID NO: 2001988 - DNA, 15 bp, Homo sapiens
gccaggtgcccagtt

SEQ ID NO: 2001989 - DNA, 15 bp, Homo sapiens
ccaggtgcccagttc

SEQ ID NO: 2001990 - DNA, 15 bp, Homo sapiens
caggtgcccagttct

SEQ ID NO: 2001991 - DNA, 15 bp, Homo sapiens
aggtgcccagttctg

SEQ ID NO: 2001992 - DNA, 15 bp, Homo sapiens
ggtgcccagttctgg

SEQ ID NO: 2001993 - DNA, 15 bp, Homo sapiens
gtgcccagttctgga

SEQ ID NO: 2001994 - DNA, 15 bp, Homo sapiens
tgcccagttctggag

SEQ ID NO: 2001995 - DNA, 15 bp, Homo sapiens
gcccagttctggagc

SEQ ID NO: 2001996 - DNA, 15 bp, Homo sapiens
cccagttctggagct

SEQ ID NO: 2001997 - DNA, 15 bp, Homo sapiens
ccagttctggagcta

SEQ ID NO: 2001998 - DNA, 15 bp, Homo sapiens
cagttctggagctat

SEQ ID NO: 2001999 - DNA, 15 bp, Homo sapiens
agttctggagctatt

SEQ ID NO: 2002000 - DNA, 15 bp, Homo sapiens
gttctggagctattt

SEQ ID NO: 2002001 - DNA, 15 bp, Homo sapiens
ttctggagctatttt

SEQ ID NO: 2002002 - DNA, 15 bp, Homo sapiens
tctggagctattttt

SEQ ID NO: 2002003 - DNA, 15 bp, Homo sapiens
ctggagctatttttt

SEQ ID NO: 2002004 - DNA, 15 bp, Homo sapiens
tggagctattttttt

SEQ ID NO: 2002005 - DNA, 15 bp, Homo sapiens
ggagctatttttttc

SEQ ID NO: 2002006 - DNA, 15 bp, Homo sapiens
gagctatttttttct

SEQ ID NO: 2002007 - DNA, 15 bp, Homo sapiens
agctatttttttctt

SEQ ID NO: 2002008 - DNA, 15 bp, Homo sapiens
gctatttttttctta

SEQ ID NO: 2002009 - DNA, 15 bp, Homo sapiens
ctatttttttcttaa

SEQ ID NO: 2002010 - DNA, 15 bp, Homo sapiens
tatttttttcttaat

SEQ ID NO: 2002011 - DNA, 15 bp, Homo sapiens
atttttttcttaatt

SEQ ID NO: 2002012 - DNA, 15 bp, Homo sapiens
tttttttcttaattt

SEQ ID NO: 2002013 - DNA, 15 bp, Homo sapiens
ttttttcttaatttc

SEQ ID NO: 2002014 - DNA, 15 bp, Homo sapiens
tttttcttaatttct

SEQ ID NO: 2002015 - DNA, 15 bp, Homo sapiens
tttcttaatttctca

SEQ ID NO: 2002016 - DNA, 15 bp, Homo sapiens
ttcttaatttctcag

SEQ ID NO: 2002017 - DNA, 15 bp, Homo sapiens
tcttaatttctcagt

SEQ ID NO: 2002018 - DNA, 15 bp, Homo sapiens
cttaatttctcagtc

SEQ ID NO: 2002019 - DNA, 15 bp, Homo sapiens
ttaatttctcagtcc

SEQ ID NO: 2002020 - DNA, 15 bp, Homo sapiens
taatttctcagtccc

SEQ ID NO: 2002021 - DNA, 15 bp, Homo sapiens
aatttctcagtccca

SEQ ID NO: 2002022 - DNA, 15 bp, Homo sapiens
atttctcagtcccag

SEQ ID NO: 2002023 - DNA, 15 bp, Homo sapiens
tttctcagtcccagc

SEQ ID NO: 2002024 - DNA, 15 bp, Homo sapiens
ttctcagtcccagcc

SEQ ID NO: 2002025 - DNA, 15 bp, Homo sapiens
tctcagtcccagcct

SEQ ID NO: 2002026 - DNA, 15 bp, Homo sapiens
ctcagtcccagcctg

SEQ ID NO: 2002027 - DNA, 15 bp, Homo sapiens
tcagtcccagcctgt

SEQ ID NO: 2002028 - DNA, 15 bp, Homo sapiens
cagtcccagcctgta

SEQ ID NO: 2002029 - DNA, 15 bp, Homo sapiens
agtcccagcctgtat

SEQ ID NO: 2002030 - DNA, 15 bp, Homo sapiens
gtcccagcctgtatg

SEQ ID NO: 2002031 - DNA, 15 bp, Homo sapiens
tcccagcctgtatgg

SEQ ID NO: 2002032 - DNA, 15 bp, Homo sapiens
cccagcctgtatggg

SEQ ID NO: 2002033 - DNA, 15 bp, Homo sapiens
ccagcctgtatgggc

SEQ ID NO: 2002034 - DNA, 15 bp, Homo sapiens
cagcctgtatgggca

SEQ ID NO: 2002035 - DNA, 15 bp, Homo sapiens
agcctgtatgggcag

SEQ ID NO: 2002036 - DNA, 15 bp, Homo sapiens
gcctgtatgggcagt

SEQ ID NO: 2002037 - DNA, 15 bp, Homo sapiens
cctgtatgggcagta

SEQ ID NO: 2002038 - DNA, 15 bp, Homo sapiens
ctgtatgggcagtat

SEQ ID NO: 2002039 - DNA, 15 bp, Homo sapiens
tgtatgggcagtata

SEQ ID NO: 2002040 - DNA, 15 bp, Homo sapiens
gtatgggcagtataa

SEQ ID NO: 2002041 - DNA, 15 bp, Homo sapiens
tatgggcagtataaa

SEQ ID NO: 2002042 - DNA, 15 bp, Homo sapiens
atgggcagtataaat

SEQ ID NO: 2002043 - DNA, 15 bp, Homo sapiens
tgggcagtataaatt

SEQ ID NO: 2002044 - DNA, 15 bp, Homo sapiens
gggcagtataaattt

SEQ ID NO: 2002045 - DNA, 15 bp, Homo sapiens
ggcagtataaatttg

SEQ ID NO: 2002046 - DNA, 15 bp, Homo sapiens
gcagtataaatttga

SEQ ID NO: 2002047 - DNA, 15 bp, Homo sapiens
cagtataaatttgaa

SEQ ID NO: 2002048 - DNA, 15 bp, Homo sapiens
agtataaatttgaac

SEQ ID NO: 2002049 - DNA, 15 bp, Homo sapiens
gtataaatttgaacc

SEQ ID NO: 2002050 - DNA, 15 bp, Homo sapiens
tataaatttgaaccc

SEQ ID NO: 2002051 - DNA, 15 bp, Homo sapiens
ataaatttgaaccct

SEQ ID NO: 2002052 - DNA, 15 bp, Homo sapiens
taaatttgaacccta

SEQ ID NO: 2002053 - DNA, 15 bp, Homo sapiens
aaatttgaaccctaa

SEQ ID NO: 2002054 - DNA, 15 bp, Homo sapiens
aatttgaaccctaaa

SEQ ID NO: 2002055 - DNA, 15 bp, Homo sapiens
atttgaaccctaaac

SEQ ID NO: 2002056 - DNA, 15 bp, Homo sapiens
tttgaaccctaaact

SEQ ID NO: 2002057 - DNA, 15 bp, Homo sapiens
ttgaaccctaaactc

SEQ ID NO: 2002058 - DNA, 15 bp, Homo sapiens
tgaaccctaaactct

SEQ ID NO: 2002059 - DNA, 15 bp, Homo sapiens
gaaccctaaactctt

SEQ ID NO: 2002060 - DNA, 15 bp, Homo sapiens
aaccctaaactctta

SEQ ID NO: 2002061 - DNA, 15 bp, Homo sapiens
accctaaactcttag

SEQ ID NO: 2002062 - DNA, 15 bp, Homo sapiens
ccctaaactcttaga

SEQ ID NO: 2002063 - DNA, 15 bp, Homo sapiens
cctaaactcttagaa

SEQ ID NO: 2002064 - DNA, 15 bp, Homo sapiens
ctaaactcttagaag

SEQ ID NO: 2002065 - DNA, 15 bp, Homo sapiens
taaactcttagaagg

SEQ ID NO: 2002066 - DNA, 15 bp, Homo sapiens
aaactcttagaaggt

SEQ ID NO: 2002067 - DNA, 15 bp, Homo sapiens
aactcttagaaggta

SEQ ID NO: 2002068 - DNA, 15 bp, Homo sapiens
actcttagaaggtaa

SEQ ID NO: 2002069 - DNA, 15 bp, Homo sapiens
ctcttagaaggtaaa

SEQ ID NO: 2002070 - DNA, 15 bp, Homo sapiens
tcttagaaggtaaac

SEQ ID NO: 2002071 - DNA, 15 bp, Homo sapiens
cttagaaggtaaaca

SEQ ID NO: 2002072 - DNA, 15 bp, Homo sapiens
ttagaaggtaaacag

SEQ ID NO: 2002073 - DNA, 15 bp, Homo sapiens
tagaaggtaaacagc

SEQ ID NO: 2002074 - DNA, 15 bp, Homo sapiens
agaaggtaaacagct

SEQ ID NO: 2002075 - DNA, 15 bp, Homo sapiens
gaaggtaaacagctc

SEQ ID NO: 2002076 - DNA, 15 bp, Homo sapiens
aaggtaaacagctct

SEQ ID NO: 2002077 - DNA, 15 bp, Homo sapiens
aggtaaacagctcta

SEQ ID NO: 2002078 - DNA, 15 bp, Homo sapiens
ggtaaacagctctag

SEQ ID NO: 2002079 - DNA, 15 bp, Homo sapiens
gtaaacagctctagg

SEQ ID NO: 2002080 - DNA, 15 bp, Homo sapiens
taaacagctctaggt

SEQ ID NO: 2002081 - DNA, 15 bp, Homo sapiens
aaacagctctaggtg

SEQ ID NO: 2002082 - DNA, 15 bp, Homo sapiens
aacagctctaggtga

SEQ ID NO: 2002083 - DNA, 15 bp, Homo sapiens
acagctctaggtgac

SEQ ID NO: 2002084 - DNA, 15 bp, Homo sapiens
cagctctaggtgact

SEQ ID NO: 2002085 - DNA, 15 bp, Homo sapiens
agctctaggtgactt

SEQ ID NO: 2002086 - DNA, 15 bp, Homo sapiens
gctctaggtgacttt

SEQ ID NO: 2002087 - DNA, 15 bp, Homo sapiens
ctctaggtgactttt

SEQ ID NO: 2002088 - DNA, 15 bp, Homo sapiens
tctaggtgacttttt

SEQ ID NO: 2002089 - DNA, 15 bp, Homo sapiens
ctaggtgactttttt

SEQ ID NO: 2002090 - DNA, 15 bp, Homo sapiens
taggtgacttttttc

SEQ ID NO: 2002091 - DNA, 15 bp, Homo sapiens
aggtgacttttttca

SEQ ID NO: 2002092 - DNA, 15 bp, Homo sapiens
ggtgacttttttcac

SEQ ID NO: 2002093 - DNA, 15 bp, Homo sapiens
gtgacttttttcact

SEQ ID NO: 2002094 - DNA, 15 bp, Homo sapiens
tgacttttttcactt

SEQ ID NO: 2002095 - DNA, 15 bp, Homo sapiens
gacttttttcacttt

SEQ ID NO: 2002096 - DNA, 15 bp, Homo sapiens
acttttttcacttta

SEQ ID NO: 2002097 - DNA, 15 bp, Homo sapiens
cttttttcactttat

SEQ ID NO: 2002098 - DNA, 15 bp, Homo sapiens
ttttttcactttatc

SEQ ID NO: 2002099 - DNA, 15 bp, Homo sapiens
tttttcactttatcc

SEQ ID NO: 2002100 - DNA, 15 bp, Homo sapiens
ttttcactttatcca

SEQ ID NO: 2002101 - DNA, 15 bp, Homo sapiens
tttcactttatccaa

SEQ ID NO: 2002102 - DNA, 15 bp, Homo sapiens
ttcactttatccaaa

SEQ ID NO: 2002103 - DNA, 15 bp, Homo sapiens
tcactttatccaaag

SEQ ID NO: 2002104 - DNA, 15 bp, Homo sapiens
cactttatccaaagt

SEQ ID NO: 2002105 - DNA, 15 bp, Homo sapiens
actttatccaaagtt

SEQ ID NO: 2002106 - DNA, 15 bp, Homo sapiens
ctttatccaaagttt

SEQ ID NO: 2002107 - DNA, 15 bp, Homo sapiens
tttatccaaagttta

SEQ ID NO: 2002108 - DNA, 15 bp, Homo sapiens
ttatccaaagtttag

SEQ ID NO: 2002109 - DNA, 15 bp, Homo sapiens
tatccaaagtttagg

SEQ ID NO: 2002110 - DNA, 15 bp, Homo sapiens
atccaaagtttaggc

SEQ ID NO: 2002111 - DNA, 15 bp, Homo sapiens
tccaaagtttaggca

SEQ ID NO: 2002112 - DNA, 15 bp, Homo sapiens
ccaaagtttaggcag

SEQ ID NO: 2002113 - DNA, 15 bp, Homo sapiens
caaagtttaggcaga

SEQ ID NO: 2002114 - DNA, 15 bp, Homo sapiens
aaagtttaggcagag

SEQ ID NO: 2002115 - DNA, 15 bp, Homo sapiens
aagtttaggcagagc

SEQ ID NO: 2002116 - DNA, 15 bp, Homo sapiens
agtttaggcagagca

SEQ ID NO: 2002117 - DNA, 15 bp, Homo sapiens
gtttaggcagagcag

SEQ ID NO: 2002118 - DNA, 15 bp, Homo sapiens
tttaggcagagcagt

SEQ ID NO: 2002119 - DNA, 15 bp, Homo sapiens
ttaggcagagcagtt

SEQ ID NO: 2002120 - DNA, 15 bp, Homo sapiens
taggcagagcagtta

SEQ ID NO: 2002121 - DNA, 15 bp, Homo sapiens
aggcagagcagttaa

SEQ ID NO: 2002122 - DNA, 15 bp, Homo sapiens
ggcagagcagttaag

SEQ ID NO: 2002123 - DNA, 15 bp, Homo sapiens
gcagagcagttaagc

SEQ ID NO: 2002124 - DNA, 15 bp, Homo sapiens
cagagcagttaagct

SEQ ID NO: 2002125 - DNA, 15 bp, Homo sapiens
agagcagttaagctt

SEQ ID NO: 2002126 - DNA, 15 bp, Homo sapiens
gagcagttaagcttc

SEQ ID NO: 2002127 - DNA, 15 bp, Homo sapiens
agcagttaagcttct

SEQ ID NO: 2002128 - DNA, 15 bp, Homo sapiens
gcagttaagcttctt

SEQ ID NO: 2002129 - DNA, 15 bp, Homo sapiens
cagttaagcttcttt

SEQ ID NO: 2002130 - DNA, 15 bp, Homo sapiens
agttaagcttctttg

SEQ ID NO: 2002131 - DNA, 15 bp, Homo sapiens
gttaagcttctttgt

SEQ ID NO: 2002132 - DNA, 15 bp, Homo sapiens
ttaagcttctttgtg

SEQ ID NO: 2002133 - DNA, 15 bp, Homo sapiens
taagcttctttgtgc

SEQ ID NO: 2002134 - DNA, 15 bp, Homo sapiens
aagcttctttgtgct

SEQ ID NO: 2002135 - DNA, 15 bp, Homo sapiens
agcttctttgtgctg

SEQ ID NO: 2002136 - DNA, 15 bp, Homo sapiens
gcttctttgtgctgg

SEQ ID NO: 2002137 - DNA, 15 bp, Homo sapiens
cttctttgtgctggt

SEQ ID NO: 2002138 - DNA, 15 bp, Homo sapiens
ttctttgtgctggta

SEQ ID NO: 2002139 - DNA, 15 bp, Homo sapiens
tctttgtgctggtag

SEQ ID NO: 2002140 - DNA, 15 bp, Homo sapiens
ctttgtgctggtagg

SEQ ID NO: 2002141 - DNA, 15 bp, Homo sapiens
tttgtgctggtaggt

SEQ ID NO: 2002142 - DNA, 15 bp, Homo sapiens
ttgtgctggtaggtt

SEQ ID NO: 2002143 - DNA, 15 bp, Homo sapiens
tgtgctggtaggttt

SEQ ID NO: 2002144 - DNA, 15 bp, Homo sapiens
gtgctggtaggtttt

SEQ ID NO: 2002145 - DNA, 15 bp, Homo sapiens
tgctggtaggttttt

SEQ ID NO: 2002146 - DNA, 15 bp, Homo sapiens
gctggtaggtttttt

SEQ ID NO: 2002147 - DNA, 15 bp, Homo sapiens
ctggtaggttttttt

SEQ ID NO: 2002148 - DNA, 15 bp, Homo sapiens
tggtaggtttttttc

SEQ ID NO: 2002149 - DNA, 15 bp, Homo sapiens
ggtaggtttttttct

SEQ ID NO: 2002150 - DNA, 15 bp, Homo sapiens
gtaggtttttttctt

SEQ ID NO: 2002151 - DNA, 15 bp, Homo sapiens
taggtttttttcttt

SEQ ID NO: 2002152 - DNA, 15 bp, Homo sapiens
aggtttttttctttt

SEQ ID NO: 2002153 - DNA, 15 bp, Homo sapiens
ggtttttttcttttt

SEQ ID NO: 2002154 - DNA, 15 bp, Homo sapiens
ctttttttctttttg

SEQ ID NO: 2002155 - DNA, 15 bp, Homo sapiens
tttttttctttttgt

SEQ ID NO: 2002156 - DNA, 15 bp, Homo sapiens
ttttttctttttgtg

SEQ ID NO: 2002157 - DNA, 15 bp, Homo sapiens
tttttctttttgtgg

SEQ ID NO: 2002158 - DNA, 15 bp, Homo sapiens
ttttctttttgtggg

SEQ ID NO: 2002159 - DNA, 15 bp, Homo sapiens
tttctttttgtgggg

SEQ ID NO: 2002160 - DNA, 15 bp, Homo sapiens
ttctttttgtgggga

SEQ ID NO: 2002161 - DNA, 15 bp, Homo sapiens
tctttttgtggggag

SEQ ID NO: 2002162 - DNA, 15 bp, Homo sapiens
ctttttgtggggagt

SEQ ID NO: 2002163 - DNA, 15 bp, Homo sapiens
tttttgtggggagtg

SEQ ID NO: 2002164 - DNA, 15 bp, Homo sapiens
ttttgtggggagtgg

SEQ ID NO: 2002165 - DNA, 15 bp, Homo sapiens
tttgtggggagtggg

SEQ ID NO: 2002166 - DNA, 15 bp, Homo sapiens
ttgtggggagtgggg

SEQ ID NO: 2002167 - DNA, 15 bp, Homo sapiens
tgtggggagtggggg

SEQ ID NO: 2002168 - DNA, 15 bp, Homo sapiens
gtggggagtgggggc

SEQ ID NO: 2002169 - DNA, 15 bp, Homo sapiens
tggggagtgggggcg

SEQ ID NO: 2002170 - DNA, 15 bp, Homo sapiens
ggggagtgggggcgg

SEQ ID NO: 2002171 - DNA, 15 bp, Homo sapiens
gggagtgggggcggc

SEQ ID NO: 2002172 - DNA, 15 bp, Homo sapiens
ggagtgggggcggca

SEQ ID NO: 2002173 - DNA, 15 bp, Homo sapiens
gagtgggggcggcag

SEQ ID NO: 2002174 - DNA, 15 bp, Homo sapiens
agtgggggcggcagg

SEQ ID NO: 2002175 - DNA, 15 bp, Homo sapiens
gtgggggcggcaggg

SEQ ID NO: 2002176 - DNA, 15 bp, Homo sapiens
tgggggcggcagggg

SEQ ID NO: 2002177 - DNA, 15 bp, Homo sapiens
gggggcggcaggggg

SEQ ID NO: 2002178 - DNA, 15 bp, Homo sapiens
ggggcggcaggggga

SEQ ID NO: 2002179 - DNA, 15 bp, Homo sapiens
gggcggcagggggag

SEQ ID NO: 2002180 - DNA, 15 bp, Homo sapiens
ggcggcagggggagt

SEQ ID NO: 2002181 - DNA, 15 bp, Homo sapiens
gcggcagggggagtg

SEQ ID NO: 2002182 - DNA, 15 bp, Homo sapiens
cggcagggggagtgc

SEQ ID NO: 2002183 - DNA, 15 bp, Homo sapiens
ggcagggggagtgca

SEQ ID NO: 2002184 - DNA, 15 bp, Homo sapiens
gcagggggagtgcat

SEQ ID NO: 2002185 - DNA, 15 bp, Homo sapiens
cagggggagtgcatt

SEQ ID NO: 2002186 - DNA, 15 bp, Homo sapiens
agggggagtgcattg

SEQ ID NO: 2002187 - DNA, 15 bp, Homo sapiens
gggggagtgcattgt

SEQ ID NO: 2002188 - DNA, 15 bp, Homo sapiens
ggggagtgcattgtt

SEQ ID NO: 2002189 - DNA, 15 bp, Homo sapiens
gggagtgcattgttc

SEQ ID NO: 2002190 - DNA, 15 bp, Homo sapiens
ggagtgcattgttct

SEQ ID NO: 2002191 - DNA, 15 bp, Homo sapiens
gagtgcattgttctt

SEQ ID NO: 2002192 - DNA, 15 bp, Homo sapiens
agtgcattgttcttt

SEQ ID NO: 2002193 - DNA, 15 bp, Homo sapiens
gtgcattgttctttc

SEQ ID NO: 2002194 - DNA, 15 bp, Homo sapiens
tgcattgttctttct

SEQ ID NO: 2002195 - DNA, 15 bp, Homo sapiens
gcattgttctttcta

SEQ ID NO: 2002196 - DNA, 15 bp, Homo sapiens
cattgttctttctag

SEQ ID NO: 2002197 - DNA, 15 bp, Homo sapiens
attgttctttctagt

SEQ ID NO: 2002198 - DNA, 15 bp, Homo sapiens
ttgttctttctagtt

SEQ ID NO: 2002199 - DNA, 15 bp, Homo sapiens
tgttctttctagttc

SEQ ID NO: 2002200 - DNA, 15 bp, Homo sapiens
gttctttctagttca

SEQ ID NO: 2002201 - DNA, 15 bp, Homo sapiens
ttctttctagttcat

SEQ ID NO: 2002202 - DNA, 15 bp, Homo sapiens
tctttctagttcatg

SEQ ID NO: 2002203 - DNA, 15 bp, Homo sapiens
ctttctagttcatgt

SEQ ID NO: 2002204 - DNA, 15 bp, Homo sapiens
tttctagttcatgtt

SEQ ID NO: 2002205 - DNA, 15 bp, Homo sapiens
ttctagttcatgttt

SEQ ID NO: 2002206 - DNA, 15 bp, Homo sapiens
tctagttcatgtttt

SEQ ID NO: 2002207 - DNA, 15 bp, Homo sapiens
ctagttcatgtttta

SEQ ID NO: 2002208 - DNA, 15 bp, Homo sapiens
tagttcatgttttat

SEQ ID NO: 2002209 - DNA, 15 bp, Homo sapiens
agttcatgttttatg

SEQ ID NO: 2002210 - DNA, 15 bp, Homo sapiens
gttcatgttttatgc

SEQ ID NO: 2002211 - DNA, 15 bp, Homo sapiens
ttcatgttttatgca

SEQ ID NO: 2002212 - DNA, 15 bp, Homo sapiens
tcatgttttatgcag

SEQ ID NO: 2002213 - DNA, 15 bp, Homo sapiens
catgttttatgcagg

SEQ ID NO: 2002214 - DNA, 15 bp, Homo sapiens
atgttttatgcaggg

SEQ ID NO: 2002215 - DNA, 15 bp, Homo sapiens
tgttttatgcagggc

SEQ ID NO: 2002216 - DNA, 15 bp, Homo sapiens
gttttatgcagggcc

SEQ ID NO: 2002217 - DNA, 15 bp, Homo sapiens
ttttatgcagggccc

SEQ ID NO: 2002218 - DNA, 15 bp, Homo sapiens
tttatgcagggccca

SEQ ID NO: 2002219 - DNA, 15 bp, Homo sapiens
ttatgcagggcccaa

SEQ ID NO: 2002220 - DNA, 15 bp, Homo sapiens
tatgcagggcccaag

SEQ ID NO: 2002221 - DNA, 15 bp, Homo sapiens
atgcagggcccaagt

SEQ ID NO: 2002222 - DNA, 15 bp, Homo sapiens
tgcagggcccaagtt

SEQ ID NO: 2002223 - DNA, 15 bp, Homo sapiens
gcagggcccaagtta

SEQ ID NO: 2002224 - DNA, 15 bp, Homo sapiens
cagggcccaagttag

SEQ ID NO: 2002225 - DNA, 15 bp, Homo sapiens
agggcccaagttaga

SEQ ID NO: 2002226 - DNA, 15 bp, Homo sapiens
gggcccaagttagaa

SEQ ID NO: 2002227 - DNA, 15 bp, Homo sapiens
ggcccaagttagaat

SEQ ID NO: 2002228 - DNA, 15 bp, Homo sapiens
gcccaagttagaatc

SEQ ID NO: 2002229 - DNA, 15 bp, Homo sapiens
cccaagttagaatcc

SEQ ID NO: 2002230 - DNA, 15 bp, Homo sapiens
ccaagttagaatcct

SEQ ID NO: 2002231 - DNA, 15 bp, Homo sapiens
caagttagaatcctg

SEQ ID NO: 2002232 - DNA, 15 bp, Homo sapiens
aagttagaatcctga

SEQ ID NO: 2002233 - DNA, 15 bp, Homo sapiens
agttagaatcctgaa

SEQ ID NO: 2002234 - DNA, 15 bp, Homo sapiens
gttagaatcctgaat

SEQ ID NO: 2002235 - DNA, 15 bp, Homo sapiens
ttagaatcctgaatt

SEQ ID NO: 2002236 - DNA, 15 bp, Homo sapiens
tagaatcctgaatta

SEQ ID NO: 2002237 - DNA, 15 bp, Homo sapiens
agaatcctgaattat

SEQ ID NO: 2002238 - DNA, 15 bp, Homo sapiens
gaatcctgaattatt

SEQ ID NO: 2002239 - DNA, 15 bp, Homo sapiens
aatcctgaattatta

SEQ ID NO: 2002240 - DNA, 15 bp, Homo sapiens
atcctgaattattag

SEQ ID NO: 2002241 - DNA, 15 bp, Homo sapiens
tcctgaattattagg

SEQ ID NO: 2002242 - DNA, 15 bp, Homo sapiens
cctgaattattaggg

SEQ ID NO: 2002243 - DNA, 15 bp, Homo sapiens
ctgaattattagggt

SEQ ID NO: 2002244 - DNA, 15 bp, Homo sapiens
tgaattattagggta

SEQ ID NO: 2002245 - DNA, 15 bp, Homo sapiens
gaattattagggtac

SEQ ID NO: 2002246 - DNA, 15 bp, Homo sapiens
aattattagggtaca

SEQ ID NO: 2002247 - DNA, 15 bp, Homo sapiens
attattagggtacaa

SEQ ID NO: 2002248 - DNA, 15 bp, Homo sapiens
ttattagggtacaag

SEQ ID NO: 2002249 - DNA, 15 bp, Homo sapiens
tattagggtacaagg

SEQ ID NO: 2002250 - DNA, 15 bp, Homo sapiens
attagggtacaaggc

SEQ ID NO: 2002251 - DNA, 15 bp, Homo sapiens
ttagggtacaaggcg

SEQ ID NO: 2002252 - DNA, 15 bp, Homo sapiens
tagggtacaaggcgt

SEQ ID NO: 2002253 - DNA, 15 bp, Homo sapiens
agggtacaaggcgtt

SEQ ID NO: 2002254 - DNA, 15 bp, Homo sapiens
gggtacaaggcgttt

SEQ ID NO: 2002255 - DNA, 15 bp, Homo sapiens
ggtacaaggcgttta

SEQ ID NO: 2002256 - DNA, 15 bp, Homo sapiens
gtacaaggcgtttat

SEQ ID NO: 2002257 - DNA, 15 bp, Homo sapiens
tacaaggcgtttata

SEQ ID NO: 2002258 - DNA, 15 bp, Homo sapiens
acaaggcgtttatat

SEQ ID NO: 2002259 - DNA, 15 bp, Homo sapiens
caaggcgtttatatc

SEQ ID NO: 2002260 - DNA, 15 bp, Homo sapiens
aaggcgtttatatcc

SEQ ID NO: 2002261 - DNA, 15 bp, Homo sapiens
aggcgtttatatcca

SEQ ID NO: 2002262 - DNA, 15 bp, Homo sapiens
ggcgtttatatccag

SEQ ID NO: 2002263 - DNA, 15 bp, Homo sapiens
gcgtttatatccagt

SEQ ID NO: 2002264 - DNA, 15 bp, Homo sapiens
cgtttatatccagtc

SEQ ID NO: 2002265 - DNA, 15 bp, Homo sapiens
gtttatatccagtct

SEQ ID NO: 2002266 - DNA, 15 bp, Homo sapiens
tttatatccagtctc

SEQ ID NO: 2002267 - DNA, 15 bp, Homo sapiens
ttatatccagtctcc

SEQ ID NO: 2002268 - DNA, 15 bp, Homo sapiens
tatatccagtctcca

SEQ ID NO: 2002269 - DNA, 15 bp, Homo sapiens
atatccagtctccat

SEQ ID NO: 2002270 - DNA, 15 bp, Homo sapiens
tatccagtctccatg

SEQ ID NO: 2002271 - DNA, 15 bp, Homo sapiens
atccagtctccatgt

SEQ ID NO: 2002272 - DNA, 15 bp, Homo sapiens
tccagtctccatgtg

SEQ ID NO: 2002273 - DNA, 15 bp, Homo sapiens
ccagtctccatgtgg

SEQ ID NO: 2002274 - DNA, 15 bp, Homo sapiens
cagtctccatgtgga

SEQ ID NO: 2002275 - DNA, 15 bp, Homo sapiens
agtctccatgtggat

SEQ ID NO: 2002276 - DNA, 15 bp, Homo sapiens
gtctccatgtggatg

SEQ ID NO: 2002277 - DNA, 15 bp, Homo sapiens
tctccatgtggatgt

SEQ ID NO: 2002278 - DNA, 15 bp, Homo sapiens
ctccatgtggatgtt

SEQ ID NO: 2002279 - DNA, 15 bp, Homo sapiens
tccatgtggatgtta

SEQ ID NO: 2002280 - DNA, 15 bp, Homo sapiens
ccatgtggatgttaa

SEQ ID NO: 2002281 - DNA, 15 bp, Homo sapiens
catgtggatgttaag

SEQ ID NO: 2002282 - DNA, 15 bp, Homo sapiens
atgtggatgttaagc

SEQ ID NO: 2002283 - DNA, 15 bp, Homo sapiens
tgtggatgttaagcc

SEQ ID NO: 2002284 - DNA, 15 bp, Homo sapiens
gtggatgttaagccc

SEQ ID NO: 2002285 - DNA, 15 bp, Homo sapiens
tggatgttaagcccc

SEQ ID NO: 2002286 - DNA, 15 bp, Homo sapiens
ggatgttaagcccca

SEQ ID NO: 2002287 - DNA, 15 bp, Homo sapiens
gatgttaagccccaa

SEQ ID NO: 2002288 - DNA, 15 bp, Homo sapiens
atgttaagccccaag

SEQ ID NO: 2002289 - DNA, 15 bp, Homo sapiens
tgttaagccccaagc

SEQ ID NO: 2002290 - DNA, 15 bp, Homo sapiens
gttaagccccaagct

SEQ ID NO: 2002291 - DNA, 15 bp, Homo sapiens
ttaagccccaagctc

SEQ ID NO: 2002292 - DNA, 15 bp, Homo sapiens
taagccccaagctcc

SEQ ID NO: 2002293 - DNA, 15 bp, Homo sapiens
aagccccaagctcct

SEQ ID NO: 2002294 - DNA, 15 bp, Homo sapiens
agccccaagctccta

SEQ ID NO: 2002295 - DNA, 15 bp, Homo sapiens
gccccaagctcctag

SEQ ID NO: 2002296 - DNA, 15 bp, Homo sapiens
ccccaagctcctagg

SEQ ID NO: 2002297 - DNA, 15 bp, Homo sapiens
cccaagctcctaggt

SEQ ID NO: 2002298 - DNA, 15 bp, Homo sapiens
ccaagctcctaggtt

SEQ ID NO: 2002299 - DNA, 15 bp, Homo sapiens
caagctcctaggtta

SEQ ID NO: 2002300 - DNA, 15 bp, Homo sapiens
aagctcctaggttaa

SEQ ID NO: 2002301 - DNA, 15 bp, Homo sapiens
agctcctaggttaag

SEQ ID NO: 2002302 - DNA, 15 bp, Homo sapiens
gctcctaggttaagg

SEQ ID NO: 2002303 - DNA, 15 bp, Homo sapiens
ctcctaggttaagga

SEQ ID NO: 2002304 - DNA, 15 bp, Homo sapiens
tcctaggttaaggag

SEQ ID NO: 2002305 - DNA, 15 bp, Homo sapiens
cctaggttaaggaga

SEQ ID NO: 2002306 - DNA, 15 bp, Homo sapiens
ctaggttaaggagat

SEQ ID NO: 2002307 - DNA, 15 bp, Homo sapiens
taggttaaggagatc

SEQ ID NO: 2002308 - DNA, 15 bp, Homo sapiens
aggttaaggagatca

SEQ ID NO: 2002309 - DNA, 15 bp, Homo sapiens
ggttaaggagatcaa

SEQ ID NO: 2002310 - DNA, 15 bp, Homo sapiens
gttaaggagatcaaa

SEQ ID NO: 2002311 - DNA, 15 bp, Homo sapiens
ttaaggagatcaaaa

SEQ ID NO: 2002312 - DNA, 15 bp, Homo sapiens
taaggagatcaaaaa

SEQ ID NO: 2002313 - DNA, 15 bp, Homo sapiens
aaggagatcaaaaac

SEQ ID NO: 2002314 - DNA, 15 bp, Homo sapiens
aggagatcaaaaacc

SEQ ID NO: 2002315 - DNA, 15 bp, Homo sapiens
ggagatcaaaaacct

SEQ ID NO: 2002316 - DNA, 15 bp, Homo sapiens
gagatcaaaaacctc

SEQ ID NO: 2002317 - DNA, 15 bp, Homo sapiens
agatcaaaaacctca

SEQ ID NO: 2002318 - DNA, 15 bp, Homo sapiens
gatcaaaaacctcac

SEQ ID NO: 2002319 - DNA, 15 bp, Homo sapiens
atcaaaaacctcact

SEQ ID NO: 2002320 - DNA, 15 bp, Homo sapiens
tcaaaaacctcactc

SEQ ID NO: 2002321 - DNA, 15 bp, Homo sapiens
caaaaacctcactca

SEQ ID NO: 2002322 - DNA, 15 bp, Homo sapiens
aaaaacctcactcat

SEQ ID NO: 2002323 - DNA, 15 bp, Homo sapiens
aaaacctcactcatc

SEQ ID NO: 2002324 - DNA, 15 bp, Homo sapiens
aaacctcactcatct

SEQ ID NO: 2002325 - DNA, 15 bp, Homo sapiens
aacctcactcatctt

SEQ ID NO: 2002326 - DNA, 15 bp, Homo sapiens
acctcactcatcttt

SEQ ID NO: 2002327 - DNA, 15 bp, Homo sapiens
cctcactcatctttc

SEQ ID NO: 2002328 - DNA, 15 bp, Homo sapiens
ctcactcatctttcc

SEQ ID NO: 2002329 - DNA, 15 bp, Homo sapiens
tcactcatctttcct

SEQ ID NO: 2002330 - DNA, 15 bp, Homo sapiens
cactcatctttcctt

SEQ ID NO: 2002331 - DNA, 15 bp, Homo sapiens
actcatctttccttt

SEQ ID NO: 2002332 - DNA, 15 bp, Homo sapiens
ctcatctttcctttg

SEQ ID NO: 2002333 - DNA, 15 bp, Homo sapiens
tcatctttcctttgt

SEQ ID NO: 2002334 - DNA, 15 bp, Homo sapiens
catctttcctttgtt

SEQ ID NO: 2002335 - DNA, 15 bp, Homo sapiens
atctttcctttgttg

SEQ ID NO: 2002336 - DNA, 15 bp, Homo sapiens
tctttcctttgttgc

SEQ ID NO: 2002337 - DNA, 15 bp, Homo sapiens
ctttcctttgttgca

SEQ ID NO: 2002338 - DNA, 15 bp, Homo sapiens
tttcctttgttgcag

SEQ ID NO: 2002339 - DNA, 15 bp, Homo sapiens
ttcctttgttgcagg

SEQ ID NO: 2002340 - DNA, 15 bp, Homo sapiens
tcctttgttgcaggg

SEQ ID NO: 2002341 - DNA, 15 bp, Homo sapiens
cctttgttgcagggc

SEQ ID NO: 2002342 - DNA, 15 bp, Homo sapiens
ctttgttgcagggct

SEQ ID NO: 2002343 - DNA, 15 bp, Homo sapiens
tttgttgcagggctg

SEQ ID NO: 2002344 - DNA, 15 bp, Homo sapiens
ttgttgcagggctgg

SEQ ID NO: 2002345 - DNA, 15 bp, Homo sapiens
tgttgcagggctggg

SEQ ID NO: 2002346 - DNA, 15 bp, Homo sapiens
gttgcagggctgggt

SEQ ID NO: 2002347 - DNA, 15 bp, Homo sapiens
ttgcagggctgggtc

SEQ ID NO: 2002348 - DNA, 15 bp, Homo sapiens
tgcagggctgggtca

SEQ ID NO: 2002349 - DNA, 15 bp, Homo sapiens
gcagggctgggtcat

SEQ ID NO: 2002350 - DNA, 15 bp, Homo sapiens
cagggctgggtcatg

SEQ ID NO: 2002351 - DNA, 15 bp, Homo sapiens
agggctgggtcatgt

SEQ ID NO: 2002352 - DNA, 15 bp, Homo sapiens
gggctgggtcatgta

SEQ ID NO: 2002353 - DNA, 15 bp, Homo sapiens
ggctgggtcatgtac

SEQ ID NO: 2002354 - DNA, 15 bp, Homo sapiens
gctgggtcatgtact

SEQ ID NO: 2002355 - DNA, 15 bp, Homo sapiens
ctgggtcatgtactt

SEQ ID NO: 2002356 - DNA, 15 bp, Homo sapiens
tgggtcatgtacttg

SEQ ID NO: 2002357 - DNA, 15 bp, Homo sapiens
gggtcatgtacttgt

SEQ ID NO: 2002358 - DNA, 15 bp, Homo sapiens
ggtcatgtacttgtg

SEQ ID NO: 2002359 - DNA, 15 bp, Homo sapiens
gtcatgtacttgtgc

SEQ ID NO: 2002360 - DNA, 15 bp, Homo sapiens
tcatgtacttgtgca

SEQ ID NO: 2002361 - DNA, 15 bp, Homo sapiens
catgtacttgtgcac

SEQ ID NO: 2002362 - DNA, 15 bp, Homo sapiens
atgtacttgtgcact

SEQ ID NO: 2002363 - DNA, 15 bp, Homo sapiens
tgtacttgtgcactt

SEQ ID NO: 2002364 - DNA, 15 bp, Homo sapiens
gtacttgtgcactta

SEQ ID NO: 2002365 - DNA, 15 bp, Homo sapiens
tacttgtgcacttaa

SEQ ID NO: 2002366 - DNA, 15 bp, Homo sapiens
acttgtgcacttaac

SEQ ID NO: 2002367 - DNA, 15 bp, Homo sapiens
cttgtgcacttaact

SEQ ID NO: 2002368 - DNA, 15 bp, Homo sapiens
ttgtgcacttaactc

SEQ ID NO: 2002369 - DNA, 15 bp, Homo sapiens
tgtgcacttaactct

SEQ ID NO: 2002370 - DNA, 15 bp, Homo sapiens
gtgcacttaactctc

SEQ ID NO: 2002371 - DNA, 15 bp, Homo sapiens
tgcacttaactctct

SEQ ID NO: 2002372 - DNA, 15 bp, Homo sapiens
gcacttaactctctg

SEQ ID NO: 2002373 - DNA, 15 bp, Homo sapiens
cacttaactctctgg

SEQ ID NO: 2002374 - DNA, 15 bp, Homo sapiens
acttaactctctggt

SEQ ID NO: 2002375 - DNA, 15 bp, Homo sapiens
cttaactctctggtt

SEQ ID NO: 2002376 - DNA, 15 bp, Homo sapiens
ttaactctctggttt

SEQ ID NO: 2002377 - DNA, 15 bp, Homo sapiens
taactctctggtttt

SEQ ID NO: 2002378 - DNA, 15 bp, Homo sapiens
aactctctggttttc

SEQ ID NO: 2002379 - DNA, 15 bp, Homo sapiens
actctctggttttca

SEQ ID NO: 2002380 - DNA, 15 bp, Homo sapiens
ctctctggttttcag

SEQ ID NO: 2002381 - DNA, 15 bp, Homo sapiens
tctctggttttcagt

SEQ ID NO: 2002382 - DNA, 15 bp, Homo sapiens
ctctggttttcagtt

SEQ ID NO: 2002383 - DNA, 15 bp, Homo sapiens
tctggttttcagttt

SEQ ID NO: 2002384 - DNA, 15 bp, Homo sapiens
ctggttttcagtttt

SEQ ID NO: 2002385 - DNA, 15 bp, Homo sapiens
tggttttcagttttc

SEQ ID NO: 2002386 - DNA, 15 bp, Homo sapiens
ggttttcagttttct

SEQ ID NO: 2002387 - DNA, 15 bp, Homo sapiens
gttttcagttttctt

SEQ ID NO: 2002388 - DNA, 15 bp, Homo sapiens
ttttcagttttcttc

SEQ ID NO: 2002389 - DNA, 15 bp, Homo sapiens
tttcagttttcttct

SEQ ID NO: 2002390 - DNA, 15 bp, Homo sapiens
ttcagttttcttctt

SEQ ID NO: 2002391 - DNA, 15 bp, Homo sapiens
tcagttttcttcttc

SEQ ID NO: 2002392 - DNA, 15 bp, Homo sapiens
cagttttcttcttct

SEQ ID NO: 2002393 - DNA, 15 bp, Homo sapiens
agttttcttcttctt

SEQ ID NO: 2002394 - DNA, 15 bp, Homo sapiens
gttttcttcttcttt

SEQ ID NO: 2002395 - DNA, 15 bp, Homo sapiens
tttcttcttcttttc

SEQ ID NO: 2002396 - DNA, 15 bp, Homo sapiens
ttcttcttcttttct

SEQ ID NO: 2002397 - DNA, 15 bp, Homo sapiens
tcttcttcttttctg

SEQ ID NO: 2002398 - DNA, 15 bp, Homo sapiens
cttcttcttttctgg

SEQ ID NO: 2002399 - DNA, 15 bp, Homo sapiens
ttcttcttttctgga

SEQ ID NO: 2002400 - DNA, 15 bp, Homo sapiens
tcttcttttctggac

SEQ ID NO: 2002401 - DNA, 15 bp, Homo sapiens
cttcttttctggacc

SEQ ID NO: 2002402 - DNA, 15 bp, Homo sapiens
ttcttttctggacct

SEQ ID NO: 2002403 - DNA, 15 bp, Homo sapiens
tcttttctggaccta

SEQ ID NO: 2002404 - DNA, 15 bp, Homo sapiens
cttttctggacctat

SEQ ID NO: 2002405 - DNA, 15 bp, Homo sapiens
ttttctggacctata

SEQ ID NO: 2002406 - DNA, 15 bp, Homo sapiens
tttctggacctatac

SEQ ID NO: 2002407 - DNA, 15 bp, Homo sapiens
ttctggacctataca

SEQ ID NO: 2002408 - DNA, 15 bp, Homo sapiens
tctggacctatacat

SEQ ID NO: 2002409 - DNA, 15 bp, Homo sapiens
ctggacctatacatt

SEQ ID NO: 2002410 - DNA, 15 bp, Homo sapiens
tggacctatacattt

SEQ ID NO: 2002411 - DNA, 15 bp, Homo sapiens
ggacctatacattta

SEQ ID NO: 2002412 - DNA, 15 bp, Homo sapiens
gacctatacatttaa

SEQ ID NO: 2002413 - DNA, 15 bp, Homo sapiens
acctatacatttaaa

SEQ ID NO: 2002414 - DNA, 15 bp, Homo sapiens
cctatacatttaaaa

SEQ ID NO: 2002415 - DNA, 15 bp, Homo sapiens
ctatacatttaaaat

SEQ ID NO: 2002416 - DNA, 15 bp, Homo sapiens
tatacatttaaaata

SEQ ID NO: 2002417 - DNA, 15 bp, Homo sapiens
atacatttaaaatat

SEQ ID NO: 2002418 - DNA, 15 bp, Homo sapiens
tacatttaaaatatc

SEQ ID NO: 2002419 - DNA, 15 bp, Homo sapiens
acatttaaaatatct

SEQ ID NO: 2002420 - DNA, 15 bp, Homo sapiens
catttaaaatatctt

SEQ ID NO: 2002421 - DNA, 15 bp, Homo sapiens
atttaaaatatcttt

SEQ ID NO: 2002422 - DNA, 15 bp, Homo sapiens
tttaaaatatctttc

SEQ ID NO: 2002423 - DNA, 15 bp, Homo sapiens
ttaaaatatctttca

SEQ ID NO: 2002424 - DNA, 15 bp, Homo sapiens
taaaatatctttcag

SEQ ID NO: 2002425 - DNA, 15 bp, Homo sapiens
aaaatatctttcagt

SEQ ID NO: 2002426 - DNA, 15 bp, Homo sapiens
aaatatctttcagta

SEQ ID NO: 2002427 - DNA, 15 bp, Homo sapiens
aatatctttcagtat

SEQ ID NO: 2002428 - DNA, 15 bp, Homo sapiens
atatctttcagtatg

SEQ ID NO: 2002429 - DNA, 15 bp, Homo sapiens
tatctttcagtatgc

SEQ ID NO: 2002430 - DNA, 15 bp, Homo sapiens
atctttcagtatgcc

SEQ ID NO: 2002431 - DNA, 15 bp, Homo sapiens
tctttcagtatgcct

SEQ ID NO: 2002432 - DNA, 15 bp, Homo sapiens
ctttcagtatgccta

SEQ ID NO: 2002433 - DNA, 15 bp, Homo sapiens
tttcagtatgcctag

SEQ ID NO: 2002434 - DNA, 15 bp, Homo sapiens
ttcagtatgcctaga

SEQ ID NO: 2002435 - DNA, 15 bp, Homo sapiens
tcagtatgcctagac

SEQ ID NO: 2002436 - DNA, 15 bp, Homo sapiens
cagtatgcctagact

SEQ ID NO: 2002437 - DNA, 15 bp, Homo sapiens
agtatgcctagactt

SEQ ID NO: 2002438 - DNA, 15 bp, Homo sapiens
gtatgcctagacttt

SEQ ID NO: 2002439 - DNA, 15 bp, Homo sapiens
tatgcctagactttc

SEQ ID NO: 2002440 - DNA, 15 bp, Homo sapiens
atgcctagactttct

SEQ ID NO: 2002441 - DNA, 15 bp, Homo sapiens
tgcctagactttcta

SEQ ID NO: 2002442 - DNA, 15 bp, Homo sapiens
gcctagactttctag

SEQ ID NO: 2002443 - DNA, 15 bp, Homo sapiens
cctagactttctagc

SEQ ID NO: 2002444 - DNA, 15 bp, Homo sapiens
ctagactttctagct

SEQ ID NO: 2002445 - DNA, 15 bp, Homo sapiens
tagactttctagctg

SEQ ID NO: 2002446 - DNA, 15 bp, Homo sapiens
agactttctagctgt

SEQ ID NO: 2002447 - DNA, 15 bp, Homo sapiens
gactttctagctgtt

SEQ ID NO: 2002448 - DNA, 15 bp, Homo sapiens
actttctagctgttt

SEQ ID NO: 2002449 - DNA, 15 bp, Homo sapiens
ctttctagctgtttt

SEQ ID NO: 2002450 - DNA, 15 bp, Homo sapiens
tttctagctgtttta

SEQ ID NO: 2002451 - DNA, 15 bp, Homo sapiens
ttctagctgttttag

SEQ ID NO: 2002452 - DNA, 15 bp, Homo sapiens
tctagctgttttagt

SEQ ID NO: 2002453 - DNA, 15 bp, Homo sapiens
ctagctgttttagtg

SEQ ID NO: 2002454 - DNA, 15 bp, Homo sapiens
tagctgttttagtga

SEQ ID NO: 2002455 - DNA, 15 bp, Homo sapiens
agctgttttagtgat

SEQ ID NO: 2002456 - DNA, 15 bp, Homo sapiens
gctgttttagtgata

SEQ ID NO: 2002457 - DNA, 15 bp, Homo sapiens
ctgttttagtgatag

SEQ ID NO: 2002458 - DNA, 15 bp, Homo sapiens
tgttttagtgatagg

SEQ ID NO: 2002459 - DNA, 15 bp, Homo sapiens
gttttagtgataggt

SEQ ID NO: 2002460 - DNA, 15 bp, Homo sapiens
ttttagtgataggtt

SEQ ID NO: 2002461 - DNA, 15 bp, Homo sapiens
tttagtgataggttt

SEQ ID NO: 2002462 - DNA, 15 bp, Homo sapiens
ttagtgataggtttt

SEQ ID NO: 2002463 - DNA, 15 bp, Homo sapiens
tagtgataggttttc

SEQ ID NO: 2002464 - DNA, 15 bp, Homo sapiens
agtgataggttttct

SEQ ID NO: 2002465 - DNA, 15 bp, Homo sapiens
gtgataggttttcta

SEQ ID NO: 2002466 - DNA, 15 bp, Homo sapiens
tgataggttttctac

SEQ ID NO: 2002467 - DNA, 15 bp, Homo sapiens
gataggttttctact

SEQ ID NO: 2002468 - DNA, 15 bp, Homo sapiens
ataggttttctactg

SEQ ID NO: 2002469 - DNA, 15 bp, Homo sapiens
taggttttctactgt

SEQ ID NO: 2002470 - DNA, 15 bp, Homo sapiens
aggttttctactgtt

SEQ ID NO: 2002471 - DNA, 15 bp, Homo sapiens
ggttttctactgttc

SEQ ID NO: 2002472 - DNA, 15 bp, Homo sapiens
gttttctactgttca

SEQ ID NO: 2002473 - DNA, 15 bp, Homo sapiens
ttttctactgttcat

SEQ ID NO: 2002474 - DNA, 15 bp, Homo sapiens
tttctactgttcatt

SEQ ID NO: 2002475 - DNA, 15 bp, Homo sapiens
ttctactgttcattt

SEQ ID NO: 2002476 - DNA, 15 bp, Homo sapiens
tctactgttcatttc

SEQ ID NO: 2002477 - DNA, 15 bp, Homo sapiens
ctactgttcatttct

SEQ ID NO: 2002478 - DNA, 15 bp, Homo sapiens
tactgttcatttctt

SEQ ID NO: 2002479 - DNA, 15 bp, Homo sapiens
actgttcatttcttt

SEQ ID NO: 2002480 - DNA, 15 bp, Homo sapiens
ctgttcatttctttt

SEQ ID NO: 2002481 - DNA, 15 bp, Homo sapiens
tgttcatttcttttg

SEQ ID NO: 2002482 - DNA, 15 bp, Homo sapiens
gttcatttcttttgc

SEQ ID NO: 2002483 - DNA, 15 bp, Homo sapiens
ttcatttcttttgct

SEQ ID NO: 2002484 - DNA, 15 bp, Homo sapiens
tcatttcttttgctc

SEQ ID NO: 2002485 - DNA, 15 bp, Homo sapiens
catttcttttgctca

SEQ ID NO: 2002486 - DNA, 15 bp, Homo sapiens
atttcttttgctcag

SEQ ID NO: 2002487 - DNA, 15 bp, Homo sapiens
tttcttttgctcaga

SEQ ID NO: 2002488 - DNA, 15 bp, Homo sapiens
ttcttttgctcagac

SEQ ID NO: 2002489 - DNA, 15 bp, Homo sapiens
tcttttgctcagact

SEQ ID NO: 2002490 - DNA, 15 bp, Homo sapiens
cttttgctcagacta

SEQ ID NO: 2002491 - DNA, 15 bp, Homo sapiens
ttttgctcagactac

SEQ ID NO: 2002492 - DNA, 15 bp, Homo sapiens
tttgctcagactacg

SEQ ID NO: 2002493 - DNA, 15 bp, Homo sapiens
ttgctcagactacgc

SEQ ID NO: 2002494 - DNA, 15 bp, Homo sapiens
tgctcagactacgct

SEQ ID NO: 2002495 - DNA, 15 bp, Homo sapiens
gctcagactacgctt

SEQ ID NO: 2002496 - DNA, 15 bp, Homo sapiens
ctcagactacgcttt

SEQ ID NO: 2002497 - DNA, 15 bp, Homo sapiens
tcagactacgcttta

SEQ ID NO: 2002498 - DNA, 15 bp, Homo sapiens
cagactacgctttat

SEQ ID NO: 2002499 - DNA, 15 bp, Homo sapiens
agactacgctttatt

SEQ ID NO: 2002500 - DNA, 15 bp, Homo sapiens
gactacgctttattt

SEQ ID NO: 2002501 - DNA, 15 bp, Homo sapiens
actacgctttatttg

SEQ ID NO: 2002502 - DNA, 15 bp, Homo sapiens
ctacgctttatttga

SEQ ID NO: 2002503 - DNA, 15 bp, Homo sapiens
tacgctttatttgat

SEQ ID NO: 2002504 - DNA, 15 bp, Homo sapiens
acgctttatttgatt

SEQ ID NO: 2002505 - DNA, 15 bp, Homo sapiens
cgctttatttgattt

SEQ ID NO: 2002506 - DNA, 15 bp, Homo sapiens
gctttatttgatttc

SEQ ID NO: 2002507 - DNA, 15 bp, Homo sapiens
ctttatttgatttct

SEQ ID NO: 2002508 - DNA, 15 bp, Homo sapiens
tttatttgatttctc

SEQ ID NO: 2002509 - DNA, 15 bp, Homo sapiens
ttatttgatttctct

SEQ ID NO: 2002510 - DNA, 15 bp, Homo sapiens
tatttgatttctctg

SEQ ID NO: 2002511 - DNA, 15 bp, Homo sapiens
atttgatttctctgc

SEQ ID NO: 2002512 - DNA, 15 bp, Homo sapiens
tttgatttctctgct

SEQ ID NO: 2002513 - DNA, 15 bp, Homo sapiens
ttgatttctctgctt

SEQ ID NO: 2002514 - DNA, 15 bp, Homo sapiens
tgatttctctgcttc

SEQ ID NO: 2002515 - DNA, 15 bp, Homo sapiens
gatttctctgcttcg

SEQ ID NO: 2002516 - DNA, 15 bp, Homo sapiens
atttctctgcttcgg

SEQ ID NO: 2002517 - DNA, 15 bp, Homo sapiens
tttctctgcttcgga

SEQ ID NO: 2002518 - DNA, 15 bp, Homo sapiens
ttctctgcttcggaa

SEQ ID NO: 2002519 - DNA, 15 bp, Homo sapiens
tctctgcttcggaaa

SEQ ID NO: 2002520 - DNA, 15 bp, Homo sapiens
ctctgcttcggaaat

SEQ ID NO: 2002521 - DNA, 15 bp, Homo sapiens
tctgcttcggaaatg

SEQ ID NO: 2002522 - DNA, 15 bp, Homo sapiens
ctgcttcggaaatga

SEQ ID NO: 2002523 - DNA, 15 bp, Homo sapiens
tgcttcggaaatgat

SEQ ID NO: 2002524 - DNA, 15 bp, Homo sapiens
gcttcggaaatgatg

SEQ ID NO: 2002525 - DNA, 15 bp, Homo sapiens
cttcggaaatgatgt

SEQ ID NO: 2002526 - DNA, 15 bp, Homo sapiens
ttcggaaatgatgtt

SEQ ID NO: 2002527 - DNA, 15 bp, Homo sapiens
tcggaaatgatgttt

SEQ ID NO: 2002528 - DNA, 15 bp, Homo sapiens
cggaaatgatgttta

SEQ ID NO: 2002529 - DNA, 15 bp, Homo sapiens
ggaaatgatgtttaa

SEQ ID NO: 2002530 - DNA, 15 bp, Homo sapiens
gaaatgatgtttaac

SEQ ID NO: 2002531 - DNA, 15 bp, Homo sapiens
aaatgatgtttaacc

SEQ ID NO: 2002532 - DNA, 15 bp, Homo sapiens
aatgatgtttaacct

SEQ ID NO: 2002533 - DNA, 15 bp, Homo sapiens
atgatgtttaacctt

SEQ ID NO: 2002534 - DNA, 15 bp, Homo sapiens
tgatgtttaaccttc

SEQ ID NO: 2002535 - DNA, 15 bp, Homo sapiens
gatgtttaaccttca

SEQ ID NO: 2002536 - DNA, 15 bp, Homo sapiens
atgtttaaccttcac

SEQ ID NO: 2002537 - DNA, 15 bp, Homo sapiens
tgtttaaccttcaca

SEQ ID NO: 2002538 - DNA, 15 bp, Homo sapiens
gtttaaccttcacaa

SEQ ID NO: 2002539 - DNA, 15 bp, Homo sapiens
tttaaccttcacaaa

SEQ ID NO: 2002540 - DNA, 15 bp, Homo sapiens
ttaaccttcacaaaa

SEQ ID NO: 2002541 - DNA, 15 bp, Homo sapiens
taaccttcacaaaat

SEQ ID NO: 2002542 - DNA, 15 bp, Homo sapiens
aaccttcacaaaata

SEQ ID NO: 2002543 - DNA, 15 bp, Homo sapiens
accttcacaaaatac

SEQ ID NO: 2002544 - DNA, 15 bp, Homo sapiens
ccttcacaaaatacc

SEQ ID NO: 2002545 - DNA, 15 bp, Homo sapiens
cttcacaaaatacct

SEQ ID NO: 2002546 - DNA, 15 bp, Homo sapiens
ttcacaaaatacctg

SEQ ID NO: 2002547 - DNA, 15 bp, Homo sapiens
tcacaaaatacctgc

SEQ ID NO: 2002548 - DNA, 15 bp, Homo sapiens
cacaaaatacctgct

SEQ ID NO: 2002549 - DNA, 15 bp, Homo sapiens
acaaaatacctgctc

SEQ ID NO: 2002550 - DNA, 15 bp, Homo sapiens
caaaatacctgctct

SEQ ID NO: 2002551 - DNA, 15 bp, Homo sapiens
aaaatacctgctctc

SEQ ID NO: 2002552 - DNA, 15 bp, Homo sapiens
aaatacctgctctct

SEQ ID NO: 2002553 - DNA, 15 bp, Homo sapiens
aatacctgctctcta

SEQ ID NO: 2002554 - DNA, 15 bp, Homo sapiens
atacctgctctctat

SEQ ID NO: 2002555 - DNA, 15 bp, Homo sapiens
tacctgctctctata

SEQ ID NO: 2002556 - DNA, 15 bp, Homo sapiens
acctgctctctataa

SEQ ID NO: 2002557 - DNA, 15 bp, Homo sapiens
cctgctctctataag

SEQ ID NO: 2002558 - DNA, 15 bp, Homo sapiens
ctgctctctataagg

SEQ ID NO: 2002559 - DNA, 15 bp, Homo sapiens
tgctctctataaggg

SEQ ID NO: 2002560 - DNA, 15 bp, Homo sapiens
gctctctataagggt

SEQ ID NO: 2002561 - DNA, 15 bp, Homo sapiens
ctctctataagggta

SEQ ID NO: 2002562 - DNA, 15 bp, Homo sapiens
tctctataagggtac

SEQ ID NO: 2002563 - DNA, 15 bp, Homo sapiens
ctctataagggtacc

SEQ ID NO: 2002564 - DNA, 15 bp, Homo sapiens
tctataagggtacca

SEQ ID NO: 2002565 - DNA, 15 bp, Homo sapiens
ctataagggtaccag

SEQ ID NO: 2002566 - DNA, 15 bp, Homo sapiens
tataagggtaccaga

SEQ ID NO: 2002567 - DNA, 15 bp, Homo sapiens
ataagggtaccagac

SEQ ID NO: 2002568 - DNA, 15 bp, Homo sapiens
taagggtaccagact

SEQ ID NO: 2002569 - DNA, 15 bp, Homo sapiens
aagggtaccagacta

SEQ ID NO: 2002570 - DNA, 15 bp, Homo sapiens
agggtaccagactat

SEQ ID NO: 2002571 - DNA, 15 bp, Homo sapiens
gggtaccagactata

SEQ ID NO: 2002572 - DNA, 15 bp, Homo sapiens
ggtaccagactataa

SEQ ID NO: 2002573 - DNA, 15 bp, Homo sapiens
gtaccagactataaa

SEQ ID NO: 2002574 - DNA, 15 bp, Homo sapiens
taccagactataaaa

SEQ ID NO: 2002575 - DNA, 15 bp, Homo sapiens
accagactataaaag

SEQ ID NO: 2002576 - DNA, 15 bp, Homo sapiens
ccagactataaaagg

SEQ ID NO: 2002577 - DNA, 15 bp, Homo sapiens
cagactataaaaggg

SEQ ID NO: 2002578 - DNA, 15 bp, Homo sapiens
agactataaaaggga

SEQ ID NO: 2002579 - DNA, 15 bp, Homo sapiens
gactataaaagggac

SEQ ID NO: 2002580 - DNA, 15 bp, Homo sapiens
actataaaagggaca

SEQ ID NO: 2002581 - DNA, 15 bp, Homo sapiens
ctataaaagggacaa

SEQ ID NO: 2002582 - DNA, 15 bp, Homo sapiens
tataaaagggacaaa

SEQ ID NO: 2002583 - DNA, 15 bp, Homo sapiens
ataaaagggacaaaa

SEQ ID NO: 2002584 - DNA, 15 bp, Homo sapiens
taaaagggacaaaat

SEQ ID NO: 2002585 - DNA, 15 bp, Homo sapiens
aaaagggacaaaatt

SEQ ID NO: 2002586 - DNA, 15 bp, Homo sapiens
aaagggacaaaattt

SEQ ID NO: 2002587 - DNA, 15 bp, Homo sapiens
aagggacaaaatttt

SEQ ID NO: 2002588 - DNA, 15 bp, Homo sapiens
agggacaaaattttt

SEQ ID NO: 2002589 - DNA, 15 bp, Homo sapiens
gggacaaaatttttc

SEQ ID NO: 2002590 - DNA, 15 bp, Homo sapiens
ggacaaaatttttct

SEQ ID NO: 2002591 - DNA, 15 bp, Homo sapiens
gacaaaatttttctc

SEQ ID NO: 2002592 - DNA, 15 bp, Homo sapiens
acaaaatttttctcc

SEQ ID NO: 2002593 - DNA, 15 bp, Homo sapiens
caaaatttttctccc

SEQ ID NO: 2002594 - DNA, 15 bp, Homo sapiens
aaaatttttctccca

SEQ ID NO: 2002595 - DNA, 15 bp, Homo sapiens
aaatttttctcccat

SEQ ID NO: 2002596 - DNA, 15 bp, Homo sapiens
aatttttctcccatt

SEQ ID NO: 2002597 - DNA, 15 bp, Homo sapiens
atttttctcccattt

SEQ ID NO: 2002598 - DNA, 15 bp, Homo sapiens
tttttctcccatttt

SEQ ID NO: 2002599 - DNA, 15 bp, Homo sapiens
ttttctcccattttt

SEQ ID NO: 2002600 - DNA, 15 bp, Homo sapiens
tttctcccatttttc

SEQ ID NO: 2002601 - DNA, 15 bp, Homo sapiens
ttctcccatttttca

SEQ ID NO: 2002602 - DNA, 15 bp, Homo sapiens
tctcccatttttcac

SEQ ID NO: 2002603 - DNA, 15 bp, Homo sapiens
ctcccatttttcaca

SEQ ID NO: 2002604 - DNA, 15 bp, Homo sapiens
tcccatttttcacaa

SEQ ID NO: 2002605 - DNA, 15 bp, Homo sapiens
cccatttttcacaaa

SEQ ID NO: 2002606 - DNA, 15 bp, Homo sapiens
ccatttttcacaaac

SEQ ID NO: 2002607 - DNA, 15 bp, Homo sapiens
catttttcacaaaca

SEQ ID NO: 2002608 - DNA, 15 bp, Homo sapiens
atttttcacaaacaa

SEQ ID NO: 2002609 - DNA, 15 bp, Homo sapiens
tttttcacaaacaac

SEQ ID NO: 2002610 - DNA, 15 bp, Homo sapiens
ttttcacaaacaacc

SEQ ID NO: 2002611 - DNA, 15 bp, Homo sapiens
tttcacaaacaacca

SEQ ID NO: 2002612 - DNA, 15 bp, Homo sapiens
ttcacaaacaaccac

SEQ ID NO: 2002613 - DNA, 15 bp, Homo sapiens
tcacaaacaaccaca

SEQ ID NO: 2002614 - DNA, 15 bp, Homo sapiens
cacaaacaaccacaa

SEQ ID NO: 2002615 - DNA, 15 bp, Homo sapiens
acaaacaaccacaag

SEQ ID NO: 2002616 - DNA, 15 bp, Homo sapiens
caaacaaccacaaga

SEQ ID NO: 2002617 - DNA, 15 bp, Homo sapiens
aaacaaccacaagag

SEQ ID NO: 2002618 - DNA, 15 bp, Homo sapiens
aacaaccacaagagt

SEQ ID NO: 2002619 - DNA, 15 bp, Homo sapiens
acaaccacaagagtc

SEQ ID NO: 2002620 - DNA, 15 bp, Homo sapiens
caaccacaagagtca

SEQ ID NO: 2002621 - DNA, 15 bp, Homo sapiens
aaccacaagagtcaa

SEQ ID NO: 2002622 - DNA, 15 bp, Homo sapiens
accacaagagtcaac

SEQ ID NO: 2002623 - DNA, 15 bp, Homo sapiens
ccacaagagtcaact

SEQ ID NO: 2002624 - DNA, 15 bp, Homo sapiens
cacaagagtcaactt

SEQ ID NO: 2002625 - DNA, 15 bp, Homo sapiens
acaagagtcaacttt

SEQ ID NO: 2002626 - DNA, 15 bp, Homo sapiens
caagagtcaactttt

SEQ ID NO: 2002627 - DNA, 15 bp, Homo sapiens
aagagtcaacttttc

SEQ ID NO: 2002628 - DNA, 15 bp, Homo sapiens
agagtcaacttttca

SEQ ID NO: 2002629 - DNA, 15 bp, Homo sapiens
gagtcaacttttcag

SEQ ID NO: 2002630 - DNA, 15 bp, Homo sapiens
agtcaacttttcaga

SEQ ID NO: 2002631 - DNA, 15 bp, Homo sapiens
gtcaacttttcagaa

SEQ ID NO: 2002632 - DNA, 15 bp, Homo sapiens
tcaacttttcagaag

SEQ ID NO: 2002633 - DNA, 15 bp, Homo sapiens
caacttttcagaagt

SEQ ID NO: 2002634 - DNA, 15 bp, Homo sapiens
aacttttcagaagtt

SEQ ID NO: 2002635 - DNA, 15 bp, Homo sapiens
acttttcagaagttg

SEQ ID NO: 2002636 - DNA, 15 bp, Homo sapiens
cttttcagaagttgg

SEQ ID NO: 2002637 - DNA, 15 bp, Homo sapiens
ttttcagaagttggt

SEQ ID NO: 2002638 - DNA, 15 bp, Homo sapiens
tttcagaagttggta

SEQ ID NO: 2002639 - DNA, 15 bp, Homo sapiens
ttcagaagttggtat

SEQ ID NO: 2002640 - DNA, 15 bp, Homo sapiens
tcagaagttggtatt

SEQ ID NO: 2002641 - DNA, 15 bp, Homo sapiens
cagaagttggtattg

SEQ ID NO: 2002642 - DNA, 15 bp, Homo sapiens
agaagttggtattgc

SEQ ID NO: 2002643 - DNA, 15 bp, Homo sapiens
gaagttggtattgct

SEQ ID NO: 2002644 - DNA, 15 bp, Homo sapiens
aagttggtattgctg

SEQ ID NO: 2002645 - DNA, 15 bp, Homo sapiens
agttggtattgctga

SEQ ID NO: 2002646 - DNA, 15 bp, Homo sapiens
gttggtattgctgat

SEQ ID NO: 2002647 - DNA, 15 bp, Homo sapiens
ttggtattgctgatc

SEQ ID NO: 2002648 - DNA, 15 bp, Homo sapiens
tggtattgctgatct

SEQ ID NO: 2002649 - DNA, 15 bp, Homo sapiens
ggtattgctgatcta

SEQ ID NO: 2002650 - DNA, 15 bp, Homo sapiens
gtattgctgatctat

SEQ ID NO: 2002651 - DNA, 15 bp, Homo sapiens
tattgctgatctatg

SEQ ID NO: 2002652 - DNA, 15 bp, Homo sapiens
attgctgatctatga

SEQ ID NO: 2002653 - DNA, 15 bp, Homo sapiens
ttgctgatctatgat

SEQ ID NO: 2002654 - DNA, 15 bp, Homo sapiens
tgctgatctatgatg

SEQ ID NO: 2002655 - DNA, 15 bp, Homo sapiens
gctgatctatgatgt

SEQ ID NO: 2002656 - DNA, 15 bp, Homo sapiens
ctgatctatgatgtt

SEQ ID NO: 2002657 - DNA, 15 bp, Homo sapiens
tgatctatgatgttg

SEQ ID NO: 2002658 - DNA, 15 bp, Homo sapiens
gatctatgatgttgt

SEQ ID NO: 2002659 - DNA, 15 bp, Homo sapiens
atctatgatgttgtg

SEQ ID NO: 2002660 - DNA, 15 bp, Homo sapiens
tctatgatgttgtgt

SEQ ID NO: 2002661 - DNA, 15 bp, Homo sapiens
ctatgatgttgtgtt

SEQ ID NO: 2002662 - DNA, 15 bp, Homo sapiens
tatgatgttgtgttt

SEQ ID NO: 2002663 - DNA, 15 bp, Homo sapiens
atgatgttgtgtttt

SEQ ID NO: 2002664 - DNA, 15 bp, Homo sapiens
tgatgttgtgttttc

SEQ ID NO: 2002665 - DNA, 15 bp, Homo sapiens
gatgttgtgttttct

SEQ ID NO: 2002666 - DNA, 15 bp, Homo sapiens
atgttgtgttttctg

SEQ ID NO: 2002667 - DNA, 15 bp, Homo sapiens
tgttgtgttttctga

SEQ ID NO: 2002668 - DNA, 15 bp, Homo sapiens
gttgtgttttctgag

SEQ ID NO: 2002669 - DNA, 15 bp, Homo sapiens
ttgtgttttctgagg

SEQ ID NO: 2002670 - DNA, 15 bp, Homo sapiens
tgtgttttctgagga

SEQ ID NO: 2002671 - DNA, 15 bp, Homo sapiens
gtgttttctgaggag

SEQ ID NO: 2002672 - DNA, 15 bp, Homo sapiens
tgttttctgaggagc

SEQ ID NO: 2002673 - DNA, 15 bp, Homo sapiens
gttttctgaggagcc

SEQ ID NO: 2002674 - DNA, 15 bp, Homo sapiens
ttttctgaggagccg

SEQ ID NO: 2002675 - DNA, 15 bp, Homo sapiens
tttctgaggagccgt

SEQ ID NO: 2002676 - DNA, 15 bp, Homo sapiens
ttctgaggagccgta

SEQ ID NO: 2002677 - DNA, 15 bp, Homo sapiens
tctgaggagccgtac

SEQ ID NO: 2002678 - DNA, 15 bp, Homo sapiens
ctgaggagccgtact

SEQ ID NO: 2002679 - DNA, 15 bp, Homo sapiens
tgaggagccgtactc

SEQ ID NO: 2002680 - DNA, 15 bp, Homo sapiens
gaggagccgtactcc

SEQ ID NO: 2002681 - DNA, 15 bp, Homo sapiens
aggagccgtactcca

SEQ ID NO: 2002682 - DNA, 15 bp, Homo sapiens
ggagccgtactccat

SEQ ID NO: 2002683 - DNA, 15 bp, Homo sapiens
gagccgtactccata

SEQ ID NO: 2002684 - DNA, 15 bp, Homo sapiens
agccgtactccatat

SEQ ID NO: 2002685 - DNA, 15 bp, Homo sapiens
gccgtactccatatt

SEQ ID NO: 2002686 - DNA, 15 bp, Homo sapiens
ccgtactccatattt

SEQ ID NO: 2002687 - DNA, 15 bp, Homo sapiens
cgtactccatatttc

SEQ ID NO: 2002688 - DNA, 15 bp, Homo sapiens
gtactccatatttct

SEQ ID NO: 2002689 - DNA, 15 bp, Homo sapiens
tactccatatttcta

SEQ ID NO: 2002690 - DNA, 15 bp, Homo sapiens
actccatatttctac

SEQ ID NO: 2002691 - DNA, 15 bp, Homo sapiens
ctccatatttctacg

SEQ ID NO: 2002692 - DNA, 15 bp, Homo sapiens
tccatatttctacgc

SEQ ID NO: 2002693 - DNA, 15 bp, Homo sapiens
ccatatttctacgct

SEQ ID NO: 2002694 - DNA, 15 bp, Homo sapiens
catatttctacgctc

SEQ ID NO: 2002695 - DNA, 15 bp, Homo sapiens
atatttctacgctct

SEQ ID NO: 2002696 - DNA, 15 bp, Homo sapiens
tatttctacgctctt

SEQ ID NO: 2002697 - DNA, 15 bp, Homo sapiens
atttctacgctcttt

SEQ ID NO: 2002698 - DNA, 15 bp, Homo sapiens
tttctacgctctttg

SEQ ID NO: 2002699 - DNA, 15 bp, Homo sapiens
ttctacgctctttgc

SEQ ID NO: 2002700 - DNA, 15 bp, Homo sapiens
tctacgctctttgca

SEQ ID NO: 2002701 - DNA, 15 bp, Homo sapiens
ctacgctctttgcag

SEQ ID NO: 2002702 - DNA, 15 bp, Homo sapiens
tacgctctttgcagc

SEQ ID NO: 2002703 - DNA, 15 bp, Homo sapiens
acgctctttgcagca

SEQ ID NO: 2002704 - DNA, 15 bp, Homo sapiens
cgctctttgcagcag

SEQ ID NO: 2002705 - DNA, 15 bp, Homo sapiens
gctctttgcagcagc

SEQ ID NO: 2002706 - DNA, 15 bp, Homo sapiens
ctctttgcagcagct

SEQ ID NO: 2002707 - DNA, 15 bp, Homo sapiens
tctttgcagcagctg

SEQ ID NO: 2002708 - DNA, 15 bp, Homo sapiens
ctttgcagcagctgt

SEQ ID NO: 2002709 - DNA, 15 bp, Homo sapiens
tttgcagcagctgtg

SEQ ID NO: 2002710 - DNA, 15 bp, Homo sapiens
ttgcagcagctgtgg

SEQ ID NO: 2002711 - DNA, 15 bp, Homo sapiens
tgcagcagctgtgga

SEQ ID NO: 2002712 - DNA, 15 bp, Homo sapiens
gcagcagctgtggaa

SEQ ID NO: 2002713 - DNA, 15 bp, Homo sapiens
cagcagctgtggaat

SEQ ID NO: 2002714 - DNA, 15 bp, Homo sapiens
agcagctgtggaatt

SEQ ID NO: 2002715 - DNA, 15 bp, Homo sapiens
gcagctgtggaattt

SEQ ID NO: 2002716 - DNA, 15 bp, Homo sapiens
cagctgtggaatttt

SEQ ID NO: 2002717 - DNA, 15 bp, Homo sapiens
agctgtggaattttt

SEQ ID NO: 2002718 - DNA, 15 bp, Homo sapiens
gctgtggaattttta

SEQ ID NO: 2002719 - DNA, 15 bp, Homo sapiens
ctgtggaatttttag

SEQ ID NO: 2002720 - DNA, 15 bp, Homo sapiens
tgtggaatttttagc

SEQ ID NO: 2002721 - DNA, 15 bp, Homo sapiens
gtggaatttttagca

SEQ ID NO: 2002722 - DNA, 15 bp, Homo sapiens
tggaatttttagcat

SEQ ID NO: 2002723 - DNA, 15 bp, Homo sapiens
ggaatttttagcatt

SEQ ID NO: 2002724 - DNA, 15 bp, Homo sapiens
gaatttttagcattg

SEQ ID NO: 2002725 - DNA, 15 bp, Homo sapiens
aatttttagcattga

SEQ ID NO: 2002726 - DNA, 15 bp, Homo sapiens
atttttagcattgag

SEQ ID NO: 2002727 - DNA, 15 bp, Homo sapiens
tttttagcattgagg

SEQ ID NO: 2002728 - DNA, 15 bp, Homo sapiens
ttttagcattgagga

SEQ ID NO: 2002729 - DNA, 15 bp, Homo sapiens
tttagcattgaggac

SEQ ID NO: 2002730 - DNA, 15 bp, Homo sapiens
ttagcattgaggaca

SEQ ID NO: 2002731 - DNA, 15 bp, Homo sapiens
tagcattgaggacaa

SEQ ID NO: 2002732 - DNA, 15 bp, Homo sapiens
agcattgaggacaac

SEQ ID NO: 2002733 - DNA, 15 bp, Homo sapiens
gcattgaggacaacc

SEQ ID NO: 2002734 - DNA, 15 bp, Homo sapiens
cattgaggacaacct

SEQ ID NO: 2002735 - DNA, 15 bp, Homo sapiens
attgaggacaacctc

SEQ ID NO: 2002736 - DNA, 15 bp, Homo sapiens
ttgaggacaacctca

SEQ ID NO: 2002737 - DNA, 15 bp, Homo sapiens
tgaggacaacctcat

SEQ ID NO: 2002738 - DNA, 15 bp, Homo sapiens
gaggacaacctcatt

SEQ ID NO: 2002739 - DNA, 15 bp, Homo sapiens
aggacaacctcattc

SEQ ID NO: 2002740 - DNA, 15 bp, Homo sapiens
ggacaacctcattcc

SEQ ID NO: 2002741 - DNA, 15 bp, Homo sapiens
gacaacctcattccc

SEQ ID NO: 2002742 - DNA, 15 bp, Homo sapiens
acaacctcattccca

SEQ ID NO: 2002743 - DNA, 15 bp, Homo sapiens
caacctcattcccag

SEQ ID NO: 2002744 - DNA, 15 bp, Homo sapiens
aacctcattcccagc

SEQ ID NO: 2002745 - DNA, 15 bp, Homo sapiens
acctcattcccagct

SEQ ID NO: 2002746 - DNA, 15 bp, Homo sapiens
cctcattcccagctt

SEQ ID NO: 2002747 - DNA, 15 bp, Homo sapiens
ctcattcccagcttg

SEQ ID NO: 2002748 - DNA, 15 bp, Homo sapiens
tcattcccagcttga

SEQ ID NO: 2002749 - DNA, 15 bp, Homo sapiens
cattcccagcttgaa

SEQ ID NO: 2002750 - DNA, 15 bp, Homo sapiens
attcccagcttgaaa

SEQ ID NO: 2002751 - DNA, 15 bp, Homo sapiens
ttcccagcttgaaat

SEQ ID NO: 2002752 - DNA, 15 bp, Homo sapiens
tcccagcttgaaatg

SEQ ID NO: 2002753 - DNA, 15 bp, Homo sapiens
cccagcttgaaatgc

SEQ ID NO: 2002754 - DNA, 15 bp, Homo sapiens
ccagcttgaaatgct

SEQ ID NO: 2002755 - DNA, 15 bp, Homo sapiens
cagcttgaaatgctg

SEQ ID NO: 2002756 - DNA, 15 bp, Homo sapiens
agcttgaaatgctga

SEQ ID NO: 2002757 - DNA, 15 bp, Homo sapiens
gcttgaaatgctgag

SEQ ID NO: 2002758 - DNA, 15 bp, Homo sapiens
cttgaaatgctgagc

SEQ ID NO: 2002759 - DNA, 15 bp, Homo sapiens
ttgaaatgctgagct

SEQ ID NO: 2002760 - DNA, 15 bp, Homo sapiens
tgaaatgctgagctt

SEQ ID NO: 2002761 - DNA, 15 bp, Homo sapiens
gaaatgctgagcttt

SEQ ID NO: 2002762 - DNA, 15 bp, Homo sapiens
aaatgctgagctttt

SEQ ID NO: 2002763 - DNA, 15 bp, Homo sapiens
aatgctgagcttttc

SEQ ID NO: 2002764 - DNA, 15 bp, Homo sapiens
atgctgagcttttct

SEQ ID NO: 2002765 - DNA, 15 bp, Homo sapiens
tgctgagcttttctt

SEQ ID NO: 2002766 - DNA, 15 bp, Homo sapiens
gctgagcttttctta

SEQ ID NO: 2002767 - DNA, 15 bp, Homo sapiens
ctgagcttttcttac

SEQ ID NO: 2002768 - DNA, 15 bp, Homo sapiens
tgagcttttcttacc

SEQ ID NO: 2002769 - DNA, 15 bp, Homo sapiens
gagcttttcttaccc

SEQ ID NO: 2002770 - DNA, 15 bp, Homo sapiens
agcttttcttaccct

SEQ ID NO: 2002771 - DNA, 15 bp, Homo sapiens
gcttttcttaccctg

SEQ ID NO: 2002772 - DNA, 15 bp, Homo sapiens
cttttcttaccctga

SEQ ID NO: 2002773 - DNA, 15 bp, Homo sapiens
ttttcttaccctgat

SEQ ID NO: 2002774 - DNA, 15 bp, Homo sapiens
tttcttaccctgatg

SEQ ID NO: 2002775 - DNA, 15 bp, Homo sapiens
ttcttaccctgatga

SEQ ID NO: 2002776 - DNA, 15 bp, Homo sapiens
tcttaccctgatgat

SEQ ID NO: 2002777 - DNA, 15 bp, Homo sapiens
cttaccctgatgata

SEQ ID NO: 2002778 - DNA, 15 bp, Homo sapiens
ttaccctgatgatag

SEQ ID NO: 2002779 - DNA, 15 bp, Homo sapiens
taccctgatgatagg

SEQ ID NO: 2002780 - DNA, 15 bp, Homo sapiens
accctgatgatagga

SEQ ID NO: 2002781 - DNA, 15 bp, Homo sapiens
ccctgatgataggaa

SEQ ID NO: 2002782 - DNA, 15 bp, Homo sapiens
cctgatgataggaag

SEQ ID NO: 2002783 - DNA, 15 bp, Homo sapiens
ctgatgataggaaga

SEQ ID NO: 2002784 - DNA, 15 bp, Homo sapiens
tgatgataggaagag

SEQ ID NO: 2002785 - DNA, 15 bp, Homo sapiens
gatgataggaagaga

SEQ ID NO: 2002786 - DNA, 15 bp, Homo sapiens
atgataggaagagag

SEQ ID NO: 2002787 - DNA, 15 bp, Homo sapiens
tgataggaagagagt

SEQ ID NO: 2002788 - DNA, 15 bp, Homo sapiens
gataggaagagagtt

SEQ ID NO: 2002789 - DNA, 15 bp, Homo sapiens
ataggaagagagttc

SEQ ID NO: 2002790 - DNA, 15 bp, Homo sapiens
taggaagagagttca

SEQ ID NO: 2002791 - DNA, 15 bp, Homo sapiens
aggaagagagttcat

SEQ ID NO: 2002792 - DNA, 15 bp, Homo sapiens
ggaagagagttcatg

SEQ ID NO: 2002793 - DNA, 15 bp, Homo sapiens
gaagagagttcatgt

SEQ ID NO: 2002794 - DNA, 15 bp, Homo sapiens
aagagagttcatgta

SEQ ID NO: 2002795 - DNA, 15 bp, Homo sapiens
agagagttcatgtaa

SEQ ID NO: 2002796 - DNA, 15 bp, Homo sapiens
gagagttcatgtaag

SEQ ID NO: 2002797 - DNA, 15 bp, Homo sapiens
agagttcatgtaagt

SEQ ID NO: 2002798 - DNA, 15 bp, Homo sapiens
gagttcatgtaagtg

SEQ ID NO: 2002799 - DNA, 15 bp, Homo sapiens
agttcatgtaagtgc

SEQ ID NO: 2002800 - DNA, 15 bp, Homo sapiens
gttcatgtaagtgct

SEQ ID NO: 2002801 - DNA, 15 bp, Homo sapiens
ttcatgtaagtgctt

SEQ ID NO: 2002802 - DNA, 15 bp, Homo sapiens
tcatgtaagtgctta

SEQ ID NO: 2002803 - DNA, 15 bp, Homo sapiens
catgtaagtgcttag

SEQ ID NO: 2002804 - DNA, 15 bp, Homo sapiens
atgtaagtgcttaga

SEQ ID NO: 2002805 - DNA, 15 bp, Homo sapiens
tgtaagtgcttagaa

SEQ ID NO: 2002806 - DNA, 15 bp, Homo sapiens
gtaagtgcttagaat

SEQ ID NO: 2002807 - DNA, 15 bp, Homo sapiens
taagtgcttagaata

SEQ ID NO: 2002808 - DNA, 15 bp, Homo sapiens
aagtgcttagaatag

SEQ ID NO: 2002809 - DNA, 15 bp, Homo sapiens
agtgcttagaatagt

SEQ ID NO: 2002810 - DNA, 15 bp, Homo sapiens
gtgcttagaatagtt

SEQ ID NO: 2002811 - DNA, 15 bp, Homo sapiens
tgcttagaatagttg

SEQ ID NO: 2002812 - DNA, 15 bp, Homo sapiens
gcttagaatagttgt

SEQ ID NO: 2002813 - DNA, 15 bp, Homo sapiens
cttagaatagttgta

SEQ ID NO: 2002814 - DNA, 15 bp, Homo sapiens
ttagaatagttgtac

SEQ ID NO: 2002815 - DNA, 15 bp, Homo sapiens
tagaatagttgtact

SEQ ID NO: 2002816 - DNA, 15 bp, Homo sapiens
agaatagttgtactg

SEQ ID NO: 2002817 - DNA, 15 bp, Homo sapiens
gaatagttgtactgt

SEQ ID NO: 2002818 - DNA, 15 bp, Homo sapiens
aatagttgtactgtt

SEQ ID NO: 2002819 - DNA, 15 bp, Homo sapiens
atagttgtactgtta

SEQ ID NO: 2002820 - DNA, 15 bp, Homo sapiens
tagttgtactgttag

SEQ ID NO: 2002821 - DNA, 15 bp, Homo sapiens
agttgtactgttagc

SEQ ID NO: 2002822 - DNA, 15 bp, Homo sapiens
gttgtactgttagct

SEQ ID NO: 2002823 - DNA, 15 bp, Homo sapiens
ttgtactgttagctg

SEQ ID NO: 2002824 - DNA, 15 bp, Homo sapiens
tgtactgttagctgt

SEQ ID NO: 2002825 - DNA, 15 bp, Homo sapiens
gtactgttagctgta

SEQ ID NO: 2002826 - DNA, 15 bp, Homo sapiens
tactgttagctgtag

SEQ ID NO: 2002827 - DNA, 15 bp, Homo sapiens
actgttagctgtagt

SEQ ID NO: 2002828 - DNA, 15 bp, Homo sapiens
ctgttagctgtagtc

SEQ ID NO: 2002829 - DNA, 15 bp, Homo sapiens
tgttagctgtagtct

SEQ ID NO: 2002830 - DNA, 15 bp, Homo sapiens
gttagctgtagtcta

SEQ ID NO: 2002831 - DNA, 15 bp, Homo sapiens
ttagctgtagtctaa

SEQ ID NO: 2002832 - DNA, 15 bp, Homo sapiens
tagctgtagtctaat

SEQ ID NO: 2002833 - DNA, 15 bp, Homo sapiens
agctgtagtctaatt

SEQ ID NO: 2002834 - DNA, 15 bp, Homo sapiens
gctgtagtctaatta

SEQ ID NO: 2002835 - DNA, 15 bp, Homo sapiens
ctgtagtctaattaa

SEQ ID NO: 2002836 - DNA, 15 bp, Homo sapiens
tgtagtctaattaaa

SEQ ID NO: 2002837 - DNA, 15 bp, Homo sapiens
gtagtctaattaaag

SEQ ID NO: 2002838 - DNA, 15 bp, Homo sapiens
tagtctaattaaagc

SEQ ID NO: 2002839 - DNA, 15 bp, Homo sapiens
agtctaattaaagct

SEQ ID NO: 2002840 - DNA, 15 bp, Homo sapiens
gtctaattaaagcta

SEQ ID NO: 2002841 - DNA, 15 bp, Homo sapiens
tctaattaaagctaa

SEQ ID NO: 2002842 - DNA, 15 bp, Homo sapiens
ctaattaaagctaaa

SEQ ID NO: 2002843 - DNA, 15 bp, Homo sapiens
taattaaagctaaag

SEQ ID NO: 2002844 - DNA, 15 bp, Homo sapiens
aattaaagctaaagt

SEQ ID NO: 2002845 - DNA, 15 bp, Homo sapiens
attaaagctaaagtg

SEQ ID NO: 2002846 - DNA, 15 bp, Homo sapiens
ttaaagctaaagtga

SEQ ID NO: 2002847 - DNA, 15 bp, Homo sapiens
taaagctaaagtgag

SEQ ID NO: 2002848 - DNA, 15 bp, Homo sapiens
aaagctaaagtgagt

SEQ ID NO: 2002849 - DNA, 15 bp, Homo sapiens
aagctaaagtgagtg

SEQ ID NO: 2002850 - DNA, 15 bp, Homo sapiens
agctaaagtgagtga

SEQ ID NO: 2002851 - DNA, 15 bp, Homo sapiens
gctaaagtgagtgaa

SEQ ID NO: 2002852 - DNA, 15 bp, Homo sapiens
ctaaagtgagtgaaa

SEQ ID NO: 2002853 - DNA, 15 bp, Homo sapiens
taaagtgagtgaaac

SEQ ID NO: 2002854 - DNA, 15 bp, Homo sapiens
aaagtgagtgaaacg

SEQ ID NO: 2002855 - DNA, 15 bp, Homo sapiens
aagtgagtgaaacga

SEQ ID NO: 2002856 - DNA, 15 bp, Homo sapiens
agtgagtgaaacgag

SEQ ID NO: 2002857 - DNA, 15 bp, Homo sapiens
gtgagtgaaacgaga

SEQ ID NO: 2002858 - DNA, 15 bp, Homo sapiens
tgagtgaaacgagaa

SEQ ID NO: 2002859 - DNA, 15 bp, Homo sapiens
gagtgaaacgagaat

SEQ ID NO: 2002860 - DNA, 15 bp, Homo sapiens
agtgaaacgagaatt

SEQ ID NO: 2002861 - DNA, 15 bp, Homo sapiens
gtgaaacgagaattt

SEQ ID NO: 2002862 - DNA, 15 bp, Homo sapiens
tgaaacgagaatttg

SEQ ID NO: 2002863 - DNA, 15 bp, Homo sapiens
gaaacgagaatttga

SEQ ID NO: 2002864 - DNA, 15 bp, Homo sapiens
aaacgagaatttgag

SEQ ID NO: 2002865 - DNA, 15 bp, Homo sapiens
aacgagaatttgaga

SEQ ID NO: 2002866 - DNA, 15 bp, Homo sapiens
acgagaatttgagaa

SEQ ID NO: 2002867 - DNA, 15 bp, Homo sapiens
cgagaatttgagaag

SEQ ID NO: 2002868 - DNA, 15 bp, Homo sapiens
gagaatttgagaagg

SEQ ID NO: 2002869 - DNA, 15 bp, Homo sapiens
agaatttgagaagga

SEQ ID NO: 2002870 - DNA, 15 bp, Homo sapiens
gaatttgagaaggaa

SEQ ID NO: 2002871 - DNA, 15 bp, Homo sapiens
aatttgagaaggaag

SEQ ID NO: 2002872 - DNA, 15 bp, Homo sapiens
atttgagaaggaaga

SEQ ID NO: 2002873 - DNA, 15 bp, Homo sapiens
tttgagaaggaagaa

SEQ ID NO: 2002874 - DNA, 15 bp, Homo sapiens
ttgagaaggaagaat

SEQ ID NO: 2002875 - DNA, 15 bp, Homo sapiens
tgagaaggaagaata

SEQ ID NO: 2002876 - DNA, 15 bp, Homo sapiens
gagaaggaagaatag

SEQ ID NO: 2002877 - DNA, 15 bp, Homo sapiens
agaaggaagaatagg

SEQ ID NO: 2002878 - DNA, 15 bp, Homo sapiens
gaaggaagaatagga

SEQ ID NO: 2002879 - DNA, 15 bp, Homo sapiens
aaggaagaataggat

SEQ ID NO: 2002880 - DNA, 15 bp, Homo sapiens
aggaagaataggatt

SEQ ID NO: 2002881 - DNA, 15 bp, Homo sapiens
ggaagaataggattg

SEQ ID NO: 2002882 - DNA, 15 bp, Homo sapiens
gaagaataggattga

SEQ ID NO: 2002883 - DNA, 15 bp, Homo sapiens
aagaataggattgat

SEQ ID NO: 2002884 - DNA, 15 bp, Homo sapiens
agaataggattgatt

SEQ ID NO: 2002885 - DNA, 15 bp, Homo sapiens
gaataggattgatta

SEQ ID NO: 2002886 - DNA, 15 bp, Homo sapiens
aataggattgattac

SEQ ID NO: 2002887 - DNA, 15 bp, Homo sapiens
ataggattgattaca

SEQ ID NO: 2002888 - DNA, 15 bp, Homo sapiens
taggattgattacat

SEQ ID NO: 2002889 - DNA, 15 bp, Homo sapiens
aggattgattacatt

SEQ ID NO: 2002890 - DNA, 15 bp, Homo sapiens
ggattgattacattc

SEQ ID NO: 2002891 - DNA, 15 bp, Homo sapiens
gattgattacattct

SEQ ID NO: 2002892 - DNA, 15 bp, Homo sapiens
attgattacattctt

SEQ ID NO: 2002893 - DNA, 15 bp, Homo sapiens
ttgattacattctta

SEQ ID NO: 2002894 - DNA, 15 bp, Homo sapiens
tgattacattcttat

SEQ ID NO: 2002895 - DNA, 15 bp, Homo sapiens
gattacattcttatc

SEQ ID NO: 2002896 - DNA, 15 bp, Homo sapiens
attacattcttatca

SEQ ID NO: 2002897 - DNA, 15 bp, Homo sapiens
ttacattcttatcaa

SEQ ID NO: 2002898 - DNA, 15 bp, Homo sapiens
tacattcttatcaac

SEQ ID NO: 2002899 - DNA, 15 bp, Homo sapiens
acattcttatcaact

SEQ ID NO: 2002900 - DNA, 15 bp, Homo sapiens
cattcttatcaactg

SEQ ID NO: 2002901 - DNA, 15 bp, Homo sapiens
attcttatcaactga

SEQ ID NO: 2002902 - DNA, 15 bp, Homo sapiens
ttcttatcaactgaa

SEQ ID NO: 2002903 - DNA, 15 bp, Homo sapiens
tcttatcaactgaag

SEQ ID NO: 2002904 - DNA, 15 bp, Homo sapiens
cttatcaactgaagg

SEQ ID NO: 2002905 - DNA, 15 bp, Homo sapiens
ttatcaactgaaggt

SEQ ID NO: 2002906 - DNA, 15 bp, Homo sapiens
tatcaactgaaggtt

SEQ ID NO: 2002907 - DNA, 15 bp, Homo sapiens
atcaactgaaggttt

SEQ ID NO: 2002908 - DNA, 15 bp, Homo sapiens
tcaactgaaggttta

SEQ ID NO: 2002909 - DNA, 15 bp, Homo sapiens
caactgaaggtttag

SEQ ID NO: 2002910 - DNA, 15 bp, Homo sapiens
aactgaaggtttagt

SEQ ID NO: 2002911 - DNA, 15 bp, Homo sapiens
actgaaggtttagtg

SEQ ID NO: 2002912 - DNA, 15 bp, Homo sapiens
ctgaaggtttagtgt

SEQ ID NO: 2002913 - DNA, 15 bp, Homo sapiens
tgaaggtttagtgtg

SEQ ID NO: 2002914 - DNA, 15 bp, Homo sapiens
gaaggtttagtgtga

SEQ ID NO: 2002915 - DNA, 15 bp, Homo sapiens
aaggtttagtgtgat

SEQ ID NO: 2002916 - DNA, 15 bp, Homo sapiens
aggtttagtgtgatg

SEQ ID NO: 2002917 - DNA, 15 bp, Homo sapiens
ggtttagtgtgatga

SEQ ID NO: 2002918 - DNA, 15 bp, Homo sapiens
gtttagtgtgatgat

SEQ ID NO: 2002919 - DNA, 15 bp, Homo sapiens
tttagtgtgatgatt

SEQ ID NO: 2002920 - DNA, 15 bp, Homo sapiens
ttagtgtgatgatta

SEQ ID NO: 2002921 - DNA, 15 bp, Homo sapiens
tagtgtgatgattaa

SEQ ID NO: 2002922 - DNA, 15 bp, Homo sapiens
agtgtgatgattaat

SEQ ID NO: 2002923 - DNA, 15 bp, Homo sapiens
gtgtgatgattaata

SEQ ID NO: 2002924 - DNA, 15 bp, Homo sapiens
tgtgatgattaataa

SEQ ID NO: 2002925 - DNA, 15 bp, Homo sapiens
gtgatgattaataac

SEQ ID NO: 2002926 - DNA, 15 bp, Homo sapiens
tgatgattaataact

SEQ ID NO: 2002927 - DNA, 15 bp, Homo sapiens
gatgattaataactc

SEQ ID NO: 2002928 - DNA, 15 bp, Homo sapiens
atgattaataactcc

SEQ ID NO: 2002929 - DNA, 15 bp, Homo sapiens
tgattaataactcct

SEQ ID NO: 2002930 - DNA, 15 bp, Homo sapiens
gattaataactcctt

SEQ ID NO: 2002931 - DNA, 15 bp, Homo sapiens
attaataactccttt

SEQ ID NO: 2002932 - DNA, 15 bp, Homo sapiens
ttaataactcctttg

SEQ ID NO: 2002933 - DNA, 15 bp, Homo sapiens
taataactcctttgc

SEQ ID NO: 2002934 - DNA, 15 bp, Homo sapiens
aataactcctttgca

SEQ ID NO: 2002935 - DNA, 15 bp, Homo sapiens
ataactcctttgcaa

SEQ ID NO: 2002936 - DNA, 15 bp, Homo sapiens
taactcctttgcaaa

SEQ ID NO: 2002937 - DNA, 15 bp, Homo sapiens
aactcctttgcaaat

SEQ ID NO: 2002938 - DNA, 15 bp, Homo sapiens
actcctttgcaaatt

SEQ ID NO: 2002939 - DNA, 15 bp, Homo sapiens
ctcctttgcaaattg

SEQ ID NO: 2002940 - DNA, 15 bp, Homo sapiens
tcctttgcaaattgc

SEQ ID NO: 2002941 - DNA, 15 bp, Homo sapiens
cctttgcaaattgca

SEQ ID NO: 2002942 - DNA, 15 bp, Homo sapiens
ctttgcaaattgcac

SEQ ID NO: 2002943 - DNA, 15 bp, Homo sapiens
tttgcaaattgcact

SEQ ID NO: 2002944 - DNA, 15 bp, Homo sapiens
ttgcaaattgcacta

SEQ ID NO: 2002945 - DNA, 15 bp, Homo sapiens
tgcaaattgcactaa

SEQ ID NO: 2002946 - DNA, 15 bp, Homo sapiens
gcaaattgcactaaa

SEQ ID NO: 2002947 - DNA, 15 bp, Homo sapiens
caaattgcactaaat

SEQ ID NO: 2002948 - DNA, 15 bp, Homo sapiens
aaattgcactaaatg

SEQ ID NO: 2002949 - DNA, 15 bp, Homo sapiens
aattgcactaaatga

SEQ ID NO: 2002950 - DNA, 15 bp, Homo sapiens
attgcactaaatgat

SEQ ID NO: 2002951 - DNA, 15 bp, Homo sapiens
ttgcactaaatgatt

SEQ ID NO: 2002952 - DNA, 15 bp, Homo sapiens
tgcactaaatgattg

SEQ ID NO: 2002953 - DNA, 15 bp, Homo sapiens
gcactaaatgattga

SEQ ID NO: 2002954 - DNA, 15 bp, Homo sapiens
cactaaatgattgaa

SEQ ID NO: 2002955 - DNA, 15 bp, Homo sapiens
actaaatgattgaaa

SEQ ID NO: 2002956 - DNA, 15 bp, Homo sapiens
ctaaatgattgaaat

SEQ ID NO: 2002957 - DNA, 15 bp, Homo sapiens
taaatgattgaaatt

SEQ ID NO: 2002958 - DNA, 15 bp, Homo sapiens
aaatgattgaaattc

SEQ ID NO: 2002959 - DNA, 15 bp, Homo sapiens
aatgattgaaattca

SEQ ID NO: 2002960 - DNA, 15 bp, Homo sapiens
atgattgaaattcaa

SEQ ID NO: 2002961 - DNA, 15 bp, Homo sapiens
tgattgaaattcaag

SEQ ID NO: 2002962 - DNA, 15 bp, Homo sapiens
gattgaaattcaagt

SEQ ID NO: 2002963 - DNA, 15 bp, Homo sapiens
attgaaattcaagtt

SEQ ID NO: 2002964 - DNA, 15 bp, Homo sapiens
ttgaaattcaagtta

SEQ ID NO: 2002965 - DNA, 15 bp, Homo sapiens
tgaaattcaagttaa

SEQ ID NO: 2002966 - DNA, 15 bp, Homo sapiens
gaaattcaagttaat

SEQ ID NO: 2002967 - DNA, 15 bp, Homo sapiens
aaattcaagttaata

SEQ ID NO: 2002968 - DNA, 15 bp, Homo sapiens
aattcaagttaatac

SEQ ID NO: 2002969 - DNA, 15 bp, Homo sapiens
attcaagttaataca

SEQ ID NO: 2002970 - DNA, 15 bp, Homo sapiens
ttcaagttaatacat

SEQ ID NO: 2002971 - DNA, 15 bp, Homo sapiens
tcaagttaatacata

SEQ ID NO: 2002972 - DNA, 15 bp, Homo sapiens
caagttaatacatat

SEQ ID NO: 2002973 - DNA, 15 bp, Homo sapiens
aagttaatacatata

SEQ ID NO: 2002974 - DNA, 15 bp, Homo sapiens
agttaatacatataa

SEQ ID NO: 2002975 - DNA, 15 bp, Homo sapiens
gttaatacatataaa

SEQ ID NO: 2002976 - DNA, 15 bp, Homo sapiens
ttaatacatataaat

SEQ ID NO: 2002977 - DNA, 15 bp, Homo sapiens
taatacatataaatt

SEQ ID NO: 2002978 - DNA, 15 bp, Homo sapiens
aatacatataaatta

SEQ ID NO: 2002979 - DNA, 15 bp, Homo sapiens
atacatataaattat

SEQ ID NO: 2002980 - DNA, 15 bp, Homo sapiens
tacatataaattata

SEQ ID NO: 2002981 - DNA, 15 bp, Homo sapiens
acatataaattataa

SEQ ID NO: 2002982 - DNA, 15 bp, Homo sapiens
catataaattataag

SEQ ID NO: 2002983 - DNA, 15 bp, Homo sapiens
atataaattataaga

SEQ ID NO: 2002984 - DNA, 15 bp, Homo sapiens
tataaattataagac

SEQ ID NO: 2002985 - DNA, 15 bp, Homo sapiens
ataaattataagacc

SEQ ID NO: 2002986 - DNA, 15 bp, Homo sapiens
taaattataagacca

SEQ ID NO: 2002987 - DNA, 15 bp, Homo sapiens
aaattataagaccat

SEQ ID NO: 2002988 - DNA, 15 bp, Homo sapiens
aattataagaccata

SEQ ID NO: 2002989 - DNA, 15 bp, Homo sapiens
attataagaccatat

SEQ ID NO: 2002990 - DNA, 15 bp, Homo sapiens
ttataagaccatata

SEQ ID NO: 2002991 - DNA, 15 bp, Homo sapiens
tataagaccatatag

SEQ ID NO: 2002992 - DNA, 15 bp, Homo sapiens
ataagaccatatagt

SEQ ID NO: 2002993 - DNA, 15 bp, Homo sapiens
taagaccatatagta

SEQ ID NO: 2002994 - DNA, 15 bp, Homo sapiens
aagaccatatagtat

SEQ ID NO: 2002995 - DNA, 15 bp, Homo sapiens
agaccatatagtatt

SEQ ID NO: 2002996 - DNA, 15 bp, Homo sapiens
gaccatatagtattt

SEQ ID NO: 2002997 - DNA, 15 bp, Homo sapiens
accatatagtatttg

SEQ ID NO: 2002998 - DNA, 15 bp, Homo sapiens
ccatatagtatttgt

SEQ ID NO: 2002999 - DNA, 15 bp, Homo sapiens
catatagtatttgtg

SEQ ID NO: 2003000 - DNA, 15 bp, Homo sapiens
atatagtatttgtgc

SEQ ID NO: 2003001 - DNA, 15 bp, Homo sapiens
tatagtatttgtgcc

SEQ ID NO: 2003002 - DNA, 15 bp, Homo sapiens
atagtatttgtgcct

SEQ ID NO: 2003003 - DNA, 15 bp, Homo sapiens
tagtatttgtgcctt

SEQ ID NO: 2003004 - DNA, 15 bp, Homo sapiens
agtatttgtgccttt

SEQ ID NO: 2003005 - DNA, 15 bp, Homo sapiens
gtatttgtgcctttt

SEQ ID NO: 2003006 - DNA, 15 bp, Homo sapiens
tatttgtgccttttc

SEQ ID NO: 2003007 - DNA, 15 bp, Homo sapiens
atttgtgccttttca

SEQ ID NO: 2003008 - DNA, 15 bp, Homo sapiens
tttgtgccttttcac

SEQ ID NO: 2003009 - DNA, 15 bp, Homo sapiens
ttgtgccttttcacc

SEQ ID NO: 2003010 - DNA, 15 bp, Homo sapiens
tgtgccttttcacca

SEQ ID NO: 2003011 - DNA, 15 bp, Homo sapiens
gtgccttttcaccat

SEQ ID NO: 2003012 - DNA, 15 bp, Homo sapiens
tgccttttcaccata

SEQ ID NO: 2003013 - DNA, 15 bp, Homo sapiens
gccttttcaccatat

SEQ ID NO: 2003014 - DNA, 15 bp, Homo sapiens
ccttttcaccatatc

SEQ ID NO: 2003015 - DNA, 15 bp, Homo sapiens
cttttcaccatatct

SEQ ID NO: 2003016 - DNA, 15 bp, Homo sapiens
ttttcaccatatctc

SEQ ID NO: 2003017 - DNA, 15 bp, Homo sapiens
tttcaccatatctct

SEQ ID NO: 2003018 - DNA, 15 bp, Homo sapiens
ttcaccatatctcta

SEQ ID NO: 2003019 - DNA, 15 bp, Homo sapiens
tcaccatatctctat

SEQ ID NO: 2003020 - DNA, 15 bp, Homo sapiens
caccatatctctatt

SEQ ID NO: 2003021 - DNA, 15 bp, Homo sapiens
accatatctctattg

SEQ ID NO: 2003022 - DNA, 15 bp, Homo sapiens
ccatatctctattgc

SEQ ID NO: 2003023 - DNA, 15 bp, Homo sapiens
catatctctattgct

SEQ ID NO: 2003024 - DNA, 15 bp, Homo sapiens
atatctctattgctg

SEQ ID NO: 2003025 - DNA, 15 bp, Homo sapiens
tatctctattgctgc

SEQ ID NO: 2003026 - DNA, 15 bp, Homo sapiens
atctctattgctgca

SEQ ID NO: 2003027 - DNA, 15 bp, Homo sapiens
tctctattgctgcat

SEQ ID NO: 2003028 - DNA, 15 bp, Homo sapiens
ctctattgctgcatt

SEQ ID NO: 2003029 - DNA, 15 bp, Homo sapiens
tctattgctgcattt

SEQ ID NO: 2003030 - DNA, 15 bp, Homo sapiens
ctattgctgcattta

SEQ ID NO: 2003031 - DNA, 15 bp, Homo sapiens
tattgctgcatttat

SEQ ID NO: 2003032 - DNA, 15 bp, Homo sapiens
attgctgcatttata

SEQ ID NO: 2003033 - DNA, 15 bp, Homo sapiens
ttgctgcatttataa

SEQ ID NO: 2003034 - DNA, 15 bp, Homo sapiens
tgctgcatttataaa

SEQ ID NO: 2003035 - DNA, 15 bp, Homo sapiens
gctgcatttataaaa

SEQ ID NO: 2003036 - DNA, 15 bp, Homo sapiens
ctgcatttataaaag

SEQ ID NO: 2003037 - DNA, 15 bp, Homo sapiens
tgcatttataaaagt

SEQ ID NO: 2003038 - DNA, 15 bp, Homo sapiens
gcatttataaaagtt

SEQ ID NO: 2003039 - DNA, 15 bp, Homo sapiens
catttataaaagttt

SEQ ID NO: 2003040 - DNA, 15 bp, Homo sapiens
atttataaaagttta

SEQ ID NO: 2003041 - DNA, 15 bp, Homo sapiens
tttataaaagtttac

SEQ ID NO: 2003042 - DNA, 15 bp, Homo sapiens
ttataaaagtttaca

SEQ ID NO: 2003043 - DNA, 15 bp, Homo sapiens
tataaaagtttacaa

SEQ ID NO: 2003044 - DNA, 15 bp, Homo sapiens
ataaaagtttacaat

SEQ ID NO: 2003045 - DNA, 15 bp, Homo sapiens
taaaagtttacaatt

SEQ ID NO: 2003046 - DNA, 15 bp, Homo sapiens
aaaagtttacaattt

SEQ ID NO: 2003047 - DNA, 15 bp, Homo sapiens
aaagtttacaattta

SEQ ID NO: 2003048 - DNA, 15 bp, Homo sapiens
aagtttacaatttaa

SEQ ID NO: 2003049 - DNA, 15 bp, Homo sapiens
agtttacaatttaat

SEQ ID NO: 2003050 - DNA, 15 bp, Homo sapiens
gtttacaatttaatt

SEQ ID NO: 2003051 - DNA, 15 bp, Homo sapiens
tttacaatttaattg

SEQ ID NO: 2003052 - DNA, 15 bp, Homo sapiens
ttacaatttaattgt

SEQ ID NO: 2003053 - DNA, 15 bp, Homo sapiens
tacaatttaattgtg

SEQ ID NO: 2003054 - DNA, 15 bp, Homo sapiens
acaatttaattgtgc

SEQ ID NO: 2003055 - DNA, 15 bp, Homo sapiens
caatttaattgtgct

SEQ ID NO: 2003056 - DNA, 15 bp, Homo sapiens
aatttaattgtgctg

SEQ ID NO: 2003057 - DNA, 15 bp, Homo sapiens
atttaattgtgctgc

SEQ ID NO: 2003058 - DNA, 15 bp, Homo sapiens
tttaattgtgctgct

SEQ ID NO: 2003059 - DNA, 15 bp, Homo sapiens
ttaattgtgctgctt

SEQ ID NO: 2003060 - DNA, 15 bp, Homo sapiens
taattgtgctgctta

SEQ ID NO: 2003061 - DNA, 15 bp, Homo sapiens
aattgtgctgcttat

SEQ ID NO: 2003062 - DNA, 15 bp, Homo sapiens
attgtgctgcttata

SEQ ID NO: 2003063 - DNA, 15 bp, Homo sapiens
ttgtgctgcttatat

SEQ ID NO: 2003064 - DNA, 15 bp, Homo sapiens
tgtgctgcttatatt

SEQ ID NO: 2003065 - DNA, 15 bp, Homo sapiens
gtgctgcttatattt

SEQ ID NO: 2003066 - DNA, 15 bp, Homo sapiens
tgctgcttatatttt

SEQ ID NO: 2003067 - DNA, 15 bp, Homo sapiens
gctgcttatattttt

SEQ ID NO: 2003068 - DNA, 15 bp, Homo sapiens
ctgcttatatttttt

SEQ ID NO: 2003069 - DNA, 15 bp, Homo sapiens
tgcttatatttttta

SEQ ID NO: 2003070 - DNA, 15 bp, Homo sapiens
gcttatattttttat

SEQ ID NO: 2003071 - DNA, 15 bp, Homo sapiens
cttatattttttatg

SEQ ID NO: 2003072 - DNA, 15 bp, Homo sapiens
ttatattttttatgt

SEQ ID NO: 2003073 - DNA, 15 bp, Homo sapiens
tatattttttatgtc

SEQ ID NO: 2003074 - DNA, 15 bp, Homo sapiens
atattttttatgtct

SEQ ID NO: 2003075 - DNA, 15 bp, Homo sapiens
tattttttatgtcta

SEQ ID NO: 2003076 - DNA, 15 bp, Homo sapiens
attttttatgtctat

SEQ ID NO: 2003077 - DNA, 15 bp, Homo sapiens
ttttttatgtctatt

SEQ ID NO: 2003078 - DNA, 15 bp, Homo sapiens
tttttatgtctatta

SEQ ID NO: 2003079 - DNA, 15 bp, Homo sapiens
ttttatgtctattaa

SEQ ID NO: 2003080 - DNA, 15 bp, Homo sapiens
tttatgtctattaat

SEQ ID NO: 2003081 - DNA, 15 bp, Homo sapiens
ttatgtctattaata

SEQ ID NO: 2003082 - DNA, 15 bp, Homo sapiens
tatgtctattaatat

SEQ ID NO: 2003083 - DNA, 15 bp, Homo sapiens
atgtctattaatatg

SEQ ID NO: 2003084 - DNA, 15 bp, Homo sapiens
tgtctattaatatga

SEQ ID NO: 2003085 - DNA, 15 bp, Homo sapiens
gtctattaatatgaa

SEQ ID NO: 2003086 - DNA, 15 bp, Homo sapiens
tctattaatatgaat

SEQ ID NO: 2003087 - DNA, 15 bp, Homo sapiens
ctattaatatgaata

SEQ ID NO: 2003088 - DNA, 15 bp, Homo sapiens
tattaatatgaataa

SEQ ID NO: 2003089 - DNA, 15 bp, Homo sapiens
attaatatgaataat

SEQ ID NO: 2003090 - DNA, 15 bp, Homo sapiens
ttaatatgaataatg

SEQ ID NO: 2003091 - DNA, 15 bp, Homo sapiens
taatatgaataatga

SEQ ID NO: 2003092 - DNA, 15 bp, Homo sapiens
aatatgaataatgag

SEQ ID NO: 2003093 - DNA, 15 bp, Homo sapiens
atatgaataatgagt

SEQ ID NO: 2003094 - DNA, 15 bp, Homo sapiens
tatgaataatgagta

SEQ ID NO: 2003095 - DNA, 15 bp, Homo sapiens
atgaataatgagtat

SEQ ID NO: 2003096 - DNA, 15 bp, Homo sapiens
tgaataatgagtatg

SEQ ID NO: 2003097 - DNA, 15 bp, Homo sapiens
gaataatgagtatgc

SEQ ID NO: 2003098 - DNA, 15 bp, Homo sapiens
aataatgagtatgcc

SEQ ID NO: 2003099 - DNA, 15 bp, Homo sapiens
ataatgagtatgcct

SEQ ID NO: 2003100 - DNA, 15 bp, Homo sapiens
taatgagtatgcctc

SEQ ID NO: 2003101 - DNA, 15 bp, Homo sapiens
aatgagtatgcctca

SEQ ID NO: 2003102 - DNA, 15 bp, Homo sapiens
atgagtatgcctcat

SEQ ID NO: 2003103 - DNA, 15 bp, Homo sapiens
tgagtatgcctcatt

SEQ ID NO: 2003104 - DNA, 15 bp, Homo sapiens
gagtatgcctcatta

SEQ ID NO: 2003105 - DNA, 15 bp, Homo sapiens
agtatgcctcattag

SEQ ID NO: 2003106 - DNA, 15 bp, Homo sapiens
gtatgcctcattagg

SEQ ID NO: 2003107 - DNA, 15 bp, Homo sapiens
tatgcctcattaggt

SEQ ID NO: 2003108 - DNA, 15 bp, Homo sapiens
atgcctcattaggta

SEQ ID NO: 2003109 - DNA, 15 bp, Homo sapiens
tgcctcattaggtag

SEQ ID NO: 2003110 - DNA, 15 bp, Homo sapiens
gcctcattaggtagc

SEQ ID NO: 2003111 - DNA, 15 bp, Homo sapiens
cctcattaggtagca

SEQ ID NO: 2003112 - DNA, 15 bp, Homo sapiens
ctcattaggtagcat

SEQ ID NO: 2003113 - DNA, 15 bp, Homo sapiens
tcattaggtagcatg

SEQ ID NO: 2003114 - DNA, 15 bp, Homo sapiens
cattaggtagcatga

SEQ ID NO: 2003115 - DNA, 15 bp, Homo sapiens
attaggtagcatgat

SEQ ID NO: 2003116 - DNA, 15 bp, Homo sapiens
ttaggtagcatgatt

SEQ ID NO: 2003117 - DNA, 15 bp, Homo sapiens
taggtagcatgattt

SEQ ID NO: 2003118 - DNA, 15 bp, Homo sapiens
aggtagcatgattta

SEQ ID NO: 2003119 - DNA, 15 bp, Homo sapiens
ggtagcatgatttaa

SEQ ID NO: 2003120 - DNA, 15 bp, Homo sapiens
gtagcatgatttaat

SEQ ID NO: 2003121 - DNA, 15 bp, Homo sapiens
tagcatgatttaata

SEQ ID NO: 2003122 - DNA, 15 bp, Homo sapiens
agcatgatttaatag

SEQ ID NO: 2003123 - DNA, 15 bp, Homo sapiens
gcatgatttaataga

SEQ ID NO: 2003124 - DNA, 15 bp, Homo sapiens
catgatttaatagat

SEQ ID NO: 2003125 - DNA, 15 bp, Homo sapiens
atgatttaatagatt

SEQ ID NO: 2003126 - DNA, 15 bp, Homo sapiens
tgatttaatagatta

SEQ ID NO: 2003127 - DNA, 15 bp, Homo sapiens
gatttaatagattag

SEQ ID NO: 2003128 - DNA, 15 bp, Homo sapiens
atttaatagattagc

SEQ ID NO: 2003129 - DNA, 15 bp, Homo sapiens
tttaatagattagca

SEQ ID NO: 2003130 - DNA, 15 bp, Homo sapiens
ttaatagattagcaa

SEQ ID NO: 2003131 - DNA, 15 bp, Homo sapiens
taatagattagcaat

SEQ ID NO: 2003132 - DNA, 15 bp, Homo sapiens
aatagattagcaata

SEQ ID NO: 2003133 - DNA, 15 bp, Homo sapiens
atagattagcaatac

SEQ ID NO: 2003134 - DNA, 15 bp, Homo sapiens
tagattagcaatacc

SEQ ID NO: 2003135 - DNA, 15 bp, Homo sapiens
agattagcaatacca

SEQ ID NO: 2003136 - DNA, 15 bp, Homo sapiens
gattagcaataccaa

SEQ ID NO: 2003137 - DNA, 15 bp, Homo sapiens
attagcaataccaac

SEQ ID NO: 2003138 - DNA, 15 bp, Homo sapiens
ttagcaataccaact

SEQ ID NO: 2003139 - DNA, 15 bp, Homo sapiens
tagcaataccaactt

SEQ ID NO: 2003140 - DNA, 15 bp, Homo sapiens
agcaataccaacttt

SEQ ID NO: 2003141 - DNA, 15 bp, Homo sapiens
gcaataccaactttt

SEQ ID NO: 2003142 - DNA, 15 bp, Homo sapiens
caataccaacttttg

SEQ ID NO: 2003143 - DNA, 15 bp, Homo sapiens
aataccaacttttga

SEQ ID NO: 2003144 - DNA, 15 bp, Homo sapiens
ataccaacttttgaa

SEQ ID NO: 2003145 - DNA, 15 bp, Homo sapiens
taccaacttttgaaa

SEQ ID NO: 2003146 - DNA, 15 bp, Homo sapiens
accaacttttgaaaa

SEQ ID NO: 2003147 - DNA, 15 bp, Homo sapiens
ccaacttttgaaaat

SEQ ID NO: 2003148 - DNA, 15 bp, Homo sapiens
caacttttgaaaatc

SEQ ID NO: 2003149 - DNA, 15 bp, Homo sapiens
aacttttgaaaatct

SEQ ID NO: 2003150 - DNA, 15 bp, Homo sapiens
acttttgaaaatctg

SEQ ID NO: 2003151 - DNA, 15 bp, Homo sapiens
cttttgaaaatctga

SEQ ID NO: 2003152 - DNA, 15 bp, Homo sapiens
ttttgaaaatctgag

SEQ ID NO: 2003153 - DNA, 15 bp, Homo sapiens
tttgaaaatctgagt

SEQ ID NO: 2003154 - DNA, 15 bp, Homo sapiens
ttgaaaatctgagtg

SEQ ID NO: 2003155 - DNA, 15 bp, Homo sapiens
tgaaaatctgagtgc

SEQ ID NO: 2003156 - DNA, 15 bp, Homo sapiens
gaaaatctgagtgct

SEQ ID NO: 2003157 - DNA, 15 bp, Homo sapiens
aaaatctgagtgctg

SEQ ID NO: 2003158 - DNA, 15 bp, Homo sapiens
aaatctgagtgctgt

SEQ ID NO: 2003159 - DNA, 15 bp, Homo sapiens
aatctgagtgctgtg

SEQ ID NO: 2003160 - DNA, 15 bp, Homo sapiens
atctgagtgctgtgg

SEQ ID NO: 2003161 - DNA, 15 bp, Homo sapiens
tctgagtgctgtggt

SEQ ID NO: 2003162 - DNA, 15 bp, Homo sapiens
ctgagtgctgtggtt

SEQ ID NO: 2003163 - DNA, 15 bp, Homo sapiens
tgagtgctgtggttg

SEQ ID NO: 2003164 - DNA, 15 bp, Homo sapiens
gagtgctgtggttgt

SEQ ID NO: 2003165 - DNA, 15 bp, Homo sapiens
agtgctgtggttgtt

SEQ ID NO: 2003166 - DNA, 15 bp, Homo sapiens
gtgctgtggttgttg

SEQ ID NO: 2003167 - DNA, 15 bp, Homo sapiens
tgctgtggttgttgg

SEQ ID NO: 2003168 - DNA, 15 bp, Homo sapiens
gctgtggttgttggt

SEQ ID NO: 2003169 - DNA, 15 bp, Homo sapiens
ctgtggttgttggtg

SEQ ID NO: 2003170 - DNA, 15 bp, Homo sapiens
tgtggttgttggtgt

SEQ ID NO: 2003171 - DNA, 15 bp, Homo sapiens
gtggttgttggtgta

SEQ ID NO: 2003172 - DNA, 15 bp, Homo sapiens
tggttgttggtgtaa

SEQ ID NO: 2003173 - DNA, 15 bp, Homo sapiens
ggttgttggtgtaaa

SEQ ID NO: 2003174 - DNA, 15 bp, Homo sapiens
gttgttggtgtaaaa

SEQ ID NO: 2003175 - DNA, 15 bp, Homo sapiens
ttgttggtgtaaaat

SEQ ID NO: 2003176 - DNA, 15 bp, Homo sapiens
tgttggtgtaaaatg

SEQ ID NO: 2003177 - DNA, 15 bp, Homo sapiens
gttggtgtaaaatgg

SEQ ID NO: 2003178 - DNA, 15 bp, Homo sapiens
ttggtgtaaaatgga

SEQ ID NO: 2003179 - DNA, 15 bp, Homo sapiens
tggtgtaaaatggaa

SEQ ID NO: 2003180 - DNA, 15 bp, Homo sapiens
ggtgtaaaatggaag

SEQ ID NO: 2003181 - DNA, 15 bp, Homo sapiens
gtgtaaaatggaaga

SEQ ID NO: 2003182 - DNA, 15 bp, Homo sapiens
tgtaaaatggaagaa

SEQ ID NO: 2003183 - DNA, 15 bp, Homo sapiens
gtaaaatggaagaaa

SEQ ID NO: 2003184 - DNA, 15 bp, Homo sapiens
taaaatggaagaaaa

SEQ ID NO: 2003185 - DNA, 15 bp, Homo sapiens
aaaatggaagaaaag

SEQ ID NO: 2003186 - DNA, 15 bp, Homo sapiens
aaatggaagaaaagt

SEQ ID NO: 2003187 - DNA, 15 bp, Homo sapiens
aatggaagaaaagtt

SEQ ID NO: 2003188 - DNA, 15 bp, Homo sapiens
atggaagaaaagttt

SEQ ID NO: 2003189 - DNA, 15 bp, Homo sapiens
tggaagaaaagttta

SEQ ID NO: 2003190 - DNA, 15 bp, Homo sapiens
ggaagaaaagtttaa

SEQ ID NO: 2003191 - DNA, 15 bp, Homo sapiens
gaagaaaagtttaat

SEQ ID NO: 2003192 - DNA, 15 bp, Homo sapiens
aagaaaagtttaatg

SEQ ID NO: 2003193 - DNA, 15 bp, Homo sapiens
agaaaagtttaatgc

SEQ ID NO: 2003194 - DNA, 15 bp, Homo sapiens
gaaaagtttaatgcc

SEQ ID NO: 2003195 - DNA, 15 bp, Homo sapiens
aaaagtttaatgcct

SEQ ID NO: 2003196 - DNA, 15 bp, Homo sapiens
aaagtttaatgcctt

SEQ ID NO: 2003197 - DNA, 15 bp, Homo sapiens
aagtttaatgccttt

SEQ ID NO: 2003198 - DNA, 15 bp, Homo sapiens
agtttaatgcctttt

SEQ ID NO: 2003199 - DNA, 15 bp, Homo sapiens
gtttaatgcctttta

SEQ ID NO: 2003200 - DNA, 15 bp, Homo sapiens
tttaatgccttttat

SEQ ID NO: 2003201 - DNA, 15 bp, Homo sapiens
ttaatgccttttatt

SEQ ID NO: 2003202 - DNA, 15 bp, Homo sapiens
taatgccttttatta

SEQ ID NO: 2003203 - DNA, 15 bp, Homo sapiens
aatgccttttattaa

SEQ ID NO: 2003204 - DNA, 15 bp, Homo sapiens
atgccttttattaac

SEQ ID NO: 2003205 - DNA, 15 bp, Homo sapiens
tgccttttattaaca

SEQ ID NO: 2003206 - DNA, 15 bp, Homo sapiens
gccttttattaacat

SEQ ID NO: 2003207 - DNA, 15 bp, Homo sapiens
ccttttattaacatt

SEQ ID NO: 2003208 - DNA, 15 bp, Homo sapiens
cttttattaacattt

SEQ ID NO: 2003209 - DNA, 15 bp, Homo sapiens
ttttattaacattta

SEQ ID NO: 2003210 - DNA, 15 bp, Homo sapiens
tttattaacatttag

SEQ ID NO: 2003211 - DNA, 15 bp, Homo sapiens
ttattaacatttagg

SEQ ID NO: 2003212 - DNA, 15 bp, Homo sapiens
tattaacatttaggc

SEQ ID NO: 2003213 - DNA, 15 bp, Homo sapiens
attaacatttaggct

SEQ ID NO: 2003214 - DNA, 15 bp, Homo sapiens
ttaacatttaggcta

SEQ ID NO: 2003215 - DNA, 15 bp, Homo sapiens
taacatttaggctaa

SEQ ID NO: 2003216 - DNA, 15 bp, Homo sapiens
aacatttaggctaag

SEQ ID NO: 2003217 - DNA, 15 bp, Homo sapiens
acatttaggctaagt

SEQ ID NO: 2003218 - DNA, 15 bp, Homo sapiens
catttaggctaagtg

SEQ ID NO: 2003219 - DNA, 15 bp, Homo sapiens
atttaggctaagtga

SEQ ID NO: 2003220 - DNA, 15 bp, Homo sapiens
tttaggctaagtgaa

SEQ ID NO: 2003221 - DNA, 15 bp, Homo sapiens
ttaggctaagtgaat

SEQ ID NO: 2003222 - DNA, 15 bp, Homo sapiens
taggctaagtgaatt

SEQ ID NO: 2003223 - DNA, 15 bp, Homo sapiens
aggctaagtgaattt

SEQ ID NO: 2003224 - DNA, 15 bp, Homo sapiens
ggctaagtgaatttc

SEQ ID NO: 2003225 - DNA, 15 bp, Homo sapiens
gctaagtgaatttct

SEQ ID NO: 2003226 - DNA, 15 bp, Homo sapiens
ctaagtgaatttctt

SEQ ID NO: 2003227 - DNA, 15 bp, Homo sapiens
taagtgaatttcttt

SEQ ID NO: 2003228 - DNA, 15 bp, Homo sapiens
aagtgaatttctttt

SEQ ID NO: 2003229 - DNA, 15 bp, Homo sapiens
agtgaatttctttta

SEQ ID NO: 2003230 - DNA, 15 bp, Homo sapiens
gtgaatttcttttat

SEQ ID NO: 2003231 - DNA, 15 bp, Homo sapiens
tgaatttcttttatc

SEQ ID NO: 2003232 - DNA, 15 bp, Homo sapiens
gaatttcttttatca

SEQ ID NO: 2003233 - DNA, 15 bp, Homo sapiens
aatttcttttatcag

SEQ ID NO: 2003234 - DNA, 15 bp, Homo sapiens
atttcttttatcagt

SEQ ID NO: 2003235 - DNA, 15 bp, Homo sapiens
tttcttttatcagtt

SEQ ID NO: 2003236 - DNA, 15 bp, Homo sapiens
ttcttttatcagttt

SEQ ID NO: 2003237 - DNA, 15 bp, Homo sapiens
tcttttatcagttta

SEQ ID NO: 2003238 - DNA, 15 bp, Homo sapiens
cttttatcagtttaa

SEQ ID NO: 2003239 - DNA, 15 bp, Homo sapiens
ttttatcagtttaaa

SEQ ID NO: 2003240 - DNA, 15 bp, Homo sapiens
tttatcagtttaaaa

SEQ ID NO: 2003241 - DNA, 15 bp, Homo sapiens
ttatcagtttaaaaa

SEQ ID NO: 2003242 - DNA, 15 bp, Homo sapiens
tatcagtttaaaaat

SEQ ID NO: 2003243 - DNA, 15 bp, Homo sapiens
atcagtttaaaaata

SEQ ID NO: 2003244 - DNA, 15 bp, Homo sapiens
tcagtttaaaaatat

SEQ ID NO: 2003245 - DNA, 15 bp, Homo sapiens
cagtttaaaaatatc

SEQ ID NO: 2003246 - DNA, 15 bp, Homo sapiens
agtttaaaaatatct

SEQ ID NO: 2003247 - DNA, 15 bp, Homo sapiens
gtttaaaaatatcta

SEQ ID NO: 2003248 - DNA, 15 bp, Homo sapiens
tttaaaaatatctac

SEQ ID NO: 2003249 - DNA, 15 bp, Homo sapiens
ttaaaaatatctaca

SEQ ID NO: 2003250 - DNA, 15 bp, Homo sapiens
taaaaatatctacat

SEQ ID NO: 2003251 - DNA, 15 bp, Homo sapiens
aaaaatatctacata

SEQ ID NO: 2003252 - DNA, 15 bp, Homo sapiens
aaaatatctacatat

SEQ ID NO: 2003253 - DNA, 15 bp, Homo sapiens
aaatatctacatatt

SEQ ID NO: 2003254 - DNA, 15 bp, Homo sapiens
aatatctacatattt

SEQ ID NO: 2003255 - DNA, 15 bp, Homo sapiens
atatctacatatttg

SEQ ID NO: 2003256 - DNA, 15 bp, Homo sapiens
tatctacatatttgt

SEQ ID NO: 2003257 - DNA, 15 bp, Homo sapiens
atctacatatttgtt

SEQ ID NO: 2003258 - DNA, 15 bp, Homo sapiens
tctacatatttgtta

SEQ ID NO: 2003259 - DNA, 15 bp, Homo sapiens
ctacatatttgttaa

SEQ ID NO: 2003260 - DNA, 15 bp, Homo sapiens
tacatatttgttaag

SEQ ID NO: 2003261 - DNA, 15 bp, Homo sapiens
acatatttgttaagt

SEQ ID NO: 2003262 - DNA, 15 bp, Homo sapiens
catatttgttaagtg

SEQ ID NO: 2003263 - DNA, 15 bp, Homo sapiens
atatttgttaagtgt

SEQ ID NO: 2003264 - DNA, 15 bp, Homo sapiens
tatttgttaagtgtt

SEQ ID NO: 2003265 - DNA, 15 bp, Homo sapiens
atttgttaagtgtta

SEQ ID NO: 2003266 - DNA, 15 bp, Homo sapiens
tttgttaagtgttaa

SEQ ID NO: 2003267 - DNA, 15 bp, Homo sapiens
ttgttaagtgttaaa

SEQ ID NO: 2003268 - DNA, 15 bp, Homo sapiens
tgttaagtgttaaat

SEQ ID NO: 2003269 - DNA, 15 bp, Homo sapiens
gttaagtgttaaatg

SEQ ID NO: 2003270 - DNA, 15 bp, Homo sapiens
ttaagtgttaaatgt

SEQ ID NO: 2003271 - DNA, 15 bp, Homo sapiens
taagtgttaaatgtt

SEQ ID NO: 2003272 - DNA, 15 bp, Homo sapiens
aagtgttaaatgttt

SEQ ID NO: 2003273 - DNA, 15 bp, Homo sapiens
agtgttaaatgtttc

SEQ ID NO: 2003274 - DNA, 15 bp, Homo sapiens
gtgttaaatgtttct

SEQ ID NO: 2003275 - DNA, 15 bp, Homo sapiens
tgttaaatgtttcta

SEQ ID NO: 2003276 - DNA, 15 bp, Homo sapiens
gttaaatgtttctac

SEQ ID NO: 2003277 - DNA, 15 bp, Homo sapiens
ttaaatgtttctacg

SEQ ID NO: 2003278 - DNA, 15 bp, Homo sapiens
taaatgtttctacgt

SEQ ID NO: 2003279 - DNA, 15 bp, Homo sapiens
aaatgtttctacgtt

SEQ ID NO: 2003280 - DNA, 15 bp, Homo sapiens
aatgtttctacgttt

SEQ ID NO: 2003281 - DNA, 15 bp, Homo sapiens
atgtttctacgtttg

SEQ ID NO: 2003282 - DNA, 15 bp, Homo sapiens
tgtttctacgtttgt

SEQ ID NO: 2003283 - DNA, 15 bp, Homo sapiens
gtttctacgtttgtg

SEQ ID NO: 2003284 - DNA, 15 bp, Homo sapiens
tttctacgtttgtga

SEQ ID NO: 2003285 - DNA, 15 bp, Homo sapiens
ttctacgtttgtgat

SEQ ID NO: 2003286 - DNA, 15 bp, Homo sapiens
tctacgtttgtgata

SEQ ID NO: 2003287 - DNA, 15 bp, Homo sapiens
ctacgtttgtgataa

SEQ ID NO: 2003288 - DNA, 15 bp, Homo sapiens
tacgtttgtgataac

SEQ ID NO: 2003289 - DNA, 15 bp, Homo sapiens
acgtttgtgataact

SEQ ID NO: 2003290 - DNA, 15 bp, Homo sapiens
cgtttgtgataactt

SEQ ID NO: 2003291 - DNA, 15 bp, Homo sapiens
gtttgtgataacttc

SEQ ID NO: 2003292 - DNA, 15 bp, Homo sapiens
tttgtgataacttca

SEQ ID NO: 2003293 - DNA, 15 bp, Homo sapiens
ttgtgataacttcat

SEQ ID NO: 2003294 - DNA, 15 bp, Homo sapiens
tgtgataacttcata

SEQ ID NO: 2003295 - DNA, 15 bp, Homo sapiens
gtgataacttcatat

SEQ ID NO: 2003296 - DNA, 15 bp, Homo sapiens
tgataacttcatatt

SEQ ID NO: 2003297 - DNA, 15 bp, Homo sapiens
gataacttcatattc

SEQ ID NO: 2003298 - DNA, 15 bp, Homo sapiens
ataacttcatattca

SEQ ID NO: 2003299 - DNA, 15 bp, Homo sapiens
taacttcatattcaa

SEQ ID NO: 2003300 - DNA, 15 bp, Homo sapiens
aacttcatattcaac

SEQ ID NO: 2003301 - DNA, 15 bp, Homo sapiens
acttcatattcaaca

SEQ ID NO: 2003302 - DNA, 15 bp, Homo sapiens
cttcatattcaacat

SEQ ID NO: 2003303 - DNA, 15 bp, Homo sapiens
ttcatattcaacata

SEQ ID NO: 2003304 - DNA, 15 bp, Homo sapiens
tcatattcaacatag

SEQ ID NO: 2003305 - DNA, 15 bp, Homo sapiens
catattcaacatagg

SEQ ID NO: 2003306 - DNA, 15 bp, Homo sapiens
atattcaacatagga

SEQ ID NO: 2003307 - DNA, 15 bp, Homo sapiens
tattcaacataggag

SEQ ID NO: 2003308 - DNA, 15 bp, Homo sapiens
attcaacataggaga

SEQ ID NO: 2003309 - DNA, 15 bp, Homo sapiens
ttcaacataggagaa

SEQ ID NO: 2003310 - DNA, 15 bp, Homo sapiens
tcaacataggagaag

SEQ ID NO: 2003311 - DNA, 15 bp, Homo sapiens
caacataggagaagc

SEQ ID NO: 2003312 - DNA, 15 bp, Homo sapiens
aacataggagaagct

SEQ ID NO: 2003313 - DNA, 15 bp, Homo sapiens
acataggagaagctg

SEQ ID NO: 2003314 - DNA, 15 bp, Homo sapiens
cataggagaagctgg

SEQ ID NO: 2003315 - DNA, 15 bp, Homo sapiens
ataggagaagctggg

SEQ ID NO: 2003316 - DNA, 15 bp, Homo sapiens
taggagaagctgggg

SEQ ID NO: 2003317 - DNA, 15 bp, Homo sapiens
aggagaagctggggt

SEQ ID NO: 2003318 - DNA, 15 bp, Homo sapiens
ggagaagctggggtt

SEQ ID NO: 2003319 - DNA, 15 bp, Homo sapiens
gagaagctggggttt

SEQ ID NO: 2003320 - DNA, 15 bp, Homo sapiens
agaagctggggttta

SEQ ID NO: 2003321 - DNA, 15 bp, Homo sapiens
gaagctggggtttaa

SEQ ID NO: 2003322 - DNA, 15 bp, Homo sapiens
aagctggggtttaaa

SEQ ID NO: 2003323 - DNA, 15 bp, Homo sapiens
agctggggtttaaac

SEQ ID NO: 2003324 - DNA, 15 bp, Homo sapiens
gctggggtttaaaca

SEQ ID NO: 2003325 - DNA, 15 bp, Homo sapiens
ctggggtttaaacag

SEQ ID NO: 2003326 - DNA, 15 bp, Homo sapiens
tggggtttaaacaga

SEQ ID NO: 2003327 - DNA, 15 bp, Homo sapiens
ggggtttaaacagat

SEQ ID NO: 2003328 - DNA, 15 bp, Homo sapiens
gggtttaaacagata

SEQ ID NO: 2003329 - DNA, 15 bp, Homo sapiens
ggtttaaacagatat

SEQ ID NO: 2003330 - DNA, 15 bp, Homo sapiens
gtttaaacagatatt

SEQ ID NO: 2003331 - DNA, 15 bp, Homo sapiens
tttaaacagatattc

SEQ ID NO: 2003332 - DNA, 15 bp, Homo sapiens
ttaaacagatattcc

SEQ ID NO: 2003333 - DNA, 15 bp, Homo sapiens
taaacagatattcct

SEQ ID NO: 2003334 - DNA, 15 bp, Homo sapiens
aaacagatattcctg

SEQ ID NO: 2003335 - DNA, 15 bp, Homo sapiens
aacagatattcctgt

SEQ ID NO: 2003336 - DNA, 15 bp, Homo sapiens
acagatattcctgtc

SEQ ID NO: 2003337 - DNA, 15 bp, Homo sapiens
cagatattcctgtcc

SEQ ID NO: 2003338 - DNA, 15 bp, Homo sapiens
agatattcctgtcct

SEQ ID NO: 2003339 - DNA, 15 bp, Homo sapiens
gatattcctgtcctt

SEQ ID NO: 2003340 - DNA, 15 bp, Homo sapiens
atattcctgtcctta

SEQ ID NO: 2003341 - DNA, 15 bp, Homo sapiens
tattcctgtccttat

SEQ ID NO: 2003342 - DNA, 15 bp, Homo sapiens
attcctgtccttata

SEQ ID NO: 2003343 - DNA, 15 bp, Homo sapiens
ttcctgtccttataa

SEQ ID NO: 2003344 - DNA, 15 bp, Homo sapiens
tcctgtccttataag

SEQ ID NO: 2003345 - DNA, 15 bp, Homo sapiens
cctgtccttataagc

SEQ ID NO: 2003346 - DNA, 15 bp, Homo sapiens
ctgtccttataagct

SEQ ID NO: 2003347 - DNA, 15 bp, Homo sapiens
tgtccttataagctt

SEQ ID NO: 2003348 - DNA, 15 bp, Homo sapiens
gtccttataagctta

SEQ ID NO: 2003349 - DNA, 15 bp, Homo sapiens
tccttataagcttat

SEQ ID NO: 2003350 - DNA, 15 bp, Homo sapiens
ccttataagcttatg

SEQ ID NO: 2003351 - DNA, 15 bp, Homo sapiens
cttataagcttatgt

SEQ ID NO: 2003352 - DNA, 15 bp, Homo sapiens
ttataagcttatgtt

SEQ ID NO: 2003353 - DNA, 15 bp, Homo sapiens
tataagcttatgttc

SEQ ID NO: 2003354 - DNA, 15 bp, Homo sapiens
ataagcttatgttct

SEQ ID NO: 2003355 - DNA, 15 bp, Homo sapiens
taagcttatgttctg

SEQ ID NO: 2003356 - DNA, 15 bp, Homo sapiens
aagcttatgttctgt

SEQ ID NO: 2003357 - DNA, 15 bp, Homo sapiens
agcttatgttctgtg

SEQ ID NO: 2003358 - DNA, 15 bp, Homo sapiens
gcttatgttctgtga

SEQ ID NO: 2003359 - DNA, 15 bp, Homo sapiens
cttatgttctgtgaa

SEQ ID NO: 2003360 - DNA, 15 bp, Homo sapiens
ttatgttctgtgaag

SEQ ID NO: 2003361 - DNA, 15 bp, Homo sapiens
tatgttctgtgaagt

SEQ ID NO: 2003362 - DNA, 15 bp, Homo sapiens
atgttctgtgaagta

SEQ ID NO: 2003363 - DNA, 15 bp, Homo sapiens
tgttctgtgaagtag

SEQ ID NO: 2003364 - DNA, 15 bp, Homo sapiens
gttctgtgaagtagg

SEQ ID NO: 2003365 - DNA, 15 bp, Homo sapiens
ttctgtgaagtaggg

SEQ ID NO: 2003366 - DNA, 15 bp, Homo sapiens
tctgtgaagtaggga

SEQ ID NO: 2003367 - DNA, 15 bp, Homo sapiens
ctgtgaagtagggat

SEQ ID NO: 2003368 - DNA, 15 bp, Homo sapiens
tgtgaagtagggata

SEQ ID NO: 2003369 - DNA, 15 bp, Homo sapiens
gtgaagtagggatat

SEQ ID NO: 2003370 - DNA, 15 bp, Homo sapiens
tgaagtagggatatt

SEQ ID NO: 2003371 - DNA, 15 bp, Homo sapiens
gaagtagggatatta

SEQ ID NO: 2003372 - DNA, 15 bp, Homo sapiens
aagtagggatattaa

SEQ ID NO: 2003373 - DNA, 15 bp, Homo sapiens
agtagggatattaag

SEQ ID NO: 2003374 - DNA, 15 bp, Homo sapiens
gtagggatattaagc

SEQ ID NO: 2003375 - DNA, 15 bp, Homo sapiens
tagggatattaagca

SEQ ID NO: 2003376 - DNA, 15 bp, Homo sapiens
agggatattaagcaa

SEQ ID NO: 2003377 - DNA, 15 bp, Homo sapiens
gggatattaagcaaa

SEQ ID NO: 2003378 - DNA, 15 bp, Homo sapiens
ggatattaagcaaat

SEQ ID NO: 2003379 - DNA, 15 bp, Homo sapiens
gatattaagcaaata

SEQ ID NO: 2003380 - DNA, 15 bp, Homo sapiens
atattaagcaaataa

SEQ ID NO: 2003381 - DNA, 15 bp, Homo sapiens
tattaagcaaataat

SEQ ID NO: 2003382 - DNA, 15 bp, Homo sapiens
attaagcaaataatt

SEQ ID NO: 2003383 - DNA, 15 bp, Homo sapiens
ttaagcaaataatta

SEQ ID NO: 2003384 - DNA, 15 bp, Homo sapiens
taagcaaataattac

SEQ ID NO: 2003385 - DNA, 15 bp, Homo sapiens
aagcaaataattaca

SEQ ID NO: 2003386 - DNA, 15 bp, Homo sapiens
agcaaataattacat

SEQ ID NO: 2003387 - DNA, 15 bp, Homo sapiens
gcaaataattacata

SEQ ID NO: 2003388 - DNA, 15 bp, Homo sapiens
caaataattacataa

SEQ ID NO: 2003389 - DNA, 15 bp, Homo sapiens
aaataattacataaa

SEQ ID NO: 2003390 - DNA, 15 bp, Homo sapiens
taattacataaatac

SEQ ID NO: 2003391 - DNA, 15 bp, Homo sapiens
aattacataaataca

SEQ ID NO: 2003392 - DNA, 15 bp, Homo sapiens
attacataaatacat

SEQ ID NO: 2003393 - DNA, 15 bp, Homo sapiens
ttacataaatacatg

SEQ ID NO: 2003394 - DNA, 15 bp, Homo sapiens
tacataaatacatgt

SEQ ID NO: 2003395 - DNA, 15 bp, Homo sapiens
acataaatacatgta

SEQ ID NO: 2003396 - DNA, 15 bp, Homo sapiens
cataaatacatgtac

SEQ ID NO: 2003397 - DNA, 15 bp, Homo sapiens
ataaatacatgtaca

SEQ ID NO: 2003398 - DNA, 15 bp, Homo sapiens
taaatacatgtacaa

SEQ ID NO: 2003399 - DNA, 15 bp, Homo sapiens
aaatacatgtacaaa

SEQ ID NO: 2003400 - DNA, 15 bp, Homo sapiens
aatacatgtacaaac

SEQ ID NO: 2003401 - DNA, 15 bp, Homo sapiens
atacatgtacaaact

SEQ ID NO: 2003402 - DNA, 15 bp, Homo sapiens
tacatgtacaaactg

SEQ ID NO: 2003403 - DNA, 15 bp, Homo sapiens
acatgtacaaactgt

SEQ ID NO: 2003404 - DNA, 15 bp, Homo sapiens
catgtacaaactgtg

SEQ ID NO: 2003405 - DNA, 15 bp, Homo sapiens
atgtacaaactgtga

SEQ ID NO: 2003406 - DNA, 15 bp, Homo sapiens
tgtacaaactgtgaa

SEQ ID NO: 2003407 - DNA, 15 bp, Homo sapiens
gtacaaactgtgaaa

SEQ ID NO: 2003408 - DNA, 15 bp, Homo sapiens
tacaaactgtgaaaa

SEQ ID NO: 2003409 - DNA, 15 bp, Homo sapiens
acaaactgtgaaaag

SEQ ID NO: 2003410 - DNA, 15 bp, Homo sapiens
caaactgtgaaaagt

SEQ ID NO: 2003411 - DNA, 15 bp, Homo sapiens
aaactgtgaaaagtg

SEQ ID NO: 2003412 - DNA, 15 bp, Homo sapiens
aactgtgaaaagtgc

SEQ ID NO: 2003413 - DNA, 15 bp, Homo sapiens
actgtgaaaagtgca

SEQ ID NO: 2003414 - DNA, 15 bp, Homo sapiens
ctgtgaaaagtgcaa

SEQ ID NO: 2003415 - DNA, 15 bp, Homo sapiens
tgtgaaaagtgcaat

SEQ ID NO: 2003416 - DNA, 15 bp, Homo sapiens
gtgaaaagtgcaatg

SEQ ID NO: 2003417 - DNA, 15 bp, Homo sapiens
tgaaaagtgcaatga

SEQ ID NO: 2003418 - DNA, 15 bp, Homo sapiens
gaaaagtgcaatgaa

SEQ ID NO: 2003419 - DNA, 15 bp, Homo sapiens
aaaagtgcaatgaaa

SEQ ID NO: 2003420 - DNA, 15 bp, Homo sapiens
aaagtgcaatgaaaa

SEQ ID NO: 2003421 - DNA, 15 bp, Homo sapiens
aagtgcaatgaaaaa

SEQ ID NO: 2003422 - DNA, 15 bp, Homo sapiens
agtgcaatgaaaaaa

SEQ ID NO: 2003423 - DNA, 15 bp, Homo sapiens
gtgcaatgaaaaaag

SEQ ID NO: 2003424 - DNA, 15 bp, Homo sapiens
tgcaatgaaaaaagg

SEQ ID NO: 2003425 - DNA, 15 bp, Homo sapiens
gcaatgaaaaaaggc

SEQ ID NO: 2003426 - DNA, 15 bp, Homo sapiens
caatgaaaaaaggct

SEQ ID NO: 2003427 - DNA, 15 bp, Homo sapiens
aatgaaaaaaggctt

SEQ ID NO: 2003428 - DNA, 15 bp, Homo sapiens
atgaaaaaaggctta

SEQ ID NO: 2003429 - DNA, 15 bp, Homo sapiens
tgaaaaaaggcttac

SEQ ID NO: 2003430 - DNA, 15 bp, Homo sapiens
gaaaaaaggcttact

SEQ ID NO: 2003431 - DNA, 15 bp, Homo sapiens
aaaaaaggcttactc

SEQ ID NO: 2003432 - DNA, 15 bp, Homo sapiens
aaaaaggcttactcg

SEQ ID NO: 2003433 - DNA, 15 bp, Homo sapiens
aaaaggcttactcgg

SEQ ID NO: 2003434 - DNA, 15 bp, Homo sapiens
aaaggcttactcggt

SEQ ID NO: 2003435 - DNA, 15 bp, Homo sapiens
aaggcttactcggtt

SEQ ID NO: 2003436 - DNA, 15 bp, Homo sapiens
aggcttactcggttt

SEQ ID NO: 2003437 - DNA, 15 bp, Homo sapiens
ggcttactcggtttt

SEQ ID NO: 2003438 - DNA, 15 bp, Homo sapiens
gcttactcggttttc

SEQ ID NO: 2003439 - DNA, 15 bp, Homo sapiens
cttactcggttttca

SEQ ID NO: 2003440 - DNA, 15 bp, Homo sapiens
ttactcggttttcaa

SEQ ID NO: 2003441 - DNA, 15 bp, Homo sapiens
tactcggttttcaaa

SEQ ID NO: 2003442 - DNA, 15 bp, Homo sapiens
actcggttttcaaat

SEQ ID NO: 2003443 - DNA, 15 bp, Homo sapiens
ctcggttttcaaata

SEQ ID NO: 2003444 - DNA, 15 bp, Homo sapiens
tcggttttcaaatac

SEQ ID NO: 2003445 - DNA, 15 bp, Homo sapiens
cggttttcaaataca

SEQ ID NO: 2003446 - DNA, 15 bp, Homo sapiens
ggttttcaaatacaa

SEQ ID NO: 2003447 - DNA, 15 bp, Homo sapiens
gttttcaaatacaaa

SEQ ID NO: 2003448 - DNA, 15 bp, Homo sapiens
ttttcaaatacaaag

SEQ ID NO: 2003449 - DNA, 15 bp, Homo sapiens
tttcaaatacaaagt

SEQ ID NO: 2003450 - DNA, 15 bp, Homo sapiens
ttcaaatacaaagta

SEQ ID NO: 2003451 - DNA, 15 bp, Homo sapiens
tcaaatacaaagtaa

SEQ ID NO: 2003452 - DNA, 15 bp, Homo sapiens
caaatacaaagtaaa

SEQ ID NO: 2003453 - DNA, 15 bp, Homo sapiens
aaatacaaagtaaat

SEQ ID NO: 2003454 - DNA, 15 bp, Homo sapiens
aatacaaagtaaatg

SEQ ID NO: 2003455 - DNA, 15 bp, Homo sapiens
atacaaagtaaatgt

SEQ ID NO: 2003456 - DNA, 15 bp, Homo sapiens
tacaaagtaaatgta

SEQ ID NO: 2003457 - DNA, 15 bp, Homo sapiens
acaaagtaaatgtac

SEQ ID NO: 2003458 - DNA, 15 bp, Homo sapiens
caaagtaaatgtacc

SEQ ID NO: 2003459 - DNA, 15 bp, Homo sapiens
aaagtaaatgtaccc

SEQ ID NO: 2003460 - DNA, 15 bp, Homo sapiens
aagtaaatgtaccct

SEQ ID NO: 2003461 - DNA, 15 bp, Homo sapiens
agtaaatgtaccctg

SEQ ID NO: 2003462 - DNA, 15 bp, Homo sapiens
gtaaatgtaccctgt

SEQ ID NO: 2003463 - DNA, 15 bp, Homo sapiens
taaatgtaccctgtg

SEQ ID NO: 2003464 - DNA, 15 bp, Homo sapiens
aaatgtaccctgtga

SEQ ID NO: 2003465 - DNA, 15 bp, Homo sapiens
aatgtaccctgtgaa

SEQ ID NO: 2003466 - DNA, 15 bp, Homo sapiens
atgtaccctgtgaat

SEQ ID NO: 2003467 - DNA, 15 bp, Homo sapiens
tgtaccctgtgaata

SEQ ID NO: 2003468 - DNA, 15 bp, Homo sapiens
gtaccctgtgaatat

SEQ ID NO: 2003469 - DNA, 15 bp, Homo sapiens
taccctgtgaatata

SEQ ID NO: 2003470 - DNA, 15 bp, Homo sapiens
accctgtgaatataa

SEQ ID NO: 2003471 - DNA, 15 bp, Homo sapiens
ccctgtgaatataaa

SEQ ID NO: 2003472 - DNA, 15 bp, Homo sapiens
cctgtgaatataaag

SEQ ID NO: 2003473 - DNA, 15 bp, Homo sapiens
ctgtgaatataaagt

SEQ ID NO: 2003474 - DNA, 15 bp, Homo sapiens
tgtgaatataaagtt

SEQ ID NO: 2003475 - DNA, 15 bp, Homo sapiens
gtgaatataaagttt

SEQ ID NO: 2003476 - DNA, 15 bp, Homo sapiens
tgaatataaagtttc

SEQ ID NO: 2003477 - DNA, 15 bp, Homo sapiens
gaatataaagtttca

SEQ ID NO: 2003478 - DNA, 15 bp, Homo sapiens
aatataaagtttcat

SEQ ID NO: 2003479 - DNA, 15 bp, Homo sapiens
atataaagtttcatt

SEQ ID NO: 2003480 - DNA, 15 bp, Homo sapiens
tataaagtttcattc

SEQ ID NO: 2003481 - DNA, 15 bp, Homo sapiens
ataaagtttcattcg

SEQ ID NO: 2003482 - DNA, 15 bp, Homo sapiens
taaagtttcattcgt

SEQ ID NO: 2003483 - DNA, 15 bp, Homo sapiens
aaagtttcattcgtg

SEQ ID NO: 2003484 - DNA, 15 bp, Homo sapiens
aagtttcattcgtgt

SEQ ID NO: 2003485 - DNA, 15 bp, Homo sapiens
agtttcattcgtgtt

SEQ ID NO: 2003486 - DNA, 15 bp, Homo sapiens
gtttcattcgtgttt

SEQ ID NO: 2003487 - DNA, 15 bp, Homo sapiens
tttcattcgtgtttc

SEQ ID NO: 2003488 - DNA, 15 bp, Homo sapiens
ttcattcgtgtttca

SEQ ID NO: 2003489 - DNA, 15 bp, Homo sapiens
tcattcgtgtttcaa

SEQ ID NO: 2003490 - DNA, 15 bp, Homo sapiens
cattcgtgtttcaaa

SEQ ID NO: 2003491 - DNA, 15 bp, Homo sapiens
attcgtgtttcaaaa

SEQ ID NO: 2003492 - DNA, 15 bp, Homo sapiens
ttcgtgtttcaaaaa

SEQ ID NO: 2003493 - DNA, 15 bp, Homo sapiens
tcgtgtttcaaaaat

SEQ ID NO: 2003494 - DNA, 15 bp, Homo sapiens
cgtgtttcaaaaatc

SEQ ID NO: 2003495 - DNA, 15 bp, Homo sapiens
gtgtttcaaaaatct

SEQ ID NO: 2003496 - DNA, 15 bp, Homo sapiens
tgtttcaaaaatcta

SEQ ID NO: 2003497 - DNA, 15 bp, Homo sapiens
gtttcaaaaatctag

SEQ ID NO: 2003498 - DNA, 15 bp, Homo sapiens
tttcaaaaatctagt

SEQ ID NO: 2003499 - DNA, 15 bp, Homo sapiens
ttcaaaaatctagtt

SEQ ID NO: 2003500 - DNA, 15 bp, Homo sapiens
tcaaaaatctagttg

SEQ ID NO: 2003501 - DNA, 15 bp, Homo sapiens
caaaaatctagttga

SEQ ID NO: 2003502 - DNA, 15 bp, Homo sapiens
aaaaatctagttgat

SEQ ID NO: 2003503 - DNA, 15 bp, Homo sapiens
aaaatctagttgata

SEQ ID NO: 2003504 - DNA, 15 bp, Homo sapiens
aaatctagttgataa

SEQ ID NO: 2003505 - DNA, 15 bp, Homo sapiens
aatctagttgataaa

SEQ ID NO: 2003506 - DNA, 15 bp, Homo sapiens
atctagttgataaaa

SEQ ID NO: 2003507 - DNA, 15 bp, Homo sapiens
tctagttgataaaag

SEQ ID NO: 2003508 - DNA, 15 bp, Homo sapiens
ctagttgataaaagt

SEQ ID NO: 2003509 - DNA, 15 bp, Homo sapiens
tagttgataaaagta

SEQ ID NO: 2003510 - DNA, 15 bp, Homo sapiens
agttgataaaagtag

SEQ ID NO: 2003511 - DNA, 15 bp, Homo sapiens
gttgataaaagtaga

SEQ ID NO: 2003512 - DNA, 15 bp, Homo sapiens
ttgataaaagtagaa

SEQ ID NO: 2003513 - DNA, 15 bp, Homo sapiens
tgataaaagtagaag

SEQ ID NO: 2003514 - DNA, 15 bp, Homo sapiens
gataaaagtagaagt

SEQ ID NO: 2003515 - DNA, 15 bp, Homo sapiens
ataaaagtagaagtt

SEQ ID NO: 2003516 - DNA, 15 bp, Homo sapiens
taaaagtagaagtta

SEQ ID NO: 2003517 - DNA, 15 bp, Homo sapiens
aaaagtagaagttag

SEQ ID NO: 2003518 - DNA, 15 bp, Homo sapiens
aaagtagaagttagt

SEQ ID NO: 2003519 - DNA, 15 bp, Homo sapiens
aagtagaagttagta

SEQ ID NO: 2003520 - DNA, 15 bp, Homo sapiens
agtagaagttagtaa

SEQ ID NO: 2003521 - DNA, 15 bp, Homo sapiens
gtagaagttagtaaa

SEQ ID NO: 2003522 - DNA, 15 bp, Homo sapiens
tagaagttagtaaaa

SEQ ID NO: 2003523 - DNA, 15 bp, Homo sapiens
agaagttagtaaaat

SEQ ID NO: 2003524 - DNA, 15 bp, Homo sapiens
gaagttagtaaaatc

SEQ ID NO: 2003525 - DNA, 15 bp, Homo sapiens
aagttagtaaaatca

SEQ ID NO: 2003526 - DNA, 15 bp, Homo sapiens
agttagtaaaatcaa

SEQ ID NO: 2003527 - DNA, 15 bp, Homo sapiens
gttagtaaaatcaag

SEQ ID NO: 2003528 - DNA, 15 bp, Homo sapiens
ttagtaaaatcaagt

SEQ ID NO: 2003529 - DNA, 15 bp, Homo sapiens
tagtaaaatcaagtt

SEQ ID NO: 2003530 - DNA, 15 bp, Homo sapiens
agtaaaatcaagttt

SEQ ID NO: 2003531 - DNA, 15 bp, Homo sapiens
gtaaaatcaagttta

SEQ ID NO: 2003532 - DNA, 15 bp, Homo sapiens
taaaatcaagtttac

SEQ ID NO: 2003533 - DNA, 15 bp, Homo sapiens
aaaatcaagtttact

SEQ ID NO: 2003534 - DNA, 15 bp, Homo sapiens
aaatcaagtttactt

SEQ ID NO: 2003535 - DNA, 15 bp, Homo sapiens
aatcaagtttactta

SEQ ID NO: 2003536 - DNA, 15 bp, Homo sapiens
atcaagtttacttat

SEQ ID NO: 2003537 - DNA, 15 bp, Homo sapiens
tcaagtttacttatt

SEQ ID NO: 2003538 - DNA, 15 bp, Homo sapiens
caagtttacttatta

SEQ ID NO: 2003539 - DNA, 15 bp, Homo sapiens
aagtttacttattat

SEQ ID NO: 2003540 - DNA, 15 bp, Homo sapiens
agtttacttattata

SEQ ID NO: 2003541 - DNA, 15 bp, Homo sapiens
gtttacttattatag

SEQ ID NO: 2003542 - DNA, 15 bp, Homo sapiens
tttacttattatagt

SEQ ID NO: 2003543 - DNA, 15 bp, Homo sapiens
ttacttattatagtt

SEQ ID NO: 2003544 - DNA, 15 bp, Homo sapiens
tacttattatagttt

SEQ ID NO: 2003545 - DNA, 15 bp, Homo sapiens
acttattatagtttt

SEQ ID NO: 2003546 - DNA, 15 bp, Homo sapiens
cttattatagtttta

SEQ ID NO: 2003547 - DNA, 15 bp, Homo sapiens
ttattatagttttag

SEQ ID NO: 2003548 - DNA, 15 bp, Homo sapiens
tattatagttttagt

SEQ ID NO: 2003549 - DNA, 15 bp, Homo sapiens
attatagttttagtc

SEQ ID NO: 2003550 - DNA, 15 bp, Homo sapiens
ttatagttttagtct

SEQ ID NO: 2003551 - DNA, 15 bp, Homo sapiens
tatagttttagtctt

SEQ ID NO: 2003552 - DNA, 15 bp, Homo sapiens
atagttttagtctta

SEQ ID NO: 2003553 - DNA, 15 bp, Homo sapiens
tagttttagtcttaa

SEQ ID NO: 2003554 - DNA, 15 bp, Homo sapiens
agttttagtcttaat

SEQ ID NO: 2003555 - DNA, 15 bp, Homo sapiens
gttttagtcttaatt

SEQ ID NO: 2003556 - DNA, 15 bp, Homo sapiens
ttttagtcttaattc

SEQ ID NO: 2003557 - DNA, 15 bp, Homo sapiens
tttagtcttaattca

SEQ ID NO: 2003558 - DNA, 15 bp, Homo sapiens
ttagtcttaattcaa

SEQ ID NO: 2003559 - DNA, 15 bp, Homo sapiens
tagtcttaattcaaa

SEQ ID NO: 2003560 - DNA, 15 bp, Homo sapiens
agtcttaattcaaat

SEQ ID NO: 2003561 - DNA, 15 bp, Homo sapiens
gtcttaattcaaatt

SEQ ID NO: 2003562 - DNA, 15 bp, Homo sapiens
tcttaattcaaatta

SEQ ID NO: 2003563 - DNA, 15 bp, Homo sapiens
cttaattcaaattat

SEQ ID NO: 2003564 - DNA, 15 bp, Homo sapiens
ttaattcaaattata

SEQ ID NO: 2003565 - DNA, 15 bp, Homo sapiens
taattcaaattatac

SEQ ID NO: 2003566 - DNA, 15 bp, Homo sapiens
aattcaaattatact

SEQ ID NO: 2003567 - DNA, 15 bp, Homo sapiens
attcaaattatactt

SEQ ID NO: 2003568 - DNA, 15 bp, Homo sapiens
ttcaaattatacttt

SEQ ID NO: 2003569 - DNA, 15 bp, Homo sapiens
tcaaattatactttt

SEQ ID NO: 2003570 - DNA, 15 bp, Homo sapiens
caaattatactttta

SEQ ID NO: 2003571 - DNA, 15 bp, Homo sapiens
aaattatacttttac

SEQ ID NO: 2003572 - DNA, 15 bp, Homo sapiens
aattatacttttact

SEQ ID NO: 2003573 - DNA, 15 bp, Homo sapiens
attatacttttactt

SEQ ID NO: 2003574 - DNA, 15 bp, Homo sapiens
ttatacttttacttg

SEQ ID NO: 2003575 - DNA, 15 bp, Homo sapiens
tatacttttacttgt

SEQ ID NO: 2003576 - DNA, 15 bp, Homo sapiens
atacttttacttgta

SEQ ID NO: 2003577 - DNA, 15 bp, Homo sapiens
tacttttacttgtaa

SEQ ID NO: 2003578 - DNA, 15 bp, Homo sapiens
acttttacttgtaat

SEQ ID NO: 2003579 - DNA, 15 bp, Homo sapiens
cttttacttgtaatt

SEQ ID NO: 2003580 - DNA, 15 bp, Homo sapiens
ttttacttgtaattg

SEQ ID NO: 2003581 - DNA, 15 bp, Homo sapiens
tttacttgtaattgg

SEQ ID NO: 2003582 - DNA, 15 bp, Homo sapiens
ttacttgtaattgga

SEQ ID NO: 2003583 - DNA, 15 bp, Homo sapiens
tacttgtaattggaa

SEQ ID NO: 2003584 - DNA, 15 bp, Homo sapiens
acttgtaattggaaa

SEQ ID NO: 2003585 - DNA, 15 bp, Homo sapiens
cttgtaattggaaat

SEQ ID NO: 2003586 - DNA, 15 bp, Homo sapiens
ttgtaattggaaata

SEQ ID NO: 2003587 - DNA, 15 bp, Homo sapiens
tgtaattggaaatat

SEQ ID NO: 2003588 - DNA, 15 bp, Homo sapiens
gtaattggaaatatg

SEQ ID NO: 2003589 - DNA, 15 bp, Homo sapiens
taattggaaatatga

SEQ ID NO: 2003590 - DNA, 15 bp, Homo sapiens
aattggaaatatgaa

SEQ ID NO: 2003591 - DNA, 15 bp, Homo sapiens
attggaaatatgaat

SEQ ID NO: 2003592 - DNA, 15 bp, Homo sapiens
ttggaaatatgaatt

SEQ ID NO: 2003593 - DNA, 15 bp, Homo sapiens
tggaaatatgaattt

SEQ ID NO: 2003594 - DNA, 15 bp, Homo sapiens
ggaaatatgaatttt

SEQ ID NO: 2003595 - DNA, 15 bp, Homo sapiens
gaaatatgaattttt

SEQ ID NO: 2003596 - DNA, 15 bp, Homo sapiens
aaatatgaattttta

SEQ ID NO: 2003597 - DNA, 15 bp, Homo sapiens
aatatgaatttttaa

SEQ ID NO: 2003598 - DNA, 15 bp, Homo sapiens
tatgaatttttaaaa

SEQ ID NO: 2003599 - DNA, 15 bp, Homo sapiens
atgaatttttaaaac

SEQ ID NO: 2003600 - DNA, 15 bp, Homo sapiens
tgaatttttaaaact

SEQ ID NO: 2003601 - DNA, 15 bp, Homo sapiens
gaatttttaaaacta

SEQ ID NO: 2003602 - DNA, 15 bp, Homo sapiens
aatttttaaaactat

SEQ ID NO: 2003603 - DNA, 15 bp, Homo sapiens
atttttaaaactatt

SEQ ID NO: 2003604 - DNA, 15 bp, Homo sapiens
tttttaaaactattc

SEQ ID NO: 2003605 - DNA, 15 bp, Homo sapiens
ttttaaaactattca

SEQ ID NO: 2003606 - DNA, 15 bp, Homo sapiens
tttaaaactattcat

SEQ ID NO: 2003607 - DNA, 15 bp, Homo sapiens
ttaaaactattcatt

SEQ ID NO: 2003608 - DNA, 15 bp, Homo sapiens
taaaactattcattg

SEQ ID NO: 2003609 - DNA, 15 bp, Homo sapiens
aaaactattcattgt

SEQ ID NO: 2003610 - DNA, 15 bp, Homo sapiens
aaactattcattgtg

SEQ ID NO: 2003611 - DNA, 15 bp, Homo sapiens
aactattcattgtgg

SEQ ID NO: 2003612 - DNA, 15 bp, Homo sapiens
actattcattgtgga

SEQ ID NO: 2003613 - DNA, 15 bp, Homo sapiens
ctattcattgtggaa

SEQ ID NO: 2003614 - DNA, 15 bp, Homo sapiens
tattcattgtggaaa

SEQ ID NO: 2003615 - DNA, 15 bp, Homo sapiens
attcattgtggaaaa

SEQ ID NO: 2003616 - DNA, 15 bp, Homo sapiens
ttcattgtggaaaaa

SEQ ID NO: 2003617 - DNA, 15 bp, Homo sapiens
tcattgtggaaaaat

SEQ ID NO: 2003618 - DNA, 15 bp, Homo sapiens
cattgtggaaaaatg

SEQ ID NO: 2003619 - DNA, 15 bp, Homo sapiens
attgtggaaaaatgg

SEQ ID NO: 2003620 - DNA, 15 bp, Homo sapiens
ttgtggaaaaatgga

SEQ ID NO: 2003621 - DNA, 15 bp, Homo sapiens
tgtggaaaaatggaa

SEQ ID NO: 2003622 - DNA, 15 bp, Homo sapiens
gtggaaaaatggaaa

SEQ ID NO: 2003623 - DNA, 15 bp, Homo sapiens
tggaaaaatggaaaa

SEQ ID NO: 2003624 - DNA, 15 bp, Homo sapiens
ggaaaaatggaaaaa

SEQ ID NO: 2003625 - DNA, 15 bp, Homo sapiens
gaaaaatggaaaaat

SEQ ID NO: 2003626 - DNA, 15 bp, Homo sapiens
aaaaatggaaaaata

SEQ ID NO: 2003627 - DNA, 15 bp, Homo sapiens
aaaatggaaaaatac

SEQ ID NO: 2003628 - DNA, 15 bp, Homo sapiens
aaatggaaaaataca

SEQ ID NO: 2003629 - DNA, 15 bp, Homo sapiens
aatggaaaaatacac

SEQ ID NO: 2003630 - DNA, 15 bp, Homo sapiens
atggaaaaatacaca

SEQ ID NO: 2003631 - DNA, 15 bp, Homo sapiens
tggaaaaatacacat

SEQ ID NO: 2003632 - DNA, 15 bp, Homo sapiens
ggaaaaatacacata

SEQ ID NO: 2003633 - DNA, 15 bp, Homo sapiens
gaaaaatacacatag

SEQ ID NO: 2003634 - DNA, 15 bp, Homo sapiens
aaaaatacacataga

SEQ ID NO: 2003635 - DNA, 15 bp, Homo sapiens
aaaatacacatagaa

SEQ ID NO: 2003636 - DNA, 15 bp, Homo sapiens
aaatacacatagaat

SEQ ID NO: 2003637 - DNA, 15 bp, Homo sapiens
aatacacatagaata

SEQ ID NO: 2003638 - DNA, 15 bp, Homo sapiens
atacacatagaatag

SEQ ID NO: 2003639 - DNA, 15 bp, Homo sapiens
tacacatagaatagt

SEQ ID NO: 2003640 - DNA, 15 bp, Homo sapiens
acacatagaatagta

SEQ ID NO: 2003641 - DNA, 15 bp, Homo sapiens
cacatagaatagtac

SEQ ID NO: 2003642 - DNA, 15 bp, Homo sapiens
acatagaatagtact

SEQ ID NO: 2003643 - DNA, 15 bp, Homo sapiens
catagaatagtactt

SEQ ID NO: 2003644 - DNA, 15 bp, Homo sapiens
atagaatagtacttc

SEQ ID NO: 2003645 - DNA, 15 bp, Homo sapiens
tagaatagtacttca

SEQ ID NO: 2003646 - DNA, 15 bp, Homo sapiens
agaatagtacttcaa

SEQ ID NO: 2003647 - DNA, 15 bp, Homo sapiens
gaatagtacttcaaa

SEQ ID NO: 2003648 - DNA, 15 bp, Homo sapiens
aatagtacttcaaat

SEQ ID NO: 2003649 - DNA, 15 bp, Homo sapiens
atagtacttcaaatc

SEQ ID NO: 2003650 - DNA, 15 bp, Homo sapiens
tagtacttcaaatcc

SEQ ID NO: 2003651 - DNA, 15 bp, Homo sapiens
agtacttcaaatccc

SEQ ID NO: 2003652 - DNA, 15 bp, Homo sapiens
gtacttcaaatcccc

SEQ ID NO: 2003653 - DNA, 15 bp, Homo sapiens
tacttcaaatcccca

SEQ ID NO: 2003654 - DNA, 15 bp, Homo sapiens
acttcaaatccccat

SEQ ID NO: 2003655 - DNA, 15 bp, Homo sapiens
cttcaaatccccatg

SEQ ID NO: 2003656 - DNA, 15 bp, Homo sapiens
ttcaaatccccatgc

SEQ ID NO: 2003657 - DNA, 15 bp, Homo sapiens
tcaaatccccatgca

SEQ ID NO: 2003658 - DNA, 15 bp, Homo sapiens
caaatccccatgcat

SEQ ID NO: 2003659 - DNA, 15 bp, Homo sapiens
aaatccccatgcatc

SEQ ID NO: 2003660 - DNA, 15 bp, Homo sapiens
aatccccatgcatct

SEQ ID NO: 2003661 - DNA, 15 bp, Homo sapiens
atccccatgcatctc

SEQ ID NO: 2003662 - DNA, 15 bp, Homo sapiens
tccccatgcatctct

SEQ ID NO: 2003663 - DNA, 15 bp, Homo sapiens
ccccatgcatctctt

SEQ ID NO: 2003664 - DNA, 15 bp, Homo sapiens
cccatgcatctctta

SEQ ID NO: 2003665 - DNA, 15 bp, Homo sapiens
ccatgcatctcttac

SEQ ID NO: 2003666 - DNA, 15 bp, Homo sapiens
catgcatctcttact

SEQ ID NO: 2003667 - DNA, 15 bp, Homo sapiens
atgcatctcttactc

SEQ ID NO: 2003668 - DNA, 15 bp, Homo sapiens
tgcatctcttactct

SEQ ID NO: 2003669 - DNA, 15 bp, Homo sapiens
gcatctcttactctg

SEQ ID NO: 2003670 - DNA, 15 bp, Homo sapiens
catctcttactctgc

SEQ ID NO: 2003671 - DNA, 15 bp, Homo sapiens
atctcttactctgct

SEQ ID NO: 2003672 - DNA, 15 bp, Homo sapiens
tctcttactctgctt

SEQ ID NO: 2003673 - DNA, 15 bp, Homo sapiens
ctcttactctgcttt

SEQ ID NO: 2003674 - DNA, 15 bp, Homo sapiens
tcttactctgcttta

SEQ ID NO: 2003675 - DNA, 15 bp, Homo sapiens
cttactctgctttaa

SEQ ID NO: 2003676 - DNA, 15 bp, Homo sapiens
ttactctgctttaac

SEQ ID NO: 2003677 - DNA, 15 bp, Homo sapiens
tactctgctttaact

SEQ ID NO: 2003678 - DNA, 15 bp, Homo sapiens
actctgctttaactg

SEQ ID NO: 2003679 - DNA, 15 bp, Homo sapiens
ctctgctttaactgt

SEQ ID NO: 2003680 - DNA, 15 bp, Homo sapiens
tctgctttaactgtt

SEQ ID NO: 2003681 - DNA, 15 bp, Homo sapiens
ctgctttaactgttt

SEQ ID NO: 2003682 - DNA, 15 bp, Homo sapiens
tgctttaactgtttc

SEQ ID NO: 2003683 - DNA, 15 bp, Homo sapiens
gctttaactgtttct

SEQ ID NO: 2003684 - DNA, 15 bp, Homo sapiens
ctttaactgtttctg

SEQ ID NO: 2003685 - DNA, 15 bp, Homo sapiens
tttaactgtttctgg

SEQ ID NO: 2003686 - DNA, 15 bp, Homo sapiens
ttaactgtttctggc

SEQ ID NO: 2003687 - DNA, 15 bp, Homo sapiens
taactgtttctggca

SEQ ID NO: 2003688 - DNA, 15 bp, Homo sapiens
aactgtttctggcat

SEQ ID NO: 2003689 - DNA, 15 bp, Homo sapiens
actgtttctggcatg

SEQ ID NO: 2003690 - DNA, 15 bp, Homo sapiens
ctgtttctggcatgc

SEQ ID NO: 2003691 - DNA, 15 bp, Homo sapiens
tgtttctggcatgct

SEQ ID NO: 2003692 - DNA, 15 bp, Homo sapiens
gtttctggcatgcta

SEQ ID NO: 2003693 - DNA, 15 bp, Homo sapiens
tttctggcatgctat

SEQ ID NO: 2003694 - DNA, 15 bp, Homo sapiens
ttctggcatgctatg

SEQ ID NO: 2003695 - DNA, 15 bp, Homo sapiens
tctggcatgctatgg

SEQ ID NO: 2003696 - DNA, 15 bp, Homo sapiens
ctggcatgctatggt

SEQ ID NO: 2003697 - DNA, 15 bp, Homo sapiens
ttggattggttccaa

SEQ ID NO: 2003698 - DNA, 15 bp, Homo sapiens
tggattggttccaag

SEQ ID NO: 2003699 - DNA, 15 bp, Homo sapiens
ggattggttccaagt

SEQ ID NO: 2003700 - DNA, 15 bp, Homo sapiens
gattggttccaagtc

SEQ ID NO: 2003701 - DNA, 15 bp, Homo sapiens
attggttccaagtct

SEQ ID NO: 2003702 - DNA, 15 bp, Homo sapiens
ttggttccaagtctt

SEQ ID NO: 2003703 - DNA, 15 bp, Homo sapiens
tggttccaagtcttt

SEQ ID NO: 2003704 - DNA, 15 bp, Homo sapiens
ggttccaagtctttg

SEQ ID NO: 2003705 - DNA, 15 bp, Homo sapiens
gttccaagtctttgc

SEQ ID NO: 2003706 - DNA, 15 bp, Homo sapiens
ttccaagtctttgct

SEQ ID NO: 2003707 - DNA, 15 bp, Homo sapiens
tccaagtctttgctg

SEQ ID NO: 2003708 - DNA, 15 bp, Homo sapiens
ccaagtctttgctgt

SEQ ID NO: 2003709 - DNA, 15 bp, Homo sapiens
caagtctttgctgtt

SEQ ID NO: 2003710 - DNA, 15 bp, Homo sapiens
aagtctttgctgttg

SEQ ID NO: 2003711 - DNA, 15 bp, Homo sapiens
agtctttgctgttgt

SEQ ID NO: 2003712 - DNA, 15 bp, Homo sapiens
gtctttgctgttgtg

SEQ ID NO: 2003713 - DNA, 15 bp, Homo sapiens
tctttgctgttgtga

SEQ ID NO: 2003714 - DNA, 15 bp, Homo sapiens
ctttgctgttgtgaa

SEQ ID NO: 2003715 - DNA, 15 bp, Homo sapiens
tttgctgttgtgaac

SEQ ID NO: 2003716 - DNA, 15 bp, Homo sapiens
ttgctgttgtgaaca

SEQ ID NO: 2003717 - DNA, 15 bp, Homo sapiens
tgctgttgtgaacag

SEQ ID NO: 2003718 - DNA, 15 bp, Homo sapiens
gctgttgtgaacagt

SEQ ID NO: 2003719 - DNA, 15 bp, Homo sapiens
ctgttgtgaacagtg

SEQ ID NO: 2003720 - DNA, 15 bp, Homo sapiens
tgttgtgaacagtgc

SEQ ID NO: 2003721 - DNA, 15 bp, Homo sapiens
gttgtgaacagtgct

SEQ ID NO: 2003722 - DNA, 15 bp, Homo sapiens
ttgtgaacagtgctg

SEQ ID NO: 2003723 - DNA, 15 bp, Homo sapiens
tgtgaacagtgctgc

SEQ ID NO: 2003724 - DNA, 15 bp, Homo sapiens
gtgaacagtgctgca

SEQ ID NO: 2003725 - DNA, 15 bp, Homo sapiens
tgaacagtgctgcag

SEQ ID NO: 2003726 - DNA, 15 bp, Homo sapiens
gaacagtgctgcagt

SEQ ID NO: 2003727 - DNA, 15 bp, Homo sapiens
aacagtgctgcagta

SEQ ID NO: 2003728 - DNA, 15 bp, Homo sapiens
acagtgctgcagtaa

SEQ ID NO: 2003729 - DNA, 15 bp, Homo sapiens
cagtgctgcagtaaa

SEQ ID NO: 2003730 - DNA, 15 bp, Homo sapiens
agtgctgcagtaaac

SEQ ID NO: 2003731 - DNA, 15 bp, Homo sapiens
gtgctgcagtaaaca

SEQ ID NO: 2003732 - DNA, 15 bp, Homo sapiens
tgctgcagtaaacat

SEQ ID NO: 2003733 - DNA, 15 bp, Homo sapiens
gctgcagtaaacata

SEQ ID NO: 2003734 - DNA, 15 bp, Homo sapiens
ctgcagtaaacatac

SEQ ID NO: 2003735 - DNA, 15 bp, Homo sapiens
tgcagtaaacatacg

SEQ ID NO: 2003736 - DNA, 15 bp, Homo sapiens
gcagtaaacatacgt

SEQ ID NO: 2003737 - DNA, 15 bp, Homo sapiens
cagtaaacatacgtg

SEQ ID NO: 2003738 - DNA, 15 bp, Homo sapiens
agtaaacatacgtgt

SEQ ID NO: 2003739 - DNA, 15 bp, Homo sapiens
gtaaacatacgtgtg

SEQ ID NO: 2003740 - DNA, 15 bp, Homo sapiens
taaacatacgtgtgc

SEQ ID NO: 2003741 - DNA, 15 bp, Homo sapiens
aaacatacgtgtgca

SEQ ID NO: 2003742 - DNA, 15 bp, Homo sapiens
aacatacgtgtgcat

SEQ ID NO: 2003743 - DNA, 15 bp, Homo sapiens
acatacgtgtgcatg

SEQ ID NO: 2003744 - DNA, 15 bp, Homo sapiens
catacgtgtgcatgt

SEQ ID NO: 2003745 - DNA, 15 bp, Homo sapiens
atacgtgtgcatgtg

SEQ ID NO: 2003746 - DNA, 15 bp, Homo sapiens
tacgtgtgcatgtgt

SEQ ID NO: 2003747 - DNA, 15 bp, Homo sapiens
acgtgtgcatgtgtc

SEQ ID NO: 2003748 - DNA, 15 bp, Homo sapiens
cgtgtgcatgtgtct

SEQ ID NO: 2003749 - DNA, 15 bp, Homo sapiens
gtgtgcatgtgtctt

SEQ ID NO: 2003750 - DNA, 15 bp, Homo sapiens
tgtgcatgtgtcttt

SEQ ID NO: 2003751 - DNA, 15 bp, Homo sapiens
gtgcatgtgtcttta

SEQ ID NO: 2003752 - DNA, 15 bp, Homo sapiens
tgcatgtgtctttat

SEQ ID NO: 2003753 - DNA, 15 bp, Homo sapiens
gcatgtgtctttata

SEQ ID NO: 2003754 - DNA, 15 bp, Homo sapiens
catgtgtctttatag

SEQ ID NO: 2003755 - DNA, 15 bp, Homo sapiens
atgtgtctttatagc

SEQ ID NO: 2003756 - DNA, 15 bp, Homo sapiens
tgtgtctttatagca

SEQ ID NO: 2003757 - DNA, 15 bp, Homo sapiens
gtgtctttatagcag

SEQ ID NO: 2003758 - DNA, 15 bp, Homo sapiens
tgtctttatagcaga

SEQ ID NO: 2003759 - DNA, 15 bp, Homo sapiens
gtctttatagcagaa

SEQ ID NO: 2003760 - DNA, 15 bp, Homo sapiens
tctttatagcagaat

SEQ ID NO: 2003761 - DNA, 15 bp, Homo sapiens
ctttatagcagaatg

SEQ ID NO: 2003762 - DNA, 15 bp, Homo sapiens
tttatagcagaatga

SEQ ID NO: 2003763 - DNA, 15 bp, Homo sapiens
ttatagcagaatgat

SEQ ID NO: 2003764 - DNA, 15 bp, Homo sapiens
tatagcagaatgatt

SEQ ID NO: 2003765 - DNA, 15 bp, Homo sapiens
atagcagaatgattt

SEQ ID NO: 2003766 - DNA, 15 bp, Homo sapiens
tagcagaatgatttg

SEQ ID NO: 2003767 - DNA, 15 bp, Homo sapiens
agcagaatgatttgt

SEQ ID NO: 2003768 - DNA, 15 bp, Homo sapiens
gcagaatgatttgta

SEQ ID NO: 2003769 - DNA, 15 bp, Homo sapiens
cagaatgatttgtaa

SEQ ID NO: 2003770 - DNA, 15 bp, Homo sapiens
agaatgatttgtaat

SEQ ID NO: 2003771 - DNA, 15 bp, Homo sapiens
gaatgatttgtaatc

SEQ ID NO: 2003772 - DNA, 15 bp, Homo sapiens
aatgatttgtaatcc

SEQ ID NO: 2003773 - DNA, 15 bp, Homo sapiens
atgatttgtaatcct

SEQ ID NO: 2003774 - DNA, 15 bp, Homo sapiens
tgatttgtaatcctt

SEQ ID NO: 2003775 - DNA, 15 bp, Homo sapiens
gatttgtaatccttt

SEQ ID NO: 2003776 - DNA, 15 bp, Homo sapiens
atttgtaatcctttg

SEQ ID NO: 2003777 - DNA, 15 bp, Homo sapiens
tttgtaatcctttgg

SEQ ID NO: 2003778 - DNA, 15 bp, Homo sapiens
ttgtaatcctttggg

SEQ ID NO: 2003779 - DNA, 15 bp, Homo sapiens
tgtaatcctttgggt

SEQ ID NO: 2003780 - DNA, 15 bp, Homo sapiens
gtaatcctttgggta

SEQ ID NO: 2003781 - DNA, 15 bp, Homo sapiens
cccagtaatgggatg

SEQ ID NO: 2003782 - DNA, 15 bp, Homo sapiens
ccagtaatgggatgg

SEQ ID NO: 2003783 - DNA, 15 bp, Homo sapiens
cagtaatgggatggc

SEQ ID NO: 2003784 - DNA, 15 bp, Homo sapiens
agtaatgggatggct

SEQ ID NO: 2003785 - DNA, 15 bp, Homo sapiens
gtaatgggatggctg

SEQ ID NO: 2003786 - DNA, 15 bp, Homo sapiens
taatgggatggctgg

SEQ ID NO: 2003787 - DNA, 15 bp, Homo sapiens
aatgggatggctggg

SEQ ID NO: 2003788 - DNA, 15 bp, Homo sapiens
atgggatggctgggt

SEQ ID NO: 2003789 - DNA, 15 bp, Homo sapiens
tgggatggctgggtc

SEQ ID NO: 2003790 - DNA, 15 bp, Homo sapiens
gggatggctgggtca

SEQ ID NO: 2003791 - DNA, 15 bp, Homo sapiens
ggatggctgggtcaa

SEQ ID NO: 2003792 - DNA, 15 bp, Homo sapiens
gatggctgggtcaaa

SEQ ID NO: 2003793 - DNA, 15 bp, Homo sapiens
atggctgggtcaaat

SEQ ID NO: 2003794 - DNA, 15 bp, Homo sapiens
tggctgggtcaaatg

SEQ ID NO: 2003795 - DNA, 15 bp, Homo sapiens
ggctgggtcaaatgg

SEQ ID NO: 2003796 - DNA, 15 bp, Homo sapiens
gctgggtcaaatggt

SEQ ID NO: 2003797 - DNA, 15 bp, Homo sapiens
ctgggtcaaatggta

SEQ ID NO: 2003798 - DNA, 15 bp, Homo sapiens
tgggtcaaatggtat

SEQ ID NO: 2003799 - DNA, 15 bp, Homo sapiens
gggtcaaatggtatt

SEQ ID NO: 2003800 - DNA, 15 bp, Homo sapiens
ggtcaaatggtattt

SEQ ID NO: 2003801 - DNA, 15 bp, Homo sapiens
tggtatttctagttc

SEQ ID NO: 2003802 - DNA, 15 bp, Homo sapiens
ggtatttctagttct

SEQ ID NO: 2003803 - DNA, 15 bp, Homo sapiens
gtatttctagttcta

SEQ ID NO: 2003804 - DNA, 15 bp, Homo sapiens
tatttctagttctag

SEQ ID NO: 2003805 - DNA, 15 bp, Homo sapiens
atttctagttctaga

SEQ ID NO: 2003806 - DNA, 15 bp, Homo sapiens
tttctagttctagat

SEQ ID NO: 2003807 - DNA, 15 bp, Homo sapiens
ttctagttctagatc

SEQ ID NO: 2003808 - DNA, 15 bp, Homo sapiens
tctagttctagatcc

SEQ ID NO: 2003809 - DNA, 15 bp, Homo sapiens
ctagttctagatcct

SEQ ID NO: 2003810 - DNA, 15 bp, Homo sapiens
tagttctagatcctt

SEQ ID NO: 2003811 - DNA, 15 bp, Homo sapiens
agttctagatccttg

SEQ ID NO: 2003812 - DNA, 15 bp, Homo sapiens
caacagtgtaaaagt

SEQ ID NO: 2003813 - DNA, 15 bp, Homo sapiens
aacagtgtaaaagtg

SEQ ID NO: 2003814 - DNA, 15 bp, Homo sapiens
acagtgtaaaagtgt

SEQ ID NO: 2003815 - DNA, 15 bp, Homo sapiens
cagtgtaaaagtgtt

SEQ ID NO: 2003816 - DNA, 15 bp, Homo sapiens
agtgtaaaagtgttc

SEQ ID NO: 2003817 - DNA, 15 bp, Homo sapiens
gtgtaaaagtgttcc

SEQ ID NO: 2003818 - DNA, 15 bp, Homo sapiens
tgtaaaagtgttcct

SEQ ID NO: 2003819 - DNA, 15 bp, Homo sapiens
gtaaaagtgttccta

SEQ ID NO: 2003820 - DNA, 15 bp, Homo sapiens
taaaagtgttcctat

SEQ ID NO: 2003821 - DNA, 15 bp, Homo sapiens
aaaagtgttcctatt

SEQ ID NO: 2003822 - DNA, 15 bp, Homo sapiens
aaagtgttcctattt

SEQ ID NO: 2003823 - DNA, 15 bp, Homo sapiens
aagtgttcctatttc

SEQ ID NO: 2003824 - DNA, 15 bp, Homo sapiens
agtgttcctatttct

SEQ ID NO: 2003825 - DNA, 15 bp, Homo sapiens
gtgttcctatttctc

SEQ ID NO: 2003826 - DNA, 15 bp, Homo sapiens
tgttcctatttctcc

SEQ ID NO: 2003827 - DNA, 15 bp, Homo sapiens
gttcctatttctcca

SEQ ID NO: 2003828 - DNA, 15 bp, Homo sapiens
ttcctatttctccac

SEQ ID NO: 2003829 - DNA, 15 bp, Homo sapiens
tcctatttctccaca

SEQ ID NO: 2003830 - DNA, 15 bp, Homo sapiens
cctatttctccacat

SEQ ID NO: 2003831 - DNA, 15 bp, Homo sapiens
ctatttctccacatt

SEQ ID NO: 2003832 - DNA, 15 bp, Homo sapiens
tatttctccacattc

SEQ ID NO: 2003833 - DNA, 15 bp, Homo sapiens
atttctccacattct

SEQ ID NO: 2003834 - DNA, 15 bp, Homo sapiens
tttctccacattctc

SEQ ID NO: 2003835 - DNA, 15 bp, Homo sapiens
ttctccacattctct

SEQ ID NO: 2003836 - DNA, 15 bp, Homo sapiens
tctccacattctctc

SEQ ID NO: 2003837 - DNA, 15 bp, Homo sapiens
ctccacattctctcc

SEQ ID NO: 2003838 - DNA, 15 bp, Homo sapiens
tccacattctctcca

SEQ ID NO: 2003839 - DNA, 15 bp, Homo sapiens
ccacattctctccag

SEQ ID NO: 2003840 - DNA, 15 bp, Homo sapiens
cacattctctccagc

SEQ ID NO: 2003841 - DNA, 15 bp, Homo sapiens
acattctctccagca

SEQ ID NO: 2003842 - DNA, 15 bp, Homo sapiens
cattctctccagcat

SEQ ID NO: 2003843 - DNA, 15 bp, Homo sapiens
attctctccagcatc

SEQ ID NO: 2003844 - DNA, 15 bp, Homo sapiens
ttctctccagcatct

SEQ ID NO: 2003845 - DNA, 15 bp, Homo sapiens
tctctccagcatctt

SEQ ID NO: 2003846 - DNA, 15 bp, Homo sapiens
ctctccagcatcttt

SEQ ID NO: 2003847 - DNA, 15 bp, Homo sapiens
tctccagcatctttt

SEQ ID NO: 2003848 - DNA, 15 bp, Homo sapiens
ctccagcatcttttc

SEQ ID NO: 2003849 - DNA, 15 bp, Homo sapiens
tccagcatcttttct

SEQ ID NO: 2003850 - DNA, 15 bp, Homo sapiens
ccagcatcttttctt

SEQ ID NO: 2003851 - DNA, 15 bp, Homo sapiens
cagcatcttttcttt

SEQ ID NO: 2003852 - DNA, 15 bp, Homo sapiens
agcatcttttctttc

SEQ ID NO: 2003853 - DNA, 15 bp, Homo sapiens
gcatcttttctttcc

SEQ ID NO: 2003854 - DNA, 15 bp, Homo sapiens
catcttttctttcct

SEQ ID NO: 2003855 - DNA, 15 bp, Homo sapiens
atcttttctttcctg

SEQ ID NO: 2003856 - DNA, 15 bp, Homo sapiens
tcttttctttcctga

SEQ ID NO: 2003857 - DNA, 15 bp, Homo sapiens
cttttctttcctgac

SEQ ID NO: 2003858 - DNA, 15 bp, Homo sapiens
ttttctttcctgact

SEQ ID NO: 2003859 - DNA, 15 bp, Homo sapiens
tttctttcctgactt

SEQ ID NO: 2003860 - DNA, 15 bp, Homo sapiens
ttctttcctgacttt

SEQ ID NO: 2003861 - DNA, 15 bp, Homo sapiens
tctttcctgactttt

SEQ ID NO: 2003862 - DNA, 15 bp, Homo sapiens
ctttcctgacttttt

SEQ ID NO: 2003863 - DNA, 15 bp, Homo sapiens
atgatcgccattctt

SEQ ID NO: 2003864 - DNA, 15 bp, Homo sapiens
tgatcgccattctta

SEQ ID NO: 2003865 - DNA, 15 bp, Homo sapiens
gatcgccattcttac

SEQ ID NO: 2003866 - DNA, 15 bp, Homo sapiens
atcgccattcttact

SEQ ID NO: 2003867 - DNA, 15 bp, Homo sapiens
tcgccattcttactg

SEQ ID NO: 2003868 - DNA, 15 bp, Homo sapiens
cgccattcttactgg

SEQ ID NO: 2003869 - DNA, 15 bp, Homo sapiens
gccattcttactggc

SEQ ID NO: 2003870 - DNA, 15 bp, Homo sapiens
ccattcttactggcg

SEQ ID NO: 2003871 - DNA, 15 bp, Homo sapiens
cattcttactggcgt

SEQ ID NO: 2003872 - DNA, 15 bp, Homo sapiens
attcttactggcgtg

SEQ ID NO: 2003873 - DNA, 15 bp, Homo sapiens
ttcttactggcgtga

SEQ ID NO: 2003874 - DNA, 15 bp, Homo sapiens
tcttactggcgtgag

SEQ ID NO: 2003875 - DNA, 15 bp, Homo sapiens
cttactggcgtgaga

SEQ ID NO: 2003876 - DNA, 15 bp, Homo sapiens
ttactggcgtgagat

SEQ ID NO: 2003877 - DNA, 15 bp, Homo sapiens
tactggcgtgagatg

SEQ ID NO: 2003878 - DNA, 15 bp, Homo sapiens
actggcgtgagatgg

SEQ ID NO: 2003879 - DNA, 15 bp, Homo sapiens
ctggcgtgagatggt

SEQ ID NO: 2003880 - DNA, 15 bp, Homo sapiens
tggcgtgagatggta

SEQ ID NO: 2003881 - DNA, 15 bp, Homo sapiens
ggcgtgagatggtat

SEQ ID NO: 2003882 - DNA, 15 bp, Homo sapiens
gcgtgagatggtatc

SEQ ID NO: 2003883 - DNA, 15 bp, Homo sapiens
cgtgagatggtatct

SEQ ID NO: 2003884 - DNA, 15 bp, Homo sapiens
tgatttgcatttctg

SEQ ID NO: 2003885 - DNA, 15 bp, Homo sapiens
gatttgcatttctgt

SEQ ID NO: 2003886 - DNA, 15 bp, Homo sapiens
atttgcatttctgta

SEQ ID NO: 2003887 - DNA, 15 bp, Homo sapiens
tttgcatttctgtaa

SEQ ID NO: 2003888 - DNA, 15 bp, Homo sapiens
ttgcatttctgtaat

SEQ ID NO: 2003889 - DNA, 15 bp, Homo sapiens
tgcatttctgtaatg

SEQ ID NO: 2003890 - DNA, 15 bp, Homo sapiens
gcatttctgtaatga

SEQ ID NO: 2003891 - DNA, 15 bp, Homo sapiens
catttctgtaatgac

SEQ ID NO: 2003892 - DNA, 15 bp, Homo sapiens
atttctgtaatgacc

SEQ ID NO: 2003893 - DNA, 15 bp, Homo sapiens
tttctgtaatgacca

SEQ ID NO: 2003894 - DNA, 15 bp, Homo sapiens
ttctgtaatgaccag

SEQ ID NO: 2003895 - DNA, 15 bp, Homo sapiens
tctgtaatgaccagt

SEQ ID NO: 2003896 - DNA, 15 bp, Homo sapiens
ctgtaatgaccagtg

SEQ ID NO: 2003897 - DNA, 15 bp, Homo sapiens
tgtaatgaccagtga

SEQ ID NO: 2003898 - DNA, 15 bp, Homo sapiens
gtaatgaccagtgat

SEQ ID NO: 2003899 - DNA, 15 bp, Homo sapiens
taatgaccagtgata

SEQ ID NO: 2003900 - DNA, 15 bp, Homo sapiens
aatgaccagtgataa

SEQ ID NO: 2003901 - DNA, 15 bp, Homo sapiens
atgaccagtgataat

SEQ ID NO: 2003902 - DNA, 15 bp, Homo sapiens
tgaccagtgataatg

SEQ ID NO: 2003903 - DNA, 15 bp, Homo sapiens
gaccagtgataatga

SEQ ID NO: 2003904 - DNA, 15 bp, Homo sapiens
accagtgataatgag

SEQ ID NO: 2003905 - DNA, 15 bp, Homo sapiens
ccagtgataatgagc

SEQ ID NO: 2003906 - DNA, 15 bp, Homo sapiens
cagtgataatgagct

SEQ ID NO: 2003907 - DNA, 15 bp, Homo sapiens
agtgataatgagctt

SEQ ID NO: 2003908 - DNA, 15 bp, Homo sapiens
gtgataatgagcttt

SEQ ID NO: 2003909 - DNA, 15 bp, Homo sapiens
tgataatgagctttt

SEQ ID NO: 2003910 - DNA, 15 bp, Homo sapiens
gataatgagcttttc

SEQ ID NO: 2003911 - DNA, 15 bp, Homo sapiens
ataatgagcttttct

SEQ ID NO: 2003912 - DNA, 15 bp, Homo sapiens
taatgagcttttctt

SEQ ID NO: 2003913 - DNA, 15 bp, Homo sapiens
aatgagcttttcttt

SEQ ID NO: 2003914 - DNA, 15 bp, Homo sapiens
atgagcttttcttta

SEQ ID NO: 2003915 - DNA, 15 bp, Homo sapiens
tgagcttttctttat

SEQ ID NO: 2003916 - DNA, 15 bp, Homo sapiens
gagcttttctttata

SEQ ID NO: 2003917 - DNA, 15 bp, Homo sapiens
agcttttctttatat

SEQ ID NO: 2003918 - DNA, 15 bp, Homo sapiens
gcttttctttatatg

SEQ ID NO: 2003919 - DNA, 15 bp, Homo sapiens
cttttctttatatgt

SEQ ID NO: 2003920 - DNA, 15 bp, Homo sapiens
ttttctttatatgtt

SEQ ID NO: 2003921 - DNA, 15 bp, Homo sapiens
tttctttatatgttt

SEQ ID NO: 2003922 - DNA, 15 bp, Homo sapiens
ttctttatatgtttg

SEQ ID NO: 2003923 - DNA, 15 bp, Homo sapiens
tctttatatgtttgt

SEQ ID NO: 2003924 - DNA, 15 bp, Homo sapiens
ctttatatgtttgtt

SEQ ID NO: 2003925 - DNA, 15 bp, Homo sapiens
tttatatgtttgttg

SEQ ID NO: 2003926 - DNA, 15 bp, Homo sapiens
ttatatgtttgttgt

SEQ ID NO: 2003927 - DNA, 15 bp, Homo sapiens
tatatgtttgttgtc

SEQ ID NO: 2003928 - DNA, 15 bp, Homo sapiens
atatgtttgttgtct

SEQ ID NO: 2003929 - DNA, 15 bp, Homo sapiens
tatgtttgttgtctt

SEQ ID NO: 2003930 - DNA, 15 bp, Homo sapiens
atgtttgttgtcttc

SEQ ID NO: 2003931 - DNA, 15 bp, Homo sapiens
tgtttgttgtcttct

SEQ ID NO: 2003932 - DNA, 15 bp, Homo sapiens
gtttgttgtcttctt

SEQ ID NO: 2003933 - DNA, 15 bp, Homo sapiens
tttgttgtcttcttt

SEQ ID NO: 2003934 - DNA, 15 bp, Homo sapiens
ttgttgtcttctttt

SEQ ID NO: 2003935 - DNA, 15 bp, Homo sapiens
tgttgtcttcttttg

SEQ ID NO: 2003936 - DNA, 15 bp, Homo sapiens
gttgtcttcttttga

SEQ ID NO: 2003937 - DNA, 15 bp, Homo sapiens
ttgtcttcttttgag

SEQ ID NO: 2003938 - DNA, 15 bp, Homo sapiens
tgtcttcttttgaga

SEQ ID NO: 2003939 - DNA, 15 bp, Homo sapiens
gtcttcttttgagaa

SEQ ID NO: 2003940 - DNA, 15 bp, Homo sapiens
gagaagtgtctgttc

SEQ ID NO: 2003941 - DNA, 15 bp, Homo sapiens
agaagtgtctgttca

SEQ ID NO: 2003942 - DNA, 15 bp, Homo sapiens
gaagtgtctgttcat

SEQ ID NO: 2003943 - DNA, 15 bp, Homo sapiens
aagtgtctgttcata

SEQ ID NO: 2003944 - DNA, 15 bp, Homo sapiens
agtgtctgttcatat

SEQ ID NO: 2003945 - DNA, 15 bp, Homo sapiens
gtgtctgttcatatc

SEQ ID NO: 2003946 - DNA, 15 bp, Homo sapiens
tgtctgttcatatcc

SEQ ID NO: 2003947 - DNA, 15 bp, Homo sapiens
gtctgttcatatcct

SEQ ID NO: 2003948 - DNA, 15 bp, Homo sapiens
tctgttcatatcctt

SEQ ID NO: 2003949 - DNA, 15 bp, Homo sapiens
ctgttcatatccttc

SEQ ID NO: 2003950 - DNA, 15 bp, Homo sapiens
tgttcatatccttca

SEQ ID NO: 2003951 - DNA, 15 bp, Homo sapiens
gttcatatccttcat

SEQ ID NO: 2003952 - DNA, 15 bp, Homo sapiens
ttcatatccttcatc

SEQ ID NO: 2003953 - DNA, 15 bp, Homo sapiens
tcatatccttcatct

SEQ ID NO: 2003954 - DNA, 15 bp, Homo sapiens
catatccttcatcta

SEQ ID NO: 2003955 - DNA, 15 bp, Homo sapiens
atatccttcatctac

SEQ ID NO: 2003956 - DNA, 15 bp, Homo sapiens
tatccttcatctact

SEQ ID NO: 2003957 - DNA, 15 bp, Homo sapiens
atccttcatctactt

SEQ ID NO: 2003958 - DNA, 15 bp, Homo sapiens
tccttcatctacttt

SEQ ID NO: 2003959 - DNA, 15 bp, Homo sapiens
ccttcatctactttt

SEQ ID NO: 2003960 - DNA, 15 bp, Homo sapiens
cttcatctacttttt

SEQ ID NO: 2003961 - DNA, 15 bp, Homo sapiens
ttcatctacttttta

SEQ ID NO: 2003962 - DNA, 15 bp, Homo sapiens
tcatctactttttaa

SEQ ID NO: 2003963 - DNA, 15 bp, Homo sapiens
catctactttttaat

SEQ ID NO: 2003964 - DNA, 15 bp, Homo sapiens
atctactttttaatg

SEQ ID NO: 2003965 - DNA, 15 bp, Homo sapiens
tctactttttaatgg

SEQ ID NO: 2003966 - DNA, 15 bp, Homo sapiens
ctactttttaatggg

SEQ ID NO: 2003967 - DNA, 15 bp, Homo sapiens
tactttttaatgggg

SEQ ID NO: 2003968 - DNA, 15 bp, Homo sapiens
actttttaatggggt

SEQ ID NO: 2003969 - DNA, 15 bp, Homo sapiens
ctttttaatggggtt

SEQ ID NO: 2003970 - DNA, 15 bp, Homo sapiens
tttttaatggggttg

SEQ ID NO: 2003971 - DNA, 15 bp, Homo sapiens
ttttaatggggttgt

SEQ ID NO: 2003972 - DNA, 15 bp, Homo sapiens
tttaatggggttgtt

SEQ ID NO: 2003973 - DNA, 15 bp, Homo sapiens
ttaatggggttgttt

SEQ ID NO: 2003974 - DNA, 15 bp, Homo sapiens
taatggggttgtttg

SEQ ID NO: 2003975 - DNA, 15 bp, Homo sapiens
aatggggttgtttgt

SEQ ID NO: 2003976 - DNA, 15 bp, Homo sapiens
atggggttgtttgtg

SEQ ID NO: 2003977 - DNA, 15 bp, Homo sapiens
tggggttgtttgtgt

SEQ ID NO: 2003978 - DNA, 15 bp, Homo sapiens
ggggttgtttgtgtt

SEQ ID NO: 2003979 - DNA, 15 bp, Homo sapiens
gggttgtttgtgttt

SEQ ID NO: 2003980 - DNA, 15 bp, Homo sapiens
ggttgtttgtgtttt

SEQ ID NO: 2003981 - DNA, 15 bp, Homo sapiens
gttgtttgtgttttt

SEQ ID NO: 2003982 - DNA, 15 bp, Homo sapiens
ttgtttgtgtttttc

SEQ ID NO: 2003983 - DNA, 15 bp, Homo sapiens
tgtttgtgtttttct

SEQ ID NO: 2003984 - DNA, 15 bp, Homo sapiens
gtttgtgtttttctt

SEQ ID NO: 2003985 - DNA, 15 bp, Homo sapiens
tttgtgtttttcttg

SEQ ID NO: 2003986 - DNA, 15 bp, Homo sapiens
ttgtgtttttcttgt

SEQ ID NO: 2003987 - DNA, 15 bp, Homo sapiens
tgtgtttttcttgta

SEQ ID NO: 2003988 - DNA, 15 bp, Homo sapiens
gtgtttttcttgtaa

SEQ ID NO: 2003989 - DNA, 15 bp, Homo sapiens
tgtttttcttgtaaa

SEQ ID NO: 2003990 - DNA, 15 bp, Homo sapiens
gtttttcttgtaaat

SEQ ID NO: 2003991 - DNA, 15 bp, Homo sapiens
taagttctttgtagg

SEQ ID NO: 2003992 - DNA, 15 bp, Homo sapiens
aagttctttgtaggt

SEQ ID NO: 2003993 - DNA, 15 bp, Homo sapiens
agttctttgtaggtt

SEQ ID NO: 2003994 - DNA, 15 bp, Homo sapiens
gttctttgtaggttc

SEQ ID NO: 2003995 - DNA, 15 bp, Homo sapiens
ttctttgtaggttct

SEQ ID NO: 2003996 - DNA, 15 bp, Homo sapiens
tctttgtaggttctg

SEQ ID NO: 2003997 - DNA, 15 bp, Homo sapiens
ctttgtaggttctgg

SEQ ID NO: 2003998 - DNA, 15 bp, Homo sapiens
tttgtaggttctggt

SEQ ID NO: 2003999 - DNA, 15 bp, Homo sapiens
ttgtaggttctggtt

SEQ ID NO: 2004000 - DNA, 15 bp, Homo sapiens
tgtaggttctggtta

SEQ ID NO: 2004001 - DNA, 15 bp, Homo sapiens
gtaggttctggttat

SEQ ID NO: 2004002 - DNA, 15 bp, Homo sapiens
taggttctggttatt

SEQ ID NO: 2004003 - DNA, 15 bp, Homo sapiens
aggttctggttatta

SEQ ID NO: 2004004 - DNA, 15 bp, Homo sapiens
ggttctggttattag

SEQ ID NO: 2004005 - DNA, 15 bp, Homo sapiens
gttctggttattagc

SEQ ID NO: 2004006 - DNA, 15 bp, Homo sapiens
ttctggttattagcc

SEQ ID NO: 2004007 - DNA, 15 bp, Homo sapiens
tctggttattagccc

SEQ ID NO: 2004008 - DNA, 15 bp, Homo sapiens
ctggttattagccct

SEQ ID NO: 2004009 - DNA, 15 bp, Homo sapiens
tggttattagccctt

SEQ ID NO: 2004010 - DNA, 15 bp, Homo sapiens
ggttattagcccttt

SEQ ID NO: 2004011 - DNA, 15 bp, Homo sapiens
gttattagccctttg

SEQ ID NO: 2004012 - DNA, 15 bp, Homo sapiens
ttattagccctttgt

SEQ ID NO: 2004013 - DNA, 15 bp, Homo sapiens
tattagccctttgtc

SEQ ID NO: 2004014 - DNA, 15 bp, Homo sapiens
attagccctttgtca

SEQ ID NO: 2004015 - DNA, 15 bp, Homo sapiens
ttagccctttgtcag

SEQ ID NO: 2004016 - DNA, 15 bp, Homo sapiens
tagccctttgtcaga

SEQ ID NO: 2004017 - DNA, 15 bp, Homo sapiens
agccctttgtcagat

SEQ ID NO: 2004018 - DNA, 15 bp, Homo sapiens
gccctttgtcagatg

SEQ ID NO: 2004019 - DNA, 15 bp, Homo sapiens
ccctttgtcagatgg

SEQ ID NO: 2004020 - DNA, 15 bp, Homo sapiens
cctttgtcagatggg

SEQ ID NO: 2004021 - DNA, 15 bp, Homo sapiens
ctttgtcagatgggt

SEQ ID NO: 2004022 - DNA, 15 bp, Homo sapiens
cagatgggtagattg

SEQ ID NO: 2004023 - DNA, 15 bp, Homo sapiens
agatgggtagattgc

SEQ ID NO: 2004024 - DNA, 15 bp, Homo sapiens
gatgggtagattgca

SEQ ID NO: 2004025 - DNA, 15 bp, Homo sapiens
atgggtagattgcaa

SEQ ID NO: 2004026 - DNA, 15 bp, Homo sapiens
tgggtagattgcaaa

SEQ ID NO: 2004027 - DNA, 15 bp, Homo sapiens
gggtagattgcaaaa

SEQ ID NO: 2004028 - DNA, 15 bp, Homo sapiens
ggtagattgcaaaaa

SEQ ID NO: 2004029 - DNA, 15 bp, Homo sapiens
gtagattgcaaaaat

SEQ ID NO: 2004030 - DNA, 15 bp, Homo sapiens
tagattgcaaaaatt

SEQ ID NO: 2004031 - DNA, 15 bp, Homo sapiens
tctgtaggttgcctg

SEQ ID NO: 2004032 - DNA, 15 bp, Homo sapiens
ctgtaggttgcctgt

SEQ ID NO: 2004033 - DNA, 15 bp, Homo sapiens
tgtaggttgcctgtt

SEQ ID NO: 2004034 - DNA, 15 bp, Homo sapiens
gtaggttgcctgttc

SEQ ID NO: 2004035 - DNA, 15 bp, Homo sapiens
taggttgcctgttca

SEQ ID NO: 2004036 - DNA, 15 bp, Homo sapiens
ggttgcctgttcact

SEQ ID NO: 2004037 - DNA, 15 bp, Homo sapiens
gttgcctgttcactc

SEQ ID NO: 2004038 - DNA, 15 bp, Homo sapiens
ttgcctgttcactcc

SEQ ID NO: 2004039 - DNA, 15 bp, Homo sapiens
tgcctgttcactccg

SEQ ID NO: 2004040 - DNA, 15 bp, Homo sapiens
gcctgttcactccga

SEQ ID NO: 2004041 - DNA, 15 bp, Homo sapiens
cctgttcactccgat

SEQ ID NO: 2004042 - DNA, 15 bp, Homo sapiens
ctgttcactccgatg

SEQ ID NO: 2004043 - DNA, 15 bp, Homo sapiens
tgttcactccgatgg

SEQ ID NO: 2004044 - DNA, 15 bp, Homo sapiens
gttcactccgatggt

SEQ ID NO: 2004045 - DNA, 15 bp, Homo sapiens
ttcactccgatggta

SEQ ID NO: 2004046 - DNA, 15 bp, Homo sapiens
tcactccgatggtag

SEQ ID NO: 2004047 - DNA, 15 bp, Homo sapiens
cactccgatggtagt

SEQ ID NO: 2004048 - DNA, 15 bp, Homo sapiens
actccgatggtagtt

SEQ ID NO: 2004049 - DNA, 15 bp, Homo sapiens
ctccgatggtagttt

SEQ ID NO: 2004050 - DNA, 15 bp, Homo sapiens
tccgatggtagtttc

SEQ ID NO: 2004051 - DNA, 15 bp, Homo sapiens
ccgatggtagtttct

SEQ ID NO: 2004052 - DNA, 15 bp, Homo sapiens
cgatggtagtttctt

SEQ ID NO: 2004053 - DNA, 15 bp, Homo sapiens
gatggtagtttcttt

SEQ ID NO: 2004054 - DNA, 15 bp, Homo sapiens
atggtagtttctttt

SEQ ID NO: 2004055 - DNA, 15 bp, Homo sapiens
tggtagtttcttttg

SEQ ID NO: 2004056 - DNA, 15 bp, Homo sapiens
ggtagtttcttttgc

SEQ ID NO: 2004057 - DNA, 15 bp, Homo sapiens
gtagtttcttttgct

SEQ ID NO: 2004058 - DNA, 15 bp, Homo sapiens
tagtttcttttgcta

SEQ ID NO: 2004059 - DNA, 15 bp, Homo sapiens
agtttcttttgctat

SEQ ID NO: 2004060 - DNA, 15 bp, Homo sapiens
gtttcttttgctatg

SEQ ID NO: 2004061 - DNA, 15 bp, Homo sapiens
tttcttttgctatgc

SEQ ID NO: 2004062 - DNA, 15 bp, Homo sapiens
ttcttttgctatgca

SEQ ID NO: 2004063 - DNA, 15 bp, Homo sapiens
tcttttgctatgcag

SEQ ID NO: 2004064 - DNA, 15 bp, Homo sapiens
cttttgctatgcaga

SEQ ID NO: 2004065 - DNA, 15 bp, Homo sapiens
ttttgctatgcagaa

SEQ ID NO: 2004066 - DNA, 15 bp, Homo sapiens
gctatgcagaagctc

SEQ ID NO: 2004067 - DNA, 15 bp, Homo sapiens
ctatgcagaagctct

SEQ ID NO: 2004068 - DNA, 15 bp, Homo sapiens
tatgcagaagctctt

SEQ ID NO: 2004069 - DNA, 15 bp, Homo sapiens
atgcagaagctcttt

SEQ ID NO: 2004070 - DNA, 15 bp, Homo sapiens
cagaagctctttagt

SEQ ID NO: 2004071 - DNA, 15 bp, Homo sapiens
agaagctctttagtt

SEQ ID NO: 2004072 - DNA, 15 bp, Homo sapiens
gaagctctttagttt

SEQ ID NO: 2004073 - DNA, 15 bp, Homo sapiens
aagctctttagttta

SEQ ID NO: 2004074 - DNA, 15 bp, Homo sapiens
agctctttagtttaa

SEQ ID NO: 2004075 - DNA, 15 bp, Homo sapiens
gctctttagtttaat

SEQ ID NO: 2004076 - DNA, 15 bp, Homo sapiens
ctttagtttaattag

SEQ ID NO: 2004077 - DNA, 15 bp, Homo sapiens
tttagtttaattaga

SEQ ID NO: 2004078 - DNA, 15 bp, Homo sapiens
ttagtttaattagat

SEQ ID NO: 2004079 - DNA, 15 bp, Homo sapiens
tagtttaattagatc

SEQ ID NO: 2004080 - DNA, 15 bp, Homo sapiens
agtttaattagatcc

SEQ ID NO: 2004081 - DNA, 15 bp, Homo sapiens
gtttaattagatccc

SEQ ID NO: 2004082 - DNA, 15 bp, Homo sapiens
ttgtcaattttggca

SEQ ID NO: 2004083 - DNA, 15 bp, Homo sapiens
tgtcaattttggcat

SEQ ID NO: 2004084 - DNA, 15 bp, Homo sapiens
gtcaattttggcatt

SEQ ID NO: 2004085 - DNA, 15 bp, Homo sapiens
tcaattttggcattt

SEQ ID NO: 2004086 - DNA, 15 bp, Homo sapiens
caattttggcatttg

SEQ ID NO: 2004087 - DNA, 15 bp, Homo sapiens
aattttggcatttgt

SEQ ID NO: 2004088 - DNA, 15 bp, Homo sapiens
attttggcatttgtt

SEQ ID NO: 2004089 - DNA, 15 bp, Homo sapiens
ttttggcatttgttg

SEQ ID NO: 2004090 - DNA, 15 bp, Homo sapiens
tttggcatttgttgt

SEQ ID NO: 2004091 - DNA, 15 bp, Homo sapiens
ttggcatttgttgtc

SEQ ID NO: 2004092 - DNA, 15 bp, Homo sapiens
tggcatttgttgtca

SEQ ID NO: 2004093 - DNA, 15 bp, Homo sapiens
ggcatttgttgtcat

SEQ ID NO: 2004094 - DNA, 15 bp, Homo sapiens
gcatttgttgtcatt

SEQ ID NO: 2004095 - DNA, 15 bp, Homo sapiens
catttgttgtcattg

SEQ ID NO: 2004096 - DNA, 15 bp, Homo sapiens
atttgttgtcattgc

SEQ ID NO: 2004097 - DNA, 15 bp, Homo sapiens
tgcttttggtgtttc

SEQ ID NO: 2004098 - DNA, 15 bp, Homo sapiens
gcttttggtgtttca

SEQ ID NO: 2004099 - DNA, 15 bp, Homo sapiens
cttttggtgtttcag

SEQ ID NO: 2004100 - DNA, 15 bp, Homo sapiens
ttttggtgtttcagt

SEQ ID NO: 2004101 - DNA, 15 bp, Homo sapiens
tttggtgtttcagtc

SEQ ID NO: 2004102 - DNA, 15 bp, Homo sapiens
ttggtgtttcagtca

SEQ ID NO: 2004103 - DNA, 15 bp, Homo sapiens
tggtgtttcagtcat

SEQ ID NO: 2004104 - DNA, 15 bp, Homo sapiens
ggtgtttcagtcatg

SEQ ID NO: 2004105 - DNA, 15 bp, Homo sapiens
gtgtttcagtcatga

SEQ ID NO: 2004106 - DNA, 15 bp, Homo sapiens
tgtttcagtcatgaa

SEQ ID NO: 2004107 - DNA, 15 bp, Homo sapiens
gtttcagtcatgaag

SEQ ID NO: 2004108 - DNA, 15 bp, Homo sapiens
tttcagtcatgaagt

SEQ ID NO: 2004109 - DNA, 15 bp, Homo sapiens
ttcagtcatgaagtc

SEQ ID NO: 2004110 - DNA, 15 bp, Homo sapiens
tcagtcatgaagtct

SEQ ID NO: 2004111 - DNA, 15 bp, Homo sapiens
cagtcatgaagtctt

SEQ ID NO: 2004112 - DNA, 15 bp, Homo sapiens
ctttccccatgccta

SEQ ID NO: 2004113 - DNA, 15 bp, Homo sapiens
tttccccatgcctat

SEQ ID NO: 2004114 - DNA, 15 bp, Homo sapiens
ttccccatgcctatg

SEQ ID NO: 2004115 - DNA, 15 bp, Homo sapiens
tccccatgcctatgt

SEQ ID NO: 2004116 - DNA, 15 bp, Homo sapiens
ccccatgcctatgtc

SEQ ID NO: 2004117 - DNA, 15 bp, Homo sapiens
cccatgcctatgtcc

SEQ ID NO: 2004118 - DNA, 15 bp, Homo sapiens
ccatgcctatgtcct

SEQ ID NO: 2004119 - DNA, 15 bp, Homo sapiens
catgcctatgtcctg

SEQ ID NO: 2004120 - DNA, 15 bp, Homo sapiens
atgcctatgtcctga

SEQ ID NO: 2004121 - DNA, 15 bp, Homo sapiens
tgcctatgtcctgaa

SEQ ID NO: 2004122 - DNA, 15 bp, Homo sapiens
gcctatgtcctgaat

SEQ ID NO: 2004123 - DNA, 15 bp, Homo sapiens
cctatgtcctgaatg

SEQ ID NO: 2004124 - DNA, 15 bp, Homo sapiens
ctatgtcctgaatgg

SEQ ID NO: 2004125 - DNA, 15 bp, Homo sapiens
tatgtcctgaatggt

SEQ ID NO: 2004126 - DNA, 15 bp, Homo sapiens
atgtcctgaatggta

SEQ ID NO: 2004127 - DNA, 15 bp, Homo sapiens
tattgcctaggtttc

SEQ ID NO: 2004128 - DNA, 15 bp, Homo sapiens
attgcctaggtttct

SEQ ID NO: 2004129 - DNA, 15 bp, Homo sapiens
ttgcctaggtttctt

SEQ ID NO: 2004130 - DNA, 15 bp, Homo sapiens
tgcctaggtttcttt

SEQ ID NO: 2004131 - DNA, 15 bp, Homo sapiens
gcctaggtttctttc

SEQ ID NO: 2004132 - DNA, 15 bp, Homo sapiens
cctaggtttctttct

SEQ ID NO: 2004133 - DNA, 15 bp, Homo sapiens
ctaggtttctttcta

SEQ ID NO: 2004134 - DNA, 15 bp, Homo sapiens
taggtttctttctag

SEQ ID NO: 2004135 - DNA, 15 bp, Homo sapiens
aggtttctttctagg

SEQ ID NO: 2004136 - DNA, 15 bp, Homo sapiens
ggtttctttctaggg

SEQ ID NO: 2004137 - DNA, 15 bp, Homo sapiens
gtttctttctagggt

SEQ ID NO: 2004138 - DNA, 15 bp, Homo sapiens
tttctttctagggtt

SEQ ID NO: 2004139 - DNA, 15 bp, Homo sapiens
ttctttctagggttt

SEQ ID NO: 2004140 - DNA, 15 bp, Homo sapiens
tctttctagggtttt

SEQ ID NO: 2004141 - DNA, 15 bp, Homo sapiens
ctttctagggttttt

SEQ ID NO: 2004142 - DNA, 15 bp, Homo sapiens
tttctagggttttta

SEQ ID NO: 2004143 - DNA, 15 bp, Homo sapiens
ttaagtctttaatct

SEQ ID NO: 2004144 - DNA, 15 bp, Homo sapiens
taagtctttaatcta

SEQ ID NO: 2004145 - DNA, 15 bp, Homo sapiens
aagtctttaatctat

SEQ ID NO: 2004146 - DNA, 15 bp, Homo sapiens
agtctttaatctatc

SEQ ID NO: 2004147 - DNA, 15 bp, Homo sapiens
gtctttaatctatct

SEQ ID NO: 2004148 - DNA, 15 bp, Homo sapiens
tctttaatctatctt

SEQ ID NO: 2004149 - DNA, 15 bp, Homo sapiens
ctttaatctatcttg

SEQ ID NO: 2004150 - DNA, 15 bp, Homo sapiens
tttaatctatcttga

SEQ ID NO: 2004151 - DNA, 15 bp, Homo sapiens
ttaatctatcttgag

SEQ ID NO: 2004152 - DNA, 15 bp, Homo sapiens
taatctatcttgagt

SEQ ID NO: 2004153 - DNA, 15 bp, Homo sapiens
aatctatcttgagtt

SEQ ID NO: 2004154 - DNA, 15 bp, Homo sapiens
atctatcttgagtta

SEQ ID NO: 2004155 - DNA, 15 bp, Homo sapiens
tctatcttgagttaa

SEQ ID NO: 2004156 - DNA, 15 bp, Homo sapiens
ctatcttgagttaat

SEQ ID NO: 2004157 - DNA, 15 bp, Homo sapiens
tatcttgagttaatt

SEQ ID NO: 2004158 - DNA, 15 bp, Homo sapiens
atcttgagttaatta

SEQ ID NO: 2004159 - DNA, 15 bp, Homo sapiens
tcttgagttaattat

SEQ ID NO: 2004160 - DNA, 15 bp, Homo sapiens
cttgagttaattatt

SEQ ID NO: 2004161 - DNA, 15 bp, Homo sapiens
ttgagttaattattg

SEQ ID NO: 2004162 - DNA, 15 bp, Homo sapiens
tgagttaattattgt

SEQ ID NO: 2004163 - DNA, 15 bp, Homo sapiens
gagttaattattgta

SEQ ID NO: 2004164 - DNA, 15 bp, Homo sapiens
agttaattattgtat

SEQ ID NO: 2004165 - DNA, 15 bp, Homo sapiens
gttaattattgtata

SEQ ID NO: 2004166 - DNA, 15 bp, Homo sapiens
ttaattattgtataa

SEQ ID NO: 2004167 - DNA, 15 bp, Homo sapiens
taattattgtataag

SEQ ID NO: 2004168 - DNA, 15 bp, Homo sapiens
aattattgtataagg

SEQ ID NO: 2004169 - DNA, 15 bp, Homo sapiens
attattgtataaggt

SEQ ID NO: 2004170 - DNA, 15 bp, Homo sapiens
ttattgtataaggtg

SEQ ID NO: 2004171 - DNA, 15 bp, Homo sapiens
tattgtataaggtgt

SEQ ID NO: 2004172 - DNA, 15 bp, Homo sapiens
attgtataaggtgta

SEQ ID NO: 2004173 - DNA, 15 bp, Homo sapiens
taaggtgtaaggaaa

SEQ ID NO: 2004174 - DNA, 15 bp, Homo sapiens
aaggtgtaaggaaag

SEQ ID NO: 2004175 - DNA, 15 bp, Homo sapiens
aggtgtaaggaaagg

SEQ ID NO: 2004176 - DNA, 15 bp, Homo sapiens
ggtgtaaggaaaggg

SEQ ID NO: 2004177 - DNA, 15 bp, Homo sapiens
gtgtaaggaaagggt

SEQ ID NO: 2004178 - DNA, 15 bp, Homo sapiens
tgtaaggaaagggtc

SEQ ID NO: 2004179 - DNA, 15 bp, Homo sapiens
gtaaggaaagggtcc

SEQ ID NO: 2004180 - DNA, 15 bp, Homo sapiens
taaggaaagggtcca

SEQ ID NO: 2004181 - DNA, 15 bp, Homo sapiens
aaggaaagggtccag

SEQ ID NO: 2004182 - DNA, 15 bp, Homo sapiens
aggaaagggtccagt

SEQ ID NO: 2004183 - DNA, 15 bp, Homo sapiens
ggaaagggtccagtt

SEQ ID NO: 2004184 - DNA, 15 bp, Homo sapiens
gaaagggtccagttt

SEQ ID NO: 2004185 - DNA, 15 bp, Homo sapiens
aaagggtccagtttc

SEQ ID NO: 2004186 - DNA, 15 bp, Homo sapiens
aagggtccagtttca

SEQ ID NO: 2004187 - DNA, 15 bp, Homo sapiens
agggtccagtttcag

SEQ ID NO: 2004188 - DNA, 15 bp, Homo sapiens
gggtccagtttcagt

SEQ ID NO: 2004189 - DNA, 15 bp, Homo sapiens
ggtccagtttcagtt

SEQ ID NO: 2004190 - DNA, 15 bp, Homo sapiens
gtccagtttcagttt

SEQ ID NO: 2004191 - DNA, 15 bp, Homo sapiens
tccagtttcagtttt

SEQ ID NO: 2004192 - DNA, 15 bp, Homo sapiens
agccagttttgccag

SEQ ID NO: 2004193 - DNA, 15 bp, Homo sapiens
gccagttttgccagt

SEQ ID NO: 2004194 - DNA, 15 bp, Homo sapiens
ccagttttgccagta

SEQ ID NO: 2004195 - DNA, 15 bp, Homo sapiens
cagttttgccagtac

SEQ ID NO: 2004196 - DNA, 15 bp, Homo sapiens
agttttgccagtacc

SEQ ID NO: 2004197 - DNA, 15 bp, Homo sapiens
gttttgccagtacca

SEQ ID NO: 2004198 - DNA, 15 bp, Homo sapiens
ttttgccagtaccat

SEQ ID NO: 2004199 - DNA, 15 bp, Homo sapiens
tttgccagtaccatt

SEQ ID NO: 2004200 - DNA, 15 bp, Homo sapiens
ttgccagtaccattt

SEQ ID NO: 2004201 - DNA, 15 bp, Homo sapiens
tgccagtaccattta

SEQ ID NO: 2004202 - DNA, 15 bp, Homo sapiens
gccagtaccatttat

SEQ ID NO: 2004203 - DNA, 15 bp, Homo sapiens
ccagtaccatttatt

SEQ ID NO: 2004204 - DNA, 15 bp, Homo sapiens
cagtaccatttatta

SEQ ID NO: 2004205 - DNA, 15 bp, Homo sapiens
agtaccatttattaa

SEQ ID NO: 2004206 - DNA, 15 bp, Homo sapiens
gtaccatttattaaa

SEQ ID NO: 2004207 - DNA, 15 bp, Homo sapiens
taccatttattaaat

SEQ ID NO: 2004208 - DNA, 15 bp, Homo sapiens
aagatcagatggttg

SEQ ID NO: 2004209 - DNA, 15 bp, Homo sapiens
agatcagatggttgt

SEQ ID NO: 2004210 - DNA, 15 bp, Homo sapiens
gatcagatggttgta

SEQ ID NO: 2004211 - DNA, 15 bp, Homo sapiens
atcagatggttgtag

SEQ ID NO: 2004212 - DNA, 15 bp, Homo sapiens
tcagatggttgtaga

SEQ ID NO: 2004213 - DNA, 15 bp, Homo sapiens
cagatggttgtagat

SEQ ID NO: 2004214 - DNA, 15 bp, Homo sapiens
agatggttgtagatg

SEQ ID NO: 2004215 - DNA, 15 bp, Homo sapiens
gatggttgtagatgt

SEQ ID NO: 2004216 - DNA, 15 bp, Homo sapiens
atggttgtagatgtg

SEQ ID NO: 2004217 - DNA, 15 bp, Homo sapiens
gtagatgtgtggtgt

SEQ ID NO: 2004218 - DNA, 15 bp, Homo sapiens
tgttatttctgaggc

SEQ ID NO: 2004219 - DNA, 15 bp, Homo sapiens
gttatttctgaggcc

SEQ ID NO: 2004220 - DNA, 15 bp, Homo sapiens
ttatttctgaggcct

SEQ ID NO: 2004221 - DNA, 15 bp, Homo sapiens
tatttctgaggcctc

SEQ ID NO: 2004222 - DNA, 15 bp, Homo sapiens
atttctgaggcctct

SEQ ID NO: 2004223 - DNA, 15 bp, Homo sapiens
tttctgaggcctctg

SEQ ID NO: 2004224 - DNA, 15 bp, Homo sapiens
ttctgaggcctctgt

SEQ ID NO: 2004225 - DNA, 15 bp, Homo sapiens
tctgaggcctctgtt

SEQ ID NO: 2004226 - DNA, 15 bp, Homo sapiens
ctgaggcctctgttc

SEQ ID NO: 2004227 - DNA, 15 bp, Homo sapiens
tgaggcctctgttct

SEQ ID NO: 2004228 - DNA, 15 bp, Homo sapiens
gaggcctctgttctg

SEQ ID NO: 2004229 - DNA, 15 bp, Homo sapiens
aggcctctgttctgt

SEQ ID NO: 2004230 - DNA, 15 bp, Homo sapiens
ggcctctgttctgtt

SEQ ID NO: 2004231 - DNA, 15 bp, Homo sapiens
gtatctgttttggta

SEQ ID NO: 2004232 - DNA, 15 bp, Homo sapiens
tatctgttttggtac

SEQ ID NO: 2004233 - DNA, 15 bp, Homo sapiens
atctgttttggtacc

SEQ ID NO: 2004234 - DNA, 15 bp, Homo sapiens
tctgttttggtacca

SEQ ID NO: 2004235 - DNA, 15 bp, Homo sapiens
ctgttttggtaccag

SEQ ID NO: 2004236 - DNA, 15 bp, Homo sapiens
tgttttggtaccagt

SEQ ID NO: 2004237 - DNA, 15 bp, Homo sapiens
gttttggtaccagta

SEQ ID NO: 2004238 - DNA, 15 bp, Homo sapiens
ttttggtaccagtac

SEQ ID NO: 2004239 - DNA, 15 bp, Homo sapiens
tttggtaccagtacc

SEQ ID NO: 2004240 - DNA, 15 bp, Homo sapiens
ttggtaccagtacca

SEQ ID NO: 2004241 - DNA, 15 bp, Homo sapiens
tggtaccagtaccat

SEQ ID NO: 2004242 - DNA, 15 bp, Homo sapiens
ggtaccagtaccatg

SEQ ID NO: 2004243 - DNA, 15 bp, Homo sapiens
gtaccagtaccatgc

SEQ ID NO: 2004244 - DNA, 15 bp, Homo sapiens
taccagtaccatgct

SEQ ID NO: 2004245 - DNA, 15 bp, Homo sapiens
accagtaccatgctg

SEQ ID NO: 2004246 - DNA, 15 bp, Homo sapiens
taccatgctgttttg

SEQ ID NO: 2004247 - DNA, 15 bp, Homo sapiens
accatgctgttttgg

SEQ ID NO: 2004248 - DNA, 15 bp, Homo sapiens
ccatgctgttttggt

SEQ ID NO: 2004249 - DNA, 15 bp, Homo sapiens
catgctgttttggtt

SEQ ID NO: 2004250 - DNA, 15 bp, Homo sapiens
atgctgttttggtta

SEQ ID NO: 2004251 - DNA, 15 bp, Homo sapiens
tgctgttttggttac

SEQ ID NO: 2004252 - DNA, 15 bp, Homo sapiens
gctgttttggttact

SEQ ID NO: 2004253 - DNA, 15 bp, Homo sapiens
ctgttttggttactg

SEQ ID NO: 2004254 - DNA, 15 bp, Homo sapiens
tgttttggttactgt

SEQ ID NO: 2004255 - DNA, 15 bp, Homo sapiens
gttttggttactgta

SEQ ID NO: 2004256 - DNA, 15 bp, Homo sapiens
ttttggttactgtag

SEQ ID NO: 2004257 - DNA, 15 bp, Homo sapiens
tttggttactgtagc

SEQ ID NO: 2004258 - DNA, 15 bp, Homo sapiens
ttggttactgtagcc

SEQ ID NO: 2004259 - DNA, 15 bp, Homo sapiens
tggttactgtagcct

SEQ ID NO: 2004260 - DNA, 15 bp, Homo sapiens
ggttactgtagcctt

SEQ ID NO: 2004261 - DNA, 15 bp, Homo sapiens
gttactgtagccttg

SEQ ID NO: 2004262 - DNA, 15 bp, Homo sapiens
actgtagccttgtat

SEQ ID NO: 2004263 - DNA, 15 bp, Homo sapiens
ctgtagccttgtata

SEQ ID NO: 2004264 - DNA, 15 bp, Homo sapiens
tgtagccttgtatag

SEQ ID NO: 2004265 - DNA, 15 bp, Homo sapiens
gtagccttgtatagt

SEQ ID NO: 2004266 - DNA, 15 bp, Homo sapiens
tagccttgtatagtt

SEQ ID NO: 2004267 - DNA, 15 bp, Homo sapiens
agccttgtatagttt

SEQ ID NO: 2004268 - DNA, 15 bp, Homo sapiens
gccttgtatagtttg

SEQ ID NO: 2004269 - DNA, 15 bp, Homo sapiens
ccttgtatagtttga

SEQ ID NO: 2004270 - DNA, 15 bp, Homo sapiens
cttgtatagtttgaa

SEQ ID NO: 2004271 - DNA, 15 bp, Homo sapiens
ttgtatagtttgaag

SEQ ID NO: 2004272 - DNA, 15 bp, Homo sapiens
tgtatagtttgaagt

SEQ ID NO: 2004273 - DNA, 15 bp, Homo sapiens
gtatagtttgaagtc

SEQ ID NO: 2004274 - DNA, 15 bp, Homo sapiens
tatagtttgaagtca

SEQ ID NO: 2004275 - DNA, 15 bp, Homo sapiens
atagtttgaagtcag

SEQ ID NO: 2004276 - DNA, 15 bp, Homo sapiens
tagtttgaagtcagg

SEQ ID NO: 2004277 - DNA, 15 bp, Homo sapiens
agtttgaagtcaggt

SEQ ID NO: 2004278 - DNA, 15 bp, Homo sapiens
tcaggtagtgtgatt

SEQ ID NO: 2004279 - DNA, 15 bp, Homo sapiens
caggtagtgtgattc

SEQ ID NO: 2004280 - DNA, 15 bp, Homo sapiens
aggtagtgtgattcc

SEQ ID NO: 2004281 - DNA, 15 bp, Homo sapiens
ggtagtgtgattcct

SEQ ID NO: 2004282 - DNA, 15 bp, Homo sapiens
gtagtgtgattcctc

SEQ ID NO: 2004283 - DNA, 15 bp, Homo sapiens
tagtgtgattcctcc

SEQ ID NO: 2004284 - DNA, 15 bp, Homo sapiens
agtgtgattcctcca

SEQ ID NO: 2004285 - DNA, 15 bp, Homo sapiens
gtgtgattcctccag

SEQ ID NO: 2004286 - DNA, 15 bp, Homo sapiens
tgtgattcctccagc

SEQ ID NO: 2004287 - DNA, 15 bp, Homo sapiens
gtgattcctccagct

SEQ ID NO: 2004288 - DNA, 15 bp, Homo sapiens
tgattcctccagctt

SEQ ID NO: 2004289 - DNA, 15 bp, Homo sapiens
gattcctccagcttt

SEQ ID NO: 2004290 - DNA, 15 bp, Homo sapiens
attcctccagctttg

SEQ ID NO: 2004291 - DNA, 15 bp, Homo sapiens
ttcctccagctttgt

SEQ ID NO: 2004292 - DNA, 15 bp, Homo sapiens
tcctccagctttgtt

SEQ ID NO: 2004293 - DNA, 15 bp, Homo sapiens
ccagctttgttcttt

SEQ ID NO: 2004294 - DNA, 15 bp, Homo sapiens
cagctttgttctttt

SEQ ID NO: 2004295 - DNA, 15 bp, Homo sapiens
agctttgttcttttt

SEQ ID NO: 2004296 - DNA, 15 bp, Homo sapiens
gctttgttctttttg

SEQ ID NO: 2004297 - DNA, 15 bp, Homo sapiens
ctttgttctttttgc

SEQ ID NO: 2004298 - DNA, 15 bp, Homo sapiens
tttgttctttttgct

SEQ ID NO: 2004299 - DNA, 15 bp, Homo sapiens
ttgttctttttgctt

SEQ ID NO: 2004300 - DNA, 15 bp, Homo sapiens
tgttctttttgctta

SEQ ID NO: 2004301 - DNA, 15 bp, Homo sapiens
gttctttttgcttag

SEQ ID NO: 2004302 - DNA, 15 bp, Homo sapiens
ttctttttgcttagg

SEQ ID NO: 2004303 - DNA, 15 bp, Homo sapiens
tctttttgcttagga

SEQ ID NO: 2004304 - DNA, 15 bp, Homo sapiens
ctttttgcttaggat

SEQ ID NO: 2004305 - DNA, 15 bp, Homo sapiens
tttttgcttaggatt

SEQ ID NO: 2004306 - DNA, 15 bp, Homo sapiens
ttttgcttaggattg

SEQ ID NO: 2004307 - DNA, 15 bp, Homo sapiens
tttgcttaggattgt

SEQ ID NO: 2004308 - DNA, 15 bp, Homo sapiens
tgcttaggattgtcg

SEQ ID NO: 2004309 - DNA, 15 bp, Homo sapiens
gcttaggattgtcgt

SEQ ID NO: 2004310 - DNA, 15 bp, Homo sapiens
cttaggattgtcgtg

SEQ ID NO: 2004311 - DNA, 15 bp, Homo sapiens
ttaggattgtcgtgg

SEQ ID NO: 2004312 - DNA, 15 bp, Homo sapiens
taggattgtcgtggt

SEQ ID NO: 2004313 - DNA, 15 bp, Homo sapiens
aggattgtcgtggtt

SEQ ID NO: 2004314 - DNA, 15 bp, Homo sapiens
ggattgtcgtggtta

SEQ ID NO: 2004315 - DNA, 15 bp, Homo sapiens
gattgtcgtggttat

SEQ ID NO: 2004316 - DNA, 15 bp, Homo sapiens
attgtcgtggttatg

SEQ ID NO: 2004317 - DNA, 15 bp, Homo sapiens
ttgtcgtggttatgc

SEQ ID NO: 2004318 - DNA, 15 bp, Homo sapiens
tgtcgtggttatgcg

SEQ ID NO: 2004319 - DNA, 15 bp, Homo sapiens
gtcgtggttatgcgg

SEQ ID NO: 2004320 - DNA, 15 bp, Homo sapiens
tcgtggttatgcggg

SEQ ID NO: 2004321 - DNA, 15 bp, Homo sapiens
cgtggttatgcgggc

SEQ ID NO: 2004322 - DNA, 15 bp, Homo sapiens
gtggttatgcgggct

SEQ ID NO: 2004323 - DNA, 15 bp, Homo sapiens
tggttatgcgggctc

SEQ ID NO: 2004324 - DNA, 15 bp, Homo sapiens
ggttatgcgggctct

SEQ ID NO: 2004325 - DNA, 15 bp, Homo sapiens
gttatgcgggctctt

SEQ ID NO: 2004326 - DNA, 15 bp, Homo sapiens
ttatgcgggctcttt

SEQ ID NO: 2004327 - DNA, 15 bp, Homo sapiens
tatgcgggctctttt

SEQ ID NO: 2004328 - DNA, 15 bp, Homo sapiens
atgcgggctcttttc

SEQ ID NO: 2004329 - DNA, 15 bp, Homo sapiens
tgcgggctcttttct

SEQ ID NO: 2004330 - DNA, 15 bp, Homo sapiens
gcgggctcttttctg

SEQ ID NO: 2004331 - DNA, 15 bp, Homo sapiens
cgggctcttttctgg

SEQ ID NO: 2004332 - DNA, 15 bp, Homo sapiens
gggctcttttctggt

SEQ ID NO: 2004333 - DNA, 15 bp, Homo sapiens
ggctcttttctggtt

SEQ ID NO: 2004334 - DNA, 15 bp, Homo sapiens
gctcttttctggttt

SEQ ID NO: 2004335 - DNA, 15 bp, Homo sapiens
ctcttttctggtttc

SEQ ID NO: 2004336 - DNA, 15 bp, Homo sapiens
tcttttctggtttca

SEQ ID NO: 2004337 - DNA, 15 bp, Homo sapiens
cttttctggtttcat

SEQ ID NO: 2004338 - DNA, 15 bp, Homo sapiens
ttttctggtttcata

SEQ ID NO: 2004339 - DNA, 15 bp, Homo sapiens
tttctggtttcatat

SEQ ID NO: 2004340 - DNA, 15 bp, Homo sapiens
ttctggtttcatatg

SEQ ID NO: 2004341 - DNA, 15 bp, Homo sapiens
tctggtttcatatga

SEQ ID NO: 2004342 - DNA, 15 bp, Homo sapiens
ctggtttcatatgaa

SEQ ID NO: 2004343 - DNA, 15 bp, Homo sapiens
tggtttcatatgaaa

SEQ ID NO: 2004344 - DNA, 15 bp, Homo sapiens
ggtttcatatgaaat

SEQ ID NO: 2004345 - DNA, 15 bp, Homo sapiens
gtttcatatgaaatt

SEQ ID NO: 2004346 - DNA, 15 bp, Homo sapiens
tttcatatgaaattt

SEQ ID NO: 2004347 - DNA, 15 bp, Homo sapiens
ttcatatgaaattta

SEQ ID NO: 2004348 - DNA, 15 bp, Homo sapiens
tcatatgaaatttaa

SEQ ID NO: 2004349 - DNA, 15 bp, Homo sapiens
catatgaaatttaaa

SEQ ID NO: 2004350 - DNA, 15 bp, Homo sapiens
atatgaaatttaaag

SEQ ID NO: 2004351 - DNA, 15 bp, Homo sapiens
tttttctaattctgt

SEQ ID NO: 2004352 - DNA, 15 bp, Homo sapiens
ttttctaattctgtg

SEQ ID NO: 2004353 - DNA, 15 bp, Homo sapiens
tttctaattctgtga

SEQ ID NO: 2004354 - DNA, 15 bp, Homo sapiens
ttctaattctgtgaa

SEQ ID NO: 2004355 - DNA, 15 bp, Homo sapiens
tctaattctgtgaag

SEQ ID NO: 2004356 - DNA, 15 bp, Homo sapiens
ctaattctgtgaaga

SEQ ID NO: 2004357 - DNA, 15 bp, Homo sapiens
taattctgtgaagaa

SEQ ID NO: 2004358 - DNA, 15 bp, Homo sapiens
aattctgtgaagaaa

SEQ ID NO: 2004359 - DNA, 15 bp, Homo sapiens
attctgtgaagaaag

SEQ ID NO: 2004360 - DNA, 15 bp, Homo sapiens
ttctgtgaagaaagt

SEQ ID NO: 2004361 - DNA, 15 bp, Homo sapiens
tctgtgaagaaagtc

SEQ ID NO: 2004362 - DNA, 15 bp, Homo sapiens
ctgtgaagaaagtca

SEQ ID NO: 2004363 - DNA, 15 bp, Homo sapiens
tgtgaagaaagtcag

SEQ ID NO: 2004364 - DNA, 15 bp, Homo sapiens
gtgaagaaagtcagt

SEQ ID NO: 2004365 - DNA, 15 bp, Homo sapiens
tgaagaaagtcagtg

SEQ ID NO: 2004366 - DNA, 15 bp, Homo sapiens
gaagaaagtcagtgg

SEQ ID NO: 2004367 - DNA, 15 bp, Homo sapiens
aagaaagtcagtggt

SEQ ID NO: 2004368 - DNA, 15 bp, Homo sapiens
agaaagtcagtggta

SEQ ID NO: 2004369 - DNA, 15 bp, Homo sapiens
gaaagtcagtggtag

SEQ ID NO: 2004370 - DNA, 15 bp, Homo sapiens
aaagtcagtggtagt

SEQ ID NO: 2004371 - DNA, 15 bp, Homo sapiens
aagtcagtggtagtt

SEQ ID NO: 2004372 - DNA, 15 bp, Homo sapiens
agtcagtggtagttt

SEQ ID NO: 2004373 - DNA, 15 bp, Homo sapiens
gtcagtggtagtttg

SEQ ID NO: 2004374 - DNA, 15 bp, Homo sapiens
tcagtggtagtttga

SEQ ID NO: 2004375 - DNA, 15 bp, Homo sapiens
cagtggtagtttgat

SEQ ID NO: 2004376 - DNA, 15 bp, Homo sapiens
agtggtagtttgatg

SEQ ID NO: 2004377 - DNA, 15 bp, Homo sapiens
gtggtagtttgatgg

SEQ ID NO: 2004378 - DNA, 15 bp, Homo sapiens
tggtagtttgatggg

SEQ ID NO: 2004379 - DNA, 15 bp, Homo sapiens
ggtagtttgatgggg

SEQ ID NO: 2004380 - DNA, 15 bp, Homo sapiens
gtagtttgatgggga

SEQ ID NO: 2004381 - DNA, 15 bp, Homo sapiens
tagtttgatggggat

SEQ ID NO: 2004382 - DNA, 15 bp, Homo sapiens
agtttgatggggata

SEQ ID NO: 2004383 - DNA, 15 bp, Homo sapiens
gtttgatggggatag

SEQ ID NO: 2004384 - DNA, 15 bp, Homo sapiens
tttgatggggatagc

SEQ ID NO: 2004385 - DNA, 15 bp, Homo sapiens
ttgatggggatagca

SEQ ID NO: 2004386 - DNA, 15 bp, Homo sapiens
tgatggggatagcat

SEQ ID NO: 2004387 - DNA, 15 bp, Homo sapiens
gatggggatagcatt

SEQ ID NO: 2004388 - DNA, 15 bp, Homo sapiens
atggggatagcattg

SEQ ID NO: 2004389 - DNA, 15 bp, Homo sapiens
tggggatagcattga

SEQ ID NO: 2004390 - DNA, 15 bp, Homo sapiens
ggggatagcattgaa

SEQ ID NO: 2004391 - DNA, 15 bp, Homo sapiens
gggatagcattgaat

SEQ ID NO: 2004392 - DNA, 15 bp, Homo sapiens
ggatagcattgaatc

SEQ ID NO: 2004393 - DNA, 15 bp, Homo sapiens
gatagcattgaatct

SEQ ID NO: 2004394 - DNA, 15 bp, Homo sapiens
atagcattgaatcta

SEQ ID NO: 2004395 - DNA, 15 bp, Homo sapiens
tagcattgaatctat

SEQ ID NO: 2004396 - DNA, 15 bp, Homo sapiens
agcattgaatctata

SEQ ID NO: 2004397 - DNA, 15 bp, Homo sapiens
gcattgaatctataa

SEQ ID NO: 2004398 - DNA, 15 bp, Homo sapiens
cattgaatctataaa

SEQ ID NO: 2004399 - DNA, 15 bp, Homo sapiens
tgaatctataaattg

SEQ ID NO: 2004400 - DNA, 15 bp, Homo sapiens
gaatctataaattgc

SEQ ID NO: 2004401 - DNA, 15 bp, Homo sapiens
aatctataaattgct

SEQ ID NO: 2004402 - DNA, 15 bp, Homo sapiens
atctataaattgctt

SEQ ID NO: 2004403 - DNA, 15 bp, Homo sapiens
tctataaattgcttt

SEQ ID NO: 2004404 - DNA, 15 bp, Homo sapiens
ctataaattgctttg

SEQ ID NO: 2004405 - DNA, 15 bp, Homo sapiens
tataaattgctttgg

SEQ ID NO: 2004406 - DNA, 15 bp, Homo sapiens
ataaattgctttggg

SEQ ID NO: 2004407 - DNA, 15 bp, Homo sapiens
taaattgctttgggc

SEQ ID NO: 2004408 - DNA, 15 bp, Homo sapiens
aaattgctttgggca

SEQ ID NO: 2004409 - DNA, 15 bp, Homo sapiens
aattgctttgggcag

SEQ ID NO: 2004410 - DNA, 15 bp, Homo sapiens
attgctttgggcagt

SEQ ID NO: 2004411 - DNA, 15 bp, Homo sapiens
ttgctttgggcagta

SEQ ID NO: 2004412 - DNA, 15 bp, Homo sapiens
tgctttgggcagtac

SEQ ID NO: 2004413 - DNA, 15 bp, Homo sapiens
gctttgggcagtacg

SEQ ID NO: 2004414 - DNA, 15 bp, Homo sapiens
ctttgggcagtacgg

SEQ ID NO: 2004415 - DNA, 15 bp, Homo sapiens
tttgggcagtacggc

SEQ ID NO: 2004416 - DNA, 15 bp, Homo sapiens
ttgggcagtacggcc

SEQ ID NO: 2004417 - DNA, 15 bp, Homo sapiens
tgggcagtacggcca

SEQ ID NO: 2004418 - DNA, 15 bp, Homo sapiens
gggcagtacggccat

SEQ ID NO: 2004419 - DNA, 15 bp, Homo sapiens
ggcagtacggccatt

SEQ ID NO: 2004420 - DNA, 15 bp, Homo sapiens
gcagtacggccattt

SEQ ID NO: 2004421 - DNA, 15 bp, Homo sapiens
cagtacggccatttt

SEQ ID NO: 2004422 - DNA, 15 bp, Homo sapiens
agtacggccattttc

SEQ ID NO: 2004423 - DNA, 15 bp, Homo sapiens
gtacggccattttca

SEQ ID NO: 2004424 - DNA, 15 bp, Homo sapiens
tacggccattttcac

SEQ ID NO: 2004425 - DNA, 15 bp, Homo sapiens
acggccattttcacg

SEQ ID NO: 2004426 - DNA, 15 bp, Homo sapiens
cggccattttcacga

SEQ ID NO: 2004427 - DNA, 15 bp, Homo sapiens
ggccattttcacgat

SEQ ID NO: 2004428 - DNA, 15 bp, Homo sapiens
gccattttcacgata

SEQ ID NO: 2004429 - DNA, 15 bp, Homo sapiens
ccattttcacgatat

SEQ ID NO: 2004430 - DNA, 15 bp, Homo sapiens
cattttcacgatatt

SEQ ID NO: 2004431 - DNA, 15 bp, Homo sapiens
attttcacgatattg

SEQ ID NO: 2004432 - DNA, 15 bp, Homo sapiens
ttttcacgatattga

SEQ ID NO: 2004433 - DNA, 15 bp, Homo sapiens
tttcacgatattgat

SEQ ID NO: 2004434 - DNA, 15 bp, Homo sapiens
ttcacgatattgatt

SEQ ID NO: 2004435 - DNA, 15 bp, Homo sapiens
tcacgatattgattc

SEQ ID NO: 2004436 - DNA, 15 bp, Homo sapiens
cacgatattgattct

SEQ ID NO: 2004437 - DNA, 15 bp, Homo sapiens
acgatattgattctt

SEQ ID NO: 2004438 - DNA, 15 bp, Homo sapiens
cgatattgattcttc

SEQ ID NO: 2004439 - DNA, 15 bp, Homo sapiens
gatattgattcttcc

SEQ ID NO: 2004440 - DNA, 15 bp, Homo sapiens
atattgattcttcct

SEQ ID NO: 2004441 - DNA, 15 bp, Homo sapiens
tattgattcttccta

SEQ ID NO: 2004442 - DNA, 15 bp, Homo sapiens
attgattcttcctat

SEQ ID NO: 2004443 - DNA, 15 bp, Homo sapiens
ttgattcttcctatc

SEQ ID NO: 2004444 - DNA, 15 bp, Homo sapiens
tgattcttcctatcg

SEQ ID NO: 2004445 - DNA, 15 bp, Homo sapiens
gattcttcctatcga

SEQ ID NO: 2004446 - DNA, 15 bp, Homo sapiens
attcttcctatcgat

SEQ ID NO: 2004447 - DNA, 15 bp, Homo sapiens
ttcttcctatcgatg

SEQ ID NO: 2004448 - DNA, 15 bp, Homo sapiens
tcttcctatcgatga

SEQ ID NO: 2004449 - DNA, 15 bp, Homo sapiens
cttcctatcgatgag

SEQ ID NO: 2004450 - DNA, 15 bp, Homo sapiens
ttcctatcgatgagc

SEQ ID NO: 2004451 - DNA, 15 bp, Homo sapiens
tcctatcgatgagca

SEQ ID NO: 2004452 - DNA, 15 bp, Homo sapiens
cctatcgatgagcat

SEQ ID NO: 2004453 - DNA, 15 bp, Homo sapiens
ctatcgatgagcatg

SEQ ID NO: 2004454 - DNA, 15 bp, Homo sapiens
tatcgatgagcatgg

SEQ ID NO: 2004455 - DNA, 15 bp, Homo sapiens
atcgatgagcatgga

SEQ ID NO: 2004456 - DNA, 15 bp, Homo sapiens
tcgatgagcatggaa

SEQ ID NO: 2004457 - DNA, 15 bp, Homo sapiens
cgatgagcatggaat

SEQ ID NO: 2004458 - DNA, 15 bp, Homo sapiens
gatgagcatggaatg

SEQ ID NO: 2004459 - DNA, 15 bp, Homo sapiens
catggaatgtttttc

SEQ ID NO: 2004460 - DNA, 15 bp, Homo sapiens
atggaatgtttttcc

SEQ ID NO: 2004461 - DNA, 15 bp, Homo sapiens
tggaatgtttttccg

SEQ ID NO: 2004462 - DNA, 15 bp, Homo sapiens
ggaatgtttttccgt

SEQ ID NO: 2004463 - DNA, 15 bp, Homo sapiens
gaatgtttttccgtt

SEQ ID NO: 2004464 - DNA, 15 bp, Homo sapiens
aatgtttttccgttt

SEQ ID NO: 2004465 - DNA, 15 bp, Homo sapiens
atgtttttccgtttg

SEQ ID NO: 2004466 - DNA, 15 bp, Homo sapiens
tgtttttccgtttgt

SEQ ID NO: 2004467 - DNA, 15 bp, Homo sapiens
gtttttccgtttgtt

SEQ ID NO: 2004468 - DNA, 15 bp, Homo sapiens
tttttccgtttgttt

SEQ ID NO: 2004469 - DNA, 15 bp, Homo sapiens
ttttccgtttgtttg

SEQ ID NO: 2004470 - DNA, 15 bp, Homo sapiens
tttccgtttgtttgt

SEQ ID NO: 2004471 - DNA, 15 bp, Homo sapiens
ttccgtttgtttgtg

SEQ ID NO: 2004472 - DNA, 15 bp, Homo sapiens
tccgtttgtttgtgt

SEQ ID NO: 2004473 - DNA, 15 bp, Homo sapiens
ccgtttgtttgtgtc

SEQ ID NO: 2004474 - DNA, 15 bp, Homo sapiens
cgtttgtttgtgtcc

SEQ ID NO: 2004475 - DNA, 15 bp, Homo sapiens
gtttgtttgtgtcct

SEQ ID NO: 2004476 - DNA, 15 bp, Homo sapiens
tttgtttgtgtcctc

SEQ ID NO: 2004477 - DNA, 15 bp, Homo sapiens
ttgtttgtgtcctct

SEQ ID NO: 2004478 - DNA, 15 bp, Homo sapiens
tgtttgtgtcctctc

SEQ ID NO: 2004479 - DNA, 15 bp, Homo sapiens
tttgtgtcctctctg

SEQ ID NO: 2004480 - DNA, 15 bp, Homo sapiens
ttgtgtcctctctgg

SEQ ID NO: 2004481 - DNA, 15 bp, Homo sapiens
tgtgtcctctctggc

SEQ ID NO: 2004482 - DNA, 15 bp, Homo sapiens
gtgtcctctctggct

SEQ ID NO: 2004483 - DNA, 15 bp, Homo sapiens
tgtcctctctggctg

SEQ ID NO: 2004484 - DNA, 15 bp, Homo sapiens
gtcctctctggctgg

SEQ ID NO: 2004485 - DNA, 15 bp, Homo sapiens
tcctctctggctggc

SEQ ID NO: 2004486 - DNA, 15 bp, Homo sapiens
cctctctggctggca

SEQ ID NO: 2004487 - DNA, 15 bp, Homo sapiens
ctctctggctggcat

SEQ ID NO: 2004488 - DNA, 15 bp, Homo sapiens
tctctggctggcatc

SEQ ID NO: 2004489 - DNA, 15 bp, Homo sapiens
ctctggctggcatct

SEQ ID NO: 2004490 - DNA, 15 bp, Homo sapiens
tctggctggcatctg

SEQ ID NO: 2004491 - DNA, 15 bp, Homo sapiens
ctggctggcatctgg

SEQ ID NO: 2004492 - DNA, 15 bp, Homo sapiens
tggctggcatctggc

SEQ ID NO: 2004493 - DNA, 15 bp, Homo sapiens
ggctggcatctggca

SEQ ID NO: 2004494 - DNA, 15 bp, Homo sapiens
gctggcatctggcag

SEQ ID NO: 2004495 - DNA, 15 bp, Homo sapiens
ctggcatctggcagg

SEQ ID NO: 2004496 - DNA, 15 bp, Homo sapiens
tggcatctggcaggt

SEQ ID NO: 2004497 - DNA, 15 bp, Homo sapiens
ggcatctggcaggtg

SEQ ID NO: 2004498 - DNA, 15 bp, Homo sapiens
gcatctggcaggtgc

SEQ ID NO: 2004499 - DNA, 15 bp, Homo sapiens
catctggcaggtgcc

SEQ ID NO: 2004500 - DNA, 15 bp, Homo sapiens
atctggcaggtgccc

SEQ ID NO: 2004501 - DNA, 15 bp, Homo sapiens
tctggcaggtgcccc

SEQ ID NO: 2004502 - DNA, 15 bp, Homo sapiens
ctggcaggtgcccct

SEQ ID NO: 2004503 - DNA, 15 bp, Homo sapiens
tggcaggtgcccctc

SEQ ID NO: 2004504 - DNA, 15 bp, Homo sapiens
ggcaggtgcccctct

SEQ ID NO: 2004505 - DNA, 15 bp, Homo sapiens
gcaggtgcccctctg

SEQ ID NO: 2004506 - DNA, 15 bp, Homo sapiens
caggtgcccctctgg

SEQ ID NO: 2004507 - DNA, 15 bp, Homo sapiens
aggtgcccctctggg

SEQ ID NO: 2004508 - DNA, 15 bp, Homo sapiens
ggtgcccctctggga

SEQ ID NO: 2004509 - DNA, 15 bp, Homo sapiens
gtgcccctctgggac

SEQ ID NO: 2004510 - DNA, 15 bp, Homo sapiens
tgcccctctgggaca

SEQ ID NO: 2004511 - DNA, 15 bp, Homo sapiens
gcccctctgggacaa

SEQ ID NO: 2004512 - DNA, 15 bp, Homo sapiens
cccctctgggacaaa

SEQ ID NO: 2004513 - DNA, 15 bp, Homo sapiens
ccctctgggacaaag

SEQ ID NO: 2004514 - DNA, 15 bp, Homo sapiens
cctctgggacaaagc

SEQ ID NO: 2004515 - DNA, 15 bp, Homo sapiens
ctctgggacaaagct

SEQ ID NO: 2004516 - DNA, 15 bp, Homo sapiens
tctgggacaaagctt

SEQ ID NO: 2004517 - DNA, 15 bp, Homo sapiens
ctgggacaaagcttc

SEQ ID NO: 2004518 - DNA, 15 bp, Homo sapiens
tgggacaaagcttcc

SEQ ID NO: 2004519 - DNA, 15 bp, Homo sapiens
gggacaaagcttcca

SEQ ID NO: 2004520 - DNA, 15 bp, Homo sapiens
ggacaaagcttccag

SEQ ID NO: 2004521 - DNA, 15 bp, Homo sapiens
gacaaagcttccaga

SEQ ID NO: 2004522 - DNA, 15 bp, Homo sapiens
acaaagcttccagag

SEQ ID NO: 2004523 - DNA, 15 bp, Homo sapiens
caaagcttccagagg

SEQ ID NO: 2004524 - DNA, 15 bp, Homo sapiens
aaagcttccagaggt

SEQ ID NO: 2004525 - DNA, 15 bp, Homo sapiens
aagcttccagaggta

SEQ ID NO: 2004526 - DNA, 15 bp, Homo sapiens
agcttccagaggtag

SEQ ID NO: 2004527 - DNA, 15 bp, Homo sapiens
gcttccagaggtagg

SEQ ID NO: 2004528 - DNA, 15 bp, Homo sapiens
cttccagaggtagga

SEQ ID NO: 2004529 - DNA, 15 bp, Homo sapiens
ttccagaggtaggaa

SEQ ID NO: 2004530 - DNA, 15 bp, Homo sapiens
tccagaggtaggaac

SEQ ID NO: 2004531 - DNA, 15 bp, Homo sapiens
ccagaggtaggaaca

SEQ ID NO: 2004532 - DNA, 15 bp, Homo sapiens
cagaggtaggaacac

SEQ ID NO: 2004533 - DNA, 15 bp, Homo sapiens
agaggtaggaacacg

SEQ ID NO: 2004534 - DNA, 15 bp, Homo sapiens
gaggtaggaacacgc

SEQ ID NO: 2004535 - DNA, 15 bp, Homo sapiens
aggtaggaacacgca

SEQ ID NO: 2004536 - DNA, 15 bp, Homo sapiens
ggtaggaacacgcag

SEQ ID NO: 2004537 - DNA, 15 bp, Homo sapiens
gtaggaacacgcagc

SEQ ID NO: 2004538 - DNA, 15 bp, Homo sapiens
taggaacacgcagca

SEQ ID NO: 2004539 - DNA, 15 bp, Homo sapiens
aggaacacgcagcaa

SEQ ID NO: 2004540 - DNA, 15 bp, Homo sapiens
ggaacacgcagcaat

SEQ ID NO: 2004541 - DNA, 15 bp, Homo sapiens
gaacacgcagcaatc

SEQ ID NO: 2004542 - DNA, 15 bp, Homo sapiens
aacacgcagcaatct

SEQ ID NO: 2004543 - DNA, 15 bp, Homo sapiens
acacgcagcaatctt

SEQ ID NO: 2004544 - DNA, 15 bp, Homo sapiens
cacgcagcaatcttt

SEQ ID NO: 2004545 - DNA, 15 bp, Homo sapiens
acgcagcaatctttg

SEQ ID NO: 2004546 - DNA, 15 bp, Homo sapiens
cgcagcaatctttgt

SEQ ID NO: 2004547 - DNA, 15 bp, Homo sapiens
gcagcaatctttgtt

SEQ ID NO: 2004548 - DNA, 15 bp, Homo sapiens
cagcaatctttgttg

SEQ ID NO: 2004549 - DNA, 15 bp, Homo sapiens
agcaatctttgttgt

SEQ ID NO: 2004550 - DNA, 15 bp, Homo sapiens
gcaatctttgttgtt

SEQ ID NO: 2004551 - DNA, 15 bp, Homo sapiens
caatctttgttgttc

SEQ ID NO: 2004552 - DNA, 15 bp, Homo sapiens
aatctttgttgttcc

SEQ ID NO: 2004553 - DNA, 15 bp, Homo sapiens
atctttgttgttccg

SEQ ID NO: 2004554 - DNA, 15 bp, Homo sapiens
tctttgttgttccgc

SEQ ID NO: 2004555 - DNA, 15 bp, Homo sapiens
ctttgttgttccgca

SEQ ID NO: 2004556 - DNA, 15 bp, Homo sapiens
tttgttgttccgcag

SEQ ID NO: 2004557 - DNA, 15 bp, Homo sapiens
ttgttgttccgcagc

SEQ ID NO: 2004558 - DNA, 15 bp, Homo sapiens
tgttgttccgcagcc

SEQ ID NO: 2004559 - DNA, 15 bp, Homo sapiens
gttgttccgcagcct

SEQ ID NO: 2004560 - DNA, 15 bp, Homo sapiens
ttgttccgcagcctc

SEQ ID NO: 2004561 - DNA, 15 bp, Homo sapiens
tgttccgcagcctct

SEQ ID NO: 2004562 - DNA, 15 bp, Homo sapiens
gttccgcagcctctg

SEQ ID NO: 2004563 - DNA, 15 bp, Homo sapiens
ttccgcagcctctgc

SEQ ID NO: 2004564 - DNA, 15 bp, Homo sapiens
tccgcagcctctgct

SEQ ID NO: 2004565 - DNA, 15 bp, Homo sapiens
ccgcagcctctgctg

SEQ ID NO: 2004566 - DNA, 15 bp, Homo sapiens
cgcagcctctgctgg

SEQ ID NO: 2004567 - DNA, 15 bp, Homo sapiens
gcagcctctgctggt

SEQ ID NO: 2004568 - DNA, 15 bp, Homo sapiens
cagcctctgctggtg

SEQ ID NO: 2004569 - DNA, 15 bp, Homo sapiens
agcctctgctggtga

SEQ ID NO: 2004570 - DNA, 15 bp, Homo sapiens
gcctctgctggtgat

SEQ ID NO: 2004571 - DNA, 15 bp, Homo sapiens
cctctgctggtgata

SEQ ID NO: 2004572 - DNA, 15 bp, Homo sapiens
ctctgctggtgatac

SEQ ID NO: 2004573 - DNA, 15 bp, Homo sapiens
tctgctggtgatact

SEQ ID NO: 2004574 - DNA, 15 bp, Homo sapiens
ctgctggtgatactc

SEQ ID NO: 2004575 - DNA, 15 bp, Homo sapiens
tgctggtgatactct

SEQ ID NO: 2004576 - DNA, 15 bp, Homo sapiens
gctggtgatactctg

SEQ ID NO: 2004577 - DNA, 15 bp, Homo sapiens
ctggtgatactctgg

SEQ ID NO: 2004578 - DNA, 15 bp, Homo sapiens
tggtgatactctggc

SEQ ID NO: 2004579 - DNA, 15 bp, Homo sapiens
ggtgatactctggca

SEQ ID NO: 2004580 - DNA, 15 bp, Homo sapiens
gtgatactctggcaa

SEQ ID NO: 2004581 - DNA, 15 bp, Homo sapiens
tgatactctggcaaa

SEQ ID NO: 2004582 - DNA, 15 bp, Homo sapiens
gatactctggcaaac

SEQ ID NO: 2004583 - DNA, 15 bp, Homo sapiens
atactctggcaaaca

SEQ ID NO: 2004584 - DNA, 15 bp, Homo sapiens
tactctggcaaacag

SEQ ID NO: 2004585 - DNA, 15 bp, Homo sapiens
actctggcaaacagg

SEQ ID NO: 2004586 - DNA, 15 bp, Homo sapiens
ctctggcaaacaggg

SEQ ID NO: 2004587 - DNA, 15 bp, Homo sapiens
tctggcaaacagggt

SEQ ID NO: 2004588 - DNA, 15 bp, Homo sapiens
ctggcaaacagggtc

SEQ ID NO: 2004589 - DNA, 15 bp, Homo sapiens
tggcaaacagggtct

SEQ ID NO: 2004590 - DNA, 15 bp, Homo sapiens
ggcaaacagggtctg

SEQ ID NO: 2004591 - DNA, 15 bp, Homo sapiens
gcaaacagggtctgg

SEQ ID NO: 2004592 - DNA, 15 bp, Homo sapiens
caaacagggtctgga

SEQ ID NO: 2004593 - DNA, 15 bp, Homo sapiens
aaacagggtctggag

SEQ ID NO: 2004594 - DNA, 15 bp, Homo sapiens
aacagggtctggagt

SEQ ID NO: 2004595 - DNA, 15 bp, Homo sapiens
acagggtctggagtg

SEQ ID NO: 2004596 - DNA, 15 bp, Homo sapiens
cagggtctggagtgg

SEQ ID NO: 2004597 - DNA, 15 bp, Homo sapiens
agggtctggagtgga

SEQ ID NO: 2004598 - DNA, 15 bp, Homo sapiens
gggtctggagtggac

SEQ ID NO: 2004599 - DNA, 15 bp, Homo sapiens
ggtctggagtggacc

SEQ ID NO: 2004600 - DNA, 15 bp, Homo sapiens
gtctggagtggacct

SEQ ID NO: 2004601 - DNA, 15 bp, Homo sapiens
tctggagtggacctc

SEQ ID NO: 2004602 - DNA, 15 bp, Homo sapiens
ctggagtggacctcc

SEQ ID NO: 2004603 - DNA, 15 bp, Homo sapiens
tggagtggacctcca

SEQ ID NO: 2004604 - DNA, 15 bp, Homo sapiens
ggagtggacctccag

SEQ ID NO: 2004605 - DNA, 15 bp, Homo sapiens
gagtggacctccagc

SEQ ID NO: 2004606 - DNA, 15 bp, Homo sapiens
agtggacctccagca

SEQ ID NO: 2004607 - DNA, 15 bp, Homo sapiens
gtggacctccagcaa

SEQ ID NO: 2004608 - DNA, 15 bp, Homo sapiens
tggacctccagcaaa

SEQ ID NO: 2004609 - DNA, 15 bp, Homo sapiens
ggacctccagcaaac

SEQ ID NO: 2004610 - DNA, 15 bp, Homo sapiens
gacctccagcaaact

SEQ ID NO: 2004611 - DNA, 15 bp, Homo sapiens
acctccagcaaactc

SEQ ID NO: 2004612 - DNA, 15 bp, Homo sapiens
cctccagcaaactcc

SEQ ID NO: 2004613 - DNA, 15 bp, Homo sapiens
ctccagcaaactcca

SEQ ID NO: 2004614 - DNA, 15 bp, Homo sapiens
tccagcaaactccag

SEQ ID NO: 2004615 - DNA, 15 bp, Homo sapiens
ccagcaaactccagc

SEQ ID NO: 2004616 - DNA, 15 bp, Homo sapiens
cagcaaactccagca

SEQ ID NO: 2004617 - DNA, 15 bp, Homo sapiens
agcaaactccagcag

SEQ ID NO: 2004618 - DNA, 15 bp, Homo sapiens
gcaaactccagcaga

SEQ ID NO: 2004619 - DNA, 15 bp, Homo sapiens
caaactccagcagac

SEQ ID NO: 2004620 - DNA, 15 bp, Homo sapiens
aaactccagcagacc

SEQ ID NO: 2004621 - DNA, 15 bp, Homo sapiens
aactccagcagacct

SEQ ID NO: 2004622 - DNA, 15 bp, Homo sapiens
actccagcagacctg

SEQ ID NO: 2004623 - DNA, 15 bp, Homo sapiens
ctccagcagacctgc

SEQ ID NO: 2004624 - DNA, 15 bp, Homo sapiens
tccagcagacctgca

SEQ ID NO: 2004625 - DNA, 15 bp, Homo sapiens
ccagcagacctgcag

SEQ ID NO: 2004626 - DNA, 15 bp, Homo sapiens
cagcagacctgcagc

SEQ ID NO: 2004627 - DNA, 15 bp, Homo sapiens
agcagacctgcagca

SEQ ID NO: 2004628 - DNA, 15 bp, Homo sapiens
gcagacctgcagcag

SEQ ID NO: 2004629 - DNA, 15 bp, Homo sapiens
cagacctgcagcaga

SEQ ID NO: 2004630 - DNA, 15 bp, Homo sapiens
agacctgcagcagag

SEQ ID NO: 2004631 - DNA, 15 bp, Homo sapiens
gacctgcagcagagg

SEQ ID NO: 2004632 - DNA, 15 bp, Homo sapiens
acctgcagcagaggg

SEQ ID NO: 2004633 - DNA, 15 bp, Homo sapiens
cctgcagcagagggt

SEQ ID NO: 2004634 - DNA, 15 bp, Homo sapiens
ctgcagcagagggtt

SEQ ID NO: 2004635 - DNA, 15 bp, Homo sapiens
tgcagcagagggttc

SEQ ID NO: 2004636 - DNA, 15 bp, Homo sapiens
gcagcagagggttct

SEQ ID NO: 2004637 - DNA, 15 bp, Homo sapiens
cagcagagggttctg

SEQ ID NO: 2004638 - DNA, 15 bp, Homo sapiens
agcagagggttctgc

SEQ ID NO: 2004639 - DNA, 15 bp, Homo sapiens
gcagagggttctgcc

SEQ ID NO: 2004640 - DNA, 15 bp, Homo sapiens
cagagggttctgcct

SEQ ID NO: 2004641 - DNA, 15 bp, Homo sapiens
agagggttctgcctg

SEQ ID NO: 2004642 - DNA, 15 bp, Homo sapiens
gagggttctgcctgt

SEQ ID NO: 2004643 - DNA, 15 bp, Homo sapiens
agggttctgcctgtt

SEQ ID NO: 2004644 - DNA, 15 bp, Homo sapiens
gggttctgcctgtta

SEQ ID NO: 2004645 - DNA, 15 bp, Homo sapiens
ggttctgcctgttag

SEQ ID NO: 2004646 - DNA, 15 bp, Homo sapiens
gttctgcctgttaga

SEQ ID NO: 2004647 - DNA, 15 bp, Homo sapiens
ttctgcctgttagaa

SEQ ID NO: 2004648 - DNA, 15 bp, Homo sapiens
tctgcctgttagaag

SEQ ID NO: 2004649 - DNA, 15 bp, Homo sapiens
ctgcctgttagaagg

SEQ ID NO: 2004650 - DNA, 15 bp, Homo sapiens
tgcctgttagaagga

SEQ ID NO: 2004651 - DNA, 15 bp, Homo sapiens
gcctgttagaaggaa

SEQ ID NO: 2004652 - DNA, 15 bp, Homo sapiens
cctgttagaaggaaa

SEQ ID NO: 2004653 - DNA, 15 bp, Homo sapiens
ctgttagaaggaaaa

SEQ ID NO: 2004654 - DNA, 15 bp, Homo sapiens
tgttagaaggaaaac

SEQ ID NO: 2004655 - DNA, 15 bp, Homo sapiens
gttagaaggaaaact

SEQ ID NO: 2004656 - DNA, 15 bp, Homo sapiens
ttagaaggaaaacta

SEQ ID NO: 2004657 - DNA, 15 bp, Homo sapiens
tagaaggaaaactaa

SEQ ID NO: 2004658 - DNA, 15 bp, Homo sapiens
agaaggaaaactaag

SEQ ID NO: 2004659 - DNA, 15 bp, Homo sapiens
gaaggaaaactaaga

SEQ ID NO: 2004660 - DNA, 15 bp, Homo sapiens
aaggaaaactaagaa

SEQ ID NO: 2004661 - DNA, 15 bp, Homo sapiens
aggaaaactaagaaa

SEQ ID NO: 2004662 - DNA, 15 bp, Homo sapiens
ggaaaactaagaaag

SEQ ID NO: 2004663 - DNA, 15 bp, Homo sapiens
gaaaactaagaaagg

SEQ ID NO: 2004664 - DNA, 15 bp, Homo sapiens
aaaactaagaaagga

SEQ ID NO: 2004665 - DNA, 15 bp, Homo sapiens
aaactaagaaaggaa

SEQ ID NO: 2004666 - DNA, 15 bp, Homo sapiens
aactaagaaaggaat

SEQ ID NO: 2004667 - DNA, 15 bp, Homo sapiens
actaagaaaggaata

SEQ ID NO: 2004668 - DNA, 15 bp, Homo sapiens
ctaagaaaggaatag

SEQ ID NO: 2004669 - DNA, 15 bp, Homo sapiens
taagaaaggaatagt

SEQ ID NO: 2004670 - DNA, 15 bp, Homo sapiens
aagaaaggaatagta

SEQ ID NO: 2004671 - DNA, 15 bp, Homo sapiens
agaaaggaatagtat

SEQ ID NO: 2004672 - DNA, 15 bp, Homo sapiens
gaaaggaatagtatc

SEQ ID NO: 2004673 - DNA, 15 bp, Homo sapiens
aaaggaatagtatca

SEQ ID NO: 2004674 - DNA, 15 bp, Homo sapiens
aaggaatagtatcat

SEQ ID NO: 2004675 - DNA, 15 bp, Homo sapiens
aggaatagtatcatc

SEQ ID NO: 2004676 - DNA, 15 bp, Homo sapiens
ggaatagtatcatca

SEQ ID NO: 2004677 - DNA, 15 bp, Homo sapiens
gaatagtatcatcat

SEQ ID NO: 2004678 - DNA, 15 bp, Homo sapiens
aatagtatcatcatc

SEQ ID NO: 2004679 - DNA, 15 bp, Homo sapiens
atagtatcatcatca

SEQ ID NO: 2004680 - DNA, 15 bp, Homo sapiens
tagtatcatcatcaa

SEQ ID NO: 2004681 - DNA, 15 bp, Homo sapiens
agtatcatcatcaac

SEQ ID NO: 2004682 - DNA, 15 bp, Homo sapiens
gtatcatcatcaaca

SEQ ID NO: 2004683 - DNA, 15 bp, Homo sapiens
tatcatcatcaacat

SEQ ID NO: 2004684 - DNA, 15 bp, Homo sapiens
atcatcatcaacatc

SEQ ID NO: 2004685 - DNA, 15 bp, Homo sapiens
tcatcatcaacatca

SEQ ID NO: 2004686 - DNA, 15 bp, Homo sapiens
catcatcaacatcaa

SEQ ID NO: 2004687 - DNA, 15 bp, Homo sapiens
atcatcaacatcaaa

SEQ ID NO: 2004688 - DNA, 15 bp, Homo sapiens
tcatcaacatcaaag

SEQ ID NO: 2004689 - DNA, 15 bp, Homo sapiens
catcaacatcaaaga

SEQ ID NO: 2004690 - DNA, 15 bp, Homo sapiens
atcaacatcaaagac

SEQ ID NO: 2004691 - DNA, 15 bp, Homo sapiens
tcaacatcaaagacc

SEQ ID NO: 2004692 - DNA, 15 bp, Homo sapiens
caacatcaaagacca

SEQ ID NO: 2004693 - DNA, 15 bp, Homo sapiens
aacatcaaagaccaa

SEQ ID NO: 2004694 - DNA, 15 bp, Homo sapiens
acatcaaagaccaaa

SEQ ID NO: 2004695 - DNA, 15 bp, Homo sapiens
catcaaagaccaaag

SEQ ID NO: 2004696 - DNA, 15 bp, Homo sapiens
atcaaagaccaaagg

SEQ ID NO: 2004697 - DNA, 15 bp, Homo sapiens
tcaaagaccaaaggt

SEQ ID NO: 2004698 - DNA, 15 bp, Homo sapiens
caaagaccaaaggta

SEQ ID NO: 2004699 - DNA, 15 bp, Homo sapiens
aaagaccaaaggtag

SEQ ID NO: 2004700 - DNA, 15 bp, Homo sapiens
aagaccaaaggtaga

SEQ ID NO: 2004701 - DNA, 15 bp, Homo sapiens
agaccaaaggtagat

SEQ ID NO: 2004702 - DNA, 15 bp, Homo sapiens
gaccaaaggtagata

SEQ ID NO: 2004703 - DNA, 15 bp, Homo sapiens
accaaaggtagataa

SEQ ID NO: 2004704 - DNA, 15 bp, Homo sapiens
ccaaaggtagataaa

SEQ ID NO: 2004705 - DNA, 15 bp, Homo sapiens
caaaggtagataaat

SEQ ID NO: 2004706 - DNA, 15 bp, Homo sapiens
aaaggtagataaatc

SEQ ID NO: 2004707 - DNA, 15 bp, Homo sapiens
aaggtagataaatcc

SEQ ID NO: 2004708 - DNA, 15 bp, Homo sapiens
aggtagataaatcca

SEQ ID NO: 2004709 - DNA, 15 bp, Homo sapiens
ggtagataaatccac

SEQ ID NO: 2004710 - DNA, 15 bp, Homo sapiens
gtagataaatccaca

SEQ ID NO: 2004711 - DNA, 15 bp, Homo sapiens
tagataaatccacaa

SEQ ID NO: 2004712 - DNA, 15 bp, Homo sapiens
agataaatccacaaa

SEQ ID NO: 2004713 - DNA, 15 bp, Homo sapiens
gataaatccacaaaa

SEQ ID NO: 2004714 - DNA, 15 bp, Homo sapiens
ataaatccacaaaaa

SEQ ID NO: 2004715 - DNA, 15 bp, Homo sapiens
taaatccacaaaaat

SEQ ID NO: 2004716 - DNA, 15 bp, Homo sapiens
aaatccacaaaaatg

SEQ ID NO: 2004717 - DNA, 15 bp, Homo sapiens
aatccacaaaaatgg

SEQ ID NO: 2004718 - DNA, 15 bp, Homo sapiens
atccacaaaaatggg

SEQ ID NO: 2004719 - DNA, 15 bp, Homo sapiens
tccacaaaaatggga

SEQ ID NO: 2004720 - DNA, 15 bp, Homo sapiens
ccacaaaaatgggaa

SEQ ID NO: 2004721 - DNA, 15 bp, Homo sapiens
cacaaaaatgggaag

SEQ ID NO: 2004722 - DNA, 15 bp, Homo sapiens
acaaaaatgggaaga

SEQ ID NO: 2004723 - DNA, 15 bp, Homo sapiens
caaaaatgggaagaa

SEQ ID NO: 2004724 - DNA, 15 bp, Homo sapiens
aaaaatgggaagaaa

SEQ ID NO: 2004725 - DNA, 15 bp, Homo sapiens
aaaatgggaagaaac

SEQ ID NO: 2004726 - DNA, 15 bp, Homo sapiens
aaatgggaagaaacc

SEQ ID NO: 2004727 - DNA, 15 bp, Homo sapiens
aatgggaagaaacca

SEQ ID NO: 2004728 - DNA, 15 bp, Homo sapiens
atgggaagaaaccag

SEQ ID NO: 2004729 - DNA, 15 bp, Homo sapiens
tgggaagaaaccagt

SEQ ID NO: 2004730 - DNA, 15 bp, Homo sapiens
gggaagaaaccagtg

SEQ ID NO: 2004731 - DNA, 15 bp, Homo sapiens
ggaagaaaccagtgc

SEQ ID NO: 2004732 - DNA, 15 bp, Homo sapiens
gaagaaaccagtgca

SEQ ID NO: 2004733 - DNA, 15 bp, Homo sapiens
aagaaaccagtgcaa

SEQ ID NO: 2004734 - DNA, 15 bp, Homo sapiens
agaaaccagtgcaaa

SEQ ID NO: 2004735 - DNA, 15 bp, Homo sapiens
gaaaccagtgcaaaa

SEQ ID NO: 2004736 - DNA, 15 bp, Homo sapiens
aaaccagtgcaaaaa

SEQ ID NO: 2004737 - DNA, 15 bp, Homo sapiens
aaccagtgcaaaaag

SEQ ID NO: 2004738 - DNA, 15 bp, Homo sapiens
accagtgcaaaaagg

SEQ ID NO: 2004739 - DNA, 15 bp, Homo sapiens
ccagtgcaaaaaggc

SEQ ID NO: 2004740 - DNA, 15 bp, Homo sapiens
cagtgcaaaaaggct

SEQ ID NO: 2004741 - DNA, 15 bp, Homo sapiens
agtgcaaaaaggctg

SEQ ID NO: 2004742 - DNA, 15 bp, Homo sapiens
gtgcaaaaaggctga

SEQ ID NO: 2004743 - DNA, 15 bp, Homo sapiens
tgcaaaaaggctgaa

SEQ ID NO: 2004744 - DNA, 15 bp, Homo sapiens
gcaaaaaggctgaaa

SEQ ID NO: 2004745 - DNA, 15 bp, Homo sapiens
caaaaaggctgaaaa

SEQ ID NO: 2004746 - DNA, 15 bp, Homo sapiens
aaaaaggctgaaaaa

SEQ ID NO: 2004747 - DNA, 15 bp, Homo sapiens
aaaaggctgaaaaaa

SEQ ID NO: 2004748 - DNA, 15 bp, Homo sapiens
aaaggctgaaaaaaa

SEQ ID NO: 2004749 - DNA, 15 bp, Homo sapiens
aaggctgaaaaaaaa

SEQ ID NO: 2004750 - DNA, 15 bp, Homo sapiens
aggctgaaaaaaaaa

SEQ ID NO: 2004751 - DNA, 15 bp, Homo sapiens
ggctgaaaaaaaaac

SEQ ID NO: 2004752 - DNA, 15 bp, Homo sapiens
gctgaaaaaaaaacg

SEQ ID NO: 2004753 - DNA, 15 bp, Homo sapiens
ctgaaaaaaaaacga

SEQ ID NO: 2004754 - DNA, 15 bp, Homo sapiens
tgaaaaaaaaacgag

SEQ ID NO: 2004755 - DNA, 15 bp, Homo sapiens
gaaaaaaaaacgagc

SEQ ID NO: 2004756 - DNA, 15 bp, Homo sapiens
aaaaaaaaacgagca

SEQ ID NO: 2004757 - DNA, 15 bp, Homo sapiens
aaaaaaaacgagcac

SEQ ID NO: 2004758 - DNA, 15 bp, Homo sapiens
aaaaaaacgagcacg

SEQ ID NO: 2004759 - DNA, 15 bp, Homo sapiens
aaaaaacgagcacgc

SEQ ID NO: 2004760 - DNA, 15 bp, Homo sapiens
aaaaacgagcacgcc

SEQ ID NO: 2004761 - DNA, 15 bp, Homo sapiens
aaaacgagcacgcct

SEQ ID NO: 2004762 - DNA, 15 bp, Homo sapiens
aaacgagcacgcctc

SEQ ID NO: 2004763 - DNA, 15 bp, Homo sapiens
aacgagcacgcctct

SEQ ID NO: 2004764 - DNA, 15 bp, Homo sapiens
acgagcacgcctctt

SEQ ID NO: 2004765 - DNA, 15 bp, Homo sapiens
cgagcacgcctcttc

SEQ ID NO: 2004766 - DNA, 15 bp, Homo sapiens
gagcacgcctcttct

SEQ ID NO: 2004767 - DNA, 15 bp, Homo sapiens
agcacgcctcttctc

SEQ ID NO: 2004768 - DNA, 15 bp, Homo sapiens
gcacgcctcttctcc

SEQ ID NO: 2004769 - DNA, 15 bp, Homo sapiens
cacgcctcttctcct

SEQ ID NO: 2004770 - DNA, 15 bp, Homo sapiens
acgcctcttctcctc

SEQ ID NO: 2004771 - DNA, 15 bp, Homo sapiens
cgcctcttctcctcc

SEQ ID NO: 2004772 - DNA, 15 bp, Homo sapiens
gcctcttctcctcca

SEQ ID NO: 2004773 - DNA, 15 bp, Homo sapiens
cctcttctcctccaa

SEQ ID NO: 2004774 - DNA, 15 bp, Homo sapiens
ctcttctcctccaaa

SEQ ID NO: 2004775 - DNA, 15 bp, Homo sapiens
tcttctcctccaaag

SEQ ID NO: 2004776 - DNA, 15 bp, Homo sapiens
cttctcctccaaagg

SEQ ID NO: 2004777 - DNA, 15 bp, Homo sapiens
ttctcctccaaagga

SEQ ID NO: 2004778 - DNA, 15 bp, Homo sapiens
tctcctccaaaggat

SEQ ID NO: 2004779 - DNA, 15 bp, Homo sapiens
ctcctccaaaggatc

SEQ ID NO: 2004780 - DNA, 15 bp, Homo sapiens
tcctccaaaggatca

SEQ ID NO: 2004781 - DNA, 15 bp, Homo sapiens
cctccaaaggatcac

SEQ ID NO: 2004782 - DNA, 15 bp, Homo sapiens
ctccaaaggatcaca

SEQ ID NO: 2004783 - DNA, 15 bp, Homo sapiens
tccaaaggatcacaa

SEQ ID NO: 2004784 - DNA, 15 bp, Homo sapiens
ccaaaggatcacaac

SEQ ID NO: 2004785 - DNA, 15 bp, Homo sapiens
caaaggatcacaact

SEQ ID NO: 2004786 - DNA, 15 bp, Homo sapiens
aaaggatcacaactc

SEQ ID NO: 2004787 - DNA, 15 bp, Homo sapiens
aaggatcacaactcc

SEQ ID NO: 2004788 - DNA, 15 bp, Homo sapiens
aggatcacaactcct

SEQ ID NO: 2004789 - DNA, 15 bp, Homo sapiens
ggatcacaactcctt

SEQ ID NO: 2004790 - DNA, 15 bp, Homo sapiens
gatcacaactcctta

SEQ ID NO: 2004791 - DNA, 15 bp, Homo sapiens
atcacaactccttac

SEQ ID NO: 2004792 - DNA, 15 bp, Homo sapiens
tcacaactccttacc

SEQ ID NO: 2004793 - DNA, 15 bp, Homo sapiens
cacaactccttacca

SEQ ID NO: 2004794 - DNA, 15 bp, Homo sapiens
acaactccttaccag

SEQ ID NO: 2004795 - DNA, 15 bp, Homo sapiens
caactccttaccagc

SEQ ID NO: 2004796 - DNA, 15 bp, Homo sapiens
aactccttaccagca

SEQ ID NO: 2004797 - DNA, 15 bp, Homo sapiens
actccttaccagcaa

SEQ ID NO: 2004798 - DNA, 15 bp, Homo sapiens
ctccttaccagcaaa

SEQ ID NO: 2004799 - DNA, 15 bp, Homo sapiens
tccttaccagcaaag

SEQ ID NO: 2004800 - DNA, 15 bp, Homo sapiens
ccttaccagcaaagg

SEQ ID NO: 2004801 - DNA, 15 bp, Homo sapiens
cttaccagcaaagga

SEQ ID NO: 2004802 - DNA, 15 bp, Homo sapiens
ttaccagcaaaggaa

SEQ ID NO: 2004803 - DNA, 15 bp, Homo sapiens
taccagcaaaggaac

SEQ ID NO: 2004804 - DNA, 15 bp, Homo sapiens
accagcaaaggaacg

SEQ ID NO: 2004805 - DNA, 15 bp, Homo sapiens
ccagcaaaggaacga

SEQ ID NO: 2004806 - DNA, 15 bp, Homo sapiens
cagcaaaggaacgaa

SEQ ID NO: 2004807 - DNA, 15 bp, Homo sapiens
agcaaaggaacgaaa

SEQ ID NO: 2004808 - DNA, 15 bp, Homo sapiens
gcaaaggaacgaaac

SEQ ID NO: 2004809 - DNA, 15 bp, Homo sapiens
caaaggaacgaaact

SEQ ID NO: 2004810 - DNA, 15 bp, Homo sapiens
aaaggaacgaaactg

SEQ ID NO: 2004811 - DNA, 15 bp, Homo sapiens
aaggaacgaaactgg

SEQ ID NO: 2004812 - DNA, 15 bp, Homo sapiens
aggaacgaaactgga

SEQ ID NO: 2004813 - DNA, 15 bp, Homo sapiens
ggaacgaaactggac

SEQ ID NO: 2004814 - DNA, 15 bp, Homo sapiens
gaacgaaactggaca

SEQ ID NO: 2004815 - DNA, 15 bp, Homo sapiens
aacgaaactggacaa

SEQ ID NO: 2004816 - DNA, 15 bp, Homo sapiens
acgaaactggacaaa

SEQ ID NO: 2004817 - DNA, 15 bp, Homo sapiens
cgaaactggacaaag

SEQ ID NO: 2004818 - DNA, 15 bp, Homo sapiens
gaaactggacaaaga

SEQ ID NO: 2004819 - DNA, 15 bp, Homo sapiens
aaactggacaaagaa

SEQ ID NO: 2004820 - DNA, 15 bp, Homo sapiens
aactggacaaagaat

SEQ ID NO: 2004821 - DNA, 15 bp, Homo sapiens
actggacaaagaatg

SEQ ID NO: 2004822 - DNA, 15 bp, Homo sapiens
ctggacaaagaatga

SEQ ID NO: 2004823 - DNA, 15 bp, Homo sapiens
tggacaaagaatgag

SEQ ID NO: 2004824 - DNA, 15 bp, Homo sapiens
ggacaaagaatgagt

SEQ ID NO: 2004825 - DNA, 15 bp, Homo sapiens
gacaaagaatgagtt

SEQ ID NO: 2004826 - DNA, 15 bp, Homo sapiens
acaaagaatgagttt

SEQ ID NO: 2004827 - DNA, 15 bp, Homo sapiens
caaagaatgagtttg

SEQ ID NO: 2004828 - DNA, 15 bp, Homo sapiens
aaagaatgagtttga

SEQ ID NO: 2004829 - DNA, 15 bp, Homo sapiens
aagaatgagtttgac

SEQ ID NO: 2004830 - DNA, 15 bp, Homo sapiens
agaatgagtttgaca

SEQ ID NO: 2004831 - DNA, 15 bp, Homo sapiens
gaatgagtttgacaa

SEQ ID NO: 2004832 - DNA, 15 bp, Homo sapiens
aatgagtttgacaaa

SEQ ID NO: 2004833 - DNA, 15 bp, Homo sapiens
atgagtttgacaaat

SEQ ID NO: 2004834 - DNA, 15 bp, Homo sapiens
tgagtttgacaaatt

SEQ ID NO: 2004835 - DNA, 15 bp, Homo sapiens
gagtttgacaaattg

SEQ ID NO: 2004836 - DNA, 15 bp, Homo sapiens
agtttgacaaattga

SEQ ID NO: 2004837 - DNA, 15 bp, Homo sapiens
gtttgacaaattgac

SEQ ID NO: 2004838 - DNA, 15 bp, Homo sapiens
tttgacaaattgaca

SEQ ID NO: 2004839 - DNA, 15 bp, Homo sapiens
ttgacaaattgacag

SEQ ID NO: 2004840 - DNA, 15 bp, Homo sapiens
tgacaaattgacaga

SEQ ID NO: 2004841 - DNA, 15 bp, Homo sapiens
gacaaattgacagaa

SEQ ID NO: 2004842 - DNA, 15 bp, Homo sapiens
acaaattgacagaag

SEQ ID NO: 2004843 - DNA, 15 bp, Homo sapiens
caaattgacagaagt

SEQ ID NO: 2004844 - DNA, 15 bp, Homo sapiens
aaattgacagaagta

SEQ ID NO: 2004845 - DNA, 15 bp, Homo sapiens
aattgacagaagtag

SEQ ID NO: 2004846 - DNA, 15 bp, Homo sapiens
attgacagaagtagg

SEQ ID NO: 2004847 - DNA, 15 bp, Homo sapiens
ttgacagaagtaggc

SEQ ID NO: 2004848 - DNA, 15 bp, Homo sapiens
tgacagaagtaggct

SEQ ID NO: 2004849 - DNA, 15 bp, Homo sapiens
gacagaagtaggctt

SEQ ID NO: 2004850 - DNA, 15 bp, Homo sapiens
acagaagtaggcttc

SEQ ID NO: 2004851 - DNA, 15 bp, Homo sapiens
cagaagtaggcttca

SEQ ID NO: 2004852 - DNA, 15 bp, Homo sapiens
agaagtaggcttcag

SEQ ID NO: 2004853 - DNA, 15 bp, Homo sapiens
gaagtaggcttcaga

SEQ ID NO: 2004854 - DNA, 15 bp, Homo sapiens
aagtaggcttcagaa

SEQ ID NO: 2004855 - DNA, 15 bp, Homo sapiens
agtaggcttcagaag

SEQ ID NO: 2004856 - DNA, 15 bp, Homo sapiens
gtaggcttcagaaga

SEQ ID NO: 2004857 - DNA, 15 bp, Homo sapiens
taggcttcagaagat

SEQ ID NO: 2004858 - DNA, 15 bp, Homo sapiens
aggcttcagaagatg

SEQ ID NO: 2004859 - DNA, 15 bp, Homo sapiens
ggcttcagaagatgg

SEQ ID NO: 2004860 - DNA, 15 bp, Homo sapiens
gcttcagaagatggg

SEQ ID NO: 2004861 - DNA, 15 bp, Homo sapiens
cttcagaagatgggt

SEQ ID NO: 2004862 - DNA, 15 bp, Homo sapiens
ttcagaagatgggta

SEQ ID NO: 2004863 - DNA, 15 bp, Homo sapiens
tcagaagatgggtaa

SEQ ID NO: 2004864 - DNA, 15 bp, Homo sapiens
cagaagatgggtaat

SEQ ID NO: 2004865 - DNA, 15 bp, Homo sapiens
agaagatgggtaata

SEQ ID NO: 2004866 - DNA, 15 bp, Homo sapiens
gaagatgggtaataa

SEQ ID NO: 2004867 - DNA, 15 bp, Homo sapiens
aagatgggtaataac

SEQ ID NO: 2004868 - DNA, 15 bp, Homo sapiens
agatgggtaataaca

SEQ ID NO: 2004869 - DNA, 15 bp, Homo sapiens
gatgggtaataacaa

SEQ ID NO: 2004870 - DNA, 15 bp, Homo sapiens
atgggtaataacaaa

SEQ ID NO: 2004871 - DNA, 15 bp, Homo sapiens
tgggtaataacaaac

SEQ ID NO: 2004872 - DNA, 15 bp, Homo sapiens
gggtaataacaaact

SEQ ID NO: 2004873 - DNA, 15 bp, Homo sapiens
ggtaataacaaactc

SEQ ID NO: 2004874 - DNA, 15 bp, Homo sapiens
gtaataacaaactcc

SEQ ID NO: 2004875 - DNA, 15 bp, Homo sapiens
taataacaaactcct

SEQ ID NO: 2004876 - DNA, 15 bp, Homo sapiens
aataacaaactcctc

SEQ ID NO: 2004877 - DNA, 15 bp, Homo sapiens
ataacaaactcctcc

SEQ ID NO: 2004878 - DNA, 15 bp, Homo sapiens
taacaaactcctcca

SEQ ID NO: 2004879 - DNA, 15 bp, Homo sapiens
aacaaactcctccaa

SEQ ID NO: 2004880 - DNA, 15 bp, Homo sapiens
acaaactcctccaag

SEQ ID NO: 2004881 - DNA, 15 bp, Homo sapiens
caaactcctccaagc

SEQ ID NO: 2004882 - DNA, 15 bp, Homo sapiens
aaactcctccaagct

SEQ ID NO: 2004883 - DNA, 15 bp, Homo sapiens
aactcctccaagcta

SEQ ID NO: 2004884 - DNA, 15 bp, Homo sapiens
actcctccaagctaa

SEQ ID NO: 2004885 - DNA, 15 bp, Homo sapiens
ctcctccaagctaaa

SEQ ID NO: 2004886 - DNA, 15 bp, Homo sapiens
tcctccaagctaaaa

SEQ ID NO: 2004887 - DNA, 15 bp, Homo sapiens
cctccaagctaaaag

SEQ ID NO: 2004888 - DNA, 15 bp, Homo sapiens
ctccaagctaaaaga

SEQ ID NO: 2004889 - DNA, 15 bp, Homo sapiens
tccaagctaaaagag

SEQ ID NO: 2004890 - DNA, 15 bp, Homo sapiens
ccaagctaaaagagc

SEQ ID NO: 2004891 - DNA, 15 bp, Homo sapiens
caagctaaaagagca

SEQ ID NO: 2004892 - DNA, 15 bp, Homo sapiens
aagctaaaagagcat

SEQ ID NO: 2004893 - DNA, 15 bp, Homo sapiens
agctaaaagagcatg

SEQ ID NO: 2004894 - DNA, 15 bp, Homo sapiens
gctaaaagagcatgt

SEQ ID NO: 2004895 - DNA, 15 bp, Homo sapiens
ctaaaagagcatgtt

SEQ ID NO: 2004896 - DNA, 15 bp, Homo sapiens
taaaagagcatgttc

SEQ ID NO: 2004897 - DNA, 15 bp, Homo sapiens
aaaagagcatgttct

SEQ ID NO: 2004898 - DNA, 15 bp, Homo sapiens
aaagagcatgttcta

SEQ ID NO: 2004899 - DNA, 15 bp, Homo sapiens
aagagcatgttctaa

SEQ ID NO: 2004900 - DNA, 15 bp, Homo sapiens
agagcatgttctaac

SEQ ID NO: 2004901 - DNA, 15 bp, Homo sapiens
gagcatgttctaacc

SEQ ID NO: 2004902 - DNA, 15 bp, Homo sapiens
agcatgttctaaccc

SEQ ID NO: 2004903 - DNA, 15 bp, Homo sapiens
gcatgttctaaccca

SEQ ID NO: 2004904 - DNA, 15 bp, Homo sapiens
catgttctaacccaa

SEQ ID NO: 2004905 - DNA, 15 bp, Homo sapiens
atgttctaacccaat

SEQ ID NO: 2004906 - DNA, 15 bp, Homo sapiens
tgttctaacccaatg

SEQ ID NO: 2004907 - DNA, 15 bp, Homo sapiens
gttctaacccaatgc

SEQ ID NO: 2004908 - DNA, 15 bp, Homo sapiens
ttctaacccaatgca

SEQ ID NO: 2004909 - DNA, 15 bp, Homo sapiens
tctaacccaatgcaa

SEQ ID NO: 2004910 - DNA, 15 bp, Homo sapiens
ctaacccaatgcaag

SEQ ID NO: 2004911 - DNA, 15 bp, Homo sapiens
taacccaatgcaagg

SEQ ID NO: 2004912 - DNA, 15 bp, Homo sapiens
aacccaatgcaagga

SEQ ID NO: 2004913 - DNA, 15 bp, Homo sapiens
acccaatgcaaggaa

SEQ ID NO: 2004914 - DNA, 15 bp, Homo sapiens
cccaatgcaaggaag

SEQ ID NO: 2004915 - DNA, 15 bp, Homo sapiens
ccaatgcaaggaagc

SEQ ID NO: 2004916 - DNA, 15 bp, Homo sapiens
caatgcaaggaagct

SEQ ID NO: 2004917 - DNA, 15 bp, Homo sapiens
aatgcaaggaagcta

SEQ ID NO: 2004918 - DNA, 15 bp, Homo sapiens
atgcaaggaagctaa

SEQ ID NO: 2004919 - DNA, 15 bp, Homo sapiens
tgcaaggaagctaag

SEQ ID NO: 2004920 - DNA, 15 bp, Homo sapiens
gcaaggaagctaaga

SEQ ID NO: 2004921 - DNA, 15 bp, Homo sapiens
caaggaagctaagaa

SEQ ID NO: 2004922 - DNA, 15 bp, Homo sapiens
aaggaagctaagaac

SEQ ID NO: 2004923 - DNA, 15 bp, Homo sapiens
aggaagctaagaacc

SEQ ID NO: 2004924 - DNA, 15 bp, Homo sapiens
ggaagctaagaacct

SEQ ID NO: 2004925 - DNA, 15 bp, Homo sapiens
gaagctaagaacctg

SEQ ID NO: 2004926 - DNA, 15 bp, Homo sapiens
aagctaagaacctgg

SEQ ID NO: 2004927 - DNA, 15 bp, Homo sapiens
agctaagaacctgga

SEQ ID NO: 2004928 - DNA, 15 bp, Homo sapiens
gctaagaacctggaa

SEQ ID NO: 2004929 - DNA, 15 bp, Homo sapiens
ctaagaacctggaaa

SEQ ID NO: 2004930 - DNA, 15 bp, Homo sapiens
taagaacctggaaaa

SEQ ID NO: 2004931 - DNA, 15 bp, Homo sapiens
aagaacctggaaaaa

SEQ ID NO: 2004932 - DNA, 15 bp, Homo sapiens
agaacctggaaaaaa

SEQ ID NO: 2004933 - DNA, 15 bp, Homo sapiens
gaacctggaaaaaag

SEQ ID NO: 2004934 - DNA, 15 bp, Homo sapiens
aacctggaaaaaagg

SEQ ID NO: 2004935 - DNA, 15 bp, Homo sapiens
acctggaaaaaaggt

SEQ ID NO: 2004936 - DNA, 15 bp, Homo sapiens
cctggaaaaaaggtt

SEQ ID NO: 2004937 - DNA, 15 bp, Homo sapiens
ctggaaaaaaggtta

SEQ ID NO: 2004938 - DNA, 15 bp, Homo sapiens
tggaaaaaaggttag

SEQ ID NO: 2004939 - DNA, 15 bp, Homo sapiens
ggaaaaaaggttaga

SEQ ID NO: 2004940 - DNA, 15 bp, Homo sapiens
gaaaaaaggttagac

SEQ ID NO: 2004941 - DNA, 15 bp, Homo sapiens
aaaaaaggttagacg

SEQ ID NO: 2004942 - DNA, 15 bp, Homo sapiens
aaaaaggttagacga

SEQ ID NO: 2004943 - DNA, 15 bp, Homo sapiens
aaaaggttagacgaa

SEQ ID NO: 2004944 - DNA, 15 bp, Homo sapiens
aaaggttagacgaat

SEQ ID NO: 2004945 - DNA, 15 bp, Homo sapiens
aaggttagacgaatt

SEQ ID NO: 2004946 - DNA, 15 bp, Homo sapiens
aggttagacgaattg

SEQ ID NO: 2004947 - DNA, 15 bp, Homo sapiens
ggttagacgaattgc

SEQ ID NO: 2004948 - DNA, 15 bp, Homo sapiens
gttagacgaattgct

SEQ ID NO: 2004949 - DNA, 15 bp, Homo sapiens
ttagacgaattgctg

SEQ ID NO: 2004950 - DNA, 15 bp, Homo sapiens
tagacgaattgctga

SEQ ID NO: 2004951 - DNA, 15 bp, Homo sapiens
agacgaattgctgac

SEQ ID NO: 2004952 - DNA, 15 bp, Homo sapiens
gacgaattgctgact

SEQ ID NO: 2004953 - DNA, 15 bp, Homo sapiens
acgaattgctgacta

SEQ ID NO: 2004954 - DNA, 15 bp, Homo sapiens
cgaattgctgactag

SEQ ID NO: 2004955 - DNA, 15 bp, Homo sapiens
gaattgctgactaga

SEQ ID NO: 2004956 - DNA, 15 bp, Homo sapiens
aattgctgactagaa

SEQ ID NO: 2004957 - DNA, 15 bp, Homo sapiens
attgctgactagaat

SEQ ID NO: 2004958 - DNA, 15 bp, Homo sapiens
ttgctgactagaata

SEQ ID NO: 2004959 - DNA, 15 bp, Homo sapiens
tgctgactagaataa

SEQ ID NO: 2004960 - DNA, 15 bp, Homo sapiens
gctgactagaataac

SEQ ID NO: 2004961 - DNA, 15 bp, Homo sapiens
ctgactagaataacc

SEQ ID NO: 2004962 - DNA, 15 bp, Homo sapiens
tgactagaataacca

SEQ ID NO: 2004963 - DNA, 15 bp, Homo sapiens
gactagaataaccat

SEQ ID NO: 2004964 - DNA, 15 bp, Homo sapiens
actagaataaccatc

SEQ ID NO: 2004965 - DNA, 15 bp, Homo sapiens
ctagaataaccatct

SEQ ID NO: 2004966 - DNA, 15 bp, Homo sapiens
tagaataaccatctt

SEQ ID NO: 2004967 - DNA, 15 bp, Homo sapiens
agaataaccatctta

SEQ ID NO: 2004968 - DNA, 15 bp, Homo sapiens
gaataaccatcttag

SEQ ID NO: 2004969 - DNA, 15 bp, Homo sapiens
aataaccatcttaga

SEQ ID NO: 2004970 - DNA, 15 bp, Homo sapiens
ataaccatcttagag

SEQ ID NO: 2004971 - DNA, 15 bp, Homo sapiens
taaccatcttagaga

SEQ ID NO: 2004972 - DNA, 15 bp, Homo sapiens
aaccatcttagagaa

SEQ ID NO: 2004973 - DNA, 15 bp, Homo sapiens
accatcttagagaag

SEQ ID NO: 2004974 - DNA, 15 bp, Homo sapiens
ccatcttagagaaga

SEQ ID NO: 2004975 - DNA, 15 bp, Homo sapiens
catcttagagaagaa

SEQ ID NO: 2004976 - DNA, 15 bp, Homo sapiens
atcttagagaagaac

SEQ ID NO: 2004977 - DNA, 15 bp, Homo sapiens
tcttagagaagaaca

SEQ ID NO: 2004978 - DNA, 15 bp, Homo sapiens
cttagagaagaacat

SEQ ID NO: 2004979 - DNA, 15 bp, Homo sapiens
ttagagaagaacata

SEQ ID NO: 2004980 - DNA, 15 bp, Homo sapiens
tagagaagaacataa

SEQ ID NO: 2004981 - DNA, 15 bp, Homo sapiens
agagaagaacataaa

SEQ ID NO: 2004982 - DNA, 15 bp, Homo sapiens
gagaagaacataaat

SEQ ID NO: 2004983 - DNA, 15 bp, Homo sapiens
agaagaacataaatg

SEQ ID NO: 2004984 - DNA, 15 bp, Homo sapiens
gaagaacataaatga

SEQ ID NO: 2004985 - DNA, 15 bp, Homo sapiens
aagaacataaatgac

SEQ ID NO: 2004986 - DNA, 15 bp, Homo sapiens
agaacataaatgacc

SEQ ID NO: 2004987 - DNA, 15 bp, Homo sapiens
gaacataaatgacct

SEQ ID NO: 2004988 - DNA, 15 bp, Homo sapiens
aacataaatgacctg

SEQ ID NO: 2004989 - DNA, 15 bp, Homo sapiens
acataaatgacctga

SEQ ID NO: 2004990 - DNA, 15 bp, Homo sapiens
cataaatgacctgat

SEQ ID NO: 2004991 - DNA, 15 bp, Homo sapiens
ataaatgacctgatg

SEQ ID NO: 2004992 - DNA, 15 bp, Homo sapiens
taaatgacctgatgg

SEQ ID NO: 2004993 - DNA, 15 bp, Homo sapiens
aaatgacctgatgga

SEQ ID NO: 2004994 - DNA, 15 bp, Homo sapiens
aatgacctgatggag

SEQ ID NO: 2004995 - DNA, 15 bp, Homo sapiens
atgacctgatggagc

SEQ ID NO: 2004996 - DNA, 15 bp, Homo sapiens
tgacctgatggagct

SEQ ID NO: 2004997 - DNA, 15 bp, Homo sapiens
gacctgatggagctg

SEQ ID NO: 2004998 - DNA, 15 bp, Homo sapiens
acctgatggagctga

SEQ ID NO: 2004999 - DNA, 15 bp, Homo sapiens
cctgatggagctgaa

SEQ ID NO: 2005000 - DNA, 15 bp, Homo sapiens
ctgatggagctgaaa

SEQ ID NO: 2005001 - DNA, 15 bp, Homo sapiens
tgatggagctgaaaa

SEQ ID NO: 2005002 - DNA, 15 bp, Homo sapiens
gatggagctgaaaaa

SEQ ID NO: 2005003 - DNA, 15 bp, Homo sapiens
atggagctgaaaaat

SEQ ID NO: 2005004 - DNA, 15 bp, Homo sapiens
tggagctgaaaaata

SEQ ID NO: 2005005 - DNA, 15 bp, Homo sapiens
ggagctgaaaaatac

SEQ ID NO: 2005006 - DNA, 15 bp, Homo sapiens
gagctgaaaaataca

SEQ ID NO: 2005007 - DNA, 15 bp, Homo sapiens
agctgaaaaatacag

SEQ ID NO: 2005008 - DNA, 15 bp, Homo sapiens
gctgaaaaatacagc

SEQ ID NO: 2005009 - DNA, 15 bp, Homo sapiens
ctgaaaaatacagca

SEQ ID NO: 2005010 - DNA, 15 bp, Homo sapiens
tgaaaaatacagcat

SEQ ID NO: 2005011 - DNA, 15 bp, Homo sapiens
gaaaaatacagcatg

SEQ ID NO: 2005012 - DNA, 15 bp, Homo sapiens
aaaaatacagcatga

SEQ ID NO: 2005013 - DNA, 15 bp, Homo sapiens
aaaatacagcatgag

SEQ ID NO: 2005014 - DNA, 15 bp, Homo sapiens
aaatacagcatgaga

SEQ ID NO: 2005015 - DNA, 15 bp, Homo sapiens
aatacagcatgagaa

SEQ ID NO: 2005016 - DNA, 15 bp, Homo sapiens
atacagcatgagaac

SEQ ID NO: 2005017 - DNA, 15 bp, Homo sapiens
tacagcatgagaact

SEQ ID NO: 2005018 - DNA, 15 bp, Homo sapiens
acagcatgagaactt

SEQ ID NO: 2005019 - DNA, 15 bp, Homo sapiens
cagcatgagaacttc

SEQ ID NO: 2005020 - DNA, 15 bp, Homo sapiens
agcatgagaacttcg

SEQ ID NO: 2005021 - DNA, 15 bp, Homo sapiens
gcatgagaacttcgt

SEQ ID NO: 2005022 - DNA, 15 bp, Homo sapiens
catgagaacttcgtg

SEQ ID NO: 2005023 - DNA, 15 bp, Homo sapiens
atgagaacttcgtga

SEQ ID NO: 2005024 - DNA, 15 bp, Homo sapiens
tgagaacttcgtgaa

SEQ ID NO: 2005025 - DNA, 15 bp, Homo sapiens
gagaacttcgtgaag

SEQ ID NO: 2005026 - DNA, 15 bp, Homo sapiens
agaacttcgtgaagc

SEQ ID NO: 2005027 - DNA, 15 bp, Homo sapiens
gaacttcgtgaagca

SEQ ID NO: 2005028 - DNA, 15 bp, Homo sapiens
aacttcgtgaagcat

SEQ ID NO: 2005029 - DNA, 15 bp, Homo sapiens
acttcgtgaagcata

SEQ ID NO: 2005030 - DNA, 15 bp, Homo sapiens
cttcgtgaagcatac

SEQ ID NO: 2005031 - DNA, 15 bp, Homo sapiens
ttcgtgaagcataca

SEQ ID NO: 2005032 - DNA, 15 bp, Homo sapiens
tcgtgaagcatacac

SEQ ID NO: 2005033 - DNA, 15 bp, Homo sapiens
cgtgaagcatacaca

SEQ ID NO: 2005034 - DNA, 15 bp, Homo sapiens
gtgaagcatacacaa

SEQ ID NO: 2005035 - DNA, 15 bp, Homo sapiens
tgaagcatacacaag

SEQ ID NO: 2005036 - DNA, 15 bp, Homo sapiens
gaagcatacacaagt

SEQ ID NO: 2005037 - DNA, 15 bp, Homo sapiens
aagcatacacaagta

SEQ ID NO: 2005038 - DNA, 15 bp, Homo sapiens
agcatacacaagtat

SEQ ID NO: 2005039 - DNA, 15 bp, Homo sapiens
gcatacacaagtatc

SEQ ID NO: 2005040 - DNA, 15 bp, Homo sapiens
catacacaagtatca

SEQ ID NO: 2005041 - DNA, 15 bp, Homo sapiens
atacacaagtatcaa

SEQ ID NO: 2005042 - DNA, 15 bp, Homo sapiens
tacacaagtatcaat

SEQ ID NO: 2005043 - DNA, 15 bp, Homo sapiens
acacaagtatcaata

SEQ ID NO: 2005044 - DNA, 15 bp, Homo sapiens
cacaagtatcaatag

SEQ ID NO: 2005045 - DNA, 15 bp, Homo sapiens
acaagtatcaatagc

SEQ ID NO: 2005046 - DNA, 15 bp, Homo sapiens
caagtatcaatagcc

SEQ ID NO: 2005047 - DNA, 15 bp, Homo sapiens
aagtatcaatagcca

SEQ ID NO: 2005048 - DNA, 15 bp, Homo sapiens
agtatcaatagccaa

SEQ ID NO: 2005049 - DNA, 15 bp, Homo sapiens
gtatcaatagccaaa

SEQ ID NO: 2005050 - DNA, 15 bp, Homo sapiens
tatcaatagccaaat

SEQ ID NO: 2005051 - DNA, 15 bp, Homo sapiens
atcaatagccaaatc

SEQ ID NO: 2005052 - DNA, 15 bp, Homo sapiens
tcaatagccaaatca

SEQ ID NO: 2005053 - DNA, 15 bp, Homo sapiens
caatagccaaatcaa

SEQ ID NO: 2005054 - DNA, 15 bp, Homo sapiens
aatagccaaatcaat

SEQ ID NO: 2005055 - DNA, 15 bp, Homo sapiens
atagccaaatcaatc

SEQ ID NO: 2005056 - DNA, 15 bp, Homo sapiens
tagccaaatcaatca

SEQ ID NO: 2005057 - DNA, 15 bp, Homo sapiens
agccaaatcaatcaa

SEQ ID NO: 2005058 - DNA, 15 bp, Homo sapiens
gccaaatcaatcaag

SEQ ID NO: 2005059 - DNA, 15 bp, Homo sapiens
ccaaatcaatcaagc

SEQ ID NO: 2005060 - DNA, 15 bp, Homo sapiens
caaatcaatcaagca

SEQ ID NO: 2005061 - DNA, 15 bp, Homo sapiens
aaatcaatcaagcag

SEQ ID NO: 2005062 - DNA, 15 bp, Homo sapiens
aatcaatcaagcaga

SEQ ID NO: 2005063 - DNA, 15 bp, Homo sapiens
atcaatcaagcagaa

SEQ ID NO: 2005064 - DNA, 15 bp, Homo sapiens
tcaatcaagcagaag

SEQ ID NO: 2005065 - DNA, 15 bp, Homo sapiens
caatcaagcagaaga

SEQ ID NO: 2005066 - DNA, 15 bp, Homo sapiens
aatcaagcagaagaa

SEQ ID NO: 2005067 - DNA, 15 bp, Homo sapiens
atcaagcagaagaaa

SEQ ID NO: 2005068 - DNA, 15 bp, Homo sapiens
tcaagcagaagaaag

SEQ ID NO: 2005069 - DNA, 15 bp, Homo sapiens
caagcagaagaaagg

SEQ ID NO: 2005070 - DNA, 15 bp, Homo sapiens
aagcagaagaaagga

SEQ ID NO: 2005071 - DNA, 15 bp, Homo sapiens
agcagaagaaaggat

SEQ ID NO: 2005072 - DNA, 15 bp, Homo sapiens
gcagaagaaaggata

SEQ ID NO: 2005073 - DNA, 15 bp, Homo sapiens
cagaagaaaggatat

SEQ ID NO: 2005074 - DNA, 15 bp, Homo sapiens
agaagaaaggatatc

SEQ ID NO: 2005075 - DNA, 15 bp, Homo sapiens
gaagaaaggatatca

SEQ ID NO: 2005076 - DNA, 15 bp, Homo sapiens
aagaaaggatatcag

SEQ ID NO: 2005077 - DNA, 15 bp, Homo sapiens
agaaaggatatcaga

SEQ ID NO: 2005078 - DNA, 15 bp, Homo sapiens
gaaaggatatcagag

SEQ ID NO: 2005079 - DNA, 15 bp, Homo sapiens
aaaggatatcagaga

SEQ ID NO: 2005080 - DNA, 15 bp, Homo sapiens
aaggatatcagagat

SEQ ID NO: 2005081 - DNA, 15 bp, Homo sapiens
aggatatcagagatt

SEQ ID NO: 2005082 - DNA, 15 bp, Homo sapiens
ggatatcagagattg

SEQ ID NO: 2005083 - DNA, 15 bp, Homo sapiens
gatatcagagattga

SEQ ID NO: 2005084 - DNA, 15 bp, Homo sapiens
atatcagagattgaa

SEQ ID NO: 2005085 - DNA, 15 bp, Homo sapiens
tatcagagattgaag

SEQ ID NO: 2005086 - DNA, 15 bp, Homo sapiens
atcagagattgaaga

SEQ ID NO: 2005087 - DNA, 15 bp, Homo sapiens
tcagagattgaagat

SEQ ID NO: 2005088 - DNA, 15 bp, Homo sapiens
cagagattgaagatc

SEQ ID NO: 2005089 - DNA, 15 bp, Homo sapiens
agagattgaagatca

SEQ ID NO: 2005090 - DNA, 15 bp, Homo sapiens
gagattgaagatcaa

SEQ ID NO: 2005091 - DNA, 15 bp, Homo sapiens
agattgaagatcaac

SEQ ID NO: 2005092 - DNA, 15 bp, Homo sapiens
gattgaagatcaact

SEQ ID NO: 2005093 - DNA, 15 bp, Homo sapiens
attgaagatcaactc

SEQ ID NO: 2005094 - DNA, 15 bp, Homo sapiens
ttgaagatcaactca

SEQ ID NO: 2005095 - DNA, 15 bp, Homo sapiens
tgaagatcaactcaa

SEQ ID NO: 2005096 - DNA, 15 bp, Homo sapiens
gaagatcaactcaat

SEQ ID NO: 2005097 - DNA, 15 bp, Homo sapiens
aagatcaactcaatg

SEQ ID NO: 2005098 - DNA, 15 bp, Homo sapiens
agatcaactcaatga

SEQ ID NO: 2005099 - DNA, 15 bp, Homo sapiens
gatcaactcaatgaa

SEQ ID NO: 2005100 - DNA, 15 bp, Homo sapiens
atcaactcaatgaaa

SEQ ID NO: 2005101 - DNA, 15 bp, Homo sapiens
tcaactcaatgaaat

SEQ ID NO: 2005102 - DNA, 15 bp, Homo sapiens
caactcaatgaaata

SEQ ID NO: 2005103 - DNA, 15 bp, Homo sapiens
aactcaatgaaataa

SEQ ID NO: 2005104 - DNA, 15 bp, Homo sapiens
actcaatgaaataaa

SEQ ID NO: 2005105 - DNA, 15 bp, Homo sapiens
ctcaatgaaataaag

SEQ ID NO: 2005106 - DNA, 15 bp, Homo sapiens
tcaatgaaataaagc

SEQ ID NO: 2005107 - DNA, 15 bp, Homo sapiens
caatgaaataaagcg

SEQ ID NO: 2005108 - DNA, 15 bp, Homo sapiens
aatgaaataaagcga

SEQ ID NO: 2005109 - DNA, 15 bp, Homo sapiens
atgaaataaagcgag

SEQ ID NO: 2005110 - DNA, 15 bp, Homo sapiens
tgaaataaagcgaga

SEQ ID NO: 2005111 - DNA, 15 bp, Homo sapiens
gaaataaagcgagaa

SEQ ID NO: 2005112 - DNA, 15 bp, Homo sapiens
aaataaagcgagaag

SEQ ID NO: 2005113 - DNA, 15 bp, Homo sapiens
aataaagcgagaaga

SEQ ID NO: 2005114 - DNA, 15 bp, Homo sapiens
ataaagcgagaagac

SEQ ID NO: 2005115 - DNA, 15 bp, Homo sapiens
taaagcgagaagaca

SEQ ID NO: 2005116 - DNA, 15 bp, Homo sapiens
aaagcgagaagacaa

SEQ ID NO: 2005117 - DNA, 15 bp, Homo sapiens
aagcgagaagacaag

SEQ ID NO: 2005118 - DNA, 15 bp, Homo sapiens
agcgagaagacaaga

SEQ ID NO: 2005119 - DNA, 15 bp, Homo sapiens
gcgagaagacaagat

SEQ ID NO: 2005120 - DNA, 15 bp, Homo sapiens
cgagaagacaagatt

SEQ ID NO: 2005121 - DNA, 15 bp, Homo sapiens
gagaagacaagatta

SEQ ID NO: 2005122 - DNA, 15 bp, Homo sapiens
agaagacaagattag

SEQ ID NO: 2005123 - DNA, 15 bp, Homo sapiens
gaagacaagattaga

SEQ ID NO: 2005124 - DNA, 15 bp, Homo sapiens
aagacaagattagag

SEQ ID NO: 2005125 - DNA, 15 bp, Homo sapiens
agacaagattagaga

SEQ ID NO: 2005126 - DNA, 15 bp, Homo sapiens
gacaagattagagaa

SEQ ID NO: 2005127 - DNA, 15 bp, Homo sapiens
acaagattagagaaa

SEQ ID NO: 2005128 - DNA, 15 bp, Homo sapiens
caagattagagaaaa

SEQ ID NO: 2005129 - DNA, 15 bp, Homo sapiens
aagattagagaaaaa

SEQ ID NO: 2005130 - DNA, 15 bp, Homo sapiens
agattagagaaaaaa

SEQ ID NO: 2005131 - DNA, 15 bp, Homo sapiens
gattagagaaaaaag

SEQ ID NO: 2005132 - DNA, 15 bp, Homo sapiens
attagagaaaaaaga

SEQ ID NO: 2005133 - DNA, 15 bp, Homo sapiens
ttagagaaaaaagag

SEQ ID NO: 2005134 - DNA, 15 bp, Homo sapiens
tagagaaaaaagagt

SEQ ID NO: 2005135 - DNA, 15 bp, Homo sapiens
agagaaaaaagagtg

SEQ ID NO: 2005136 - DNA, 15 bp, Homo sapiens
gagaaaaaagagtga

SEQ ID NO: 2005137 - DNA, 15 bp, Homo sapiens
agaaaaaagagtgaa

SEQ ID NO: 2005138 - DNA, 15 bp, Homo sapiens
gaaaaaagagtgaaa

SEQ ID NO: 2005139 - DNA, 15 bp, Homo sapiens
aaaaaagagtgaaaa

SEQ ID NO: 2005140 - DNA, 15 bp, Homo sapiens
aaaaagagtgaaaag

SEQ ID NO: 2005141 - DNA, 15 bp, Homo sapiens
aaaagagtgaaaaga

SEQ ID NO: 2005142 - DNA, 15 bp, Homo sapiens
aaagagtgaaaagaa

SEQ ID NO: 2005143 - DNA, 15 bp, Homo sapiens
aagagtgaaaagaaa

SEQ ID NO: 2005144 - DNA, 15 bp, Homo sapiens
agagtgaaaagaaat

SEQ ID NO: 2005145 - DNA, 15 bp, Homo sapiens
gagtgaaaagaaatg

SEQ ID NO: 2005146 - DNA, 15 bp, Homo sapiens
agtgaaaagaaatga

SEQ ID NO: 2005147 - DNA, 15 bp, Homo sapiens
gtgaaaagaaatgaa

SEQ ID NO: 2005148 - DNA, 15 bp, Homo sapiens
tgaaaagaaatgaac

SEQ ID NO: 2005149 - DNA, 15 bp, Homo sapiens
gaaaagaaatgaaca

SEQ ID NO: 2005150 - DNA, 15 bp, Homo sapiens
aaaagaaatgaacaa

SEQ ID NO: 2005151 - DNA, 15 bp, Homo sapiens
aaagaaatgaacaaa

SEQ ID NO: 2005152 - DNA, 15 bp, Homo sapiens
aagaaatgaacaaag

SEQ ID NO: 2005153 - DNA, 15 bp, Homo sapiens
agaaatgaacaaagc

SEQ ID NO: 2005154 - DNA, 15 bp, Homo sapiens
gaaatgaacaaagcc

SEQ ID NO: 2005155 - DNA, 15 bp, Homo sapiens
aaatgaacaaagcct

SEQ ID NO: 2005156 - DNA, 15 bp, Homo sapiens
aatgaacaaagcctc

SEQ ID NO: 2005157 - DNA, 15 bp, Homo sapiens
atgaacaaagcctcc

SEQ ID NO: 2005158 - DNA, 15 bp, Homo sapiens
tgaacaaagcctcca

SEQ ID NO: 2005159 - DNA, 15 bp, Homo sapiens
gaacaaagcctccaa

SEQ ID NO: 2005160 - DNA, 15 bp, Homo sapiens
aacaaagcctccaag

SEQ ID NO: 2005161 - DNA, 15 bp, Homo sapiens
acaaagcctccaaga

SEQ ID NO: 2005162 - DNA, 15 bp, Homo sapiens
caaagcctccaagaa

SEQ ID NO: 2005163 - DNA, 15 bp, Homo sapiens
aaagcctccaagaaa

SEQ ID NO: 2005164 - DNA, 15 bp, Homo sapiens
aagcctccaagaaat

SEQ ID NO: 2005165 - DNA, 15 bp, Homo sapiens
agcctccaagaaata

SEQ ID NO: 2005166 - DNA, 15 bp, Homo sapiens
gcctccaagaaatat

SEQ ID NO: 2005167 - DNA, 15 bp, Homo sapiens
cctccaagaaatatg

SEQ ID NO: 2005168 - DNA, 15 bp, Homo sapiens
ctccaagaaatatgg

SEQ ID NO: 2005169 - DNA, 15 bp, Homo sapiens
tccaagaaatatggg

SEQ ID NO: 2005170 - DNA, 15 bp, Homo sapiens
ccaagaaatatggga

SEQ ID NO: 2005171 - DNA, 15 bp, Homo sapiens
caagaaatatgggac

SEQ ID NO: 2005172 - DNA, 15 bp, Homo sapiens
aagaaatatgggact

SEQ ID NO: 2005173 - DNA, 15 bp, Homo sapiens
agaaatatgggacta

SEQ ID NO: 2005174 - DNA, 15 bp, Homo sapiens
gaaatatgggactat

SEQ ID NO: 2005175 - DNA, 15 bp, Homo sapiens
aaatatgggactatg

SEQ ID NO: 2005176 - DNA, 15 bp, Homo sapiens
aatatgggactatgt

SEQ ID NO: 2005177 - DNA, 15 bp, Homo sapiens
atatgggactatgtg

SEQ ID NO: 2005178 - DNA, 15 bp, Homo sapiens
tatgggactatgtga

SEQ ID NO: 2005179 - DNA, 15 bp, Homo sapiens
atgggactatgtgaa

SEQ ID NO: 2005180 - DNA, 15 bp, Homo sapiens
tgggactatgtgaaa

SEQ ID NO: 2005181 - DNA, 15 bp, Homo sapiens
gggactatgtgaaaa

SEQ ID NO: 2005182 - DNA, 15 bp, Homo sapiens
ggactatgtgaaaag

SEQ ID NO: 2005183 - DNA, 15 bp, Homo sapiens
gactatgtgaaaaga

SEQ ID NO: 2005184 - DNA, 15 bp, Homo sapiens
actatgtgaaaagac

SEQ ID NO: 2005185 - DNA, 15 bp, Homo sapiens
ctatgtgaaaagacc

SEQ ID NO: 2005186 - DNA, 15 bp, Homo sapiens
tatgtgaaaagacca

SEQ ID NO: 2005187 - DNA, 15 bp, Homo sapiens
atgtgaaaagaccaa

SEQ ID NO: 2005188 - DNA, 15 bp, Homo sapiens
tgtgaaaagaccaaa

SEQ ID NO: 2005189 - DNA, 15 bp, Homo sapiens
gtgaaaagaccaaat

SEQ ID NO: 2005190 - DNA, 15 bp, Homo sapiens
tgaaaagaccaaatc

SEQ ID NO: 2005191 - DNA, 15 bp, Homo sapiens
gaaaagaccaaatct

SEQ ID NO: 2005192 - DNA, 15 bp, Homo sapiens
aaaagaccaaatcta

SEQ ID NO: 2005193 - DNA, 15 bp, Homo sapiens
aaagaccaaatctac

SEQ ID NO: 2005194 - DNA, 15 bp, Homo sapiens
aagaccaaatctaca

SEQ ID NO: 2005195 - DNA, 15 bp, Homo sapiens
agaccaaatctacat

SEQ ID NO: 2005196 - DNA, 15 bp, Homo sapiens
gaccaaatctacatt

SEQ ID NO: 2005197 - DNA, 15 bp, Homo sapiens
accaaatctacattt

SEQ ID NO: 2005198 - DNA, 15 bp, Homo sapiens
ccaaatctacatttg

SEQ ID NO: 2005199 - DNA, 15 bp, Homo sapiens
caaatctacatttgg

SEQ ID NO: 2005200 - DNA, 15 bp, Homo sapiens
aaatctacatttggt

SEQ ID NO: 2005201 - DNA, 15 bp, Homo sapiens
aatctacatttggtt

SEQ ID NO: 2005202 - DNA, 15 bp, Homo sapiens
atctacatttggtta

SEQ ID NO: 2005203 - DNA, 15 bp, Homo sapiens
tctacatttggttag

SEQ ID NO: 2005204 - DNA, 15 bp, Homo sapiens
ctacatttggttagt

SEQ ID NO: 2005205 - DNA, 15 bp, Homo sapiens
tacatttggttagtg

SEQ ID NO: 2005206 - DNA, 15 bp, Homo sapiens
acatttggttagtgt

SEQ ID NO: 2005207 - DNA, 15 bp, Homo sapiens
catttggttagtgta

SEQ ID NO: 2005208 - DNA, 15 bp, Homo sapiens
atttggttagtgtac

SEQ ID NO: 2005209 - DNA, 15 bp, Homo sapiens
tttggttagtgtacc

SEQ ID NO: 2005210 - DNA, 15 bp, Homo sapiens
ttggttagtgtacct

SEQ ID NO: 2005211 - DNA, 15 bp, Homo sapiens
tggttagtgtacctg

SEQ ID NO: 2005212 - DNA, 15 bp, Homo sapiens
ggttagtgtacctga

SEQ ID NO: 2005213 - DNA, 15 bp, Homo sapiens
gttagtgtacctgaa

SEQ ID NO: 2005214 - DNA, 15 bp, Homo sapiens
ttagtgtacctgaaa

SEQ ID NO: 2005215 - DNA, 15 bp, Homo sapiens
tagtgtacctgaaag

SEQ ID NO: 2005216 - DNA, 15 bp, Homo sapiens
agtgtacctgaaagt

SEQ ID NO: 2005217 - DNA, 15 bp, Homo sapiens
gtgtacctgaaagtg

SEQ ID NO: 2005218 - DNA, 15 bp, Homo sapiens
tgtacctgaaagtga

SEQ ID NO: 2005219 - DNA, 15 bp, Homo sapiens
gtacctgaaagtgat

SEQ ID NO: 2005220 - DNA, 15 bp, Homo sapiens
tacctgaaagtgatg

SEQ ID NO: 2005221 - DNA, 15 bp, Homo sapiens
acctgaaagtgatgg

SEQ ID NO: 2005222 - DNA, 15 bp, Homo sapiens
cctgaaagtgatggg

SEQ ID NO: 2005223 - DNA, 15 bp, Homo sapiens
ctgaaagtgatgggg

SEQ ID NO: 2005224 - DNA, 15 bp, Homo sapiens
tgaaagtgatgggga

SEQ ID NO: 2005225 - DNA, 15 bp, Homo sapiens
gaaagtgatggggag

SEQ ID NO: 2005226 - DNA, 15 bp, Homo sapiens
aaagtgatggggagg

SEQ ID NO: 2005227 - DNA, 15 bp, Homo sapiens
aagtgatggggagga

SEQ ID NO: 2005228 - DNA, 15 bp, Homo sapiens
agtgatggggaggat

SEQ ID NO: 2005229 - DNA, 15 bp, Homo sapiens
gtgatggggaggatg

SEQ ID NO: 2005230 - DNA, 15 bp, Homo sapiens
tgatggggaggatgg

SEQ ID NO: 2005231 - DNA, 15 bp, Homo sapiens
gatggggaggatgga

SEQ ID NO: 2005232 - DNA, 15 bp, Homo sapiens
atggggaggatggaa

SEQ ID NO: 2005233 - DNA, 15 bp, Homo sapiens
tggggaggatggaaa

SEQ ID NO: 2005234 - DNA, 15 bp, Homo sapiens
ggggaggatggaaaa

SEQ ID NO: 2005235 - DNA, 15 bp, Homo sapiens
gggaggatggaaaaa

SEQ ID NO: 2005236 - DNA, 15 bp, Homo sapiens
ggaggatggaaaaag

SEQ ID NO: 2005237 - DNA, 15 bp, Homo sapiens
gaggatggaaaaagt

SEQ ID NO: 2005238 - DNA, 15 bp, Homo sapiens
aggatggaaaaagtt

SEQ ID NO: 2005239 - DNA, 15 bp, Homo sapiens
ggatggaaaaagttg

SEQ ID NO: 2005240 - DNA, 15 bp, Homo sapiens
gatggaaaaagttgg

SEQ ID NO: 2005241 - DNA, 15 bp, Homo sapiens
atggaaaaagttgga

SEQ ID NO: 2005242 - DNA, 15 bp, Homo sapiens
tggaaaaagttggaa

SEQ ID NO: 2005243 - DNA, 15 bp, Homo sapiens
ggaaaaagttggaaa

SEQ ID NO: 2005244 - DNA, 15 bp, Homo sapiens
gaaaaagttggaaaa

SEQ ID NO: 2005245 - DNA, 15 bp, Homo sapiens
aaaaagttggaaaac

SEQ ID NO: 2005246 - DNA, 15 bp, Homo sapiens
aaaagttggaaaaca

SEQ ID NO: 2005247 - DNA, 15 bp, Homo sapiens
aaagttggaaaacac

SEQ ID NO: 2005248 - DNA, 15 bp, Homo sapiens
aagttggaaaacact

SEQ ID NO: 2005249 - DNA, 15 bp, Homo sapiens
agttggaaaacactc

SEQ ID NO: 2005250 - DNA, 15 bp, Homo sapiens
gttggaaaacactct

SEQ ID NO: 2005251 - DNA, 15 bp, Homo sapiens
ttggaaaacactctt

SEQ ID NO: 2005252 - DNA, 15 bp, Homo sapiens
tggaaaacactcttc

SEQ ID NO: 2005253 - DNA, 15 bp, Homo sapiens
ggaaaacactcttca

SEQ ID NO: 2005254 - DNA, 15 bp, Homo sapiens
gaaaacactcttcag

SEQ ID NO: 2005255 - DNA, 15 bp, Homo sapiens
aaaacactcttcagg

SEQ ID NO: 2005256 - DNA, 15 bp, Homo sapiens
aaacactcttcagga

SEQ ID NO: 2005257 - DNA, 15 bp, Homo sapiens
aacactcttcaggat

SEQ ID NO: 2005258 - DNA, 15 bp, Homo sapiens
acactcttcaggata

SEQ ID NO: 2005259 - DNA, 15 bp, Homo sapiens
cactcttcaggatat

SEQ ID NO: 2005260 - DNA, 15 bp, Homo sapiens
actcttcaggatatt

SEQ ID NO: 2005261 - DNA, 15 bp, Homo sapiens
ctcttcaggatatta

SEQ ID NO: 2005262 - DNA, 15 bp, Homo sapiens
tcttcaggatattag

SEQ ID NO: 2005263 - DNA, 15 bp, Homo sapiens
cttcaggatattagc

SEQ ID NO: 2005264 - DNA, 15 bp, Homo sapiens
ttcaggatattagca

SEQ ID NO: 2005265 - DNA, 15 bp, Homo sapiens
tcaggatattagcag

SEQ ID NO: 2005266 - DNA, 15 bp, Homo sapiens
caggatattagcagg

SEQ ID NO: 2005267 - DNA, 15 bp, Homo sapiens
aggatattagcagga

SEQ ID NO: 2005268 - DNA, 15 bp, Homo sapiens
ggatattagcaggag

SEQ ID NO: 2005269 - DNA, 15 bp, Homo sapiens
gatattagcaggaga

SEQ ID NO: 2005270 - DNA, 15 bp, Homo sapiens
atattagcaggagaa

SEQ ID NO: 2005271 - DNA, 15 bp, Homo sapiens
tattagcaggagaac

SEQ ID NO: 2005272 - DNA, 15 bp, Homo sapiens
attagcaggagaact

SEQ ID NO: 2005273 - DNA, 15 bp, Homo sapiens
ttagcaggagaactt

SEQ ID NO: 2005274 - DNA, 15 bp, Homo sapiens
tagcaggagaacttc

SEQ ID NO: 2005275 - DNA, 15 bp, Homo sapiens
agcaggagaacttcc

SEQ ID NO: 2005276 - DNA, 15 bp, Homo sapiens
gcaggagaacttccc

SEQ ID NO: 2005277 - DNA, 15 bp, Homo sapiens
caggagaacttcccc

SEQ ID NO: 2005278 - DNA, 15 bp, Homo sapiens
aggagaacttcccca

SEQ ID NO: 2005279 - DNA, 15 bp, Homo sapiens
ggagaacttccccaa

SEQ ID NO: 2005280 - DNA, 15 bp, Homo sapiens
gagaacttccccaac

SEQ ID NO: 2005281 - DNA, 15 bp, Homo sapiens
agaacttccccaacc

SEQ ID NO: 2005282 - DNA, 15 bp, Homo sapiens
gaacttccccaacct

SEQ ID NO: 2005283 - DNA, 15 bp, Homo sapiens
aacttccccaaccta

SEQ ID NO: 2005284 - DNA, 15 bp, Homo sapiens
acttccccaacctag

SEQ ID NO: 2005285 - DNA, 15 bp, Homo sapiens
cttccccaacctagc

SEQ ID NO: 2005286 - DNA, 15 bp, Homo sapiens
ttccccaacctagca

SEQ ID NO: 2005287 - DNA, 15 bp, Homo sapiens
tccccaacctagcaa

SEQ ID NO: 2005288 - DNA, 15 bp, Homo sapiens
ccccaacctagcaag

SEQ ID NO: 2005289 - DNA, 15 bp, Homo sapiens
cccaacctagcaagg

SEQ ID NO: 2005290 - DNA, 15 bp, Homo sapiens
ccaacctagcaaggc

SEQ ID NO: 2005291 - DNA, 15 bp, Homo sapiens
caacctagcaaggca

SEQ ID NO: 2005292 - DNA, 15 bp, Homo sapiens
aacctagcaaggcag

SEQ ID NO: 2005293 - DNA, 15 bp, Homo sapiens
acctagcaaggcagg

SEQ ID NO: 2005294 - DNA, 15 bp, Homo sapiens
cctagcaaggcaggc

SEQ ID NO: 2005295 - DNA, 15 bp, Homo sapiens
ctagcaaggcaggcc

SEQ ID NO: 2005296 - DNA, 15 bp, Homo sapiens
tagcaaggcaggcca

SEQ ID NO: 2005297 - DNA, 15 bp, Homo sapiens
agcaaggcaggccaa

SEQ ID NO: 2005298 - DNA, 15 bp, Homo sapiens
gcaaggcaggccaac

SEQ ID NO: 2005299 - DNA, 15 bp, Homo sapiens
caaggcaggccaaca

SEQ ID NO: 2005300 - DNA, 15 bp, Homo sapiens
aaggcaggccaacat

SEQ ID NO: 2005301 - DNA, 15 bp, Homo sapiens
aggcaggccaacatt

SEQ ID NO: 2005302 - DNA, 15 bp, Homo sapiens
ggcaggccaacattc

SEQ ID NO: 2005303 - DNA, 15 bp, Homo sapiens
gcaggccaacattca

SEQ ID NO: 2005304 - DNA, 15 bp, Homo sapiens
caggccaacattcaa

SEQ ID NO: 2005305 - DNA, 15 bp, Homo sapiens
aggccaacattcaaa

SEQ ID NO: 2005306 - DNA, 15 bp, Homo sapiens
ggccaacattcaaat

SEQ ID NO: 2005307 - DNA, 15 bp, Homo sapiens
gccaacattcaaatt

SEQ ID NO: 2005308 - DNA, 15 bp, Homo sapiens
ccaacattcaaattc

SEQ ID NO: 2005309 - DNA, 15 bp, Homo sapiens
caacattcaaattca

SEQ ID NO: 2005310 - DNA, 15 bp, Homo sapiens
aacattcaaattcag

SEQ ID NO: 2005311 - DNA, 15 bp, Homo sapiens
acattcaaattcagg

SEQ ID NO: 2005312 - DNA, 15 bp, Homo sapiens
cattcaaattcagga

SEQ ID NO: 2005313 - DNA, 15 bp, Homo sapiens
attcaaattcaggaa

SEQ ID NO: 2005314 - DNA, 15 bp, Homo sapiens
ttcaaattcaggaaa

SEQ ID NO: 2005315 - DNA, 15 bp, Homo sapiens
tcaaattcaggaaat

SEQ ID NO: 2005316 - DNA, 15 bp, Homo sapiens
caaattcaggaaata

SEQ ID NO: 2005317 - DNA, 15 bp, Homo sapiens
aaattcaggaaatac

SEQ ID NO: 2005318 - DNA, 15 bp, Homo sapiens
aattcaggaaataca

SEQ ID NO: 2005319 - DNA, 15 bp, Homo sapiens
attcaggaaatacag

SEQ ID NO: 2005320 - DNA, 15 bp, Homo sapiens
ttcaggaaatacaga

SEQ ID NO: 2005321 - DNA, 15 bp, Homo sapiens
tcaggaaatacagag

SEQ ID NO: 2005322 - DNA, 15 bp, Homo sapiens
caggaaatacagaga

SEQ ID NO: 2005323 - DNA, 15 bp, Homo sapiens
aggaaatacagagaa

SEQ ID NO: 2005324 - DNA, 15 bp, Homo sapiens
ggaaatacagagaac

SEQ ID NO: 2005325 - DNA, 15 bp, Homo sapiens
gaaatacagagaaca

SEQ ID NO: 2005326 - DNA, 15 bp, Homo sapiens
aaatacagagaacac

SEQ ID NO: 2005327 - DNA, 15 bp, Homo sapiens
aatacagagaacact

SEQ ID NO: 2005328 - DNA, 15 bp, Homo sapiens
atacagagaacacta

SEQ ID NO: 2005329 - DNA, 15 bp, Homo sapiens
tacagagaacactac

SEQ ID NO: 2005330 - DNA, 15 bp, Homo sapiens
acagagaacactaca

SEQ ID NO: 2005331 - DNA, 15 bp, Homo sapiens
cagagaacactacaa

SEQ ID NO: 2005332 - DNA, 15 bp, Homo sapiens
agagaacactacaaa

SEQ ID NO: 2005333 - DNA, 15 bp, Homo sapiens
gagaacactacaaag

SEQ ID NO: 2005334 - DNA, 15 bp, Homo sapiens
agaacactacaaaga

SEQ ID NO: 2005335 - DNA, 15 bp, Homo sapiens
gaacactacaaagat

SEQ ID NO: 2005336 - DNA, 15 bp, Homo sapiens
aacactacaaagata

SEQ ID NO: 2005337 - DNA, 15 bp, Homo sapiens
acactacaaagataa

SEQ ID NO: 2005338 - DNA, 15 bp, Homo sapiens
cactacaaagataat

SEQ ID NO: 2005339 - DNA, 15 bp, Homo sapiens
actacaaagataatc

SEQ ID NO: 2005340 - DNA, 15 bp, Homo sapiens
ctacaaagataatcc

SEQ ID NO: 2005341 - DNA, 15 bp, Homo sapiens
tacaaagataatcct

SEQ ID NO: 2005342 - DNA, 15 bp, Homo sapiens
acaaagataatcctc

SEQ ID NO: 2005343 - DNA, 15 bp, Homo sapiens
caaagataatcctcg

SEQ ID NO: 2005344 - DNA, 15 bp, Homo sapiens
aaagataatcctcga

SEQ ID NO: 2005345 - DNA, 15 bp, Homo sapiens
aagataatcctcgag

SEQ ID NO: 2005346 - DNA, 15 bp, Homo sapiens
agataatcctcgaga

SEQ ID NO: 2005347 - DNA, 15 bp, Homo sapiens
gataatcctcgagaa

SEQ ID NO: 2005348 - DNA, 15 bp, Homo sapiens
ataatcctcgagaag

SEQ ID NO: 2005349 - DNA, 15 bp, Homo sapiens
taatcctcgagaaga

SEQ ID NO: 2005350 - DNA, 15 bp, Homo sapiens
aatcctcgagaagag

SEQ ID NO: 2005351 - DNA, 15 bp, Homo sapiens
atcctcgagaagagc

SEQ ID NO: 2005352 - DNA, 15 bp, Homo sapiens
tcctcgagaagagca

SEQ ID NO: 2005353 - DNA, 15 bp, Homo sapiens
cctcgagaagagcaa

SEQ ID NO: 2005354 - DNA, 15 bp, Homo sapiens
ctcgagaagagcaac

SEQ ID NO: 2005355 - DNA, 15 bp, Homo sapiens
tcgagaagagcaacc

SEQ ID NO: 2005356 - DNA, 15 bp, Homo sapiens
cgagaagagcaaccc

SEQ ID NO: 2005357 - DNA, 15 bp, Homo sapiens
gagaagagcaacccc

SEQ ID NO: 2005358 - DNA, 15 bp, Homo sapiens
agaagagcaacccca

SEQ ID NO: 2005359 - DNA, 15 bp, Homo sapiens
gaagagcaaccccaa

SEQ ID NO: 2005360 - DNA, 15 bp, Homo sapiens
aagagcaaccccaag

SEQ ID NO: 2005361 - DNA, 15 bp, Homo sapiens
agagcaaccccaaga

SEQ ID NO: 2005362 - DNA, 15 bp, Homo sapiens
gagcaaccccaagac

SEQ ID NO: 2005363 - DNA, 15 bp, Homo sapiens
agcaaccccaagaca

SEQ ID NO: 2005364 - DNA, 15 bp, Homo sapiens
gcaaccccaagacat

SEQ ID NO: 2005365 - DNA, 15 bp, Homo sapiens
caaccccaagacata

SEQ ID NO: 2005366 - DNA, 15 bp, Homo sapiens
aaccccaagacatat

SEQ ID NO: 2005367 - DNA, 15 bp, Homo sapiens
accccaagacatata

SEQ ID NO: 2005368 - DNA, 15 bp, Homo sapiens
ccccaagacatataa

SEQ ID NO: 2005369 - DNA, 15 bp, Homo sapiens
cccaagacatataat

SEQ ID NO: 2005370 - DNA, 15 bp, Homo sapiens
ccaagacatataatc

SEQ ID NO: 2005371 - DNA, 15 bp, Homo sapiens
caagacatataatcg

SEQ ID NO: 2005372 - DNA, 15 bp, Homo sapiens
aagacatataatcgt

SEQ ID NO: 2005373 - DNA, 15 bp, Homo sapiens
agacatataatcgtc

SEQ ID NO: 2005374 - DNA, 15 bp, Homo sapiens
gacatataatcgtca

SEQ ID NO: 2005375 - DNA, 15 bp, Homo sapiens
acatataatcgtcag

SEQ ID NO: 2005376 - DNA, 15 bp, Homo sapiens
catataatcgtcaga

SEQ ID NO: 2005377 - DNA, 15 bp, Homo sapiens
atataatcgtcagat

SEQ ID NO: 2005378 - DNA, 15 bp, Homo sapiens
tataatcgtcagatt

SEQ ID NO: 2005379 - DNA, 15 bp, Homo sapiens
ataatcgtcagattc

SEQ ID NO: 2005380 - DNA, 15 bp, Homo sapiens
taatcgtcagattca

SEQ ID NO: 2005381 - DNA, 15 bp, Homo sapiens
aatcgtcagattcac

SEQ ID NO: 2005382 - DNA, 15 bp, Homo sapiens
atcgtcagattcacc

SEQ ID NO: 2005383 - DNA, 15 bp, Homo sapiens
tcgtcagattcacca

SEQ ID NO: 2005384 - DNA, 15 bp, Homo sapiens
cgtcagattcaccaa

SEQ ID NO: 2005385 - DNA, 15 bp, Homo sapiens
gtcagattcaccaag

SEQ ID NO: 2005386 - DNA, 15 bp, Homo sapiens
tcagattcaccaagg

SEQ ID NO: 2005387 - DNA, 15 bp, Homo sapiens
cagattcaccaaggt

SEQ ID NO: 2005388 - DNA, 15 bp, Homo sapiens
agattcaccaaggtt

SEQ ID NO: 2005389 - DNA, 15 bp, Homo sapiens
gattcaccaaggttg

SEQ ID NO: 2005390 - DNA, 15 bp, Homo sapiens
attcaccaaggttga

SEQ ID NO: 2005391 - DNA, 15 bp, Homo sapiens
ttcaccaaggttgaa

SEQ ID NO: 2005392 - DNA, 15 bp, Homo sapiens
tcaccaaggttgaaa

SEQ ID NO: 2005393 - DNA, 15 bp, Homo sapiens
caccaaggttgaaat

SEQ ID NO: 2005394 - DNA, 15 bp, Homo sapiens
accaaggttgaaatg

SEQ ID NO: 2005395 - DNA, 15 bp, Homo sapiens
ccaaggttgaaatga

SEQ ID NO: 2005396 - DNA, 15 bp, Homo sapiens
caaggttgaaatgaa

SEQ ID NO: 2005397 - DNA, 15 bp, Homo sapiens
aaggttgaaatgaag

SEQ ID NO: 2005398 - DNA, 15 bp, Homo sapiens
aggttgaaatgaagg

SEQ ID NO: 2005399 - DNA, 15 bp, Homo sapiens
ggttgaaatgaagga

SEQ ID NO: 2005400 - DNA, 15 bp, Homo sapiens
gttgaaatgaaggaa

SEQ ID NO: 2005401 - DNA, 15 bp, Homo sapiens
ttgaaatgaaggaaa

SEQ ID NO: 2005402 - DNA, 15 bp, Homo sapiens
tgaaatgaaggaaaa

SEQ ID NO: 2005403 - DNA, 15 bp, Homo sapiens
gaaatgaaggaaaaa

SEQ ID NO: 2005404 - DNA, 15 bp, Homo sapiens
aaatgaaggaaaaaa

SEQ ID NO: 2005405 - DNA, 15 bp, Homo sapiens
aatgaaggaaaaaat

SEQ ID NO: 2005406 - DNA, 15 bp, Homo sapiens
atgaaggaaaaaata

SEQ ID NO: 2005407 - DNA, 15 bp, Homo sapiens
tgaaggaaaaaatat

SEQ ID NO: 2005408 - DNA, 15 bp, Homo sapiens
gaaggaaaaaatatt

SEQ ID NO: 2005409 - DNA, 15 bp, Homo sapiens
aaggaaaaaatatta

SEQ ID NO: 2005410 - DNA, 15 bp, Homo sapiens
aggaaaaaatattaa

SEQ ID NO: 2005411 - DNA, 15 bp, Homo sapiens
ggaaaaaatattaag

SEQ ID NO: 2005412 - DNA, 15 bp, Homo sapiens
gaaaaaatattaagg

SEQ ID NO: 2005413 - DNA, 15 bp, Homo sapiens
aaaaaatattaaggg

SEQ ID NO: 2005414 - DNA, 15 bp, Homo sapiens
aaaaatattaagggc

SEQ ID NO: 2005415 - DNA, 15 bp, Homo sapiens
aaaatattaagggca

SEQ ID NO: 2005416 - DNA, 15 bp, Homo sapiens
aaatattaagggcag

SEQ ID NO: 2005417 - DNA, 15 bp, Homo sapiens
aatattaagggcagc

SEQ ID NO: 2005418 - DNA, 15 bp, Homo sapiens
atattaagggcagcc

SEQ ID NO: 2005419 - DNA, 15 bp, Homo sapiens
tattaagggcagcca

SEQ ID NO: 2005420 - DNA, 15 bp, Homo sapiens
attaagggcagccag

SEQ ID NO: 2005421 - DNA, 15 bp, Homo sapiens
ttaagggcagccaga

SEQ ID NO: 2005422 - DNA, 15 bp, Homo sapiens
taagggcagccagag

SEQ ID NO: 2005423 - DNA, 15 bp, Homo sapiens
aagggcagccagaga

SEQ ID NO: 2005424 - DNA, 15 bp, Homo sapiens
agggcagccagagag

SEQ ID NO: 2005425 - DNA, 15 bp, Homo sapiens
gggcagccagagaga

SEQ ID NO: 2005426 - DNA, 15 bp, Homo sapiens
ggcagccagagagaa

SEQ ID NO: 2005427 - DNA, 15 bp, Homo sapiens
gcagccagagagaaa

SEQ ID NO: 2005428 - DNA, 15 bp, Homo sapiens
cagccagagagaaag

SEQ ID NO: 2005429 - DNA, 15 bp, Homo sapiens
agccagagagaaagg

SEQ ID NO: 2005430 - DNA, 15 bp, Homo sapiens
gccagagagaaaggt

SEQ ID NO: 2005431 - DNA, 15 bp, Homo sapiens
ccagagagaaaggtc

SEQ ID NO: 2005432 - DNA, 15 bp, Homo sapiens
cagagagaaaggtcg

SEQ ID NO: 2005433 - DNA, 15 bp, Homo sapiens
agagagaaaggtcgg

SEQ ID NO: 2005434 - DNA, 15 bp, Homo sapiens
gagagaaaggtcggg

SEQ ID NO: 2005435 - DNA, 15 bp, Homo sapiens
agagaaaggtcgggt

SEQ ID NO: 2005436 - DNA, 15 bp, Homo sapiens
gagaaaggtcgggtt

SEQ ID NO: 2005437 - DNA, 15 bp, Homo sapiens
agaaaggtcgggtta

SEQ ID NO: 2005438 - DNA, 15 bp, Homo sapiens
gaaaggtcgggttac

SEQ ID NO: 2005439 - DNA, 15 bp, Homo sapiens
aaaggtcgggttacc

SEQ ID NO: 2005440 - DNA, 15 bp, Homo sapiens
aaggtcgggttaccc

SEQ ID NO: 2005441 - DNA, 15 bp, Homo sapiens
aggtcgggttaccca

SEQ ID NO: 2005442 - DNA, 15 bp, Homo sapiens
ggtcgggttacccac

SEQ ID NO: 2005443 - DNA, 15 bp, Homo sapiens
gtcgggttacccaca

SEQ ID NO: 2005444 - DNA, 15 bp, Homo sapiens
tcgggttacccacaa

SEQ ID NO: 2005445 - DNA, 15 bp, Homo sapiens
cgggttacccacaaa

SEQ ID NO: 2005446 - DNA, 15 bp, Homo sapiens
gggttacccacaaag

SEQ ID NO: 2005447 - DNA, 15 bp, Homo sapiens
ggttacccacaaagg

SEQ ID NO: 2005448 - DNA, 15 bp, Homo sapiens
gttacccacaaaggg

SEQ ID NO: 2005449 - DNA, 15 bp, Homo sapiens
ttacccacaaaggga

SEQ ID NO: 2005450 - DNA, 15 bp, Homo sapiens
tacccacaaagggaa

SEQ ID NO: 2005451 - DNA, 15 bp, Homo sapiens
acccacaaagggaag

SEQ ID NO: 2005452 - DNA, 15 bp, Homo sapiens
cccacaaagggaagc

SEQ ID NO: 2005453 - DNA, 15 bp, Homo sapiens
ccacaaagggaagcc

SEQ ID NO: 2005454 - DNA, 15 bp, Homo sapiens
cacaaagggaagccc

SEQ ID NO: 2005455 - DNA, 15 bp, Homo sapiens
acaaagggaagccca

SEQ ID NO: 2005456 - DNA, 15 bp, Homo sapiens
caaagggaagcccat

SEQ ID NO: 2005457 - DNA, 15 bp, Homo sapiens
aaagggaagcccatc

SEQ ID NO: 2005458 - DNA, 15 bp, Homo sapiens
aagggaagcccatca

SEQ ID NO: 2005459 - DNA, 15 bp, Homo sapiens
agggaagcccatcag

SEQ ID NO: 2005460 - DNA, 15 bp, Homo sapiens
gggaagcccatcaga

SEQ ID NO: 2005461 - DNA, 15 bp, Homo sapiens
ggaagcccatcagac

SEQ ID NO: 2005462 - DNA, 15 bp, Homo sapiens
gaagcccatcagact

SEQ ID NO: 2005463 - DNA, 15 bp, Homo sapiens
aagcccatcagactg

SEQ ID NO: 2005464 - DNA, 15 bp, Homo sapiens
agcccatcagactga

SEQ ID NO: 2005465 - DNA, 15 bp, Homo sapiens
gcccatcagactgac

SEQ ID NO: 2005466 - DNA, 15 bp, Homo sapiens
cccatcagactgaca

SEQ ID NO: 2005467 - DNA, 15 bp, Homo sapiens
ccatcagactgacag

SEQ ID NO: 2005468 - DNA, 15 bp, Homo sapiens
catcagactgacagc

SEQ ID NO: 2005469 - DNA, 15 bp, Homo sapiens
atcagactgacagca

SEQ ID NO: 2005470 - DNA, 15 bp, Homo sapiens
tcagactgacagcag

SEQ ID NO: 2005471 - DNA, 15 bp, Homo sapiens
cagactgacagcaga

SEQ ID NO: 2005472 - DNA, 15 bp, Homo sapiens
agactgacagcagat

SEQ ID NO: 2005473 - DNA, 15 bp, Homo sapiens
gactgacagcagatc

SEQ ID NO: 2005474 - DNA, 15 bp, Homo sapiens
actgacagcagatct

SEQ ID NO: 2005475 - DNA, 15 bp, Homo sapiens
ctgacagcagatctc

SEQ ID NO: 2005476 - DNA, 15 bp, Homo sapiens
tgacagcagatctct

SEQ ID NO: 2005477 - DNA, 15 bp, Homo sapiens
gacagcagatctcta

SEQ ID NO: 2005478 - DNA, 15 bp, Homo sapiens
acagcagatctctag

SEQ ID NO: 2005479 - DNA, 15 bp, Homo sapiens
cagcagatctctagg

SEQ ID NO: 2005480 - DNA, 15 bp, Homo sapiens
agcagatctctaggc

SEQ ID NO: 2005481 - DNA, 15 bp, Homo sapiens
gcagatctctaggca

SEQ ID NO: 2005482 - DNA, 15 bp, Homo sapiens
cagatctctaggcag

SEQ ID NO: 2005483 - DNA, 15 bp, Homo sapiens
agatctctaggcaga

SEQ ID NO: 2005484 - DNA, 15 bp, Homo sapiens
gatctctaggcagaa

SEQ ID NO: 2005485 - DNA, 15 bp, Homo sapiens
atctctaggcagaaa

SEQ ID NO: 2005486 - DNA, 15 bp, Homo sapiens
tctctaggcagaaac

SEQ ID NO: 2005487 - DNA, 15 bp, Homo sapiens
ctctaggcagaaacc

SEQ ID NO: 2005488 - DNA, 15 bp, Homo sapiens
tctaggcagaaaccc

SEQ ID NO: 2005489 - DNA, 15 bp, Homo sapiens
ctaggcagaaaccct

SEQ ID NO: 2005490 - DNA, 15 bp, Homo sapiens
taggcagaaacccta

SEQ ID NO: 2005491 - DNA, 15 bp, Homo sapiens
aggcagaaaccctac

SEQ ID NO: 2005492 - DNA, 15 bp, Homo sapiens
ggcagaaaccctaca

SEQ ID NO: 2005493 - DNA, 15 bp, Homo sapiens
gcagaaaccctacaa

SEQ ID NO: 2005494 - DNA, 15 bp, Homo sapiens
cagaaaccctacaag

SEQ ID NO: 2005495 - DNA, 15 bp, Homo sapiens
agaaaccctacaagc

SEQ ID NO: 2005496 - DNA, 15 bp, Homo sapiens
gaaaccctacaagcc

SEQ ID NO: 2005497 - DNA, 15 bp, Homo sapiens
aaaccctacaagcca

SEQ ID NO: 2005498 - DNA, 15 bp, Homo sapiens
aaccctacaagccag

SEQ ID NO: 2005499 - DNA, 15 bp, Homo sapiens
accctacaagccaga

SEQ ID NO: 2005500 - DNA, 15 bp, Homo sapiens
ccctacaagccagaa

SEQ ID NO: 2005501 - DNA, 15 bp, Homo sapiens
cctacaagccagaat

SEQ ID NO: 2005502 - DNA, 15 bp, Homo sapiens
ctacaagccagaata

SEQ ID NO: 2005503 - DNA, 15 bp, Homo sapiens
tacaagccagaatag

SEQ ID NO: 2005504 - DNA, 15 bp, Homo sapiens
acaagccagaataga

SEQ ID NO: 2005505 - DNA, 15 bp, Homo sapiens
caagccagaatagag

SEQ ID NO: 2005506 - DNA, 15 bp, Homo sapiens
aagccagaatagagt

SEQ ID NO: 2005507 - DNA, 15 bp, Homo sapiens
agccagaatagagtg

SEQ ID NO: 2005508 - DNA, 15 bp, Homo sapiens
gccagaatagagtgg

SEQ ID NO: 2005509 - DNA, 15 bp, Homo sapiens
ccagaatagagtggg

SEQ ID NO: 2005510 - DNA, 15 bp, Homo sapiens
cagaatagagtgggg

SEQ ID NO: 2005511 - DNA, 15 bp, Homo sapiens
agaatagagtggggg

SEQ ID NO: 2005512 - DNA, 15 bp, Homo sapiens
gaatagagtgggggc

SEQ ID NO: 2005513 - DNA, 15 bp, Homo sapiens
aatagagtgggggcc

SEQ ID NO: 2005514 - DNA, 15 bp, Homo sapiens
atagagtgggggcca

SEQ ID NO: 2005515 - DNA, 15 bp, Homo sapiens
tagagtgggggccaa

SEQ ID NO: 2005516 - DNA, 15 bp, Homo sapiens
agagtgggggccaat

SEQ ID NO: 2005517 - DNA, 15 bp, Homo sapiens
gagtgggggccaata

SEQ ID NO: 2005518 - DNA, 15 bp, Homo sapiens
agtgggggccaatat

SEQ ID NO: 2005519 - DNA, 15 bp, Homo sapiens
gtgggggccaatatt

SEQ ID NO: 2005520 - DNA, 15 bp, Homo sapiens
tgggggccaatattc

SEQ ID NO: 2005521 - DNA, 15 bp, Homo sapiens
gggggccaatattca

SEQ ID NO: 2005522 - DNA, 15 bp, Homo sapiens
ggggccaatattcaa

SEQ ID NO: 2005523 - DNA, 15 bp, Homo sapiens
gggccaatattcaac

SEQ ID NO: 2005524 - DNA, 15 bp, Homo sapiens
ggccaatattcaaca

SEQ ID NO: 2005525 - DNA, 15 bp, Homo sapiens
gccaatattcaacat

SEQ ID NO: 2005526 - DNA, 15 bp, Homo sapiens
ccaatattcaacatt

SEQ ID NO: 2005527 - DNA, 15 bp, Homo sapiens
caatattcaacattc

SEQ ID NO: 2005528 - DNA, 15 bp, Homo sapiens
aatattcaacattct

SEQ ID NO: 2005529 - DNA, 15 bp, Homo sapiens
atattcaacattctt

SEQ ID NO: 2005530 - DNA, 15 bp, Homo sapiens
tattcaacattctta

SEQ ID NO: 2005531 - DNA, 15 bp, Homo sapiens
attcaacattcttaa

SEQ ID NO: 2005532 - DNA, 15 bp, Homo sapiens
ttcaacattcttaaa

SEQ ID NO: 2005533 - DNA, 15 bp, Homo sapiens
tcaacattcttaaag

SEQ ID NO: 2005534 - DNA, 15 bp, Homo sapiens
caacattcttaaaga

SEQ ID NO: 2005535 - DNA, 15 bp, Homo sapiens
aacattcttaaagaa

SEQ ID NO: 2005536 - DNA, 15 bp, Homo sapiens
acattcttaaagaaa

SEQ ID NO: 2005537 - DNA, 15 bp, Homo sapiens
cattcttaaagaaaa

SEQ ID NO: 2005538 - DNA, 15 bp, Homo sapiens
attcttaaagaaaag

SEQ ID NO: 2005539 - DNA, 15 bp, Homo sapiens
ttcttaaagaaaaga

SEQ ID NO: 2005540 - DNA, 15 bp, Homo sapiens
cttaaagaaaagaat

SEQ ID NO: 2005541 - DNA, 15 bp, Homo sapiens
ttaaagaaaagaatt

SEQ ID NO: 2005542 - DNA, 15 bp, Homo sapiens
taaagaaaagaattt

SEQ ID NO: 2005543 - DNA, 15 bp, Homo sapiens
aaagaaaagaatttt

SEQ ID NO: 2005544 - DNA, 15 bp, Homo sapiens
aagaaaagaattttc

SEQ ID NO: 2005545 - DNA, 15 bp, Homo sapiens
agaaaagaattttca

SEQ ID NO: 2005546 - DNA, 15 bp, Homo sapiens
gaaaagaattttcat

SEQ ID NO: 2005547 - DNA, 15 bp, Homo sapiens
aaaagaattttcatc

SEQ ID NO: 2005548 - DNA, 15 bp, Homo sapiens
aaagaattttcatca

SEQ ID NO: 2005549 - DNA, 15 bp, Homo sapiens
aagaattttcatcac

SEQ ID NO: 2005550 - DNA, 15 bp, Homo sapiens
agaattttcatcaca

SEQ ID NO: 2005551 - DNA, 15 bp, Homo sapiens
gaattttcatcacag

SEQ ID NO: 2005552 - DNA, 15 bp, Homo sapiens
aattttcatcacaga

SEQ ID NO: 2005553 - DNA, 15 bp, Homo sapiens
attttcatcacagaa

SEQ ID NO: 2005554 - DNA, 15 bp, Homo sapiens
ttttcatcacagaat

SEQ ID NO: 2005555 - DNA, 15 bp, Homo sapiens
tttcatcacagaatt

SEQ ID NO: 2005556 - DNA, 15 bp, Homo sapiens
ttcatcacagaattt

SEQ ID NO: 2005557 - DNA, 15 bp, Homo sapiens
tcatcacagaatttc

SEQ ID NO: 2005558 - DNA, 15 bp, Homo sapiens
catcacagaatttca

SEQ ID NO: 2005559 - DNA, 15 bp, Homo sapiens
atcacagaatttcat

SEQ ID NO: 2005560 - DNA, 15 bp, Homo sapiens
tcacagaatttcata

SEQ ID NO: 2005561 - DNA, 15 bp, Homo sapiens
cacagaatttcatat

SEQ ID NO: 2005562 - DNA, 15 bp, Homo sapiens
acagaatttcatatc

SEQ ID NO: 2005563 - DNA, 15 bp, Homo sapiens
cagaatttcatatcc

SEQ ID NO: 2005564 - DNA, 15 bp, Homo sapiens
agaatttcatatcca

SEQ ID NO: 2005565 - DNA, 15 bp, Homo sapiens
gaatttcatatccag

SEQ ID NO: 2005566 - DNA, 15 bp, Homo sapiens
aatttcatatccagg

SEQ ID NO: 2005567 - DNA, 15 bp, Homo sapiens
atttcatatccaggc

SEQ ID NO: 2005568 - DNA, 15 bp, Homo sapiens
tttcatatccaggca

SEQ ID NO: 2005569 - DNA, 15 bp, Homo sapiens
ttcatatccaggcaa

SEQ ID NO: 2005570 - DNA, 15 bp, Homo sapiens
tcatatccaggcaaa

SEQ ID NO: 2005571 - DNA, 15 bp, Homo sapiens
catatccaggcaaac

SEQ ID NO: 2005572 - DNA, 15 bp, Homo sapiens
atatccaggcaaact

SEQ ID NO: 2005573 - DNA, 15 bp, Homo sapiens
tatccaggcaaacta

SEQ ID NO: 2005574 - DNA, 15 bp, Homo sapiens
atccaggcaaactaa

SEQ ID NO: 2005575 - DNA, 15 bp, Homo sapiens
tccaggcaaactaag

SEQ ID NO: 2005576 - DNA, 15 bp, Homo sapiens
ccaggcaaactaagc

SEQ ID NO: 2005577 - DNA, 15 bp, Homo sapiens
caggcaaactaagct

SEQ ID NO: 2005578 - DNA, 15 bp, Homo sapiens
aggcaaactaagctt

SEQ ID NO: 2005579 - DNA, 15 bp, Homo sapiens
ggcaaactaagcttc

SEQ ID NO: 2005580 - DNA, 15 bp, Homo sapiens
gcaaactaagcttca

SEQ ID NO: 2005581 - DNA, 15 bp, Homo sapiens
caaactaagcttcat

SEQ ID NO: 2005582 - DNA, 15 bp, Homo sapiens
aaactaagcttcata

SEQ ID NO: 2005583 - DNA, 15 bp, Homo sapiens
aactaagcttcataa

SEQ ID NO: 2005584 - DNA, 15 bp, Homo sapiens
actaagcttcataag

SEQ ID NO: 2005585 - DNA, 15 bp, Homo sapiens
ctaagcttcataagc

SEQ ID NO: 2005586 - DNA, 15 bp, Homo sapiens
taagcttcataagcg

SEQ ID NO: 2005587 - DNA, 15 bp, Homo sapiens
aagcttcataagcga

SEQ ID NO: 2005588 - DNA, 15 bp, Homo sapiens
agcttcataagcgaa

SEQ ID NO: 2005589 - DNA, 15 bp, Homo sapiens
gcttcataagcgaag

SEQ ID NO: 2005590 - DNA, 15 bp, Homo sapiens
cttcataagcgaagg

SEQ ID NO: 2005591 - DNA, 15 bp, Homo sapiens
ttcataagcgaagga

SEQ ID NO: 2005592 - DNA, 15 bp, Homo sapiens
tcataagcgaaggag

SEQ ID NO: 2005593 - DNA, 15 bp, Homo sapiens
cataagcgaaggaga

SEQ ID NO: 2005594 - DNA, 15 bp, Homo sapiens
ataagcgaaggagaa

SEQ ID NO: 2005595 - DNA, 15 bp, Homo sapiens
taagcgaaggagaaa

SEQ ID NO: 2005596 - DNA, 15 bp, Homo sapiens
aagcgaaggagaaat

SEQ ID NO: 2005597 - DNA, 15 bp, Homo sapiens
agcgaaggagaaata

SEQ ID NO: 2005598 - DNA, 15 bp, Homo sapiens
gcgaaggagaaataa

SEQ ID NO: 2005599 - DNA, 15 bp, Homo sapiens
cgaaggagaaataaa

SEQ ID NO: 2005600 - DNA, 15 bp, Homo sapiens
gaaggagaaataaaa

SEQ ID NO: 2005601 - DNA, 15 bp, Homo sapiens
aaggagaaataaaat

SEQ ID NO: 2005602 - DNA, 15 bp, Homo sapiens
aggagaaataaaata

SEQ ID NO: 2005603 - DNA, 15 bp, Homo sapiens
ggagaaataaaatac

SEQ ID NO: 2005604 - DNA, 15 bp, Homo sapiens
gagaaataaaatact

SEQ ID NO: 2005605 - DNA, 15 bp, Homo sapiens
agaaataaaatactt

SEQ ID NO: 2005606 - DNA, 15 bp, Homo sapiens
gaaataaaatacttt

SEQ ID NO: 2005607 - DNA, 15 bp, Homo sapiens
aaataaaatacttta

SEQ ID NO: 2005608 - DNA, 15 bp, Homo sapiens
aataaaatactttac

SEQ ID NO: 2005609 - DNA, 15 bp, Homo sapiens
ataaaatactttaca

SEQ ID NO: 2005610 - DNA, 15 bp, Homo sapiens
taaaatactttacag

SEQ ID NO: 2005611 - DNA, 15 bp, Homo sapiens
aaaatactttacaga

SEQ ID NO: 2005612 - DNA, 15 bp, Homo sapiens
aaatactttacagac

SEQ ID NO: 2005613 - DNA, 15 bp, Homo sapiens
aatactttacagaca

SEQ ID NO: 2005614 - DNA, 15 bp, Homo sapiens
atactttacagacaa

SEQ ID NO: 2005615 - DNA, 15 bp, Homo sapiens
tactttacagacaag

SEQ ID NO: 2005616 - DNA, 15 bp, Homo sapiens
actttacagacaagc

SEQ ID NO: 2005617 - DNA, 15 bp, Homo sapiens
ctttacagacaagca

SEQ ID NO: 2005618 - DNA, 15 bp, Homo sapiens
tttacagacaagcaa

SEQ ID NO: 2005619 - DNA, 15 bp, Homo sapiens
ttacagacaagcaaa

SEQ ID NO: 2005620 - DNA, 15 bp, Homo sapiens
tacagacaagcaaat

SEQ ID NO: 2005621 - DNA, 15 bp, Homo sapiens
acagacaagcaaatg

SEQ ID NO: 2005622 - DNA, 15 bp, Homo sapiens
cagacaagcaaatgc

SEQ ID NO: 2005623 - DNA, 15 bp, Homo sapiens
agacaagcaaatgct

SEQ ID NO: 2005624 - DNA, 15 bp, Homo sapiens
gacaagcaaatgctg

SEQ ID NO: 2005625 - DNA, 15 bp, Homo sapiens
acaagcaaatgctga

SEQ ID NO: 2005626 - DNA, 15 bp, Homo sapiens
caagcaaatgctgag

SEQ ID NO: 2005627 - DNA, 15 bp, Homo sapiens
aagcaaatgctgaga

SEQ ID NO: 2005628 - DNA, 15 bp, Homo sapiens
agcaaatgctgagag

SEQ ID NO: 2005629 - DNA, 15 bp, Homo sapiens
gcaaatgctgagaga

SEQ ID NO: 2005630 - DNA, 15 bp, Homo sapiens
caaatgctgagagat

SEQ ID NO: 2005631 - DNA, 15 bp, Homo sapiens
aaatgctgagagatt

SEQ ID NO: 2005632 - DNA, 15 bp, Homo sapiens
aatgctgagagattt

SEQ ID NO: 2005633 - DNA, 15 bp, Homo sapiens
atgctgagagatttt

SEQ ID NO: 2005634 - DNA, 15 bp, Homo sapiens
tgctgagagattttg

SEQ ID NO: 2005635 - DNA, 15 bp, Homo sapiens
gctgagagattttgt

SEQ ID NO: 2005636 - DNA, 15 bp, Homo sapiens
ctgagagattttgtc

SEQ ID NO: 2005637 - DNA, 15 bp, Homo sapiens
tgagagattttgtca

SEQ ID NO: 2005638 - DNA, 15 bp, Homo sapiens
gagagattttgtcac

SEQ ID NO: 2005639 - DNA, 15 bp, Homo sapiens
agagattttgtcacc

SEQ ID NO: 2005640 - DNA, 15 bp, Homo sapiens
gagattttgtcacca

SEQ ID NO: 2005641 - DNA, 15 bp, Homo sapiens
agattttgtcaccac

SEQ ID NO: 2005642 - DNA, 15 bp, Homo sapiens
gattttgtcaccacc

SEQ ID NO: 2005643 - DNA, 15 bp, Homo sapiens
attttgtcaccacca

SEQ ID NO: 2005644 - DNA, 15 bp, Homo sapiens
ttttgtcaccaccag

SEQ ID NO: 2005645 - DNA, 15 bp, Homo sapiens
tttgtcaccaccagg

SEQ ID NO: 2005646 - DNA, 15 bp, Homo sapiens
ttgtcaccaccaggc

SEQ ID NO: 2005647 - DNA, 15 bp, Homo sapiens
tgtcaccaccaggcc

SEQ ID NO: 2005648 - DNA, 15 bp, Homo sapiens
gtcaccaccaggcct

SEQ ID NO: 2005649 - DNA, 15 bp, Homo sapiens
tcaccaccaggcctg

SEQ ID NO: 2005650 - DNA, 15 bp, Homo sapiens
caccaccaggcctgc

SEQ ID NO: 2005651 - DNA, 15 bp, Homo sapiens
accaccaggcctgcc

SEQ ID NO: 2005652 - DNA, 15 bp, Homo sapiens
ccaccaggcctgcct

SEQ ID NO: 2005653 - DNA, 15 bp, Homo sapiens
caccaggcctgcctt

SEQ ID NO: 2005654 - DNA, 15 bp, Homo sapiens
accaggcctgcctta

SEQ ID NO: 2005655 - DNA, 15 bp, Homo sapiens
ccaggcctgccttac

SEQ ID NO: 2005656 - DNA, 15 bp, Homo sapiens
caggcctgccttaca

SEQ ID NO: 2005657 - DNA, 15 bp, Homo sapiens
aggcctgccttacaa

SEQ ID NO: 2005658 - DNA, 15 bp, Homo sapiens
ggcctgccttacaag

SEQ ID NO: 2005659 - DNA, 15 bp, Homo sapiens
gcctgccttacaaga

SEQ ID NO: 2005660 - DNA, 15 bp, Homo sapiens
cctgccttacaagag

SEQ ID NO: 2005661 - DNA, 15 bp, Homo sapiens
ctgccttacaagagc

SEQ ID NO: 2005662 - DNA, 15 bp, Homo sapiens
tgccttacaagagct

SEQ ID NO: 2005663 - DNA, 15 bp, Homo sapiens
gccttacaagagctc

SEQ ID NO: 2005664 - DNA, 15 bp, Homo sapiens
ccttacaagagctcc

SEQ ID NO: 2005665 - DNA, 15 bp, Homo sapiens
cttacaagagctcct

SEQ ID NO: 2005666 - DNA, 15 bp, Homo sapiens
ttacaagagctcctg

SEQ ID NO: 2005667 - DNA, 15 bp, Homo sapiens
tacaagagctcctga

SEQ ID NO: 2005668 - DNA, 15 bp, Homo sapiens
acaagagctcctgaa

SEQ ID NO: 2005669 - DNA, 15 bp, Homo sapiens
caagagctcctgaag

SEQ ID NO: 2005670 - DNA, 15 bp, Homo sapiens
aagagctcctgaagg

SEQ ID NO: 2005671 - DNA, 15 bp, Homo sapiens
agagctcctgaagga

SEQ ID NO: 2005672 - DNA, 15 bp, Homo sapiens
gagctcctgaaggaa

SEQ ID NO: 2005673 - DNA, 15 bp, Homo sapiens
agctcctgaaggaag

SEQ ID NO: 2005674 - DNA, 15 bp, Homo sapiens
gctcctgaaggaagc

SEQ ID NO: 2005675 - DNA, 15 bp, Homo sapiens
ctcctgaaggaagca

SEQ ID NO: 2005676 - DNA, 15 bp, Homo sapiens
tcctgaaggaagcac

SEQ ID NO: 2005677 - DNA, 15 bp, Homo sapiens
cctgaaggaagcact

SEQ ID NO: 2005678 - DNA, 15 bp, Homo sapiens
ctgaaggaagcacta

SEQ ID NO: 2005679 - DNA, 15 bp, Homo sapiens
tgaaggaagcactaa

SEQ ID NO: 2005680 - DNA, 15 bp, Homo sapiens
gaaggaagcactaag

SEQ ID NO: 2005681 - DNA, 15 bp, Homo sapiens
aaggaagcactaagc

SEQ ID NO: 2005682 - DNA, 15 bp, Homo sapiens
aggaagcactaagca

SEQ ID NO: 2005683 - DNA, 15 bp, Homo sapiens
ggaagcactaagcat

SEQ ID NO: 2005684 - DNA, 15 bp, Homo sapiens
gaagcactaagcatg

SEQ ID NO: 2005685 - DNA, 15 bp, Homo sapiens
aagcactaagcatgg

SEQ ID NO: 2005686 - DNA, 15 bp, Homo sapiens
agcactaagcatgga

SEQ ID NO: 2005687 - DNA, 15 bp, Homo sapiens
gcactaagcatggaa

SEQ ID NO: 2005688 - DNA, 15 bp, Homo sapiens
cactaagcatggaaa

SEQ ID NO: 2005689 - DNA, 15 bp, Homo sapiens
actaagcatggaaag

SEQ ID NO: 2005690 - DNA, 15 bp, Homo sapiens
ctaagcatggaaagg

SEQ ID NO: 2005691 - DNA, 15 bp, Homo sapiens
taagcatggaaagga

SEQ ID NO: 2005692 - DNA, 15 bp, Homo sapiens
aagcatggaaaggaa

SEQ ID NO: 2005693 - DNA, 15 bp, Homo sapiens
agcatggaaaggaac

SEQ ID NO: 2005694 - DNA, 15 bp, Homo sapiens
gcatggaaaggaaca

SEQ ID NO: 2005695 - DNA, 15 bp, Homo sapiens
catggaaaggaacaa

SEQ ID NO: 2005696 - DNA, 15 bp, Homo sapiens
atggaaaggaacaac

SEQ ID NO: 2005697 - DNA, 15 bp, Homo sapiens
tggaaaggaacaact

SEQ ID NO: 2005698 - DNA, 15 bp, Homo sapiens
ggaaaggaacaactg

SEQ ID NO: 2005699 - DNA, 15 bp, Homo sapiens
gaaaggaacaactgg

SEQ ID NO: 2005700 - DNA, 15 bp, Homo sapiens
aaaggaacaactggt

SEQ ID NO: 2005701 - DNA, 15 bp, Homo sapiens
aaggaacaactggta

SEQ ID NO: 2005702 - DNA, 15 bp, Homo sapiens
aggaacaactggtac

SEQ ID NO: 2005703 - DNA, 15 bp, Homo sapiens
ggaacaactggtacc

SEQ ID NO: 2005704 - DNA, 15 bp, Homo sapiens
gaacaactggtacca

SEQ ID NO: 2005705 - DNA, 15 bp, Homo sapiens
aacaactggtaccaa

SEQ ID NO: 2005706 - DNA, 15 bp, Homo sapiens
acaactggtaccaac

SEQ ID NO: 2005707 - DNA, 15 bp, Homo sapiens
caactggtaccaacc

SEQ ID NO: 2005708 - DNA, 15 bp, Homo sapiens
aactggtaccaacca

SEQ ID NO: 2005709 - DNA, 15 bp, Homo sapiens
actggtaccaaccac

SEQ ID NO: 2005710 - DNA, 15 bp, Homo sapiens
ctggtaccaaccact

SEQ ID NO: 2005711 - DNA, 15 bp, Homo sapiens
tggtaccaaccactg

SEQ ID NO: 2005712 - DNA, 15 bp, Homo sapiens
ggtaccaaccactgc

SEQ ID NO: 2005713 - DNA, 15 bp, Homo sapiens
gtaccaaccactgca

SEQ ID NO: 2005714 - DNA, 15 bp, Homo sapiens
taccaaccactgcaa

SEQ ID NO: 2005715 - DNA, 15 bp, Homo sapiens
accaaccactgcaaa

SEQ ID NO: 2005716 - DNA, 15 bp, Homo sapiens
ccaaccactgcaaaa

SEQ ID NO: 2005717 - DNA, 15 bp, Homo sapiens
caaccactgcaaaaa

SEQ ID NO: 2005718 - DNA, 15 bp, Homo sapiens
aaccactgcaaaaac

SEQ ID NO: 2005719 - DNA, 15 bp, Homo sapiens
accactgcaaaaaca

SEQ ID NO: 2005720 - DNA, 15 bp, Homo sapiens
ccactgcaaaaacat

SEQ ID NO: 2005721 - DNA, 15 bp, Homo sapiens
cactgcaaaaacata

SEQ ID NO: 2005722 - DNA, 15 bp, Homo sapiens
actgcaaaaacataa

SEQ ID NO: 2005723 - DNA, 15 bp, Homo sapiens
ctgcaaaaacataac

SEQ ID NO: 2005724 - DNA, 15 bp, Homo sapiens
tgcaaaaacataaca

SEQ ID NO: 2005725 - DNA, 15 bp, Homo sapiens
gcaaaaacataacaa

SEQ ID NO: 2005726 - DNA, 15 bp, Homo sapiens
caaaaacataacaaa

SEQ ID NO: 2005727 - DNA, 15 bp, Homo sapiens
aaaaacataacaaat

SEQ ID NO: 2005728 - DNA, 15 bp, Homo sapiens
aaaacataacaaatt

SEQ ID NO: 2005729 - DNA, 15 bp, Homo sapiens
aaacataacaaattg

SEQ ID NO: 2005730 - DNA, 15 bp, Homo sapiens
aacataacaaattgt

SEQ ID NO: 2005731 - DNA, 15 bp, Homo sapiens
acataacaaattgta

SEQ ID NO: 2005732 - DNA, 15 bp, Homo sapiens
cataacaaattgtaa

SEQ ID NO: 2005733 - DNA, 15 bp, Homo sapiens
ataacaaattgtaaa

SEQ ID NO: 2005734 - DNA, 15 bp, Homo sapiens
taacaaattgtaaag

SEQ ID NO: 2005735 - DNA, 15 bp, Homo sapiens
aacaaattgtaaaga

SEQ ID NO: 2005736 - DNA, 15 bp, Homo sapiens
acaaattgtaaagac

SEQ ID NO: 2005737 - DNA, 15 bp, Homo sapiens
caaattgtaaagacc

SEQ ID NO: 2005738 - DNA, 15 bp, Homo sapiens
aaattgtaaagacca

SEQ ID NO: 2005739 - DNA, 15 bp, Homo sapiens
aattgtaaagaccat

SEQ ID NO: 2005740 - DNA, 15 bp, Homo sapiens
attgtaaagaccatc

SEQ ID NO: 2005741 - DNA, 15 bp, Homo sapiens
ttgtaaagaccatct

SEQ ID NO: 2005742 - DNA, 15 bp, Homo sapiens
tgtaaagaccatcta

SEQ ID NO: 2005743 - DNA, 15 bp, Homo sapiens
gtaaagaccatctat

SEQ ID NO: 2005744 - DNA, 15 bp, Homo sapiens
taaagaccatctatg

SEQ ID NO: 2005745 - DNA, 15 bp, Homo sapiens
aaagaccatctatgc

SEQ ID NO: 2005746 - DNA, 15 bp, Homo sapiens
aagaccatctatgct

SEQ ID NO: 2005747 - DNA, 15 bp, Homo sapiens
agaccatctatgctg

SEQ ID NO: 2005748 - DNA, 15 bp, Homo sapiens
gaccatctatgctgt

SEQ ID NO: 2005749 - DNA, 15 bp, Homo sapiens
accatctatgctgtg

SEQ ID NO: 2005750 - DNA, 15 bp, Homo sapiens
ccatctatgctgtga

SEQ ID NO: 2005751 - DNA, 15 bp, Homo sapiens
catctatgctgtgaa

SEQ ID NO: 2005752 - DNA, 15 bp, Homo sapiens
atctatgctgtgaag

SEQ ID NO: 2005753 - DNA, 15 bp, Homo sapiens
tctatgctgtgaaga

SEQ ID NO: 2005754 - DNA, 15 bp, Homo sapiens
ctatgctgtgaagaa

SEQ ID NO: 2005755 - DNA, 15 bp, Homo sapiens
tatgctgtgaagaaa

SEQ ID NO: 2005756 - DNA, 15 bp, Homo sapiens
atgctgtgaagaaac

SEQ ID NO: 2005757 - DNA, 15 bp, Homo sapiens
tgctgtgaagaaact

SEQ ID NO: 2005758 - DNA, 15 bp, Homo sapiens
gctgtgaagaaactg

SEQ ID NO: 2005759 - DNA, 15 bp, Homo sapiens
ctgtgaagaaactgc

SEQ ID NO: 2005760 - DNA, 15 bp, Homo sapiens
tgtgaagaaactgca

SEQ ID NO: 2005761 - DNA, 15 bp, Homo sapiens
gtgaagaaactgcat

SEQ ID NO: 2005762 - DNA, 15 bp, Homo sapiens
tgaagaaactgcatc

SEQ ID NO: 2005763 - DNA, 15 bp, Homo sapiens
gaagaaactgcatca

SEQ ID NO: 2005764 - DNA, 15 bp, Homo sapiens
aagaaactgcatcaa

SEQ ID NO: 2005765 - DNA, 15 bp, Homo sapiens
agaaactgcatcaac

SEQ ID NO: 2005766 - DNA, 15 bp, Homo sapiens
gaaactgcatcaact

SEQ ID NO: 2005767 - DNA, 15 bp, Homo sapiens
aaactgcatcaacta

SEQ ID NO: 2005768 - DNA, 15 bp, Homo sapiens
aactgcatcaactaa

SEQ ID NO: 2005769 - DNA, 15 bp, Homo sapiens
actgcatcaactaat

SEQ ID NO: 2005770 - DNA, 15 bp, Homo sapiens
ctgcatcaactaatg

SEQ ID NO: 2005771 - DNA, 15 bp, Homo sapiens
tgcatcaactaatgg

SEQ ID NO: 2005772 - DNA, 15 bp, Homo sapiens
gcatcaactaatggg

SEQ ID NO: 2005773 - DNA, 15 bp, Homo sapiens
catcaactaatgggc

SEQ ID NO: 2005774 - DNA, 15 bp, Homo sapiens
atcaactaatgggct

SEQ ID NO: 2005775 - DNA, 15 bp, Homo sapiens
tcaactaatgggcta

SEQ ID NO: 2005776 - DNA, 15 bp, Homo sapiens
caactaatgggctaa

SEQ ID NO: 2005777 - DNA, 15 bp, Homo sapiens
aactaatgggctaaa

SEQ ID NO: 2005778 - DNA, 15 bp, Homo sapiens
actaatgggctaaat

SEQ ID NO: 2005779 - DNA, 15 bp, Homo sapiens
ctaatgggctaaata

SEQ ID NO: 2005780 - DNA, 15 bp, Homo sapiens
taatgggctaaataa

SEQ ID NO: 2005781 - DNA, 15 bp, Homo sapiens
aatgggctaaataac

SEQ ID NO: 2005782 - DNA, 15 bp, Homo sapiens
atgggctaaataacc

SEQ ID NO: 2005783 - DNA, 15 bp, Homo sapiens
tgggctaaataacca

SEQ ID NO: 2005784 - DNA, 15 bp, Homo sapiens
gggctaaataaccag

SEQ ID NO: 2005785 - DNA, 15 bp, Homo sapiens
ggctaaataaccagc

SEQ ID NO: 2005786 - DNA, 15 bp, Homo sapiens
gctaaataaccagct

SEQ ID NO: 2005787 - DNA, 15 bp, Homo sapiens
ctaaataaccagcta

SEQ ID NO: 2005788 - DNA, 15 bp, Homo sapiens
taaataaccagctag

SEQ ID NO: 2005789 - DNA, 15 bp, Homo sapiens
aaataaccagctagc

SEQ ID NO: 2005790 - DNA, 15 bp, Homo sapiens
aataaccagctagca

SEQ ID NO: 2005791 - DNA, 15 bp, Homo sapiens
ataaccagctagcat

SEQ ID NO: 2005792 - DNA, 15 bp, Homo sapiens
taaccagctagcatc

SEQ ID NO: 2005793 - DNA, 15 bp, Homo sapiens
aaccagctagcatca

SEQ ID NO: 2005794 - DNA, 15 bp, Homo sapiens
accagctagcatcat

SEQ ID NO: 2005795 - DNA, 15 bp, Homo sapiens
ccagctagcatcata

SEQ ID NO: 2005796 - DNA, 15 bp, Homo sapiens
cagctagcatcataa

SEQ ID NO: 2005797 - DNA, 15 bp, Homo sapiens
agctagcatcataat

SEQ ID NO: 2005798 - DNA, 15 bp, Homo sapiens
gctagcatcataata

SEQ ID NO: 2005799 - DNA, 15 bp, Homo sapiens
ctagcatcataataa

SEQ ID NO: 2005800 - DNA, 15 bp, Homo sapiens
tagcatcataataac

SEQ ID NO: 2005801 - DNA, 15 bp, Homo sapiens
agcatcataataaca

SEQ ID NO: 2005802 - DNA, 15 bp, Homo sapiens
gcatcataataacaa

SEQ ID NO: 2005803 - DNA, 15 bp, Homo sapiens
catcataataacaaa

SEQ ID NO: 2005804 - DNA, 15 bp, Homo sapiens
atcataataacaaat

SEQ ID NO: 2005805 - DNA, 15 bp, Homo sapiens
tcataataacaaatt

SEQ ID NO: 2005806 - DNA, 15 bp, Homo sapiens
cataataacaaattc

SEQ ID NO: 2005807 - DNA, 15 bp, Homo sapiens
ataataacaaattca

SEQ ID NO: 2005808 - DNA, 15 bp, Homo sapiens
taataacaaattcac

SEQ ID NO: 2005809 - DNA, 15 bp, Homo sapiens
aataacaaattcaca

SEQ ID NO: 2005810 - DNA, 15 bp, Homo sapiens
ataacaaattcacac

SEQ ID NO: 2005811 - DNA, 15 bp, Homo sapiens
taacaaattcacaca

SEQ ID NO: 2005812 - DNA, 15 bp, Homo sapiens
aacaaattcacacat

SEQ ID NO: 2005813 - DNA, 15 bp, Homo sapiens
acaaattcacacata

SEQ ID NO: 2005814 - DNA, 15 bp, Homo sapiens
caaattcacacataa

SEQ ID NO: 2005815 - DNA, 15 bp, Homo sapiens
aaattcacacataac

SEQ ID NO: 2005816 - DNA, 15 bp, Homo sapiens
aattcacacataaca

SEQ ID NO: 2005817 - DNA, 15 bp, Homo sapiens
attcacacataacac

SEQ ID NO: 2005818 - DNA, 15 bp, Homo sapiens
ttcacacataacact

SEQ ID NO: 2005819 - DNA, 15 bp, Homo sapiens
tcacacataacacta

SEQ ID NO: 2005820 - DNA, 15 bp, Homo sapiens
cacacataacactat

SEQ ID NO: 2005821 - DNA, 15 bp, Homo sapiens
acacataacactatt

SEQ ID NO: 2005822 - DNA, 15 bp, Homo sapiens
cacataacactatta

SEQ ID NO: 2005823 - DNA, 15 bp, Homo sapiens
acataacactattaa

SEQ ID NO: 2005824 - DNA, 15 bp, Homo sapiens
cataacactattaac

SEQ ID NO: 2005825 - DNA, 15 bp, Homo sapiens
ataacactattaacc

SEQ ID NO: 2005826 - DNA, 15 bp, Homo sapiens
taacactattaacct

SEQ ID NO: 2005827 - DNA, 15 bp, Homo sapiens
aacactattaacctt

SEQ ID NO: 2005828 - DNA, 15 bp, Homo sapiens
acactattaacctta

SEQ ID NO: 2005829 - DNA, 15 bp, Homo sapiens
cactattaaccttaa

SEQ ID NO: 2005830 - DNA, 15 bp, Homo sapiens
actattaaccttaaa

SEQ ID NO: 2005831 - DNA, 15 bp, Homo sapiens
ctattaaccttaaat

SEQ ID NO: 2005832 - DNA, 15 bp, Homo sapiens
tattaaccttaaatg

SEQ ID NO: 2005833 - DNA, 15 bp, Homo sapiens
attaaccttaaatgt

SEQ ID NO: 2005834 - DNA, 15 bp, Homo sapiens
ttaaccttaaatgta

SEQ ID NO: 2005835 - DNA, 15 bp, Homo sapiens
taaccttaaatgtaa

SEQ ID NO: 2005836 - DNA, 15 bp, Homo sapiens
aaccttaaatgtaaa

SEQ ID NO: 2005837 - DNA, 15 bp, Homo sapiens
accttaaatgtaaac

SEQ ID NO: 2005838 - DNA, 15 bp, Homo sapiens
ccttaaatgtaaacg

SEQ ID NO: 2005839 - DNA, 15 bp, Homo sapiens
cttaaatgtaaacgg

SEQ ID NO: 2005840 - DNA, 15 bp, Homo sapiens
ttaaatgtaaacggg

SEQ ID NO: 2005841 - DNA, 15 bp, Homo sapiens
taaatgtaaacgggc

SEQ ID NO: 2005842 - DNA, 15 bp, Homo sapiens
aaatgtaaacgggct

SEQ ID NO: 2005843 - DNA, 15 bp, Homo sapiens
aatgtaaacgggcta

SEQ ID NO: 2005844 - DNA, 15 bp, Homo sapiens
atgtaaacgggctaa

SEQ ID NO: 2005845 - DNA, 15 bp, Homo sapiens
tgtaaacgggctaaa

SEQ ID NO: 2005846 - DNA, 15 bp, Homo sapiens
gtaaacgggctaaat

SEQ ID NO: 2005847 - DNA, 15 bp, Homo sapiens
taaacgggctaaatg

SEQ ID NO: 2005848 - DNA, 15 bp, Homo sapiens
aaacgggctaaatgc

SEQ ID NO: 2005849 - DNA, 15 bp, Homo sapiens
aacgggctaaatgcc

SEQ ID NO: 2005850 - DNA, 15 bp, Homo sapiens
acgggctaaatgccc

SEQ ID NO: 2005851 - DNA, 15 bp, Homo sapiens
cgggctaaatgcccc

SEQ ID NO: 2005852 - DNA, 15 bp, Homo sapiens
gggctaaatgcccca

SEQ ID NO: 2005853 - DNA, 15 bp, Homo sapiens
ggctaaatgccccaa

SEQ ID NO: 2005854 - DNA, 15 bp, Homo sapiens
gctaaatgccccaat

SEQ ID NO: 2005855 - DNA, 15 bp, Homo sapiens
ctaaatgccccaatt

SEQ ID NO: 2005856 - DNA, 15 bp, Homo sapiens
taaatgccccaatta

SEQ ID NO: 2005857 - DNA, 15 bp, Homo sapiens
aaatgccccaattaa

SEQ ID NO: 2005858 - DNA, 15 bp, Homo sapiens
aatgccccaattaaa

SEQ ID NO: 2005859 - DNA, 15 bp, Homo sapiens
atgccccaattaaaa

SEQ ID NO: 2005860 - DNA, 15 bp, Homo sapiens
tgccccaattaaaag

SEQ ID NO: 2005861 - DNA, 15 bp, Homo sapiens
gccccaattaaaaga

SEQ ID NO: 2005862 - DNA, 15 bp, Homo sapiens
ccccaattaaaagac

SEQ ID NO: 2005863 - DNA, 15 bp, Homo sapiens
cccaattaaaagaca

SEQ ID NO: 2005864 - DNA, 15 bp, Homo sapiens
ccaattaaaagacac

SEQ ID NO: 2005865 - DNA, 15 bp, Homo sapiens
caattaaaagacaca

SEQ ID NO: 2005866 - DNA, 15 bp, Homo sapiens
aattaaaagacacag

SEQ ID NO: 2005867 - DNA, 15 bp, Homo sapiens
attaaaagacacaga

SEQ ID NO: 2005868 - DNA, 15 bp, Homo sapiens
ttaaaagacacagac

SEQ ID NO: 2005869 - DNA, 15 bp, Homo sapiens
taaaagacacagact

SEQ ID NO: 2005870 - DNA, 15 bp, Homo sapiens
aaaagacacagactg

SEQ ID NO: 2005871 - DNA, 15 bp, Homo sapiens
aaagacacagactgg

SEQ ID NO: 2005872 - DNA, 15 bp, Homo sapiens
aagacacagactggc

SEQ ID NO: 2005873 - DNA, 15 bp, Homo sapiens
agacacagactggca

SEQ ID NO: 2005874 - DNA, 15 bp, Homo sapiens
gacacagactggcaa

SEQ ID NO: 2005875 - DNA, 15 bp, Homo sapiens
acacagactggcaaa

SEQ ID NO: 2005876 - DNA, 15 bp, Homo sapiens
cacagactggcaaat

SEQ ID NO: 2005877 - DNA, 15 bp, Homo sapiens
acagactggcaaatt

SEQ ID NO: 2005878 - DNA, 15 bp, Homo sapiens
cagactggcaaattg

SEQ ID NO: 2005879 - DNA, 15 bp, Homo sapiens
agactggcaaattgg

SEQ ID NO: 2005880 - DNA, 15 bp, Homo sapiens
gactggcaaattgga

SEQ ID NO: 2005881 - DNA, 15 bp, Homo sapiens
actggcaaattggat

SEQ ID NO: 2005882 - DNA, 15 bp, Homo sapiens
ctggcaaattggata

SEQ ID NO: 2005883 - DNA, 15 bp, Homo sapiens
tggcaaattggataa

SEQ ID NO: 2005884 - DNA, 15 bp, Homo sapiens
ggcaaattggataaa

SEQ ID NO: 2005885 - DNA, 15 bp, Homo sapiens
gcaaattggataaag

SEQ ID NO: 2005886 - DNA, 15 bp, Homo sapiens
caaattggataaaga

SEQ ID NO: 2005887 - DNA, 15 bp, Homo sapiens
aaattggataaagag

SEQ ID NO: 2005888 - DNA, 15 bp, Homo sapiens
aattggataaagagt

SEQ ID NO: 2005889 - DNA, 15 bp, Homo sapiens
attggataaagagtc

SEQ ID NO: 2005890 - DNA, 15 bp, Homo sapiens
ttggataaagagtca

SEQ ID NO: 2005891 - DNA, 15 bp, Homo sapiens
tggataaagagtcaa

SEQ ID NO: 2005892 - DNA, 15 bp, Homo sapiens
ggataaagagtcaag

SEQ ID NO: 2005893 - DNA, 15 bp, Homo sapiens
gataaagagtcaaga

SEQ ID NO: 2005894 - DNA, 15 bp, Homo sapiens
ataaagagtcaagac

SEQ ID NO: 2005895 - DNA, 15 bp, Homo sapiens
taaagagtcaagacc

SEQ ID NO: 2005896 - DNA, 15 bp, Homo sapiens
aaagagtcaagaccc

SEQ ID NO: 2005897 - DNA, 15 bp, Homo sapiens
aagagtcaagaccca

SEQ ID NO: 2005898 - DNA, 15 bp, Homo sapiens
agagtcaagacccat

SEQ ID NO: 2005899 - DNA, 15 bp, Homo sapiens
gagtcaagacccatc

SEQ ID NO: 2005900 - DNA, 15 bp, Homo sapiens
agtcaagacccatca

SEQ ID NO: 2005901 - DNA, 15 bp, Homo sapiens
gtcaagacccatcac

SEQ ID NO: 2005902 - DNA, 15 bp, Homo sapiens
tcaagacccatcact

SEQ ID NO: 2005903 - DNA, 15 bp, Homo sapiens
caagacccatcactg

SEQ ID NO: 2005904 - DNA, 15 bp, Homo sapiens
aagacccatcactgt

SEQ ID NO: 2005905 - DNA, 15 bp, Homo sapiens
agacccatcactgtg

SEQ ID NO: 2005906 - DNA, 15 bp, Homo sapiens
gacccatcactgtgc

SEQ ID NO: 2005907 - DNA, 15 bp, Homo sapiens
acccatcactgtgct

SEQ ID NO: 2005908 - DNA, 15 bp, Homo sapiens
cccatcactgtgctg

SEQ ID NO: 2005909 - DNA, 15 bp, Homo sapiens
ccatcactgtgctgt

SEQ ID NO: 2005910 - DNA, 15 bp, Homo sapiens
catcactgtgctgta

SEQ ID NO: 2005911 - DNA, 15 bp, Homo sapiens
atcactgtgctgtat

SEQ ID NO: 2005912 - DNA, 15 bp, Homo sapiens
tcactgtgctgtatt

SEQ ID NO: 2005913 - DNA, 15 bp, Homo sapiens
cactgtgctgtattc

SEQ ID NO: 2005914 - DNA, 15 bp, Homo sapiens
actgtgctgtattca

SEQ ID NO: 2005915 - DNA, 15 bp, Homo sapiens
ctgtgctgtattcag

SEQ ID NO: 2005916 - DNA, 15 bp, Homo sapiens
tgtgctgtattcagg

SEQ ID NO: 2005917 - DNA, 15 bp, Homo sapiens
gtgctgtattcagga

SEQ ID NO: 2005918 - DNA, 15 bp, Homo sapiens
tgctgtattcaggag

SEQ ID NO: 2005919 - DNA, 15 bp, Homo sapiens
gctgtattcaggaga

SEQ ID NO: 2005920 - DNA, 15 bp, Homo sapiens
ctgtattcaggagac

SEQ ID NO: 2005921 - DNA, 15 bp, Homo sapiens
tgtattcaggagacc

SEQ ID NO: 2005922 - DNA, 15 bp, Homo sapiens
gtattcaggagaccc

SEQ ID NO: 2005923 - DNA, 15 bp, Homo sapiens
tattcaggagaccca

SEQ ID NO: 2005924 - DNA, 15 bp, Homo sapiens
attcaggagacccat

SEQ ID NO: 2005925 - DNA, 15 bp, Homo sapiens
ttcaggagacccatc

SEQ ID NO: 2005926 - DNA, 15 bp, Homo sapiens
tcaggagacccatct

SEQ ID NO: 2005927 - DNA, 15 bp, Homo sapiens
caggagacccatctc

SEQ ID NO: 2005928 - DNA, 15 bp, Homo sapiens
aggagacccatctca

SEQ ID NO: 2005929 - DNA, 15 bp, Homo sapiens
ggagacccatctcac

SEQ ID NO: 2005930 - DNA, 15 bp, Homo sapiens
gagacccatctcaca

SEQ ID NO: 2005931 - DNA, 15 bp, Homo sapiens
agacccatctcacat

SEQ ID NO: 2005932 - DNA, 15 bp, Homo sapiens
gacccatctcacatg

SEQ ID NO: 2005933 - DNA, 15 bp, Homo sapiens
acccatctcacatgc

SEQ ID NO: 2005934 - DNA, 15 bp, Homo sapiens
cccatctcacatgca

SEQ ID NO: 2005935 - DNA, 15 bp, Homo sapiens
ccatctcacatgcaa

SEQ ID NO: 2005936 - DNA, 15 bp, Homo sapiens
catctcacatgcaaa

SEQ ID NO: 2005937 - DNA, 15 bp, Homo sapiens
atctcacatgcaaag

SEQ ID NO: 2005938 - DNA, 15 bp, Homo sapiens
tctcacatgcaaagt

SEQ ID NO: 2005939 - DNA, 15 bp, Homo sapiens
ctcacatgcaaagtt

SEQ ID NO: 2005940 - DNA, 15 bp, Homo sapiens
tcacatgcaaagtta

SEQ ID NO: 2005941 - DNA, 15 bp, Homo sapiens
cacatgcaaagttac

SEQ ID NO: 2005942 - DNA, 15 bp, Homo sapiens
acatgcaaagttaca

SEQ ID NO: 2005943 - DNA, 15 bp, Homo sapiens
catgcaaagttacac

SEQ ID NO: 2005944 - DNA, 15 bp, Homo sapiens
atgcaaagttacaca

SEQ ID NO: 2005945 - DNA, 15 bp, Homo sapiens
tgcaaagttacacat

SEQ ID NO: 2005946 - DNA, 15 bp, Homo sapiens
gcaaagttacacata

SEQ ID NO: 2005947 - DNA, 15 bp, Homo sapiens
caaagttacacatag

SEQ ID NO: 2005948 - DNA, 15 bp, Homo sapiens
aaagttacacatagg

SEQ ID NO: 2005949 - DNA, 15 bp, Homo sapiens
aagttacacataggc

SEQ ID NO: 2005950 - DNA, 15 bp, Homo sapiens
agttacacataggct

SEQ ID NO: 2005951 - DNA, 15 bp, Homo sapiens
gttacacataggctc

SEQ ID NO: 2005952 - DNA, 15 bp, Homo sapiens
ttacacataggctca

SEQ ID NO: 2005953 - DNA, 15 bp, Homo sapiens
tacacataggctcaa

SEQ ID NO: 2005954 - DNA, 15 bp, Homo sapiens
acacataggctcaaa

SEQ ID NO: 2005955 - DNA, 15 bp, Homo sapiens
cacataggctcaaaa

SEQ ID NO: 2005956 - DNA, 15 bp, Homo sapiens
acataggctcaaaat

SEQ ID NO: 2005957 - DNA, 15 bp, Homo sapiens
cataggctcaaaata

SEQ ID NO: 2005958 - DNA, 15 bp, Homo sapiens
ataggctcaaaataa

SEQ ID NO: 2005959 - DNA, 15 bp, Homo sapiens
taggctcaaaataaa

SEQ ID NO: 2005960 - DNA, 15 bp, Homo sapiens
aggctcaaaataaag

SEQ ID NO: 2005961 - DNA, 15 bp, Homo sapiens
ggctcaaaataaagg

SEQ ID NO: 2005962 - DNA, 15 bp, Homo sapiens
gctcaaaataaaggg

SEQ ID NO: 2005963 - DNA, 15 bp, Homo sapiens
ctcaaaataaagggt

SEQ ID NO: 2005964 - DNA, 15 bp, Homo sapiens
tcaaaataaagggtt

SEQ ID NO: 2005965 - DNA, 15 bp, Homo sapiens
caaaataaagggttg

SEQ ID NO: 2005966 - DNA, 15 bp, Homo sapiens
aaaataaagggttgg

SEQ ID NO: 2005967 - DNA, 15 bp, Homo sapiens
aaataaagggttgga

SEQ ID NO: 2005968 - DNA, 15 bp, Homo sapiens
aataaagggttggag

SEQ ID NO: 2005969 - DNA, 15 bp, Homo sapiens
ataaagggttggagg

SEQ ID NO: 2005970 - DNA, 15 bp, Homo sapiens
taaagggttggagga

SEQ ID NO: 2005971 - DNA, 15 bp, Homo sapiens
aaagggttggaggaa

SEQ ID NO: 2005972 - DNA, 15 bp, Homo sapiens
aagggttggaggaag

SEQ ID NO: 2005973 - DNA, 15 bp, Homo sapiens
agggttggaggaaga

SEQ ID NO: 2005974 - DNA, 15 bp, Homo sapiens
gggttggaggaagat

SEQ ID NO: 2005975 - DNA, 15 bp, Homo sapiens
ggttggaggaagatt

SEQ ID NO: 2005976 - DNA, 15 bp, Homo sapiens
gttggaggaagattt

SEQ ID NO: 2005977 - DNA, 15 bp, Homo sapiens
ttggaggaagattta

SEQ ID NO: 2005978 - DNA, 15 bp, Homo sapiens
tggaggaagatttac

SEQ ID NO: 2005979 - DNA, 15 bp, Homo sapiens
ggaggaagatttacc

SEQ ID NO: 2005980 - DNA, 15 bp, Homo sapiens
gaggaagatttacca

SEQ ID NO: 2005981 - DNA, 15 bp, Homo sapiens
aggaagatttaccaa

SEQ ID NO: 2005982 - DNA, 15 bp, Homo sapiens
ggaagatttaccaag

SEQ ID NO: 2005983 - DNA, 15 bp, Homo sapiens
gaagatttaccaagc

SEQ ID NO: 2005984 - DNA, 15 bp, Homo sapiens
aagatttaccaagca

SEQ ID NO: 2005985 - DNA, 15 bp, Homo sapiens
agatttaccaagcaa

SEQ ID NO: 2005986 - DNA, 15 bp, Homo sapiens
gatttaccaagcaaa

SEQ ID NO: 2005987 - DNA, 15 bp, Homo sapiens
atttaccaagcaaat

SEQ ID NO: 2005988 - DNA, 15 bp, Homo sapiens
tttaccaagcaaatg

SEQ ID NO: 2005989 - DNA, 15 bp, Homo sapiens
ttaccaagcaaatgg

SEQ ID NO: 2005990 - DNA, 15 bp, Homo sapiens
taccaagcaaatgga

SEQ ID NO: 2005991 - DNA, 15 bp, Homo sapiens
accaagcaaatggaa

SEQ ID NO: 2005992 - DNA, 15 bp, Homo sapiens
ccaagcaaatggaaa

SEQ ID NO: 2005993 - DNA, 15 bp, Homo sapiens
caagcaaatggaaag

SEQ ID NO: 2005994 - DNA, 15 bp, Homo sapiens
aagcaaatggaaagc

SEQ ID NO: 2005995 - DNA, 15 bp, Homo sapiens
agcaaatggaaagca

SEQ ID NO: 2005996 - DNA, 15 bp, Homo sapiens
gcaaatggaaagcaa

SEQ ID NO: 2005997 - DNA, 15 bp, Homo sapiens
caaatggaaagcaaa

SEQ ID NO: 2005998 - DNA, 15 bp, Homo sapiens
aaatggaaagcaaaa

SEQ ID NO: 2005999 - DNA, 15 bp, Homo sapiens
aatggaaagcaaaaa

SEQ ID NO: 2006000 - DNA, 15 bp, Homo sapiens
atggaaagcaaaaaa

SEQ ID NO: 2006001 - DNA, 15 bp, Homo sapiens
tggaaagcaaaaaaa

SEQ ID NO: 2006002 - DNA, 15 bp, Homo sapiens
ggaaagcaaaaaaaa

SEQ ID NO: 2006003 - DNA, 15 bp, Homo sapiens
gaaagcaaaaaaaag

SEQ ID NO: 2006004 - DNA, 15 bp, Homo sapiens
aaagcaaaaaaaagt

SEQ ID NO: 2006005 - DNA, 15 bp, Homo sapiens
aagcaaaaaaaagta

SEQ ID NO: 2006006 - DNA, 15 bp, Homo sapiens
agcaaaaaaaagtag

SEQ ID NO: 2006007 - DNA, 15 bp, Homo sapiens
gcaaaaaaaagtagg

SEQ ID NO: 2006008 - DNA, 15 bp, Homo sapiens
caaaaaaaagtaggg

SEQ ID NO: 2006009 - DNA, 15 bp, Homo sapiens
aaaaaaaagtagggt

SEQ ID NO: 2006010 - DNA, 15 bp, Homo sapiens
aaaaaaagtagggtt

SEQ ID NO: 2006011 - DNA, 15 bp, Homo sapiens
aaaaaagtagggttg

SEQ ID NO: 2006012 - DNA, 15 bp, Homo sapiens
aaaaagtagggttgc

SEQ ID NO: 2006013 - DNA, 15 bp, Homo sapiens
aaaagtagggttgca

SEQ ID NO: 2006014 - DNA, 15 bp, Homo sapiens
aaagtagggttgcaa

SEQ ID NO: 2006015 - DNA, 15 bp, Homo sapiens
aagtagggttgcaat

SEQ ID NO: 2006016 - DNA, 15 bp, Homo sapiens
agtagggttgcaatc

SEQ ID NO: 2006017 - DNA, 15 bp, Homo sapiens
gtagggttgcaatcc

SEQ ID NO: 2006018 - DNA, 15 bp, Homo sapiens
tagggttgcaatcct

SEQ ID NO: 2006019 - DNA, 15 bp, Homo sapiens
agggttgcaatccta

SEQ ID NO: 2006020 - DNA, 15 bp, Homo sapiens
gggttgcaatcctag

SEQ ID NO: 2006021 - DNA, 15 bp, Homo sapiens
ggttgcaatcctagt

SEQ ID NO: 2006022 - DNA, 15 bp, Homo sapiens
gttgcaatcctagtc

SEQ ID NO: 2006023 - DNA, 15 bp, Homo sapiens
ttgcaatcctagtct

SEQ ID NO: 2006024 - DNA, 15 bp, Homo sapiens
tgcaatcctagtctc

SEQ ID NO: 2006025 - DNA, 15 bp, Homo sapiens
gcaatcctagtctct

SEQ ID NO: 2006026 - DNA, 15 bp, Homo sapiens
caatcctagtctctg

SEQ ID NO: 2006027 - DNA, 15 bp, Homo sapiens
aatcctagtctctga

SEQ ID NO: 2006028 - DNA, 15 bp, Homo sapiens
atcctagtctctgat

SEQ ID NO: 2006029 - DNA, 15 bp, Homo sapiens
tcctagtctctgata

SEQ ID NO: 2006030 - DNA, 15 bp, Homo sapiens
cctagtctctgataa

SEQ ID NO: 2006031 - DNA, 15 bp, Homo sapiens
ctagtctctgataaa

SEQ ID NO: 2006032 - DNA, 15 bp, Homo sapiens
tagtctctgataaaa

SEQ ID NO: 2006033 - DNA, 15 bp, Homo sapiens
agtctctgataaaac

SEQ ID NO: 2006034 - DNA, 15 bp, Homo sapiens
gtctctgataaaaca

SEQ ID NO: 2006035 - DNA, 15 bp, Homo sapiens
tctctgataaaacag

SEQ ID NO: 2006036 - DNA, 15 bp, Homo sapiens
ctctgataaaacaga

SEQ ID NO: 2006037 - DNA, 15 bp, Homo sapiens
tctgataaaacagac

SEQ ID NO: 2006038 - DNA, 15 bp, Homo sapiens
ctgataaaacagact

SEQ ID NO: 2006039 - DNA, 15 bp, Homo sapiens
tgataaaacagactt

SEQ ID NO: 2006040 - DNA, 15 bp, Homo sapiens
gataaaacagacttt

SEQ ID NO: 2006041 - DNA, 15 bp, Homo sapiens
ataaaacagacttta

SEQ ID NO: 2006042 - DNA, 15 bp, Homo sapiens
taaaacagactttaa

SEQ ID NO: 2006043 - DNA, 15 bp, Homo sapiens
aaaacagactttaaa

SEQ ID NO: 2006044 - DNA, 15 bp, Homo sapiens
aaacagactttaaac

SEQ ID NO: 2006045 - DNA, 15 bp, Homo sapiens
aacagactttaaacc

SEQ ID NO: 2006046 - DNA, 15 bp, Homo sapiens
acagactttaaacca

SEQ ID NO: 2006047 - DNA, 15 bp, Homo sapiens
cagactttaaaccaa

SEQ ID NO: 2006048 - DNA, 15 bp, Homo sapiens
agactttaaaccaac

SEQ ID NO: 2006049 - DNA, 15 bp, Homo sapiens
gactttaaaccaaca

SEQ ID NO: 2006050 - DNA, 15 bp, Homo sapiens
actttaaaccaacaa

SEQ ID NO: 2006051 - DNA, 15 bp, Homo sapiens
ctttaaaccaacaaa

SEQ ID NO: 2006052 - DNA, 15 bp, Homo sapiens
tttaaaccaacaaaa

SEQ ID NO: 2006053 - DNA, 15 bp, Homo sapiens
ttaaaccaacaaaaa

SEQ ID NO: 2006054 - DNA, 15 bp, Homo sapiens
taaaccaacaaaaaa

SEQ ID NO: 2006055 - DNA, 15 bp, Homo sapiens
aaaccaacaaaaaag

SEQ ID NO: 2006056 - DNA, 15 bp, Homo sapiens
aaccaacaaaaaaga

SEQ ID NO: 2006057 - DNA, 15 bp, Homo sapiens
accaacaaaaaagat

SEQ ID NO: 2006058 - DNA, 15 bp, Homo sapiens
ccaacaaaaaagatc

SEQ ID NO: 2006059 - DNA, 15 bp, Homo sapiens
caacaaaaaagatca

SEQ ID NO: 2006060 - DNA, 15 bp, Homo sapiens
aacaaaaaagatcaa

SEQ ID NO: 2006061 - DNA, 15 bp, Homo sapiens
acaaaaaagatcaaa

SEQ ID NO: 2006062 - DNA, 15 bp, Homo sapiens
caaaaaagatcaaaa

SEQ ID NO: 2006063 - DNA, 15 bp, Homo sapiens
aaaaaagatcaaaag

SEQ ID NO: 2006064 - DNA, 15 bp, Homo sapiens
aaaaagatcaaaaga

SEQ ID NO: 2006065 - DNA, 15 bp, Homo sapiens
aaaagatcaaaagag

SEQ ID NO: 2006066 - DNA, 15 bp, Homo sapiens
aaagatcaaaagagt

SEQ ID NO: 2006067 - DNA, 15 bp, Homo sapiens
aagatcaaaagagtc

SEQ ID NO: 2006068 - DNA, 15 bp, Homo sapiens
agatcaaaagagtca

SEQ ID NO: 2006069 - DNA, 15 bp, Homo sapiens
gatcaaaagagtcaa

SEQ ID NO: 2006070 - DNA, 15 bp, Homo sapiens
atcaaaagagtcaaa

SEQ ID NO: 2006071 - DNA, 15 bp, Homo sapiens
aaaagagtcaaagaa

SEQ ID NO: 2006072 - DNA, 15 bp, Homo sapiens
aaagagtcaaagaag

SEQ ID NO: 2006073 - DNA, 15 bp, Homo sapiens
agagtcaaagaaggg

SEQ ID NO: 2006074 - DNA, 15 bp, Homo sapiens
gagtcaaagaagggt

SEQ ID NO: 2006075 - DNA, 15 bp, Homo sapiens
agtcaaagaagggta

SEQ ID NO: 2006076 - DNA, 15 bp, Homo sapiens
gtcaaagaagggtat

SEQ ID NO: 2006077 - DNA, 15 bp, Homo sapiens
tcaaagaagggtatt

SEQ ID NO: 2006078 - DNA, 15 bp, Homo sapiens
caaagaagggtatta

SEQ ID NO: 2006079 - DNA, 15 bp, Homo sapiens
aaagaagggtattac

SEQ ID NO: 2006080 - DNA, 15 bp, Homo sapiens
aagaagggtattaca

SEQ ID NO: 2006081 - DNA, 15 bp, Homo sapiens
agaagggtattacat

SEQ ID NO: 2006082 - DNA, 15 bp, Homo sapiens
gaagggtattacata

SEQ ID NO: 2006083 - DNA, 15 bp, Homo sapiens
aagggtattacataa

SEQ ID NO: 2006084 - DNA, 15 bp, Homo sapiens
agggtattacataat

SEQ ID NO: 2006085 - DNA, 15 bp, Homo sapiens
gggtattacataatg

SEQ ID NO: 2006086 - DNA, 15 bp, Homo sapiens
ggtattacataatgg

SEQ ID NO: 2006087 - DNA, 15 bp, Homo sapiens
gtattacataatggt

SEQ ID NO: 2006088 - DNA, 15 bp, Homo sapiens
tattacataatggta

SEQ ID NO: 2006089 - DNA, 15 bp, Homo sapiens
attacataatggtaa

SEQ ID NO: 2006090 - DNA, 15 bp, Homo sapiens
ttacataatggtaaa

SEQ ID NO: 2006091 - DNA, 15 bp, Homo sapiens
tacataatggtaaag

SEQ ID NO: 2006092 - DNA, 15 bp, Homo sapiens
acataatggtaaaga

SEQ ID NO: 2006093 - DNA, 15 bp, Homo sapiens
cataatggtaaagag

SEQ ID NO: 2006094 - DNA, 15 bp, Homo sapiens
ataatggtaaagaga

SEQ ID NO: 2006095 - DNA, 15 bp, Homo sapiens
taatggtaaagagat

SEQ ID NO: 2006096 - DNA, 15 bp, Homo sapiens
aatggtaaagagatc

SEQ ID NO: 2006097 - DNA, 15 bp, Homo sapiens
atggtaaagagatca

SEQ ID NO: 2006098 - DNA, 15 bp, Homo sapiens
tggtaaagagatcag

SEQ ID NO: 2006099 - DNA, 15 bp, Homo sapiens
ggtaaagagatcagt

SEQ ID NO: 2006100 - DNA, 15 bp, Homo sapiens
gtaaagagatcagtg

SEQ ID NO: 2006101 - DNA, 15 bp, Homo sapiens
taaagagatcagtgc

SEQ ID NO: 2006102 - DNA, 15 bp, Homo sapiens
aaagagatcagtgca

SEQ ID NO: 2006103 - DNA, 15 bp, Homo sapiens
aagagatcagtgcaa

SEQ ID NO: 2006104 - DNA, 15 bp, Homo sapiens
agagatcagtgcaac

SEQ ID NO: 2006105 - DNA, 15 bp, Homo sapiens
gagatcagtgcaaca

SEQ ID NO: 2006106 - DNA, 15 bp, Homo sapiens
agatcagtgcaacaa

SEQ ID NO: 2006107 - DNA, 15 bp, Homo sapiens
gatcagtgcaacaac

SEQ ID NO: 2006108 - DNA, 15 bp, Homo sapiens
atcagtgcaacaaca

SEQ ID NO: 2006109 - DNA, 15 bp, Homo sapiens
tcagtgcaacaacaa

SEQ ID NO: 2006110 - DNA, 15 bp, Homo sapiens
cagtgcaacaacaag

SEQ ID NO: 2006111 - DNA, 15 bp, Homo sapiens
agtgcaacaacaaga

SEQ ID NO: 2006112 - DNA, 15 bp, Homo sapiens
gtgcaacaacaagag

SEQ ID NO: 2006113 - DNA, 15 bp, Homo sapiens
tgcaacaacaagagc

SEQ ID NO: 2006114 - DNA, 15 bp, Homo sapiens
gcaacaacaagagct

SEQ ID NO: 2006115 - DNA, 15 bp, Homo sapiens
caacaacaagagcta

SEQ ID NO: 2006116 - DNA, 15 bp, Homo sapiens
aacaacaagagctaa

SEQ ID NO: 2006117 - DNA, 15 bp, Homo sapiens
acaacaagagctaac

SEQ ID NO: 2006118 - DNA, 15 bp, Homo sapiens
caacaagagctaact

SEQ ID NO: 2006119 - DNA, 15 bp, Homo sapiens
aacaagagctaacta

SEQ ID NO: 2006120 - DNA, 15 bp, Homo sapiens
acaagagctaactac

SEQ ID NO: 2006121 - DNA, 15 bp, Homo sapiens
caagagctaactacc

SEQ ID NO: 2006122 - DNA, 15 bp, Homo sapiens
aagagctaactaccc

SEQ ID NO: 2006123 - DNA, 15 bp, Homo sapiens
agagctaactaccct

SEQ ID NO: 2006124 - DNA, 15 bp, Homo sapiens
gagctaactacccta

SEQ ID NO: 2006125 - DNA, 15 bp, Homo sapiens
agctaactaccctaa

SEQ ID NO: 2006126 - DNA, 15 bp, Homo sapiens
gctaactaccctaaa

SEQ ID NO: 2006127 - DNA, 15 bp, Homo sapiens
ctaactaccctaaat

SEQ ID NO: 2006128 - DNA, 15 bp, Homo sapiens
taactaccctaaata

SEQ ID NO: 2006129 - DNA, 15 bp, Homo sapiens
aactaccctaaatat

SEQ ID NO: 2006130 - DNA, 15 bp, Homo sapiens
actaccctaaatata

SEQ ID NO: 2006131 - DNA, 15 bp, Homo sapiens
ctaccctaaatatat

SEQ ID NO: 2006132 - DNA, 15 bp, Homo sapiens
taccctaaatatata

SEQ ID NO: 2006133 - DNA, 15 bp, Homo sapiens
accctaaatatatat

SEQ ID NO: 2006134 - DNA, 15 bp, Homo sapiens
ccctaaatatatatg

SEQ ID NO: 2006135 - DNA, 15 bp, Homo sapiens
cctaaatatatatgc

SEQ ID NO: 2006136 - DNA, 15 bp, Homo sapiens
ctaaatatatatgca

SEQ ID NO: 2006137 - DNA, 15 bp, Homo sapiens
taaatatatatgcac

SEQ ID NO: 2006138 - DNA, 15 bp, Homo sapiens
aaatatatatgcacc

SEQ ID NO: 2006139 - DNA, 15 bp, Homo sapiens
aatatatatgcaccc

SEQ ID NO: 2006140 - DNA, 15 bp, Homo sapiens
atatatatgcaccca

SEQ ID NO: 2006141 - DNA, 15 bp, Homo sapiens
tatatatgcacccaa

SEQ ID NO: 2006142 - DNA, 15 bp, Homo sapiens
atatatgcacccaat

SEQ ID NO: 2006143 - DNA, 15 bp, Homo sapiens
tatatgcacccaata

SEQ ID NO: 2006144 - DNA, 15 bp, Homo sapiens
atatgcacccaatac

SEQ ID NO: 2006145 - DNA, 15 bp, Homo sapiens
tatgcacccaataca

SEQ ID NO: 2006146 - DNA, 15 bp, Homo sapiens
atgcacccaatacag

SEQ ID NO: 2006147 - DNA, 15 bp, Homo sapiens
tgcacccaatacagg

SEQ ID NO: 2006148 - DNA, 15 bp, Homo sapiens
gcacccaatacagga

SEQ ID NO: 2006149 - DNA, 15 bp, Homo sapiens
cacccaatacaggaa

SEQ ID NO: 2006150 - DNA, 15 bp, Homo sapiens
acccaatacaggaac

SEQ ID NO: 2006151 - DNA, 15 bp, Homo sapiens
cccaatacaggaaca

SEQ ID NO: 2006152 - DNA, 15 bp, Homo sapiens
ccaatacaggaacac

SEQ ID NO: 2006153 - DNA, 15 bp, Homo sapiens
caatacaggaacacc

SEQ ID NO: 2006154 - DNA, 15 bp, Homo sapiens
aatacaggaacaccc

SEQ ID NO: 2006155 - DNA, 15 bp, Homo sapiens
atacaggaacaccca

SEQ ID NO: 2006156 - DNA, 15 bp, Homo sapiens
tacaggaacacccag

SEQ ID NO: 2006157 - DNA, 15 bp, Homo sapiens
acaggaacacccaga

SEQ ID NO: 2006158 - DNA, 15 bp, Homo sapiens
caggaacacccagat

SEQ ID NO: 2006159 - DNA, 15 bp, Homo sapiens
aggaacacccagatt

SEQ ID NO: 2006160 - DNA, 15 bp, Homo sapiens
ggaacacccagattc

SEQ ID NO: 2006161 - DNA, 15 bp, Homo sapiens
gaacacccagattca

SEQ ID NO: 2006162 - DNA, 15 bp, Homo sapiens
aacacccagattcat

SEQ ID NO: 2006163 - DNA, 15 bp, Homo sapiens
acacccagattcata

SEQ ID NO: 2006164 - DNA, 15 bp, Homo sapiens
cacccagattcataa

SEQ ID NO: 2006165 - DNA, 15 bp, Homo sapiens
acccagattcataaa

SEQ ID NO: 2006166 - DNA, 15 bp, Homo sapiens
cccagattcataaag

SEQ ID NO: 2006167 - DNA, 15 bp, Homo sapiens
ccagattcataaagc

SEQ ID NO: 2006168 - DNA, 15 bp, Homo sapiens
cagattcataaagca

SEQ ID NO: 2006169 - DNA, 15 bp, Homo sapiens
agattcataaagcaa

SEQ ID NO: 2006170 - DNA, 15 bp, Homo sapiens
gattcataaagcaag

SEQ ID NO: 2006171 - DNA, 15 bp, Homo sapiens
attcataaagcaagt

SEQ ID NO: 2006172 - DNA, 15 bp, Homo sapiens
ttcataaagcaagtc

SEQ ID NO: 2006173 - DNA, 15 bp, Homo sapiens
tcataaagcaagtcc

SEQ ID NO: 2006174 - DNA, 15 bp, Homo sapiens
cataaagcaagtcct

SEQ ID NO: 2006175 - DNA, 15 bp, Homo sapiens
ataaagcaagtcctt

SEQ ID NO: 2006176 - DNA, 15 bp, Homo sapiens
taaagcaagtcctta

SEQ ID NO: 2006177 - DNA, 15 bp, Homo sapiens
aaagcaagtccttag

SEQ ID NO: 2006178 - DNA, 15 bp, Homo sapiens
aagcaagtccttaga

SEQ ID NO: 2006179 - DNA, 15 bp, Homo sapiens
agcaagtccttagag

SEQ ID NO: 2006180 - DNA, 15 bp, Homo sapiens
gcaagtccttagaga

SEQ ID NO: 2006181 - DNA, 15 bp, Homo sapiens
caagtccttagagac

SEQ ID NO: 2006182 - DNA, 15 bp, Homo sapiens
aagtccttagagacc

SEQ ID NO: 2006183 - DNA, 15 bp, Homo sapiens
agtccttagagacct

SEQ ID NO: 2006184 - DNA, 15 bp, Homo sapiens
gtccttagagaccta

SEQ ID NO: 2006185 - DNA, 15 bp, Homo sapiens
tccttagagacctac

SEQ ID NO: 2006186 - DNA, 15 bp, Homo sapiens
ccttagagacctaca

SEQ ID NO: 2006187 - DNA, 15 bp, Homo sapiens
cttagagacctacaa

SEQ ID NO: 2006188 - DNA, 15 bp, Homo sapiens
ttagagacctacaaa

SEQ ID NO: 2006189 - DNA, 15 bp, Homo sapiens
tagagacctacaaag

SEQ ID NO: 2006190 - DNA, 15 bp, Homo sapiens
agagacctacaaaga

SEQ ID NO: 2006191 - DNA, 15 bp, Homo sapiens
gagacctacaaagag

SEQ ID NO: 2006192 - DNA, 15 bp, Homo sapiens
agacctacaaagaga

SEQ ID NO: 2006193 - DNA, 15 bp, Homo sapiens
gacctacaaagagac

SEQ ID NO: 2006194 - DNA, 15 bp, Homo sapiens
acctacaaagagact

SEQ ID NO: 2006195 - DNA, 15 bp, Homo sapiens
cctacaaagagactt

SEQ ID NO: 2006196 - DNA, 15 bp, Homo sapiens
ctacaaagagactta

SEQ ID NO: 2006197 - DNA, 15 bp, Homo sapiens
tacaaagagacttag

SEQ ID NO: 2006198 - DNA, 15 bp, Homo sapiens
acaaagagacttaga

SEQ ID NO: 2006199 - DNA, 15 bp, Homo sapiens
caaagagacttagac

SEQ ID NO: 2006200 - DNA, 15 bp, Homo sapiens
aaagagacttagact

SEQ ID NO: 2006201 - DNA, 15 bp, Homo sapiens
aagagacttagactc

SEQ ID NO: 2006202 - DNA, 15 bp, Homo sapiens
agagacttagactcc

SEQ ID NO: 2006203 - DNA, 15 bp, Homo sapiens
gagacttagactccc

SEQ ID NO: 2006204 - DNA, 15 bp, Homo sapiens
agacttagactccca

SEQ ID NO: 2006205 - DNA, 15 bp, Homo sapiens
gacttagactcccac

SEQ ID NO: 2006206 - DNA, 15 bp, Homo sapiens
acttagactcccaca

SEQ ID NO: 2006207 - DNA, 15 bp, Homo sapiens
cttagactcccacac

SEQ ID NO: 2006208 - DNA, 15 bp, Homo sapiens
ttagactcccacaca

SEQ ID NO: 2006209 - DNA, 15 bp, Homo sapiens
tagactcccacacaa

SEQ ID NO: 2006210 - DNA, 15 bp, Homo sapiens
agactcccacacaat

SEQ ID NO: 2006211 - DNA, 15 bp, Homo sapiens
gactcccacacaata

SEQ ID NO: 2006212 - DNA, 15 bp, Homo sapiens
actcccacacaataa

SEQ ID NO: 2006213 - DNA, 15 bp, Homo sapiens
ctcccacacaataat

SEQ ID NO: 2006214 - DNA, 15 bp, Homo sapiens
tcccacacaataata

SEQ ID NO: 2006215 - DNA, 15 bp, Homo sapiens
cccacacaataataa

SEQ ID NO: 2006216 - DNA, 15 bp, Homo sapiens
ccacacaataataat

SEQ ID NO: 2006217 - DNA, 15 bp, Homo sapiens
cacacaataataatg

SEQ ID NO: 2006218 - DNA, 15 bp, Homo sapiens
acacaataataatgg

SEQ ID NO: 2006219 - DNA, 15 bp, Homo sapiens
cacaataataatggg

SEQ ID NO: 2006220 - DNA, 15 bp, Homo sapiens
acaataataatggga

SEQ ID NO: 2006221 - DNA, 15 bp, Homo sapiens
caataataatgggag

SEQ ID NO: 2006222 - DNA, 15 bp, Homo sapiens
aataataatgggaga

SEQ ID NO: 2006223 - DNA, 15 bp, Homo sapiens
ataataatgggagac

SEQ ID NO: 2006224 - DNA, 15 bp, Homo sapiens
taataatgggagact

SEQ ID NO: 2006225 - DNA, 15 bp, Homo sapiens
aataatgggagactt

SEQ ID NO: 2006226 - DNA, 15 bp, Homo sapiens
ataatgggagacttt

SEQ ID NO: 2006227 - DNA, 15 bp, Homo sapiens
taatgggagacttta

SEQ ID NO: 2006228 - DNA, 15 bp, Homo sapiens
aatgggagactttaa

SEQ ID NO: 2006229 - DNA, 15 bp, Homo sapiens
atgggagactttaac

SEQ ID NO: 2006230 - DNA, 15 bp, Homo sapiens
tgggagactttaaca

SEQ ID NO: 2006231 - DNA, 15 bp, Homo sapiens
gggagactttaacac

SEQ ID NO: 2006232 - DNA, 15 bp, Homo sapiens
ggagactttaacacc

SEQ ID NO: 2006233 - DNA, 15 bp, Homo sapiens
gagactttaacaccc

SEQ ID NO: 2006234 - DNA, 15 bp, Homo sapiens
agactttaacacccc

SEQ ID NO: 2006235 - DNA, 15 bp, Homo sapiens
gactttaacacccca

SEQ ID NO: 2006236 - DNA, 15 bp, Homo sapiens
actttaacaccccac

SEQ ID NO: 2006237 - DNA, 15 bp, Homo sapiens
ctttaacaccccact

SEQ ID NO: 2006238 - DNA, 15 bp, Homo sapiens
tttaacaccccactg

SEQ ID NO: 2006239 - DNA, 15 bp, Homo sapiens
ttaacaccccactgt

SEQ ID NO: 2006240 - DNA, 15 bp, Homo sapiens
taacaccccactgtc

SEQ ID NO: 2006241 - DNA, 15 bp, Homo sapiens
aacaccccactgtca

SEQ ID NO: 2006242 - DNA, 15 bp, Homo sapiens
acaccccactgtcaa

SEQ ID NO: 2006243 - DNA, 15 bp, Homo sapiens
caccccactgtcaac

SEQ ID NO: 2006244 - DNA, 15 bp, Homo sapiens
accccactgtcaaca

SEQ ID NO: 2006245 - DNA, 15 bp, Homo sapiens
ccccactgtcaacat

SEQ ID NO: 2006246 - DNA, 15 bp, Homo sapiens
cccactgtcaacatt

SEQ ID NO: 2006247 - DNA, 15 bp, Homo sapiens
ccactgtcaacatta

SEQ ID NO: 2006248 - DNA, 15 bp, Homo sapiens
cactgtcaacattag

SEQ ID NO: 2006249 - DNA, 15 bp, Homo sapiens
actgtcaacattaga

SEQ ID NO: 2006250 - DNA, 15 bp, Homo sapiens
ctgtcaacattagac

SEQ ID NO: 2006251 - DNA, 15 bp, Homo sapiens
tgtcaacattagaca

SEQ ID NO: 2006252 - DNA, 15 bp, Homo sapiens
gtcaacattagacag

SEQ ID NO: 2006253 - DNA, 15 bp, Homo sapiens
tcaacattagacaga

SEQ ID NO: 2006254 - DNA, 15 bp, Homo sapiens
caacattagacagat

SEQ ID NO: 2006255 - DNA, 15 bp, Homo sapiens
aacattagacagatc

SEQ ID NO: 2006256 - DNA, 15 bp, Homo sapiens
acattagacagatca

SEQ ID NO: 2006257 - DNA, 15 bp, Homo sapiens
cattagacagatcaa

SEQ ID NO: 2006258 - DNA, 15 bp, Homo sapiens
attagacagatcaac

SEQ ID NO: 2006259 - DNA, 15 bp, Homo sapiens
ttagacagatcaacg

SEQ ID NO: 2006260 - DNA, 15 bp, Homo sapiens
tagacagatcaacga

SEQ ID NO: 2006261 - DNA, 15 bp, Homo sapiens
agacagatcaacgag

SEQ ID NO: 2006262 - DNA, 15 bp, Homo sapiens
gacagatcaacgaga

SEQ ID NO: 2006263 - DNA, 15 bp, Homo sapiens
acagatcaacgagac

SEQ ID NO: 2006264 - DNA, 15 bp, Homo sapiens
cagatcaacgagaca

SEQ ID NO: 2006265 - DNA, 15 bp, Homo sapiens
agatcaacgagacag

SEQ ID NO: 2006266 - DNA, 15 bp, Homo sapiens
gatcaacgagacaga

SEQ ID NO: 2006267 - DNA, 15 bp, Homo sapiens
atcaacgagacagaa

SEQ ID NO: 2006268 - DNA, 15 bp, Homo sapiens
tcaacgagacagaaa

SEQ ID NO: 2006269 - DNA, 15 bp, Homo sapiens
caacgagacagaaag

SEQ ID NO: 2006270 - DNA, 15 bp, Homo sapiens
aacgagacagaaagt

SEQ ID NO: 2006271 - DNA, 15 bp, Homo sapiens
acgagacagaaagtt

SEQ ID NO: 2006272 - DNA, 15 bp, Homo sapiens
cgagacagaaagtta

SEQ ID NO: 2006273 - DNA, 15 bp, Homo sapiens
gagacagaaagttaa

SEQ ID NO: 2006274 - DNA, 15 bp, Homo sapiens
agacagaaagttaac

SEQ ID NO: 2006275 - DNA, 15 bp, Homo sapiens
gacagaaagttaaca

SEQ ID NO: 2006276 - DNA, 15 bp, Homo sapiens
cagaaagttaacaag

SEQ ID NO: 2006277 - DNA, 15 bp, Homo sapiens
agaaagttaacaagg

SEQ ID NO: 2006278 - DNA, 15 bp, Homo sapiens
gaaagttaacaagga

SEQ ID NO: 2006279 - DNA, 15 bp, Homo sapiens
aaagttaacaaggat

SEQ ID NO: 2006280 - DNA, 15 bp, Homo sapiens
aagttaacaaggata

SEQ ID NO: 2006281 - DNA, 15 bp, Homo sapiens
agttaacaaggatat

SEQ ID NO: 2006282 - DNA, 15 bp, Homo sapiens
gttaacaaggatatc

SEQ ID NO: 2006283 - DNA, 15 bp, Homo sapiens
ttaacaaggatatcc

SEQ ID NO: 2006284 - DNA, 15 bp, Homo sapiens
taacaaggatatcca

SEQ ID NO: 2006285 - DNA, 15 bp, Homo sapiens
aacaaggatatccag

SEQ ID NO: 2006286 - DNA, 15 bp, Homo sapiens
acaaggatatccagg

SEQ ID NO: 2006287 - DNA, 15 bp, Homo sapiens
caaggatatccagga

SEQ ID NO: 2006288 - DNA, 15 bp, Homo sapiens
aaggatatccaggag

SEQ ID NO: 2006289 - DNA, 15 bp, Homo sapiens
aggatatccaggagt

SEQ ID NO: 2006290 - DNA, 15 bp, Homo sapiens
ggatatccaggagtt

SEQ ID NO: 2006291 - DNA, 15 bp, Homo sapiens
gatatccaggagttg

SEQ ID NO: 2006292 - DNA, 15 bp, Homo sapiens
atatccaggagttga

SEQ ID NO: 2006293 - DNA, 15 bp, Homo sapiens
tatccaggagttgaa

SEQ ID NO: 2006294 - DNA, 15 bp, Homo sapiens
atccaggagttgaac

SEQ ID NO: 2006295 - DNA, 15 bp, Homo sapiens
tccaggagttgaact

SEQ ID NO: 2006296 - DNA, 15 bp, Homo sapiens
ccaggagttgaactc

SEQ ID NO: 2006297 - DNA, 15 bp, Homo sapiens
caggagttgaactca

SEQ ID NO: 2006298 - DNA, 15 bp, Homo sapiens
aggagttgaactcag

SEQ ID NO: 2006299 - DNA, 15 bp, Homo sapiens
ggagttgaactcagc

SEQ ID NO: 2006300 - DNA, 15 bp, Homo sapiens
gagttgaactcagcc

SEQ ID NO: 2006301 - DNA, 15 bp, Homo sapiens
agttgaactcagccc

SEQ ID NO: 2006302 - DNA, 15 bp, Homo sapiens
gttgaactcagccct

SEQ ID NO: 2006303 - DNA, 15 bp, Homo sapiens
ttgaactcagccctg

SEQ ID NO: 2006304 - DNA, 15 bp, Homo sapiens
tgaactcagccctgc

SEQ ID NO: 2006305 - DNA, 15 bp, Homo sapiens
gaactcagccctgca

SEQ ID NO: 2006306 - DNA, 15 bp, Homo sapiens
aactcagccctgcac

SEQ ID NO: 2006307 - DNA, 15 bp, Homo sapiens
actcagccctgcacc

SEQ ID NO: 2006308 - DNA, 15 bp, Homo sapiens
ctcagccctgcacca

SEQ ID NO: 2006309 - DNA, 15 bp, Homo sapiens
tcagccctgcaccaa

SEQ ID NO: 2006310 - DNA, 15 bp, Homo sapiens
cagccctgcaccaag

SEQ ID NO: 2006311 - DNA, 15 bp, Homo sapiens
agccctgcaccaagt

SEQ ID NO: 2006312 - DNA, 15 bp, Homo sapiens
gccctgcaccaagtg

SEQ ID NO: 2006313 - DNA, 15 bp, Homo sapiens
ccctgcaccaagtgg

SEQ ID NO: 2006314 - DNA, 15 bp, Homo sapiens
cctgcaccaagtgga

SEQ ID NO: 2006315 - DNA, 15 bp, Homo sapiens
ctgcaccaagtggac

SEQ ID NO: 2006316 - DNA, 15 bp, Homo sapiens
tgcaccaagtggacc

SEQ ID NO: 2006317 - DNA, 15 bp, Homo sapiens
gcaccaagtggacct

SEQ ID NO: 2006318 - DNA, 15 bp, Homo sapiens
caccaagtggaccta

SEQ ID NO: 2006319 - DNA, 15 bp, Homo sapiens
accaagtggacctaa

SEQ ID NO: 2006320 - DNA, 15 bp, Homo sapiens
ccaagtggacctaat

SEQ ID NO: 2006321 - DNA, 15 bp, Homo sapiens
caagtggacctaata

SEQ ID NO: 2006322 - DNA, 15 bp, Homo sapiens
aagtggacctaatag

SEQ ID NO: 2006323 - DNA, 15 bp, Homo sapiens
agtggacctaataga

SEQ ID NO: 2006324 - DNA, 15 bp, Homo sapiens
gtggacctaatagac

SEQ ID NO: 2006325 - DNA, 15 bp, Homo sapiens
tggacctaatagaca

SEQ ID NO: 2006326 - DNA, 15 bp, Homo sapiens
ggacctaatagacat

SEQ ID NO: 2006327 - DNA, 15 bp, Homo sapiens
gacctaatagacatc

SEQ ID NO: 2006328 - DNA, 15 bp, Homo sapiens
acctaatagacatct

SEQ ID NO: 2006329 - DNA, 15 bp, Homo sapiens
cctaatagacatctg

SEQ ID NO: 2006330 - DNA, 15 bp, Homo sapiens
ctaatagacatctgc

SEQ ID NO: 2006331 - DNA, 15 bp, Homo sapiens
taatagacatctgca

SEQ ID NO: 2006332 - DNA, 15 bp, Homo sapiens
aatagacatctgcag

SEQ ID NO: 2006333 - DNA, 15 bp, Homo sapiens
atagacatctgcaga

SEQ ID NO: 2006334 - DNA, 15 bp, Homo sapiens
tagacatctgcagaa

SEQ ID NO: 2006335 - DNA, 15 bp, Homo sapiens
agacatctgcagaac

SEQ ID NO: 2006336 - DNA, 15 bp, Homo sapiens
gacatctgcagaact

SEQ ID NO: 2006337 - DNA, 15 bp, Homo sapiens
acatctgcagaactc

SEQ ID NO: 2006338 - DNA, 15 bp, Homo sapiens
catctgcagaactct

SEQ ID NO: 2006339 - DNA, 15 bp, Homo sapiens
atctgcagaactctc

SEQ ID NO: 2006340 - DNA, 15 bp, Homo sapiens
tctgcagaactctcc

SEQ ID NO: 2006341 - DNA, 15 bp, Homo sapiens
ctgcagaactctcca

SEQ ID NO: 2006342 - DNA, 15 bp, Homo sapiens
tgcagaactctccac

SEQ ID NO: 2006343 - DNA, 15 bp, Homo sapiens
gcagaactctccacc

SEQ ID NO: 2006344 - DNA, 15 bp, Homo sapiens
cagaactctccaccc

SEQ ID NO: 2006345 - DNA, 15 bp, Homo sapiens
agaactctccacccc

SEQ ID NO: 2006346 - DNA, 15 bp, Homo sapiens
gaactctccacccca

SEQ ID NO: 2006347 - DNA, 15 bp, Homo sapiens
aactctccaccccaa

SEQ ID NO: 2006348 - DNA, 15 bp, Homo sapiens
actctccaccccaaa

SEQ ID NO: 2006349 - DNA, 15 bp, Homo sapiens
ctctccaccccaaat

SEQ ID NO: 2006350 - DNA, 15 bp, Homo sapiens
tctccaccccaaatc

SEQ ID NO: 2006351 - DNA, 15 bp, Homo sapiens
ctccaccccaaatca

SEQ ID NO: 2006352 - DNA, 15 bp, Homo sapiens
tccaccccaaatcaa

SEQ ID NO: 2006353 - DNA, 15 bp, Homo sapiens
ccaccccaaatcaac

SEQ ID NO: 2006354 - DNA, 15 bp, Homo sapiens
caccccaaatcaaca

SEQ ID NO: 2006355 - DNA, 15 bp, Homo sapiens
accccaaatcaacag

SEQ ID NO: 2006356 - DNA, 15 bp, Homo sapiens
ccccaaatcaacaga

SEQ ID NO: 2006357 - DNA, 15 bp, Homo sapiens
cccaaatcaacagaa

SEQ ID NO: 2006358 - DNA, 15 bp, Homo sapiens
ccaaatcaacagaat

SEQ ID NO: 2006359 - DNA, 15 bp, Homo sapiens
caaatcaacagaatg

SEQ ID NO: 2006360 - DNA, 15 bp, Homo sapiens
aaatcaacagaatgt

SEQ ID NO: 2006361 - DNA, 15 bp, Homo sapiens
aatcaacagaatgta

SEQ ID NO: 2006362 - DNA, 15 bp, Homo sapiens
atcaacagaatgtat

SEQ ID NO: 2006363 - DNA, 15 bp, Homo sapiens
tcaacagaatgtata

SEQ ID NO: 2006364 - DNA, 15 bp, Homo sapiens
caacagaatgtatat

SEQ ID NO: 2006365 - DNA, 15 bp, Homo sapiens
aacagaatgtatatt

SEQ ID NO: 2006366 - DNA, 15 bp, Homo sapiens
acagaatgtatattc

SEQ ID NO: 2006367 - DNA, 15 bp, Homo sapiens
cagaatgtatattct

SEQ ID NO: 2006368 - DNA, 15 bp, Homo sapiens
agaatgtatattctt

SEQ ID NO: 2006369 - DNA, 15 bp, Homo sapiens
gaatgtatattcttc

SEQ ID NO: 2006370 - DNA, 15 bp, Homo sapiens
aatgtatattcttct

SEQ ID NO: 2006371 - DNA, 15 bp, Homo sapiens
atgtatattcttctc

SEQ ID NO: 2006372 - DNA, 15 bp, Homo sapiens
tgtatattcttctca

SEQ ID NO: 2006373 - DNA, 15 bp, Homo sapiens
gtatattcttctcag

SEQ ID NO: 2006374 - DNA, 15 bp, Homo sapiens
tatattcttctcagc

SEQ ID NO: 2006375 - DNA, 15 bp, Homo sapiens
atattcttctcagca

SEQ ID NO: 2006376 - DNA, 15 bp, Homo sapiens
tattcttctcagcac

SEQ ID NO: 2006377 - DNA, 15 bp, Homo sapiens
attcttctcagcacc

SEQ ID NO: 2006378 - DNA, 15 bp, Homo sapiens
ttcttctcagcacca

SEQ ID NO: 2006379 - DNA, 15 bp, Homo sapiens
tcttctcagcaccac

SEQ ID NO: 2006380 - DNA, 15 bp, Homo sapiens
cttctcagcaccaca

SEQ ID NO: 2006381 - DNA, 15 bp, Homo sapiens
ttctcagcaccacat

SEQ ID NO: 2006382 - DNA, 15 bp, Homo sapiens
tctcagcaccacatt

SEQ ID NO: 2006383 - DNA, 15 bp, Homo sapiens
ctcagcaccacattg

SEQ ID NO: 2006384 - DNA, 15 bp, Homo sapiens
tcagcaccacattgc

SEQ ID NO: 2006385 - DNA, 15 bp, Homo sapiens
cagcaccacattgca

SEQ ID NO: 2006386 - DNA, 15 bp, Homo sapiens
agcaccacattgcac

SEQ ID NO: 2006387 - DNA, 15 bp, Homo sapiens
gcaccacattgcact

SEQ ID NO: 2006388 - DNA, 15 bp, Homo sapiens
caccacattgcactt

SEQ ID NO: 2006389 - DNA, 15 bp, Homo sapiens
accacattgcactta

SEQ ID NO: 2006390 - DNA, 15 bp, Homo sapiens
ccacattgcacttat

SEQ ID NO: 2006391 - DNA, 15 bp, Homo sapiens
cacattgcacttatt

SEQ ID NO: 2006392 - DNA, 15 bp, Homo sapiens
acattgcacttattc

SEQ ID NO: 2006393 - DNA, 15 bp, Homo sapiens
cattgcacttattcc

SEQ ID NO: 2006394 - DNA, 15 bp, Homo sapiens
attgcacttattcca

SEQ ID NO: 2006395 - DNA, 15 bp, Homo sapiens
ttgcacttattccaa

SEQ ID NO: 2006396 - DNA, 15 bp, Homo sapiens
tgcacttattccaaa

SEQ ID NO: 2006397 - DNA, 15 bp, Homo sapiens
gcacttattccaaaa

SEQ ID NO: 2006398 - DNA, 15 bp, Homo sapiens
cacttattccaaaat

SEQ ID NO: 2006399 - DNA, 15 bp, Homo sapiens
acttattccaaaatt

SEQ ID NO: 2006400 - DNA, 15 bp, Homo sapiens
cttattccaaaattg

SEQ ID NO: 2006401 - DNA, 15 bp, Homo sapiens
ttattccaaaattga

SEQ ID NO: 2006402 - DNA, 15 bp, Homo sapiens
tattccaaaattgac

SEQ ID NO: 2006403 - DNA, 15 bp, Homo sapiens
attccaaaattgacc

SEQ ID NO: 2006404 - DNA, 15 bp, Homo sapiens
ttccaaaattgacca

SEQ ID NO: 2006405 - DNA, 15 bp, Homo sapiens
tccaaaattgaccac

SEQ ID NO: 2006406 - DNA, 15 bp, Homo sapiens
ccaaaattgaccaca

SEQ ID NO: 2006407 - DNA, 15 bp, Homo sapiens
caaaattgaccacat

SEQ ID NO: 2006408 - DNA, 15 bp, Homo sapiens
aaaattgaccacata

SEQ ID NO: 2006409 - DNA, 15 bp, Homo sapiens
aaattgaccacataa

SEQ ID NO: 2006410 - DNA, 15 bp, Homo sapiens
aattgaccacataat

SEQ ID NO: 2006411 - DNA, 15 bp, Homo sapiens
attgaccacataatt

SEQ ID NO: 2006412 - DNA, 15 bp, Homo sapiens
ttgaccacataattg

SEQ ID NO: 2006413 - DNA, 15 bp, Homo sapiens
tgaccacataattgg

SEQ ID NO: 2006414 - DNA, 15 bp, Homo sapiens
gaccacataattgga

SEQ ID NO: 2006415 - DNA, 15 bp, Homo sapiens
accacataattggaa

SEQ ID NO: 2006416 - DNA, 15 bp, Homo sapiens
ccacataattggaat

SEQ ID NO: 2006417 - DNA, 15 bp, Homo sapiens
cacataattggaata

SEQ ID NO: 2006418 - DNA, 15 bp, Homo sapiens
acataattggaatac

SEQ ID NO: 2006419 - DNA, 15 bp, Homo sapiens
cataattggaataca

SEQ ID NO: 2006420 - DNA, 15 bp, Homo sapiens
ataattggaatacaa

SEQ ID NO: 2006421 - DNA, 15 bp, Homo sapiens
taattggaatacaac

SEQ ID NO: 2006422 - DNA, 15 bp, Homo sapiens
aattggaatacaaca

SEQ ID NO: 2006423 - DNA, 15 bp, Homo sapiens
attggaatacaacac

SEQ ID NO: 2006424 - DNA, 15 bp, Homo sapiens
ttggaatacaacact

SEQ ID NO: 2006425 - DNA, 15 bp, Homo sapiens
tggaatacaacactc

SEQ ID NO: 2006426 - DNA, 15 bp, Homo sapiens
ggaatacaacactcc

SEQ ID NO: 2006427 - DNA, 15 bp, Homo sapiens
gaatacaacactcct

SEQ ID NO: 2006428 - DNA, 15 bp, Homo sapiens
aatacaacactcctc

SEQ ID NO: 2006429 - DNA, 15 bp, Homo sapiens
atacaacactcctca

SEQ ID NO: 2006430 - DNA, 15 bp, Homo sapiens
tacaacactcctcag

SEQ ID NO: 2006431 - DNA, 15 bp, Homo sapiens
acaacactcctcagc

SEQ ID NO: 2006432 - DNA, 15 bp, Homo sapiens
caacactcctcagca

SEQ ID NO: 2006433 - DNA, 15 bp, Homo sapiens
aacactcctcagcaa

SEQ ID NO: 2006434 - DNA, 15 bp, Homo sapiens
acactcctcagcaaa

SEQ ID NO: 2006435 - DNA, 15 bp, Homo sapiens
cactcctcagcaaat

SEQ ID NO: 2006436 - DNA, 15 bp, Homo sapiens
actcctcagcaaatg

SEQ ID NO: 2006437 - DNA, 15 bp, Homo sapiens
ctcctcagcaaatgc

SEQ ID NO: 2006438 - DNA, 15 bp, Homo sapiens
tcctcagcaaatgcc

SEQ ID NO: 2006439 - DNA, 15 bp, Homo sapiens
cctcagcaaatgcca

SEQ ID NO: 2006440 - DNA, 15 bp, Homo sapiens
ctcagcaaatgccaa

SEQ ID NO: 2006441 - DNA, 15 bp, Homo sapiens
tcagcaaatgccaaa

SEQ ID NO: 2006442 - DNA, 15 bp, Homo sapiens
cagcaaatgccaaag

SEQ ID NO: 2006443 - DNA, 15 bp, Homo sapiens
agcaaatgccaaaga

SEQ ID NO: 2006444 - DNA, 15 bp, Homo sapiens
gcaaatgccaaagaa

SEQ ID NO: 2006445 - DNA, 15 bp, Homo sapiens
caaatgccaaagaat

SEQ ID NO: 2006446 - DNA, 15 bp, Homo sapiens
aaatgccaaagaatg

SEQ ID NO: 2006447 - DNA, 15 bp, Homo sapiens
aatgccaaagaatgg

SEQ ID NO: 2006448 - DNA, 15 bp, Homo sapiens
atgccaaagaatgga

SEQ ID NO: 2006449 - DNA, 15 bp, Homo sapiens
tgccaaagaatggaa

SEQ ID NO: 2006450 - DNA, 15 bp, Homo sapiens
gccaaagaatggaaa

SEQ ID NO: 2006451 - DNA, 15 bp, Homo sapiens
ccaaagaatggaaat

SEQ ID NO: 2006452 - DNA, 15 bp, Homo sapiens
caaagaatggaaatc

SEQ ID NO: 2006453 - DNA, 15 bp, Homo sapiens
aaagaatggaaatca

SEQ ID NO: 2006454 - DNA, 15 bp, Homo sapiens
aagaatggaaatcat

SEQ ID NO: 2006455 - DNA, 15 bp, Homo sapiens
agaatggaaatcata

SEQ ID NO: 2006456 - DNA, 15 bp, Homo sapiens
gaatggaaatcataa

SEQ ID NO: 2006457 - DNA, 15 bp, Homo sapiens
aatggaaatcataac

SEQ ID NO: 2006458 - DNA, 15 bp, Homo sapiens
atggaaatcataaca

SEQ ID NO: 2006459 - DNA, 15 bp, Homo sapiens
tggaaatcataacaa

SEQ ID NO: 2006460 - DNA, 15 bp, Homo sapiens
ggaaatcataacaaa

SEQ ID NO: 2006461 - DNA, 15 bp, Homo sapiens
gaaatcataacaaag

SEQ ID NO: 2006462 - DNA, 15 bp, Homo sapiens
aaatcataacaaaga

SEQ ID NO: 2006463 - DNA, 15 bp, Homo sapiens
aatcataacaaagac

SEQ ID NO: 2006464 - DNA, 15 bp, Homo sapiens
atcataacaaagact

SEQ ID NO: 2006465 - DNA, 15 bp, Homo sapiens
tcataacaaagactc

SEQ ID NO: 2006466 - DNA, 15 bp, Homo sapiens
cataacaaagactct

SEQ ID NO: 2006467 - DNA, 15 bp, Homo sapiens
ataacaaagactctc

SEQ ID NO: 2006468 - DNA, 15 bp, Homo sapiens
taacaaagactctca

SEQ ID NO: 2006469 - DNA, 15 bp, Homo sapiens
aacaaagactctcag

SEQ ID NO: 2006470 - DNA, 15 bp, Homo sapiens
acaaagactctcaga

SEQ ID NO: 2006471 - DNA, 15 bp, Homo sapiens
caaagactctcagac

SEQ ID NO: 2006472 - DNA, 15 bp, Homo sapiens
aaagactctcagacc

SEQ ID NO: 2006473 - DNA, 15 bp, Homo sapiens
aagactctcagacca

SEQ ID NO: 2006474 - DNA, 15 bp, Homo sapiens
agactctcagaccac

SEQ ID NO: 2006475 - DNA, 15 bp, Homo sapiens
gactctcagaccaca

SEQ ID NO: 2006476 - DNA, 15 bp, Homo sapiens
actctcagaccacag

SEQ ID NO: 2006477 - DNA, 15 bp, Homo sapiens
ctctcagaccacagt

SEQ ID NO: 2006478 - DNA, 15 bp, Homo sapiens
tctcagaccacagtg

SEQ ID NO: 2006479 - DNA, 15 bp, Homo sapiens
ctcagaccacagtgc

SEQ ID NO: 2006480 - DNA, 15 bp, Homo sapiens
tcagaccacagtgca

SEQ ID NO: 2006481 - DNA, 15 bp, Homo sapiens
cagaccacagtgcaa

SEQ ID NO: 2006482 - DNA, 15 bp, Homo sapiens
agaccacagtgcaat

SEQ ID NO: 2006483 - DNA, 15 bp, Homo sapiens
gaccacagtgcaatc

SEQ ID NO: 2006484 - DNA, 15 bp, Homo sapiens
accacagtgcaatca

SEQ ID NO: 2006485 - DNA, 15 bp, Homo sapiens
ccacagtgcaatcaa

SEQ ID NO: 2006486 - DNA, 15 bp, Homo sapiens
cacagtgcaatcaaa

SEQ ID NO: 2006487 - DNA, 15 bp, Homo sapiens
acagtgcaatcaaac

SEQ ID NO: 2006488 - DNA, 15 bp, Homo sapiens
cagtgcaatcaaact

SEQ ID NO: 2006489 - DNA, 15 bp, Homo sapiens
agtgcaatcaaacta

SEQ ID NO: 2006490 - DNA, 15 bp, Homo sapiens
gtgcaatcaaactag

SEQ ID NO: 2006491 - DNA, 15 bp, Homo sapiens
tgcaatcaaactaga

SEQ ID NO: 2006492 - DNA, 15 bp, Homo sapiens
gcaatcaaactagaa

SEQ ID NO: 2006493 - DNA, 15 bp, Homo sapiens
caatcaaactagaac

SEQ ID NO: 2006494 - DNA, 15 bp, Homo sapiens
aatcaaactagaact

SEQ ID NO: 2006495 - DNA, 15 bp, Homo sapiens
atcaaactagaactc

SEQ ID NO: 2006496 - DNA, 15 bp, Homo sapiens
tcaaactagaactca

SEQ ID NO: 2006497 - DNA, 15 bp, Homo sapiens
caaactagaactcag

SEQ ID NO: 2006498 - DNA, 15 bp, Homo sapiens
aaactagaactcagg

SEQ ID NO: 2006499 - DNA, 15 bp, Homo sapiens
aactagaactcagga

SEQ ID NO: 2006500 - DNA, 15 bp, Homo sapiens
actagaactcaggat

SEQ ID NO: 2006501 - DNA, 15 bp, Homo sapiens
ctagaactcaggatt

SEQ ID NO: 2006502 - DNA, 15 bp, Homo sapiens
tagaactcaggatta

SEQ ID NO: 2006503 - DNA, 15 bp, Homo sapiens
agaactcaggattaa

SEQ ID NO: 2006504 - DNA, 15 bp, Homo sapiens
gaactcaggattaag

SEQ ID NO: 2006505 - DNA, 15 bp, Homo sapiens
aactcaggattaagg

SEQ ID NO: 2006506 - DNA, 15 bp, Homo sapiens
actcaggattaagga

SEQ ID NO: 2006507 - DNA, 15 bp, Homo sapiens
ctcaggattaaggaa

SEQ ID NO: 2006508 - DNA, 15 bp, Homo sapiens
tcaggattaaggaac

SEQ ID NO: 2006509 - DNA, 15 bp, Homo sapiens
caggattaaggaact

SEQ ID NO: 2006510 - DNA, 15 bp, Homo sapiens
aggattaaggaactc

SEQ ID NO: 2006511 - DNA, 15 bp, Homo sapiens
ggattaaggaactca

SEQ ID NO: 2006512 - DNA, 15 bp, Homo sapiens
gattaaggaactcac

SEQ ID NO: 2006513 - DNA, 15 bp, Homo sapiens
attaaggaactcact

SEQ ID NO: 2006514 - DNA, 15 bp, Homo sapiens
ttaaggaactcactc

SEQ ID NO: 2006515 - DNA, 15 bp, Homo sapiens
taaggaactcactct

SEQ ID NO: 2006516 - DNA, 15 bp, Homo sapiens
aaggaactcactcta

SEQ ID NO: 2006517 - DNA, 15 bp, Homo sapiens
aggaactcactctaa

SEQ ID NO: 2006518 - DNA, 15 bp, Homo sapiens
ggaactcactctaaa

SEQ ID NO: 2006519 - DNA, 15 bp, Homo sapiens
gaactcactctaaac

SEQ ID NO: 2006520 - DNA, 15 bp, Homo sapiens
aactcactctaaacc

SEQ ID NO: 2006521 - DNA, 15 bp, Homo sapiens
actcactctaaacca

SEQ ID NO: 2006522 - DNA, 15 bp, Homo sapiens
ctcactctaaaccac

SEQ ID NO: 2006523 - DNA, 15 bp, Homo sapiens
tcactctaaaccaca

SEQ ID NO: 2006524 - DNA, 15 bp, Homo sapiens
cactctaaaccacac

SEQ ID NO: 2006525 - DNA, 15 bp, Homo sapiens
actctaaaccacaca

SEQ ID NO: 2006526 - DNA, 15 bp, Homo sapiens
ctctaaaccacacaa

SEQ ID NO: 2006527 - DNA, 15 bp, Homo sapiens
tctaaaccacacaac

SEQ ID NO: 2006528 - DNA, 15 bp, Homo sapiens
ctaaaccacacaact

SEQ ID NO: 2006529 - DNA, 15 bp, Homo sapiens
taaaccacacaacta

SEQ ID NO: 2006530 - DNA, 15 bp, Homo sapiens
aaaccacacaactac

SEQ ID NO: 2006531 - DNA, 15 bp, Homo sapiens
aaccacacaactaca

SEQ ID NO: 2006532 - DNA, 15 bp, Homo sapiens
accacacaactacat

SEQ ID NO: 2006533 - DNA, 15 bp, Homo sapiens
ccacacaactacatg

SEQ ID NO: 2006534 - DNA, 15 bp, Homo sapiens
cacacaactacatgg

SEQ ID NO: 2006535 - DNA, 15 bp, Homo sapiens
acacaactacatgga

SEQ ID NO: 2006536 - DNA, 15 bp, Homo sapiens
cacaactacatggaa

SEQ ID NO: 2006537 - DNA, 15 bp, Homo sapiens
acaactacatggaaa

SEQ ID NO: 2006538 - DNA, 15 bp, Homo sapiens
caactacatggaaac

SEQ ID NO: 2006539 - DNA, 15 bp, Homo sapiens
aactacatggaaact

SEQ ID NO: 2006540 - DNA, 15 bp, Homo sapiens
actacatggaaactg

SEQ ID NO: 2006541 - DNA, 15 bp, Homo sapiens
ctacatggaaactga

SEQ ID NO: 2006542 - DNA, 15 bp, Homo sapiens
tacatggaaactgaa

SEQ ID NO: 2006543 - DNA, 15 bp, Homo sapiens
acatggaaactgaac

SEQ ID NO: 2006544 - DNA, 15 bp, Homo sapiens
catggaaactgaaca

SEQ ID NO: 2006545 - DNA, 15 bp, Homo sapiens
atggaaactgaacaa

SEQ ID NO: 2006546 - DNA, 15 bp, Homo sapiens
tggaaactgaacaac

SEQ ID NO: 2006547 - DNA, 15 bp, Homo sapiens
ggaaactgaacaacc

SEQ ID NO: 2006548 - DNA, 15 bp, Homo sapiens
gaaactgaacaacct

SEQ ID NO: 2006549 - DNA, 15 bp, Homo sapiens
aaactgaacaacctg

SEQ ID NO: 2006550 - DNA, 15 bp, Homo sapiens
aactgaacaacctgc

SEQ ID NO: 2006551 - DNA, 15 bp, Homo sapiens
actgaacaacctgct

SEQ ID NO: 2006552 - DNA, 15 bp, Homo sapiens
ctgaacaacctgctc

SEQ ID NO: 2006553 - DNA, 15 bp, Homo sapiens
tgaacaacctgctcc

SEQ ID NO: 2006554 - DNA, 15 bp, Homo sapiens
gaacaacctgctcct

SEQ ID NO: 2006555 - DNA, 15 bp, Homo sapiens
aacaacctgctcctg

SEQ ID NO: 2006556 - DNA, 15 bp, Homo sapiens
acaacctgctcctga

SEQ ID NO: 2006557 - DNA, 15 bp, Homo sapiens
caacctgctcctgaa

SEQ ID NO: 2006558 - DNA, 15 bp, Homo sapiens
aacctgctcctgaat

SEQ ID NO: 2006559 - DNA, 15 bp, Homo sapiens
acctgctcctgaatg

SEQ ID NO: 2006560 - DNA, 15 bp, Homo sapiens
cctgctcctgaatga

SEQ ID NO: 2006561 - DNA, 15 bp, Homo sapiens
ctgctcctgaatgac

SEQ ID NO: 2006562 - DNA, 15 bp, Homo sapiens
tgctcctgaatgact

SEQ ID NO: 2006563 - DNA, 15 bp, Homo sapiens
gctcctgaatgacta

SEQ ID NO: 2006564 - DNA, 15 bp, Homo sapiens
ctcctgaatgactac

SEQ ID NO: 2006565 - DNA, 15 bp, Homo sapiens
tcctgaatgactact

SEQ ID NO: 2006566 - DNA, 15 bp, Homo sapiens
cctgaatgactactg

SEQ ID NO: 2006567 - DNA, 15 bp, Homo sapiens
ctgaatgactactgg

SEQ ID NO: 2006568 - DNA, 15 bp, Homo sapiens
tgaatgactactggg

SEQ ID NO: 2006569 - DNA, 15 bp, Homo sapiens
gaatgactactggga

SEQ ID NO: 2006570 - DNA, 15 bp, Homo sapiens
aatgactactgggaa

SEQ ID NO: 2006571 - DNA, 15 bp, Homo sapiens
atgactactgggaag

SEQ ID NO: 2006572 - DNA, 15 bp, Homo sapiens
tgactactgggaaga

SEQ ID NO: 2006573 - DNA, 15 bp, Homo sapiens
gactactgggaagat

SEQ ID NO: 2006574 - DNA, 15 bp, Homo sapiens
actactgggaagata

SEQ ID NO: 2006575 - DNA, 15 bp, Homo sapiens
ctactgggaagataa

SEQ ID NO: 2006576 - DNA, 15 bp, Homo sapiens
tactgggaagataac

SEQ ID NO: 2006577 - DNA, 15 bp, Homo sapiens
actgggaagataaca

SEQ ID NO: 2006578 - DNA, 15 bp, Homo sapiens
ctgggaagataacaa

SEQ ID NO: 2006579 - DNA, 15 bp, Homo sapiens
tgggaagataacaaa

SEQ ID NO: 2006580 - DNA, 15 bp, Homo sapiens
gggaagataacaaaa

SEQ ID NO: 2006581 - DNA, 15 bp, Homo sapiens
ggaagataacaaaat

SEQ ID NO: 2006582 - DNA, 15 bp, Homo sapiens
gaagataacaaaatg

SEQ ID NO: 2006583 - DNA, 15 bp, Homo sapiens
aagataacaaaatga

SEQ ID NO: 2006584 - DNA, 15 bp, Homo sapiens
agataacaaaatgaa

SEQ ID NO: 2006585 - DNA, 15 bp, Homo sapiens
gataacaaaatgaag

SEQ ID NO: 2006586 - DNA, 15 bp, Homo sapiens
ataacaaaatgaagg

SEQ ID NO: 2006587 - DNA, 15 bp, Homo sapiens
taacaaaatgaaggc

SEQ ID NO: 2006588 - DNA, 15 bp, Homo sapiens
aacaaaatgaaggca

SEQ ID NO: 2006589 - DNA, 15 bp, Homo sapiens
acaaaatgaaggcag

SEQ ID NO: 2006590 - DNA, 15 bp, Homo sapiens
caaaatgaaggcaga

SEQ ID NO: 2006591 - DNA, 15 bp, Homo sapiens
aaaatgaaggcagaa

SEQ ID NO: 2006592 - DNA, 15 bp, Homo sapiens
aaatgaaggcagaaa

SEQ ID NO: 2006593 - DNA, 15 bp, Homo sapiens
aatgaaggcagaaat

SEQ ID NO: 2006594 - DNA, 15 bp, Homo sapiens
atgaaggcagaaata

SEQ ID NO: 2006595 - DNA, 15 bp, Homo sapiens
tgaaggcagaaataa

SEQ ID NO: 2006596 - DNA, 15 bp, Homo sapiens
gaaggcagaaataaa

SEQ ID NO: 2006597 - DNA, 15 bp, Homo sapiens
aaggcagaaataaag

SEQ ID NO: 2006598 - DNA, 15 bp, Homo sapiens
aggcagaaataaaga

SEQ ID NO: 2006599 - DNA, 15 bp, Homo sapiens
ggcagaaataaagat

SEQ ID NO: 2006600 - DNA, 15 bp, Homo sapiens
gcagaaataaagatg

SEQ ID NO: 2006601 - DNA, 15 bp, Homo sapiens
cagaaataaagatgt

SEQ ID NO: 2006602 - DNA, 15 bp, Homo sapiens
agaaataaagatgtt

SEQ ID NO: 2006603 - DNA, 15 bp, Homo sapiens
gaaataaagatgttc

SEQ ID NO: 2006604 - DNA, 15 bp, Homo sapiens
aaataaagatgttct

SEQ ID NO: 2006605 - DNA, 15 bp, Homo sapiens
aataaagatgttctt

SEQ ID NO: 2006606 - DNA, 15 bp, Homo sapiens
ataaagatgttcttt

SEQ ID NO: 2006607 - DNA, 15 bp, Homo sapiens
taaagatgttctttg

SEQ ID NO: 2006608 - DNA, 15 bp, Homo sapiens
aaagatgttctttga

SEQ ID NO: 2006609 - DNA, 15 bp, Homo sapiens
aagatgttctttgaa

SEQ ID NO: 2006610 - DNA, 15 bp, Homo sapiens
agatgttctttgaaa

SEQ ID NO: 2006611 - DNA, 15 bp, Homo sapiens
gatgttctttgaaac

SEQ ID NO: 2006612 - DNA, 15 bp, Homo sapiens
atgttctttgaaacc

SEQ ID NO: 2006613 - DNA, 15 bp, Homo sapiens
tgttctttgaaacca

SEQ ID NO: 2006614 - DNA, 15 bp, Homo sapiens
gttctttgaaaccaa

SEQ ID NO: 2006615 - DNA, 15 bp, Homo sapiens
ttctttgaaaccaat

SEQ ID NO: 2006616 - DNA, 15 bp, Homo sapiens
tctttgaaaccaatg

SEQ ID NO: 2006617 - DNA, 15 bp, Homo sapiens
ctttgaaaccaatga

SEQ ID NO: 2006618 - DNA, 15 bp, Homo sapiens
tttgaaaccaatgag

SEQ ID NO: 2006619 - DNA, 15 bp, Homo sapiens
ttgaaaccaatgaga

SEQ ID NO: 2006620 - DNA, 15 bp, Homo sapiens
tgaaaccaatgagaa

SEQ ID NO: 2006621 - DNA, 15 bp, Homo sapiens
gaaaccaatgagaaa

SEQ ID NO: 2006622 - DNA, 15 bp, Homo sapiens
aaaccaatgagaaaa

SEQ ID NO: 2006623 - DNA, 15 bp, Homo sapiens
aaccaatgagaaaaa

SEQ ID NO: 2006624 - DNA, 15 bp, Homo sapiens
accaatgagaaaaat

SEQ ID NO: 2006625 - DNA, 15 bp, Homo sapiens
ccaatgagaaaaata

SEQ ID NO: 2006626 - DNA, 15 bp, Homo sapiens
caatgagaaaaatac

SEQ ID NO: 2006627 - DNA, 15 bp, Homo sapiens
aatgagaaaaataca

SEQ ID NO: 2006628 - DNA, 15 bp, Homo sapiens
atgagaaaaatacac

SEQ ID NO: 2006629 - DNA, 15 bp, Homo sapiens
tgagaaaaatacaca

SEQ ID NO: 2006630 - DNA, 15 bp, Homo sapiens
gagaaaaatacacaa

SEQ ID NO: 2006631 - DNA, 15 bp, Homo sapiens
agaaaaatacacaac

SEQ ID NO: 2006632 - DNA, 15 bp, Homo sapiens
gaaaaatacacaacg

SEQ ID NO: 2006633 - DNA, 15 bp, Homo sapiens
aaaaatacacaacgt

SEQ ID NO: 2006634 - DNA, 15 bp, Homo sapiens
aaaatacacaacgta

SEQ ID NO: 2006635 - DNA, 15 bp, Homo sapiens
aaatacacaacgtac

SEQ ID NO: 2006636 - DNA, 15 bp, Homo sapiens
aatacacaacgtacc

SEQ ID NO: 2006637 - DNA, 15 bp, Homo sapiens
atacacaacgtacca

SEQ ID NO: 2006638 - DNA, 15 bp, Homo sapiens
tacacaacgtaccaa

SEQ ID NO: 2006639 - DNA, 15 bp, Homo sapiens
acacaacgtaccaaa

SEQ ID NO: 2006640 - DNA, 15 bp, Homo sapiens
cacaacgtaccaaaa

SEQ ID NO: 2006641 - DNA, 15 bp, Homo sapiens
acaacgtaccaaaac

SEQ ID NO: 2006642 - DNA, 15 bp, Homo sapiens
caacgtaccaaaacc

SEQ ID NO: 2006643 - DNA, 15 bp, Homo sapiens
aacgtaccaaaacct

SEQ ID NO: 2006644 - DNA, 15 bp, Homo sapiens
acgtaccaaaacctc

SEQ ID NO: 2006645 - DNA, 15 bp, Homo sapiens
cgtaccaaaacctct

SEQ ID NO: 2006646 - DNA, 15 bp, Homo sapiens
gtaccaaaacctctg

SEQ ID NO: 2006647 - DNA, 15 bp, Homo sapiens
taccaaaacctctgg

SEQ ID NO: 2006648 - DNA, 15 bp, Homo sapiens
accaaaacctctggg

SEQ ID NO: 2006649 - DNA, 15 bp, Homo sapiens
ccaaaacctctggga

SEQ ID NO: 2006650 - DNA, 15 bp, Homo sapiens
caaaacctctgggat

SEQ ID NO: 2006651 - DNA, 15 bp, Homo sapiens
aaaacctctgggata

SEQ ID NO: 2006652 - DNA, 15 bp, Homo sapiens
aaacctctgggatac

SEQ ID NO: 2006653 - DNA, 15 bp, Homo sapiens
aacctctgggataca

SEQ ID NO: 2006654 - DNA, 15 bp, Homo sapiens
acctctgggatacat

SEQ ID NO: 2006655 - DNA, 15 bp, Homo sapiens
cctctgggatacatt

SEQ ID NO: 2006656 - DNA, 15 bp, Homo sapiens
ctctgggatacattt

SEQ ID NO: 2006657 - DNA, 15 bp, Homo sapiens
tctgggatacattta

SEQ ID NO: 2006658 - DNA, 15 bp, Homo sapiens
ctgggatacatttat

SEQ ID NO: 2006659 - DNA, 15 bp, Homo sapiens
tgggatacatttata

SEQ ID NO: 2006660 - DNA, 15 bp, Homo sapiens
gggatacatttatag

SEQ ID NO: 2006661 - DNA, 15 bp, Homo sapiens
ggatacatttatagc

SEQ ID NO: 2006662 - DNA, 15 bp, Homo sapiens
gatacatttatagca

SEQ ID NO: 2006663 - DNA, 15 bp, Homo sapiens
atacatttatagcag

SEQ ID NO: 2006664 - DNA, 15 bp, Homo sapiens
tacatttatagcagt

SEQ ID NO: 2006665 - DNA, 15 bp, Homo sapiens
acatttatagcagtg

SEQ ID NO: 2006666 - DNA, 15 bp, Homo sapiens
catttatagcagtgt

SEQ ID NO: 2006667 - DNA, 15 bp, Homo sapiens
atttatagcagtgtg

SEQ ID NO: 2006668 - DNA, 15 bp, Homo sapiens
tttatagcagtgtgt

SEQ ID NO: 2006669 - DNA, 15 bp, Homo sapiens
ttatagcagtgtgta

SEQ ID NO: 2006670 - DNA, 15 bp, Homo sapiens
tatagcagtgtgtag

SEQ ID NO: 2006671 - DNA, 15 bp, Homo sapiens
atagcagtgtgtaga

SEQ ID NO: 2006672 - DNA, 15 bp, Homo sapiens
tagcagtgtgtagag

SEQ ID NO: 2006673 - DNA, 15 bp, Homo sapiens
agcagtgtgtagagg

SEQ ID NO: 2006674 - DNA, 15 bp, Homo sapiens
gcagtgtgtagaggg

SEQ ID NO: 2006675 - DNA, 15 bp, Homo sapiens
cagtgtgtagaggga

SEQ ID NO: 2006676 - DNA, 15 bp, Homo sapiens
agtgtgtagagggaa

SEQ ID NO: 2006677 - DNA, 15 bp, Homo sapiens
gtgtgtagagggaaa

SEQ ID NO: 2006678 - DNA, 15 bp, Homo sapiens
tgtgtagagggaaat

SEQ ID NO: 2006679 - DNA, 15 bp, Homo sapiens
gtgtagagggaaatt

SEQ ID NO: 2006680 - DNA, 15 bp, Homo sapiens
tgtagagggaaattt

SEQ ID NO: 2006681 - DNA, 15 bp, Homo sapiens
gtagagggaaattta

SEQ ID NO: 2006682 - DNA, 15 bp, Homo sapiens
tagagggaaatttat

SEQ ID NO: 2006683 - DNA, 15 bp, Homo sapiens
agagggaaatttata

SEQ ID NO: 2006684 - DNA, 15 bp, Homo sapiens
gagggaaatttatag

SEQ ID NO: 2006685 - DNA, 15 bp, Homo sapiens
agggaaatttatagc

SEQ ID NO: 2006686 - DNA, 15 bp, Homo sapiens
gggaaatttatagca

SEQ ID NO: 2006687 - DNA, 15 bp, Homo sapiens
ggaaatttatagcac

SEQ ID NO: 2006688 - DNA, 15 bp, Homo sapiens
gaaatttatagcact

SEQ ID NO: 2006689 - DNA, 15 bp, Homo sapiens
aaatttatagcacta

SEQ ID NO: 2006690 - DNA, 15 bp, Homo sapiens
aatttatagcactaa

SEQ ID NO: 2006691 - DNA, 15 bp, Homo sapiens
atttatagcactaaa

SEQ ID NO: 2006692 - DNA, 15 bp, Homo sapiens
tttatagcactaaat

SEQ ID NO: 2006693 - DNA, 15 bp, Homo sapiens
ttatagcactaaatg

SEQ ID NO: 2006694 - DNA, 15 bp, Homo sapiens
tatagcactaaatgc

SEQ ID NO: 2006695 - DNA, 15 bp, Homo sapiens
atagcactaaatgcc

SEQ ID NO: 2006696 - DNA, 15 bp, Homo sapiens
tagcactaaatgccc

SEQ ID NO: 2006697 - DNA, 15 bp, Homo sapiens
agcactaaatgccca

SEQ ID NO: 2006698 - DNA, 15 bp, Homo sapiens
gcactaaatgcccac

SEQ ID NO: 2006699 - DNA, 15 bp, Homo sapiens
cactaaatgcccaca

SEQ ID NO: 2006700 - DNA, 15 bp, Homo sapiens
actaaatgcccacaa

SEQ ID NO: 2006701 - DNA, 15 bp, Homo sapiens
ctaaatgcccacaag

SEQ ID NO: 2006702 - DNA, 15 bp, Homo sapiens
taaatgcccacaaga

SEQ ID NO: 2006703 - DNA, 15 bp, Homo sapiens
aaatgcccacaagat

SEQ ID NO: 2006704 - DNA, 15 bp, Homo sapiens
aatgcccacaagata

SEQ ID NO: 2006705 - DNA, 15 bp, Homo sapiens
atgcccacaagataa

SEQ ID NO: 2006706 - DNA, 15 bp, Homo sapiens
tgcccacaagataaa

SEQ ID NO: 2006707 - DNA, 15 bp, Homo sapiens
gcccacaagataaag

SEQ ID NO: 2006708 - DNA, 15 bp, Homo sapiens
cccacaagataaagc

SEQ ID NO: 2006709 - DNA, 15 bp, Homo sapiens
ccacaagataaagca

SEQ ID NO: 2006710 - DNA, 15 bp, Homo sapiens
cacaagataaagcag

SEQ ID NO: 2006711 - DNA, 15 bp, Homo sapiens
acaagataaagcagg

SEQ ID NO: 2006712 - DNA, 15 bp, Homo sapiens
caagataaagcagga

SEQ ID NO: 2006713 - DNA, 15 bp, Homo sapiens
gataaagcaggaaag

SEQ ID NO: 2006714 - DNA, 15 bp, Homo sapiens
ataaagcaggaaaga

SEQ ID NO: 2006715 - DNA, 15 bp, Homo sapiens
taaagcaggaaagat

SEQ ID NO: 2006716 - DNA, 15 bp, Homo sapiens
aaagcaggaaagatc

SEQ ID NO: 2006717 - DNA, 15 bp, Homo sapiens
aagcaggaaagatct

SEQ ID NO: 2006718 - DNA, 15 bp, Homo sapiens
agcaggaaagatcta

SEQ ID NO: 2006719 - DNA, 15 bp, Homo sapiens
gcaggaaagatctaa

SEQ ID NO: 2006720 - DNA, 15 bp, Homo sapiens
caggaaagatctaaa

SEQ ID NO: 2006721 - DNA, 15 bp, Homo sapiens
aggaaagatctaaaa

SEQ ID NO: 2006722 - DNA, 15 bp, Homo sapiens
ggaaagatctaaaat

SEQ ID NO: 2006723 - DNA, 15 bp, Homo sapiens
gaaagatctaaaatt

SEQ ID NO: 2006724 - DNA, 15 bp, Homo sapiens
aaagatctaaaattg

SEQ ID NO: 2006725 - DNA, 15 bp, Homo sapiens
aagatctaaaattga

SEQ ID NO: 2006726 - DNA, 15 bp, Homo sapiens
agatctaaaattgac

SEQ ID NO: 2006727 - DNA, 15 bp, Homo sapiens
gatctaaaattgaca

SEQ ID NO: 2006728 - DNA, 15 bp, Homo sapiens
atctaaaattgacac

SEQ ID NO: 2006729 - DNA, 15 bp, Homo sapiens
tctaaaattgacacc

SEQ ID NO: 2006730 - DNA, 15 bp, Homo sapiens
ctaaaattgacaccc

SEQ ID NO: 2006731 - DNA, 15 bp, Homo sapiens
taaaattgacaccct

SEQ ID NO: 2006732 - DNA, 15 bp, Homo sapiens
aaaattgacacccta

SEQ ID NO: 2006733 - DNA, 15 bp, Homo sapiens
aaattgacaccctaa

SEQ ID NO: 2006734 - DNA, 15 bp, Homo sapiens
aattgacaccctaac

SEQ ID NO: 2006735 - DNA, 15 bp, Homo sapiens
attgacaccctaaca

SEQ ID NO: 2006736 - DNA, 15 bp, Homo sapiens
ttgacaccctaacat

SEQ ID NO: 2006737 - DNA, 15 bp, Homo sapiens
tgacaccctaacatc

SEQ ID NO: 2006738 - DNA, 15 bp, Homo sapiens
gacaccctaacatca

SEQ ID NO: 2006739 - DNA, 15 bp, Homo sapiens
acaccctaacatcac

SEQ ID NO: 2006740 - DNA, 15 bp, Homo sapiens
caccctaacatcaca

SEQ ID NO: 2006741 - DNA, 15 bp, Homo sapiens
accctaacatcacaa

SEQ ID NO: 2006742 - DNA, 15 bp, Homo sapiens
ccctaacatcacaat

SEQ ID NO: 2006743 - DNA, 15 bp, Homo sapiens
cctaacatcacaatt

SEQ ID NO: 2006744 - DNA, 15 bp, Homo sapiens
ctaacatcacaatta

SEQ ID NO: 2006745 - DNA, 15 bp, Homo sapiens
taacatcacaattaa

SEQ ID NO: 2006746 - DNA, 15 bp, Homo sapiens
aacatcacaattaaa

SEQ ID NO: 2006747 - DNA, 15 bp, Homo sapiens
acatcacaattaaaa

SEQ ID NO: 2006748 - DNA, 15 bp, Homo sapiens
catcacaattaaaag

SEQ ID NO: 2006749 - DNA, 15 bp, Homo sapiens
atcacaattaaaaga

SEQ ID NO: 2006750 - DNA, 15 bp, Homo sapiens
tcacaattaaaagaa

SEQ ID NO: 2006751 - DNA, 15 bp, Homo sapiens
cacaattaaaagaac

SEQ ID NO: 2006752 - DNA, 15 bp, Homo sapiens
acaattaaaagaact

SEQ ID NO: 2006753 - DNA, 15 bp, Homo sapiens
caattaaaagaacta

SEQ ID NO: 2006754 - DNA, 15 bp, Homo sapiens
aattaaaagaactag

SEQ ID NO: 2006755 - DNA, 15 bp, Homo sapiens
attaaaagaactaga

SEQ ID NO: 2006756 - DNA, 15 bp, Homo sapiens
ttaaaagaactagag

SEQ ID NO: 2006757 - DNA, 15 bp, Homo sapiens
taaaagaactagaga

SEQ ID NO: 2006758 - DNA, 15 bp, Homo sapiens
aaaagaactagagaa

SEQ ID NO: 2006759 - DNA, 15 bp, Homo sapiens
aaagaactagagaag

SEQ ID NO: 2006760 - DNA, 15 bp, Homo sapiens
aagaactagagaagc

SEQ ID NO: 2006761 - DNA, 15 bp, Homo sapiens
agaactagagaagca

SEQ ID NO: 2006762 - DNA, 15 bp, Homo sapiens
gaactagagaagcaa

SEQ ID NO: 2006763 - DNA, 15 bp, Homo sapiens
aactagagaagcaag

SEQ ID NO: 2006764 - DNA, 15 bp, Homo sapiens
actagagaagcaaga

SEQ ID NO: 2006765 - DNA, 15 bp, Homo sapiens
ctagagaagcaagag

SEQ ID NO: 2006766 - DNA, 15 bp, Homo sapiens
tagagaagcaagagc

SEQ ID NO: 2006767 - DNA, 15 bp, Homo sapiens
agagaagcaagagca

SEQ ID NO: 2006768 - DNA, 15 bp, Homo sapiens
gagaagcaagagcaa

SEQ ID NO: 2006769 - DNA, 15 bp, Homo sapiens
agaagcaagagcaaa

SEQ ID NO: 2006770 - DNA, 15 bp, Homo sapiens
gaagcaagagcaaac

SEQ ID NO: 2006771 - DNA, 15 bp, Homo sapiens
aagcaagagcaaaca

SEQ ID NO: 2006772 - DNA, 15 bp, Homo sapiens
agcaagagcaaacaa

SEQ ID NO: 2006773 - DNA, 15 bp, Homo sapiens
gcaagagcaaacaaa

SEQ ID NO: 2006774 - DNA, 15 bp, Homo sapiens
caagagcaaacaaat

SEQ ID NO: 2006775 - DNA, 15 bp, Homo sapiens
aagagcaaacaaatt

SEQ ID NO: 2006776 - DNA, 15 bp, Homo sapiens
agagcaaacaaattc

SEQ ID NO: 2006777 - DNA, 15 bp, Homo sapiens
gagcaaacaaattca

SEQ ID NO: 2006778 - DNA, 15 bp, Homo sapiens
agcaaacaaattcaa

SEQ ID NO: 2006779 - DNA, 15 bp, Homo sapiens
gcaaacaaattcaaa

SEQ ID NO: 2006780 - DNA, 15 bp, Homo sapiens
caaacaaattcaaaa

SEQ ID NO: 2006781 - DNA, 15 bp, Homo sapiens
aaacaaattcaaaag

SEQ ID NO: 2006782 - DNA, 15 bp, Homo sapiens
aacaaattcaaaagc

SEQ ID NO: 2006783 - DNA, 15 bp, Homo sapiens
acaaattcaaaagct

SEQ ID NO: 2006784 - DNA, 15 bp, Homo sapiens
caaattcaaaagcta

SEQ ID NO: 2006785 - DNA, 15 bp, Homo sapiens
aaattcaaaagctag

SEQ ID NO: 2006786 - DNA, 15 bp, Homo sapiens
aattcaaaagctagc

SEQ ID NO: 2006787 - DNA, 15 bp, Homo sapiens
attcaaaagctagca

SEQ ID NO: 2006788 - DNA, 15 bp, Homo sapiens
ttcaaaagctagcag

SEQ ID NO: 2006789 - DNA, 15 bp, Homo sapiens
tcaaaagctagcaga

SEQ ID NO: 2006790 - DNA, 15 bp, Homo sapiens
caaaagctagcagag

SEQ ID NO: 2006791 - DNA, 15 bp, Homo sapiens
aaaagctagcagagg

SEQ ID NO: 2006792 - DNA, 15 bp, Homo sapiens
aaagctagcagagga

SEQ ID NO: 2006793 - DNA, 15 bp, Homo sapiens
aagctagcagaggac

SEQ ID NO: 2006794 - DNA, 15 bp, Homo sapiens
agctagcagaggaca

SEQ ID NO: 2006795 - DNA, 15 bp, Homo sapiens
gctagcagaggacaa

SEQ ID NO: 2006796 - DNA, 15 bp, Homo sapiens
ctagcagaggacaag

SEQ ID NO: 2006797 - DNA, 15 bp, Homo sapiens
tagcagaggacaaga

SEQ ID NO: 2006798 - DNA, 15 bp, Homo sapiens
agcagaggacaagaa

SEQ ID NO: 2006799 - DNA, 15 bp, Homo sapiens
gcagaggacaagaaa

SEQ ID NO: 2006800 - DNA, 15 bp, Homo sapiens
cagaggacaagaaat

SEQ ID NO: 2006801 - DNA, 15 bp, Homo sapiens
agaggacaagaaata

SEQ ID NO: 2006802 - DNA, 15 bp, Homo sapiens
gaggacaagaaataa

SEQ ID NO: 2006803 - DNA, 15 bp, Homo sapiens
aggacaagaaataac

SEQ ID NO: 2006804 - DNA, 15 bp, Homo sapiens
ggacaagaaataact

SEQ ID NO: 2006805 - DNA, 15 bp, Homo sapiens
gacaagaaataacta

SEQ ID NO: 2006806 - DNA, 15 bp, Homo sapiens
acaagaaataactaa

SEQ ID NO: 2006807 - DNA, 15 bp, Homo sapiens
caagaaataactaag

SEQ ID NO: 2006808 - DNA, 15 bp, Homo sapiens
aagaaataactaaga

SEQ ID NO: 2006809 - DNA, 15 bp, Homo sapiens
agaaataactaagat

SEQ ID NO: 2006810 - DNA, 15 bp, Homo sapiens
gaaataactaagatc

SEQ ID NO: 2006811 - DNA, 15 bp, Homo sapiens
aaataactaagatca

SEQ ID NO: 2006812 - DNA, 15 bp, Homo sapiens
aataactaagatcag

SEQ ID NO: 2006813 - DNA, 15 bp, Homo sapiens
ataactaagatcaga

SEQ ID NO: 2006814 - DNA, 15 bp, Homo sapiens
taactaagatcagag

SEQ ID NO: 2006815 - DNA, 15 bp, Homo sapiens
aactaagatcagagc

SEQ ID NO: 2006816 - DNA, 15 bp, Homo sapiens
actaagatcagagca

SEQ ID NO: 2006817 - DNA, 15 bp, Homo sapiens
ctaagatcagagcag

SEQ ID NO: 2006818 - DNA, 15 bp, Homo sapiens
taagatcagagcaga

SEQ ID NO: 2006819 - DNA, 15 bp, Homo sapiens
aagatcagagcagaa

SEQ ID NO: 2006820 - DNA, 15 bp, Homo sapiens
agatcagagcagaac

SEQ ID NO: 2006821 - DNA, 15 bp, Homo sapiens
gatcagagcagaact

SEQ ID NO: 2006822 - DNA, 15 bp, Homo sapiens
atcagagcagaactg

SEQ ID NO: 2006823 - DNA, 15 bp, Homo sapiens
tcagagcagaactga

SEQ ID NO: 2006824 - DNA, 15 bp, Homo sapiens
cagagcagaactgaa

SEQ ID NO: 2006825 - DNA, 15 bp, Homo sapiens
agagcagaactgaag

SEQ ID NO: 2006826 - DNA, 15 bp, Homo sapiens
gagcagaactgaagg

SEQ ID NO: 2006827 - DNA, 15 bp, Homo sapiens
agcagaactgaagga

SEQ ID NO: 2006828 - DNA, 15 bp, Homo sapiens
gcagaactgaaggag

SEQ ID NO: 2006829 - DNA, 15 bp, Homo sapiens
cagaactgaaggaga

SEQ ID NO: 2006830 - DNA, 15 bp, Homo sapiens
agaactgaaggagat

SEQ ID NO: 2006831 - DNA, 15 bp, Homo sapiens
gaactgaaggagata

SEQ ID NO: 2006832 - DNA, 15 bp, Homo sapiens
aactgaaggagatag

SEQ ID NO: 2006833 - DNA, 15 bp, Homo sapiens
actgaaggagataga

SEQ ID NO: 2006834 - DNA, 15 bp, Homo sapiens
ctgaaggagatagag

SEQ ID NO: 2006835 - DNA, 15 bp, Homo sapiens
tgaaggagatagaga

SEQ ID NO: 2006836 - DNA, 15 bp, Homo sapiens
gaaggagatagagac

SEQ ID NO: 2006837 - DNA, 15 bp, Homo sapiens
aaggagatagagaca

SEQ ID NO: 2006838 - DNA, 15 bp, Homo sapiens
aggagatagagacac

SEQ ID NO: 2006839 - DNA, 15 bp, Homo sapiens
ggagatagagacacg

SEQ ID NO: 2006840 - DNA, 15 bp, Homo sapiens
gagatagagacacga

SEQ ID NO: 2006841 - DNA, 15 bp, Homo sapiens
agatagagacacgaa

SEQ ID NO: 2006842 - DNA, 15 bp, Homo sapiens
gatagagacacgaaa

SEQ ID NO: 2006843 - DNA, 15 bp, Homo sapiens
atagagacacgaaaa

SEQ ID NO: 2006844 - DNA, 15 bp, Homo sapiens
tagagacacgaaaaa

SEQ ID NO: 2006845 - DNA, 15 bp, Homo sapiens
agagacacgaaaaac

SEQ ID NO: 2006846 - DNA, 15 bp, Homo sapiens
gagacacgaaaaacc

SEQ ID NO: 2006847 - DNA, 15 bp, Homo sapiens
agacacgaaaaacct

SEQ ID NO: 2006848 - DNA, 15 bp, Homo sapiens
gacacgaaaaacctt

SEQ ID NO: 2006849 - DNA, 15 bp, Homo sapiens
acacgaaaaaccttt

SEQ ID NO: 2006850 - DNA, 15 bp, Homo sapiens
cacgaaaaacctttc

SEQ ID NO: 2006851 - DNA, 15 bp, Homo sapiens
acgaaaaacctttca

SEQ ID NO: 2006852 - DNA, 15 bp, Homo sapiens
cgaaaaacctttcaa

SEQ ID NO: 2006853 - DNA, 15 bp, Homo sapiens
gaaaaacctttcaaa

SEQ ID NO: 2006854 - DNA, 15 bp, Homo sapiens
aaaaacctttcaaaa

SEQ ID NO: 2006855 - DNA, 15 bp, Homo sapiens
aaaacctttcaaaaa

SEQ ID NO: 2006856 - DNA, 15 bp, Homo sapiens
aaacctttcaaaaaa

SEQ ID NO: 2006857 - DNA, 15 bp, Homo sapiens
aacctttcaaaaaat

SEQ ID NO: 2006858 - DNA, 15 bp, Homo sapiens
acctttcaaaaaatc

SEQ ID NO: 2006859 - DNA, 15 bp, Homo sapiens
cctttcaaaaaatca

SEQ ID NO: 2006860 - DNA, 15 bp, Homo sapiens
ctttcaaaaaatcaa

SEQ ID NO: 2006861 - DNA, 15 bp, Homo sapiens
tttcaaaaaatcaat

SEQ ID NO: 2006862 - DNA, 15 bp, Homo sapiens
ttcaaaaaatcaatg

SEQ ID NO: 2006863 - DNA, 15 bp, Homo sapiens
tcaaaaaatcaatga

SEQ ID NO: 2006864 - DNA, 15 bp, Homo sapiens
caaaaaatcaatgag

SEQ ID NO: 2006865 - DNA, 15 bp, Homo sapiens
aaaaaatcaatgagt

SEQ ID NO: 2006866 - DNA, 15 bp, Homo sapiens
aaaaatcaatgagtc

SEQ ID NO: 2006867 - DNA, 15 bp, Homo sapiens
aaaatcaatgagtct

SEQ ID NO: 2006868 - DNA, 15 bp, Homo sapiens
aaatcaatgagtctc

SEQ ID NO: 2006869 - DNA, 15 bp, Homo sapiens
aatcaatgagtctcc

SEQ ID NO: 2006870 - DNA, 15 bp, Homo sapiens
atcaatgagtctcct

SEQ ID NO: 2006871 - DNA, 15 bp, Homo sapiens
tcaatgagtctcctg

SEQ ID NO: 2006872 - DNA, 15 bp, Homo sapiens
caatgagtctcctga

SEQ ID NO: 2006873 - DNA, 15 bp, Homo sapiens
aatgagtctcctgac

SEQ ID NO: 2006874 - DNA, 15 bp, Homo sapiens
atgagtctcctgacc

SEQ ID NO: 2006875 - DNA, 15 bp, Homo sapiens
tgagtctcctgacct

SEQ ID NO: 2006876 - DNA, 15 bp, Homo sapiens
gagtctcctgacctc

SEQ ID NO: 2006877 - DNA, 15 bp, Homo sapiens
agtctcctgacctcg

SEQ ID NO: 2006878 - DNA, 15 bp, Homo sapiens
gtctcctgacctcgt

SEQ ID NO: 2006879 - DNA, 15 bp, Homo sapiens
cctcgtgatccgccg

SEQ ID NO: 2006880 - DNA, 15 bp, Homo sapiens
ctcgtgatccgccgc

SEQ ID NO: 2006881 - DNA, 15 bp, Homo sapiens
tcgtgatccgccgcc

SEQ ID NO: 2006882 - DNA, 15 bp, Homo sapiens
cgtgatccgccgcct

SEQ ID NO: 2006883 - DNA, 15 bp, Homo sapiens
gtgatccgccgcctt

SEQ ID NO: 2006884 - DNA, 15 bp, Homo sapiens
tgatccgccgccttg

SEQ ID NO: 2006885 - DNA, 15 bp, Homo sapiens
gatccgccgccttgg

SEQ ID NO: 2006886 - DNA, 15 bp, Homo sapiens
atccgccgccttggc

SEQ ID NO: 2006887 - DNA, 15 bp, Homo sapiens
tccgccgccttggcc

SEQ ID NO: 2006888 - DNA, 15 bp, Homo sapiens
ccgccgccttggcct

SEQ ID NO: 2006889 - DNA, 15 bp, Homo sapiens
cgccgccttggcctc

SEQ ID NO: 2006890 - DNA, 15 bp, Homo sapiens
gccgccttggcctca

SEQ ID NO: 2006891 - DNA, 15 bp, Homo sapiens
ccgccttggcctcag

SEQ ID NO: 2006892 - DNA, 15 bp, Homo sapiens
cgccttggcctcagt

SEQ ID NO: 2006893 - DNA, 15 bp, Homo sapiens
gccttggcctcagtg

SEQ ID NO: 2006894 - DNA, 15 bp, Homo sapiens
ccttggcctcagtga

SEQ ID NO: 2006895 - DNA, 15 bp, Homo sapiens
cttggcctcagtgaa

SEQ ID NO: 2006896 - DNA, 15 bp, Homo sapiens
ttggcctcagtgaaa

SEQ ID NO: 2006897 - DNA, 15 bp, Homo sapiens
tggcctcagtgaaac

SEQ ID NO: 2006898 - DNA, 15 bp, Homo sapiens
ggcctcagtgaaacc

SEQ ID NO: 2006899 - DNA, 15 bp, Homo sapiens
gcctcagtgaaaccc

SEQ ID NO: 2006900 - DNA, 15 bp, Homo sapiens
cctcagtgaaacccc

SEQ ID NO: 2006901 - DNA, 15 bp, Homo sapiens
ctcagtgaaacccca

SEQ ID NO: 2006902 - DNA, 15 bp, Homo sapiens
tcagtgaaaccccat

SEQ ID NO: 2006903 - DNA, 15 bp, Homo sapiens
aaaaaaattagccgg

SEQ ID NO: 2006904 - DNA, 15 bp, Homo sapiens
aggagaatggcgtgc

SEQ ID NO: 2006905 - DNA, 15 bp, Homo sapiens
ggagaatggcgtgca

SEQ ID NO: 2006906 - DNA, 15 bp, Homo sapiens
gagaatggcgtgcac

SEQ ID NO: 2006907 - DNA, 15 bp, Homo sapiens
agaatggcgtgcacc

SEQ ID NO: 2006908 - DNA, 15 bp, Homo sapiens
gaatggcgtgcaccc

SEQ ID NO: 2006909 - DNA, 15 bp, Homo sapiens
aatggcgtgcacccg

SEQ ID NO: 2006910 - DNA, 15 bp, Homo sapiens
atggcgtgcacccgg

SEQ ID NO: 2006911 - DNA, 15 bp, Homo sapiens
tggcgtgcacccggg

SEQ ID NO: 2006912 - DNA, 15 bp, Homo sapiens
ggcgtgcacccggga

SEQ ID NO: 2006913 - DNA, 15 bp, Homo sapiens
gcgtgcacccgggag

SEQ ID NO: 2006914 - DNA, 15 bp, Homo sapiens
cgtgcacccgggagg

SEQ ID NO: 2006915 - DNA, 15 bp, Homo sapiens
gtgcacccgggaggc

SEQ ID NO: 2006916 - DNA, 15 bp, Homo sapiens
tgcacccgggaggca

SEQ ID NO: 2006917 - DNA, 15 bp, Homo sapiens
gcacccgggaggcag

SEQ ID NO: 2006918 - DNA, 15 bp, Homo sapiens
cacccgggaggcaga

SEQ ID NO: 2006919 - DNA, 15 bp, Homo sapiens
cttgcagtgagccag

SEQ ID NO: 2006920 - DNA, 15 bp, Homo sapiens
ttgcagtgagccagg

SEQ ID NO: 2006921 - DNA, 15 bp, Homo sapiens
gtgagccaggatcgt

SEQ ID NO: 2006922 - DNA, 15 bp, Homo sapiens
tgagccaggatcgtg

SEQ ID NO: 2006923 - DNA, 15 bp, Homo sapiens
gagccaggatcgtgc

SEQ ID NO: 2006924 - DNA, 15 bp, Homo sapiens
agccaggatcgtgca

SEQ ID NO: 2006925 - DNA, 15 bp, Homo sapiens
gccaggatcgtgcaa

SEQ ID NO: 2006926 - DNA, 15 bp, Homo sapiens
ccaggatcgtgcaac

SEQ ID NO: 2006927 - DNA, 15 bp, Homo sapiens
caggatcgtgcaact

SEQ ID NO: 2006928 - DNA, 15 bp, Homo sapiens
aggatcgtgcaactg

SEQ ID NO: 2006929 - DNA, 15 bp, Homo sapiens
ggatcgtgcaactgc

SEQ ID NO: 2006930 - DNA, 15 bp, Homo sapiens
gatcgtgcaactgca

SEQ ID NO: 2006931 - DNA, 15 bp, Homo sapiens
atcgtgcaactgcac

SEQ ID NO: 2006932 - DNA, 15 bp, Homo sapiens
tcgtgcaactgcact

SEQ ID NO: 2006933 - DNA, 15 bp, Homo sapiens
cgtgcaactgcactc

SEQ ID NO: 2006934 - DNA, 15 bp, Homo sapiens
gcaactgcactccaa

SEQ ID NO: 2006935 - DNA, 15 bp, Homo sapiens
caactgcactccaac

SEQ ID NO: 2006936 - DNA, 15 bp, Homo sapiens
aactgcactccaacc

SEQ ID NO: 2006937 - DNA, 15 bp, Homo sapiens
tgcactccaacctgg

SEQ ID NO: 2006938 - DNA, 15 bp, Homo sapiens
gcactccaacctggg

SEQ ID NO: 2006939 - DNA, 15 bp, Homo sapiens
cactccaacctgggc

SEQ ID NO: 2006940 - DNA, 15 bp, Homo sapiens
actccaacctgggcg

SEQ ID NO: 2006941 - DNA, 15 bp, Homo sapiens
ctccaacctgggcga

SEQ ID NO: 2006942 - DNA, 15 bp, Homo sapiens
tccaacctgggcgac

SEQ ID NO: 2006943 - DNA, 15 bp, Homo sapiens
ccaacctgggcgaca

SEQ ID NO: 2006944 - DNA, 15 bp, Homo sapiens
caacctgggcgacag

SEQ ID NO: 2006945 - DNA, 15 bp, Homo sapiens
aacctgggcgacaga

SEQ ID NO: 2006946 - DNA, 15 bp, Homo sapiens
acctgggcgacagag

SEQ ID NO: 2006947 - DNA, 15 bp, Homo sapiens
gagcaagactctgtt

SEQ ID NO: 2006948 - DNA, 15 bp, Homo sapiens
agcaagactctgttt

SEQ ID NO: 2006949 - DNA, 15 bp, Homo sapiens
gcaagactctgttta

SEQ ID NO: 2006950 - DNA, 15 bp, Homo sapiens
caagactctgtttaa

SEQ ID NO: 2006951 - DNA, 15 bp, Homo sapiens
aagactctgtttaaa

SEQ ID NO: 2006952 - DNA, 15 bp, Homo sapiens
agactctgtttaaaa

SEQ ID NO: 2006953 - DNA, 15 bp, Homo sapiens
gactctgtttaaaaa

SEQ ID NO: 2006954 - DNA, 15 bp, Homo sapiens
actctgtttaaaaaa

SEQ ID NO: 2006955 - DNA, 15 bp, Homo sapiens
ctctgtttaaaaaaa

SEQ ID NO: 2006956 - DNA, 15 bp, Homo sapiens
tctgtttaaaaaaaa

SEQ ID NO: 2006957 - DNA, 15 bp, Homo sapiens
aaaaaaaaatcaatg

SEQ ID NO: 2006958 - DNA, 15 bp, Homo sapiens
aaaaaaaatcaatga

SEQ ID NO: 2006959 - DNA, 15 bp, Homo sapiens
aaaaaaatcaatgaa

SEQ ID NO: 2006960 - DNA, 15 bp, Homo sapiens
aaaaaatcaatgaat

SEQ ID NO: 2006961 - DNA, 15 bp, Homo sapiens
aaaaatcaatgaatc

SEQ ID NO: 2006962 - DNA, 15 bp, Homo sapiens
aaaatcaatgaatcc

SEQ ID NO: 2006963 - DNA, 15 bp, Homo sapiens
aaatcaatgaatcca

SEQ ID NO: 2006964 - DNA, 15 bp, Homo sapiens
aatcaatgaatccag

SEQ ID NO: 2006965 - DNA, 15 bp, Homo sapiens
atcaatgaatccagg

SEQ ID NO: 2006966 - DNA, 15 bp, Homo sapiens
tcaatgaatccagga

SEQ ID NO: 2006967 - DNA, 15 bp, Homo sapiens
caatgaatccaggag

SEQ ID NO: 2006968 - DNA, 15 bp, Homo sapiens
aatgaatccaggagc

SEQ ID NO: 2006969 - DNA, 15 bp, Homo sapiens
atgaatccaggagct

SEQ ID NO: 2006970 - DNA, 15 bp, Homo sapiens
tgaatccaggagctg

SEQ ID NO: 2006971 - DNA, 15 bp, Homo sapiens
gaatccaggagctgg

SEQ ID NO: 2006972 - DNA, 15 bp, Homo sapiens
aatccaggagctggt

SEQ ID NO: 2006973 - DNA, 15 bp, Homo sapiens
atccaggagctggtt

SEQ ID NO: 2006974 - DNA, 15 bp, Homo sapiens
tccaggagctggttt

SEQ ID NO: 2006975 - DNA, 15 bp, Homo sapiens
ccaggagctggtttt

SEQ ID NO: 2006976 - DNA, 15 bp, Homo sapiens
caggagctggttttt

SEQ ID NO: 2006977 - DNA, 15 bp, Homo sapiens
aggagctggtttttt

SEQ ID NO: 2006978 - DNA, 15 bp, Homo sapiens
ggagctggttttttg

SEQ ID NO: 2006979 - DNA, 15 bp, Homo sapiens
gagctggttttttga

SEQ ID NO: 2006980 - DNA, 15 bp, Homo sapiens
agctggttttttgaa

SEQ ID NO: 2006981 - DNA, 15 bp, Homo sapiens
gctggttttttgaaa

SEQ ID NO: 2006982 - DNA, 15 bp, Homo sapiens
ctggttttttgaaaa

SEQ ID NO: 2006983 - DNA, 15 bp, Homo sapiens
tggttttttgaaaag

SEQ ID NO: 2006984 - DNA, 15 bp, Homo sapiens
ggttttttgaaaaga

SEQ ID NO: 2006985 - DNA, 15 bp, Homo sapiens
gttttttgaaaagat

SEQ ID NO: 2006986 - DNA, 15 bp, Homo sapiens
ttttttgaaaagatc

SEQ ID NO: 2006987 - DNA, 15 bp, Homo sapiens
tttttgaaaagatca

SEQ ID NO: 2006988 - DNA, 15 bp, Homo sapiens
ttttgaaaagatcaa

SEQ ID NO: 2006989 - DNA, 15 bp, Homo sapiens
tttgaaaagatcaac

SEQ ID NO: 2006990 - DNA, 15 bp, Homo sapiens
ttgaaaagatcaaca

SEQ ID NO: 2006991 - DNA, 15 bp, Homo sapiens
tgaaaagatcaacaa

SEQ ID NO: 2006992 - DNA, 15 bp, Homo sapiens
gaaaagatcaacaaa

SEQ ID NO: 2006993 - DNA, 15 bp, Homo sapiens
aaaagatcaacaaaa

SEQ ID NO: 2006994 - DNA, 15 bp, Homo sapiens
aaagatcaacaaaat

SEQ ID NO: 2006995 - DNA, 15 bp, Homo sapiens
aagatcaacaaaata

SEQ ID NO: 2006996 - DNA, 15 bp, Homo sapiens
agatcaacaaaataa

SEQ ID NO: 2006997 - DNA, 15 bp, Homo sapiens
gatcaacaaaataaa

SEQ ID NO: 2006998 - DNA, 15 bp, Homo sapiens
atcaacaaaataaat

SEQ ID NO: 2006999 - DNA, 15 bp, Homo sapiens
tcaacaaaataaata

SEQ ID NO: 2007000 - DNA, 15 bp, Homo sapiens
caacaaaataaatag

SEQ ID NO: 2007001 - DNA, 15 bp, Homo sapiens
aacaaaataaataga

SEQ ID NO: 2007002 - DNA, 15 bp, Homo sapiens
acaaaataaatagac

SEQ ID NO: 2007003 - DNA, 15 bp, Homo sapiens
caaaataaatagacc

SEQ ID NO: 2007004 - DNA, 15 bp, Homo sapiens
aaaataaatagacca

SEQ ID NO: 2007005 - DNA, 15 bp, Homo sapiens
aaataaatagaccac

SEQ ID NO: 2007006 - DNA, 15 bp, Homo sapiens
aataaatagaccact

SEQ ID NO: 2007007 - DNA, 15 bp, Homo sapiens
ataaatagaccacta

SEQ ID NO: 2007008 - DNA, 15 bp, Homo sapiens
taaatagaccactag

SEQ ID NO: 2007009 - DNA, 15 bp, Homo sapiens
atagaccactagcca

SEQ ID NO: 2007010 - DNA, 15 bp, Homo sapiens
tagaccactagccag

SEQ ID NO: 2007011 - DNA, 15 bp, Homo sapiens
agaccactagccaga

SEQ ID NO: 2007012 - DNA, 15 bp, Homo sapiens
gaccactagccagac

SEQ ID NO: 2007013 - DNA, 15 bp, Homo sapiens
accactagccagact

SEQ ID NO: 2007014 - DNA, 15 bp, Homo sapiens
ccactagccagactc

SEQ ID NO: 2007015 - DNA, 15 bp, Homo sapiens
cactagccagactca

SEQ ID NO: 2007016 - DNA, 15 bp, Homo sapiens
actagccagactcat

SEQ ID NO: 2007017 - DNA, 15 bp, Homo sapiens
ctagccagactcata

SEQ ID NO: 2007018 - DNA, 15 bp, Homo sapiens
tagccagactcataa

SEQ ID NO: 2007019 - DNA, 15 bp, Homo sapiens
agccagactcataaa

SEQ ID NO: 2007020 - DNA, 15 bp, Homo sapiens
gccagactcataaag

SEQ ID NO: 2007021 - DNA, 15 bp, Homo sapiens
ccagactcataaaga

SEQ ID NO: 2007022 - DNA, 15 bp, Homo sapiens
cagactcataaagaa

SEQ ID NO: 2007023 - DNA, 15 bp, Homo sapiens
agactcataaagaag

SEQ ID NO: 2007024 - DNA, 15 bp, Homo sapiens
gactcataaagaaga

SEQ ID NO: 2007025 - DNA, 15 bp, Homo sapiens
actcataaagaagaa

SEQ ID NO: 2007026 - DNA, 15 bp, Homo sapiens
ctcataaagaagaaa

SEQ ID NO: 2007027 - DNA, 15 bp, Homo sapiens
tcataaagaagaaag

SEQ ID NO: 2007028 - DNA, 15 bp, Homo sapiens
cataaagaagaaaga

SEQ ID NO: 2007029 - DNA, 15 bp, Homo sapiens
ataaagaagaaagag

SEQ ID NO: 2007030 - DNA, 15 bp, Homo sapiens
taaagaagaaagaga

SEQ ID NO: 2007031 - DNA, 15 bp, Homo sapiens
aaagaagaaagagag

SEQ ID NO: 2007032 - DNA, 15 bp, Homo sapiens
aagaagaaagagagg

SEQ ID NO: 2007033 - DNA, 15 bp, Homo sapiens
agaagaaagagagga

SEQ ID NO: 2007034 - DNA, 15 bp, Homo sapiens
gaagaaagagaggag

SEQ ID NO: 2007035 - DNA, 15 bp, Homo sapiens
aagaaagagaggaga

SEQ ID NO: 2007036 - DNA, 15 bp, Homo sapiens
agaaagagaggagaa

SEQ ID NO: 2007037 - DNA, 15 bp, Homo sapiens
gaaagagaggagaat

SEQ ID NO: 2007038 - DNA, 15 bp, Homo sapiens
aaagagaggagaatc

SEQ ID NO: 2007039 - DNA, 15 bp, Homo sapiens
aagagaggagaatca

SEQ ID NO: 2007040 - DNA, 15 bp, Homo sapiens
agagaggagaatcaa

SEQ ID NO: 2007041 - DNA, 15 bp, Homo sapiens
gagaggagaatcaaa

SEQ ID NO: 2007042 - DNA, 15 bp, Homo sapiens
agaggagaatcaaat

SEQ ID NO: 2007043 - DNA, 15 bp, Homo sapiens
gaggagaatcaaata

SEQ ID NO: 2007044 - DNA, 15 bp, Homo sapiens
aggagaatcaaatag

SEQ ID NO: 2007045 - DNA, 15 bp, Homo sapiens
ggagaatcaaataga

SEQ ID NO: 2007046 - DNA, 15 bp, Homo sapiens
gagaatcaaatagac

SEQ ID NO: 2007047 - DNA, 15 bp, Homo sapiens
agaatcaaatagacg

SEQ ID NO: 2007048 - DNA, 15 bp, Homo sapiens
gaatcaaatagacgc

SEQ ID NO: 2007049 - DNA, 15 bp, Homo sapiens
aatcaaatagacgca

SEQ ID NO: 2007050 - DNA, 15 bp, Homo sapiens
atcaaatagacgcaa

SEQ ID NO: 2007051 - DNA, 15 bp, Homo sapiens
tcaaatagacgcaat

SEQ ID NO: 2007052 - DNA, 15 bp, Homo sapiens
caaatagacgcaata

SEQ ID NO: 2007053 - DNA, 15 bp, Homo sapiens
aaatagacgcaataa

SEQ ID NO: 2007054 - DNA, 15 bp, Homo sapiens
aatagacgcaataaa

SEQ ID NO: 2007055 - DNA, 15 bp, Homo sapiens
atagacgcaataaaa

SEQ ID NO: 2007056 - DNA, 15 bp, Homo sapiens
tagacgcaataaaaa

SEQ ID NO: 2007057 - DNA, 15 bp, Homo sapiens
agacgcaataaaaaa

SEQ ID NO: 2007058 - DNA, 15 bp, Homo sapiens
gacgcaataaaaaat

SEQ ID NO: 2007059 - DNA, 15 bp, Homo sapiens
acgcaataaaaaatg

SEQ ID NO: 2007060 - DNA, 15 bp, Homo sapiens
cgcaataaaaaatga

SEQ ID NO: 2007061 - DNA, 15 bp, Homo sapiens
gcaataaaaaatgat

SEQ ID NO: 2007062 - DNA, 15 bp, Homo sapiens
caataaaaaatgata

SEQ ID NO: 2007063 - DNA, 15 bp, Homo sapiens
aataaaaaatgataa

SEQ ID NO: 2007064 - DNA, 15 bp, Homo sapiens
ataaaaaatgataaa

SEQ ID NO: 2007065 - DNA, 15 bp, Homo sapiens
taaaaaatgataaaa

SEQ ID NO: 2007066 - DNA, 15 bp, Homo sapiens
aaaaaatgataaaag

SEQ ID NO: 2007067 - DNA, 15 bp, Homo sapiens
aaaaatgataaaagg

SEQ ID NO: 2007068 - DNA, 15 bp, Homo sapiens
aaaatgataaaaggg

SEQ ID NO: 2007069 - DNA, 15 bp, Homo sapiens
aaatgataaaaggga

SEQ ID NO: 2007070 - DNA, 15 bp, Homo sapiens
aatgataaaagggat

SEQ ID NO: 2007071 - DNA, 15 bp, Homo sapiens
atgataaaagggata

SEQ ID NO: 2007072 - DNA, 15 bp, Homo sapiens
tgataaaagggatat

SEQ ID NO: 2007073 - DNA, 15 bp, Homo sapiens
gataaaagggatatc

SEQ ID NO: 2007074 - DNA, 15 bp, Homo sapiens
ataaaagggatatca

SEQ ID NO: 2007075 - DNA, 15 bp, Homo sapiens
taaaagggatatcac

SEQ ID NO: 2007076 - DNA, 15 bp, Homo sapiens
aaaagggatatcacc

SEQ ID NO: 2007077 - DNA, 15 bp, Homo sapiens
aaagggatatcacca

SEQ ID NO: 2007078 - DNA, 15 bp, Homo sapiens
aagggatatcaccac

SEQ ID NO: 2007079 - DNA, 15 bp, Homo sapiens
agggatatcaccacc

SEQ ID NO: 2007080 - DNA, 15 bp, Homo sapiens
gggatatcaccaccg

SEQ ID NO: 2007081 - DNA, 15 bp, Homo sapiens
ggatatcaccaccga

SEQ ID NO: 2007082 - DNA, 15 bp, Homo sapiens
gatatcaccaccgat

SEQ ID NO: 2007083 - DNA, 15 bp, Homo sapiens
atatcaccaccgatc

SEQ ID NO: 2007084 - DNA, 15 bp, Homo sapiens
tatcaccaccgatcc

SEQ ID NO: 2007085 - DNA, 15 bp, Homo sapiens
atcaccaccgatccc

SEQ ID NO: 2007086 - DNA, 15 bp, Homo sapiens
tcaccaccgatccca

SEQ ID NO: 2007087 - DNA, 15 bp, Homo sapiens
caccaccgatcccac

SEQ ID NO: 2007088 - DNA, 15 bp, Homo sapiens
accaccgatcccaca

SEQ ID NO: 2007089 - DNA, 15 bp, Homo sapiens
ccaccgatcccacag

SEQ ID NO: 2007090 - DNA, 15 bp, Homo sapiens
caccgatcccacaga

SEQ ID NO: 2007091 - DNA, 15 bp, Homo sapiens
accgatcccacagaa

SEQ ID NO: 2007092 - DNA, 15 bp, Homo sapiens
ccgatcccacagaaa

SEQ ID NO: 2007093 - DNA, 15 bp, Homo sapiens
cgatcccacagaaat

SEQ ID NO: 2007094 - DNA, 15 bp, Homo sapiens
gatcccacagaaata

SEQ ID NO: 2007095 - DNA, 15 bp, Homo sapiens
atcccacagaaatac

SEQ ID NO: 2007096 - DNA, 15 bp, Homo sapiens
tcccacagaaataca

SEQ ID NO: 2007097 - DNA, 15 bp, Homo sapiens
cccacagaaatacaa

SEQ ID NO: 2007098 - DNA, 15 bp, Homo sapiens
ccacagaaatacaaa

SEQ ID NO: 2007099 - DNA, 15 bp, Homo sapiens
cacagaaatacaaac

SEQ ID NO: 2007100 - DNA, 15 bp, Homo sapiens
acagaaatacaaact

SEQ ID NO: 2007101 - DNA, 15 bp, Homo sapiens
cagaaatacaaacta

SEQ ID NO: 2007102 - DNA, 15 bp, Homo sapiens
agaaatacaaactac

SEQ ID NO: 2007103 - DNA, 15 bp, Homo sapiens
gaaatacaaactacc

SEQ ID NO: 2007104 - DNA, 15 bp, Homo sapiens
aaatacaaactacca

SEQ ID NO: 2007105 - DNA, 15 bp, Homo sapiens
aatacaaactaccat

SEQ ID NO: 2007106 - DNA, 15 bp, Homo sapiens
atacaaactaccatc

SEQ ID NO: 2007107 - DNA, 15 bp, Homo sapiens
tacaaactaccatca

SEQ ID NO: 2007108 - DNA, 15 bp, Homo sapiens
acaaactaccatcag

SEQ ID NO: 2007109 - DNA, 15 bp, Homo sapiens
caaactaccatcaga

SEQ ID NO: 2007110 - DNA, 15 bp, Homo sapiens
aaactaccatcagag

SEQ ID NO: 2007111 - DNA, 15 bp, Homo sapiens
aactaccatcagaga

SEQ ID NO: 2007112 - DNA, 15 bp, Homo sapiens
actaccatcagagaa

SEQ ID NO: 2007113 - DNA, 15 bp, Homo sapiens
ctaccatcagagaat

SEQ ID NO: 2007114 - DNA, 15 bp, Homo sapiens
taccatcagagaata

SEQ ID NO: 2007115 - DNA, 15 bp, Homo sapiens
accatcagagaatac

SEQ ID NO: 2007116 - DNA, 15 bp, Homo sapiens
ccatcagagaatact

SEQ ID NO: 2007117 - DNA, 15 bp, Homo sapiens
catcagagaatacta

SEQ ID NO: 2007118 - DNA, 15 bp, Homo sapiens
atcagagaatactat

SEQ ID NO: 2007119 - DNA, 15 bp, Homo sapiens
tcagagaatactata

SEQ ID NO: 2007120 - DNA, 15 bp, Homo sapiens
cagagaatactataa

SEQ ID NO: 2007121 - DNA, 15 bp, Homo sapiens
agagaatactataaa

SEQ ID NO: 2007122 - DNA, 15 bp, Homo sapiens
gagaatactataaac

SEQ ID NO: 2007123 - DNA, 15 bp, Homo sapiens
agaatactataaaca

SEQ ID NO: 2007124 - DNA, 15 bp, Homo sapiens
gaatactataaacac

SEQ ID NO: 2007125 - DNA, 15 bp, Homo sapiens
aatactataaacacc

SEQ ID NO: 2007126 - DNA, 15 bp, Homo sapiens
atactataaacacct

SEQ ID NO: 2007127 - DNA, 15 bp, Homo sapiens
tactataaacacctc

SEQ ID NO: 2007128 - DNA, 15 bp, Homo sapiens
actataaacacctct

SEQ ID NO: 2007129 - DNA, 15 bp, Homo sapiens
ctataaacacctctg

SEQ ID NO: 2007130 - DNA, 15 bp, Homo sapiens
tataaacacctctgt

SEQ ID NO: 2007131 - DNA, 15 bp, Homo sapiens
ataaacacctctgtg

SEQ ID NO: 2007132 - DNA, 15 bp, Homo sapiens
taaacacctctgtgc

SEQ ID NO: 2007133 - DNA, 15 bp, Homo sapiens
aaacacctctgtgca

SEQ ID NO: 2007134 - DNA, 15 bp, Homo sapiens
aacacctctgtgcaa

SEQ ID NO: 2007135 - DNA, 15 bp, Homo sapiens
acacctctgtgcaaa

SEQ ID NO: 2007136 - DNA, 15 bp, Homo sapiens
cacctctgtgcaaat

SEQ ID NO: 2007137 - DNA, 15 bp, Homo sapiens
acctctgtgcaaata

SEQ ID NO: 2007138 - DNA, 15 bp, Homo sapiens
cctctgtgcaaataa

SEQ ID NO: 2007139 - DNA, 15 bp, Homo sapiens
ctctgtgcaaataaa

SEQ ID NO: 2007140 - DNA, 15 bp, Homo sapiens
tctgtgcaaataaac

SEQ ID NO: 2007141 - DNA, 15 bp, Homo sapiens
ctgtgcaaataaact

SEQ ID NO: 2007142 - DNA, 15 bp, Homo sapiens
tgtgcaaataaacta

SEQ ID NO: 2007143 - DNA, 15 bp, Homo sapiens
gtgcaaataaactag

SEQ ID NO: 2007144 - DNA, 15 bp, Homo sapiens
tgcaaataaactaga

SEQ ID NO: 2007145 - DNA, 15 bp, Homo sapiens
gcaaataaactagaa

SEQ ID NO: 2007146 - DNA, 15 bp, Homo sapiens
caaataaactagaaa

SEQ ID NO: 2007147 - DNA, 15 bp, Homo sapiens
aaataaactagaaaa

SEQ ID NO: 2007148 - DNA, 15 bp, Homo sapiens
aataaactagaaaat

SEQ ID NO: 2007149 - DNA, 15 bp, Homo sapiens
ataaactagaaaatc

SEQ ID NO: 2007150 - DNA, 15 bp, Homo sapiens
taaactagaaaatct

SEQ ID NO: 2007151 - DNA, 15 bp, Homo sapiens
aaactagaaaatcta

SEQ ID NO: 2007152 - DNA, 15 bp, Homo sapiens
aactagaaaatctag

SEQ ID NO: 2007153 - DNA, 15 bp, Homo sapiens
actagaaaatctagc

SEQ ID NO: 2007154 - DNA, 15 bp, Homo sapiens
ggaagggcacattta

SEQ ID NO: 2007155 - DNA, 15 bp, Homo sapiens
aagggcacatttagt

SEQ ID NO: 2007156 - DNA, 15 bp, Homo sapiens
agggcacatttagta

SEQ ID NO: 2007157 - DNA, 15 bp, Homo sapiens
gggcacatttagtaa

SEQ ID NO: 2007158 - DNA, 15 bp, Homo sapiens
ggcacatttagtaac

SEQ ID NO: 2007159 - DNA, 15 bp, Homo sapiens
gcacatttagtaact

SEQ ID NO: 2007160 - DNA, 15 bp, Homo sapiens
cacatttagtaactg

SEQ ID NO: 2007161 - DNA, 15 bp, Homo sapiens
acatttagtaactgc

SEQ ID NO: 2007162 - DNA, 15 bp, Homo sapiens
catttagtaactgct

SEQ ID NO: 2007163 - DNA, 15 bp, Homo sapiens
atttagtaactgctc

SEQ ID NO: 2007164 - DNA, 15 bp, Homo sapiens
tttagtaactgctca

SEQ ID NO: 2007165 - DNA, 15 bp, Homo sapiens
ttagtaactgctcaa

SEQ ID NO: 2007166 - DNA, 15 bp, Homo sapiens
tagtaactgctcaaa

SEQ ID NO: 2007167 - DNA, 15 bp, Homo sapiens
agtaactgctcaaaa

SEQ ID NO: 2007168 - DNA, 15 bp, Homo sapiens
gtaactgctcaaaat

SEQ ID NO: 2007169 - DNA, 15 bp, Homo sapiens
taactgctcaaaata

SEQ ID NO: 2007170 - DNA, 15 bp, Homo sapiens
aactgctcaaaatac

SEQ ID NO: 2007171 - DNA, 15 bp, Homo sapiens
actgctcaaaatact

SEQ ID NO: 2007172 - DNA, 15 bp, Homo sapiens
ctgctcaaaatacta

SEQ ID NO: 2007173 - DNA, 15 bp, Homo sapiens
tgctcaaaatactaa

SEQ ID NO: 2007174 - DNA, 15 bp, Homo sapiens
gctcaaaatactaaa

SEQ ID NO: 2007175 - DNA, 15 bp, Homo sapiens
ctcaaaatactaaac

SEQ ID NO: 2007176 - DNA, 15 bp, Homo sapiens
tcaaaatactaaact

SEQ ID NO: 2007177 - DNA, 15 bp, Homo sapiens
caaaatactaaactt

SEQ ID NO: 2007178 - DNA, 15 bp, Homo sapiens
aaaatactaaacttt

SEQ ID NO: 2007179 - DNA, 15 bp, Homo sapiens
aaatactaaactttt

SEQ ID NO: 2007180 - DNA, 15 bp, Homo sapiens
aatactaaacttttt

SEQ ID NO: 2007181 - DNA, 15 bp, Homo sapiens
atactaaactttttt

SEQ ID NO: 2007182 - DNA, 15 bp, Homo sapiens
tactaaacttttttg

SEQ ID NO: 2007183 - DNA, 15 bp, Homo sapiens
actaaacttttttgc

SEQ ID NO: 2007184 - DNA, 15 bp, Homo sapiens
ctaaacttttttgcc

SEQ ID NO: 2007185 - DNA, 15 bp, Homo sapiens
taaacttttttgcca

SEQ ID NO: 2007186 - DNA, 15 bp, Homo sapiens
aaacttttttgccaa

SEQ ID NO: 2007187 - DNA, 15 bp, Homo sapiens
aacttttttgccaac

SEQ ID NO: 2007188 - DNA, 15 bp, Homo sapiens
acttttttgccaacc

SEQ ID NO: 2007189 - DNA, 15 bp, Homo sapiens
cttttttgccaacca

SEQ ID NO: 2007190 - DNA, 15 bp, Homo sapiens
ttttttgccaaccac

SEQ ID NO: 2007191 - DNA, 15 bp, Homo sapiens
tttttgccaaccaca

SEQ ID NO: 2007192 - DNA, 15 bp, Homo sapiens
ttttgccaaccacat

SEQ ID NO: 2007193 - DNA, 15 bp, Homo sapiens
tttgccaaccacatg

SEQ ID NO: 2007194 - DNA, 15 bp, Homo sapiens
ttgccaaccacatga

SEQ ID NO: 2007195 - DNA, 15 bp, Homo sapiens
tgccaaccacatgat

SEQ ID NO: 2007196 - DNA, 15 bp, Homo sapiens
gccaaccacatgatg

SEQ ID NO: 2007197 - DNA, 15 bp, Homo sapiens
ccaaccacatgatgt

SEQ ID NO: 2007198 - DNA, 15 bp, Homo sapiens
caaccacatgatgtc

SEQ ID NO: 2007199 - DNA, 15 bp, Homo sapiens
aaccacatgatgtct

SEQ ID NO: 2007200 - DNA, 15 bp, Homo sapiens
accacatgatgtcta

SEQ ID NO: 2007201 - DNA, 15 bp, Homo sapiens
ccacatgatgtctag

SEQ ID NO: 2007202 - DNA, 15 bp, Homo sapiens
cacatgatgtctagt

SEQ ID NO: 2007203 - DNA, 15 bp, Homo sapiens
acatgatgtctagtt

SEQ ID NO: 2007204 - DNA, 15 bp, Homo sapiens
catgatgtctagttt

SEQ ID NO: 2007205 - DNA, 15 bp, Homo sapiens
atgatgtctagtttt

SEQ ID NO: 2007206 - DNA, 15 bp, Homo sapiens
tgatgtctagttttt

SEQ ID NO: 2007207 - DNA, 15 bp, Homo sapiens
gatgtctagtttttc

SEQ ID NO: 2007208 - DNA, 15 bp, Homo sapiens
atgtctagtttttca

SEQ ID NO: 2007209 - DNA, 15 bp, Homo sapiens
tgtctagtttttcat

SEQ ID NO: 2007210 - DNA, 15 bp, Homo sapiens
gtctagtttttcata

SEQ ID NO: 2007211 - DNA, 15 bp, Homo sapiens
tctagtttttcatac

SEQ ID NO: 2007212 - DNA, 15 bp, Homo sapiens
ctagtttttcatact

SEQ ID NO: 2007213 - DNA, 15 bp, Homo sapiens
tagtttttcatactt

SEQ ID NO: 2007214 - DNA, 15 bp, Homo sapiens
agtttttcatactta

SEQ ID NO: 2007215 - DNA, 15 bp, Homo sapiens
gtttttcatacttat

SEQ ID NO: 2007216 - DNA, 15 bp, Homo sapiens
tttttcatacttatt

SEQ ID NO: 2007217 - DNA, 15 bp, Homo sapiens
ttttcatacttattt

SEQ ID NO: 2007218 - DNA, 15 bp, Homo sapiens
tttcatacttatttt

SEQ ID NO: 2007219 - DNA, 15 bp, Homo sapiens
ttcatacttatttta

SEQ ID NO: 2007220 - DNA, 15 bp, Homo sapiens
tcatacttattttat

SEQ ID NO: 2007221 - DNA, 15 bp, Homo sapiens
catacttattttatt

SEQ ID NO: 2007222 - DNA, 15 bp, Homo sapiens
atacttattttattt

SEQ ID NO: 2007223 - DNA, 15 bp, Homo sapiens
tacttattttatttg

SEQ ID NO: 2007224 - DNA, 15 bp, Homo sapiens
acttattttatttga

SEQ ID NO: 2007225 - DNA, 15 bp, Homo sapiens
cttattttatttgaa

SEQ ID NO: 2007226 - DNA, 15 bp, Homo sapiens
ttattttatttgaaa

SEQ ID NO: 2007227 - DNA, 15 bp, Homo sapiens
tattttatttgaaaa

SEQ ID NO: 2007228 - DNA, 15 bp, Homo sapiens
attttatttgaaaat

SEQ ID NO: 2007229 - DNA, 15 bp, Homo sapiens
ttttatttgaaaatg

SEQ ID NO: 2007230 - DNA, 15 bp, Homo sapiens
tttatttgaaaatgt

SEQ ID NO: 2007231 - DNA, 15 bp, Homo sapiens
ttatttgaaaatgtg

SEQ ID NO: 2007232 - DNA, 15 bp, Homo sapiens
tatttgaaaatgtgt

SEQ ID NO: 2007233 - DNA, 15 bp, Homo sapiens
atttgaaaatgtgta

SEQ ID NO: 2007234 - DNA, 15 bp, Homo sapiens
tttgaaaatgtgtat

SEQ ID NO: 2007235 - DNA, 15 bp, Homo sapiens
ttgaaaatgtgtatt

SEQ ID NO: 2007236 - DNA, 15 bp, Homo sapiens
tgaaaatgtgtattt

SEQ ID NO: 2007237 - DNA, 15 bp, Homo sapiens
gaaaatgtgtatttt

SEQ ID NO: 2007238 - DNA, 15 bp, Homo sapiens
aaaatgtgtatttta

SEQ ID NO: 2007239 - DNA, 15 bp, Homo sapiens
aaatgtgtattttac

SEQ ID NO: 2007240 - DNA, 15 bp, Homo sapiens
aatgtgtattttact

SEQ ID NO: 2007241 - DNA, 15 bp, Homo sapiens
atgtgtattttactt

SEQ ID NO: 2007242 - DNA, 15 bp, Homo sapiens
tgtgtattttacttt

SEQ ID NO: 2007243 - DNA, 15 bp, Homo sapiens
gtgtattttacttta

SEQ ID NO: 2007244 - DNA, 15 bp, Homo sapiens
tgtattttactttaa

SEQ ID NO: 2007245 - DNA, 15 bp, Homo sapiens
gtattttactttaaa

SEQ ID NO: 2007246 - DNA, 15 bp, Homo sapiens
tattttactttaaaa

SEQ ID NO: 2007247 - DNA, 15 bp, Homo sapiens
attttactttaaaat

SEQ ID NO: 2007248 - DNA, 15 bp, Homo sapiens
tttactttaaaatga

SEQ ID NO: 2007249 - DNA, 15 bp, Homo sapiens
ttactttaaaatgaa

SEQ ID NO: 2007250 - DNA, 15 bp, Homo sapiens
tactttaaaatgaat

SEQ ID NO: 2007251 - DNA, 15 bp, Homo sapiens
actttaaaatgaata

SEQ ID NO: 2007252 - DNA, 15 bp, Homo sapiens
ctttaaaatgaatat

SEQ ID NO: 2007253 - DNA, 15 bp, Homo sapiens
tttaaaatgaatata

SEQ ID NO: 2007254 - DNA, 15 bp, Homo sapiens
ttaaaatgaatatat

SEQ ID NO: 2007255 - DNA, 15 bp, Homo sapiens
taaaatgaatatatt

SEQ ID NO: 2007256 - DNA, 15 bp, Homo sapiens
aaaatgaatatatta

SEQ ID NO: 2007257 - DNA, 15 bp, Homo sapiens
aaatgaatatattat

SEQ ID NO: 2007258 - DNA, 15 bp, Homo sapiens
aatgaatatattatg

SEQ ID NO: 2007259 - DNA, 15 bp, Homo sapiens
atgaatatattatga

SEQ ID NO: 2007260 - DNA, 15 bp, Homo sapiens
tgaatatattatgaa

SEQ ID NO: 2007261 - DNA, 15 bp, Homo sapiens
gaatatattatgaaa

SEQ ID NO: 2007262 - DNA, 15 bp, Homo sapiens
aatatattatgaaaa

SEQ ID NO: 2007263 - DNA, 15 bp, Homo sapiens
atatattatgaaaaa

SEQ ID NO: 2007264 - DNA, 15 bp, Homo sapiens
tatattatgaaaaat

SEQ ID NO: 2007265 - DNA, 15 bp, Homo sapiens
atattatgaaaaatg

SEQ ID NO: 2007266 - DNA, 15 bp, Homo sapiens
tattatgaaaaatga

SEQ ID NO: 2007267 - DNA, 15 bp, Homo sapiens
attatgaaaaatgaa

SEQ ID NO: 2007268 - DNA, 15 bp, Homo sapiens
ttatgaaaaatgaaa

SEQ ID NO: 2007269 - DNA, 15 bp, Homo sapiens
tatgaaaaatgaaaa

SEQ ID NO: 2007270 - DNA, 15 bp, Homo sapiens
atgaaaaatgaaaac

SEQ ID NO: 2007271 - DNA, 15 bp, Homo sapiens
tgaaaaatgaaaact

SEQ ID NO: 2007272 - DNA, 15 bp, Homo sapiens
gaaaaatgaaaacta

SEQ ID NO: 2007273 - DNA, 15 bp, Homo sapiens
aaaaatgaaaactat

SEQ ID NO: 2007274 - DNA, 15 bp, Homo sapiens
aaaatgaaaactatg

SEQ ID NO: 2007275 - DNA, 15 bp, Homo sapiens
aaatgaaaactatga

SEQ ID NO: 2007276 - DNA, 15 bp, Homo sapiens
aatgaaaactatgaa

SEQ ID NO: 2007277 - DNA, 15 bp, Homo sapiens
atgaaaactatgaaa

SEQ ID NO: 2007278 - DNA, 15 bp, Homo sapiens
tgaaaactatgaaaa

SEQ ID NO: 2007279 - DNA, 15 bp, Homo sapiens
gaaaactatgaaaat

SEQ ID NO: 2007280 - DNA, 15 bp, Homo sapiens
aaaactatgaaaatt

SEQ ID NO: 2007281 - DNA, 15 bp, Homo sapiens
aaactatgaaaatta

SEQ ID NO: 2007282 - DNA, 15 bp, Homo sapiens
aactatgaaaattac

SEQ ID NO: 2007283 - DNA, 15 bp, Homo sapiens
actatgaaaattact

SEQ ID NO: 2007284 - DNA, 15 bp, Homo sapiens
ctatgaaaattacta

SEQ ID NO: 2007285 - DNA, 15 bp, Homo sapiens
tatgaaaattactaa

SEQ ID NO: 2007286 - DNA, 15 bp, Homo sapiens
atgaaaattactaaa

SEQ ID NO: 2007287 - DNA, 15 bp, Homo sapiens
tgaaaattactaaat

SEQ ID NO: 2007288 - DNA, 15 bp, Homo sapiens
gaaaattactaaatc

SEQ ID NO: 2007289 - DNA, 15 bp, Homo sapiens
aaaattactaaatct

SEQ ID NO: 2007290 - DNA, 15 bp, Homo sapiens
aaattactaaatctt

SEQ ID NO: 2007291 - DNA, 15 bp, Homo sapiens
aattactaaatctta

SEQ ID NO: 2007292 - DNA, 15 bp, Homo sapiens
attactaaatcttaa

SEQ ID NO: 2007293 - DNA, 15 bp, Homo sapiens
ttactaaatcttaag

SEQ ID NO: 2007294 - DNA, 15 bp, Homo sapiens
tactaaatcttaagc

SEQ ID NO: 2007295 - DNA, 15 bp, Homo sapiens
actaaatcttaagcc

SEQ ID NO: 2007296 - DNA, 15 bp, Homo sapiens
ctaaatcttaagcct

SEQ ID NO: 2007297 - DNA, 15 bp, Homo sapiens
taaatcttaagccta

SEQ ID NO: 2007298 - DNA, 15 bp, Homo sapiens
aaatcttaagcctaa

SEQ ID NO: 2007299 - DNA, 15 bp, Homo sapiens
aatcttaagcctaaa

SEQ ID NO: 2007300 - DNA, 15 bp, Homo sapiens
atcttaagcctaaag

SEQ ID NO: 2007301 - DNA, 15 bp, Homo sapiens
tcttaagcctaaagt

SEQ ID NO: 2007302 - DNA, 15 bp, Homo sapiens
cttaagcctaaagtt

SEQ ID NO: 2007303 - DNA, 15 bp, Homo sapiens
ttaagcctaaagtta

SEQ ID NO: 2007304 - DNA, 15 bp, Homo sapiens
taagcctaaagttat

SEQ ID NO: 2007305 - DNA, 15 bp, Homo sapiens
aagcctaaagttatt

SEQ ID NO: 2007306 - DNA, 15 bp, Homo sapiens
agcctaaagttattt

SEQ ID NO: 2007307 - DNA, 15 bp, Homo sapiens
gcctaaagttatttt

SEQ ID NO: 2007308 - DNA, 15 bp, Homo sapiens
cctaaagttatttta

SEQ ID NO: 2007309 - DNA, 15 bp, Homo sapiens
ctaaagttattttat

SEQ ID NO: 2007310 - DNA, 15 bp, Homo sapiens
taaagttattttatg

SEQ ID NO: 2007311 - DNA, 15 bp, Homo sapiens
aaagttattttatgt

SEQ ID NO: 2007312 - DNA, 15 bp, Homo sapiens
aagttattttatgtg

SEQ ID NO: 2007313 - DNA, 15 bp, Homo sapiens
agttattttatgtgg

SEQ ID NO: 2007314 - DNA, 15 bp, Homo sapiens
gttattttatgtggt

SEQ ID NO: 2007315 - DNA, 15 bp, Homo sapiens
ttattttatgtggtg

SEQ ID NO: 2007316 - DNA, 15 bp, Homo sapiens
tattttatgtggtgc

SEQ ID NO: 2007317 - DNA, 15 bp, Homo sapiens
attttatgtggtgca

SEQ ID NO: 2007318 - DNA, 15 bp, Homo sapiens
ttttatgtggtgcac

SEQ ID NO: 2007319 - DNA, 15 bp, Homo sapiens
tttatgtggtgcacc

SEQ ID NO: 2007320 - DNA, 15 bp, Homo sapiens
ttatgtggtgcacct

SEQ ID NO: 2007321 - DNA, 15 bp, Homo sapiens
tatgtggtgcacctg

SEQ ID NO: 2007322 - DNA, 15 bp, Homo sapiens
atgtggtgcacctgg

SEQ ID NO: 2007323 - DNA, 15 bp, Homo sapiens
tgtggtgcacctggt

SEQ ID NO: 2007324 - DNA, 15 bp, Homo sapiens
gtggtgcacctggta

SEQ ID NO: 2007325 - DNA, 15 bp, Homo sapiens
tggtgcacctggtac

SEQ ID NO: 2007326 - DNA, 15 bp, Homo sapiens
ggtgcacctggtacc

SEQ ID NO: 2007327 - DNA, 15 bp, Homo sapiens
gtgcacctggtacca

SEQ ID NO: 2007328 - DNA, 15 bp, Homo sapiens
tgcacctggtaccac

SEQ ID NO: 2007329 - DNA, 15 bp, Homo sapiens
gcacctggtaccaca

SEQ ID NO: 2007330 - DNA, 15 bp, Homo sapiens
cacctggtaccacaa

SEQ ID NO: 2007331 - DNA, 15 bp, Homo sapiens
acctggtaccacaat

SEQ ID NO: 2007332 - DNA, 15 bp, Homo sapiens
cctggtaccacaata

SEQ ID NO: 2007333 - DNA, 15 bp, Homo sapiens
ctggtaccacaatac

SEQ ID NO: 2007334 - DNA, 15 bp, Homo sapiens
tggtaccacaatacg

SEQ ID NO: 2007335 - DNA, 15 bp, Homo sapiens
ggtaccacaatacgg

SEQ ID NO: 2007336 - DNA, 15 bp, Homo sapiens
gtaccacaatacggt

SEQ ID NO: 2007337 - DNA, 15 bp, Homo sapiens
taccacaatacggtt

SEQ ID NO: 2007338 - DNA, 15 bp, Homo sapiens
accacaatacggttt

SEQ ID NO: 2007339 - DNA, 15 bp, Homo sapiens
ccacaatacggtttc

SEQ ID NO: 2007340 - DNA, 15 bp, Homo sapiens
cacaatacggtttca

SEQ ID NO: 2007341 - DNA, 15 bp, Homo sapiens
acaatacggtttcaa

SEQ ID NO: 2007342 - DNA, 15 bp, Homo sapiens
caatacggtttcaaa

SEQ ID NO: 2007343 - DNA, 15 bp, Homo sapiens
aatacggtttcaaaa

SEQ ID NO: 2007344 - DNA, 15 bp, Homo sapiens
atacggtttcaaaag

SEQ ID NO: 2007345 - DNA, 15 bp, Homo sapiens
tacggtttcaaaagc

SEQ ID NO: 2007346 - DNA, 15 bp, Homo sapiens
acggtttcaaaagct

SEQ ID NO: 2007347 - DNA, 15 bp, Homo sapiens
cggtttcaaaagcta

SEQ ID NO: 2007348 - DNA, 15 bp, Homo sapiens
ggtttcaaaagctat

SEQ ID NO: 2007349 - DNA, 15 bp, Homo sapiens
gtttcaaaagctatt

SEQ ID NO: 2007350 - DNA, 15 bp, Homo sapiens
tttcaaaagctatta

SEQ ID NO: 2007351 - DNA, 15 bp, Homo sapiens
ttcaaaagctattaa

SEQ ID NO: 2007352 - DNA, 15 bp, Homo sapiens
tcaaaagctattaaa

SEQ ID NO: 2007353 - DNA, 15 bp, Homo sapiens
caaaagctattaaaa

SEQ ID NO: 2007354 - DNA, 15 bp, Homo sapiens
aaaagctattaaaaa

SEQ ID NO: 2007355 - DNA, 15 bp, Homo sapiens
aaagctattaaaaaa

SEQ ID NO: 2007356 - DNA, 15 bp, Homo sapiens
aagctattaaaaaaa

SEQ ID NO: 2007357 - DNA, 15 bp, Homo sapiens
agctattaaaaaaag

SEQ ID NO: 2007358 - DNA, 15 bp, Homo sapiens
gctattaaaaaaaga

SEQ ID NO: 2007359 - DNA, 15 bp, Homo sapiens
ctattaaaaaaagac

SEQ ID NO: 2007360 - DNA, 15 bp, Homo sapiens
tattaaaaaaagaca

SEQ ID NO: 2007361 - DNA, 15 bp, Homo sapiens
attaaaaaaagacac

SEQ ID NO: 2007362 - DNA, 15 bp, Homo sapiens
ttaaaaaaagacaca

SEQ ID NO: 2007363 - DNA, 15 bp, Homo sapiens
taaaaaaagacacag

SEQ ID NO: 2007364 - DNA, 15 bp, Homo sapiens
aaaaaaagacacagt

SEQ ID NO: 2007365 - DNA, 15 bp, Homo sapiens
aaaaaagacacagta

SEQ ID NO: 2007366 - DNA, 15 bp, Homo sapiens
aaaaagacacagtaa

SEQ ID NO: 2007367 - DNA, 15 bp, Homo sapiens
aaaagacacagtaat

SEQ ID NO: 2007368 - DNA, 15 bp, Homo sapiens
aaagacacagtaatt

SEQ ID NO: 2007369 - DNA, 15 bp, Homo sapiens
aagacacagtaattt

SEQ ID NO: 2007370 - DNA, 15 bp, Homo sapiens
agacacagtaatttg

SEQ ID NO: 2007371 - DNA, 15 bp, Homo sapiens
gacacagtaatttga

SEQ ID NO: 2007372 - DNA, 15 bp, Homo sapiens
acacagtaatttgaa

SEQ ID NO: 2007373 - DNA, 15 bp, Homo sapiens
cacagtaatttgaat

SEQ ID NO: 2007374 - DNA, 15 bp, Homo sapiens
acagtaatttgaata

SEQ ID NO: 2007375 - DNA, 15 bp, Homo sapiens
cagtaatttgaatag

SEQ ID NO: 2007376 - DNA, 15 bp, Homo sapiens
agtaatttgaatagg

SEQ ID NO: 2007377 - DNA, 15 bp, Homo sapiens
gtaatttgaatagga

SEQ ID NO: 2007378 - DNA, 15 bp, Homo sapiens
taatttgaataggat

SEQ ID NO: 2007379 - DNA, 15 bp, Homo sapiens
aatttgaataggatg

SEQ ID NO: 2007380 - DNA, 15 bp, Homo sapiens
atttgaataggatgt

SEQ ID NO: 2007381 - DNA, 15 bp, Homo sapiens
tttgaataggatgtt

SEQ ID NO: 2007382 - DNA, 15 bp, Homo sapiens
ttgaataggatgtta

SEQ ID NO: 2007383 - DNA, 15 bp, Homo sapiens
tgaataggatgttat

SEQ ID NO: 2007384 - DNA, 15 bp, Homo sapiens
gaataggatgttata

SEQ ID NO: 2007385 - DNA, 15 bp, Homo sapiens
aataggatgttatat

SEQ ID NO: 2007386 - DNA, 15 bp, Homo sapiens
ataggatgttatatg

SEQ ID NO: 2007387 - DNA, 15 bp, Homo sapiens
taggatgttatatgg

SEQ ID NO: 2007388 - DNA, 15 bp, Homo sapiens
aggatgttatatggg

SEQ ID NO: 2007389 - DNA, 15 bp, Homo sapiens
ggatgttatatggga

SEQ ID NO: 2007390 - DNA, 15 bp, Homo sapiens
gatgttatatgggat

SEQ ID NO: 2007391 - DNA, 15 bp, Homo sapiens
atgttatatgggatg

SEQ ID NO: 2007392 - DNA, 15 bp, Homo sapiens
tgttatatgggatgc

SEQ ID NO: 2007393 - DNA, 15 bp, Homo sapiens
gttatatgggatgcc

SEQ ID NO: 2007394 - DNA, 15 bp, Homo sapiens
ttatatgggatgcct

SEQ ID NO: 2007395 - DNA, 15 bp, Homo sapiens
tatatgggatgcctt

SEQ ID NO: 2007396 - DNA, 15 bp, Homo sapiens
atatgggatgccttt

SEQ ID NO: 2007397 - DNA, 15 bp, Homo sapiens
tatgggatgcctttc

SEQ ID NO: 2007398 - DNA, 15 bp, Homo sapiens
atgggatgcctttct

SEQ ID NO: 2007399 - DNA, 15 bp, Homo sapiens
tgggatgcctttctt

SEQ ID NO: 2007400 - DNA, 15 bp, Homo sapiens
gggatgcctttctta

SEQ ID NO: 2007401 - DNA, 15 bp, Homo sapiens
ggatgcctttcttag

SEQ ID NO: 2007402 - DNA, 15 bp, Homo sapiens
gatgcctttcttagt

SEQ ID NO: 2007403 - DNA, 15 bp, Homo sapiens
atgcctttcttagtt

SEQ ID NO: 2007404 - DNA, 15 bp, Homo sapiens
tgcctttcttagttt

SEQ ID NO: 2007405 - DNA, 15 bp, Homo sapiens
gcctttcttagttta

SEQ ID NO: 2007406 - DNA, 15 bp, Homo sapiens
cctttcttagtttat

SEQ ID NO: 2007407 - DNA, 15 bp, Homo sapiens
ctttcttagtttatc

SEQ ID NO: 2007408 - DNA, 15 bp, Homo sapiens
tttcttagtttatca

SEQ ID NO: 2007409 - DNA, 15 bp, Homo sapiens
ttcttagtttatcag

SEQ ID NO: 2007410 - DNA, 15 bp, Homo sapiens
tcttagtttatcagt

SEQ ID NO: 2007411 - DNA, 15 bp, Homo sapiens
cttagtttatcagtt

SEQ ID NO: 2007412 - DNA, 15 bp, Homo sapiens
ttagtttatcagttt

SEQ ID NO: 2007413 - DNA, 15 bp, Homo sapiens
tagtttatcagtttc

SEQ ID NO: 2007414 - DNA, 15 bp, Homo sapiens
agtttatcagtttct

SEQ ID NO: 2007415 - DNA, 15 bp, Homo sapiens
gtttatcagtttctg

SEQ ID NO: 2007416 - DNA, 15 bp, Homo sapiens
tttatcagtttctga

SEQ ID NO: 2007417 - DNA, 15 bp, Homo sapiens
ttatcagtttctgac

SEQ ID NO: 2007418 - DNA, 15 bp, Homo sapiens
tatcagtttctgaca

SEQ ID NO: 2007419 - DNA, 15 bp, Homo sapiens
atcagtttctgacaa

SEQ ID NO: 2007420 - DNA, 15 bp, Homo sapiens
tcagtttctgacaag

SEQ ID NO: 2007421 - DNA, 15 bp, Homo sapiens
cagtttctgacaaga

SEQ ID NO: 2007422 - DNA, 15 bp, Homo sapiens
agtttctgacaagat

SEQ ID NO: 2007423 - DNA, 15 bp, Homo sapiens
gtttctgacaagatc

SEQ ID NO: 2007424 - DNA, 15 bp, Homo sapiens
tttctgacaagatct

SEQ ID NO: 2007425 - DNA, 15 bp, Homo sapiens
ttctgacaagatctt

SEQ ID NO: 2007426 - DNA, 15 bp, Homo sapiens
tctgacaagatctta

SEQ ID NO: 2007427 - DNA, 15 bp, Homo sapiens
ctgacaagatcttac

SEQ ID NO: 2007428 - DNA, 15 bp, Homo sapiens
tgacaagatcttacg

SEQ ID NO: 2007429 - DNA, 15 bp, Homo sapiens
gacaagatcttacga

SEQ ID NO: 2007430 - DNA, 15 bp, Homo sapiens
acaagatcttacgag

SEQ ID NO: 2007431 - DNA, 15 bp, Homo sapiens
caagatcttacgaga

SEQ ID NO: 2007432 - DNA, 15 bp, Homo sapiens
aagatcttacgagat

SEQ ID NO: 2007433 - DNA, 15 bp, Homo sapiens
agatcttacgagatg

SEQ ID NO: 2007434 - DNA, 15 bp, Homo sapiens
gatcttacgagatgt

SEQ ID NO: 2007435 - DNA, 15 bp, Homo sapiens
atcttacgagatgtg

SEQ ID NO: 2007436 - DNA, 15 bp, Homo sapiens
tcttacgagatgtgt

SEQ ID NO: 2007437 - DNA, 15 bp, Homo sapiens
cttacgagatgtgtt

SEQ ID NO: 2007438 - DNA, 15 bp, Homo sapiens
ttacgagatgtgttg

SEQ ID NO: 2007439 - DNA, 15 bp, Homo sapiens
tacgagatgtgttgg

SEQ ID NO: 2007440 - DNA, 15 bp, Homo sapiens
acgagatgtgttggg

SEQ ID NO: 2007441 - DNA, 15 bp, Homo sapiens
cgagatgtgttgggt

SEQ ID NO: 2007442 - DNA, 15 bp, Homo sapiens
gagatgtgttgggta

SEQ ID NO: 2007443 - DNA, 15 bp, Homo sapiens
agatgtgttgggtaa

SEQ ID NO: 2007444 - DNA, 15 bp, Homo sapiens
gatgtgttgggtaag

SEQ ID NO: 2007445 - DNA, 15 bp, Homo sapiens
atgtgttgggtaagg

SEQ ID NO: 2007446 - DNA, 15 bp, Homo sapiens
tgtgttgggtaagga

SEQ ID NO: 2007447 - DNA, 15 bp, Homo sapiens
gtgttgggtaaggaa

SEQ ID NO: 2007448 - DNA, 15 bp, Homo sapiens
tgttgggtaaggaag

SEQ ID NO: 2007449 - DNA, 15 bp, Homo sapiens
gttgggtaaggaaga

SEQ ID NO: 2007450 - DNA, 15 bp, Homo sapiens
ttgggtaaggaagac

SEQ ID NO: 2007451 - DNA, 15 bp, Homo sapiens
tgggtaaggaagacc

SEQ ID NO: 2007452 - DNA, 15 bp, Homo sapiens
gggtaaggaagaccc

SEQ ID NO: 2007453 - DNA, 15 bp, Homo sapiens
ggtaaggaagaccct

SEQ ID NO: 2007454 - DNA, 15 bp, Homo sapiens
gtaaggaagaccctt

SEQ ID NO: 2007455 - DNA, 15 bp, Homo sapiens
taaggaagacccttc

SEQ ID NO: 2007456 - DNA, 15 bp, Homo sapiens
aaggaagacccttca

SEQ ID NO: 2007457 - DNA, 15 bp, Homo sapiens
aggaagacccttcac

SEQ ID NO: 2007458 - DNA, 15 bp, Homo sapiens
ggaagacccttcact

SEQ ID NO: 2007459 - DNA, 15 bp, Homo sapiens
gaagacccttcactc

SEQ ID NO: 2007460 - DNA, 15 bp, Homo sapiens
aagacccttcactca

SEQ ID NO: 2007461 - DNA, 15 bp, Homo sapiens
agacccttcactcaa

SEQ ID NO: 2007462 - DNA, 15 bp, Homo sapiens
gacccttcactcaat

SEQ ID NO: 2007463 - DNA, 15 bp, Homo sapiens
acccttcactcaatg

SEQ ID NO: 2007464 - DNA, 15 bp, Homo sapiens
cccttcactcaatgt

SEQ ID NO: 2007465 - DNA, 15 bp, Homo sapiens
ccttcactcaatgta

SEQ ID NO: 2007466 - DNA, 15 bp, Homo sapiens
cttcactcaatgtac

SEQ ID NO: 2007467 - DNA, 15 bp, Homo sapiens
ttcactcaatgtact

SEQ ID NO: 2007468 - DNA, 15 bp, Homo sapiens
tcactcaatgtactt

SEQ ID NO: 2007469 - DNA, 15 bp, Homo sapiens
cactcaatgtacttt

SEQ ID NO: 2007470 - DNA, 15 bp, Homo sapiens
actcaatgtactttg

SEQ ID NO: 2007471 - DNA, 15 bp, Homo sapiens
ctcaatgtactttgt

SEQ ID NO: 2007472 - DNA, 15 bp, Homo sapiens
tcaatgtactttgtt

SEQ ID NO: 2007473 - DNA, 15 bp, Homo sapiens
caatgtactttgtta

SEQ ID NO: 2007474 - DNA, 15 bp, Homo sapiens
aatgtactttgttat

SEQ ID NO: 2007475 - DNA, 15 bp, Homo sapiens
atgtactttgttatt

SEQ ID NO: 2007476 - DNA, 15 bp, Homo sapiens
tgtactttgttatta

SEQ ID NO: 2007477 - DNA, 15 bp, Homo sapiens
gtactttgttattat

SEQ ID NO: 2007478 - DNA, 15 bp, Homo sapiens
tactttgttattatt

SEQ ID NO: 2007479 - DNA, 15 bp, Homo sapiens
actttgttattattc

SEQ ID NO: 2007480 - DNA, 15 bp, Homo sapiens
ctttgttattattca

SEQ ID NO: 2007481 - DNA, 15 bp, Homo sapiens
tttgttattattcag

SEQ ID NO: 2007482 - DNA, 15 bp, Homo sapiens
ttgttattattcagc

SEQ ID NO: 2007483 - DNA, 15 bp, Homo sapiens
tgttattattcagct

SEQ ID NO: 2007484 - DNA, 15 bp, Homo sapiens
gttattattcagctt

SEQ ID NO: 2007485 - DNA, 15 bp, Homo sapiens
ttattattcagcttt

SEQ ID NO: 2007486 - DNA, 15 bp, Homo sapiens
tattattcagctttt

SEQ ID NO: 2007487 - DNA, 15 bp, Homo sapiens
attattcagcttttt

SEQ ID NO: 2007488 - DNA, 15 bp, Homo sapiens
ttattcagctttttg

SEQ ID NO: 2007489 - DNA, 15 bp, Homo sapiens
tattcagctttttgt

SEQ ID NO: 2007490 - DNA, 15 bp, Homo sapiens
attcagctttttgtt

SEQ ID NO: 2007491 - DNA, 15 bp, Homo sapiens
ttcagctttttgtta

SEQ ID NO: 2007492 - DNA, 15 bp, Homo sapiens
tcagctttttgttac

SEQ ID NO: 2007493 - DNA, 15 bp, Homo sapiens
cagctttttgttact

SEQ ID NO: 2007494 - DNA, 15 bp, Homo sapiens
agctttttgttactt

SEQ ID NO: 2007495 - DNA, 15 bp, Homo sapiens
gctttttgttacttt

SEQ ID NO: 2007496 - DNA, 15 bp, Homo sapiens
ctttttgttacttta

SEQ ID NO: 2007497 - DNA, 15 bp, Homo sapiens
tttttgttactttag

SEQ ID NO: 2007498 - DNA, 15 bp, Homo sapiens
ttttgttactttagg

SEQ ID NO: 2007499 - DNA, 15 bp, Homo sapiens
tttgttactttaggc

SEQ ID NO: 2007500 - DNA, 15 bp, Homo sapiens
ttgttactttaggct

SEQ ID NO: 2007501 - DNA, 15 bp, Homo sapiens
tgttactttaggctg

SEQ ID NO: 2007502 - DNA, 15 bp, Homo sapiens
gttactttaggctga

SEQ ID NO: 2007503 - DNA, 15 bp, Homo sapiens
ttactttaggctgat

SEQ ID NO: 2007504 - DNA, 15 bp, Homo sapiens
tactttaggctgatt

SEQ ID NO: 2007505 - DNA, 15 bp, Homo sapiens
actttaggctgatta

SEQ ID NO: 2007506 - DNA, 15 bp, Homo sapiens
ctttaggctgattaa

SEQ ID NO: 2007507 - DNA, 15 bp, Homo sapiens
tttaggctgattaac

SEQ ID NO: 2007508 - DNA, 15 bp, Homo sapiens
ttaggctgattaaca

SEQ ID NO: 2007509 - DNA, 15 bp, Homo sapiens
taggctgattaacac

SEQ ID NO: 2007510 - DNA, 15 bp, Homo sapiens
aggctgattaacaca

SEQ ID NO: 2007511 - DNA, 15 bp, Homo sapiens
ggctgattaacacaa

SEQ ID NO: 2007512 - DNA, 15 bp, Homo sapiens
gctgattaacacaag

SEQ ID NO: 2007513 - DNA, 15 bp, Homo sapiens
ctgattaacacaagc

SEQ ID NO: 2007514 - DNA, 15 bp, Homo sapiens
tgattaacacaagct

SEQ ID NO: 2007515 - DNA, 15 bp, Homo sapiens
gattaacacaagctg

SEQ ID NO: 2007516 - DNA, 15 bp, Homo sapiens
attaacacaagctgt

SEQ ID NO: 2007517 - DNA, 15 bp, Homo sapiens
ttaacacaagctgta

SEQ ID NO: 2007518 - DNA, 15 bp, Homo sapiens
taacacaagctgtat

SEQ ID NO: 2007519 - DNA, 15 bp, Homo sapiens
aacacaagctgtata

SEQ ID NO: 2007520 - DNA, 15 bp, Homo sapiens
acacaagctgtataa

SEQ ID NO: 2007521 - DNA, 15 bp, Homo sapiens
cacaagctgtataat

SEQ ID NO: 2007522 - DNA, 15 bp, Homo sapiens
acaagctgtataatt

SEQ ID NO: 2007523 - DNA, 15 bp, Homo sapiens
caagctgtataattt

SEQ ID NO: 2007524 - DNA, 15 bp, Homo sapiens
aagctgtataattta

SEQ ID NO: 2007525 - DNA, 15 bp, Homo sapiens
agctgtataatttag

SEQ ID NO: 2007526 - DNA, 15 bp, Homo sapiens
gctgtataatttagt

SEQ ID NO: 2007527 - DNA, 15 bp, Homo sapiens
ctgtataatttagta

SEQ ID NO: 2007528 - DNA, 15 bp, Homo sapiens
tgtataatttagtaa

SEQ ID NO: 2007529 - DNA, 15 bp, Homo sapiens
gtataatttagtaag

SEQ ID NO: 2007530 - DNA, 15 bp, Homo sapiens
tataatttagtaagt

SEQ ID NO: 2007531 - DNA, 15 bp, Homo sapiens
ataatttagtaagta

SEQ ID NO: 2007532 - DNA, 15 bp, Homo sapiens
taatttagtaagtat

SEQ ID NO: 2007533 - DNA, 15 bp, Homo sapiens
aatttagtaagtata

SEQ ID NO: 2007534 - DNA, 15 bp, Homo sapiens
atttagtaagtataa

SEQ ID NO: 2007535 - DNA, 15 bp, Homo sapiens
tttagtaagtataag

SEQ ID NO: 2007536 - DNA, 15 bp, Homo sapiens
ttagtaagtataagg

SEQ ID NO: 2007537 - DNA, 15 bp, Homo sapiens
tagtaagtataagga

SEQ ID NO: 2007538 - DNA, 15 bp, Homo sapiens
agtaagtataaggaa

SEQ ID NO: 2007539 - DNA, 15 bp, Homo sapiens
gtaagtataaggaaa

SEQ ID NO: 2007540 - DNA, 15 bp, Homo sapiens
taagtataaggaaat

SEQ ID NO: 2007541 - DNA, 15 bp, Homo sapiens
aagtataaggaaatc

SEQ ID NO: 2007542 - DNA, 15 bp, Homo sapiens
agtataaggaaatca

SEQ ID NO: 2007543 - DNA, 15 bp, Homo sapiens
gtataaggaaatcaa

SEQ ID NO: 2007544 - DNA, 15 bp, Homo sapiens
tataaggaaatcaag

SEQ ID NO: 2007545 - DNA, 15 bp, Homo sapiens
ataaggaaatcaagt

SEQ ID NO: 2007546 - DNA, 15 bp, Homo sapiens
taaggaaatcaagtt

SEQ ID NO: 2007547 - DNA, 15 bp, Homo sapiens
aaggaaatcaagttg

SEQ ID NO: 2007548 - DNA, 15 bp, Homo sapiens
aggaaatcaagttgc

SEQ ID NO: 2007549 - DNA, 15 bp, Homo sapiens
ggaaatcaagttgca

SEQ ID NO: 2007550 - DNA, 15 bp, Homo sapiens
gaaatcaagttgcat

SEQ ID NO: 2007551 - DNA, 15 bp, Homo sapiens
aaatcaagttgcatt

SEQ ID NO: 2007552 - DNA, 15 bp, Homo sapiens
aatcaagttgcattg

SEQ ID NO: 2007553 - DNA, 15 bp, Homo sapiens
atcaagttgcattgg

SEQ ID NO: 2007554 - DNA, 15 bp, Homo sapiens
tcaagttgcattggt

SEQ ID NO: 2007555 - DNA, 15 bp, Homo sapiens
caagttgcattggtt

SEQ ID NO: 2007556 - DNA, 15 bp, Homo sapiens
aagttgcattggttg

SEQ ID NO: 2007557 - DNA, 15 bp, Homo sapiens
agttgcattggttgc

SEQ ID NO: 2007558 - DNA, 15 bp, Homo sapiens
gttgcattggttgct

SEQ ID NO: 2007559 - DNA, 15 bp, Homo sapiens
ttgcattggttgctt

SEQ ID NO: 2007560 - DNA, 15 bp, Homo sapiens
tgcattggttgcttt

SEQ ID NO: 2007561 - DNA, 15 bp, Homo sapiens
gcattggttgctttg

SEQ ID NO: 2007562 - DNA, 15 bp, Homo sapiens
cattggttgctttgg

SEQ ID NO: 2007563 - DNA, 15 bp, Homo sapiens
attggttgctttggg

SEQ ID NO: 2007564 - DNA, 15 bp, Homo sapiens
ttggttgctttgggc

SEQ ID NO: 2007565 - DNA, 15 bp, Homo sapiens
tggttgctttgggca

SEQ ID NO: 2007566 - DNA, 15 bp, Homo sapiens
ggttgctttgggcaa

SEQ ID NO: 2007567 - DNA, 15 bp, Homo sapiens
gttgctttgggcaag

SEQ ID NO: 2007568 - DNA, 15 bp, Homo sapiens
ttgctttgggcaagt

SEQ ID NO: 2007569 - DNA, 15 bp, Homo sapiens
tgctttgggcaagtc

SEQ ID NO: 2007570 - DNA, 15 bp, Homo sapiens
gctttgggcaagtca

SEQ ID NO: 2007571 - DNA, 15 bp, Homo sapiens
ctttgggcaagtcaa

SEQ ID NO: 2007572 - DNA, 15 bp, Homo sapiens
tttgggcaagtcaaa

SEQ ID NO: 2007573 - DNA, 15 bp, Homo sapiens
ttgggcaagtcaaaa

SEQ ID NO: 2007574 - DNA, 15 bp, Homo sapiens
tgggcaagtcaaaat

SEQ ID NO: 2007575 - DNA, 15 bp, Homo sapiens
gggcaagtcaaaatt

SEQ ID NO: 2007576 - DNA, 15 bp, Homo sapiens
ggcaagtcaaaattg

SEQ ID NO: 2007577 - DNA, 15 bp, Homo sapiens
gcaagtcaaaattgc

SEQ ID NO: 2007578 - DNA, 15 bp, Homo sapiens
caagtcaaaattgct

SEQ ID NO: 2007579 - DNA, 15 bp, Homo sapiens
aagtcaaaattgctg

SEQ ID NO: 2007580 - DNA, 15 bp, Homo sapiens
agtcaaaattgctga

SEQ ID NO: 2007581 - DNA, 15 bp, Homo sapiens
gtcaaaattgctgag

SEQ ID NO: 2007582 - DNA, 15 bp, Homo sapiens
tcaaaattgctgaga

SEQ ID NO: 2007583 - DNA, 15 bp, Homo sapiens
caaaattgctgagag

SEQ ID NO: 2007584 - DNA, 15 bp, Homo sapiens
aaaattgctgagagt

SEQ ID NO: 2007585 - DNA, 15 bp, Homo sapiens
aaattgctgagagtt

SEQ ID NO: 2007586 - DNA, 15 bp, Homo sapiens
aattgctgagagttg

SEQ ID NO: 2007587 - DNA, 15 bp, Homo sapiens
attgctgagagttgg

SEQ ID NO: 2007588 - DNA, 15 bp, Homo sapiens
ttgctgagagttgga

SEQ ID NO: 2007589 - DNA, 15 bp, Homo sapiens
tgctgagagttggag

SEQ ID NO: 2007590 - DNA, 15 bp, Homo sapiens
gctgagagttggagg

SEQ ID NO: 2007591 - DNA, 15 bp, Homo sapiens
ctgagagttggagga

SEQ ID NO: 2007592 - DNA, 15 bp, Homo sapiens
tgagagttggaggaa

SEQ ID NO: 2007593 - DNA, 15 bp, Homo sapiens
gagagttggaggaat

SEQ ID NO: 2007594 - DNA, 15 bp, Homo sapiens
agagttggaggaatc

SEQ ID NO: 2007595 - DNA, 15 bp, Homo sapiens
gagttggaggaatcc

SEQ ID NO: 2007596 - DNA, 15 bp, Homo sapiens
agttggaggaatcca

SEQ ID NO: 2007597 - DNA, 15 bp, Homo sapiens
gttggaggaatccat

SEQ ID NO: 2007598 - DNA, 15 bp, Homo sapiens
agtatattgctataa

SEQ ID NO: 2007599 - DNA, 15 bp, Homo sapiens
gtatattgctataac

SEQ ID NO: 2007600 - DNA, 15 bp, Homo sapiens
tatattgctataact

SEQ ID NO: 2007601 - DNA, 15 bp, Homo sapiens
atattgctataactt

SEQ ID NO: 2007602 - DNA, 15 bp, Homo sapiens
tattgctataacttc

SEQ ID NO: 2007603 - DNA, 15 bp, Homo sapiens
attgctataacttct

SEQ ID NO: 2007604 - DNA, 15 bp, Homo sapiens
ttgctataacttcta

SEQ ID NO: 2007605 - DNA, 15 bp, Homo sapiens
tgctataacttctat

SEQ ID NO: 2007606 - DNA, 15 bp, Homo sapiens
gctataacttctatt

SEQ ID NO: 2007607 - DNA, 15 bp, Homo sapiens
ctataacttctattt

SEQ ID NO: 2007608 - DNA, 15 bp, Homo sapiens
tataacttctatttt

SEQ ID NO: 2007609 - DNA, 15 bp, Homo sapiens
ataacttctatttta

SEQ ID NO: 2007610 - DNA, 15 bp, Homo sapiens
taacttctattttat

SEQ ID NO: 2007611 - DNA, 15 bp, Homo sapiens
aacttctattttatt

SEQ ID NO: 2007612 - DNA, 15 bp, Homo sapiens
acttctattttatta

SEQ ID NO: 2007613 - DNA, 15 bp, Homo sapiens
cttctattttattat

SEQ ID NO: 2007614 - DNA, 15 bp, Homo sapiens
ttctattttattatt

SEQ ID NO: 2007615 - DNA, 15 bp, Homo sapiens
tctattttattattg

SEQ ID NO: 2007616 - DNA, 15 bp, Homo sapiens
ctattttattattgt

SEQ ID NO: 2007617 - DNA, 15 bp, Homo sapiens
tattttattattgtt

SEQ ID NO: 2007618 - DNA, 15 bp, Homo sapiens
attttattattgttt

SEQ ID NO: 2007619 - DNA, 15 bp, Homo sapiens
ttttattattgtttt

SEQ ID NO: 2007620 - DNA, 15 bp, Homo sapiens
tttattattgttttt

SEQ ID NO: 2007621 - DNA, 15 bp, Homo sapiens
ttattattgttttta

SEQ ID NO: 2007622 - DNA, 15 bp, Homo sapiens
tattattgtttttaa

SEQ ID NO: 2007623 - DNA, 15 bp, Homo sapiens
attattgtttttaat

SEQ ID NO: 2007624 - DNA, 15 bp, Homo sapiens
ttattgtttttaatc

SEQ ID NO: 2007625 - DNA, 15 bp, Homo sapiens
tattgtttttaatct

SEQ ID NO: 2007626 - DNA, 15 bp, Homo sapiens
attgtttttaatctc

SEQ ID NO: 2007627 - DNA, 15 bp, Homo sapiens
ttgtttttaatctct

SEQ ID NO: 2007628 - DNA, 15 bp, Homo sapiens
tgtttttaatctctt

SEQ ID NO: 2007629 - DNA, 15 bp, Homo sapiens
gtttttaatctctta

SEQ ID NO: 2007630 - DNA, 15 bp, Homo sapiens
tttttaatctcttac

SEQ ID NO: 2007631 - DNA, 15 bp, Homo sapiens
ttttaatctcttact

SEQ ID NO: 2007632 - DNA, 15 bp, Homo sapiens
tttaatctcttactg

SEQ ID NO: 2007633 - DNA, 15 bp, Homo sapiens
ttaatctcttactgt

SEQ ID NO: 2007634 - DNA, 15 bp, Homo sapiens
taatctcttactgtg

SEQ ID NO: 2007635 - DNA, 15 bp, Homo sapiens
aatctcttactgtgc

SEQ ID NO: 2007636 - DNA, 15 bp, Homo sapiens
atctcttactgtgcc

SEQ ID NO: 2007637 - DNA, 15 bp, Homo sapiens
tctcttactgtgcct

SEQ ID NO: 2007638 - DNA, 15 bp, Homo sapiens
ctcttactgtgccta

SEQ ID NO: 2007639 - DNA, 15 bp, Homo sapiens
tcttactgtgcctaa

SEQ ID NO: 2007640 - DNA, 15 bp, Homo sapiens
cttactgtgcctaat

SEQ ID NO: 2007641 - DNA, 15 bp, Homo sapiens
ttactgtgcctaatt

SEQ ID NO: 2007642 - DNA, 15 bp, Homo sapiens
tactgtgcctaattt

SEQ ID NO: 2007643 - DNA, 15 bp, Homo sapiens
actgtgcctaattta

SEQ ID NO: 2007644 - DNA, 15 bp, Homo sapiens
ctgtgcctaatttat

SEQ ID NO: 2007645 - DNA, 15 bp, Homo sapiens
tgtgcctaatttata

SEQ ID NO: 2007646 - DNA, 15 bp, Homo sapiens
gtgcctaatttataa

SEQ ID NO: 2007647 - DNA, 15 bp, Homo sapiens
tgcctaatttataat

SEQ ID NO: 2007648 - DNA, 15 bp, Homo sapiens
gcctaatttataatt

SEQ ID NO: 2007649 - DNA, 15 bp, Homo sapiens
cctaatttataatta

SEQ ID NO: 2007650 - DNA, 15 bp, Homo sapiens
ctaatttataattaa

SEQ ID NO: 2007651 - DNA, 15 bp, Homo sapiens
taatttataattaaa

SEQ ID NO: 2007652 - DNA, 15 bp, Homo sapiens
aatttataattaaac

SEQ ID NO: 2007653 - DNA, 15 bp, Homo sapiens
atttataattaaact

SEQ ID NO: 2007654 - DNA, 15 bp, Homo sapiens
tttataattaaactt

SEQ ID NO: 2007655 - DNA, 15 bp, Homo sapiens
ttataattaaacttt

SEQ ID NO: 2007656 - DNA, 15 bp, Homo sapiens
tataattaaacttta

SEQ ID NO: 2007657 - DNA, 15 bp, Homo sapiens
ataattaaactttat

SEQ ID NO: 2007658 - DNA, 15 bp, Homo sapiens
taattaaactttatc

SEQ ID NO: 2007659 - DNA, 15 bp, Homo sapiens
aattaaactttatca

SEQ ID NO: 2007660 - DNA, 15 bp, Homo sapiens
attaaactttatcac

SEQ ID NO: 2007661 - DNA, 15 bp, Homo sapiens
ttaaactttatcaca

SEQ ID NO: 2007662 - DNA, 15 bp, Homo sapiens
taaactttatcacag

SEQ ID NO: 2007663 - DNA, 15 bp, Homo sapiens
aaactttatcacagg

SEQ ID NO: 2007664 - DNA, 15 bp, Homo sapiens
aactttatcacaggt

SEQ ID NO: 2007665 - DNA, 15 bp, Homo sapiens
actttatcacaggta

SEQ ID NO: 2007666 - DNA, 15 bp, Homo sapiens
ctttatcacaggtat

SEQ ID NO: 2007667 - DNA, 15 bp, Homo sapiens
tttatcacaggtatt

SEQ ID NO: 2007668 - DNA, 15 bp, Homo sapiens
ttatcacaggtattt

SEQ ID NO: 2007669 - DNA, 15 bp, Homo sapiens
tatcacaggtatttc

SEQ ID NO: 2007670 - DNA, 15 bp, Homo sapiens
atcacaggtatttct

SEQ ID NO: 2007671 - DNA, 15 bp, Homo sapiens
tcacaggtatttctg

SEQ ID NO: 2007672 - DNA, 15 bp, Homo sapiens
cacaggtatttctgt

SEQ ID NO: 2007673 - DNA, 15 bp, Homo sapiens
acaggtatttctgta

SEQ ID NO: 2007674 - DNA, 15 bp, Homo sapiens
caggtatttctgtat

SEQ ID NO: 2007675 - DNA, 15 bp, Homo sapiens
aggtatttctgtata

SEQ ID NO: 2007676 - DNA, 15 bp, Homo sapiens
ggtatttctgtatag

SEQ ID NO: 2007677 - DNA, 15 bp, Homo sapiens
gtatttctgtatagg

SEQ ID NO: 2007678 - DNA, 15 bp, Homo sapiens
tatttctgtatagga

SEQ ID NO: 2007679 - DNA, 15 bp, Homo sapiens
atttctgtataggag

SEQ ID NO: 2007680 - DNA, 15 bp, Homo sapiens
tttctgtataggaga

SEQ ID NO: 2007681 - DNA, 15 bp, Homo sapiens
ttctgtataggagaa

SEQ ID NO: 2007682 - DNA, 15 bp, Homo sapiens
tctgtataggagaaa

SEQ ID NO: 2007683 - DNA, 15 bp, Homo sapiens
ctgtataggagaaaa

SEQ ID NO: 2007684 - DNA, 15 bp, Homo sapiens
tgtataggagaaaaa

SEQ ID NO: 2007685 - DNA, 15 bp, Homo sapiens
gtataggagaaaaac

SEQ ID NO: 2007686 - DNA, 15 bp, Homo sapiens
tataggagaaaaaca

SEQ ID NO: 2007687 - DNA, 15 bp, Homo sapiens
ataggagaaaaacac

SEQ ID NO: 2007688 - DNA, 15 bp, Homo sapiens
taggagaaaaacaca

SEQ ID NO: 2007689 - DNA, 15 bp, Homo sapiens
aggagaaaaacacag

SEQ ID NO: 2007690 - DNA, 15 bp, Homo sapiens
ggagaaaaacacagc

SEQ ID NO: 2007691 - DNA, 15 bp, Homo sapiens
gagaaaaacacagca

SEQ ID NO: 2007692 - DNA, 15 bp, Homo sapiens
agaaaaacacagcat

SEQ ID NO: 2007693 - DNA, 15 bp, Homo sapiens
gaaaaacacagcata

SEQ ID NO: 2007694 - DNA, 15 bp, Homo sapiens
aaaaacacagcatat

SEQ ID NO: 2007695 - DNA, 15 bp, Homo sapiens
aaaacacagcatata

SEQ ID NO: 2007696 - DNA, 15 bp, Homo sapiens
aaacacagcatatat

SEQ ID NO: 2007697 - DNA, 15 bp, Homo sapiens
aacacagcatatatt

SEQ ID NO: 2007698 - DNA, 15 bp, Homo sapiens
acacagcatatattg

SEQ ID NO: 2007699 - DNA, 15 bp, Homo sapiens
cacagcatatattgg

SEQ ID NO: 2007700 - DNA, 15 bp, Homo sapiens
acagcatatattggg

SEQ ID NO: 2007701 - DNA, 15 bp, Homo sapiens
cagcatatattgggt

SEQ ID NO: 2007702 - DNA, 15 bp, Homo sapiens
agcatatattgggtt

SEQ ID NO: 2007703 - DNA, 15 bp, Homo sapiens
gcatatattgggttc

SEQ ID NO: 2007704 - DNA, 15 bp, Homo sapiens
catatattgggttca

SEQ ID NO: 2007705 - DNA, 15 bp, Homo sapiens
atatattgggttcaa

SEQ ID NO: 2007706 - DNA, 15 bp, Homo sapiens
tatattgggttcaat

SEQ ID NO: 2007707 - DNA, 15 bp, Homo sapiens
atattgggttcaata

SEQ ID NO: 2007708 - DNA, 15 bp, Homo sapiens
tattgggttcaatac

SEQ ID NO: 2007709 - DNA, 15 bp, Homo sapiens
attgggttcaatact

SEQ ID NO: 2007710 - DNA, 15 bp, Homo sapiens
ttgggttcaatactg

SEQ ID NO: 2007711 - DNA, 15 bp, Homo sapiens
tgggttcaatactgt

SEQ ID NO: 2007712 - DNA, 15 bp, Homo sapiens
gggttcaatactgta

SEQ ID NO: 2007713 - DNA, 15 bp, Homo sapiens
ggttcaatactgtaa

SEQ ID NO: 2007714 - DNA, 15 bp, Homo sapiens
gttcaatactgtaat

SEQ ID NO: 2007715 - DNA, 15 bp, Homo sapiens
ttcaatactgtaatt

SEQ ID NO: 2007716 - DNA, 15 bp, Homo sapiens
tcaatactgtaattc

SEQ ID NO: 2007717 - DNA, 15 bp, Homo sapiens
caatactgtaattct

SEQ ID NO: 2007718 - DNA, 15 bp, Homo sapiens
aatactgtaattctg

SEQ ID NO: 2007719 - DNA, 15 bp, Homo sapiens
atactgtaattctgt

SEQ ID NO: 2007720 - DNA, 15 bp, Homo sapiens
tactgtaattctgtg

SEQ ID NO: 2007721 - DNA, 15 bp, Homo sapiens
actgtaattctgtgg

SEQ ID NO: 2007722 - DNA, 15 bp, Homo sapiens
ctgtaattctgtggt

SEQ ID NO: 2007723 - DNA, 15 bp, Homo sapiens
tgtaattctgtggtt

SEQ ID NO: 2007724 - DNA, 15 bp, Homo sapiens
gtaattctgtggttt

SEQ ID NO: 2007725 - DNA, 15 bp, Homo sapiens
taattctgtggtttc

SEQ ID NO: 2007726 - DNA, 15 bp, Homo sapiens
aattctgtggtttca

SEQ ID NO: 2007727 - DNA, 15 bp, Homo sapiens
attctgtggtttcag

SEQ ID NO: 2007728 - DNA, 15 bp, Homo sapiens
ttctgtggtttcagg

SEQ ID NO: 2007729 - DNA, 15 bp, Homo sapiens
tctgtggtttcaggt

SEQ ID NO: 2007730 - DNA, 15 bp, Homo sapiens
ctgtggtttcaggta

SEQ ID NO: 2007731 - DNA, 15 bp, Homo sapiens
tgtggtttcaggtat

SEQ ID NO: 2007732 - DNA, 15 bp, Homo sapiens
gtggtttcaggtatc

SEQ ID NO: 2007733 - DNA, 15 bp, Homo sapiens
tggtttcaggtatcc

SEQ ID NO: 2007734 - DNA, 15 bp, Homo sapiens
ggtttcaggtatccc

SEQ ID NO: 2007735 - DNA, 15 bp, Homo sapiens
gtttcaggtatccct

SEQ ID NO: 2007736 - DNA, 15 bp, Homo sapiens
tttcaggtatccctg

SEQ ID NO: 2007737 - DNA, 15 bp, Homo sapiens
ttcaggtatccctga

SEQ ID NO: 2007738 - DNA, 15 bp, Homo sapiens
tcaggtatccctgag

SEQ ID NO: 2007739 - DNA, 15 bp, Homo sapiens
caggtatccctgagg

SEQ ID NO: 2007740 - DNA, 15 bp, Homo sapiens
aggtatccctgaggg

SEQ ID NO: 2007741 - DNA, 15 bp, Homo sapiens
ggtatccctgagggg

SEQ ID NO: 2007742 - DNA, 15 bp, Homo sapiens
gtatccctgaggggt

SEQ ID NO: 2007743 - DNA, 15 bp, Homo sapiens
tatccctgaggggtc

SEQ ID NO: 2007744 - DNA, 15 bp, Homo sapiens
atccctgaggggtct

SEQ ID NO: 2007745 - DNA, 15 bp, Homo sapiens
tccctgaggggtctt

SEQ ID NO: 2007746 - DNA, 15 bp, Homo sapiens
ccctgaggggtcttg

SEQ ID NO: 2007747 - DNA, 15 bp, Homo sapiens
cctgaggggtcttgg

SEQ ID NO: 2007748 - DNA, 15 bp, Homo sapiens
ctgaggggtcttgga

SEQ ID NO: 2007749 - DNA, 15 bp, Homo sapiens
tgaggggtcttggaa

SEQ ID NO: 2007750 - DNA, 15 bp, Homo sapiens
gaggggtcttggaac

SEQ ID NO: 2007751 - DNA, 15 bp, Homo sapiens
aggggtcttggaaca

SEQ ID NO: 2007752 - DNA, 15 bp, Homo sapiens
ggggtcttggaacat

SEQ ID NO: 2007753 - DNA, 15 bp, Homo sapiens
gggtcttggaacata

SEQ ID NO: 2007754 - DNA, 15 bp, Homo sapiens
ggtcttggaacatat

SEQ ID NO: 2007755 - DNA, 15 bp, Homo sapiens
gtcttggaacatatc

SEQ ID NO: 2007756 - DNA, 15 bp, Homo sapiens
tcttggaacatatcc

SEQ ID NO: 2007757 - DNA, 15 bp, Homo sapiens
cttggaacatatccc

SEQ ID NO: 2007758 - DNA, 15 bp, Homo sapiens
ttggaacatatcccc

SEQ ID NO: 2007759 - DNA, 15 bp, Homo sapiens
tggaacatatccccc

SEQ ID NO: 2007760 - DNA, 15 bp, Homo sapiens
ggaacatatccccca

SEQ ID NO: 2007761 - DNA, 15 bp, Homo sapiens
gaacatatcccccac

SEQ ID NO: 2007762 - DNA, 15 bp, Homo sapiens
aacatatcccccaca

SEQ ID NO: 2007763 - DNA, 15 bp, Homo sapiens
acatatcccccacag

SEQ ID NO: 2007764 - DNA, 15 bp, Homo sapiens
catatcccccacagt

SEQ ID NO: 2007765 - DNA, 15 bp, Homo sapiens
atatcccccacagtt

SEQ ID NO: 2007766 - DNA, 15 bp, Homo sapiens
tatcccccacagtta

SEQ ID NO: 2007767 - DNA, 15 bp, Homo sapiens
atcccccacagttaa

SEQ ID NO: 2007768 - DNA, 15 bp, Homo sapiens
tcccccacagttaag

SEQ ID NO: 2007769 - DNA, 15 bp, Homo sapiens
cccccacagttaagg

SEQ ID NO: 2007770 - DNA, 15 bp, Homo sapiens
ccccacagttaaggg

SEQ ID NO: 2007771 - DNA, 15 bp, Homo sapiens
cccacagttaagggg

SEQ ID NO: 2007772 - DNA, 15 bp, Homo sapiens
ccacagttaaggggg

SEQ ID NO: 2007773 - DNA, 15 bp, Homo sapiens
cacagttaagggggt

SEQ ID NO: 2007774 - DNA, 15 bp, Homo sapiens
acagttaagggggta

SEQ ID NO: 2007775 - DNA, 15 bp, Homo sapiens
cagttaagggggtac

SEQ ID NO: 2007776 - DNA, 15 bp, Homo sapiens
agttaagggggtact

SEQ ID NO: 2007777 - DNA, 15 bp, Homo sapiens
gttaagggggtacta

SEQ ID NO: 2007778 - DNA, 15 bp, Homo sapiens
ttaagggggtactac

SEQ ID NO: 2007779 - DNA, 15 bp, Homo sapiens
taagggggtactact

SEQ ID NO: 2007780 - DNA, 15 bp, Homo sapiens
aagggggtactactg

SEQ ID NO: 2007781 - DNA, 15 bp, Homo sapiens
agggggtactactgt

SEQ ID NO: 2007782 - DNA, 15 bp, Homo sapiens
gggggtactactgta

SEQ ID NO: 2007783 - DNA, 15 bp, Homo sapiens
ggggtactactgtac

SEQ ID NO: 2007784 - DNA, 15 bp, Homo sapiens
gggtactactgtact

SEQ ID NO: 2007785 - DNA, 15 bp, Homo sapiens
ggtactactgtactt

SEQ ID NO: 2007786 - DNA, 15 bp, Homo sapiens
gtactactgtacttt

SEQ ID NO: 2007787 - DNA, 15 bp, Homo sapiens
tactactgtactttc

SEQ ID NO: 2007788 - DNA, 15 bp, Homo sapiens
actactgtactttcc

SEQ ID NO: 2007789 - DNA, 15 bp, Homo sapiens
ctactgtactttcct

SEQ ID NO: 2007790 - DNA, 15 bp, Homo sapiens
tactgtactttcctc

SEQ ID NO: 2007791 - DNA, 15 bp, Homo sapiens
actgtactttcctca

SEQ ID NO: 2007792 - DNA, 15 bp, Homo sapiens
ctgtactttcctcat

SEQ ID NO: 2007793 - DNA, 15 bp, Homo sapiens
tgtactttcctcatt

SEQ ID NO: 2007794 - DNA, 15 bp, Homo sapiens
gtactttcctcattc

SEQ ID NO: 2007795 - DNA, 15 bp, Homo sapiens
tactttcctcattca

SEQ ID NO: 2007796 - DNA, 15 bp, Homo sapiens
actttcctcattcaa

SEQ ID NO: 2007797 - DNA, 15 bp, Homo sapiens
ctttcctcattcaaa

SEQ ID NO: 2007798 - DNA, 15 bp, Homo sapiens
tttcctcattcaaaa

SEQ ID NO: 2007799 - DNA, 15 bp, Homo sapiens
ttcctcattcaaaat

SEQ ID NO: 2007800 - DNA, 15 bp, Homo sapiens
tcctcattcaaaatt

SEQ ID NO: 2007801 - DNA, 15 bp, Homo sapiens
cctcattcaaaattg

SEQ ID NO: 2007802 - DNA, 15 bp, Homo sapiens
ctcattcaaaattgt

SEQ ID NO: 2007803 - DNA, 15 bp, Homo sapiens
tcattcaaaattgtg

SEQ ID NO: 2007804 - DNA, 15 bp, Homo sapiens
cattcaaaattgtgt

SEQ ID NO: 2007805 - DNA, 15 bp, Homo sapiens
attcaaaattgtgtt

SEQ ID NO: 2007806 - DNA, 15 bp, Homo sapiens
ttcaaaattgtgttg

SEQ ID NO: 2007807 - DNA, 15 bp, Homo sapiens
tcaaaattgtgttgt

SEQ ID NO: 2007808 - DNA, 15 bp, Homo sapiens
caaaattgtgttgtt

SEQ ID NO: 2007809 - DNA, 15 bp, Homo sapiens
aaaattgtgttgttt

SEQ ID NO: 2007810 - DNA, 15 bp, Homo sapiens
aaattgtgttgtttc

SEQ ID NO: 2007811 - DNA, 15 bp, Homo sapiens
aattgtgttgtttct

SEQ ID NO: 2007812 - DNA, 15 bp, Homo sapiens
attgtgttgtttctt

SEQ ID NO: 2007813 - DNA, 15 bp, Homo sapiens
ttgtgttgtttcttc

SEQ ID NO: 2007814 - DNA, 15 bp, Homo sapiens
tgtgttgtttcttca

SEQ ID NO: 2007815 - DNA, 15 bp, Homo sapiens
gtgttgtttcttcaa

SEQ ID NO: 2007816 - DNA, 15 bp, Homo sapiens
tgttgtttcttcaag

SEQ ID NO: 2007817 - DNA, 15 bp, Homo sapiens
gttgtttcttcaagc

SEQ ID NO: 2007818 - DNA, 15 bp, Homo sapiens
ttgtttcttcaagct

SEQ ID NO: 2007819 - DNA, 15 bp, Homo sapiens
tgtttcttcaagctc

SEQ ID NO: 2007820 - DNA, 15 bp, Homo sapiens
gtttcttcaagctcc

SEQ ID NO: 2007821 - DNA, 15 bp, Homo sapiens
tttcttcaagctcca

SEQ ID NO: 2007822 - DNA, 15 bp, Homo sapiens
ttcttcaagctccac

SEQ ID NO: 2007823 - DNA, 15 bp, Homo sapiens
tcttcaagctccact

SEQ ID NO: 2007824 - DNA, 15 bp, Homo sapiens
cttcaagctccactc

SEQ ID NO: 2007825 - DNA, 15 bp, Homo sapiens
ttcaagctccactca

SEQ ID NO: 2007826 - DNA, 15 bp, Homo sapiens
tcaagctccactcat

SEQ ID NO: 2007827 - DNA, 15 bp, Homo sapiens
caagctccactcatg

SEQ ID NO: 2007828 - DNA, 15 bp, Homo sapiens
aagctccactcatgt

SEQ ID NO: 2007829 - DNA, 15 bp, Homo sapiens
agctccactcatgtc

SEQ ID NO: 2007830 - DNA, 15 bp, Homo sapiens
gctccactcatgtca

SEQ ID NO: 2007831 - DNA, 15 bp, Homo sapiens
ctccactcatgtcag

SEQ ID NO: 2007832 - DNA, 15 bp, Homo sapiens
tccactcatgtcagc

SEQ ID NO: 2007833 - DNA, 15 bp, Homo sapiens
ccactcatgtcagca

SEQ ID NO: 2007834 - DNA, 15 bp, Homo sapiens
cactcatgtcagcac

SEQ ID NO: 2007835 - DNA, 15 bp, Homo sapiens
actcatgtcagcacc

SEQ ID NO: 2007836 - DNA, 15 bp, Homo sapiens
ctcatgtcagcacct

SEQ ID NO: 2007837 - DNA, 15 bp, Homo sapiens
tcatgtcagcacctt

SEQ ID NO: 2007838 - DNA, 15 bp, Homo sapiens
catgtcagcaccttt

SEQ ID NO: 2007839 - DNA, 15 bp, Homo sapiens
atgtcagcacctttt

SEQ ID NO: 2007840 - DNA, 15 bp, Homo sapiens
tgtcagcacctttta

SEQ ID NO: 2007841 - DNA, 15 bp, Homo sapiens
gtcagcaccttttat

SEQ ID NO: 2007842 - DNA, 15 bp, Homo sapiens
tcagcaccttttata

SEQ ID NO: 2007843 - DNA, 15 bp, Homo sapiens
cagcaccttttatac

SEQ ID NO: 2007844 - DNA, 15 bp, Homo sapiens
agcaccttttatacg

SEQ ID NO: 2007845 - DNA, 15 bp, Homo sapiens
gcaccttttatacga

SEQ ID NO: 2007846 - DNA, 15 bp, Homo sapiens
caccttttatacgat

SEQ ID NO: 2007847 - DNA, 15 bp, Homo sapiens
accttttatacgatc

SEQ ID NO: 2007848 - DNA, 15 bp, Homo sapiens
ccttttatacgatcc

SEQ ID NO: 2007849 - DNA, 15 bp, Homo sapiens
cttttatacgatcct

SEQ ID NO: 2007850 - DNA, 15 bp, Homo sapiens
ttttatacgatcctt

SEQ ID NO: 2007851 - DNA, 15 bp, Homo sapiens
tttatacgatccttc

SEQ ID NO: 2007852 - DNA, 15 bp, Homo sapiens
ttatacgatccttcc

SEQ ID NO: 2007853 - DNA, 15 bp, Homo sapiens
tatacgatccttccc

SEQ ID NO: 2007854 - DNA, 15 bp, Homo sapiens
atacgatccttccct

SEQ ID NO: 2007855 - DNA, 15 bp, Homo sapiens
tacgatccttcccta

SEQ ID NO: 2007856 - DNA, 15 bp, Homo sapiens
acgatccttccctaa

SEQ ID NO: 2007857 - DNA, 15 bp, Homo sapiens
cgatccttccctaat

SEQ ID NO: 2007858 - DNA, 15 bp, Homo sapiens
gatccttccctaatt

SEQ ID NO: 2007859 - DNA, 15 bp, Homo sapiens
atccttccctaattc

SEQ ID NO: 2007860 - DNA, 15 bp, Homo sapiens
tccttccctaattct

SEQ ID NO: 2007861 - DNA, 15 bp, Homo sapiens
ccttccctaattctt

SEQ ID NO: 2007862 - DNA, 15 bp, Homo sapiens
cttccctaattcttc

SEQ ID NO: 2007863 - DNA, 15 bp, Homo sapiens
ttccctaattcttca

SEQ ID NO: 2007864 - DNA, 15 bp, Homo sapiens
tccctaattcttcac

SEQ ID NO: 2007865 - DNA, 15 bp, Homo sapiens
ccctaattcttcacg

SEQ ID NO: 2007866 - DNA, 15 bp, Homo sapiens
cctaattcttcacgt

SEQ ID NO: 2007867 - DNA, 15 bp, Homo sapiens
ctaattcttcacgtc

SEQ ID NO: 2007868 - DNA, 15 bp, Homo sapiens
taattcttcacgtca

SEQ ID NO: 2007869 - DNA, 15 bp, Homo sapiens
aattcttcacgtcag

SEQ ID NO: 2007870 - DNA, 15 bp, Homo sapiens
attcttcacgtcaga

SEQ ID NO: 2007871 - DNA, 15 bp, Homo sapiens
ttcttcacgtcagaa

SEQ ID NO: 2007872 - DNA, 15 bp, Homo sapiens
tcttcacgtcagaat

SEQ ID NO: 2007873 - DNA, 15 bp, Homo sapiens
cttcacgtcagaatc

SEQ ID NO: 2007874 - DNA, 15 bp, Homo sapiens
ttcacgtcagaatca

SEQ ID NO: 2007875 - DNA, 15 bp, Homo sapiens
tcacgtcagaatcag

SEQ ID NO: 2007876 - DNA, 15 bp, Homo sapiens
cacgtcagaatcagt

SEQ ID NO: 2007877 - DNA, 15 bp, Homo sapiens
acgtcagaatcagtc

SEQ ID NO: 2007878 - DNA, 15 bp, Homo sapiens
cgtcagaatcagtca

SEQ ID NO: 2007879 - DNA, 15 bp, Homo sapiens
gtcagaatcagtcat

SEQ ID NO: 2007880 - DNA, 15 bp, Homo sapiens
tcagaatcagtcatt

SEQ ID NO: 2007881 - DNA, 15 bp, Homo sapiens
cagaatcagtcattt

SEQ ID NO: 2007882 - DNA, 15 bp, Homo sapiens
agaatcagtcatttt

SEQ ID NO: 2007883 - DNA, 15 bp, Homo sapiens
gaatcagtcatttta

SEQ ID NO: 2007884 - DNA, 15 bp, Homo sapiens
aatcagtcattttag

SEQ ID NO: 2007885 - DNA, 15 bp, Homo sapiens
atcagtcattttagt

SEQ ID NO: 2007886 - DNA, 15 bp, Homo sapiens
tcagtcattttagta

SEQ ID NO: 2007887 - DNA, 15 bp, Homo sapiens
cagtcattttagtac

SEQ ID NO: 2007888 - DNA, 15 bp, Homo sapiens
agtcattttagtact

SEQ ID NO: 2007889 - DNA, 15 bp, Homo sapiens
gtcattttagtactt

SEQ ID NO: 2007890 - DNA, 15 bp, Homo sapiens
tcattttagtacttt

SEQ ID NO: 2007891 - DNA, 15 bp, Homo sapiens
cattttagtacttta

SEQ ID NO: 2007892 - DNA, 15 bp, Homo sapiens
attttagtactttat

SEQ ID NO: 2007893 - DNA, 15 bp, Homo sapiens
ttttagtactttata

SEQ ID NO: 2007894 - DNA, 15 bp, Homo sapiens
tttagtactttatac

SEQ ID NO: 2007895 - DNA, 15 bp, Homo sapiens
ttagtactttatact

SEQ ID NO: 2007896 - DNA, 15 bp, Homo sapiens
tagtactttatactt

SEQ ID NO: 2007897 - DNA, 15 bp, Homo sapiens
agtactttatacttt

SEQ ID NO: 2007898 - DNA, 15 bp, Homo sapiens
gtactttatactttg

SEQ ID NO: 2007899 - DNA, 15 bp, Homo sapiens
tactttatactttga

SEQ ID NO: 2007900 - DNA, 15 bp, Homo sapiens
actttatactttgat

SEQ ID NO: 2007901 - DNA, 15 bp, Homo sapiens
ctttatactttgatc

SEQ ID NO: 2007902 - DNA, 15 bp, Homo sapiens
tttatactttgatca

SEQ ID NO: 2007903 - DNA, 15 bp, Homo sapiens
ttatactttgatcag

SEQ ID NO: 2007904 - DNA, 15 bp, Homo sapiens
tatactttgatcaga

SEQ ID NO: 2007905 - DNA, 15 bp, Homo sapiens
atactttgatcagag

SEQ ID NO: 2007906 - DNA, 15 bp, Homo sapiens
tactttgatcagagt

SEQ ID NO: 2007907 - DNA, 15 bp, Homo sapiens
actttgatcagagtc

SEQ ID NO: 2007908 - DNA, 15 bp, Homo sapiens
ctttgatcagagtct

SEQ ID NO: 2007909 - DNA, 15 bp, Homo sapiens
tttgatcagagtctc

SEQ ID NO: 2007910 - DNA, 15 bp, Homo sapiens
ttgatcagagtctca

SEQ ID NO: 2007911 - DNA, 15 bp, Homo sapiens
tgatcagagtctcat

SEQ ID NO: 2007912 - DNA, 15 bp, Homo sapiens
gatcagagtctcatt

SEQ ID NO: 2007913 - DNA, 15 bp, Homo sapiens
atcagagtctcattt

SEQ ID NO: 2007914 - DNA, 15 bp, Homo sapiens
tcagagtctcatttt

SEQ ID NO: 2007915 - DNA, 15 bp, Homo sapiens
cagagtctcattttc

SEQ ID NO: 2007916 - DNA, 15 bp, Homo sapiens
agagtctcattttca

SEQ ID NO: 2007917 - DNA, 15 bp, Homo sapiens
gagtctcattttcac

SEQ ID NO: 2007918 - DNA, 15 bp, Homo sapiens
agtctcattttcact

SEQ ID NO: 2007919 - DNA, 15 bp, Homo sapiens
gtctcattttcacta

SEQ ID NO: 2007920 - DNA, 15 bp, Homo sapiens
tctcattttcactaa

SEQ ID NO: 2007921 - DNA, 15 bp, Homo sapiens
ctcattttcactaaa

SEQ ID NO: 2007922 - DNA, 15 bp, Homo sapiens
tcattttcactaaag

SEQ ID NO: 2007923 - DNA, 15 bp, Homo sapiens
cattttcactaaaga

SEQ ID NO: 2007924 - DNA, 15 bp, Homo sapiens
attttcactaaagaa

SEQ ID NO: 2007925 - DNA, 15 bp, Homo sapiens
ttttcactaaagaaa

SEQ ID NO: 2007926 - DNA, 15 bp, Homo sapiens
tttcactaaagaaac

SEQ ID NO: 2007927 - DNA, 15 bp, Homo sapiens
ttcactaaagaaact

SEQ ID NO: 2007928 - DNA, 15 bp, Homo sapiens
tcactaaagaaacta

SEQ ID NO: 2007929 - DNA, 15 bp, Homo sapiens
cactaaagaaactaa

SEQ ID NO: 2007930 - DNA, 15 bp, Homo sapiens
actaaagaaactaaa

SEQ ID NO: 2007931 - DNA, 15 bp, Homo sapiens
ctaaagaaactaaat

SEQ ID NO: 2007932 - DNA, 15 bp, Homo sapiens
taaagaaactaaatc

SEQ ID NO: 2007933 - DNA, 15 bp, Homo sapiens
aaagaaactaaatct

SEQ ID NO: 2007934 - DNA, 15 bp, Homo sapiens
aagaaactaaatctt

SEQ ID NO: 2007935 - DNA, 15 bp, Homo sapiens
agaaactaaatcttc

SEQ ID NO: 2007936 - DNA, 15 bp, Homo sapiens
gaaactaaatcttcc

SEQ ID NO: 2007937 - DNA, 15 bp, Homo sapiens
aaactaaatcttcca

SEQ ID NO: 2007938 - DNA, 15 bp, Homo sapiens
aactaaatcttccac

SEQ ID NO: 2007939 - DNA, 15 bp, Homo sapiens
actaaatcttccacc

SEQ ID NO: 2007940 - DNA, 15 bp, Homo sapiens
ctaaatcttccacca

SEQ ID NO: 2007941 - DNA, 15 bp, Homo sapiens
taaatcttccaccat

SEQ ID NO: 2007942 - DNA, 15 bp, Homo sapiens
aaatcttccaccata

SEQ ID NO: 2007943 - DNA, 15 bp, Homo sapiens
aatcttccaccatat

SEQ ID NO: 2007944 - DNA, 15 bp, Homo sapiens
atcttccaccatatt

SEQ ID NO: 2007945 - DNA, 15 bp, Homo sapiens
tcttccaccatattc

SEQ ID NO: 2007946 - DNA, 15 bp, Homo sapiens
cttccaccatattct

SEQ ID NO: 2007947 - DNA, 15 bp, Homo sapiens
ttccaccatattctg

SEQ ID NO: 2007948 - DNA, 15 bp, Homo sapiens
tccaccatattctgg

SEQ ID NO: 2007949 - DNA, 15 bp, Homo sapiens
ccaccatattctggc

SEQ ID NO: 2007950 - DNA, 15 bp, Homo sapiens
caccatattctggct

SEQ ID NO: 2007951 - DNA, 15 bp, Homo sapiens
accatattctggctt

SEQ ID NO: 2007952 - DNA, 15 bp, Homo sapiens
ccatattctggcttt

SEQ ID NO: 2007953 - DNA, 15 bp, Homo sapiens
catattctggctttt

SEQ ID NO: 2007954 - DNA, 15 bp, Homo sapiens
atattctggcttttt

SEQ ID NO: 2007955 - DNA, 15 bp, Homo sapiens
tattctggctttttt

SEQ ID NO: 2007956 - DNA, 15 bp, Homo sapiens
attctggcttttttt

SEQ ID NO: 2007957 - DNA, 15 bp, Homo sapiens
ttctggctttttttg

SEQ ID NO: 2007958 - DNA, 15 bp, Homo sapiens
tctggctttttttgt

SEQ ID NO: 2007959 - DNA, 15 bp, Homo sapiens
ctggctttttttgtg

SEQ ID NO: 2007960 - DNA, 15 bp, Homo sapiens
tggctttttttgtgg

SEQ ID NO: 2007961 - DNA, 15 bp, Homo sapiens
ggctttttttgtggt

SEQ ID NO: 2007962 - DNA, 15 bp, Homo sapiens
gctttttttgtggta

SEQ ID NO: 2007963 - DNA, 15 bp, Homo sapiens
ctttttttgtggtaa

SEQ ID NO: 2007964 - DNA, 15 bp, Homo sapiens
tttttttgtggtaag

SEQ ID NO: 2007965 - DNA, 15 bp, Homo sapiens
ttttttgtggtaaga

SEQ ID NO: 2007966 - DNA, 15 bp, Homo sapiens
tttttgtggtaagat

SEQ ID NO: 2007967 - DNA, 15 bp, Homo sapiens
ttttgtggtaagata

SEQ ID NO: 2007968 - DNA, 15 bp, Homo sapiens
tttgtggtaagatac

SEQ ID NO: 2007969 - DNA, 15 bp, Homo sapiens
ttgtggtaagatacc

SEQ ID NO: 2007970 - DNA, 15 bp, Homo sapiens
tgtggtaagatacca

SEQ ID NO: 2007971 - DNA, 15 bp, Homo sapiens
gtggtaagataccac

SEQ ID NO: 2007972 - DNA, 15 bp, Homo sapiens
tggtaagataccacc

SEQ ID NO: 2007973 - DNA, 15 bp, Homo sapiens
ggtaagataccacct

SEQ ID NO: 2007974 - DNA, 15 bp, Homo sapiens
gtaagataccacctc

SEQ ID NO: 2007975 - DNA, 15 bp, Homo sapiens
taagataccacctct

SEQ ID NO: 2007976 - DNA, 15 bp, Homo sapiens
aagataccacctctt

SEQ ID NO: 2007977 - DNA, 15 bp, Homo sapiens
agataccacctctta

SEQ ID NO: 2007978 - DNA, 15 bp, Homo sapiens
gataccacctcttat

SEQ ID NO: 2007979 - DNA, 15 bp, Homo sapiens
ataccacctcttatt

SEQ ID NO: 2007980 - DNA, 15 bp, Homo sapiens
taccacctcttattc

SEQ ID NO: 2007981 - DNA, 15 bp, Homo sapiens
accacctcttattcc

SEQ ID NO: 2007982 - DNA, 15 bp, Homo sapiens
ccacctcttattcct

SEQ ID NO: 2007983 - DNA, 15 bp, Homo sapiens
cacctcttattcctt

SEQ ID NO: 2007984 - DNA, 15 bp, Homo sapiens
acctcttattccttc

SEQ ID NO: 2007985 - DNA, 15 bp, Homo sapiens
cctcttattccttct

SEQ ID NO: 2007986 - DNA, 15 bp, Homo sapiens
ctcttattccttcta

SEQ ID NO: 2007987 - DNA, 15 bp, Homo sapiens
tcttattccttctat

SEQ ID NO: 2007988 - DNA, 15 bp, Homo sapiens
cttattccttctatt

SEQ ID NO: 2007989 - DNA, 15 bp, Homo sapiens
ttattccttctattc

SEQ ID NO: 2007990 - DNA, 15 bp, Homo sapiens
tattccttctattcc

SEQ ID NO: 2007991 - DNA, 15 bp, Homo sapiens
attccttctattccc

SEQ ID NO: 2007992 - DNA, 15 bp, Homo sapiens
ttccttctattccct

SEQ ID NO: 2007993 - DNA, 15 bp, Homo sapiens
tccttctattccctc

SEQ ID NO: 2007994 - DNA, 15 bp, Homo sapiens
ccttctattccctct

SEQ ID NO: 2007995 - DNA, 15 bp, Homo sapiens
cttctattccctcta

SEQ ID NO: 2007996 - DNA, 15 bp, Homo sapiens
ttctattccctctag

SEQ ID NO: 2007997 - DNA, 15 bp, Homo sapiens
tctattccctctagc

SEQ ID NO: 2007998 - DNA, 15 bp, Homo sapiens
ctattccctctagct

SEQ ID NO: 2007999 - DNA, 15 bp, Homo sapiens
tattccctctagctt

SEQ ID NO: 2008000 - DNA, 15 bp, Homo sapiens
attccctctagcttc

SEQ ID NO: 2008001 - DNA, 15 bp, Homo sapiens
ttccctctagcttct

SEQ ID NO: 2008002 - DNA, 15 bp, Homo sapiens
tccctctagcttcta

SEQ ID NO: 2008003 - DNA, 15 bp, Homo sapiens
ccctctagcttctaa

SEQ ID NO: 2008004 - DNA, 15 bp, Homo sapiens
cctctagcttctaat

SEQ ID NO: 2008005 - DNA, 15 bp, Homo sapiens
ctctagcttctaata

SEQ ID NO: 2008006 - DNA, 15 bp, Homo sapiens
tctagcttctaatat

SEQ ID NO: 2008007 - DNA, 15 bp, Homo sapiens
ctagcttctaatata

SEQ ID NO: 2008008 - DNA, 15 bp, Homo sapiens
tagcttctaatatag

SEQ ID NO: 2008009 - DNA, 15 bp, Homo sapiens
agcttctaatatagt

SEQ ID NO: 2008010 - DNA, 15 bp, Homo sapiens
gcttctaatatagtg

SEQ ID NO: 2008011 - DNA, 15 bp, Homo sapiens
cttctaatatagtga

SEQ ID NO: 2008012 - DNA, 15 bp, Homo sapiens
ttctaatatagtgag

SEQ ID NO: 2008013 - DNA, 15 bp, Homo sapiens
tctaatatagtgagt

SEQ ID NO: 2008014 - DNA, 15 bp, Homo sapiens
ctaatatagtgagtg

SEQ ID NO: 2008015 - DNA, 15 bp, Homo sapiens
taatatagtgagtgt

SEQ ID NO: 2008016 - DNA, 15 bp, Homo sapiens
aatatagtgagtgtt

SEQ ID NO: 2008017 - DNA, 15 bp, Homo sapiens
atatagtgagtgttt

SEQ ID NO: 2008018 - DNA, 15 bp, Homo sapiens
tatagtgagtgttta

SEQ ID NO: 2008019 - DNA, 15 bp, Homo sapiens
atagtgagtgtttat

SEQ ID NO: 2008020 - DNA, 15 bp, Homo sapiens
tagtgagtgtttata

SEQ ID NO: 2008021 - DNA, 15 bp, Homo sapiens
agtgagtgtttataa

SEQ ID NO: 2008022 - DNA, 15 bp, Homo sapiens
gtgagtgtttataaa

SEQ ID NO: 2008023 - DNA, 15 bp, Homo sapiens
tgagtgtttataaag

SEQ ID NO: 2008024 - DNA, 15 bp, Homo sapiens
gagtgtttataaaga

SEQ ID NO: 2008025 - DNA, 15 bp, Homo sapiens
agtgtttataaagaa

SEQ ID NO: 2008026 - DNA, 15 bp, Homo sapiens
gtgtttataaagaat

SEQ ID NO: 2008027 - DNA, 15 bp, Homo sapiens
tgtttataaagaata

SEQ ID NO: 2008028 - DNA, 15 bp, Homo sapiens
gtttataaagaatag

SEQ ID NO: 2008029 - DNA, 15 bp, Homo sapiens
tttataaagaatagg

SEQ ID NO: 2008030 - DNA, 15 bp, Homo sapiens
ttataaagaatagga

SEQ ID NO: 2008031 - DNA, 15 bp, Homo sapiens
tataaagaataggac

SEQ ID NO: 2008032 - DNA, 15 bp, Homo sapiens
ataaagaataggaca

SEQ ID NO: 2008033 - DNA, 15 bp, Homo sapiens
taaagaataggacac

SEQ ID NO: 2008034 - DNA, 15 bp, Homo sapiens
aaagaataggacaca

SEQ ID NO: 2008035 - DNA, 15 bp, Homo sapiens
aagaataggacacag

SEQ ID NO: 2008036 - DNA, 15 bp, Homo sapiens
agaataggacacagg

SEQ ID NO: 2008037 - DNA, 15 bp, Homo sapiens
gaataggacacaggg

SEQ ID NO: 2008038 - DNA, 15 bp, Homo sapiens
aataggacacagggc

SEQ ID NO: 2008039 - DNA, 15 bp, Homo sapiens
ataggacacagggcc

SEQ ID NO: 2008040 - DNA, 15 bp, Homo sapiens
taggacacagggcca

SEQ ID NO: 2008041 - DNA, 15 bp, Homo sapiens
aggacacagggccag

SEQ ID NO: 2008042 - DNA, 15 bp, Homo sapiens
ggacacagggccagt

SEQ ID NO: 2008043 - DNA, 15 bp, Homo sapiens
gacacagggccagtt

SEQ ID NO: 2008044 - DNA, 15 bp, Homo sapiens
acacagggccagtta

SEQ ID NO: 2008045 - DNA, 15 bp, Homo sapiens
cacagggccagttat

SEQ ID NO: 2008046 - DNA, 15 bp, Homo sapiens
acagggccagttata

SEQ ID NO: 2008047 - DNA, 15 bp, Homo sapiens
cagggccagttataa

SEQ ID NO: 2008048 - DNA, 15 bp, Homo sapiens
agggccagttataaa

SEQ ID NO: 2008049 - DNA, 15 bp, Homo sapiens
gggccagttataaag

SEQ ID NO: 2008050 - DNA, 15 bp, Homo sapiens
ggccagttataaaga

SEQ ID NO: 2008051 - DNA, 15 bp, Homo sapiens
gccagttataaagaa

SEQ ID NO: 2008052 - DNA, 15 bp, Homo sapiens
ccagttataaagaat

SEQ ID NO: 2008053 - DNA, 15 bp, Homo sapiens
cagttataaagaata

SEQ ID NO: 2008054 - DNA, 15 bp, Homo sapiens
agttataaagaatag

SEQ ID NO: 2008055 - DNA, 15 bp, Homo sapiens
gttataaagaatagg

SEQ ID NO: 2008056 - DNA, 15 bp, Homo sapiens
gaataggacacaggc

SEQ ID NO: 2008057 - DNA, 15 bp, Homo sapiens
aataggacacaggct

SEQ ID NO: 2008058 - DNA, 15 bp, Homo sapiens
ataggacacaggctc

SEQ ID NO: 2008059 - DNA, 15 bp, Homo sapiens
taggacacaggctca

SEQ ID NO: 2008060 - DNA, 15 bp, Homo sapiens
aggacacaggctcat

SEQ ID NO: 2008061 - DNA, 15 bp, Homo sapiens
ggacacaggctcatg

SEQ ID NO: 2008062 - DNA, 15 bp, Homo sapiens
gacacaggctcatgc

SEQ ID NO: 2008063 - DNA, 15 bp, Homo sapiens
acacaggctcatgcc

SEQ ID NO: 2008064 - DNA, 15 bp, Homo sapiens
cacaggctcatgcct

SEQ ID NO: 2008065 - DNA, 15 bp, Homo sapiens
acaggctcatgcctg

SEQ ID NO: 2008066 - DNA, 15 bp, Homo sapiens
caggctcatgcctgt

SEQ ID NO: 2008067 - DNA, 15 bp, Homo sapiens
aggctcatgcctgta

SEQ ID NO: 2008068 - DNA, 15 bp, Homo sapiens
cgaggtcaggagatg

SEQ ID NO: 2008069 - DNA, 15 bp, Homo sapiens
gaggtcaggagatgg

SEQ ID NO: 2008070 - DNA, 15 bp, Homo sapiens
aggtcaggagatgga

SEQ ID NO: 2008071 - DNA, 15 bp, Homo sapiens
ggtcaggagatggag

SEQ ID NO: 2008072 - DNA, 15 bp, Homo sapiens
gtcaggagatggaga

SEQ ID NO: 2008073 - DNA, 15 bp, Homo sapiens
tcaggagatggagac

SEQ ID NO: 2008074 - DNA, 15 bp, Homo sapiens
caggagatggagacc

SEQ ID NO: 2008075 - DNA, 15 bp, Homo sapiens
aggagatggagacca

SEQ ID NO: 2008076 - DNA, 15 bp, Homo sapiens
ggagatggagaccat

SEQ ID NO: 2008077 - DNA, 15 bp, Homo sapiens
gagatggagaccatc

SEQ ID NO: 2008078 - DNA, 15 bp, Homo sapiens
agatggagaccatcc

SEQ ID NO: 2008079 - DNA, 15 bp, Homo sapiens
gatggagaccatcct

SEQ ID NO: 2008080 - DNA, 15 bp, Homo sapiens
atggagaccatcctg

SEQ ID NO: 2008081 - DNA, 15 bp, Homo sapiens
tggagaccatcctgg

SEQ ID NO: 2008082 - DNA, 15 bp, Homo sapiens
aaaattagccaggct

SEQ ID NO: 2008083 - DNA, 15 bp, Homo sapiens
aaattagccaggctt

SEQ ID NO: 2008084 - DNA, 15 bp, Homo sapiens
aattagccaggcttg

SEQ ID NO: 2008085 - DNA, 15 bp, Homo sapiens
attagccaggcttgg

SEQ ID NO: 2008086 - DNA, 15 bp, Homo sapiens
ttagccaggcttggt

SEQ ID NO: 2008087 - DNA, 15 bp, Homo sapiens
tagccaggcttggtg

SEQ ID NO: 2008088 - DNA, 15 bp, Homo sapiens
agccaggcttggtgg

SEQ ID NO: 2008089 - DNA, 15 bp, Homo sapiens
gccaggcttggtggt

SEQ ID NO: 2008090 - DNA, 15 bp, Homo sapiens
ccaggcttggtggta

SEQ ID NO: 2008091 - DNA, 15 bp, Homo sapiens
caggcttggtggtat

SEQ ID NO: 2008092 - DNA, 15 bp, Homo sapiens
aggcttggtggtatg

SEQ ID NO: 2008093 - DNA, 15 bp, Homo sapiens
ggcttggtggtatgc

SEQ ID NO: 2008094 - DNA, 15 bp, Homo sapiens
gcttggtggtatgcg

SEQ ID NO: 2008095 - DNA, 15 bp, Homo sapiens
cttggtggtatgcgc

SEQ ID NO: 2008096 - DNA, 15 bp, Homo sapiens
ttggtggtatgcgcc

SEQ ID NO: 2008097 - DNA, 15 bp, Homo sapiens
tggtggtatgcgcct

SEQ ID NO: 2008098 - DNA, 15 bp, Homo sapiens
ggtggtatgcgcctg

SEQ ID NO: 2008099 - DNA, 15 bp, Homo sapiens
atgcgcctgtagtcc

SEQ ID NO: 2008100 - DNA, 15 bp, Homo sapiens
ggctgaggcaggagc

SEQ ID NO: 2008101 - DNA, 15 bp, Homo sapiens
gctgaggcaggagca

SEQ ID NO: 2008102 - DNA, 15 bp, Homo sapiens
ctgaggcaggagcat

SEQ ID NO: 2008103 - DNA, 15 bp, Homo sapiens
tgaggcaggagcatc

SEQ ID NO: 2008104 - DNA, 15 bp, Homo sapiens
gaggcaggagcatcg

SEQ ID NO: 2008105 - DNA, 15 bp, Homo sapiens
aggcaggagcatcgc

SEQ ID NO: 2008106 - DNA, 15 bp, Homo sapiens
ggcaggagcatcgct

SEQ ID NO: 2008107 - DNA, 15 bp, Homo sapiens
gcaggagcatcgctt

SEQ ID NO: 2008108 - DNA, 15 bp, Homo sapiens
caggagcatcgcttg

SEQ ID NO: 2008109 - DNA, 15 bp, Homo sapiens
aggagcatcgcttga

SEQ ID NO: 2008110 - DNA, 15 bp, Homo sapiens
ggagcatcgcttgaa

SEQ ID NO: 2008111 - DNA, 15 bp, Homo sapiens
gagcatcgcttgaat

SEQ ID NO: 2008112 - DNA, 15 bp, Homo sapiens
agcatcgcttgaatc

SEQ ID NO: 2008113 - DNA, 15 bp, Homo sapiens
gcatcgcttgaatcc

SEQ ID NO: 2008114 - DNA, 15 bp, Homo sapiens
catcgcttgaatcca

SEQ ID NO: 2008115 - DNA, 15 bp, Homo sapiens
tccagcctgggggac

SEQ ID NO: 2008116 - DNA, 15 bp, Homo sapiens
ccagcctgggggaca

SEQ ID NO: 2008117 - DNA, 15 bp, Homo sapiens
cagcctgggggacag

SEQ ID NO: 2008118 - DNA, 15 bp, Homo sapiens
aaaaaaaaaaagggg

SEQ ID NO: 2008119 - DNA, 15 bp, Homo sapiens
aaaaaaaaaaggggc

SEQ ID NO: 2008120 - DNA, 15 bp, Homo sapiens
aaaaaaaaaggggca

SEQ ID NO: 2008121 - DNA, 15 bp, Homo sapiens
aaaaaaaaggggcac

SEQ ID NO: 2008122 - DNA, 15 bp, Homo sapiens
aaaaaaaggggcaca

SEQ ID NO: 2008123 - DNA, 15 bp, Homo sapiens
aaaaaaggggcacaa

SEQ ID NO: 2008124 - DNA, 15 bp, Homo sapiens
aaaaaggggcacaat

SEQ ID NO: 2008125 - DNA, 15 bp, Homo sapiens
aaaaggggcacaata

SEQ ID NO: 2008126 - DNA, 15 bp, Homo sapiens
aaaggggcacaataa

SEQ ID NO: 2008127 - DNA, 15 bp, Homo sapiens
aaggggcacaataag

SEQ ID NO: 2008128 - DNA, 15 bp, Homo sapiens
aggggcacaataagt

SEQ ID NO: 2008129 - DNA, 15 bp, Homo sapiens
ggggcacaataagta

SEQ ID NO: 2008130 - DNA, 15 bp, Homo sapiens
gggcacaataagtat

SEQ ID NO: 2008131 - DNA, 15 bp, Homo sapiens
ggcacaataagtatt

SEQ ID NO: 2008132 - DNA, 15 bp, Homo sapiens
gcacaataagtattg

SEQ ID NO: 2008133 - DNA, 15 bp, Homo sapiens
cacaataagtattgg

SEQ ID NO: 2008134 - DNA, 15 bp, Homo sapiens
acaataagtattgga

SEQ ID NO: 2008135 - DNA, 15 bp, Homo sapiens
caataagtattggaa

SEQ ID NO: 2008136 - DNA, 15 bp, Homo sapiens
aataagtattggaat

SEQ ID NO: 2008137 - DNA, 15 bp, Homo sapiens
ataagtattggaatt

SEQ ID NO: 2008138 - DNA, 15 bp, Homo sapiens
taagtattggaattc

SEQ ID NO: 2008139 - DNA, 15 bp, Homo sapiens
aagtattggaattca

SEQ ID NO: 2008140 - DNA, 15 bp, Homo sapiens
agtattggaattcat

SEQ ID NO: 2008141 - DNA, 15 bp, Homo sapiens
gtattggaattcatt

SEQ ID NO: 2008142 - DNA, 15 bp, Homo sapiens
tattggaattcattg

SEQ ID NO: 2008143 - DNA, 15 bp, Homo sapiens
attggaattcattga

SEQ ID NO: 2008144 - DNA, 15 bp, Homo sapiens
ttggaattcattgaa

SEQ ID NO: 2008145 - DNA, 15 bp, Homo sapiens
tggaattcattgaaa

SEQ ID NO: 2008146 - DNA, 15 bp, Homo sapiens
ggaattcattgaaat

SEQ ID NO: 2008147 - DNA, 15 bp, Homo sapiens
gaattcattgaaata

SEQ ID NO: 2008148 - DNA, 15 bp, Homo sapiens
aattcattgaaatac

SEQ ID NO: 2008149 - DNA, 15 bp, Homo sapiens
attcattgaaatacc

SEQ ID NO: 2008150 - DNA, 15 bp, Homo sapiens
ttcattgaaatacct

SEQ ID NO: 2008151 - DNA, 15 bp, Homo sapiens
tcattgaaatacctc

SEQ ID NO: 2008152 - DNA, 15 bp, Homo sapiens
cattgaaatacctcc

SEQ ID NO: 2008153 - DNA, 15 bp, Homo sapiens
attgaaatacctcct

SEQ ID NO: 2008154 - DNA, 15 bp, Homo sapiens
ttgaaatacctcctg

SEQ ID NO: 2008155 - DNA, 15 bp, Homo sapiens
tgaaatacctcctgt

SEQ ID NO: 2008156 - DNA, 15 bp, Homo sapiens
gaaatacctcctgtt

SEQ ID NO: 2008157 - DNA, 15 bp, Homo sapiens
aaatacctcctgttt

SEQ ID NO: 2008158 - DNA, 15 bp, Homo sapiens
aatacctcctgtttc

SEQ ID NO: 2008159 - DNA, 15 bp, Homo sapiens
atacctcctgtttct

SEQ ID NO: 2008160 - DNA, 15 bp, Homo sapiens
tacctcctgtttctc

SEQ ID NO: 2008161 - DNA, 15 bp, Homo sapiens
acctcctgtttctcc

SEQ ID NO: 2008162 - DNA, 15 bp, Homo sapiens
cctcctgtttctcca

SEQ ID NO: 2008163 - DNA, 15 bp, Homo sapiens
ctcctgtttctccat

SEQ ID NO: 2008164 - DNA, 15 bp, Homo sapiens
tcctgtttctccatg

SEQ ID NO: 2008165 - DNA, 15 bp, Homo sapiens
cctgtttctccatgt

SEQ ID NO: 2008166 - DNA, 15 bp, Homo sapiens
ctgtttctccatgtc

SEQ ID NO: 2008167 - DNA, 15 bp, Homo sapiens
tgtttctccatgtcg

SEQ ID NO: 2008168 - DNA, 15 bp, Homo sapiens
gtttctccatgtcgg

SEQ ID NO: 2008169 - DNA, 15 bp, Homo sapiens
tttctccatgtcgga

SEQ ID NO: 2008170 - DNA, 15 bp, Homo sapiens
ttctccatgtcggag

SEQ ID NO: 2008171 - DNA, 15 bp, Homo sapiens
tctccatgtcggagg

SEQ ID NO: 2008172 - DNA, 15 bp, Homo sapiens
ctccatgtcggaggg

SEQ ID NO: 2008173 - DNA, 15 bp, Homo sapiens
tccatgtcggagggc

SEQ ID NO: 2008174 - DNA, 15 bp, Homo sapiens
ccatgtcggagggct

SEQ ID NO: 2008175 - DNA, 15 bp, Homo sapiens
catgtcggagggctg

SEQ ID NO: 2008176 - DNA, 15 bp, Homo sapiens
atgtcggagggctgg

SEQ ID NO: 2008177 - DNA, 15 bp, Homo sapiens
tgtcggagggctggt

SEQ ID NO: 2008178 - DNA, 15 bp, Homo sapiens
gtcggagggctggta

SEQ ID NO: 2008179 - DNA, 15 bp, Homo sapiens
tcggagggctggtat

SEQ ID NO: 2008180 - DNA, 15 bp, Homo sapiens
cggagggctggtatc

SEQ ID NO: 2008181 - DNA, 15 bp, Homo sapiens
ggagggctggtatca

SEQ ID NO: 2008182 - DNA, 15 bp, Homo sapiens
gagggctggtatcat

SEQ ID NO: 2008183 - DNA, 15 bp, Homo sapiens
agggctggtatcatt

SEQ ID NO: 2008184 - DNA, 15 bp, Homo sapiens
gggctggtatcatta

SEQ ID NO: 2008185 - DNA, 15 bp, Homo sapiens
ggctggtatcattaa

SEQ ID NO: 2008186 - DNA, 15 bp, Homo sapiens
gctggtatcattaat

SEQ ID NO: 2008187 - DNA, 15 bp, Homo sapiens
ctggtatcattaatg

SEQ ID NO: 2008188 - DNA, 15 bp, Homo sapiens
tggtatcattaatga

SEQ ID NO: 2008189 - DNA, 15 bp, Homo sapiens
ggtatcattaatgat

SEQ ID NO: 2008190 - DNA, 15 bp, Homo sapiens
gtatcattaatgatg

SEQ ID NO: 2008191 - DNA, 15 bp, Homo sapiens
tatcattaatgatgt

SEQ ID NO: 2008192 - DNA, 15 bp, Homo sapiens
atcattaatgatgtc

SEQ ID NO: 2008193 - DNA, 15 bp, Homo sapiens
tcattaatgatgtct

SEQ ID NO: 2008194 - DNA, 15 bp, Homo sapiens
cattaatgatgtcta

SEQ ID NO: 2008195 - DNA, 15 bp, Homo sapiens
attaatgatgtctaa

SEQ ID NO: 2008196 - DNA, 15 bp, Homo sapiens
ttaatgatgtctaaa

SEQ ID NO: 2008197 - DNA, 15 bp, Homo sapiens
taatgatgtctaaag

SEQ ID NO: 2008198 - DNA, 15 bp, Homo sapiens
aatgatgtctaaagt

SEQ ID NO: 2008199 - DNA, 15 bp, Homo sapiens
atgatgtctaaagta

SEQ ID NO: 2008200 - DNA, 15 bp, Homo sapiens
tgatgtctaaagtaa

SEQ ID NO: 2008201 - DNA, 15 bp, Homo sapiens
gatgtctaaagtaag

SEQ ID NO: 2008202 - DNA, 15 bp, Homo sapiens
atgtctaaagtaaga

SEQ ID NO: 2008203 - DNA, 15 bp, Homo sapiens
tgtctaaagtaagag

SEQ ID NO: 2008204 - DNA, 15 bp, Homo sapiens
gtctaaagtaagagt

SEQ ID NO: 2008205 - DNA, 15 bp, Homo sapiens
tctaaagtaagagtt

SEQ ID NO: 2008206 - DNA, 15 bp, Homo sapiens
ctaaagtaagagtta

SEQ ID NO: 2008207 - DNA, 15 bp, Homo sapiens
taaagtaagagttat

SEQ ID NO: 2008208 - DNA, 15 bp, Homo sapiens
aaagtaagagttatt

SEQ ID NO: 2008209 - DNA, 15 bp, Homo sapiens
aagtaagagttattt

SEQ ID NO: 2008210 - DNA, 15 bp, Homo sapiens
agtaagagttatttg

SEQ ID NO: 2008211 - DNA, 15 bp, Homo sapiens
gtaagagttatttgg

SEQ ID NO: 2008212 - DNA, 15 bp, Homo sapiens
taagagttatttggt

SEQ ID NO: 2008213 - DNA, 15 bp, Homo sapiens
aagagttatttggtt

SEQ ID NO: 2008214 - DNA, 15 bp, Homo sapiens
agagttatttggtta

SEQ ID NO: 2008215 - DNA, 15 bp, Homo sapiens
gagttatttggttat

SEQ ID NO: 2008216 - DNA, 15 bp, Homo sapiens
agttatttggttatt

SEQ ID NO: 2008217 - DNA, 15 bp, Homo sapiens
gttatttggttattt

SEQ ID NO: 2008218 - DNA, 15 bp, Homo sapiens
ttatttggttatttg

SEQ ID NO: 2008219 - DNA, 15 bp, Homo sapiens
tatttggttatttgc

SEQ ID NO: 2008220 - DNA, 15 bp, Homo sapiens
atttggttatttgca

SEQ ID NO: 2008221 - DNA, 15 bp, Homo sapiens
tttggttatttgcag

SEQ ID NO: 2008222 - DNA, 15 bp, Homo sapiens
ttggttatttgcagt

SEQ ID NO: 2008223 - DNA, 15 bp, Homo sapiens
tggttatttgcagtt

SEQ ID NO: 2008224 - DNA, 15 bp, Homo sapiens
ggttatttgcagttt

SEQ ID NO: 2008225 - DNA, 15 bp, Homo sapiens
gttatttgcagtttt

SEQ ID NO: 2008226 - DNA, 15 bp, Homo sapiens
ttatttgcagttttc

SEQ ID NO: 2008227 - DNA, 15 bp, Homo sapiens
tatttgcagttttcc

SEQ ID NO: 2008228 - DNA, 15 bp, Homo sapiens
atttgcagttttccc

SEQ ID NO: 2008229 - DNA, 15 bp, Homo sapiens
tttgcagttttccct

SEQ ID NO: 2008230 - DNA, 15 bp, Homo sapiens
ttgcagttttccctt

SEQ ID NO: 2008231 - DNA, 15 bp, Homo sapiens
tgcagttttcccttc

SEQ ID NO: 2008232 - DNA, 15 bp, Homo sapiens
gcagttttcccttca

SEQ ID NO: 2008233 - DNA, 15 bp, Homo sapiens
cagttttcccttcac

SEQ ID NO: 2008234 - DNA, 15 bp, Homo sapiens
agttttcccttcaca

SEQ ID NO: 2008235 - DNA, 15 bp, Homo sapiens
gttttcccttcacat

SEQ ID NO: 2008236 - DNA, 15 bp, Homo sapiens
ttttcccttcacatt

SEQ ID NO: 2008237 - DNA, 15 bp, Homo sapiens
tttcccttcacatta

SEQ ID NO: 2008238 - DNA, 15 bp, Homo sapiens
ttcccttcacattag

SEQ ID NO: 2008239 - DNA, 15 bp, Homo sapiens
tcccttcacattagc

SEQ ID NO: 2008240 - DNA, 15 bp, Homo sapiens
cccttcacattagca

SEQ ID NO: 2008241 - DNA, 15 bp, Homo sapiens
ccttcacattagcat

SEQ ID NO: 2008242 - DNA, 15 bp, Homo sapiens
cttcacattagcata

SEQ ID NO: 2008243 - DNA, 15 bp, Homo sapiens
ttcacattagcataa

SEQ ID NO: 2008244 - DNA, 15 bp, Homo sapiens
tcacattagcataaa

SEQ ID NO: 2008245 - DNA, 15 bp, Homo sapiens
cacattagcataaat

SEQ ID NO: 2008246 - DNA, 15 bp, Homo sapiens
acattagcataaatt

SEQ ID NO: 2008247 - DNA, 15 bp, Homo sapiens
cattagcataaattt

SEQ ID NO: 2008248 - DNA, 15 bp, Homo sapiens
attagcataaatttg

SEQ ID NO: 2008249 - DNA, 15 bp, Homo sapiens
ttagcataaatttgg

SEQ ID NO: 2008250 - DNA, 15 bp, Homo sapiens
tagcataaatttgga

SEQ ID NO: 2008251 - DNA, 15 bp, Homo sapiens
agcataaatttggaa

SEQ ID NO: 2008252 - DNA, 15 bp, Homo sapiens
gcataaatttggaag

SEQ ID NO: 2008253 - DNA, 15 bp, Homo sapiens
cataaatttggaagg

SEQ ID NO: 2008254 - DNA, 15 bp, Homo sapiens
ataaatttggaaggc

SEQ ID NO: 2008255 - DNA, 15 bp, Homo sapiens
taaatttggaaggca

SEQ ID NO: 2008256 - DNA, 15 bp, Homo sapiens
aaatttggaaggcac

SEQ ID NO: 2008257 - DNA, 15 bp, Homo sapiens
aatttggaaggcaca

SEQ ID NO: 2008258 - DNA, 15 bp, Homo sapiens
atttggaaggcacag

SEQ ID NO: 2008259 - DNA, 15 bp, Homo sapiens
tttggaaggcacagg

SEQ ID NO: 2008260 - DNA, 15 bp, Homo sapiens
ttggaaggcacaggc

SEQ ID NO: 2008261 - DNA, 15 bp, Homo sapiens
tggaaggcacaggct

SEQ ID NO: 2008262 - DNA, 15 bp, Homo sapiens
ggaaggcacaggctt

SEQ ID NO: 2008263 - DNA, 15 bp, Homo sapiens
gaaggcacaggcttg

SEQ ID NO: 2008264 - DNA, 15 bp, Homo sapiens
aaggcacaggcttga

SEQ ID NO: 2008265 - DNA, 15 bp, Homo sapiens
aggcacaggcttgag

SEQ ID NO: 2008266 - DNA, 15 bp, Homo sapiens
ggcacaggcttgagt

SEQ ID NO: 2008267 - DNA, 15 bp, Homo sapiens
gcacaggcttgagtt

SEQ ID NO: 2008268 - DNA, 15 bp, Homo sapiens
cacaggcttgagttt

SEQ ID NO: 2008269 - DNA, 15 bp, Homo sapiens
acaggcttgagttta

SEQ ID NO: 2008270 - DNA, 15 bp, Homo sapiens
caggcttgagtttaa

SEQ ID NO: 2008271 - DNA, 15 bp, Homo sapiens
aggcttgagtttaac

SEQ ID NO: 2008272 - DNA, 15 bp, Homo sapiens
ggcttgagtttaact

SEQ ID NO: 2008273 - DNA, 15 bp, Homo sapiens
gcttgagtttaactt

SEQ ID NO: 2008274 - DNA, 15 bp, Homo sapiens
cttgagtttaacttt

SEQ ID NO: 2008275 - DNA, 15 bp, Homo sapiens
ttgagtttaactttc

SEQ ID NO: 2008276 - DNA, 15 bp, Homo sapiens
tgagtttaactttca

SEQ ID NO: 2008277 - DNA, 15 bp, Homo sapiens
gagtttaactttcat

SEQ ID NO: 2008278 - DNA, 15 bp, Homo sapiens
agtttaactttcatc

SEQ ID NO: 2008279 - DNA, 15 bp, Homo sapiens
gtttaactttcatct

SEQ ID NO: 2008280 - DNA, 15 bp, Homo sapiens
tttaactttcatctc

SEQ ID NO: 2008281 - DNA, 15 bp, Homo sapiens
ttaactttcatctct

SEQ ID NO: 2008282 - DNA, 15 bp, Homo sapiens
taactttcatctcta

SEQ ID NO: 2008283 - DNA, 15 bp, Homo sapiens
aactttcatctctac

SEQ ID NO: 2008284 - DNA, 15 bp, Homo sapiens
actttcatctctact

SEQ ID NO: 2008285 - DNA, 15 bp, Homo sapiens
ctttcatctctactt

SEQ ID NO: 2008286 - DNA, 15 bp, Homo sapiens
tttcatctctacttt

SEQ ID NO: 2008287 - DNA, 15 bp, Homo sapiens
tcatctctactttcc

SEQ ID NO: 2008288 - DNA, 15 bp, Homo sapiens
catctctactttcct

SEQ ID NO: 2008289 - DNA, 15 bp, Homo sapiens
atctctactttcctg

SEQ ID NO: 2008290 - DNA, 15 bp, Homo sapiens
tctctactttcctgg

SEQ ID NO: 2008291 - DNA, 15 bp, Homo sapiens
ctctactttcctggc

SEQ ID NO: 2008292 - DNA, 15 bp, Homo sapiens
tctactttcctggct

SEQ ID NO: 2008293 - DNA, 15 bp, Homo sapiens
ctactttcctggctg

SEQ ID NO: 2008294 - DNA, 15 bp, Homo sapiens
tactttcctggctgc

SEQ ID NO: 2008295 - DNA, 15 bp, Homo sapiens
actttcctggctgct

SEQ ID NO: 2008296 - DNA, 15 bp, Homo sapiens
ctttcctggctgctg

SEQ ID NO: 2008297 - DNA, 15 bp, Homo sapiens
tttcctggctgctgt

SEQ ID NO: 2008298 - DNA, 15 bp, Homo sapiens
ttcctggctgctgtt

SEQ ID NO: 2008299 - DNA, 15 bp, Homo sapiens
tcctggctgctgttt

SEQ ID NO: 2008300 - DNA, 15 bp, Homo sapiens
cctggctgctgtttt

SEQ ID NO: 2008301 - DNA, 15 bp, Homo sapiens
ctggctgctgttttg

SEQ ID NO: 2008302 - DNA, 15 bp, Homo sapiens
tggctgctgttttga

SEQ ID NO: 2008303 - DNA, 15 bp, Homo sapiens
ggctgctgttttgag

SEQ ID NO: 2008304 - DNA, 15 bp, Homo sapiens
gctgctgttttgaga

SEQ ID NO: 2008305 - DNA, 15 bp, Homo sapiens
ctgctgttttgagaa

SEQ ID NO: 2008306 - DNA, 15 bp, Homo sapiens
tgctgttttgagaag

SEQ ID NO: 2008307 - DNA, 15 bp, Homo sapiens
gctgttttgagaaga

SEQ ID NO: 2008308 - DNA, 15 bp, Homo sapiens
ctgttttgagaagat

SEQ ID NO: 2008309 - DNA, 15 bp, Homo sapiens
tgttttgagaagatt

SEQ ID NO: 2008310 - DNA, 15 bp, Homo sapiens
gttttgagaagattt

SEQ ID NO: 2008311 - DNA, 15 bp, Homo sapiens
ttttgagaagatttc

SEQ ID NO: 2008312 - DNA, 15 bp, Homo sapiens
tttgagaagatttct

SEQ ID NO: 2008313 - DNA, 15 bp, Homo sapiens
ttgagaagatttctt

SEQ ID NO: 2008314 - DNA, 15 bp, Homo sapiens
tgagaagatttcttc

SEQ ID NO: 2008315 - DNA, 15 bp, Homo sapiens
gagaagatttcttca

SEQ ID NO: 2008316 - DNA, 15 bp, Homo sapiens
agaagatttcttcat

SEQ ID NO: 2008317 - DNA, 15 bp, Homo sapiens
gaagatttcttcatt

SEQ ID NO: 2008318 - DNA, 15 bp, Homo sapiens
aagatttcttcattt

SEQ ID NO: 2008319 - DNA, 15 bp, Homo sapiens
agatttcttcatttg

SEQ ID NO: 2008320 - DNA, 15 bp, Homo sapiens
gatttcttcatttgt

SEQ ID NO: 2008321 - DNA, 15 bp, Homo sapiens
tttcttcatttgtac

SEQ ID NO: 2008322 - DNA, 15 bp, Homo sapiens
ttcttcatttgtaca

SEQ ID NO: 2008323 - DNA, 15 bp, Homo sapiens
tcttcatttgtacaa

SEQ ID NO: 2008324 - DNA, 15 bp, Homo sapiens
cttcatttgtacaat

SEQ ID NO: 2008325 - DNA, 15 bp, Homo sapiens
ttcatttgtacaatg

SEQ ID NO: 2008326 - DNA, 15 bp, Homo sapiens
tcatttgtacaatgt

SEQ ID NO: 2008327 - DNA, 15 bp, Homo sapiens
catttgtacaatgtg

SEQ ID NO: 2008328 - DNA, 15 bp, Homo sapiens
atttgtacaatgtgg

SEQ ID NO: 2008329 - DNA, 15 bp, Homo sapiens
tttgtacaatgtgga

SEQ ID NO: 2008330 - DNA, 15 bp, Homo sapiens
ttgtacaatgtggat

SEQ ID NO: 2008331 - DNA, 15 bp, Homo sapiens
tgtacaatgtggatc

SEQ ID NO: 2008332 - DNA, 15 bp, Homo sapiens
gtacaatgtggatca

SEQ ID NO: 2008333 - DNA, 15 bp, Homo sapiens
tacaatgtggatcat

SEQ ID NO: 2008334 - DNA, 15 bp, Homo sapiens
acaatgtggatcata

SEQ ID NO: 2008335 - DNA, 15 bp, Homo sapiens
caatgtggatcataa

SEQ ID NO: 2008336 - DNA, 15 bp, Homo sapiens
aatgtggatcataat

SEQ ID NO: 2008337 - DNA, 15 bp, Homo sapiens
atgtggatcataatg

SEQ ID NO: 2008338 - DNA, 15 bp, Homo sapiens
tgtggatcataatgc

SEQ ID NO: 2008339 - DNA, 15 bp, Homo sapiens
gtggatcataatgca

SEQ ID NO: 2008340 - DNA, 15 bp, Homo sapiens
tggatcataatgcac

SEQ ID NO: 2008341 - DNA, 15 bp, Homo sapiens
ggatcataatgcaca

SEQ ID NO: 2008342 - DNA, 15 bp, Homo sapiens
gatcataatgcacat

SEQ ID NO: 2008343 - DNA, 15 bp, Homo sapiens
atcataatgcacatt

SEQ ID NO: 2008344 - DNA, 15 bp, Homo sapiens
tcataatgcacattc

SEQ ID NO: 2008345 - DNA, 15 bp, Homo sapiens
cataatgcacattca

SEQ ID NO: 2008346 - DNA, 15 bp, Homo sapiens
ataatgcacattcat

SEQ ID NO: 2008347 - DNA, 15 bp, Homo sapiens
taatgcacattcata

SEQ ID NO: 2008348 - DNA, 15 bp, Homo sapiens
aatgcacattcataa

SEQ ID NO: 2008349 - DNA, 15 bp, Homo sapiens
atgcacattcataat

SEQ ID NO: 2008350 - DNA, 15 bp, Homo sapiens
tgcacattcataatc

SEQ ID NO: 2008351 - DNA, 15 bp, Homo sapiens
gcacattcataatcc

SEQ ID NO: 2008352 - DNA, 15 bp, Homo sapiens
cacattcataatccc

SEQ ID NO: 2008353 - DNA, 15 bp, Homo sapiens
acattcataatccct

SEQ ID NO: 2008354 - DNA, 15 bp, Homo sapiens
cattcataatccctt

SEQ ID NO: 2008355 - DNA, 15 bp, Homo sapiens
attcataatcccttg

SEQ ID NO: 2008356 - DNA, 15 bp, Homo sapiens
ttcataatcccttgt

SEQ ID NO: 2008357 - DNA, 15 bp, Homo sapiens
tcataatcccttgtc

SEQ ID NO: 2008358 - DNA, 15 bp, Homo sapiens
cataatcccttgtct

SEQ ID NO: 2008359 - DNA, 15 bp, Homo sapiens
ataatcccttgtctg

SEQ ID NO: 2008360 - DNA, 15 bp, Homo sapiens
taatcccttgtctgt

SEQ ID NO: 2008361 - DNA, 15 bp, Homo sapiens
aatcccttgtctgta

SEQ ID NO: 2008362 - DNA, 15 bp, Homo sapiens
atcccttgtctgtaa

SEQ ID NO: 2008363 - DNA, 15 bp, Homo sapiens
tcccttgtctgtaat

SEQ ID NO: 2008364 - DNA, 15 bp, Homo sapiens
cccttgtctgtaatc

SEQ ID NO: 2008365 - DNA, 15 bp, Homo sapiens
ccttgtctgtaatct

SEQ ID NO: 2008366 - DNA, 15 bp, Homo sapiens
cttgtctgtaatctg

SEQ ID NO: 2008367 - DNA, 15 bp, Homo sapiens
ttgtctgtaatctga

SEQ ID NO: 2008368 - DNA, 15 bp, Homo sapiens
tgtctgtaatctgaa

SEQ ID NO: 2008369 - DNA, 15 bp, Homo sapiens
gtctgtaatctgaaa

SEQ ID NO: 2008370 - DNA, 15 bp, Homo sapiens
tctgtaatctgaaac

SEQ ID NO: 2008371 - DNA, 15 bp, Homo sapiens
ctgtaatctgaaacc

SEQ ID NO: 2008372 - DNA, 15 bp, Homo sapiens
tgtaatctgaaaccc

SEQ ID NO: 2008373 - DNA, 15 bp, Homo sapiens
gtaatctgaaacccc

SEQ ID NO: 2008374 - DNA, 15 bp, Homo sapiens
taatctgaaacccca

SEQ ID NO: 2008375 - DNA, 15 bp, Homo sapiens
aatctgaaaccccaa

SEQ ID NO: 2008376 - DNA, 15 bp, Homo sapiens
atctgaaaccccaaa

SEQ ID NO: 2008377 - DNA, 15 bp, Homo sapiens
tctgaaaccccaaat

SEQ ID NO: 2008378 - DNA, 15 bp, Homo sapiens
ctgaaaccccaaatc

SEQ ID NO: 2008379 - DNA, 15 bp, Homo sapiens
tgaaaccccaaatcc

SEQ ID NO: 2008380 - DNA, 15 bp, Homo sapiens
gaaaccccaaatcct

SEQ ID NO: 2008381 - DNA, 15 bp, Homo sapiens
aaaccccaaatcctc

SEQ ID NO: 2008382 - DNA, 15 bp, Homo sapiens
aaccccaaatcctcc

SEQ ID NO: 2008383 - DNA, 15 bp, Homo sapiens
accccaaatcctcca

SEQ ID NO: 2008384 - DNA, 15 bp, Homo sapiens
ccccaaatcctccaa

SEQ ID NO: 2008385 - DNA, 15 bp, Homo sapiens
cccaaatcctccaaa

SEQ ID NO: 2008386 - DNA, 15 bp, Homo sapiens
ccaaatcctccaaaa

SEQ ID NO: 2008387 - DNA, 15 bp, Homo sapiens
caaatcctccaaaaa

SEQ ID NO: 2008388 - DNA, 15 bp, Homo sapiens
aaatcctccaaaaac

SEQ ID NO: 2008389 - DNA, 15 bp, Homo sapiens
aatcctccaaaaacc

SEQ ID NO: 2008390 - DNA, 15 bp, Homo sapiens
atcctccaaaaacct

SEQ ID NO: 2008391 - DNA, 15 bp, Homo sapiens
tcctccaaaaacctt

SEQ ID NO: 2008392 - DNA, 15 bp, Homo sapiens
cctccaaaaacctta

SEQ ID NO: 2008393 - DNA, 15 bp, Homo sapiens
ctccaaaaaccttaa

SEQ ID NO: 2008394 - DNA, 15 bp, Homo sapiens
tccaaaaaccttaag

SEQ ID NO: 2008395 - DNA, 15 bp, Homo sapiens
ccaaaaaccttaagt

SEQ ID NO: 2008396 - DNA, 15 bp, Homo sapiens
caaaaaccttaagtt

SEQ ID NO: 2008397 - DNA, 15 bp, Homo sapiens
aaaaaccttaagttt

SEQ ID NO: 2008398 - DNA, 15 bp, Homo sapiens
aaaaccttaagtttt

SEQ ID NO: 2008399 - DNA, 15 bp, Homo sapiens
aaaccttaagtttta

SEQ ID NO: 2008400 - DNA, 15 bp, Homo sapiens
aaccttaagttttat

SEQ ID NO: 2008401 - DNA, 15 bp, Homo sapiens
accttaagttttatc

SEQ ID NO: 2008402 - DNA, 15 bp, Homo sapiens
ccttaagttttatca

SEQ ID NO: 2008403 - DNA, 15 bp, Homo sapiens
cttaagttttatcaa

SEQ ID NO: 2008404 - DNA, 15 bp, Homo sapiens
ttaagttttatcaaa

SEQ ID NO: 2008405 - DNA, 15 bp, Homo sapiens
taagttttatcaaaa

SEQ ID NO: 2008406 - DNA, 15 bp, Homo sapiens
aagttttatcaaaaa

SEQ ID NO: 2008407 - DNA, 15 bp, Homo sapiens
agttttatcaaaaaa

SEQ ID NO: 2008408 - DNA, 15 bp, Homo sapiens
gttttatcaaaaaat

SEQ ID NO: 2008409 - DNA, 15 bp, Homo sapiens
ttttatcaaaaaata

SEQ ID NO: 2008410 - DNA, 15 bp, Homo sapiens
tttatcaaaaaataa

SEQ ID NO: 2008411 - DNA, 15 bp, Homo sapiens
ttatcaaaaaataaa

SEQ ID NO: 2008412 - DNA, 15 bp, Homo sapiens
tatcaaaaaataaaa

SEQ ID NO: 2008413 - DNA, 15 bp, Homo sapiens
atcaaaaaataaaaa

SEQ ID NO: 2008414 - DNA, 15 bp, Homo sapiens
aaaaaataaaaaagt

SEQ ID NO: 2008415 - DNA, 15 bp, Homo sapiens
aaaaataaaaaagtt

SEQ ID NO: 2008416 - DNA, 15 bp, Homo sapiens
aaaataaaaaagttt

SEQ ID NO: 2008417 - DNA, 15 bp, Homo sapiens
aaataaaaaagtttg

SEQ ID NO: 2008418 - DNA, 15 bp, Homo sapiens
aataaaaaagtttga

SEQ ID NO: 2008419 - DNA, 15 bp, Homo sapiens
ataaaaaagtttgac

SEQ ID NO: 2008420 - DNA, 15 bp, Homo sapiens
taaaaaagtttgaca

SEQ ID NO: 2008421 - DNA, 15 bp, Homo sapiens
aaaaaagtttgacac

SEQ ID NO: 2008422 - DNA, 15 bp, Homo sapiens
aaaaagtttgacacc

SEQ ID NO: 2008423 - DNA, 15 bp, Homo sapiens
aaaagtttgacacca

SEQ ID NO: 2008424 - DNA, 15 bp, Homo sapiens
aaagtttgacaccaa

SEQ ID NO: 2008425 - DNA, 15 bp, Homo sapiens
aagtttgacaccaaa

SEQ ID NO: 2008426 - DNA, 15 bp, Homo sapiens
agtttgacaccaaaa

SEQ ID NO: 2008427 - DNA, 15 bp, Homo sapiens
gtttgacaccaaaat

SEQ ID NO: 2008428 - DNA, 15 bp, Homo sapiens
tttgacaccaaaatt

SEQ ID NO: 2008429 - DNA, 15 bp, Homo sapiens
ttgacaccaaaattt

SEQ ID NO: 2008430 - DNA, 15 bp, Homo sapiens
tgacaccaaaattta

SEQ ID NO: 2008431 - DNA, 15 bp, Homo sapiens
gacaccaaaatttat

SEQ ID NO: 2008432 - DNA, 15 bp, Homo sapiens
acaccaaaatttatt

SEQ ID NO: 2008433 - DNA, 15 bp, Homo sapiens
caccaaaatttattt

SEQ ID NO: 2008434 - DNA, 15 bp, Homo sapiens
accaaaatttatttg

SEQ ID NO: 2008435 - DNA, 15 bp, Homo sapiens
ccaaaatttatttgg

SEQ ID NO: 2008436 - DNA, 15 bp, Homo sapiens
caaaatttatttggt

SEQ ID NO: 2008437 - DNA, 15 bp, Homo sapiens
aaaatttatttggtg

SEQ ID NO: 2008438 - DNA, 15 bp, Homo sapiens
aaatttatttggtgc

SEQ ID NO: 2008439 - DNA, 15 bp, Homo sapiens
aatttatttggtgca

SEQ ID NO: 2008440 - DNA, 15 bp, Homo sapiens
atttatttggtgcaa

SEQ ID NO: 2008441 - DNA, 15 bp, Homo sapiens
tttatttggtgcaaa

SEQ ID NO: 2008442 - DNA, 15 bp, Homo sapiens
ttatttggtgcaaat

SEQ ID NO: 2008443 - DNA, 15 bp, Homo sapiens
tatttggtgcaaatg

SEQ ID NO: 2008444 - DNA, 15 bp, Homo sapiens
atttggtgcaaatgc

SEQ ID NO: 2008445 - DNA, 15 bp, Homo sapiens
tttggtgcaaatgcc

SEQ ID NO: 2008446 - DNA, 15 bp, Homo sapiens
ttggtgcaaatgcct

SEQ ID NO: 2008447 - DNA, 15 bp, Homo sapiens
tggtgcaaatgcctt

SEQ ID NO: 2008448 - DNA, 15 bp, Homo sapiens
ggtgcaaatgcctta

SEQ ID NO: 2008449 - DNA, 15 bp, Homo sapiens
gtgcaaatgccttat

SEQ ID NO: 2008450 - DNA, 15 bp, Homo sapiens
tgcaaatgccttatc

SEQ ID NO: 2008451 - DNA, 15 bp, Homo sapiens
gcaaatgccttatct

SEQ ID NO: 2008452 - DNA, 15 bp, Homo sapiens
caaatgccttatctg

SEQ ID NO: 2008453 - DNA, 15 bp, Homo sapiens
aaatgccttatctgc

SEQ ID NO: 2008454 - DNA, 15 bp, Homo sapiens
aatgccttatctgca

SEQ ID NO: 2008455 - DNA, 15 bp, Homo sapiens
atgccttatctgcat

SEQ ID NO: 2008456 - DNA, 15 bp, Homo sapiens
tgccttatctgcata

SEQ ID NO: 2008457 - DNA, 15 bp, Homo sapiens
gccttatctgcatag

SEQ ID NO: 2008458 - DNA, 15 bp, Homo sapiens
ccttatctgcataga

SEQ ID NO: 2008459 - DNA, 15 bp, Homo sapiens
cttatctgcatagat

SEQ ID NO: 2008460 - DNA, 15 bp, Homo sapiens
ttatctgcatagatg

SEQ ID NO: 2008461 - DNA, 15 bp, Homo sapiens
tatctgcatagatgg

SEQ ID NO: 2008462 - DNA, 15 bp, Homo sapiens
atctgcatagatggg

SEQ ID NO: 2008463 - DNA, 15 bp, Homo sapiens
tctgcatagatggga

SEQ ID NO: 2008464 - DNA, 15 bp, Homo sapiens
ctgcatagatgggag

SEQ ID NO: 2008465 - DNA, 15 bp, Homo sapiens
tgcatagatgggagg

SEQ ID NO: 2008466 - DNA, 15 bp, Homo sapiens
gcatagatgggaggt

SEQ ID NO: 2008467 - DNA, 15 bp, Homo sapiens
catagatgggaggtt

SEQ ID NO: 2008468 - DNA, 15 bp, Homo sapiens
atagatgggaggttt

SEQ ID NO: 2008469 - DNA, 15 bp, Homo sapiens
tagatgggaggtttt

SEQ ID NO: 2008470 - DNA, 15 bp, Homo sapiens
agatgggaggttttt

SEQ ID NO: 2008471 - DNA, 15 bp, Homo sapiens
gatgggaggttttta

SEQ ID NO: 2008472 - DNA, 15 bp, Homo sapiens
atgggaggtttttag

SEQ ID NO: 2008473 - DNA, 15 bp, Homo sapiens
tgggaggtttttagc

SEQ ID NO: 2008474 - DNA, 15 bp, Homo sapiens
gggaggtttttagct

SEQ ID NO: 2008475 - DNA, 15 bp, Homo sapiens
ggaggtttttagcta

SEQ ID NO: 2008476 - DNA, 15 bp, Homo sapiens
gaggtttttagctat

SEQ ID NO: 2008477 - DNA, 15 bp, Homo sapiens
aggtttttagctatc

SEQ ID NO: 2008478 - DNA, 15 bp, Homo sapiens
ggtttttagctatct

SEQ ID NO: 2008479 - DNA, 15 bp, Homo sapiens
gtttttagctatctt

SEQ ID NO: 2008480 - DNA, 15 bp, Homo sapiens
tttttagctatcttt

SEQ ID NO: 2008481 - DNA, 15 bp, Homo sapiens
ttttagctatctttg

SEQ ID NO: 2008482 - DNA, 15 bp, Homo sapiens
tttagctatctttgt

SEQ ID NO: 2008483 - DNA, 15 bp, Homo sapiens
ttagctatctttgtt

SEQ ID NO: 2008484 - DNA, 15 bp, Homo sapiens
tagctatctttgttt

SEQ ID NO: 2008485 - DNA, 15 bp, Homo sapiens
agctatctttgtttc

SEQ ID NO: 2008486 - DNA, 15 bp, Homo sapiens
gctatctttgtttca

SEQ ID NO: 2008487 - DNA, 15 bp, Homo sapiens
ctatctttgtttcac

SEQ ID NO: 2008488 - DNA, 15 bp, Homo sapiens
tatctttgtttcact

SEQ ID NO: 2008489 - DNA, 15 bp, Homo sapiens
atctttgtttcactt

SEQ ID NO: 2008490 - DNA, 15 bp, Homo sapiens
tctttgtttcactta

SEQ ID NO: 2008491 - DNA, 15 bp, Homo sapiens
ctttgtttcacttag

SEQ ID NO: 2008492 - DNA, 15 bp, Homo sapiens
tttgtttcacttagt

SEQ ID NO: 2008493 - DNA, 15 bp, Homo sapiens
ttgtttcacttagtg

SEQ ID NO: 2008494 - DNA, 15 bp, Homo sapiens
tgtttcacttagtgt

SEQ ID NO: 2008495 - DNA, 15 bp, Homo sapiens
gtttcacttagtgtg

SEQ ID NO: 2008496 - DNA, 15 bp, Homo sapiens
tttcacttagtgtgg

SEQ ID NO: 2008497 - DNA, 15 bp, Homo sapiens
ttcacttagtgtgga

SEQ ID NO: 2008498 - DNA, 15 bp, Homo sapiens
tcacttagtgtggat

SEQ ID NO: 2008499 - DNA, 15 bp, Homo sapiens
cacttagtgtggata

SEQ ID NO: 2008500 - DNA, 15 bp, Homo sapiens
acttagtgtggatat

SEQ ID NO: 2008501 - DNA, 15 bp, Homo sapiens
cttagtgtggatatt

SEQ ID NO: 2008502 - DNA, 15 bp, Homo sapiens
ttagtgtggatatta

SEQ ID NO: 2008503 - DNA, 15 bp, Homo sapiens
tagtgtggatattaa

SEQ ID NO: 2008504 - DNA, 15 bp, Homo sapiens
agtgtggatattaat

SEQ ID NO: 2008505 - DNA, 15 bp, Homo sapiens
gtgtggatattaatg

SEQ ID NO: 2008506 - DNA, 15 bp, Homo sapiens
tgtggatattaatgt

SEQ ID NO: 2008507 - DNA, 15 bp, Homo sapiens
gtggatattaatgtt

SEQ ID NO: 2008508 - DNA, 15 bp, Homo sapiens
tggatattaatgttg

SEQ ID NO: 2008509 - DNA, 15 bp, Homo sapiens
ggatattaatgttgc

SEQ ID NO: 2008510 - DNA, 15 bp, Homo sapiens
gatattaatgttgcg

SEQ ID NO: 2008511 - DNA, 15 bp, Homo sapiens
atattaatgttgcgc

SEQ ID NO: 2008512 - DNA, 15 bp, Homo sapiens
tattaatgttgcgct

SEQ ID NO: 2008513 - DNA, 15 bp, Homo sapiens
attaatgttgcgctg

SEQ ID NO: 2008514 - DNA, 15 bp, Homo sapiens
ttaatgttgcgctgc

SEQ ID NO: 2008515 - DNA, 15 bp, Homo sapiens
taatgttgcgctgca

SEQ ID NO: 2008516 - DNA, 15 bp, Homo sapiens
aatgttgcgctgcag

SEQ ID NO: 2008517 - DNA, 15 bp, Homo sapiens
atgttgcgctgcaga

SEQ ID NO: 2008518 - DNA, 15 bp, Homo sapiens
tgttgcgctgcagaa

SEQ ID NO: 2008519 - DNA, 15 bp, Homo sapiens
gttgcgctgcagaaa

SEQ ID NO: 2008520 - DNA, 15 bp, Homo sapiens
ttgcgctgcagaaat

SEQ ID NO: 2008521 - DNA, 15 bp, Homo sapiens
tgcgctgcagaaata

SEQ ID NO: 2008522 - DNA, 15 bp, Homo sapiens
gcgctgcagaaatat

SEQ ID NO: 2008523 - DNA, 15 bp, Homo sapiens
cgctgcagaaatatt

SEQ ID NO: 2008524 - DNA, 15 bp, Homo sapiens
gctgcagaaatattg

SEQ ID NO: 2008525 - DNA, 15 bp, Homo sapiens
ctgcagaaatattga

SEQ ID NO: 2008526 - DNA, 15 bp, Homo sapiens
tgcagaaatattgat

SEQ ID NO: 2008527 - DNA, 15 bp, Homo sapiens
gcagaaatattgatg

SEQ ID NO: 2008528 - DNA, 15 bp, Homo sapiens
cagaaatattgatga

SEQ ID NO: 2008529 - DNA, 15 bp, Homo sapiens
agaaatattgatgag

SEQ ID NO: 2008530 - DNA, 15 bp, Homo sapiens
gaaatattgatgaga

SEQ ID NO: 2008531 - DNA, 15 bp, Homo sapiens
aaatattgatgagat

SEQ ID NO: 2008532 - DNA, 15 bp, Homo sapiens
aatattgatgagatt

SEQ ID NO: 2008533 - DNA, 15 bp, Homo sapiens
atattgatgagattg

SEQ ID NO: 2008534 - DNA, 15 bp, Homo sapiens
tattgatgagattga

SEQ ID NO: 2008535 - DNA, 15 bp, Homo sapiens
attgatgagattgat

SEQ ID NO: 2008536 - DNA, 15 bp, Homo sapiens
ttgatgagattgatt

SEQ ID NO: 2008537 - DNA, 15 bp, Homo sapiens
tgatgagattgattt

SEQ ID NO: 2008538 - DNA, 15 bp, Homo sapiens
gatgagattgatttt

SEQ ID NO: 2008539 - DNA, 15 bp, Homo sapiens
atgagattgattttg

SEQ ID NO: 2008540 - DNA, 15 bp, Homo sapiens
tgagattgattttgg

SEQ ID NO: 2008541 - DNA, 15 bp, Homo sapiens
gagattgattttggg

SEQ ID NO: 2008542 - DNA, 15 bp, Homo sapiens
agattgattttgggg

SEQ ID NO: 2008543 - DNA, 15 bp, Homo sapiens
gattgattttggggt

SEQ ID NO: 2008544 - DNA, 15 bp, Homo sapiens
attgattttggggtg

SEQ ID NO: 2008545 - DNA, 15 bp, Homo sapiens
ttgattttggggtgc

SEQ ID NO: 2008546 - DNA, 15 bp, Homo sapiens
tgattttggggtgct

SEQ ID NO: 2008547 - DNA, 15 bp, Homo sapiens
gattttggggtgctg

SEQ ID NO: 2008548 - DNA, 15 bp, Homo sapiens
attttggggtgctgt

SEQ ID NO: 2008549 - DNA, 15 bp, Homo sapiens
ttttggggtgctgtt

SEQ ID NO: 2008550 - DNA, 15 bp, Homo sapiens
tttggggtgctgttc

SEQ ID NO: 2008551 - DNA, 15 bp, Homo sapiens
ttggggtgctgttcc

SEQ ID NO: 2008552 - DNA, 15 bp, Homo sapiens
tggggtgctgttcca

SEQ ID NO: 2008553 - DNA, 15 bp, Homo sapiens
ggggtgctgttccat

SEQ ID NO: 2008554 - DNA, 15 bp, Homo sapiens
gggtgctgttccatt

SEQ ID NO: 2008555 - DNA, 15 bp, Homo sapiens
ggtgctgttccattt

SEQ ID NO: 2008556 - DNA, 15 bp, Homo sapiens
gtgctgttccatttt

SEQ ID NO: 2008557 - DNA, 15 bp, Homo sapiens
tgctgttccattttc

SEQ ID NO: 2008558 - DNA, 15 bp, Homo sapiens
gctgttccattttct

SEQ ID NO: 2008559 - DNA, 15 bp, Homo sapiens
ctgttccattttcta

SEQ ID NO: 2008560 - DNA, 15 bp, Homo sapiens
tgttccattttctac

SEQ ID NO: 2008561 - DNA, 15 bp, Homo sapiens
gttccattttctact

SEQ ID NO: 2008562 - DNA, 15 bp, Homo sapiens
ttccattttctactg

SEQ ID NO: 2008563 - DNA, 15 bp, Homo sapiens
tccattttctactgg

SEQ ID NO: 2008564 - DNA, 15 bp, Homo sapiens
ccattttctactgga

SEQ ID NO: 2008565 - DNA, 15 bp, Homo sapiens
cattttctactggag

SEQ ID NO: 2008566 - DNA, 15 bp, Homo sapiens
attttctactggagt

SEQ ID NO: 2008567 - DNA, 15 bp, Homo sapiens
ttttctactggagtg

SEQ ID NO: 2008568 - DNA, 15 bp, Homo sapiens
tttctactggagtgt

SEQ ID NO: 2008569 - DNA, 15 bp, Homo sapiens
ttctactggagtgtt

SEQ ID NO: 2008570 - DNA, 15 bp, Homo sapiens
tctactggagtgtta

SEQ ID NO: 2008571 - DNA, 15 bp, Homo sapiens
ctactggagtgttac

SEQ ID NO: 2008572 - DNA, 15 bp, Homo sapiens
tactggagtgttaca

SEQ ID NO: 2008573 - DNA, 15 bp, Homo sapiens
actggagtgttacat

SEQ ID NO: 2008574 - DNA, 15 bp, Homo sapiens
ctggagtgttacata

SEQ ID NO: 2008575 - DNA, 15 bp, Homo sapiens
tggagtgttacataa

SEQ ID NO: 2008576 - DNA, 15 bp, Homo sapiens
ggagtgttacataat

SEQ ID NO: 2008577 - DNA, 15 bp, Homo sapiens
gagtgttacataata

SEQ ID NO: 2008578 - DNA, 15 bp, Homo sapiens
agtgttacataatac

SEQ ID NO: 2008579 - DNA, 15 bp, Homo sapiens
gtgttacataataca

SEQ ID NO: 2008580 - DNA, 15 bp, Homo sapiens
tgttacataatacat

SEQ ID NO: 2008581 - DNA, 15 bp, Homo sapiens
gttacataatacatg

SEQ ID NO: 2008582 - DNA, 15 bp, Homo sapiens
ttacataatacatga

SEQ ID NO: 2008583 - DNA, 15 bp, Homo sapiens
tacataatacatgat

SEQ ID NO: 2008584 - DNA, 15 bp, Homo sapiens
acataatacatgata

SEQ ID NO: 2008585 - DNA, 15 bp, Homo sapiens
cataatacatgataa

SEQ ID NO: 2008586 - DNA, 15 bp, Homo sapiens
ataatacatgataag

SEQ ID NO: 2008587 - DNA, 15 bp, Homo sapiens
taatacatgataaga

SEQ ID NO: 2008588 - DNA, 15 bp, Homo sapiens
aatacatgataagaa

SEQ ID NO: 2008589 - DNA, 15 bp, Homo sapiens
atacatgataagaat

SEQ ID NO: 2008590 - DNA, 15 bp, Homo sapiens
tacatgataagaata

SEQ ID NO: 2008591 - DNA, 15 bp, Homo sapiens
acatgataagaatag

SEQ ID NO: 2008592 - DNA, 15 bp, Homo sapiens
catgataagaatagt

SEQ ID NO: 2008593 - DNA, 15 bp, Homo sapiens
atgataagaatagta

SEQ ID NO: 2008594 - DNA, 15 bp, Homo sapiens
tgataagaatagtac

SEQ ID NO: 2008595 - DNA, 15 bp, Homo sapiens
gataagaatagtact

SEQ ID NO: 2008596 - DNA, 15 bp, Homo sapiens
ataagaatagtactt

SEQ ID NO: 2008597 - DNA, 15 bp, Homo sapiens
taagaatagtactta

SEQ ID NO: 2008598 - DNA, 15 bp, Homo sapiens
aagaatagtacttag

SEQ ID NO: 2008599 - DNA, 15 bp, Homo sapiens
agaatagtacttagc

SEQ ID NO: 2008600 - DNA, 15 bp, Homo sapiens
gaatagtacttagca

SEQ ID NO: 2008601 - DNA, 15 bp, Homo sapiens
aatagtacttagcat

SEQ ID NO: 2008602 - DNA, 15 bp, Homo sapiens
atagtacttagcata

SEQ ID NO: 2008603 - DNA, 15 bp, Homo sapiens
tagtacttagcatat

SEQ ID NO: 2008604 - DNA, 15 bp, Homo sapiens
agtacttagcatatt

SEQ ID NO: 2008605 - DNA, 15 bp, Homo sapiens
gtacttagcatattc

SEQ ID NO: 2008606 - DNA, 15 bp, Homo sapiens
tacttagcatattca

SEQ ID NO: 2008607 - DNA, 15 bp, Homo sapiens
acttagcatattcat

SEQ ID NO: 2008608 - DNA, 15 bp, Homo sapiens
cttagcatattcatg

SEQ ID NO: 2008609 - DNA, 15 bp, Homo sapiens
ttagcatattcatgt

SEQ ID NO: 2008610 - DNA, 15 bp, Homo sapiens
tagcatattcatgtt

SEQ ID NO: 2008611 - DNA, 15 bp, Homo sapiens
agcatattcatgttt

SEQ ID NO: 2008612 - DNA, 15 bp, Homo sapiens
attcatgtttctctt

SEQ ID NO: 2008613 - DNA, 15 bp, Homo sapiens
ttcatgtttctcttc

SEQ ID NO: 2008614 - DNA, 15 bp, Homo sapiens
tcatgtttctcttct

SEQ ID NO: 2008615 - DNA, 15 bp, Homo sapiens
catgtttctcttctt

SEQ ID NO: 2008616 - DNA, 15 bp, Homo sapiens
atgtttctcttcttc

SEQ ID NO: 2008617 - DNA, 15 bp, Homo sapiens
tgtttctcttcttcc

SEQ ID NO: 2008618 - DNA, 15 bp, Homo sapiens
gtttctcttcttcct

SEQ ID NO: 2008619 - DNA, 15 bp, Homo sapiens
tttctcttcttcctt

SEQ ID NO: 2008620 - DNA, 15 bp, Homo sapiens
ttctcttcttccttc

SEQ ID NO: 2008621 - DNA, 15 bp, Homo sapiens
tctcttcttccttct

SEQ ID NO: 2008622 - DNA, 15 bp, Homo sapiens
ctcttcttccttctg

SEQ ID NO: 2008623 - DNA, 15 bp, Homo sapiens
tcttcttccttctgg

SEQ ID NO: 2008624 - DNA, 15 bp, Homo sapiens
cttcttccttctggg

SEQ ID NO: 2008625 - DNA, 15 bp, Homo sapiens
ttcttccttctgggc

SEQ ID NO: 2008626 - DNA, 15 bp, Homo sapiens
tcttccttctgggca

SEQ ID NO: 2008627 - DNA, 15 bp, Homo sapiens
cttccttctgggcac

SEQ ID NO: 2008628 - DNA, 15 bp, Homo sapiens
ttccttctgggcaca

SEQ ID NO: 2008629 - DNA, 15 bp, Homo sapiens
tccttctgggcacag

SEQ ID NO: 2008630 - DNA, 15 bp, Homo sapiens
ccttctgggcacagc

SEQ ID NO: 2008631 - DNA, 15 bp, Homo sapiens
cttctgggcacagca

SEQ ID NO: 2008632 - DNA, 15 bp, Homo sapiens
ttctgggcacagcac

SEQ ID NO: 2008633 - DNA, 15 bp, Homo sapiens
tctgggcacagcacc

SEQ ID NO: 2008634 - DNA, 15 bp, Homo sapiens
ctgggcacagcacca

SEQ ID NO: 2008635 - DNA, 15 bp, Homo sapiens
tgggcacagcaccat

SEQ ID NO: 2008636 - DNA, 15 bp, Homo sapiens
gggcacagcaccata

SEQ ID NO: 2008637 - DNA, 15 bp, Homo sapiens
ggcacagcaccatac

SEQ ID NO: 2008638 - DNA, 15 bp, Homo sapiens
gcacagcaccatacc

SEQ ID NO: 2008639 - DNA, 15 bp, Homo sapiens
cacagcaccatacca

SEQ ID NO: 2008640 - DNA, 15 bp, Homo sapiens
acagcaccataccac

SEQ ID NO: 2008641 - DNA, 15 bp, Homo sapiens
cagcaccataccact

SEQ ID NO: 2008642 - DNA, 15 bp, Homo sapiens
agcaccataccactc

SEQ ID NO: 2008643 - DNA, 15 bp, Homo sapiens
gcaccataccactct

SEQ ID NO: 2008644 - DNA, 15 bp, Homo sapiens
caccataccactctt

SEQ ID NO: 2008645 - DNA, 15 bp, Homo sapiens
accataccactctta

SEQ ID NO: 2008646 - DNA, 15 bp, Homo sapiens
ccataccactcttag

SEQ ID NO: 2008647 - DNA, 15 bp, Homo sapiens
cataccactcttagc

SEQ ID NO: 2008648 - DNA, 15 bp, Homo sapiens
ataccactcttagca

SEQ ID NO: 2008649 - DNA, 15 bp, Homo sapiens
taccactcttagcat

SEQ ID NO: 2008650 - DNA, 15 bp, Homo sapiens
accactcttagcatt

SEQ ID NO: 2008651 - DNA, 15 bp, Homo sapiens
ccactcttagcattc

SEQ ID NO: 2008652 - DNA, 15 bp, Homo sapiens
cactcttagcattct

SEQ ID NO: 2008653 - DNA, 15 bp, Homo sapiens
actcttagcattctg

SEQ ID NO: 2008654 - DNA, 15 bp, Homo sapiens
ctcttagcattctga

SEQ ID NO: 2008655 - DNA, 15 bp, Homo sapiens
tcttagcattctgat

SEQ ID NO: 2008656 - DNA, 15 bp, Homo sapiens
cttagcattctgata

SEQ ID NO: 2008657 - DNA, 15 bp, Homo sapiens
ttagcattctgatag

SEQ ID NO: 2008658 - DNA, 15 bp, Homo sapiens
tagcattctgatagt

SEQ ID NO: 2008659 - DNA, 15 bp, Homo sapiens
agcattctgatagtt

SEQ ID NO: 2008660 - DNA, 15 bp, Homo sapiens
gcattctgatagtta

SEQ ID NO: 2008661 - DNA, 15 bp, Homo sapiens
cattctgatagttag

SEQ ID NO: 2008662 - DNA, 15 bp, Homo sapiens
attctgatagttagg

SEQ ID NO: 2008663 - DNA, 15 bp, Homo sapiens
ttctgatagttaggt

SEQ ID NO: 2008664 - DNA, 15 bp, Homo sapiens
tctgatagttaggtg

SEQ ID NO: 2008665 - DNA, 15 bp, Homo sapiens
ctgatagttaggtgg

SEQ ID NO: 2008666 - DNA, 15 bp, Homo sapiens
tgatagttaggtggt

SEQ ID NO: 2008667 - DNA, 15 bp, Homo sapiens
gatagttaggtggta

SEQ ID NO: 2008668 - DNA, 15 bp, Homo sapiens
atagttaggtggtac

SEQ ID NO: 2008669 - DNA, 15 bp, Homo sapiens
tagttaggtggtacc

SEQ ID NO: 2008670 - DNA, 15 bp, Homo sapiens
agttaggtggtacca

SEQ ID NO: 2008671 - DNA, 15 bp, Homo sapiens
gttaggtggtaccat

SEQ ID NO: 2008672 - DNA, 15 bp, Homo sapiens
ttaggtggtaccatc

SEQ ID NO: 2008673 - DNA, 15 bp, Homo sapiens
taggtggtaccatct

SEQ ID NO: 2008674 - DNA, 15 bp, Homo sapiens
aggtggtaccatctg

SEQ ID NO: 2008675 - DNA, 15 bp, Homo sapiens
ggtggtaccatctga

SEQ ID NO: 2008676 - DNA, 15 bp, Homo sapiens
gtggtaccatctgac

SEQ ID NO: 2008677 - DNA, 15 bp, Homo sapiens
tggtaccatctgact

SEQ ID NO: 2008678 - DNA, 15 bp, Homo sapiens
ggtaccatctgactg

SEQ ID NO: 2008679 - DNA, 15 bp, Homo sapiens
gtaccatctgactga

SEQ ID NO: 2008680 - DNA, 15 bp, Homo sapiens
taccatctgactgag

SEQ ID NO: 2008681 - DNA, 15 bp, Homo sapiens
accatctgactgagt

SEQ ID NO: 2008682 - DNA, 15 bp, Homo sapiens
ccatctgactgagtt

SEQ ID NO: 2008683 - DNA, 15 bp, Homo sapiens
catctgactgagttc

SEQ ID NO: 2008684 - DNA, 15 bp, Homo sapiens
atctgactgagttct

SEQ ID NO: 2008685 - DNA, 15 bp, Homo sapiens
tctgactgagttctg

SEQ ID NO: 2008686 - DNA, 15 bp, Homo sapiens
ctgactgagttctgg

SEQ ID NO: 2008687 - DNA, 15 bp, Homo sapiens
tgactgagttctggc

SEQ ID NO: 2008688 - DNA, 15 bp, Homo sapiens
gactgagttctggcc

SEQ ID NO: 2008689 - DNA, 15 bp, Homo sapiens
actgagttctggcca

SEQ ID NO: 2008690 - DNA, 15 bp, Homo sapiens
ctgagttctggccag

SEQ ID NO: 2008691 - DNA, 15 bp, Homo sapiens
tgagttctggccagt

SEQ ID NO: 2008692 - DNA, 15 bp, Homo sapiens
gagttctggccagta

SEQ ID NO: 2008693 - DNA, 15 bp, Homo sapiens
agttctggccagtaa

SEQ ID NO: 2008694 - DNA, 15 bp, Homo sapiens
gttctggccagtaaa

SEQ ID NO: 2008695 - DNA, 15 bp, Homo sapiens
ttctggccagtaaaa

SEQ ID NO: 2008696 - DNA, 15 bp, Homo sapiens
tctggccagtaaaat

SEQ ID NO: 2008697 - DNA, 15 bp, Homo sapiens
ctggccagtaaaatg

SEQ ID NO: 2008698 - DNA, 15 bp, Homo sapiens
tggccagtaaaatgt

SEQ ID NO: 2008699 - DNA, 15 bp, Homo sapiens
ggccagtaaaatgtc

SEQ ID NO: 2008700 - DNA, 15 bp, Homo sapiens
gccagtaaaatgtca

SEQ ID NO: 2008701 - DNA, 15 bp, Homo sapiens
ccagtaaaatgtcag

SEQ ID NO: 2008702 - DNA, 15 bp, Homo sapiens
cagtaaaatgtcagt

SEQ ID NO: 2008703 - DNA, 15 bp, Homo sapiens
agtaaaatgtcagtt

SEQ ID NO: 2008704 - DNA, 15 bp, Homo sapiens
gtaaaatgtcagttc

SEQ ID NO: 2008705 - DNA, 15 bp, Homo sapiens
taaaatgtcagttcc

SEQ ID NO: 2008706 - DNA, 15 bp, Homo sapiens
aaaatgtcagttcca

SEQ ID NO: 2008707 - DNA, 15 bp, Homo sapiens
aaatgtcagttccaa

SEQ ID NO: 2008708 - DNA, 15 bp, Homo sapiens
aatgtcagttccaat

SEQ ID NO: 2008709 - DNA, 15 bp, Homo sapiens
atgtcagttccaatg

SEQ ID NO: 2008710 - DNA, 15 bp, Homo sapiens
tgtcagttccaatga

SEQ ID NO: 2008711 - DNA, 15 bp, Homo sapiens
gtcagttccaatgat

SEQ ID NO: 2008712 - DNA, 15 bp, Homo sapiens
tcagttccaatgatg

SEQ ID NO: 2008713 - DNA, 15 bp, Homo sapiens
cagttccaatgatgt

SEQ ID NO: 2008714 - DNA, 15 bp, Homo sapiens
agttccaatgatgta

SEQ ID NO: 2008715 - DNA, 15 bp, Homo sapiens
gttccaatgatgtac

SEQ ID NO: 2008716 - DNA, 15 bp, Homo sapiens
ttccaatgatgtaca

SEQ ID NO: 2008717 - DNA, 15 bp, Homo sapiens
tccaatgatgtacaa

SEQ ID NO: 2008718 - DNA, 15 bp, Homo sapiens
ccaatgatgtacaat

SEQ ID NO: 2008719 - DNA, 15 bp, Homo sapiens
caatgatgtacaatc

SEQ ID NO: 2008720 - DNA, 15 bp, Homo sapiens
aatgatgtacaatcg

SEQ ID NO: 2008721 - DNA, 15 bp, Homo sapiens
atgatgtacaatcga

SEQ ID NO: 2008722 - DNA, 15 bp, Homo sapiens
tgatgtacaatcgac

SEQ ID NO: 2008723 - DNA, 15 bp, Homo sapiens
gatgtacaatcgacc

SEQ ID NO: 2008724 - DNA, 15 bp, Homo sapiens
atgtacaatcgaccc

SEQ ID NO: 2008725 - DNA, 15 bp, Homo sapiens
tgtacaatcgaccct

SEQ ID NO: 2008726 - DNA, 15 bp, Homo sapiens
gtacaatcgaccctt

SEQ ID NO: 2008727 - DNA, 15 bp, Homo sapiens
tacaatcgacccttg

SEQ ID NO: 2008728 - DNA, 15 bp, Homo sapiens
acaatcgacccttga

SEQ ID NO: 2008729 - DNA, 15 bp, Homo sapiens
caatcgacccttgaa

SEQ ID NO: 2008730 - DNA, 15 bp, Homo sapiens
aatcgacccttgaac

SEQ ID NO: 2008731 - DNA, 15 bp, Homo sapiens
atcgacccttgaaca

SEQ ID NO: 2008732 - DNA, 15 bp, Homo sapiens
tcgacccttgaacaa

SEQ ID NO: 2008733 - DNA, 15 bp, Homo sapiens
cgacccttgaacaac

SEQ ID NO: 2008734 - DNA, 15 bp, Homo sapiens
acccttgaacaacac

SEQ ID NO: 2008735 - DNA, 15 bp, Homo sapiens
cccttgaacaacact

SEQ ID NO: 2008736 - DNA, 15 bp, Homo sapiens
ccttgaacaacactg

SEQ ID NO: 2008737 - DNA, 15 bp, Homo sapiens
cttgaacaacactgg

SEQ ID NO: 2008738 - DNA, 15 bp, Homo sapiens
ttgaacaacactggg

SEQ ID NO: 2008739 - DNA, 15 bp, Homo sapiens
tgaacaacactgggg

SEQ ID NO: 2008740 - DNA, 15 bp, Homo sapiens
gaacaacactggggt

SEQ ID NO: 2008741 - DNA, 15 bp, Homo sapiens
aacaacactggggtt

SEQ ID NO: 2008742 - DNA, 15 bp, Homo sapiens
acaacactggggtta

SEQ ID NO: 2008743 - DNA, 15 bp, Homo sapiens
caacactggggttag

SEQ ID NO: 2008744 - DNA, 15 bp, Homo sapiens
aacactggggttagg

SEQ ID NO: 2008745 - DNA, 15 bp, Homo sapiens
acactggggttaggg

SEQ ID NO: 2008746 - DNA, 15 bp, Homo sapiens
cactggggttagggg

SEQ ID NO: 2008747 - DNA, 15 bp, Homo sapiens
actggggttaggggc

SEQ ID NO: 2008748 - DNA, 15 bp, Homo sapiens
ctggggttaggggca

SEQ ID NO: 2008749 - DNA, 15 bp, Homo sapiens
tggggttaggggcac

SEQ ID NO: 2008750 - DNA, 15 bp, Homo sapiens
ggggttaggggcact

SEQ ID NO: 2008751 - DNA, 15 bp, Homo sapiens
gggttaggggcactg

SEQ ID NO: 2008752 - DNA, 15 bp, Homo sapiens
ggttaggggcactga

SEQ ID NO: 2008753 - DNA, 15 bp, Homo sapiens
gttaggggcactgaa

SEQ ID NO: 2008754 - DNA, 15 bp, Homo sapiens
ttaggggcactgaat

SEQ ID NO: 2008755 - DNA, 15 bp, Homo sapiens
taggggcactgaatc

SEQ ID NO: 2008756 - DNA, 15 bp, Homo sapiens
aggggcactgaatct

SEQ ID NO: 2008757 - DNA, 15 bp, Homo sapiens
ggggcactgaatctc

SEQ ID NO: 2008758 - DNA, 15 bp, Homo sapiens
gggcactgaatctcc

SEQ ID NO: 2008759 - DNA, 15 bp, Homo sapiens
ggcactgaatctcca

SEQ ID NO: 2008760 - DNA, 15 bp, Homo sapiens
gcactgaatctccac

SEQ ID NO: 2008761 - DNA, 15 bp, Homo sapiens
cactgaatctccacg

SEQ ID NO: 2008762 - DNA, 15 bp, Homo sapiens
actgaatctccacgc

SEQ ID NO: 2008763 - DNA, 15 bp, Homo sapiens
ctgaatctccacgca

SEQ ID NO: 2008764 - DNA, 15 bp, Homo sapiens
tgaatctccacgcaa

SEQ ID NO: 2008765 - DNA, 15 bp, Homo sapiens
gaatctccacgcaat

SEQ ID NO: 2008766 - DNA, 15 bp, Homo sapiens
aatctccacgcaatg

SEQ ID NO: 2008767 - DNA, 15 bp, Homo sapiens
atctccacgcaatgg

SEQ ID NO: 2008768 - DNA, 15 bp, Homo sapiens
tctccacgcaatgga

SEQ ID NO: 2008769 - DNA, 15 bp, Homo sapiens
ctccacgcaatggaa

SEQ ID NO: 2008770 - DNA, 15 bp, Homo sapiens
tccacgcaatggaaa

SEQ ID NO: 2008771 - DNA, 15 bp, Homo sapiens
ccacgcaatggaaaa

SEQ ID NO: 2008772 - DNA, 15 bp, Homo sapiens
cacgcaatggaaaat

SEQ ID NO: 2008773 - DNA, 15 bp, Homo sapiens
acgcaatggaaaatc

SEQ ID NO: 2008774 - DNA, 15 bp, Homo sapiens
cgcaatggaaaatct

SEQ ID NO: 2008775 - DNA, 15 bp, Homo sapiens
gcaatggaaaatcta

SEQ ID NO: 2008776 - DNA, 15 bp, Homo sapiens
caatggaaaatctac

SEQ ID NO: 2008777 - DNA, 15 bp, Homo sapiens
aatggaaaatctacg

SEQ ID NO: 2008778 - DNA, 15 bp, Homo sapiens
atggaaaatctacgt

SEQ ID NO: 2008779 - DNA, 15 bp, Homo sapiens
tggaaaatctacgta

SEQ ID NO: 2008780 - DNA, 15 bp, Homo sapiens
ggaaaatctacgtat

SEQ ID NO: 2008781 - DNA, 15 bp, Homo sapiens
gaaaatctacgtata

SEQ ID NO: 2008782 - DNA, 15 bp, Homo sapiens
aaaatctacgtataa

SEQ ID NO: 2008783 - DNA, 15 bp, Homo sapiens
aaatctacgtataac

SEQ ID NO: 2008784 - DNA, 15 bp, Homo sapiens
aatctacgtataact

SEQ ID NO: 2008785 - DNA, 15 bp, Homo sapiens
atctacgtataactt

SEQ ID NO: 2008786 - DNA, 15 bp, Homo sapiens
tctacgtataacttt

SEQ ID NO: 2008787 - DNA, 15 bp, Homo sapiens
ctacgtataactttt

SEQ ID NO: 2008788 - DNA, 15 bp, Homo sapiens
tacgtataacttttg

SEQ ID NO: 2008789 - DNA, 15 bp, Homo sapiens
acgtataacttttgc

SEQ ID NO: 2008790 - DNA, 15 bp, Homo sapiens
cgtataacttttgcc

SEQ ID NO: 2008791 - DNA, 15 bp, Homo sapiens
gtataacttttgcct

SEQ ID NO: 2008792 - DNA, 15 bp, Homo sapiens
tataacttttgcctc

SEQ ID NO: 2008793 - DNA, 15 bp, Homo sapiens
ataacttttgcctcc

SEQ ID NO: 2008794 - DNA, 15 bp, Homo sapiens
taacttttgcctccc

SEQ ID NO: 2008795 - DNA, 15 bp, Homo sapiens
aacttttgcctcccc

SEQ ID NO: 2008796 - DNA, 15 bp, Homo sapiens
acttttgcctcccca

SEQ ID NO: 2008797 - DNA, 15 bp, Homo sapiens
cttttgcctccccaa

SEQ ID NO: 2008798 - DNA, 15 bp, Homo sapiens
ttttgcctccccaaa

SEQ ID NO: 2008799 - DNA, 15 bp, Homo sapiens
tttgcctccccaaaa

SEQ ID NO: 2008800 - DNA, 15 bp, Homo sapiens
ttgcctccccaaaaa

SEQ ID NO: 2008801 - DNA, 15 bp, Homo sapiens
tgcctccccaaaaac

SEQ ID NO: 2008802 - DNA, 15 bp, Homo sapiens
gcctccccaaaaact

SEQ ID NO: 2008803 - DNA, 15 bp, Homo sapiens
cctccccaaaaacta

SEQ ID NO: 2008804 - DNA, 15 bp, Homo sapiens
ctccccaaaaactaa

SEQ ID NO: 2008805 - DNA, 15 bp, Homo sapiens
tccccaaaaactaaa

SEQ ID NO: 2008806 - DNA, 15 bp, Homo sapiens
ccccaaaaactaaac

SEQ ID NO: 2008807 - DNA, 15 bp, Homo sapiens
cccaaaaactaaact

SEQ ID NO: 2008808 - DNA, 15 bp, Homo sapiens
ccaaaaactaaacta

SEQ ID NO: 2008809 - DNA, 15 bp, Homo sapiens
caaaaactaaactac

SEQ ID NO: 2008810 - DNA, 15 bp, Homo sapiens
aaaaactaaactact

SEQ ID NO: 2008811 - DNA, 15 bp, Homo sapiens
aaaactaaactacta

SEQ ID NO: 2008812 - DNA, 15 bp, Homo sapiens
actaaactactaata

SEQ ID NO: 2008813 - DNA, 15 bp, Homo sapiens
ctaaactactaataa

SEQ ID NO: 2008814 - DNA, 15 bp, Homo sapiens
taaactactaataag

SEQ ID NO: 2008815 - DNA, 15 bp, Homo sapiens
aaactactaataaga

SEQ ID NO: 2008816 - DNA, 15 bp, Homo sapiens
aactactaataagac

SEQ ID NO: 2008817 - DNA, 15 bp, Homo sapiens
actactaataagact

SEQ ID NO: 2008818 - DNA, 15 bp, Homo sapiens
ctactaataagactg

SEQ ID NO: 2008819 - DNA, 15 bp, Homo sapiens
tactaataagactgt

SEQ ID NO: 2008820 - DNA, 15 bp, Homo sapiens
actaataagactgtt

SEQ ID NO: 2008821 - DNA, 15 bp, Homo sapiens
ctaataagactgttg

SEQ ID NO: 2008822 - DNA, 15 bp, Homo sapiens
taataagactgttga

SEQ ID NO: 2008823 - DNA, 15 bp, Homo sapiens
aataagactgttgat

SEQ ID NO: 2008824 - DNA, 15 bp, Homo sapiens
ataagactgttgatc

SEQ ID NO: 2008825 - DNA, 15 bp, Homo sapiens
taagactgttgatcg

SEQ ID NO: 2008826 - DNA, 15 bp, Homo sapiens
aagactgttgatcgg

SEQ ID NO: 2008827 - DNA, 15 bp, Homo sapiens
agactgttgatcgga

SEQ ID NO: 2008828 - DNA, 15 bp, Homo sapiens
gactgttgatcggaa

SEQ ID NO: 2008829 - DNA, 15 bp, Homo sapiens
actgttgatcggaag

SEQ ID NO: 2008830 - DNA, 15 bp, Homo sapiens
ctgttgatcggaagc

SEQ ID NO: 2008831 - DNA, 15 bp, Homo sapiens
tgttgatcggaagcc

SEQ ID NO: 2008832 - DNA, 15 bp, Homo sapiens
gttgatcggaagcct

SEQ ID NO: 2008833 - DNA, 15 bp, Homo sapiens
ttgatcggaagcctt

SEQ ID NO: 2008834 - DNA, 15 bp, Homo sapiens
tgatcggaagccttt

SEQ ID NO: 2008835 - DNA, 15 bp, Homo sapiens
gatcggaagcctttt

SEQ ID NO: 2008836 - DNA, 15 bp, Homo sapiens
atcggaagccttttg

SEQ ID NO: 2008837 - DNA, 15 bp, Homo sapiens
tcggaagccttttga

SEQ ID NO: 2008838 - DNA, 15 bp, Homo sapiens
cggaagccttttgat

SEQ ID NO: 2008839 - DNA, 15 bp, Homo sapiens
ggaagccttttgata

SEQ ID NO: 2008840 - DNA, 15 bp, Homo sapiens
gaagccttttgataa

SEQ ID NO: 2008841 - DNA, 15 bp, Homo sapiens
aagccttttgataac

SEQ ID NO: 2008842 - DNA, 15 bp, Homo sapiens
agccttttgataaca

SEQ ID NO: 2008843 - DNA, 15 bp, Homo sapiens
gccttttgataacat

SEQ ID NO: 2008844 - DNA, 15 bp, Homo sapiens
ccttttgataacata

SEQ ID NO: 2008845 - DNA, 15 bp, Homo sapiens
cttttgataacataa

SEQ ID NO: 2008846 - DNA, 15 bp, Homo sapiens
ttttgataacataaa

SEQ ID NO: 2008847 - DNA, 15 bp, Homo sapiens
tttgataacataaac

SEQ ID NO: 2008848 - DNA, 15 bp, Homo sapiens
ttgataacataaaca

SEQ ID NO: 2008849 - DNA, 15 bp, Homo sapiens
tgataacataaacag

SEQ ID NO: 2008850 - DNA, 15 bp, Homo sapiens
gataacataaacaga

SEQ ID NO: 2008851 - DNA, 15 bp, Homo sapiens
ataacataaacagat

SEQ ID NO: 2008852 - DNA, 15 bp, Homo sapiens
taacataaacagatt

SEQ ID NO: 2008853 - DNA, 15 bp, Homo sapiens
aacataaacagatta

SEQ ID NO: 2008854 - DNA, 15 bp, Homo sapiens
acataaacagattaa

SEQ ID NO: 2008855 - DNA, 15 bp, Homo sapiens
cataaacagattaac

SEQ ID NO: 2008856 - DNA, 15 bp, Homo sapiens
ataaacagattaaca

SEQ ID NO: 2008857 - DNA, 15 bp, Homo sapiens
taaacagattaacat

SEQ ID NO: 2008858 - DNA, 15 bp, Homo sapiens
aaacagattaacatg

SEQ ID NO: 2008859 - DNA, 15 bp, Homo sapiens
aacagattaacatgt

SEQ ID NO: 2008860 - DNA, 15 bp, Homo sapiens
acagattaacatgtt

SEQ ID NO: 2008861 - DNA, 15 bp, Homo sapiens
cagattaacatgttt

SEQ ID NO: 2008862 - DNA, 15 bp, Homo sapiens
agattaacatgtttt

SEQ ID NO: 2008863 - DNA, 15 bp, Homo sapiens
gattaacatgttttg

SEQ ID NO: 2008864 - DNA, 15 bp, Homo sapiens
attaacatgttttgt

SEQ ID NO: 2008865 - DNA, 15 bp, Homo sapiens
ttaacatgttttgta

SEQ ID NO: 2008866 - DNA, 15 bp, Homo sapiens
taacatgttttgtaa

SEQ ID NO: 2008867 - DNA, 15 bp, Homo sapiens
aacatgttttgtaag

SEQ ID NO: 2008868 - DNA, 15 bp, Homo sapiens
acatgttttgtaagt

SEQ ID NO: 2008869 - DNA, 15 bp, Homo sapiens
catgttttgtaagtt

SEQ ID NO: 2008870 - DNA, 15 bp, Homo sapiens
atgttttgtaagtta

SEQ ID NO: 2008871 - DNA, 15 bp, Homo sapiens
tgttttgtaagttaa

SEQ ID NO: 2008872 - DNA, 15 bp, Homo sapiens
gttttgtaagttaaa

SEQ ID NO: 2008873 - DNA, 15 bp, Homo sapiens
ttttgtaagttaaat

SEQ ID NO: 2008874 - DNA, 15 bp, Homo sapiens
tttgtaagttaaatg

SEQ ID NO: 2008875 - DNA, 15 bp, Homo sapiens
ttgtaagttaaatgt

SEQ ID NO: 2008876 - DNA, 15 bp, Homo sapiens
tgtaagttaaatgtt

SEQ ID NO: 2008877 - DNA, 15 bp, Homo sapiens
gtaagttaaatgttg

SEQ ID NO: 2008878 - DNA, 15 bp, Homo sapiens
taagttaaatgttgt

SEQ ID NO: 2008879 - DNA, 15 bp, Homo sapiens
aagttaaatgttgta

SEQ ID NO: 2008880 - DNA, 15 bp, Homo sapiens
agttaaatgttgtat

SEQ ID NO: 2008881 - DNA, 15 bp, Homo sapiens
gttaaatgttgtata

SEQ ID NO: 2008882 - DNA, 15 bp, Homo sapiens
ttaaatgttgtatat

SEQ ID NO: 2008883 - DNA, 15 bp, Homo sapiens
taaatgttgtatatg

SEQ ID NO: 2008884 - DNA, 15 bp, Homo sapiens
aaatgttgtatatgc

SEQ ID NO: 2008885 - DNA, 15 bp, Homo sapiens
aatgttgtatatgct

SEQ ID NO: 2008886 - DNA, 15 bp, Homo sapiens
atgttgtatatgcta

SEQ ID NO: 2008887 - DNA, 15 bp, Homo sapiens
tgttgtatatgctat

SEQ ID NO: 2008888 - DNA, 15 bp, Homo sapiens
gttgtatatgctata

SEQ ID NO: 2008889 - DNA, 15 bp, Homo sapiens
ttgtatatgctatat

SEQ ID NO: 2008890 - DNA, 15 bp, Homo sapiens
tgtatatgctatatt

SEQ ID NO: 2008891 - DNA, 15 bp, Homo sapiens
gtatatgctatattc

SEQ ID NO: 2008892 - DNA, 15 bp, Homo sapiens
tatatgctatattct

SEQ ID NO: 2008893 - DNA, 15 bp, Homo sapiens
atatgctatattctt

SEQ ID NO: 2008894 - DNA, 15 bp, Homo sapiens
tatgctatattctta

SEQ ID NO: 2008895 - DNA, 15 bp, Homo sapiens
atgctatattcttag

SEQ ID NO: 2008896 - DNA, 15 bp, Homo sapiens
tgctatattcttaga

SEQ ID NO: 2008897 - DNA, 15 bp, Homo sapiens
gctatattcttagag

SEQ ID NO: 2008898 - DNA, 15 bp, Homo sapiens
ctatattcttagagt

SEQ ID NO: 2008899 - DNA, 15 bp, Homo sapiens
tatattcttagagtg

SEQ ID NO: 2008900 - DNA, 15 bp, Homo sapiens
atattcttagagtga

SEQ ID NO: 2008901 - DNA, 15 bp, Homo sapiens
tattcttagagtgaa

SEQ ID NO: 2008902 - DNA, 15 bp, Homo sapiens
attcttagagtgaaa

SEQ ID NO: 2008903 - DNA, 15 bp, Homo sapiens
ttcttagagtgaaat

SEQ ID NO: 2008904 - DNA, 15 bp, Homo sapiens
tcttagagtgaaata

SEQ ID NO: 2008905 - DNA, 15 bp, Homo sapiens
cttagagtgaaataa

SEQ ID NO: 2008906 - DNA, 15 bp, Homo sapiens
ttagagtgaaataag

SEQ ID NO: 2008907 - DNA, 15 bp, Homo sapiens
tagagtgaaataagc

SEQ ID NO: 2008908 - DNA, 15 bp, Homo sapiens
agagtgaaataagct

SEQ ID NO: 2008909 - DNA, 15 bp, Homo sapiens
gagtgaaataagctc

SEQ ID NO: 2008910 - DNA, 15 bp, Homo sapiens
agtgaaataagctcc

SEQ ID NO: 2008911 - DNA, 15 bp, Homo sapiens
gtgaaataagctcca

SEQ ID NO: 2008912 - DNA, 15 bp, Homo sapiens
tgaaataagctccag

SEQ ID NO: 2008913 - DNA, 15 bp, Homo sapiens
gaaataagctccaga

SEQ ID NO: 2008914 - DNA, 15 bp, Homo sapiens
aaataagctccagaa

SEQ ID NO: 2008915 - DNA, 15 bp, Homo sapiens
aataagctccagaaa

SEQ ID NO: 2008916 - DNA, 15 bp, Homo sapiens
ataagctccagaaaa

SEQ ID NO: 2008917 - DNA, 15 bp, Homo sapiens
taagctccagaaaag

SEQ ID NO: 2008918 - DNA, 15 bp, Homo sapiens
aagctccagaaaaga

SEQ ID NO: 2008919 - DNA, 15 bp, Homo sapiens
agctccagaaaagaa

SEQ ID NO: 2008920 - DNA, 15 bp, Homo sapiens
gctccagaaaagaaa

SEQ ID NO: 2008921 - DNA, 15 bp, Homo sapiens
ctccagaaaagaaat

SEQ ID NO: 2008922 - DNA, 15 bp, Homo sapiens
tccagaaaagaaatt

SEQ ID NO: 2008923 - DNA, 15 bp, Homo sapiens
ccagaaaagaaattg

SEQ ID NO: 2008924 - DNA, 15 bp, Homo sapiens
cagaaaagaaattgt

SEQ ID NO: 2008925 - DNA, 15 bp, Homo sapiens
agaaaagaaattgtt

SEQ ID NO: 2008926 - DNA, 15 bp, Homo sapiens
gaaaagaaattgtta

SEQ ID NO: 2008927 - DNA, 15 bp, Homo sapiens
aaaagaaattgttac

SEQ ID NO: 2008928 - DNA, 15 bp, Homo sapiens
aaagaaattgttacc

SEQ ID NO: 2008929 - DNA, 15 bp, Homo sapiens
aagaaattgttaccc

SEQ ID NO: 2008930 - DNA, 15 bp, Homo sapiens
agaaattgttaccca

SEQ ID NO: 2008931 - DNA, 15 bp, Homo sapiens
gaaattgttacccag

SEQ ID NO: 2008932 - DNA, 15 bp, Homo sapiens
aaattgttacccaga

SEQ ID NO: 2008933 - DNA, 15 bp, Homo sapiens
aattgttacccagaa

SEQ ID NO: 2008934 - DNA, 15 bp, Homo sapiens
attgttacccagaaa

SEQ ID NO: 2008935 - DNA, 15 bp, Homo sapiens
ttgttacccagaaaa

SEQ ID NO: 2008936 - DNA, 15 bp, Homo sapiens
tgttacccagaaaat

SEQ ID NO: 2008937 - DNA, 15 bp, Homo sapiens
gttacccagaaaatc

SEQ ID NO: 2008938 - DNA, 15 bp, Homo sapiens
ttacccagaaaatca

SEQ ID NO: 2008939 - DNA, 15 bp, Homo sapiens
tacccagaaaatcat

SEQ ID NO: 2008940 - DNA, 15 bp, Homo sapiens
acccagaaaatcatg

SEQ ID NO: 2008941 - DNA, 15 bp, Homo sapiens
cccagaaaatcatga

SEQ ID NO: 2008942 - DNA, 15 bp, Homo sapiens
ccagaaaatcatgag

SEQ ID NO: 2008943 - DNA, 15 bp, Homo sapiens
cagaaaatcatgagg

SEQ ID NO: 2008944 - DNA, 15 bp, Homo sapiens
agaaaatcatgagga

SEQ ID NO: 2008945 - DNA, 15 bp, Homo sapiens
gaaaatcatgaggaa

SEQ ID NO: 2008946 - DNA, 15 bp, Homo sapiens
aaaatcatgaggaag

SEQ ID NO: 2008947 - DNA, 15 bp, Homo sapiens
aaatcatgaggaaga

SEQ ID NO: 2008948 - DNA, 15 bp, Homo sapiens
aatcatgaggaagag

SEQ ID NO: 2008949 - DNA, 15 bp, Homo sapiens
atcatgaggaagaga

SEQ ID NO: 2008950 - DNA, 15 bp, Homo sapiens
tcatgaggaagagaa

SEQ ID NO: 2008951 - DNA, 15 bp, Homo sapiens
catgaggaagagaaa

SEQ ID NO: 2008952 - DNA, 15 bp, Homo sapiens
atgaggaagagaaaa

SEQ ID NO: 2008953 - DNA, 15 bp, Homo sapiens
tgaggaagagaaaat

SEQ ID NO: 2008954 - DNA, 15 bp, Homo sapiens
gaggaagagaaaata

SEQ ID NO: 2008955 - DNA, 15 bp, Homo sapiens
aggaagagaaaatat

SEQ ID NO: 2008956 - DNA, 15 bp, Homo sapiens
ggaagagaaaatata

SEQ ID NO: 2008957 - DNA, 15 bp, Homo sapiens
gaagagaaaatatat

SEQ ID NO: 2008958 - DNA, 15 bp, Homo sapiens
aagagaaaatatatt

SEQ ID NO: 2008959 - DNA, 15 bp, Homo sapiens
agagaaaatatattt

SEQ ID NO: 2008960 - DNA, 15 bp, Homo sapiens
gagaaaatatattta

SEQ ID NO: 2008961 - DNA, 15 bp, Homo sapiens
agaaaatatatttac

SEQ ID NO: 2008962 - DNA, 15 bp, Homo sapiens
gaaaatatatttact

SEQ ID NO: 2008963 - DNA, 15 bp, Homo sapiens
aaaatatatttactg

SEQ ID NO: 2008964 - DNA, 15 bp, Homo sapiens
aaatatatttactgt

SEQ ID NO: 2008965 - DNA, 15 bp, Homo sapiens
aatatatttactgtt

SEQ ID NO: 2008966 - DNA, 15 bp, Homo sapiens
atatatttactgttc

SEQ ID NO: 2008967 - DNA, 15 bp, Homo sapiens
tatatttactgttct

SEQ ID NO: 2008968 - DNA, 15 bp, Homo sapiens
atatttactgttctc

SEQ ID NO: 2008969 - DNA, 15 bp, Homo sapiens
tatttactgttctct

SEQ ID NO: 2008970 - DNA, 15 bp, Homo sapiens
atttactgttctctg

SEQ ID NO: 2008971 - DNA, 15 bp, Homo sapiens
tttactgttctctga

SEQ ID NO: 2008972 - DNA, 15 bp, Homo sapiens
ttactgttctctgag

SEQ ID NO: 2008973 - DNA, 15 bp, Homo sapiens
tactgttctctgagt

SEQ ID NO: 2008974 - DNA, 15 bp, Homo sapiens
actgttctctgagtg

SEQ ID NO: 2008975 - DNA, 15 bp, Homo sapiens
ctgttctctgagtgg

SEQ ID NO: 2008976 - DNA, 15 bp, Homo sapiens
tgttctctgagtgga

SEQ ID NO: 2008977 - DNA, 15 bp, Homo sapiens
gttctctgagtggaa

SEQ ID NO: 2008978 - DNA, 15 bp, Homo sapiens
ttctctgagtggaag

SEQ ID NO: 2008979 - DNA, 15 bp, Homo sapiens
tctctgagtggaagt

SEQ ID NO: 2008980 - DNA, 15 bp, Homo sapiens
ctctgagtggaagtg

SEQ ID NO: 2008981 - DNA, 15 bp, Homo sapiens
tctgagtggaagtgg

SEQ ID NO: 2008982 - DNA, 15 bp, Homo sapiens
ctgagtggaagtgga

SEQ ID NO: 2008983 - DNA, 15 bp, Homo sapiens
tgagtggaagtggat

SEQ ID NO: 2008984 - DNA, 15 bp, Homo sapiens
gagtggaagtggatt

SEQ ID NO: 2008985 - DNA, 15 bp, Homo sapiens
agtggaagtggatta

SEQ ID NO: 2008986 - DNA, 15 bp, Homo sapiens
gtggaagtggattat

SEQ ID NO: 2008987 - DNA, 15 bp, Homo sapiens
tggaagtggattatc

SEQ ID NO: 2008988 - DNA, 15 bp, Homo sapiens
ggaagtggattatca

SEQ ID NO: 2008989 - DNA, 15 bp, Homo sapiens
gaagtggattatcac

SEQ ID NO: 2008990 - DNA, 15 bp, Homo sapiens
aagtggattatcacg

SEQ ID NO: 2008991 - DNA, 15 bp, Homo sapiens
agtggattatcacga

SEQ ID NO: 2008992 - DNA, 15 bp, Homo sapiens
gtggattatcacgaa

SEQ ID NO: 2008993 - DNA, 15 bp, Homo sapiens
tggattatcacgaag

SEQ ID NO: 2008994 - DNA, 15 bp, Homo sapiens
ggattatcacgaagg

SEQ ID NO: 2008995 - DNA, 15 bp, Homo sapiens
gattatcacgaaggt

SEQ ID NO: 2008996 - DNA, 15 bp, Homo sapiens
attatcacgaaggtc

SEQ ID NO: 2008997 - DNA, 15 bp, Homo sapiens
ttatcacgaaggtct

SEQ ID NO: 2008998 - DNA, 15 bp, Homo sapiens
tatcacgaaggtctt

SEQ ID NO: 2008999 - DNA, 15 bp, Homo sapiens
atcacgaaggtcttc

SEQ ID NO: 2009000 - DNA, 15 bp, Homo sapiens
tcacgaaggtcttca

SEQ ID NO: 2009001 - DNA, 15 bp, Homo sapiens
cacgaaggtcttcat

SEQ ID NO: 2009002 - DNA, 15 bp, Homo sapiens
acgaaggtcttcatc

SEQ ID NO: 2009003 - DNA, 15 bp, Homo sapiens
cgaaggtcttcatcc

SEQ ID NO: 2009004 - DNA, 15 bp, Homo sapiens
gaaggtcttcatcct

SEQ ID NO: 2009005 - DNA, 15 bp, Homo sapiens
aaggtcttcatcctc

SEQ ID NO: 2009006 - DNA, 15 bp, Homo sapiens
aggtcttcatcctct

SEQ ID NO: 2009007 - DNA, 15 bp, Homo sapiens
ggtcttcatcctctt

SEQ ID NO: 2009008 - DNA, 15 bp, Homo sapiens
gtcttcatcctcttt

SEQ ID NO: 2009009 - DNA, 15 bp, Homo sapiens
tcttcatcctcttta

SEQ ID NO: 2009010 - DNA, 15 bp, Homo sapiens
cttcatcctctttat

SEQ ID NO: 2009011 - DNA, 15 bp, Homo sapiens
ttcatcctctttatc

SEQ ID NO: 2009012 - DNA, 15 bp, Homo sapiens
tcatcctctttatct

SEQ ID NO: 2009013 - DNA, 15 bp, Homo sapiens
catcctctttatctt

SEQ ID NO: 2009014 - DNA, 15 bp, Homo sapiens
atcctctttatcttc

SEQ ID NO: 2009015 - DNA, 15 bp, Homo sapiens
tcctctttatcttca

SEQ ID NO: 2009016 - DNA, 15 bp, Homo sapiens
cctctttatcttcat

SEQ ID NO: 2009017 - DNA, 15 bp, Homo sapiens
ctctttatcttcatg

SEQ ID NO: 2009018 - DNA, 15 bp, Homo sapiens
tctttatcttcatgt

SEQ ID NO: 2009019 - DNA, 15 bp, Homo sapiens
ctttatcttcatgtt

SEQ ID NO: 2009020 - DNA, 15 bp, Homo sapiens
tttatcttcatgttg

SEQ ID NO: 2009021 - DNA, 15 bp, Homo sapiens
ttatcttcatgttga

SEQ ID NO: 2009022 - DNA, 15 bp, Homo sapiens
tatcttcatgttgag

SEQ ID NO: 2009023 - DNA, 15 bp, Homo sapiens
atcttcatgttgagt

SEQ ID NO: 2009024 - DNA, 15 bp, Homo sapiens
tcttcatgttgagta

SEQ ID NO: 2009025 - DNA, 15 bp, Homo sapiens
cttcatgttgagtag

SEQ ID NO: 2009026 - DNA, 15 bp, Homo sapiens
ttcatgttgagtagg

SEQ ID NO: 2009027 - DNA, 15 bp, Homo sapiens
tcatgttgagtaggt

SEQ ID NO: 2009028 - DNA, 15 bp, Homo sapiens
catgttgagtaggtg

SEQ ID NO: 2009029 - DNA, 15 bp, Homo sapiens
atgttgagtaggtgg

SEQ ID NO: 2009030 - DNA, 15 bp, Homo sapiens
tgttgagtaggtgga

SEQ ID NO: 2009031 - DNA, 15 bp, Homo sapiens
gttgagtaggtggag

SEQ ID NO: 2009032 - DNA, 15 bp, Homo sapiens
ttgagtaggtggagg

SEQ ID NO: 2009033 - DNA, 15 bp, Homo sapiens
tgagtaggtggagga

SEQ ID NO: 2009034 - DNA, 15 bp, Homo sapiens
gagtaggtggaggag

SEQ ID NO: 2009035 - DNA, 15 bp, Homo sapiens
agtaggtggaggaga

SEQ ID NO: 2009036 - DNA, 15 bp, Homo sapiens
gtaggtggaggagaa

SEQ ID NO: 2009037 - DNA, 15 bp, Homo sapiens
taggtggaggagaaa

SEQ ID NO: 2009038 - DNA, 15 bp, Homo sapiens
aggtggaggagaaag

SEQ ID NO: 2009039 - DNA, 15 bp, Homo sapiens
ggtggaggagaaaga

SEQ ID NO: 2009040 - DNA, 15 bp, Homo sapiens
gtggaggagaaagaa

SEQ ID NO: 2009041 - DNA, 15 bp, Homo sapiens
tggaggagaaagaag

SEQ ID NO: 2009042 - DNA, 15 bp, Homo sapiens
ggaggagaaagaaga

SEQ ID NO: 2009043 - DNA, 15 bp, Homo sapiens
gaggagaaagaagag

SEQ ID NO: 2009044 - DNA, 15 bp, Homo sapiens
aggagaaagaagagg

SEQ ID NO: 2009045 - DNA, 15 bp, Homo sapiens
ggagaaagaagaggg

SEQ ID NO: 2009046 - DNA, 15 bp, Homo sapiens
gagaaagaagaggga

SEQ ID NO: 2009047 - DNA, 15 bp, Homo sapiens
agaaagaagagggat

SEQ ID NO: 2009048 - DNA, 15 bp, Homo sapiens
gaaagaagagggatt

SEQ ID NO: 2009049 - DNA, 15 bp, Homo sapiens
aaagaagagggattg

SEQ ID NO: 2009050 - DNA, 15 bp, Homo sapiens
aagaagagggattgg

SEQ ID NO: 2009051 - DNA, 15 bp, Homo sapiens
agaagagggattggt

SEQ ID NO: 2009052 - DNA, 15 bp, Homo sapiens
gaagagggattggtc

SEQ ID NO: 2009053 - DNA, 15 bp, Homo sapiens
aagagggattggtct

SEQ ID NO: 2009054 - DNA, 15 bp, Homo sapiens
agagggattggtctt

SEQ ID NO: 2009055 - DNA, 15 bp, Homo sapiens
gagggattggtctta

SEQ ID NO: 2009056 - DNA, 15 bp, Homo sapiens
agggattggtcttac

SEQ ID NO: 2009057 - DNA, 15 bp, Homo sapiens
gggattggtcttact

SEQ ID NO: 2009058 - DNA, 15 bp, Homo sapiens
ggattggtcttactg

SEQ ID NO: 2009059 - DNA, 15 bp, Homo sapiens
gattggtcttactgt

SEQ ID NO: 2009060 - DNA, 15 bp, Homo sapiens
attggtcttactgtc

SEQ ID NO: 2009061 - DNA, 15 bp, Homo sapiens
ttggtcttactgtcc

SEQ ID NO: 2009062 - DNA, 15 bp, Homo sapiens
tggtcttactgtccc

SEQ ID NO: 2009063 - DNA, 15 bp, Homo sapiens
ggtcttactgtcccc

SEQ ID NO: 2009064 - DNA, 15 bp, Homo sapiens
gtcttactgtccccg

SEQ ID NO: 2009065 - DNA, 15 bp, Homo sapiens
tcttactgtccccgg

SEQ ID NO: 2009066 - DNA, 15 bp, Homo sapiens
cttactgtccccggg

SEQ ID NO: 2009067 - DNA, 15 bp, Homo sapiens
ttactgtccccgggc

SEQ ID NO: 2009068 - DNA, 15 bp, Homo sapiens
tactgtccccgggct

SEQ ID NO: 2009069 - DNA, 15 bp, Homo sapiens
actgtccccgggctg

SEQ ID NO: 2009070 - DNA, 15 bp, Homo sapiens
ctgtccccgggctgg

SEQ ID NO: 2009071 - DNA, 15 bp, Homo sapiens
tgtccccgggctggc

SEQ ID NO: 2009072 - DNA, 15 bp, Homo sapiens
gtccccgggctggca

SEQ ID NO: 2009073 - DNA, 15 bp, Homo sapiens
tccccgggctggcag

SEQ ID NO: 2009074 - DNA, 15 bp, Homo sapiens
ccccgggctggcaga

SEQ ID NO: 2009075 - DNA, 15 bp, Homo sapiens
cccgggctggcagag

SEQ ID NO: 2009076 - DNA, 15 bp, Homo sapiens
ccgggctggcagagg

SEQ ID NO: 2009077 - DNA, 15 bp, Homo sapiens
cgggctggcagaggt

SEQ ID NO: 2009078 - DNA, 15 bp, Homo sapiens
gggctggcagaggtg

SEQ ID NO: 2009079 - DNA, 15 bp, Homo sapiens
ggctggcagaggtgg

SEQ ID NO: 2009080 - DNA, 15 bp, Homo sapiens
gctggcagaggtgga

SEQ ID NO: 2009081 - DNA, 15 bp, Homo sapiens
ctggcagaggtggaa

SEQ ID NO: 2009082 - DNA, 15 bp, Homo sapiens
tggcagaggtggaag

SEQ ID NO: 2009083 - DNA, 15 bp, Homo sapiens
ggcagaggtggaagt

SEQ ID NO: 2009084 - DNA, 15 bp, Homo sapiens
gcagaggtggaagta

SEQ ID NO: 2009085 - DNA, 15 bp, Homo sapiens
cagaggtggaagtaa

SEQ ID NO: 2009086 - DNA, 15 bp, Homo sapiens
agaggtggaagtaaa

SEQ ID NO: 2009087 - DNA, 15 bp, Homo sapiens
gaggtggaagtaaac

SEQ ID NO: 2009088 - DNA, 15 bp, Homo sapiens
aggtggaagtaaacc

SEQ ID NO: 2009089 - DNA, 15 bp, Homo sapiens
ggtggaagtaaacct

SEQ ID NO: 2009090 - DNA, 15 bp, Homo sapiens
gtggaagtaaacctc

SEQ ID NO: 2009091 - DNA, 15 bp, Homo sapiens
tggaagtaaacctct

SEQ ID NO: 2009092 - DNA, 15 bp, Homo sapiens
ggaagtaaacctctg

SEQ ID NO: 2009093 - DNA, 15 bp, Homo sapiens
gaagtaaacctctgt

SEQ ID NO: 2009094 - DNA, 15 bp, Homo sapiens
aagtaaacctctgta

SEQ ID NO: 2009095 - DNA, 15 bp, Homo sapiens
agtaaacctctgtat

SEQ ID NO: 2009096 - DNA, 15 bp, Homo sapiens
gtaaacctctgtata

SEQ ID NO: 2009097 - DNA, 15 bp, Homo sapiens
taaacctctgtataa

SEQ ID NO: 2009098 - DNA, 15 bp, Homo sapiens
aaacctctgtataag

SEQ ID NO: 2009099 - DNA, 15 bp, Homo sapiens
aacctctgtataagt

SEQ ID NO: 2009100 - DNA, 15 bp, Homo sapiens
acctctgtataagtg

SEQ ID NO: 2009101 - DNA, 15 bp, Homo sapiens
cctctgtataagtgg

SEQ ID NO: 2009102 - DNA, 15 bp, Homo sapiens
ctctgtataagtgga

SEQ ID NO: 2009103 - DNA, 15 bp, Homo sapiens
tctgtataagtggat

SEQ ID NO: 2009104 - DNA, 15 bp, Homo sapiens
ctgtataagtggatc

SEQ ID NO: 2009105 - DNA, 15 bp, Homo sapiens
tgtataagtggatca

SEQ ID NO: 2009106 - DNA, 15 bp, Homo sapiens
gtataagtggatcag

SEQ ID NO: 2009107 - DNA, 15 bp, Homo sapiens
tataagtggatcagc

SEQ ID NO: 2009108 - DNA, 15 bp, Homo sapiens
ataagtggatcagca

SEQ ID NO: 2009109 - DNA, 15 bp, Homo sapiens
taagtggatcagcat

SEQ ID NO: 2009110 - DNA, 15 bp, Homo sapiens
aagtggatcagcatg

SEQ ID NO: 2009111 - DNA, 15 bp, Homo sapiens
agtggatcagcatgg

SEQ ID NO: 2009112 - DNA, 15 bp, Homo sapiens
gtggatcagcatggt

SEQ ID NO: 2009113 - DNA, 15 bp, Homo sapiens
tggatcagcatggtt

SEQ ID NO: 2009114 - DNA, 15 bp, Homo sapiens
ggatcagcatggttc

SEQ ID NO: 2009115 - DNA, 15 bp, Homo sapiens
gatcagcatggttca

SEQ ID NO: 2009116 - DNA, 15 bp, Homo sapiens
atcagcatggttcaa

SEQ ID NO: 2009117 - DNA, 15 bp, Homo sapiens
tcagcatggttcaaa

SEQ ID NO: 2009118 - DNA, 15 bp, Homo sapiens
cagcatggttcaaag

SEQ ID NO: 2009119 - DNA, 15 bp, Homo sapiens
agcatggttcaaagc

SEQ ID NO: 2009120 - DNA, 15 bp, Homo sapiens
gcatggttcaaagcc

SEQ ID NO: 2009121 - DNA, 15 bp, Homo sapiens
catggttcaaagcca

SEQ ID NO: 2009122 - DNA, 15 bp, Homo sapiens
atggttcaaagccat

SEQ ID NO: 2009123 - DNA, 15 bp, Homo sapiens
tggttcaaagccatg

SEQ ID NO: 2009124 - DNA, 15 bp, Homo sapiens
ggttcaaagccatgt

SEQ ID NO: 2009125 - DNA, 15 bp, Homo sapiens
gttcaaagccatgtt

SEQ ID NO: 2009126 - DNA, 15 bp, Homo sapiens
ttcaaagccatgttg

SEQ ID NO: 2009127 - DNA, 15 bp, Homo sapiens
tcaaagccatgttgt

SEQ ID NO: 2009128 - DNA, 15 bp, Homo sapiens
caaagccatgttgtt

SEQ ID NO: 2009129 - DNA, 15 bp, Homo sapiens
aaagccatgttgttt

SEQ ID NO: 2009130 - DNA, 15 bp, Homo sapiens
aagccatgttgttta

SEQ ID NO: 2009131 - DNA, 15 bp, Homo sapiens
agccatgttgtttaa

SEQ ID NO: 2009132 - DNA, 15 bp, Homo sapiens
gccatgttgtttaag

SEQ ID NO: 2009133 - DNA, 15 bp, Homo sapiens
ccatgttgtttaagg

SEQ ID NO: 2009134 - DNA, 15 bp, Homo sapiens
catgttgtttaaggg

SEQ ID NO: 2009135 - DNA, 15 bp, Homo sapiens
atgttgtttaagggt

SEQ ID NO: 2009136 - DNA, 15 bp, Homo sapiens
tgttgtttaagggtc

SEQ ID NO: 2009137 - DNA, 15 bp, Homo sapiens
gttgtttaagggtca

SEQ ID NO: 2009138 - DNA, 15 bp, Homo sapiens
ttgtttaagggtcaa

SEQ ID NO: 2009139 - DNA, 15 bp, Homo sapiens
tgtttaagggtcaac

SEQ ID NO: 2009140 - DNA, 15 bp, Homo sapiens
gtttaagggtcaact

SEQ ID NO: 2009141 - DNA, 15 bp, Homo sapiens
tttaagggtcaactg

SEQ ID NO: 2009142 - DNA, 15 bp, Homo sapiens
ttaagggtcaactgt

SEQ ID NO: 2009143 - DNA, 15 bp, Homo sapiens
taagggtcaactgta

SEQ ID NO: 2009144 - DNA, 15 bp, Homo sapiens
aagggtcaactgtat

SEQ ID NO: 2009145 - DNA, 15 bp, Homo sapiens
agggtcaactgtata

SEQ ID NO: 2009146 - DNA, 15 bp, Homo sapiens
gggtcaactgtatat

SEQ ID NO: 2009147 - DNA, 15 bp, Homo sapiens
ggtcaactgtatatg

SEQ ID NO: 2009148 - DNA, 15 bp, Homo sapiens
gtcaactgtatatga

SEQ ID NO: 2009149 - DNA, 15 bp, Homo sapiens
tcaactgtatatgat

SEQ ID NO: 2009150 - DNA, 15 bp, Homo sapiens
caactgtatatgatt

SEQ ID NO: 2009151 - DNA, 15 bp, Homo sapiens
aactgtatatgattt

SEQ ID NO: 2009152 - DNA, 15 bp, Homo sapiens
actgtatatgatttt

SEQ ID NO: 2009153 - DNA, 15 bp, Homo sapiens
ctgtatatgattttt

SEQ ID NO: 2009154 - DNA, 15 bp, Homo sapiens
tgtatatgattttta

SEQ ID NO: 2009155 - DNA, 15 bp, Homo sapiens
gtatatgatttttaa

SEQ ID NO: 2009156 - DNA, 15 bp, Homo sapiens
tatatgatttttaag

SEQ ID NO: 2009157 - DNA, 15 bp, Homo sapiens
atatgatttttaagc

SEQ ID NO: 2009158 - DNA, 15 bp, Homo sapiens
tatgatttttaagcc

SEQ ID NO: 2009159 - DNA, 15 bp, Homo sapiens
atgatttttaagcct

SEQ ID NO: 2009160 - DNA, 15 bp, Homo sapiens
tgatttttaagcctg

SEQ ID NO: 2009161 - DNA, 15 bp, Homo sapiens
gatttttaagcctga

SEQ ID NO: 2009162 - DNA, 15 bp, Homo sapiens
atttttaagcctgat

SEQ ID NO: 2009163 - DNA, 15 bp, Homo sapiens
tttttaagcctgatg

SEQ ID NO: 2009164 - DNA, 15 bp, Homo sapiens
ttttaagcctgatgt

SEQ ID NO: 2009165 - DNA, 15 bp, Homo sapiens
tttaagcctgatgtc

SEQ ID NO: 2009166 - DNA, 15 bp, Homo sapiens
ttaagcctgatgtct

SEQ ID NO: 2009167 - DNA, 15 bp, Homo sapiens
taagcctgatgtcta

SEQ ID NO: 2009168 - DNA, 15 bp, Homo sapiens
aagcctgatgtctaa

SEQ ID NO: 2009169 - DNA, 15 bp, Homo sapiens
agcctgatgtctaac

SEQ ID NO: 2009170 - DNA, 15 bp, Homo sapiens
gcctgatgtctaact

SEQ ID NO: 2009171 - DNA, 15 bp, Homo sapiens
cctgatgtctaactt

SEQ ID NO: 2009172 - DNA, 15 bp, Homo sapiens
ctgatgtctaacttc

SEQ ID NO: 2009173 - DNA, 15 bp, Homo sapiens
tgatgtctaacttct

SEQ ID NO: 2009174 - DNA, 15 bp, Homo sapiens
gatgtctaacttctc

SEQ ID NO: 2009175 - DNA, 15 bp, Homo sapiens
atgtctaacttctca

SEQ ID NO: 2009176 - DNA, 15 bp, Homo sapiens
tgtctaacttctcac

SEQ ID NO: 2009177 - DNA, 15 bp, Homo sapiens
gtctaacttctcacc

SEQ ID NO: 2009178 - DNA, 15 bp, Homo sapiens
tctaacttctcacca

SEQ ID NO: 2009179 - DNA, 15 bp, Homo sapiens
ctaacttctcaccaa

SEQ ID NO: 2009180 - DNA, 15 bp, Homo sapiens
taacttctcaccaat

SEQ ID NO: 2009181 - DNA, 15 bp, Homo sapiens
aacttctcaccaatc

SEQ ID NO: 2009182 - DNA, 15 bp, Homo sapiens
acttctcaccaatct

SEQ ID NO: 2009183 - DNA, 15 bp, Homo sapiens
cttctcaccaatctt

SEQ ID NO: 2009184 - DNA, 15 bp, Homo sapiens
ttctcaccaatcttc

SEQ ID NO: 2009185 - DNA, 15 bp, Homo sapiens
tctcaccaatcttcc

SEQ ID NO: 2009186 - DNA, 15 bp, Homo sapiens
ctcaccaatcttcca

SEQ ID NO: 2009187 - DNA, 15 bp, Homo sapiens
tcaccaatcttccat

SEQ ID NO: 2009188 - DNA, 15 bp, Homo sapiens
caccaatcttccatt

SEQ ID NO: 2009189 - DNA, 15 bp, Homo sapiens
accaatcttccattc

SEQ ID NO: 2009190 - DNA, 15 bp, Homo sapiens
ccaatcttccattct

SEQ ID NO: 2009191 - DNA, 15 bp, Homo sapiens
caatcttccattctt

SEQ ID NO: 2009192 - DNA, 15 bp, Homo sapiens
aatcttccattcttg

SEQ ID NO: 2009193 - DNA, 15 bp, Homo sapiens
atcttccattcttgc

SEQ ID NO: 2009194 - DNA, 15 bp, Homo sapiens
tcttccattcttgct

SEQ ID NO: 2009195 - DNA, 15 bp, Homo sapiens
cttccattcttgctt

SEQ ID NO: 2009196 - DNA, 15 bp, Homo sapiens
ttccattcttgcttt

SEQ ID NO: 2009197 - DNA, 15 bp, Homo sapiens
tccattcttgctttc

SEQ ID NO: 2009198 - DNA, 15 bp, Homo sapiens
ccattcttgctttct

SEQ ID NO: 2009199 - DNA, 15 bp, Homo sapiens
cattcttgctttctt

SEQ ID NO: 2009200 - DNA, 15 bp, Homo sapiens
attcttgctttcttc

SEQ ID NO: 2009201 - DNA, 15 bp, Homo sapiens
ttcttgctttcttct

SEQ ID NO: 2009202 - DNA, 15 bp, Homo sapiens
tcttgctttcttcta

SEQ ID NO: 2009203 - DNA, 15 bp, Homo sapiens
cttgctttcttctat

SEQ ID NO: 2009204 - DNA, 15 bp, Homo sapiens
ttgctttcttctatc

SEQ ID NO: 2009205 - DNA, 15 bp, Homo sapiens
tgctttcttctatca

SEQ ID NO: 2009206 - DNA, 15 bp, Homo sapiens
gctttcttctatcaa

SEQ ID NO: 2009207 - DNA, 15 bp, Homo sapiens
ctttcttctatcaac

SEQ ID NO: 2009208 - DNA, 15 bp, Homo sapiens
tttcttctatcaacg

SEQ ID NO: 2009209 - DNA, 15 bp, Homo sapiens
ttcttctatcaacgc

SEQ ID NO: 2009210 - DNA, 15 bp, Homo sapiens
tcttctatcaacgcc

SEQ ID NO: 2009211 - DNA, 15 bp, Homo sapiens
cttctatcaacgcct

SEQ ID NO: 2009212 - DNA, 15 bp, Homo sapiens
ttctatcaacgccta

SEQ ID NO: 2009213 - DNA, 15 bp, Homo sapiens
tctatcaacgcctac

SEQ ID NO: 2009214 - DNA, 15 bp, Homo sapiens
ctatcaacgcctact

SEQ ID NO: 2009215 - DNA, 15 bp, Homo sapiens
tatcaacgcctacta

SEQ ID NO: 2009216 - DNA, 15 bp, Homo sapiens
atcaacgcctactag

SEQ ID NO: 2009217 - DNA, 15 bp, Homo sapiens
tcaacgcctactaga

SEQ ID NO: 2009218 - DNA, 15 bp, Homo sapiens
caacgcctactagaa

SEQ ID NO: 2009219 - DNA, 15 bp, Homo sapiens
aacgcctactagaaa

SEQ ID NO: 2009220 - DNA, 15 bp, Homo sapiens
acgcctactagaaac

SEQ ID NO: 2009221 - DNA, 15 bp, Homo sapiens
cgcctactagaaaca

SEQ ID NO: 2009222 - DNA, 15 bp, Homo sapiens
gcctactagaaacag

SEQ ID NO: 2009223 - DNA, 15 bp, Homo sapiens
cctactagaaacaga

SEQ ID NO: 2009224 - DNA, 15 bp, Homo sapiens
ctactagaaacagac

SEQ ID NO: 2009225 - DNA, 15 bp, Homo sapiens
tactagaaacagacg

SEQ ID NO: 2009226 - DNA, 15 bp, Homo sapiens
actagaaacagacgg

SEQ ID NO: 2009227 - DNA, 15 bp, Homo sapiens
ctagaaacagacggt

SEQ ID NO: 2009228 - DNA, 15 bp, Homo sapiens
tagaaacagacggtt

SEQ ID NO: 2009229 - DNA, 15 bp, Homo sapiens
agaaacagacggttc

SEQ ID NO: 2009230 - DNA, 15 bp, Homo sapiens
gaaacagacggttca

SEQ ID NO: 2009231 - DNA, 15 bp, Homo sapiens
aaacagacggttcag

SEQ ID NO: 2009232 - DNA, 15 bp, Homo sapiens
aacagacggttcagt

SEQ ID NO: 2009233 - DNA, 15 bp, Homo sapiens
acagacggttcagtg

SEQ ID NO: 2009234 - DNA, 15 bp, Homo sapiens
cagacggttcagtgg

SEQ ID NO: 2009235 - DNA, 15 bp, Homo sapiens
agacggttcagtgga

SEQ ID NO: 2009236 - DNA, 15 bp, Homo sapiens
gacggttcagtggag

SEQ ID NO: 2009237 - DNA, 15 bp, Homo sapiens
acggttcagtggagg

SEQ ID NO: 2009238 - DNA, 15 bp, Homo sapiens
cggttcagtggaggg

SEQ ID NO: 2009239 - DNA, 15 bp, Homo sapiens
ggttcagtggagggg

SEQ ID NO: 2009240 - DNA, 15 bp, Homo sapiens
gttcagtggaggggg

SEQ ID NO: 2009241 - DNA, 15 bp, Homo sapiens
ttcagtggagggggt

SEQ ID NO: 2009242 - DNA, 15 bp, Homo sapiens
tcagtggagggggtc

SEQ ID NO: 2009243 - DNA, 15 bp, Homo sapiens
cagtggagggggtct

SEQ ID NO: 2009244 - DNA, 15 bp, Homo sapiens
agtggagggggtctc

SEQ ID NO: 2009245 - DNA, 15 bp, Homo sapiens
gtggagggggtctcc

SEQ ID NO: 2009246 - DNA, 15 bp, Homo sapiens
tggagggggtctcca

SEQ ID NO: 2009247 - DNA, 15 bp, Homo sapiens
ggagggggtctccaa

SEQ ID NO: 2009248 - DNA, 15 bp, Homo sapiens
gagggggtctccaag

SEQ ID NO: 2009249 - DNA, 15 bp, Homo sapiens
agggggtctccaaga

SEQ ID NO: 2009250 - DNA, 15 bp, Homo sapiens
gggggtctccaagac

SEQ ID NO: 2009251 - DNA, 15 bp, Homo sapiens
ggggtctccaagacg

SEQ ID NO: 2009252 - DNA, 15 bp, Homo sapiens
gggtctccaagacgc

SEQ ID NO: 2009253 - DNA, 15 bp, Homo sapiens
ggtctccaagacgcc

SEQ ID NO: 2009254 - DNA, 15 bp, Homo sapiens
gtctccaagacgcca

SEQ ID NO: 2009255 - DNA, 15 bp, Homo sapiens
tctccaagacgccag

SEQ ID NO: 2009256 - DNA, 15 bp, Homo sapiens
ctccaagacgccaga

SEQ ID NO: 2009257 - DNA, 15 bp, Homo sapiens
tccaagacgccagaa

SEQ ID NO: 2009258 - DNA, 15 bp, Homo sapiens
ccaagacgccagaag

SEQ ID NO: 2009259 - DNA, 15 bp, Homo sapiens
caagacgccagaaga

SEQ ID NO: 2009260 - DNA, 15 bp, Homo sapiens
aagacgccagaagat

SEQ ID NO: 2009261 - DNA, 15 bp, Homo sapiens
agacgccagaagatg

SEQ ID NO: 2009262 - DNA, 15 bp, Homo sapiens
gacgccagaagatgg

SEQ ID NO: 2009263 - DNA, 15 bp, Homo sapiens
acgccagaagatggt

SEQ ID NO: 2009264 - DNA, 15 bp, Homo sapiens
cgccagaagatggta

SEQ ID NO: 2009265 - DNA, 15 bp, Homo sapiens
gccagaagatggtaa

SEQ ID NO: 2009266 - DNA, 15 bp, Homo sapiens
ccagaagatggtaaa

SEQ ID NO: 2009267 - DNA, 15 bp, Homo sapiens
cagaagatggtaaaa

SEQ ID NO: 2009268 - DNA, 15 bp, Homo sapiens
agaagatggtaaaac

SEQ ID NO: 2009269 - DNA, 15 bp, Homo sapiens
gaagatggtaaaacc

SEQ ID NO: 2009270 - DNA, 15 bp, Homo sapiens
aagatggtaaaacca

SEQ ID NO: 2009271 - DNA, 15 bp, Homo sapiens
agatggtaaaaccat

SEQ ID NO: 2009272 - DNA, 15 bp, Homo sapiens
gatggtaaaaccatt

SEQ ID NO: 2009273 - DNA, 15 bp, Homo sapiens
atggtaaaaccatta

SEQ ID NO: 2009274 - DNA, 15 bp, Homo sapiens
tggtaaaaccattag

SEQ ID NO: 2009275 - DNA, 15 bp, Homo sapiens
ggtaaaaccattaga

SEQ ID NO: 2009276 - DNA, 15 bp, Homo sapiens
gtaaaaccattagaa

SEQ ID NO: 2009277 - DNA, 15 bp, Homo sapiens
taaaaccattagaaa

SEQ ID NO: 2009278 - DNA, 15 bp, Homo sapiens
aaaaccattagaaag

SEQ ID NO: 2009279 - DNA, 15 bp, Homo sapiens
aaaccattagaaagc

SEQ ID NO: 2009280 - DNA, 15 bp, Homo sapiens
aaccattagaaagca

SEQ ID NO: 2009281 - DNA, 15 bp, Homo sapiens
accattagaaagcat

SEQ ID NO: 2009282 - DNA, 15 bp, Homo sapiens
ccattagaaagcatg

SEQ ID NO: 2009283 - DNA, 15 bp, Homo sapiens
cattagaaagcatga

SEQ ID NO: 2009284 - DNA, 15 bp, Homo sapiens
attagaaagcatgat

SEQ ID NO: 2009285 - DNA, 15 bp, Homo sapiens
ttagaaagcatgatt

SEQ ID NO: 2009286 - DNA, 15 bp, Homo sapiens
tagaaagcatgattt

SEQ ID NO: 2009287 - DNA, 15 bp, Homo sapiens
agaaagcatgattta

SEQ ID NO: 2009288 - DNA, 15 bp, Homo sapiens
gaaagcatgatttaa

SEQ ID NO: 2009289 - DNA, 15 bp, Homo sapiens
aaagcatgatttaag

SEQ ID NO: 2009290 - DNA, 15 bp, Homo sapiens
aagcatgatttaaga

SEQ ID NO: 2009291 - DNA, 15 bp, Homo sapiens
agcatgatttaagag

SEQ ID NO: 2009292 - DNA, 15 bp, Homo sapiens
gcatgatttaagaga

SEQ ID NO: 2009293 - DNA, 15 bp, Homo sapiens
catgatttaagagaa

SEQ ID NO: 2009294 - DNA, 15 bp, Homo sapiens
atgatttaagagaaa

SEQ ID NO: 2009295 - DNA, 15 bp, Homo sapiens
tgatttaagagaaat

SEQ ID NO: 2009296 - DNA, 15 bp, Homo sapiens
gatttaagagaaatt

SEQ ID NO: 2009297 - DNA, 15 bp, Homo sapiens
atttaagagaaatta

SEQ ID NO: 2009298 - DNA, 15 bp, Homo sapiens
tttaagagaaattaa

SEQ ID NO: 2009299 - DNA, 15 bp, Homo sapiens
ttaagagaaattaac

SEQ ID NO: 2009300 - DNA, 15 bp, Homo sapiens
taagagaaattaact

SEQ ID NO: 2009301 - DNA, 15 bp, Homo sapiens
aagagaaattaactt

SEQ ID NO: 2009302 - DNA, 15 bp, Homo sapiens
agagaaattaacttt

SEQ ID NO: 2009303 - DNA, 15 bp, Homo sapiens
gagaaattaactttt

SEQ ID NO: 2009304 - DNA, 15 bp, Homo sapiens
agaaattaacttttg

SEQ ID NO: 2009305 - DNA, 15 bp, Homo sapiens
gaaattaacttttgt

SEQ ID NO: 2009306 - DNA, 15 bp, Homo sapiens
aaattaacttttgtt

SEQ ID NO: 2009307 - DNA, 15 bp, Homo sapiens
aattaacttttgttg

SEQ ID NO: 2009308 - DNA, 15 bp, Homo sapiens
attaacttttgttgt

SEQ ID NO: 2009309 - DNA, 15 bp, Homo sapiens
ttaacttttgttgtc

SEQ ID NO: 2009310 - DNA, 15 bp, Homo sapiens
taacttttgttgtct

SEQ ID NO: 2009311 - DNA, 15 bp, Homo sapiens
aacttttgttgtctt

SEQ ID NO: 2009312 - DNA, 15 bp, Homo sapiens
acttttgttgtctta

SEQ ID NO: 2009313 - DNA, 15 bp, Homo sapiens
cttttgttgtcttag

SEQ ID NO: 2009314 - DNA, 15 bp, Homo sapiens
ttttgttgtcttagc

SEQ ID NO: 2009315 - DNA, 15 bp, Homo sapiens
tttgttgtcttagcc

SEQ ID NO: 2009316 - DNA, 15 bp, Homo sapiens
ttgttgtcttagcca

SEQ ID NO: 2009317 - DNA, 15 bp, Homo sapiens
tgttgtcttagccag

SEQ ID NO: 2009318 - DNA, 15 bp, Homo sapiens
gttgtcttagccagt

SEQ ID NO: 2009319 - DNA, 15 bp, Homo sapiens
ttgtcttagccagtg

SEQ ID NO: 2009320 - DNA, 15 bp, Homo sapiens
tgtcttagccagtga

SEQ ID NO: 2009321 - DNA, 15 bp, Homo sapiens
gtcttagccagtgat

SEQ ID NO: 2009322 - DNA, 15 bp, Homo sapiens
tcttagccagtgata

SEQ ID NO: 2009323 - DNA, 15 bp, Homo sapiens
cttagccagtgatat

SEQ ID NO: 2009324 - DNA, 15 bp, Homo sapiens
ttagccagtgatatt

SEQ ID NO: 2009325 - DNA, 15 bp, Homo sapiens
tagccagtgatattt

SEQ ID NO: 2009326 - DNA, 15 bp, Homo sapiens
agccagtgatatttt

SEQ ID NO: 2009327 - DNA, 15 bp, Homo sapiens
gccagtgatattttg

SEQ ID NO: 2009328 - DNA, 15 bp, Homo sapiens
ccagtgatattttgg

SEQ ID NO: 2009329 - DNA, 15 bp, Homo sapiens
cagtgatattttggg

SEQ ID NO: 2009330 - DNA, 15 bp, Homo sapiens
agtgatattttggga

SEQ ID NO: 2009331 - DNA, 15 bp, Homo sapiens
gtgatattttgggat

SEQ ID NO: 2009332 - DNA, 15 bp, Homo sapiens
tgatattttgggatt

SEQ ID NO: 2009333 - DNA, 15 bp, Homo sapiens
gatattttgggatta

SEQ ID NO: 2009334 - DNA, 15 bp, Homo sapiens
attttgggattattt

SEQ ID NO: 2009335 - DNA, 15 bp, Homo sapiens
ttttgggattatttg

SEQ ID NO: 2009336 - DNA, 15 bp, Homo sapiens
tttgggattatttgt

SEQ ID NO: 2009337 - DNA, 15 bp, Homo sapiens
ttgggattatttgtg

SEQ ID NO: 2009338 - DNA, 15 bp, Homo sapiens
tgggattatttgtga

SEQ ID NO: 2009339 - DNA, 15 bp, Homo sapiens
gggattatttgtgac

SEQ ID NO: 2009340 - DNA, 15 bp, Homo sapiens
ggattatttgtgaca

SEQ ID NO: 2009341 - DNA, 15 bp, Homo sapiens
gattatttgtgacag

SEQ ID NO: 2009342 - DNA, 15 bp, Homo sapiens
attatttgtgacaga

SEQ ID NO: 2009343 - DNA, 15 bp, Homo sapiens
ttatttgtgacagaa

SEQ ID NO: 2009344 - DNA, 15 bp, Homo sapiens
tatttgtgacagaaa

SEQ ID NO: 2009345 - DNA, 15 bp, Homo sapiens
atttgtgacagaaat

SEQ ID NO: 2009346 - DNA, 15 bp, Homo sapiens
tttgtgacagaaatt

SEQ ID NO: 2009347 - DNA, 15 bp, Homo sapiens
ttgtgacagaaatta

SEQ ID NO: 2009348 - DNA, 15 bp, Homo sapiens
tgtgacagaaattag

SEQ ID NO: 2009349 - DNA, 15 bp, Homo sapiens
gtgacagaaattagt

SEQ ID NO: 2009350 - DNA, 15 bp, Homo sapiens
tgacagaaattagtt

SEQ ID NO: 2009351 - DNA, 15 bp, Homo sapiens
gacagaaattagttc

SEQ ID NO: 2009352 - DNA, 15 bp, Homo sapiens
acagaaattagttcg

SEQ ID NO: 2009353 - DNA, 15 bp, Homo sapiens
cagaaattagttcgt

SEQ ID NO: 2009354 - DNA, 15 bp, Homo sapiens
agaaattagttcgtg

SEQ ID NO: 2009355 - DNA, 15 bp, Homo sapiens
gaaattagttcgtgc

SEQ ID NO: 2009356 - DNA, 15 bp, Homo sapiens
aaattagttcgtgct

SEQ ID NO: 2009357 - DNA, 15 bp, Homo sapiens
aattagttcgtgctg

SEQ ID NO: 2009358 - DNA, 15 bp, Homo sapiens
attagttcgtgctga

SEQ ID NO: 2009359 - DNA, 15 bp, Homo sapiens
ttagttcgtgctgac

SEQ ID NO: 2009360 - DNA, 15 bp, Homo sapiens
tagttcgtgctgact

SEQ ID NO: 2009361 - DNA, 15 bp, Homo sapiens
agttcgtgctgacta

SEQ ID NO: 2009362 - DNA, 15 bp, Homo sapiens
gttcgtgctgactaa

SEQ ID NO: 2009363 - DNA, 15 bp, Homo sapiens
ttcgtgctgactaac

SEQ ID NO: 2009364 - DNA, 15 bp, Homo sapiens
tcgtgctgactaaca

SEQ ID NO: 2009365 - DNA, 15 bp, Homo sapiens
cgtgctgactaacat

SEQ ID NO: 2009366 - DNA, 15 bp, Homo sapiens
gtgctgactaacata

SEQ ID NO: 2009367 - DNA, 15 bp, Homo sapiens
tgctgactaacataa

SEQ ID NO: 2009368 - DNA, 15 bp, Homo sapiens
gctgactaacataac

SEQ ID NO: 2009369 - DNA, 15 bp, Homo sapiens
ctgactaacataact

SEQ ID NO: 2009370 - DNA, 15 bp, Homo sapiens
tgactaacataacta

SEQ ID NO: 2009371 - DNA, 15 bp, Homo sapiens
gactaacataactac

SEQ ID NO: 2009372 - DNA, 15 bp, Homo sapiens
actaacataactaca

SEQ ID NO: 2009373 - DNA, 15 bp, Homo sapiens
ctaacataactacat

SEQ ID NO: 2009374 - DNA, 15 bp, Homo sapiens
taacataactacatg

SEQ ID NO: 2009375 - DNA, 15 bp, Homo sapiens
aacataactacatgc

SEQ ID NO: 2009376 - DNA, 15 bp, Homo sapiens
acataactacatgct

SEQ ID NO: 2009377 - DNA, 15 bp, Homo sapiens
cataactacatgctg

SEQ ID NO: 2009378 - DNA, 15 bp, Homo sapiens
ataactacatgctgg

SEQ ID NO: 2009379 - DNA, 15 bp, Homo sapiens
taactacatgctgga

SEQ ID NO: 2009380 - DNA, 15 bp, Homo sapiens
aactacatgctggac

SEQ ID NO: 2009381 - DNA, 15 bp, Homo sapiens
actacatgctggaca

SEQ ID NO: 2009382 - DNA, 15 bp, Homo sapiens
ctacatgctggacat

SEQ ID NO: 2009383 - DNA, 15 bp, Homo sapiens
tacatgctggacatc

SEQ ID NO: 2009384 - DNA, 15 bp, Homo sapiens
acatgctggacatct

SEQ ID NO: 2009385 - DNA, 15 bp, Homo sapiens
catgctggacatctt

SEQ ID NO: 2009386 - DNA, 15 bp, Homo sapiens
atgctggacatcttg

SEQ ID NO: 2009387 - DNA, 15 bp, Homo sapiens
tgctggacatcttgc

SEQ ID NO: 2009388 - DNA, 15 bp, Homo sapiens
gctggacatcttgcc

SEQ ID NO: 2009389 - DNA, 15 bp, Homo sapiens
ctggacatcttgcct

SEQ ID NO: 2009390 - DNA, 15 bp, Homo sapiens
tggacatcttgcctt

SEQ ID NO: 2009391 - DNA, 15 bp, Homo sapiens
ggacatcttgccttt

SEQ ID NO: 2009392 - DNA, 15 bp, Homo sapiens
gacatcttgcctttg

SEQ ID NO: 2009393 - DNA, 15 bp, Homo sapiens
acatcttgcctttgc

SEQ ID NO: 2009394 - DNA, 15 bp, Homo sapiens
catcttgcctttgcc

SEQ ID NO: 2009395 - DNA, 15 bp, Homo sapiens
atcttgcctttgcct

SEQ ID NO: 2009396 - DNA, 15 bp, Homo sapiens
tcttgcctttgcctc

SEQ ID NO: 2009397 - DNA, 15 bp, Homo sapiens
cttgcctttgcctct

SEQ ID NO: 2009398 - DNA, 15 bp, Homo sapiens
ttgcctttgcctctt

SEQ ID NO: 2009399 - DNA, 15 bp, Homo sapiens
tgcctttgcctcttc

SEQ ID NO: 2009400 - DNA, 15 bp, Homo sapiens
gcctttgcctcttca

SEQ ID NO: 2009401 - DNA, 15 bp, Homo sapiens
cctttgcctcttcaa

SEQ ID NO: 2009402 - DNA, 15 bp, Homo sapiens
ctttgcctcttcaaa

SEQ ID NO: 2009403 - DNA, 15 bp, Homo sapiens
tttgcctcttcaaat

SEQ ID NO: 2009404 - DNA, 15 bp, Homo sapiens
ttgcctcttcaaatc

SEQ ID NO: 2009405 - DNA, 15 bp, Homo sapiens
tgcctcttcaaatcc

SEQ ID NO: 2009406 - DNA, 15 bp, Homo sapiens
gcctcttcaaatcca

SEQ ID NO: 2009407 - DNA, 15 bp, Homo sapiens
cctcttcaaatccac

SEQ ID NO: 2009408 - DNA, 15 bp, Homo sapiens
ctcttcaaatccact

SEQ ID NO: 2009409 - DNA, 15 bp, Homo sapiens
tcttcaaatccactc

SEQ ID NO: 2009410 - DNA, 15 bp, Homo sapiens
cttcaaatccactct

SEQ ID NO: 2009411 - DNA, 15 bp, Homo sapiens
ttcaaatccactctg

SEQ ID NO: 2009412 - DNA, 15 bp, Homo sapiens
tcaaatccactctgt

SEQ ID NO: 2009413 - DNA, 15 bp, Homo sapiens
caaatccactctgtt

SEQ ID NO: 2009414 - DNA, 15 bp, Homo sapiens
aaatccactctgttc

SEQ ID NO: 2009415 - DNA, 15 bp, Homo sapiens
aatccactctgttct

SEQ ID NO: 2009416 - DNA, 15 bp, Homo sapiens
atccactctgttctt

SEQ ID NO: 2009417 - DNA, 15 bp, Homo sapiens
tccactctgttcttt

SEQ ID NO: 2009418 - DNA, 15 bp, Homo sapiens
ccactctgttcttta

SEQ ID NO: 2009419 - DNA, 15 bp, Homo sapiens
cactctgttctttac

SEQ ID NO: 2009420 - DNA, 15 bp, Homo sapiens
actctgttctttacc

SEQ ID NO: 2009421 - DNA, 15 bp, Homo sapiens
ctctgttctttaccc

SEQ ID NO: 2009422 - DNA, 15 bp, Homo sapiens
tctgttctttaccct

SEQ ID NO: 2009423 - DNA, 15 bp, Homo sapiens
ctgttctttaccctg

SEQ ID NO: 2009424 - DNA, 15 bp, Homo sapiens
tgttctttaccctgc

SEQ ID NO: 2009425 - DNA, 15 bp, Homo sapiens
gttctttaccctgct

SEQ ID NO: 2009426 - DNA, 15 bp, Homo sapiens
ttctttaccctgctg

SEQ ID NO: 2009427 - DNA, 15 bp, Homo sapiens
tctttaccctgctgt

SEQ ID NO: 2009428 - DNA, 15 bp, Homo sapiens
ctttaccctgctgtg

SEQ ID NO: 2009429 - DNA, 15 bp, Homo sapiens
tttaccctgctgtgt

SEQ ID NO: 2009430 - DNA, 15 bp, Homo sapiens
ttaccctgctgtgta

SEQ ID NO: 2009431 - DNA, 15 bp, Homo sapiens
taccctgctgtgtac

SEQ ID NO: 2009432 - DNA, 15 bp, Homo sapiens
accctgctgtgtacc

SEQ ID NO: 2009433 - DNA, 15 bp, Homo sapiens
ccctgctgtgtaccc

SEQ ID NO: 2009434 - DNA, 15 bp, Homo sapiens
cctgctgtgtaccct

SEQ ID NO: 2009435 - DNA, 15 bp, Homo sapiens
ctgctgtgtacccta

SEQ ID NO: 2009436 - DNA, 15 bp, Homo sapiens
tgctgtgtaccctaa

SEQ ID NO: 2009437 - DNA, 15 bp, Homo sapiens
gctgtgtaccctaag

SEQ ID NO: 2009438 - DNA, 15 bp, Homo sapiens
ctgtgtaccctaaga

SEQ ID NO: 2009439 - DNA, 15 bp, Homo sapiens
tgtgtaccctaagag

SEQ ID NO: 2009440 - DNA, 15 bp, Homo sapiens
gtgtaccctaagagg

SEQ ID NO: 2009441 - DNA, 15 bp, Homo sapiens
tgtaccctaagaggc

SEQ ID NO: 2009442 - DNA, 15 bp, Homo sapiens
gtaccctaagaggct

SEQ ID NO: 2009443 - DNA, 15 bp, Homo sapiens
taccctaagaggctg

SEQ ID NO: 2009444 - DNA, 15 bp, Homo sapiens
accctaagaggctga

SEQ ID NO: 2009445 - DNA, 15 bp, Homo sapiens
ccctaagaggctgac

SEQ ID NO: 2009446 - DNA, 15 bp, Homo sapiens
cctaagaggctgacc

SEQ ID NO: 2009447 - DNA, 15 bp, Homo sapiens
ctaagaggctgacct

SEQ ID NO: 2009448 - DNA, 15 bp, Homo sapiens
taagaggctgacctg

SEQ ID NO: 2009449 - DNA, 15 bp, Homo sapiens
aagaggctgacctgt

SEQ ID NO: 2009450 - DNA, 15 bp, Homo sapiens
agaggctgacctgtg

SEQ ID NO: 2009451 - DNA, 15 bp, Homo sapiens
gaggctgacctgtgt

SEQ ID NO: 2009452 - DNA, 15 bp, Homo sapiens
aggctgacctgtgta

SEQ ID NO: 2009453 - DNA, 15 bp, Homo sapiens
ggctgacctgtgtag

SEQ ID NO: 2009454 - DNA, 15 bp, Homo sapiens
gctgacctgtgtaga

SEQ ID NO: 2009455 - DNA, 15 bp, Homo sapiens
ctgacctgtgtagag

SEQ ID NO: 2009456 - DNA, 15 bp, Homo sapiens
tgacctgtgtagagg

SEQ ID NO: 2009457 - DNA, 15 bp, Homo sapiens
gacctgtgtagaggg

SEQ ID NO: 2009458 - DNA, 15 bp, Homo sapiens
acctgtgtagagggt

SEQ ID NO: 2009459 - DNA, 15 bp, Homo sapiens
cctgtgtagagggta

SEQ ID NO: 2009460 - DNA, 15 bp, Homo sapiens
ctgtgtagagggtat

SEQ ID NO: 2009461 - DNA, 15 bp, Homo sapiens
tgtgtagagggtatc

SEQ ID NO: 2009462 - DNA, 15 bp, Homo sapiens
gtgtagagggtatca

SEQ ID NO: 2009463 - DNA, 15 bp, Homo sapiens
tgtagagggtatcat

SEQ ID NO: 2009464 - DNA, 15 bp, Homo sapiens
gtagagggtatcatt

SEQ ID NO: 2009465 - DNA, 15 bp, Homo sapiens
tagagggtatcattg

SEQ ID NO: 2009466 - DNA, 15 bp, Homo sapiens
agagggtatcattgg

SEQ ID NO: 2009467 - DNA, 15 bp, Homo sapiens
gagggtatcattggg

SEQ ID NO: 2009468 - DNA, 15 bp, Homo sapiens
agggtatcattgggc

SEQ ID NO: 2009469 - DNA, 15 bp, Homo sapiens
gggtatcattgggct

SEQ ID NO: 2009470 - DNA, 15 bp, Homo sapiens
ggtatcattgggctc

SEQ ID NO: 2009471 - DNA, 15 bp, Homo sapiens
gtatcattgggctcc

SEQ ID NO: 2009472 - DNA, 15 bp, Homo sapiens
tatcattgggctccc

SEQ ID NO: 2009473 - DNA, 15 bp, Homo sapiens
atcattgggctcccc

SEQ ID NO: 2009474 - DNA, 15 bp, Homo sapiens
tcattgggctcccct

SEQ ID NO: 2009475 - DNA, 15 bp, Homo sapiens
cattgggctcccctc

SEQ ID NO: 2009476 - DNA, 15 bp, Homo sapiens
attgggctcccctcc

SEQ ID NO: 2009477 - DNA, 15 bp, Homo sapiens
ttgggctcccctcct

SEQ ID NO: 2009478 - DNA, 15 bp, Homo sapiens
tgggctcccctcctt

SEQ ID NO: 2009479 - DNA, 15 bp, Homo sapiens
gggctcccctccttt

SEQ ID NO: 2009480 - DNA, 15 bp, Homo sapiens
ggctcccctcctttc

SEQ ID NO: 2009481 - DNA, 15 bp, Homo sapiens
gctcccctcctttct

SEQ ID NO: 2009482 - DNA, 15 bp, Homo sapiens
ctcccctcctttctg

SEQ ID NO: 2009483 - DNA, 15 bp, Homo sapiens
tcccctcctttctgg

SEQ ID NO: 2009484 - DNA, 15 bp, Homo sapiens
cccctcctttctggc

SEQ ID NO: 2009485 - DNA, 15 bp, Homo sapiens
ccctcctttctggct

SEQ ID NO: 2009486 - DNA, 15 bp, Homo sapiens
cctcctttctggctt

SEQ ID NO: 2009487 - DNA, 15 bp, Homo sapiens
ctcctttctggcttt

SEQ ID NO: 2009488 - DNA, 15 bp, Homo sapiens
tcctttctggctttc

SEQ ID NO: 2009489 - DNA, 15 bp, Homo sapiens
cctttctggctttca

SEQ ID NO: 2009490 - DNA, 15 bp, Homo sapiens
ctttctggctttcag

SEQ ID NO: 2009491 - DNA, 15 bp, Homo sapiens
tttctggctttcagc

SEQ ID NO: 2009492 - DNA, 15 bp, Homo sapiens
ttctggctttcagct

SEQ ID NO: 2009493 - DNA, 15 bp, Homo sapiens
tctggctttcagctg

SEQ ID NO: 2009494 - DNA, 15 bp, Homo sapiens
ctggctttcagctgg

SEQ ID NO: 2009495 - DNA, 15 bp, Homo sapiens
tggctttcagctggc

SEQ ID NO: 2009496 - DNA, 15 bp, Homo sapiens
ggctttcagctggcc

SEQ ID NO: 2009497 - DNA, 15 bp, Homo sapiens
gctttcagctggccc

SEQ ID NO: 2009498 - DNA, 15 bp, Homo sapiens
ctttcagctggccca

SEQ ID NO: 2009499 - DNA, 15 bp, Homo sapiens
tttcagctggcccat

SEQ ID NO: 2009500 - DNA, 15 bp, Homo sapiens
ttcagctggcccata

SEQ ID NO: 2009501 - DNA, 15 bp, Homo sapiens
tcagctggcccatag

SEQ ID NO: 2009502 - DNA, 15 bp, Homo sapiens
cagctggcccatagg

SEQ ID NO: 2009503 - DNA, 15 bp, Homo sapiens
agctggcccataggg

SEQ ID NO: 2009504 - DNA, 15 bp, Homo sapiens
gctggcccataggga

SEQ ID NO: 2009505 - DNA, 15 bp, Homo sapiens
ctggcccatagggaa

SEQ ID NO: 2009506 - DNA, 15 bp, Homo sapiens
tggcccatagggaat

SEQ ID NO: 2009507 - DNA, 15 bp, Homo sapiens
ggcccatagggaata

SEQ ID NO: 2009508 - DNA, 15 bp, Homo sapiens
gcccatagggaatac

SEQ ID NO: 2009509 - DNA, 15 bp, Homo sapiens
cccatagggaataca

SEQ ID NO: 2009510 - DNA, 15 bp, Homo sapiens
ccatagggaatacaa

SEQ ID NO: 2009511 - DNA, 15 bp, Homo sapiens
catagggaatacaag

SEQ ID NO: 2009512 - DNA, 15 bp, Homo sapiens
atagggaatacaagc

SEQ ID NO: 2009513 - DNA, 15 bp, Homo sapiens
tagggaatacaagcg

SEQ ID NO: 2009514 - DNA, 15 bp, Homo sapiens
agggaatacaagcgg

SEQ ID NO: 2009515 - DNA, 15 bp, Homo sapiens
gggaatacaagcgga

SEQ ID NO: 2009516 - DNA, 15 bp, Homo sapiens
ggaatacaagcggaa

SEQ ID NO: 2009517 - DNA, 15 bp, Homo sapiens
gaatacaagcggaag

SEQ ID NO: 2009518 - DNA, 15 bp, Homo sapiens
aatacaagcggaaga

SEQ ID NO: 2009519 - DNA, 15 bp, Homo sapiens
atacaagcggaagat

SEQ ID NO: 2009520 - DNA, 15 bp, Homo sapiens
tacaagcggaagatt

SEQ ID NO: 2009521 - DNA, 15 bp, Homo sapiens
acaagcggaagatta

SEQ ID NO: 2009522 - DNA, 15 bp, Homo sapiens
caagcggaagattag

SEQ ID NO: 2009523 - DNA, 15 bp, Homo sapiens
aagcggaagattagg

SEQ ID NO: 2009524 - DNA, 15 bp, Homo sapiens
agcggaagattaggg

SEQ ID NO: 2009525 - DNA, 15 bp, Homo sapiens
gcggaagattaggga

SEQ ID NO: 2009526 - DNA, 15 bp, Homo sapiens
cggaagattagggag

SEQ ID NO: 2009527 - DNA, 15 bp, Homo sapiens
ggaagattagggaga

SEQ ID NO: 2009528 - DNA, 15 bp, Homo sapiens
gaagattagggagaa

SEQ ID NO: 2009529 - DNA, 15 bp, Homo sapiens
aagattagggagaag

SEQ ID NO: 2009530 - DNA, 15 bp, Homo sapiens
agattagggagaaga

SEQ ID NO: 2009531 - DNA, 15 bp, Homo sapiens
gattagggagaagaa

SEQ ID NO: 2009532 - DNA, 15 bp, Homo sapiens
attagggagaagaaa

SEQ ID NO: 2009533 - DNA, 15 bp, Homo sapiens
ttagggagaagaaag

SEQ ID NO: 2009534 - DNA, 15 bp, Homo sapiens
tagggagaagaaaga

SEQ ID NO: 2009535 - DNA, 15 bp, Homo sapiens
gagaagaaagagagt

SEQ ID NO: 2009536 - DNA, 15 bp, Homo sapiens
agaagaaagagagta

SEQ ID NO: 2009537 - DNA, 15 bp, Homo sapiens
gaagaaagagagtaa

SEQ ID NO: 2009538 - DNA, 15 bp, Homo sapiens
aagaaagagagtaag

SEQ ID NO: 2009539 - DNA, 15 bp, Homo sapiens
agaaagagagtaagg

SEQ ID NO: 2009540 - DNA, 15 bp, Homo sapiens
gaaagagagtaaggt

SEQ ID NO: 2009541 - DNA, 15 bp, Homo sapiens
aaagagagtaaggtt

SEQ ID NO: 2009542 - DNA, 15 bp, Homo sapiens
aagagagtaaggtta

SEQ ID NO: 2009543 - DNA, 15 bp, Homo sapiens
agagagtaaggttag

SEQ ID NO: 2009544 - DNA, 15 bp, Homo sapiens
gagagtaaggttagg

SEQ ID NO: 2009545 - DNA, 15 bp, Homo sapiens
agagtaaggttagga

SEQ ID NO: 2009546 - DNA, 15 bp, Homo sapiens
gagtaaggttaggag

SEQ ID NO: 2009547 - DNA, 15 bp, Homo sapiens
agtaaggttaggagg

SEQ ID NO: 2009548 - DNA, 15 bp, Homo sapiens
gtaaggttaggaggt

SEQ ID NO: 2009549 - DNA, 15 bp, Homo sapiens
taaggttaggaggta

SEQ ID NO: 2009550 - DNA, 15 bp, Homo sapiens
aaggttaggaggtat

SEQ ID NO: 2009551 - DNA, 15 bp, Homo sapiens
aggttaggaggtata

SEQ ID NO: 2009552 - DNA, 15 bp, Homo sapiens
ggttaggaggtatat

SEQ ID NO: 2009553 - DNA, 15 bp, Homo sapiens
gttaggaggtatata

SEQ ID NO: 2009554 - DNA, 15 bp, Homo sapiens
ttaggaggtatatat

SEQ ID NO: 2009555 - DNA, 15 bp, Homo sapiens
taggaggtatatatt

SEQ ID NO: 2009556 - DNA, 15 bp, Homo sapiens
aggaggtatatattt

SEQ ID NO: 2009557 - DNA, 15 bp, Homo sapiens
ggaggtatatatttt

SEQ ID NO: 2009558 - DNA, 15 bp, Homo sapiens
gaggtatatattttt

SEQ ID NO: 2009559 - DNA, 15 bp, Homo sapiens
aggtatatatttttg

SEQ ID NO: 2009560 - DNA, 15 bp, Homo sapiens
ggtatatatttttgg

SEQ ID NO: 2009561 - DNA, 15 bp, Homo sapiens
gtatatatttttggc

SEQ ID NO: 2009562 - DNA, 15 bp, Homo sapiens
tatatatttttggct

SEQ ID NO: 2009563 - DNA, 15 bp, Homo sapiens
atatatttttggctc

SEQ ID NO: 2009564 - DNA, 15 bp, Homo sapiens
tatatttttggctcc

SEQ ID NO: 2009565 - DNA, 15 bp, Homo sapiens
atatttttggctccg

SEQ ID NO: 2009566 - DNA, 15 bp, Homo sapiens
tatttttggctccgt

SEQ ID NO: 2009567 - DNA, 15 bp, Homo sapiens
atttttggctccgtt

SEQ ID NO: 2009568 - DNA, 15 bp, Homo sapiens
tttttggctccgttt

SEQ ID NO: 2009569 - DNA, 15 bp, Homo sapiens
ttttggctccgtttc

SEQ ID NO: 2009570 - DNA, 15 bp, Homo sapiens
tttggctccgtttct

SEQ ID NO: 2009571 - DNA, 15 bp, Homo sapiens
ttggctccgtttctg

SEQ ID NO: 2009572 - DNA, 15 bp, Homo sapiens
tggctccgtttctgc

SEQ ID NO: 2009573 - DNA, 15 bp, Homo sapiens
ggctccgtttctgca

SEQ ID NO: 2009574 - DNA, 15 bp, Homo sapiens
gctccgtttctgcag

SEQ ID NO: 2009575 - DNA, 15 bp, Homo sapiens
ctccgtttctgcagg

SEQ ID NO: 2009576 - DNA, 15 bp, Homo sapiens
tccgtttctgcaggg

SEQ ID NO: 2009577 - DNA, 15 bp, Homo sapiens
ccgtttctgcagggt

SEQ ID NO: 2009578 - DNA, 15 bp, Homo sapiens
cgtttctgcagggtc

SEQ ID NO: 2009579 - DNA, 15 bp, Homo sapiens
gtttctgcagggtcc

SEQ ID NO: 2009580 - DNA, 15 bp, Homo sapiens
tttctgcagggtccc

SEQ ID NO: 2009581 - DNA, 15 bp, Homo sapiens
ttctgcagggtccca

SEQ ID NO: 2009582 - DNA, 15 bp, Homo sapiens
tctgcagggtcccag

SEQ ID NO: 2009583 - DNA, 15 bp, Homo sapiens
ctgcagggtcccagt

SEQ ID NO: 2009584 - DNA, 15 bp, Homo sapiens
tgcagggtcccagtg

SEQ ID NO: 2009585 - DNA, 15 bp, Homo sapiens
gcagggtcccagtgg

SEQ ID NO: 2009586 - DNA, 15 bp, Homo sapiens
cagggtcccagtggg

SEQ ID NO: 2009587 - DNA, 15 bp, Homo sapiens
agggtcccagtgggc

SEQ ID NO: 2009588 - DNA, 15 bp, Homo sapiens
gggtcccagtgggct

SEQ ID NO: 2009589 - DNA, 15 bp, Homo sapiens
ggtcccagtgggctg

SEQ ID NO: 2009590 - DNA, 15 bp, Homo sapiens
gtcccagtgggctgg

SEQ ID NO: 2009591 - DNA, 15 bp, Homo sapiens
tcccagtgggctggc

SEQ ID NO: 2009592 - DNA, 15 bp, Homo sapiens
cccagtgggctggct

SEQ ID NO: 2009593 - DNA, 15 bp, Homo sapiens
ccagtgggctggcta

SEQ ID NO: 2009594 - DNA, 15 bp, Homo sapiens
cagtgggctggctac

SEQ ID NO: 2009595 - DNA, 15 bp, Homo sapiens
agtgggctggctaca

SEQ ID NO: 2009596 - DNA, 15 bp, Homo sapiens
gtgggctggctacat

SEQ ID NO: 2009597 - DNA, 15 bp, Homo sapiens
tgggctggctacatc

SEQ ID NO: 2009598 - DNA, 15 bp, Homo sapiens
gggctggctacatcc

SEQ ID NO: 2009599 - DNA, 15 bp, Homo sapiens
ggctggctacatcca

SEQ ID NO: 2009600 - DNA, 15 bp, Homo sapiens
gctggctacatccat

SEQ ID NO: 2009601 - DNA, 15 bp, Homo sapiens
ctggctacatccatc

SEQ ID NO: 2009602 - DNA, 15 bp, Homo sapiens
tggctacatccatcc

SEQ ID NO: 2009603 - DNA, 15 bp, Homo sapiens
ggctacatccatcca

SEQ ID NO: 2009604 - DNA, 15 bp, Homo sapiens
gctacatccatccat

SEQ ID NO: 2009605 - DNA, 15 bp, Homo sapiens
ctacatccatccatg

SEQ ID NO: 2009606 - DNA, 15 bp, Homo sapiens
tacatccatccatgc

SEQ ID NO: 2009607 - DNA, 15 bp, Homo sapiens
acatccatccatgca

SEQ ID NO: 2009608 - DNA, 15 bp, Homo sapiens
catccatccatgcag

SEQ ID NO: 2009609 - DNA, 15 bp, Homo sapiens
atccatccatgcagt

SEQ ID NO: 2009610 - DNA, 15 bp, Homo sapiens
tccatccatgcagta

SEQ ID NO: 2009611 - DNA, 15 bp, Homo sapiens
ccatccatgcagtat

SEQ ID NO: 2009612 - DNA, 15 bp, Homo sapiens
catccatgcagtatg

SEQ ID NO: 2009613 - DNA, 15 bp, Homo sapiens
atccatgcagtatgg

SEQ ID NO: 2009614 - DNA, 15 bp, Homo sapiens
tccatgcagtatggt

SEQ ID NO: 2009615 - DNA, 15 bp, Homo sapiens
ccatgcagtatggtt

SEQ ID NO: 2009616 - DNA, 15 bp, Homo sapiens
catgcagtatggttt

SEQ ID NO: 2009617 - DNA, 15 bp, Homo sapiens
atgcagtatggtttt

SEQ ID NO: 2009618 - DNA, 15 bp, Homo sapiens
tgcagtatggttttt

SEQ ID NO: 2009619 - DNA, 15 bp, Homo sapiens
gcagtatggtttttg

SEQ ID NO: 2009620 - DNA, 15 bp, Homo sapiens
cagtatggtttttgt

SEQ ID NO: 2009621 - DNA, 15 bp, Homo sapiens
agtatggtttttgtt

SEQ ID NO: 2009622 - DNA, 15 bp, Homo sapiens
gtatggtttttgttg

SEQ ID NO: 2009623 - DNA, 15 bp, Homo sapiens
tatggtttttgttgg

SEQ ID NO: 2009624 - DNA, 15 bp, Homo sapiens
atggtttttgttggg

SEQ ID NO: 2009625 - DNA, 15 bp, Homo sapiens
tggtttttgttgggt

SEQ ID NO: 2009626 - DNA, 15 bp, Homo sapiens
ggtttttgttgggtg

SEQ ID NO: 2009627 - DNA, 15 bp, Homo sapiens
gtttttgttgggtga

SEQ ID NO: 2009628 - DNA, 15 bp, Homo sapiens
tttttgttgggtgac

SEQ ID NO: 2009629 - DNA, 15 bp, Homo sapiens
ttttgttgggtgacc

SEQ ID NO: 2009630 - DNA, 15 bp, Homo sapiens
tttgttgggtgaccc

SEQ ID NO: 2009631 - DNA, 15 bp, Homo sapiens
ttgttgggtgaccct

SEQ ID NO: 2009632 - DNA, 15 bp, Homo sapiens
tgttgggtgaccctc

SEQ ID NO: 2009633 - DNA, 15 bp, Homo sapiens
gttgggtgaccctct

SEQ ID NO: 2009634 - DNA, 15 bp, Homo sapiens
ttgggtgaccctctc

SEQ ID NO: 2009635 - DNA, 15 bp, Homo sapiens
tgggtgaccctctcc

SEQ ID NO: 2009636 - DNA, 15 bp, Homo sapiens
gggtgaccctctcca

SEQ ID NO: 2009637 - DNA, 15 bp, Homo sapiens
ggtgaccctctccac

SEQ ID NO: 2009638 - DNA, 15 bp, Homo sapiens
gtgaccctctccaca

SEQ ID NO: 2009639 - DNA, 15 bp, Homo sapiens
tgaccctctccacac

SEQ ID NO: 2009640 - DNA, 15 bp, Homo sapiens
gaccctctccacaca

SEQ ID NO: 2009641 - DNA, 15 bp, Homo sapiens
accctctccacacaa

SEQ ID NO: 2009642 - DNA, 15 bp, Homo sapiens
ccctctccacacaac

SEQ ID NO: 2009643 - DNA, 15 bp, Homo sapiens
cctctccacacaacc

SEQ ID NO: 2009644 - DNA, 15 bp, Homo sapiens
ctctccacacaacct

SEQ ID NO: 2009645 - DNA, 15 bp, Homo sapiens
tctccacacaaccta

SEQ ID NO: 2009646 - DNA, 15 bp, Homo sapiens
ctccacacaacctac

SEQ ID NO: 2009647 - DNA, 15 bp, Homo sapiens
tccacacaacctact

SEQ ID NO: 2009648 - DNA, 15 bp, Homo sapiens
ccacacaacctactc

SEQ ID NO: 2009649 - DNA, 15 bp, Homo sapiens
cacacaacctactct

SEQ ID NO: 2009650 - DNA, 15 bp, Homo sapiens
acacaacctactctg

SEQ ID NO: 2009651 - DNA, 15 bp, Homo sapiens
cacaacctactctgt

SEQ ID NO: 2009652 - DNA, 15 bp, Homo sapiens
acaacctactctgtg

SEQ ID NO: 2009653 - DNA, 15 bp, Homo sapiens
caacctactctgtgt

SEQ ID NO: 2009654 - DNA, 15 bp, Homo sapiens
aacctactctgtgtc

SEQ ID NO: 2009655 - DNA, 15 bp, Homo sapiens
acctactctgtgtct

SEQ ID NO: 2009656 - DNA, 15 bp, Homo sapiens
cctactctgtgtctg

SEQ ID NO: 2009657 - DNA, 15 bp, Homo sapiens
ctactctgtgtctgc

SEQ ID NO: 2009658 - DNA, 15 bp, Homo sapiens
tactctgtgtctgct

SEQ ID NO: 2009659 - DNA, 15 bp, Homo sapiens
actctgtgtctgctt

SEQ ID NO: 2009660 - DNA, 15 bp, Homo sapiens
ctctgtgtctgcttt

SEQ ID NO: 2009661 - DNA, 15 bp, Homo sapiens
tctgtgtctgctttc

SEQ ID NO: 2009662 - DNA, 15 bp, Homo sapiens
ctgtgtctgctttct

SEQ ID NO: 2009663 - DNA, 15 bp, Homo sapiens
tgtgtctgctttctg

SEQ ID NO: 2009664 - DNA, 15 bp, Homo sapiens
gtgtctgctttctgc

SEQ ID NO: 2009665 - DNA, 15 bp, Homo sapiens
tgtctgctttctgct

SEQ ID NO: 2009666 - DNA, 15 bp, Homo sapiens
gtctgctttctgcta

SEQ ID NO: 2009667 - DNA, 15 bp, Homo sapiens
tctgctttctgctaa

SEQ ID NO: 2009668 - DNA, 15 bp, Homo sapiens
ctgctttctgctaac

SEQ ID NO: 2009669 - DNA, 15 bp, Homo sapiens
tgctttctgctaact

SEQ ID NO: 2009670 - DNA, 15 bp, Homo sapiens
gctttctgctaactg

SEQ ID NO: 2009671 - DNA, 15 bp, Homo sapiens
ctttctgctaactgc

SEQ ID NO: 2009672 - DNA, 15 bp, Homo sapiens
tttctgctaactgct

SEQ ID NO: 2009673 - DNA, 15 bp, Homo sapiens
ttctgctaactgctt

SEQ ID NO: 2009674 - DNA, 15 bp, Homo sapiens
tctgctaactgcttc

SEQ ID NO: 2009675 - DNA, 15 bp, Homo sapiens
ctgctaactgcttcc

SEQ ID NO: 2009676 - DNA, 15 bp, Homo sapiens
tgctaactgcttcct

SEQ ID NO: 2009677 - DNA, 15 bp, Homo sapiens
gctaactgcttcctg

SEQ ID NO: 2009678 - DNA, 15 bp, Homo sapiens
ctaactgcttcctgc

SEQ ID NO: 2009679 - DNA, 15 bp, Homo sapiens
taactgcttcctgca

SEQ ID NO: 2009680 - DNA, 15 bp, Homo sapiens
aactgcttcctgcac

SEQ ID NO: 2009681 - DNA, 15 bp, Homo sapiens
actgcttcctgcact

SEQ ID NO: 2009682 - DNA, 15 bp, Homo sapiens
ctgcttcctgcactc

SEQ ID NO: 2009683 - DNA, 15 bp, Homo sapiens
tgcttcctgcactca

SEQ ID NO: 2009684 - DNA, 15 bp, Homo sapiens
gcttcctgcactcac

SEQ ID NO: 2009685 - DNA, 15 bp, Homo sapiens
cttcctgcactcact

SEQ ID NO: 2009686 - DNA, 15 bp, Homo sapiens
ttcctgcactcacta

SEQ ID NO: 2009687 - DNA, 15 bp, Homo sapiens
tcctgcactcactac

SEQ ID NO: 2009688 - DNA, 15 bp, Homo sapiens
cctgcactcactact

SEQ ID NO: 2009689 - DNA, 15 bp, Homo sapiens
ctgcactcactactt

SEQ ID NO: 2009690 - DNA, 15 bp, Homo sapiens
tgcactcactacttc

SEQ ID NO: 2009691 - DNA, 15 bp, Homo sapiens
gcactcactacttca

SEQ ID NO: 2009692 - DNA, 15 bp, Homo sapiens
cactcactacttcag

SEQ ID NO: 2009693 - DNA, 15 bp, Homo sapiens
actcactacttcagg

SEQ ID NO: 2009694 - DNA, 15 bp, Homo sapiens
ctcactacttcaggt

SEQ ID NO: 2009695 - DNA, 15 bp, Homo sapiens
tcactacttcaggtg

SEQ ID NO: 2009696 - DNA, 15 bp, Homo sapiens
cactacttcaggtgt

SEQ ID NO: 2009697 - DNA, 15 bp, Homo sapiens
actacttcaggtgta

SEQ ID NO: 2009698 - DNA, 15 bp, Homo sapiens
ctacttcaggtgtag

SEQ ID NO: 2009699 - DNA, 15 bp, Homo sapiens
tacttcaggtgtagt

SEQ ID NO: 2009700 - DNA, 15 bp, Homo sapiens
acttcaggtgtagta

SEQ ID NO: 2009701 - DNA, 15 bp, Homo sapiens
cttcaggtgtagtat

SEQ ID NO: 2009702 - DNA, 15 bp, Homo sapiens
ttcaggtgtagtatc

SEQ ID NO: 2009703 - DNA, 15 bp, Homo sapiens
tcaggtgtagtatca

SEQ ID NO: 2009704 - DNA, 15 bp, Homo sapiens
caggtgtagtatcac

SEQ ID NO: 2009705 - DNA, 15 bp, Homo sapiens
aggtgtagtatcaca

SEQ ID NO: 2009706 - DNA, 15 bp, Homo sapiens
ggtgtagtatcacac

SEQ ID NO: 2009707 - DNA, 15 bp, Homo sapiens
gtgtagtatcacact

SEQ ID NO: 2009708 - DNA, 15 bp, Homo sapiens
tgtagtatcacactg

SEQ ID NO: 2009709 - DNA, 15 bp, Homo sapiens
gtagtatcacactgt

SEQ ID NO: 2009710 - DNA, 15 bp, Homo sapiens
tagtatcacactgtc

SEQ ID NO: 2009711 - DNA, 15 bp, Homo sapiens
agtatcacactgtct

SEQ ID NO: 2009712 - DNA, 15 bp, Homo sapiens
gtatcacactgtctc

SEQ ID NO: 2009713 - DNA, 15 bp, Homo sapiens
tatcacactgtctct

SEQ ID NO: 2009714 - DNA, 15 bp, Homo sapiens
atcacactgtctctt

SEQ ID NO: 2009715 - DNA, 15 bp, Homo sapiens
tcacactgtctctta

SEQ ID NO: 2009716 - DNA, 15 bp, Homo sapiens
cacactgtctcttaa

SEQ ID NO: 2009717 - DNA, 15 bp, Homo sapiens
acactgtctcttaag

SEQ ID NO: 2009718 - DNA, 15 bp, Homo sapiens
cactgtctcttaaga

SEQ ID NO: 2009719 - DNA, 15 bp, Homo sapiens
actgtctcttaagag

SEQ ID NO: 2009720 - DNA, 15 bp, Homo sapiens
ctgtctcttaagagt

SEQ ID NO: 2009721 - DNA, 15 bp, Homo sapiens
tgtctcttaagagtt

SEQ ID NO: 2009722 - DNA, 15 bp, Homo sapiens
gtctcttaagagttt

SEQ ID NO: 2009723 - DNA, 15 bp, Homo sapiens
tctcttaagagtttc

SEQ ID NO: 2009724 - DNA, 15 bp, Homo sapiens
ctcttaagagtttcc

SEQ ID NO: 2009725 - DNA, 15 bp, Homo sapiens
tcttaagagtttcct

SEQ ID NO: 2009726 - DNA, 15 bp, Homo sapiens
cttaagagtttcctt

SEQ ID NO: 2009727 - DNA, 15 bp, Homo sapiens
ttaagagtttcctta

SEQ ID NO: 2009728 - DNA, 15 bp, Homo sapiens
taagagtttccttaa

SEQ ID NO: 2009729 - DNA, 15 bp, Homo sapiens
aagagtttccttaaa

SEQ ID NO: 2009730 - DNA, 15 bp, Homo sapiens
agagtttccttaaaa

SEQ ID NO: 2009731 - DNA, 15 bp, Homo sapiens
gagtttccttaaaac

SEQ ID NO: 2009732 - DNA, 15 bp, Homo sapiens
agtttccttaaaacc

SEQ ID NO: 2009733 - DNA, 15 bp, Homo sapiens
gtttccttaaaacct

SEQ ID NO: 2009734 - DNA, 15 bp, Homo sapiens
tttccttaaaacctg

SEQ ID NO: 2009735 - DNA, 15 bp, Homo sapiens
ttccttaaaacctgc

SEQ ID NO: 2009736 - DNA, 15 bp, Homo sapiens
tccttaaaacctgcc

SEQ ID NO: 2009737 - DNA, 15 bp, Homo sapiens
ccttaaaacctgcct

SEQ ID NO: 2009738 - DNA, 15 bp, Homo sapiens
cttaaaacctgcctt

SEQ ID NO: 2009739 - DNA, 15 bp, Homo sapiens
ttaaaacctgccttc

SEQ ID NO: 2009740 - DNA, 15 bp, Homo sapiens
taaaacctgccttct

SEQ ID NO: 2009741 - DNA, 15 bp, Homo sapiens
aaaacctgccttctc

SEQ ID NO: 2009742 - DNA, 15 bp, Homo sapiens
aaacctgccttctcc

SEQ ID NO: 2009743 - DNA, 15 bp, Homo sapiens
aacctgccttctcct

SEQ ID NO: 2009744 - DNA, 15 bp, Homo sapiens
acctgccttctcctt

SEQ ID NO: 2009745 - DNA, 15 bp, Homo sapiens
cctgccttctccttt

SEQ ID NO: 2009746 - DNA, 15 bp, Homo sapiens
ctgccttctccttta

SEQ ID NO: 2009747 - DNA, 15 bp, Homo sapiens
tgccttctcctttat

SEQ ID NO: 2009748 - DNA, 15 bp, Homo sapiens
gccttctcctttata

SEQ ID NO: 2009749 - DNA, 15 bp, Homo sapiens
ccttctcctttatac

SEQ ID NO: 2009750 - DNA, 15 bp, Homo sapiens
cttctcctttataca

SEQ ID NO: 2009751 - DNA, 15 bp, Homo sapiens
ttctcctttatacat

SEQ ID NO: 2009752 - DNA, 15 bp, Homo sapiens
tctcctttatacata

SEQ ID NO: 2009753 - DNA, 15 bp, Homo sapiens
ctcctttatacataa

SEQ ID NO: 2009754 - DNA, 15 bp, Homo sapiens
tcctttatacataat

SEQ ID NO: 2009755 - DNA, 15 bp, Homo sapiens
cctttatacataatc

SEQ ID NO: 2009756 - DNA, 15 bp, Homo sapiens
ctttatacataatct

SEQ ID NO: 2009757 - DNA, 15 bp, Homo sapiens
tttatacataatctc

SEQ ID NO: 2009758 - DNA, 15 bp, Homo sapiens
ttatacataatctct

SEQ ID NO: 2009759 - DNA, 15 bp, Homo sapiens
tatacataatctcta

SEQ ID NO: 2009760 - DNA, 15 bp, Homo sapiens
atacataatctctaa

SEQ ID NO: 2009761 - DNA, 15 bp, Homo sapiens
tacataatctctaat

SEQ ID NO: 2009762 - DNA, 15 bp, Homo sapiens
acataatctctaata

SEQ ID NO: 2009763 - DNA, 15 bp, Homo sapiens
cataatctctaatat

SEQ ID NO: 2009764 - DNA, 15 bp, Homo sapiens
ataatctctaatatc

SEQ ID NO: 2009765 - DNA, 15 bp, Homo sapiens
taatctctaatatct

SEQ ID NO: 2009766 - DNA, 15 bp, Homo sapiens
aatctctaatatctc

SEQ ID NO: 2009767 - DNA, 15 bp, Homo sapiens
atctctaatatctca

SEQ ID NO: 2009768 - DNA, 15 bp, Homo sapiens
tctctaatatctcag

SEQ ID NO: 2009769 - DNA, 15 bp, Homo sapiens
ctctaatatctcagt

SEQ ID NO: 2009770 - DNA, 15 bp, Homo sapiens
tctaatatctcagtt

SEQ ID NO: 2009771 - DNA, 15 bp, Homo sapiens
ctaatatctcagttt

SEQ ID NO: 2009772 - DNA, 15 bp, Homo sapiens
taatatctcagtttg

SEQ ID NO: 2009773 - DNA, 15 bp, Homo sapiens
aatatctcagtttga

SEQ ID NO: 2009774 - DNA, 15 bp, Homo sapiens
atatctcagtttgaa

SEQ ID NO: 2009775 - DNA, 15 bp, Homo sapiens
tatctcagtttgaat

SEQ ID NO: 2009776 - DNA, 15 bp, Homo sapiens
atctcagtttgaatt

SEQ ID NO: 2009777 - DNA, 15 bp, Homo sapiens
tctcagtttgaattt

SEQ ID NO: 2009778 - DNA, 15 bp, Homo sapiens
ctcagtttgaatttg

SEQ ID NO: 2009779 - DNA, 15 bp, Homo sapiens
tcagtttgaatttgc

SEQ ID NO: 2009780 - DNA, 15 bp, Homo sapiens
cagtttgaatttgcc

SEQ ID NO: 2009781 - DNA, 15 bp, Homo sapiens
agtttgaatttgcca

SEQ ID NO: 2009782 - DNA, 15 bp, Homo sapiens
gtttgaatttgccac

SEQ ID NO: 2009783 - DNA, 15 bp, Homo sapiens
tttgaatttgccacc

SEQ ID NO: 2009784 - DNA, 15 bp, Homo sapiens
ttgaatttgccacct

SEQ ID NO: 2009785 - DNA, 15 bp, Homo sapiens
tgaatttgccacctg

SEQ ID NO: 2009786 - DNA, 15 bp, Homo sapiens
gaatttgccacctgt

SEQ ID NO: 2009787 - DNA, 15 bp, Homo sapiens
aatttgccacctgtt

SEQ ID NO: 2009788 - DNA, 15 bp, Homo sapiens
atttgccacctgttt

SEQ ID NO: 2009789 - DNA, 15 bp, Homo sapiens
tttgccacctgtttc

SEQ ID NO: 2009790 - DNA, 15 bp, Homo sapiens
ttgccacctgtttcc

SEQ ID NO: 2009791 - DNA, 15 bp, Homo sapiens
tgccacctgtttcct

SEQ ID NO: 2009792 - DNA, 15 bp, Homo sapiens
gccacctgtttcctg

SEQ ID NO: 2009793 - DNA, 15 bp, Homo sapiens
ccacctgtttcctgc

SEQ ID NO: 2009794 - DNA, 15 bp, Homo sapiens
cacctgtttcctgct

SEQ ID NO: 2009795 - DNA, 15 bp, Homo sapiens
acctgtttcctgcta

SEQ ID NO: 2009796 - DNA, 15 bp, Homo sapiens
cctgtttcctgctag

SEQ ID NO: 2009797 - DNA, 15 bp, Homo sapiens
ctgtttcctgctaga

SEQ ID NO: 2009798 - DNA, 15 bp, Homo sapiens
tgtttcctgctagaa

SEQ ID NO: 2009799 - DNA, 15 bp, Homo sapiens
gtttcctgctagaac

SEQ ID NO: 2009800 - DNA, 15 bp, Homo sapiens
tttcctgctagaacc

SEQ ID NO: 2009801 - DNA, 15 bp, Homo sapiens
ttcctgctagaacct

SEQ ID NO: 2009802 - DNA, 15 bp, Homo sapiens
tcctgctagaacctt

SEQ ID NO: 2009803 - DNA, 15 bp, Homo sapiens
cctgctagaacctta

SEQ ID NO: 2009804 - DNA, 15 bp, Homo sapiens
ctgctagaaccttaa

SEQ ID NO: 2009805 - DNA, 15 bp, Homo sapiens
tgctagaaccttaat

SEQ ID NO: 2009806 - DNA, 15 bp, Homo sapiens
gctagaaccttaatt

SEQ ID NO: 2009807 - DNA, 15 bp, Homo sapiens
ctagaaccttaattg

SEQ ID NO: 2009808 - DNA, 15 bp, Homo sapiens
tagaaccttaattgc

SEQ ID NO: 2009809 - DNA, 15 bp, Homo sapiens
agaaccttaattgct

SEQ ID NO: 2009810 - DNA, 15 bp, Homo sapiens
gaaccttaattgcta

SEQ ID NO: 2009811 - DNA, 15 bp, Homo sapiens
aaccttaattgctac

SEQ ID NO: 2009812 - DNA, 15 bp, Homo sapiens
accttaattgctaca

SEQ ID NO: 2009813 - DNA, 15 bp, Homo sapiens
ccttaattgctacaa

SEQ ID NO: 2009814 - DNA, 15 bp, Homo sapiens
cttaattgctacaag

SEQ ID NO: 2009815 - DNA, 15 bp, Homo sapiens
ttaattgctacaagc

SEQ ID NO: 2009816 - DNA, 15 bp, Homo sapiens
taattgctacaagct

SEQ ID NO: 2009817 - DNA, 15 bp, Homo sapiens
aattgctacaagctg

SEQ ID NO: 2009818 - DNA, 15 bp, Homo sapiens
attgctacaagctgt

SEQ ID NO: 2009819 - DNA, 15 bp, Homo sapiens
ttgctacaagctgta

SEQ ID NO: 2009820 - DNA, 15 bp, Homo sapiens
tgctacaagctgtat

SEQ ID NO: 2009821 - DNA, 15 bp, Homo sapiens
gctacaagctgtatg

SEQ ID NO: 2009822 - DNA, 15 bp, Homo sapiens
ctacaagctgtatgt

SEQ ID NO: 2009823 - DNA, 15 bp, Homo sapiens
tacaagctgtatgta

SEQ ID NO: 2009824 - DNA, 15 bp, Homo sapiens
acaagctgtatgtac

SEQ ID NO: 2009825 - DNA, 15 bp, Homo sapiens
caagctgtatgtaca

SEQ ID NO: 2009826 - DNA, 15 bp, Homo sapiens
aagctgtatgtacac

SEQ ID NO: 2009827 - DNA, 15 bp, Homo sapiens
agctgtatgtacact

SEQ ID NO: 2009828 - DNA, 15 bp, Homo sapiens
gctgtatgtacactg

SEQ ID NO: 2009829 - DNA, 15 bp, Homo sapiens
ctgtatgtacactgt

SEQ ID NO: 2009830 - DNA, 15 bp, Homo sapiens
tgtatgtacactgta

SEQ ID NO: 2009831 - DNA, 15 bp, Homo sapiens
gtatgtacactgtat

SEQ ID NO: 2009832 - DNA, 15 bp, Homo sapiens
tatgtacactgtatc

SEQ ID NO: 2009833 - DNA, 15 bp, Homo sapiens
atgtacactgtatca

SEQ ID NO: 2009834 - DNA, 15 bp, Homo sapiens
tgtacactgtatcat

SEQ ID NO: 2009835 - DNA, 15 bp, Homo sapiens
gtacactgtatcatc

SEQ ID NO: 2009836 - DNA, 15 bp, Homo sapiens
tacactgtatcatct

SEQ ID NO: 2009837 - DNA, 15 bp, Homo sapiens
acactgtatcatctt

SEQ ID NO: 2009838 - DNA, 15 bp, Homo sapiens
cactgtatcatcttc

SEQ ID NO: 2009839 - DNA, 15 bp, Homo sapiens
actgtatcatcttcc

SEQ ID NO: 2009840 - DNA, 15 bp, Homo sapiens
ctgtatcatcttcct

SEQ ID NO: 2009841 - DNA, 15 bp, Homo sapiens
tgtatcatcttccta

SEQ ID NO: 2009842 - DNA, 15 bp, Homo sapiens
gtatcatcttcctaa

SEQ ID NO: 2009843 - DNA, 15 bp, Homo sapiens
tatcatcttcctaaa

SEQ ID NO: 2009844 - DNA, 15 bp, Homo sapiens
atcatcttcctaaaa

SEQ ID NO: 2009845 - DNA, 15 bp, Homo sapiens
tcatcttcctaaaat

SEQ ID NO: 2009846 - DNA, 15 bp, Homo sapiens
catcttcctaaaatc

SEQ ID NO: 2009847 - DNA, 15 bp, Homo sapiens
atcttcctaaaatca

SEQ ID NO: 2009848 - DNA, 15 bp, Homo sapiens
tcttcctaaaatcac

SEQ ID NO: 2009849 - DNA, 15 bp, Homo sapiens
cttcctaaaatcacc

SEQ ID NO: 2009850 - DNA, 15 bp, Homo sapiens
ttcctaaaatcacca

SEQ ID NO: 2009851 - DNA, 15 bp, Homo sapiens
tcctaaaatcaccag

SEQ ID NO: 2009852 - DNA, 15 bp, Homo sapiens
cctaaaatcaccagg

SEQ ID NO: 2009853 - DNA, 15 bp, Homo sapiens
ctaaaatcaccaggc

SEQ ID NO: 2009854 - DNA, 15 bp, Homo sapiens
taaaatcaccaggca

SEQ ID NO: 2009855 - DNA, 15 bp, Homo sapiens
aaaatcaccaggcat

SEQ ID NO: 2009856 - DNA, 15 bp, Homo sapiens
aaatcaccaggcatg

SEQ ID NO: 2009857 - DNA, 15 bp, Homo sapiens
aatcaccaggcatgg

SEQ ID NO: 2009858 - DNA, 15 bp, Homo sapiens
atcaccaggcatggt

SEQ ID NO: 2009859 - DNA, 15 bp, Homo sapiens
tcaccaggcatggtg

SEQ ID NO: 2009860 - DNA, 15 bp, Homo sapiens
caccaggcatggtgg

SEQ ID NO: 2009861 - DNA, 15 bp, Homo sapiens
accaggcatggtggg

SEQ ID NO: 2009862 - DNA, 15 bp, Homo sapiens
ccaggcatggtggga

SEQ ID NO: 2009863 - DNA, 15 bp, Homo sapiens
caggcatggtgggat

SEQ ID NO: 2009864 - DNA, 15 bp, Homo sapiens
aggcatggtgggatg

SEQ ID NO: 2009865 - DNA, 15 bp, Homo sapiens
ggcatggtgggatgt

SEQ ID NO: 2009866 - DNA, 15 bp, Homo sapiens
gcatggtgggatgtg

SEQ ID NO: 2009867 - DNA, 15 bp, Homo sapiens
catggtgggatgtga

SEQ ID NO: 2009868 - DNA, 15 bp, Homo sapiens
atggtgggatgtgag

SEQ ID NO: 2009869 - DNA, 15 bp, Homo sapiens
tggtgggatgtgagc

SEQ ID NO: 2009870 - DNA, 15 bp, Homo sapiens
ggtgggatgtgagct

SEQ ID NO: 2009871 - DNA, 15 bp, Homo sapiens
gtgggatgtgagcta

SEQ ID NO: 2009872 - DNA, 15 bp, Homo sapiens
tgggatgtgagctat

SEQ ID NO: 2009873 - DNA, 15 bp, Homo sapiens
gggatgtgagctata

SEQ ID NO: 2009874 - DNA, 15 bp, Homo sapiens
ggatgtgagctatag

SEQ ID NO: 2009875 - DNA, 15 bp, Homo sapiens
gatgtgagctatagt

SEQ ID NO: 2009876 - DNA, 15 bp, Homo sapiens
atgtgagctatagtc

SEQ ID NO: 2009877 - DNA, 15 bp, Homo sapiens
tgtgagctatagtcc

SEQ ID NO: 2009878 - DNA, 15 bp, Homo sapiens
gtgagctatagtccc

SEQ ID NO: 2009879 - DNA, 15 bp, Homo sapiens
tgagctatagtccca

SEQ ID NO: 2009880 - DNA, 15 bp, Homo sapiens
gagctatagtcccag

SEQ ID NO: 2009881 - DNA, 15 bp, Homo sapiens
agctatagtcccagc

SEQ ID NO: 2009882 - DNA, 15 bp, Homo sapiens
gctatagtcccagca

SEQ ID NO: 2009883 - DNA, 15 bp, Homo sapiens
ctatagtcccagcaa

SEQ ID NO: 2009884 - DNA, 15 bp, Homo sapiens
tatagtcccagcaac

SEQ ID NO: 2009885 - DNA, 15 bp, Homo sapiens
atagtcccagcaact

SEQ ID NO: 2009886 - DNA, 15 bp, Homo sapiens
tagtcccagcaactc

SEQ ID NO: 2009887 - DNA, 15 bp, Homo sapiens
agtcccagcaactca

SEQ ID NO: 2009888 - DNA, 15 bp, Homo sapiens
gtcccagcaactcag

SEQ ID NO: 2009889 - DNA, 15 bp, Homo sapiens
tcccagcaactcagg

SEQ ID NO: 2009890 - DNA, 15 bp, Homo sapiens
cccagcaactcagga

SEQ ID NO: 2009891 - DNA, 15 bp, Homo sapiens
ccagcaactcaggag

SEQ ID NO: 2009892 - DNA, 15 bp, Homo sapiens
cagcaactcaggagg

SEQ ID NO: 2009893 - DNA, 15 bp, Homo sapiens
agcaactcaggaggc

SEQ ID NO: 2009894 - DNA, 15 bp, Homo sapiens
gcaactcaggaggct

SEQ ID NO: 2009895 - DNA, 15 bp, Homo sapiens
caactcaggaggctg

SEQ ID NO: 2009896 - DNA, 15 bp, Homo sapiens
aactcaggaggctga

SEQ ID NO: 2009897 - DNA, 15 bp, Homo sapiens
actcaggaggctgat

SEQ ID NO: 2009898 - DNA, 15 bp, Homo sapiens
ctcaggaggctgatg

SEQ ID NO: 2009899 - DNA, 15 bp, Homo sapiens
tcaggaggctgatgt

SEQ ID NO: 2009900 - DNA, 15 bp, Homo sapiens
caggaggctgatgta

SEQ ID NO: 2009901 - DNA, 15 bp, Homo sapiens
aggaggctgatgtag

SEQ ID NO: 2009902 - DNA, 15 bp, Homo sapiens
ggaggctgatgtagg

SEQ ID NO: 2009903 - DNA, 15 bp, Homo sapiens
gaggctgatgtagga

SEQ ID NO: 2009904 - DNA, 15 bp, Homo sapiens
aggctgatgtaggag

SEQ ID NO: 2009905 - DNA, 15 bp, Homo sapiens
ggctgatgtaggagg

SEQ ID NO: 2009906 - DNA, 15 bp, Homo sapiens
gctgatgtaggagga

SEQ ID NO: 2009907 - DNA, 15 bp, Homo sapiens
ctgatgtaggaggat

SEQ ID NO: 2009908 - DNA, 15 bp, Homo sapiens
tgatgtaggaggatt

SEQ ID NO: 2009909 - DNA, 15 bp, Homo sapiens
gatgtaggaggattg

SEQ ID NO: 2009910 - DNA, 15 bp, Homo sapiens
atgtaggaggattgc

SEQ ID NO: 2009911 - DNA, 15 bp, Homo sapiens
tgtaggaggattgct

SEQ ID NO: 2009912 - DNA, 15 bp, Homo sapiens
gtaggaggattgctt

SEQ ID NO: 2009913 - DNA, 15 bp, Homo sapiens
taggaggattgcttg

SEQ ID NO: 2009914 - DNA, 15 bp, Homo sapiens
ttgcttgagcccaga

SEQ ID NO: 2009915 - DNA, 15 bp, Homo sapiens
tgcttgagcccagaa

SEQ ID NO: 2009916 - DNA, 15 bp, Homo sapiens
gcttgagcccagaaa

SEQ ID NO: 2009917 - DNA, 15 bp, Homo sapiens
cttgagcccagaaat

SEQ ID NO: 2009918 - DNA, 15 bp, Homo sapiens
ttgagcccagaaatt

SEQ ID NO: 2009919 - DNA, 15 bp, Homo sapiens
tgagcccagaaattc

SEQ ID NO: 2009920 - DNA, 15 bp, Homo sapiens
gagcccagaaattca

SEQ ID NO: 2009921 - DNA, 15 bp, Homo sapiens
agcccagaaattcaa

SEQ ID NO: 2009922 - DNA, 15 bp, Homo sapiens
gcccagaaattcaag

SEQ ID NO: 2009923 - DNA, 15 bp, Homo sapiens
cccagaaattcaagg

SEQ ID NO: 2009924 - DNA, 15 bp, Homo sapiens
ccagaaattcaaggc

SEQ ID NO: 2009925 - DNA, 15 bp, Homo sapiens
cagaaattcaaggct

SEQ ID NO: 2009926 - DNA, 15 bp, Homo sapiens
agaaattcaaggcta

SEQ ID NO: 2009927 - DNA, 15 bp, Homo sapiens
gaaattcaaggctac

SEQ ID NO: 2009928 - DNA, 15 bp, Homo sapiens
aaattcaaggctaca

SEQ ID NO: 2009929 - DNA, 15 bp, Homo sapiens
aattcaaggctacag

SEQ ID NO: 2009930 - DNA, 15 bp, Homo sapiens
attcaaggctacagt

SEQ ID NO: 2009931 - DNA, 15 bp, Homo sapiens
ttcaaggctacagtg

SEQ ID NO: 2009932 - DNA, 15 bp, Homo sapiens
tacagtgagctatgg

SEQ ID NO: 2009933 - DNA, 15 bp, Homo sapiens
acagtgagctatgga

SEQ ID NO: 2009934 - DNA, 15 bp, Homo sapiens
cagtgagctatggat

SEQ ID NO: 2009935 - DNA, 15 bp, Homo sapiens
agtgagctatggata

SEQ ID NO: 2009936 - DNA, 15 bp, Homo sapiens
gtgagctatggatac

SEQ ID NO: 2009937 - DNA, 15 bp, Homo sapiens
tgagctatggatacc

SEQ ID NO: 2009938 - DNA, 15 bp, Homo sapiens
gagctatggataccc

SEQ ID NO: 2009939 - DNA, 15 bp, Homo sapiens
agctatggataccct

SEQ ID NO: 2009940 - DNA, 15 bp, Homo sapiens
gctatggatacccta

SEQ ID NO: 2009941 - DNA, 15 bp, Homo sapiens
ctatggataccctaa

SEQ ID NO: 2009942 - DNA, 15 bp, Homo sapiens
tatggataccctaac

SEQ ID NO: 2009943 - DNA, 15 bp, Homo sapiens
atggataccctaacc

SEQ ID NO: 2009944 - DNA, 15 bp, Homo sapiens
tggataccctaacct

SEQ ID NO: 2009945 - DNA, 15 bp, Homo sapiens
ggataccctaacctg

SEQ ID NO: 2009946 - DNA, 15 bp, Homo sapiens
gataccctaacctga

SEQ ID NO: 2009947 - DNA, 15 bp, Homo sapiens
ataccctaacctgag

SEQ ID NO: 2009948 - DNA, 15 bp, Homo sapiens
taccctaacctgagc

SEQ ID NO: 2009949 - DNA, 15 bp, Homo sapiens
accctaacctgagca

SEQ ID NO: 2009950 - DNA, 15 bp, Homo sapiens
ccctaacctgagcaa

SEQ ID NO: 2009951 - DNA, 15 bp, Homo sapiens
cctaacctgagcaac

SEQ ID NO: 2009952 - DNA, 15 bp, Homo sapiens
ctaacctgagcaaca

SEQ ID NO: 2009953 - DNA, 15 bp, Homo sapiens
taacctgagcaacag

SEQ ID NO: 2009954 - DNA, 15 bp, Homo sapiens
aacctgagcaacaga

SEQ ID NO: 2009955 - DNA, 15 bp, Homo sapiens
acctgagcaacagag

SEQ ID NO: 2009956 - DNA, 15 bp, Homo sapiens
cctgagcaacagagc

SEQ ID NO: 2009957 - DNA, 15 bp, Homo sapiens
ctgagcaacagagca

SEQ ID NO: 2009958 - DNA, 15 bp, Homo sapiens
tgagcaacagagcaa

SEQ ID NO: 2009959 - DNA, 15 bp, Homo sapiens
gagcaacagagcaag

SEQ ID NO: 2009960 - DNA, 15 bp, Homo sapiens
agcaacagagcaaga

SEQ ID NO: 2009961 - DNA, 15 bp, Homo sapiens
aacagagcaagacct

SEQ ID NO: 2009962 - DNA, 15 bp, Homo sapiens
caagaccttgtctct

SEQ ID NO: 2009963 - DNA, 15 bp, Homo sapiens
aagaccttgtctcta

SEQ ID NO: 2009964 - DNA, 15 bp, Homo sapiens
agaccttgtctctaa

SEQ ID NO: 2009965 - DNA, 15 bp, Homo sapiens
gaccttgtctctaaa

SEQ ID NO: 2009966 - DNA, 15 bp, Homo sapiens
accttgtctctaaaa

SEQ ID NO: 2009967 - DNA, 15 bp, Homo sapiens
ccttgtctctaaaaa

SEQ ID NO: 2009968 - DNA, 15 bp, Homo sapiens
cttgtctctaaaaaa

SEQ ID NO: 2009969 - DNA, 15 bp, Homo sapiens
ttgtctctaaaaaac

SEQ ID NO: 2009970 - DNA, 15 bp, Homo sapiens
tgtctctaaaaaaca

SEQ ID NO: 2009971 - DNA, 15 bp, Homo sapiens
gtctctaaaaaacaa

SEQ ID NO: 2009972 - DNA, 15 bp, Homo sapiens
tctctaaaaaacaaa

SEQ ID NO: 2009973 - DNA, 15 bp, Homo sapiens
ctctaaaaaacaaaa

SEQ ID NO: 2009974 - DNA, 15 bp, Homo sapiens
tctaaaaaacaaaaa

SEQ ID NO: 2009975 - DNA, 15 bp, Homo sapiens
ctaaaaaacaaaaat

SEQ ID NO: 2009976 - DNA, 15 bp, Homo sapiens
taaaaaacaaaaatt

SEQ ID NO: 2009977 - DNA, 15 bp, Homo sapiens
aaaaaacaaaaatta

SEQ ID NO: 2009978 - DNA, 15 bp, Homo sapiens
aaaacaaaaattaag

SEQ ID NO: 2009979 - DNA, 15 bp, Homo sapiens
aaacaaaaattaagt

SEQ ID NO: 2009980 - DNA, 15 bp, Homo sapiens
aacaaaaattaagtt

SEQ ID NO: 2009981 - DNA, 15 bp, Homo sapiens
acaaaaattaagtta

SEQ ID NO: 2009982 - DNA, 15 bp, Homo sapiens
caaaaattaagttaa

SEQ ID NO: 2009983 - DNA, 15 bp, Homo sapiens
aaaaattaagttaaa

SEQ ID NO: 2009984 - DNA, 15 bp, Homo sapiens
aaaattaagttaaaa

SEQ ID NO: 2009985 - DNA, 15 bp, Homo sapiens
aaattaagttaaaaa

SEQ ID NO: 2009986 - DNA, 15 bp, Homo sapiens
aattaagttaaaaaa

SEQ ID NO: 2009987 - DNA, 15 bp, Homo sapiens
attaagttaaaaaat

SEQ ID NO: 2009988 - DNA, 15 bp, Homo sapiens
ttaagttaaaaaatt

SEQ ID NO: 2009989 - DNA, 15 bp, Homo sapiens
taagttaaaaaattg

SEQ ID NO: 2009990 - DNA, 15 bp, Homo sapiens
aagttaaaaaattgt

SEQ ID NO: 2009991 - DNA, 15 bp, Homo sapiens
agttaaaaaattgtg

SEQ ID NO: 2009992 - DNA, 15 bp, Homo sapiens
gttaaaaaattgtgt

SEQ ID NO: 2009993 - DNA, 15 bp, Homo sapiens
ttaaaaaattgtgtc

SEQ ID NO: 2009994 - DNA, 15 bp, Homo sapiens
taaaaaattgtgtct

SEQ ID NO: 2009995 - DNA, 15 bp, Homo sapiens
aaaaaattgtgtctt

SEQ ID NO: 2009996 - DNA, 15 bp, Homo sapiens
aaaaattgtgtcttt

SEQ ID NO: 2009997 - DNA, 15 bp, Homo sapiens
aaaattgtgtctttc

SEQ ID NO: 2009998 - DNA, 15 bp, Homo sapiens
aaattgtgtctttct

SEQ ID NO: 2009999 - DNA, 15 bp, Homo sapiens
aattgtgtctttctt

SEQ ID NO: 2010000 - DNA, 15 bp, Homo sapiens
attgtgtctttcttt

SEQ ID NO: 2010001 - DNA, 15 bp, Homo sapiens
ttgtgtctttcttta

SEQ ID NO: 2010002 - DNA, 15 bp, Homo sapiens
tgtgtctttctttat

SEQ ID NO: 2010003 - DNA, 15 bp, Homo sapiens
gtgtctttctttata

SEQ ID NO: 2010004 - DNA, 15 bp, Homo sapiens
tgtctttctttatat

SEQ ID NO: 2010005 - DNA, 15 bp, Homo sapiens
gtctttctttatata

SEQ ID NO: 2010006 - DNA, 15 bp, Homo sapiens
tctttctttatatac

SEQ ID NO: 2010007 - DNA, 15 bp, Homo sapiens
ctttctttatatact

SEQ ID NO: 2010008 - DNA, 15 bp, Homo sapiens
tttctttatatactt

SEQ ID NO: 2010009 - DNA, 15 bp, Homo sapiens
ttctttatatactta

SEQ ID NO: 2010010 - DNA, 15 bp, Homo sapiens
tctttatatacttac

SEQ ID NO: 2010011 - DNA, 15 bp, Homo sapiens
ctttatatacttaca

SEQ ID NO: 2010012 - DNA, 15 bp, Homo sapiens
tttatatacttacat

SEQ ID NO: 2010013 - DNA, 15 bp, Homo sapiens
ttatatacttacatt

SEQ ID NO: 2010014 - DNA, 15 bp, Homo sapiens
tatatacttacatta

SEQ ID NO: 2010015 - DNA, 15 bp, Homo sapiens
atatacttacattac

SEQ ID NO: 2010016 - DNA, 15 bp, Homo sapiens
tatacttacattact

SEQ ID NO: 2010017 - DNA, 15 bp, Homo sapiens
atacttacattactt

SEQ ID NO: 2010018 - DNA, 15 bp, Homo sapiens
tacttacattacttt

SEQ ID NO: 2010019 - DNA, 15 bp, Homo sapiens
acttacattactttc

SEQ ID NO: 2010020 - DNA, 15 bp, Homo sapiens
cttacattactttcc

SEQ ID NO: 2010021 - DNA, 15 bp, Homo sapiens
ttacattactttccg

SEQ ID NO: 2010022 - DNA, 15 bp, Homo sapiens
tacattactttccgt

SEQ ID NO: 2010023 - DNA, 15 bp, Homo sapiens
acattactttccgtt

SEQ ID NO: 2010024 - DNA, 15 bp, Homo sapiens
cattactttccgttg

SEQ ID NO: 2010025 - DNA, 15 bp, Homo sapiens
attactttccgttga

SEQ ID NO: 2010026 - DNA, 15 bp, Homo sapiens
ttactttccgttgat

SEQ ID NO: 2010027 - DNA, 15 bp, Homo sapiens
tactttccgttgatc

SEQ ID NO: 2010028 - DNA, 15 bp, Homo sapiens
actttccgttgatct

SEQ ID NO: 2010029 - DNA, 15 bp, Homo sapiens
ctttccgttgatctg

SEQ ID NO: 2010030 - DNA, 15 bp, Homo sapiens
tttccgttgatctgt

SEQ ID NO: 2010031 - DNA, 15 bp, Homo sapiens
ttccgttgatctgtt

SEQ ID NO: 2010032 - DNA, 15 bp, Homo sapiens
tccgttgatctgttt

SEQ ID NO: 2010033 - DNA, 15 bp, Homo sapiens
ccgttgatctgtttt

SEQ ID NO: 2010034 - DNA, 15 bp, Homo sapiens
cgttgatctgttttt

SEQ ID NO: 2010035 - DNA, 15 bp, Homo sapiens
gttgatctgtttttg

SEQ ID NO: 2010036 - DNA, 15 bp, Homo sapiens
ttgatctgtttttga

SEQ ID NO: 2010037 - DNA, 15 bp, Homo sapiens
tgatctgtttttgaa

SEQ ID NO: 2010038 - DNA, 15 bp, Homo sapiens
gatctgtttttgaaa

SEQ ID NO: 2010039 - DNA, 15 bp, Homo sapiens
atctgtttttgaaat

SEQ ID NO: 2010040 - DNA, 15 bp, Homo sapiens
tctgtttttgaaatg

SEQ ID NO: 2010041 - DNA, 15 bp, Homo sapiens
ctgtttttgaaatgt

SEQ ID NO: 2010042 - DNA, 15 bp, Homo sapiens
gtttttgaaatgttt

SEQ ID NO: 2010043 - DNA, 15 bp, Homo sapiens
tttttgaaatgtttc

SEQ ID NO: 2010044 - DNA, 15 bp, Homo sapiens
ttttgaaatgtttcc

SEQ ID NO: 2010045 - DNA, 15 bp, Homo sapiens
tttgaaatgtttcca

SEQ ID NO: 2010046 - DNA, 15 bp, Homo sapiens
ttgaaatgtttccag

SEQ ID NO: 2010047 - DNA, 15 bp, Homo sapiens
tgaaatgtttccaga

SEQ ID NO: 2010048 - DNA, 15 bp, Homo sapiens
gaaatgtttccagaa

SEQ ID NO: 2010049 - DNA, 15 bp, Homo sapiens
aaatgtttccagaac

SEQ ID NO: 2010050 - DNA, 15 bp, Homo sapiens
aatgtttccagaact

SEQ ID NO: 2010051 - DNA, 15 bp, Homo sapiens
atgtttccagaactg

SEQ ID NO: 2010052 - DNA, 15 bp, Homo sapiens
tgtttccagaactgt

SEQ ID NO: 2010053 - DNA, 15 bp, Homo sapiens
gtttccagaactgtc

SEQ ID NO: 2010054 - DNA, 15 bp, Homo sapiens
tttccagaactgtct

SEQ ID NO: 2010055 - DNA, 15 bp, Homo sapiens
ttccagaactgtctt

SEQ ID NO: 2010056 - DNA, 15 bp, Homo sapiens
tccagaactgtcttc

SEQ ID NO: 2010057 - DNA, 15 bp, Homo sapiens
ccagaactgtcttcc

SEQ ID NO: 2010058 - DNA, 15 bp, Homo sapiens
cagaactgtcttccc

SEQ ID NO: 2010059 - DNA, 15 bp, Homo sapiens
agaactgtcttccct

SEQ ID NO: 2010060 - DNA, 15 bp, Homo sapiens
gaactgtcttccctc

SEQ ID NO: 2010061 - DNA, 15 bp, Homo sapiens
aactgtcttccctca

SEQ ID NO: 2010062 - DNA, 15 bp, Homo sapiens
actgtcttccctcac

SEQ ID NO: 2010063 - DNA, 15 bp, Homo sapiens
ctgtcttccctcacg

SEQ ID NO: 2010064 - DNA, 15 bp, Homo sapiens
tgtcttccctcacgt

SEQ ID NO: 2010065 - DNA, 15 bp, Homo sapiens
gtcttccctcacgta

SEQ ID NO: 2010066 - DNA, 15 bp, Homo sapiens
tcttccctcacgtat

SEQ ID NO: 2010067 - DNA, 15 bp, Homo sapiens
cttccctcacgtatt

SEQ ID NO: 2010068 - DNA, 15 bp, Homo sapiens
ttccctcacgtattg

SEQ ID NO: 2010069 - DNA, 15 bp, Homo sapiens
tccctcacgtattga

SEQ ID NO: 2010070 - DNA, 15 bp, Homo sapiens
ccctcacgtattgat

SEQ ID NO: 2010071 - DNA, 15 bp, Homo sapiens
cctcacgtattgatt

SEQ ID NO: 2010072 - DNA, 15 bp, Homo sapiens
ctcacgtattgattc

SEQ ID NO: 2010073 - DNA, 15 bp, Homo sapiens
tcacgtattgattct

SEQ ID NO: 2010074 - DNA, 15 bp, Homo sapiens
cacgtattgattctt

SEQ ID NO: 2010075 - DNA, 15 bp, Homo sapiens
acgtattgattcttc

SEQ ID NO: 2010076 - DNA, 15 bp, Homo sapiens
cgtattgattcttcc

SEQ ID NO: 2010077 - DNA, 15 bp, Homo sapiens
gtattgattcttcca

SEQ ID NO: 2010078 - DNA, 15 bp, Homo sapiens
tattgattcttccaa

SEQ ID NO: 2010079 - DNA, 15 bp, Homo sapiens
attgattcttccaaa

SEQ ID NO: 2010080 - DNA, 15 bp, Homo sapiens
ttgattcttccaaaa

SEQ ID NO: 2010081 - DNA, 15 bp, Homo sapiens
tgattcttccaaaat

SEQ ID NO: 2010082 - DNA, 15 bp, Homo sapiens
gattcttccaaaatt

SEQ ID NO: 2010083 - DNA, 15 bp, Homo sapiens
attcttccaaaattc

SEQ ID NO: 2010084 - DNA, 15 bp, Homo sapiens
ttcttccaaaattct

SEQ ID NO: 2010085 - DNA, 15 bp, Homo sapiens
tcttccaaaattctt

SEQ ID NO: 2010086 - DNA, 15 bp, Homo sapiens
cttccaaaattctta

SEQ ID NO: 2010087 - DNA, 15 bp, Homo sapiens
ttccaaaattcttaa

SEQ ID NO: 2010088 - DNA, 15 bp, Homo sapiens
tccaaaattcttaag

SEQ ID NO: 2010089 - DNA, 15 bp, Homo sapiens
ccaaaattcttaaga

SEQ ID NO: 2010090 - DNA, 15 bp, Homo sapiens
caaaattcttaagaa

SEQ ID NO: 2010091 - DNA, 15 bp, Homo sapiens
aaaattcttaagaaa

SEQ ID NO: 2010092 - DNA, 15 bp, Homo sapiens
aaattcttaagaaaa

SEQ ID NO: 2010093 - DNA, 15 bp, Homo sapiens
aattcttaagaaaat

SEQ ID NO: 2010094 - DNA, 15 bp, Homo sapiens
attcttaagaaaatg

SEQ ID NO: 2010095 - DNA, 15 bp, Homo sapiens
ttcttaagaaaatgg

SEQ ID NO: 2010096 - DNA, 15 bp, Homo sapiens
tcttaagaaaatgga

SEQ ID NO: 2010097 - DNA, 15 bp, Homo sapiens
cttaagaaaatggaa

SEQ ID NO: 2010098 - DNA, 15 bp, Homo sapiens
ttaagaaaatggaaa

SEQ ID NO: 2010099 - DNA, 15 bp, Homo sapiens
taagaaaatggaaaa

SEQ ID NO: 2010100 - DNA, 15 bp, Homo sapiens
aagaaaatggaaaaa

SEQ ID NO: 2010101 - DNA, 15 bp, Homo sapiens
agaaaatggaaaaaa

SEQ ID NO: 2010102 - DNA, 15 bp, Homo sapiens
gaaaatggaaaaaag

SEQ ID NO: 2010103 - DNA, 15 bp, Homo sapiens
aaaatggaaaaaagt

SEQ ID NO: 2010104 - DNA, 15 bp, Homo sapiens
aaatggaaaaaagta

SEQ ID NO: 2010105 - DNA, 15 bp, Homo sapiens
aatggaaaaaagtaa

SEQ ID NO: 2010106 - DNA, 15 bp, Homo sapiens
atggaaaaaagtaat

SEQ ID NO: 2010107 - DNA, 15 bp, Homo sapiens
tggaaaaaagtaatt

SEQ ID NO: 2010108 - DNA, 15 bp, Homo sapiens
ggaaaaaagtaattt

SEQ ID NO: 2010109 - DNA, 15 bp, Homo sapiens
gaaaaaagtaatttc

SEQ ID NO: 2010110 - DNA, 15 bp, Homo sapiens
aaaaaagtaatttct

SEQ ID NO: 2010111 - DNA, 15 bp, Homo sapiens
aaaaagtaatttctg

SEQ ID NO: 2010112 - DNA, 15 bp, Homo sapiens
aaaagtaatttctga

SEQ ID NO: 2010113 - DNA, 15 bp, Homo sapiens
aaagtaatttctgaa

SEQ ID NO: 2010114 - DNA, 15 bp, Homo sapiens
aagtaatttctgaaa

SEQ ID NO: 2010115 - DNA, 15 bp, Homo sapiens
agtaatttctgaaaa

SEQ ID NO: 2010116 - DNA, 15 bp, Homo sapiens
gtaatttctgaaaat

SEQ ID NO: 2010117 - DNA, 15 bp, Homo sapiens
taatttctgaaaatg

SEQ ID NO: 2010118 - DNA, 15 bp, Homo sapiens
aatttctgaaaatga

SEQ ID NO: 2010119 - DNA, 15 bp, Homo sapiens
atttctgaaaatgat

SEQ ID NO: 2010120 - DNA, 15 bp, Homo sapiens
tttctgaaaatgatg

SEQ ID NO: 2010121 - DNA, 15 bp, Homo sapiens
ttctgaaaatgatga

SEQ ID NO: 2010122 - DNA, 15 bp, Homo sapiens
tctgaaaatgatgag

SEQ ID NO: 2010123 - DNA, 15 bp, Homo sapiens
ctgaaaatgatgaga

SEQ ID NO: 2010124 - DNA, 15 bp, Homo sapiens
tgaaaatgatgagaa

SEQ ID NO: 2010125 - DNA, 15 bp, Homo sapiens
gaaaatgatgagaat

SEQ ID NO: 2010126 - DNA, 15 bp, Homo sapiens
aaaatgatgagaatg

SEQ ID NO: 2010127 - DNA, 15 bp, Homo sapiens
aaatgatgagaatga

SEQ ID NO: 2010128 - DNA, 15 bp, Homo sapiens
aatgatgagaatgat

SEQ ID NO: 2010129 - DNA, 15 bp, Homo sapiens
atgatgagaatgatc

SEQ ID NO: 2010130 - DNA, 15 bp, Homo sapiens
tgatgagaatgatca

SEQ ID NO: 2010131 - DNA, 15 bp, Homo sapiens
gatgagaatgatcat

SEQ ID NO: 2010132 - DNA, 15 bp, Homo sapiens
atgagaatgatcata

SEQ ID NO: 2010133 - DNA, 15 bp, Homo sapiens
tgagaatgatcataa

SEQ ID NO: 2010134 - DNA, 15 bp, Homo sapiens
gagaatgatcataaa

SEQ ID NO: 2010135 - DNA, 15 bp, Homo sapiens
agaatgatcataaat

SEQ ID NO: 2010136 - DNA, 15 bp, Homo sapiens
gaatgatcataaatt

SEQ ID NO: 2010137 - DNA, 15 bp, Homo sapiens
aatgatcataaattt

SEQ ID NO: 2010138 - DNA, 15 bp, Homo sapiens
atgatcataaatttc

SEQ ID NO: 2010139 - DNA, 15 bp, Homo sapiens
tgatcataaatttca

SEQ ID NO: 2010140 - DNA, 15 bp, Homo sapiens
gatcataaatttcat

SEQ ID NO: 2010141 - DNA, 15 bp, Homo sapiens
atcataaatttcata

SEQ ID NO: 2010142 - DNA, 15 bp, Homo sapiens
tcataaatttcatat

SEQ ID NO: 2010143 - DNA, 15 bp, Homo sapiens
cataaatttcatata

SEQ ID NO: 2010144 - DNA, 15 bp, Homo sapiens
ataaatttcatatag

SEQ ID NO: 2010145 - DNA, 15 bp, Homo sapiens
taaatttcatatagc

SEQ ID NO: 2010146 - DNA, 15 bp, Homo sapiens
aaatttcatatagca

SEQ ID NO: 2010147 - DNA, 15 bp, Homo sapiens
aatttcatatagcac

SEQ ID NO: 2010148 - DNA, 15 bp, Homo sapiens
atttcatatagcact

SEQ ID NO: 2010149 - DNA, 15 bp, Homo sapiens
tttcatatagcactt

SEQ ID NO: 2010150 - DNA, 15 bp, Homo sapiens
ttcatatagcacttt

SEQ ID NO: 2010151 - DNA, 15 bp, Homo sapiens
tcatatagcactttc

SEQ ID NO: 2010152 - DNA, 15 bp, Homo sapiens
catatagcactttct

SEQ ID NO: 2010153 - DNA, 15 bp, Homo sapiens
atatagcactttctt

SEQ ID NO: 2010154 - DNA, 15 bp, Homo sapiens
tatagcactttcttg

SEQ ID NO: 2010155 - DNA, 15 bp, Homo sapiens
atagcactttcttga

SEQ ID NO: 2010156 - DNA, 15 bp, Homo sapiens
tagcactttcttgag

SEQ ID NO: 2010157 - DNA, 15 bp, Homo sapiens
agcactttcttgaga

SEQ ID NO: 2010158 - DNA, 15 bp, Homo sapiens
gcactttcttgagaa

SEQ ID NO: 2010159 - DNA, 15 bp, Homo sapiens
cactttcttgagaat

SEQ ID NO: 2010160 - DNA, 15 bp, Homo sapiens
actttcttgagaatt

SEQ ID NO: 2010161 - DNA, 15 bp, Homo sapiens
ctttcttgagaattt

SEQ ID NO: 2010162 - DNA, 15 bp, Homo sapiens
tttcttgagaatttc

SEQ ID NO: 2010163 - DNA, 15 bp, Homo sapiens
ttcttgagaatttca

SEQ ID NO: 2010164 - DNA, 15 bp, Homo sapiens
tcttgagaatttcaa

SEQ ID NO: 2010165 - DNA, 15 bp, Homo sapiens
cttgagaatttcaaa

SEQ ID NO: 2010166 - DNA, 15 bp, Homo sapiens
ttgagaatttcaaat

SEQ ID NO: 2010167 - DNA, 15 bp, Homo sapiens
tgagaatttcaaatt

SEQ ID NO: 2010168 - DNA, 15 bp, Homo sapiens
gagaatttcaaattg

SEQ ID NO: 2010169 - DNA, 15 bp, Homo sapiens
agaatttcaaattgc

SEQ ID NO: 2010170 - DNA, 15 bp, Homo sapiens
gaatttcaaattgca

SEQ ID NO: 2010171 - DNA, 15 bp, Homo sapiens
aatttcaaattgcag

SEQ ID NO: 2010172 - DNA, 15 bp, Homo sapiens
atttcaaattgcagt

SEQ ID NO: 2010173 - DNA, 15 bp, Homo sapiens
tttcaaattgcagtt

SEQ ID NO: 2010174 - DNA, 15 bp, Homo sapiens
ttcaaattgcagttt

SEQ ID NO: 2010175 - DNA, 15 bp, Homo sapiens
tcaaattgcagtttt

SEQ ID NO: 2010176 - DNA, 15 bp, Homo sapiens
caaattgcagtttta

SEQ ID NO: 2010177 - DNA, 15 bp, Homo sapiens
aaattgcagttttaa

SEQ ID NO: 2010178 - DNA, 15 bp, Homo sapiens
aattgcagttttaat

SEQ ID NO: 2010179 - DNA, 15 bp, Homo sapiens
attgcagttttaata

SEQ ID NO: 2010180 - DNA, 15 bp, Homo sapiens
ttgcagttttaatat

SEQ ID NO: 2010181 - DNA, 15 bp, Homo sapiens
tgcagttttaatatt

SEQ ID NO: 2010182 - DNA, 15 bp, Homo sapiens
gcagttttaatattt

SEQ ID NO: 2010183 - DNA, 15 bp, Homo sapiens
cagttttaatatttt

SEQ ID NO: 2010184 - DNA, 15 bp, Homo sapiens
agttttaatatttta

SEQ ID NO: 2010185 - DNA, 15 bp, Homo sapiens
gttttaatattttac

SEQ ID NO: 2010186 - DNA, 15 bp, Homo sapiens
ttttaatattttact

SEQ ID NO: 2010187 - DNA, 15 bp, Homo sapiens
tttaatattttactt

SEQ ID NO: 2010188 - DNA, 15 bp, Homo sapiens
ttaatattttacttt

SEQ ID NO: 2010189 - DNA, 15 bp, Homo sapiens
taatattttacttta

SEQ ID NO: 2010190 - DNA, 15 bp, Homo sapiens
aatattttactttag

SEQ ID NO: 2010191 - DNA, 15 bp, Homo sapiens
atattttactttaga

SEQ ID NO: 2010192 - DNA, 15 bp, Homo sapiens
tattttactttagaa

SEQ ID NO: 2010193 - DNA, 15 bp, Homo sapiens
attttactttagaaa

SEQ ID NO: 2010194 - DNA, 15 bp, Homo sapiens
ttttactttagaaac

SEQ ID NO: 2010195 - DNA, 15 bp, Homo sapiens
tttactttagaaaca

SEQ ID NO: 2010196 - DNA, 15 bp, Homo sapiens
ttactttagaaacag

SEQ ID NO: 2010197 - DNA, 15 bp, Homo sapiens
tactttagaaacagg

SEQ ID NO: 2010198 - DNA, 15 bp, Homo sapiens
actttagaaacaggt

SEQ ID NO: 2010199 - DNA, 15 bp, Homo sapiens
ctttagaaacaggtc

SEQ ID NO: 2010200 - DNA, 15 bp, Homo sapiens
tttagaaacaggtcc

SEQ ID NO: 2010201 - DNA, 15 bp, Homo sapiens
ttagaaacaggtcca

SEQ ID NO: 2010202 - DNA, 15 bp, Homo sapiens
tagaaacaggtccag

SEQ ID NO: 2010203 - DNA, 15 bp, Homo sapiens
agaaacaggtccagt

SEQ ID NO: 2010204 - DNA, 15 bp, Homo sapiens
gaaacaggtccagtt

SEQ ID NO: 2010205 - DNA, 15 bp, Homo sapiens
aaacaggtccagttt

SEQ ID NO: 2010206 - DNA, 15 bp, Homo sapiens
aacaggtccagtttt

SEQ ID NO: 2010207 - DNA, 15 bp, Homo sapiens
acaggtccagttttc

SEQ ID NO: 2010208 - DNA, 15 bp, Homo sapiens
caggtccagttttcc

SEQ ID NO: 2010209 - DNA, 15 bp, Homo sapiens
aggtccagttttccc

SEQ ID NO: 2010210 - DNA, 15 bp, Homo sapiens
ggtccagttttccct

SEQ ID NO: 2010211 - DNA, 15 bp, Homo sapiens
gtccagttttccctt

SEQ ID NO: 2010212 - DNA, 15 bp, Homo sapiens
tccagttttcccttc

SEQ ID NO: 2010213 - DNA, 15 bp, Homo sapiens
ccagttttcccttct

SEQ ID NO: 2010214 - DNA, 15 bp, Homo sapiens
cagttttcccttctg

SEQ ID NO: 2010215 - DNA, 15 bp, Homo sapiens
agttttcccttctgt

SEQ ID NO: 2010216 - DNA, 15 bp, Homo sapiens
gttttcccttctgta

SEQ ID NO: 2010217 - DNA, 15 bp, Homo sapiens
ttttcccttctgtaa

SEQ ID NO: 2010218 - DNA, 15 bp, Homo sapiens
tttcccttctgtaat

SEQ ID NO: 2010219 - DNA, 15 bp, Homo sapiens
ttcccttctgtaatt

SEQ ID NO: 2010220 - DNA, 15 bp, Homo sapiens
tcccttctgtaattt

SEQ ID NO: 2010221 - DNA, 15 bp, Homo sapiens
cccttctgtaatttt

SEQ ID NO: 2010222 - DNA, 15 bp, Homo sapiens
ccttctgtaattttt

SEQ ID NO: 2010223 - DNA, 15 bp, Homo sapiens
cttctgtaatttttt

SEQ ID NO: 2010224 - DNA, 15 bp, Homo sapiens
ttctgtaattttttt

SEQ ID NO: 2010225 - DNA, 15 bp, Homo sapiens
tctgtaatttttttc

SEQ ID NO: 2010226 - DNA, 15 bp, Homo sapiens
ctgtaatttttttct

SEQ ID NO: 2010227 - DNA, 15 bp, Homo sapiens
tgtaatttttttctt

SEQ ID NO: 2010228 - DNA, 15 bp, Homo sapiens
gtaatttttttcttt

SEQ ID NO: 2010229 - DNA, 15 bp, Homo sapiens
taatttttttctttg

SEQ ID NO: 2010230 - DNA, 15 bp, Homo sapiens
aatttttttctttgg

SEQ ID NO: 2010231 - DNA, 15 bp, Homo sapiens
atttttttctttggt

SEQ ID NO: 2010232 - DNA, 15 bp, Homo sapiens
tttttttctttggtc

SEQ ID NO: 2010233 - DNA, 15 bp, Homo sapiens
ttttttctttggtct

SEQ ID NO: 2010234 - DNA, 15 bp, Homo sapiens
tttttctttggtctt

SEQ ID NO: 2010235 - DNA, 15 bp, Homo sapiens
ttttctttggtcttt

SEQ ID NO: 2010236 - DNA, 15 bp, Homo sapiens
tttctttggtctttt

SEQ ID NO: 2010237 - DNA, 15 bp, Homo sapiens
ttctttggtcttttt

SEQ ID NO: 2010238 - DNA, 15 bp, Homo sapiens
tctttggtctttttg

SEQ ID NO: 2010239 - DNA, 15 bp, Homo sapiens
ctttggtctttttgg

SEQ ID NO: 2010240 - DNA, 15 bp, Homo sapiens
tttggtctttttgga

SEQ ID NO: 2010241 - DNA, 15 bp, Homo sapiens
ttggtctttttggat

SEQ ID NO: 2010242 - DNA, 15 bp, Homo sapiens
tggtctttttggatt

SEQ ID NO: 2010243 - DNA, 15 bp, Homo sapiens
ggtctttttggattt

SEQ ID NO: 2010244 - DNA, 15 bp, Homo sapiens
gtctttttggatttt

SEQ ID NO: 2010245 - DNA, 15 bp, Homo sapiens
tctttttggattttt

SEQ ID NO: 2010246 - DNA, 15 bp, Homo sapiens
ctttttggatttttt

SEQ ID NO: 2010247 - DNA, 15 bp, Homo sapiens
tttttggattttttg

SEQ ID NO: 2010248 - DNA, 15 bp, Homo sapiens
ttttggattttttgg

SEQ ID NO: 2010249 - DNA, 15 bp, Homo sapiens
tttggattttttggg

SEQ ID NO: 2010250 - DNA, 15 bp, Homo sapiens
ttggattttttgggt

SEQ ID NO: 2010251 - DNA, 15 bp, Homo sapiens
tggattttttgggtt

SEQ ID NO: 2010252 - DNA, 15 bp, Homo sapiens
ggattttttgggttt

SEQ ID NO: 2010253 - DNA, 15 bp, Homo sapiens
gattttttgggtttt

SEQ ID NO: 2010254 - DNA, 15 bp, Homo sapiens
attttttgggttttt

SEQ ID NO: 2010255 - DNA, 15 bp, Homo sapiens
ttttttgggtttttt

SEQ ID NO: 2010256 - DNA, 15 bp, Homo sapiens
tttgggttttttttt

SEQ ID NO: 2010257 - DNA, 15 bp, Homo sapiens
ttttttttttgaaaa

SEQ ID NO: 2010258 - DNA, 15 bp, Homo sapiens
tttttttttgaaaag

SEQ ID NO: 2010259 - DNA, 15 bp, Homo sapiens
ttttttttgaaaaga

SEQ ID NO: 2010260 - DNA, 15 bp, Homo sapiens
tttttttgaaaagaa

SEQ ID NO: 2010261 - DNA, 15 bp, Homo sapiens
ttttttgaaaagaac

SEQ ID NO: 2010262 - DNA, 15 bp, Homo sapiens
tttttgaaaagaaca

SEQ ID NO: 2010263 - DNA, 15 bp, Homo sapiens
ttttgaaaagaacac

SEQ ID NO: 2010264 - DNA, 15 bp, Homo sapiens
tttgaaaagaacaca

SEQ ID NO: 2010265 - DNA, 15 bp, Homo sapiens
ttgaaaagaacacag

SEQ ID NO: 2010266 - DNA, 15 bp, Homo sapiens
tgaaaagaacacaga

SEQ ID NO: 2010267 - DNA, 15 bp, Homo sapiens
gaaaagaacacagag

SEQ ID NO: 2010268 - DNA, 15 bp, Homo sapiens
aaaagaacacagaga

SEQ ID NO: 2010269 - DNA, 15 bp, Homo sapiens
aaagaacacagagat

SEQ ID NO: 2010270 - DNA, 15 bp, Homo sapiens
aagaacacagagatc

SEQ ID NO: 2010271 - DNA, 15 bp, Homo sapiens
agaacacagagatct

SEQ ID NO: 2010272 - DNA, 15 bp, Homo sapiens
gaacacagagatctt

SEQ ID NO: 2010273 - DNA, 15 bp, Homo sapiens
aacacagagatcttt

SEQ ID NO: 2010274 - DNA, 15 bp, Homo sapiens
acacagagatctttt

SEQ ID NO: 2010275 - DNA, 15 bp, Homo sapiens
cacagagatcttttc

SEQ ID NO: 2010276 - DNA, 15 bp, Homo sapiens
acagagatcttttct

SEQ ID NO: 2010277 - DNA, 15 bp, Homo sapiens
cagagatcttttctt

SEQ ID NO: 2010278 - DNA, 15 bp, Homo sapiens
agagatcttttcttg

SEQ ID NO: 2010279 - DNA, 15 bp, Homo sapiens
gagatcttttcttga

SEQ ID NO: 2010280 - DNA, 15 bp, Homo sapiens
gatcttttcttgagt

SEQ ID NO: 2010281 - DNA, 15 bp, Homo sapiens
atcttttcttgagtg

SEQ ID NO: 2010282 - DNA, 15 bp, Homo sapiens
tcttttcttgagtga

SEQ ID NO: 2010283 - DNA, 15 bp, Homo sapiens
cttttcttgagtgat

SEQ ID NO: 2010284 - DNA, 15 bp, Homo sapiens
ttttcttgagtgata

SEQ ID NO: 2010285 - DNA, 15 bp, Homo sapiens
tttcttgagtgatat

SEQ ID NO: 2010286 - DNA, 15 bp, Homo sapiens
ttcttgagtgatatt

SEQ ID NO: 2010287 - DNA, 15 bp, Homo sapiens
tcttgagtgatattt

SEQ ID NO: 2010288 - DNA, 15 bp, Homo sapiens
cttgagtgatatttg

SEQ ID NO: 2010289 - DNA, 15 bp, Homo sapiens
ttgagtgatatttgc

SEQ ID NO: 2010290 - DNA, 15 bp, Homo sapiens
tgagtgatatttgca

SEQ ID NO: 2010291 - DNA, 15 bp, Homo sapiens
gagtgatatttgcac

SEQ ID NO: 2010292 - DNA, 15 bp, Homo sapiens
agtgatatttgcaca

SEQ ID NO: 2010293 - DNA, 15 bp, Homo sapiens
gtgatatttgcacag

SEQ ID NO: 2010294 - DNA, 15 bp, Homo sapiens
tgatatttgcacaga

SEQ ID NO: 2010295 - DNA, 15 bp, Homo sapiens
gatatttgcacagac

SEQ ID NO: 2010296 - DNA, 15 bp, Homo sapiens
atatttgcacagaca

SEQ ID NO: 2010297 - DNA, 15 bp, Homo sapiens
tatttgcacagacat

SEQ ID NO: 2010298 - DNA, 15 bp, Homo sapiens
atttgcacagacatt

SEQ ID NO: 2010299 - DNA, 15 bp, Homo sapiens
tttgcacagacattg

SEQ ID NO: 2010300 - DNA, 15 bp, Homo sapiens
ttgcacagacattgc

SEQ ID NO: 2010301 - DNA, 15 bp, Homo sapiens
tgcacagacattgcc

SEQ ID NO: 2010302 - DNA, 15 bp, Homo sapiens
gcacagacattgcct

SEQ ID NO: 2010303 - DNA, 15 bp, Homo sapiens
cacagacattgcctt

SEQ ID NO: 2010304 - DNA, 15 bp, Homo sapiens
acagacattgccttg

SEQ ID NO: 2010305 - DNA, 15 bp, Homo sapiens
cagacattgccttgg

SEQ ID NO: 2010306 - DNA, 15 bp, Homo sapiens
agacattgccttggt

SEQ ID NO: 2010307 - DNA, 15 bp, Homo sapiens
gacattgccttggta

SEQ ID NO: 2010308 - DNA, 15 bp, Homo sapiens
acattgccttggtaa

SEQ ID NO: 2010309 - DNA, 15 bp, Homo sapiens
cattgccttggtaat

SEQ ID NO: 2010310 - DNA, 15 bp, Homo sapiens
attgccttggtaatt

SEQ ID NO: 2010311 - DNA, 15 bp, Homo sapiens
ttgccttggtaattg

SEQ ID NO: 2010312 - DNA, 15 bp, Homo sapiens
tgccttggtaattga

SEQ ID NO: 2010313 - DNA, 15 bp, Homo sapiens
gccttggtaattgaa

SEQ ID NO: 2010314 - DNA, 15 bp, Homo sapiens
ccttggtaattgaag

SEQ ID NO: 2010315 - DNA, 15 bp, Homo sapiens
cttggtaattgaagc

SEQ ID NO: 2010316 - DNA, 15 bp, Homo sapiens
ttggtaattgaagct

SEQ ID NO: 2010317 - DNA, 15 bp, Homo sapiens
tggtaattgaagctt

SEQ ID NO: 2010318 - DNA, 15 bp, Homo sapiens
ggtaattgaagcttt

SEQ ID NO: 2010319 - DNA, 15 bp, Homo sapiens
gtaattgaagctttt

SEQ ID NO: 2010320 - DNA, 15 bp, Homo sapiens
taattgaagcttttt

SEQ ID NO: 2010321 - DNA, 15 bp, Homo sapiens
aattgaagctttttt

SEQ ID NO: 2010322 - DNA, 15 bp, Homo sapiens
attgaagcttttttt

SEQ ID NO: 2010323 - DNA, 15 bp, Homo sapiens
ttgaagctttttttt

SEQ ID NO: 2010324 - DNA, 15 bp, Homo sapiens
tgaagcttttttttt

SEQ ID NO: 2010325 - DNA, 15 bp, Homo sapiens
gaagctttttttttt

SEQ ID NO: 2010326 - DNA, 15 bp, Homo sapiens
ttttttttagaaaat

SEQ ID NO: 2010327 - DNA, 15 bp, Homo sapiens
tttttttagaaaatc

SEQ ID NO: 2010328 - DNA, 15 bp, Homo sapiens
ttttttagaaaatcc

SEQ ID NO: 2010329 - DNA, 15 bp, Homo sapiens
tttttagaaaatcct

SEQ ID NO: 2010330 - DNA, 15 bp, Homo sapiens
ttttagaaaatccta

SEQ ID NO: 2010331 - DNA, 15 bp, Homo sapiens
tttagaaaatcctat

SEQ ID NO: 2010332 - DNA, 15 bp, Homo sapiens
ttagaaaatcctatt

SEQ ID NO: 2010333 - DNA, 15 bp, Homo sapiens
tagaaaatcctatta

SEQ ID NO: 2010334 - DNA, 15 bp, Homo sapiens
agaaaatcctattaa

SEQ ID NO: 2010335 - DNA, 15 bp, Homo sapiens
gaaaatcctattaag

SEQ ID NO: 2010336 - DNA, 15 bp, Homo sapiens
aaaatcctattaagt

SEQ ID NO: 2010337 - DNA, 15 bp, Homo sapiens
aaatcctattaagtt

SEQ ID NO: 2010338 - DNA, 15 bp, Homo sapiens
aatcctattaagttt

SEQ ID NO: 2010339 - DNA, 15 bp, Homo sapiens
atcctattaagtttt

SEQ ID NO: 2010340 - DNA, 15 bp, Homo sapiens
tcctattaagtttta

SEQ ID NO: 2010341 - DNA, 15 bp, Homo sapiens
cctattaagttttat

SEQ ID NO: 2010342 - DNA, 15 bp, Homo sapiens
ctattaagttttatg

SEQ ID NO: 2010343 - DNA, 15 bp, Homo sapiens
tattaagttttatgc

SEQ ID NO: 2010344 - DNA, 15 bp, Homo sapiens
attaagttttatgcc

SEQ ID NO: 2010345 - DNA, 15 bp, Homo sapiens
ttaagttttatgcca

SEQ ID NO: 2010346 - DNA, 15 bp, Homo sapiens
taagttttatgccat

SEQ ID NO: 2010347 - DNA, 15 bp, Homo sapiens
aagttttatgccatg

SEQ ID NO: 2010348 - DNA, 15 bp, Homo sapiens
agttttatgccatgt

SEQ ID NO: 2010349 - DNA, 15 bp, Homo sapiens
gttttatgccatgtc

SEQ ID NO: 2010350 - DNA, 15 bp, Homo sapiens
ttttatgccatgtct

SEQ ID NO: 2010351 - DNA, 15 bp, Homo sapiens
tttatgccatgtcta

SEQ ID NO: 2010352 - DNA, 15 bp, Homo sapiens
ttatgccatgtctat

SEQ ID NO: 2010353 - DNA, 15 bp, Homo sapiens
tatgccatgtctatg

SEQ ID NO: 2010354 - DNA, 15 bp, Homo sapiens
atgccatgtctatgc

SEQ ID NO: 2010355 - DNA, 15 bp, Homo sapiens
tgccatgtctatgct

SEQ ID NO: 2010356 - DNA, 15 bp, Homo sapiens
gccatgtctatgctc

SEQ ID NO: 2010357 - DNA, 15 bp, Homo sapiens
ccatgtctatgctca

SEQ ID NO: 2010358 - DNA, 15 bp, Homo sapiens
catgtctatgctcat

SEQ ID NO: 2010359 - DNA, 15 bp, Homo sapiens
atgtctatgctcatt

SEQ ID NO: 2010360 - DNA, 15 bp, Homo sapiens
tgtctatgctcattg

SEQ ID NO: 2010361 - DNA, 15 bp, Homo sapiens
gtctatgctcattgc

SEQ ID NO: 2010362 - DNA, 15 bp, Homo sapiens
tctatgctcattgca

SEQ ID NO: 2010363 - DNA, 15 bp, Homo sapiens
ctatgctcattgcac

SEQ ID NO: 2010364 - DNA, 15 bp, Homo sapiens
tatgctcattgcacc

SEQ ID NO: 2010365 - DNA, 15 bp, Homo sapiens
atgctcattgcacct

SEQ ID NO: 2010366 - DNA, 15 bp, Homo sapiens
tgctcattgcacctg

SEQ ID NO: 2010367 - DNA, 15 bp, Homo sapiens
gctcattgcacctgt

SEQ ID NO: 2010368 - DNA, 15 bp, Homo sapiens
ctcattgcacctgtg

SEQ ID NO: 2010369 - DNA, 15 bp, Homo sapiens
tcattgcacctgtgc

SEQ ID NO: 2010370 - DNA, 15 bp, Homo sapiens
cattgcacctgtgcc

SEQ ID NO: 2010371 - DNA, 15 bp, Homo sapiens
attgcacctgtgcct

SEQ ID NO: 2010372 - DNA, 15 bp, Homo sapiens
ttgcacctgtgcctc

SEQ ID NO: 2010373 - DNA, 15 bp, Homo sapiens
tgcacctgtgcctca

SEQ ID NO: 2010374 - DNA, 15 bp, Homo sapiens
gcacctgtgcctcat

SEQ ID NO: 2010375 - DNA, 15 bp, Homo sapiens
cacctgtgcctcatg

SEQ ID NO: 2010376 - DNA, 15 bp, Homo sapiens
acctgtgcctcatgt

SEQ ID NO: 2010377 - DNA, 15 bp, Homo sapiens
cctgtgcctcatgtc

SEQ ID NO: 2010378 - DNA, 15 bp, Homo sapiens
ctgtgcctcatgtct

SEQ ID NO: 2010379 - DNA, 15 bp, Homo sapiens
tgtgcctcatgtctc

SEQ ID NO: 2010380 - DNA, 15 bp, Homo sapiens
gtgcctcatgtctca

SEQ ID NO: 2010381 - DNA, 15 bp, Homo sapiens
tgcctcatgtctcat

SEQ ID NO: 2010382 - DNA, 15 bp, Homo sapiens
gcctcatgtctcatt

SEQ ID NO: 2010383 - DNA, 15 bp, Homo sapiens
cctcatgtctcattc

SEQ ID NO: 2010384 - DNA, 15 bp, Homo sapiens
ctcatgtctcattca

SEQ ID NO: 2010385 - DNA, 15 bp, Homo sapiens
tcatgtctcattcat

SEQ ID NO: 2010386 - DNA, 15 bp, Homo sapiens
catgtctcattcatt

SEQ ID NO: 2010387 - DNA, 15 bp, Homo sapiens
atgtctcattcattc

SEQ ID NO: 2010388 - DNA, 15 bp, Homo sapiens
tgtctcattcattca

SEQ ID NO: 2010389 - DNA, 15 bp, Homo sapiens
gtctcattcattcat

SEQ ID NO: 2010390 - DNA, 15 bp, Homo sapiens
tcattcattcattcg

SEQ ID NO: 2010391 - DNA, 15 bp, Homo sapiens
cattcattcattcgt

SEQ ID NO: 2010392 - DNA, 15 bp, Homo sapiens
attcattcattcgtt

SEQ ID NO: 2010393 - DNA, 15 bp, Homo sapiens
ttcattcattcgttt

SEQ ID NO: 2010394 - DNA, 15 bp, Homo sapiens
tcattcattcgttta

SEQ ID NO: 2010395 - DNA, 15 bp, Homo sapiens
cattcattcgtttat

SEQ ID NO: 2010396 - DNA, 15 bp, Homo sapiens
attcattcgtttatt

SEQ ID NO: 2010397 - DNA, 15 bp, Homo sapiens
ttcattcgtttattt

SEQ ID NO: 2010398 - DNA, 15 bp, Homo sapiens
tcattcgtttatttt

SEQ ID NO: 2010399 - DNA, 15 bp, Homo sapiens
cattcgtttattttt

SEQ ID NO: 2010400 - DNA, 15 bp, Homo sapiens
attcgtttatttttt

SEQ ID NO: 2010401 - DNA, 15 bp, Homo sapiens
ttcgtttattttttt

SEQ ID NO: 2010402 - DNA, 15 bp, Homo sapiens
tcgtttattttttta

SEQ ID NO: 2010403 - DNA, 15 bp, Homo sapiens
cgtttatttttttat

SEQ ID NO: 2010404 - DNA, 15 bp, Homo sapiens
gtttatttttttatt

SEQ ID NO: 2010405 - DNA, 15 bp, Homo sapiens
atttttttattattt

SEQ ID NO: 2010406 - DNA, 15 bp, Homo sapiens
tttttttattatttt

SEQ ID NO: 2010407 - DNA, 15 bp, Homo sapiens
ttttttattattttt

SEQ ID NO: 2010408 - DNA, 15 bp, Homo sapiens
tttttattatttttt

SEQ ID NO: 2010409 - DNA, 15 bp, Homo sapiens
ttttattattttttt

SEQ ID NO: 2010410 - DNA, 15 bp, Homo sapiens
tttattatttttttt

SEQ ID NO: 2010411 - DNA, 15 bp, Homo sapiens
attattttttttttt

SEQ ID NO: 2010412 - DNA, 15 bp, Homo sapiens
tattttttttttttg

SEQ ID NO: 2010413 - DNA, 15 bp, Homo sapiens
attttttttttttga

SEQ ID NO: 2010414 - DNA, 15 bp, Homo sapiens
tcgctcttgttgcct

SEQ ID NO: 2010415 - DNA, 15 bp, Homo sapiens
cgctcttgttgccta

SEQ ID NO: 2010416 - DNA, 15 bp, Homo sapiens
gctcttgttgcctag

SEQ ID NO: 2010417 - DNA, 15 bp, Homo sapiens
ctcttgttgcctagg

SEQ ID NO: 2010418 - DNA, 15 bp, Homo sapiens
tcttgttgcctaggc

SEQ ID NO: 2010419 - DNA, 15 bp, Homo sapiens
gctcactgcaaccta

SEQ ID NO: 2010420 - DNA, 15 bp, Homo sapiens
ctcactgcaacctac

SEQ ID NO: 2010421 - DNA, 15 bp, Homo sapiens
tcactgcaacctaca

SEQ ID NO: 2010422 - DNA, 15 bp, Homo sapiens
cactgcaacctacac

SEQ ID NO: 2010423 - DNA, 15 bp, Homo sapiens
actgcaacctacacc

SEQ ID NO: 2010424 - DNA, 15 bp, Homo sapiens
ctgcaacctacacct

SEQ ID NO: 2010425 - DNA, 15 bp, Homo sapiens
tgcaacctacacctc

SEQ ID NO: 2010426 - DNA, 15 bp, Homo sapiens
gcaacctacacctcc

SEQ ID NO: 2010427 - DNA, 15 bp, Homo sapiens
caacctacacctccc

SEQ ID NO: 2010428 - DNA, 15 bp, Homo sapiens
aacctacacctccca

SEQ ID NO: 2010429 - DNA, 15 bp, Homo sapiens
acctacacctcccag

SEQ ID NO: 2010430 - DNA, 15 bp, Homo sapiens
cctacacctcccaga

SEQ ID NO: 2010431 - DNA, 15 bp, Homo sapiens
ctacacctcccagat

SEQ ID NO: 2010432 - DNA, 15 bp, Homo sapiens
tacacctcccagatt

SEQ ID NO: 2010433 - DNA, 15 bp, Homo sapiens
acacctcccagattc

SEQ ID NO: 2010434 - DNA, 15 bp, Homo sapiens
cacctcccagattca

SEQ ID NO: 2010435 - DNA, 15 bp, Homo sapiens
acctcccagattcaa

SEQ ID NO: 2010436 - DNA, 15 bp, Homo sapiens
cctcccagattcaag

SEQ ID NO: 2010437 - DNA, 15 bp, Homo sapiens
ctcccagattcaagt

SEQ ID NO: 2010438 - DNA, 15 bp, Homo sapiens
tcccagattcaagtg

SEQ ID NO: 2010439 - DNA, 15 bp, Homo sapiens
cccagattcaagtga

SEQ ID NO: 2010440 - DNA, 15 bp, Homo sapiens
ccagattcaagtgat

SEQ ID NO: 2010441 - DNA, 15 bp, Homo sapiens
cagattcaagtgatt

SEQ ID NO: 2010442 - DNA, 15 bp, Homo sapiens
agattcaagtgattc

SEQ ID NO: 2010443 - DNA, 15 bp, Homo sapiens
gtgcctgccaccacg

SEQ ID NO: 2010444 - DNA, 15 bp, Homo sapiens
tgcctgccaccacgc

SEQ ID NO: 2010445 - DNA, 15 bp, Homo sapiens
cctgccaccacgcct

SEQ ID NO: 2010446 - DNA, 15 bp, Homo sapiens
ctgccaccacgcctg

SEQ ID NO: 2010447 - DNA, 15 bp, Homo sapiens
cctggctaattttcg

SEQ ID NO: 2010448 - DNA, 15 bp, Homo sapiens
ctggctaattttcgt

SEQ ID NO: 2010449 - DNA, 15 bp, Homo sapiens
tggctaattttcgta

SEQ ID NO: 2010450 - DNA, 15 bp, Homo sapiens
ggctaattttcgtat

SEQ ID NO: 2010451 - DNA, 15 bp, Homo sapiens
gctaattttcgtatt

SEQ ID NO: 2010452 - DNA, 15 bp, Homo sapiens
ctaattttcgtattt

SEQ ID NO: 2010453 - DNA, 15 bp, Homo sapiens
taattttcgtatttt

SEQ ID NO: 2010454 - DNA, 15 bp, Homo sapiens
aattttcgtattttt

SEQ ID NO: 2010455 - DNA, 15 bp, Homo sapiens
attttcgtattttta

SEQ ID NO: 2010456 - DNA, 15 bp, Homo sapiens
ttttcgtatttttag

SEQ ID NO: 2010457 - DNA, 15 bp, Homo sapiens
tttcgtatttttagt

SEQ ID NO: 2010458 - DNA, 15 bp, Homo sapiens
ttcgtatttttagta

SEQ ID NO: 2010459 - DNA, 15 bp, Homo sapiens
tcgtatttttagtag

SEQ ID NO: 2010460 - DNA, 15 bp, Homo sapiens
cgtatttttagtaga

SEQ ID NO: 2010461 - DNA, 15 bp, Homo sapiens
tgagccgccgcgcct

SEQ ID NO: 2010462 - DNA, 15 bp, Homo sapiens
gagccgccgcgcctg

SEQ ID NO: 2010463 - DNA, 15 bp, Homo sapiens
agccgccgcgcctgg

SEQ ID NO: 2010464 - DNA, 15 bp, Homo sapiens
gccgccgcgcctggc

SEQ ID NO: 2010465 - DNA, 15 bp, Homo sapiens
ccgccgcgcctggcc

SEQ ID NO: 2010466 - DNA, 15 bp, Homo sapiens
cgccgcgcctggcct

SEQ ID NO: 2010467 - DNA, 15 bp, Homo sapiens
gccgcgcctggcctt

SEQ ID NO: 2010468 - DNA, 15 bp, Homo sapiens
ccgcgcctggccttc

SEQ ID NO: 2010469 - DNA, 15 bp, Homo sapiens
cgcgcctggccttca

SEQ ID NO: 2010470 - DNA, 15 bp, Homo sapiens
gcgcctggccttcat

SEQ ID NO: 2010471 - DNA, 15 bp, Homo sapiens
cgcctggccttcatg

SEQ ID NO: 2010472 - DNA, 15 bp, Homo sapiens
gcctggccttcatgt

SEQ ID NO: 2010473 - DNA, 15 bp, Homo sapiens
cctggccttcatgtc

SEQ ID NO: 2010474 - DNA, 15 bp, Homo sapiens
ctggccttcatgtct

SEQ ID NO: 2010475 - DNA, 15 bp, Homo sapiens
tggccttcatgtctc

SEQ ID NO: 2010476 - DNA, 15 bp, Homo sapiens
ggccttcatgtctct

SEQ ID NO: 2010477 - DNA, 15 bp, Homo sapiens
gccttcatgtctctt

SEQ ID NO: 2010478 - DNA, 15 bp, Homo sapiens
ccttcatgtctcttt

SEQ ID NO: 2010479 - DNA, 15 bp, Homo sapiens
cttcatgtctctttt

SEQ ID NO: 2010480 - DNA, 15 bp, Homo sapiens
ttcatgtctctttta

SEQ ID NO: 2010481 - DNA, 15 bp, Homo sapiens
tcatgtctcttttaa

SEQ ID NO: 2010482 - DNA, 15 bp, Homo sapiens
catgtctcttttaaa

SEQ ID NO: 2010483 - DNA, 15 bp, Homo sapiens
atgtctcttttaaat

SEQ ID NO: 2010484 - DNA, 15 bp, Homo sapiens
tgtctcttttaaata

SEQ ID NO: 2010485 - DNA, 15 bp, Homo sapiens
gtctcttttaaatag

SEQ ID NO: 2010486 - DNA, 15 bp, Homo sapiens
tctcttttaaatagg

SEQ ID NO: 2010487 - DNA, 15 bp, Homo sapiens
ctcttttaaatagga

SEQ ID NO: 2010488 - DNA, 15 bp, Homo sapiens
tcttttaaataggac

SEQ ID NO: 2010489 - DNA, 15 bp, Homo sapiens
cttttaaataggact

SEQ ID NO: 2010490 - DNA, 15 bp, Homo sapiens
ttttaaataggactt

SEQ ID NO: 2010491 - DNA, 15 bp, Homo sapiens
tttaaataggacttc

SEQ ID NO: 2010492 - DNA, 15 bp, Homo sapiens
ttaaataggacttct

SEQ ID NO: 2010493 - DNA, 15 bp, Homo sapiens
taaataggacttcta

SEQ ID NO: 2010494 - DNA, 15 bp, Homo sapiens
aaataggacttctaa

SEQ ID NO: 2010495 - DNA, 15 bp, Homo sapiens
aataggacttctaaa

SEQ ID NO: 2010496 - DNA, 15 bp, Homo sapiens
ataggacttctaaaa

SEQ ID NO: 2010497 - DNA, 15 bp, Homo sapiens
taggacttctaaaat

SEQ ID NO: 2010498 - DNA, 15 bp, Homo sapiens
aggacttctaaaatt

SEQ ID NO: 2010499 - DNA, 15 bp, Homo sapiens
ggacttctaaaattt

SEQ ID NO: 2010500 - DNA, 15 bp, Homo sapiens
gacttctaaaatttt

SEQ ID NO: 2010501 - DNA, 15 bp, Homo sapiens
acttctaaaattttg

SEQ ID NO: 2010502 - DNA, 15 bp, Homo sapiens
cttctaaaattttga

SEQ ID NO: 2010503 - DNA, 15 bp, Homo sapiens
ttctaaaattttgaa

SEQ ID NO: 2010504 - DNA, 15 bp, Homo sapiens
tctaaaattttgaaa

SEQ ID NO: 2010505 - DNA, 15 bp, Homo sapiens
ctaaaattttgaaat

SEQ ID NO: 2010506 - DNA, 15 bp, Homo sapiens
taaaattttgaaatg

SEQ ID NO: 2010507 - DNA, 15 bp, Homo sapiens
aaaattttgaaatga

SEQ ID NO: 2010508 - DNA, 15 bp, Homo sapiens
aaattttgaaatgag

SEQ ID NO: 2010509 - DNA, 15 bp, Homo sapiens
aattttgaaatgagg

SEQ ID NO: 2010510 - DNA, 15 bp, Homo sapiens
attttgaaatgaggt

SEQ ID NO: 2010511 - DNA, 15 bp, Homo sapiens
ttttgaaatgaggtc

SEQ ID NO: 2010512 - DNA, 15 bp, Homo sapiens
tttgaaatgaggtca

SEQ ID NO: 2010513 - DNA, 15 bp, Homo sapiens
ttgaaatgaggtcag

SEQ ID NO: 2010514 - DNA, 15 bp, Homo sapiens
tgaaatgaggtcagc

SEQ ID NO: 2010515 - DNA, 15 bp, Homo sapiens
gaaatgaggtcagct

SEQ ID NO: 2010516 - DNA, 15 bp, Homo sapiens
aaatgaggtcagctt

SEQ ID NO: 2010517 - DNA, 15 bp, Homo sapiens
aatgaggtcagcttc

SEQ ID NO: 2010518 - DNA, 15 bp, Homo sapiens
atgaggtcagcttca

SEQ ID NO: 2010519 - DNA, 15 bp, Homo sapiens
tgaggtcagcttcag

SEQ ID NO: 2010520 - DNA, 15 bp, Homo sapiens
gaggtcagcttcagt

SEQ ID NO: 2010521 - DNA, 15 bp, Homo sapiens
aggtcagcttcagtg

SEQ ID NO: 2010522 - DNA, 15 bp, Homo sapiens
ggtcagcttcagtgg

SEQ ID NO: 2010523 - DNA, 15 bp, Homo sapiens
gtcagcttcagtggc

SEQ ID NO: 2010524 - DNA, 15 bp, Homo sapiens
tcagcttcagtggct

SEQ ID NO: 2010525 - DNA, 15 bp, Homo sapiens
cagcttcagtggctc

SEQ ID NO: 2010526 - DNA, 15 bp, Homo sapiens
agcttcagtggctca

SEQ ID NO: 2010527 - DNA, 15 bp, Homo sapiens
gcttcagtggctcat

SEQ ID NO: 2010528 - DNA, 15 bp, Homo sapiens
cttcagtggctcatg

SEQ ID NO: 2010529 - DNA, 15 bp, Homo sapiens
ttcagtggctcatgc

SEQ ID NO: 2010530 - DNA, 15 bp, Homo sapiens
tcagtggctcatgcc

SEQ ID NO: 2010531 - DNA, 15 bp, Homo sapiens
ctcatgcctataatc

SEQ ID NO: 2010532 - DNA, 15 bp, Homo sapiens
tcatgcctataatcc

SEQ ID NO: 2010533 - DNA, 15 bp, Homo sapiens
gcctataatcccagt

SEQ ID NO: 2010534 - DNA, 15 bp, Homo sapiens
cctataatcccagtg

SEQ ID NO: 2010535 - DNA, 15 bp, Homo sapiens
ctataatcccagtgc

SEQ ID NO: 2010536 - DNA, 15 bp, Homo sapiens
tataatcccagtgct

SEQ ID NO: 2010537 - DNA, 15 bp, Homo sapiens
ataatcccagtgctt

SEQ ID NO: 2010538 - DNA, 15 bp, Homo sapiens
tcccagtgctttgga

SEQ ID NO: 2010539 - DNA, 15 bp, Homo sapiens
cccagtgctttggaa

SEQ ID NO: 2010540 - DNA, 15 bp, Homo sapiens
ccagtgctttggaag

SEQ ID NO: 2010541 - DNA, 15 bp, Homo sapiens
cagtgctttggaagg

SEQ ID NO: 2010542 - DNA, 15 bp, Homo sapiens
agtgctttggaaggc

SEQ ID NO: 2010543 - DNA, 15 bp, Homo sapiens
gtgctttggaaggcc

SEQ ID NO: 2010544 - DNA, 15 bp, Homo sapiens
tgctttggaaggcca

SEQ ID NO: 2010545 - DNA, 15 bp, Homo sapiens
gctttggaaggccaa

SEQ ID NO: 2010546 - DNA, 15 bp, Homo sapiens
ggaaggccaaggcaa

SEQ ID NO: 2010547 - DNA, 15 bp, Homo sapiens
gaaggccaaggcaag

SEQ ID NO: 2010548 - DNA, 15 bp, Homo sapiens
aaggccaaggcaaga

SEQ ID NO: 2010549 - DNA, 15 bp, Homo sapiens
aggccaaggcaagag

SEQ ID NO: 2010550 - DNA, 15 bp, Homo sapiens
ggccaaggcaagagg

SEQ ID NO: 2010551 - DNA, 15 bp, Homo sapiens
gccaaggcaagagga

SEQ ID NO: 2010552 - DNA, 15 bp, Homo sapiens
agaggatcacttgaa

SEQ ID NO: 2010553 - DNA, 15 bp, Homo sapiens
gaggatcacttgaag

SEQ ID NO: 2010554 - DNA, 15 bp, Homo sapiens
aggatcacttgaagc

SEQ ID NO: 2010555 - DNA, 15 bp, Homo sapiens
ggatcacttgaagcc

SEQ ID NO: 2010556 - DNA, 15 bp, Homo sapiens
gatcacttgaagcca

SEQ ID NO: 2010557 - DNA, 15 bp, Homo sapiens
atcacttgaagccag

SEQ ID NO: 2010558 - DNA, 15 bp, Homo sapiens
tcacttgaagccagg

SEQ ID NO: 2010559 - DNA, 15 bp, Homo sapiens
cacttgaagccaggg

SEQ ID NO: 2010560 - DNA, 15 bp, Homo sapiens
acttgaagccagggg

SEQ ID NO: 2010561 - DNA, 15 bp, Homo sapiens
cttgaagccaggggt

SEQ ID NO: 2010562 - DNA, 15 bp, Homo sapiens
ttgaagccaggggtt

SEQ ID NO: 2010563 - DNA, 15 bp, Homo sapiens
tgaagccaggggttt

SEQ ID NO: 2010564 - DNA, 15 bp, Homo sapiens
gaagccaggggtttg

SEQ ID NO: 2010565 - DNA, 15 bp, Homo sapiens
aagccaggggtttga

SEQ ID NO: 2010566 - DNA, 15 bp, Homo sapiens
agccaggggtttgag

SEQ ID NO: 2010567 - DNA, 15 bp, Homo sapiens
gccaggggtttgaga

SEQ ID NO: 2010568 - DNA, 15 bp, Homo sapiens
caggggtttgagacc

SEQ ID NO: 2010569 - DNA, 15 bp, Homo sapiens
aggggtttgagacca

SEQ ID NO: 2010570 - DNA, 15 bp, Homo sapiens
ggggtttgagaccag

SEQ ID NO: 2010571 - DNA, 15 bp, Homo sapiens
gggtttgagaccagc

SEQ ID NO: 2010572 - DNA, 15 bp, Homo sapiens
ggtttgagaccagcc

SEQ ID NO: 2010573 - DNA, 15 bp, Homo sapiens
cctgggcaacatcat

SEQ ID NO: 2010574 - DNA, 15 bp, Homo sapiens
ctgggcaacatcatg

SEQ ID NO: 2010575 - DNA, 15 bp, Homo sapiens
tgggcaacatcatga

SEQ ID NO: 2010576 - DNA, 15 bp, Homo sapiens
gggcaacatcatgag

SEQ ID NO: 2010577 - DNA, 15 bp, Homo sapiens
ggcaacatcatgaga

SEQ ID NO: 2010578 - DNA, 15 bp, Homo sapiens
gcaacatcatgagac

SEQ ID NO: 2010579 - DNA, 15 bp, Homo sapiens
caacatcatgagacc

SEQ ID NO: 2010580 - DNA, 15 bp, Homo sapiens
aacatcatgagaccc

SEQ ID NO: 2010581 - DNA, 15 bp, Homo sapiens
acatcatgagaccct

SEQ ID NO: 2010582 - DNA, 15 bp, Homo sapiens
catcatgagaccctg

SEQ ID NO: 2010583 - DNA, 15 bp, Homo sapiens
atcatgagaccctgt

SEQ ID NO: 2010584 - DNA, 15 bp, Homo sapiens
tcatgagaccctgtc

SEQ ID NO: 2010585 - DNA, 15 bp, Homo sapiens
catgagaccctgtct

SEQ ID NO: 2010586 - DNA, 15 bp, Homo sapiens
atgagaccctgtctc

SEQ ID NO: 2010587 - DNA, 15 bp, Homo sapiens
cctgtctctacaaag

SEQ ID NO: 2010588 - DNA, 15 bp, Homo sapiens
ctgtctctacaaagt

SEQ ID NO: 2010589 - DNA, 15 bp, Homo sapiens
tgtctctacaaagta

SEQ ID NO: 2010590 - DNA, 15 bp, Homo sapiens
gtctctacaaagtac

SEQ ID NO: 2010591 - DNA, 15 bp, Homo sapiens
tctctacaaagtaca

SEQ ID NO: 2010592 - DNA, 15 bp, Homo sapiens
ctctacaaagtacat

SEQ ID NO: 2010593 - DNA, 15 bp, Homo sapiens
tctacaaagtacatt

SEQ ID NO: 2010594 - DNA, 15 bp, Homo sapiens
ctacaaagtacattt

SEQ ID NO: 2010595 - DNA, 15 bp, Homo sapiens
tacaaagtacattta

SEQ ID NO: 2010596 - DNA, 15 bp, Homo sapiens
acaaagtacatttaa

SEQ ID NO: 2010597 - DNA, 15 bp, Homo sapiens
caaagtacatttaaa

SEQ ID NO: 2010598 - DNA, 15 bp, Homo sapiens
aaagtacatttaaaa

SEQ ID NO: 2010599 - DNA, 15 bp, Homo sapiens
aagtacatttaaaaa

SEQ ID NO: 2010600 - DNA, 15 bp, Homo sapiens
agtacatttaaaaaa

SEQ ID NO: 2010601 - DNA, 15 bp, Homo sapiens
gtacatttaaaaaaa

SEQ ID NO: 2010602 - DNA, 15 bp, Homo sapiens
tacatttaaaaaaaa

SEQ ID NO: 2010603 - DNA, 15 bp, Homo sapiens
acatttaaaaaaaaa

SEQ ID NO: 2010604 - DNA, 15 bp, Homo sapiens
catttaaaaaaaaat

SEQ ID NO: 2010605 - DNA, 15 bp, Homo sapiens
atttaaaaaaaaatt

SEQ ID NO: 2010606 - DNA, 15 bp, Homo sapiens
tttaaaaaaaaatta

SEQ ID NO: 2010607 - DNA, 15 bp, Homo sapiens
gtgtggtggcacaca

SEQ ID NO: 2010608 - DNA, 15 bp, Homo sapiens
tgtggtggcacacac

SEQ ID NO: 2010609 - DNA, 15 bp, Homo sapiens
ggtggcacacacctg

SEQ ID NO: 2010610 - DNA, 15 bp, Homo sapiens
gtggcacacacctgt

SEQ ID NO: 2010611 - DNA, 15 bp, Homo sapiens
tggcacacacctgta

SEQ ID NO: 2010612 - DNA, 15 bp, Homo sapiens
ggcacacacctgtat

SEQ ID NO: 2010613 - DNA, 15 bp, Homo sapiens
gcacacacctgtata

SEQ ID NO: 2010614 - DNA, 15 bp, Homo sapiens
cacacacctgtatag

SEQ ID NO: 2010615 - DNA, 15 bp, Homo sapiens
acacacctgtatagt

SEQ ID NO: 2010616 - DNA, 15 bp, Homo sapiens
cacacctgtatagtc

SEQ ID NO: 2010617 - DNA, 15 bp, Homo sapiens
acacctgtatagtct

SEQ ID NO: 2010618 - DNA, 15 bp, Homo sapiens
cacctgtatagtctt

SEQ ID NO: 2010619 - DNA, 15 bp, Homo sapiens
acctgtatagtctta

SEQ ID NO: 2010620 - DNA, 15 bp, Homo sapiens
cctgtatagtcttag

SEQ ID NO: 2010621 - DNA, 15 bp, Homo sapiens
ctgtatagtcttagc

SEQ ID NO: 2010622 - DNA, 15 bp, Homo sapiens
tgtatagtcttagcc

SEQ ID NO: 2010623 - DNA, 15 bp, Homo sapiens
gtatagtcttagcca

SEQ ID NO: 2010624 - DNA, 15 bp, Homo sapiens
tatagtcttagccac

SEQ ID NO: 2010625 - DNA, 15 bp, Homo sapiens
atagtcttagccact

SEQ ID NO: 2010626 - DNA, 15 bp, Homo sapiens
tagtcttagccactt

SEQ ID NO: 2010627 - DNA, 15 bp, Homo sapiens
agtcttagccacttg

SEQ ID NO: 2010628 - DNA, 15 bp, Homo sapiens
gtcttagccacttgg

SEQ ID NO: 2010629 - DNA, 15 bp, Homo sapiens
tcttagccacttggg

SEQ ID NO: 2010630 - DNA, 15 bp, Homo sapiens
cttagccacttggga

SEQ ID NO: 2010631 - DNA, 15 bp, Homo sapiens
ttagccacttgggaa

SEQ ID NO: 2010632 - DNA, 15 bp, Homo sapiens
tagccacttgggaag

SEQ ID NO: 2010633 - DNA, 15 bp, Homo sapiens
agccacttgggaagc

SEQ ID NO: 2010634 - DNA, 15 bp, Homo sapiens
gccacttgggaagct

SEQ ID NO: 2010635 - DNA, 15 bp, Homo sapiens
ccacttgggaagctg

SEQ ID NO: 2010636 - DNA, 15 bp, Homo sapiens
cacttgggaagctga

SEQ ID NO: 2010637 - DNA, 15 bp, Homo sapiens
acttgggaagctgag

SEQ ID NO: 2010638 - DNA, 15 bp, Homo sapiens
cttgggaagctgagg

SEQ ID NO: 2010639 - DNA, 15 bp, Homo sapiens
gggaagctgaggcaa

SEQ ID NO: 2010640 - DNA, 15 bp, Homo sapiens
ggaagctgaggcaag

SEQ ID NO: 2010641 - DNA, 15 bp, Homo sapiens
gaagctgaggcaagt

SEQ ID NO: 2010642 - DNA, 15 bp, Homo sapiens
aagctgaggcaagta

SEQ ID NO: 2010643 - DNA, 15 bp, Homo sapiens
agctgaggcaagtag

SEQ ID NO: 2010644 - DNA, 15 bp, Homo sapiens
gctgaggcaagtaga

SEQ ID NO: 2010645 - DNA, 15 bp, Homo sapiens
ctgaggcaagtagat

SEQ ID NO: 2010646 - DNA, 15 bp, Homo sapiens
tgaggcaagtagatc

SEQ ID NO: 2010647 - DNA, 15 bp, Homo sapiens
gaggcaagtagatcg

SEQ ID NO: 2010648 - DNA, 15 bp, Homo sapiens
aggcaagtagatcgc

SEQ ID NO: 2010649 - DNA, 15 bp, Homo sapiens
ggcaagtagatcgcc

SEQ ID NO: 2010650 - DNA, 15 bp, Homo sapiens
gcaagtagatcgcct

SEQ ID NO: 2010651 - DNA, 15 bp, Homo sapiens
caagtagatcgcctg

SEQ ID NO: 2010652 - DNA, 15 bp, Homo sapiens
aagtagatcgcctga

SEQ ID NO: 2010653 - DNA, 15 bp, Homo sapiens
agtagatcgcctgac

SEQ ID NO: 2010654 - DNA, 15 bp, Homo sapiens
gtagatcgcctgacc

SEQ ID NO: 2010655 - DNA, 15 bp, Homo sapiens
tagatcgcctgaccc

SEQ ID NO: 2010656 - DNA, 15 bp, Homo sapiens
agatcgcctgacccc

SEQ ID NO: 2010657 - DNA, 15 bp, Homo sapiens
gatcgcctgacccca

SEQ ID NO: 2010658 - DNA, 15 bp, Homo sapiens
atcgcctgaccccag

SEQ ID NO: 2010659 - DNA, 15 bp, Homo sapiens
tcgcctgaccccagg

SEQ ID NO: 2010660 - DNA, 15 bp, Homo sapiens
cgcctgaccccagga

SEQ ID NO: 2010661 - DNA, 15 bp, Homo sapiens
gcctgaccccaggag

SEQ ID NO: 2010662 - DNA, 15 bp, Homo sapiens
cctgaccccaggagt

SEQ ID NO: 2010663 - DNA, 15 bp, Homo sapiens
ctgaccccaggagtt

SEQ ID NO: 2010664 - DNA, 15 bp, Homo sapiens
tgaccccaggagttc

SEQ ID NO: 2010665 - DNA, 15 bp, Homo sapiens
gaccccaggagttca

SEQ ID NO: 2010666 - DNA, 15 bp, Homo sapiens
accccaggagttcaa

SEQ ID NO: 2010667 - DNA, 15 bp, Homo sapiens
ccccaggagttcaag

SEQ ID NO: 2010668 - DNA, 15 bp, Homo sapiens
ccaggagttcaaggt

SEQ ID NO: 2010669 - DNA, 15 bp, Homo sapiens
caggagttcaaggtt

SEQ ID NO: 2010670 - DNA, 15 bp, Homo sapiens
aggagttcaaggttg

SEQ ID NO: 2010671 - DNA, 15 bp, Homo sapiens
ggagttcaaggttgc

SEQ ID NO: 2010672 - DNA, 15 bp, Homo sapiens
gagttcaaggttgca

SEQ ID NO: 2010673 - DNA, 15 bp, Homo sapiens
agttcaaggttgcag

SEQ ID NO: 2010674 - DNA, 15 bp, Homo sapiens
gttcaaggttgcagt

SEQ ID NO: 2010675 - DNA, 15 bp, Homo sapiens
ttcaaggttgcagtg

SEQ ID NO: 2010676 - DNA, 15 bp, Homo sapiens
tcaaggttgcagtga

SEQ ID NO: 2010677 - DNA, 15 bp, Homo sapiens
caaggttgcagtgag

SEQ ID NO: 2010678 - DNA, 15 bp, Homo sapiens
aaggttgcagtgagc

SEQ ID NO: 2010679 - DNA, 15 bp, Homo sapiens
gttgcagtgagctat

SEQ ID NO: 2010680 - DNA, 15 bp, Homo sapiens
ttgcagtgagctatg

SEQ ID NO: 2010681 - DNA, 15 bp, Homo sapiens
tgcagtgagctatgt

SEQ ID NO: 2010682 - DNA, 15 bp, Homo sapiens
gcagtgagctatgtt

SEQ ID NO: 2010683 - DNA, 15 bp, Homo sapiens
cagtgagctatgttc

SEQ ID NO: 2010684 - DNA, 15 bp, Homo sapiens
agtgagctatgttcc

SEQ ID NO: 2010685 - DNA, 15 bp, Homo sapiens
gtgagctatgttccc

SEQ ID NO: 2010686 - DNA, 15 bp, Homo sapiens
tgagctatgttccca

SEQ ID NO: 2010687 - DNA, 15 bp, Homo sapiens
gagctatgttcccac

SEQ ID NO: 2010688 - DNA, 15 bp, Homo sapiens
agctatgttcccacc

SEQ ID NO: 2010689 - DNA, 15 bp, Homo sapiens
gctatgttcccacca

SEQ ID NO: 2010690 - DNA, 15 bp, Homo sapiens
ctatgttcccaccac

SEQ ID NO: 2010691 - DNA, 15 bp, Homo sapiens
tatgttcccaccacc

SEQ ID NO: 2010692 - DNA, 15 bp, Homo sapiens
atgttcccaccaccg

SEQ ID NO: 2010693 - DNA, 15 bp, Homo sapiens
tgttcccaccaccgc

SEQ ID NO: 2010694 - DNA, 15 bp, Homo sapiens
gttcccaccaccgca

SEQ ID NO: 2010695 - DNA, 15 bp, Homo sapiens
ttcccaccaccgcac

SEQ ID NO: 2010696 - DNA, 15 bp, Homo sapiens
tcccaccaccgcact

SEQ ID NO: 2010697 - DNA, 15 bp, Homo sapiens
cccaccaccgcactt

SEQ ID NO: 2010698 - DNA, 15 bp, Homo sapiens
ccaccaccgcacttc

SEQ ID NO: 2010699 - DNA, 15 bp, Homo sapiens
caccaccgcacttca

SEQ ID NO: 2010700 - DNA, 15 bp, Homo sapiens
accaccgcacttcag

SEQ ID NO: 2010701 - DNA, 15 bp, Homo sapiens
ccaccgcacttcagc

SEQ ID NO: 2010702 - DNA, 15 bp, Homo sapiens
caccgcacttcagcc

SEQ ID NO: 2010703 - DNA, 15 bp, Homo sapiens
accgcacttcagcca

SEQ ID NO: 2010704 - DNA, 15 bp, Homo sapiens
ccgcacttcagccag

SEQ ID NO: 2010705 - DNA, 15 bp, Homo sapiens
cgcacttcagccagt

SEQ ID NO: 2010706 - DNA, 15 bp, Homo sapiens
gcacttcagccagtt

SEQ ID NO: 2010707 - DNA, 15 bp, Homo sapiens
cacttcagccagtta

SEQ ID NO: 2010708 - DNA, 15 bp, Homo sapiens
acttcagccagttaa

SEQ ID NO: 2010709 - DNA, 15 bp, Homo sapiens
cttcagccagttaag

SEQ ID NO: 2010710 - DNA, 15 bp, Homo sapiens
ttcagccagttaagg

SEQ ID NO: 2010711 - DNA, 15 bp, Homo sapiens
tcagccagttaaggg

SEQ ID NO: 2010712 - DNA, 15 bp, Homo sapiens
cagccagttaagggg

SEQ ID NO: 2010713 - DNA, 15 bp, Homo sapiens
agccagttaagggga

SEQ ID NO: 2010714 - DNA, 15 bp, Homo sapiens
gccagttaaggggac

SEQ ID NO: 2010715 - DNA, 15 bp, Homo sapiens
ccagttaaggggaca

SEQ ID NO: 2010716 - DNA, 15 bp, Homo sapiens
cagttaaggggacag

SEQ ID NO: 2010717 - DNA, 15 bp, Homo sapiens
agttaaggggacaga

SEQ ID NO: 2010718 - DNA, 15 bp, Homo sapiens
gttaaggggacagag

SEQ ID NO: 2010719 - DNA, 15 bp, Homo sapiens
ttaaggggacagagc

SEQ ID NO: 2010720 - DNA, 15 bp, Homo sapiens
taaggggacagagcg

SEQ ID NO: 2010721 - DNA, 15 bp, Homo sapiens
aaggggacagagcga

SEQ ID NO: 2010722 - DNA, 15 bp, Homo sapiens
aggggacagagcgag

SEQ ID NO: 2010723 - DNA, 15 bp, Homo sapiens
ggggacagagcgaga

SEQ ID NO: 2010724 - DNA, 15 bp, Homo sapiens
gggacagagcgagac

SEQ ID NO: 2010725 - DNA, 15 bp, Homo sapiens
ggacagagcgagacc

SEQ ID NO: 2010726 - DNA, 15 bp, Homo sapiens
tgtctcaaaaaaatt

SEQ ID NO: 2010727 - DNA, 15 bp, Homo sapiens
gtctcaaaaaaattt

SEQ ID NO: 2010728 - DNA, 15 bp, Homo sapiens
tctcaaaaaaatttt

SEQ ID NO: 2010729 - DNA, 15 bp, Homo sapiens
ctcaaaaaaattttg

SEQ ID NO: 2010730 - DNA, 15 bp, Homo sapiens
tcaaaaaaattttgt

SEQ ID NO: 2010731 - DNA, 15 bp, Homo sapiens
caaaaaaattttgtt

SEQ ID NO: 2010732 - DNA, 15 bp, Homo sapiens
aaaaaaattttgttt

SEQ ID NO: 2010733 - DNA, 15 bp, Homo sapiens
aaaaaattttgtttt

SEQ ID NO: 2010734 - DNA, 15 bp, Homo sapiens
aaaaattttgttttg

SEQ ID NO: 2010735 - DNA, 15 bp, Homo sapiens
aaaattttgttttga

SEQ ID NO: 2010736 - DNA, 15 bp, Homo sapiens
aaattttgttttgaa

SEQ ID NO: 2010737 - DNA, 15 bp, Homo sapiens
aattttgttttgaaa

SEQ ID NO: 2010738 - DNA, 15 bp, Homo sapiens
attttgttttgaaat

SEQ ID NO: 2010739 - DNA, 15 bp, Homo sapiens
ttttgttttgaaatg

SEQ ID NO: 2010740 - DNA, 15 bp, Homo sapiens
tttgttttgaaatga

SEQ ID NO: 2010741 - DNA, 15 bp, Homo sapiens
ttgttttgaaatgaa

SEQ ID NO: 2010742 - DNA, 15 bp, Homo sapiens
tgttttgaaatgaat

SEQ ID NO: 2010743 - DNA, 15 bp, Homo sapiens
gttttgaaatgaatt

SEQ ID NO: 2010744 - DNA, 15 bp, Homo sapiens
ttttgaaatgaattt

SEQ ID NO: 2010745 - DNA, 15 bp, Homo sapiens
tttgaaatgaattta

SEQ ID NO: 2010746 - DNA, 15 bp, Homo sapiens
ttgaaatgaatttat

SEQ ID NO: 2010747 - DNA, 15 bp, Homo sapiens
tgaaatgaatttatg

SEQ ID NO: 2010748 - DNA, 15 bp, Homo sapiens
gaaatgaatttatgt

SEQ ID NO: 2010749 - DNA, 15 bp, Homo sapiens
aaatgaatttatgta

SEQ ID NO: 2010750 - DNA, 15 bp, Homo sapiens
aatgaatttatgtat

SEQ ID NO: 2010751 - DNA, 15 bp, Homo sapiens
atgaatttatgtatg

SEQ ID NO: 2010752 - DNA, 15 bp, Homo sapiens
tgaatttatgtatgt

SEQ ID NO: 2010753 - DNA, 15 bp, Homo sapiens
gaatttatgtatgtt

SEQ ID NO: 2010754 - DNA, 15 bp, Homo sapiens
aatttatgtatgttt

SEQ ID NO: 2010755 - DNA, 15 bp, Homo sapiens
atttatgtatgtttg

SEQ ID NO: 2010756 - DNA, 15 bp, Homo sapiens
tttatgtatgtttgg

SEQ ID NO: 2010757 - DNA, 15 bp, Homo sapiens
ttatgtatgtttggt

SEQ ID NO: 2010758 - DNA, 15 bp, Homo sapiens
tatgtatgtttggtt

SEQ ID NO: 2010759 - DNA, 15 bp, Homo sapiens
atgtatgtttggtta

SEQ ID NO: 2010760 - DNA, 15 bp, Homo sapiens
tgtatgtttggttat

SEQ ID NO: 2010761 - DNA, 15 bp, Homo sapiens
gtatgtttggttatt

SEQ ID NO: 2010762 - DNA, 15 bp, Homo sapiens
tatgtttggttattt

SEQ ID NO: 2010763 - DNA, 15 bp, Homo sapiens
atgtttggttatttc

SEQ ID NO: 2010764 - DNA, 15 bp, Homo sapiens
tgtttggttatttct

SEQ ID NO: 2010765 - DNA, 15 bp, Homo sapiens
gtttggttatttctg

SEQ ID NO: 2010766 - DNA, 15 bp, Homo sapiens
tttggttatttctga

SEQ ID NO: 2010767 - DNA, 15 bp, Homo sapiens
ttggttatttctgaa

SEQ ID NO: 2010768 - DNA, 15 bp, Homo sapiens
tggttatttctgaaa

SEQ ID NO: 2010769 - DNA, 15 bp, Homo sapiens
ggttatttctgaaag

SEQ ID NO: 2010770 - DNA, 15 bp, Homo sapiens
gttatttctgaaagc

SEQ ID NO: 2010771 - DNA, 15 bp, Homo sapiens
ttatttctgaaagca

SEQ ID NO: 2010772 - DNA, 15 bp, Homo sapiens
tatttctgaaagcag

SEQ ID NO: 2010773 - DNA, 15 bp, Homo sapiens
atttctgaaagcagt

SEQ ID NO: 2010774 - DNA, 15 bp, Homo sapiens
tttctgaaagcagtt

SEQ ID NO: 2010775 - DNA, 15 bp, Homo sapiens
ttctgaaagcagttc

SEQ ID NO: 2010776 - DNA, 15 bp, Homo sapiens
tctgaaagcagttca

SEQ ID NO: 2010777 - DNA, 15 bp, Homo sapiens
ctgaaagcagttcag

SEQ ID NO: 2010778 - DNA, 15 bp, Homo sapiens
tgaaagcagttcagg

SEQ ID NO: 2010779 - DNA, 15 bp, Homo sapiens
gaaagcagttcaggc

SEQ ID NO: 2010780 - DNA, 15 bp, Homo sapiens
aaagcagttcaggcc

SEQ ID NO: 2010781 - DNA, 15 bp, Homo sapiens
aagcagttcaggcct

SEQ ID NO: 2010782 - DNA, 15 bp, Homo sapiens
agcagttcaggccta

SEQ ID NO: 2010783 - DNA, 15 bp, Homo sapiens
gcagttcaggcctac

SEQ ID NO: 2010784 - DNA, 15 bp, Homo sapiens
cagttcaggcctaca

SEQ ID NO: 2010785 - DNA, 15 bp, Homo sapiens
agttcaggcctacag

SEQ ID NO: 2010786 - DNA, 15 bp, Homo sapiens
gttcaggcctacagc

SEQ ID NO: 2010787 - DNA, 15 bp, Homo sapiens
ttcaggcctacagcc

SEQ ID NO: 2010788 - DNA, 15 bp, Homo sapiens
tcaggcctacagcca

SEQ ID NO: 2010789 - DNA, 15 bp, Homo sapiens
caggcctacagccat

SEQ ID NO: 2010790 - DNA, 15 bp, Homo sapiens
aggcctacagccata

SEQ ID NO: 2010791 - DNA, 15 bp, Homo sapiens
ggcctacagccatac

SEQ ID NO: 2010792 - DNA, 15 bp, Homo sapiens
gcctacagccatacc

SEQ ID NO: 2010793 - DNA, 15 bp, Homo sapiens
cctacagccatacca

SEQ ID NO: 2010794 - DNA, 15 bp, Homo sapiens
ctacagccataccac

SEQ ID NO: 2010795 - DNA, 15 bp, Homo sapiens
tacagccataccacc

SEQ ID NO: 2010796 - DNA, 15 bp, Homo sapiens
acagccataccaccc

SEQ ID NO: 2010797 - DNA, 15 bp, Homo sapiens
cagccataccaccct

SEQ ID NO: 2010798 - DNA, 15 bp, Homo sapiens
agccataccaccctg

SEQ ID NO: 2010799 - DNA, 15 bp, Homo sapiens
gccataccaccctga

SEQ ID NO: 2010800 - DNA, 15 bp, Homo sapiens
ccataccaccctgaa

SEQ ID NO: 2010801 - DNA, 15 bp, Homo sapiens
cataccaccctgaat

SEQ ID NO: 2010802 - DNA, 15 bp, Homo sapiens
ataccaccctgaatg

SEQ ID NO: 2010803 - DNA, 15 bp, Homo sapiens
taccaccctgaatgc

SEQ ID NO: 2010804 - DNA, 15 bp, Homo sapiens
accaccctgaatgca

SEQ ID NO: 2010805 - DNA, 15 bp, Homo sapiens
ccaccctgaatgcac

SEQ ID NO: 2010806 - DNA, 15 bp, Homo sapiens
caccctgaatgcacc

SEQ ID NO: 2010807 - DNA, 15 bp, Homo sapiens
accctgaatgcacct

SEQ ID NO: 2010808 - DNA, 15 bp, Homo sapiens
ccctgaatgcacctg

SEQ ID NO: 2010809 - DNA, 15 bp, Homo sapiens
cctgaatgcacctga

SEQ ID NO: 2010810 - DNA, 15 bp, Homo sapiens
ctgaatgcacctgat

SEQ ID NO: 2010811 - DNA, 15 bp, Homo sapiens
tgaatgcacctgatg

SEQ ID NO: 2010812 - DNA, 15 bp, Homo sapiens
gaatgcacctgatgt

SEQ ID NO: 2010813 - DNA, 15 bp, Homo sapiens
aatgcacctgatgtt

SEQ ID NO: 2010814 - DNA, 15 bp, Homo sapiens
atgcacctgatgttg

SEQ ID NO: 2010815 - DNA, 15 bp, Homo sapiens
tgcacctgatgttgt

SEQ ID NO: 2010816 - DNA, 15 bp, Homo sapiens
gcacctgatgttgtc

SEQ ID NO: 2010817 - DNA, 15 bp, Homo sapiens
cacctgatgttgtct

SEQ ID NO: 2010818 - DNA, 15 bp, Homo sapiens
acctgatgttgtctg

SEQ ID NO: 2010819 - DNA, 15 bp, Homo sapiens
cctgatgttgtctga

SEQ ID NO: 2010820 - DNA, 15 bp, Homo sapiens
ctgatgttgtctgaa

SEQ ID NO: 2010821 - DNA, 15 bp, Homo sapiens
tgatgttgtctgaaa

SEQ ID NO: 2010822 - DNA, 15 bp, Homo sapiens
gatgttgtctgaaag

SEQ ID NO: 2010823 - DNA, 15 bp, Homo sapiens
atgttgtctgaaagc

SEQ ID NO: 2010824 - DNA, 15 bp, Homo sapiens
tgttgtctgaaagca

SEQ ID NO: 2010825 - DNA, 15 bp, Homo sapiens
gttgtctgaaagcaa

SEQ ID NO: 2010826 - DNA, 15 bp, Homo sapiens
ttgtctgaaagcaat

SEQ ID NO: 2010827 - DNA, 15 bp, Homo sapiens
tgtctgaaagcaatt

SEQ ID NO: 2010828 - DNA, 15 bp, Homo sapiens
gtctgaaagcaattc

SEQ ID NO: 2010829 - DNA, 15 bp, Homo sapiens
tctgaaagcaattca

SEQ ID NO: 2010830 - DNA, 15 bp, Homo sapiens
ctgaaagcaattcag

SEQ ID NO: 2010831 - DNA, 15 bp, Homo sapiens
tgaaagcaattcagg

SEQ ID NO: 2010832 - DNA, 15 bp, Homo sapiens
gaaagcaattcaggt

SEQ ID NO: 2010833 - DNA, 15 bp, Homo sapiens
aaagcaattcaggtt

SEQ ID NO: 2010834 - DNA, 15 bp, Homo sapiens
aagcaattcaggttt

SEQ ID NO: 2010835 - DNA, 15 bp, Homo sapiens
agcaattcaggtttt

SEQ ID NO: 2010836 - DNA, 15 bp, Homo sapiens
gcaattcaggttttc

SEQ ID NO: 2010837 - DNA, 15 bp, Homo sapiens
caattcaggttttca

SEQ ID NO: 2010838 - DNA, 15 bp, Homo sapiens
aattcaggttttcag

SEQ ID NO: 2010839 - DNA, 15 bp, Homo sapiens
attcaggttttcagg

SEQ ID NO: 2010840 - DNA, 15 bp, Homo sapiens
ttcaggttttcagga

SEQ ID NO: 2010841 - DNA, 15 bp, Homo sapiens
tcaggttttcaggat

SEQ ID NO: 2010842 - DNA, 15 bp, Homo sapiens
caggttttcaggatt

SEQ ID NO: 2010843 - DNA, 15 bp, Homo sapiens
aggttttcaggatta

SEQ ID NO: 2010844 - DNA, 15 bp, Homo sapiens
ggttttcaggattaa

SEQ ID NO: 2010845 - DNA, 15 bp, Homo sapiens
gttttcaggattaaa

SEQ ID NO: 2010846 - DNA, 15 bp, Homo sapiens
ttttcaggattaaaa

SEQ ID NO: 2010847 - DNA, 15 bp, Homo sapiens
tttcaggattaaaat

SEQ ID NO: 2010848 - DNA, 15 bp, Homo sapiens
ttcaggattaaaatt

SEQ ID NO: 2010849 - DNA, 15 bp, Homo sapiens
tcaggattaaaattt

SEQ ID NO: 2010850 - DNA, 15 bp, Homo sapiens
caggattaaaatttt

SEQ ID NO: 2010851 - DNA, 15 bp, Homo sapiens
aggattaaaattttt

SEQ ID NO: 2010852 - DNA, 15 bp, Homo sapiens
ggattaaaattttta

SEQ ID NO: 2010853 - DNA, 15 bp, Homo sapiens
gattaaaatttttat

SEQ ID NO: 2010854 - DNA, 15 bp, Homo sapiens
attaaaatttttatg

SEQ ID NO: 2010855 - DNA, 15 bp, Homo sapiens
ttaaaatttttatgc

SEQ ID NO: 2010856 - DNA, 15 bp, Homo sapiens
taaaatttttatgct

SEQ ID NO: 2010857 - DNA, 15 bp, Homo sapiens
aaaatttttatgcta

SEQ ID NO: 2010858 - DNA, 15 bp, Homo sapiens
aaatttttatgctac

SEQ ID NO: 2010859 - DNA, 15 bp, Homo sapiens
aatttttatgctact

SEQ ID NO: 2010860 - DNA, 15 bp, Homo sapiens
atttttatgctacta

SEQ ID NO: 2010861 - DNA, 15 bp, Homo sapiens
tttttatgctactag

SEQ ID NO: 2010862 - DNA, 15 bp, Homo sapiens
ttttatgctactagg

SEQ ID NO: 2010863 - DNA, 15 bp, Homo sapiens
tttatgctactaggt

SEQ ID NO: 2010864 - DNA, 15 bp, Homo sapiens
ttatgctactaggtt

SEQ ID NO: 2010865 - DNA, 15 bp, Homo sapiens
tatgctactaggttt

SEQ ID NO: 2010866 - DNA, 15 bp, Homo sapiens
atgctactaggtttg

SEQ ID NO: 2010867 - DNA, 15 bp, Homo sapiens
tgctactaggtttgt

SEQ ID NO: 2010868 - DNA, 15 bp, Homo sapiens
gctactaggtttgta

SEQ ID NO: 2010869 - DNA, 15 bp, Homo sapiens
ctactaggtttgtaa

SEQ ID NO: 2010870 - DNA, 15 bp, Homo sapiens
tactaggtttgtaac

SEQ ID NO: 2010871 - DNA, 15 bp, Homo sapiens
actaggtttgtaacc

SEQ ID NO: 2010872 - DNA, 15 bp, Homo sapiens
ctaggtttgtaacct

SEQ ID NO: 2010873 - DNA, 15 bp, Homo sapiens
taggtttgtaaccta

SEQ ID NO: 2010874 - DNA, 15 bp, Homo sapiens
aggtttgtaacctat

SEQ ID NO: 2010875 - DNA, 15 bp, Homo sapiens
ggtttgtaacctata

SEQ ID NO: 2010876 - DNA, 15 bp, Homo sapiens
gtttgtaacctatat

SEQ ID NO: 2010877 - DNA, 15 bp, Homo sapiens
tttgtaacctatatt

SEQ ID NO: 2010878 - DNA, 15 bp, Homo sapiens
ttgtaacctatattt

SEQ ID NO: 2010879 - DNA, 15 bp, Homo sapiens
tgtaacctatattta

SEQ ID NO: 2010880 - DNA, 15 bp, Homo sapiens
gtaacctatatttaa

SEQ ID NO: 2010881 - DNA, 15 bp, Homo sapiens
taacctatatttaaa

SEQ ID NO: 2010882 - DNA, 15 bp, Homo sapiens
aacctatatttaaaa

SEQ ID NO: 2010883 - DNA, 15 bp, Homo sapiens
acctatatttaaaag

SEQ ID NO: 2010884 - DNA, 15 bp, Homo sapiens
cctatatttaaaagt

SEQ ID NO: 2010885 - DNA, 15 bp, Homo sapiens
ctatatttaaaagta

SEQ ID NO: 2010886 - DNA, 15 bp, Homo sapiens
tatatttaaaagtag

SEQ ID NO: 2010887 - DNA, 15 bp, Homo sapiens
atatttaaaagtaga

SEQ ID NO: 2010888 - DNA, 15 bp, Homo sapiens
tatttaaaagtagaa

SEQ ID NO: 2010889 - DNA, 15 bp, Homo sapiens
atttaaaagtagaac

SEQ ID NO: 2010890 - DNA, 15 bp, Homo sapiens
tttaaaagtagaaca

SEQ ID NO: 2010891 - DNA, 15 bp, Homo sapiens
ttaaaagtagaacat

SEQ ID NO: 2010892 - DNA, 15 bp, Homo sapiens
taaaagtagaacatt

SEQ ID NO: 2010893 - DNA, 15 bp, Homo sapiens
aaaagtagaacattt

SEQ ID NO: 2010894 - DNA, 15 bp, Homo sapiens
aaagtagaacattta

SEQ ID NO: 2010895 - DNA, 15 bp, Homo sapiens
aagtagaacatttaa

SEQ ID NO: 2010896 - DNA, 15 bp, Homo sapiens
agtagaacatttaaa

SEQ ID NO: 2010897 - DNA, 15 bp, Homo sapiens
gtagaacatttaaaa

SEQ ID NO: 2010898 - DNA, 15 bp, Homo sapiens
tagaacatttaaaac

SEQ ID NO: 2010899 - DNA, 15 bp, Homo sapiens
agaacatttaaaaca

SEQ ID NO: 2010900 - DNA, 15 bp, Homo sapiens
gaacatttaaaacat

SEQ ID NO: 2010901 - DNA, 15 bp, Homo sapiens
atttaaaacatttta

SEQ ID NO: 2010902 - DNA, 15 bp, Homo sapiens
tttaaaacattttag

SEQ ID NO: 2010903 - DNA, 15 bp, Homo sapiens
ttaaaacattttagt

SEQ ID NO: 2010904 - DNA, 15 bp, Homo sapiens
taaaacattttagta

SEQ ID NO: 2010905 - DNA, 15 bp, Homo sapiens
aaaacattttagtag

SEQ ID NO: 2010906 - DNA, 15 bp, Homo sapiens
aaacattttagtagt

SEQ ID NO: 2010907 - DNA, 15 bp, Homo sapiens
aacattttagtagta

SEQ ID NO: 2010908 - DNA, 15 bp, Homo sapiens
acattttagtagtat

SEQ ID NO: 2010909 - DNA, 15 bp, Homo sapiens
cattttagtagtata

SEQ ID NO: 2010910 - DNA, 15 bp, Homo sapiens
attttagtagtatat

SEQ ID NO: 2010911 - DNA, 15 bp, Homo sapiens
ttttagtagtatata

SEQ ID NO: 2010912 - DNA, 15 bp, Homo sapiens
tttagtagtatatag

SEQ ID NO: 2010913 - DNA, 15 bp, Homo sapiens
ttagtagtatatagc

SEQ ID NO: 2010914 - DNA, 15 bp, Homo sapiens
tagtagtatatagca

SEQ ID NO: 2010915 - DNA, 15 bp, Homo sapiens
agtagtatatagcac

SEQ ID NO: 2010916 - DNA, 15 bp, Homo sapiens
gtagtatatagcact

SEQ ID NO: 2010917 - DNA, 15 bp, Homo sapiens
tagtatatagcactg

SEQ ID NO: 2010918 - DNA, 15 bp, Homo sapiens
agtatatagcactga

SEQ ID NO: 2010919 - DNA, 15 bp, Homo sapiens
gtatatagcactgaa

SEQ ID NO: 2010920 - DNA, 15 bp, Homo sapiens
tatatagcactgaaa

SEQ ID NO: 2010921 - DNA, 15 bp, Homo sapiens
atatagcactgaaaa

SEQ ID NO: 2010922 - DNA, 15 bp, Homo sapiens
tatagcactgaaaag

SEQ ID NO: 2010923 - DNA, 15 bp, Homo sapiens
atagcactgaaaagt

SEQ ID NO: 2010924 - DNA, 15 bp, Homo sapiens
tagcactgaaaagtg

SEQ ID NO: 2010925 - DNA, 15 bp, Homo sapiens
agcactgaaaagtgg

SEQ ID NO: 2010926 - DNA, 15 bp, Homo sapiens
gcactgaaaagtggc

SEQ ID NO: 2010927 - DNA, 15 bp, Homo sapiens
cactgaaaagtggct

SEQ ID NO: 2010928 - DNA, 15 bp, Homo sapiens
actgaaaagtggctt

SEQ ID NO: 2010929 - DNA, 15 bp, Homo sapiens
ctgaaaagtggcttt

SEQ ID NO: 2010930 - DNA, 15 bp, Homo sapiens
tgaaaagtggctttt

SEQ ID NO: 2010931 - DNA, 15 bp, Homo sapiens
gaaaagtggcttttt

SEQ ID NO: 2010932 - DNA, 15 bp, Homo sapiens
aaaagtggcttttta

SEQ ID NO: 2010933 - DNA, 15 bp, Homo sapiens
aaagtggctttttag

SEQ ID NO: 2010934 - DNA, 15 bp, Homo sapiens
aagtggctttttagc

SEQ ID NO: 2010935 - DNA, 15 bp, Homo sapiens
agtggctttttagcg

SEQ ID NO: 2010936 - DNA, 15 bp, Homo sapiens
gtggctttttagcgt

SEQ ID NO: 2010937 - DNA, 15 bp, Homo sapiens
tggctttttagcgta

SEQ ID NO: 2010938 - DNA, 15 bp, Homo sapiens
ggctttttagcgtag

SEQ ID NO: 2010939 - DNA, 15 bp, Homo sapiens
gctttttagcgtaga

SEQ ID NO: 2010940 - DNA, 15 bp, Homo sapiens
ctttttagcgtagac

SEQ ID NO: 2010941 - DNA, 15 bp, Homo sapiens
tttttagcgtagaca

SEQ ID NO: 2010942 - DNA, 15 bp, Homo sapiens
ttttagcgtagacag

SEQ ID NO: 2010943 - DNA, 15 bp, Homo sapiens
tttagcgtagacagt

SEQ ID NO: 2010944 - DNA, 15 bp, Homo sapiens
ttagcgtagacagtt

SEQ ID NO: 2010945 - DNA, 15 bp, Homo sapiens
tagcgtagacagttg

SEQ ID NO: 2010946 - DNA, 15 bp, Homo sapiens
agcgtagacagttgt

SEQ ID NO: 2010947 - DNA, 15 bp, Homo sapiens
gcgtagacagttgtt

SEQ ID NO: 2010948 - DNA, 15 bp, Homo sapiens
cgtagacagttgttt

SEQ ID NO: 2010949 - DNA, 15 bp, Homo sapiens
gtagacagttgtttt

SEQ ID NO: 2010950 - DNA, 15 bp, Homo sapiens
tagacagttgttttt

SEQ ID NO: 2010951 - DNA, 15 bp, Homo sapiens
agacagttgtttttc

SEQ ID NO: 2010952 - DNA, 15 bp, Homo sapiens
gacagttgtttttca

SEQ ID NO: 2010953 - DNA, 15 bp, Homo sapiens
acagttgtttttcaa

SEQ ID NO: 2010954 - DNA, 15 bp, Homo sapiens
cagttgtttttcaag

SEQ ID NO: 2010955 - DNA, 15 bp, Homo sapiens
agttgtttttcaaga

SEQ ID NO: 2010956 - DNA, 15 bp, Homo sapiens
gttgtttttcaagaa

SEQ ID NO: 2010957 - DNA, 15 bp, Homo sapiens
ttgtttttcaagaaa

SEQ ID NO: 2010958 - DNA, 15 bp, Homo sapiens
tgtttttcaagaaac

SEQ ID NO: 2010959 - DNA, 15 bp, Homo sapiens
gtttttcaagaaact

SEQ ID NO: 2010960 - DNA, 15 bp, Homo sapiens
tttttcaagaaacta

SEQ ID NO: 2010961 - DNA, 15 bp, Homo sapiens
ttttcaagaaactat

SEQ ID NO: 2010962 - DNA, 15 bp, Homo sapiens
tttcaagaaactatt

SEQ ID NO: 2010963 - DNA, 15 bp, Homo sapiens
ttcaagaaactattt

SEQ ID NO: 2010964 - DNA, 15 bp, Homo sapiens
tcaagaaactatttt

SEQ ID NO: 2010965 - DNA, 15 bp, Homo sapiens
caagaaactattttg

SEQ ID NO: 2010966 - DNA, 15 bp, Homo sapiens
aagaaactattttgt

SEQ ID NO: 2010967 - DNA, 15 bp, Homo sapiens
agaaactattttgta

SEQ ID NO: 2010968 - DNA, 15 bp, Homo sapiens
gaaactattttgtaa

SEQ ID NO: 2010969 - DNA, 15 bp, Homo sapiens
aaactattttgtaat

SEQ ID NO: 2010970 - DNA, 15 bp, Homo sapiens
aactattttgtaatc

SEQ ID NO: 2010971 - DNA, 15 bp, Homo sapiens
actattttgtaatcc

SEQ ID NO: 2010972 - DNA, 15 bp, Homo sapiens
ctattttgtaatcct

SEQ ID NO: 2010973 - DNA, 15 bp, Homo sapiens
tattttgtaatccta

SEQ ID NO: 2010974 - DNA, 15 bp, Homo sapiens
attttgtaatcctag

SEQ ID NO: 2010975 - DNA, 15 bp, Homo sapiens
ttttgtaatcctagc

SEQ ID NO: 2010976 - DNA, 15 bp, Homo sapiens
tttgtaatcctagct

SEQ ID NO: 2010977 - DNA, 15 bp, Homo sapiens
ttgtaatcctagcta

SEQ ID NO: 2010978 - DNA, 15 bp, Homo sapiens
tgtaatcctagctac

SEQ ID NO: 2010979 - DNA, 15 bp, Homo sapiens
gtaatcctagctact

SEQ ID NO: 2010980 - DNA, 15 bp, Homo sapiens
taatcctagctactt

SEQ ID NO: 2010981 - DNA, 15 bp, Homo sapiens
aatcctagctacttg

SEQ ID NO: 2010982 - DNA, 15 bp, Homo sapiens
atcctagctacttgg

SEQ ID NO: 2010983 - DNA, 15 bp, Homo sapiens
tagctacttgggagc

SEQ ID NO: 2010984 - DNA, 15 bp, Homo sapiens
ttgggagcctgaggt

SEQ ID NO: 2010985 - DNA, 15 bp, Homo sapiens
tgggagcctgaggtg

SEQ ID NO: 2010986 - DNA, 15 bp, Homo sapiens
gggagcctgaggtgg

SEQ ID NO: 2010987 - DNA, 15 bp, Homo sapiens
ggagcctgaggtggg

SEQ ID NO: 2010988 - DNA, 15 bp, Homo sapiens
gagcctgaggtggga

SEQ ID NO: 2010989 - DNA, 15 bp, Homo sapiens
agcctgaggtgggag

SEQ ID NO: 2010990 - DNA, 15 bp, Homo sapiens
gcctgaggtgggagg

SEQ ID NO: 2010991 - DNA, 15 bp, Homo sapiens
cctgaggtgggagga

SEQ ID NO: 2010992 - DNA, 15 bp, Homo sapiens
gaggtgggaggatcg

SEQ ID NO: 2010993 - DNA, 15 bp, Homo sapiens
aggtgggaggatcgc

SEQ ID NO: 2010994 - DNA, 15 bp, Homo sapiens
ggtgggaggatcgct

SEQ ID NO: 2010995 - DNA, 15 bp, Homo sapiens
gtgggaggatcgctt

SEQ ID NO: 2010996 - DNA, 15 bp, Homo sapiens
tgggaggatcgcttg

SEQ ID NO: 2010997 - DNA, 15 bp, Homo sapiens
aggatcgcttgagct

SEQ ID NO: 2010998 - DNA, 15 bp, Homo sapiens
ggatcgcttgagctc

SEQ ID NO: 2010999 - DNA, 15 bp, Homo sapiens
gatcgcttgagctca

SEQ ID NO: 2011000 - DNA, 15 bp, Homo sapiens
atcgcttgagctcag

SEQ ID NO: 2011001 - DNA, 15 bp, Homo sapiens
tcgcttgagctcaga

SEQ ID NO: 2011002 - DNA, 15 bp, Homo sapiens
cgcttgagctcagaa

SEQ ID NO: 2011003 - DNA, 15 bp, Homo sapiens
gcttgagctcagaat

SEQ ID NO: 2011004 - DNA, 15 bp, Homo sapiens
cttgagctcagaatc

SEQ ID NO: 2011005 - DNA, 15 bp, Homo sapiens
ttgagctcagaatcc

SEQ ID NO: 2011006 - DNA, 15 bp, Homo sapiens
tgagctcagaatcca

SEQ ID NO: 2011007 - DNA, 15 bp, Homo sapiens
gagctcagaatccag

SEQ ID NO: 2011008 - DNA, 15 bp, Homo sapiens
agctcagaatccagt

SEQ ID NO: 2011009 - DNA, 15 bp, Homo sapiens
gctcagaatccagtc

SEQ ID NO: 2011010 - DNA, 15 bp, Homo sapiens
ctcagaatccagtct

SEQ ID NO: 2011011 - DNA, 15 bp, Homo sapiens
tcagaatccagtctg

SEQ ID NO: 2011012 - DNA, 15 bp, Homo sapiens
cagaatccagtctgg

SEQ ID NO: 2011013 - DNA, 15 bp, Homo sapiens
agaatccagtctggg

SEQ ID NO: 2011014 - DNA, 15 bp, Homo sapiens
gaatccagtctgggc

SEQ ID NO: 2011015 - DNA, 15 bp, Homo sapiens
aatccagtctgggca

SEQ ID NO: 2011016 - DNA, 15 bp, Homo sapiens
atccagtctgggcaa

SEQ ID NO: 2011017 - DNA, 15 bp, Homo sapiens
ttgtttgatagcatc

SEQ ID NO: 2011018 - DNA, 15 bp, Homo sapiens
tgtttgatagcatca

SEQ ID NO: 2011019 - DNA, 15 bp, Homo sapiens
gtttgatagcatcat

SEQ ID NO: 2011020 - DNA, 15 bp, Homo sapiens
tttgatagcatcatt

SEQ ID NO: 2011021 - DNA, 15 bp, Homo sapiens
ttgatagcatcatta

SEQ ID NO: 2011022 - DNA, 15 bp, Homo sapiens
tgatagcatcattat

SEQ ID NO: 2011023 - DNA, 15 bp, Homo sapiens
gatagcatcattatg

SEQ ID NO: 2011024 - DNA, 15 bp, Homo sapiens
atagcatcattatgg

SEQ ID NO: 2011025 - DNA, 15 bp, Homo sapiens
tagcatcattatgga

SEQ ID NO: 2011026 - DNA, 15 bp, Homo sapiens
agcatcattatggaa

SEQ ID NO: 2011027 - DNA, 15 bp, Homo sapiens
gcatcattatggaag

SEQ ID NO: 2011028 - DNA, 15 bp, Homo sapiens
catcattatggaaga

SEQ ID NO: 2011029 - DNA, 15 bp, Homo sapiens
atcattatggaagat

SEQ ID NO: 2011030 - DNA, 15 bp, Homo sapiens
tcattatggaagata

SEQ ID NO: 2011031 - DNA, 15 bp, Homo sapiens
cattatggaagatat

SEQ ID NO: 2011032 - DNA, 15 bp, Homo sapiens
attatggaagatatt

SEQ ID NO: 2011033 - DNA, 15 bp, Homo sapiens
ttatggaagatattg

SEQ ID NO: 2011034 - DNA, 15 bp, Homo sapiens
tatggaagatattga

SEQ ID NO: 2011035 - DNA, 15 bp, Homo sapiens
atggaagatattgaa

SEQ ID NO: 2011036 - DNA, 15 bp, Homo sapiens
tggaagatattgaat

SEQ ID NO: 2011037 - DNA, 15 bp, Homo sapiens
ggaagatattgaata

SEQ ID NO: 2011038 - DNA, 15 bp, Homo sapiens
gaagatattgaatag

SEQ ID NO: 2011039 - DNA, 15 bp, Homo sapiens
aagatattgaatagc

SEQ ID NO: 2011040 - DNA, 15 bp, Homo sapiens
agatattgaatagca

SEQ ID NO: 2011041 - DNA, 15 bp, Homo sapiens
gatattgaatagcac

SEQ ID NO: 2011042 - DNA, 15 bp, Homo sapiens
atattgaatagcaca

SEQ ID NO: 2011043 - DNA, 15 bp, Homo sapiens
tattgaatagcacat

SEQ ID NO: 2011044 - DNA, 15 bp, Homo sapiens
attgaatagcacata

SEQ ID NO: 2011045 - DNA, 15 bp, Homo sapiens
ttgaatagcacatat

SEQ ID NO: 2011046 - DNA, 15 bp, Homo sapiens
tgaatagcacatatt

SEQ ID NO: 2011047 - DNA, 15 bp, Homo sapiens
gaatagcacatattt

SEQ ID NO: 2011048 - DNA, 15 bp, Homo sapiens
aatagcacatatttg

SEQ ID NO: 2011049 - DNA, 15 bp, Homo sapiens
atagcacatatttgt

SEQ ID NO: 2011050 - DNA, 15 bp, Homo sapiens
tagcacatatttgtg

SEQ ID NO: 2011051 - DNA, 15 bp, Homo sapiens
agcacatatttgtga

SEQ ID NO: 2011052 - DNA, 15 bp, Homo sapiens
gcacatatttgtgat

SEQ ID NO: 2011053 - DNA, 15 bp, Homo sapiens
cacatatttgtgatc

SEQ ID NO: 2011054 - DNA, 15 bp, Homo sapiens
acatatttgtgatct

SEQ ID NO: 2011055 - DNA, 15 bp, Homo sapiens
catatttgtgatctt

SEQ ID NO: 2011056 - DNA, 15 bp, Homo sapiens
atatttgtgatcttt

SEQ ID NO: 2011057 - DNA, 15 bp, Homo sapiens
tatttgtgatctttt

SEQ ID NO: 2011058 - DNA, 15 bp, Homo sapiens
atttgtgatctttta

SEQ ID NO: 2011059 - DNA, 15 bp, Homo sapiens
tttgtgatcttttaa

SEQ ID NO: 2011060 - DNA, 15 bp, Homo sapiens
ttgtgatcttttaag

SEQ ID NO: 2011061 - DNA, 15 bp, Homo sapiens
tgtgatcttttaagt

SEQ ID NO: 2011062 - DNA, 15 bp, Homo sapiens
gtgatcttttaagtt

SEQ ID NO: 2011063 - DNA, 15 bp, Homo sapiens
tgatcttttaagtta

SEQ ID NO: 2011064 - DNA, 15 bp, Homo sapiens
gatcttttaagttag

SEQ ID NO: 2011065 - DNA, 15 bp, Homo sapiens
atcttttaagttagc

SEQ ID NO: 2011066 - DNA, 15 bp, Homo sapiens
tcttttaagttagct

SEQ ID NO: 2011067 - DNA, 15 bp, Homo sapiens
cttttaagttagcta

SEQ ID NO: 2011068 - DNA, 15 bp, Homo sapiens
ttttaagttagctat

SEQ ID NO: 2011069 - DNA, 15 bp, Homo sapiens
tttaagttagctata

SEQ ID NO: 2011070 - DNA, 15 bp, Homo sapiens
ttaagttagctatag

SEQ ID NO: 2011071 - DNA, 15 bp, Homo sapiens
taagttagctataga

SEQ ID NO: 2011072 - DNA, 15 bp, Homo sapiens
aagttagctatagaa

SEQ ID NO: 2011073 - DNA, 15 bp, Homo sapiens
agttagctatagaag

SEQ ID NO: 2011074 - DNA, 15 bp, Homo sapiens
gttagctatagaagc

SEQ ID NO: 2011075 - DNA, 15 bp, Homo sapiens
ttagctatagaagcc

SEQ ID NO: 2011076 - DNA, 15 bp, Homo sapiens
tagctatagaagcca

SEQ ID NO: 2011077 - DNA, 15 bp, Homo sapiens
agctatagaagccat

SEQ ID NO: 2011078 - DNA, 15 bp, Homo sapiens
gctatagaagccatc

SEQ ID NO: 2011079 - DNA, 15 bp, Homo sapiens
ctatagaagccatct

SEQ ID NO: 2011080 - DNA, 15 bp, Homo sapiens
tatagaagccatctt

SEQ ID NO: 2011081 - DNA, 15 bp, Homo sapiens
atagaagccatcttc

SEQ ID NO: 2011082 - DNA, 15 bp, Homo sapiens
tagaagccatcttct

SEQ ID NO: 2011083 - DNA, 15 bp, Homo sapiens
agaagccatcttctc

SEQ ID NO: 2011084 - DNA, 15 bp, Homo sapiens
gaagccatcttctca

SEQ ID NO: 2011085 - DNA, 15 bp, Homo sapiens
aagccatcttctcat

SEQ ID NO: 2011086 - DNA, 15 bp, Homo sapiens
agccatcttctcatt

SEQ ID NO: 2011087 - DNA, 15 bp, Homo sapiens
gccatcttctcattc

SEQ ID NO: 2011088 - DNA, 15 bp, Homo sapiens
ccatcttctcattct

SEQ ID NO: 2011089 - DNA, 15 bp, Homo sapiens
catcttctcattctg

SEQ ID NO: 2011090 - DNA, 15 bp, Homo sapiens
atcttctcattctgc

SEQ ID NO: 2011091 - DNA, 15 bp, Homo sapiens
tcttctcattctgct

SEQ ID NO: 2011092 - DNA, 15 bp, Homo sapiens
cttctcattctgctg

SEQ ID NO: 2011093 - DNA, 15 bp, Homo sapiens
ttctcattctgctgt

SEQ ID NO: 2011094 - DNA, 15 bp, Homo sapiens
tctcattctgctgtg

SEQ ID NO: 2011095 - DNA, 15 bp, Homo sapiens
ctcattctgctgtgg

SEQ ID NO: 2011096 - DNA, 15 bp, Homo sapiens
tcattctgctgtggt

SEQ ID NO: 2011097 - DNA, 15 bp, Homo sapiens
cattctgctgtggta

SEQ ID NO: 2011098 - DNA, 15 bp, Homo sapiens
attctgctgtggtaa

SEQ ID NO: 2011099 - DNA, 15 bp, Homo sapiens
ttctgctgtggtaag

SEQ ID NO: 2011100 - DNA, 15 bp, Homo sapiens
tctgctgtggtaagt

SEQ ID NO: 2011101 - DNA, 15 bp, Homo sapiens
ctgctgtggtaagtg

SEQ ID NO: 2011102 - DNA, 15 bp, Homo sapiens
tgctgtggtaagtga

SEQ ID NO: 2011103 - DNA, 15 bp, Homo sapiens
gctgtggtaagtgaa

SEQ ID NO: 2011104 - DNA, 15 bp, Homo sapiens
ctgtggtaagtgaat

SEQ ID NO: 2011105 - DNA, 15 bp, Homo sapiens
tgtggtaagtgaatg

SEQ ID NO: 2011106 - DNA, 15 bp, Homo sapiens
gtggtaagtgaatgt

SEQ ID NO: 2011107 - DNA, 15 bp, Homo sapiens
tggtaagtgaatgtc

SEQ ID NO: 2011108 - DNA, 15 bp, Homo sapiens
ggtaagtgaatgtct

SEQ ID NO: 2011109 - DNA, 15 bp, Homo sapiens
gtaagtgaatgtctt

SEQ ID NO: 2011110 - DNA, 15 bp, Homo sapiens
taagtgaatgtcttt

SEQ ID NO: 2011111 - DNA, 15 bp, Homo sapiens
aagtgaatgtctttc

SEQ ID NO: 2011112 - DNA, 15 bp, Homo sapiens
agtgaatgtctttct

SEQ ID NO: 2011113 - DNA, 15 bp, Homo sapiens
gtgaatgtctttctg

SEQ ID NO: 2011114 - DNA, 15 bp, Homo sapiens
tgaatgtctttctga

SEQ ID NO: 2011115 - DNA, 15 bp, Homo sapiens
gaatgtctttctgac

SEQ ID NO: 2011116 - DNA, 15 bp, Homo sapiens
aatgtctttctgact

SEQ ID NO: 2011117 - DNA, 15 bp, Homo sapiens
atgtctttctgactt

SEQ ID NO: 2011118 - DNA, 15 bp, Homo sapiens
tgtctttctgacttt

SEQ ID NO: 2011119 - DNA, 15 bp, Homo sapiens
gtctttctgactttc

SEQ ID NO: 2011120 - DNA, 15 bp, Homo sapiens
tctttctgactttct

SEQ ID NO: 2011121 - DNA, 15 bp, Homo sapiens
ctttctgactttctt

SEQ ID NO: 2011122 - DNA, 15 bp, Homo sapiens
tttctgactttcttc

SEQ ID NO: 2011123 - DNA, 15 bp, Homo sapiens
ttctgactttcttct

SEQ ID NO: 2011124 - DNA, 15 bp, Homo sapiens
tctgactttcttctg

SEQ ID NO: 2011125 - DNA, 15 bp, Homo sapiens
ctgactttcttctgg

SEQ ID NO: 2011126 - DNA, 15 bp, Homo sapiens
tgactttcttctggg

SEQ ID NO: 2011127 - DNA, 15 bp, Homo sapiens
gactttcttctgggt

SEQ ID NO: 2011128 - DNA, 15 bp, Homo sapiens
actttcttctgggtc

SEQ ID NO: 2011129 - DNA, 15 bp, Homo sapiens
ctttcttctgggtcc

SEQ ID NO: 2011130 - DNA, 15 bp, Homo sapiens
tttcttctgggtccc

SEQ ID NO: 2011131 - DNA, 15 bp, Homo sapiens
ttcttctgggtccct

SEQ ID NO: 2011132 - DNA, 15 bp, Homo sapiens
tcttctgggtcccta

SEQ ID NO: 2011133 - DNA, 15 bp, Homo sapiens
cttctgggtccctat

SEQ ID NO: 2011134 - DNA, 15 bp, Homo sapiens
ttctgggtccctatt

SEQ ID NO: 2011135 - DNA, 15 bp, Homo sapiens
tctgggtccctattt

SEQ ID NO: 2011136 - DNA, 15 bp, Homo sapiens
ctgggtccctatttc

SEQ ID NO: 2011137 - DNA, 15 bp, Homo sapiens
tgggtccctatttca

SEQ ID NO: 2011138 - DNA, 15 bp, Homo sapiens
gggtccctatttcac

SEQ ID NO: 2011139 - DNA, 15 bp, Homo sapiens
ggtccctatttcact

SEQ ID NO: 2011140 - DNA, 15 bp, Homo sapiens
gtccctatttcactg

SEQ ID NO: 2011141 - DNA, 15 bp, Homo sapiens
tccctatttcactga

SEQ ID NO: 2011142 - DNA, 15 bp, Homo sapiens
ccctatttcactgat

SEQ ID NO: 2011143 - DNA, 15 bp, Homo sapiens
cctatttcactgata

SEQ ID NO: 2011144 - DNA, 15 bp, Homo sapiens
ctatttcactgatat

SEQ ID NO: 2011145 - DNA, 15 bp, Homo sapiens
tatttcactgatatc

SEQ ID NO: 2011146 - DNA, 15 bp, Homo sapiens
atttcactgatatct

SEQ ID NO: 2011147 - DNA, 15 bp, Homo sapiens
tttcactgatatcta

SEQ ID NO: 2011148 - DNA, 15 bp, Homo sapiens
ttcactgatatctaa

SEQ ID NO: 2011149 - DNA, 15 bp, Homo sapiens
tcactgatatctaaa

SEQ ID NO: 2011150 - DNA, 15 bp, Homo sapiens
cactgatatctaaac

SEQ ID NO: 2011151 - DNA, 15 bp, Homo sapiens
actgatatctaaacc

SEQ ID NO: 2011152 - DNA, 15 bp, Homo sapiens
ctgatatctaaacct

SEQ ID NO: 2011153 - DNA, 15 bp, Homo sapiens
tgatatctaaacctg

SEQ ID NO: 2011154 - DNA, 15 bp, Homo sapiens
gatatctaaacctga

SEQ ID NO: 2011155 - DNA, 15 bp, Homo sapiens
atatctaaacctgat

SEQ ID NO: 2011156 - DNA, 15 bp, Homo sapiens
tatctaaacctgatt

SEQ ID NO: 2011157 - DNA, 15 bp, Homo sapiens
atctaaacctgattt

SEQ ID NO: 2011158 - DNA, 15 bp, Homo sapiens
tctaaacctgatttc

SEQ ID NO: 2011159 - DNA, 15 bp, Homo sapiens
ctaaacctgatttct

SEQ ID NO: 2011160 - DNA, 15 bp, Homo sapiens
taaacctgatttcta

SEQ ID NO: 2011161 - DNA, 15 bp, Homo sapiens
aaacctgatttctag

SEQ ID NO: 2011162 - DNA, 15 bp, Homo sapiens
aacctgatttctagc

SEQ ID NO: 2011163 - DNA, 15 bp, Homo sapiens
acctgatttctagca

SEQ ID NO: 2011164 - DNA, 15 bp, Homo sapiens
cctgatttctagcag

SEQ ID NO: 2011165 - DNA, 15 bp, Homo sapiens
ctgatttctagcagg

SEQ ID NO: 2011166 - DNA, 15 bp, Homo sapiens
tgatttctagcaggg

SEQ ID NO: 2011167 - DNA, 15 bp, Homo sapiens
gatttctagcaggga

SEQ ID NO: 2011168 - DNA, 15 bp, Homo sapiens
atttctagcagggaa

SEQ ID NO: 2011169 - DNA, 15 bp, Homo sapiens
tttctagcagggaag

SEQ ID NO: 2011170 - DNA, 15 bp, Homo sapiens
ttctagcagggaaga

SEQ ID NO: 2011171 - DNA, 15 bp, Homo sapiens
tctagcagggaagag

SEQ ID NO: 2011172 - DNA, 15 bp, Homo sapiens
ctagcagggaagaga

SEQ ID NO: 2011173 - DNA, 15 bp, Homo sapiens
tagcagggaagagac

SEQ ID NO: 2011174 - DNA, 15 bp, Homo sapiens
agcagggaagagact

SEQ ID NO: 2011175 - DNA, 15 bp, Homo sapiens
gcagggaagagacta

SEQ ID NO: 2011176 - DNA, 15 bp, Homo sapiens
cagggaagagactaa

SEQ ID NO: 2011177 - DNA, 15 bp, Homo sapiens
agggaagagactaaa

SEQ ID NO: 2011178 - DNA, 15 bp, Homo sapiens
gggaagagactaaag

SEQ ID NO: 2011179 - DNA, 15 bp, Homo sapiens
ggaagagactaaagc

SEQ ID NO: 2011180 - DNA, 15 bp, Homo sapiens
gaagagactaaagca

SEQ ID NO: 2011181 - DNA, 15 bp, Homo sapiens
aagagactaaagcaa

SEQ ID NO: 2011182 - DNA, 15 bp, Homo sapiens
agagactaaagcaag

SEQ ID NO: 2011183 - DNA, 15 bp, Homo sapiens
gagactaaagcaagc

SEQ ID NO: 2011184 - DNA, 15 bp, Homo sapiens
agactaaagcaagca

SEQ ID NO: 2011185 - DNA, 15 bp, Homo sapiens
gactaaagcaagcac

SEQ ID NO: 2011186 - DNA, 15 bp, Homo sapiens
actaaagcaagcaca

SEQ ID NO: 2011187 - DNA, 15 bp, Homo sapiens
ctaaagcaagcacat

SEQ ID NO: 2011188 - DNA, 15 bp, Homo sapiens
taaagcaagcacatc

SEQ ID NO: 2011189 - DNA, 15 bp, Homo sapiens
aaagcaagcacatcc

SEQ ID NO: 2011190 - DNA, 15 bp, Homo sapiens
aagcaagcacatcct

SEQ ID NO: 2011191 - DNA, 15 bp, Homo sapiens
agcaagcacatcctt

SEQ ID NO: 2011192 - DNA, 15 bp, Homo sapiens
gcaagcacatccttt

SEQ ID NO: 2011193 - DNA, 15 bp, Homo sapiens
caagcacatcctttc

SEQ ID NO: 2011194 - DNA, 15 bp, Homo sapiens
aagcacatcctttca

SEQ ID NO: 2011195 - DNA, 15 bp, Homo sapiens
agcacatcctttcat

SEQ ID NO: 2011196 - DNA, 15 bp, Homo sapiens
gcacatcctttcatt

SEQ ID NO: 2011197 - DNA, 15 bp, Homo sapiens
cacatcctttcattc

SEQ ID NO: 2011198 - DNA, 15 bp, Homo sapiens
acatcctttcattcc

SEQ ID NO: 2011199 - DNA, 15 bp, Homo sapiens
catcctttcattccc

SEQ ID NO: 2011200 - DNA, 15 bp, Homo sapiens
atcctttcattccct

SEQ ID NO: 2011201 - DNA, 15 bp, Homo sapiens
tcctttcattccctt

SEQ ID NO: 2011202 - DNA, 15 bp, Homo sapiens
cctttcattcccttg

SEQ ID NO: 2011203 - DNA, 15 bp, Homo sapiens
ctttcattcccttgc

SEQ ID NO: 2011204 - DNA, 15 bp, Homo sapiens
tttcattcccttgct

SEQ ID NO: 2011205 - DNA, 15 bp, Homo sapiens
ttcattcccttgctc

SEQ ID NO: 2011206 - DNA, 15 bp, Homo sapiens
tcattcccttgctct

SEQ ID NO: 2011207 - DNA, 15 bp, Homo sapiens
cattcccttgctctc

SEQ ID NO: 2011208 - DNA, 15 bp, Homo sapiens
attcccttgctctca

SEQ ID NO: 2011209 - DNA, 15 bp, Homo sapiens
ttcccttgctctcag

SEQ ID NO: 2011210 - DNA, 15 bp, Homo sapiens
tcccttgctctcagt

SEQ ID NO: 2011211 - DNA, 15 bp, Homo sapiens
cccttgctctcagtg

SEQ ID NO: 2011212 - DNA, 15 bp, Homo sapiens
ccttgctctcagtgt

SEQ ID NO: 2011213 - DNA, 15 bp, Homo sapiens
cttgctctcagtgtg

SEQ ID NO: 2011214 - DNA, 15 bp, Homo sapiens
ttgctctcagtgtgt

SEQ ID NO: 2011215 - DNA, 15 bp, Homo sapiens
tgctctcagtgtgta

SEQ ID NO: 2011216 - DNA, 15 bp, Homo sapiens
gctctcagtgtgtag

SEQ ID NO: 2011217 - DNA, 15 bp, Homo sapiens
ctctcagtgtgtaga

SEQ ID NO: 2011218 - DNA, 15 bp, Homo sapiens
tctcagtgtgtagag

SEQ ID NO: 2011219 - DNA, 15 bp, Homo sapiens
ctcagtgtgtagagc

SEQ ID NO: 2011220 - DNA, 15 bp, Homo sapiens
tcagtgtgtagagct

SEQ ID NO: 2011221 - DNA, 15 bp, Homo sapiens
cagtgtgtagagctg

SEQ ID NO: 2011222 - DNA, 15 bp, Homo sapiens
agtgtgtagagctga

SEQ ID NO: 2011223 - DNA, 15 bp, Homo sapiens
gtgtgtagagctgaa

SEQ ID NO: 2011224 - DNA, 15 bp, Homo sapiens
tgtgtagagctgaaa

SEQ ID NO: 2011225 - DNA, 15 bp, Homo sapiens
gtgtagagctgaaat

SEQ ID NO: 2011226 - DNA, 15 bp, Homo sapiens
tgtagagctgaaatg

SEQ ID NO: 2011227 - DNA, 15 bp, Homo sapiens
gtagagctgaaatgt

SEQ ID NO: 2011228 - DNA, 15 bp, Homo sapiens
tagagctgaaatgtt

SEQ ID NO: 2011229 - DNA, 15 bp, Homo sapiens
agagctgaaatgttt

SEQ ID NO: 2011230 - DNA, 15 bp, Homo sapiens
gagctgaaatgtttc

SEQ ID NO: 2011231 - DNA, 15 bp, Homo sapiens
agctgaaatgtttcc

SEQ ID NO: 2011232 - DNA, 15 bp, Homo sapiens
gctgaaatgtttcca

SEQ ID NO: 2011233 - DNA, 15 bp, Homo sapiens
ctgaaatgtttccat

SEQ ID NO: 2011234 - DNA, 15 bp, Homo sapiens
tgaaatgtttccata

SEQ ID NO: 2011235 - DNA, 15 bp, Homo sapiens
gaaatgtttccatat

SEQ ID NO: 2011236 - DNA, 15 bp, Homo sapiens
aaatgtttccatata

SEQ ID NO: 2011237 - DNA, 15 bp, Homo sapiens
aatgtttccatatat

SEQ ID NO: 2011238 - DNA, 15 bp, Homo sapiens
atgtttccatatatg

SEQ ID NO: 2011239 - DNA, 15 bp, Homo sapiens
tgtttccatatatgg

SEQ ID NO: 2011240 - DNA, 15 bp, Homo sapiens
gtttccatatatggg

SEQ ID NO: 2011241 - DNA, 15 bp, Homo sapiens
tttccatatatggga

SEQ ID NO: 2011242 - DNA, 15 bp, Homo sapiens
ttccatatatgggaa

SEQ ID NO: 2011243 - DNA, 15 bp, Homo sapiens
tccatatatgggaat

SEQ ID NO: 2011244 - DNA, 15 bp, Homo sapiens
ccatatatgggaatt

SEQ ID NO: 2011245 - DNA, 15 bp, Homo sapiens
catatatgggaattt

SEQ ID NO: 2011246 - DNA, 15 bp, Homo sapiens
atatatgggaatttc

SEQ ID NO: 2011247 - DNA, 15 bp, Homo sapiens
tatatgggaatttct

SEQ ID NO: 2011248 - DNA, 15 bp, Homo sapiens
atatgggaatttctc

SEQ ID NO: 2011249 - DNA, 15 bp, Homo sapiens
tatgggaatttctca

SEQ ID NO: 2011250 - DNA, 15 bp, Homo sapiens
atgggaatttctcat

SEQ ID NO: 2011251 - DNA, 15 bp, Homo sapiens
tgggaatttctcata

SEQ ID NO: 2011252 - DNA, 15 bp, Homo sapiens
gggaatttctcatag

SEQ ID NO: 2011253 - DNA, 15 bp, Homo sapiens
ggaatttctcatagc

SEQ ID NO: 2011254 - DNA, 15 bp, Homo sapiens
gaatttctcatagca

SEQ ID NO: 2011255 - DNA, 15 bp, Homo sapiens
aatttctcatagcat

SEQ ID NO: 2011256 - DNA, 15 bp, Homo sapiens
atttctcatagcatt

SEQ ID NO: 2011257 - DNA, 15 bp, Homo sapiens
tttctcatagcattg

SEQ ID NO: 2011258 - DNA, 15 bp, Homo sapiens
ttctcatagcattgg

SEQ ID NO: 2011259 - DNA, 15 bp, Homo sapiens
tctcatagcattggg

SEQ ID NO: 2011260 - DNA, 15 bp, Homo sapiens
ctcatagcattgggt

SEQ ID NO: 2011261 - DNA, 15 bp, Homo sapiens
tcatagcattgggtt

SEQ ID NO: 2011262 - DNA, 15 bp, Homo sapiens
catagcattgggttt

SEQ ID NO: 2011263 - DNA, 15 bp, Homo sapiens
atagcattgggtttg

SEQ ID NO: 2011264 - DNA, 15 bp, Homo sapiens
tagcattgggtttgg

SEQ ID NO: 2011265 - DNA, 15 bp, Homo sapiens
agcattgggtttgga

SEQ ID NO: 2011266 - DNA, 15 bp, Homo sapiens
gcattgggtttggac

SEQ ID NO: 2011267 - DNA, 15 bp, Homo sapiens
cattgggtttggaca

SEQ ID NO: 2011268 - DNA, 15 bp, Homo sapiens
attgggtttggacat

SEQ ID NO: 2011269 - DNA, 15 bp, Homo sapiens
ttgggtttggacata

SEQ ID NO: 2011270 - DNA, 15 bp, Homo sapiens
tgggtttggacatac

SEQ ID NO: 2011271 - DNA, 15 bp, Homo sapiens
gggtttggacataca

SEQ ID NO: 2011272 - DNA, 15 bp, Homo sapiens
ggtttggacatacag

SEQ ID NO: 2011273 - DNA, 15 bp, Homo sapiens
gtttggacatacaga

SEQ ID NO: 2011274 - DNA, 15 bp, Homo sapiens
tttggacatacagat

SEQ ID NO: 2011275 - DNA, 15 bp, Homo sapiens
ttggacatacagatg

SEQ ID NO: 2011276 - DNA, 15 bp, Homo sapiens
tggacatacagatgt

SEQ ID NO: 2011277 - DNA, 15 bp, Homo sapiens
ggacatacagatgtg

SEQ ID NO: 2011278 - DNA, 15 bp, Homo sapiens
gacatacagatgtga

SEQ ID NO: 2011279 - DNA, 15 bp, Homo sapiens
acatacagatgtgat

SEQ ID NO: 2011280 - DNA, 15 bp, Homo sapiens
catacagatgtgata

SEQ ID NO: 2011281 - DNA, 15 bp, Homo sapiens
atacagatgtgataa

SEQ ID NO: 2011282 - DNA, 15 bp, Homo sapiens
tacagatgtgataat

SEQ ID NO: 2011283 - DNA, 15 bp, Homo sapiens
acagatgtgataata

SEQ ID NO: 2011284 - DNA, 15 bp, Homo sapiens
cagatgtgataataa

SEQ ID NO: 2011285 - DNA, 15 bp, Homo sapiens
agatgtgataataat

SEQ ID NO: 2011286 - DNA, 15 bp, Homo sapiens
gatgtgataataatc

SEQ ID NO: 2011287 - DNA, 15 bp, Homo sapiens
atgtgataataatcc

SEQ ID NO: 2011288 - DNA, 15 bp, Homo sapiens
tgtgataataatcct

SEQ ID NO: 2011289 - DNA, 15 bp, Homo sapiens
gtgataataatcctc

SEQ ID NO: 2011290 - DNA, 15 bp, Homo sapiens
tgataataatcctca

SEQ ID NO: 2011291 - DNA, 15 bp, Homo sapiens
gataataatcctcac

SEQ ID NO: 2011292 - DNA, 15 bp, Homo sapiens
ataataatcctcaca

SEQ ID NO: 2011293 - DNA, 15 bp, Homo sapiens
taataatcctcacaa

SEQ ID NO: 2011294 - DNA, 15 bp, Homo sapiens
aataatcctcacaac

SEQ ID NO: 2011295 - DNA, 15 bp, Homo sapiens
atcctcacaacaaca

SEQ ID NO: 2011296 - DNA, 15 bp, Homo sapiens
tcctcacaacaacaa

SEQ ID NO: 2011297 - DNA, 15 bp, Homo sapiens
cctcacaacaacaac

SEQ ID NO: 2011298 - DNA, 15 bp, Homo sapiens
ctcacaacaacaaca

SEQ ID NO: 2011299 - DNA, 15 bp, Homo sapiens
tcacaacaacaacat

SEQ ID NO: 2011300 - DNA, 15 bp, Homo sapiens
cacaacaacaacatt

SEQ ID NO: 2011301 - DNA, 15 bp, Homo sapiens
acaacaacaacatta

SEQ ID NO: 2011302 - DNA, 15 bp, Homo sapiens
caacaacaacattac

SEQ ID NO: 2011303 - DNA, 15 bp, Homo sapiens
aacaacaacattact

SEQ ID NO: 2011304 - DNA, 15 bp, Homo sapiens
acaacaacattactg

SEQ ID NO: 2011305 - DNA, 15 bp, Homo sapiens
caacaacattactgc

SEQ ID NO: 2011306 - DNA, 15 bp, Homo sapiens
aacaacattactgca

SEQ ID NO: 2011307 - DNA, 15 bp, Homo sapiens
acaacattactgcat

SEQ ID NO: 2011308 - DNA, 15 bp, Homo sapiens
caacattactgcatc

SEQ ID NO: 2011309 - DNA, 15 bp, Homo sapiens
aacattactgcatct

SEQ ID NO: 2011310 - DNA, 15 bp, Homo sapiens
acattactgcatcta

SEQ ID NO: 2011311 - DNA, 15 bp, Homo sapiens
cattactgcatctag

SEQ ID NO: 2011312 - DNA, 15 bp, Homo sapiens
attactgcatctagg

SEQ ID NO: 2011313 - DNA, 15 bp, Homo sapiens
ttactgcatctagga

SEQ ID NO: 2011314 - DNA, 15 bp, Homo sapiens
tactgcatctaggaa

SEQ ID NO: 2011315 - DNA, 15 bp, Homo sapiens
actgcatctaggaat

SEQ ID NO: 2011316 - DNA, 15 bp, Homo sapiens
ctgcatctaggaatg

SEQ ID NO: 2011317 - DNA, 15 bp, Homo sapiens
tgcatctaggaatgt

SEQ ID NO: 2011318 - DNA, 15 bp, Homo sapiens
gcatctaggaatgtg

SEQ ID NO: 2011319 - DNA, 15 bp, Homo sapiens
catctaggaatgtgg

SEQ ID NO: 2011320 - DNA, 15 bp, Homo sapiens
atctaggaatgtggg

SEQ ID NO: 2011321 - DNA, 15 bp, Homo sapiens
tctaggaatgtgggt

SEQ ID NO: 2011322 - DNA, 15 bp, Homo sapiens
ctaggaatgtgggtg

SEQ ID NO: 2011323 - DNA, 15 bp, Homo sapiens
taggaatgtgggtgg

SEQ ID NO: 2011324 - DNA, 15 bp, Homo sapiens
aggaatgtgggtggg

SEQ ID NO: 2011325 - DNA, 15 bp, Homo sapiens
ggaatgtgggtgggc

SEQ ID NO: 2011326 - DNA, 15 bp, Homo sapiens
gaatgtgggtgggcc

SEQ ID NO: 2011327 - DNA, 15 bp, Homo sapiens
aatgtgggtgggcca

SEQ ID NO: 2011328 - DNA, 15 bp, Homo sapiens
atgtgggtgggccaa

SEQ ID NO: 2011329 - DNA, 15 bp, Homo sapiens
tgtgggtgggccaag

SEQ ID NO: 2011330 - DNA, 15 bp, Homo sapiens
gtgggtgggccaaga

SEQ ID NO: 2011331 - DNA, 15 bp, Homo sapiens
tgggtgggccaagac

SEQ ID NO: 2011332 - DNA, 15 bp, Homo sapiens
gggtgggccaagaca

SEQ ID NO: 2011333 - DNA, 15 bp, Homo sapiens
ggtgggccaagacac

SEQ ID NO: 2011334 - DNA, 15 bp, Homo sapiens
gtgggccaagacact

SEQ ID NO: 2011335 - DNA, 15 bp, Homo sapiens
tgggccaagacactg

SEQ ID NO: 2011336 - DNA, 15 bp, Homo sapiens
gggccaagacactgt

SEQ ID NO: 2011337 - DNA, 15 bp, Homo sapiens
ggccaagacactgtg

SEQ ID NO: 2011338 - DNA, 15 bp, Homo sapiens
gccaagacactgtga

SEQ ID NO: 2011339 - DNA, 15 bp, Homo sapiens
ccaagacactgtgaa

SEQ ID NO: 2011340 - DNA, 15 bp, Homo sapiens
caagacactgtgaag

SEQ ID NO: 2011341 - DNA, 15 bp, Homo sapiens
aagacactgtgaagg

SEQ ID NO: 2011342 - DNA, 15 bp, Homo sapiens
agacactgtgaaggg

SEQ ID NO: 2011343 - DNA, 15 bp, Homo sapiens
gacactgtgaagggt

SEQ ID NO: 2011344 - DNA, 15 bp, Homo sapiens
acactgtgaagggtt

SEQ ID NO: 2011345 - DNA, 15 bp, Homo sapiens
cactgtgaagggttt

SEQ ID NO: 2011346 - DNA, 15 bp, Homo sapiens
actgtgaagggttta

SEQ ID NO: 2011347 - DNA, 15 bp, Homo sapiens
ctgtgaagggtttat

SEQ ID NO: 2011348 - DNA, 15 bp, Homo sapiens
tgtgaagggtttatg

SEQ ID NO: 2011349 - DNA, 15 bp, Homo sapiens
gtgaagggtttatgt

SEQ ID NO: 2011350 - DNA, 15 bp, Homo sapiens
tgaagggtttatgtg

SEQ ID NO: 2011351 - DNA, 15 bp, Homo sapiens
gaagggtttatgtga

SEQ ID NO: 2011352 - DNA, 15 bp, Homo sapiens
aagggtttatgtgaa

SEQ ID NO: 2011353 - DNA, 15 bp, Homo sapiens
agggtttatgtgaat

SEQ ID NO: 2011354 - DNA, 15 bp, Homo sapiens
gggtttatgtgaatt

SEQ ID NO: 2011355 - DNA, 15 bp, Homo sapiens
ggtttatgtgaatta

SEQ ID NO: 2011356 - DNA, 15 bp, Homo sapiens
gtttatgtgaattat

SEQ ID NO: 2011357 - DNA, 15 bp, Homo sapiens
tttatgtgaattatg

SEQ ID NO: 2011358 - DNA, 15 bp, Homo sapiens
ttatgtgaattatgt

SEQ ID NO: 2011359 - DNA, 15 bp, Homo sapiens
tatgtgaattatgtc

SEQ ID NO: 2011360 - DNA, 15 bp, Homo sapiens
atgtgaattatgtca

SEQ ID NO: 2011361 - DNA, 15 bp, Homo sapiens
tgtgaattatgtcat

SEQ ID NO: 2011362 - DNA, 15 bp, Homo sapiens
gtgaattatgtcatt

SEQ ID NO: 2011363 - DNA, 15 bp, Homo sapiens
tgaattatgtcattt

SEQ ID NO: 2011364 - DNA, 15 bp, Homo sapiens
gaattatgtcattta

SEQ ID NO: 2011365 - DNA, 15 bp, Homo sapiens
aattatgtcatttaa

SEQ ID NO: 2011366 - DNA, 15 bp, Homo sapiens
attatgtcatttaat

SEQ ID NO: 2011367 - DNA, 15 bp, Homo sapiens
ttatgtcatttaatc

SEQ ID NO: 2011368 - DNA, 15 bp, Homo sapiens
tatgtcatttaatct

SEQ ID NO: 2011369 - DNA, 15 bp, Homo sapiens
atgtcatttaatctt

SEQ ID NO: 2011370 - DNA, 15 bp, Homo sapiens
tgtcatttaatcttc

SEQ ID NO: 2011371 - DNA, 15 bp, Homo sapiens
gtcatttaatcttca

SEQ ID NO: 2011372 - DNA, 15 bp, Homo sapiens
tcatttaatcttcag

SEQ ID NO: 2011373 - DNA, 15 bp, Homo sapiens
catttaatcttcaga

SEQ ID NO: 2011374 - DNA, 15 bp, Homo sapiens
atttaatcttcagaa

SEQ ID NO: 2011375 - DNA, 15 bp, Homo sapiens
tttaatcttcagaaa

SEQ ID NO: 2011376 - DNA, 15 bp, Homo sapiens
ttaatcttcagaaaa

SEQ ID NO: 2011377 - DNA, 15 bp, Homo sapiens
taatcttcagaaaaa

SEQ ID NO: 2011378 - DNA, 15 bp, Homo sapiens
aatcttcagaaaaaa

SEQ ID NO: 2011379 - DNA, 15 bp, Homo sapiens
atcttcagaaaaaaa

SEQ ID NO: 2011380 - DNA, 15 bp, Homo sapiens
tcttcagaaaaaaac

SEQ ID NO: 2011381 - DNA, 15 bp, Homo sapiens
cttcagaaaaaaacc

SEQ ID NO: 2011382 - DNA, 15 bp, Homo sapiens
ttcagaaaaaaacca

SEQ ID NO: 2011383 - DNA, 15 bp, Homo sapiens
tcagaaaaaaaccac

SEQ ID NO: 2011384 - DNA, 15 bp, Homo sapiens
cagaaaaaaaccact

SEQ ID NO: 2011385 - DNA, 15 bp, Homo sapiens
agaaaaaaaccactg

SEQ ID NO: 2011386 - DNA, 15 bp, Homo sapiens
gaaaaaaaccactgt

SEQ ID NO: 2011387 - DNA, 15 bp, Homo sapiens
aaaaaaaccactgta

SEQ ID NO: 2011388 - DNA, 15 bp, Homo sapiens
aaaaaaccactgtaa

SEQ ID NO: 2011389 - DNA, 15 bp, Homo sapiens
aaaaaccactgtaag

SEQ ID NO: 2011390 - DNA, 15 bp, Homo sapiens
aaaaccactgtaagt

SEQ ID NO: 2011391 - DNA, 15 bp, Homo sapiens
aaaccactgtaagtt

SEQ ID NO: 2011392 - DNA, 15 bp, Homo sapiens
aaccactgtaagttc

SEQ ID NO: 2011393 - DNA, 15 bp, Homo sapiens
accactgtaagttct

SEQ ID NO: 2011394 - DNA, 15 bp, Homo sapiens
ccactgtaagttctg

SEQ ID NO: 2011395 - DNA, 15 bp, Homo sapiens
cactgtaagttctgc

SEQ ID NO: 2011396 - DNA, 15 bp, Homo sapiens
actgtaagttctgcc

SEQ ID NO: 2011397 - DNA, 15 bp, Homo sapiens
ctgtaagttctgcca

SEQ ID NO: 2011398 - DNA, 15 bp, Homo sapiens
tgtaagttctgccag

SEQ ID NO: 2011399 - DNA, 15 bp, Homo sapiens
gtaagttctgccagc

SEQ ID NO: 2011400 - DNA, 15 bp, Homo sapiens
taagttctgccagcc

SEQ ID NO: 2011401 - DNA, 15 bp, Homo sapiens
aagttctgccagccc

SEQ ID NO: 2011402 - DNA, 15 bp, Homo sapiens
agttctgccagccca

SEQ ID NO: 2011403 - DNA, 15 bp, Homo sapiens
tctgccagcccattt

SEQ ID NO: 2011404 - DNA, 15 bp, Homo sapiens
ctgccagcccatttt

SEQ ID NO: 2011405 - DNA, 15 bp, Homo sapiens
tgccagcccatttta

SEQ ID NO: 2011406 - DNA, 15 bp, Homo sapiens
gccagcccattttat

SEQ ID NO: 2011407 - DNA, 15 bp, Homo sapiens
ccagcccattttata

SEQ ID NO: 2011408 - DNA, 15 bp, Homo sapiens
cagcccattttatag

SEQ ID NO: 2011409 - DNA, 15 bp, Homo sapiens
agcccattttataga

SEQ ID NO: 2011410 - DNA, 15 bp, Homo sapiens
gcccattttatagat

SEQ ID NO: 2011411 - DNA, 15 bp, Homo sapiens
ccattttatagatga

SEQ ID NO: 2011412 - DNA, 15 bp, Homo sapiens
cattttatagatgag

SEQ ID NO: 2011413 - DNA, 15 bp, Homo sapiens
attttatagatgagg

SEQ ID NO: 2011414 - DNA, 15 bp, Homo sapiens
ttttatagatgagga

SEQ ID NO: 2011415 - DNA, 15 bp, Homo sapiens
tttatagatgaggaa

SEQ ID NO: 2011416 - DNA, 15 bp, Homo sapiens
ttatagatgaggaaa

SEQ ID NO: 2011417 - DNA, 15 bp, Homo sapiens
tatagatgaggaaac

SEQ ID NO: 2011418 - DNA, 15 bp, Homo sapiens
atagatgaggaaact

SEQ ID NO: 2011419 - DNA, 15 bp, Homo sapiens
agatgaggaaactgt

SEQ ID NO: 2011420 - DNA, 15 bp, Homo sapiens
gatgaggaaactgtg

SEQ ID NO: 2011421 - DNA, 15 bp, Homo sapiens
atgaggaaactgtga

SEQ ID NO: 2011422 - DNA, 15 bp, Homo sapiens
tgaggaaactgtgac

SEQ ID NO: 2011423 - DNA, 15 bp, Homo sapiens
gaggaaactgtgact

SEQ ID NO: 2011424 - DNA, 15 bp, Homo sapiens
aggaaactgtgactt

SEQ ID NO: 2011425 - DNA, 15 bp, Homo sapiens
ggaaactgtgactta

SEQ ID NO: 2011426 - DNA, 15 bp, Homo sapiens
gaaactgtgacttag

SEQ ID NO: 2011427 - DNA, 15 bp, Homo sapiens
aaactgtgacttaga

SEQ ID NO: 2011428 - DNA, 15 bp, Homo sapiens
aactgtgacttagag

SEQ ID NO: 2011429 - DNA, 15 bp, Homo sapiens
actgtgacttagagc

SEQ ID NO: 2011430 - DNA, 15 bp, Homo sapiens
ctgtgacttagagca

SEQ ID NO: 2011431 - DNA, 15 bp, Homo sapiens
tgtgacttagagcag

SEQ ID NO: 2011432 - DNA, 15 bp, Homo sapiens
gtgacttagagcagt

SEQ ID NO: 2011433 - DNA, 15 bp, Homo sapiens
tgacttagagcagtg

SEQ ID NO: 2011434 - DNA, 15 bp, Homo sapiens
gacttagagcagtga

SEQ ID NO: 2011435 - DNA, 15 bp, Homo sapiens
acttagagcagtgaa

SEQ ID NO: 2011436 - DNA, 15 bp, Homo sapiens
cttagagcagtgaaa

SEQ ID NO: 2011437 - DNA, 15 bp, Homo sapiens
ttagagcagtgaaat

SEQ ID NO: 2011438 - DNA, 15 bp, Homo sapiens
tagagcagtgaaata

SEQ ID NO: 2011439 - DNA, 15 bp, Homo sapiens
agagcagtgaaataa

SEQ ID NO: 2011440 - DNA, 15 bp, Homo sapiens
gagcagtgaaataac

SEQ ID NO: 2011441 - DNA, 15 bp, Homo sapiens
agcagtgaaataact

SEQ ID NO: 2011442 - DNA, 15 bp, Homo sapiens
gcagtgaaataactt

SEQ ID NO: 2011443 - DNA, 15 bp, Homo sapiens
cagtgaaataacttg

SEQ ID NO: 2011444 - DNA, 15 bp, Homo sapiens
agtgaaataacttgt

SEQ ID NO: 2011445 - DNA, 15 bp, Homo sapiens
gtgaaataacttgtc

SEQ ID NO: 2011446 - DNA, 15 bp, Homo sapiens
tgaaataacttgtct

SEQ ID NO: 2011447 - DNA, 15 bp, Homo sapiens
gaaataacttgtcta

SEQ ID NO: 2011448 - DNA, 15 bp, Homo sapiens
aaataacttgtctat

SEQ ID NO: 2011449 - DNA, 15 bp, Homo sapiens
aataacttgtctatg

SEQ ID NO: 2011450 - DNA, 15 bp, Homo sapiens
ataacttgtctatgg

SEQ ID NO: 2011451 - DNA, 15 bp, Homo sapiens
taacttgtctatggt

SEQ ID NO: 2011452 - DNA, 15 bp, Homo sapiens
aacttgtctatggtc

SEQ ID NO: 2011453 - DNA, 15 bp, Homo sapiens
acttgtctatggtca

SEQ ID NO: 2011454 - DNA, 15 bp, Homo sapiens
cttgtctatggtcat

SEQ ID NO: 2011455 - DNA, 15 bp, Homo sapiens
ttgtctatggtcata

SEQ ID NO: 2011456 - DNA, 15 bp, Homo sapiens
tgtctatggtcatac

SEQ ID NO: 2011457 - DNA, 15 bp, Homo sapiens
gtctatggtcataca

SEQ ID NO: 2011458 - DNA, 15 bp, Homo sapiens
tctatggtcatacag

SEQ ID NO: 2011459 - DNA, 15 bp, Homo sapiens
ctatggtcatacagc

SEQ ID NO: 2011460 - DNA, 15 bp, Homo sapiens
tatggtcatacagct

SEQ ID NO: 2011461 - DNA, 15 bp, Homo sapiens
atggtcatacagctg

SEQ ID NO: 2011462 - DNA, 15 bp, Homo sapiens
tggtcatacagctga

SEQ ID NO: 2011463 - DNA, 15 bp, Homo sapiens
ggtcatacagctgag

SEQ ID NO: 2011464 - DNA, 15 bp, Homo sapiens
gtcatacagctgaga

SEQ ID NO: 2011465 - DNA, 15 bp, Homo sapiens
tcatacagctgagaa

SEQ ID NO: 2011466 - DNA, 15 bp, Homo sapiens
catacagctgagaag

SEQ ID NO: 2011467 - DNA, 15 bp, Homo sapiens
atacagctgagaagt

SEQ ID NO: 2011468 - DNA, 15 bp, Homo sapiens
tacagctgagaagtg

SEQ ID NO: 2011469 - DNA, 15 bp, Homo sapiens
acagctgagaagtgg

SEQ ID NO: 2011470 - DNA, 15 bp, Homo sapiens
cagctgagaagtggc

SEQ ID NO: 2011471 - DNA, 15 bp, Homo sapiens
agctgagaagtggca

SEQ ID NO: 2011472 - DNA, 15 bp, Homo sapiens
gctgagaagtggcag

SEQ ID NO: 2011473 - DNA, 15 bp, Homo sapiens
ctgagaagtggcaga

SEQ ID NO: 2011474 - DNA, 15 bp, Homo sapiens
tgagaagtggcagag

SEQ ID NO: 2011475 - DNA, 15 bp, Homo sapiens
gagaagtggcagagg

SEQ ID NO: 2011476 - DNA, 15 bp, Homo sapiens
agaagtggcagaggc

SEQ ID NO: 2011477 - DNA, 15 bp, Homo sapiens
gaagtggcagaggca

SEQ ID NO: 2011478 - DNA, 15 bp, Homo sapiens
aagtggcagaggcaa

SEQ ID NO: 2011479 - DNA, 15 bp, Homo sapiens
agtggcagaggcaag

SEQ ID NO: 2011480 - DNA, 15 bp, Homo sapiens
gtggcagaggcaagt

SEQ ID NO: 2011481 - DNA, 15 bp, Homo sapiens
tggcagaggcaagtt

SEQ ID NO: 2011482 - DNA, 15 bp, Homo sapiens
ggcagaggcaagttg

SEQ ID NO: 2011483 - DNA, 15 bp, Homo sapiens
gcagaggcaagttgc

SEQ ID NO: 2011484 - DNA, 15 bp, Homo sapiens
cagaggcaagttgct

SEQ ID NO: 2011485 - DNA, 15 bp, Homo sapiens
agaggcaagttgctt

SEQ ID NO: 2011486 - DNA, 15 bp, Homo sapiens
gaggcaagttgcttg

SEQ ID NO: 2011487 - DNA, 15 bp, Homo sapiens
aggcaagttgcttgt

SEQ ID NO: 2011488 - DNA, 15 bp, Homo sapiens
ggcaagttgcttgta

SEQ ID NO: 2011489 - DNA, 15 bp, Homo sapiens
gcaagttgcttgtaa

SEQ ID NO: 2011490 - DNA, 15 bp, Homo sapiens
caagttgcttgtaaa

SEQ ID NO: 2011491 - DNA, 15 bp, Homo sapiens
aagttgcttgtaaag

SEQ ID NO: 2011492 - DNA, 15 bp, Homo sapiens
agttgcttgtaaagt

SEQ ID NO: 2011493 - DNA, 15 bp, Homo sapiens
gttgcttgtaaagta

SEQ ID NO: 2011494 - DNA, 15 bp, Homo sapiens
ttgcttgtaaagtag

SEQ ID NO: 2011495 - DNA, 15 bp, Homo sapiens
tgcttgtaaagtaga

SEQ ID NO: 2011496 - DNA, 15 bp, Homo sapiens
gcttgtaaagtagag

SEQ ID NO: 2011497 - DNA, 15 bp, Homo sapiens
cttgtaaagtagagc

SEQ ID NO: 2011498 - DNA, 15 bp, Homo sapiens
ttgtaaagtagagcc

SEQ ID NO: 2011499 - DNA, 15 bp, Homo sapiens
tgtaaagtagagcca

SEQ ID NO: 2011500 - DNA, 15 bp, Homo sapiens
gtaaagtagagccaa

SEQ ID NO: 2011501 - DNA, 15 bp, Homo sapiens
taaagtagagccaag

SEQ ID NO: 2011502 - DNA, 15 bp, Homo sapiens
aaagtagagccaagc

SEQ ID NO: 2011503 - DNA, 15 bp, Homo sapiens
aagtagagccaagcc

SEQ ID NO: 2011504 - DNA, 15 bp, Homo sapiens
agtagagccaagcct

SEQ ID NO: 2011505 - DNA, 15 bp, Homo sapiens
gtagagccaagcctt

SEQ ID NO: 2011506 - DNA, 15 bp, Homo sapiens
tagagccaagcctta

SEQ ID NO: 2011507 - DNA, 15 bp, Homo sapiens
agagccaagccttag

SEQ ID NO: 2011508 - DNA, 15 bp, Homo sapiens
gagccaagccttaga

SEQ ID NO: 2011509 - DNA, 15 bp, Homo sapiens
agccaagccttagag

SEQ ID NO: 2011510 - DNA, 15 bp, Homo sapiens
gccaagccttagaga

SEQ ID NO: 2011511 - DNA, 15 bp, Homo sapiens
ccaagccttagagat

SEQ ID NO: 2011512 - DNA, 15 bp, Homo sapiens
caagccttagagatg

SEQ ID NO: 2011513 - DNA, 15 bp, Homo sapiens
aagccttagagatgg

SEQ ID NO: 2011514 - DNA, 15 bp, Homo sapiens
agccttagagatgga

SEQ ID NO: 2011515 - DNA, 15 bp, Homo sapiens
gccttagagatggat

SEQ ID NO: 2011516 - DNA, 15 bp, Homo sapiens
ccttagagatggatg

SEQ ID NO: 2011517 - DNA, 15 bp, Homo sapiens
cttagagatggatgg

SEQ ID NO: 2011518 - DNA, 15 bp, Homo sapiens
ttagagatggatggg

SEQ ID NO: 2011519 - DNA, 15 bp, Homo sapiens
tagagatggatgggt

SEQ ID NO: 2011520 - DNA, 15 bp, Homo sapiens
agagatggatgggtg

SEQ ID NO: 2011521 - DNA, 15 bp, Homo sapiens
gagatggatgggtga

SEQ ID NO: 2011522 - DNA, 15 bp, Homo sapiens
agatggatgggtgaa

SEQ ID NO: 2011523 - DNA, 15 bp, Homo sapiens
gatggatgggtgaag

SEQ ID NO: 2011524 - DNA, 15 bp, Homo sapiens
atggatgggtgaaga

SEQ ID NO: 2011525 - DNA, 15 bp, Homo sapiens
tggatgggtgaagat

SEQ ID NO: 2011526 - DNA, 15 bp, Homo sapiens
ggatgggtgaagata

SEQ ID NO: 2011527 - DNA, 15 bp, Homo sapiens
gatgggtgaagatag

SEQ ID NO: 2011528 - DNA, 15 bp, Homo sapiens
atgggtgaagataga

SEQ ID NO: 2011529 - DNA, 15 bp, Homo sapiens
tgggtgaagatagat

SEQ ID NO: 2011530 - DNA, 15 bp, Homo sapiens
gggtgaagatagata

SEQ ID NO: 2011531 - DNA, 15 bp, Homo sapiens
ggtgaagatagatat

SEQ ID NO: 2011532 - DNA, 15 bp, Homo sapiens
gtgaagatagatata

SEQ ID NO: 2011533 - DNA, 15 bp, Homo sapiens
tgaagatagatatag

SEQ ID NO: 2011534 - DNA, 15 bp, Homo sapiens
gaagatagatataga

SEQ ID NO: 2011535 - DNA, 15 bp, Homo sapiens
aagatagatatagat

SEQ ID NO: 2011536 - DNA, 15 bp, Homo sapiens
agatagatatagatg

SEQ ID NO: 2011537 - DNA, 15 bp, Homo sapiens
gatagatatagatgt

SEQ ID NO: 2011538 - DNA, 15 bp, Homo sapiens
atagatatagatgta

SEQ ID NO: 2011539 - DNA, 15 bp, Homo sapiens
tagatatagatgtat

SEQ ID NO: 2011540 - DNA, 15 bp, Homo sapiens
agatatagatgtatg

SEQ ID NO: 2011541 - DNA, 15 bp, Homo sapiens
gatatagatgtatgt

SEQ ID NO: 2011542 - DNA, 15 bp, Homo sapiens
atatagatgtatgtg

SEQ ID NO: 2011543 - DNA, 15 bp, Homo sapiens
tatagatgtatgtgt

SEQ ID NO: 2011544 - DNA, 15 bp, Homo sapiens
atagatgtatgtgta

SEQ ID NO: 2011545 - DNA, 15 bp, Homo sapiens
tagatgtatgtgtat

SEQ ID NO: 2011546 - DNA, 15 bp, Homo sapiens
agatgtatgtgtata

SEQ ID NO: 2011547 - DNA, 15 bp, Homo sapiens
gatgtatgtgtatat

SEQ ID NO: 2011548 - DNA, 15 bp, Homo sapiens
atgtatgtgtatata

SEQ ID NO: 2011549 - DNA, 15 bp, Homo sapiens
tgtatgtgtatatag

SEQ ID NO: 2011550 - DNA, 15 bp, Homo sapiens
gtatgtgtatatagg

SEQ ID NO: 2011551 - DNA, 15 bp, Homo sapiens
tatgtgtatataggt

SEQ ID NO: 2011552 - DNA, 15 bp, Homo sapiens
atgtgtatataggta

SEQ ID NO: 2011553 - DNA, 15 bp, Homo sapiens
tgtgtatataggtat

SEQ ID NO: 2011554 - DNA, 15 bp, Homo sapiens
gtgtatataggtatg

SEQ ID NO: 2011555 - DNA, 15 bp, Homo sapiens
tgtatataggtatgt

SEQ ID NO: 2011556 - DNA, 15 bp, Homo sapiens
gtatataggtatgtg

SEQ ID NO: 2011557 - DNA, 15 bp, Homo sapiens
tatataggtatgtgt

SEQ ID NO: 2011558 - DNA, 15 bp, Homo sapiens
atataggtatgtgta

SEQ ID NO: 2011559 - DNA, 15 bp, Homo sapiens
tataggtatgtgtat

SEQ ID NO: 2011560 - DNA, 15 bp, Homo sapiens
ataggtatgtgtata

SEQ ID NO: 2011561 - DNA, 15 bp, Homo sapiens
taggtatgtgtatat

SEQ ID NO: 2011562 - DNA, 15 bp, Homo sapiens
aggtatgtgtatatc

SEQ ID NO: 2011563 - DNA, 15 bp, Homo sapiens
ggtatgtgtatatct

SEQ ID NO: 2011564 - DNA, 15 bp, Homo sapiens
gtatgtgtatatctg

SEQ ID NO: 2011565 - DNA, 15 bp, Homo sapiens
tatgtgtatatctgt

SEQ ID NO: 2011566 - DNA, 15 bp, Homo sapiens
atgtgtatatctgta

SEQ ID NO: 2011567 - DNA, 15 bp, Homo sapiens
tgtgtatatctgtac

SEQ ID NO: 2011568 - DNA, 15 bp, Homo sapiens
gtgtatatctgtaca

SEQ ID NO: 2011569 - DNA, 15 bp, Homo sapiens
tgtatatctgtacac

SEQ ID NO: 2011570 - DNA, 15 bp, Homo sapiens
gtatatctgtacaca

SEQ ID NO: 2011571 - DNA, 15 bp, Homo sapiens
tatatctgtacacat

SEQ ID NO: 2011572 - DNA, 15 bp, Homo sapiens
atatctgtacacata

SEQ ID NO: 2011573 - DNA, 15 bp, Homo sapiens
tatctgtacacatat

SEQ ID NO: 2011574 - DNA, 15 bp, Homo sapiens
atctgtacacatatg

SEQ ID NO: 2011575 - DNA, 15 bp, Homo sapiens
tctgtacacatatgc

SEQ ID NO: 2011576 - DNA, 15 bp, Homo sapiens
ctgtacacatatgca

SEQ ID NO: 2011577 - DNA, 15 bp, Homo sapiens
tgtacacatatgcat

SEQ ID NO: 2011578 - DNA, 15 bp, Homo sapiens
gtacacatatgcata

SEQ ID NO: 2011579 - DNA, 15 bp, Homo sapiens
tacacatatgcatac

SEQ ID NO: 2011580 - DNA, 15 bp, Homo sapiens
acacatatgcataca

SEQ ID NO: 2011581 - DNA, 15 bp, Homo sapiens
cacatatgcatacat

SEQ ID NO: 2011582 - DNA, 15 bp, Homo sapiens
acatatgcatacata

SEQ ID NO: 2011583 - DNA, 15 bp, Homo sapiens
catatgcatacatat

SEQ ID NO: 2011584 - DNA, 15 bp, Homo sapiens
atatgcatacatatt

SEQ ID NO: 2011585 - DNA, 15 bp, Homo sapiens
tatgcatacatattt

SEQ ID NO: 2011586 - DNA, 15 bp, Homo sapiens
atgcatacatatttg

SEQ ID NO: 2011587 - DNA, 15 bp, Homo sapiens
tgcatacatatttga

SEQ ID NO: 2011588 - DNA, 15 bp, Homo sapiens
gcatacatatttgat

SEQ ID NO: 2011589 - DNA, 15 bp, Homo sapiens
catacatatttgatg

SEQ ID NO: 2011590 - DNA, 15 bp, Homo sapiens
atacatatttgatgt

SEQ ID NO: 2011591 - DNA, 15 bp, Homo sapiens
tacatatttgatgtg

SEQ ID NO: 2011592 - DNA, 15 bp, Homo sapiens
acatatttgatgtgc

SEQ ID NO: 2011593 - DNA, 15 bp, Homo sapiens
catatttgatgtgct

SEQ ID NO: 2011594 - DNA, 15 bp, Homo sapiens
atatttgatgtgctt

SEQ ID NO: 2011595 - DNA, 15 bp, Homo sapiens
tatttgatgtgcttg

SEQ ID NO: 2011596 - DNA, 15 bp, Homo sapiens
atttgatgtgcttga

SEQ ID NO: 2011597 - DNA, 15 bp, Homo sapiens
tttgatgtgcttgag

SEQ ID NO: 2011598 - DNA, 15 bp, Homo sapiens
ttgatgtgcttgaga

SEQ ID NO: 2011599 - DNA, 15 bp, Homo sapiens
tgatgtgcttgagag

SEQ ID NO: 2011600 - DNA, 15 bp, Homo sapiens
gatgtgcttgagaga

SEQ ID NO: 2011601 - DNA, 15 bp, Homo sapiens
atgtgcttgagagat

SEQ ID NO: 2011602 - DNA, 15 bp, Homo sapiens
tgtgcttgagagata

SEQ ID NO: 2011603 - DNA, 15 bp, Homo sapiens
gtgcttgagagatag

SEQ ID NO: 2011604 - DNA, 15 bp, Homo sapiens
tgcttgagagataga

SEQ ID NO: 2011605 - DNA, 15 bp, Homo sapiens
gcttgagagatagat

SEQ ID NO: 2011606 - DNA, 15 bp, Homo sapiens
cttgagagatagatg

SEQ ID NO: 2011607 - DNA, 15 bp, Homo sapiens
ttgagagatagatgc

SEQ ID NO: 2011608 - DNA, 15 bp, Homo sapiens
tgagagatagatgct

SEQ ID NO: 2011609 - DNA, 15 bp, Homo sapiens
gagagatagatgcta

SEQ ID NO: 2011610 - DNA, 15 bp, Homo sapiens
agagatagatgctaa

SEQ ID NO: 2011611 - DNA, 15 bp, Homo sapiens
gagatagatgctaag

SEQ ID NO: 2011612 - DNA, 15 bp, Homo sapiens
agatagatgctaagg

SEQ ID NO: 2011613 - DNA, 15 bp, Homo sapiens
gatagatgctaagga

SEQ ID NO: 2011614 - DNA, 15 bp, Homo sapiens
atagatgctaaggac

SEQ ID NO: 2011615 - DNA, 15 bp, Homo sapiens
tagatgctaaggact

SEQ ID NO: 2011616 - DNA, 15 bp, Homo sapiens
agatgctaaggacta

SEQ ID NO: 2011617 - DNA, 15 bp, Homo sapiens
gatgctaaggactaa

SEQ ID NO: 2011618 - DNA, 15 bp, Homo sapiens
atgctaaggactaat

SEQ ID NO: 2011619 - DNA, 15 bp, Homo sapiens
tgctaaggactaatg

SEQ ID NO: 2011620 - DNA, 15 bp, Homo sapiens
gctaaggactaatgc

SEQ ID NO: 2011621 - DNA, 15 bp, Homo sapiens
ctaaggactaatgca

SEQ ID NO: 2011622 - DNA, 15 bp, Homo sapiens
taaggactaatgcat

SEQ ID NO: 2011623 - DNA, 15 bp, Homo sapiens
aaggactaatgcatt

SEQ ID NO: 2011624 - DNA, 15 bp, Homo sapiens
aggactaatgcattt

SEQ ID NO: 2011625 - DNA, 15 bp, Homo sapiens
ggactaatgcatttt

SEQ ID NO: 2011626 - DNA, 15 bp, Homo sapiens
gactaatgcattttg

SEQ ID NO: 2011627 - DNA, 15 bp, Homo sapiens
actaatgcattttga

SEQ ID NO: 2011628 - DNA, 15 bp, Homo sapiens
ctaatgcattttgaa

SEQ ID NO: 2011629 - DNA, 15 bp, Homo sapiens
taatgcattttgaaa

SEQ ID NO: 2011630 - DNA, 15 bp, Homo sapiens
aatgcattttgaaat

SEQ ID NO: 2011631 - DNA, 15 bp, Homo sapiens
atgcattttgaaatt

SEQ ID NO: 2011632 - DNA, 15 bp, Homo sapiens
tgcattttgaaattt

SEQ ID NO: 2011633 - DNA, 15 bp, Homo sapiens
gcattttgaaatttt

SEQ ID NO: 2011634 - DNA, 15 bp, Homo sapiens
cattttgaaattttt

SEQ ID NO: 2011635 - DNA, 15 bp, Homo sapiens
attttgaaatttttc

SEQ ID NO: 2011636 - DNA, 15 bp, Homo sapiens
ttttgaaatttttct

SEQ ID NO: 2011637 - DNA, 15 bp, Homo sapiens
tttgaaatttttctg

SEQ ID NO: 2011638 - DNA, 15 bp, Homo sapiens
ttgaaatttttctgg

SEQ ID NO: 2011639 - DNA, 15 bp, Homo sapiens
tgaaatttttctgga

SEQ ID NO: 2011640 - DNA, 15 bp, Homo sapiens
gaaatttttctggag

SEQ ID NO: 2011641 - DNA, 15 bp, Homo sapiens
aaatttttctggagc

SEQ ID NO: 2011642 - DNA, 15 bp, Homo sapiens
aatttttctggagcc

SEQ ID NO: 2011643 - DNA, 15 bp, Homo sapiens
atttttctggagcca

SEQ ID NO: 2011644 - DNA, 15 bp, Homo sapiens
tttttctggagccag

SEQ ID NO: 2011645 - DNA, 15 bp, Homo sapiens
ttttctggagccagg

SEQ ID NO: 2011646 - DNA, 15 bp, Homo sapiens
tttctggagccagga

SEQ ID NO: 2011647 - DNA, 15 bp, Homo sapiens
ttctggagccaggaa

SEQ ID NO: 2011648 - DNA, 15 bp, Homo sapiens
tctggagccaggaat

SEQ ID NO: 2011649 - DNA, 15 bp, Homo sapiens
ctggagccaggaata

SEQ ID NO: 2011650 - DNA, 15 bp, Homo sapiens
tggagccaggaatat

SEQ ID NO: 2011651 - DNA, 15 bp, Homo sapiens
ggagccaggaatata

SEQ ID NO: 2011652 - DNA, 15 bp, Homo sapiens
gagccaggaatatag

SEQ ID NO: 2011653 - DNA, 15 bp, Homo sapiens
agccaggaatatagt

SEQ ID NO: 2011654 - DNA, 15 bp, Homo sapiens
gccaggaatatagta

SEQ ID NO: 2011655 - DNA, 15 bp, Homo sapiens
ccaggaatatagtaa

SEQ ID NO: 2011656 - DNA, 15 bp, Homo sapiens
caggaatatagtaat

SEQ ID NO: 2011657 - DNA, 15 bp, Homo sapiens
aggaatatagtaata

SEQ ID NO: 2011658 - DNA, 15 bp, Homo sapiens
ggaatatagtaatac

SEQ ID NO: 2011659 - DNA, 15 bp, Homo sapiens
gaatatagtaatact

SEQ ID NO: 2011660 - DNA, 15 bp, Homo sapiens
aatatagtaatactt

SEQ ID NO: 2011661 - DNA, 15 bp, Homo sapiens
atatagtaatactta

SEQ ID NO: 2011662 - DNA, 15 bp, Homo sapiens
tatagtaatacttag

SEQ ID NO: 2011663 - DNA, 15 bp, Homo sapiens
atagtaatacttagt

SEQ ID NO: 2011664 - DNA, 15 bp, Homo sapiens
tagtaatacttagtg

SEQ ID NO: 2011665 - DNA, 15 bp, Homo sapiens
agtaatacttagtgg

SEQ ID NO: 2011666 - DNA, 15 bp, Homo sapiens
gtaatacttagtggc

SEQ ID NO: 2011667 - DNA, 15 bp, Homo sapiens
taatacttagtggca

SEQ ID NO: 2011668 - DNA, 15 bp, Homo sapiens
aatacttagtggcaa

SEQ ID NO: 2011669 - DNA, 15 bp, Homo sapiens
atacttagtggcaaa

SEQ ID NO: 2011670 - DNA, 15 bp, Homo sapiens
tacttagtggcaaat

SEQ ID NO: 2011671 - DNA, 15 bp, Homo sapiens
acttagtggcaaata

SEQ ID NO: 2011672 - DNA, 15 bp, Homo sapiens
cttagtggcaaataa

SEQ ID NO: 2011673 - DNA, 15 bp, Homo sapiens
ttagtggcaaataat

SEQ ID NO: 2011674 - DNA, 15 bp, Homo sapiens
tagtggcaaataatg

SEQ ID NO: 2011675 - DNA, 15 bp, Homo sapiens
agtggcaaataatga

SEQ ID NO: 2011676 - DNA, 15 bp, Homo sapiens
gtggcaaataatgag

SEQ ID NO: 2011677 - DNA, 15 bp, Homo sapiens
tggcaaataatgagc

SEQ ID NO: 2011678 - DNA, 15 bp, Homo sapiens
ggcaaataatgagcc

SEQ ID NO: 2011679 - DNA, 15 bp, Homo sapiens
gcaaataatgagcct

SEQ ID NO: 2011680 - DNA, 15 bp, Homo sapiens
caaataatgagcctt

SEQ ID NO: 2011681 - DNA, 15 bp, Homo sapiens
aaataatgagccttt

SEQ ID NO: 2011682 - DNA, 15 bp, Homo sapiens
aataatgagcctttt

SEQ ID NO: 2011683 - DNA, 15 bp, Homo sapiens
ataatgagccttttt

SEQ ID NO: 2011684 - DNA, 15 bp, Homo sapiens
taatgagcctttttc

SEQ ID NO: 2011685 - DNA, 15 bp, Homo sapiens
aatgagcctttttcc

SEQ ID NO: 2011686 - DNA, 15 bp, Homo sapiens
atgagcctttttcca

SEQ ID NO: 2011687 - DNA, 15 bp, Homo sapiens
tgagcctttttccat

SEQ ID NO: 2011688 - DNA, 15 bp, Homo sapiens
gagcctttttccatt

SEQ ID NO: 2011689 - DNA, 15 bp, Homo sapiens
agcctttttccatta

SEQ ID NO: 2011690 - DNA, 15 bp, Homo sapiens
gcctttttccattaa

SEQ ID NO: 2011691 - DNA, 15 bp, Homo sapiens
cctttttccattaat

SEQ ID NO: 2011692 - DNA, 15 bp, Homo sapiens
ctttttccattaata

SEQ ID NO: 2011693 - DNA, 15 bp, Homo sapiens
tttttccattaataa

SEQ ID NO: 2011694 - DNA, 15 bp, Homo sapiens
ttttccattaataat

SEQ ID NO: 2011695 - DNA, 15 bp, Homo sapiens
tttccattaataata

SEQ ID NO: 2011696 - DNA, 15 bp, Homo sapiens
ttccattaataataa

SEQ ID NO: 2011697 - DNA, 15 bp, Homo sapiens
tccattaataataag

SEQ ID NO: 2011698 - DNA, 15 bp, Homo sapiens
ccattaataataaga

SEQ ID NO: 2011699 - DNA, 15 bp, Homo sapiens
cattaataataagaa

SEQ ID NO: 2011700 - DNA, 15 bp, Homo sapiens
attaataataagaat

SEQ ID NO: 2011701 - DNA, 15 bp, Homo sapiens
ttaataataagaata

SEQ ID NO: 2011702 - DNA, 15 bp, Homo sapiens
taataataagaatat

SEQ ID NO: 2011703 - DNA, 15 bp, Homo sapiens
aataataagaatata

SEQ ID NO: 2011704 - DNA, 15 bp, Homo sapiens
ataataagaatataa

SEQ ID NO: 2011705 - DNA, 15 bp, Homo sapiens
taataagaatataat

SEQ ID NO: 2011706 - DNA, 15 bp, Homo sapiens
aataagaatataatt

SEQ ID NO: 2011707 - DNA, 15 bp, Homo sapiens
ataagaatataattt

SEQ ID NO: 2011708 - DNA, 15 bp, Homo sapiens
taagaatataatttc

SEQ ID NO: 2011709 - DNA, 15 bp, Homo sapiens
aagaatataatttct

SEQ ID NO: 2011710 - DNA, 15 bp, Homo sapiens
agaatataatttctt

SEQ ID NO: 2011711 - DNA, 15 bp, Homo sapiens
gaatataatttcttt

SEQ ID NO: 2011712 - DNA, 15 bp, Homo sapiens
aatataatttctttg

SEQ ID NO: 2011713 - DNA, 15 bp, Homo sapiens
atataatttctttgg

SEQ ID NO: 2011714 - DNA, 15 bp, Homo sapiens
tataatttctttgga

SEQ ID NO: 2011715 - DNA, 15 bp, Homo sapiens
ataatttctttggaa

SEQ ID NO: 2011716 - DNA, 15 bp, Homo sapiens
taatttctttggaag

SEQ ID NO: 2011717 - DNA, 15 bp, Homo sapiens
aatttctttggaagg

SEQ ID NO: 2011718 - DNA, 15 bp, Homo sapiens
atttctttggaagga

SEQ ID NO: 2011719 - DNA, 15 bp, Homo sapiens
tttctttggaaggaa

SEQ ID NO: 2011720 - DNA, 15 bp, Homo sapiens
ttctttggaaggaaa

SEQ ID NO: 2011721 - DNA, 15 bp, Homo sapiens
tctttggaaggaaat

SEQ ID NO: 2011722 - DNA, 15 bp, Homo sapiens
ctttggaaggaaata

SEQ ID NO: 2011723 - DNA, 15 bp, Homo sapiens
tttggaaggaaatac

SEQ ID NO: 2011724 - DNA, 15 bp, Homo sapiens
ttggaaggaaatact

SEQ ID NO: 2011725 - DNA, 15 bp, Homo sapiens
tggaaggaaatacta

SEQ ID NO: 2011726 - DNA, 15 bp, Homo sapiens
ggaaggaaatactat

SEQ ID NO: 2011727 - DNA, 15 bp, Homo sapiens
gaaggaaatactatc

SEQ ID NO: 2011728 - DNA, 15 bp, Homo sapiens
aaggaaatactatct

SEQ ID NO: 2011729 - DNA, 15 bp, Homo sapiens
aggaaatactatcta

SEQ ID NO: 2011730 - DNA, 15 bp, Homo sapiens
ggaaatactatctaa

SEQ ID NO: 2011731 - DNA, 15 bp, Homo sapiens
gaaatactatctaat

SEQ ID NO: 2011732 - DNA, 15 bp, Homo sapiens
aaatactatctaatt

SEQ ID NO: 2011733 - DNA, 15 bp, Homo sapiens
aatactatctaatta

SEQ ID NO: 2011734 - DNA, 15 bp, Homo sapiens
atactatctaattat

SEQ ID NO: 2011735 - DNA, 15 bp, Homo sapiens
tactatctaattata

SEQ ID NO: 2011736 - DNA, 15 bp, Homo sapiens
actatctaattatag

SEQ ID NO: 2011737 - DNA, 15 bp, Homo sapiens
ctatctaattatagt

SEQ ID NO: 2011738 - DNA, 15 bp, Homo sapiens
tatctaattatagtt

SEQ ID NO: 2011739 - DNA, 15 bp, Homo sapiens
atctaattatagttt

SEQ ID NO: 2011740 - DNA, 15 bp, Homo sapiens
tctaattatagtttc

SEQ ID NO: 2011741 - DNA, 15 bp, Homo sapiens
ctaattatagtttcc

SEQ ID NO: 2011742 - DNA, 15 bp, Homo sapiens
taattatagtttccc

SEQ ID NO: 2011743 - DNA, 15 bp, Homo sapiens
aattatagtttccct

SEQ ID NO: 2011744 - DNA, 15 bp, Homo sapiens
attatagtttccctc

SEQ ID NO: 2011745 - DNA, 15 bp, Homo sapiens
ttatagtttccctca

SEQ ID NO: 2011746 - DNA, 15 bp, Homo sapiens
tatagtttccctcag

SEQ ID NO: 2011747 - DNA, 15 bp, Homo sapiens
atagtttccctcagt

SEQ ID NO: 2011748 - DNA, 15 bp, Homo sapiens
tagtttccctcagta

SEQ ID NO: 2011749 - DNA, 15 bp, Homo sapiens
agtttccctcagtat

SEQ ID NO: 2011750 - DNA, 15 bp, Homo sapiens
gtttccctcagtata

SEQ ID NO: 2011751 - DNA, 15 bp, Homo sapiens
tttccctcagtatat

SEQ ID NO: 2011752 - DNA, 15 bp, Homo sapiens
ttccctcagtatatc

SEQ ID NO: 2011753 - DNA, 15 bp, Homo sapiens
tccctcagtatatct

SEQ ID NO: 2011754 - DNA, 15 bp, Homo sapiens
ccctcagtatatctg

SEQ ID NO: 2011755 - DNA, 15 bp, Homo sapiens
cctcagtatatctgg

SEQ ID NO: 2011756 - DNA, 15 bp, Homo sapiens
ctcagtatatctggg

SEQ ID NO: 2011757 - DNA, 15 bp, Homo sapiens
tcagtatatctgggg

SEQ ID NO: 2011758 - DNA, 15 bp, Homo sapiens
cagtatatctggggg

SEQ ID NO: 2011759 - DNA, 15 bp, Homo sapiens
agtatatctggggga

SEQ ID NO: 2011760 - DNA, 15 bp, Homo sapiens
gtatatctgggggat

SEQ ID NO: 2011761 - DNA, 15 bp, Homo sapiens
tatatctgggggatt

SEQ ID NO: 2011762 - DNA, 15 bp, Homo sapiens
atatctgggggattg

SEQ ID NO: 2011763 - DNA, 15 bp, Homo sapiens
tatctgggggattgg

SEQ ID NO: 2011764 - DNA, 15 bp, Homo sapiens
atctgggggattggt

SEQ ID NO: 2011765 - DNA, 15 bp, Homo sapiens
tctgggggattggtt

SEQ ID NO: 2011766 - DNA, 15 bp, Homo sapiens
ctgggggattggtta

SEQ ID NO: 2011767 - DNA, 15 bp, Homo sapiens
tgggggattggttag

SEQ ID NO: 2011768 - DNA, 15 bp, Homo sapiens
gggggattggttagc

SEQ ID NO: 2011769 - DNA, 15 bp, Homo sapiens
ggggattggttagca

SEQ ID NO: 2011770 - DNA, 15 bp, Homo sapiens
gggattggttagcag

SEQ ID NO: 2011771 - DNA, 15 bp, Homo sapiens
ggattggttagcaga

SEQ ID NO: 2011772 - DNA, 15 bp, Homo sapiens
gattggttagcagac

SEQ ID NO: 2011773 - DNA, 15 bp, Homo sapiens
attggttagcagacc

SEQ ID NO: 2011774 - DNA, 15 bp, Homo sapiens
ttggttagcagaccc

SEQ ID NO: 2011775 - DNA, 15 bp, Homo sapiens
tggttagcagacccc

SEQ ID NO: 2011776 - DNA, 15 bp, Homo sapiens
ggttagcagacccct

SEQ ID NO: 2011777 - DNA, 15 bp, Homo sapiens
gttagcagacccctg

SEQ ID NO: 2011778 - DNA, 15 bp, Homo sapiens
ttagcagacccctgt

SEQ ID NO: 2011779 - DNA, 15 bp, Homo sapiens
tagcagacccctgtg

SEQ ID NO: 2011780 - DNA, 15 bp, Homo sapiens
agcagacccctgtgt

SEQ ID NO: 2011781 - DNA, 15 bp, Homo sapiens
gcagacccctgtgta

SEQ ID NO: 2011782 - DNA, 15 bp, Homo sapiens
cagacccctgtgtat

SEQ ID NO: 2011783 - DNA, 15 bp, Homo sapiens
agacccctgtgtata

SEQ ID NO: 2011784 - DNA, 15 bp, Homo sapiens
gacccctgtgtatac

SEQ ID NO: 2011785 - DNA, 15 bp, Homo sapiens
acccctgtgtatacc

SEQ ID NO: 2011786 - DNA, 15 bp, Homo sapiens
cccctgtgtatacca

SEQ ID NO: 2011787 - DNA, 15 bp, Homo sapiens
ccctgtgtataccaa

SEQ ID NO: 2011788 - DNA, 15 bp, Homo sapiens
cctgtgtataccaaa

SEQ ID NO: 2011789 - DNA, 15 bp, Homo sapiens
ctgtgtataccaaaa

SEQ ID NO: 2011790 - DNA, 15 bp, Homo sapiens
tgtgtataccaaaat

SEQ ID NO: 2011791 - DNA, 15 bp, Homo sapiens
gtgtataccaaaatt

SEQ ID NO: 2011792 - DNA, 15 bp, Homo sapiens
tgtataccaaaattt

SEQ ID NO: 2011793 - DNA, 15 bp, Homo sapiens
gtataccaaaatttg

SEQ ID NO: 2011794 - DNA, 15 bp, Homo sapiens
tataccaaaatttgc

SEQ ID NO: 2011795 - DNA, 15 bp, Homo sapiens
ataccaaaatttgcg

SEQ ID NO: 2011796 - DNA, 15 bp, Homo sapiens
taccaaaatttgcgc

SEQ ID NO: 2011797 - DNA, 15 bp, Homo sapiens
accaaaatttgcgca

SEQ ID NO: 2011798 - DNA, 15 bp, Homo sapiens
ccaaaatttgcgcat

SEQ ID NO: 2011799 - DNA, 15 bp, Homo sapiens
caaaatttgcgcata

SEQ ID NO: 2011800 - DNA, 15 bp, Homo sapiens
aaaatttgcgcatat

SEQ ID NO: 2011801 - DNA, 15 bp, Homo sapiens
aaatttgcgcatatt

SEQ ID NO: 2011802 - DNA, 15 bp, Homo sapiens
aatttgcgcatattc

SEQ ID NO: 2011803 - DNA, 15 bp, Homo sapiens
atttgcgcatattca

SEQ ID NO: 2011804 - DNA, 15 bp, Homo sapiens
tttgcgcatattcaa

SEQ ID NO: 2011805 - DNA, 15 bp, Homo sapiens
ttgcgcatattcaaa

SEQ ID NO: 2011806 - DNA, 15 bp, Homo sapiens
tgcgcatattcaaat

SEQ ID NO: 2011807 - DNA, 15 bp, Homo sapiens
gcgcatattcaaatc

SEQ ID NO: 2011808 - DNA, 15 bp, Homo sapiens
cgcatattcaaatcc

SEQ ID NO: 2011809 - DNA, 15 bp, Homo sapiens
gcatattcaaatccc

SEQ ID NO: 2011810 - DNA, 15 bp, Homo sapiens
catattcaaatccca

SEQ ID NO: 2011811 - DNA, 15 bp, Homo sapiens
atattcaaatcccaa

SEQ ID NO: 2011812 - DNA, 15 bp, Homo sapiens
tattcaaatcccaaa

SEQ ID NO: 2011813 - DNA, 15 bp, Homo sapiens
attcaaatcccaaaa

SEQ ID NO: 2011814 - DNA, 15 bp, Homo sapiens
ttcaaatcccaaaat

SEQ ID NO: 2011815 - DNA, 15 bp, Homo sapiens
tcaaatcccaaaatc

SEQ ID NO: 2011816 - DNA, 15 bp, Homo sapiens
caaatcccaaaatcg

SEQ ID NO: 2011817 - DNA, 15 bp, Homo sapiens
aaatcccaaaatcgg

SEQ ID NO: 2011818 - DNA, 15 bp, Homo sapiens
aatcccaaaatcggc

SEQ ID NO: 2011819 - DNA, 15 bp, Homo sapiens
atcccaaaatcggcc

SEQ ID NO: 2011820 - DNA, 15 bp, Homo sapiens
tcccaaaatcggccc

SEQ ID NO: 2011821 - DNA, 15 bp, Homo sapiens
cccaaaatcggccct

SEQ ID NO: 2011822 - DNA, 15 bp, Homo sapiens
ccaaaatcggccctg

SEQ ID NO: 2011823 - DNA, 15 bp, Homo sapiens
caaaatcggccctgt

SEQ ID NO: 2011824 - DNA, 15 bp, Homo sapiens
aaaatcggccctgtg

SEQ ID NO: 2011825 - DNA, 15 bp, Homo sapiens
aaatcggccctgtgg

SEQ ID NO: 2011826 - DNA, 15 bp, Homo sapiens
aatcggccctgtgga

SEQ ID NO: 2011827 - DNA, 15 bp, Homo sapiens
atcggccctgtggaa

SEQ ID NO: 2011828 - DNA, 15 bp, Homo sapiens
tcggccctgtggaac

SEQ ID NO: 2011829 - DNA, 15 bp, Homo sapiens
cggccctgtggaacg

SEQ ID NO: 2011830 - DNA, 15 bp, Homo sapiens
ggccctgtggaacgt

SEQ ID NO: 2011831 - DNA, 15 bp, Homo sapiens
gccctgtggaacgtg

SEQ ID NO: 2011832 - DNA, 15 bp, Homo sapiens
ccctgtggaacgtgc

SEQ ID NO: 2011833 - DNA, 15 bp, Homo sapiens
cctgtggaacgtgct

SEQ ID NO: 2011834 - DNA, 15 bp, Homo sapiens
ctgtggaacgtgctt

SEQ ID NO: 2011835 - DNA, 15 bp, Homo sapiens
tgtggaacgtgcttc

SEQ ID NO: 2011836 - DNA, 15 bp, Homo sapiens
gtggaacgtgcttcc

SEQ ID NO: 2011837 - DNA, 15 bp, Homo sapiens
tggaacgtgcttcct

SEQ ID NO: 2011838 - DNA, 15 bp, Homo sapiens
ggaacgtgcttcctt

SEQ ID NO: 2011839 - DNA, 15 bp, Homo sapiens
gaacgtgcttccttg

SEQ ID NO: 2011840 - DNA, 15 bp, Homo sapiens
aacgtgcttccttgt

SEQ ID NO: 2011841 - DNA, 15 bp, Homo sapiens
acgtgcttccttgtg

SEQ ID NO: 2011842 - DNA, 15 bp, Homo sapiens
cgtgcttccttgtgg

SEQ ID NO: 2011843 - DNA, 15 bp, Homo sapiens
gtgcttccttgtgga

SEQ ID NO: 2011844 - DNA, 15 bp, Homo sapiens
tgcttccttgtggaa

SEQ ID NO: 2011845 - DNA, 15 bp, Homo sapiens
gcttccttgtggaac

SEQ ID NO: 2011846 - DNA, 15 bp, Homo sapiens
cttccttgtggaacc

SEQ ID NO: 2011847 - DNA, 15 bp, Homo sapiens
ttccttgtggaacct

SEQ ID NO: 2011848 - DNA, 15 bp, Homo sapiens
tccttgtggaaccta

SEQ ID NO: 2011849 - DNA, 15 bp, Homo sapiens
ccttgtggaacctat

SEQ ID NO: 2011850 - DNA, 15 bp, Homo sapiens
cttgtggaacctatt

SEQ ID NO: 2011851 - DNA, 15 bp, Homo sapiens
ttgtggaacctattt

SEQ ID NO: 2011852 - DNA, 15 bp, Homo sapiens
tgtggaacctattta

SEQ ID NO: 2011853 - DNA, 15 bp, Homo sapiens
gtggaacctatttat

SEQ ID NO: 2011854 - DNA, 15 bp, Homo sapiens
tggaacctatttata

SEQ ID NO: 2011855 - DNA, 15 bp, Homo sapiens
ggaacctatttatac

SEQ ID NO: 2011856 - DNA, 15 bp, Homo sapiens
gaacctatttataca

SEQ ID NO: 2011857 - DNA, 15 bp, Homo sapiens
aacctatttatacag

SEQ ID NO: 2011858 - DNA, 15 bp, Homo sapiens
acctatttatacagt

SEQ ID NO: 2011859 - DNA, 15 bp, Homo sapiens
cctatttatacagta

SEQ ID NO: 2011860 - DNA, 15 bp, Homo sapiens
ctatttatacagtat

SEQ ID NO: 2011861 - DNA, 15 bp, Homo sapiens
tatttatacagtatg

SEQ ID NO: 2011862 - DNA, 15 bp, Homo sapiens
atttatacagtatgt

SEQ ID NO: 2011863 - DNA, 15 bp, Homo sapiens
tttatacagtatgtg

SEQ ID NO: 2011864 - DNA, 15 bp, Homo sapiens
ttatacagtatgtgg

SEQ ID NO: 2011865 - DNA, 15 bp, Homo sapiens
tatacagtatgtggg

SEQ ID NO: 2011866 - DNA, 15 bp, Homo sapiens
atacagtatgtgggt

SEQ ID NO: 2011867 - DNA, 15 bp, Homo sapiens
tacagtatgtgggtt

SEQ ID NO: 2011868 - DNA, 15 bp, Homo sapiens
acagtatgtgggttt

SEQ ID NO: 2011869 - DNA, 15 bp, Homo sapiens
cagtatgtgggtttc

SEQ ID NO: 2011870 - DNA, 15 bp, Homo sapiens
agtatgtgggtttca

SEQ ID NO: 2011871 - DNA, 15 bp, Homo sapiens
gtatgtgggtttcac

SEQ ID NO: 2011872 - DNA, 15 bp, Homo sapiens
tatgtgggtttcaca

SEQ ID NO: 2011873 - DNA, 15 bp, Homo sapiens
atgtgggtttcacat

SEQ ID NO: 2011874 - DNA, 15 bp, Homo sapiens
tgtgggtttcacatc

SEQ ID NO: 2011875 - DNA, 15 bp, Homo sapiens
gtgggtttcacatcc

SEQ ID NO: 2011876 - DNA, 15 bp, Homo sapiens
tgggtttcacatccc

SEQ ID NO: 2011877 - DNA, 15 bp, Homo sapiens
gggtttcacatccca

SEQ ID NO: 2011878 - DNA, 15 bp, Homo sapiens
ggtttcacatcccac

SEQ ID NO: 2011879 - DNA, 15 bp, Homo sapiens
gtttcacatcccaca

SEQ ID NO: 2011880 - DNA, 15 bp, Homo sapiens
tttcacatcccacaa

SEQ ID NO: 2011881 - DNA, 15 bp, Homo sapiens
ttcacatcccacaaa

SEQ ID NO: 2011882 - DNA, 15 bp, Homo sapiens
tcacatcccacaaat

SEQ ID NO: 2011883 - DNA, 15 bp, Homo sapiens
cacatcccacaaata

SEQ ID NO: 2011884 - DNA, 15 bp, Homo sapiens
acatcccacaaatac

SEQ ID NO: 2011885 - DNA, 15 bp, Homo sapiens
catcccacaaatact

SEQ ID NO: 2011886 - DNA, 15 bp, Homo sapiens
atcccacaaatactg

SEQ ID NO: 2011887 - DNA, 15 bp, Homo sapiens
tcccacaaatactgt

SEQ ID NO: 2011888 - DNA, 15 bp, Homo sapiens
cccacaaatactgtg

SEQ ID NO: 2011889 - DNA, 15 bp, Homo sapiens
ccacaaatactgtgc

SEQ ID NO: 2011890 - DNA, 15 bp, Homo sapiens
cacaaatactgtgct

SEQ ID NO: 2011891 - DNA, 15 bp, Homo sapiens
acaaatactgtgctt

SEQ ID NO: 2011892 - DNA, 15 bp, Homo sapiens
caaatactgtgcttt

SEQ ID NO: 2011893 - DNA, 15 bp, Homo sapiens
aaatactgtgctttc

SEQ ID NO: 2011894 - DNA, 15 bp, Homo sapiens
aatactgtgctttca

SEQ ID NO: 2011895 - DNA, 15 bp, Homo sapiens
atactgtgctttcaa

SEQ ID NO: 2011896 - DNA, 15 bp, Homo sapiens
tactgtgctttcaat

SEQ ID NO: 2011897 - DNA, 15 bp, Homo sapiens
actgtgctttcaatc

SEQ ID NO: 2011898 - DNA, 15 bp, Homo sapiens
ctgtgctttcaatct

SEQ ID NO: 2011899 - DNA, 15 bp, Homo sapiens
tgtgctttcaatcta

SEQ ID NO: 2011900 - DNA, 15 bp, Homo sapiens
gtgctttcaatctat

SEQ ID NO: 2011901 - DNA, 15 bp, Homo sapiens
tgctttcaatctatg

SEQ ID NO: 2011902 - DNA, 15 bp, Homo sapiens
gctttcaatctatgt

SEQ ID NO: 2011903 - DNA, 15 bp, Homo sapiens
ctttcaatctatgta

SEQ ID NO: 2011904 - DNA, 15 bp, Homo sapiens
tttcaatctatgtat

SEQ ID NO: 2011905 - DNA, 15 bp, Homo sapiens
ttcaatctatgtata

SEQ ID NO: 2011906 - DNA, 15 bp, Homo sapiens
tcaatctatgtataa

SEQ ID NO: 2011907 - DNA, 15 bp, Homo sapiens
caatctatgtataag

SEQ ID NO: 2011908 - DNA, 15 bp, Homo sapiens
aatctatgtataagt

SEQ ID NO: 2011909 - DNA, 15 bp, Homo sapiens
atctatgtataagtg

SEQ ID NO: 2011910 - DNA, 15 bp, Homo sapiens
tctatgtataagtgt

SEQ ID NO: 2011911 - DNA, 15 bp, Homo sapiens
ctatgtataagtgtg

SEQ ID NO: 2011912 - DNA, 15 bp, Homo sapiens
tatgtataagtgtgc

SEQ ID NO: 2011913 - DNA, 15 bp, Homo sapiens
atgtataagtgtgcc

SEQ ID NO: 2011914 - DNA, 15 bp, Homo sapiens
tgtataagtgtgccc

SEQ ID NO: 2011915 - DNA, 15 bp, Homo sapiens
gtataagtgtgccca

SEQ ID NO: 2011916 - DNA, 15 bp, Homo sapiens
tataagtgtgcccat

SEQ ID NO: 2011917 - DNA, 15 bp, Homo sapiens
ataagtgtgcccatg

SEQ ID NO: 2011918 - DNA, 15 bp, Homo sapiens
taagtgtgcccatgc

SEQ ID NO: 2011919 - DNA, 15 bp, Homo sapiens
aagtgtgcccatgcc

SEQ ID NO: 2011920 - DNA, 15 bp, Homo sapiens
agtgtgcccatgcca

SEQ ID NO: 2011921 - DNA, 15 bp, Homo sapiens
gtgtgcccatgccat

SEQ ID NO: 2011922 - DNA, 15 bp, Homo sapiens
tgtgcccatgccatt

SEQ ID NO: 2011923 - DNA, 15 bp, Homo sapiens
gtgcccatgccattc

SEQ ID NO: 2011924 - DNA, 15 bp, Homo sapiens
tgcccatgccattca

SEQ ID NO: 2011925 - DNA, 15 bp, Homo sapiens
gcccatgccattcaa

SEQ ID NO: 2011926 - DNA, 15 bp, Homo sapiens
cccatgccattcaaa

SEQ ID NO: 2011927 - DNA, 15 bp, Homo sapiens
ccatgccattcaaac

SEQ ID NO: 2011928 - DNA, 15 bp, Homo sapiens
catgccattcaaacc

SEQ ID NO: 2011929 - DNA, 15 bp, Homo sapiens
atgccattcaaaccc

SEQ ID NO: 2011930 - DNA, 15 bp, Homo sapiens
tgccattcaaaccca

SEQ ID NO: 2011931 - DNA, 15 bp, Homo sapiens
gccattcaaacccat

SEQ ID NO: 2011932 - DNA, 15 bp, Homo sapiens
ccattcaaacccatg

SEQ ID NO: 2011933 - DNA, 15 bp, Homo sapiens
cattcaaacccatgt

SEQ ID NO: 2011934 - DNA, 15 bp, Homo sapiens
attcaaacccatgtt

SEQ ID NO: 2011935 - DNA, 15 bp, Homo sapiens
ttcaaacccatgttg

SEQ ID NO: 2011936 - DNA, 15 bp, Homo sapiens
tcaaacccatgttgt

SEQ ID NO: 2011937 - DNA, 15 bp, Homo sapiens
caaacccatgttgtt

SEQ ID NO: 2011938 - DNA, 15 bp, Homo sapiens
aaacccatgttgttc

SEQ ID NO: 2011939 - DNA, 15 bp, Homo sapiens
aacccatgttgttca

SEQ ID NO: 2011940 - DNA, 15 bp, Homo sapiens
acccatgttgttcaa

SEQ ID NO: 2011941 - DNA, 15 bp, Homo sapiens
cccatgttgttcaag

SEQ ID NO: 2011942 - DNA, 15 bp, Homo sapiens
ccatgttgttcaagg

SEQ ID NO: 2011943 - DNA, 15 bp, Homo sapiens
catgttgttcaaggg

SEQ ID NO: 2011944 - DNA, 15 bp, Homo sapiens
atgttgttcaagggt

SEQ ID NO: 2011945 - DNA, 15 bp, Homo sapiens
tgttgttcaagggtc

SEQ ID NO: 2011946 - DNA, 15 bp, Homo sapiens
gttgttcaagggtca

SEQ ID NO: 2011947 - DNA, 15 bp, Homo sapiens
ttgttcaagggtcaa

SEQ ID NO: 2011948 - DNA, 15 bp, Homo sapiens
tgttcaagggtcaac

SEQ ID NO: 2011949 - DNA, 15 bp, Homo sapiens
gttcaagggtcaact

SEQ ID NO: 2011950 - DNA, 15 bp, Homo sapiens
ttcaagggtcaactt

SEQ ID NO: 2011951 - DNA, 15 bp, Homo sapiens
tcaagggtcaacttt

SEQ ID NO: 2011952 - DNA, 15 bp, Homo sapiens
caagggtcaacttta

SEQ ID NO: 2011953 - DNA, 15 bp, Homo sapiens
aagggtcaactttac

SEQ ID NO: 2011954 - DNA, 15 bp, Homo sapiens
agggtcaactttact

SEQ ID NO: 2011955 - DNA, 15 bp, Homo sapiens
gggtcaactttactt

SEQ ID NO: 2011956 - DNA, 15 bp, Homo sapiens
ggtcaactttacttt

SEQ ID NO: 2011957 - DNA, 15 bp, Homo sapiens
gtcaactttacttta

SEQ ID NO: 2011958 - DNA, 15 bp, Homo sapiens
tcaactttactttaa

SEQ ID NO: 2011959 - DNA, 15 bp, Homo sapiens
caactttactttaag

SEQ ID NO: 2011960 - DNA, 15 bp, Homo sapiens
aactttactttaagg

SEQ ID NO: 2011961 - DNA, 15 bp, Homo sapiens
actttactttaaggc

SEQ ID NO: 2011962 - DNA, 15 bp, Homo sapiens
ctttactttaaggct

SEQ ID NO: 2011963 - DNA, 15 bp, Homo sapiens
tttactttaaggcta

SEQ ID NO: 2011964 - DNA, 15 bp, Homo sapiens
ttactttaaggctag

SEQ ID NO: 2011965 - DNA, 15 bp, Homo sapiens
tactttaaggctaga

SEQ ID NO: 2011966 - DNA, 15 bp, Homo sapiens
actttaaggctagat

SEQ ID NO: 2011967 - DNA, 15 bp, Homo sapiens
ctttaaggctagata

SEQ ID NO: 2011968 - DNA, 15 bp, Homo sapiens
tttaaggctagataa

SEQ ID NO: 2011969 - DNA, 15 bp, Homo sapiens
ttaaggctagataat

SEQ ID NO: 2011970 - DNA, 15 bp, Homo sapiens
taaggctagataatt

SEQ ID NO: 2011971 - DNA, 15 bp, Homo sapiens
aaggctagataattc

SEQ ID NO: 2011972 - DNA, 15 bp, Homo sapiens
aggctagataattct

SEQ ID NO: 2011973 - DNA, 15 bp, Homo sapiens
ggctagataattctt

SEQ ID NO: 2011974 - DNA, 15 bp, Homo sapiens
gctagataattcttc

SEQ ID NO: 2011975 - DNA, 15 bp, Homo sapiens
ctagataattcttct

SEQ ID NO: 2011976 - DNA, 15 bp, Homo sapiens
tagataattcttctg

SEQ ID NO: 2011977 - DNA, 15 bp, Homo sapiens
agataattcttctgt

SEQ ID NO: 2011978 - DNA, 15 bp, Homo sapiens
gataattcttctgtc

SEQ ID NO: 2011979 - DNA, 15 bp, Homo sapiens
ataattcttctgtct

SEQ ID NO: 2011980 - DNA, 15 bp, Homo sapiens
taattcttctgtcta

SEQ ID NO: 2011981 - DNA, 15 bp, Homo sapiens
aattcttctgtctaa

SEQ ID NO: 2011982 - DNA, 15 bp, Homo sapiens
attcttctgtctaag

SEQ ID NO: 2011983 - DNA, 15 bp, Homo sapiens
ttcttctgtctaaga

SEQ ID NO: 2011984 - DNA, 15 bp, Homo sapiens
tcttctgtctaagaa

SEQ ID NO: 2011985 - DNA, 15 bp, Homo sapiens
cttctgtctaagaac

SEQ ID NO: 2011986 - DNA, 15 bp, Homo sapiens
ttctgtctaagaact

SEQ ID NO: 2011987 - DNA, 15 bp, Homo sapiens
tctgtctaagaactt

SEQ ID NO: 2011988 - DNA, 15 bp, Homo sapiens
ctgtctaagaactta

SEQ ID NO: 2011989 - DNA, 15 bp, Homo sapiens
tgtctaagaacttag

SEQ ID NO: 2011990 - DNA, 15 bp, Homo sapiens
gtctaagaacttaga

SEQ ID NO: 2011991 - DNA, 15 bp, Homo sapiens
tctaagaacttagag

SEQ ID NO: 2011992 - DNA, 15 bp, Homo sapiens
ctaagaacttagagt

SEQ ID NO: 2011993 - DNA, 15 bp, Homo sapiens
taagaacttagagtc

SEQ ID NO: 2011994 - DNA, 15 bp, Homo sapiens
aagaacttagagtct

SEQ ID NO: 2011995 - DNA, 15 bp, Homo sapiens
agaacttagagtctg

SEQ ID NO: 2011996 - DNA, 15 bp, Homo sapiens
gaacttagagtctga

SEQ ID NO: 2011997 - DNA, 15 bp, Homo sapiens
aacttagagtctgag

SEQ ID NO: 2011998 - DNA, 15 bp, Homo sapiens
acttagagtctgagt

SEQ ID NO: 2011999 - DNA, 15 bp, Homo sapiens
cttagagtctgagta

SEQ ID NO: 2012000 - DNA, 15 bp, Homo sapiens
ttagagtctgagtag

SEQ ID NO: 2012001 - DNA, 15 bp, Homo sapiens
tagagtctgagtagt

SEQ ID NO: 2012002 - DNA, 15 bp, Homo sapiens
agagtctgagtagtt

SEQ ID NO: 2012003 - DNA, 15 bp, Homo sapiens
gagtctgagtagttg

SEQ ID NO: 2012004 - DNA, 15 bp, Homo sapiens
agtctgagtagttga

SEQ ID NO: 2012005 - DNA, 15 bp, Homo sapiens
gtctgagtagttgac

SEQ ID NO: 2012006 - DNA, 15 bp, Homo sapiens
tctgagtagttgacg

SEQ ID NO: 2012007 - DNA, 15 bp, Homo sapiens
ctgagtagttgacgt

SEQ ID NO: 2012008 - DNA, 15 bp, Homo sapiens
tgagtagttgacgta

SEQ ID NO: 2012009 - DNA, 15 bp, Homo sapiens
gagtagttgacgtat

SEQ ID NO: 2012010 - DNA, 15 bp, Homo sapiens
agtagttgacgtata

SEQ ID NO: 2012011 - DNA, 15 bp, Homo sapiens
gtagttgacgtatat

SEQ ID NO: 2012012 - DNA, 15 bp, Homo sapiens
tagttgacgtatatt

SEQ ID NO: 2012013 - DNA, 15 bp, Homo sapiens
agttgacgtatattg

SEQ ID NO: 2012014 - DNA, 15 bp, Homo sapiens
gttgacgtatattgt

SEQ ID NO: 2012015 - DNA, 15 bp, Homo sapiens
ttgacgtatattgta

SEQ ID NO: 2012016 - DNA, 15 bp, Homo sapiens
tgacgtatattgtac

SEQ ID NO: 2012017 - DNA, 15 bp, Homo sapiens
gacgtatattgtact

SEQ ID NO: 2012018 - DNA, 15 bp, Homo sapiens
acgtatattgtactt

SEQ ID NO: 2012019 - DNA, 15 bp, Homo sapiens
cgtatattgtacttg

SEQ ID NO: 2012020 - DNA, 15 bp, Homo sapiens
gtatattgtacttgt

SEQ ID NO: 2012021 - DNA, 15 bp, Homo sapiens
tatattgtacttgta

SEQ ID NO: 2012022 - DNA, 15 bp, Homo sapiens
atattgtacttgtaa

SEQ ID NO: 2012023 - DNA, 15 bp, Homo sapiens
tattgtacttgtaag

SEQ ID NO: 2012024 - DNA, 15 bp, Homo sapiens
attgtacttgtaagt

SEQ ID NO: 2012025 - DNA, 15 bp, Homo sapiens
ttgtacttgtaagtt

SEQ ID NO: 2012026 - DNA, 15 bp, Homo sapiens
tgtacttgtaagttt

SEQ ID NO: 2012027 - DNA, 15 bp, Homo sapiens
gtacttgtaagttta

SEQ ID NO: 2012028 - DNA, 15 bp, Homo sapiens
tacttgtaagtttac

SEQ ID NO: 2012029 - DNA, 15 bp, Homo sapiens
acttgtaagtttacc

SEQ ID NO: 2012030 - DNA, 15 bp, Homo sapiens
cttgtaagtttacca

SEQ ID NO: 2012031 - DNA, 15 bp, Homo sapiens
ttgtaagtttaccaa

SEQ ID NO: 2012032 - DNA, 15 bp, Homo sapiens
tgtaagtttaccaag

SEQ ID NO: 2012033 - DNA, 15 bp, Homo sapiens
gtaagtttaccaagt

SEQ ID NO: 2012034 - DNA, 15 bp, Homo sapiens
taagtttaccaagtt

SEQ ID NO: 2012035 - DNA, 15 bp, Homo sapiens
aagtttaccaagttt

SEQ ID NO: 2012036 - DNA, 15 bp, Homo sapiens
agtttaccaagtttg

SEQ ID NO: 2012037 - DNA, 15 bp, Homo sapiens
gtttaccaagtttga

SEQ ID NO: 2012038 - DNA, 15 bp, Homo sapiens
tttaccaagtttgac

SEQ ID NO: 2012039 - DNA, 15 bp, Homo sapiens
ttaccaagtttgact

SEQ ID NO: 2012040 - DNA, 15 bp, Homo sapiens
taccaagtttgactc

SEQ ID NO: 2012041 - DNA, 15 bp, Homo sapiens
accaagtttgactct

SEQ ID NO: 2012042 - DNA, 15 bp, Homo sapiens
ccaagtttgactctg

SEQ ID NO: 2012043 - DNA, 15 bp, Homo sapiens
caagtttgactctgc

SEQ ID NO: 2012044 - DNA, 15 bp, Homo sapiens
aagtttgactctgca

SEQ ID NO: 2012045 - DNA, 15 bp, Homo sapiens
agtttgactctgcat

SEQ ID NO: 2012046 - DNA, 15 bp, Homo sapiens
gtttgactctgcatt

SEQ ID NO: 2012047 - DNA, 15 bp, Homo sapiens
tttgactctgcattt

SEQ ID NO: 2012048 - DNA, 15 bp, Homo sapiens
ttgactctgcatttt

SEQ ID NO: 2012049 - DNA, 15 bp, Homo sapiens
tgactctgcattttg

SEQ ID NO: 2012050 - DNA, 15 bp, Homo sapiens
gactctgcattttgc

SEQ ID NO: 2012051 - DNA, 15 bp, Homo sapiens
actctgcattttgca

SEQ ID NO: 2012052 - DNA, 15 bp, Homo sapiens
ctctgcattttgcag

SEQ ID NO: 2012053 - DNA, 15 bp, Homo sapiens
tctgcattttgcaga

SEQ ID NO: 2012054 - DNA, 15 bp, Homo sapiens
ctgcattttgcagac

SEQ ID NO: 2012055 - DNA, 15 bp, Homo sapiens
tgcattttgcagaca

SEQ ID NO: 2012056 - DNA, 15 bp, Homo sapiens
gcattttgcagacat

SEQ ID NO: 2012057 - DNA, 15 bp, Homo sapiens
cattttgcagacatg

SEQ ID NO: 2012058 - DNA, 15 bp, Homo sapiens
attttgcagacatgt

SEQ ID NO: 2012059 - DNA, 15 bp, Homo sapiens
ttttgcagacatgtc

SEQ ID NO: 2012060 - DNA, 15 bp, Homo sapiens
tttgcagacatgtct

SEQ ID NO: 2012061 - DNA, 15 bp, Homo sapiens
ttgcagacatgtctg

SEQ ID NO: 2012062 - DNA, 15 bp, Homo sapiens
tgcagacatgtctgt

SEQ ID NO: 2012063 - DNA, 15 bp, Homo sapiens
gcagacatgtctgta

SEQ ID NO: 2012064 - DNA, 15 bp, Homo sapiens
cagacatgtctgtag

SEQ ID NO: 2012065 - DNA, 15 bp, Homo sapiens
agacatgtctgtagg

SEQ ID NO: 2012066 - DNA, 15 bp, Homo sapiens
gacatgtctgtagga

SEQ ID NO: 2012067 - DNA, 15 bp, Homo sapiens
acatgtctgtaggat

SEQ ID NO: 2012068 - DNA, 15 bp, Homo sapiens
catgtctgtaggatt

SEQ ID NO: 2012069 - DNA, 15 bp, Homo sapiens
atgtctgtaggattg

SEQ ID NO: 2012070 - DNA, 15 bp, Homo sapiens
tgtctgtaggattga

SEQ ID NO: 2012071 - DNA, 15 bp, Homo sapiens
gtctgtaggattgac

SEQ ID NO: 2012072 - DNA, 15 bp, Homo sapiens
tctgtaggattgaca

SEQ ID NO: 2012073 - DNA, 15 bp, Homo sapiens
ctgtaggattgacat

SEQ ID NO: 2012074 - DNA, 15 bp, Homo sapiens
tgtaggattgacata

SEQ ID NO: 2012075 - DNA, 15 bp, Homo sapiens
gtaggattgacataa

SEQ ID NO: 2012076 - DNA, 15 bp, Homo sapiens
taggattgacataat

SEQ ID NO: 2012077 - DNA, 15 bp, Homo sapiens
aggattgacataatc

SEQ ID NO: 2012078 - DNA, 15 bp, Homo sapiens
ggattgacataatcc

SEQ ID NO: 2012079 - DNA, 15 bp, Homo sapiens
gattgacataatcca

SEQ ID NO: 2012080 - DNA, 15 bp, Homo sapiens
attgacataatccat

SEQ ID NO: 2012081 - DNA, 15 bp, Homo sapiens
ttgacataatccata

SEQ ID NO: 2012082 - DNA, 15 bp, Homo sapiens
tgacataatccatag

SEQ ID NO: 2012083 - DNA, 15 bp, Homo sapiens
gacataatccatagg

SEQ ID NO: 2012084 - DNA, 15 bp, Homo sapiens
acataatccataggt

SEQ ID NO: 2012085 - DNA, 15 bp, Homo sapiens
cataatccataggtg

SEQ ID NO: 2012086 - DNA, 15 bp, Homo sapiens
ataatccataggtgc

SEQ ID NO: 2012087 - DNA, 15 bp, Homo sapiens
taatccataggtgct

SEQ ID NO: 2012088 - DNA, 15 bp, Homo sapiens
aatccataggtgctc

SEQ ID NO: 2012089 - DNA, 15 bp, Homo sapiens
atccataggtgctcc

SEQ ID NO: 2012090 - DNA, 15 bp, Homo sapiens
tccataggtgctcct

SEQ ID NO: 2012091 - DNA, 15 bp, Homo sapiens
ccataggtgctccta

SEQ ID NO: 2012092 - DNA, 15 bp, Homo sapiens
cataggtgctcctaa

SEQ ID NO: 2012093 - DNA, 15 bp, Homo sapiens
ataggtgctcctaat

SEQ ID NO: 2012094 - DNA, 15 bp, Homo sapiens
taggtgctcctaatg

SEQ ID NO: 2012095 - DNA, 15 bp, Homo sapiens
aggtgctcctaatgc

SEQ ID NO: 2012096 - DNA, 15 bp, Homo sapiens
ggtgctcctaatgca

SEQ ID NO: 2012097 - DNA, 15 bp, Homo sapiens
gtgctcctaatgcag

SEQ ID NO: 2012098 - DNA, 15 bp, Homo sapiens
tgctcctaatgcagt

SEQ ID NO: 2012099 - DNA, 15 bp, Homo sapiens
gctcctaatgcagta

SEQ ID NO: 2012100 - DNA, 15 bp, Homo sapiens
ctcctaatgcagtag

SEQ ID NO: 2012101 - DNA, 15 bp, Homo sapiens
tcctaatgcagtagt

SEQ ID NO: 2012102 - DNA, 15 bp, Homo sapiens
cctaatgcagtagtc

SEQ ID NO: 2012103 - DNA, 15 bp, Homo sapiens
ctaatgcagtagtct

SEQ ID NO: 2012104 - DNA, 15 bp, Homo sapiens
taatgcagtagtcta

SEQ ID NO: 2012105 - DNA, 15 bp, Homo sapiens
aatgcagtagtctat

SEQ ID NO: 2012106 - DNA, 15 bp, Homo sapiens
atgcagtagtctata

SEQ ID NO: 2012107 - DNA, 15 bp, Homo sapiens
tgcagtagtctataa

SEQ ID NO: 2012108 - DNA, 15 bp, Homo sapiens
gcagtagtctataat

SEQ ID NO: 2012109 - DNA, 15 bp, Homo sapiens
cagtagtctataatt

SEQ ID NO: 2012110 - DNA, 15 bp, Homo sapiens
agtagtctataattt

SEQ ID NO: 2012111 - DNA, 15 bp, Homo sapiens
gtagtctataatttg

SEQ ID NO: 2012112 - DNA, 15 bp, Homo sapiens
tagtctataatttga

SEQ ID NO: 2012113 - DNA, 15 bp, Homo sapiens
agtctataatttgac

SEQ ID NO: 2012114 - DNA, 15 bp, Homo sapiens
gtctataatttgact

SEQ ID NO: 2012115 - DNA, 15 bp, Homo sapiens
tctataatttgactt

SEQ ID NO: 2012116 - DNA, 15 bp, Homo sapiens
ctataatttgacttt

SEQ ID NO: 2012117 - DNA, 15 bp, Homo sapiens
tataatttgactttc

SEQ ID NO: 2012118 - DNA, 15 bp, Homo sapiens
ataatttgactttct

SEQ ID NO: 2012119 - DNA, 15 bp, Homo sapiens
taatttgactttctt

SEQ ID NO: 2012120 - DNA, 15 bp, Homo sapiens
aatttgactttctta

SEQ ID NO: 2012121 - DNA, 15 bp, Homo sapiens
atttgactttcttat

SEQ ID NO: 2012122 - DNA, 15 bp, Homo sapiens
tttgactttcttatt

SEQ ID NO: 2012123 - DNA, 15 bp, Homo sapiens
ttgactttcttatta

SEQ ID NO: 2012124 - DNA, 15 bp, Homo sapiens
tgactttcttattac

SEQ ID NO: 2012125 - DNA, 15 bp, Homo sapiens
gactttcttattact

SEQ ID NO: 2012126 - DNA, 15 bp, Homo sapiens
actttcttattactt

SEQ ID NO: 2012127 - DNA, 15 bp, Homo sapiens
ctttcttattacttt

SEQ ID NO: 2012128 - DNA, 15 bp, Homo sapiens
tttcttattactttt

SEQ ID NO: 2012129 - DNA, 15 bp, Homo sapiens
ttcttattacttttc

SEQ ID NO: 2012130 - DNA, 15 bp, Homo sapiens
tcttattacttttcc

SEQ ID NO: 2012131 - DNA, 15 bp, Homo sapiens
cttattacttttccc

SEQ ID NO: 2012132 - DNA, 15 bp, Homo sapiens
ttattacttttcccc

SEQ ID NO: 2012133 - DNA, 15 bp, Homo sapiens
tattacttttcccct

SEQ ID NO: 2012134 - DNA, 15 bp, Homo sapiens
attacttttcccctt

SEQ ID NO: 2012135 - DNA, 15 bp, Homo sapiens
ttacttttcccctta

SEQ ID NO: 2012136 - DNA, 15 bp, Homo sapiens
tacttttccccttaa

SEQ ID NO: 2012137 - DNA, 15 bp, Homo sapiens
acttttccccttaaa

SEQ ID NO: 2012138 - DNA, 15 bp, Homo sapiens
cttttccccttaaaa

SEQ ID NO: 2012139 - DNA, 15 bp, Homo sapiens
ttttccccttaaaaa

SEQ ID NO: 2012140 - DNA, 15 bp, Homo sapiens
tttccccttaaaaat

SEQ ID NO: 2012141 - DNA, 15 bp, Homo sapiens
ttccccttaaaaatt

SEQ ID NO: 2012142 - DNA, 15 bp, Homo sapiens
tccccttaaaaattc

SEQ ID NO: 2012143 - DNA, 15 bp, Homo sapiens
ccccttaaaaattct

SEQ ID NO: 2012144 - DNA, 15 bp, Homo sapiens
cccttaaaaattcta

SEQ ID NO: 2012145 - DNA, 15 bp, Homo sapiens
ccttaaaaattctaa

SEQ ID NO: 2012146 - DNA, 15 bp, Homo sapiens
cttaaaaattctaag

SEQ ID NO: 2012147 - DNA, 15 bp, Homo sapiens
ttaaaaattctaaga

SEQ ID NO: 2012148 - DNA, 15 bp, Homo sapiens
taaaaattctaagac

SEQ ID NO: 2012149 - DNA, 15 bp, Homo sapiens
aaaaattctaagaca

SEQ ID NO: 2012150 - DNA, 15 bp, Homo sapiens
aaaattctaagacag

SEQ ID NO: 2012151 - DNA, 15 bp, Homo sapiens
aaattctaagacagc

SEQ ID NO: 2012152 - DNA, 15 bp, Homo sapiens
aattctaagacagca

SEQ ID NO: 2012153 - DNA, 15 bp, Homo sapiens
attctaagacagcat

SEQ ID NO: 2012154 - DNA, 15 bp, Homo sapiens
ttctaagacagcatt

SEQ ID NO: 2012155 - DNA, 15 bp, Homo sapiens
tctaagacagcattg

SEQ ID NO: 2012156 - DNA, 15 bp, Homo sapiens
ctaagacagcattga

SEQ ID NO: 2012157 - DNA, 15 bp, Homo sapiens
taagacagcattgag

SEQ ID NO: 2012158 - DNA, 15 bp, Homo sapiens
aagacagcattgagt

SEQ ID NO: 2012159 - DNA, 15 bp, Homo sapiens
agacagcattgagtt

SEQ ID NO: 2012160 - DNA, 15 bp, Homo sapiens
gacagcattgagttt

SEQ ID NO: 2012161 - DNA, 15 bp, Homo sapiens
cagcattgagttttt

SEQ ID NO: 2012162 - DNA, 15 bp, Homo sapiens
agcattgagtttttg

SEQ ID NO: 2012163 - DNA, 15 bp, Homo sapiens
gcattgagtttttgg

SEQ ID NO: 2012164 - DNA, 15 bp, Homo sapiens
cattgagtttttggt

SEQ ID NO: 2012165 - DNA, 15 bp, Homo sapiens
attgagtttttggta

SEQ ID NO: 2012166 - DNA, 15 bp, Homo sapiens
ttgagtttttggtat

SEQ ID NO: 2012167 - DNA, 15 bp, Homo sapiens
tgagtttttggtatc

SEQ ID NO: 2012168 - DNA, 15 bp, Homo sapiens
gagtttttggtatcc

SEQ ID NO: 2012169 - DNA, 15 bp, Homo sapiens
agtttttggtatcct

SEQ ID NO: 2012170 - DNA, 15 bp, Homo sapiens
gtttttggtatcctc

SEQ ID NO: 2012171 - DNA, 15 bp, Homo sapiens
tttttggtatcctca

SEQ ID NO: 2012172 - DNA, 15 bp, Homo sapiens
ttttggtatcctcag

SEQ ID NO: 2012173 - DNA, 15 bp, Homo sapiens
tttggtatcctcaga

SEQ ID NO: 2012174 - DNA, 15 bp, Homo sapiens
ttggtatcctcagag

SEQ ID NO: 2012175 - DNA, 15 bp, Homo sapiens
tggtatcctcagagg

SEQ ID NO: 2012176 - DNA, 15 bp, Homo sapiens
ggtatcctcagagga

SEQ ID NO: 2012177 - DNA, 15 bp, Homo sapiens
gtatcctcagaggaa

SEQ ID NO: 2012178 - DNA, 15 bp, Homo sapiens
tatcctcagaggaaa

SEQ ID NO: 2012179 - DNA, 15 bp, Homo sapiens
atcctcagaggaaaa

SEQ ID NO: 2012180 - DNA, 15 bp, Homo sapiens
tcctcagaggaaaag

SEQ ID NO: 2012181 - DNA, 15 bp, Homo sapiens
cctcagaggaaaaga

SEQ ID NO: 2012182 - DNA, 15 bp, Homo sapiens
ctcagaggaaaagac

SEQ ID NO: 2012183 - DNA, 15 bp, Homo sapiens
tcagaggaaaagaca

SEQ ID NO: 2012184 - DNA, 15 bp, Homo sapiens
cagaggaaaagacag

SEQ ID NO: 2012185 - DNA, 15 bp, Homo sapiens
agaggaaaagacagt

SEQ ID NO: 2012186 - DNA, 15 bp, Homo sapiens
gaggaaaagacagtt

SEQ ID NO: 2012187 - DNA, 15 bp, Homo sapiens
aggaaaagacagtta

SEQ ID NO: 2012188 - DNA, 15 bp, Homo sapiens
ggaaaagacagttac

SEQ ID NO: 2012189 - DNA, 15 bp, Homo sapiens
gaaaagacagttacc

SEQ ID NO: 2012190 - DNA, 15 bp, Homo sapiens
aaaagacagttacct

SEQ ID NO: 2012191 - DNA, 15 bp, Homo sapiens
aaagacagttacctc

SEQ ID NO: 2012192 - DNA, 15 bp, Homo sapiens
aagacagttacctct

SEQ ID NO: 2012193 - DNA, 15 bp, Homo sapiens
agacagttacctcta

SEQ ID NO: 2012194 - DNA, 15 bp, Homo sapiens
gacagttacctctaa

SEQ ID NO: 2012195 - DNA, 15 bp, Homo sapiens
acagttacctctaag

SEQ ID NO: 2012196 - DNA, 15 bp, Homo sapiens
cagttacctctaaga

SEQ ID NO: 2012197 - DNA, 15 bp, Homo sapiens
agttacctctaagat

SEQ ID NO: 2012198 - DNA, 15 bp, Homo sapiens
gttacctctaagata

SEQ ID NO: 2012199 - DNA, 15 bp, Homo sapiens
ttacctctaagatac

SEQ ID NO: 2012200 - DNA, 15 bp, Homo sapiens
tacctctaagatacc

SEQ ID NO: 2012201 - DNA, 15 bp, Homo sapiens
acctctaagatacct

SEQ ID NO: 2012202 - DNA, 15 bp, Homo sapiens
cctctaagataccta

SEQ ID NO: 2012203 - DNA, 15 bp, Homo sapiens
ctctaagatacctac

SEQ ID NO: 2012204 - DNA, 15 bp, Homo sapiens
tctaagatacctact

SEQ ID NO: 2012205 - DNA, 15 bp, Homo sapiens
ctaagatacctactt

SEQ ID NO: 2012206 - DNA, 15 bp, Homo sapiens
taagatacctacttt

SEQ ID NO: 2012207 - DNA, 15 bp, Homo sapiens
aagatacctactttc

SEQ ID NO: 2012208 - DNA, 15 bp, Homo sapiens
agatacctactttca

SEQ ID NO: 2012209 - DNA, 15 bp, Homo sapiens
gatacctactttcag

SEQ ID NO: 2012210 - DNA, 15 bp, Homo sapiens
atacctactttcagg

SEQ ID NO: 2012211 - DNA, 15 bp, Homo sapiens
tacctactttcaggg

SEQ ID NO: 2012212 - DNA, 15 bp, Homo sapiens
acctactttcagggc

SEQ ID NO: 2012213 - DNA, 15 bp, Homo sapiens
cctactttcagggca

SEQ ID NO: 2012214 - DNA, 15 bp, Homo sapiens
ctactttcagggcag

SEQ ID NO: 2012215 - DNA, 15 bp, Homo sapiens
tactttcagggcagg

SEQ ID NO: 2012216 - DNA, 15 bp, Homo sapiens
actttcagggcaggc

SEQ ID NO: 2012217 - DNA, 15 bp, Homo sapiens
ctttcagggcaggcg

SEQ ID NO: 2012218 - DNA, 15 bp, Homo sapiens
tttcagggcaggcgt

SEQ ID NO: 2012219 - DNA, 15 bp, Homo sapiens
ttcagggcaggcgtg

SEQ ID NO: 2012220 - DNA, 15 bp, Homo sapiens
tcagggcaggcgtgg

SEQ ID NO: 2012221 - DNA, 15 bp, Homo sapiens
cagggcaggcgtggt

SEQ ID NO: 2012222 - DNA, 15 bp, Homo sapiens
agggcaggcgtggtg

SEQ ID NO: 2012223 - DNA, 15 bp, Homo sapiens
gggcaggcgtggtgg

SEQ ID NO: 2012224 - DNA, 15 bp, Homo sapiens
gcaggcgtggtggct

SEQ ID NO: 2012225 - DNA, 15 bp, Homo sapiens
caggcgtggtggctc

SEQ ID NO: 2012226 - DNA, 15 bp, Homo sapiens
aggcgtggtggctca

SEQ ID NO: 2012227 - DNA, 15 bp, Homo sapiens
ggcgtggtggctcat

SEQ ID NO: 2012228 - DNA, 15 bp, Homo sapiens
gcgtggtggctcatg

SEQ ID NO: 2012229 - DNA, 15 bp, Homo sapiens
cctagcactttggga

SEQ ID NO: 2012230 - DNA, 15 bp, Homo sapiens
ttgggaggccaaagc

SEQ ID NO: 2012231 - DNA, 15 bp, Homo sapiens
tgggaggccaaagca

SEQ ID NO: 2012232 - DNA, 15 bp, Homo sapiens
gggaggccaaagcag

SEQ ID NO: 2012233 - DNA, 15 bp, Homo sapiens
ggaggccaaagcagg

SEQ ID NO: 2012234 - DNA, 15 bp, Homo sapiens
gaggccaaagcaggc

SEQ ID NO: 2012235 - DNA, 15 bp, Homo sapiens
aggccaaagcaggcg

SEQ ID NO: 2012236 - DNA, 15 bp, Homo sapiens
ggccaaagcaggcga

SEQ ID NO: 2012237 - DNA, 15 bp, Homo sapiens
gccaaagcaggcgaa

SEQ ID NO: 2012238 - DNA, 15 bp, Homo sapiens
ccaaagcaggcgaat

SEQ ID NO: 2012239 - DNA, 15 bp, Homo sapiens
caaagcaggcgaatc

SEQ ID NO: 2012240 - DNA, 15 bp, Homo sapiens
aaagcaggcgaatca

SEQ ID NO: 2012241 - DNA, 15 bp, Homo sapiens
aagcaggcgaatcac

SEQ ID NO: 2012242 - DNA, 15 bp, Homo sapiens
agcaggcgaatcacc

SEQ ID NO: 2012243 - DNA, 15 bp, Homo sapiens
gcaggcgaatcacct

SEQ ID NO: 2012244 - DNA, 15 bp, Homo sapiens
caggcgaatcacctg

SEQ ID NO: 2012245 - DNA, 15 bp, Homo sapiens
aggcgaatcacctga

SEQ ID NO: 2012246 - DNA, 15 bp, Homo sapiens
ggcgaatcacctgag

SEQ ID NO: 2012247 - DNA, 15 bp, Homo sapiens
gcgaatcacctgagg

SEQ ID NO: 2012248 - DNA, 15 bp, Homo sapiens
cgaatcacctgaggt

SEQ ID NO: 2012249 - DNA, 15 bp, Homo sapiens
gccaacatgatgaag

SEQ ID NO: 2012250 - DNA, 15 bp, Homo sapiens
ccaacatgatgaagc

SEQ ID NO: 2012251 - DNA, 15 bp, Homo sapiens
caacatgatgaagcc

SEQ ID NO: 2012252 - DNA, 15 bp, Homo sapiens
aacatgatgaagccc

SEQ ID NO: 2012253 - DNA, 15 bp, Homo sapiens
acatgatgaagcccc

SEQ ID NO: 2012254 - DNA, 15 bp, Homo sapiens
catgatgaagccccg

SEQ ID NO: 2012255 - DNA, 15 bp, Homo sapiens
atgatgaagccccgt

SEQ ID NO: 2012256 - DNA, 15 bp, Homo sapiens
tgatgaagccccgtc

SEQ ID NO: 2012257 - DNA, 15 bp, Homo sapiens
gccccgtctctactg

SEQ ID NO: 2012258 - DNA, 15 bp, Homo sapiens
aatacaaaaattagt

SEQ ID NO: 2012259 - DNA, 15 bp, Homo sapiens
acaaaaattagtcga

SEQ ID NO: 2012260 - DNA, 15 bp, Homo sapiens
caaaaattagtcgag

SEQ ID NO: 2012261 - DNA, 15 bp, Homo sapiens
aaaaattagtcgagc

SEQ ID NO: 2012262 - DNA, 15 bp, Homo sapiens
aaaattagtcgagcg

SEQ ID NO: 2012263 - DNA, 15 bp, Homo sapiens
aaattagtcgagcgt

SEQ ID NO: 2012264 - DNA, 15 bp, Homo sapiens
aattagtcgagcgtg

SEQ ID NO: 2012265 - DNA, 15 bp, Homo sapiens
attagtcgagcgtgg

SEQ ID NO: 2012266 - DNA, 15 bp, Homo sapiens
ttagtcgagcgtggt

SEQ ID NO: 2012267 - DNA, 15 bp, Homo sapiens
tagtcgagcgtggtg

SEQ ID NO: 2012268 - DNA, 15 bp, Homo sapiens
agtcgagcgtggtgg

SEQ ID NO: 2012269 - DNA, 15 bp, Homo sapiens
gtcgagcgtggtggc

SEQ ID NO: 2012270 - DNA, 15 bp, Homo sapiens
tcgagcgtggtggca

SEQ ID NO: 2012271 - DNA, 15 bp, Homo sapiens
cgagcgtggtggcag

SEQ ID NO: 2012272 - DNA, 15 bp, Homo sapiens
gagcgtggtggcagg

SEQ ID NO: 2012273 - DNA, 15 bp, Homo sapiens
agcgtggtggcaggc

SEQ ID NO: 2012274 - DNA, 15 bp, Homo sapiens
ggctgaggtgagaga

SEQ ID NO: 2012275 - DNA, 15 bp, Homo sapiens
gctgaggtgagagaa

SEQ ID NO: 2012276 - DNA, 15 bp, Homo sapiens
ctgaggtgagagaat

SEQ ID NO: 2012277 - DNA, 15 bp, Homo sapiens
tgaggtgagagaatt

SEQ ID NO: 2012278 - DNA, 15 bp, Homo sapiens
gaggtgagagaattg

SEQ ID NO: 2012279 - DNA, 15 bp, Homo sapiens
gtgagagaattgctt

SEQ ID NO: 2012280 - DNA, 15 bp, Homo sapiens
tgagagaattgcttg

SEQ ID NO: 2012281 - DNA, 15 bp, Homo sapiens
gagagaattgcttga

SEQ ID NO: 2012282 - DNA, 15 bp, Homo sapiens
ttgaacctgggaggg

SEQ ID NO: 2012283 - DNA, 15 bp, Homo sapiens
tgaacctgggagggg

SEQ ID NO: 2012284 - DNA, 15 bp, Homo sapiens
gaacctgggaggggg

SEQ ID NO: 2012285 - DNA, 15 bp, Homo sapiens
aacctgggaggggga

SEQ ID NO: 2012286 - DNA, 15 bp, Homo sapiens
acctgggagggggag

SEQ ID NO: 2012287 - DNA, 15 bp, Homo sapiens
cctgggagggggaga

SEQ ID NO: 2012288 - DNA, 15 bp, Homo sapiens
ctgggagggggagat

SEQ ID NO: 2012289 - DNA, 15 bp, Homo sapiens
tgggagggggagatt

SEQ ID NO: 2012290 - DNA, 15 bp, Homo sapiens
gggagggggagattg

SEQ ID NO: 2012291 - DNA, 15 bp, Homo sapiens
ggagggggagattgc

SEQ ID NO: 2012292 - DNA, 15 bp, Homo sapiens
gagggggagattgca

SEQ ID NO: 2012293 - DNA, 15 bp, Homo sapiens
agggggagattgcag

SEQ ID NO: 2012294 - DNA, 15 bp, Homo sapiens
gggggagattgcagt

SEQ ID NO: 2012295 - DNA, 15 bp, Homo sapiens
ggggagattgcagtc

SEQ ID NO: 2012296 - DNA, 15 bp, Homo sapiens
gggagattgcagtca

SEQ ID NO: 2012297 - DNA, 15 bp, Homo sapiens
ggagattgcagtcag

SEQ ID NO: 2012298 - DNA, 15 bp, Homo sapiens
gattgcagtcagccg

SEQ ID NO: 2012299 - DNA, 15 bp, Homo sapiens
attgcagtcagccga

SEQ ID NO: 2012300 - DNA, 15 bp, Homo sapiens
ttgcagtcagccgag

SEQ ID NO: 2012301 - DNA, 15 bp, Homo sapiens
tgcagtcagccgaga

SEQ ID NO: 2012302 - DNA, 15 bp, Homo sapiens
gcagtcagccgagat

SEQ ID NO: 2012303 - DNA, 15 bp, Homo sapiens
cagtcagccgagatc

SEQ ID NO: 2012304 - DNA, 15 bp, Homo sapiens
agtcagccgagatca

SEQ ID NO: 2012305 - DNA, 15 bp, Homo sapiens
gtcagccgagatcac

SEQ ID NO: 2012306 - DNA, 15 bp, Homo sapiens
tcagccgagatcacg

SEQ ID NO: 2012307 - DNA, 15 bp, Homo sapiens
cagccgagatcacgc

SEQ ID NO: 2012308 - DNA, 15 bp, Homo sapiens
tccagcctgggggat

SEQ ID NO: 2012309 - DNA, 15 bp, Homo sapiens
ccagcctgggggata

SEQ ID NO: 2012310 - DNA, 15 bp, Homo sapiens
cagcctgggggataa

SEQ ID NO: 2012311 - DNA, 15 bp, Homo sapiens
agcctgggggataag

SEQ ID NO: 2012312 - DNA, 15 bp, Homo sapiens
gcctgggggataaga

SEQ ID NO: 2012313 - DNA, 15 bp, Homo sapiens
cctgggggataagag

SEQ ID NO: 2012314 - DNA, 15 bp, Homo sapiens
ctgggggataagagc

SEQ ID NO: 2012315 - DNA, 15 bp, Homo sapiens
tgggggataagagcg

SEQ ID NO: 2012316 - DNA, 15 bp, Homo sapiens
gggggataagagcga

SEQ ID NO: 2012317 - DNA, 15 bp, Homo sapiens
ggggataagagcgag

SEQ ID NO: 2012318 - DNA, 15 bp, Homo sapiens
gggataagagcgaga

SEQ ID NO: 2012319 - DNA, 15 bp, Homo sapiens
ggataagagcgagac

SEQ ID NO: 2012320 - DNA, 15 bp, Homo sapiens
gataagagcgagact

SEQ ID NO: 2012321 - DNA, 15 bp, Homo sapiens
ataagagcgagactt

SEQ ID NO: 2012322 - DNA, 15 bp, Homo sapiens
taagagcgagacttc

SEQ ID NO: 2012323 - DNA, 15 bp, Homo sapiens
aagagcgagacttcg

SEQ ID NO: 2012324 - DNA, 15 bp, Homo sapiens
agagcgagacttcgt

SEQ ID NO: 2012325 - DNA, 15 bp, Homo sapiens
cgagacttcgtctca

SEQ ID NO: 2012326 - DNA, 15 bp, Homo sapiens
gagacttcgtctcaa

SEQ ID NO: 2012327 - DNA, 15 bp, Homo sapiens
agacttcgtctcaaa

SEQ ID NO: 2012328 - DNA, 15 bp, Homo sapiens
gacttcgtctcaaaa

SEQ ID NO: 2012329 - DNA, 15 bp, Homo sapiens
acttcgtctcaaaaa

SEQ ID NO: 2012330 - DNA, 15 bp, Homo sapiens
cttcgtctcaaaaaa

SEQ ID NO: 2012331 - DNA, 15 bp, Homo sapiens
ttcgtctcaaaaaaa

SEQ ID NO: 2012332 - DNA, 15 bp, Homo sapiens
tcgtctcaaaaaaaa

SEQ ID NO: 2012333 - DNA, 15 bp, Homo sapiens
aaaaaaaaagaaacc

SEQ ID NO: 2012334 - DNA, 15 bp, Homo sapiens
aaaaaaaagaaacct

SEQ ID NO: 2012335 - DNA, 15 bp, Homo sapiens
aaaaaaagaaaccta

SEQ ID NO: 2012336 - DNA, 15 bp, Homo sapiens
aaaaaagaaacctac

SEQ ID NO: 2012337 - DNA, 15 bp, Homo sapiens
aaaaagaaacctact

SEQ ID NO: 2012338 - DNA, 15 bp, Homo sapiens
aaaagaaacctactt

SEQ ID NO: 2012339 - DNA, 15 bp, Homo sapiens
aaagaaacctacttt

SEQ ID NO: 2012340 - DNA, 15 bp, Homo sapiens
aagaaacctactttc

SEQ ID NO: 2012341 - DNA, 15 bp, Homo sapiens
agaaacctactttct

SEQ ID NO: 2012342 - DNA, 15 bp, Homo sapiens
gaaacctactttctg

SEQ ID NO: 2012343 - DNA, 15 bp, Homo sapiens
aaacctactttctgt

SEQ ID NO: 2012344 - DNA, 15 bp, Homo sapiens
aacctactttctgtg

SEQ ID NO: 2012345 - DNA, 15 bp, Homo sapiens
acctactttctgtga

SEQ ID NO: 2012346 - DNA, 15 bp, Homo sapiens
cctactttctgtgaa

SEQ ID NO: 2012347 - DNA, 15 bp, Homo sapiens
ctactttctgtgaaa

SEQ ID NO: 2012348 - DNA, 15 bp, Homo sapiens
tactttctgtgaaag

SEQ ID NO: 2012349 - DNA, 15 bp, Homo sapiens
actttctgtgaaagt

SEQ ID NO: 2012350 - DNA, 15 bp, Homo sapiens
ctttctgtgaaagtc

SEQ ID NO: 2012351 - DNA, 15 bp, Homo sapiens
tttctgtgaaagtcg

SEQ ID NO: 2012352 - DNA, 15 bp, Homo sapiens
ttctgtgaaagtcgg

SEQ ID NO: 2012353 - DNA, 15 bp, Homo sapiens
tctgtgaaagtcggt

SEQ ID NO: 2012354 - DNA, 15 bp, Homo sapiens
ctgtgaaagtcggtg

SEQ ID NO: 2012355 - DNA, 15 bp, Homo sapiens
tgtgaaagtcggtgt

SEQ ID NO: 2012356 - DNA, 15 bp, Homo sapiens
gtgaaagtcggtgta

SEQ ID NO: 2012357 - DNA, 15 bp, Homo sapiens
tgaaagtcggtgtat

SEQ ID NO: 2012358 - DNA, 15 bp, Homo sapiens
gaaagtcggtgtata

SEQ ID NO: 2012359 - DNA, 15 bp, Homo sapiens
aaagtcggtgtatat

SEQ ID NO: 2012360 - DNA, 15 bp, Homo sapiens
aagtcggtgtatatg

SEQ ID NO: 2012361 - DNA, 15 bp, Homo sapiens
agtcggtgtatatgt

SEQ ID NO: 2012362 - DNA, 15 bp, Homo sapiens
gtcggtgtatatgtt

SEQ ID NO: 2012363 - DNA, 15 bp, Homo sapiens
tcggtgtatatgttt

SEQ ID NO: 2012364 - DNA, 15 bp, Homo sapiens
cggtgtatatgtttt

SEQ ID NO: 2012365 - DNA, 15 bp, Homo sapiens
ggtgtatatgttttt

SEQ ID NO: 2012366 - DNA, 15 bp, Homo sapiens
gtgtatatgtttttt

SEQ ID NO: 2012367 - DNA, 15 bp, Homo sapiens
tgtatatgttttttt

SEQ ID NO: 2012368 - DNA, 15 bp, Homo sapiens
gtatatgttttttta

SEQ ID NO: 2012369 - DNA, 15 bp, Homo sapiens
tatatgtttttttaa

SEQ ID NO: 2012370 - DNA, 15 bp, Homo sapiens
atatgtttttttaaa

SEQ ID NO: 2012371 - DNA, 15 bp, Homo sapiens
tatgtttttttaaat

SEQ ID NO: 2012372 - DNA, 15 bp, Homo sapiens
atgtttttttaaata

SEQ ID NO: 2012373 - DNA, 15 bp, Homo sapiens
tgtttttttaaataa

SEQ ID NO: 2012374 - DNA, 15 bp, Homo sapiens
gtttttttaaataag

SEQ ID NO: 2012375 - DNA, 15 bp, Homo sapiens
tttttttaaataaga

SEQ ID NO: 2012376 - DNA, 15 bp, Homo sapiens
ttttttaaataagac

SEQ ID NO: 2012377 - DNA, 15 bp, Homo sapiens
tttttaaataagaca

SEQ ID NO: 2012378 - DNA, 15 bp, Homo sapiens
ttttaaataagacac

SEQ ID NO: 2012379 - DNA, 15 bp, Homo sapiens
tttaaataagacaca

SEQ ID NO: 2012380 - DNA, 15 bp, Homo sapiens
ttaaataagacacaa

SEQ ID NO: 2012381 - DNA, 15 bp, Homo sapiens
taaataagacacaag

SEQ ID NO: 2012382 - DNA, 15 bp, Homo sapiens
aaataagacacaagt

SEQ ID NO: 2012383 - DNA, 15 bp, Homo sapiens
aataagacacaagta

SEQ ID NO: 2012384 - DNA, 15 bp, Homo sapiens
ataagacacaagtat

SEQ ID NO: 2012385 - DNA, 15 bp, Homo sapiens
taagacacaagtatg

SEQ ID NO: 2012386 - DNA, 15 bp, Homo sapiens
aagacacaagtatgt

SEQ ID NO: 2012387 - DNA, 15 bp, Homo sapiens
agacacaagtatgtg

SEQ ID NO: 2012388 - DNA, 15 bp, Homo sapiens
gacacaagtatgtgg

SEQ ID NO: 2012389 - DNA, 15 bp, Homo sapiens
acacaagtatgtggt

SEQ ID NO: 2012390 - DNA, 15 bp, Homo sapiens
cacaagtatgtggta

SEQ ID NO: 2012391 - DNA, 15 bp, Homo sapiens
acaagtatgtggtag

SEQ ID NO: 2012392 - DNA, 15 bp, Homo sapiens
caagtatgtggtaga

SEQ ID NO: 2012393 - DNA, 15 bp, Homo sapiens
aagtatgtggtagag

SEQ ID NO: 2012394 - DNA, 15 bp, Homo sapiens
agtatgtggtagagt

SEQ ID NO: 2012395 - DNA, 15 bp, Homo sapiens
gtatgtggtagagta

SEQ ID NO: 2012396 - DNA, 15 bp, Homo sapiens
tatgtggtagagtag

SEQ ID NO: 2012397 - DNA, 15 bp, Homo sapiens
atgtggtagagtagg

SEQ ID NO: 2012398 - DNA, 15 bp, Homo sapiens
tgtggtagagtaggg

SEQ ID NO: 2012399 - DNA, 15 bp, Homo sapiens
gtggtagagtaggga

SEQ ID NO: 2012400 - DNA, 15 bp, Homo sapiens
tggtagagtagggat

SEQ ID NO: 2012401 - DNA, 15 bp, Homo sapiens
ggtagagtagggatt

SEQ ID NO: 2012402 - DNA, 15 bp, Homo sapiens
gtagagtagggatta

SEQ ID NO: 2012403 - DNA, 15 bp, Homo sapiens
tagagtagggattat

SEQ ID NO: 2012404 - DNA, 15 bp, Homo sapiens
agagtagggattatc

SEQ ID NO: 2012405 - DNA, 15 bp, Homo sapiens
gagtagggattatct

SEQ ID NO: 2012406 - DNA, 15 bp, Homo sapiens
agtagggattatcta

SEQ ID NO: 2012407 - DNA, 15 bp, Homo sapiens
gtagggattatctaa

SEQ ID NO: 2012408 - DNA, 15 bp, Homo sapiens
tagggattatctaag

SEQ ID NO: 2012409 - DNA, 15 bp, Homo sapiens
agggattatctaagc

SEQ ID NO: 2012410 - DNA, 15 bp, Homo sapiens
gggattatctaagca

SEQ ID NO: 2012411 - DNA, 15 bp, Homo sapiens
ggattatctaagcaa

SEQ ID NO: 2012412 - DNA, 15 bp, Homo sapiens
gattatctaagcaat

SEQ ID NO: 2012413 - DNA, 15 bp, Homo sapiens
attatctaagcaatt

SEQ ID NO: 2012414 - DNA, 15 bp, Homo sapiens
ttatctaagcaatta

SEQ ID NO: 2012415 - DNA, 15 bp, Homo sapiens
tatctaagcaattag

SEQ ID NO: 2012416 - DNA, 15 bp, Homo sapiens
atctaagcaattagt

SEQ ID NO: 2012417 - DNA, 15 bp, Homo sapiens
tctaagcaattagtc

SEQ ID NO: 2012418 - DNA, 15 bp, Homo sapiens
ctaagcaattagtcc

SEQ ID NO: 2012419 - DNA, 15 bp, Homo sapiens
taagcaattagtccc

SEQ ID NO: 2012420 - DNA, 15 bp, Homo sapiens
aagcaattagtccct

SEQ ID NO: 2012421 - DNA, 15 bp, Homo sapiens
agcaattagtcccta

SEQ ID NO: 2012422 - DNA, 15 bp, Homo sapiens
gcaattagtccctat

SEQ ID NO: 2012423 - DNA, 15 bp, Homo sapiens
caattagtccctatc

SEQ ID NO: 2012424 - DNA, 15 bp, Homo sapiens
aattagtccctatca

SEQ ID NO: 2012425 - DNA, 15 bp, Homo sapiens
attagtccctatcat

SEQ ID NO: 2012426 - DNA, 15 bp, Homo sapiens
ttagtccctatcatg

SEQ ID NO: 2012427 - DNA, 15 bp, Homo sapiens
tagtccctatcatgg

SEQ ID NO: 2012428 - DNA, 15 bp, Homo sapiens
agtccctatcatgga

SEQ ID NO: 2012429 - DNA, 15 bp, Homo sapiens
gtccctatcatggat

SEQ ID NO: 2012430 - DNA, 15 bp, Homo sapiens
tccctatcatggatg

SEQ ID NO: 2012431 - DNA, 15 bp, Homo sapiens
ccctatcatggatgg

SEQ ID NO: 2012432 - DNA, 15 bp, Homo sapiens
cctatcatggatggt

SEQ ID NO: 2012433 - DNA, 15 bp, Homo sapiens
ctatcatggatggtg

SEQ ID NO: 2012434 - DNA, 15 bp, Homo sapiens
tatcatggatggtga

SEQ ID NO: 2012435 - DNA, 15 bp, Homo sapiens
atcatggatggtgaa

SEQ ID NO: 2012436 - DNA, 15 bp, Homo sapiens
tcatggatggtgaag

SEQ ID NO: 2012437 - DNA, 15 bp, Homo sapiens
catggatggtgaagg

SEQ ID NO: 2012438 - DNA, 15 bp, Homo sapiens
atggatggtgaaggt

SEQ ID NO: 2012439 - DNA, 15 bp, Homo sapiens
tggatggtgaaggta

SEQ ID NO: 2012440 - DNA, 15 bp, Homo sapiens
ggatggtgaaggtac

SEQ ID NO: 2012441 - DNA, 15 bp, Homo sapiens
gatggtgaaggtact

SEQ ID NO: 2012442 - DNA, 15 bp, Homo sapiens
atggtgaaggtacta

SEQ ID NO: 2012443 - DNA, 15 bp, Homo sapiens
tggtgaaggtactaa

SEQ ID NO: 2012444 - DNA, 15 bp, Homo sapiens
ggtgaaggtactaat

SEQ ID NO: 2012445 - DNA, 15 bp, Homo sapiens
gtgaaggtactaatc

SEQ ID NO: 2012446 - DNA, 15 bp, Homo sapiens
tgaaggtactaatca

SEQ ID NO: 2012447 - DNA, 15 bp, Homo sapiens
gaaggtactaatcag

SEQ ID NO: 2012448 - DNA, 15 bp, Homo sapiens
aaggtactaatcagt

SEQ ID NO: 2012449 - DNA, 15 bp, Homo sapiens
aggtactaatcagtg

SEQ ID NO: 2012450 - DNA, 15 bp, Homo sapiens
ggtactaatcagtgt

SEQ ID NO: 2012451 - DNA, 15 bp, Homo sapiens
gtactaatcagtgtt

SEQ ID NO: 2012452 - DNA, 15 bp, Homo sapiens
tactaatcagtgttt

SEQ ID NO: 2012453 - DNA, 15 bp, Homo sapiens
actaatcagtgtttg

SEQ ID NO: 2012454 - DNA, 15 bp, Homo sapiens
ctaatcagtgtttgg

SEQ ID NO: 2012455 - DNA, 15 bp, Homo sapiens
taatcagtgtttggg

SEQ ID NO: 2012456 - DNA, 15 bp, Homo sapiens
aatcagtgtttggga

SEQ ID NO: 2012457 - DNA, 15 bp, Homo sapiens
atcagtgtttgggag

SEQ ID NO: 2012458 - DNA, 15 bp, Homo sapiens
tcagtgtttgggagg

SEQ ID NO: 2012459 - DNA, 15 bp, Homo sapiens
cagtgtttgggaggg

SEQ ID NO: 2012460 - DNA, 15 bp, Homo sapiens
agtgtttgggaggga

SEQ ID NO: 2012461 - DNA, 15 bp, Homo sapiens
gtgtttgggagggag

SEQ ID NO: 2012462 - DNA, 15 bp, Homo sapiens
tgtttgggagggagt

SEQ ID NO: 2012463 - DNA, 15 bp, Homo sapiens
gtttgggagggagtg

SEQ ID NO: 2012464 - DNA, 15 bp, Homo sapiens
tttgggagggagtgg

SEQ ID NO: 2012465 - DNA, 15 bp, Homo sapiens
ttgggagggagtgga

SEQ ID NO: 2012466 - DNA, 15 bp, Homo sapiens
tgggagggagtggag

SEQ ID NO: 2012467 - DNA, 15 bp, Homo sapiens
gggagggagtggaga

SEQ ID NO: 2012468 - DNA, 15 bp, Homo sapiens
ggagggagtggagat

SEQ ID NO: 2012469 - DNA, 15 bp, Homo sapiens
gagggagtggagata

SEQ ID NO: 2012470 - DNA, 15 bp, Homo sapiens
agggagtggagatag

SEQ ID NO: 2012471 - DNA, 15 bp, Homo sapiens
gggagtggagatagc

SEQ ID NO: 2012472 - DNA, 15 bp, Homo sapiens
ggagtggagatagct

SEQ ID NO: 2012473 - DNA, 15 bp, Homo sapiens
gagtggagatagctt

SEQ ID NO: 2012474 - DNA, 15 bp, Homo sapiens
agtggagatagcttc

SEQ ID NO: 2012475 - DNA, 15 bp, Homo sapiens
gtggagatagcttcc

SEQ ID NO: 2012476 - DNA, 15 bp, Homo sapiens
tggagatagcttccg

SEQ ID NO: 2012477 - DNA, 15 bp, Homo sapiens
ggagatagcttccgt

SEQ ID NO: 2012478 - DNA, 15 bp, Homo sapiens
gagatagcttccgta

SEQ ID NO: 2012479 - DNA, 15 bp, Homo sapiens
agatagcttccgtat

SEQ ID NO: 2012480 - DNA, 15 bp, Homo sapiens
gatagcttccgtata

SEQ ID NO: 2012481 - DNA, 15 bp, Homo sapiens
atagcttccgtatat

SEQ ID NO: 2012482 - DNA, 15 bp, Homo sapiens
tagcttccgtatata

SEQ ID NO: 2012483 - DNA, 15 bp, Homo sapiens
agcttccgtatatag

SEQ ID NO: 2012484 - DNA, 15 bp, Homo sapiens
gcttccgtatataga

SEQ ID NO: 2012485 - DNA, 15 bp, Homo sapiens
cttccgtatatagag

SEQ ID NO: 2012486 - DNA, 15 bp, Homo sapiens
ttccgtatatagaga

SEQ ID NO: 2012487 - DNA, 15 bp, Homo sapiens
tccgtatatagagag

SEQ ID NO: 2012488 - DNA, 15 bp, Homo sapiens
ccgtatatagagagg

SEQ ID NO: 2012489 - DNA, 15 bp, Homo sapiens
cgtatatagagaggt

SEQ ID NO: 2012490 - DNA, 15 bp, Homo sapiens
gtatatagagaggta

SEQ ID NO: 2012491 - DNA, 15 bp, Homo sapiens
tatatagagaggtaa

SEQ ID NO: 2012492 - DNA, 15 bp, Homo sapiens
atatagagaggtaat

SEQ ID NO: 2012493 - DNA, 15 bp, Homo sapiens
tatagagaggtaatg

SEQ ID NO: 2012494 - DNA, 15 bp, Homo sapiens
atagagaggtaatgc

SEQ ID NO: 2012495 - DNA, 15 bp, Homo sapiens
tagagaggtaatgca

SEQ ID NO: 2012496 - DNA, 15 bp, Homo sapiens
agagaggtaatgcat

SEQ ID NO: 2012497 - DNA, 15 bp, Homo sapiens
gagaggtaatgcatt

SEQ ID NO: 2012498 - DNA, 15 bp, Homo sapiens
agaggtaatgcattt

SEQ ID NO: 2012499 - DNA, 15 bp, Homo sapiens
gaggtaatgcatttt

SEQ ID NO: 2012500 - DNA, 15 bp, Homo sapiens
aggtaatgcatttta

SEQ ID NO: 2012501 - DNA, 15 bp, Homo sapiens
ggtaatgcattttaa

SEQ ID NO: 2012502 - DNA, 15 bp, Homo sapiens
gtaatgcattttaaa

SEQ ID NO: 2012503 - DNA, 15 bp, Homo sapiens
taatgcattttaaaa

SEQ ID NO: 2012504 - DNA, 15 bp, Homo sapiens
aatgcattttaaaat

SEQ ID NO: 2012505 - DNA, 15 bp, Homo sapiens
atgcattttaaaatc

SEQ ID NO: 2012506 - DNA, 15 bp, Homo sapiens
tgcattttaaaatca

SEQ ID NO: 2012507 - DNA, 15 bp, Homo sapiens
gcattttaaaatcat

SEQ ID NO: 2012508 - DNA, 15 bp, Homo sapiens
cattttaaaatcatt

SEQ ID NO: 2012509 - DNA, 15 bp, Homo sapiens
attttaaaatcattt

SEQ ID NO: 2012510 - DNA, 15 bp, Homo sapiens
ttttaaaatcattta

SEQ ID NO: 2012511 - DNA, 15 bp, Homo sapiens
tttaaaatcatttag

SEQ ID NO: 2012512 - DNA, 15 bp, Homo sapiens
ttaaaatcatttagg

SEQ ID NO: 2012513 - DNA, 15 bp, Homo sapiens
taaaatcatttaggg

SEQ ID NO: 2012514 - DNA, 15 bp, Homo sapiens
aaaatcatttagggg

SEQ ID NO: 2012515 - DNA, 15 bp, Homo sapiens
aaatcatttagggga

SEQ ID NO: 2012516 - DNA, 15 bp, Homo sapiens
aatcatttaggggac

SEQ ID NO: 2012517 - DNA, 15 bp, Homo sapiens
atcatttaggggact

SEQ ID NO: 2012518 - DNA, 15 bp, Homo sapiens
tcatttaggggactt

SEQ ID NO: 2012519 - DNA, 15 bp, Homo sapiens
catttaggggacttt

SEQ ID NO: 2012520 - DNA, 15 bp, Homo sapiens
atttaggggactttt

SEQ ID NO: 2012521 - DNA, 15 bp, Homo sapiens
tttaggggacttttt

SEQ ID NO: 2012522 - DNA, 15 bp, Homo sapiens
ttaggggactttttc

SEQ ID NO: 2012523 - DNA, 15 bp, Homo sapiens
taggggactttttca

SEQ ID NO: 2012524 - DNA, 15 bp, Homo sapiens
aggggactttttcaa

SEQ ID NO: 2012525 - DNA, 15 bp, Homo sapiens
ggggactttttcaaa

SEQ ID NO: 2012526 - DNA, 15 bp, Homo sapiens
gggactttttcaaat

SEQ ID NO: 2012527 - DNA, 15 bp, Homo sapiens
ggactttttcaaata

SEQ ID NO: 2012528 - DNA, 15 bp, Homo sapiens
gactttttcaaataa

SEQ ID NO: 2012529 - DNA, 15 bp, Homo sapiens
actttttcaaataat

SEQ ID NO: 2012530 - DNA, 15 bp, Homo sapiens
ctttttcaaataatc

SEQ ID NO: 2012531 - DNA, 15 bp, Homo sapiens
tttttcaaataatcc

SEQ ID NO: 2012532 - DNA, 15 bp, Homo sapiens
ttttcaaataatcct

SEQ ID NO: 2012533 - DNA, 15 bp, Homo sapiens
tttcaaataatcctg

SEQ ID NO: 2012534 - DNA, 15 bp, Homo sapiens
ttcaaataatcctgt

SEQ ID NO: 2012535 - DNA, 15 bp, Homo sapiens
tcaaataatcctgtt

SEQ ID NO: 2012536 - DNA, 15 bp, Homo sapiens
caaataatcctgttt

SEQ ID NO: 2012537 - DNA, 15 bp, Homo sapiens
aaataatcctgtttc

SEQ ID NO: 2012538 - DNA, 15 bp, Homo sapiens
aataatcctgtttct

SEQ ID NO: 2012539 - DNA, 15 bp, Homo sapiens
ataatcctgtttctt

SEQ ID NO: 2012540 - DNA, 15 bp, Homo sapiens
taatcctgtttcttc

SEQ ID NO: 2012541 - DNA, 15 bp, Homo sapiens
aatcctgtttcttca

SEQ ID NO: 2012542 - DNA, 15 bp, Homo sapiens
atcctgtttcttcat

SEQ ID NO: 2012543 - DNA, 15 bp, Homo sapiens
tcctgtttcttcatg

SEQ ID NO: 2012544 - DNA, 15 bp, Homo sapiens
cctgtttcttcatgg

SEQ ID NO: 2012545 - DNA, 15 bp, Homo sapiens
ctgtttcttcatggt

SEQ ID NO: 2012546 - DNA, 15 bp, Homo sapiens
tgtttcttcatggtg

SEQ ID NO: 2012547 - DNA, 15 bp, Homo sapiens
gtttcttcatggtga

SEQ ID NO: 2012548 - DNA, 15 bp, Homo sapiens
tttcttcatggtgag

SEQ ID NO: 2012549 - DNA, 15 bp, Homo sapiens
ttcttcatggtgaga

SEQ ID NO: 2012550 - DNA, 15 bp, Homo sapiens
tcttcatggtgagat

SEQ ID NO: 2012551 - DNA, 15 bp, Homo sapiens
cttcatggtgagatt

SEQ ID NO: 2012552 - DNA, 15 bp, Homo sapiens
ttcatggtgagattc

SEQ ID NO: 2012553 - DNA, 15 bp, Homo sapiens
tcatggtgagattcc

SEQ ID NO: 2012554 - DNA, 15 bp, Homo sapiens
catggtgagattccc

SEQ ID NO: 2012555 - DNA, 15 bp, Homo sapiens
atggtgagattccct

SEQ ID NO: 2012556 - DNA, 15 bp, Homo sapiens
tggtgagattccctg

SEQ ID NO: 2012557 - DNA, 15 bp, Homo sapiens
ggtgagattccctga

SEQ ID NO: 2012558 - DNA, 15 bp, Homo sapiens
gtgagattccctgac

SEQ ID NO: 2012559 - DNA, 15 bp, Homo sapiens
tgagattccctgaca

SEQ ID NO: 2012560 - DNA, 15 bp, Homo sapiens
gagattccctgacac

SEQ ID NO: 2012561 - DNA, 15 bp, Homo sapiens
agattccctgacaca

SEQ ID NO: 2012562 - DNA, 15 bp, Homo sapiens
gattccctgacacag

SEQ ID NO: 2012563 - DNA, 15 bp, Homo sapiens
attccctgacacagt

SEQ ID NO: 2012564 - DNA, 15 bp, Homo sapiens
ttccctgacacagtg

SEQ ID NO: 2012565 - DNA, 15 bp, Homo sapiens
tccctgacacagtga

SEQ ID NO: 2012566 - DNA, 15 bp, Homo sapiens
ccctgacacagtgag

SEQ ID NO: 2012567 - DNA, 15 bp, Homo sapiens
cctgacacagtgagc

SEQ ID NO: 2012568 - DNA, 15 bp, Homo sapiens
ctgacacagtgagcc

SEQ ID NO: 2012569 - DNA, 15 bp, Homo sapiens
tgacacagtgagcca

SEQ ID NO: 2012570 - DNA, 15 bp, Homo sapiens
gacacagtgagccaa

SEQ ID NO: 2012571 - DNA, 15 bp, Homo sapiens
acacagtgagccaat

SEQ ID NO: 2012572 - DNA, 15 bp, Homo sapiens
cacagtgagccaatc

SEQ ID NO: 2012573 - DNA, 15 bp, Homo sapiens
acagtgagccaatca

SEQ ID NO: 2012574 - DNA, 15 bp, Homo sapiens
cagtgagccaatcag

SEQ ID NO: 2012575 - DNA, 15 bp, Homo sapiens
agtgagccaatcagg

SEQ ID NO: 2012576 - DNA, 15 bp, Homo sapiens
gtgagccaatcaggt

SEQ ID NO: 2012577 - DNA, 15 bp, Homo sapiens
tgagccaatcaggtt

SEQ ID NO: 2012578 - DNA, 15 bp, Homo sapiens
gagccaatcaggttt

SEQ ID NO: 2012579 - DNA, 15 bp, Homo sapiens
agccaatcaggtttg

SEQ ID NO: 2012580 - DNA, 15 bp, Homo sapiens
gccaatcaggtttgc

SEQ ID NO: 2012581 - DNA, 15 bp, Homo sapiens
ccaatcaggtttgct

SEQ ID NO: 2012582 - DNA, 15 bp, Homo sapiens
caatcaggtttgcta

SEQ ID NO: 2012583 - DNA, 15 bp, Homo sapiens
aatcaggtttgctaa

SEQ ID NO: 2012584 - DNA, 15 bp, Homo sapiens
atcaggtttgctaag

SEQ ID NO: 2012585 - DNA, 15 bp, Homo sapiens
tcaggtttgctaagg

SEQ ID NO: 2012586 - DNA, 15 bp, Homo sapiens
caggtttgctaaggc

SEQ ID NO: 2012587 - DNA, 15 bp, Homo sapiens
aggtttgctaaggca

SEQ ID NO: 2012588 - DNA, 15 bp, Homo sapiens
ggtttgctaaggcag

SEQ ID NO: 2012589 - DNA, 15 bp, Homo sapiens
gtttgctaaggcaga

SEQ ID NO: 2012590 - DNA, 15 bp, Homo sapiens
tttgctaaggcagaa

SEQ ID NO: 2012591 - DNA, 15 bp, Homo sapiens
ttgctaaggcagaaa

SEQ ID NO: 2012592 - DNA, 15 bp, Homo sapiens
tgctaaggcagaaaa

SEQ ID NO: 2012593 - DNA, 15 bp, Homo sapiens
gctaaggcagaaaat

SEQ ID NO: 2012594 - DNA, 15 bp, Homo sapiens
ctaaggcagaaaatg

SEQ ID NO: 2012595 - DNA, 15 bp, Homo sapiens
taaggcagaaaatgt

SEQ ID NO: 2012596 - DNA, 15 bp, Homo sapiens
aaggcagaaaatgtt

SEQ ID NO: 2012597 - DNA, 15 bp, Homo sapiens
aggcagaaaatgttc

SEQ ID NO: 2012598 - DNA, 15 bp, Homo sapiens
ggcagaaaatgttcg

SEQ ID NO: 2012599 - DNA, 15 bp, Homo sapiens
gcagaaaatgttcga

SEQ ID NO: 2012600 - DNA, 15 bp, Homo sapiens
cagaaaatgttcgag

SEQ ID NO: 2012601 - DNA, 15 bp, Homo sapiens
agaaaatgttcgaga

SEQ ID NO: 2012602 - DNA, 15 bp, Homo sapiens
gaaaatgttcgagag

SEQ ID NO: 2012603 - DNA, 15 bp, Homo sapiens
aaaatgttcgagagc

SEQ ID NO: 2012604 - DNA, 15 bp, Homo sapiens
aaatgttcgagagcc

SEQ ID NO: 2012605 - DNA, 15 bp, Homo sapiens
aatgttcgagagcca

SEQ ID NO: 2012606 - DNA, 15 bp, Homo sapiens
atgttcgagagccac

SEQ ID NO: 2012607 - DNA, 15 bp, Homo sapiens
tgttcgagagccact

SEQ ID NO: 2012608 - DNA, 15 bp, Homo sapiens
gttcgagagccactg

SEQ ID NO: 2012609 - DNA, 15 bp, Homo sapiens
ttcgagagccactgt

SEQ ID NO: 2012610 - DNA, 15 bp, Homo sapiens
tcgagagccactgta

SEQ ID NO: 2012611 - DNA, 15 bp, Homo sapiens
cgagagccactgtac

SEQ ID NO: 2012612 - DNA, 15 bp, Homo sapiens
gagagccactgtact

SEQ ID NO: 2012613 - DNA, 15 bp, Homo sapiens
agagccactgtacta

SEQ ID NO: 2012614 - DNA, 15 bp, Homo sapiens
gagccactgtactag

SEQ ID NO: 2012615 - DNA, 15 bp, Homo sapiens
agccactgtactaga

SEQ ID NO: 2012616 - DNA, 15 bp, Homo sapiens
gccactgtactagac

SEQ ID NO: 2012617 - DNA, 15 bp, Homo sapiens
ccactgtactagaca

SEQ ID NO: 2012618 - DNA, 15 bp, Homo sapiens
cactgtactagacag

SEQ ID NO: 2012619 - DNA, 15 bp, Homo sapiens
actgtactagacagc

SEQ ID NO: 2012620 - DNA, 15 bp, Homo sapiens
ctgtactagacagca

SEQ ID NO: 2012621 - DNA, 15 bp, Homo sapiens
tgtactagacagcat

SEQ ID NO: 2012622 - DNA, 15 bp, Homo sapiens
gtactagacagcatg

SEQ ID NO: 2012623 - DNA, 15 bp, Homo sapiens
tactagacagcatga

SEQ ID NO: 2012624 - DNA, 15 bp, Homo sapiens
actagacagcatgaa

SEQ ID NO: 2012625 - DNA, 15 bp, Homo sapiens
ctagacagcatgaaa

SEQ ID NO: 2012626 - DNA, 15 bp, Homo sapiens
tagacagcatgaaag

SEQ ID NO: 2012627 - DNA, 15 bp, Homo sapiens
agacagcatgaaaga

SEQ ID NO: 2012628 - DNA, 15 bp, Homo sapiens
gacagcatgaaagat

SEQ ID NO: 2012629 - DNA, 15 bp, Homo sapiens
acagcatgaaagatg

SEQ ID NO: 2012630 - DNA, 15 bp, Homo sapiens
cagcatgaaagatga

SEQ ID NO: 2012631 - DNA, 15 bp, Homo sapiens
agcatgaaagatgac

SEQ ID NO: 2012632 - DNA, 15 bp, Homo sapiens
gcatgaaagatgact

SEQ ID NO: 2012633 - DNA, 15 bp, Homo sapiens
catgaaagatgactg

SEQ ID NO: 2012634 - DNA, 15 bp, Homo sapiens
atgaaagatgactgt

SEQ ID NO: 2012635 - DNA, 15 bp, Homo sapiens
tgaaagatgactgtt

SEQ ID NO: 2012636 - DNA, 15 bp, Homo sapiens
gaaagatgactgttt

SEQ ID NO: 2012637 - DNA, 15 bp, Homo sapiens
aaagatgactgtttt

SEQ ID NO: 2012638 - DNA, 15 bp, Homo sapiens
aagatgactgttttg

SEQ ID NO: 2012639 - DNA, 15 bp, Homo sapiens
agatgactgttttgt

SEQ ID NO: 2012640 - DNA, 15 bp, Homo sapiens
gatgactgttttgtt

SEQ ID NO: 2012641 - DNA, 15 bp, Homo sapiens
atgactgttttgttg

SEQ ID NO: 2012642 - DNA, 15 bp, Homo sapiens
tgactgttttgttga

SEQ ID NO: 2012643 - DNA, 15 bp, Homo sapiens
gactgttttgttgaa

SEQ ID NO: 2012644 - DNA, 15 bp, Homo sapiens
actgttttgttgaag

SEQ ID NO: 2012645 - DNA, 15 bp, Homo sapiens
ctgttttgttgaagc

SEQ ID NO: 2012646 - DNA, 15 bp, Homo sapiens
tgttttgttgaagct

SEQ ID NO: 2012647 - DNA, 15 bp, Homo sapiens
gttttgttgaagctt

SEQ ID NO: 2012648 - DNA, 15 bp, Homo sapiens
ttttgttgaagctta

SEQ ID NO: 2012649 - DNA, 15 bp, Homo sapiens
tttgttgaagcttaa

SEQ ID NO: 2012650 - DNA, 15 bp, Homo sapiens
ttgttgaagcttaat

SEQ ID NO: 2012651 - DNA, 15 bp, Homo sapiens
tgttgaagcttaatg

SEQ ID NO: 2012652 - DNA, 15 bp, Homo sapiens
gttgaagcttaatgg

SEQ ID NO: 2012653 - DNA, 15 bp, Homo sapiens
ttgaagcttaatggt

SEQ ID NO: 2012654 - DNA, 15 bp, Homo sapiens
tgaagcttaatggta

SEQ ID NO: 2012655 - DNA, 15 bp, Homo sapiens
gaagcttaatggtaa

SEQ ID NO: 2012656 - DNA, 15 bp, Homo sapiens
aagcttaatggtaat

SEQ ID NO: 2012657 - DNA, 15 bp, Homo sapiens
agcttaatggtaatt

SEQ ID NO: 2012658 - DNA, 15 bp, Homo sapiens
gcttaatggtaattt

SEQ ID NO: 2012659 - DNA, 15 bp, Homo sapiens
cttaatggtaatttt

SEQ ID NO: 2012660 - DNA, 15 bp, Homo sapiens
ttaatggtaattttt

SEQ ID NO: 2012661 - DNA, 15 bp, Homo sapiens
taatggtaatttttc

SEQ ID NO: 2012662 - DNA, 15 bp, Homo sapiens
aatggtaatttttcc

SEQ ID NO: 2012663 - DNA, 15 bp, Homo sapiens
atggtaatttttcca

SEQ ID NO: 2012664 - DNA, 15 bp, Homo sapiens
tggtaatttttccat

SEQ ID NO: 2012665 - DNA, 15 bp, Homo sapiens
ggtaatttttccata

SEQ ID NO: 2012666 - DNA, 15 bp, Homo sapiens
gtaatttttccataa

SEQ ID NO: 2012667 - DNA, 15 bp, Homo sapiens
taatttttccataat

SEQ ID NO: 2012668 - DNA, 15 bp, Homo sapiens
aatttttccataatc

SEQ ID NO: 2012669 - DNA, 15 bp, Homo sapiens
atttttccataatcc

SEQ ID NO: 2012670 - DNA, 15 bp, Homo sapiens
tttttccataatcct

SEQ ID NO: 2012671 - DNA, 15 bp, Homo sapiens
ttttccataatcctg

SEQ ID NO: 2012672 - DNA, 15 bp, Homo sapiens
tttccataatcctgg

SEQ ID NO: 2012673 - DNA, 15 bp, Homo sapiens
ttccataatcctggt

SEQ ID NO: 2012674 - DNA, 15 bp, Homo sapiens
tccataatcctggtc

SEQ ID NO: 2012675 - DNA, 15 bp, Homo sapiens
ccataatcctggtcc

SEQ ID NO: 2012676 - DNA, 15 bp, Homo sapiens
cataatcctggtcct

SEQ ID NO: 2012677 - DNA, 15 bp, Homo sapiens
ataatcctggtcctt

SEQ ID NO: 2012678 - DNA, 15 bp, Homo sapiens
taatcctggtcctta

SEQ ID NO: 2012679 - DNA, 15 bp, Homo sapiens
aatcctggtccttaa

SEQ ID NO: 2012680 - DNA, 15 bp, Homo sapiens
atcctggtccttaaa

SEQ ID NO: 2012681 - DNA, 15 bp, Homo sapiens
tcctggtccttaaaa

SEQ ID NO: 2012682 - DNA, 15 bp, Homo sapiens
cctggtccttaaaaa

SEQ ID NO: 2012683 - DNA, 15 bp, Homo sapiens
ctggtccttaaaaag

SEQ ID NO: 2012684 - DNA, 15 bp, Homo sapiens
tggtccttaaaaagc

SEQ ID NO: 2012685 - DNA, 15 bp, Homo sapiens
ggtccttaaaaagca

SEQ ID NO: 2012686 - DNA, 15 bp, Homo sapiens
gtccttaaaaagcaa

SEQ ID NO: 2012687 - DNA, 15 bp, Homo sapiens
tccttaaaaagcaaa

SEQ ID NO: 2012688 - DNA, 15 bp, Homo sapiens
ccttaaaaagcaaaa

SEQ ID NO: 2012689 - DNA, 15 bp, Homo sapiens
cttaaaaagcaaaaa

SEQ ID NO: 2012690 - DNA, 15 bp, Homo sapiens
ttaaaaagcaaaaaa

SEQ ID NO: 2012691 - DNA, 15 bp, Homo sapiens
taaaaagcaaaaaaa

SEQ ID NO: 2012692 - DNA, 15 bp, Homo sapiens
aaaagcaaaaaaaag

SEQ ID NO: 2012693 - DNA, 15 bp, Homo sapiens
aaagcaaaaaaaaga

SEQ ID NO: 2012694 - DNA, 15 bp, Homo sapiens
aagcaaaaaaaagaa

SEQ ID NO: 2012695 - DNA, 15 bp, Homo sapiens
agcaaaaaaaagaac

SEQ ID NO: 2012696 - DNA, 15 bp, Homo sapiens
gcaaaaaaaagaaca

SEQ ID NO: 2012697 - DNA, 15 bp, Homo sapiens
caaaaaaaagaacac

SEQ ID NO: 2012698 - DNA, 15 bp, Homo sapiens
aaaaaaaagaacaca

SEQ ID NO: 2012699 - DNA, 15 bp, Homo sapiens
aaaaaaagaacacat

SEQ ID NO: 2012700 - DNA, 15 bp, Homo sapiens
aaaaaagaacacatt

SEQ ID NO: 2012701 - DNA, 15 bp, Homo sapiens
aaaaagaacacatta

SEQ ID NO: 2012702 - DNA, 15 bp, Homo sapiens
aaaagaacacattag

SEQ ID NO: 2012703 - DNA, 15 bp, Homo sapiens
aaagaacacattaga

SEQ ID NO: 2012704 - DNA, 15 bp, Homo sapiens
aagaacacattagag

SEQ ID NO: 2012705 - DNA, 15 bp, Homo sapiens
agaacacattagagt

SEQ ID NO: 2012706 - DNA, 15 bp, Homo sapiens
gaacacattagagtg

SEQ ID NO: 2012707 - DNA, 15 bp, Homo sapiens
aacacattagagtgt

SEQ ID NO: 2012708 - DNA, 15 bp, Homo sapiens
acacattagagtgtt

SEQ ID NO: 2012709 - DNA, 15 bp, Homo sapiens
cacattagagtgttg

SEQ ID NO: 2012710 - DNA, 15 bp, Homo sapiens
acattagagtgttgt

SEQ ID NO: 2012711 - DNA, 15 bp, Homo sapiens
cattagagtgttgtt

SEQ ID NO: 2012712 - DNA, 15 bp, Homo sapiens
attagagtgttgtta

SEQ ID NO: 2012713 - DNA, 15 bp, Homo sapiens
ttagagtgttgttac

SEQ ID NO: 2012714 - DNA, 15 bp, Homo sapiens
tagagtgttgttact

SEQ ID NO: 2012715 - DNA, 15 bp, Homo sapiens
agagtgttgttactt

SEQ ID NO: 2012716 - DNA, 15 bp, Homo sapiens
gagtgttgttacttt

SEQ ID NO: 2012717 - DNA, 15 bp, Homo sapiens
agtgttgttactttt

SEQ ID NO: 2012718 - DNA, 15 bp, Homo sapiens
gtgttgttacttttc

SEQ ID NO: 2012719 - DNA, 15 bp, Homo sapiens
tgttgttacttttct

SEQ ID NO: 2012720 - DNA, 15 bp, Homo sapiens
gttgttacttttctc

SEQ ID NO: 2012721 - DNA, 15 bp, Homo sapiens
ttgttacttttctct

SEQ ID NO: 2012722 - DNA, 15 bp, Homo sapiens
tgttacttttctctc

SEQ ID NO: 2012723 - DNA, 15 bp, Homo sapiens
gttacttttctctct

SEQ ID NO: 2012724 - DNA, 15 bp, Homo sapiens
ttacttttctctctc

SEQ ID NO: 2012725 - DNA, 15 bp, Homo sapiens
tacttttctctctct

SEQ ID NO: 2012726 - DNA, 15 bp, Homo sapiens
acttttctctctctc

SEQ ID NO: 2012727 - DNA, 15 bp, Homo sapiens
cttttctctctctca

SEQ ID NO: 2012728 - DNA, 15 bp, Homo sapiens
ttttctctctctcaa

SEQ ID NO: 2012729 - DNA, 15 bp, Homo sapiens
tttctctctctcaat

SEQ ID NO: 2012730 - DNA, 15 bp, Homo sapiens
ttctctctctcaata

SEQ ID NO: 2012731 - DNA, 15 bp, Homo sapiens
tctctctctcaatag

SEQ ID NO: 2012732 - DNA, 15 bp, Homo sapiens
ctctctctcaataga

SEQ ID NO: 2012733 - DNA, 15 bp, Homo sapiens
tctctctcaatagaa

SEQ ID NO: 2012734 - DNA, 15 bp, Homo sapiens
ctctctcaatagaaa

SEQ ID NO: 2012735 - DNA, 15 bp, Homo sapiens
tctctcaatagaaat

SEQ ID NO: 2012736 - DNA, 15 bp, Homo sapiens
ctctcaatagaaatg

SEQ ID NO: 2012737 - DNA, 15 bp, Homo sapiens
tctcaatagaaatgt

SEQ ID NO: 2012738 - DNA, 15 bp, Homo sapiens
ctcaatagaaatgtt

SEQ ID NO: 2012739 - DNA, 15 bp, Homo sapiens
tcaatagaaatgttc

SEQ ID NO: 2012740 - DNA, 15 bp, Homo sapiens
caatagaaatgttcc

SEQ ID NO: 2012741 - DNA, 15 bp, Homo sapiens
aatagaaatgttcct

SEQ ID NO: 2012742 - DNA, 15 bp, Homo sapiens
atagaaatgttccta

SEQ ID NO: 2012743 - DNA, 15 bp, Homo sapiens
tagaaatgttcctaa

SEQ ID NO: 2012744 - DNA, 15 bp, Homo sapiens
agaaatgttcctaaa

SEQ ID NO: 2012745 - DNA, 15 bp, Homo sapiens
gaaatgttcctaaac

SEQ ID NO: 2012746 - DNA, 15 bp, Homo sapiens
aaatgttcctaaacc

SEQ ID NO: 2012747 - DNA, 15 bp, Homo sapiens
aatgttcctaaacca

SEQ ID NO: 2012748 - DNA, 15 bp, Homo sapiens
atgttcctaaaccag

SEQ ID NO: 2012749 - DNA, 15 bp, Homo sapiens
tgttcctaaaccagc

SEQ ID NO: 2012750 - DNA, 15 bp, Homo sapiens
gttcctaaaccagca

SEQ ID NO: 2012751 - DNA, 15 bp, Homo sapiens
ttcctaaaccagcaa

SEQ ID NO: 2012752 - DNA, 15 bp, Homo sapiens
tcctaaaccagcaaa

SEQ ID NO: 2012753 - DNA, 15 bp, Homo sapiens
cctaaaccagcaaag

SEQ ID NO: 2012754 - DNA, 15 bp, Homo sapiens
ctaaaccagcaaagg

SEQ ID NO: 2012755 - DNA, 15 bp, Homo sapiens
taaaccagcaaagga

SEQ ID NO: 2012756 - DNA, 15 bp, Homo sapiens
aaaccagcaaaggag

SEQ ID NO: 2012757 - DNA, 15 bp, Homo sapiens
aaccagcaaaggagg

SEQ ID NO: 2012758 - DNA, 15 bp, Homo sapiens
accagcaaaggaggc

SEQ ID NO: 2012759 - DNA, 15 bp, Homo sapiens
ccagcaaaggaggct

SEQ ID NO: 2012760 - DNA, 15 bp, Homo sapiens
cagcaaaggaggcta

SEQ ID NO: 2012761 - DNA, 15 bp, Homo sapiens
agcaaaggaggctat

SEQ ID NO: 2012762 - DNA, 15 bp, Homo sapiens
gcaaaggaggctatc

SEQ ID NO: 2012763 - DNA, 15 bp, Homo sapiens
caaaggaggctatct

SEQ ID NO: 2012764 - DNA, 15 bp, Homo sapiens
aaaggaggctatctg

SEQ ID NO: 2012765 - DNA, 15 bp, Homo sapiens
aaggaggctatctga

SEQ ID NO: 2012766 - DNA, 15 bp, Homo sapiens
aggaggctatctgaa

SEQ ID NO: 2012767 - DNA, 15 bp, Homo sapiens
ggaggctatctgaat

SEQ ID NO: 2012768 - DNA, 15 bp, Homo sapiens
gaggctatctgaatt

SEQ ID NO: 2012769 - DNA, 15 bp, Homo sapiens
aggctatctgaattt

SEQ ID NO: 2012770 - DNA, 15 bp, Homo sapiens
ggctatctgaatttt

SEQ ID NO: 2012771 - DNA, 15 bp, Homo sapiens
gctatctgaattttt

SEQ ID NO: 2012772 - DNA, 15 bp, Homo sapiens
ctatctgaattttta

SEQ ID NO: 2012773 - DNA, 15 bp, Homo sapiens
tatctgaatttttaa

SEQ ID NO: 2012774 - DNA, 15 bp, Homo sapiens
atctgaatttttaaa

SEQ ID NO: 2012775 - DNA, 15 bp, Homo sapiens
tctgaatttttaaaa

SEQ ID NO: 2012776 - DNA, 15 bp, Homo sapiens
ctgaatttttaaaag

SEQ ID NO: 2012777 - DNA, 15 bp, Homo sapiens
tgaatttttaaaagt

SEQ ID NO: 2012778 - DNA, 15 bp, Homo sapiens
gaatttttaaaagtt

SEQ ID NO: 2012779 - DNA, 15 bp, Homo sapiens
aatttttaaaagttt

SEQ ID NO: 2012780 - DNA, 15 bp, Homo sapiens
atttttaaaagtttt

SEQ ID NO: 2012781 - DNA, 15 bp, Homo sapiens
tttttaaaagttttt

SEQ ID NO: 2012782 - DNA, 15 bp, Homo sapiens
ttttaaaagttttta

SEQ ID NO: 2012783 - DNA, 15 bp, Homo sapiens
tttaaaagtttttac

SEQ ID NO: 2012784 - DNA, 15 bp, Homo sapiens
ttaaaagtttttacg

SEQ ID NO: 2012785 - DNA, 15 bp, Homo sapiens
taaaagtttttacga

SEQ ID NO: 2012786 - DNA, 15 bp, Homo sapiens
aaaagtttttacgaa

SEQ ID NO: 2012787 - DNA, 15 bp, Homo sapiens
aaagtttttacgaag

SEQ ID NO: 2012788 - DNA, 15 bp, Homo sapiens
aagtttttacgaagg

SEQ ID NO: 2012789 - DNA, 15 bp, Homo sapiens
agtttttacgaagga

SEQ ID NO: 2012790 - DNA, 15 bp, Homo sapiens
gtttttacgaaggaa

SEQ ID NO: 2012791 - DNA, 15 bp, Homo sapiens
tttttacgaaggaac

SEQ ID NO: 2012792 - DNA, 15 bp, Homo sapiens
ttttacgaaggaaca

SEQ ID NO: 2012793 - DNA, 15 bp, Homo sapiens
tttacgaaggaacat

SEQ ID NO: 2012794 - DNA, 15 bp, Homo sapiens
ttacgaaggaacata

SEQ ID NO: 2012795 - DNA, 15 bp, Homo sapiens
tacgaaggaacataa

SEQ ID NO: 2012796 - DNA, 15 bp, Homo sapiens
acgaaggaacataaa

SEQ ID NO: 2012797 - DNA, 15 bp, Homo sapiens
cgaaggaacataaaa

SEQ ID NO: 2012798 - DNA, 15 bp, Homo sapiens
gaaggaacataaaaa

SEQ ID NO: 2012799 - DNA, 15 bp, Homo sapiens
aaggaacataaaaat

SEQ ID NO: 2012800 - DNA, 15 bp, Homo sapiens
aggaacataaaaatt

SEQ ID NO: 2012801 - DNA, 15 bp, Homo sapiens
ggaacataaaaattc

SEQ ID NO: 2012802 - DNA, 15 bp, Homo sapiens
gaacataaaaattcc

SEQ ID NO: 2012803 - DNA, 15 bp, Homo sapiens
aacataaaaattcct

SEQ ID NO: 2012804 - DNA, 15 bp, Homo sapiens
acataaaaattcctt

SEQ ID NO: 2012805 - DNA, 15 bp, Homo sapiens
cataaaaattccttt

SEQ ID NO: 2012806 - DNA, 15 bp, Homo sapiens
ataaaaattcctttc

SEQ ID NO: 2012807 - DNA, 15 bp, Homo sapiens
taaaaattcctttct

SEQ ID NO: 2012808 - DNA, 15 bp, Homo sapiens
aaaaattcctttctc

SEQ ID NO: 2012809 - DNA, 15 bp, Homo sapiens
aaaattcctttctct

SEQ ID NO: 2012810 - DNA, 15 bp, Homo sapiens
aaattcctttctcta

SEQ ID NO: 2012811 - DNA, 15 bp, Homo sapiens
aattcctttctctat

SEQ ID NO: 2012812 - DNA, 15 bp, Homo sapiens
attcctttctctatc

SEQ ID NO: 2012813 - DNA, 15 bp, Homo sapiens
ttcctttctctatct

SEQ ID NO: 2012814 - DNA, 15 bp, Homo sapiens
tcctttctctatctt

SEQ ID NO: 2012815 - DNA, 15 bp, Homo sapiens
cctttctctatcttt

SEQ ID NO: 2012816 - DNA, 15 bp, Homo sapiens
ctttctctatctttt

SEQ ID NO: 2012817 - DNA, 15 bp, Homo sapiens
tttctctatcttttc

SEQ ID NO: 2012818 - DNA, 15 bp, Homo sapiens
ttctctatcttttcc

SEQ ID NO: 2012819 - DNA, 15 bp, Homo sapiens
tctctatcttttccc

SEQ ID NO: 2012820 - DNA, 15 bp, Homo sapiens
ctctatcttttccca

SEQ ID NO: 2012821 - DNA, 15 bp, Homo sapiens
tctatcttttcccac

SEQ ID NO: 2012822 - DNA, 15 bp, Homo sapiens
ctatcttttcccacc

SEQ ID NO: 2012823 - DNA, 15 bp, Homo sapiens
tatcttttcccacct

SEQ ID NO: 2012824 - DNA, 15 bp, Homo sapiens
atcttttcccacctc

SEQ ID NO: 2012825 - DNA, 15 bp, Homo sapiens
tcttttcccacctct

SEQ ID NO: 2012826 - DNA, 15 bp, Homo sapiens
cttttcccacctcta

SEQ ID NO: 2012827 - DNA, 15 bp, Homo sapiens
ttttcccacctctag

SEQ ID NO: 2012828 - DNA, 15 bp, Homo sapiens
tttcccacctctaga

SEQ ID NO: 2012829 - DNA, 15 bp, Homo sapiens
ttcccacctctagaa

SEQ ID NO: 2012830 - DNA, 15 bp, Homo sapiens
tcccacctctagaaa

SEQ ID NO: 2012831 - DNA, 15 bp, Homo sapiens
cccacctctagaaat

SEQ ID NO: 2012832 - DNA, 15 bp, Homo sapiens
ccacctctagaaatg

SEQ ID NO: 2012833 - DNA, 15 bp, Homo sapiens
cacctctagaaatgc

SEQ ID NO: 2012834 - DNA, 15 bp, Homo sapiens
acctctagaaatgct

SEQ ID NO: 2012835 - DNA, 15 bp, Homo sapiens
cctctagaaatgctt

SEQ ID NO: 2012836 - DNA, 15 bp, Homo sapiens
ctctagaaatgcttg

SEQ ID NO: 2012837 - DNA, 15 bp, Homo sapiens
tctagaaatgcttga

SEQ ID NO: 2012838 - DNA, 15 bp, Homo sapiens
ctagaaatgcttgaa

SEQ ID NO: 2012839 - DNA, 15 bp, Homo sapiens
tagaaatgcttgaaa

SEQ ID NO: 2012840 - DNA, 15 bp, Homo sapiens
agaaatgcttgaaat

SEQ ID NO: 2012841 - DNA, 15 bp, Homo sapiens
gaaatgcttgaaatg

SEQ ID NO: 2012842 - DNA, 15 bp, Homo sapiens
aaatgcttgaaatga

SEQ ID NO: 2012843 - DNA, 15 bp, Homo sapiens
aatgcttgaaatgag

SEQ ID NO: 2012844 - DNA, 15 bp, Homo sapiens
atgcttgaaatgaga

SEQ ID NO: 2012845 - DNA, 15 bp, Homo sapiens
tgcttgaaatgagat

SEQ ID NO: 2012846 - DNA, 15 bp, Homo sapiens
gcttgaaatgagatt

SEQ ID NO: 2012847 - DNA, 15 bp, Homo sapiens
cttgaaatgagattc

SEQ ID NO: 2012848 - DNA, 15 bp, Homo sapiens
ttgaaatgagattct

SEQ ID NO: 2012849 - DNA, 15 bp, Homo sapiens
tgaaatgagattctg

SEQ ID NO: 2012850 - DNA, 15 bp, Homo sapiens
gaaatgagattctgc

SEQ ID NO: 2012851 - DNA, 15 bp, Homo sapiens
aaatgagattctgcc

SEQ ID NO: 2012852 - DNA, 15 bp, Homo sapiens
aatgagattctgcct

SEQ ID NO: 2012853 - DNA, 15 bp, Homo sapiens
atgagattctgcctt

SEQ ID NO: 2012854 - DNA, 15 bp, Homo sapiens
tgagattctgcctta

SEQ ID NO: 2012855 - DNA, 15 bp, Homo sapiens
gagattctgccttac

SEQ ID NO: 2012856 - DNA, 15 bp, Homo sapiens
agattctgccttacg

SEQ ID NO: 2012857 - DNA, 15 bp, Homo sapiens
gattctgccttacgt

SEQ ID NO: 2012858 - DNA, 15 bp, Homo sapiens
attctgccttacgtc

SEQ ID NO: 2012859 - DNA, 15 bp, Homo sapiens
ttctgccttacgtct

SEQ ID NO: 2012860 - DNA, 15 bp, Homo sapiens
tctgccttacgtctc

SEQ ID NO: 2012861 - DNA, 15 bp, Homo sapiens
ctgccttacgtctca

SEQ ID NO: 2012862 - DNA, 15 bp, Homo sapiens
tgccttacgtctcac

SEQ ID NO: 2012863 - DNA, 15 bp, Homo sapiens
gccttacgtctcaca

SEQ ID NO: 2012864 - DNA, 15 bp, Homo sapiens
ccttacgtctcacaa

SEQ ID NO: 2012865 - DNA, 15 bp, Homo sapiens
cttacgtctcacaaa

SEQ ID NO: 2012866 - DNA, 15 bp, Homo sapiens
ttacgtctcacaaat

SEQ ID NO: 2012867 - DNA, 15 bp, Homo sapiens
tacgtctcacaaatt

SEQ ID NO: 2012868 - DNA, 15 bp, Homo sapiens
acgtctcacaaatta

SEQ ID NO: 2012869 - DNA, 15 bp, Homo sapiens
cgtctcacaaattaa

SEQ ID NO: 2012870 - DNA, 15 bp, Homo sapiens
gtctcacaaattaaa

SEQ ID NO: 2012871 - DNA, 15 bp, Homo sapiens
tctcacaaattaaat

SEQ ID NO: 2012872 - DNA, 15 bp, Homo sapiens
ctcacaaattaaata

SEQ ID NO: 2012873 - DNA, 15 bp, Homo sapiens
tcacaaattaaatac

SEQ ID NO: 2012874 - DNA, 15 bp, Homo sapiens
cacaaattaaatacc

SEQ ID NO: 2012875 - DNA, 15 bp, Homo sapiens
acaaattaaatacca

SEQ ID NO: 2012876 - DNA, 15 bp, Homo sapiens
caaattaaataccac

SEQ ID NO: 2012877 - DNA, 15 bp, Homo sapiens
aaattaaataccaca

SEQ ID NO: 2012878 - DNA, 15 bp, Homo sapiens
aattaaataccacat

SEQ ID NO: 2012879 - DNA, 15 bp, Homo sapiens
attaaataccacatt

SEQ ID NO: 2012880 - DNA, 15 bp, Homo sapiens
ttaaataccacattt

SEQ ID NO: 2012881 - DNA, 15 bp, Homo sapiens
taaataccacatttg

SEQ ID NO: 2012882 - DNA, 15 bp, Homo sapiens
aaataccacatttgt

SEQ ID NO: 2012883 - DNA, 15 bp, Homo sapiens
aataccacatttgtg

SEQ ID NO: 2012884 - DNA, 15 bp, Homo sapiens
ataccacatttgtgt

SEQ ID NO: 2012885 - DNA, 15 bp, Homo sapiens
taccacatttgtgtc

SEQ ID NO: 2012886 - DNA, 15 bp, Homo sapiens
accacatttgtgtct

SEQ ID NO: 2012887 - DNA, 15 bp, Homo sapiens
ccacatttgtgtctc

SEQ ID NO: 2012888 - DNA, 15 bp, Homo sapiens
cacatttgtgtctca

SEQ ID NO: 2012889 - DNA, 15 bp, Homo sapiens
acatttgtgtctcac

SEQ ID NO: 2012890 - DNA, 15 bp, Homo sapiens
catttgtgtctcacc

SEQ ID NO: 2012891 - DNA, 15 bp, Homo sapiens
atttgtgtctcaccc

SEQ ID NO: 2012892 - DNA, 15 bp, Homo sapiens
tttgtgtctcaccca

SEQ ID NO: 2012893 - DNA, 15 bp, Homo sapiens
ttgtgtctcacccat

SEQ ID NO: 2012894 - DNA, 15 bp, Homo sapiens
tgtgtctcacccatc

SEQ ID NO: 2012895 - DNA, 15 bp, Homo sapiens
gtgtctcacccatct

SEQ ID NO: 2012896 - DNA, 15 bp, Homo sapiens
tgtctcacccatctc

SEQ ID NO: 2012897 - DNA, 15 bp, Homo sapiens
gtctcacccatctca

SEQ ID NO: 2012898 - DNA, 15 bp, Homo sapiens
tctcacccatctcag

SEQ ID NO: 2012899 - DNA, 15 bp, Homo sapiens
ctcacccatctcagt

SEQ ID NO: 2012900 - DNA, 15 bp, Homo sapiens
tcacccatctcagtt

SEQ ID NO: 2012901 - DNA, 15 bp, Homo sapiens
cacccatctcagtta

SEQ ID NO: 2012902 - DNA, 15 bp, Homo sapiens
acccatctcagttat

SEQ ID NO: 2012903 - DNA, 15 bp, Homo sapiens
cccatctcagttatg

SEQ ID NO: 2012904 - DNA, 15 bp, Homo sapiens
ccatctcagttatgc

SEQ ID NO: 2012905 - DNA, 15 bp, Homo sapiens
catctcagttatgct

SEQ ID NO: 2012906 - DNA, 15 bp, Homo sapiens
atctcagttatgctg

SEQ ID NO: 2012907 - DNA, 15 bp, Homo sapiens
tctcagttatgctgt

SEQ ID NO: 2012908 - DNA, 15 bp, Homo sapiens
ctcagttatgctgtc

SEQ ID NO: 2012909 - DNA, 15 bp, Homo sapiens
tcagttatgctgtct

SEQ ID NO: 2012910 - DNA, 15 bp, Homo sapiens
cagttatgctgtctt

SEQ ID NO: 2012911 - DNA, 15 bp, Homo sapiens
agttatgctgtcttg

SEQ ID NO: 2012912 - DNA, 15 bp, Homo sapiens
gttatgctgtcttgc

SEQ ID NO: 2012913 - DNA, 15 bp, Homo sapiens
ttatgctgtcttgca

SEQ ID NO: 2012914 - DNA, 15 bp, Homo sapiens
tatgctgtcttgcat

SEQ ID NO: 2012915 - DNA, 15 bp, Homo sapiens
atgctgtcttgcatt

SEQ ID NO: 2012916 - DNA, 15 bp, Homo sapiens
tgctgtcttgcattt

SEQ ID NO: 2012917 - DNA, 15 bp, Homo sapiens
gctgtcttgcatttt

SEQ ID NO: 2012918 - DNA, 15 bp, Homo sapiens
ctgtcttgcatttta

SEQ ID NO: 2012919 - DNA, 15 bp, Homo sapiens
tgtcttgcattttaa

SEQ ID NO: 2012920 - DNA, 15 bp, Homo sapiens
gtcttgcattttaat

SEQ ID NO: 2012921 - DNA, 15 bp, Homo sapiens
tcttgcattttaatc

SEQ ID NO: 2012922 - DNA, 15 bp, Homo sapiens
cttgcattttaatca

SEQ ID NO: 2012923 - DNA, 15 bp, Homo sapiens
ttgcattttaatcaa

SEQ ID NO: 2012924 - DNA, 15 bp, Homo sapiens
tgcattttaatcaat

SEQ ID NO: 2012925 - DNA, 15 bp, Homo sapiens
gcattttaatcaatc

SEQ ID NO: 2012926 - DNA, 15 bp, Homo sapiens
cattttaatcaatcc

SEQ ID NO: 2012927 - DNA, 15 bp, Homo sapiens
attttaatcaatcct

SEQ ID NO: 2012928 - DNA, 15 bp, Homo sapiens
ttttaatcaatcctg

SEQ ID NO: 2012929 - DNA, 15 bp, Homo sapiens
tttaatcaatcctgt

SEQ ID NO: 2012930 - DNA, 15 bp, Homo sapiens
ttaatcaatcctgtt

SEQ ID NO: 2012931 - DNA, 15 bp, Homo sapiens
taatcaatcctgttt

SEQ ID NO: 2012932 - DNA, 15 bp, Homo sapiens
aatcaatcctgtttc

SEQ ID NO: 2012933 - DNA, 15 bp, Homo sapiens
atcaatcctgtttca

SEQ ID NO: 2012934 - DNA, 15 bp, Homo sapiens
tcaatcctgtttcag

SEQ ID NO: 2012935 - DNA, 15 bp, Homo sapiens
caatcctgtttcagg

SEQ ID NO: 2012936 - DNA, 15 bp, Homo sapiens
aatcctgtttcagga

SEQ ID NO: 2012937 - DNA, 15 bp, Homo sapiens
atcctgtttcaggac

SEQ ID NO: 2012938 - DNA, 15 bp, Homo sapiens
tcctgtttcaggact

SEQ ID NO: 2012939 - DNA, 15 bp, Homo sapiens
cctgtttcaggactt

SEQ ID NO: 2012940 - DNA, 15 bp, Homo sapiens
ctgtttcaggacttc

SEQ ID NO: 2012941 - DNA, 15 bp, Homo sapiens
tgtttcaggacttct

SEQ ID NO: 2012942 - DNA, 15 bp, Homo sapiens
gtttcaggacttctt

SEQ ID NO: 2012943 - DNA, 15 bp, Homo sapiens
tttcaggacttcttt

SEQ ID NO: 2012944 - DNA, 15 bp, Homo sapiens
ttcaggacttctttt

SEQ ID NO: 2012945 - DNA, 15 bp, Homo sapiens
tcaggacttcttttg

SEQ ID NO: 2012946 - DNA, 15 bp, Homo sapiens
caggacttcttttgc

SEQ ID NO: 2012947 - DNA, 15 bp, Homo sapiens
aggacttcttttgct

SEQ ID NO: 2012948 - DNA, 15 bp, Homo sapiens
ggacttcttttgctg

SEQ ID NO: 2012949 - DNA, 15 bp, Homo sapiens
gacttcttttgctgc

SEQ ID NO: 2012950 - DNA, 15 bp, Homo sapiens
acttcttttgctgcc

SEQ ID NO: 2012951 - DNA, 15 bp, Homo sapiens
cttcttttgctgcct

SEQ ID NO: 2012952 - DNA, 15 bp, Homo sapiens
ttcttttgctgcctt

SEQ ID NO: 2012953 - DNA, 15 bp, Homo sapiens
tcttttgctgccttg

SEQ ID NO: 2012954 - DNA, 15 bp, Homo sapiens
cttttgctgccttgt

SEQ ID NO: 2012955 - DNA, 15 bp, Homo sapiens
ttttgctgccttgtg

SEQ ID NO: 2012956 - DNA, 15 bp, Homo sapiens
tttgctgccttgtgg

SEQ ID NO: 2012957 - DNA, 15 bp, Homo sapiens
ttgctgccttgtggc

SEQ ID NO: 2012958 - DNA, 15 bp, Homo sapiens
tgctgccttgtggct

SEQ ID NO: 2012959 - DNA, 15 bp, Homo sapiens
gctgccttgtggctg

SEQ ID NO: 2012960 - DNA, 15 bp, Homo sapiens
ctgccttgtggctgt

SEQ ID NO: 2012961 - DNA, 15 bp, Homo sapiens
tgccttgtggctgtt

SEQ ID NO: 2012962 - DNA, 15 bp, Homo sapiens
gccttgtggctgttt

SEQ ID NO: 2012963 - DNA, 15 bp, Homo sapiens
ccttgtggctgtttc

SEQ ID NO: 2012964 - DNA, 15 bp, Homo sapiens
cttgtggctgtttct

SEQ ID NO: 2012965 - DNA, 15 bp, Homo sapiens
ttgtggctgtttctt

SEQ ID NO: 2012966 - DNA, 15 bp, Homo sapiens
tgtggctgtttctta

SEQ ID NO: 2012967 - DNA, 15 bp, Homo sapiens
gtggctgtttcttat

SEQ ID NO: 2012968 - DNA, 15 bp, Homo sapiens
tggctgtttcttatg

SEQ ID NO: 2012969 - DNA, 15 bp, Homo sapiens
ggctgtttcttatgt

SEQ ID NO: 2012970 - DNA, 15 bp, Homo sapiens
gctgtttcttatgtt

SEQ ID NO: 2012971 - DNA, 15 bp, Homo sapiens
ctgtttcttatgttt

SEQ ID NO: 2012972 - DNA, 15 bp, Homo sapiens
tgtttcttatgtttg

SEQ ID NO: 2012973 - DNA, 15 bp, Homo sapiens
gtttcttatgtttgt

SEQ ID NO: 2012974 - DNA, 15 bp, Homo sapiens
tttcttatgtttgtc

SEQ ID NO: 2012975 - DNA, 15 bp, Homo sapiens
ttcttatgtttgtca

SEQ ID NO: 2012976 - DNA, 15 bp, Homo sapiens
tcttatgtttgtcac

SEQ ID NO: 2012977 - DNA, 15 bp, Homo sapiens
cttatgtttgtcact

SEQ ID NO: 2012978 - DNA, 15 bp, Homo sapiens
ttatgtttgtcacta

SEQ ID NO: 2012979 - DNA, 15 bp, Homo sapiens
tatgtttgtcactaa

SEQ ID NO: 2012980 - DNA, 15 bp, Homo sapiens
atgtttgtcactaat

SEQ ID NO: 2012981 - DNA, 15 bp, Homo sapiens
tgtttgtcactaatt

SEQ ID NO: 2012982 - DNA, 15 bp, Homo sapiens
gtttgtcactaattc

SEQ ID NO: 2012983 - DNA, 15 bp, Homo sapiens
tttgtcactaattca

SEQ ID NO: 2012984 - DNA, 15 bp, Homo sapiens
ttgtcactaattcat

SEQ ID NO: 2012985 - DNA, 15 bp, Homo sapiens
tgtcactaattcata

SEQ ID NO: 2012986 - DNA, 15 bp, Homo sapiens
gtcactaattcataa

SEQ ID NO: 2012987 - DNA, 15 bp, Homo sapiens
tcactaattcataag

SEQ ID NO: 2012988 - DNA, 15 bp, Homo sapiens
cactaattcataagt

SEQ ID NO: 2012989 - DNA, 15 bp, Homo sapiens
actaattcataagtt

SEQ ID NO: 2012990 - DNA, 15 bp, Homo sapiens
ctaattcataagttg

SEQ ID NO: 2012991 - DNA, 15 bp, Homo sapiens
taattcataagttgg

SEQ ID NO: 2012992 - DNA, 15 bp, Homo sapiens
aattcataagttggc

SEQ ID NO: 2012993 - DNA, 15 bp, Homo sapiens
attcataagttggct

SEQ ID NO: 2012994 - DNA, 15 bp, Homo sapiens
ttcataagttggcta

SEQ ID NO: 2012995 - DNA, 15 bp, Homo sapiens
tcataagttggctaa

SEQ ID NO: 2012996 - DNA, 15 bp, Homo sapiens
cataagttggctaac

SEQ ID NO: 2012997 - DNA, 15 bp, Homo sapiens
ataagttggctaact

SEQ ID NO: 2012998 - DNA, 15 bp, Homo sapiens
taagttggctaactt

SEQ ID NO: 2012999 - DNA, 15 bp, Homo sapiens
aagttggctaacttt

SEQ ID NO: 2013000 - DNA, 15 bp, Homo sapiens
agttggctaactttt

SEQ ID NO: 2013001 - DNA, 15 bp, Homo sapiens
gttggctaactttta

SEQ ID NO: 2013002 - DNA, 15 bp, Homo sapiens
ttggctaacttttat

SEQ ID NO: 2013003 - DNA, 15 bp, Homo sapiens
tggctaacttttata

SEQ ID NO: 2013004 - DNA, 15 bp, Homo sapiens
ggctaacttttatat

SEQ ID NO: 2013005 - DNA, 15 bp, Homo sapiens
gctaacttttatatt

SEQ ID NO: 2013006 - DNA, 15 bp, Homo sapiens
ctaacttttatattt

SEQ ID NO: 2013007 - DNA, 15 bp, Homo sapiens
aacttttatatttgt

SEQ ID NO: 2013008 - DNA, 15 bp, Homo sapiens
acttttatatttgta

SEQ ID NO: 2013009 - DNA, 15 bp, Homo sapiens
cttttatatttgtag

SEQ ID NO: 2013010 - DNA, 15 bp, Homo sapiens
ttttatatttgtaga

SEQ ID NO: 2013011 - DNA, 15 bp, Homo sapiens
tttatatttgtagag

SEQ ID NO: 2013012 - DNA, 15 bp, Homo sapiens
ttatatttgtagaga

SEQ ID NO: 2013013 - DNA, 15 bp, Homo sapiens
tatatttgtagagaa

SEQ ID NO: 2013014 - DNA, 15 bp, Homo sapiens
atatttgtagagaat

SEQ ID NO: 2013015 - DNA, 15 bp, Homo sapiens
tatttgtagagaatt

SEQ ID NO: 2013016 - DNA, 15 bp, Homo sapiens
atttgtagagaattt

SEQ ID NO: 2013017 - DNA, 15 bp, Homo sapiens
tttgtagagaatttc

SEQ ID NO: 2013018 - DNA, 15 bp, Homo sapiens
ttgtagagaatttct

SEQ ID NO: 2013019 - DNA, 15 bp, Homo sapiens
tgtagagaatttctc

SEQ ID NO: 2013020 - DNA, 15 bp, Homo sapiens
gtagagaatttctca

SEQ ID NO: 2013021 - DNA, 15 bp, Homo sapiens
tagagaatttctcag

SEQ ID NO: 2013022 - DNA, 15 bp, Homo sapiens
agagaatttctcagt

SEQ ID NO: 2013023 - DNA, 15 bp, Homo sapiens
gagaatttctcagtg

SEQ ID NO: 2013024 - DNA, 15 bp, Homo sapiens
agaatttctcagtga

SEQ ID NO: 2013025 - DNA, 15 bp, Homo sapiens
aatttctcagtgatt

SEQ ID NO: 2013026 - DNA, 15 bp, Homo sapiens
atttctcagtgattt

SEQ ID NO: 2013027 - DNA, 15 bp, Homo sapiens
tttctcagtgatttt

SEQ ID NO: 2013028 - DNA, 15 bp, Homo sapiens
ttctcagtgattttc

SEQ ID NO: 2013029 - DNA, 15 bp, Homo sapiens
tctcagtgattttct

SEQ ID NO: 2013030 - DNA, 15 bp, Homo sapiens
ctcagtgattttctt

SEQ ID NO: 2013031 - DNA, 15 bp, Homo sapiens
tcagtgattttcttc

SEQ ID NO: 2013032 - DNA, 15 bp, Homo sapiens
cagtgattttcttct

SEQ ID NO: 2013033 - DNA, 15 bp, Homo sapiens
agtgattttcttcta

SEQ ID NO: 2013034 - DNA, 15 bp, Homo sapiens
gtgattttcttctag

SEQ ID NO: 2013035 - DNA, 15 bp, Homo sapiens
tgattttcttctagt

SEQ ID NO: 2013036 - DNA, 15 bp, Homo sapiens
gattttcttctagtt

SEQ ID NO: 2013037 - DNA, 15 bp, Homo sapiens
attttcttctagttg

SEQ ID NO: 2013038 - DNA, 15 bp, Homo sapiens
ttttcttctagttgg

SEQ ID NO: 2013039 - DNA, 15 bp, Homo sapiens
tttcttctagttgga

SEQ ID NO: 2013040 - DNA, 15 bp, Homo sapiens
ttcttctagttggag

SEQ ID NO: 2013041 - DNA, 15 bp, Homo sapiens
tcttctagttggagt

SEQ ID NO: 2013042 - DNA, 15 bp, Homo sapiens
cttctagttggagtt

SEQ ID NO: 2013043 - DNA, 15 bp, Homo sapiens
ttctagttggagttc

SEQ ID NO: 2013044 - DNA, 15 bp, Homo sapiens
tctagttggagttcc

SEQ ID NO: 2013045 - DNA, 15 bp, Homo sapiens
ctagttggagttcca

SEQ ID NO: 2013046 - DNA, 15 bp, Homo sapiens
tagttggagttccag

SEQ ID NO: 2013047 - DNA, 15 bp, Homo sapiens
agttggagttccagt

SEQ ID NO: 2013048 - DNA, 15 bp, Homo sapiens
gttggagttccagtg

SEQ ID NO: 2013049 - DNA, 15 bp, Homo sapiens
ttggagttccagtgt

SEQ ID NO: 2013050 - DNA, 15 bp, Homo sapiens
tggagttccagtgtg

SEQ ID NO: 2013051 - DNA, 15 bp, Homo sapiens
ggagttccagtgtgg

SEQ ID NO: 2013052 - DNA, 15 bp, Homo sapiens
gagttccagtgtggt

SEQ ID NO: 2013053 - DNA, 15 bp, Homo sapiens
agttccagtgtggtt

SEQ ID NO: 2013054 - DNA, 15 bp, Homo sapiens
gttccagtgtggttt

SEQ ID NO: 2013055 - DNA, 15 bp, Homo sapiens
ttccagtgtggtttg

SEQ ID NO: 2013056 - DNA, 15 bp, Homo sapiens
tccagtgtggtttga

SEQ ID NO: 2013057 - DNA, 15 bp, Homo sapiens
ccagtgtggtttgat

SEQ ID NO: 2013058 - DNA, 15 bp, Homo sapiens
cagtgtggtttgatt

SEQ ID NO: 2013059 - DNA, 15 bp, Homo sapiens
agtgtggtttgattt

SEQ ID NO: 2013060 - DNA, 15 bp, Homo sapiens
gtgtggtttgatttg

SEQ ID NO: 2013061 - DNA, 15 bp, Homo sapiens
tgtggtttgatttgg

SEQ ID NO: 2013062 - DNA, 15 bp, Homo sapiens
gtggtttgatttgga

SEQ ID NO: 2013063 - DNA, 15 bp, Homo sapiens
tggtttgatttggag

SEQ ID NO: 2013064 - DNA, 15 bp, Homo sapiens
ggtttgatttggagt

SEQ ID NO: 2013065 - DNA, 15 bp, Homo sapiens
gtttgatttggagtg

SEQ ID NO: 2013066 - DNA, 15 bp, Homo sapiens
tttgatttggagtgt

SEQ ID NO: 2013067 - DNA, 15 bp, Homo sapiens
ttgatttggagtgtc

SEQ ID NO: 2013068 - DNA, 15 bp, Homo sapiens
tgatttggagtgtca

SEQ ID NO: 2013069 - DNA, 15 bp, Homo sapiens
gatttggagtgtcaa

SEQ ID NO: 2013070 - DNA, 15 bp, Homo sapiens
atttggagtgtcaag

SEQ ID NO: 2013071 - DNA, 15 bp, Homo sapiens
tttggagtgtcaaga

SEQ ID NO: 2013072 - DNA, 15 bp, Homo sapiens
ttggagtgtcaagat

SEQ ID NO: 2013073 - DNA, 15 bp, Homo sapiens
tggagtgtcaagatc

SEQ ID NO: 2013074 - DNA, 15 bp, Homo sapiens
ggagtgtcaagatct

SEQ ID NO: 2013075 - DNA, 15 bp, Homo sapiens
gagtgtcaagatctc

SEQ ID NO: 2013076 - DNA, 15 bp, Homo sapiens
agtgtcaagatctct

SEQ ID NO: 2013077 - DNA, 15 bp, Homo sapiens
gtgtcaagatctctg

SEQ ID NO: 2013078 - DNA, 15 bp, Homo sapiens
tgtcaagatctctgt

SEQ ID NO: 2013079 - DNA, 15 bp, Homo sapiens
gtcaagatctctgtc

SEQ ID NO: 2013080 - DNA, 15 bp, Homo sapiens
tcaagatctctgtcc

SEQ ID NO: 2013081 - DNA, 15 bp, Homo sapiens
caagatctctgtccc

SEQ ID NO: 2013082 - DNA, 15 bp, Homo sapiens
aagatctctgtccca

SEQ ID NO: 2013083 - DNA, 15 bp, Homo sapiens
agatctctgtcccat

SEQ ID NO: 2013084 - DNA, 15 bp, Homo sapiens
gatctctgtcccatg

SEQ ID NO: 2013085 - DNA, 15 bp, Homo sapiens
atctctgtcccatgc

SEQ ID NO: 2013086 - DNA, 15 bp, Homo sapiens
tctctgtcccatgcc

SEQ ID NO: 2013087 - DNA, 15 bp, Homo sapiens
ctctgtcccatgcct

SEQ ID NO: 2013088 - DNA, 15 bp, Homo sapiens
tctgtcccatgccta

SEQ ID NO: 2013089 - DNA, 15 bp, Homo sapiens
ctgtcccatgcctag

SEQ ID NO: 2013090 - DNA, 15 bp, Homo sapiens
tgtcccatgcctagc

SEQ ID NO: 2013091 - DNA, 15 bp, Homo sapiens
gtcccatgcctagcc

SEQ ID NO: 2013092 - DNA, 15 bp, Homo sapiens
tcccatgcctagcct

SEQ ID NO: 2013093 - DNA, 15 bp, Homo sapiens
cccatgcctagcctt

SEQ ID NO: 2013094 - DNA, 15 bp, Homo sapiens
ccatgcctagcctta

SEQ ID NO: 2013095 - DNA, 15 bp, Homo sapiens
catgcctagccttag

SEQ ID NO: 2013096 - DNA, 15 bp, Homo sapiens
atgcctagccttagt

SEQ ID NO: 2013097 - DNA, 15 bp, Homo sapiens
tgcctagccttagtc

SEQ ID NO: 2013098 - DNA, 15 bp, Homo sapiens
gcctagccttagtcc

SEQ ID NO: 2013099 - DNA, 15 bp, Homo sapiens
cctagccttagtcct

SEQ ID NO: 2013100 - DNA, 15 bp, Homo sapiens
ctagccttagtcctc

SEQ ID NO: 2013101 - DNA, 15 bp, Homo sapiens
tagccttagtcctca

SEQ ID NO: 2013102 - DNA, 15 bp, Homo sapiens
agccttagtcctcag

SEQ ID NO: 2013103 - DNA, 15 bp, Homo sapiens
gccttagtcctcagt

SEQ ID NO: 2013104 - DNA, 15 bp, Homo sapiens
ccttagtcctcagtc

SEQ ID NO: 2013105 - DNA, 15 bp, Homo sapiens
cttagtcctcagtct

SEQ ID NO: 2013106 - DNA, 15 bp, Homo sapiens
ttagtcctcagtctg

SEQ ID NO: 2013107 - DNA, 15 bp, Homo sapiens
tagtcctcagtctgt

SEQ ID NO: 2013108 - DNA, 15 bp, Homo sapiens
agtcctcagtctgtt

SEQ ID NO: 2013109 - DNA, 15 bp, Homo sapiens
gtcctcagtctgttt

SEQ ID NO: 2013110 - DNA, 15 bp, Homo sapiens
tcctcagtctgtttt

SEQ ID NO: 2013111 - DNA, 15 bp, Homo sapiens
cctcagtctgtttta

SEQ ID NO: 2013112 - DNA, 15 bp, Homo sapiens
ctcagtctgttttac

SEQ ID NO: 2013113 - DNA, 15 bp, Homo sapiens
tcagtctgttttact

SEQ ID NO: 2013114 - DNA, 15 bp, Homo sapiens
cagtctgttttactg

SEQ ID NO: 2013115 - DNA, 15 bp, Homo sapiens
agtctgttttactgg

SEQ ID NO: 2013116 - DNA, 15 bp, Homo sapiens
gtctgttttactggg

SEQ ID NO: 2013117 - DNA, 15 bp, Homo sapiens
tctgttttactgggt

SEQ ID NO: 2013118 - DNA, 15 bp, Homo sapiens
ctgttttactgggtt

SEQ ID NO: 2013119 - DNA, 15 bp, Homo sapiens
tgttttactgggttc

SEQ ID NO: 2013120 - DNA, 15 bp, Homo sapiens
gttttactgggttca

SEQ ID NO: 2013121 - DNA, 15 bp, Homo sapiens
ttttactgggttcac

SEQ ID NO: 2013122 - DNA, 15 bp, Homo sapiens
tttactgggttcacc

SEQ ID NO: 2013123 - DNA, 15 bp, Homo sapiens
ttactgggttcacca

SEQ ID NO: 2013124 - DNA, 15 bp, Homo sapiens
tactgggttcaccac

SEQ ID NO: 2013125 - DNA, 15 bp, Homo sapiens
actgggttcaccacc

SEQ ID NO: 2013126 - DNA, 15 bp, Homo sapiens
ctgggttcaccacct

SEQ ID NO: 2013127 - DNA, 15 bp, Homo sapiens
tgggttcaccacctg

SEQ ID NO: 2013128 - DNA, 15 bp, Homo sapiens
gggttcaccacctgg

SEQ ID NO: 2013129 - DNA, 15 bp, Homo sapiens
ggttcaccacctggt

SEQ ID NO: 2013130 - DNA, 15 bp, Homo sapiens
gttcaccacctggtt

SEQ ID NO: 2013131 - DNA, 15 bp, Homo sapiens
ttcaccacctggttg

SEQ ID NO: 2013132 - DNA, 15 bp, Homo sapiens
tcaccacctggttgt

SEQ ID NO: 2013133 - DNA, 15 bp, Homo sapiens
caccacctggttgta

SEQ ID NO: 2013134 - DNA, 15 bp, Homo sapiens
accacctggttgtag

SEQ ID NO: 2013135 - DNA, 15 bp, Homo sapiens
ccacctggttgtagt

SEQ ID NO: 2013136 - DNA, 15 bp, Homo sapiens
cacctggttgtagta

SEQ ID NO: 2013137 - DNA, 15 bp, Homo sapiens
acctggttgtagtac

SEQ ID NO: 2013138 - DNA, 15 bp, Homo sapiens
cctggttgtagtacc

SEQ ID NO: 2013139 - DNA, 15 bp, Homo sapiens
ctggttgtagtacca

SEQ ID NO: 2013140 - DNA, 15 bp, Homo sapiens
tggttgtagtaccaa

SEQ ID NO: 2013141 - DNA, 15 bp, Homo sapiens
ggttgtagtaccaaa

SEQ ID NO: 2013142 - DNA, 15 bp, Homo sapiens
gttgtagtaccaaat

SEQ ID NO: 2013143 - DNA, 15 bp, Homo sapiens
ttgtagtaccaaatg

SEQ ID NO: 2013144 - DNA, 15 bp, Homo sapiens
tgtagtaccaaatgc

SEQ ID NO: 2013145 - DNA, 15 bp, Homo sapiens
gtagtaccaaatgcc

SEQ ID NO: 2013146 - DNA, 15 bp, Homo sapiens
tagtaccaaatgccc

SEQ ID NO: 2013147 - DNA, 15 bp, Homo sapiens
agtaccaaatgccct

SEQ ID NO: 2013148 - DNA, 15 bp, Homo sapiens
gtaccaaatgccctt

SEQ ID NO: 2013149 - DNA, 15 bp, Homo sapiens
taccaaatgcccttt

SEQ ID NO: 2013150 - DNA, 15 bp, Homo sapiens
accaaatgccctttt

SEQ ID NO: 2013151 - DNA, 15 bp, Homo sapiens
ccaaatgcccttttc

SEQ ID NO: 2013152 - DNA, 15 bp, Homo sapiens
caaatgcccttttcc

SEQ ID NO: 2013153 - DNA, 15 bp, Homo sapiens
aaatgcccttttccc

SEQ ID NO: 2013154 - DNA, 15 bp, Homo sapiens
aatgcccttttccct

SEQ ID NO: 2013155 - DNA, 15 bp, Homo sapiens
atgcccttttccctt

SEQ ID NO: 2013156 - DNA, 15 bp, Homo sapiens
tgcccttttcccttt

SEQ ID NO: 2013157 - DNA, 15 bp, Homo sapiens
gcccttttccctttc

SEQ ID NO: 2013158 - DNA, 15 bp, Homo sapiens
cccttttccctttcc

SEQ ID NO: 2013159 - DNA, 15 bp, Homo sapiens
ccttttccctttccc

SEQ ID NO: 2013160 - DNA, 15 bp, Homo sapiens
cttttccctttccct

SEQ ID NO: 2013161 - DNA, 15 bp, Homo sapiens
ttttccctttccctc

SEQ ID NO: 2013162 - DNA, 15 bp, Homo sapiens
tttccctttccctct

SEQ ID NO: 2013163 - DNA, 15 bp, Homo sapiens
ttccctttccctctc

SEQ ID NO: 2013164 - DNA, 15 bp, Homo sapiens
tccctttccctctct

SEQ ID NO: 2013165 - DNA, 15 bp, Homo sapiens
ccctttccctctctc

SEQ ID NO: 2013166 - DNA, 15 bp, Homo sapiens
cctttccctctctcc

SEQ ID NO: 2013167 - DNA, 15 bp, Homo sapiens
ctttccctctctcct

SEQ ID NO: 2013168 - DNA, 15 bp, Homo sapiens
tttccctctctcctt

SEQ ID NO: 2013169 - DNA, 15 bp, Homo sapiens
ttccctctctccttc

SEQ ID NO: 2013170 - DNA, 15 bp, Homo sapiens
tccctctctccttcc

SEQ ID NO: 2013171 - DNA, 15 bp, Homo sapiens
ccctctctccttcct

SEQ ID NO: 2013172 - DNA, 15 bp, Homo sapiens
cctctctccttcctc

SEQ ID NO: 2013173 - DNA, 15 bp, Homo sapiens
ctctctccttcctca

SEQ ID NO: 2013174 - DNA, 15 bp, Homo sapiens
tctctccttcctcac

SEQ ID NO: 2013175 - DNA, 15 bp, Homo sapiens
ctctccttcctcact

SEQ ID NO: 2013176 - DNA, 15 bp, Homo sapiens
tctccttcctcactt

SEQ ID NO: 2013177 - DNA, 15 bp, Homo sapiens
ctccttcctcacttc

SEQ ID NO: 2013178 - DNA, 15 bp, Homo sapiens
tccttcctcacttcc

SEQ ID NO: 2013179 - DNA, 15 bp, Homo sapiens
ccttcctcacttcct

SEQ ID NO: 2013180 - DNA, 15 bp, Homo sapiens
cttcctcacttcctc

SEQ ID NO: 2013181 - DNA, 15 bp, Homo sapiens
ttcctcacttcctca

SEQ ID NO: 2013182 - DNA, 15 bp, Homo sapiens
tcctcacttcctcag

SEQ ID NO: 2013183 - DNA, 15 bp, Homo sapiens
cctcacttcctcagt

SEQ ID NO: 2013184 - DNA, 15 bp, Homo sapiens
ctcacttcctcagta

SEQ ID NO: 2013185 - DNA, 15 bp, Homo sapiens
tcacttcctcagtac

SEQ ID NO: 2013186 - DNA, 15 bp, Homo sapiens
cacttcctcagtact

SEQ ID NO: 2013187 - DNA, 15 bp, Homo sapiens
acttcctcagtactg

SEQ ID NO: 2013188 - DNA, 15 bp, Homo sapiens
cttcctcagtactgc

SEQ ID NO: 2013189 - DNA, 15 bp, Homo sapiens
ttcctcagtactgcc

SEQ ID NO: 2013190 - DNA, 15 bp, Homo sapiens
tcctcagtactgccc

SEQ ID NO: 2013191 - DNA, 15 bp, Homo sapiens
cctcagtactgccca

SEQ ID NO: 2013192 - DNA, 15 bp, Homo sapiens
ctcagtactgcccaa

SEQ ID NO: 2013193 - DNA, 15 bp, Homo sapiens
tcagtactgcccaag

SEQ ID NO: 2013194 - DNA, 15 bp, Homo sapiens
cagtactgcccaagt

SEQ ID NO: 2013195 - DNA, 15 bp, Homo sapiens
agtactgcccaagtt

SEQ ID NO: 2013196 - DNA, 15 bp, Homo sapiens
gtactgcccaagttc

SEQ ID NO: 2013197 - DNA, 15 bp, Homo sapiens
tactgcccaagttcg

SEQ ID NO: 2013198 - DNA, 15 bp, Homo sapiens
actgcccaagttcgt

SEQ ID NO: 2013199 - DNA, 15 bp, Homo sapiens
ctgcccaagttcgtc

SEQ ID NO: 2013200 - DNA, 15 bp, Homo sapiens
tgcccaagttcgtca

SEQ ID NO: 2013201 - DNA, 15 bp, Homo sapiens
gcccaagttcgtcag

SEQ ID NO: 2013202 - DNA, 15 bp, Homo sapiens
cccaagttcgtcaga

SEQ ID NO: 2013203 - DNA, 15 bp, Homo sapiens
ccaagttcgtcagac

SEQ ID NO: 2013204 - DNA, 15 bp, Homo sapiens
caagttcgtcagacc

SEQ ID NO: 2013205 - DNA, 15 bp, Homo sapiens
aagttcgtcagaccc

SEQ ID NO: 2013206 - DNA, 15 bp, Homo sapiens
agttcgtcagaccca

SEQ ID NO: 2013207 - DNA, 15 bp, Homo sapiens
gttcgtcagacccaa

SEQ ID NO: 2013208 - DNA, 15 bp, Homo sapiens
ttcgtcagacccaat

SEQ ID NO: 2013209 - DNA, 15 bp, Homo sapiens
tcgtcagacccaatg

SEQ ID NO: 2013210 - DNA, 15 bp, Homo sapiens
cgtcagacccaatga

SEQ ID NO: 2013211 - DNA, 15 bp, Homo sapiens
gtcagacccaatgat

SEQ ID NO: 2013212 - DNA, 15 bp, Homo sapiens
tcagacccaatgatt

SEQ ID NO: 2013213 - DNA, 15 bp, Homo sapiens
cagacccaatgattt

SEQ ID NO: 2013214 - DNA, 15 bp, Homo sapiens
agacccaatgatttt

SEQ ID NO: 2013215 - DNA, 15 bp, Homo sapiens
gacccaatgatttta

SEQ ID NO: 2013216 - DNA, 15 bp, Homo sapiens
acccaatgattttat

SEQ ID NO: 2013217 - DNA, 15 bp, Homo sapiens
cccaatgattttatt

SEQ ID NO: 2013218 - DNA, 15 bp, Homo sapiens
ccaatgattttattc

SEQ ID NO: 2013219 - DNA, 15 bp, Homo sapiens
caatgattttattct

SEQ ID NO: 2013220 - DNA, 15 bp, Homo sapiens
aatgattttattctt

SEQ ID NO: 2013221 - DNA, 15 bp, Homo sapiens
atgattttattctta

SEQ ID NO: 2013222 - DNA, 15 bp, Homo sapiens
tgattttattcttaa

SEQ ID NO: 2013223 - DNA, 15 bp, Homo sapiens
gattttattcttaag

SEQ ID NO: 2013224 - DNA, 15 bp, Homo sapiens
attttattcttaagc

SEQ ID NO: 2013225 - DNA, 15 bp, Homo sapiens
ttttattcttaagct

SEQ ID NO: 2013226 - DNA, 15 bp, Homo sapiens
tttattcttaagcta

SEQ ID NO: 2013227 - DNA, 15 bp, Homo sapiens
ttattcttaagctaa

SEQ ID NO: 2013228 - DNA, 15 bp, Homo sapiens
tattcttaagctaat

SEQ ID NO: 2013229 - DNA, 15 bp, Homo sapiens
attcttaagctaatc

SEQ ID NO: 2013230 - DNA, 15 bp, Homo sapiens
ttcttaagctaatct

SEQ ID NO: 2013231 - DNA, 15 bp, Homo sapiens
tcttaagctaatctt

SEQ ID NO: 2013232 - DNA, 15 bp, Homo sapiens
cttaagctaatctta

SEQ ID NO: 2013233 - DNA, 15 bp, Homo sapiens
ttaagctaatcttat

SEQ ID NO: 2013234 - DNA, 15 bp, Homo sapiens
taagctaatcttatt

SEQ ID NO: 2013235 - DNA, 15 bp, Homo sapiens
aagctaatcttattt

SEQ ID NO: 2013236 - DNA, 15 bp, Homo sapiens
agctaatcttatttt

SEQ ID NO: 2013237 - DNA, 15 bp, Homo sapiens
gctaatcttattttt

SEQ ID NO: 2013238 - DNA, 15 bp, Homo sapiens
ctaatcttattttta

SEQ ID NO: 2013239 - DNA, 15 bp, Homo sapiens
taatcttatttttaa

SEQ ID NO: 2013240 - DNA, 15 bp, Homo sapiens
aatcttatttttaat

SEQ ID NO: 2013241 - DNA, 15 bp, Homo sapiens
atcttatttttaatt

SEQ ID NO: 2013242 - DNA, 15 bp, Homo sapiens
tcttatttttaattt

SEQ ID NO: 2013243 - DNA, 15 bp, Homo sapiens
cttatttttaattta

SEQ ID NO: 2013244 - DNA, 15 bp, Homo sapiens
ttatttttaatttag

SEQ ID NO: 2013245 - DNA, 15 bp, Homo sapiens
tatttttaatttagg

SEQ ID NO: 2013246 - DNA, 15 bp, Homo sapiens
atttttaatttaggt

SEQ ID NO: 2013247 - DNA, 15 bp, Homo sapiens
tttttaatttaggta

SEQ ID NO: 2013248 - DNA, 15 bp, Homo sapiens
ttttaatttaggtaa

SEQ ID NO: 2013249 - DNA, 15 bp, Homo sapiens
tttaatttaggtaat

SEQ ID NO: 2013250 - DNA, 15 bp, Homo sapiens
ttaatttaggtaatt

SEQ ID NO: 2013251 - DNA, 15 bp, Homo sapiens
taatttaggtaattc

SEQ ID NO: 2013252 - DNA, 15 bp, Homo sapiens
aatttaggtaattct

SEQ ID NO: 2013253 - DNA, 15 bp, Homo sapiens
atttaggtaattctg

SEQ ID NO: 2013254 - DNA, 15 bp, Homo sapiens
tttaggtaattctga

SEQ ID NO: 2013255 - DNA, 15 bp, Homo sapiens
ttaggtaattctgat

SEQ ID NO: 2013256 - DNA, 15 bp, Homo sapiens
taggtaattctgatt

SEQ ID NO: 2013257 - DNA, 15 bp, Homo sapiens
aggtaattctgattt

SEQ ID NO: 2013258 - DNA, 15 bp, Homo sapiens
ggtaattctgatttc

SEQ ID NO: 2013259 - DNA, 15 bp, Homo sapiens
gtaattctgatttct

SEQ ID NO: 2013260 - DNA, 15 bp, Homo sapiens
taattctgatttctg

SEQ ID NO: 2013261 - DNA, 15 bp, Homo sapiens
aattctgatttctga

SEQ ID NO: 2013262 - DNA, 15 bp, Homo sapiens
attctgatttctgat

SEQ ID NO: 2013263 - DNA, 15 bp, Homo sapiens
ttctgatttctgatt

SEQ ID NO: 2013264 - DNA, 15 bp, Homo sapiens
tctgatttctgattt

SEQ ID NO: 2013265 - DNA, 15 bp, Homo sapiens
ctgatttctgatttg

SEQ ID NO: 2013266 - DNA, 15 bp, Homo sapiens
tgatttctgatttgt

SEQ ID NO: 2013267 - DNA, 15 bp, Homo sapiens
gatttctgatttgta

SEQ ID NO: 2013268 - DNA, 15 bp, Homo sapiens
atttctgatttgtaa

SEQ ID NO: 2013269 - DNA, 15 bp, Homo sapiens
tttctgatttgtaaa

SEQ ID NO: 2013270 - DNA, 15 bp, Homo sapiens
ttctgatttgtaaaa

SEQ ID NO: 2013271 - DNA, 15 bp, Homo sapiens
tctgatttgtaaaag

SEQ ID NO: 2013272 - DNA, 15 bp, Homo sapiens
ctgatttgtaaaaga

SEQ ID NO: 2013273 - DNA, 15 bp, Homo sapiens
tgatttgtaaaagat

SEQ ID NO: 2013274 - DNA, 15 bp, Homo sapiens
gatttgtaaaagata

SEQ ID NO: 2013275 - DNA, 15 bp, Homo sapiens
atttgtaaaagataa

SEQ ID NO: 2013276 - DNA, 15 bp, Homo sapiens
tttgtaaaagataaa

SEQ ID NO: 2013277 - DNA, 15 bp, Homo sapiens
ttgtaaaagataaat

SEQ ID NO: 2013278 - DNA, 15 bp, Homo sapiens
tgtaaaagataaatt

SEQ ID NO: 2013279 - DNA, 15 bp, Homo sapiens
gtaaaagataaattt

SEQ ID NO: 2013280 - DNA, 15 bp, Homo sapiens
taaaagataaatttt

SEQ ID NO: 2013281 - DNA, 15 bp, Homo sapiens
aaaagataaattttc

SEQ ID NO: 2013282 - DNA, 15 bp, Homo sapiens
aaagataaattttct

SEQ ID NO: 2013283 - DNA, 15 bp, Homo sapiens
aagataaattttctt

SEQ ID NO: 2013284 - DNA, 15 bp, Homo sapiens
agataaattttcttc

SEQ ID NO: 2013285 - DNA, 15 bp, Homo sapiens
gataaattttcttct

SEQ ID NO: 2013286 - DNA, 15 bp, Homo sapiens
ataaattttcttctc

SEQ ID NO: 2013287 - DNA, 15 bp, Homo sapiens
taaattttcttctcc

SEQ ID NO: 2013288 - DNA, 15 bp, Homo sapiens
aaattttcttctcct

SEQ ID NO: 2013289 - DNA, 15 bp, Homo sapiens
aattttcttctcctt

SEQ ID NO: 2013290 - DNA, 15 bp, Homo sapiens
attttcttctccttc

SEQ ID NO: 2013291 - DNA, 15 bp, Homo sapiens
ttttcttctccttca

SEQ ID NO: 2013292 - DNA, 15 bp, Homo sapiens
tttcttctccttcat

SEQ ID NO: 2013293 - DNA, 15 bp, Homo sapiens
ttcttctccttcatg

SEQ ID NO: 2013294 - DNA, 15 bp, Homo sapiens
tcttctccttcatgt

SEQ ID NO: 2013295 - DNA, 15 bp, Homo sapiens
cttctccttcatgta

SEQ ID NO: 2013296 - DNA, 15 bp, Homo sapiens
ttctccttcatgtag

SEQ ID NO: 2013297 - DNA, 15 bp, Homo sapiens
tctccttcatgtagt

SEQ ID NO: 2013298 - DNA, 15 bp, Homo sapiens
ctccttcatgtagta

SEQ ID NO: 2013299 - DNA, 15 bp, Homo sapiens
tccttcatgtagtag

SEQ ID NO: 2013300 - DNA, 15 bp, Homo sapiens
ccttcatgtagtagg

SEQ ID NO: 2013301 - DNA, 15 bp, Homo sapiens
cttcatgtagtagga

SEQ ID NO: 2013302 - DNA, 15 bp, Homo sapiens
ttcatgtagtaggat

SEQ ID NO: 2013303 - DNA, 15 bp, Homo sapiens
tcatgtagtaggatt

SEQ ID NO: 2013304 - DNA, 15 bp, Homo sapiens
catgtagtaggattt

SEQ ID NO: 2013305 - DNA, 15 bp, Homo sapiens
atgtagtaggatttt

SEQ ID NO: 2013306 - DNA, 15 bp, Homo sapiens
tgtagtaggatttta

SEQ ID NO: 2013307 - DNA, 15 bp, Homo sapiens
gtagtaggattttaa

SEQ ID NO: 2013308 - DNA, 15 bp, Homo sapiens
tagtaggattttaat

SEQ ID NO: 2013309 - DNA, 15 bp, Homo sapiens
agtaggattttaatt

SEQ ID NO: 2013310 - DNA, 15 bp, Homo sapiens
gtaggattttaattt

SEQ ID NO: 2013311 - DNA, 15 bp, Homo sapiens
taggattttaatttt

SEQ ID NO: 2013312 - DNA, 15 bp, Homo sapiens
aggattttaattttg

SEQ ID NO: 2013313 - DNA, 15 bp, Homo sapiens
ggattttaattttgt

SEQ ID NO: 2013314 - DNA, 15 bp, Homo sapiens
gattttaattttgta

SEQ ID NO: 2013315 - DNA, 15 bp, Homo sapiens
attttaattttgtaa

SEQ ID NO: 2013316 - DNA, 15 bp, Homo sapiens
ttttaattttgtaaa

SEQ ID NO: 2013317 - DNA, 15 bp, Homo sapiens
tttaattttgtaaat

SEQ ID NO: 2013318 - DNA, 15 bp, Homo sapiens
ttaattttgtaaata

SEQ ID NO: 2013319 - DNA, 15 bp, Homo sapiens
taattttgtaaatat

SEQ ID NO: 2013320 - DNA, 15 bp, Homo sapiens
aattttgtaaatatt

SEQ ID NO: 2013321 - DNA, 15 bp, Homo sapiens
attttgtaaatattt

SEQ ID NO: 2013322 - DNA, 15 bp, Homo sapiens
ttttgtaaatattta

SEQ ID NO: 2013323 - DNA, 15 bp, Homo sapiens
tttgtaaatatttaa

SEQ ID NO: 2013324 - DNA, 15 bp, Homo sapiens
ttgtaaatatttaaa

SEQ ID NO: 2013325 - DNA, 15 bp, Homo sapiens
tgtaaatatttaaat

SEQ ID NO: 2013326 - DNA, 15 bp, Homo sapiens
gtaaatatttaaatt

SEQ ID NO: 2013327 - DNA, 15 bp, Homo sapiens
taaatatttaaattc

SEQ ID NO: 2013328 - DNA, 15 bp, Homo sapiens
aaatatttaaattct

SEQ ID NO: 2013329 - DNA, 15 bp, Homo sapiens
aatatttaaattctc

SEQ ID NO: 2013330 - DNA, 15 bp, Homo sapiens
atatttaaattctcc

SEQ ID NO: 2013331 - DNA, 15 bp, Homo sapiens
tatttaaattctcca

SEQ ID NO: 2013332 - DNA, 15 bp, Homo sapiens
atttaaattctccat

SEQ ID NO: 2013333 - DNA, 15 bp, Homo sapiens
tttaaattctccatt

SEQ ID NO: 2013334 - DNA, 15 bp, Homo sapiens
ttaaattctccatta

SEQ ID NO: 2013335 - DNA, 15 bp, Homo sapiens
taaattctccattaa

SEQ ID NO: 2013336 - DNA, 15 bp, Homo sapiens
aaattctccattaat

SEQ ID NO: 2013337 - DNA, 15 bp, Homo sapiens
aattctccattaatg

SEQ ID NO: 2013338 - DNA, 15 bp, Homo sapiens
attctccattaatgg

SEQ ID NO: 2013339 - DNA, 15 bp, Homo sapiens
ttctccattaatggt

SEQ ID NO: 2013340 - DNA, 15 bp, Homo sapiens
tctccattaatggtg

SEQ ID NO: 2013341 - DNA, 15 bp, Homo sapiens
ctccattaatggtgt

SEQ ID NO: 2013342 - DNA, 15 bp, Homo sapiens
tccattaatggtgtg

SEQ ID NO: 2013343 - DNA, 15 bp, Homo sapiens
ccattaatggtgtgt

SEQ ID NO: 2013344 - DNA, 15 bp, Homo sapiens
cattaatggtgtgtt

SEQ ID NO: 2013345 - DNA, 15 bp, Homo sapiens
attaatggtgtgtta

SEQ ID NO: 2013346 - DNA, 15 bp, Homo sapiens
ttaatggtgtgttaa

SEQ ID NO: 2013347 - DNA, 15 bp, Homo sapiens
taatggtgtgttaaa

SEQ ID NO: 2013348 - DNA, 15 bp, Homo sapiens
aatggtgtgttaaat

SEQ ID NO: 2013349 - DNA, 15 bp, Homo sapiens
atggtgtgttaaatc

SEQ ID NO: 2013350 - DNA, 15 bp, Homo sapiens
tggtgtgttaaatct

SEQ ID NO: 2013351 - DNA, 15 bp, Homo sapiens
ggtgtgttaaatctg

SEQ ID NO: 2013352 - DNA, 15 bp, Homo sapiens
gtgtgttaaatctgc

SEQ ID NO: 2013353 - DNA, 15 bp, Homo sapiens
tgtgttaaatctgca

SEQ ID NO: 2013354 - DNA, 15 bp, Homo sapiens
gtgttaaatctgcac

SEQ ID NO: 2013355 - DNA, 15 bp, Homo sapiens
tgttaaatctgcact

SEQ ID NO: 2013356 - DNA, 15 bp, Homo sapiens
gttaaatctgcacta

SEQ ID NO: 2013357 - DNA, 15 bp, Homo sapiens
ttaaatctgcactaa

SEQ ID NO: 2013358 - DNA, 15 bp, Homo sapiens
taaatctgcactaaa

SEQ ID NO: 2013359 - DNA, 15 bp, Homo sapiens
aaatctgcactaaaa

SEQ ID NO: 2013360 - DNA, 15 bp, Homo sapiens
aatctgcactaaaac

SEQ ID NO: 2013361 - DNA, 15 bp, Homo sapiens
atctgcactaaaact

SEQ ID NO: 2013362 - DNA, 15 bp, Homo sapiens
tctgcactaaaactg

SEQ ID NO: 2013363 - DNA, 15 bp, Homo sapiens
ctgcactaaaactgc

SEQ ID NO: 2013364 - DNA, 15 bp, Homo sapiens
tgcactaaaactgct

SEQ ID NO: 2013365 - DNA, 15 bp, Homo sapiens
gcactaaaactgctt

SEQ ID NO: 2013366 - DNA, 15 bp, Homo sapiens
cactaaaactgcttc

SEQ ID NO: 2013367 - DNA, 15 bp, Homo sapiens
actaaaactgcttct

SEQ ID NO: 2013368 - DNA, 15 bp, Homo sapiens
ctaaaactgcttctt

SEQ ID NO: 2013369 - DNA, 15 bp, Homo sapiens
taaaactgcttcttt

SEQ ID NO: 2013370 - DNA, 15 bp, Homo sapiens
aaaactgcttcttta

SEQ ID NO: 2013371 - DNA, 15 bp, Homo sapiens
aaactgcttctttac

SEQ ID NO: 2013372 - DNA, 15 bp, Homo sapiens
aactgcttctttaca

SEQ ID NO: 2013373 - DNA, 15 bp, Homo sapiens
actgcttctttacat

SEQ ID NO: 2013374 - DNA, 15 bp, Homo sapiens
ctgcttctttacatg

SEQ ID NO: 2013375 - DNA, 15 bp, Homo sapiens
tgcttctttacatgt

SEQ ID NO: 2013376 - DNA, 15 bp, Homo sapiens
gcttctttacatgtt

SEQ ID NO: 2013377 - DNA, 15 bp, Homo sapiens
cttctttacatgttt

SEQ ID NO: 2013378 - DNA, 15 bp, Homo sapiens
ttctttacatgtttt

SEQ ID NO: 2013379 - DNA, 15 bp, Homo sapiens
tctttacatgttttt

SEQ ID NO: 2013380 - DNA, 15 bp, Homo sapiens
ctttacatgttttta

SEQ ID NO: 2013381 - DNA, 15 bp, Homo sapiens
tttacatgtttttaa

SEQ ID NO: 2013382 - DNA, 15 bp, Homo sapiens
ttacatgtttttaaa

SEQ ID NO: 2013383 - DNA, 15 bp, Homo sapiens
tacatgtttttaaat

SEQ ID NO: 2013384 - DNA, 15 bp, Homo sapiens
acatgtttttaaatt

SEQ ID NO: 2013385 - DNA, 15 bp, Homo sapiens
catgtttttaaattt

SEQ ID NO: 2013386 - DNA, 15 bp, Homo sapiens
atgtttttaaatttt

SEQ ID NO: 2013387 - DNA, 15 bp, Homo sapiens
tgtttttaaattttt

SEQ ID NO: 2013388 - DNA, 15 bp, Homo sapiens
tttttaaattttttc

SEQ ID NO: 2013389 - DNA, 15 bp, Homo sapiens
ttttaaattttttca

SEQ ID NO: 2013390 - DNA, 15 bp, Homo sapiens
tttaaattttttcat

SEQ ID NO: 2013391 - DNA, 15 bp, Homo sapiens
ttaaattttttcatt

SEQ ID NO: 2013392 - DNA, 15 bp, Homo sapiens
taaattttttcatta

SEQ ID NO: 2013393 - DNA, 15 bp, Homo sapiens
aaattttttcattat

SEQ ID NO: 2013394 - DNA, 15 bp, Homo sapiens
aattttttcattatg

SEQ ID NO: 2013395 - DNA, 15 bp, Homo sapiens
attttttcattatgt

SEQ ID NO: 2013396 - DNA, 15 bp, Homo sapiens
ttttttcattatgtt

SEQ ID NO: 2013397 - DNA, 15 bp, Homo sapiens
tttttcattatgttt

SEQ ID NO: 2013398 - DNA, 15 bp, Homo sapiens
ttttcattatgtttt

SEQ ID NO: 2013399 - DNA, 15 bp, Homo sapiens
tttcattatgttttt

SEQ ID NO: 2013400 - DNA, 15 bp, Homo sapiens
ttcattatgttttta

SEQ ID NO: 2013401 - DNA, 15 bp, Homo sapiens
tcattatgtttttaa

SEQ ID NO: 2013402 - DNA, 15 bp, Homo sapiens
cattatgtttttaac

SEQ ID NO: 2013403 - DNA, 15 bp, Homo sapiens
attatgtttttaaca

SEQ ID NO: 2013404 - DNA, 15 bp, Homo sapiens
ttatgtttttaacac

SEQ ID NO: 2013405 - DNA, 15 bp, Homo sapiens
tatgtttttaacact

SEQ ID NO: 2013406 - DNA, 15 bp, Homo sapiens
atgtttttaacactt

SEQ ID NO: 2013407 - DNA, 15 bp, Homo sapiens
tgtttttaacacttt

SEQ ID NO: 2013408 - DNA, 15 bp, Homo sapiens
gtttttaacactttt

SEQ ID NO: 2013409 - DNA, 15 bp, Homo sapiens
tttttaacacttttc

SEQ ID NO: 2013410 - DNA, 15 bp, Homo sapiens
ttttaacacttttct

SEQ ID NO: 2013411 - DNA, 15 bp, Homo sapiens
tttaacacttttctt

SEQ ID NO: 2013412 - DNA, 15 bp, Homo sapiens
ttaacacttttctta

SEQ ID NO: 2013413 - DNA, 15 bp, Homo sapiens
taacacttttcttac

SEQ ID NO: 2013414 - DNA, 15 bp, Homo sapiens
aacacttttcttaca

SEQ ID NO: 2013415 - DNA, 15 bp, Homo sapiens
acacttttcttacat

SEQ ID NO: 2013416 - DNA, 15 bp, Homo sapiens
cacttttcttacatg

SEQ ID NO: 2013417 - DNA, 15 bp, Homo sapiens
acttttcttacatgc

SEQ ID NO: 2013418 - DNA, 15 bp, Homo sapiens
cttttcttacatgca

SEQ ID NO: 2013419 - DNA, 15 bp, Homo sapiens
ttttcttacatgcaa

SEQ ID NO: 2013420 - DNA, 15 bp, Homo sapiens
tttcttacatgcaaa

SEQ ID NO: 2013421 - DNA, 15 bp, Homo sapiens
tcttacatgcaaaaa

SEQ ID NO: 2013422 - DNA, 15 bp, Homo sapiens
cttacatgcaaaaaa

SEQ ID NO: 2013423 - DNA, 15 bp, Homo sapiens
ttacatgcaaaaaac

SEQ ID NO: 2013424 - DNA, 15 bp, Homo sapiens
tacatgcaaaaaaca

SEQ ID NO: 2013425 - DNA, 15 bp, Homo sapiens
acatgcaaaaaacac

SEQ ID NO: 2013426 - DNA, 15 bp, Homo sapiens
catgcaaaaaacaca

SEQ ID NO: 2013427 - DNA, 15 bp, Homo sapiens
atgcaaaaaacacaa

SEQ ID NO: 2013428 - DNA, 15 bp, Homo sapiens
tgcaaaaaacacaac

SEQ ID NO: 2013429 - DNA, 15 bp, Homo sapiens
gcaaaaaacacaacc

SEQ ID NO: 2013430 - DNA, 15 bp, Homo sapiens
caaaaaacacaaccg

SEQ ID NO: 2013431 - DNA, 15 bp, Homo sapiens
aaaaaacacaaccgt

SEQ ID NO: 2013432 - DNA, 15 bp, Homo sapiens
aaaaacacaaccgtt

SEQ ID NO: 2013433 - DNA, 15 bp, Homo sapiens
aaaacacaaccgtta

SEQ ID NO: 2013434 - DNA, 15 bp, Homo sapiens
aaacacaaccgttaa

SEQ ID NO: 2013435 - DNA, 15 bp, Homo sapiens
aacacaaccgttaaa

SEQ ID NO: 2013436 - DNA, 15 bp, Homo sapiens
acacaaccgttaaac

SEQ ID NO: 2013437 - DNA, 15 bp, Homo sapiens
cacaaccgttaaact

SEQ ID NO: 2013438 - DNA, 15 bp, Homo sapiens
acaaccgttaaactt

SEQ ID NO: 2013439 - DNA, 15 bp, Homo sapiens
caaccgttaaacttt

SEQ ID NO: 2013440 - DNA, 15 bp, Homo sapiens
aaccgttaaactttt

SEQ ID NO: 2013441 - DNA, 15 bp, Homo sapiens
accgttaaacttttc

SEQ ID NO: 2013442 - DNA, 15 bp, Homo sapiens
ccgttaaacttttct

SEQ ID NO: 2013443 - DNA, 15 bp, Homo sapiens
cgttaaacttttctt

SEQ ID NO: 2013444 - DNA, 15 bp, Homo sapiens
gttaaacttttctta

SEQ ID NO: 2013445 - DNA, 15 bp, Homo sapiens
ttaaacttttcttat

SEQ ID NO: 2013446 - DNA, 15 bp, Homo sapiens
taaacttttcttatt

SEQ ID NO: 2013447 - DNA, 15 bp, Homo sapiens
aaacttttcttatta

SEQ ID NO: 2013448 - DNA, 15 bp, Homo sapiens
aacttttcttattaa

SEQ ID NO: 2013449 - DNA, 15 bp, Homo sapiens
acttttcttattaaa

SEQ ID NO: 2013450 - DNA, 15 bp, Homo sapiens
cttttcttattaaaa

SEQ ID NO: 2013451 - DNA, 15 bp, Homo sapiens
ttttcttattaaaat

SEQ ID NO: 2013452 - DNA, 15 bp, Homo sapiens
tttcttattaaaatg

SEQ ID NO: 2013453 - DNA, 15 bp, Homo sapiens
ttcttattaaaatgc

SEQ ID NO: 2013454 - DNA, 15 bp, Homo sapiens
tcttattaaaatgca

SEQ ID NO: 2013455 - DNA, 15 bp, Homo sapiens
cttattaaaatgcaa

SEQ ID NO: 2013456 - DNA, 15 bp, Homo sapiens
ttattaaaatgcaaa

SEQ ID NO: 2013457 - DNA, 15 bp, Homo sapiens
tattaaaatgcaaag

SEQ ID NO: 2013458 - DNA, 15 bp, Homo sapiens
attaaaatgcaaagc

SEQ ID NO: 2013459 - DNA, 15 bp, Homo sapiens
ttaaaatgcaaagcc

SEQ ID NO: 2013460 - DNA, 15 bp, Homo sapiens
taaaatgcaaagcct

SEQ ID NO: 2013461 - DNA, 15 bp, Homo sapiens
aaaatgcaaagccta

SEQ ID NO: 2013462 - DNA, 15 bp, Homo sapiens
aaatgcaaagcctag

SEQ ID NO: 2013463 - DNA, 15 bp, Homo sapiens
aatgcaaagcctagt

SEQ ID NO: 2013464 - DNA, 15 bp, Homo sapiens
atgcaaagcctagtg

SEQ ID NO: 2013465 - DNA, 15 bp, Homo sapiens
tgcaaagcctagtgt

SEQ ID NO: 2013466 - DNA, 15 bp, Homo sapiens
gcaaagcctagtgtc

SEQ ID NO: 2013467 - DNA, 15 bp, Homo sapiens
caaagcctagtgtct

SEQ ID NO: 2013468 - DNA, 15 bp, Homo sapiens
aaagcctagtgtctt

SEQ ID NO: 2013469 - DNA, 15 bp, Homo sapiens
aagcctagtgtcttc

SEQ ID NO: 2013470 - DNA, 15 bp, Homo sapiens
agcctagtgtcttct

SEQ ID NO: 2013471 - DNA, 15 bp, Homo sapiens
gcctagtgtcttcta

SEQ ID NO: 2013472 - DNA, 15 bp, Homo sapiens
cctagtgtcttctag

SEQ ID NO: 2013473 - DNA, 15 bp, Homo sapiens
ctagtgtcttctagc

SEQ ID NO: 2013474 - DNA, 15 bp, Homo sapiens
tagtgtcttctagct

SEQ ID NO: 2013475 - DNA, 15 bp, Homo sapiens
agtgtcttctagctt

SEQ ID NO: 2013476 - DNA, 15 bp, Homo sapiens
gtgtcttctagcttt

SEQ ID NO: 2013477 - DNA, 15 bp, Homo sapiens
tgtcttctagctttt

SEQ ID NO: 2013478 - DNA, 15 bp, Homo sapiens
gtcttctagcttttt

SEQ ID NO: 2013479 - DNA, 15 bp, Homo sapiens
tcttctagctttttg

SEQ ID NO: 2013480 - DNA, 15 bp, Homo sapiens
cttctagctttttga

SEQ ID NO: 2013481 - DNA, 15 bp, Homo sapiens
ttctagctttttgaa

SEQ ID NO: 2013482 - DNA, 15 bp, Homo sapiens
tctagctttttgaag

SEQ ID NO: 2013483 - DNA, 15 bp, Homo sapiens
ctagctttttgaaga

SEQ ID NO: 2013484 - DNA, 15 bp, Homo sapiens
tagctttttgaagag

SEQ ID NO: 2013485 - DNA, 15 bp, Homo sapiens
agctttttgaagagc

SEQ ID NO: 2013486 - DNA, 15 bp, Homo sapiens
gctttttgaagagct

SEQ ID NO: 2013487 - DNA, 15 bp, Homo sapiens
ctttttgaagagctt

SEQ ID NO: 2013488 - DNA, 15 bp, Homo sapiens
tttttgaagagcttt

SEQ ID NO: 2013489 - DNA, 15 bp, Homo sapiens
ttttgaagagctttt

SEQ ID NO: 2013490 - DNA, 15 bp, Homo sapiens
tttgaagagcttttg

SEQ ID NO: 2013491 - DNA, 15 bp, Homo sapiens
ttgaagagcttttgt

SEQ ID NO: 2013492 - DNA, 15 bp, Homo sapiens
tgaagagcttttgtc

SEQ ID NO: 2013493 - DNA, 15 bp, Homo sapiens
gaagagcttttgtcc

SEQ ID NO: 2013494 - DNA, 15 bp, Homo sapiens
aagagcttttgtcca

SEQ ID NO: 2013495 - DNA, 15 bp, Homo sapiens
agagcttttgtccat

SEQ ID NO: 2013496 - DNA, 15 bp, Homo sapiens
gagcttttgtccatt

SEQ ID NO: 2013497 - DNA, 15 bp, Homo sapiens
agcttttgtccatta

SEQ ID NO: 2013498 - DNA, 15 bp, Homo sapiens
gcttttgtccattat

SEQ ID NO: 2013499 - DNA, 15 bp, Homo sapiens
cttttgtccattata

SEQ ID NO: 2013500 - DNA, 15 bp, Homo sapiens
ttttgtccattatat

SEQ ID NO: 2013501 - DNA, 15 bp, Homo sapiens
tttgtccattatata

SEQ ID NO: 2013502 - DNA, 15 bp, Homo sapiens
ttgtccattatataa

SEQ ID NO: 2013503 - DNA, 15 bp, Homo sapiens
tgtccattatataat

SEQ ID NO: 2013504 - DNA, 15 bp, Homo sapiens
gtccattatataatc

SEQ ID NO: 2013505 - DNA, 15 bp, Homo sapiens
tccattatataatct

SEQ ID NO: 2013506 - DNA, 15 bp, Homo sapiens
ccattatataatctg

SEQ ID NO: 2013507 - DNA, 15 bp, Homo sapiens
cattatataatctgt

SEQ ID NO: 2013508 - DNA, 15 bp, Homo sapiens
attatataatctgtc

SEQ ID NO: 2013509 - DNA, 15 bp, Homo sapiens
ttatataatctgtca

SEQ ID NO: 2013510 - DNA, 15 bp, Homo sapiens
tatataatctgtcaa

SEQ ID NO: 2013511 - DNA, 15 bp, Homo sapiens
atataatctgtcaag

SEQ ID NO: 2013512 - DNA, 15 bp, Homo sapiens
tataatctgtcaagt

SEQ ID NO: 2013513 - DNA, 15 bp, Homo sapiens
ataatctgtcaagta

SEQ ID NO: 2013514 - DNA, 15 bp, Homo sapiens
taatctgtcaagtag

SEQ ID NO: 2013515 - DNA, 15 bp, Homo sapiens
aatctgtcaagtagc

SEQ ID NO: 2013516 - DNA, 15 bp, Homo sapiens
atctgtcaagtagcc

SEQ ID NO: 2013517 - DNA, 15 bp, Homo sapiens
tctgtcaagtagcca

SEQ ID NO: 2013518 - DNA, 15 bp, Homo sapiens
ctgtcaagtagccaa

SEQ ID NO: 2013519 - DNA, 15 bp, Homo sapiens
tgtcaagtagccaag

SEQ ID NO: 2013520 - DNA, 15 bp, Homo sapiens
gtcaagtagccaaga

SEQ ID NO: 2013521 - DNA, 15 bp, Homo sapiens
tcaagtagccaagag

SEQ ID NO: 2013522 - DNA, 15 bp, Homo sapiens
caagtagccaagagt

SEQ ID NO: 2013523 - DNA, 15 bp, Homo sapiens
aagtagccaagagtt

SEQ ID NO: 2013524 - DNA, 15 bp, Homo sapiens
agtagccaagagttc

SEQ ID NO: 2013525 - DNA, 15 bp, Homo sapiens
gtagccaagagttcc

SEQ ID NO: 2013526 - DNA, 15 bp, Homo sapiens
tagccaagagttcct

SEQ ID NO: 2013527 - DNA, 15 bp, Homo sapiens
agccaagagttcctc

SEQ ID NO: 2013528 - DNA, 15 bp, Homo sapiens
gccaagagttcctca

SEQ ID NO: 2013529 - DNA, 15 bp, Homo sapiens
ccaagagttcctcag

SEQ ID NO: 2013530 - DNA, 15 bp, Homo sapiens
caagagttcctcaga

SEQ ID NO: 2013531 - DNA, 15 bp, Homo sapiens
aagagttcctcagaa

SEQ ID NO: 2013532 - DNA, 15 bp, Homo sapiens
agagttcctcagaag

SEQ ID NO: 2013533 - DNA, 15 bp, Homo sapiens
gagttcctcagaagc

SEQ ID NO: 2013534 - DNA, 15 bp, Homo sapiens
agttcctcagaagca

SEQ ID NO: 2013535 - DNA, 15 bp, Homo sapiens
gttcctcagaagcag

SEQ ID NO: 2013536 - DNA, 15 bp, Homo sapiens
ttcctcagaagcagg

SEQ ID NO: 2013537 - DNA, 15 bp, Homo sapiens
tcctcagaagcagga

SEQ ID NO: 2013538 - DNA, 15 bp, Homo sapiens
cctcagaagcaggac

SEQ ID NO: 2013539 - DNA, 15 bp, Homo sapiens
ctcagaagcaggaca

SEQ ID NO: 2013540 - DNA, 15 bp, Homo sapiens
tcagaagcaggacat

SEQ ID NO: 2013541 - DNA, 15 bp, Homo sapiens
cagaagcaggacatc

SEQ ID NO: 2013542 - DNA, 15 bp, Homo sapiens
agaagcaggacatca

SEQ ID NO: 2013543 - DNA, 15 bp, Homo sapiens
gaagcaggacatcat

SEQ ID NO: 2013544 - DNA, 15 bp, Homo sapiens
aagcaggacatcatt

SEQ ID NO: 2013545 - DNA, 15 bp, Homo sapiens
agcaggacatcattt

SEQ ID NO: 2013546 - DNA, 15 bp, Homo sapiens
gcaggacatcattta

SEQ ID NO: 2013547 - DNA, 15 bp, Homo sapiens
caggacatcatttag

SEQ ID NO: 2013548 - DNA, 15 bp, Homo sapiens
aggacatcatttaga

SEQ ID NO: 2013549 - DNA, 15 bp, Homo sapiens
ggacatcatttagat

SEQ ID NO: 2013550 - DNA, 15 bp, Homo sapiens
gacatcatttagatt

SEQ ID NO: 2013551 - DNA, 15 bp, Homo sapiens
acatcatttagattt

SEQ ID NO: 2013552 - DNA, 15 bp, Homo sapiens
catcatttagattta

SEQ ID NO: 2013553 - DNA, 15 bp, Homo sapiens
atcatttagatttaa

SEQ ID NO: 2013554 - DNA, 15 bp, Homo sapiens
tcatttagatttaaa

SEQ ID NO: 2013555 - DNA, 15 bp, Homo sapiens
catttagatttaaaa

SEQ ID NO: 2013556 - DNA, 15 bp, Homo sapiens
atttagatttaaaac

SEQ ID NO: 2013557 - DNA, 15 bp, Homo sapiens
tttagatttaaaaca

SEQ ID NO: 2013558 - DNA, 15 bp, Homo sapiens
ttagatttaaaacaa

SEQ ID NO: 2013559 - DNA, 15 bp, Homo sapiens
tagatttaaaacaat

SEQ ID NO: 2013560 - DNA, 15 bp, Homo sapiens
agatttaaaacaatt

SEQ ID NO: 2013561 - DNA, 15 bp, Homo sapiens
gatttaaaacaatta

SEQ ID NO: 2013562 - DNA, 15 bp, Homo sapiens
atttaaaacaattat

SEQ ID NO: 2013563 - DNA, 15 bp, Homo sapiens
tttaaaacaattatg

SEQ ID NO: 2013564 - DNA, 15 bp, Homo sapiens
ttaaaacaattatgg

SEQ ID NO: 2013565 - DNA, 15 bp, Homo sapiens
taaaacaattatggc

SEQ ID NO: 2013566 - DNA, 15 bp, Homo sapiens
aaaacaattatggct

SEQ ID NO: 2013567 - DNA, 15 bp, Homo sapiens
aaacaattatggctt

SEQ ID NO: 2013568 - DNA, 15 bp, Homo sapiens
aacaattatggcttg

SEQ ID NO: 2013569 - DNA, 15 bp, Homo sapiens
acaattatggcttgt

SEQ ID NO: 2013570 - DNA, 15 bp, Homo sapiens
caattatggcttgtc

SEQ ID NO: 2013571 - DNA, 15 bp, Homo sapiens
aattatggcttgtct

SEQ ID NO: 2013572 - DNA, 15 bp, Homo sapiens
attatggcttgtctg

SEQ ID NO: 2013573 - DNA, 15 bp, Homo sapiens
ttatggcttgtctgt

SEQ ID NO: 2013574 - DNA, 15 bp, Homo sapiens
tatggcttgtctgta

SEQ ID NO: 2013575 - DNA, 15 bp, Homo sapiens
atggcttgtctgtaa

SEQ ID NO: 2013576 - DNA, 15 bp, Homo sapiens
tggcttgtctgtaaa

SEQ ID NO: 2013577 - DNA, 15 bp, Homo sapiens
ggcttgtctgtaaaa

SEQ ID NO: 2013578 - DNA, 15 bp, Homo sapiens
gcttgtctgtaaaat

SEQ ID NO: 2013579 - DNA, 15 bp, Homo sapiens
cttgtctgtaaaata

SEQ ID NO: 2013580 - DNA, 15 bp, Homo sapiens
ttgtctgtaaaataa

SEQ ID NO: 2013581 - DNA, 15 bp, Homo sapiens
tgtctgtaaaataat

SEQ ID NO: 2013582 - DNA, 15 bp, Homo sapiens
gtctgtaaaataatg

SEQ ID NO: 2013583 - DNA, 15 bp, Homo sapiens
tctgtaaaataatgt

SEQ ID NO: 2013584 - DNA, 15 bp, Homo sapiens
ctgtaaaataatgtt

SEQ ID NO: 2013585 - DNA, 15 bp, Homo sapiens
tgtaaaataatgttg

SEQ ID NO: 2013586 - DNA, 15 bp, Homo sapiens
gtaaaataatgttgt

SEQ ID NO: 2013587 - DNA, 15 bp, Homo sapiens
aaaataatgttgtag

SEQ ID NO: 2013588 - DNA, 15 bp, Homo sapiens
aaataatgttgtagc

SEQ ID NO: 2013589 - DNA, 15 bp, Homo sapiens
aataatgttgtagca

SEQ ID NO: 2013590 - DNA, 15 bp, Homo sapiens
ataatgttgtagcat

SEQ ID NO: 2013591 - DNA, 15 bp, Homo sapiens
taatgttgtagcata

SEQ ID NO: 2013592 - DNA, 15 bp, Homo sapiens
aatgttgtagcataa

SEQ ID NO: 2013593 - DNA, 15 bp, Homo sapiens
atgttgtagcataac

SEQ ID NO: 2013594 - DNA, 15 bp, Homo sapiens
tgttgtagcataacc

SEQ ID NO: 2013595 - DNA, 15 bp, Homo sapiens
gttgtagcataacca

SEQ ID NO: 2013596 - DNA, 15 bp, Homo sapiens
ttgtagcataaccat

SEQ ID NO: 2013597 - DNA, 15 bp, Homo sapiens
tgtagcataaccatt

SEQ ID NO: 2013598 - DNA, 15 bp, Homo sapiens
gtagcataaccattc

SEQ ID NO: 2013599 - DNA, 15 bp, Homo sapiens
tagcataaccattca

SEQ ID NO: 2013600 - DNA, 15 bp, Homo sapiens
agcataaccattcat

SEQ ID NO: 2013601 - DNA, 15 bp, Homo sapiens
gcataaccattcatg

SEQ ID NO: 2013602 - DNA, 15 bp, Homo sapiens
cataaccattcatgg

SEQ ID NO: 2013603 - DNA, 15 bp, Homo sapiens
ataaccattcatggg

SEQ ID NO: 2013604 - DNA, 15 bp, Homo sapiens
taaccattcatggga

SEQ ID NO: 2013605 - DNA, 15 bp, Homo sapiens
aaccattcatgggat

SEQ ID NO: 2013606 - DNA, 15 bp, Homo sapiens
accattcatgggatg

SEQ ID NO: 2013607 - DNA, 15 bp, Homo sapiens
ccattcatgggatgg

SEQ ID NO: 2013608 - DNA, 15 bp, Homo sapiens
cattcatgggatggc

SEQ ID NO: 2013609 - DNA, 15 bp, Homo sapiens
attcatgggatggca

SEQ ID NO: 2013610 - DNA, 15 bp, Homo sapiens
ttcatgggatggcag

SEQ ID NO: 2013611 - DNA, 15 bp, Homo sapiens
tcatgggatggcagc

SEQ ID NO: 2013612 - DNA, 15 bp, Homo sapiens
catgggatggcagct

SEQ ID NO: 2013613 - DNA, 15 bp, Homo sapiens
atgggatggcagcta

SEQ ID NO: 2013614 - DNA, 15 bp, Homo sapiens
tgggatggcagctac

SEQ ID NO: 2013615 - DNA, 15 bp, Homo sapiens
gggatggcagctacg

SEQ ID NO: 2013616 - DNA, 15 bp, Homo sapiens
ggatggcagctacga

SEQ ID NO: 2013617 - DNA, 15 bp, Homo sapiens
gatggcagctacgat

SEQ ID NO: 2013618 - DNA, 15 bp, Homo sapiens
atggcagctacgatt

SEQ ID NO: 2013619 - DNA, 15 bp, Homo sapiens
tggcagctacgattt

SEQ ID NO: 2013620 - DNA, 15 bp, Homo sapiens
ggcagctacgatttt

SEQ ID NO: 2013621 - DNA, 15 bp, Homo sapiens
gcagctacgatttta

SEQ ID NO: 2013622 - DNA, 15 bp, Homo sapiens
cagctacgattttac

SEQ ID NO: 2013623 - DNA, 15 bp, Homo sapiens
agctacgattttact

SEQ ID NO: 2013624 - DNA, 15 bp, Homo sapiens
gctacgattttactt

SEQ ID NO: 2013625 - DNA, 15 bp, Homo sapiens
ctacgattttacttc

SEQ ID NO: 2013626 - DNA, 15 bp, Homo sapiens
tacgattttacttca

SEQ ID NO: 2013627 - DNA, 15 bp, Homo sapiens
acgattttacttcag

SEQ ID NO: 2013628 - DNA, 15 bp, Homo sapiens
cgattttacttcagt

SEQ ID NO: 2013629 - DNA, 15 bp, Homo sapiens
gattttacttcagta

SEQ ID NO: 2013630 - DNA, 15 bp, Homo sapiens
attttacttcagtaa

SEQ ID NO: 2013631 - DNA, 15 bp, Homo sapiens
ttttacttcagtaaa

SEQ ID NO: 2013632 - DNA, 15 bp, Homo sapiens
tttacttcagtaaaa

SEQ ID NO: 2013633 - DNA, 15 bp, Homo sapiens
ttacttcagtaaaat

SEQ ID NO: 2013634 - DNA, 15 bp, Homo sapiens
tacttcagtaaaata

SEQ ID NO: 2013635 - DNA, 15 bp, Homo sapiens
acttcagtaaaatat

SEQ ID NO: 2013636 - DNA, 15 bp, Homo sapiens
cttcagtaaaatatc

SEQ ID NO: 2013637 - DNA, 15 bp, Homo sapiens
ttcagtaaaatatcc

SEQ ID NO: 2013638 - DNA, 15 bp, Homo sapiens
tcagtaaaatatcct

SEQ ID NO: 2013639 - DNA, 15 bp, Homo sapiens
cagtaaaatatcctt

SEQ ID NO: 2013640 - DNA, 15 bp, Homo sapiens
agtaaaatatccttg

SEQ ID NO: 2013641 - DNA, 15 bp, Homo sapiens
gtaaaatatccttgg

SEQ ID NO: 2013642 - DNA, 15 bp, Homo sapiens
taaaatatccttgga

SEQ ID NO: 2013643 - DNA, 15 bp, Homo sapiens
aaaatatccttggat

SEQ ID NO: 2013644 - DNA, 15 bp, Homo sapiens
aaatatccttggata

SEQ ID NO: 2013645 - DNA, 15 bp, Homo sapiens
aatatccttggatac

SEQ ID NO: 2013646 - DNA, 15 bp, Homo sapiens
atatccttggatact

SEQ ID NO: 2013647 - DNA, 15 bp, Homo sapiens
tatccttggatacta

SEQ ID NO: 2013648 - DNA, 15 bp, Homo sapiens
atccttggatactac

SEQ ID NO: 2013649 - DNA, 15 bp, Homo sapiens
tccttggatactacc

SEQ ID NO: 2013650 - DNA, 15 bp, Homo sapiens
ccttggatactaccg

SEQ ID NO: 2013651 - DNA, 15 bp, Homo sapiens
cttggatactaccgc

SEQ ID NO: 2013652 - DNA, 15 bp, Homo sapiens
ttggatactaccgcc

SEQ ID NO: 2013653 - DNA, 15 bp, Homo sapiens
tggatactaccgcca

SEQ ID NO: 2013654 - DNA, 15 bp, Homo sapiens
ggatactaccgccat

SEQ ID NO: 2013655 - DNA, 15 bp, Homo sapiens
gatactaccgccatt

SEQ ID NO: 2013656 - DNA, 15 bp, Homo sapiens
atactaccgccattt

SEQ ID NO: 2013657 - DNA, 15 bp, Homo sapiens
tactaccgccatttt

SEQ ID NO: 2013658 - DNA, 15 bp, Homo sapiens
actaccgccatttta

SEQ ID NO: 2013659 - DNA, 15 bp, Homo sapiens
ctaccgccattttat

SEQ ID NO: 2013660 - DNA, 15 bp, Homo sapiens
taccgccattttatt

SEQ ID NO: 2013661 - DNA, 15 bp, Homo sapiens
accgccattttattt

SEQ ID NO: 2013662 - DNA, 15 bp, Homo sapiens
ccgccattttattta

SEQ ID NO: 2013663 - DNA, 15 bp, Homo sapiens
cgccattttatttac

SEQ ID NO: 2013664 - DNA, 15 bp, Homo sapiens
gccattttatttacc

SEQ ID NO: 2013665 - DNA, 15 bp, Homo sapiens
ccattttatttacct

SEQ ID NO: 2013666 - DNA, 15 bp, Homo sapiens
cattttatttacctt

SEQ ID NO: 2013667 - DNA, 15 bp, Homo sapiens
attttatttacctta

SEQ ID NO: 2013668 - DNA, 15 bp, Homo sapiens
ttttatttaccttaa

SEQ ID NO: 2013669 - DNA, 15 bp, Homo sapiens
tttatttaccttaaa

SEQ ID NO: 2013670 - DNA, 15 bp, Homo sapiens
ttatttaccttaaag

SEQ ID NO: 2013671 - DNA, 15 bp, Homo sapiens
tatttaccttaaaga

SEQ ID NO: 2013672 - DNA, 15 bp, Homo sapiens
atttaccttaaagat

SEQ ID NO: 2013673 - DNA, 15 bp, Homo sapiens
tttaccttaaagatt

SEQ ID NO: 2013674 - DNA, 15 bp, Homo sapiens
ttaccttaaagattt

SEQ ID NO: 2013675 - DNA, 15 bp, Homo sapiens
taccttaaagatttt

SEQ ID NO: 2013676 - DNA, 15 bp, Homo sapiens
accttaaagatttta

SEQ ID NO: 2013677 - DNA, 15 bp, Homo sapiens
ccttaaagattttac

SEQ ID NO: 2013678 - DNA, 15 bp, Homo sapiens
cttaaagattttacc

SEQ ID NO: 2013679 - DNA, 15 bp, Homo sapiens
ttaaagattttacca

SEQ ID NO: 2013680 - DNA, 15 bp, Homo sapiens
taaagattttaccaa

SEQ ID NO: 2013681 - DNA, 15 bp, Homo sapiens
aaagattttaccaag

SEQ ID NO: 2013682 - DNA, 15 bp, Homo sapiens
aagattttaccaagg

SEQ ID NO: 2013683 - DNA, 15 bp, Homo sapiens
agattttaccaaggt

SEQ ID NO: 2013684 - DNA, 15 bp, Homo sapiens
gattttaccaaggta

SEQ ID NO: 2013685 - DNA, 15 bp, Homo sapiens
attttaccaaggtac

SEQ ID NO: 2013686 - DNA, 15 bp, Homo sapiens
ttttaccaaggtacc

SEQ ID NO: 2013687 - DNA, 15 bp, Homo sapiens
tttaccaaggtaccc

SEQ ID NO: 2013688 - DNA, 15 bp, Homo sapiens
ttaccaaggtaccct

SEQ ID NO: 2013689 - DNA, 15 bp, Homo sapiens
taccaaggtacccta

SEQ ID NO: 2013690 - DNA, 15 bp, Homo sapiens
accaaggtaccctag

SEQ ID NO: 2013691 - DNA, 15 bp, Homo sapiens
ccaaggtaccctaga

SEQ ID NO: 2013692 - DNA, 15 bp, Homo sapiens
caaggtaccctagaa

SEQ ID NO: 2013693 - DNA, 15 bp, Homo sapiens
aaggtaccctagaac

SEQ ID NO: 2013694 - DNA, 15 bp, Homo sapiens
aggtaccctagaaca

SEQ ID NO: 2013695 - DNA, 15 bp, Homo sapiens
ggtaccctagaacaa

SEQ ID NO: 2013696 - DNA, 15 bp, Homo sapiens
gtaccctagaacaaa

SEQ ID NO: 2013697 - DNA, 15 bp, Homo sapiens
taccctagaacaaaa

SEQ ID NO: 2013698 - DNA, 15 bp, Homo sapiens
accctagaacaaaaa

SEQ ID NO: 2013699 - DNA, 15 bp, Homo sapiens
ccctagaacaaaaat

SEQ ID NO: 2013700 - DNA, 15 bp, Homo sapiens
cctagaacaaaaatg

SEQ ID NO: 2013701 - DNA, 15 bp, Homo sapiens
ctagaacaaaaatgg

SEQ ID NO: 2013702 - DNA, 15 bp, Homo sapiens
tagaacaaaaatggt

SEQ ID NO: 2013703 - DNA, 15 bp, Homo sapiens
agaacaaaaatggtg

SEQ ID NO: 2013704 - DNA, 15 bp, Homo sapiens
gaacaaaaatggtga

SEQ ID NO: 2013705 - DNA, 15 bp, Homo sapiens
aacaaaaatggtgag

SEQ ID NO: 2013706 - DNA, 15 bp, Homo sapiens
acaaaaatggtgagg

SEQ ID NO: 2013707 - DNA, 15 bp, Homo sapiens
caaaaatggtgaggt

SEQ ID NO: 2013708 - DNA, 15 bp, Homo sapiens
aaaaatggtgaggtc

SEQ ID NO: 2013709 - DNA, 15 bp, Homo sapiens
aaaatggtgaggtca

SEQ ID NO: 2013710 - DNA, 15 bp, Homo sapiens
aaatggtgaggtcat

SEQ ID NO: 2013711 - DNA, 15 bp, Homo sapiens
aatggtgaggtcatt

SEQ ID NO: 2013712 - DNA, 15 bp, Homo sapiens
atggtgaggtcattt

SEQ ID NO: 2013713 - DNA, 15 bp, Homo sapiens
tggtgaggtcatttt

SEQ ID NO: 2013714 - DNA, 15 bp, Homo sapiens
ggtgaggtcattttg

SEQ ID NO: 2013715 - DNA, 15 bp, Homo sapiens
gtgaggtcattttga

SEQ ID NO: 2013716 - DNA, 15 bp, Homo sapiens
tgaggtcattttgat

SEQ ID NO: 2013717 - DNA, 15 bp, Homo sapiens
gaggtcattttgatt

SEQ ID NO: 2013718 - DNA, 15 bp, Homo sapiens
aggtcattttgattc

SEQ ID NO: 2013719 - DNA, 15 bp, Homo sapiens
ggtcattttgattct

SEQ ID NO: 2013720 - DNA, 15 bp, Homo sapiens
gtcattttgattctg

SEQ ID NO: 2013721 - DNA, 15 bp, Homo sapiens
tcattttgattctgc

SEQ ID NO: 2013722 - DNA, 15 bp, Homo sapiens
cattttgattctgct

SEQ ID NO: 2013723 - DNA, 15 bp, Homo sapiens
attttgattctgcta

SEQ ID NO: 2013724 - DNA, 15 bp, Homo sapiens
ttttgattctgctaa

SEQ ID NO: 2013725 - DNA, 15 bp, Homo sapiens
tttgattctgctaaa

SEQ ID NO: 2013726 - DNA, 15 bp, Homo sapiens
ttgattctgctaaag

SEQ ID NO: 2013727 - DNA, 15 bp, Homo sapiens
tgattctgctaaagt

SEQ ID NO: 2013728 - DNA, 15 bp, Homo sapiens
gattctgctaaagtt

SEQ ID NO: 2013729 - DNA, 15 bp, Homo sapiens
attctgctaaagttg

SEQ ID NO: 2013730 - DNA, 15 bp, Homo sapiens
ttctgctaaagttgg

SEQ ID NO: 2013731 - DNA, 15 bp, Homo sapiens
tctgctaaagttggt

SEQ ID NO: 2013732 - DNA, 15 bp, Homo sapiens
ctgctaaagttggta

SEQ ID NO: 2013733 - DNA, 15 bp, Homo sapiens
tgctaaagttggtat

SEQ ID NO: 2013734 - DNA, 15 bp, Homo sapiens
gctaaagttggtatg

SEQ ID NO: 2013735 - DNA, 15 bp, Homo sapiens
ctaaagttggtatga

SEQ ID NO: 2013736 - DNA, 15 bp, Homo sapiens
taaagttggtatgac

SEQ ID NO: 2013737 - DNA, 15 bp, Homo sapiens
aaagttggtatgact

SEQ ID NO: 2013738 - DNA, 15 bp, Homo sapiens
aagttggtatgactg

SEQ ID NO: 2013739 - DNA, 15 bp, Homo sapiens
agttggtatgactgg

SEQ ID NO: 2013740 - DNA, 15 bp, Homo sapiens
gttggtatgactgga

SEQ ID NO: 2013741 - DNA, 15 bp, Homo sapiens
ttggtatgactggaa

SEQ ID NO: 2013742 - DNA, 15 bp, Homo sapiens
tggtatgactggaaa

SEQ ID NO: 2013743 - DNA, 15 bp, Homo sapiens
ggtatgactggaaag

SEQ ID NO: 2013744 - DNA, 15 bp, Homo sapiens
gtatgactggaaagc

SEQ ID NO: 2013745 - DNA, 15 bp, Homo sapiens
tatgactggaaagcc

SEQ ID NO: 2013746 - DNA, 15 bp, Homo sapiens
atgactggaaagcca

SEQ ID NO: 2013747 - DNA, 15 bp, Homo sapiens
tgactggaaagccaa

SEQ ID NO: 2013748 - DNA, 15 bp, Homo sapiens
gactggaaagccaaa

SEQ ID NO: 2013749 - DNA, 15 bp, Homo sapiens
actggaaagccaaat

SEQ ID NO: 2013750 - DNA, 15 bp, Homo sapiens
ctggaaagccaaatg

SEQ ID NO: 2013751 - DNA, 15 bp, Homo sapiens
tggaaagccaaatga

SEQ ID NO: 2013752 - DNA, 15 bp, Homo sapiens
ggaaagccaaatgac

SEQ ID NO: 2013753 - DNA, 15 bp, Homo sapiens
gaaagccaaatgaca

SEQ ID NO: 2013754 - DNA, 15 bp, Homo sapiens
aaagccaaatgacac

SEQ ID NO: 2013755 - DNA, 15 bp, Homo sapiens
aagccaaatgacaca

SEQ ID NO: 2013756 - DNA, 15 bp, Homo sapiens
agccaaatgacacag

SEQ ID NO: 2013757 - DNA, 15 bp, Homo sapiens
gccaaatgacacagt

SEQ ID NO: 2013758 - DNA, 15 bp, Homo sapiens
ccaaatgacacagtt

SEQ ID NO: 2013759 - DNA, 15 bp, Homo sapiens
caaatgacacagtta

SEQ ID NO: 2013760 - DNA, 15 bp, Homo sapiens
aaatgacacagttat

SEQ ID NO: 2013761 - DNA, 15 bp, Homo sapiens
aatgacacagttatg

SEQ ID NO: 2013762 - DNA, 15 bp, Homo sapiens
atgacacagttatga

SEQ ID NO: 2013763 - DNA, 15 bp, Homo sapiens
tgacacagttatgag

SEQ ID NO: 2013764 - DNA, 15 bp, Homo sapiens
gacacagttatgagc

SEQ ID NO: 2013765 - DNA, 15 bp, Homo sapiens
acacagttatgagca

SEQ ID NO: 2013766 - DNA, 15 bp, Homo sapiens
cacagttatgagcat

SEQ ID NO: 2013767 - DNA, 15 bp, Homo sapiens
acagttatgagcata

SEQ ID NO: 2013768 - DNA, 15 bp, Homo sapiens
cagttatgagcatag

SEQ ID NO: 2013769 - DNA, 15 bp, Homo sapiens
agttatgagcataga

SEQ ID NO: 2013770 - DNA, 15 bp, Homo sapiens
gttatgagcatagac

SEQ ID NO: 2013771 - DNA, 15 bp, Homo sapiens
ttatgagcatagacc

SEQ ID NO: 2013772 - DNA, 15 bp, Homo sapiens
tatgagcatagacct

SEQ ID NO: 2013773 - DNA, 15 bp, Homo sapiens
atgagcatagacctt

SEQ ID NO: 2013774 - DNA, 15 bp, Homo sapiens
tgagcatagaccttt

SEQ ID NO: 2013775 - DNA, 15 bp, Homo sapiens
gagcatagacctttt

SEQ ID NO: 2013776 - DNA, 15 bp, Homo sapiens
agcatagacctttta

SEQ ID NO: 2013777 - DNA, 15 bp, Homo sapiens
gcatagaccttttat

SEQ ID NO: 2013778 - DNA, 15 bp, Homo sapiens
catagaccttttatt

SEQ ID NO: 2013779 - DNA, 15 bp, Homo sapiens
atagaccttttattt

SEQ ID NO: 2013780 - DNA, 15 bp, Homo sapiens
tagaccttttatttt

SEQ ID NO: 2013781 - DNA, 15 bp, Homo sapiens
agaccttttattttc

SEQ ID NO: 2013782 - DNA, 15 bp, Homo sapiens
gaccttttattttcc

SEQ ID NO: 2013783 - DNA, 15 bp, Homo sapiens
accttttattttcca

SEQ ID NO: 2013784 - DNA, 15 bp, Homo sapiens
ccttttattttccag

SEQ ID NO: 2013785 - DNA, 15 bp, Homo sapiens
cttttattttccaga

SEQ ID NO: 2013786 - DNA, 15 bp, Homo sapiens
ttttattttccagat

SEQ ID NO: 2013787 - DNA, 15 bp, Homo sapiens
tttattttccagatg

SEQ ID NO: 2013788 - DNA, 15 bp, Homo sapiens
ttattttccagatgt

SEQ ID NO: 2013789 - DNA, 15 bp, Homo sapiens
tattttccagatgtt

SEQ ID NO: 2013790 - DNA, 15 bp, Homo sapiens
attttccagatgttt

SEQ ID NO: 2013791 - DNA, 15 bp, Homo sapiens
ttttccagatgtttg

SEQ ID NO: 2013792 - DNA, 15 bp, Homo sapiens
tttccagatgtttga

SEQ ID NO: 2013793 - DNA, 15 bp, Homo sapiens
ttccagatgtttgac

SEQ ID NO: 2013794 - DNA, 15 bp, Homo sapiens
tccagatgtttgaca

SEQ ID NO: 2013795 - DNA, 15 bp, Homo sapiens
ccagatgtttgacag

SEQ ID NO: 2013796 - DNA, 15 bp, Homo sapiens
cagatgtttgacagt

SEQ ID NO: 2013797 - DNA, 15 bp, Homo sapiens
agatgtttgacagtg

SEQ ID NO: 2013798 - DNA, 15 bp, Homo sapiens
gatgtttgacagtgt

SEQ ID NO: 2013799 - DNA, 15 bp, Homo sapiens
atgtttgacagtgta

SEQ ID NO: 2013800 - DNA, 15 bp, Homo sapiens
tgtttgacagtgtaa

SEQ ID NO: 2013801 - DNA, 15 bp, Homo sapiens
gtttgacagtgtaaa

SEQ ID NO: 2013802 - DNA, 15 bp, Homo sapiens
tttgacagtgtaaac

SEQ ID NO: 2013803 - DNA, 15 bp, Homo sapiens
ttgacagtgtaaaca

SEQ ID NO: 2013804 - DNA, 15 bp, Homo sapiens
tgacagtgtaaacat

SEQ ID NO: 2013805 - DNA, 15 bp, Homo sapiens
gacagtgtaaacata

SEQ ID NO: 2013806 - DNA, 15 bp, Homo sapiens
acagtgtaaacatac

SEQ ID NO: 2013807 - DNA, 15 bp, Homo sapiens
cagtgtaaacataca

SEQ ID NO: 2013808 - DNA, 15 bp, Homo sapiens
agtgtaaacatacat

SEQ ID NO: 2013809 - DNA, 15 bp, Homo sapiens
gtgtaaacatacata

SEQ ID NO: 2013810 - DNA, 15 bp, Homo sapiens
tgtaaacatacataa

SEQ ID NO: 2013811 - DNA, 15 bp, Homo sapiens
gtaaacatacataaa

SEQ ID NO: 2013812 - DNA, 15 bp, Homo sapiens
taaacatacataaaa

SEQ ID NO: 2013813 - DNA, 15 bp, Homo sapiens
aaacatacataaaat

SEQ ID NO: 2013814 - DNA, 15 bp, Homo sapiens
aacatacataaaata

SEQ ID NO: 2013815 - DNA, 15 bp, Homo sapiens
acatacataaaatac

SEQ ID NO: 2013816 - DNA, 15 bp, Homo sapiens
catacataaaataca

SEQ ID NO: 2013817 - DNA, 15 bp, Homo sapiens
atacataaaatacat

SEQ ID NO: 2013818 - DNA, 15 bp, Homo sapiens
tacataaaatacata

SEQ ID NO: 2013819 - DNA, 15 bp, Homo sapiens
acataaaatacatat

SEQ ID NO: 2013820 - DNA, 15 bp, Homo sapiens
cataaaatacatatt

SEQ ID NO: 2013821 - DNA, 15 bp, Homo sapiens
ataaaatacatatta

SEQ ID NO: 2013822 - DNA, 15 bp, Homo sapiens
taaaatacatattaa

SEQ ID NO: 2013823 - DNA, 15 bp, Homo sapiens
aaaatacatattaaa

SEQ ID NO: 2013824 - DNA, 15 bp, Homo sapiens
aaatacatattaaag

SEQ ID NO: 2013825 - DNA, 15 bp, Homo sapiens
aatacatattaaagt

SEQ ID NO: 2013826 - DNA, 15 bp, Homo sapiens
atacatattaaagtt

SEQ ID NO: 2013827 - DNA, 15 bp, Homo sapiens
tacatattaaagttt

SEQ ID NO: 2013828 - DNA, 15 bp, Homo sapiens
acatattaaagttta

SEQ ID NO: 2013829 - DNA, 15 bp, Homo sapiens
catattaaagtttag

SEQ ID NO: 2013830 - DNA, 15 bp, Homo sapiens
atattaaagtttaga

SEQ ID NO: 2013831 - DNA, 15 bp, Homo sapiens
tattaaagtttagat

SEQ ID NO: 2013832 - DNA, 15 bp, Homo sapiens
attaaagtttagatg

SEQ ID NO: 2013833 - DNA, 15 bp, Homo sapiens
ttaaagtttagatgc

SEQ ID NO: 2013834 - DNA, 15 bp, Homo sapiens
taaagtttagatgct

SEQ ID NO: 2013835 - DNA, 15 bp, Homo sapiens
aaagtttagatgctt

SEQ ID NO: 2013836 - DNA, 15 bp, Homo sapiens
aagtttagatgcttt

SEQ ID NO: 2013837 - DNA, 15 bp, Homo sapiens
agtttagatgcttta

SEQ ID NO: 2013838 - DNA, 15 bp, Homo sapiens
gtttagatgctttat

SEQ ID NO: 2013839 - DNA, 15 bp, Homo sapiens
tttagatgctttata

SEQ ID NO: 2013840 - DNA, 15 bp, Homo sapiens
ttagatgctttatat

SEQ ID NO: 2013841 - DNA, 15 bp, Homo sapiens
tagatgctttatatt

SEQ ID NO: 2013842 - DNA, 15 bp, Homo sapiens
agatgctttatattt

SEQ ID NO: 2013843 - DNA, 15 bp, Homo sapiens
gatgctttatatttt

SEQ ID NO: 2013844 - DNA, 15 bp, Homo sapiens
atgctttatattttg

SEQ ID NO: 2013845 - DNA, 15 bp, Homo sapiens
tgctttatattttgt

SEQ ID NO: 2013846 - DNA, 15 bp, Homo sapiens
gctttatattttgtg

SEQ ID NO: 2013847 - DNA, 15 bp, Homo sapiens
ctttatattttgtgc

SEQ ID NO: 2013848 - DNA, 15 bp, Homo sapiens
tttatattttgtgca

SEQ ID NO: 2013849 - DNA, 15 bp, Homo sapiens
ttatattttgtgcaa

SEQ ID NO: 2013850 - DNA, 15 bp, Homo sapiens
tatattttgtgcaat

SEQ ID NO: 2013851 - DNA, 15 bp, Homo sapiens
atattttgtgcaata

SEQ ID NO: 2013852 - DNA, 15 bp, Homo sapiens
tattttgtgcaataa

SEQ ID NO: 2013853 - DNA, 15 bp, Homo sapiens
attttgtgcaataaa

SEQ ID NO: 2013854 - DNA, 15 bp, Homo sapiens
ttttgtgcaataaat

SEQ ID NO: 2013855 - DNA, 15 bp, Homo sapiens
tttgtgcaataaatt

SEQ ID NO: 2013856 - DNA, 15 bp, Homo sapiens
ttgtgcaataaattg

SEQ ID NO: 2013857 - DNA, 15 bp, Homo sapiens
tgtgcaataaattga

SEQ ID NO: 2013858 - DNA, 15 bp, Homo sapiens
gtgcaataaattgaa

SEQ ID NO: 2013859 - DNA, 15 bp, Homo sapiens
tgcaataaattgaag

SEQ ID NO: 2013860 - DNA, 15 bp, Homo sapiens
gcaataaattgaagc

SEQ ID NO: 2013861 - DNA, 15 bp, Homo sapiens
caataaattgaagcc

SEQ ID NO: 2013862 - DNA, 15 bp, Homo sapiens
aataaattgaagcct

SEQ ID NO: 2013863 - DNA, 15 bp, Homo sapiens
ataaattgaagcctt

SEQ ID NO: 2013864 - DNA, 15 bp, Homo sapiens
taaattgaagcctta

SEQ ID NO: 2013865 - DNA, 15 bp, Homo sapiens
aaattgaagccttaa

SEQ ID NO: 2013866 - DNA, 15 bp, Homo sapiens
aattgaagccttaaa

SEQ ID NO: 2013867 - DNA, 15 bp, Homo sapiens
attgaagccttaaaa

SEQ ID NO: 2013868 - DNA, 15 bp, Homo sapiens
ttgaagccttaaaac

SEQ ID NO: 2013869 - DNA, 15 bp, Homo sapiens
tgaagccttaaaaca

SEQ ID NO: 2013870 - DNA, 15 bp, Homo sapiens
gaagccttaaaacat

SEQ ID NO: 2013871 - DNA, 15 bp, Homo sapiens
aagccttaaaacatt

SEQ ID NO: 2013872 - DNA, 15 bp, Homo sapiens
agccttaaaacattt

SEQ ID NO: 2013873 - DNA, 15 bp, Homo sapiens
gccttaaaacatttc

SEQ ID NO: 2013874 - DNA, 15 bp, Homo sapiens
ccttaaaacatttca

SEQ ID NO: 2013875 - DNA, 15 bp, Homo sapiens
cttaaaacatttcat

SEQ ID NO: 2013876 - DNA, 15 bp, Homo sapiens
ttaaaacatttcatt

SEQ ID NO: 2013877 - DNA, 15 bp, Homo sapiens
taaaacatttcattt

SEQ ID NO: 2013878 - DNA, 15 bp, Homo sapiens
aaaacatttcatttt

SEQ ID NO: 2013879 - DNA, 15 bp, Homo sapiens
catttcatttttttt

SEQ ID NO: 2013880 - DNA, 15 bp, Homo sapiens
atttcatttttttta

SEQ ID NO: 2013881 - DNA, 15 bp, Homo sapiens
tttcattttttttat

SEQ ID NO: 2013882 - DNA, 15 bp, Homo sapiens
ttcattttttttata

SEQ ID NO: 2013883 - DNA, 15 bp, Homo sapiens
tcattttttttataa

SEQ ID NO: 2013884 - DNA, 15 bp, Homo sapiens
cattttttttataaa

SEQ ID NO: 2013885 - DNA, 15 bp, Homo sapiens
attttttttataaaa

SEQ ID NO: 2013886 - DNA, 15 bp, Homo sapiens
ttttttttataaaag

SEQ ID NO: 2013887 - DNA, 15 bp, Homo sapiens
tttttttataaaaga

SEQ ID NO: 2013888 - DNA, 15 bp, Homo sapiens
ttttttataaaagaa

SEQ ID NO: 2013889 - DNA, 15 bp, Homo sapiens
tttttataaaagaaa

SEQ ID NO: 2013890 - DNA, 15 bp, Homo sapiens
ttttataaaagaaac

SEQ ID NO: 2013891 - DNA, 15 bp, Homo sapiens
tttataaaagaaact

SEQ ID NO: 2013892 - DNA, 15 bp, Homo sapiens
ttataaaagaaactc

SEQ ID NO: 2013893 - DNA, 15 bp, Homo sapiens
tataaaagaaactca

SEQ ID NO: 2013894 - DNA, 15 bp, Homo sapiens
ataaaagaaactcat

SEQ ID NO: 2013895 - DNA, 15 bp, Homo sapiens
taaaagaaactcatt

SEQ ID NO: 2013896 - DNA, 15 bp, Homo sapiens
aaaagaaactcatta

SEQ ID NO: 2013897 - DNA, 15 bp, Homo sapiens
aaagaaactcattag

SEQ ID NO: 2013898 - DNA, 15 bp, Homo sapiens
aagaaactcattagt

SEQ ID NO: 2013899 - DNA, 15 bp, Homo sapiens
agaaactcattagtt

SEQ ID NO: 2013900 - DNA, 15 bp, Homo sapiens
gaaactcattagttt

SEQ ID NO: 2013901 - DNA, 15 bp, Homo sapiens
aaactcattagttta

SEQ ID NO: 2013902 - DNA, 15 bp, Homo sapiens
aactcattagtttac

SEQ ID NO: 2013903 - DNA, 15 bp, Homo sapiens
actcattagtttact

SEQ ID NO: 2013904 - DNA, 15 bp, Homo sapiens
ctcattagtttactt

SEQ ID NO: 2013905 - DNA, 15 bp, Homo sapiens
tcattagtttactta

SEQ ID NO: 2013906 - DNA, 15 bp, Homo sapiens
cattagtttacttaa

SEQ ID NO: 2013907 - DNA, 15 bp, Homo sapiens
attagtttacttaat

SEQ ID NO: 2013908 - DNA, 15 bp, Homo sapiens
ttagtttacttaatt

SEQ ID NO: 2013909 - DNA, 15 bp, Homo sapiens
tagtttacttaatta

SEQ ID NO: 2013910 - DNA, 15 bp, Homo sapiens
agtttacttaattaa

SEQ ID NO: 2013911 - DNA, 15 bp, Homo sapiens
gtttacttaattaag

SEQ ID NO: 2013912 - DNA, 15 bp, Homo sapiens
tttacttaattaaga

SEQ ID NO: 2013913 - DNA, 15 bp, Homo sapiens
ttacttaattaagac

SEQ ID NO: 2013914 - DNA, 15 bp, Homo sapiens
tacttaattaagaca

SEQ ID NO: 2013915 - DNA, 15 bp, Homo sapiens
acttaattaagacag

SEQ ID NO: 2013916 - DNA, 15 bp, Homo sapiens
cttaattaagacagt

SEQ ID NO: 2013917 - DNA, 15 bp, Homo sapiens
ttaattaagacagta

SEQ ID NO: 2013918 - DNA, 15 bp, Homo sapiens
taattaagacagtaa

SEQ ID NO: 2013919 - DNA, 15 bp, Homo sapiens
aattaagacagtaaa

SEQ ID NO: 2013920 - DNA, 15 bp, Homo sapiens
attaagacagtaaaa

SEQ ID NO: 2013921 - DNA, 15 bp, Homo sapiens
ttaagacagtaaaat

SEQ ID NO: 2013922 - DNA, 15 bp, Homo sapiens
taagacagtaaaata

SEQ ID NO: 2013923 - DNA, 15 bp, Homo sapiens
aagacagtaaaatag

SEQ ID NO: 2013924 - DNA, 15 bp, Homo sapiens
agacagtaaaatagc

SEQ ID NO: 2013925 - DNA, 15 bp, Homo sapiens
gacagtaaaatagca

SEQ ID NO: 2013926 - DNA, 15 bp, Homo sapiens
acagtaaaatagcag

SEQ ID NO: 2013927 - DNA, 15 bp, Homo sapiens
cagtaaaatagcagc

SEQ ID NO: 2013928 - DNA, 15 bp, Homo sapiens
agtaaaatagcagca

SEQ ID NO: 2013929 - DNA, 15 bp, Homo sapiens
gtaaaatagcagcaa

SEQ ID NO: 2013930 - DNA, 15 bp, Homo sapiens
taaaatagcagcaag

SEQ ID NO: 2013931 - DNA, 15 bp, Homo sapiens
aaaatagcagcaagt

SEQ ID NO: 2013932 - DNA, 15 bp, Homo sapiens
aaatagcagcaagta

SEQ ID NO: 2013933 - DNA, 15 bp, Homo sapiens
aatagcagcaagtac

SEQ ID NO: 2013934 - DNA, 15 bp, Homo sapiens
atagcagcaagtacc

SEQ ID NO: 2013935 - DNA, 15 bp, Homo sapiens
tagcagcaagtacca

SEQ ID NO: 2013936 - DNA, 15 bp, Homo sapiens
agcagcaagtaccaa

SEQ ID NO: 2013937 - DNA, 15 bp, Homo sapiens
gcagcaagtaccaag

SEQ ID NO: 2013938 - DNA, 15 bp, Homo sapiens
cagcaagtaccaaga

SEQ ID NO: 2013939 - DNA, 15 bp, Homo sapiens
agcaagtaccaagac

SEQ ID NO: 2013940 - DNA, 15 bp, Homo sapiens
gcaagtaccaagaca

SEQ ID NO: 2013941 - DNA, 15 bp, Homo sapiens
caagtaccaagacat

SEQ ID NO: 2013942 - DNA, 15 bp, Homo sapiens
aagtaccaagacatt

SEQ ID NO: 2013943 - DNA, 15 bp, Homo sapiens
agtaccaagacattg

SEQ ID NO: 2013944 - DNA, 15 bp, Homo sapiens
gtaccaagacattgt

SEQ ID NO: 2013945 - DNA, 15 bp, Homo sapiens
taccaagacattgtg

SEQ ID NO: 2013946 - DNA, 15 bp, Homo sapiens
accaagacattgtgc

SEQ ID NO: 2013947 - DNA, 15 bp, Homo sapiens
ccaagacattgtgca

SEQ ID NO: 2013948 - DNA, 15 bp, Homo sapiens
caagacattgtgcat

SEQ ID NO: 2013949 - DNA, 15 bp, Homo sapiens
aagacattgtgcatt

SEQ ID NO: 2013950 - DNA, 15 bp, Homo sapiens
agacattgtgcattt

SEQ ID NO: 2013951 - DNA, 15 bp, Homo sapiens
gacattgtgcatttc

SEQ ID NO: 2013952 - DNA, 15 bp, Homo sapiens
acattgtgcatttct

SEQ ID NO: 2013953 - DNA, 15 bp, Homo sapiens
cattgtgcatttctt

SEQ ID NO: 2013954 - DNA, 15 bp, Homo sapiens
attgtgcatttcttt

SEQ ID NO: 2013955 - DNA, 15 bp, Homo sapiens
ttgtgcatttctttt

SEQ ID NO: 2013956 - DNA, 15 bp, Homo sapiens
tgtgcatttctttta

SEQ ID NO: 2013957 - DNA, 15 bp, Homo sapiens
gtgcatttcttttat

SEQ ID NO: 2013958 - DNA, 15 bp, Homo sapiens
tgcatttcttttatt

SEQ ID NO: 2013959 - DNA, 15 bp, Homo sapiens
gcatttcttttattt

SEQ ID NO: 2013960 - DNA, 15 bp, Homo sapiens
catttcttttattta

SEQ ID NO: 2013961 - DNA, 15 bp, Homo sapiens
atttcttttatttaa

SEQ ID NO: 2013962 - DNA, 15 bp, Homo sapiens
tttcttttatttaag

SEQ ID NO: 2013963 - DNA, 15 bp, Homo sapiens
ttcttttatttaaga

SEQ ID NO: 2013964 - DNA, 15 bp, Homo sapiens
tcttttatttaagac

SEQ ID NO: 2013965 - DNA, 15 bp, Homo sapiens
cttttatttaagaca

SEQ ID NO: 2013966 - DNA, 15 bp, Homo sapiens
ttttatttaagacaa

SEQ ID NO: 2013967 - DNA, 15 bp, Homo sapiens
tttatttaagacaag

SEQ ID NO: 2013968 - DNA, 15 bp, Homo sapiens
ttatttaagacaagt

SEQ ID NO: 2013969 - DNA, 15 bp, Homo sapiens
tatttaagacaagtt

SEQ ID NO: 2013970 - DNA, 15 bp, Homo sapiens
atttaagacaagtta

SEQ ID NO: 2013971 - DNA, 15 bp, Homo sapiens
tttaagacaagttac

SEQ ID NO: 2013972 - DNA, 15 bp, Homo sapiens
ttaagacaagttact

SEQ ID NO: 2013973 - DNA, 15 bp, Homo sapiens
taagacaagttactt

SEQ ID NO: 2013974 - DNA, 15 bp, Homo sapiens
aagacaagttacttc

SEQ ID NO: 2013975 - DNA, 15 bp, Homo sapiens
agacaagttacttca

SEQ ID NO: 2013976 - DNA, 15 bp, Homo sapiens
gacaagttacttcat

SEQ ID NO: 2013977 - DNA, 15 bp, Homo sapiens
acaagttacttcatt

SEQ ID NO: 2013978 - DNA, 15 bp, Homo sapiens
caagttacttcattt

SEQ ID NO: 2013979 - DNA, 15 bp, Homo sapiens
aagttacttcattta

SEQ ID NO: 2013980 - DNA, 15 bp, Homo sapiens
agttacttcatttac

SEQ ID NO: 2013981 - DNA, 15 bp, Homo sapiens
gttacttcatttaca

SEQ ID NO: 2013982 - DNA, 15 bp, Homo sapiens
ttacttcatttacat

SEQ ID NO: 2013983 - DNA, 15 bp, Homo sapiens
tacttcatttacatc

SEQ ID NO: 2013984 - DNA, 15 bp, Homo sapiens
acttcatttacatca

SEQ ID NO: 2013985 - DNA, 15 bp, Homo sapiens
cttcatttacatcag

SEQ ID NO: 2013986 - DNA, 15 bp, Homo sapiens
ttcatttacatcaga

SEQ ID NO: 2013987 - DNA, 15 bp, Homo sapiens
tcatttacatcagag

SEQ ID NO: 2013988 - DNA, 15 bp, Homo sapiens
catttacatcagagt

SEQ ID NO: 2013989 - DNA, 15 bp, Homo sapiens
atttacatcagagtt

SEQ ID NO: 2013990 - DNA, 15 bp, Homo sapiens
tttacatcagagtta

SEQ ID NO: 2013991 - DNA, 15 bp, Homo sapiens
ttacatcagagttag

SEQ ID NO: 2013992 - DNA, 15 bp, Homo sapiens
tacatcagagttaga

SEQ ID NO: 2013993 - DNA, 15 bp, Homo sapiens
acatcagagttagaa

SEQ ID NO: 2013994 - DNA, 15 bp, Homo sapiens
catcagagttagaaa

SEQ ID NO: 2013995 - DNA, 15 bp, Homo sapiens
atcagagttagaaat

SEQ ID NO: 2013996 - DNA, 15 bp, Homo sapiens
tcagagttagaaatg

SEQ ID NO: 2013997 - DNA, 15 bp, Homo sapiens
cagagttagaaatgt

SEQ ID NO: 2013998 - DNA, 15 bp, Homo sapiens
agagttagaaatgtt

SEQ ID NO: 2013999 - DNA, 15 bp, Homo sapiens
gagttagaaatgtta

SEQ ID NO: 2014000 - DNA, 15 bp, Homo sapiens
agttagaaatgttaa

SEQ ID NO: 2014001 - DNA, 15 bp, Homo sapiens
gttagaaatgttaag

SEQ ID NO: 2014002 - DNA, 15 bp, Homo sapiens
ttagaaatgttaaga

SEQ ID NO: 2014003 - DNA, 15 bp, Homo sapiens
tagaaatgttaagac

SEQ ID NO: 2014004 - DNA, 15 bp, Homo sapiens
agaaatgttaagact

SEQ ID NO: 2014005 - DNA, 15 bp, Homo sapiens
gaaatgttaagactg

SEQ ID NO: 2014006 - DNA, 15 bp, Homo sapiens
aaatgttaagactgg

SEQ ID NO: 2014007 - DNA, 15 bp, Homo sapiens
aatgttaagactggc

SEQ ID NO: 2014008 - DNA, 15 bp, Homo sapiens
atgttaagactggct

SEQ ID NO: 2014009 - DNA, 15 bp, Homo sapiens
tgttaagactggctt

SEQ ID NO: 2014010 - DNA, 15 bp, Homo sapiens
gttaagactggcttt

SEQ ID NO: 2014011 - DNA, 15 bp, Homo sapiens
ttaagactggctttc

SEQ ID NO: 2014012 - DNA, 15 bp, Homo sapiens
taagactggctttct

SEQ ID NO: 2014013 - DNA, 15 bp, Homo sapiens
aagactggctttctt

SEQ ID NO: 2014014 - DNA, 15 bp, Homo sapiens
agactggctttcttg

SEQ ID NO: 2014015 - DNA, 15 bp, Homo sapiens
gactggctttcttga

SEQ ID NO: 2014016 - DNA, 15 bp, Homo sapiens
actggctttcttgaa

SEQ ID NO: 2014017 - DNA, 15 bp, Homo sapiens
ctggctttcttgaat

SEQ ID NO: 2014018 - DNA, 15 bp, Homo sapiens
tggctttcttgaata

SEQ ID NO: 2014019 - DNA, 15 bp, Homo sapiens
ggctttcttgaatac

SEQ ID NO: 2014020 - DNA, 15 bp, Homo sapiens
gctttcttgaatact

SEQ ID NO: 2014021 - DNA, 15 bp, Homo sapiens
ctttcttgaatactt

SEQ ID NO: 2014022 - DNA, 15 bp, Homo sapiens
tttcttgaatactta

SEQ ID NO: 2014023 - DNA, 15 bp, Homo sapiens
ttcttgaatacttaa

SEQ ID NO: 2014024 - DNA, 15 bp, Homo sapiens
tcttgaatacttaaa

SEQ ID NO: 2014025 - DNA, 15 bp, Homo sapiens
cttgaatacttaaat

SEQ ID NO: 2014026 - DNA, 15 bp, Homo sapiens
ttgaatacttaaata

SEQ ID NO: 2014027 - DNA, 15 bp, Homo sapiens
tgaatacttaaatat

SEQ ID NO: 2014028 - DNA, 15 bp, Homo sapiens
gaatacttaaatata

SEQ ID NO: 2014029 - DNA, 15 bp, Homo sapiens
aatacttaaatatag

SEQ ID NO: 2014030 - DNA, 15 bp, Homo sapiens
atacttaaatatagc

SEQ ID NO: 2014031 - DNA, 15 bp, Homo sapiens
tacttaaatatagct

SEQ ID NO: 2014032 - DNA, 15 bp, Homo sapiens
acttaaatatagctc

SEQ ID NO: 2014033 - DNA, 15 bp, Homo sapiens
cttaaatatagctcg

SEQ ID NO: 2014034 - DNA, 15 bp, Homo sapiens
ttaaatatagctcga

SEQ ID NO: 2014035 - DNA, 15 bp, Homo sapiens
taaatatagctcgaa

SEQ ID NO: 2014036 - DNA, 15 bp, Homo sapiens
aaatatagctcgaat

SEQ ID NO: 2014037 - DNA, 15 bp, Homo sapiens
aatatagctcgaatc

SEQ ID NO: 2014038 - DNA, 15 bp, Homo sapiens
atatagctcgaatca

SEQ ID NO: 2014039 - DNA, 15 bp, Homo sapiens
tatagctcgaatcac

SEQ ID NO: 2014040 - DNA, 15 bp, Homo sapiens
atagctcgaatcact

SEQ ID NO: 2014041 - DNA, 15 bp, Homo sapiens
tagctcgaatcactg

SEQ ID NO: 2014042 - DNA, 15 bp, Homo sapiens
agctcgaatcactgg

SEQ ID NO: 2014043 - DNA, 15 bp, Homo sapiens
gctcgaatcactggt

SEQ ID NO: 2014044 - DNA, 15 bp, Homo sapiens
ctcgaatcactggtt

SEQ ID NO: 2014045 - DNA, 15 bp, Homo sapiens
tcgaatcactggtta

SEQ ID NO: 2014046 - DNA, 15 bp, Homo sapiens
cgaatcactggttag

SEQ ID NO: 2014047 - DNA, 15 bp, Homo sapiens
gaatcactggttaga

SEQ ID NO: 2014048 - DNA, 15 bp, Homo sapiens
aatcactggttagat

SEQ ID NO: 2014049 - DNA, 15 bp, Homo sapiens
atcactggttagata

SEQ ID NO: 2014050 - DNA, 15 bp, Homo sapiens
tcactggttagatat

SEQ ID NO: 2014051 - DNA, 15 bp, Homo sapiens
cactggttagatatg

SEQ ID NO: 2014052 - DNA, 15 bp, Homo sapiens
actggttagatatgg

SEQ ID NO: 2014053 - DNA, 15 bp, Homo sapiens
ctggttagatatgga

SEQ ID NO: 2014054 - DNA, 15 bp, Homo sapiens
tggttagatatggac

SEQ ID NO: 2014055 - DNA, 15 bp, Homo sapiens
ggttagatatggaca

SEQ ID NO: 2014056 - DNA, 15 bp, Homo sapiens
gttagatatggacat

SEQ ID NO: 2014057 - DNA, 15 bp, Homo sapiens
ttagatatggacata

SEQ ID NO: 2014058 - DNA, 15 bp, Homo sapiens
tagatatggacatat

SEQ ID NO: 2014059 - DNA, 15 bp, Homo sapiens
agatatggacatatt

SEQ ID NO: 2014060 - DNA, 15 bp, Homo sapiens
gatatggacatattt

SEQ ID NO: 2014061 - DNA, 15 bp, Homo sapiens
atatggacatatttt

SEQ ID NO: 2014062 - DNA, 15 bp, Homo sapiens
tatggacatattttc

SEQ ID NO: 2014063 - DNA, 15 bp, Homo sapiens
atggacatattttcc

SEQ ID NO: 2014064 - DNA, 15 bp, Homo sapiens
tggacatattttccc

SEQ ID NO: 2014065 - DNA, 15 bp, Homo sapiens
ggacatattttccca

SEQ ID NO: 2014066 - DNA, 15 bp, Homo sapiens
gacatattttcccaa

SEQ ID NO: 2014067 - DNA, 15 bp, Homo sapiens
acatattttcccaac

SEQ ID NO: 2014068 - DNA, 15 bp, Homo sapiens
catattttcccaact

SEQ ID NO: 2014069 - DNA, 15 bp, Homo sapiens
atattttcccaactg

SEQ ID NO: 2014070 - DNA, 15 bp, Homo sapiens
tattttcccaactgt

SEQ ID NO: 2014071 - DNA, 15 bp, Homo sapiens
attttcccaactgta

SEQ ID NO: 2014072 - DNA, 15 bp, Homo sapiens
ttttcccaactgtac

SEQ ID NO: 2014073 - DNA, 15 bp, Homo sapiens
tttcccaactgtaca

SEQ ID NO: 2014074 - DNA, 15 bp, Homo sapiens
ttcccaactgtacat

SEQ ID NO: 2014075 - DNA, 15 bp, Homo sapiens
tcccaactgtacatc

SEQ ID NO: 2014076 - DNA, 15 bp, Homo sapiens
cccaactgtacatca

SEQ ID NO: 2014077 - DNA, 15 bp, Homo sapiens
ccaactgtacatcag

SEQ ID NO: 2014078 - DNA, 15 bp, Homo sapiens
caactgtacatcagg

SEQ ID NO: 2014079 - DNA, 15 bp, Homo sapiens
aactgtacatcaggg

SEQ ID NO: 2014080 - DNA, 15 bp, Homo sapiens
actgtacatcaggga

SEQ ID NO: 2014081 - DNA, 15 bp, Homo sapiens
ctgtacatcagggag

SEQ ID NO: 2014082 - DNA, 15 bp, Homo sapiens
tgtacatcagggagg

SEQ ID NO: 2014083 - DNA, 15 bp, Homo sapiens
gtacatcagggagga

SEQ ID NO: 2014084 - DNA, 15 bp, Homo sapiens
tacatcagggaggag

SEQ ID NO: 2014085 - DNA, 15 bp, Homo sapiens
acatcagggaggagt

SEQ ID NO: 2014086 - DNA, 15 bp, Homo sapiens
catcagggaggagtg

SEQ ID NO: 2014087 - DNA, 15 bp, Homo sapiens
atcagggaggagtgc

SEQ ID NO: 2014088 - DNA, 15 bp, Homo sapiens
tcagggaggagtgct

SEQ ID NO: 2014089 - DNA, 15 bp, Homo sapiens
cagggaggagtgctt

SEQ ID NO: 2014090 - DNA, 15 bp, Homo sapiens
agggaggagtgcttt

SEQ ID NO: 2014091 - DNA, 15 bp, Homo sapiens
gggaggagtgctttc

SEQ ID NO: 2014092 - DNA, 15 bp, Homo sapiens
ggaggagtgctttca

SEQ ID NO: 2014093 - DNA, 15 bp, Homo sapiens
gaggagtgctttcat

SEQ ID NO: 2014094 - DNA, 15 bp, Homo sapiens
aggagtgctttcatt

SEQ ID NO: 2014095 - DNA, 15 bp, Homo sapiens
ggagtgctttcatta

SEQ ID NO: 2014096 - DNA, 15 bp, Homo sapiens
gagtgctttcattag

SEQ ID NO: 2014097 - DNA, 15 bp, Homo sapiens
agtgctttcattagt

SEQ ID NO: 2014098 - DNA, 15 bp, Homo sapiens
gtgctttcattagtt

SEQ ID NO: 2014099 - DNA, 15 bp, Homo sapiens
tgctttcattagttt

SEQ ID NO: 2014100 - DNA, 15 bp, Homo sapiens
gctttcattagtttc

SEQ ID NO: 2014101 - DNA, 15 bp, Homo sapiens
ctttcattagtttca

SEQ ID NO: 2014102 - DNA, 15 bp, Homo sapiens
tttcattagtttcag

SEQ ID NO: 2014103 - DNA, 15 bp, Homo sapiens
ttcattagtttcaga

SEQ ID NO: 2014104 - DNA, 15 bp, Homo sapiens
tcattagtttcagaa

SEQ ID NO: 2014105 - DNA, 15 bp, Homo sapiens
cattagtttcagaaa

SEQ ID NO: 2014106 - DNA, 15 bp, Homo sapiens
attagtttcagaaaa

SEQ ID NO: 2014107 - DNA, 15 bp, Homo sapiens
ttagtttcagaaaat

SEQ ID NO: 2014108 - DNA, 15 bp, Homo sapiens
tagtttcagaaaatg

SEQ ID NO: 2014109 - DNA, 15 bp, Homo sapiens
agtttcagaaaatgc

SEQ ID NO: 2014110 - DNA, 15 bp, Homo sapiens
gtttcagaaaatgca

SEQ ID NO: 2014111 - DNA, 15 bp, Homo sapiens
tttcagaaaatgcag

SEQ ID NO: 2014112 - DNA, 15 bp, Homo sapiens
ttcagaaaatgcaga

SEQ ID NO: 2014113 - DNA, 15 bp, Homo sapiens
tcagaaaatgcagac

SEQ ID NO: 2014114 - DNA, 15 bp, Homo sapiens
cagaaaatgcagacc

SEQ ID NO: 2014115 - DNA, 15 bp, Homo sapiens
agaaaatgcagaccc

SEQ ID NO: 2014116 - DNA, 15 bp, Homo sapiens
gaaaatgcagaccct

SEQ ID NO: 2014117 - DNA, 15 bp, Homo sapiens
aaaatgcagaccctc

SEQ ID NO: 2014118 - DNA, 15 bp, Homo sapiens
aaatgcagaccctca

SEQ ID NO: 2014119 - DNA, 15 bp, Homo sapiens
aatgcagaccctcag

SEQ ID NO: 2014120 - DNA, 15 bp, Homo sapiens
atgcagaccctcaga

SEQ ID NO: 2014121 - DNA, 15 bp, Homo sapiens
tgcagaccctcagac

SEQ ID NO: 2014122 - DNA, 15 bp, Homo sapiens
gcagaccctcagaca

SEQ ID NO: 2014123 - DNA, 15 bp, Homo sapiens
cagaccctcagacag

SEQ ID NO: 2014124 - DNA, 15 bp, Homo sapiens
agaccctcagacagc

SEQ ID NO: 2014125 - DNA, 15 bp, Homo sapiens
gaccctcagacagcc

SEQ ID NO: 2014126 - DNA, 15 bp, Homo sapiens
accctcagacagcca

SEQ ID NO: 2014127 - DNA, 15 bp, Homo sapiens
ccctcagacagccag

SEQ ID NO: 2014128 - DNA, 15 bp, Homo sapiens
cctcagacagccagc

SEQ ID NO: 2014129 - DNA, 15 bp, Homo sapiens
ctcagacagccagca

SEQ ID NO: 2014130 - DNA, 15 bp, Homo sapiens
tcagacagccagcat

SEQ ID NO: 2014131 - DNA, 15 bp, Homo sapiens
cagacagccagcatg

SEQ ID NO: 2014132 - DNA, 15 bp, Homo sapiens
agacagccagcatga

SEQ ID NO: 2014133 - DNA, 15 bp, Homo sapiens
gacagccagcatgac

SEQ ID NO: 2014134 - DNA, 15 bp, Homo sapiens
acagccagcatgacc

SEQ ID NO: 2014135 - DNA, 15 bp, Homo sapiens
cagccagcatgacca

SEQ ID NO: 2014136 - DNA, 15 bp, Homo sapiens
agccagcatgaccac

SEQ ID NO: 2014137 - DNA, 15 bp, Homo sapiens
gccagcatgaccaca

SEQ ID NO: 2014138 - DNA, 15 bp, Homo sapiens
ccagcatgaccacaa

SEQ ID NO: 2014139 - DNA, 15 bp, Homo sapiens
cagcatgaccacaac

SEQ ID NO: 2014140 - DNA, 15 bp, Homo sapiens
agcatgaccacaaca

SEQ ID NO: 2014141 - DNA, 15 bp, Homo sapiens
gcatgaccacaacat

SEQ ID NO: 2014142 - DNA, 15 bp, Homo sapiens
catgaccacaacatt

SEQ ID NO: 2014143 - DNA, 15 bp, Homo sapiens
atgaccacaacattg

SEQ ID NO: 2014144 - DNA, 15 bp, Homo sapiens
tgaccacaacattga

SEQ ID NO: 2014145 - DNA, 15 bp, Homo sapiens
gaccacaacattgag

SEQ ID NO: 2014146 - DNA, 15 bp, Homo sapiens
accacaacattgagc

SEQ ID NO: 2014147 - DNA, 15 bp, Homo sapiens
ccacaacattgagca

SEQ ID NO: 2014148 - DNA, 15 bp, Homo sapiens
cacaacattgagcaa

SEQ ID NO: 2014149 - DNA, 15 bp, Homo sapiens
acaacattgagcaat

SEQ ID NO: 2014150 - DNA, 15 bp, Homo sapiens
caacattgagcaata

SEQ ID NO: 2014151 - DNA, 15 bp, Homo sapiens
aacattgagcaataa

SEQ ID NO: 2014152 - DNA, 15 bp, Homo sapiens
acattgagcaataag

SEQ ID NO: 2014153 - DNA, 15 bp, Homo sapiens
cattgagcaataaga

SEQ ID NO: 2014154 - DNA, 15 bp, Homo sapiens
attgagcaataagag

SEQ ID NO: 2014155 - DNA, 15 bp, Homo sapiens
ttgagcaataagaga

SEQ ID NO: 2014156 - DNA, 15 bp, Homo sapiens
tgagcaataagagaa

SEQ ID NO: 2014157 - DNA, 15 bp, Homo sapiens
gagcaataagagaaa

SEQ ID NO: 2014158 - DNA, 15 bp, Homo sapiens
agcaataagagaaat

SEQ ID NO: 2014159 - DNA, 15 bp, Homo sapiens
gcaataagagaaatg

SEQ ID NO: 2014160 - DNA, 15 bp, Homo sapiens
caataagagaaatga

SEQ ID NO: 2014161 - DNA, 15 bp, Homo sapiens
aataagagaaatgaa

SEQ ID NO: 2014162 - DNA, 15 bp, Homo sapiens
ataagagaaatgaag

SEQ ID NO: 2014163 - DNA, 15 bp, Homo sapiens
taagagaaatgaagc

SEQ ID NO: 2014164 - DNA, 15 bp, Homo sapiens
aagagaaatgaagca

SEQ ID NO: 2014165 - DNA, 15 bp, Homo sapiens
agagaaatgaagcat

SEQ ID NO: 2014166 - DNA, 15 bp, Homo sapiens
gagaaatgaagcatt

SEQ ID NO: 2014167 - DNA, 15 bp, Homo sapiens
agaaatgaagcattt

SEQ ID NO: 2014168 - DNA, 15 bp, Homo sapiens
gaaatgaagcattta

SEQ ID NO: 2014169 - DNA, 15 bp, Homo sapiens
aaatgaagcatttac

SEQ ID NO: 2014170 - DNA, 15 bp, Homo sapiens
aatgaagcatttact

SEQ ID NO: 2014171 - DNA, 15 bp, Homo sapiens
atgaagcatttactt

SEQ ID NO: 2014172 - DNA, 15 bp, Homo sapiens
tgaagcatttacttt

SEQ ID NO: 2014173 - DNA, 15 bp, Homo sapiens
gaagcatttactttc

SEQ ID NO: 2014174 - DNA, 15 bp, Homo sapiens
aagcatttactttcc

SEQ ID NO: 2014175 - DNA, 15 bp, Homo sapiens
agcatttactttcca

SEQ ID NO: 2014176 - DNA, 15 bp, Homo sapiens
gcatttactttccaa

SEQ ID NO: 2014177 - DNA, 15 bp, Homo sapiens
catttactttccaag

SEQ ID NO: 2014178 - DNA, 15 bp, Homo sapiens
atttactttccaagc

SEQ ID NO: 2014179 - DNA, 15 bp, Homo sapiens
tttactttccaagca

SEQ ID NO: 2014180 - DNA, 15 bp, Homo sapiens
ttactttccaagcat

SEQ ID NO: 2014181 - DNA, 15 bp, Homo sapiens
tactttccaagcatt

SEQ ID NO: 2014182 - DNA, 15 bp, Homo sapiens
actttccaagcattt

SEQ ID NO: 2014183 - DNA, 15 bp, Homo sapiens
ctttccaagcatttg

SEQ ID NO: 2014184 - DNA, 15 bp, Homo sapiens
tttccaagcatttgc

SEQ ID NO: 2014185 - DNA, 15 bp, Homo sapiens
ttccaagcatttgcc

SEQ ID NO: 2014186 - DNA, 15 bp, Homo sapiens
tccaagcatttgcca

SEQ ID NO: 2014187 - DNA, 15 bp, Homo sapiens
ccaagcatttgccac

SEQ ID NO: 2014188 - DNA, 15 bp, Homo sapiens
caagcatttgccaca

SEQ ID NO: 2014189 - DNA, 15 bp, Homo sapiens
aagcatttgccacag

SEQ ID NO: 2014190 - DNA, 15 bp, Homo sapiens
agcatttgccacaga

SEQ ID NO: 2014191 - DNA, 15 bp, Homo sapiens
gcatttgccacagaa

SEQ ID NO: 2014192 - DNA, 15 bp, Homo sapiens
catttgccacagaag

SEQ ID NO: 2014193 - DNA, 15 bp, Homo sapiens
atttgccacagaagg

SEQ ID NO: 2014194 - DNA, 15 bp, Homo sapiens
tttgccacagaaggt

SEQ ID NO: 2014195 - DNA, 15 bp, Homo sapiens
ttgccacagaaggta

SEQ ID NO: 2014196 - DNA, 15 bp, Homo sapiens
tgccacagaaggtaa

SEQ ID NO: 2014197 - DNA, 15 bp, Homo sapiens
gccacagaaggtaat

SEQ ID NO: 2014198 - DNA, 15 bp, Homo sapiens
ccacagaaggtaatg

SEQ ID NO: 2014199 - DNA, 15 bp, Homo sapiens
cacagaaggtaatgg

SEQ ID NO: 2014200 - DNA, 15 bp, Homo sapiens
acagaaggtaatgga

SEQ ID NO: 2014201 - DNA, 15 bp, Homo sapiens
cagaaggtaatggag

SEQ ID NO: 2014202 - DNA, 15 bp, Homo sapiens
agaaggtaatggagt

SEQ ID NO: 2014203 - DNA, 15 bp, Homo sapiens
gaaggtaatggagtc

SEQ ID NO: 2014204 - DNA, 15 bp, Homo sapiens
aaggtaatggagtct

SEQ ID NO: 2014205 - DNA, 15 bp, Homo sapiens
aggtaatggagtctt

SEQ ID NO: 2014206 - DNA, 15 bp, Homo sapiens
ggtaatggagtcttt

SEQ ID NO: 2014207 - DNA, 15 bp, Homo sapiens
gtaatggagtcttta

SEQ ID NO: 2014208 - DNA, 15 bp, Homo sapiens
taatggagtctttac

SEQ ID NO: 2014209 - DNA, 15 bp, Homo sapiens
aatggagtctttaca

SEQ ID NO: 2014210 - DNA, 15 bp, Homo sapiens
atggagtctttacat

SEQ ID NO: 2014211 - DNA, 15 bp, Homo sapiens
tggagtctttacatt

SEQ ID NO: 2014212 - DNA, 15 bp, Homo sapiens
ggagtctttacattt

SEQ ID NO: 2014213 - DNA, 15 bp, Homo sapiens
gagtctttacatttg

SEQ ID NO: 2014214 - DNA, 15 bp, Homo sapiens
agtctttacatttgt

SEQ ID NO: 2014215 - DNA, 15 bp, Homo sapiens
gtctttacatttgtg

SEQ ID NO: 2014216 - DNA, 15 bp, Homo sapiens
tctttacatttgtgg

SEQ ID NO: 2014217 - DNA, 15 bp, Homo sapiens
ctttacatttgtggt

SEQ ID NO: 2014218 - DNA, 15 bp, Homo sapiens
tttacatttgtggtt

SEQ ID NO: 2014219 - DNA, 15 bp, Homo sapiens
ttacatttgtggttg

SEQ ID NO: 2014220 - DNA, 15 bp, Homo sapiens
tacatttgtggttgt

SEQ ID NO: 2014221 - DNA, 15 bp, Homo sapiens
acatttgtggttgtc

SEQ ID NO: 2014222 - DNA, 15 bp, Homo sapiens
catttgtggttgtct

SEQ ID NO: 2014223 - DNA, 15 bp, Homo sapiens
atttgtggttgtctc

SEQ ID NO: 2014224 - DNA, 15 bp, Homo sapiens
tttgtggttgtctct

SEQ ID NO: 2014225 - DNA, 15 bp, Homo sapiens
ttgtggttgtctctt

SEQ ID NO: 2014226 - DNA, 15 bp, Homo sapiens
tgtggttgtctcttc

SEQ ID NO: 2014227 - DNA, 15 bp, Homo sapiens
gtggttgtctcttcc

SEQ ID NO: 2014228 - DNA, 15 bp, Homo sapiens
tggttgtctcttccc

SEQ ID NO: 2014229 - DNA, 15 bp, Homo sapiens
ggttgtctcttccct

SEQ ID NO: 2014230 - DNA, 15 bp, Homo sapiens
gttgtctcttccctc

SEQ ID NO: 2014231 - DNA, 15 bp, Homo sapiens
ttgtctcttccctcc

SEQ ID NO: 2014232 - DNA, 15 bp, Homo sapiens
tgtctcttccctcca

SEQ ID NO: 2014233 - DNA, 15 bp, Homo sapiens
gtctcttccctccat

SEQ ID NO: 2014234 - DNA, 15 bp, Homo sapiens
tctcttccctccata

SEQ ID NO: 2014235 - DNA, 15 bp, Homo sapiens
ctcttccctccataa

SEQ ID NO: 2014236 - DNA, 15 bp, Homo sapiens
tcttccctccataag

SEQ ID NO: 2014237 - DNA, 15 bp, Homo sapiens
cttccctccataagt

SEQ ID NO: 2014238 - DNA, 15 bp, Homo sapiens
ttccctccataagtt

SEQ ID NO: 2014239 - DNA, 15 bp, Homo sapiens
tccctccataagtta

SEQ ID NO: 2014240 - DNA, 15 bp, Homo sapiens
ccctccataagttaa

SEQ ID NO: 2014241 - DNA, 15 bp, Homo sapiens
cctccataagttaag

SEQ ID NO: 2014242 - DNA, 15 bp, Homo sapiens
ctccataagttaagg

SEQ ID NO: 2014243 - DNA, 15 bp, Homo sapiens
tccataagttaaggg

SEQ ID NO: 2014244 - DNA, 15 bp, Homo sapiens
ccataagttaagggt

SEQ ID NO: 2014245 - DNA, 15 bp, Homo sapiens
cataagttaagggtt

SEQ ID NO: 2014246 - DNA, 15 bp, Homo sapiens
ataagttaagggttg

SEQ ID NO: 2014247 - DNA, 15 bp, Homo sapiens
taagttaagggttgt

SEQ ID NO: 2014248 - DNA, 15 bp, Homo sapiens
aagttaagggttgtg

SEQ ID NO: 2014249 - DNA, 15 bp, Homo sapiens
agttaagggttgtgc

SEQ ID NO: 2014250 - DNA, 15 bp, Homo sapiens
gttaagggttgtgct

SEQ ID NO: 2014251 - DNA, 15 bp, Homo sapiens
ttaagggttgtgctt

SEQ ID NO: 2014252 - DNA, 15 bp, Homo sapiens
taagggttgtgcttt

SEQ ID NO: 2014253 - DNA, 15 bp, Homo sapiens
aagggttgtgctttg

SEQ ID NO: 2014254 - DNA, 15 bp, Homo sapiens
agggttgtgctttgt

SEQ ID NO: 2014255 - DNA, 15 bp, Homo sapiens
gggttgtgctttgtt

SEQ ID NO: 2014256 - DNA, 15 bp, Homo sapiens
ggttgtgctttgttg

SEQ ID NO: 2014257 - DNA, 15 bp, Homo sapiens
gttgtgctttgttga

SEQ ID NO: 2014258 - DNA, 15 bp, Homo sapiens
ttgtgctttgttgag

SEQ ID NO: 2014259 - DNA, 15 bp, Homo sapiens
tgtgctttgttgagg

SEQ ID NO: 2014260 - DNA, 15 bp, Homo sapiens
gtgctttgttgaggc

SEQ ID NO: 2014261 - DNA, 15 bp, Homo sapiens
tgctttgttgaggca

SEQ ID NO: 2014262 - DNA, 15 bp, Homo sapiens
gctttgttgaggcat

SEQ ID NO: 2014263 - DNA, 15 bp, Homo sapiens
ctttgttgaggcatt

SEQ ID NO: 2014264 - DNA, 15 bp, Homo sapiens
tttgttgaggcattt

SEQ ID NO: 2014265 - DNA, 15 bp, Homo sapiens
ttgttgaggcatttc

SEQ ID NO: 2014266 - DNA, 15 bp, Homo sapiens
tgttgaggcatttca

SEQ ID NO: 2014267 - DNA, 15 bp, Homo sapiens
gttgaggcatttcag

SEQ ID NO: 2014268 - DNA, 15 bp, Homo sapiens
ttgaggcatttcaga

SEQ ID NO: 2014269 - DNA, 15 bp, Homo sapiens
tgaggcatttcagag

SEQ ID NO: 2014270 - DNA, 15 bp, Homo sapiens
gaggcatttcagaga

SEQ ID NO: 2014271 - DNA, 15 bp, Homo sapiens
aggcatttcagagaa

SEQ ID NO: 2014272 - DNA, 15 bp, Homo sapiens
ggcatttcagagaaa

SEQ ID NO: 2014273 - DNA, 15 bp, Homo sapiens
gcatttcagagaaat

SEQ ID NO: 2014274 - DNA, 15 bp, Homo sapiens
catttcagagaaatt

SEQ ID NO: 2014275 - DNA, 15 bp, Homo sapiens
atttcagagaaatta

SEQ ID NO: 2014276 - DNA, 15 bp, Homo sapiens
tttcagagaaattat

SEQ ID NO: 2014277 - DNA, 15 bp, Homo sapiens
ttcagagaaattatt

SEQ ID NO: 2014278 - DNA, 15 bp, Homo sapiens
tcagagaaattattt

SEQ ID NO: 2014279 - DNA, 15 bp, Homo sapiens
cagagaaattatttg

SEQ ID NO: 2014280 - DNA, 15 bp, Homo sapiens
agagaaattatttgg

SEQ ID NO: 2014281 - DNA, 15 bp, Homo sapiens
gagaaattatttggc

SEQ ID NO: 2014282 - DNA, 15 bp, Homo sapiens
agaaattatttggca

SEQ ID NO: 2014283 - DNA, 15 bp, Homo sapiens
gaaattatttggcat

SEQ ID NO: 2014284 - DNA, 15 bp, Homo sapiens
aaattatttggcatg

SEQ ID NO: 2014285 - DNA, 15 bp, Homo sapiens
aattatttggcatgc

SEQ ID NO: 2014286 - DNA, 15 bp, Homo sapiens
attatttggcatgcc

SEQ ID NO: 2014287 - DNA, 15 bp, Homo sapiens
ttatttggcatgcca

SEQ ID NO: 2014288 - DNA, 15 bp, Homo sapiens
tatttggcatgccac

SEQ ID NO: 2014289 - DNA, 15 bp, Homo sapiens
atttggcatgccact

SEQ ID NO: 2014290 - DNA, 15 bp, Homo sapiens
tttggcatgccacta

SEQ ID NO: 2014291 - DNA, 15 bp, Homo sapiens
ttggcatgccactag

SEQ ID NO: 2014292 - DNA, 15 bp, Homo sapiens
tggcatgccactagt

SEQ ID NO: 2014293 - DNA, 15 bp, Homo sapiens
ggcatgccactagtg

SEQ ID NO: 2014294 - DNA, 15 bp, Homo sapiens
gcatgccactagtga

SEQ ID NO: 2014295 - DNA, 15 bp, Homo sapiens
catgccactagtgat

SEQ ID NO: 2014296 - DNA, 15 bp, Homo sapiens
atgccactagtgata

SEQ ID NO: 2014297 - DNA, 15 bp, Homo sapiens
tgccactagtgatac

SEQ ID NO: 2014298 - DNA, 15 bp, Homo sapiens
gccactagtgatact

SEQ ID NO: 2014299 - DNA, 15 bp, Homo sapiens
ccactagtgatactt

SEQ ID NO: 2014300 - DNA, 15 bp, Homo sapiens
cactagtgatactta

SEQ ID NO: 2014301 - DNA, 15 bp, Homo sapiens
actagtgatacttag

SEQ ID NO: 2014302 - DNA, 15 bp, Homo sapiens
ctagtgatacttagg

SEQ ID NO: 2014303 - DNA, 15 bp, Homo sapiens
tagtgatacttaggg

SEQ ID NO: 2014304 - DNA, 15 bp, Homo sapiens
agtgatacttagggt

SEQ ID NO: 2014305 - DNA, 15 bp, Homo sapiens
gtgatacttagggtc

SEQ ID NO: 2014306 - DNA, 15 bp, Homo sapiens
tgatacttagggtca

SEQ ID NO: 2014307 - DNA, 15 bp, Homo sapiens
gatacttagggtcat

SEQ ID NO: 2014308 - DNA, 15 bp, Homo sapiens
atacttagggtcatg

SEQ ID NO: 2014309 - DNA, 15 bp, Homo sapiens
tacttagggtcatgg

SEQ ID NO: 2014310 - DNA, 15 bp, Homo sapiens
acttagggtcatggg

SEQ ID NO: 2014311 - DNA, 15 bp, Homo sapiens
cttagggtcatgggt

SEQ ID NO: 2014312 - DNA, 15 bp, Homo sapiens
ttagggtcatgggtg

SEQ ID NO: 2014313 - DNA, 15 bp, Homo sapiens
tagggtcatgggtgt

SEQ ID NO: 2014314 - DNA, 15 bp, Homo sapiens
agggtcatgggtgtt

SEQ ID NO: 2014315 - DNA, 15 bp, Homo sapiens
gggtcatgggtgttg

SEQ ID NO: 2014316 - DNA, 15 bp, Homo sapiens
ggtcatgggtgttgg

SEQ ID NO: 2014317 - DNA, 15 bp, Homo sapiens
gtcatgggtgttggg

SEQ ID NO: 2014318 - DNA, 15 bp, Homo sapiens
tcatgggtgttgggg

SEQ ID NO: 2014319 - DNA, 15 bp, Homo sapiens
catgggtgttgggga

SEQ ID NO: 2014320 - DNA, 15 bp, Homo sapiens
atgggtgttggggat

SEQ ID NO: 2014321 - DNA, 15 bp, Homo sapiens
tgggtgttggggatg

SEQ ID NO: 2014322 - DNA, 15 bp, Homo sapiens
gggtgttggggatga

SEQ ID NO: 2014323 - DNA, 15 bp, Homo sapiens
ggtgttggggatgat

SEQ ID NO: 2014324 - DNA, 15 bp, Homo sapiens
gtgttggggatgatt

SEQ ID NO: 2014325 - DNA, 15 bp, Homo sapiens
tgttggggatgattt

SEQ ID NO: 2014326 - DNA, 15 bp, Homo sapiens
gttggggatgatttt

SEQ ID NO: 2014327 - DNA, 15 bp, Homo sapiens
ttggggatgattttg

SEQ ID NO: 2014328 - DNA, 15 bp, Homo sapiens
tggggatgattttgt

SEQ ID NO: 2014329 - DNA, 15 bp, Homo sapiens
ggggatgattttgtt

SEQ ID NO: 2014330 - DNA, 15 bp, Homo sapiens
gggatgattttgttg

SEQ ID NO: 2014331 - DNA, 15 bp, Homo sapiens
ggatgattttgttga

SEQ ID NO: 2014332 - DNA, 15 bp, Homo sapiens
gatgattttgttgag

SEQ ID NO: 2014333 - DNA, 15 bp, Homo sapiens
atgattttgttgagc

SEQ ID NO: 2014334 - DNA, 15 bp, Homo sapiens
tgattttgttgagct

SEQ ID NO: 2014335 - DNA, 15 bp, Homo sapiens
gattttgttgagcta

SEQ ID NO: 2014336 - DNA, 15 bp, Homo sapiens
attttgttgagctag

SEQ ID NO: 2014337 - DNA, 15 bp, Homo sapiens
ttttgttgagctagt

SEQ ID NO: 2014338 - DNA, 15 bp, Homo sapiens
tttgttgagctagtg

SEQ ID NO: 2014339 - DNA, 15 bp, Homo sapiens
ttgttgagctagtga

SEQ ID NO: 2014340 - DNA, 15 bp, Homo sapiens
tgttgagctagtgag

SEQ ID NO: 2014341 - DNA, 15 bp, Homo sapiens
gttgagctagtgagg

SEQ ID NO: 2014342 - DNA, 15 bp, Homo sapiens
ttgagctagtgaggc

SEQ ID NO: 2014343 - DNA, 15 bp, Homo sapiens
tgagctagtgaggct

SEQ ID NO: 2014344 - DNA, 15 bp, Homo sapiens
gagctagtgaggctt

SEQ ID NO: 2014345 - DNA, 15 bp, Homo sapiens
agctagtgaggcttg

SEQ ID NO: 2014346 - DNA, 15 bp, Homo sapiens
gctagtgaggcttgt

SEQ ID NO: 2014347 - DNA, 15 bp, Homo sapiens
ctagtgaggcttgtg

SEQ ID NO: 2014348 - DNA, 15 bp, Homo sapiens
tagtgaggcttgtgt

SEQ ID NO: 2014349 - DNA, 15 bp, Homo sapiens
agtgaggcttgtgtt

SEQ ID NO: 2014350 - DNA, 15 bp, Homo sapiens
gtgaggcttgtgttt

SEQ ID NO: 2014351 - DNA, 15 bp, Homo sapiens
tgaggcttgtgtttg

SEQ ID NO: 2014352 - DNA, 15 bp, Homo sapiens
gaggcttgtgtttgt

SEQ ID NO: 2014353 - DNA, 15 bp, Homo sapiens
aggcttgtgtttgtg

SEQ ID NO: 2014354 - DNA, 15 bp, Homo sapiens
ggcttgtgtttgtga

SEQ ID NO: 2014355 - DNA, 15 bp, Homo sapiens
gcttgtgtttgtgac

SEQ ID NO: 2014356 - DNA, 15 bp, Homo sapiens
cttgtgtttgtgacc

SEQ ID NO: 2014357 - DNA, 15 bp, Homo sapiens
ttgtgtttgtgacca

SEQ ID NO: 2014358 - DNA, 15 bp, Homo sapiens
tgtgtttgtgaccat

SEQ ID NO: 2014359 - DNA, 15 bp, Homo sapiens
gtgtttgtgaccatt

SEQ ID NO: 2014360 - DNA, 15 bp, Homo sapiens
tgtttgtgaccattc

SEQ ID NO: 2014361 - DNA, 15 bp, Homo sapiens
gtttgtgaccattcc

SEQ ID NO: 2014362 - DNA, 15 bp, Homo sapiens
tttgtgaccattcca

SEQ ID NO: 2014363 - DNA, 15 bp, Homo sapiens
ttgtgaccattccat

SEQ ID NO: 2014364 - DNA, 15 bp, Homo sapiens
tgtgaccattccatc

SEQ ID NO: 2014365 - DNA, 15 bp, Homo sapiens
gtgaccattccatct

SEQ ID NO: 2014366 - DNA, 15 bp, Homo sapiens
tgaccattccatctt

SEQ ID NO: 2014367 - DNA, 15 bp, Homo sapiens
gaccattccatcttg

SEQ ID NO: 2014368 - DNA, 15 bp, Homo sapiens
accattccatcttgg

SEQ ID NO: 2014369 - DNA, 15 bp, Homo sapiens
ccattccatcttgga

SEQ ID NO: 2014370 - DNA, 15 bp, Homo sapiens
cattccatcttggag

SEQ ID NO: 2014371 - DNA, 15 bp, Homo sapiens
attccatcttggaga

SEQ ID NO: 2014372 - DNA, 15 bp, Homo sapiens
ttccatcttggagat

SEQ ID NO: 2014373 - DNA, 15 bp, Homo sapiens
tccatcttggagatg

SEQ ID NO: 2014374 - DNA, 15 bp, Homo sapiens
ccatcttggagatga

SEQ ID NO: 2014375 - DNA, 15 bp, Homo sapiens
catcttggagatgaa

SEQ ID NO: 2014376 - DNA, 15 bp, Homo sapiens
atcttggagatgaat

SEQ ID NO: 2014377 - DNA, 15 bp, Homo sapiens
tcttggagatgaata

SEQ ID NO: 2014378 - DNA, 15 bp, Homo sapiens
cttggagatgaatag

SEQ ID NO: 2014379 - DNA, 15 bp, Homo sapiens
ttggagatgaatagt

SEQ ID NO: 2014380 - DNA, 15 bp, Homo sapiens
tggagatgaatagtt

SEQ ID NO: 2014381 - DNA, 15 bp, Homo sapiens
ggagatgaatagtta

SEQ ID NO: 2014382 - DNA, 15 bp, Homo sapiens
gagatgaatagttag

SEQ ID NO: 2014383 - DNA, 15 bp, Homo sapiens
agatgaatagttaga

SEQ ID NO: 2014384 - DNA, 15 bp, Homo sapiens
gatgaatagttagag

SEQ ID NO: 2014385 - DNA, 15 bp, Homo sapiens
atgaatagttagagt

SEQ ID NO: 2014386 - DNA, 15 bp, Homo sapiens
tgaatagttagagtt

SEQ ID NO: 2014387 - DNA, 15 bp, Homo sapiens
gaatagttagagttg

SEQ ID NO: 2014388 - DNA, 15 bp, Homo sapiens
aatagttagagttgc

SEQ ID NO: 2014389 - DNA, 15 bp, Homo sapiens
atagttagagttgca

SEQ ID NO: 2014390 - DNA, 15 bp, Homo sapiens
tagttagagttgcag

SEQ ID NO: 2014391 - DNA, 15 bp, Homo sapiens
agttagagttgcagc

SEQ ID NO: 2014392 - DNA, 15 bp, Homo sapiens
gttagagttgcagct

SEQ ID NO: 2014393 - DNA, 15 bp, Homo sapiens
ttagagttgcagctg

SEQ ID NO: 2014394 - DNA, 15 bp, Homo sapiens
tagagttgcagctgc

SEQ ID NO: 2014395 - DNA, 15 bp, Homo sapiens
agagttgcagctgct

SEQ ID NO: 2014396 - DNA, 15 bp, Homo sapiens
gagttgcagctgctg

SEQ ID NO: 2014397 - DNA, 15 bp, Homo sapiens
agttgcagctgctgc

SEQ ID NO: 2014398 - DNA, 15 bp, Homo sapiens
gttgcagctgctgct

SEQ ID NO: 2014399 - DNA, 15 bp, Homo sapiens
ttgcagctgctgctt

SEQ ID NO: 2014400 - DNA, 15 bp, Homo sapiens
tgcagctgctgcttc

SEQ ID NO: 2014401 - DNA, 15 bp, Homo sapiens
gcagctgctgcttca

SEQ ID NO: 2014402 - DNA, 15 bp, Homo sapiens
cagctgctgcttcat

SEQ ID NO: 2014403 - DNA, 15 bp, Homo sapiens
agctgctgcttcatg

SEQ ID NO: 2014404 - DNA, 15 bp, Homo sapiens
gctgctgcttcatgt

SEQ ID NO: 2014405 - DNA, 15 bp, Homo sapiens
ctgctgcttcatgtg

SEQ ID NO: 2014406 - DNA, 15 bp, Homo sapiens
tgctgcttcatgtga

SEQ ID NO: 2014407 - DNA, 15 bp, Homo sapiens
gctgcttcatgtgaa

SEQ ID NO: 2014408 - DNA, 15 bp, Homo sapiens
ctgcttcatgtgaat

SEQ ID NO: 2014409 - DNA, 15 bp, Homo sapiens
tgcttcatgtgaatt

SEQ ID NO: 2014410 - DNA, 15 bp, Homo sapiens
gcttcatgtgaattg

SEQ ID NO: 2014411 - DNA, 15 bp, Homo sapiens
cttcatgtgaattga

SEQ ID NO: 2014412 - DNA, 15 bp, Homo sapiens
ttcatgtgaattgat

SEQ ID NO: 2014413 - DNA, 15 bp, Homo sapiens
tcatgtgaattgata

SEQ ID NO: 2014414 - DNA, 15 bp, Homo sapiens
catgtgaattgatag

SEQ ID NO: 2014415 - DNA, 15 bp, Homo sapiens
atgtgaattgatagt

SEQ ID NO: 2014416 - DNA, 15 bp, Homo sapiens
tgtgaattgatagtc

SEQ ID NO: 2014417 - DNA, 15 bp, Homo sapiens
gtgaattgatagtct

SEQ ID NO: 2014418 - DNA, 15 bp, Homo sapiens
tgaattgatagtctc

SEQ ID NO: 2014419 - DNA, 15 bp, Homo sapiens
gaattgatagtctct

SEQ ID NO: 2014420 - DNA, 15 bp, Homo sapiens
aattgatagtctctg

SEQ ID NO: 2014421 - DNA, 15 bp, Homo sapiens
attgatagtctctgt

SEQ ID NO: 2014422 - DNA, 15 bp, Homo sapiens
ttgatagtctctgtg

SEQ ID NO: 2014423 - DNA, 15 bp, Homo sapiens
tgatagtctctgtgg

SEQ ID NO: 2014424 - DNA, 15 bp, Homo sapiens
gatagtctctgtgga

SEQ ID NO: 2014425 - DNA, 15 bp, Homo sapiens
atagtctctgtggat

SEQ ID NO: 2014426 - DNA, 15 bp, Homo sapiens
tagtctctgtggatg

SEQ ID NO: 2014427 - DNA, 15 bp, Homo sapiens
agtctctgtggatgt

SEQ ID NO: 2014428 - DNA, 15 bp, Homo sapiens
gtctctgtggatgta

SEQ ID NO: 2014429 - DNA, 15 bp, Homo sapiens
tctctgtggatgtat

SEQ ID NO: 2014430 - DNA, 15 bp, Homo sapiens
ctctgtggatgtatc

SEQ ID NO: 2014431 - DNA, 15 bp, Homo sapiens
tctgtggatgtatct

SEQ ID NO: 2014432 - DNA, 15 bp, Homo sapiens
ctgtggatgtatctt

SEQ ID NO: 2014433 - DNA, 15 bp, Homo sapiens
tgtggatgtatcttc

SEQ ID NO: 2014434 - DNA, 15 bp, Homo sapiens
gtggatgtatcttct

SEQ ID NO: 2014435 - DNA, 15 bp, Homo sapiens
tggatgtatcttctg

SEQ ID NO: 2014436 - DNA, 15 bp, Homo sapiens
ggatgtatcttctgg

SEQ ID NO: 2014437 - DNA, 15 bp, Homo sapiens
gatgtatcttctgga

SEQ ID NO: 2014438 - DNA, 15 bp, Homo sapiens
atgtatcttctggat

SEQ ID NO: 2014439 - DNA, 15 bp, Homo sapiens
tgtatcttctggata

SEQ ID NO: 2014440 - DNA, 15 bp, Homo sapiens
gtatcttctggatag

SEQ ID NO: 2014441 - DNA, 15 bp, Homo sapiens
tatcttctggatagg

SEQ ID NO: 2014442 - DNA, 15 bp, Homo sapiens
atcttctggataggg

SEQ ID NO: 2014443 - DNA, 15 bp, Homo sapiens
tcttctggatagggc

SEQ ID NO: 2014444 - DNA, 15 bp, Homo sapiens
cttctggatagggca

SEQ ID NO: 2014445 - DNA, 15 bp, Homo sapiens
ttctggatagggcac

SEQ ID NO: 2014446 - DNA, 15 bp, Homo sapiens
tctggatagggcaca

SEQ ID NO: 2014447 - DNA, 15 bp, Homo sapiens
ctggatagggcacaa

SEQ ID NO: 2014448 - DNA, 15 bp, Homo sapiens
tggatagggcacaaa

SEQ ID NO: 2014449 - DNA, 15 bp, Homo sapiens
ggatagggcacaaaa

SEQ ID NO: 2014450 - DNA, 15 bp, Homo sapiens
gatagggcacaaaag

SEQ ID NO: 2014451 - DNA, 15 bp, Homo sapiens
atagggcacaaaagc

SEQ ID NO: 2014452 - DNA, 15 bp, Homo sapiens
tagggcacaaaagcc

SEQ ID NO: 2014453 - DNA, 15 bp, Homo sapiens
agggcacaaaagcct

SEQ ID NO: 2014454 - DNA, 15 bp, Homo sapiens
gggcacaaaagcctt

SEQ ID NO: 2014455 - DNA, 15 bp, Homo sapiens
ggcacaaaagcctta

SEQ ID NO: 2014456 - DNA, 15 bp, Homo sapiens
gcacaaaagccttat

SEQ ID NO: 2014457 - DNA, 15 bp, Homo sapiens
cacaaaagccttatc

SEQ ID NO: 2014458 - DNA, 15 bp, Homo sapiens
acaaaagccttatca

SEQ ID NO: 2014459 - DNA, 15 bp, Homo sapiens
caaaagccttatcag

SEQ ID NO: 2014460 - DNA, 15 bp, Homo sapiens
aaaagccttatcagt

SEQ ID NO: 2014461 - DNA, 15 bp, Homo sapiens
aaagccttatcagtg

SEQ ID NO: 2014462 - DNA, 15 bp, Homo sapiens
aagccttatcagtgc

SEQ ID NO: 2014463 - DNA, 15 bp, Homo sapiens
agccttatcagtgct

SEQ ID NO: 2014464 - DNA, 15 bp, Homo sapiens
gccttatcagtgcta

SEQ ID NO: 2014465 - DNA, 15 bp, Homo sapiens
ccttatcagtgctag

SEQ ID NO: 2014466 - DNA, 15 bp, Homo sapiens
cttatcagtgctagt

SEQ ID NO: 2014467 - DNA, 15 bp, Homo sapiens
ttatcagtgctagta

SEQ ID NO: 2014468 - DNA, 15 bp, Homo sapiens
tatcagtgctagtaa

SEQ ID NO: 2014469 - DNA, 15 bp, Homo sapiens
atcagtgctagtaaa

SEQ ID NO: 2014470 - DNA, 15 bp, Homo sapiens
tcagtgctagtaaag

SEQ ID NO: 2014471 - DNA, 15 bp, Homo sapiens
cagtgctagtaaagg

SEQ ID NO: 2014472 - DNA, 15 bp, Homo sapiens
agtgctagtaaaggt

SEQ ID NO: 2014473 - DNA, 15 bp, Homo sapiens
gtgctagtaaaggtg

SEQ ID NO: 2014474 - DNA, 15 bp, Homo sapiens
tgctagtaaaggtgg

SEQ ID NO: 2014475 - DNA, 15 bp, Homo sapiens
gctagtaaaggtggt

SEQ ID NO: 2014476 - DNA, 15 bp, Homo sapiens
ctagtaaaggtggtg

SEQ ID NO: 2014477 - DNA, 15 bp, Homo sapiens
tagtaaaggtggtgt

SEQ ID NO: 2014478 - DNA, 15 bp, Homo sapiens
agtaaaggtggtgtc

SEQ ID NO: 2014479 - DNA, 15 bp, Homo sapiens
gtaaaggtggtgtct

SEQ ID NO: 2014480 - DNA, 15 bp, Homo sapiens
taaaggtggtgtctt

SEQ ID NO: 2014481 - DNA, 15 bp, Homo sapiens
aaaggtggtgtcttt

SEQ ID NO: 2014482 - DNA, 15 bp, Homo sapiens
aaggtggtgtctttg

SEQ ID NO: 2014483 - DNA, 15 bp, Homo sapiens
aggtggtgtctttgc

SEQ ID NO: 2014484 - DNA, 15 bp, Homo sapiens
ggtggtgtctttgct

SEQ ID NO: 2014485 - DNA, 15 bp, Homo sapiens
gtggtgtctttgctt

SEQ ID NO: 2014486 - DNA, 15 bp, Homo sapiens
tggtgtctttgctta

SEQ ID NO: 2014487 - DNA, 15 bp, Homo sapiens
ggtgtctttgcttag

SEQ ID NO: 2014488 - DNA, 15 bp, Homo sapiens
gtgtctttgcttaga

SEQ ID NO: 2014489 - DNA, 15 bp, Homo sapiens
tgtctttgcttagag

SEQ ID NO: 2014490 - DNA, 15 bp, Homo sapiens
gtctttgcttagagt

SEQ ID NO: 2014491 - DNA, 15 bp, Homo sapiens
tctttgcttagagtg

SEQ ID NO: 2014492 - DNA, 15 bp, Homo sapiens
ctttgcttagagtgg

SEQ ID NO: 2014493 - DNA, 15 bp, Homo sapiens
tttgcttagagtggc

SEQ ID NO: 2014494 - DNA, 15 bp, Homo sapiens
ttgcttagagtggca

SEQ ID NO: 2014495 - DNA, 15 bp, Homo sapiens
tgcttagagtggcac

SEQ ID NO: 2014496 - DNA, 15 bp, Homo sapiens
gcttagagtggcacc

SEQ ID NO: 2014497 - DNA, 15 bp, Homo sapiens
cttagagtggcacca

SEQ ID NO: 2014498 - DNA, 15 bp, Homo sapiens
ttagagtggcaccaa

SEQ ID NO: 2014499 - DNA, 15 bp, Homo sapiens
tagagtggcaccaaa

SEQ ID NO: 2014500 - DNA, 15 bp, Homo sapiens
agagtggcaccaaac

SEQ ID NO: 2014501 - DNA, 15 bp, Homo sapiens
gagtggcaccaaacg

SEQ ID NO: 2014502 - DNA, 15 bp, Homo sapiens
agtggcaccaaacgt

SEQ ID NO: 2014503 - DNA, 15 bp, Homo sapiens
gtggcaccaaacgtt

SEQ ID NO: 2014504 - DNA, 15 bp, Homo sapiens
tggcaccaaacgttg

SEQ ID NO: 2014505 - DNA, 15 bp, Homo sapiens
ggcaccaaacgttgt

SEQ ID NO: 2014506 - DNA, 15 bp, Homo sapiens
gcaccaaacgttgtt

SEQ ID NO: 2014507 - DNA, 15 bp, Homo sapiens
caccaaacgttgttt

SEQ ID NO: 2014508 - DNA, 15 bp, Homo sapiens
accaaacgttgtttc

SEQ ID NO: 2014509 - DNA, 15 bp, Homo sapiens
ccaaacgttgtttcc

SEQ ID NO: 2014510 - DNA, 15 bp, Homo sapiens
caaacgttgtttcct

SEQ ID NO: 2014511 - DNA, 15 bp, Homo sapiens
aaacgttgtttcctt

SEQ ID NO: 2014512 - DNA, 15 bp, Homo sapiens
aacgttgtttccttt

SEQ ID NO: 2014513 - DNA, 15 bp, Homo sapiens
acgttgtttcctttg

SEQ ID NO: 2014514 - DNA, 15 bp, Homo sapiens
cgttgtttcctttgt

SEQ ID NO: 2014515 - DNA, 15 bp, Homo sapiens
gttgtttcctttgtt

SEQ ID NO: 2014516 - DNA, 15 bp, Homo sapiens
ttgtttcctttgttc

SEQ ID NO: 2014517 - DNA, 15 bp, Homo sapiens
tgtttcctttgttcg

SEQ ID NO: 2014518 - DNA, 15 bp, Homo sapiens
gtttcctttgttcga

SEQ ID NO: 2014519 - DNA, 15 bp, Homo sapiens
tttcctttgttcgat

SEQ ID NO: 2014520 - DNA, 15 bp, Homo sapiens
ttcctttgttcgata

SEQ ID NO: 2014521 - DNA, 15 bp, Homo sapiens
tcctttgttcgatat

SEQ ID NO: 2014522 - DNA, 15 bp, Homo sapiens
cctttgttcgatatt

SEQ ID NO: 2014523 - DNA, 15 bp, Homo sapiens
ctttgttcgatattg

SEQ ID NO: 2014524 - DNA, 15 bp, Homo sapiens
tttgttcgatattgt

SEQ ID NO: 2014525 - DNA, 15 bp, Homo sapiens
ttgttcgatattgtt

SEQ ID NO: 2014526 - DNA, 15 bp, Homo sapiens
tgttcgatattgttt

SEQ ID NO: 2014527 - DNA, 15 bp, Homo sapiens
gttcgatattgtttg

SEQ ID NO: 2014528 - DNA, 15 bp, Homo sapiens
ttcgatattgtttgg

SEQ ID NO: 2014529 - DNA, 15 bp, Homo sapiens
tcgatattgtttggg

SEQ ID NO: 2014530 - DNA, 15 bp, Homo sapiens
cgatattgtttgggt

SEQ ID NO: 2014531 - DNA, 15 bp, Homo sapiens
gatattgtttgggta

SEQ ID NO: 2014532 - DNA, 15 bp, Homo sapiens
atattgtttgggtat

SEQ ID NO: 2014533 - DNA, 15 bp, Homo sapiens
tattgtttgggtatt

SEQ ID NO: 2014534 - DNA, 15 bp, Homo sapiens
attgtttgggtattt

SEQ ID NO: 2014535 - DNA, 15 bp, Homo sapiens
ttgtttgggtatttt

SEQ ID NO: 2014536 - DNA, 15 bp, Homo sapiens
tgtttgggtattttg

SEQ ID NO: 2014537 - DNA, 15 bp, Homo sapiens
gtttgggtattttgg

SEQ ID NO: 2014538 - DNA, 15 bp, Homo sapiens
tttgggtattttggt

SEQ ID NO: 2014539 - DNA, 15 bp, Homo sapiens
ttgggtattttggtc

SEQ ID NO: 2014540 - DNA, 15 bp, Homo sapiens
tgggtattttggtca

SEQ ID NO: 2014541 - DNA, 15 bp, Homo sapiens
gggtattttggtcac

SEQ ID NO: 2014542 - DNA, 15 bp, Homo sapiens
ggtattttggtcact

SEQ ID NO: 2014543 - DNA, 15 bp, Homo sapiens
gtattttggtcactt

SEQ ID NO: 2014544 - DNA, 15 bp, Homo sapiens
tattttggtcacttt

SEQ ID NO: 2014545 - DNA, 15 bp, Homo sapiens
attttggtcactttg

SEQ ID NO: 2014546 - DNA, 15 bp, Homo sapiens
ttttggtcactttgg

SEQ ID NO: 2014547 - DNA, 15 bp, Homo sapiens
tttggtcactttggg

SEQ ID NO: 2014548 - DNA, 15 bp, Homo sapiens
ttggtcactttgggt

SEQ ID NO: 2014549 - DNA, 15 bp, Homo sapiens
tggtcactttgggtt

SEQ ID NO: 2014550 - DNA, 15 bp, Homo sapiens
ggtcactttgggttg

SEQ ID NO: 2014551 - DNA, 15 bp, Homo sapiens
gtcactttgggttga

SEQ ID NO: 2014552 - DNA, 15 bp, Homo sapiens
tcactttgggttgag

SEQ ID NO: 2014553 - DNA, 15 bp, Homo sapiens
cactttgggttgagt

SEQ ID NO: 2014554 - DNA, 15 bp, Homo sapiens
actttgggttgagtt

SEQ ID NO: 2014555 - DNA, 15 bp, Homo sapiens
ctttgggttgagtta

SEQ ID NO: 2014556 - DNA, 15 bp, Homo sapiens
tttgggttgagttac

SEQ ID NO: 2014557 - DNA, 15 bp, Homo sapiens
ttgggttgagttacc

SEQ ID NO: 2014558 - DNA, 15 bp, Homo sapiens
tgggttgagttacca

SEQ ID NO: 2014559 - DNA, 15 bp, Homo sapiens
gggttgagttaccac

SEQ ID NO: 2014560 - DNA, 15 bp, Homo sapiens
ggttgagttaccaca

SEQ ID NO: 2014561 - DNA, 15 bp, Homo sapiens
gttgagttaccacac

SEQ ID NO: 2014562 - DNA, 15 bp, Homo sapiens
ttgagttaccacact

SEQ ID NO: 2014563 - DNA, 15 bp, Homo sapiens
tgagttaccacactc

SEQ ID NO: 2014564 - DNA, 15 bp, Homo sapiens
gagttaccacactca

SEQ ID NO: 2014565 - DNA, 15 bp, Homo sapiens
agttaccacactcag

SEQ ID NO: 2014566 - DNA, 15 bp, Homo sapiens
gttaccacactcaga

SEQ ID NO: 2014567 - DNA, 15 bp, Homo sapiens
ttaccacactcagag

SEQ ID NO: 2014568 - DNA, 15 bp, Homo sapiens
taccacactcagaga

SEQ ID NO: 2014569 - DNA, 15 bp, Homo sapiens
accacactcagagag

SEQ ID NO: 2014570 - DNA, 15 bp, Homo sapiens
ccacactcagagagt

SEQ ID NO: 2014571 - DNA, 15 bp, Homo sapiens
cacactcagagagtt

SEQ ID NO: 2014572 - DNA, 15 bp, Homo sapiens
acactcagagagtta

SEQ ID NO: 2014573 - DNA, 15 bp, Homo sapiens
cactcagagagttaa

SEQ ID NO: 2014574 - DNA, 15 bp, Homo sapiens
actcagagagttaat

SEQ ID NO: 2014575 - DNA, 15 bp, Homo sapiens
ctcagagagttaatg

SEQ ID NO: 2014576 - DNA, 15 bp, Homo sapiens
tcagagagttaatgg

SEQ ID NO: 2014577 - DNA, 15 bp, Homo sapiens
cagagagttaatggt

SEQ ID NO: 2014578 - DNA, 15 bp, Homo sapiens
agagagttaatggtg

SEQ ID NO: 2014579 - DNA, 15 bp, Homo sapiens
gagagttaatggtgt

SEQ ID NO: 2014580 - DNA, 15 bp, Homo sapiens
agagttaatggtgtc

SEQ ID NO: 2014581 - DNA, 15 bp, Homo sapiens
gagttaatggtgtcc

SEQ ID NO: 2014582 - DNA, 15 bp, Homo sapiens
agttaatggtgtcca

SEQ ID NO: 2014583 - DNA, 15 bp, Homo sapiens
gttaatggtgtccac

SEQ ID NO: 2014584 - DNA, 15 bp, Homo sapiens
ttaatggtgtccact

SEQ ID NO: 2014585 - DNA, 15 bp, Homo sapiens
taatggtgtccactg

SEQ ID NO: 2014586 - DNA, 15 bp, Homo sapiens
aatggtgtccactgt

SEQ ID NO: 2014587 - DNA, 15 bp, Homo sapiens
atggtgtccactgtc

SEQ ID NO: 2014588 - DNA, 15 bp, Homo sapiens
tggtgtccactgtct

SEQ ID NO: 2014589 - DNA, 15 bp, Homo sapiens
ggtgtccactgtctg

SEQ ID NO: 2014590 - DNA, 15 bp, Homo sapiens
gtgtccactgtctgc

SEQ ID NO: 2014591 - DNA, 15 bp, Homo sapiens
tgtccactgtctgca

SEQ ID NO: 2014592 - DNA, 15 bp, Homo sapiens
gtccactgtctgcat

SEQ ID NO: 2014593 - DNA, 15 bp, Homo sapiens
tccactgtctgcatc

SEQ ID NO: 2014594 - DNA, 15 bp, Homo sapiens
ccactgtctgcatcc

SEQ ID NO: 2014595 - DNA, 15 bp, Homo sapiens
cactgtctgcatccc

SEQ ID NO: 2014596 - DNA, 15 bp, Homo sapiens
actgtctgcatccca

SEQ ID NO: 2014597 - DNA, 15 bp, Homo sapiens
ctgtctgcatcccac

SEQ ID NO: 2014598 - DNA, 15 bp, Homo sapiens
tgtctgcatcccact

SEQ ID NO: 2014599 - DNA, 15 bp, Homo sapiens
gtctgcatcccactt

SEQ ID NO: 2014600 - DNA, 15 bp, Homo sapiens
tctgcatcccactta

SEQ ID NO: 2014601 - DNA, 15 bp, Homo sapiens
ctgcatcccacttac

SEQ ID NO: 2014602 - DNA, 15 bp, Homo sapiens
tgcatcccacttaca

SEQ ID NO: 2014603 - DNA, 15 bp, Homo sapiens
gcatcccacttacag

SEQ ID NO: 2014604 - DNA, 15 bp, Homo sapiens
catcccacttacagt

SEQ ID NO: 2014605 - DNA, 15 bp, Homo sapiens
atcccacttacagtg

SEQ ID NO: 2014606 - DNA, 15 bp, Homo sapiens
tcccacttacagtga

SEQ ID NO: 2014607 - DNA, 15 bp, Homo sapiens
cccacttacagtgaa

SEQ ID NO: 2014608 - DNA, 15 bp, Homo sapiens
ccacttacagtgaat

SEQ ID NO: 2014609 - DNA, 15 bp, Homo sapiens
cacttacagtgaata

SEQ ID NO: 2014610 - DNA, 15 bp, Homo sapiens
acttacagtgaataa

SEQ ID NO: 2014611 - DNA, 15 bp, Homo sapiens
cttacagtgaataag

SEQ ID NO: 2014612 - DNA, 15 bp, Homo sapiens
ttacagtgaataagc

SEQ ID NO: 2014613 - DNA, 15 bp, Homo sapiens
tacagtgaataagct

SEQ ID NO: 2014614 - DNA, 15 bp, Homo sapiens
acagtgaataagctt

SEQ ID NO: 2014615 - DNA, 15 bp, Homo sapiens
cagtgaataagcttg

SEQ ID NO: 2014616 - DNA, 15 bp, Homo sapiens
agtgaataagcttga

SEQ ID NO: 2014617 - DNA, 15 bp, Homo sapiens
gtgaataagcttgag

SEQ ID NO: 2014618 - DNA, 15 bp, Homo sapiens
tgaataagcttgagg

SEQ ID NO: 2014619 - DNA, 15 bp, Homo sapiens
gaataagcttgaggt

SEQ ID NO: 2014620 - DNA, 15 bp, Homo sapiens
aataagcttgaggta

SEQ ID NO: 2014621 - DNA, 15 bp, Homo sapiens
ataagcttgaggtaa

SEQ ID NO: 2014622 - DNA, 15 bp, Homo sapiens
taagcttgaggtaaa

SEQ ID NO: 2014623 - DNA, 15 bp, Homo sapiens
aagcttgaggtaaat

SEQ ID NO: 2014624 - DNA, 15 bp, Homo sapiens
agcttgaggtaaatc

SEQ ID NO: 2014625 - DNA, 15 bp, Homo sapiens
gcttgaggtaaatcc

SEQ ID NO: 2014626 - DNA, 15 bp, Homo sapiens
cttgaggtaaatcca

SEQ ID NO: 2014627 - DNA, 15 bp, Homo sapiens
ttgaggtaaatccag

SEQ ID NO: 2014628 - DNA, 15 bp, Homo sapiens
tgaggtaaatccaga

SEQ ID NO: 2014629 - DNA, 15 bp, Homo sapiens
gaggtaaatccagaa

SEQ ID NO: 2014630 - DNA, 15 bp, Homo sapiens
aggtaaatccagaag

SEQ ID NO: 2014631 - DNA, 15 bp, Homo sapiens
ggtaaatccagaagg

SEQ ID NO: 2014632 - DNA, 15 bp, Homo sapiens
gtaaatccagaaggt

SEQ ID NO: 2014633 - DNA, 15 bp, Homo sapiens
taaatccagaaggtg

SEQ ID NO: 2014634 - DNA, 15 bp, Homo sapiens
aaatccagaaggtgt

SEQ ID NO: 2014635 - DNA, 15 bp, Homo sapiens
aatccagaaggtgtg

SEQ ID NO: 2014636 - DNA, 15 bp, Homo sapiens
atccagaaggtgtgg

SEQ ID NO: 2014637 - DNA, 15 bp, Homo sapiens
tccagaaggtgtggg

SEQ ID NO: 2014638 - DNA, 15 bp, Homo sapiens
ccagaaggtgtggga

SEQ ID NO: 2014639 - DNA, 15 bp, Homo sapiens
cagaaggtgtgggat

SEQ ID NO: 2014640 - DNA, 15 bp, Homo sapiens
agaaggtgtgggata

SEQ ID NO: 2014641 - DNA, 15 bp, Homo sapiens
gaaggtgtgggatac

SEQ ID NO: 2014642 - DNA, 15 bp, Homo sapiens
aaggtgtgggataca

SEQ ID NO: 2014643 - DNA, 15 bp, Homo sapiens
aggtgtgggatacat

SEQ ID NO: 2014644 - DNA, 15 bp, Homo sapiens
ggtgtgggatacatg

SEQ ID NO: 2014645 - DNA, 15 bp, Homo sapiens
gtgtgggatacatgt

SEQ ID NO: 2014646 - DNA, 15 bp, Homo sapiens
tgtgggatacatgtt

SEQ ID NO: 2014647 - DNA, 15 bp, Homo sapiens
gtgggatacatgtta

SEQ ID NO: 2014648 - DNA, 15 bp, Homo sapiens
tgggatacatgttat

SEQ ID NO: 2014649 - DNA, 15 bp, Homo sapiens
gggatacatgttatg

SEQ ID NO: 2014650 - DNA, 15 bp, Homo sapiens
ggatacatgttatgt

SEQ ID NO: 2014651 - DNA, 15 bp, Homo sapiens
gatacatgttatgtt

SEQ ID NO: 2014652 - DNA, 15 bp, Homo sapiens
atacatgttatgttc

SEQ ID NO: 2014653 - DNA, 15 bp, Homo sapiens
tacatgttatgttcc

SEQ ID NO: 2014654 - DNA, 15 bp, Homo sapiens
acatgttatgttcct

SEQ ID NO: 2014655 - DNA, 15 bp, Homo sapiens
catgttatgttcctt

SEQ ID NO: 2014656 - DNA, 15 bp, Homo sapiens
atgttatgttccttt

SEQ ID NO: 2014657 - DNA, 15 bp, Homo sapiens
gttatgttcctttaa

SEQ ID NO: 2014658 - DNA, 15 bp, Homo sapiens
ttatgttcctttaaa

SEQ ID NO: 2014659 - DNA, 15 bp, Homo sapiens
tatgttcctttaaag

SEQ ID NO: 2014660 - DNA, 15 bp, Homo sapiens
atgttcctttaaaga

SEQ ID NO: 2014661 - DNA, 15 bp, Homo sapiens
tgttcctttaaagat

SEQ ID NO: 2014662 - DNA, 15 bp, Homo sapiens
gttcctttaaagatg

SEQ ID NO: 2014663 - DNA, 15 bp, Homo sapiens
ttcctttaaagatga

SEQ ID NO: 2014664 - DNA, 15 bp, Homo sapiens
tcctttaaagatgat

SEQ ID NO: 2014665 - DNA, 15 bp, Homo sapiens
cctttaaagatgata

SEQ ID NO: 2014666 - DNA, 15 bp, Homo sapiens
ctttaaagatgatat

SEQ ID NO: 2014667 - DNA, 15 bp, Homo sapiens
tttaaagatgatatt

SEQ ID NO: 2014668 - DNA, 15 bp, Homo sapiens
ttaaagatgatattt

SEQ ID NO: 2014669 - DNA, 15 bp, Homo sapiens
taaagatgatatttg

SEQ ID NO: 2014670 - DNA, 15 bp, Homo sapiens
aaagatgatatttgg

SEQ ID NO: 2014671 - DNA, 15 bp, Homo sapiens
aagatgatatttggg

SEQ ID NO: 2014672 - DNA, 15 bp, Homo sapiens
agatgatatttgggt

SEQ ID NO: 2014673 - DNA, 15 bp, Homo sapiens
gatgatatttgggta

SEQ ID NO: 2014674 - DNA, 15 bp, Homo sapiens
atgatatttgggtag

SEQ ID NO: 2014675 - DNA, 15 bp, Homo sapiens
tgatatttgggtaga

SEQ ID NO: 2014676 - DNA, 15 bp, Homo sapiens
gatatttgggtagaa

SEQ ID NO: 2014677 - DNA, 15 bp, Homo sapiens
atatttgggtagaac

SEQ ID NO: 2014678 - DNA, 15 bp, Homo sapiens
tatttgggtagaaca

SEQ ID NO: 2014679 - DNA, 15 bp, Homo sapiens
atttgggtagaacat

SEQ ID NO: 2014680 - DNA, 15 bp, Homo sapiens
tttgggtagaacatg

SEQ ID NO: 2014681 - DNA, 15 bp, Homo sapiens
ttgggtagaacatgg

SEQ ID NO: 2014682 - DNA, 15 bp, Homo sapiens
tgggtagaacatgga

SEQ ID NO: 2014683 - DNA, 15 bp, Homo sapiens
gggtagaacatggag

SEQ ID NO: 2014684 - DNA, 15 bp, Homo sapiens
ggtagaacatggagt

SEQ ID NO: 2014685 - DNA, 15 bp, Homo sapiens
gtagaacatggagtc

SEQ ID NO: 2014686 - DNA, 15 bp, Homo sapiens
tagaacatggagtcc

SEQ ID NO: 2014687 - DNA, 15 bp, Homo sapiens
agaacatggagtccc

SEQ ID NO: 2014688 - DNA, 15 bp, Homo sapiens
gaacatggagtccct

SEQ ID NO: 2014689 - DNA, 15 bp, Homo sapiens
aacatggagtcccta

SEQ ID NO: 2014690 - DNA, 15 bp, Homo sapiens
acatggagtccctat

SEQ ID NO: 2014691 - DNA, 15 bp, Homo sapiens
catggagtccctatc

SEQ ID NO: 2014692 - DNA, 15 bp, Homo sapiens
atggagtccctatca

SEQ ID NO: 2014693 - DNA, 15 bp, Homo sapiens
tggagtccctatcac

SEQ ID NO: 2014694 - DNA, 15 bp, Homo sapiens
ggagtccctatcaca

SEQ ID NO: 2014695 - DNA, 15 bp, Homo sapiens
gagtccctatcacat

SEQ ID NO: 2014696 - DNA, 15 bp, Homo sapiens
agtccctatcacatg

SEQ ID NO: 2014697 - DNA, 15 bp, Homo sapiens
gtccctatcacatgg

SEQ ID NO: 2014698 - DNA, 15 bp, Homo sapiens
tccctatcacatggg

SEQ ID NO: 2014699 - DNA, 15 bp, Homo sapiens
ccctatcacatgggc

SEQ ID NO: 2014700 - DNA, 15 bp, Homo sapiens
cctatcacatgggct

SEQ ID NO: 2014701 - DNA, 15 bp, Homo sapiens
ctatcacatgggctt

SEQ ID NO: 2014702 - DNA, 15 bp, Homo sapiens
tatcacatgggcttt

SEQ ID NO: 2014703 - DNA, 15 bp, Homo sapiens
atcacatgggctttt

SEQ ID NO: 2014704 - DNA, 15 bp, Homo sapiens
tcacatgggcttttg

SEQ ID NO: 2014705 - DNA, 15 bp, Homo sapiens
cacatgggcttttgt

SEQ ID NO: 2014706 - DNA, 15 bp, Homo sapiens
acatgggcttttgtt

SEQ ID NO: 2014707 - DNA, 15 bp, Homo sapiens
catgggcttttgttt

SEQ ID NO: 2014708 - DNA, 15 bp, Homo sapiens
atgggcttttgtttc

SEQ ID NO: 2014709 - DNA, 15 bp, Homo sapiens
tgggcttttgtttcc

SEQ ID NO: 2014710 - DNA, 15 bp, Homo sapiens
gggcttttgtttcca

SEQ ID NO: 2014711 - DNA, 15 bp, Homo sapiens
ggcttttgtttccat

SEQ ID NO: 2014712 - DNA, 15 bp, Homo sapiens
gcttttgtttccatc

SEQ ID NO: 2014713 - DNA, 15 bp, Homo sapiens
cttttgtttccatca

SEQ ID NO: 2014714 - DNA, 15 bp, Homo sapiens
ttttgtttccatcat

SEQ ID NO: 2014715 - DNA, 15 bp, Homo sapiens
tttgtttccatcatc

SEQ ID NO: 2014716 - DNA, 15 bp, Homo sapiens
ttgtttccatcatcc

SEQ ID NO: 2014717 - DNA, 15 bp, Homo sapiens
tgtttccatcatcca

SEQ ID NO: 2014718 - DNA, 15 bp, Homo sapiens
gtttccatcatccac

SEQ ID NO: 2014719 - DNA, 15 bp, Homo sapiens
tttccatcatccact

SEQ ID NO: 2014720 - DNA, 15 bp, Homo sapiens
ttccatcatccactt

SEQ ID NO: 2014721 - DNA, 15 bp, Homo sapiens
tccatcatccacttc

SEQ ID NO: 2014722 - DNA, 15 bp, Homo sapiens
ccatcatccacttca

SEQ ID NO: 2014723 - DNA, 15 bp, Homo sapiens
catcatccacttcag

SEQ ID NO: 2014724 - DNA, 15 bp, Homo sapiens
atcatccacttcagt

SEQ ID NO: 2014725 - DNA, 15 bp, Homo sapiens
tcatccacttcagta

SEQ ID NO: 2014726 - DNA, 15 bp, Homo sapiens
catccacttcagtaa

SEQ ID NO: 2014727 - DNA, 15 bp, Homo sapiens
atccacttcagtaag

SEQ ID NO: 2014728 - DNA, 15 bp, Homo sapiens
tccacttcagtaagt

SEQ ID NO: 2014729 - DNA, 15 bp, Homo sapiens
ccacttcagtaagta

SEQ ID NO: 2014730 - DNA, 15 bp, Homo sapiens
cacttcagtaagtaa

SEQ ID NO: 2014731 - DNA, 15 bp, Homo sapiens
acttcagtaagtaag

SEQ ID NO: 2014732 - DNA, 15 bp, Homo sapiens
cttcagtaagtaagt

SEQ ID NO: 2014733 - DNA, 15 bp, Homo sapiens
ttcagtaagtaagta

SEQ ID NO: 2014734 - DNA, 15 bp, Homo sapiens
tcagtaagtaagtaa

SEQ ID NO: 2014735 - DNA, 15 bp, Homo sapiens
cagtaagtaagtaat

SEQ ID NO: 2014736 - DNA, 15 bp, Homo sapiens
agtaagtaagtaatg

SEQ ID NO: 2014737 - DNA, 15 bp, Homo sapiens
gtaagtaagtaatgt

SEQ ID NO: 2014738 - DNA, 15 bp, Homo sapiens
taagtaagtaatgtt

SEQ ID NO: 2014739 - DNA, 15 bp, Homo sapiens
aagtaagtaatgttt

SEQ ID NO: 2014740 - DNA, 15 bp, Homo sapiens
agtaagtaatgtttt

SEQ ID NO: 2014741 - DNA, 15 bp, Homo sapiens
gtaagtaatgttttg

SEQ ID NO: 2014742 - DNA, 15 bp, Homo sapiens
taagtaatgttttgt

SEQ ID NO: 2014743 - DNA, 15 bp, Homo sapiens
aagtaatgttttgtt

SEQ ID NO: 2014744 - DNA, 15 bp, Homo sapiens
agtaatgttttgttt

SEQ ID NO: 2014745 - DNA, 15 bp, Homo sapiens
gtaatgttttgtttg

SEQ ID NO: 2014746 - DNA, 15 bp, Homo sapiens
taatgttttgtttgt

SEQ ID NO: 2014747 - DNA, 15 bp, Homo sapiens
aatgttttgtttgtg

SEQ ID NO: 2014748 - DNA, 15 bp, Homo sapiens
atgttttgtttgtgg

SEQ ID NO: 2014749 - DNA, 15 bp, Homo sapiens
tgttttgtttgtggt

SEQ ID NO: 2014750 - DNA, 15 bp, Homo sapiens
gttttgtttgtggtc

SEQ ID NO: 2014751 - DNA, 15 bp, Homo sapiens
ttttgtttgtggtca

SEQ ID NO: 2014752 - DNA, 15 bp, Homo sapiens
tttgtttgtggtcac

SEQ ID NO: 2014753 - DNA, 15 bp, Homo sapiens
ttgtttgtggtcaca

SEQ ID NO: 2014754 - DNA, 15 bp, Homo sapiens
tgtttgtggtcacat

SEQ ID NO: 2014755 - DNA, 15 bp, Homo sapiens
gtttgtggtcacatg

SEQ ID NO: 2014756 - DNA, 15 bp, Homo sapiens
tttgtggtcacatga

SEQ ID NO: 2014757 - DNA, 15 bp, Homo sapiens
ttgtggtcacatgac

SEQ ID NO: 2014758 - DNA, 15 bp, Homo sapiens
tgtggtcacatgacc

SEQ ID NO: 2014759 - DNA, 15 bp, Homo sapiens
gtggtcacatgacca

SEQ ID NO: 2014760 - DNA, 15 bp, Homo sapiens
tggtcacatgaccac

SEQ ID NO: 2014761 - DNA, 15 bp, Homo sapiens
ggtcacatgaccacc

SEQ ID NO: 2014762 - DNA, 15 bp, Homo sapiens
gtcacatgaccacct

SEQ ID NO: 2014763 - DNA, 15 bp, Homo sapiens
tcacatgaccacctg

SEQ ID NO: 2014764 - DNA, 15 bp, Homo sapiens
cacatgaccacctgt

SEQ ID NO: 2014765 - DNA, 15 bp, Homo sapiens
acatgaccacctgtt

SEQ ID NO: 2014766 - DNA, 15 bp, Homo sapiens
catgaccacctgtta

SEQ ID NO: 2014767 - DNA, 15 bp, Homo sapiens
atgaccacctgttat

SEQ ID NO: 2014768 - DNA, 15 bp, Homo sapiens
tgaccacctgttatt

SEQ ID NO: 2014769 - DNA, 15 bp, Homo sapiens
gaccacctgttattg

SEQ ID NO: 2014770 - DNA, 15 bp, Homo sapiens
accacctgttattgt

SEQ ID NO: 2014771 - DNA, 15 bp, Homo sapiens
ccacctgttattgta

SEQ ID NO: 2014772 - DNA, 15 bp, Homo sapiens
cacctgttattgtaa

SEQ ID NO: 2014773 - DNA, 15 bp, Homo sapiens
acctgttattgtaaa

SEQ ID NO: 2014774 - DNA, 15 bp, Homo sapiens
cctgttattgtaaag

SEQ ID NO: 2014775 - DNA, 15 bp, Homo sapiens
ctgttattgtaaagg

SEQ ID NO: 2014776 - DNA, 15 bp, Homo sapiens
tgttattgtaaaggg

SEQ ID NO: 2014777 - DNA, 15 bp, Homo sapiens
gttattgtaaagggt

SEQ ID NO: 2014778 - DNA, 15 bp, Homo sapiens
ttattgtaaagggtt

SEQ ID NO: 2014779 - DNA, 15 bp, Homo sapiens
tattgtaaagggtta

SEQ ID NO: 2014780 - DNA, 15 bp, Homo sapiens
attgtaaagggttat

SEQ ID NO: 2014781 - DNA, 15 bp, Homo sapiens
ttgtaaagggttatc

SEQ ID NO: 2014782 - DNA, 15 bp, Homo sapiens
tgtaaagggttatct

SEQ ID NO: 2014783 - DNA, 15 bp, Homo sapiens
gtaaagggttatctc

SEQ ID NO: 2014784 - DNA, 15 bp, Homo sapiens
taaagggttatctct

SEQ ID NO: 2014785 - DNA, 15 bp, Homo sapiens
aaagggttatctctt

SEQ ID NO: 2014786 - DNA, 15 bp, Homo sapiens
aagggttatctcttg

SEQ ID NO: 2014787 - DNA, 15 bp, Homo sapiens
agggttatctcttgc

SEQ ID NO: 2014788 - DNA, 15 bp, Homo sapiens
gggttatctcttgca

SEQ ID NO: 2014789 - DNA, 15 bp, Homo sapiens
ggttatctcttgcaa

SEQ ID NO: 2014790 - DNA, 15 bp, Homo sapiens
gttatctcttgcaac

SEQ ID NO: 2014791 - DNA, 15 bp, Homo sapiens
ttatctcttgcaact

SEQ ID NO: 2014792 - DNA, 15 bp, Homo sapiens
tatctcttgcaactg

SEQ ID NO: 2014793 - DNA, 15 bp, Homo sapiens
atctcttgcaactga

SEQ ID NO: 2014794 - DNA, 15 bp, Homo sapiens
tctcttgcaactgaa

SEQ ID NO: 2014795 - DNA, 15 bp, Homo sapiens
tcttgcaactgaaag

SEQ ID NO: 2014796 - DNA, 15 bp, Homo sapiens
cttgcaactgaaaga

SEQ ID NO: 2014797 - DNA, 15 bp, Homo sapiens
ttgcaactgaaagag

SEQ ID NO: 2014798 - DNA, 15 bp, Homo sapiens
tgcaactgaaagagt

SEQ ID NO: 2014799 - DNA, 15 bp, Homo sapiens
gcaactgaaagagtt

SEQ ID NO: 2014800 - DNA, 15 bp, Homo sapiens
caactgaaagagttg

SEQ ID NO: 2014801 - DNA, 15 bp, Homo sapiens
aactgaaagagttgg

SEQ ID NO: 2014802 - DNA, 15 bp, Homo sapiens
actgaaagagttggt

SEQ ID NO: 2014803 - DNA, 15 bp, Homo sapiens
ctgaaagagttggtc

SEQ ID NO: 2014804 - DNA, 15 bp, Homo sapiens
tgaaagagttggtca

SEQ ID NO: 2014805 - DNA, 15 bp, Homo sapiens
gaaagagttggtcaa

SEQ ID NO: 2014806 - DNA, 15 bp, Homo sapiens
aaagagttggtcaaa

SEQ ID NO: 2014807 - DNA, 15 bp, Homo sapiens
aagagttggtcaaaa

SEQ ID NO: 2014808 - DNA, 15 bp, Homo sapiens
agagttggtcaaaag

SEQ ID NO: 2014809 - DNA, 15 bp, Homo sapiens
gagttggtcaaaaga

SEQ ID NO: 2014810 - DNA, 15 bp, Homo sapiens
agttggtcaaaagat

SEQ ID NO: 2014811 - DNA, 15 bp, Homo sapiens
gttggtcaaaagatt

SEQ ID NO: 2014812 - DNA, 15 bp, Homo sapiens
ttggtcaaaagattg

SEQ ID NO: 2014813 - DNA, 15 bp, Homo sapiens
tggtcaaaagattgg

SEQ ID NO: 2014814 - DNA, 15 bp, Homo sapiens
ggtcaaaagattggt

SEQ ID NO: 2014815 - DNA, 15 bp, Homo sapiens
gtcaaaagattggtc

SEQ ID NO: 2014816 - DNA, 15 bp, Homo sapiens
tcaaaagattggtct

SEQ ID NO: 2014817 - DNA, 15 bp, Homo sapiens
caaaagattggtctg

SEQ ID NO: 2014818 - DNA, 15 bp, Homo sapiens
aaaagattggtctgg

SEQ ID NO: 2014819 - DNA, 15 bp, Homo sapiens
aaagattggtctgga

SEQ ID NO: 2014820 - DNA, 15 bp, Homo sapiens
aagattggtctggaa

SEQ ID NO: 2014821 - DNA, 15 bp, Homo sapiens
agattggtctggaat

SEQ ID NO: 2014822 - DNA, 15 bp, Homo sapiens
gattggtctggaatg

SEQ ID NO: 2014823 - DNA, 15 bp, Homo sapiens
attggtctggaatga

SEQ ID NO: 2014824 - DNA, 15 bp, Homo sapiens
ttggtctggaatgaa

SEQ ID NO: 2014825 - DNA, 15 bp, Homo sapiens
tggtctggaatgaat

SEQ ID NO: 2014826 - DNA, 15 bp, Homo sapiens
ggtctggaatgaatg

SEQ ID NO: 2014827 - DNA, 15 bp, Homo sapiens
gtctggaatgaatgt

SEQ ID NO: 2014828 - DNA, 15 bp, Homo sapiens
tctggaatgaatgtg

SEQ ID NO: 2014829 - DNA, 15 bp, Homo sapiens
ctggaatgaatgtga

SEQ ID NO: 2014830 - DNA, 15 bp, Homo sapiens
tggaatgaatgtgaa

SEQ ID NO: 2014831 - DNA, 15 bp, Homo sapiens
ggaatgaatgtgaac

SEQ ID NO: 2014832 - DNA, 15 bp, Homo sapiens
gaatgaatgtgaact

SEQ ID NO: 2014833 - DNA, 15 bp, Homo sapiens
aatgaatgtgaactt

SEQ ID NO: 2014834 - DNA, 15 bp, Homo sapiens
atgaatgtgaactta

SEQ ID NO: 2014835 - DNA, 15 bp, Homo sapiens
tgaatgtgaacttat

SEQ ID NO: 2014836 - DNA, 15 bp, Homo sapiens
gaatgtgaacttatt

SEQ ID NO: 2014837 - DNA, 15 bp, Homo sapiens
aatgtgaacttattg

SEQ ID NO: 2014838 - DNA, 15 bp, Homo sapiens
atgtgaacttattgt

SEQ ID NO: 2014839 - DNA, 15 bp, Homo sapiens
tgtgaacttattgtt

SEQ ID NO: 2014840 - DNA, 15 bp, Homo sapiens
gtgaacttattgttg

SEQ ID NO: 2014841 - DNA, 15 bp, Homo sapiens
tgaacttattgttgt

SEQ ID NO: 2014842 - DNA, 15 bp, Homo sapiens
gaacttattgttgtg

SEQ ID NO: 2014843 - DNA, 15 bp, Homo sapiens
aacttattgttgtgc

SEQ ID NO: 2014844 - DNA, 15 bp, Homo sapiens
acttattgttgtgca

SEQ ID NO: 2014845 - DNA, 15 bp, Homo sapiens
cttattgttgtgcag

SEQ ID NO: 2014846 - DNA, 15 bp, Homo sapiens
ttattgttgtgcagg

SEQ ID NO: 2014847 - DNA, 15 bp, Homo sapiens
tattgttgtgcaggt

SEQ ID NO: 2014848 - DNA, 15 bp, Homo sapiens
attgttgtgcaggta

SEQ ID NO: 2014849 - DNA, 15 bp, Homo sapiens
ttgttgtgcaggtaa

SEQ ID NO: 2014850 - DNA, 15 bp, Homo sapiens
tgttgtgcaggtaaa

SEQ ID NO: 2014851 - DNA, 15 bp, Homo sapiens
gttgtgcaggtaaag

SEQ ID NO: 2014852 - DNA, 15 bp, Homo sapiens
ttgtgcaggtaaaga

SEQ ID NO: 2014853 - DNA, 15 bp, Homo sapiens
tgtgcaggtaaagat

SEQ ID NO: 2014854 - DNA, 15 bp, Homo sapiens
gtgcaggtaaagatg

SEQ ID NO: 2014855 - DNA, 15 bp, Homo sapiens
tgcaggtaaagatgt

SEQ ID NO: 2014856 - DNA, 15 bp, Homo sapiens
gcaggtaaagatgtg

SEQ ID NO: 2014857 - DNA, 15 bp, Homo sapiens
caggtaaagatgtgt

SEQ ID NO: 2014858 - DNA, 15 bp, Homo sapiens
aggtaaagatgtgtg

SEQ ID NO: 2014859 - DNA, 15 bp, Homo sapiens
ggtaaagatgtgtga

SEQ ID NO: 2014860 - DNA, 15 bp, Homo sapiens
gtccaaaaccctact

SEQ ID NO: 2014861 - DNA, 15 bp, Homo sapiens
tccaaaaccctactg

SEQ ID NO: 2014862 - DNA, 15 bp, Homo sapiens
ccaaaaccctactgg

SEQ ID NO: 2014863 - DNA, 15 bp, Homo sapiens
caaaaccctactggt

SEQ ID NO: 2014864 - DNA, 15 bp, Homo sapiens
aaaaccctactggtt

SEQ ID NO: 2014865 - DNA, 15 bp, Homo sapiens
aaaccctactggttc

SEQ ID NO: 2014866 - DNA, 15 bp, Homo sapiens
aaccctactggttct

SEQ ID NO: 2014867 - DNA, 15 bp, Homo sapiens
accctactggttctt

SEQ ID NO: 2014868 - DNA, 15 bp, Homo sapiens
ccctactggttctta

SEQ ID NO: 2014869 - DNA, 15 bp, Homo sapiens
cctactggttcttat

SEQ ID NO: 2014870 - DNA, 15 bp, Homo sapiens
ctactggttcttatt

SEQ ID NO: 2014871 - DNA, 15 bp, Homo sapiens
tactggttcttatta

SEQ ID NO: 2014872 - DNA, 15 bp, Homo sapiens
actggttcttattaa

SEQ ID NO: 2014873 - DNA, 15 bp, Homo sapiens
ctggttcttattaaa

SEQ ID NO: 2014874 - DNA, 15 bp, Homo sapiens
tggttcttattaaat

SEQ ID NO: 2014875 - DNA, 15 bp, Homo sapiens
ggttcttattaaata

SEQ ID NO: 2014876 - DNA, 15 bp, Homo sapiens
gttcttattaaatat

SEQ ID NO: 2014877 - DNA, 15 bp, Homo sapiens
ttcttattaaatatg

SEQ ID NO: 2014878 - DNA, 15 bp, Homo sapiens
tcttattaaatatgg

SEQ ID NO: 2014879 - DNA, 15 bp, Homo sapiens
cttattaaatatgga

SEQ ID NO: 2014880 - DNA, 15 bp, Homo sapiens
ttattaaatatggag

SEQ ID NO: 2014881 - DNA, 15 bp, Homo sapiens
tattaaatatggagc

SEQ ID NO: 2014882 - DNA, 15 bp, Homo sapiens
attaaatatggagct

SEQ ID NO: 2014883 - DNA, 15 bp, Homo sapiens
ttaaatatggagctt

SEQ ID NO: 2014884 - DNA, 15 bp, Homo sapiens
taaatatggagcttt

SEQ ID NO: 2014885 - DNA, 15 bp, Homo sapiens
aaatatggagctttg

SEQ ID NO: 2014886 - DNA, 15 bp, Homo sapiens
aatatggagctttgt

SEQ ID NO: 2014887 - DNA, 15 bp, Homo sapiens
atatggagctttgtt

SEQ ID NO: 2014888 - DNA, 15 bp, Homo sapiens
tatggagctttgtta

SEQ ID NO: 2014889 - DNA, 15 bp, Homo sapiens
atggagctttgttaa

SEQ ID NO: 2014890 - DNA, 15 bp, Homo sapiens
tggagctttgttaat

SEQ ID NO: 2014891 - DNA, 15 bp, Homo sapiens
ggagctttgttaatg

SEQ ID NO: 2014892 - DNA, 15 bp, Homo sapiens
gagctttgttaatgt

SEQ ID NO: 2014893 - DNA, 15 bp, Homo sapiens
agctttgttaatgtc

SEQ ID NO: 2014894 - DNA, 15 bp, Homo sapiens
gctttgttaatgtca

SEQ ID NO: 2014895 - DNA, 15 bp, Homo sapiens
ctttgttaatgtcat

SEQ ID NO: 2014896 - DNA, 15 bp, Homo sapiens
tttgttaatgtcatg

SEQ ID NO: 2014897 - DNA, 15 bp, Homo sapiens
ttgttaatgtcatga

SEQ ID NO: 2014898 - DNA, 15 bp, Homo sapiens
tgttaatgtcatgaa

SEQ ID NO: 2014899 - DNA, 15 bp, Homo sapiens
gttaatgtcatgaat

SEQ ID NO: 2014900 - DNA, 15 bp, Homo sapiens
ttaatgtcatgaatg

SEQ ID NO: 2014901 - DNA, 15 bp, Homo sapiens
taatgtcatgaatgc

SEQ ID NO: 2014902 - DNA, 15 bp, Homo sapiens
aatgtcatgaatgcc

SEQ ID NO: 2014903 - DNA, 15 bp, Homo sapiens
atgtcatgaatgcca

SEQ ID NO: 2014904 - DNA, 15 bp, Homo sapiens
tgtcatgaatgccag

SEQ ID NO: 2014905 - DNA, 15 bp, Homo sapiens
gtcatgaatgccagt

SEQ ID NO: 2014906 - DNA, 15 bp, Homo sapiens
tcatgaatgccagtg

SEQ ID NO: 2014907 - DNA, 15 bp, Homo sapiens
catgaatgccagtgc

SEQ ID NO: 2014908 - DNA, 15 bp, Homo sapiens
atgaatgccagtgct

SEQ ID NO: 2014909 - DNA, 15 bp, Homo sapiens
tgaatgccagtgcta

SEQ ID NO: 2014910 - DNA, 15 bp, Homo sapiens
gaatgccagtgctat

SEQ ID NO: 2014911 - DNA, 15 bp, Homo sapiens
aatgccagtgctatg

SEQ ID NO: 2014912 - DNA, 15 bp, Homo sapiens
atgccagtgctatga

SEQ ID NO: 2014913 - DNA, 15 bp, Homo sapiens
tgccagtgctatgaa

SEQ ID NO: 2014914 - DNA, 15 bp, Homo sapiens
gccagtgctatgaat

SEQ ID NO: 2014915 - DNA, 15 bp, Homo sapiens
ccagtgctatgaata

SEQ ID NO: 2014916 - DNA, 15 bp, Homo sapiens
cagtgctatgaataa

SEQ ID NO: 2014917 - DNA, 15 bp, Homo sapiens
agtgctatgaataaa

SEQ ID NO: 2014918 - DNA, 15 bp, Homo sapiens
gtgctatgaataaat

SEQ ID NO: 2014919 - DNA, 15 bp, Homo sapiens
tgctatgaataaatg

SEQ ID NO: 2014920 - DNA, 15 bp, Homo sapiens
gctatgaataaatgc

SEQ ID NO: 2014921 - DNA, 15 bp, Homo sapiens
ctatgaataaatgct

SEQ ID NO: 2014922 - DNA, 15 bp, Homo sapiens
tatgaataaatgcta

SEQ ID NO: 2014923 - DNA, 15 bp, Homo sapiens
atgaataaatgctat

SEQ ID NO: 2014924 - DNA, 15 bp, Homo sapiens
tgaataaatgctatg

SEQ ID NO: 2014925 - DNA, 15 bp, Homo sapiens
gaataaatgctatgt

SEQ ID NO: 2014926 - DNA, 15 bp, Homo sapiens
aataaatgctatgtt

SEQ ID NO: 2014927 - DNA, 15 bp, Homo sapiens
ataaatgctatgttc

SEQ ID NO: 2014928 - DNA, 15 bp, Homo sapiens
taaatgctatgttct

SEQ ID NO: 2014929 - DNA, 15 bp, Homo sapiens
aaatgctatgttcta

SEQ ID NO: 2014930 - DNA, 15 bp, Homo sapiens
aatgctatgttctac

SEQ ID NO: 2014931 - DNA, 15 bp, Homo sapiens
atgctatgttctact

SEQ ID NO: 2014932 - DNA, 15 bp, Homo sapiens
tgctatgttctactc

SEQ ID NO: 2014933 - DNA, 15 bp, Homo sapiens
gctatgttctactct

SEQ ID NO: 2014934 - DNA, 15 bp, Homo sapiens
ctatgttctactctg

SEQ ID NO: 2014935 - DNA, 15 bp, Homo sapiens
tatgttctactctga

SEQ ID NO: 2014936 - DNA, 15 bp, Homo sapiens
atgttctactctgaa

SEQ ID NO: 2014937 - DNA, 15 bp, Homo sapiens
tgttctactctgaaa

SEQ ID NO: 2014938 - DNA, 15 bp, Homo sapiens
gttctactctgaaaa

SEQ ID NO: 2014939 - DNA, 15 bp, Homo sapiens
ttctactctgaaaat

SEQ ID NO: 2014940 - DNA, 15 bp, Homo sapiens
tctactctgaaaatc

SEQ ID NO: 2014941 - DNA, 15 bp, Homo sapiens
ctactctgaaaatcc

SEQ ID NO: 2014942 - DNA, 15 bp, Homo sapiens
tactctgaaaatccc

SEQ ID NO: 2014943 - DNA, 15 bp, Homo sapiens
actctgaaaatccca

SEQ ID NO: 2014944 - DNA, 15 bp, Homo sapiens
ctctgaaaatcccag

SEQ ID NO: 2014945 - DNA, 15 bp, Homo sapiens
tctgaaaatcccaga

SEQ ID NO: 2014946 - DNA, 15 bp, Homo sapiens
ctgaaaatcccagaa

SEQ ID NO: 2014947 - DNA, 15 bp, Homo sapiens
tgaaaatcccagaac

SEQ ID NO: 2014948 - DNA, 15 bp, Homo sapiens
gaaaatcccagaact

SEQ ID NO: 2014949 - DNA, 15 bp, Homo sapiens
aaaatcccagaacta

SEQ ID NO: 2014950 - DNA, 15 bp, Homo sapiens
aaatcccagaactat

SEQ ID NO: 2014951 - DNA, 15 bp, Homo sapiens
aatcccagaactatg

SEQ ID NO: 2014952 - DNA, 15 bp, Homo sapiens
atcccagaactatga

SEQ ID NO: 2014953 - DNA, 15 bp, Homo sapiens
tcccagaactatgag

SEQ ID NO: 2014954 - DNA, 15 bp, Homo sapiens
cccagaactatgagt

SEQ ID NO: 2014955 - DNA, 15 bp, Homo sapiens
ccagaactatgagtg

SEQ ID NO: 2014956 - DNA, 15 bp, Homo sapiens
cagaactatgagtgg

SEQ ID NO: 2014957 - DNA, 15 bp, Homo sapiens
agaactatgagtggt

SEQ ID NO: 2014958 - DNA, 15 bp, Homo sapiens
gaactatgagtggtt

SEQ ID NO: 2014959 - DNA, 15 bp, Homo sapiens
aactatgagtggttc

SEQ ID NO: 2014960 - DNA, 15 bp, Homo sapiens
actatgagtggttct

SEQ ID NO: 2014961 - DNA, 15 bp, Homo sapiens
ctatgagtggttctc

SEQ ID NO: 2014962 - DNA, 15 bp, Homo sapiens
tatgagtggttctcc

SEQ ID NO: 2014963 - DNA, 15 bp, Homo sapiens
atgagtggttctcca

SEQ ID NO: 2014964 - DNA, 15 bp, Homo sapiens
tgagtggttctccaa

SEQ ID NO: 2014965 - DNA, 15 bp, Homo sapiens
gagtggttctccaag

SEQ ID NO: 2014966 - DNA, 15 bp, Homo sapiens
agtggttctccaaga

SEQ ID NO: 2014967 - DNA, 15 bp, Homo sapiens
gtggttctccaagac

SEQ ID NO: 2014968 - DNA, 15 bp, Homo sapiens
tggttctccaagact

SEQ ID NO: 2014969 - DNA, 15 bp, Homo sapiens
ggttctccaagactg

SEQ ID NO: 2014970 - DNA, 15 bp, Homo sapiens
gttctccaagactgg

SEQ ID NO: 2014971 - DNA, 15 bp, Homo sapiens
ttctccaagactggg

SEQ ID NO: 2014972 - DNA, 15 bp, Homo sapiens
tctccaagactgggc

SEQ ID NO: 2014973 - DNA, 15 bp, Homo sapiens
ctccaagactgggct

SEQ ID NO: 2014974 - DNA, 15 bp, Homo sapiens
tccaagactgggcta

SEQ ID NO: 2014975 - DNA, 15 bp, Homo sapiens
ccaagactgggctac

SEQ ID NO: 2014976 - DNA, 15 bp, Homo sapiens
caagactgggctacc

SEQ ID NO: 2014977 - DNA, 15 bp, Homo sapiens
aagactgggctacca

SEQ ID NO: 2014978 - DNA, 15 bp, Homo sapiens
agactgggctaccat

SEQ ID NO: 2014979 - DNA, 15 bp, Homo sapiens
gactgggctaccatt

SEQ ID NO: 2014980 - DNA, 15 bp, Homo sapiens
actgggctaccattt

SEQ ID NO: 2014981 - DNA, 15 bp, Homo sapiens
ctgggctaccatttt

SEQ ID NO: 2014982 - DNA, 15 bp, Homo sapiens
tgggctaccatttta

SEQ ID NO: 2014983 - DNA, 15 bp, Homo sapiens
gggctaccattttat

SEQ ID NO: 2014984 - DNA, 15 bp, Homo sapiens
ggctaccattttatt

SEQ ID NO: 2014985 - DNA, 15 bp, Homo sapiens
gctaccattttattc

SEQ ID NO: 2014986 - DNA, 15 bp, Homo sapiens
ctaccattttattct

SEQ ID NO: 2014987 - DNA, 15 bp, Homo sapiens
taccattttattcta

SEQ ID NO: 2014988 - DNA, 15 bp, Homo sapiens
accattttattctaa

SEQ ID NO: 2014989 - DNA, 15 bp, Homo sapiens
ccattttattctaag

SEQ ID NO: 2014990 - DNA, 15 bp, Homo sapiens
cattttattctaagt

SEQ ID NO: 2014991 - DNA, 15 bp, Homo sapiens
attttattctaagtg

SEQ ID NO: 2014992 - DNA, 15 bp, Homo sapiens
ttttattctaagtgc

SEQ ID NO: 2014993 - DNA, 15 bp, Homo sapiens
tttattctaagtgct

SEQ ID NO: 2014994 - DNA, 15 bp, Homo sapiens
ttattctaagtgctt

SEQ ID NO: 2014995 - DNA, 15 bp, Homo sapiens
tattctaagtgcttg

SEQ ID NO: 2014996 - DNA, 15 bp, Homo sapiens
attctaagtgcttgt

SEQ ID NO: 2014997 - DNA, 15 bp, Homo sapiens
ttctaagtgcttgtt

SEQ ID NO: 2014998 - DNA, 15 bp, Homo sapiens
tctaagtgcttgttt

SEQ ID NO: 2014999 - DNA, 15 bp, Homo sapiens
ctaagtgcttgtttc

SEQ ID NO: 2015000 - DNA, 15 bp, Homo sapiens
taagtgcttgtttcc

SEQ ID NO: 2015001 - DNA, 15 bp, Homo sapiens
aagtgcttgtttccc

SEQ ID NO: 2015002 - DNA, 15 bp, Homo sapiens
agtgcttgtttcccc

SEQ ID NO: 2015003 - DNA, 15 bp, Homo sapiens
gtgcttgtttccccc

SEQ ID NO: 2015004 - DNA, 15 bp, Homo sapiens
tgcttgtttccccct

SEQ ID NO: 2015005 - DNA, 15 bp, Homo sapiens
gcttgtttccccctg

SEQ ID NO: 2015006 - DNA, 15 bp, Homo sapiens
cttgtttccccctgg

SEQ ID NO: 2015007 - DNA, 15 bp, Homo sapiens
ttgtttccccctgga

SEQ ID NO: 2015008 - DNA, 15 bp, Homo sapiens
tgtttccccctggag

SEQ ID NO: 2015009 - DNA, 15 bp, Homo sapiens
gtttccccctggagt

SEQ ID NO: 2015010 - DNA, 15 bp, Homo sapiens
tttccccctggagtt

SEQ ID NO: 2015011 - DNA, 15 bp, Homo sapiens
ttccccctggagtta

SEQ ID NO: 2015012 - DNA, 15 bp, Homo sapiens
tccccctggagttag

SEQ ID NO: 2015013 - DNA, 15 bp, Homo sapiens
ccccctggagttaga

SEQ ID NO: 2015014 - DNA, 15 bp, Homo sapiens
cccctggagttagat

SEQ ID NO: 2015015 - DNA, 15 bp, Homo sapiens
ccctggagttagatg

SEQ ID NO: 2015016 - DNA, 15 bp, Homo sapiens
cctggagttagatgg

SEQ ID NO: 2015017 - DNA, 15 bp, Homo sapiens
ctggagttagatggg

SEQ ID NO: 2015018 - DNA, 15 bp, Homo sapiens
tggagttagatggga

SEQ ID NO: 2015019 - DNA, 15 bp, Homo sapiens
ggagttagatgggac

SEQ ID NO: 2015020 - DNA, 15 bp, Homo sapiens
gagttagatgggact

SEQ ID NO: 2015021 - DNA, 15 bp, Homo sapiens
agttagatgggacta

SEQ ID NO: 2015022 - DNA, 15 bp, Homo sapiens
gttagatgggactaa

SEQ ID NO: 2015023 - DNA, 15 bp, Homo sapiens
ttagatgggactaat

SEQ ID NO: 2015024 - DNA, 15 bp, Homo sapiens
tagatgggactaatg

SEQ ID NO: 2015025 - DNA, 15 bp, Homo sapiens
agatgggactaatga

SEQ ID NO: 2015026 - DNA, 15 bp, Homo sapiens
gatgggactaatgag

SEQ ID NO: 2015027 - DNA, 15 bp, Homo sapiens
atgggactaatgagg

SEQ ID NO: 2015028 - DNA, 15 bp, Homo sapiens
tgggactaatgagga

SEQ ID NO: 2015029 - DNA, 15 bp, Homo sapiens
gggactaatgaggaa

SEQ ID NO: 2015030 - DNA, 15 bp, Homo sapiens
ggactaatgaggaag

SEQ ID NO: 2015031 - DNA, 15 bp, Homo sapiens
gactaatgaggaaga

SEQ ID NO: 2015032 - DNA, 15 bp, Homo sapiens
actaatgaggaagaa

SEQ ID NO: 2015033 - DNA, 15 bp, Homo sapiens
ctaatgaggaagaat

SEQ ID NO: 2015034 - DNA, 15 bp, Homo sapiens
taatgaggaagaata

SEQ ID NO: 2015035 - DNA, 15 bp, Homo sapiens
aatgaggaagaatat

SEQ ID NO: 2015036 - DNA, 15 bp, Homo sapiens
atgaggaagaatatg

SEQ ID NO: 2015037 - DNA, 15 bp, Homo sapiens
tgaggaagaatatgt

SEQ ID NO: 2015038 - DNA, 15 bp, Homo sapiens
gaggaagaatatgtg

SEQ ID NO: 2015039 - DNA, 15 bp, Homo sapiens
aggaagaatatgtgc

SEQ ID NO: 2015040 - DNA, 15 bp, Homo sapiens
ggaagaatatgtgct

SEQ ID NO: 2015041 - DNA, 15 bp, Homo sapiens
gaagaatatgtgctt

SEQ ID NO: 2015042 - DNA, 15 bp, Homo sapiens
aagaatatgtgcttg

SEQ ID NO: 2015043 - DNA, 15 bp, Homo sapiens
agaatatgtgcttgt

SEQ ID NO: 2015044 - DNA, 15 bp, Homo sapiens
gaatatgtgcttgtt

SEQ ID NO: 2015045 - DNA, 15 bp, Homo sapiens
aatatgtgcttgttg

SEQ ID NO: 2015046 - DNA, 15 bp, Homo sapiens
atatgtgcttgttgg

SEQ ID NO: 2015047 - DNA, 15 bp, Homo sapiens
tatgtgcttgttggg

SEQ ID NO: 2015048 - DNA, 15 bp, Homo sapiens
atgtgcttgttgggc

SEQ ID NO: 2015049 - DNA, 15 bp, Homo sapiens
tgtgcttgttgggca

SEQ ID NO: 2015050 - DNA, 15 bp, Homo sapiens
gtgcttgttgggcaa

SEQ ID NO: 2015051 - DNA, 15 bp, Homo sapiens
tgcttgttgggcaaa

SEQ ID NO: 2015052 - DNA, 15 bp, Homo sapiens
gcttgttgggcaaag

SEQ ID NO: 2015053 - DNA, 15 bp, Homo sapiens
cttgttgggcaaagg

SEQ ID NO: 2015054 - DNA, 15 bp, Homo sapiens
ttgttgggcaaagga

SEQ ID NO: 2015055 - DNA, 15 bp, Homo sapiens
tgttgggcaaaggag

SEQ ID NO: 2015056 - DNA, 15 bp, Homo sapiens
gttgggcaaaggagc

SEQ ID NO: 2015057 - DNA, 15 bp, Homo sapiens
ttgggcaaaggagca

SEQ ID NO: 2015058 - DNA, 15 bp, Homo sapiens
tgggcaaaggagcac

SEQ ID NO: 2015059 - DNA, 15 bp, Homo sapiens
gggcaaaggagcact

SEQ ID NO: 2015060 - DNA, 15 bp, Homo sapiens
ggcaaaggagcactt

SEQ ID NO: 2015061 - DNA, 15 bp, Homo sapiens
gcaaaggagcacttc

SEQ ID NO: 2015062 - DNA, 15 bp, Homo sapiens
caaaggagcacttct

SEQ ID NO: 2015063 - DNA, 15 bp, Homo sapiens
aaaggagcacttctg

SEQ ID NO: 2015064 - DNA, 15 bp, Homo sapiens
aaggagcacttctgc

SEQ ID NO: 2015065 - DNA, 15 bp, Homo sapiens
aggagcacttctgca

SEQ ID NO: 2015066 - DNA, 15 bp, Homo sapiens
ggagcacttctgcag

SEQ ID NO: 2015067 - DNA, 15 bp, Homo sapiens
gagcacttctgcaga

SEQ ID NO: 2015068 - DNA, 15 bp, Homo sapiens
agcacttctgcagac

SEQ ID NO: 2015069 - DNA, 15 bp, Homo sapiens
gcacttctgcagaca

SEQ ID NO: 2015070 - DNA, 15 bp, Homo sapiens
cacttctgcagacaa

SEQ ID NO: 2015071 - DNA, 15 bp, Homo sapiens
acttctgcagacaaa

SEQ ID NO: 2015072 - DNA, 15 bp, Homo sapiens
cttctgcagacaaag

SEQ ID NO: 2015073 - DNA, 15 bp, Homo sapiens
ttctgcagacaaagg

SEQ ID NO: 2015074 - DNA, 15 bp, Homo sapiens
tctgcagacaaaggc

SEQ ID NO: 2015075 - DNA, 15 bp, Homo sapiens
ctgcagacaaaggct

SEQ ID NO: 2015076 - DNA, 15 bp, Homo sapiens
tgcagacaaaggctg

SEQ ID NO: 2015077 - DNA, 15 bp, Homo sapiens
gcagacaaaggctgg

SEQ ID NO: 2015078 - DNA, 15 bp, Homo sapiens
cagacaaaggctggc

SEQ ID NO: 2015079 - DNA, 15 bp, Homo sapiens
agacaaaggctggca

SEQ ID NO: 2015080 - DNA, 15 bp, Homo sapiens
gacaaaggctggcat

SEQ ID NO: 2015081 - DNA, 15 bp, Homo sapiens
acaaaggctggcatc

SEQ ID NO: 2015082 - DNA, 15 bp, Homo sapiens
caaaggctggcatcc

SEQ ID NO: 2015083 - DNA, 15 bp, Homo sapiens
aaaggctggcatccc

SEQ ID NO: 2015084 - DNA, 15 bp, Homo sapiens
aaggctggcatcccc

SEQ ID NO: 2015085 - DNA, 15 bp, Homo sapiens
aggctggcatcccca

SEQ ID NO: 2015086 - DNA, 15 bp, Homo sapiens
ggctggcatccccaa

SEQ ID NO: 2015087 - DNA, 15 bp, Homo sapiens
gctggcatccccaaa

SEQ ID NO: 2015088 - DNA, 15 bp, Homo sapiens
ctggcatccccaaaa

SEQ ID NO: 2015089 - DNA, 15 bp, Homo sapiens
tggcatccccaaaag

SEQ ID NO: 2015090 - DNA, 15 bp, Homo sapiens
ggcatccccaaaagt

SEQ ID NO: 2015091 - DNA, 15 bp, Homo sapiens
gcatccccaaaagta

SEQ ID NO: 2015092 - DNA, 15 bp, Homo sapiens
catccccaaaagtat

SEQ ID NO: 2015093 - DNA, 15 bp, Homo sapiens
atccccaaaagtata

SEQ ID NO: 2015094 - DNA, 15 bp, Homo sapiens
tccccaaaagtatag

SEQ ID NO: 2015095 - DNA, 15 bp, Homo sapiens
ccccaaaagtatagg

SEQ ID NO: 2015096 - DNA, 15 bp, Homo sapiens
cccaaaagtataggc

SEQ ID NO: 2015097 - DNA, 15 bp, Homo sapiens
ccaaaagtataggct

SEQ ID NO: 2015098 - DNA, 15 bp, Homo sapiens
caaaagtataggctg

SEQ ID NO: 2015099 - DNA, 15 bp, Homo sapiens
aaaagtataggctga

SEQ ID NO: 2015100 - DNA, 15 bp, Homo sapiens
aaagtataggctgat

SEQ ID NO: 2015101 - DNA, 15 bp, Homo sapiens
aagtataggctgatg

SEQ ID NO: 2015102 - DNA, 15 bp, Homo sapiens
agtataggctgatga

SEQ ID NO: 2015103 - DNA, 15 bp, Homo sapiens
gtataggctgatgac

SEQ ID NO: 2015104 - DNA, 15 bp, Homo sapiens
tataggctgatgacc

SEQ ID NO: 2015105 - DNA, 15 bp, Homo sapiens
ataggctgatgacca

SEQ ID NO: 2015106 - DNA, 15 bp, Homo sapiens
taggctgatgaccac

SEQ ID NO: 2015107 - DNA, 15 bp, Homo sapiens
aggctgatgaccact

SEQ ID NO: 2015108 - DNA, 15 bp, Homo sapiens
ggctgatgaccactc

SEQ ID NO: 2015109 - DNA, 15 bp, Homo sapiens
gctgatgaccactct

SEQ ID NO: 2015110 - DNA, 15 bp, Homo sapiens
ctgatgaccactctt

SEQ ID NO: 2015111 - DNA, 15 bp, Homo sapiens
tgatgaccactcttg

SEQ ID NO: 2015112 - DNA, 15 bp, Homo sapiens
gatgaccactcttga

SEQ ID NO: 2015113 - DNA, 15 bp, Homo sapiens
atgaccactcttgac

SEQ ID NO: 2015114 - DNA, 15 bp, Homo sapiens
tgaccactcttgact

SEQ ID NO: 2015115 - DNA, 15 bp, Homo sapiens
gaccactcttgactt

SEQ ID NO: 2015116 - DNA, 15 bp, Homo sapiens
accactcttgacttt

SEQ ID NO: 2015117 - DNA, 15 bp, Homo sapiens
ccactcttgactttg

SEQ ID NO: 2015118 - DNA, 15 bp, Homo sapiens
cactcttgactttga

SEQ ID NO: 2015119 - DNA, 15 bp, Homo sapiens
actcttgactttgac

SEQ ID NO: 2015120 - DNA, 15 bp, Homo sapiens
ctcttgactttgaca

SEQ ID NO: 2015121 - DNA, 15 bp, Homo sapiens
tcttgactttgacaa

SEQ ID NO: 2015122 - DNA, 15 bp, Homo sapiens
cttgactttgacaaa

SEQ ID NO: 2015123 - DNA, 15 bp, Homo sapiens
ttgactttgacaaag

SEQ ID NO: 2015124 - DNA, 15 bp, Homo sapiens
tgactttgacaaaga

SEQ ID NO: 2015125 - DNA, 15 bp, Homo sapiens
gactttgacaaagat

SEQ ID NO: 2015126 - DNA, 15 bp, Homo sapiens
actttgacaaagatt

SEQ ID NO: 2015127 - DNA, 15 bp, Homo sapiens
ctttgacaaagattg

SEQ ID NO: 2015128 - DNA, 15 bp, Homo sapiens
tttgacaaagattgg

SEQ ID NO: 2015129 - DNA, 15 bp, Homo sapiens
ttgacaaagattggg

SEQ ID NO: 2015130 - DNA, 15 bp, Homo sapiens
tgacaaagattgggc

SEQ ID NO: 2015131 - DNA, 15 bp, Homo sapiens
gacaaagattgggcc

SEQ ID NO: 2015132 - DNA, 15 bp, Homo sapiens
acaaagattgggccc

SEQ ID NO: 2015133 - DNA, 15 bp, Homo sapiens
caaagattgggccca

SEQ ID NO: 2015134 - DNA, 15 bp, Homo sapiens
aaagattgggcccat

SEQ ID NO: 2015135 - DNA, 15 bp, Homo sapiens
aagattgggcccatt

SEQ ID NO: 2015136 - DNA, 15 bp, Homo sapiens
agattgggcccattc

SEQ ID NO: 2015137 - DNA, 15 bp, Homo sapiens
gattgggcccattcc

SEQ ID NO: 2015138 - DNA, 15 bp, Homo sapiens
attgggcccattcct

SEQ ID NO: 2015139 - DNA, 15 bp, Homo sapiens
ttgggcccattccta

SEQ ID NO: 2015140 - DNA, 15 bp, Homo sapiens
tgggcccattcctac

SEQ ID NO: 2015141 - DNA, 15 bp, Homo sapiens
gggcccattcctact

SEQ ID NO: 2015142 - DNA, 15 bp, Homo sapiens
ggcccattcctactc

SEQ ID NO: 2015143 - DNA, 15 bp, Homo sapiens
gcccattcctactct

SEQ ID NO: 2015144 - DNA, 15 bp, Homo sapiens
cccattcctactcta

SEQ ID NO: 2015145 - DNA, 15 bp, Homo sapiens
ccattcctactctaa

SEQ ID NO: 2015146 - DNA, 15 bp, Homo sapiens
cattcctactctaat

SEQ ID NO: 2015147 - DNA, 15 bp, Homo sapiens
attcctactctaata

SEQ ID NO: 2015148 - DNA, 15 bp, Homo sapiens
ttcctactctaataa

SEQ ID NO: 2015149 - DNA, 15 bp, Homo sapiens
tcctactctaataac

SEQ ID NO: 2015150 - DNA, 15 bp, Homo sapiens
cctactctaataact

SEQ ID NO: 2015151 - DNA, 15 bp, Homo sapiens
ctactctaataactc

SEQ ID NO: 2015152 - DNA, 15 bp, Homo sapiens
tactctaataactca

SEQ ID NO: 2015153 - DNA, 15 bp, Homo sapiens
actctaataactcag

SEQ ID NO: 2015154 - DNA, 15 bp, Homo sapiens
ctctaataactcaga

SEQ ID NO: 2015155 - DNA, 15 bp, Homo sapiens
tctaataactcagac

SEQ ID NO: 2015156 - DNA, 15 bp, Homo sapiens
ctaataactcagact

SEQ ID NO: 2015157 - DNA, 15 bp, Homo sapiens
taataactcagactt

SEQ ID NO: 2015158 - DNA, 15 bp, Homo sapiens
aataactcagactta

SEQ ID NO: 2015159 - DNA, 15 bp, Homo sapiens
ataactcagacttac

SEQ ID NO: 2015160 - DNA, 15 bp, Homo sapiens
taactcagacttacc

SEQ ID NO: 2015161 - DNA, 15 bp, Homo sapiens
aactcagacttacca

SEQ ID NO: 2015162 - DNA, 15 bp, Homo sapiens
actcagacttaccaa

SEQ ID NO: 2015163 - DNA, 15 bp, Homo sapiens
ctcagacttaccaat

SEQ ID NO: 2015164 - DNA, 15 bp, Homo sapiens
tcagacttaccaatt

SEQ ID NO: 2015165 - DNA, 15 bp, Homo sapiens
cagacttaccaattg

SEQ ID NO: 2015166 - DNA, 15 bp, Homo sapiens
agacttaccaattgt

SEQ ID NO: 2015167 - DNA, 15 bp, Homo sapiens
gacttaccaattgtc

SEQ ID NO: 2015168 - DNA, 15 bp, Homo sapiens
acttaccaattgtca

SEQ ID NO: 2015169 - DNA, 15 bp, Homo sapiens
cttaccaattgtcag

SEQ ID NO: 2015170 - DNA, 15 bp, Homo sapiens
ttaccaattgtcaga

SEQ ID NO: 2015171 - DNA, 15 bp, Homo sapiens
taccaattgtcagat

SEQ ID NO: 2015172 - DNA, 15 bp, Homo sapiens
accaattgtcagata

SEQ ID NO: 2015173 - DNA, 15 bp, Homo sapiens
ccaattgtcagataa

SEQ ID NO: 2015174 - DNA, 15 bp, Homo sapiens
caattgtcagataat

SEQ ID NO: 2015175 - DNA, 15 bp, Homo sapiens
aattgtcagataatg

SEQ ID NO: 2015176 - DNA, 15 bp, Homo sapiens
attgtcagataatgg

SEQ ID NO: 2015177 - DNA, 15 bp, Homo sapiens
ttgtcagataatgga

SEQ ID NO: 2015178 - DNA, 15 bp, Homo sapiens
tgtcagataatggat

SEQ ID NO: 2015179 - DNA, 15 bp, Homo sapiens
gtcagataatggata

SEQ ID NO: 2015180 - DNA, 15 bp, Homo sapiens
tcagataatggataa

SEQ ID NO: 2015181 - DNA, 15 bp, Homo sapiens
cagataatggataaa

SEQ ID NO: 2015182 - DNA, 15 bp, Homo sapiens
agataatggataaag

SEQ ID NO: 2015183 - DNA, 15 bp, Homo sapiens
gataatggataaaga

SEQ ID NO: 2015184 - DNA, 15 bp, Homo sapiens
ataatggataaagat

SEQ ID NO: 2015185 - DNA, 15 bp, Homo sapiens
taatggataaagatg

SEQ ID NO: 2015186 - DNA, 15 bp, Homo sapiens
aatggataaagatga

SEQ ID NO: 2015187 - DNA, 15 bp, Homo sapiens
atggataaagatgaa

SEQ ID NO: 2015188 - DNA, 15 bp, Homo sapiens
tggataaagatgaaa

SEQ ID NO: 2015189 - DNA, 15 bp, Homo sapiens
ggataaagatgaaat

SEQ ID NO: 2015190 - DNA, 15 bp, Homo sapiens
gataaagatgaaatt

SEQ ID NO: 2015191 - DNA, 15 bp, Homo sapiens
ataaagatgaaattc

SEQ ID NO: 2015192 - DNA, 15 bp, Homo sapiens
taaagatgaaattct

SEQ ID NO: 2015193 - DNA, 15 bp, Homo sapiens
aaagatgaaattctg

SEQ ID NO: 2015194 - DNA, 15 bp, Homo sapiens
aagatgaaattctgt

SEQ ID NO: 2015195 - DNA, 15 bp, Homo sapiens
agatgaaattctgtg

SEQ ID NO: 2015196 - DNA, 15 bp, Homo sapiens
gatgaaattctgtgt

SEQ ID NO: 2015197 - DNA, 15 bp, Homo sapiens
atgaaattctgtgta

SEQ ID NO: 2015198 - DNA, 15 bp, Homo sapiens
tgaaattctgtgtaa

SEQ ID NO: 2015199 - DNA, 15 bp, Homo sapiens
gaaattctgtgtaag

SEQ ID NO: 2015200 - DNA, 15 bp, Homo sapiens
aaattctgtgtaaga

SEQ ID NO: 2015201 - DNA, 15 bp, Homo sapiens
aattctgtgtaagaa

SEQ ID NO: 2015202 - DNA, 15 bp, Homo sapiens
attctgtgtaagaaa

SEQ ID NO: 2015203 - DNA, 15 bp, Homo sapiens
ttctgtgtaagaaag

SEQ ID NO: 2015204 - DNA, 15 bp, Homo sapiens
tctgtgtaagaaagg

SEQ ID NO: 2015205 - DNA, 15 bp, Homo sapiens
ctgtgtaagaaaggt

SEQ ID NO: 2015206 - DNA, 15 bp, Homo sapiens
tgtgtaagaaaggtg

SEQ ID NO: 2015207 - DNA, 15 bp, Homo sapiens
gtgtaagaaaggtga

SEQ ID NO: 2015208 - DNA, 15 bp, Homo sapiens
tgtaagaaaggtgac

SEQ ID NO: 2015209 - DNA, 15 bp, Homo sapiens
gtaagaaaggtgact

SEQ ID NO: 2015210 - DNA, 15 bp, Homo sapiens
taagaaaggtgactt

SEQ ID NO: 2015211 - DNA, 15 bp, Homo sapiens
aagaaaggtgactta

SEQ ID NO: 2015212 - DNA, 15 bp, Homo sapiens
agaaaggtgacttaa

SEQ ID NO: 2015213 - DNA, 15 bp, Homo sapiens
gaaaggtgacttaag

SEQ ID NO: 2015214 - DNA, 15 bp, Homo sapiens
aaaggtgacttaaga

SEQ ID NO: 2015215 - DNA, 15 bp, Homo sapiens
aaggtgacttaagag

SEQ ID NO: 2015216 - DNA, 15 bp, Homo sapiens
aggtgacttaagagt

SEQ ID NO: 2015217 - DNA, 15 bp, Homo sapiens
ggtgacttaagagtg

SEQ ID NO: 2015218 - DNA, 15 bp, Homo sapiens
gtgacttaagagtgg

SEQ ID NO: 2015219 - DNA, 15 bp, Homo sapiens
tgacttaagagtgga

SEQ ID NO: 2015220 - DNA, 15 bp, Homo sapiens
gacttaagagtggat

SEQ ID NO: 2015221 - DNA, 15 bp, Homo sapiens
acttaagagtggata

SEQ ID NO: 2015222 - DNA, 15 bp, Homo sapiens
cttaagagtggatag

SEQ ID NO: 2015223 - DNA, 15 bp, Homo sapiens
ttaagagtggatagc

SEQ ID NO: 2015224 - DNA, 15 bp, Homo sapiens
taagagtggatagca

SEQ ID NO: 2015225 - DNA, 15 bp, Homo sapiens
aagagtggatagcat

SEQ ID NO: 2015226 - DNA, 15 bp, Homo sapiens
agagtggatagcatc

SEQ ID NO: 2015227 - DNA, 15 bp, Homo sapiens
gagtggatagcatca

SEQ ID NO: 2015228 - DNA, 15 bp, Homo sapiens
agtggatagcatcag

SEQ ID NO: 2015229 - DNA, 15 bp, Homo sapiens
gtggatagcatcaga

SEQ ID NO: 2015230 - DNA, 15 bp, Homo sapiens
tggatagcatcagaa

SEQ ID NO: 2015231 - DNA, 15 bp, Homo sapiens
ggatagcatcagaaa

SEQ ID NO: 2015232 - DNA, 15 bp, Homo sapiens
gatagcatcagaaag

SEQ ID NO: 2015233 - DNA, 15 bp, Homo sapiens
atagcatcagaaagt

SEQ ID NO: 2015234 - DNA, 15 bp, Homo sapiens
tagcatcagaaagta

SEQ ID NO: 2015235 - DNA, 15 bp, Homo sapiens
agcatcagaaagtat

SEQ ID NO: 2015236 - DNA, 15 bp, Homo sapiens
gcatcagaaagtata

SEQ ID NO: 2015237 - DNA, 15 bp, Homo sapiens
catcagaaagtataa

SEQ ID NO: 2015238 - DNA, 15 bp, Homo sapiens
atcagaaagtataag

SEQ ID NO: 2015239 - DNA, 15 bp, Homo sapiens
tcagaaagtataagt

SEQ ID NO: 2015240 - DNA, 15 bp, Homo sapiens
cagaaagtataagtt

SEQ ID NO: 2015241 - DNA, 15 bp, Homo sapiens
agaaagtataagttt

SEQ ID NO: 2015242 - DNA, 15 bp, Homo sapiens
gaaagtataagttta

SEQ ID NO: 2015243 - DNA, 15 bp, Homo sapiens
aaagtataagtttag

SEQ ID NO: 2015244 - DNA, 15 bp, Homo sapiens
aagtataagtttagt

SEQ ID NO: 2015245 - DNA, 15 bp, Homo sapiens
agtataagtttagta

SEQ ID NO: 2015246 - DNA, 15 bp, Homo sapiens
gtataagtttagtaa

SEQ ID NO: 2015247 - DNA, 15 bp, Homo sapiens
tataagtttagtaaa

SEQ ID NO: 2015248 - DNA, 15 bp, Homo sapiens
ataagtttagtaaaa

SEQ ID NO: 2015249 - DNA, 15 bp, Homo sapiens
taagtttagtaaaaa

SEQ ID NO: 2015250 - DNA, 15 bp, Homo sapiens
aagtttagtaaaaag

SEQ ID NO: 2015251 - DNA, 15 bp, Homo sapiens
agtttagtaaaaagt

SEQ ID NO: 2015252 - DNA, 15 bp, Homo sapiens
gtttagtaaaaagtt

SEQ ID NO: 2015253 - DNA, 15 bp, Homo sapiens
tttagtaaaaagttg

SEQ ID NO: 2015254 - DNA, 15 bp, Homo sapiens
ttagtaaaaagttga

SEQ ID NO: 2015255 - DNA, 15 bp, Homo sapiens
tagtaaaaagttgag

SEQ ID NO: 2015256 - DNA, 15 bp, Homo sapiens
agtaaaaagttgaga

SEQ ID NO: 2015257 - DNA, 15 bp, Homo sapiens
gtaaaaagttgagaa

SEQ ID NO: 2015258 - DNA, 15 bp, Homo sapiens
taaaaagttgagaat

SEQ ID NO: 2015259 - DNA, 15 bp, Homo sapiens
aaaaagttgagaatc

SEQ ID NO: 2015260 - DNA, 15 bp, Homo sapiens
aaaagttgagaatca

SEQ ID NO: 2015261 - DNA, 15 bp, Homo sapiens
aaagttgagaatcat

SEQ ID NO: 2015262 - DNA, 15 bp, Homo sapiens
aagttgagaatcatc

SEQ ID NO: 2015263 - DNA, 15 bp, Homo sapiens
agttgagaatcatct

SEQ ID NO: 2015264 - DNA, 15 bp, Homo sapiens
gttgagaatcatctg

SEQ ID NO: 2015265 - DNA, 15 bp, Homo sapiens
ttgagaatcatctgt

SEQ ID NO: 2015266 - DNA, 15 bp, Homo sapiens
tgagaatcatctgtg

SEQ ID NO: 2015267 - DNA, 15 bp, Homo sapiens
gagaatcatctgtgt

SEQ ID NO: 2015268 - DNA, 15 bp, Homo sapiens
agaatcatctgtgtt

SEQ ID NO: 2015269 - DNA, 15 bp, Homo sapiens
gaatcatctgtgttt

SEQ ID NO: 2015270 - DNA, 15 bp, Homo sapiens
aatcatctgtgtttt

SEQ ID NO: 2015271 - DNA, 15 bp, Homo sapiens
atcatctgtgttttg

SEQ ID NO: 2015272 - DNA, 15 bp, Homo sapiens
tcatctgtgttttga

SEQ ID NO: 2015273 - DNA, 15 bp, Homo sapiens
catctgtgttttgat

SEQ ID NO: 2015274 - DNA, 15 bp, Homo sapiens
atctgtgttttgata

SEQ ID NO: 2015275 - DNA, 15 bp, Homo sapiens
tctgtgttttgatag

SEQ ID NO: 2015276 - DNA, 15 bp, Homo sapiens
ctgtgttttgatagt

SEQ ID NO: 2015277 - DNA, 15 bp, Homo sapiens
tgtgttttgatagtc

SEQ ID NO: 2015278 - DNA, 15 bp, Homo sapiens
gtgttttgatagtct

SEQ ID NO: 2015279 - DNA, 15 bp, Homo sapiens
tgttttgatagtctc

SEQ ID NO: 2015280 - DNA, 15 bp, Homo sapiens
gttttgatagtctct

SEQ ID NO: 2015281 - DNA, 15 bp, Homo sapiens
ttttgatagtctctt

SEQ ID NO: 2015282 - DNA, 15 bp, Homo sapiens
tttgatagtctcttt

SEQ ID NO: 2015283 - DNA, 15 bp, Homo sapiens
ttgatagtctctttt

SEQ ID NO: 2015284 - DNA, 15 bp, Homo sapiens
tgatagtctcttttc

SEQ ID NO: 2015285 - DNA, 15 bp, Homo sapiens
gatagtctcttttcc

SEQ ID NO: 2015286 - DNA, 15 bp, Homo sapiens
atagtctcttttcct

SEQ ID NO: 2015287 - DNA, 15 bp, Homo sapiens
tagtctcttttcctg

SEQ ID NO: 2015288 - DNA, 15 bp, Homo sapiens
agtctcttttcctga

SEQ ID NO: 2015289 - DNA, 15 bp, Homo sapiens
gtctcttttcctgaa

SEQ ID NO: 2015290 - DNA, 15 bp, Homo sapiens
tctcttttcctgaaa

SEQ ID NO: 2015291 - DNA, 15 bp, Homo sapiens
ctcttttcctgaaaa

SEQ ID NO: 2015292 - DNA, 15 bp, Homo sapiens
tcttttcctgaaaaa

SEQ ID NO: 2015293 - DNA, 15 bp, Homo sapiens
cttttcctgaaaaaa

SEQ ID NO: 2015294 - DNA, 15 bp, Homo sapiens
ttttcctgaaaaaaa

SEQ ID NO: 2015295 - DNA, 15 bp, Homo sapiens
tttcctgaaaaaaaa

SEQ ID NO: 2015296 - DNA, 15 bp, Homo sapiens
ttcctgaaaaaaaaa

SEQ ID NO: 2015297 - DNA, 15 bp, Homo sapiens
tcctgaaaaaaaaat

SEQ ID NO: 2015298 - DNA, 15 bp, Homo sapiens
cctgaaaaaaaaatc

SEQ ID NO: 2015299 - DNA, 15 bp, Homo sapiens
ctgaaaaaaaaatca

SEQ ID NO: 2015300 - DNA, 15 bp, Homo sapiens
tgaaaaaaaaatcac

SEQ ID NO: 2015301 - DNA, 15 bp, Homo sapiens
gaaaaaaaaatcacc

SEQ ID NO: 2015302 - DNA, 15 bp, Homo sapiens
aaaaaaaaatcaccc

SEQ ID NO: 2015303 - DNA, 15 bp, Homo sapiens
aaaaaaaatcaccca

SEQ ID NO: 2015304 - DNA, 15 bp, Homo sapiens
aaaaaaatcacccaa

SEQ ID NO: 2015305 - DNA, 15 bp, Homo sapiens
aaaaaatcacccaaa

SEQ ID NO: 2015306 - DNA, 15 bp, Homo sapiens
aaaaatcacccaaag

SEQ ID NO: 2015307 - DNA, 15 bp, Homo sapiens
aaaatcacccaaagt

SEQ ID NO: 2015308 - DNA, 15 bp, Homo sapiens
aaatcacccaaagtc

SEQ ID NO: 2015309 - DNA, 15 bp, Homo sapiens
aatcacccaaagtca

SEQ ID NO: 2015310 - DNA, 15 bp, Homo sapiens
atcacccaaagtcac

SEQ ID NO: 2015311 - DNA, 15 bp, Homo sapiens
tcacccaaagtcacc

SEQ ID NO: 2015312 - DNA, 15 bp, Homo sapiens
cacccaaagtcaccc

SEQ ID NO: 2015313 - DNA, 15 bp, Homo sapiens
acccaaagtcacccg

SEQ ID NO: 2015314 - DNA, 15 bp, Homo sapiens
cccaaagtcacccgt

SEQ ID NO: 2015315 - DNA, 15 bp, Homo sapiens
ccaaagtcacccgta

SEQ ID NO: 2015316 - DNA, 15 bp, Homo sapiens
caaagtcacccgtat

SEQ ID NO: 2015317 - DNA, 15 bp, Homo sapiens
aaagtcacccgtatt

SEQ ID NO: 2015318 - DNA, 15 bp, Homo sapiens
aagtcacccgtattt

SEQ ID NO: 2015319 - DNA, 15 bp, Homo sapiens
agtcacccgtattta

SEQ ID NO: 2015320 - DNA, 15 bp, Homo sapiens
gtcacccgtatttag

SEQ ID NO: 2015321 - DNA, 15 bp, Homo sapiens
tcacccgtatttaga

SEQ ID NO: 2015322 - DNA, 15 bp, Homo sapiens
cacccgtatttagaa

SEQ ID NO: 2015323 - DNA, 15 bp, Homo sapiens
acccgtatttagaat

SEQ ID NO: 2015324 - DNA, 15 bp, Homo sapiens
cccgtatttagaatg

SEQ ID NO: 2015325 - DNA, 15 bp, Homo sapiens
ccgtatttagaatga

SEQ ID NO: 2015326 - DNA, 15 bp, Homo sapiens
cgtatttagaatgaa

SEQ ID NO: 2015327 - DNA, 15 bp, Homo sapiens
gtatttagaatgaag

SEQ ID NO: 2015328 - DNA, 15 bp, Homo sapiens
tatttagaatgaagc

SEQ ID NO: 2015329 - DNA, 15 bp, Homo sapiens
atttagaatgaagcc

SEQ ID NO: 2015330 - DNA, 15 bp, Homo sapiens
tttagaatgaagcca

SEQ ID NO: 2015331 - DNA, 15 bp, Homo sapiens
ttagaatgaagccat

SEQ ID NO: 2015332 - DNA, 15 bp, Homo sapiens
tagaatgaagccata

SEQ ID NO: 2015333 - DNA, 15 bp, Homo sapiens
agaatgaagccatag

SEQ ID NO: 2015334 - DNA, 15 bp, Homo sapiens
gaatgaagccatagt

SEQ ID NO: 2015335 - DNA, 15 bp, Homo sapiens
aatgaagccatagtc

SEQ ID NO: 2015336 - DNA, 15 bp, Homo sapiens
atgaagccatagtct

SEQ ID NO: 2015337 - DNA, 15 bp, Homo sapiens
tgaagccatagtctt

SEQ ID NO: 2015338 - DNA, 15 bp, Homo sapiens
gaagccatagtcttc

SEQ ID NO: 2015339 - DNA, 15 bp, Homo sapiens
aagccatagtcttct

SEQ ID NO: 2015340 - DNA, 15 bp, Homo sapiens
agccatagtcttctt

SEQ ID NO: 2015341 - DNA, 15 bp, Homo sapiens
gccatagtcttcttt

SEQ ID NO: 2015342 - DNA, 15 bp, Homo sapiens
ccatagtcttctttt

SEQ ID NO: 2015343 - DNA, 15 bp, Homo sapiens
catagtcttcttttc

SEQ ID NO: 2015344 - DNA, 15 bp, Homo sapiens
atagtcttcttttcc

SEQ ID NO: 2015345 - DNA, 15 bp, Homo sapiens
tagtcttcttttcct

SEQ ID NO: 2015346 - DNA, 15 bp, Homo sapiens
agtcttcttttcctt

SEQ ID NO: 2015347 - DNA, 15 bp, Homo sapiens
gtcttcttttccttt

SEQ ID NO: 2015348 - DNA, 15 bp, Homo sapiens
tcttcttttcctttt

SEQ ID NO: 2015349 - DNA, 15 bp, Homo sapiens
cttcttttccttttt

SEQ ID NO: 2015350 - DNA, 15 bp, Homo sapiens
ttttccttttttttg

SEQ ID NO: 2015351 - DNA, 15 bp, Homo sapiens
tttccttttttttgc

SEQ ID NO: 2015352 - DNA, 15 bp, Homo sapiens
ttccttttttttgct

SEQ ID NO: 2015353 - DNA, 15 bp, Homo sapiens
tccttttttttgctt

SEQ ID NO: 2015354 - DNA, 15 bp, Homo sapiens
ccttttttttgcttt

SEQ ID NO: 2015355 - DNA, 15 bp, Homo sapiens
cttttttttgcttta

SEQ ID NO: 2015356 - DNA, 15 bp, Homo sapiens
ttttttttgctttat

SEQ ID NO: 2015357 - DNA, 15 bp, Homo sapiens
tttttttgctttata

SEQ ID NO: 2015358 - DNA, 15 bp, Homo sapiens
ttttttgctttataa

SEQ ID NO: 2015359 - DNA, 15 bp, Homo sapiens
tttttgctttataaa

SEQ ID NO: 2015360 - DNA, 15 bp, Homo sapiens
ttttgctttataaaa

SEQ ID NO: 2015361 - DNA, 15 bp, Homo sapiens
tttgctttataaaac

SEQ ID NO: 2015362 - DNA, 15 bp, Homo sapiens
ttgctttataaaact

SEQ ID NO: 2015363 - DNA, 15 bp, Homo sapiens
tgctttataaaactt

SEQ ID NO: 2015364 - DNA, 15 bp, Homo sapiens
gctttataaaacttg

SEQ ID NO: 2015365 - DNA, 15 bp, Homo sapiens
ctttataaaacttga

SEQ ID NO: 2015366 - DNA, 15 bp, Homo sapiens
tttataaaacttgat

SEQ ID NO: 2015367 - DNA, 15 bp, Homo sapiens
ttataaaacttgatt

SEQ ID NO: 2015368 - DNA, 15 bp, Homo sapiens
tataaaacttgattt

SEQ ID NO: 2015369 - DNA, 15 bp, Homo sapiens
ataaaacttgatttt

SEQ ID NO: 2015370 - DNA, 15 bp, Homo sapiens
taaaacttgattttg

SEQ ID NO: 2015371 - DNA, 15 bp, Homo sapiens
aaaacttgattttgt

SEQ ID NO: 2015372 - DNA, 15 bp, Homo sapiens
aaacttgattttgtt

SEQ ID NO: 2015373 - DNA, 15 bp, Homo sapiens
aacttgattttgttt

SEQ ID NO: 2015374 - DNA, 15 bp, Homo sapiens
acttgattttgtttg

SEQ ID NO: 2015375 - DNA, 15 bp, Homo sapiens
cttgattttgtttgg

SEQ ID NO: 2015376 - DNA, 15 bp, Homo sapiens
ttgattttgtttggg

SEQ ID NO: 2015377 - DNA, 15 bp, Homo sapiens
tgattttgtttgggt

SEQ ID NO: 2015378 - DNA, 15 bp, Homo sapiens
gattttgtttgggtg

SEQ ID NO: 2015379 - DNA, 15 bp, Homo sapiens
attttgtttgggtgt

SEQ ID NO: 2015380 - DNA, 15 bp, Homo sapiens
ttttgtttgggtgtt

SEQ ID NO: 2015381 - DNA, 15 bp, Homo sapiens
tttgtttgggtgttt

SEQ ID NO: 2015382 - DNA, 15 bp, Homo sapiens
ttgtttgggtgttta

SEQ ID NO: 2015383 - DNA, 15 bp, Homo sapiens
tgtttgggtgtttat

SEQ ID NO: 2015384 - DNA, 15 bp, Homo sapiens
gtttgggtgtttata

SEQ ID NO: 2015385 - DNA, 15 bp, Homo sapiens
tttgggtgtttataa

SEQ ID NO: 2015386 - DNA, 15 bp, Homo sapiens
ttgggtgtttataaa

SEQ ID NO: 2015387 - DNA, 15 bp, Homo sapiens
tgggtgtttataaag

SEQ ID NO: 2015388 - DNA, 15 bp, Homo sapiens
gggtgtttataaaga

SEQ ID NO: 2015389 - DNA, 15 bp, Homo sapiens
ggtgtttataaagaa

SEQ ID NO: 2015390 - DNA, 15 bp, Homo sapiens
gtgtttataaagaag

SEQ ID NO: 2015391 - DNA, 15 bp, Homo sapiens
tgtttataaagaaga

SEQ ID NO: 2015392 - DNA, 15 bp, Homo sapiens
gtttataaagaagaa

SEQ ID NO: 2015393 - DNA, 15 bp, Homo sapiens
tttataaagaagaaa

SEQ ID NO: 2015394 - DNA, 15 bp, Homo sapiens
ttataaagaagaaac

SEQ ID NO: 2015395 - DNA, 15 bp, Homo sapiens
tataaagaagaaact

SEQ ID NO: 2015396 - DNA, 15 bp, Homo sapiens
taaagaagaaacttg

SEQ ID NO: 2015397 - DNA, 15 bp, Homo sapiens
aaagaagaaacttgt

SEQ ID NO: 2015398 - DNA, 15 bp, Homo sapiens
aagaagaaacttgta

SEQ ID NO: 2015399 - DNA, 15 bp, Homo sapiens
agaagaaacttgtaa

SEQ ID NO: 2015400 - DNA, 15 bp, Homo sapiens
gaagaaacttgtaaa

SEQ ID NO: 2015401 - DNA, 15 bp, Homo sapiens
aagaaacttgtaaag

SEQ ID NO: 2015402 - DNA, 15 bp, Homo sapiens
agaaacttgtaaaga

SEQ ID NO: 2015403 - DNA, 15 bp, Homo sapiens
gaaacttgtaaagat

SEQ ID NO: 2015404 - DNA, 15 bp, Homo sapiens
aaacttgtaaagatg

SEQ ID NO: 2015405 - DNA, 15 bp, Homo sapiens
aacttgtaaagatgc

SEQ ID NO: 2015406 - DNA, 15 bp, Homo sapiens
acttgtaaagatgcc

SEQ ID NO: 2015407 - DNA, 15 bp, Homo sapiens
cttgtaaagatgcca

SEQ ID NO: 2015408 - DNA, 15 bp, Homo sapiens
ttgtaaagatgccag

SEQ ID NO: 2015409 - DNA, 15 bp, Homo sapiens
tgtaaagatgccagt

SEQ ID NO: 2015410 - DNA, 15 bp, Homo sapiens
gtaaagatgccagtt

SEQ ID NO: 2015411 - DNA, 15 bp, Homo sapiens
taaagatgccagttt

SEQ ID NO: 2015412 - DNA, 15 bp, Homo sapiens
aaagatgccagtttt

SEQ ID NO: 2015413 - DNA, 15 bp, Homo sapiens
aagatgccagtttta

SEQ ID NO: 2015414 - DNA, 15 bp, Homo sapiens
agatgccagttttaa

SEQ ID NO: 2015415 - DNA, 15 bp, Homo sapiens
gatgccagttttaaa

SEQ ID NO: 2015416 - DNA, 15 bp, Homo sapiens
atgccagttttaaaa

SEQ ID NO: 2015417 - DNA, 15 bp, Homo sapiens
tgccagttttaaaat

SEQ ID NO: 2015418 - DNA, 15 bp, Homo sapiens
gccagttttaaaatt

SEQ ID NO: 2015419 - DNA, 15 bp, Homo sapiens
ccagttttaaaattt

SEQ ID NO: 2015420 - DNA, 15 bp, Homo sapiens
cagttttaaaatttg

SEQ ID NO: 2015421 - DNA, 15 bp, Homo sapiens
agttttaaaatttgt

SEQ ID NO: 2015422 - DNA, 15 bp, Homo sapiens
gttttaaaatttgtg

SEQ ID NO: 2015423 - DNA, 15 bp, Homo sapiens
ttttaaaatttgtgc

SEQ ID NO: 2015424 - DNA, 15 bp, Homo sapiens
tttaaaatttgtgcc

SEQ ID NO: 2015425 - DNA, 15 bp, Homo sapiens
ttaaaatttgtgccc

SEQ ID NO: 2015426 - DNA, 15 bp, Homo sapiens
taaaatttgtgcccc

SEQ ID NO: 2015427 - DNA, 15 bp, Homo sapiens
aaaatttgtgccccc

SEQ ID NO: 2015428 - DNA, 15 bp, Homo sapiens
aaatttgtgcccccc

SEQ ID NO: 2015429 - DNA, 15 bp, Homo sapiens
aatttgtgccccccc

SEQ ID NO: 2015430 - DNA, 15 bp, Homo sapiens
atttgtgccccccca

SEQ ID NO: 2015431 - DNA, 15 bp, Homo sapiens
tttgtgcccccccaa

SEQ ID NO: 2015432 - DNA, 15 bp, Homo sapiens
ttgtgcccccccaac

SEQ ID NO: 2015433 - DNA, 15 bp, Homo sapiens
tgtgcccccccaaca

SEQ ID NO: 2015434 - DNA, 15 bp, Homo sapiens
gtgcccccccaacat

SEQ ID NO: 2015435 - DNA, 15 bp, Homo sapiens
tgcccccccaacatg

SEQ ID NO: 2015436 - DNA, 15 bp, Homo sapiens
gcccccccaacatgg

SEQ ID NO: 2015437 - DNA, 15 bp, Homo sapiens
cccccccaacatggt

SEQ ID NO: 2015438 - DNA, 15 bp, Homo sapiens
ccccccaacatggta

SEQ ID NO: 2015439 - DNA, 15 bp, Homo sapiens
cccccaacatggtag

SEQ ID NO: 2015440 - DNA, 15 bp, Homo sapiens
ccccaacatggtagg

SEQ ID NO: 2015441 - DNA, 15 bp, Homo sapiens
cccaacatggtagga

SEQ ID NO: 2015442 - DNA, 15 bp, Homo sapiens
ccaacatggtaggaa

SEQ ID NO: 2015443 - DNA, 15 bp, Homo sapiens
caacatggtaggaaa

SEQ ID NO: 2015444 - DNA, 15 bp, Homo sapiens
aacatggtaggaaaa

SEQ ID NO: 2015445 - DNA, 15 bp, Homo sapiens
acatggtaggaaaat

SEQ ID NO: 2015446 - DNA, 15 bp, Homo sapiens
catggtaggaaaata

SEQ ID NO: 2015447 - DNA, 15 bp, Homo sapiens
atggtaggaaaatat

SEQ ID NO: 2015448 - DNA, 15 bp, Homo sapiens
tggtaggaaaatatt

SEQ ID NO: 2015449 - DNA, 15 bp, Homo sapiens
ggtaggaaaatattt

SEQ ID NO: 2015450 - DNA, 15 bp, Homo sapiens
gtaggaaaatattta

SEQ ID NO: 2015451 - DNA, 15 bp, Homo sapiens
taggaaaatatttac

SEQ ID NO: 2015452 - DNA, 15 bp, Homo sapiens
aggaaaatatttaca

SEQ ID NO: 2015453 - DNA, 15 bp, Homo sapiens
ggaaaatatttacat

SEQ ID NO: 2015454 - DNA, 15 bp, Homo sapiens
gaaaatatttacatt

SEQ ID NO: 2015455 - DNA, 15 bp, Homo sapiens
aaaatatttacattt

SEQ ID NO: 2015456 - DNA, 15 bp, Homo sapiens
aaatatttacatttt

SEQ ID NO: 2015457 - DNA, 15 bp, Homo sapiens
aatatttacatttta

SEQ ID NO: 2015458 - DNA, 15 bp, Homo sapiens
atatttacattttat

SEQ ID NO: 2015459 - DNA, 15 bp, Homo sapiens
tatttacattttatg

SEQ ID NO: 2015460 - DNA, 15 bp, Homo sapiens
atttacattttatga

SEQ ID NO: 2015461 - DNA, 15 bp, Homo sapiens
tttacattttatgat

SEQ ID NO: 2015462 - DNA, 15 bp, Homo sapiens
ttacattttatgatg

SEQ ID NO: 2015463 - DNA, 15 bp, Homo sapiens
tacattttatgatgc

SEQ ID NO: 2015464 - DNA, 15 bp, Homo sapiens
acattttatgatgca

SEQ ID NO: 2015465 - DNA, 15 bp, Homo sapiens
cattttatgatgcat

SEQ ID NO: 2015466 - DNA, 15 bp, Homo sapiens
attttatgatgcatc

SEQ ID NO: 2015467 - DNA, 15 bp, Homo sapiens
ttttatgatgcatcc

SEQ ID NO: 2015468 - DNA, 15 bp, Homo sapiens
tttatgatgcatcct

SEQ ID NO: 2015469 - DNA, 15 bp, Homo sapiens
ttatgatgcatcctc

SEQ ID NO: 2015470 - DNA, 15 bp, Homo sapiens
tatgatgcatcctca

SEQ ID NO: 2015471 - DNA, 15 bp, Homo sapiens
atgatgcatcctcat

SEQ ID NO: 2015472 - DNA, 15 bp, Homo sapiens
tgatgcatcctcata

SEQ ID NO: 2015473 - DNA, 15 bp, Homo sapiens
gatgcatcctcatat

SEQ ID NO: 2015474 - DNA, 15 bp, Homo sapiens
atgcatcctcatatt

SEQ ID NO: 2015475 - DNA, 15 bp, Homo sapiens
tgcatcctcatattt

SEQ ID NO: 2015476 - DNA, 15 bp, Homo sapiens
gcatcctcatatttt

SEQ ID NO: 2015477 - DNA, 15 bp, Homo sapiens
catcctcatattttt

SEQ ID NO: 2015478 - DNA, 15 bp, Homo sapiens
atcctcatatttttt

SEQ ID NO: 2015479 - DNA, 15 bp, Homo sapiens
tcctcatattttttt

SEQ ID NO: 2015480 - DNA, 15 bp, Homo sapiens
cctcatatttttttc

SEQ ID NO: 2015481 - DNA, 15 bp, Homo sapiens
ctcatatttttttca

SEQ ID NO: 2015482 - DNA, 15 bp, Homo sapiens
tcatatttttttcag

SEQ ID NO: 2015483 - DNA, 15 bp, Homo sapiens
catatttttttcagg

SEQ ID NO: 2015484 - DNA, 15 bp, Homo sapiens
atatttttttcaggg

SEQ ID NO: 2015485 - DNA, 15 bp, Homo sapiens
tatttttttcagggt

SEQ ID NO: 2015486 - DNA, 15 bp, Homo sapiens
atttttttcagggta

SEQ ID NO: 2015487 - DNA, 15 bp, Homo sapiens
tttttttcagggtaa

SEQ ID NO: 2015488 - DNA, 15 bp, Homo sapiens
ttttttcagggtaaa

SEQ ID NO: 2015489 - DNA, 15 bp, Homo sapiens
tttttcagggtaaat

SEQ ID NO: 2015490 - DNA, 15 bp, Homo sapiens
ttttcagggtaaatg

SEQ ID NO: 2015491 - DNA, 15 bp, Homo sapiens
tttcagggtaaatgt

SEQ ID NO: 2015492 - DNA, 15 bp, Homo sapiens
ttcagggtaaatgtt

SEQ ID NO: 2015493 - DNA, 15 bp, Homo sapiens
tcagggtaaatgttc

SEQ ID NO: 2015494 - DNA, 15 bp, Homo sapiens
cagggtaaatgttcc

SEQ ID NO: 2015495 - DNA, 15 bp, Homo sapiens
agggtaaatgttcct

SEQ ID NO: 2015496 - DNA, 15 bp, Homo sapiens
gggtaaatgttccta

SEQ ID NO: 2015497 - DNA, 15 bp, Homo sapiens
ggtaaatgttcctaa

SEQ ID NO: 2015498 - DNA, 15 bp, Homo sapiens
gtaaatgttcctaac

SEQ ID NO: 2015499 - DNA, 15 bp, Homo sapiens
taaatgttcctaacc

SEQ ID NO: 2015500 - DNA, 15 bp, Homo sapiens
aaatgttcctaaccc

SEQ ID NO: 2015501 - DNA, 15 bp, Homo sapiens
aatgttcctaaccca

SEQ ID NO: 2015502 - DNA, 15 bp, Homo sapiens
atgttcctaacccaa

SEQ ID NO: 2015503 - DNA, 15 bp, Homo sapiens
tgttcctaacccaac

SEQ ID NO: 2015504 - DNA, 15 bp, Homo sapiens
gttcctaacccaacc

SEQ ID NO: 2015505 - DNA, 15 bp, Homo sapiens
ttcctaacccaaccc

SEQ ID NO: 2015506 - DNA, 15 bp, Homo sapiens
tcctaacccaaccct

SEQ ID NO: 2015507 - DNA, 15 bp, Homo sapiens
cctaacccaaccctt

SEQ ID NO: 2015508 - DNA, 15 bp, Homo sapiens
ctaacccaacccttc

SEQ ID NO: 2015509 - DNA, 15 bp, Homo sapiens
taacccaacccttca

SEQ ID NO: 2015510 - DNA, 15 bp, Homo sapiens
aacccaacccttcag

SEQ ID NO: 2015511 - DNA, 15 bp, Homo sapiens
acccaacccttcagt

SEQ ID NO: 2015512 - DNA, 15 bp, Homo sapiens
cccaacccttcagtt

SEQ ID NO: 2015513 - DNA, 15 bp, Homo sapiens
ccaacccttcagttg

SEQ ID NO: 2015514 - DNA, 15 bp, Homo sapiens
caacccttcagttga

SEQ ID NO: 2015515 - DNA, 15 bp, Homo sapiens
aacccttcagttgat

SEQ ID NO: 2015516 - DNA, 15 bp, Homo sapiens
acccttcagttgatg

SEQ ID NO: 2015517 - DNA, 15 bp, Homo sapiens
cccttcagttgatgt

SEQ ID NO: 2015518 - DNA, 15 bp, Homo sapiens
ccttcagttgatgtt

SEQ ID NO: 2015519 - DNA, 15 bp, Homo sapiens
cttcagttgatgttt

SEQ ID NO: 2015520 - DNA, 15 bp, Homo sapiens
ttcagttgatgtttt

SEQ ID NO: 2015521 - DNA, 15 bp, Homo sapiens
tcagttgatgtttta

SEQ ID NO: 2015522 - DNA, 15 bp, Homo sapiens
cagttgatgttttaa

SEQ ID NO: 2015523 - DNA, 15 bp, Homo sapiens
agttgatgttttaac

SEQ ID NO: 2015524 - DNA, 15 bp, Homo sapiens
gttgatgttttaaca

SEQ ID NO: 2015525 - DNA, 15 bp, Homo sapiens
ttgatgttttaacat

SEQ ID NO: 2015526 - DNA, 15 bp, Homo sapiens
tgatgttttaacatg

SEQ ID NO: 2015527 - DNA, 15 bp, Homo sapiens
gatgttttaacatgt

SEQ ID NO: 2015528 - DNA, 15 bp, Homo sapiens
atgttttaacatgtt

SEQ ID NO: 2015529 - DNA, 15 bp, Homo sapiens
tgttttaacatgttt

SEQ ID NO: 2015530 - DNA, 15 bp, Homo sapiens
gttttaacatgtttg

SEQ ID NO: 2015531 - DNA, 15 bp, Homo sapiens
ttttaacatgtttgt

SEQ ID NO: 2015532 - DNA, 15 bp, Homo sapiens
tttaacatgtttgtt

SEQ ID NO: 2015533 - DNA, 15 bp, Homo sapiens
ttaacatgtttgttt

SEQ ID NO: 2015534 - DNA, 15 bp, Homo sapiens
taacatgtttgtttt

SEQ ID NO: 2015535 - DNA, 15 bp, Homo sapiens
aacatgtttgtttta

SEQ ID NO: 2015536 - DNA, 15 bp, Homo sapiens
acatgtttgttttac

SEQ ID NO: 2015537 - DNA, 15 bp, Homo sapiens
catgtttgttttact

SEQ ID NO: 2015538 - DNA, 15 bp, Homo sapiens
atgtttgttttactc

SEQ ID NO: 2015539 - DNA, 15 bp, Homo sapiens
tgtttgttttactct

SEQ ID NO: 2015540 - DNA, 15 bp, Homo sapiens
gtttgttttactctt

SEQ ID NO: 2015541 - DNA, 15 bp, Homo sapiens
tttgttttactcttt

SEQ ID NO: 2015542 - DNA, 15 bp, Homo sapiens
ttgttttactctttg

SEQ ID NO: 2015543 - DNA, 15 bp, Homo sapiens
tgttttactctttgc

SEQ ID NO: 2015544 - DNA, 15 bp, Homo sapiens
gttttactctttgca

SEQ ID NO: 2015545 - DNA, 15 bp, Homo sapiens
ttttactctttgcaa

SEQ ID NO: 2015546 - DNA, 15 bp, Homo sapiens
tttactctttgcaat

SEQ ID NO: 2015547 - DNA, 15 bp, Homo sapiens
ttactctttgcaatg

SEQ ID NO: 2015548 - DNA, 15 bp, Homo sapiens
tactctttgcaatga

SEQ ID NO: 2015549 - DNA, 15 bp, Homo sapiens
actctttgcaatgaa

SEQ ID NO: 2015550 - DNA, 15 bp, Homo sapiens
ctctttgcaatgaaa

SEQ ID NO: 2015551 - DNA, 15 bp, Homo sapiens
tctttgcaatgaaac

SEQ ID NO: 2015552 - DNA, 15 bp, Homo sapiens
ctttgcaatgaaacc

SEQ ID NO: 2015553 - DNA, 15 bp, Homo sapiens
tttgcaatgaaacca

SEQ ID NO: 2015554 - DNA, 15 bp, Homo sapiens
ttgcaatgaaaccaa

SEQ ID NO: 2015555 - DNA, 15 bp, Homo sapiens
tgcaatgaaaccaag

SEQ ID NO: 2015556 - DNA, 15 bp, Homo sapiens
gcaatgaaaccaaga

SEQ ID NO: 2015557 - DNA, 15 bp, Homo sapiens
caatgaaaccaagaa

SEQ ID NO: 2015558 - DNA, 15 bp, Homo sapiens
aatgaaaccaagaag

SEQ ID NO: 2015559 - DNA, 15 bp, Homo sapiens
atgaaaccaagaaga

SEQ ID NO: 2015560 - DNA, 15 bp, Homo sapiens
tgaaaccaagaagaa

SEQ ID NO: 2015561 - DNA, 15 bp, Homo sapiens
gaaaccaagaagaaa

SEQ ID NO: 2015562 - DNA, 15 bp, Homo sapiens
aaaccaagaagaaaa

SEQ ID NO: 2015563 - DNA, 15 bp, Homo sapiens
aaccaagaagaaaat

SEQ ID NO: 2015564 - DNA, 15 bp, Homo sapiens
accaagaagaaaatt

SEQ ID NO: 2015565 - DNA, 15 bp, Homo sapiens
ccaagaagaaaattt

SEQ ID NO: 2015566 - DNA, 15 bp, Homo sapiens
caagaagaaaatttc

SEQ ID NO: 2015567 - DNA, 15 bp, Homo sapiens
aagaagaaaatttct

SEQ ID NO: 2015568 - DNA, 15 bp, Homo sapiens
agaagaaaatttctc

SEQ ID NO: 2015569 - DNA, 15 bp, Homo sapiens
gaagaaaatttctct

SEQ ID NO: 2015570 - DNA, 15 bp, Homo sapiens
aagaaaatttctcta

SEQ ID NO: 2015571 - DNA, 15 bp, Homo sapiens
agaaaatttctctat

SEQ ID NO: 2015572 - DNA, 15 bp, Homo sapiens
gaaaatttctctatt

SEQ ID NO: 2015573 - DNA, 15 bp, Homo sapiens
aaaatttctctattc

SEQ ID NO: 2015574 - DNA, 15 bp, Homo sapiens
aaatttctctattct

SEQ ID NO: 2015575 - DNA, 15 bp, Homo sapiens
aatttctctattctc

SEQ ID NO: 2015576 - DNA, 15 bp, Homo sapiens
atttctctattctca

SEQ ID NO: 2015577 - DNA, 15 bp, Homo sapiens
tttctctattctcaa

SEQ ID NO: 2015578 - DNA, 15 bp, Homo sapiens
ttctctattctcaaa

SEQ ID NO: 2015579 - DNA, 15 bp, Homo sapiens
tctctattctcaaac

SEQ ID NO: 2015580 - DNA, 15 bp, Homo sapiens
ctctattctcaaaca

SEQ ID NO: 2015581 - DNA, 15 bp, Homo sapiens
tctattctcaaacat

SEQ ID NO: 2015582 - DNA, 15 bp, Homo sapiens
ctattctcaaacatg

SEQ ID NO: 2015583 - DNA, 15 bp, Homo sapiens
tattctcaaacatgc

SEQ ID NO: 2015584 - DNA, 15 bp, Homo sapiens
attctcaaacatgca

SEQ ID NO: 2015585 - DNA, 15 bp, Homo sapiens
ttctcaaacatgcat

SEQ ID NO: 2015586 - DNA, 15 bp, Homo sapiens
tctcaaacatgcatt

SEQ ID NO: 2015587 - DNA, 15 bp, Homo sapiens
ctcaaacatgcattt

SEQ ID NO: 2015588 - DNA, 15 bp, Homo sapiens
tcaaacatgcatttt

SEQ ID NO: 2015589 - DNA, 15 bp, Homo sapiens
caaacatgcatttta

SEQ ID NO: 2015590 - DNA, 15 bp, Homo sapiens
aaacatgcattttaa

SEQ ID NO: 2015591 - DNA, 15 bp, Homo sapiens
aacatgcattttaat

SEQ ID NO: 2015592 - DNA, 15 bp, Homo sapiens
acatgcattttaatc

SEQ ID NO: 2015593 - DNA, 15 bp, Homo sapiens
catgcattttaatct

SEQ ID NO: 2015594 - DNA, 15 bp, Homo sapiens
atgcattttaatctc

SEQ ID NO: 2015595 - DNA, 15 bp, Homo sapiens
tgcattttaatctcc

SEQ ID NO: 2015596 - DNA, 15 bp, Homo sapiens
gcattttaatctccc

SEQ ID NO: 2015597 - DNA, 15 bp, Homo sapiens
cattttaatctccca

SEQ ID NO: 2015598 - DNA, 15 bp, Homo sapiens
attttaatctcccat

SEQ ID NO: 2015599 - DNA, 15 bp, Homo sapiens
ttttaatctcccatt

SEQ ID NO: 2015600 - DNA, 15 bp, Homo sapiens
tttaatctcccattc

SEQ ID NO: 2015601 - DNA, 15 bp, Homo sapiens
ttaatctcccattcc

SEQ ID NO: 2015602 - DNA, 15 bp, Homo sapiens
taatctcccattccc

SEQ ID NO: 2015603 - DNA, 15 bp, Homo sapiens
aatctcccattccca

SEQ ID NO: 2015604 - DNA, 15 bp, Homo sapiens
atctcccattcccac

SEQ ID NO: 2015605 - DNA, 15 bp, Homo sapiens
tctcccattcccaca

SEQ ID NO: 2015606 - DNA, 15 bp, Homo sapiens
ctcccattcccacaa

SEQ ID NO: 2015607 - DNA, 15 bp, Homo sapiens
tcccattcccacaaa

SEQ ID NO: 2015608 - DNA, 15 bp, Homo sapiens
cccattcccacaaac

SEQ ID NO: 2015609 - DNA, 15 bp, Homo sapiens
ccattcccacaaact

SEQ ID NO: 2015610 - DNA, 15 bp, Homo sapiens
cattcccacaaactt

SEQ ID NO: 2015611 - DNA, 15 bp, Homo sapiens
attcccacaaacttg

SEQ ID NO: 2015612 - DNA, 15 bp, Homo sapiens
ttcccacaaacttgg

SEQ ID NO: 2015613 - DNA, 15 bp, Homo sapiens
tcccacaaacttgga

SEQ ID NO: 2015614 - DNA, 15 bp, Homo sapiens
cccacaaacttggaa

SEQ ID NO: 2015615 - DNA, 15 bp, Homo sapiens
ccacaaacttggaat

SEQ ID NO: 2015616 - DNA, 15 bp, Homo sapiens
cacaaacttggaata

SEQ ID NO: 2015617 - DNA, 15 bp, Homo sapiens
acaaacttggaatat

SEQ ID NO: 2015618 - DNA, 15 bp, Homo sapiens
caaacttggaatatt

SEQ ID NO: 2015619 - DNA, 15 bp, Homo sapiens
aaacttggaatattt

SEQ ID NO: 2015620 - DNA, 15 bp, Homo sapiens
aacttggaatattta

SEQ ID NO: 2015621 - DNA, 15 bp, Homo sapiens
acttggaatatttat

SEQ ID NO: 2015622 - DNA, 15 bp, Homo sapiens
cttggaatatttatt

SEQ ID NO: 2015623 - DNA, 15 bp, Homo sapiens
ttggaatatttattt

SEQ ID NO: 2015624 - DNA, 15 bp, Homo sapiens
tggaatatttattta

SEQ ID NO: 2015625 - DNA, 15 bp, Homo sapiens
ggaatatttatttaa

SEQ ID NO: 2015626 - DNA, 15 bp, Homo sapiens
gaatatttatttaat

SEQ ID NO: 2015627 - DNA, 15 bp, Homo sapiens
aatatttatttaata

SEQ ID NO: 2015628 - DNA, 15 bp, Homo sapiens
atatttatttaatac

SEQ ID NO: 2015629 - DNA, 15 bp, Homo sapiens
tatttatttaatact

SEQ ID NO: 2015630 - DNA, 15 bp, Homo sapiens
atttatttaatactt

SEQ ID NO: 2015631 - DNA, 15 bp, Homo sapiens
tttatttaatacttg

SEQ ID NO: 2015632 - DNA, 15 bp, Homo sapiens
ttatttaatacttga

SEQ ID NO: 2015633 - DNA, 15 bp, Homo sapiens
tatttaatacttgag

SEQ ID NO: 2015634 - DNA, 15 bp, Homo sapiens
atttaatacttgagg

SEQ ID NO: 2015635 - DNA, 15 bp, Homo sapiens
tttaatacttgaggt

SEQ ID NO: 2015636 - DNA, 15 bp, Homo sapiens
ttaatacttgaggta

SEQ ID NO: 2015637 - DNA, 15 bp, Homo sapiens
taatacttgaggtat

SEQ ID NO: 2015638 - DNA, 15 bp, Homo sapiens
aatacttgaggtatt

SEQ ID NO: 2015639 - DNA, 15 bp, Homo sapiens
atacttgaggtatta

SEQ ID NO: 2015640 - DNA, 15 bp, Homo sapiens
tacttgaggtattaa

SEQ ID NO: 2015641 - DNA, 15 bp, Homo sapiens
acttgaggtattaat

SEQ ID NO: 2015642 - DNA, 15 bp, Homo sapiens
cttgaggtattaatt

SEQ ID NO: 2015643 - DNA, 15 bp, Homo sapiens
ttgaggtattaattt

SEQ ID NO: 2015644 - DNA, 15 bp, Homo sapiens
tgaggtattaattta

SEQ ID NO: 2015645 - DNA, 15 bp, Homo sapiens
gaggtattaatttaa

SEQ ID NO: 2015646 - DNA, 15 bp, Homo sapiens
aggtattaatttaaa

SEQ ID NO: 2015647 - DNA, 15 bp, Homo sapiens
ggtattaatttaaaa

SEQ ID NO: 2015648 - DNA, 15 bp, Homo sapiens
gtattaatttaaaac

SEQ ID NO: 2015649 - DNA, 15 bp, Homo sapiens
tattaatttaaaact

SEQ ID NO: 2015650 - DNA, 15 bp, Homo sapiens
attaatttaaaactt

SEQ ID NO: 2015651 - DNA, 15 bp, Homo sapiens
ttaatttaaaacttg

SEQ ID NO: 2015652 - DNA, 15 bp, Homo sapiens
taatttaaaacttga

SEQ ID NO: 2015653 - DNA, 15 bp, Homo sapiens
aatttaaaacttgaa

SEQ ID NO: 2015654 - DNA, 15 bp, Homo sapiens
atttaaaacttgaag

SEQ ID NO: 2015655 - DNA, 15 bp, Homo sapiens
tttaaaacttgaagc

SEQ ID NO: 2015656 - DNA, 15 bp, Homo sapiens
ttaaaacttgaagca

SEQ ID NO: 2015657 - DNA, 15 bp, Homo sapiens
taaaacttgaagcat

SEQ ID NO: 2015658 - DNA, 15 bp, Homo sapiens
aaaacttgaagcata

SEQ ID NO: 2015659 - DNA, 15 bp, Homo sapiens
aaacttgaagcatat

SEQ ID NO: 2015660 - DNA, 15 bp, Homo sapiens
aacttgaagcatata

SEQ ID NO: 2015661 - DNA, 15 bp, Homo sapiens
acttgaagcatatac

SEQ ID NO: 2015662 - DNA, 15 bp, Homo sapiens
cttgaagcatatact

SEQ ID NO: 2015663 - DNA, 15 bp, Homo sapiens
ttgaagcatatactt

SEQ ID NO: 2015664 - DNA, 15 bp, Homo sapiens
tgaagcatatactta

SEQ ID NO: 2015665 - DNA, 15 bp, Homo sapiens
gaagcatatacttag

SEQ ID NO: 2015666 - DNA, 15 bp, Homo sapiens
aagcatatacttagt

SEQ ID NO: 2015667 - DNA, 15 bp, Homo sapiens
agcatatacttagtc

SEQ ID NO: 2015668 - DNA, 15 bp, Homo sapiens
gcatatacttagtct

SEQ ID NO: 2015669 - DNA, 15 bp, Homo sapiens
catatacttagtctc

SEQ ID NO: 2015670 - DNA, 15 bp, Homo sapiens
atatacttagtctct

SEQ ID NO: 2015671 - DNA, 15 bp, Homo sapiens
tatacttagtctctt

SEQ ID NO: 2015672 - DNA, 15 bp, Homo sapiens
atacttagtctctta

SEQ ID NO: 2015673 - DNA, 15 bp, Homo sapiens
tacttagtctcttat

SEQ ID NO: 2015674 - DNA, 15 bp, Homo sapiens
acttagtctcttatt

SEQ ID NO: 2015675 - DNA, 15 bp, Homo sapiens
cttagtctcttattc

SEQ ID NO: 2015676 - DNA, 15 bp, Homo sapiens
ttagtctcttattcc

SEQ ID NO: 2015677 - DNA, 15 bp, Homo sapiens
tagtctcttattcct

SEQ ID NO: 2015678 - DNA, 15 bp, Homo sapiens
agtctcttattcctc

SEQ ID NO: 2015679 - DNA, 15 bp, Homo sapiens
gtctcttattcctct

SEQ ID NO: 2015680 - DNA, 15 bp, Homo sapiens
tctcttattcctctc

SEQ ID NO: 2015681 - DNA, 15 bp, Homo sapiens
ctcttattcctctcc

SEQ ID NO: 2015682 - DNA, 15 bp, Homo sapiens
tcttattcctctcca

SEQ ID NO: 2015683 - DNA, 15 bp, Homo sapiens
cttattcctctccac

SEQ ID NO: 2015684 - DNA, 15 bp, Homo sapiens
ttattcctctccacc

SEQ ID NO: 2015685 - DNA, 15 bp, Homo sapiens
tattcctctccaccc

SEQ ID NO: 2015686 - DNA, 15 bp, Homo sapiens
attcctctccaccct

SEQ ID NO: 2015687 - DNA, 15 bp, Homo sapiens
ttcctctccaccctg

SEQ ID NO: 2015688 - DNA, 15 bp, Homo sapiens
tcctctccaccctgg

SEQ ID NO: 2015689 - DNA, 15 bp, Homo sapiens
cctctccaccctggt

SEQ ID NO: 2015690 - DNA, 15 bp, Homo sapiens
ctctccaccctggtc

SEQ ID NO: 2015691 - DNA, 15 bp, Homo sapiens
tctccaccctggtct

SEQ ID NO: 2015692 - DNA, 15 bp, Homo sapiens
ctccaccctggtctt

SEQ ID NO: 2015693 - DNA, 15 bp, Homo sapiens
tccaccctggtcttt

SEQ ID NO: 2015694 - DNA, 15 bp, Homo sapiens
ccaccctggtctttg

SEQ ID NO: 2015695 - DNA, 15 bp, Homo sapiens
caccctggtctttga

SEQ ID NO: 2015696 - DNA, 15 bp, Homo sapiens
accctggtctttgaa

SEQ ID NO: 2015697 - DNA, 15 bp, Homo sapiens
ccctggtctttgaaa

SEQ ID NO: 2015698 - DNA, 15 bp, Homo sapiens
cctggtctttgaaat

SEQ ID NO: 2015699 - DNA, 15 bp, Homo sapiens
ctggtctttgaaatg

SEQ ID NO: 2015700 - DNA, 15 bp, Homo sapiens
tggtctttgaaatgg

SEQ ID NO: 2015701 - DNA, 15 bp, Homo sapiens
ggtctttgaaatgga

SEQ ID NO: 2015702 - DNA, 15 bp, Homo sapiens
gtctttgaaatggaa

SEQ ID NO: 2015703 - DNA, 15 bp, Homo sapiens
tctttgaaatggaaa

SEQ ID NO: 2015704 - DNA, 15 bp, Homo sapiens
ctttgaaatggaaac

SEQ ID NO: 2015705 - DNA, 15 bp, Homo sapiens
tttgaaatggaaaca

SEQ ID NO: 2015706 - DNA, 15 bp, Homo sapiens
ttgaaatggaaacat

SEQ ID NO: 2015707 - DNA, 15 bp, Homo sapiens
tgaaatggaaacata

SEQ ID NO: 2015708 - DNA, 15 bp, Homo sapiens
gaaatggaaacataa

SEQ ID NO: 2015709 - DNA, 15 bp, Homo sapiens
aaatggaaacataaa

SEQ ID NO: 2015710 - DNA, 15 bp, Homo sapiens
aatggaaacataaaa

SEQ ID NO: 2015711 - DNA, 15 bp, Homo sapiens
atggaaacataaaag

SEQ ID NO: 2015712 - DNA, 15 bp, Homo sapiens
tggaaacataaaagt

SEQ ID NO: 2015713 - DNA, 15 bp, Homo sapiens
ggaaacataaaagtt

SEQ ID NO: 2015714 - DNA, 15 bp, Homo sapiens
gaaacataaaagttt

SEQ ID NO: 2015715 - DNA, 15 bp, Homo sapiens
aaacataaaagttta

SEQ ID NO: 2015716 - DNA, 15 bp, Homo sapiens
aacataaaagtttat

SEQ ID NO: 2015717 - DNA, 15 bp, Homo sapiens
acataaaagtttatt

SEQ ID NO: 2015718 - DNA, 15 bp, Homo sapiens
cataaaagtttattc

SEQ ID NO: 2015719 - DNA, 15 bp, Homo sapiens
ataaaagtttattca

SEQ ID NO: 2015720 - DNA, 15 bp, Homo sapiens
taaaagtttattcac

SEQ ID NO: 2015721 - DNA, 15 bp, Homo sapiens
aaaagtttattcacc

SEQ ID NO: 2015722 - DNA, 15 bp, Homo sapiens
aaagtttattcacca

SEQ ID NO: 2015723 - DNA, 15 bp, Homo sapiens
aagtttattcaccat

SEQ ID NO: 2015724 - DNA, 15 bp, Homo sapiens
agtttattcaccata

SEQ ID NO: 2015725 - DNA, 15 bp, Homo sapiens
gtttattcaccataa

SEQ ID NO: 2015726 - DNA, 15 bp, Homo sapiens
tttattcaccataat

SEQ ID NO: 2015727 - DNA, 15 bp, Homo sapiens
ttattcaccataatt

SEQ ID NO: 2015728 - DNA, 15 bp, Homo sapiens
tattcaccataattt

SEQ ID NO: 2015729 - DNA, 15 bp, Homo sapiens
attcaccataatttt

SEQ ID NO: 2015730 - DNA, 15 bp, Homo sapiens
ttcaccataatttta

SEQ ID NO: 2015731 - DNA, 15 bp, Homo sapiens
tcaccataattttat

SEQ ID NO: 2015732 - DNA, 15 bp, Homo sapiens
caccataattttata

SEQ ID NO: 2015733 - DNA, 15 bp, Homo sapiens
accataattttatac

SEQ ID NO: 2015734 - DNA, 15 bp, Homo sapiens
ccataattttataca

SEQ ID NO: 2015735 - DNA, 15 bp, Homo sapiens
cataattttatacac

SEQ ID NO: 2015736 - DNA, 15 bp, Homo sapiens
ataattttatacaca

SEQ ID NO: 2015737 - DNA, 15 bp, Homo sapiens
taattttatacacag

SEQ ID NO: 2015738 - DNA, 15 bp, Homo sapiens
aattttatacacagc

SEQ ID NO: 2015739 - DNA, 15 bp, Homo sapiens
attttatacacagct

SEQ ID NO: 2015740 - DNA, 15 bp, Homo sapiens
ttttatacacagctt

SEQ ID NO: 2015741 - DNA, 15 bp, Homo sapiens
tttatacacagcttt

SEQ ID NO: 2015742 - DNA, 15 bp, Homo sapiens
ttatacacagctttt

SEQ ID NO: 2015743 - DNA, 15 bp, Homo sapiens
tatacacagcttttc

SEQ ID NO: 2015744 - DNA, 15 bp, Homo sapiens
atacacagcttttca

SEQ ID NO: 2015745 - DNA, 15 bp, Homo sapiens
tacacagcttttcag

SEQ ID NO: 2015746 - DNA, 15 bp, Homo sapiens
acacagcttttcagg

SEQ ID NO: 2015747 - DNA, 15 bp, Homo sapiens
cacagcttttcaggg

SEQ ID NO: 2015748 - DNA, 15 bp, Homo sapiens
acagcttttcagggg

SEQ ID NO: 2015749 - DNA, 15 bp, Homo sapiens
cagcttttcagggga

SEQ ID NO: 2015750 - DNA, 15 bp, Homo sapiens
agcttttcaggggaa

SEQ ID NO: 2015751 - DNA, 15 bp, Homo sapiens
gcttttcaggggaaa

SEQ ID NO: 2015752 - DNA, 15 bp, Homo sapiens
cttttcaggggaaaa

SEQ ID NO: 2015753 - DNA, 15 bp, Homo sapiens
ttttcaggggaaaaa

SEQ ID NO: 2015754 - DNA, 15 bp, Homo sapiens
tttcaggggaaaaaa

SEQ ID NO: 2015755 - DNA, 15 bp, Homo sapiens
ttcaggggaaaaaaa

SEQ ID NO: 2015756 - DNA, 15 bp, Homo sapiens
tcaggggaaaaaaaa

SEQ ID NO: 2015757 - DNA, 15 bp, Homo sapiens
caggggaaaaaaaac

SEQ ID NO: 2015758 - DNA, 15 bp, Homo sapiens
aggggaaaaaaaact

SEQ ID NO: 2015759 - DNA, 15 bp, Homo sapiens
ggggaaaaaaaactg

SEQ ID NO: 2015760 - DNA, 15 bp, Homo sapiens
gggaaaaaaaactgt

SEQ ID NO: 2015761 - DNA, 15 bp, Homo sapiens
ggaaaaaaaactgta

SEQ ID NO: 2015762 - DNA, 15 bp, Homo sapiens
gaaaaaaaactgtac

SEQ ID NO: 2015763 - DNA, 15 bp, Homo sapiens
aaaaaaaactgtact

SEQ ID NO: 2015764 - DNA, 15 bp, Homo sapiens
aaaaaaactgtactg

SEQ ID NO: 2015765 - DNA, 15 bp, Homo sapiens
aaaaaactgtactgg

SEQ ID NO: 2015766 - DNA, 15 bp, Homo sapiens
aaaaactgtactggg

SEQ ID NO: 2015767 - DNA, 15 bp, Homo sapiens
aaaactgtactgggt

SEQ ID NO: 2015768 - DNA, 15 bp, Homo sapiens
aaactgtactgggta

SEQ ID NO: 2015769 - DNA, 15 bp, Homo sapiens
aactgtactgggtaa

SEQ ID NO: 2015770 - DNA, 15 bp, Homo sapiens
actgtactgggtaat

SEQ ID NO: 2015771 - DNA, 15 bp, Homo sapiens
ctgtactgggtaata

SEQ ID NO: 2015772 - DNA, 15 bp, Homo sapiens
tgtactgggtaataa

SEQ ID NO: 2015773 - DNA, 15 bp, Homo sapiens
gtactgggtaataag

SEQ ID NO: 2015774 - DNA, 15 bp, Homo sapiens
tactgggtaataagt

SEQ ID NO: 2015775 - DNA, 15 bp, Homo sapiens
actgggtaataagta

SEQ ID NO: 2015776 - DNA, 15 bp, Homo sapiens
ctgggtaataagtat

SEQ ID NO: 2015777 - DNA, 15 bp, Homo sapiens
tgggtaataagtata

SEQ ID NO: 2015778 - DNA, 15 bp, Homo sapiens
gggtaataagtatat

SEQ ID NO: 2015779 - DNA, 15 bp, Homo sapiens
ggtaataagtatatg

SEQ ID NO: 2015780 - DNA, 15 bp, Homo sapiens
gtaataagtatatgt

SEQ ID NO: 2015781 - DNA, 15 bp, Homo sapiens
taataagtatatgta

SEQ ID NO: 2015782 - DNA, 15 bp, Homo sapiens
aataagtatatgtag

SEQ ID NO: 2015783 - DNA, 15 bp, Homo sapiens
ataagtatatgtaga

SEQ ID NO: 2015784 - DNA, 15 bp, Homo sapiens
taagtatatgtagat

SEQ ID NO: 2015785 - DNA, 15 bp, Homo sapiens
aagtatatgtagatt

SEQ ID NO: 2015786 - DNA, 15 bp, Homo sapiens
agtatatgtagattg

SEQ ID NO: 2015787 - DNA, 15 bp, Homo sapiens
gtatatgtagattgt

SEQ ID NO: 2015788 - DNA, 15 bp, Homo sapiens
tatatgtagattgtt

SEQ ID NO: 2015789 - DNA, 15 bp, Homo sapiens
atatgtagattgttt

SEQ ID NO: 2015790 - DNA, 15 bp, Homo sapiens
tatgtagattgtttc

SEQ ID NO: 2015791 - DNA, 15 bp, Homo sapiens
atgtagattgtttca

SEQ ID NO: 2015792 - DNA, 15 bp, Homo sapiens
tgtagattgtttcag

SEQ ID NO: 2015793 - DNA, 15 bp, Homo sapiens
gtagattgtttcaga

SEQ ID NO: 2015794 - DNA, 15 bp, Homo sapiens
tagattgtttcagag

SEQ ID NO: 2015795 - DNA, 15 bp, Homo sapiens
agattgtttcagagt

SEQ ID NO: 2015796 - DNA, 15 bp, Homo sapiens
gattgtttcagagtt

SEQ ID NO: 2015797 - DNA, 15 bp, Homo sapiens
attgtttcagagttc

SEQ ID NO: 2015798 - DNA, 15 bp, Homo sapiens
ttgtttcagagttct

SEQ ID NO: 2015799 - DNA, 15 bp, Homo sapiens
tgtttcagagttctt

SEQ ID NO: 2015800 - DNA, 15 bp, Homo sapiens
gtttcagagttctta

SEQ ID NO: 2015801 - DNA, 15 bp, Homo sapiens
tttcagagttcttaa

SEQ ID NO: 2015802 - DNA, 15 bp, Homo sapiens
tcagagttcttaaat

SEQ ID NO: 2015803 - DNA, 15 bp, Homo sapiens
cagagttcttaaatt

SEQ ID NO: 2015804 - DNA, 15 bp, Homo sapiens
agagttcttaaatta

SEQ ID NO: 2015805 - DNA, 15 bp, Homo sapiens
gttcttaaattattg

SEQ ID NO: 2015806 - DNA, 15 bp, Homo sapiens
tcttaaattattgaa

SEQ ID NO: 2015807 - DNA, 15 bp, Homo sapiens
cttaaattattgaaa

SEQ ID NO: 2015808 - DNA, 15 bp, Homo sapiens
ttaaattattgaaac

SEQ ID NO: 2015809 - DNA, 15 bp, Homo sapiens
taaattattgaaaca

SEQ ID NO: 2015810 - DNA, 15 bp, Homo sapiens
aaattattgaaacat

SEQ ID NO: 2015811 - DNA, 15 bp, Homo sapiens
aattattgaaacata

SEQ ID NO: 2015812 - DNA, 15 bp, Homo sapiens
attattgaaacatac

SEQ ID NO: 2015813 - DNA, 15 bp, Homo sapiens
ttattgaaacatacc

SEQ ID NO: 2015814 - DNA, 15 bp, Homo sapiens
tattgaaacatacca

SEQ ID NO: 2015815 - DNA, 15 bp, Homo sapiens
attgaaacataccat

SEQ ID NO: 2015816 - DNA, 15 bp, Homo sapiens
ttgaaacataccatt

SEQ ID NO: 2015817 - DNA, 15 bp, Homo sapiens
tgaaacataccattt

SEQ ID NO: 2015818 - DNA, 15 bp, Homo sapiens
gaaacataccattta

SEQ ID NO: 2015819 - DNA, 15 bp, Homo sapiens
aaacataccatttac

SEQ ID NO: 2015820 - DNA, 15 bp, Homo sapiens
aacataccatttaca

SEQ ID NO: 2015821 - DNA, 15 bp, Homo sapiens
acataccatttacat

SEQ ID NO: 2015822 - DNA, 15 bp, Homo sapiens
cataccatttacata

SEQ ID NO: 2015823 - DNA, 15 bp, Homo sapiens
ataccatttacatat

SEQ ID NO: 2015824 - DNA, 15 bp, Homo sapiens
taccatttacatatg

SEQ ID NO: 2015825 - DNA, 15 bp, Homo sapiens
accatttacatatgt

SEQ ID NO: 2015826 - DNA, 15 bp, Homo sapiens
ccatttacatatgta

SEQ ID NO: 2015827 - DNA, 15 bp, Homo sapiens
catttacatatgtaa

SEQ ID NO: 2015828 - DNA, 15 bp, Homo sapiens
atttacatatgtaaa

SEQ ID NO: 2015829 - DNA, 15 bp, Homo sapiens
tttacatatgtaaaa

SEQ ID NO: 2015830 - DNA, 15 bp, Homo sapiens
ttacatatgtaaaat

SEQ ID NO: 2015831 - DNA, 15 bp, Homo sapiens
tacatatgtaaaatg

SEQ ID NO: 2015832 - DNA, 15 bp, Homo sapiens
acatatgtaaaatgt

SEQ ID NO: 2015833 - DNA, 15 bp, Homo sapiens
catatgtaaaatgta

SEQ ID NO: 2015834 - DNA, 15 bp, Homo sapiens
atatgtaaaatgtac

SEQ ID NO: 2015835 - DNA, 15 bp, Homo sapiens
tatgtaaaatgtact

SEQ ID NO: 2015836 - DNA, 15 bp, Homo sapiens
atgtaaaatgtacta

SEQ ID NO: 2015837 - DNA, 15 bp, Homo sapiens
tgtaaaatgtactat

SEQ ID NO: 2015838 - DNA, 15 bp, Homo sapiens
gtaaaatgtactata

SEQ ID NO: 2015839 - DNA, 15 bp, Homo sapiens
taaaatgtactatac

SEQ ID NO: 2015840 - DNA, 15 bp, Homo sapiens
aaaatgtactatact

SEQ ID NO: 2015841 - DNA, 15 bp, Homo sapiens
aaatgtactatactt

SEQ ID NO: 2015842 - DNA, 15 bp, Homo sapiens
aatgtactatacttt

SEQ ID NO: 2015843 - DNA, 15 bp, Homo sapiens
atgtactatacttta

SEQ ID NO: 2015844 - DNA, 15 bp, Homo sapiens
tgtactatactttaa

SEQ ID NO: 2015845 - DNA, 15 bp, Homo sapiens
gtactatactttaaa

SEQ ID NO: 2015846 - DNA, 15 bp, Homo sapiens
tactatactttaaag

SEQ ID NO: 2015847 - DNA, 15 bp, Homo sapiens
actatactttaaaga

SEQ ID NO: 2015848 - DNA, 15 bp, Homo sapiens
ctatactttaaagat

SEQ ID NO: 2015849 - DNA, 15 bp, Homo sapiens
tatactttaaagata

SEQ ID NO: 2015850 - DNA, 15 bp, Homo sapiens
atactttaaagatag

SEQ ID NO: 2015851 - DNA, 15 bp, Homo sapiens
tactttaaagatagg

SEQ ID NO: 2015852 - DNA, 15 bp, Homo sapiens
actttaaagataggt

SEQ ID NO: 2015853 - DNA, 15 bp, Homo sapiens
ctttaaagataggta

SEQ ID NO: 2015854 - DNA, 15 bp, Homo sapiens
tttaaagataggtac

SEQ ID NO: 2015855 - DNA, 15 bp, Homo sapiens
ttaaagataggtact

SEQ ID NO: 2015856 - DNA, 15 bp, Homo sapiens
taaagataggtacta

SEQ ID NO: 2015857 - DNA, 15 bp, Homo sapiens
aaagataggtactat

SEQ ID NO: 2015858 - DNA, 15 bp, Homo sapiens
aagataggtactata

SEQ ID NO: 2015859 - DNA, 15 bp, Homo sapiens
agataggtactataa

SEQ ID NO: 2015860 - DNA, 15 bp, Homo sapiens
gataggtactataat

SEQ ID NO: 2015861 - DNA, 15 bp, Homo sapiens
ataggtactataatt

SEQ ID NO: 2015862 - DNA, 15 bp, Homo sapiens
taggtactataatta

SEQ ID NO: 2015863 - DNA, 15 bp, Homo sapiens
aggtactataattag

SEQ ID NO: 2015864 - DNA, 15 bp, Homo sapiens
ggtactataattagt

SEQ ID NO: 2015865 - DNA, 15 bp, Homo sapiens
gtactataattagta

SEQ ID NO: 2015866 - DNA, 15 bp, Homo sapiens
tactataattagtaa

SEQ ID NO: 2015867 - DNA, 15 bp, Homo sapiens
actataattagtaaa

SEQ ID NO: 2015868 - DNA, 15 bp, Homo sapiens
ctataattagtaaat

SEQ ID NO: 2015869 - DNA, 15 bp, Homo sapiens
tataattagtaaata

SEQ ID NO: 2015870 - DNA, 15 bp, Homo sapiens
ataattagtaaatag

SEQ ID NO: 2015871 - DNA, 15 bp, Homo sapiens
taattagtaaataga

SEQ ID NO: 2015872 - DNA, 15 bp, Homo sapiens
aattagtaaatagat

SEQ ID NO: 2015873 - DNA, 15 bp, Homo sapiens
attagtaaatagatt

SEQ ID NO: 2015874 - DNA, 15 bp, Homo sapiens
ttagtaaatagatta

SEQ ID NO: 2015875 - DNA, 15 bp, Homo sapiens
tagtaaatagattac

SEQ ID NO: 2015876 - DNA, 15 bp, Homo sapiens
agtaaatagattact

SEQ ID NO: 2015877 - DNA, 15 bp, Homo sapiens
gtaaatagattactg

SEQ ID NO: 2015878 - DNA, 15 bp, Homo sapiens
taaatagattactgt

SEQ ID NO: 2015879 - DNA, 15 bp, Homo sapiens
aaatagattactgtt

SEQ ID NO: 2015880 - DNA, 15 bp, Homo sapiens
aatagattactgtta

SEQ ID NO: 2015881 - DNA, 15 bp, Homo sapiens
atagattactgttaa

SEQ ID NO: 2015882 - DNA, 15 bp, Homo sapiens
tagattactgttaaa

SEQ ID NO: 2015883 - DNA, 15 bp, Homo sapiens
agattactgttaaat

SEQ ID NO: 2015884 - DNA, 15 bp, Homo sapiens
gattactgttaaata

SEQ ID NO: 2015885 - DNA, 15 bp, Homo sapiens
attactgttaaataa

SEQ ID NO: 2015886 - DNA, 15 bp, Homo sapiens
ttactgttaaataac

SEQ ID NO: 2015887 - DNA, 15 bp, Homo sapiens
tactgttaaataact

SEQ ID NO: 2015888 - DNA, 15 bp, Homo sapiens
actgttaaataactt

SEQ ID NO: 2015889 - DNA, 15 bp, Homo sapiens
ctgttaaataacttt

SEQ ID NO: 2015890 - DNA, 15 bp, Homo sapiens
tgttaaataactttt

SEQ ID NO: 2015891 - DNA, 15 bp, Homo sapiens
gttaaataacttttt

SEQ ID NO: 2015892 - DNA, 15 bp, Homo sapiens
ttaaataactttttt

SEQ ID NO: 2015893 - DNA, 15 bp, Homo sapiens
taaataacttttttt

SEQ ID NO: 2015894 - DNA, 15 bp, Homo sapiens
aaataacttttttta

SEQ ID NO: 2015895 - DNA, 15 bp, Homo sapiens
aataactttttttaa

SEQ ID NO: 2015896 - DNA, 15 bp, Homo sapiens
ataactttttttaaa

SEQ ID NO: 2015897 - DNA, 15 bp, Homo sapiens
taactttttttaaaa

SEQ ID NO: 2015898 - DNA, 15 bp, Homo sapiens
aactttttttaaaaa

SEQ ID NO: 2015899 - DNA, 15 bp, Homo sapiens
actttttttaaaaaa

SEQ ID NO: 2015900 - DNA, 15 bp, Homo sapiens
ttttttaaaaaaaag

SEQ ID NO: 2015901 - DNA, 15 bp, Homo sapiens
tttttaaaaaaaagt

SEQ ID NO: 2015902 - DNA, 15 bp, Homo sapiens
ttttaaaaaaaagtt

SEQ ID NO: 2015903 - DNA, 15 bp, Homo sapiens
tttaaaaaaaagttt

SEQ ID NO: 2015904 - DNA, 15 bp, Homo sapiens
ttaaaaaaaagtttc

SEQ ID NO: 2015905 - DNA, 15 bp, Homo sapiens
taaaaaaaagtttca

SEQ ID NO: 2015906 - DNA, 15 bp, Homo sapiens
aaaaaaaagtttcat

SEQ ID NO: 2015907 - DNA, 15 bp, Homo sapiens
aaaaaaagtttcatc

SEQ ID NO: 2015908 - DNA, 15 bp, Homo sapiens
aaaaaagtttcatct

SEQ ID NO: 2015909 - DNA, 15 bp, Homo sapiens
aaaaagtttcatcta

SEQ ID NO: 2015910 - DNA, 15 bp, Homo sapiens
aaaagtttcatctat

SEQ ID NO: 2015911 - DNA, 15 bp, Homo sapiens
aaagtttcatctatg

SEQ ID NO: 2015912 - DNA, 15 bp, Homo sapiens
aagtttcatctatgc

SEQ ID NO: 2015913 - DNA, 15 bp, Homo sapiens
agtttcatctatgca

SEQ ID NO: 2015914 - DNA, 15 bp, Homo sapiens
gtttcatctatgcac

SEQ ID NO: 2015915 - DNA, 15 bp, Homo sapiens
tttcatctatgcaca

SEQ ID NO: 2015916 - DNA, 15 bp, Homo sapiens
ttcatctatgcacat

SEQ ID NO: 2015917 - DNA, 15 bp, Homo sapiens
tcatctatgcacata

SEQ ID NO: 2015918 - DNA, 15 bp, Homo sapiens
catctatgcacatag

SEQ ID NO: 2015919 - DNA, 15 bp, Homo sapiens
atctatgcacatagg

SEQ ID NO: 2015920 - DNA, 15 bp, Homo sapiens
tctatgcacataggc

SEQ ID NO: 2015921 - DNA, 15 bp, Homo sapiens
ctatgcacataggct

SEQ ID NO: 2015922 - DNA, 15 bp, Homo sapiens
tatgcacataggctc

SEQ ID NO: 2015923 - DNA, 15 bp, Homo sapiens
atgcacataggctct

SEQ ID NO: 2015924 - DNA, 15 bp, Homo sapiens
tgcacataggctctg

SEQ ID NO: 2015925 - DNA, 15 bp, Homo sapiens
gcacataggctctga

SEQ ID NO: 2015926 - DNA, 15 bp, Homo sapiens
cacataggctctgag

SEQ ID NO: 2015927 - DNA, 15 bp, Homo sapiens
acataggctctgagc

SEQ ID NO: 2015928 - DNA, 15 bp, Homo sapiens
cataggctctgagca

SEQ ID NO: 2015929 - DNA, 15 bp, Homo sapiens
ataggctctgagcag

SEQ ID NO: 2015930 - DNA, 15 bp, Homo sapiens
taggctctgagcaga

SEQ ID NO: 2015931 - DNA, 15 bp, Homo sapiens
aggctctgagcagat

SEQ ID NO: 2015932 - DNA, 15 bp, Homo sapiens
ggctctgagcagatt

SEQ ID NO: 2015933 - DNA, 15 bp, Homo sapiens
gctctgagcagattt

SEQ ID NO: 2015934 - DNA, 15 bp, Homo sapiens
ctctgagcagatttc

SEQ ID NO: 2015935 - DNA, 15 bp, Homo sapiens
tctgagcagatttca

SEQ ID NO: 2015936 - DNA, 15 bp, Homo sapiens
ctgagcagatttcag

SEQ ID NO: 2015937 - DNA, 15 bp, Homo sapiens
tgagcagatttcaga

SEQ ID NO: 2015938 - DNA, 15 bp, Homo sapiens
gagcagatttcagat

SEQ ID NO: 2015939 - DNA, 15 bp, Homo sapiens
agcagatttcagata

SEQ ID NO: 2015940 - DNA, 15 bp, Homo sapiens
gcagatttcagatag

SEQ ID NO: 2015941 - DNA, 15 bp, Homo sapiens
cagatttcagatagt

SEQ ID NO: 2015942 - DNA, 15 bp, Homo sapiens
agatttcagatagtt

SEQ ID NO: 2015943 - DNA, 15 bp, Homo sapiens
gatttcagatagttc

SEQ ID NO: 2015944 - DNA, 15 bp, Homo sapiens
atttcagatagttcc

SEQ ID NO: 2015945 - DNA, 15 bp, Homo sapiens
tttcagatagttcct

SEQ ID NO: 2015946 - DNA, 15 bp, Homo sapiens
ttcagatagttcctg

SEQ ID NO: 2015947 - DNA, 15 bp, Homo sapiens
tcagatagttcctga

SEQ ID NO: 2015948 - DNA, 15 bp, Homo sapiens
cagatagttcctgaa

SEQ ID NO: 2015949 - DNA, 15 bp, Homo sapiens
agatagttcctgaat

SEQ ID NO: 2015950 - DNA, 15 bp, Homo sapiens
gatagttcctgaata

SEQ ID NO: 2015951 - DNA, 15 bp, Homo sapiens
atagttcctgaataa

SEQ ID NO: 2015952 - DNA, 15 bp, Homo sapiens
tagttcctgaataaa

SEQ ID NO: 2015953 - DNA, 15 bp, Homo sapiens
agttcctgaataaaa

SEQ ID NO: 2015954 - DNA, 15 bp, Homo sapiens
gttcctgaataaaaa

SEQ ID NO: 2015955 - DNA, 15 bp, Homo sapiens
ttcctgaataaaaat

SEQ ID NO: 2015956 - DNA, 15 bp, Homo sapiens
tcctgaataaaaatc

SEQ ID NO: 2015957 - DNA, 15 bp, Homo sapiens
cctgaataaaaatca

SEQ ID NO: 2015958 - DNA, 15 bp, Homo sapiens
ctgaataaaaatcaa

SEQ ID NO: 2015959 - DNA, 15 bp, Homo sapiens
tgaataaaaatcaaa

SEQ ID NO: 2015960 - DNA, 15 bp, Homo sapiens
gaataaaaatcaaaa

SEQ ID NO: 2015961 - DNA, 15 bp, Homo sapiens
aataaaaatcaaaat

SEQ ID NO: 2015962 - DNA, 15 bp, Homo sapiens
ataaaaatcaaaatt

SEQ ID NO: 2015963 - DNA, 15 bp, Homo sapiens
taaaaatcaaaattg

SEQ ID NO: 2015964 - DNA, 15 bp, Homo sapiens
aaaaatcaaaattga

SEQ ID NO: 2015965 - DNA, 15 bp, Homo sapiens
aaaatcaaaattgac

SEQ ID NO: 2015966 - DNA, 15 bp, Homo sapiens
aaatcaaaattgact

SEQ ID NO: 2015967 - DNA, 15 bp, Homo sapiens
aatcaaaattgacta

SEQ ID NO: 2015968 - DNA, 15 bp, Homo sapiens
atcaaaattgactat

SEQ ID NO: 2015969 - DNA, 15 bp, Homo sapiens
tcaaaattgactatc

SEQ ID NO: 2015970 - DNA, 15 bp, Homo sapiens
caaaattgactatca

SEQ ID NO: 2015971 - DNA, 15 bp, Homo sapiens
aaaattgactatcag

SEQ ID NO: 2015972 - DNA, 15 bp, Homo sapiens
aaattgactatcagt

SEQ ID NO: 2015973 - DNA, 15 bp, Homo sapiens
aattgactatcagtt

SEQ ID NO: 2015974 - DNA, 15 bp, Homo sapiens
attgactatcagttg

SEQ ID NO: 2015975 - DNA, 15 bp, Homo sapiens
ttgactatcagttgc

SEQ ID NO: 2015976 - DNA, 15 bp, Homo sapiens
tgactatcagttgcc

SEQ ID NO: 2015977 - DNA, 15 bp, Homo sapiens
gactatcagttgcca

SEQ ID NO: 2015978 - DNA, 15 bp, Homo sapiens
actatcagttgccat

SEQ ID NO: 2015979 - DNA, 15 bp, Homo sapiens
ctatcagttgccatt

SEQ ID NO: 2015980 - DNA, 15 bp, Homo sapiens
tatcagttgccattt

SEQ ID NO: 2015981 - DNA, 15 bp, Homo sapiens
atcagttgccatttt

SEQ ID NO: 2015982 - DNA, 15 bp, Homo sapiens
tcagttgccatttta

SEQ ID NO: 2015983 - DNA, 15 bp, Homo sapiens
cagttgccattttat

SEQ ID NO: 2015984 - DNA, 15 bp, Homo sapiens
agttgccattttata

SEQ ID NO: 2015985 - DNA, 15 bp, Homo sapiens
gttgccattttatat

SEQ ID NO: 2015986 - DNA, 15 bp, Homo sapiens
ttgccattttatata

SEQ ID NO: 2015987 - DNA, 15 bp, Homo sapiens
tgccattttatatat

SEQ ID NO: 2015988 - DNA, 15 bp, Homo sapiens
gccattttatatatg

SEQ ID NO: 2015989 - DNA, 15 bp, Homo sapiens
ccattttatatatgt

SEQ ID NO: 2015990 - DNA, 15 bp, Homo sapiens
cattttatatatgtt

SEQ ID NO: 2015991 - DNA, 15 bp, Homo sapiens
attttatatatgtta

SEQ ID NO: 2015992 - DNA, 15 bp, Homo sapiens
ttttatatatgttaa

SEQ ID NO: 2015993 - DNA, 15 bp, Homo sapiens
tttatatatgttaac

SEQ ID NO: 2015994 - DNA, 15 bp, Homo sapiens
ttatatatgttaaca

SEQ ID NO: 2015995 - DNA, 15 bp, Homo sapiens
tatatatgttaacat

SEQ ID NO: 2015996 - DNA, 15 bp, Homo sapiens
atatatgttaacata

SEQ ID NO: 2015997 - DNA, 15 bp, Homo sapiens
tatatgttaacatat

SEQ ID NO: 2015998 - DNA, 15 bp, Homo sapiens
atatgttaacatata

SEQ ID NO: 2015999 - DNA, 15 bp, Homo sapiens
tatgttaacatataa

SEQ ID NO: 2016000 - DNA, 15 bp, Homo sapiens
atgttaacatataaa

SEQ ID NO: 2016001 - DNA, 15 bp, Homo sapiens
tgttaacatataaag

SEQ ID NO: 2016002 - DNA, 15 bp, Homo sapiens
gttaacatataaaga

SEQ ID NO: 2016003 - DNA, 15 bp, Homo sapiens
ttaacatataaagaa

SEQ ID NO: 2016004 - DNA, 15 bp, Homo sapiens
taacatataaagaaa

SEQ ID NO: 2016005 - DNA, 15 bp, Homo sapiens
aacatataaagaaaa

SEQ ID NO: 2016006 - DNA, 15 bp, Homo sapiens
acatataaagaaaaa

SEQ ID NO: 2016007 - DNA, 15 bp, Homo sapiens
catataaagaaaaaa

SEQ ID NO: 2016008 - DNA, 15 bp, Homo sapiens
atataaagaaaaaag

SEQ ID NO: 2016009 - DNA, 15 bp, Homo sapiens
tataaagaaaaaaga

SEQ ID NO: 2016010 - DNA, 15 bp, Homo sapiens
ataaagaaaaaagag

SEQ ID NO: 2016011 - DNA, 15 bp, Homo sapiens
taaagaaaaaagagt

SEQ ID NO: 2016012 - DNA, 15 bp, Homo sapiens
aaagaaaaaagagtc

SEQ ID NO: 2016013 - DNA, 15 bp, Homo sapiens
aagaaaaaagagtca

SEQ ID NO: 2016014 - DNA, 15 bp, Homo sapiens
agaaaaaagagtcat

SEQ ID NO: 2016015 - DNA, 15 bp, Homo sapiens
gaaaaaagagtcatt

SEQ ID NO: 2016016 - DNA, 15 bp, Homo sapiens
aaaaaagagtcattt

SEQ ID NO: 2016017 - DNA, 15 bp, Homo sapiens
aaaaagagtcatttg

SEQ ID NO: 2016018 - DNA, 15 bp, Homo sapiens
aaaagagtcatttga

SEQ ID NO: 2016019 - DNA, 15 bp, Homo sapiens
aaagagtcatttgag

SEQ ID NO: 2016020 - DNA, 15 bp, Homo sapiens
aagagtcatttgagg

SEQ ID NO: 2016021 - DNA, 15 bp, Homo sapiens
agagtcatttgagga

SEQ ID NO: 2016022 - DNA, 15 bp, Homo sapiens
gagtcatttgaggat

SEQ ID NO: 2016023 - DNA, 15 bp, Homo sapiens
agtcatttgaggatg

SEQ ID NO: 2016024 - DNA, 15 bp, Homo sapiens
gtcatttgaggatgg

SEQ ID NO: 2016025 - DNA, 15 bp, Homo sapiens
tcatttgaggatgga

SEQ ID NO: 2016026 - DNA, 15 bp, Homo sapiens
catttgaggatggaa

SEQ ID NO: 2016027 - DNA, 15 bp, Homo sapiens
atttgaggatggaag

SEQ ID NO: 2016028 - DNA, 15 bp, Homo sapiens
tttgaggatggaaga

SEQ ID NO: 2016029 - DNA, 15 bp, Homo sapiens
ttgaggatggaagat

SEQ ID NO: 2016030 - DNA, 15 bp, Homo sapiens
tgaggatggaagatc

SEQ ID NO: 2016031 - DNA, 15 bp, Homo sapiens
gaggatggaagatca

SEQ ID NO: 2016032 - DNA, 15 bp, Homo sapiens
aggatggaagatcag

SEQ ID NO: 2016033 - DNA, 15 bp, Homo sapiens
ggatggaagatcagc

SEQ ID NO: 2016034 - DNA, 15 bp, Homo sapiens
gatggaagatcagct

SEQ ID NO: 2016035 - DNA, 15 bp, Homo sapiens
atggaagatcagcta

SEQ ID NO: 2016036 - DNA, 15 bp, Homo sapiens
tggaagatcagctaa

SEQ ID NO: 2016037 - DNA, 15 bp, Homo sapiens
ggaagatcagctaaa

SEQ ID NO: 2016038 - DNA, 15 bp, Homo sapiens
gaagatcagctaaaa

SEQ ID NO: 2016039 - DNA, 15 bp, Homo sapiens
aagatcagctaaaaa

SEQ ID NO: 2016040 - DNA, 15 bp, Homo sapiens
agatcagctaaaaag

SEQ ID NO: 2016041 - DNA, 15 bp, Homo sapiens
gatcagctaaaaagc

SEQ ID NO: 2016042 - DNA, 15 bp, Homo sapiens
atcagctaaaaagca

SEQ ID NO: 2016043 - DNA, 15 bp, Homo sapiens
tcagctaaaaagcaa

SEQ ID NO: 2016044 - DNA, 15 bp, Homo sapiens
cagctaaaaagcaag

SEQ ID NO: 2016045 - DNA, 15 bp, Homo sapiens
agctaaaaagcaagt

SEQ ID NO: 2016046 - DNA, 15 bp, Homo sapiens
gctaaaaagcaagtt

SEQ ID NO: 2016047 - DNA, 15 bp, Homo sapiens
ctaaaaagcaagttg

SEQ ID NO: 2016048 - DNA, 15 bp, Homo sapiens
taaaaagcaagttgt

SEQ ID NO: 2016049 - DNA, 15 bp, Homo sapiens
aaaaagcaagttgta

SEQ ID NO: 2016050 - DNA, 15 bp, Homo sapiens
aaaagcaagttgtaa

SEQ ID NO: 2016051 - DNA, 15 bp, Homo sapiens
aaagcaagttgtaat

SEQ ID NO: 2016052 - DNA, 15 bp, Homo sapiens
aagcaagttgtaata

SEQ ID NO: 2016053 - DNA, 15 bp, Homo sapiens
agcaagttgtaatat

SEQ ID NO: 2016054 - DNA, 15 bp, Homo sapiens
gcaagttgtaatatt

SEQ ID NO: 2016055 - DNA, 15 bp, Homo sapiens
caagttgtaatattt

SEQ ID NO: 2016056 - DNA, 15 bp, Homo sapiens
aagttgtaatattta

SEQ ID NO: 2016057 - DNA, 15 bp, Homo sapiens
agttgtaatatttat

SEQ ID NO: 2016058 - DNA, 15 bp, Homo sapiens
gttgtaatatttata

SEQ ID NO: 2016059 - DNA, 15 bp, Homo sapiens
ttgtaatatttataa

SEQ ID NO: 2016060 - DNA, 15 bp, Homo sapiens
tgtaatatttataac

SEQ ID NO: 2016061 - DNA, 15 bp, Homo sapiens
gtaatatttataaca

SEQ ID NO: 2016062 - DNA, 15 bp, Homo sapiens
taatatttataacag

SEQ ID NO: 2016063 - DNA, 15 bp, Homo sapiens
aatatttataacagt

SEQ ID NO: 2016064 - DNA, 15 bp, Homo sapiens
atatttataacagtt

SEQ ID NO: 2016065 - DNA, 15 bp, Homo sapiens
tatttataacagttc

SEQ ID NO: 2016066 - DNA, 15 bp, Homo sapiens
atttataacagttct

SEQ ID NO: 2016067 - DNA, 15 bp, Homo sapiens
tttataacagttctg

SEQ ID NO: 2016068 - DNA, 15 bp, Homo sapiens
ttataacagttctgc

SEQ ID NO: 2016069 - DNA, 15 bp, Homo sapiens
tataacagttctgca

SEQ ID NO: 2016070 - DNA, 15 bp, Homo sapiens
ataacagttctgcag

SEQ ID NO: 2016071 - DNA, 15 bp, Homo sapiens
taacagttctgcagg

SEQ ID NO: 2016072 - DNA, 15 bp, Homo sapiens
aacagttctgcaggt

SEQ ID NO: 2016073 - DNA, 15 bp, Homo sapiens
acagttctgcaggtg

SEQ ID NO: 2016074 - DNA, 15 bp, Homo sapiens
cagttctgcaggtgg

SEQ ID NO: 2016075 - DNA, 15 bp, Homo sapiens
agttctgcaggtgga

SEQ ID NO: 2016076 - DNA, 15 bp, Homo sapiens
gttctgcaggtggag

SEQ ID NO: 2016077 - DNA, 15 bp, Homo sapiens
ttctgcaggtggagg

SEQ ID NO: 2016078 - DNA, 15 bp, Homo sapiens
tctgcaggtggaggt

SEQ ID NO: 2016079 - DNA, 15 bp, Homo sapiens
ctgcaggtggaggtg

SEQ ID NO: 2016080 - DNA, 15 bp, Homo sapiens
tgcaggtggaggtgg

SEQ ID NO: 2016081 - DNA, 15 bp, Homo sapiens
gcaggtggaggtggc

SEQ ID NO: 2016082 - DNA, 15 bp, Homo sapiens
caggtggaggtggca

SEQ ID NO: 2016083 - DNA, 15 bp, Homo sapiens
aggtggaggtggcag

SEQ ID NO: 2016084 - DNA, 15 bp, Homo sapiens
ggtggaggtggcagg

SEQ ID NO: 2016085 - DNA, 15 bp, Homo sapiens
gtggaggtggcaggg

SEQ ID NO: 2016086 - DNA, 15 bp, Homo sapiens
tggaggtggcaggga

SEQ ID NO: 2016087 - DNA, 15 bp, Homo sapiens
ggaggtggcagggat

SEQ ID NO: 2016088 - DNA, 15 bp, Homo sapiens
gaggtggcagggatt

SEQ ID NO: 2016089 - DNA, 15 bp, Homo sapiens
aggtggcagggattc

SEQ ID NO: 2016090 - DNA, 15 bp, Homo sapiens
ggtggcagggattca

SEQ ID NO: 2016091 - DNA, 15 bp, Homo sapiens
gtggcagggattcat

SEQ ID NO: 2016092 - DNA, 15 bp, Homo sapiens
tggcagggattcatt

SEQ ID NO: 2016093 - DNA, 15 bp, Homo sapiens
ggcagggattcatta

SEQ ID NO: 2016094 - DNA, 15 bp, Homo sapiens
gcagggattcattaa

SEQ ID NO: 2016095 - DNA, 15 bp, Homo sapiens
cagggattcattaag

SEQ ID NO: 2016096 - DNA, 15 bp, Homo sapiens
agggattcattaaga

SEQ ID NO: 2016097 - DNA, 15 bp, Homo sapiens
gggattcattaagat

SEQ ID NO: 2016098 - DNA, 15 bp, Homo sapiens
ggattcattaagatc

SEQ ID NO: 2016099 - DNA, 15 bp, Homo sapiens
gattcattaagatct

SEQ ID NO: 2016100 - DNA, 15 bp, Homo sapiens
attcattaagatctt

SEQ ID NO: 2016101 - DNA, 15 bp, Homo sapiens
ttcattaagatcttg

SEQ ID NO: 2016102 - DNA, 15 bp, Homo sapiens
tcattaagatcttga

SEQ ID NO: 2016103 - DNA, 15 bp, Homo sapiens
cattaagatcttgat

SEQ ID NO: 2016104 - DNA, 15 bp, Homo sapiens
attaagatcttgatc

SEQ ID NO: 2016105 - DNA, 15 bp, Homo sapiens
ttaagatcttgatca

SEQ ID NO: 2016106 - DNA, 15 bp, Homo sapiens
taagatcttgatcag

SEQ ID NO: 2016107 - DNA, 15 bp, Homo sapiens
aagatcttgatcaga

SEQ ID NO: 2016108 - DNA, 15 bp, Homo sapiens
agatcttgatcagag

SEQ ID NO: 2016109 - DNA, 15 bp, Homo sapiens
gatcttgatcagagt

SEQ ID NO: 2016110 - DNA, 15 bp, Homo sapiens
atcttgatcagagtt

SEQ ID NO: 2016111 - DNA, 15 bp, Homo sapiens
tcttgatcagagttg

SEQ ID NO: 2016112 - DNA, 15 bp, Homo sapiens
cttgatcagagttgg

SEQ ID NO: 2016113 - DNA, 15 bp, Homo sapiens
ttgatcagagttggg

SEQ ID NO: 2016114 - DNA, 15 bp, Homo sapiens
tgatcagagttggga

SEQ ID NO: 2016115 - DNA, 15 bp, Homo sapiens
gatcagagttgggag

SEQ ID NO: 2016116 - DNA, 15 bp, Homo sapiens
atcagagttgggagg

SEQ ID NO: 2016117 - DNA, 15 bp, Homo sapiens
tcagagttgggagga

SEQ ID NO: 2016118 - DNA, 15 bp, Homo sapiens
cagagttgggaggaa

SEQ ID NO: 2016119 - DNA, 15 bp, Homo sapiens
agagttgggaggaat

SEQ ID NO: 2016120 - DNA, 15 bp, Homo sapiens
gagttgggaggaata

SEQ ID NO: 2016121 - DNA, 15 bp, Homo sapiens
agttgggaggaatag

SEQ ID NO: 2016122 - DNA, 15 bp, Homo sapiens
gttgggaggaataga

SEQ ID NO: 2016123 - DNA, 15 bp, Homo sapiens
ttgggaggaatagag

SEQ ID NO: 2016124 - DNA, 15 bp, Homo sapiens
tgggaggaatagaga

SEQ ID NO: 2016125 - DNA, 15 bp, Homo sapiens
gggaggaatagagaa

SEQ ID NO: 2016126 - DNA, 15 bp, Homo sapiens
ggaggaatagagaac

SEQ ID NO: 2016127 - DNA, 15 bp, Homo sapiens
gaggaatagagaact

SEQ ID NO: 2016128 - DNA, 15 bp, Homo sapiens
aggaatagagaactc

SEQ ID NO: 2016129 - DNA, 15 bp, Homo sapiens
ggaatagagaactcc

SEQ ID NO: 2016130 - DNA, 15 bp, Homo sapiens
gaatagagaactcct

SEQ ID NO: 2016131 - DNA, 15 bp, Homo sapiens
aatagagaactcctg

SEQ ID NO: 2016132 - DNA, 15 bp, Homo sapiens
atagagaactcctga

SEQ ID NO: 2016133 - DNA, 15 bp, Homo sapiens
tagagaactcctgac

SEQ ID NO: 2016134 - DNA, 15 bp, Homo sapiens
agagaactcctgaca

SEQ ID NO: 2016135 - DNA, 15 bp, Homo sapiens
gagaactcctgacac

SEQ ID NO: 2016136 - DNA, 15 bp, Homo sapiens
agaactcctgacact

SEQ ID NO: 2016137 - DNA, 15 bp, Homo sapiens
gaactcctgacactg

SEQ ID NO: 2016138 - DNA, 15 bp, Homo sapiens
aactcctgacactgg

SEQ ID NO: 2016139 - DNA, 15 bp, Homo sapiens
actcctgacactgga

SEQ ID NO: 2016140 - DNA, 15 bp, Homo sapiens
ctcctgacactggat

SEQ ID NO: 2016141 - DNA, 15 bp, Homo sapiens
tcctgacactggatc

SEQ ID NO: 2016142 - DNA, 15 bp, Homo sapiens
cctgacactggatct

SEQ ID NO: 2016143 - DNA, 15 bp, Homo sapiens
ctgacactggatctc

SEQ ID NO: 2016144 - DNA, 15 bp, Homo sapiens
tgacactggatctca

SEQ ID NO: 2016145 - DNA, 15 bp, Homo sapiens
gacactggatctcaa

SEQ ID NO: 2016146 - DNA, 15 bp, Homo sapiens
acactggatctcaag

SEQ ID NO: 2016147 - DNA, 15 bp, Homo sapiens
cactggatctcaagg

SEQ ID NO: 2016148 - DNA, 15 bp, Homo sapiens
actggatctcaaggt

SEQ ID NO: 2016149 - DNA, 15 bp, Homo sapiens
ctggatctcaaggtt

SEQ ID NO: 2016150 - DNA, 15 bp, Homo sapiens
tggatctcaaggttg

SEQ ID NO: 2016151 - DNA, 15 bp, Homo sapiens
ggatctcaaggttgg

SEQ ID NO: 2016152 - DNA, 15 bp, Homo sapiens
gatctcaaggttgga

SEQ ID NO: 2016153 - DNA, 15 bp, Homo sapiens
atctcaaggttggaa

SEQ ID NO: 2016154 - DNA, 15 bp, Homo sapiens
tctcaaggttggaat

SEQ ID NO: 2016155 - DNA, 15 bp, Homo sapiens
ctcaaggttggaatc

SEQ ID NO: 2016156 - DNA, 15 bp, Homo sapiens
tcaaggttggaatct

SEQ ID NO: 2016157 - DNA, 15 bp, Homo sapiens
caaggttggaatctt

SEQ ID NO: 2016158 - DNA, 15 bp, Homo sapiens
aaggttggaatcttc

SEQ ID NO: 2016159 - DNA, 15 bp, Homo sapiens
aggttggaatcttct

SEQ ID NO: 2016160 - DNA, 15 bp, Homo sapiens
ggttggaatcttctt

SEQ ID NO: 2016161 - DNA, 15 bp, Homo sapiens
gttggaatcttcttg

SEQ ID NO: 2016162 - DNA, 15 bp, Homo sapiens
ttggaatcttcttgg

SEQ ID NO: 2016163 - DNA, 15 bp, Homo sapiens
tggaatcttcttggt

SEQ ID NO: 2016164 - DNA, 15 bp, Homo sapiens
ggaatcttcttggtt

SEQ ID NO: 2016165 - DNA, 15 bp, Homo sapiens
gaatcttcttggttt

SEQ ID NO: 2016166 - DNA, 15 bp, Homo sapiens
aatcttcttggtttt

SEQ ID NO: 2016167 - DNA, 15 bp, Homo sapiens
atcttcttggttttt

SEQ ID NO: 2016168 - DNA, 15 bp, Homo sapiens
tcttcttggtttttc

SEQ ID NO: 2016169 - DNA, 15 bp, Homo sapiens
cttcttggtttttca

SEQ ID NO: 2016170 - DNA, 15 bp, Homo sapiens
ttcttggtttttcat

SEQ ID NO: 2016171 - DNA, 15 bp, Homo sapiens
tcttggtttttcata

SEQ ID NO: 2016172 - DNA, 15 bp, Homo sapiens
cttggtttttcataa

SEQ ID NO: 2016173 - DNA, 15 bp, Homo sapiens
ttggtttttcataaa

SEQ ID NO: 2016174 - DNA, 15 bp, Homo sapiens
tggtttttcataaaa

SEQ ID NO: 2016175 - DNA, 15 bp, Homo sapiens
ggtttttcataaaat

SEQ ID NO: 2016176 - DNA, 15 bp, Homo sapiens
gtttttcataaaatc

SEQ ID NO: 2016177 - DNA, 15 bp, Homo sapiens
tttttcataaaatct

SEQ ID NO: 2016178 - DNA, 15 bp, Homo sapiens
ttttcataaaatcta

SEQ ID NO: 2016179 - DNA, 15 bp, Homo sapiens
tttcataaaatctac

SEQ ID NO: 2016180 - DNA, 15 bp, Homo sapiens
ttcataaaatctact

SEQ ID NO: 2016181 - DNA, 15 bp, Homo sapiens
tcataaaatctactg

SEQ ID NO: 2016182 - DNA, 15 bp, Homo sapiens
cataaaatctactgg

SEQ ID NO: 2016183 - DNA, 15 bp, Homo sapiens
ataaaatctactggt

SEQ ID NO: 2016184 - DNA, 15 bp, Homo sapiens
taaaatctactggtg

SEQ ID NO: 2016185 - DNA, 15 bp, Homo sapiens
aaaatctactggtgg

SEQ ID NO: 2016186 - DNA, 15 bp, Homo sapiens
aaatctactggtggc

SEQ ID NO: 2016187 - DNA, 15 bp, Homo sapiens
aatctactggtggca

SEQ ID NO: 2016188 - DNA, 15 bp, Homo sapiens
atctactggtggcag

SEQ ID NO: 2016189 - DNA, 15 bp, Homo sapiens
tctactggtggcagg

SEQ ID NO: 2016190 - DNA, 15 bp, Homo sapiens
ctactggtggcaggg

SEQ ID NO: 2016191 - DNA, 15 bp, Homo sapiens
tactggtggcagggg

SEQ ID NO: 2016192 - DNA, 15 bp, Homo sapiens
actggtggcaggggc

SEQ ID NO: 2016193 - DNA, 15 bp, Homo sapiens
ctggtggcaggggca

SEQ ID NO: 2016194 - DNA, 15 bp, Homo sapiens
tggtggcaggggcaa

SEQ ID NO: 2016195 - DNA, 15 bp, Homo sapiens
ggtggcaggggcaag

SEQ ID NO: 2016196 - DNA, 15 bp, Homo sapiens
gtggcaggggcaagt

SEQ ID NO: 2016197 - DNA, 15 bp, Homo sapiens
tggcaggggcaagtt

SEQ ID NO: 2016198 - DNA, 15 bp, Homo sapiens
ggcaggggcaagtta

SEQ ID NO: 2016199 - DNA, 15 bp, Homo sapiens
gcaggggcaagttaa

SEQ ID NO: 2016200 - DNA, 15 bp, Homo sapiens
caggggcaagttaag

SEQ ID NO: 2016201 - DNA, 15 bp, Homo sapiens
aggggcaagttaagt

SEQ ID NO: 2016202 - DNA, 15 bp, Homo sapiens
ggggcaagttaagtg

SEQ ID NO: 2016203 - DNA, 15 bp, Homo sapiens
gggcaagttaagtga

SEQ ID NO: 2016204 - DNA, 15 bp, Homo sapiens
ggcaagttaagtgag

SEQ ID NO: 2016205 - DNA, 15 bp, Homo sapiens
gcaagttaagtgagt

SEQ ID NO: 2016206 - DNA, 15 bp, Homo sapiens
caagttaagtgagtc

SEQ ID NO: 2016207 - DNA, 15 bp, Homo sapiens
aagttaagtgagtca

SEQ ID NO: 2016208 - DNA, 15 bp, Homo sapiens
agttaagtgagtcaa

SEQ ID NO: 2016209 - DNA, 15 bp, Homo sapiens
gttaagtgagtcaag

SEQ ID NO: 2016210 - DNA, 15 bp, Homo sapiens
ttaagtgagtcaagc

SEQ ID NO: 2016211 - DNA, 15 bp, Homo sapiens
taagtgagtcaagcg

SEQ ID NO: 2016212 - DNA, 15 bp, Homo sapiens
aagtgagtcaagcgg

SEQ ID NO: 2016213 - DNA, 15 bp, Homo sapiens
agtgagtcaagcggt

SEQ ID NO: 2016214 - DNA, 15 bp, Homo sapiens
gtgagtcaagcggtg

SEQ ID NO: 2016215 - DNA, 15 bp, Homo sapiens
tgagtcaagcggtgg

SEQ ID NO: 2016216 - DNA, 15 bp, Homo sapiens
gagtcaagcggtgga

SEQ ID NO: 2016217 - DNA, 15 bp, Homo sapiens
agtcaagcggtggaa

SEQ ID NO: 2016218 - DNA, 15 bp, Homo sapiens
gtcaagcggtggaaa

SEQ ID NO: 2016219 - DNA, 15 bp, Homo sapiens
tcaagcggtggaaat

SEQ ID NO: 2016220 - DNA, 15 bp, Homo sapiens
caagcggtggaaatg

SEQ ID NO: 2016221 - DNA, 15 bp, Homo sapiens
aagcggtggaaatga

SEQ ID NO: 2016222 - DNA, 15 bp, Homo sapiens
agcggtggaaatgat

SEQ ID NO: 2016223 - DNA, 15 bp, Homo sapiens
gcggtggaaatgatt

SEQ ID NO: 2016224 - DNA, 15 bp, Homo sapiens
cggtggaaatgattg

SEQ ID NO: 2016225 - DNA, 15 bp, Homo sapiens
ggtggaaatgattgt

SEQ ID NO: 2016226 - DNA, 15 bp, Homo sapiens
gtggaaatgattgta

SEQ ID NO: 2016227 - DNA, 15 bp, Homo sapiens
tggaaatgattgtat

SEQ ID NO: 2016228 - DNA, 15 bp, Homo sapiens
ggaaatgattgtatt

SEQ ID NO: 2016229 - DNA, 15 bp, Homo sapiens
gaaatgattgtatta

SEQ ID NO: 2016230 - DNA, 15 bp, Homo sapiens
aaatgattgtattat

SEQ ID NO: 2016231 - DNA, 15 bp, Homo sapiens
aatgattgtattatc

SEQ ID NO: 2016232 - DNA, 15 bp, Homo sapiens
atgattgtattatct

SEQ ID NO: 2016233 - DNA, 15 bp, Homo sapiens
tgattgtattatctc

SEQ ID NO: 2016234 - DNA, 15 bp, Homo sapiens
gattgtattatctca

SEQ ID NO: 2016235 - DNA, 15 bp, Homo sapiens
attgtattatctcag

SEQ ID NO: 2016236 - DNA, 15 bp, Homo sapiens
ttgtattatctcaga

SEQ ID NO: 2016237 - DNA, 15 bp, Homo sapiens
tgtattatctcagat

SEQ ID NO: 2016238 - DNA, 15 bp, Homo sapiens
gtattatctcagatt

SEQ ID NO: 2016239 - DNA, 15 bp, Homo sapiens
tattatctcagattt

SEQ ID NO: 2016240 - DNA, 15 bp, Homo sapiens
attatctcagattta

SEQ ID NO: 2016241 - DNA, 15 bp, Homo sapiens
ttatctcagatttat

SEQ ID NO: 2016242 - DNA, 15 bp, Homo sapiens
tatctcagatttatg

SEQ ID NO: 2016243 - DNA, 15 bp, Homo sapiens
atctcagatttatga

SEQ ID NO: 2016244 - DNA, 15 bp, Homo sapiens
tctcagatttatgat

SEQ ID NO: 2016245 - DNA, 15 bp, Homo sapiens
ctcagatttatgatc

SEQ ID NO: 2016246 - DNA, 15 bp, Homo sapiens
tcagatttatgatct

SEQ ID NO: 2016247 - DNA, 15 bp, Homo sapiens
cagatttatgatctc

SEQ ID NO: 2016248 - DNA, 15 bp, Homo sapiens
agatttatgatctcc

SEQ ID NO: 2016249 - DNA, 15 bp, Homo sapiens
gatttatgatctcca

SEQ ID NO: 2016250 - DNA, 15 bp, Homo sapiens
atttatgatctccac

SEQ ID NO: 2016251 - DNA, 15 bp, Homo sapiens
tttatgatctccaca

SEQ ID NO: 2016252 - DNA, 15 bp, Homo sapiens
ttatgatctccacag

SEQ ID NO: 2016253 - DNA, 15 bp, Homo sapiens
tatgatctccacagt

SEQ ID NO: 2016254 - DNA, 15 bp, Homo sapiens
atgatctccacagtc

SEQ ID NO: 2016255 - DNA, 15 bp, Homo sapiens
tgatctccacagtct

SEQ ID NO: 2016256 - DNA, 15 bp, Homo sapiens
gatctccacagtctt

SEQ ID NO: 2016257 - DNA, 15 bp, Homo sapiens
atctccacagtcttg

SEQ ID NO: 2016258 - DNA, 15 bp, Homo sapiens
tctccacagtcttga

SEQ ID NO: 2016259 - DNA, 15 bp, Homo sapiens
ctccacagtcttgat

SEQ ID NO: 2016260 - DNA, 15 bp, Homo sapiens
tccacagtcttgatt

SEQ ID NO: 2016261 - DNA, 15 bp, Homo sapiens
ccacagtcttgattg

SEQ ID NO: 2016262 - DNA, 15 bp, Homo sapiens
cacagtcttgattga

SEQ ID NO: 2016263 - DNA, 15 bp, Homo sapiens
acagtcttgattgag

SEQ ID NO: 2016264 - DNA, 15 bp, Homo sapiens
cagtcttgattgaga

SEQ ID NO: 2016265 - DNA, 15 bp, Homo sapiens
agtcttgattgagac

SEQ ID NO: 2016266 - DNA, 15 bp, Homo sapiens
gtcttgattgagaca

SEQ ID NO: 2016267 - DNA, 15 bp, Homo sapiens
tcttgattgagacag

SEQ ID NO: 2016268 - DNA, 15 bp, Homo sapiens
cttgattgagacagt

SEQ ID NO: 2016269 - DNA, 15 bp, Homo sapiens
ttgattgagacagtc

SEQ ID NO: 2016270 - DNA, 15 bp, Homo sapiens
tgattgagacagtcc

SEQ ID NO: 2016271 - DNA, 15 bp, Homo sapiens
gattgagacagtcca

SEQ ID NO: 2016272 - DNA, 15 bp, Homo sapiens
attgagacagtccag

SEQ ID NO: 2016273 - DNA, 15 bp, Homo sapiens
ttgagacagtccaga

SEQ ID NO: 2016274 - DNA, 15 bp, Homo sapiens
tgagacagtccagag

SEQ ID NO: 2016275 - DNA, 15 bp, Homo sapiens
gagacagtccagaga

SEQ ID NO: 2016276 - DNA, 15 bp, Homo sapiens
agacagtccagagat

SEQ ID NO: 2016277 - DNA, 15 bp, Homo sapiens
gacagtccagagatg

SEQ ID NO: 2016278 - DNA, 15 bp, Homo sapiens
acagtccagagatgg

SEQ ID NO: 2016279 - DNA, 15 bp, Homo sapiens
cagtccagagatgga

SEQ ID NO: 2016280 - DNA, 15 bp, Homo sapiens
agtccagagatggag

SEQ ID NO: 2016281 - DNA, 15 bp, Homo sapiens
gtccagagatggagg

SEQ ID NO: 2016282 - DNA, 15 bp, Homo sapiens
tccagagatggaggg

SEQ ID NO: 2016283 - DNA, 15 bp, Homo sapiens
ccagagatggaggga

SEQ ID NO: 2016284 - DNA, 15 bp, Homo sapiens
cagagatggagggag

SEQ ID NO: 2016285 - DNA, 15 bp, Homo sapiens
agagatggagggaga

SEQ ID NO: 2016286 - DNA, 15 bp, Homo sapiens
gagatggagggagac

SEQ ID NO: 2016287 - DNA, 15 bp, Homo sapiens
agatggagggagact

SEQ ID NO: 2016288 - DNA, 15 bp, Homo sapiens
gatggagggagacta

SEQ ID NO: 2016289 - DNA, 15 bp, Homo sapiens
atggagggagactag

SEQ ID NO: 2016290 - DNA, 15 bp, Homo sapiens
tggagggagactagt

SEQ ID NO: 2016291 - DNA, 15 bp, Homo sapiens
ggagggagactagta

SEQ ID NO: 2016292 - DNA, 15 bp, Homo sapiens
gagggagactagtag

SEQ ID NO: 2016293 - DNA, 15 bp, Homo sapiens
agggagactagtaga

SEQ ID NO: 2016294 - DNA, 15 bp, Homo sapiens
gggagactagtagaa

SEQ ID NO: 2016295 - DNA, 15 bp, Homo sapiens
ggagactagtagaat

SEQ ID NO: 2016296 - DNA, 15 bp, Homo sapiens
gagactagtagaatc

SEQ ID NO: 2016297 - DNA, 15 bp, Homo sapiens
agactagtagaatca

SEQ ID NO: 2016298 - DNA, 15 bp, Homo sapiens
gactagtagaatcat

SEQ ID NO: 2016299 - DNA, 15 bp, Homo sapiens
actagtagaatcatt

SEQ ID NO: 2016300 - DNA, 15 bp, Homo sapiens
ctagtagaatcattt

SEQ ID NO: 2016301 - DNA, 15 bp, Homo sapiens
tagtagaatcatttg

SEQ ID NO: 2016302 - DNA, 15 bp, Homo sapiens
agtagaatcatttgg

SEQ ID NO: 2016303 - DNA, 15 bp, Homo sapiens
gtagaatcatttgga

SEQ ID NO: 2016304 - DNA, 15 bp, Homo sapiens
tagaatcatttggaa

SEQ ID NO: 2016305 - DNA, 15 bp, Homo sapiens
agaatcatttggaag

SEQ ID NO: 2016306 - DNA, 15 bp, Homo sapiens
gaatcatttggaaga

SEQ ID NO: 2016307 - DNA, 15 bp, Homo sapiens
aatcatttggaagag

SEQ ID NO: 2016308 - DNA, 15 bp, Homo sapiens
atcatttggaagagg

SEQ ID NO: 2016309 - DNA, 15 bp, Homo sapiens
tcatttggaagagga

SEQ ID NO: 2016310 - DNA, 15 bp, Homo sapiens
catttggaagaggag

SEQ ID NO: 2016311 - DNA, 15 bp, Homo sapiens
atttggaagaggaga

SEQ ID NO: 2016312 - DNA, 15 bp, Homo sapiens
tttggaagaggagat

SEQ ID NO: 2016313 - DNA, 15 bp, Homo sapiens
ttggaagaggagata

SEQ ID NO: 2016314 - DNA, 15 bp, Homo sapiens
tggaagaggagatac

SEQ ID NO: 2016315 - DNA, 15 bp, Homo sapiens
ggaagaggagataca

SEQ ID NO: 2016316 - DNA, 15 bp, Homo sapiens
gaagaggagatacaa

SEQ ID NO: 2016317 - DNA, 15 bp, Homo sapiens
aagaggagatacaat

SEQ ID NO: 2016318 - DNA, 15 bp, Homo sapiens
agaggagatacaatt

SEQ ID NO: 2016319 - DNA, 15 bp, Homo sapiens
gaggagatacaattg

SEQ ID NO: 2016320 - DNA, 15 bp, Homo sapiens
aggagatacaattgt

SEQ ID NO: 2016321 - DNA, 15 bp, Homo sapiens
ggagatacaattgtc

SEQ ID NO: 2016322 - DNA, 15 bp, Homo sapiens
gagatacaattgtca

SEQ ID NO: 2016323 - DNA, 15 bp, Homo sapiens
agatacaattgtcat

SEQ ID NO: 2016324 - DNA, 15 bp, Homo sapiens
gatacaattgtcatt

SEQ ID NO: 2016325 - DNA, 15 bp, Homo sapiens
atacaattgtcattg

SEQ ID NO: 2016326 - DNA, 15 bp, Homo sapiens
tacaattgtcattgt

SEQ ID NO: 2016327 - DNA, 15 bp, Homo sapiens
acaattgtcattgtg

SEQ ID NO: 2016328 - DNA, 15 bp, Homo sapiens
caattgtcattgtgg

SEQ ID NO: 2016329 - DNA, 15 bp, Homo sapiens
aattgtcattgtggg

SEQ ID NO: 2016330 - DNA, 15 bp, Homo sapiens
attgtcattgtgggt

SEQ ID NO: 2016331 - DNA, 15 bp, Homo sapiens
ttgtcattgtgggtt

SEQ ID NO: 2016332 - DNA, 15 bp, Homo sapiens
tgtcattgtgggttt

SEQ ID NO: 2016333 - DNA, 15 bp, Homo sapiens
gtcattgtgggtttg

SEQ ID NO: 2016334 - DNA, 15 bp, Homo sapiens
tcattgtgggtttgt

SEQ ID NO: 2016335 - DNA, 15 bp, Homo sapiens
cattgtgggtttgtc

SEQ ID NO: 2016336 - DNA, 15 bp, Homo sapiens
attgtgggtttgtca

SEQ ID NO: 2016337 - DNA, 15 bp, Homo sapiens
ttgtgggtttgtcag

SEQ ID NO: 2016338 - DNA, 15 bp, Homo sapiens
tgtgggtttgtcaga

SEQ ID NO: 2016339 - DNA, 15 bp, Homo sapiens
gtgggtttgtcagat

SEQ ID NO: 2016340 - DNA, 15 bp, Homo sapiens
tgggtttgtcagatt

SEQ ID NO: 2016341 - DNA, 15 bp, Homo sapiens
gggtttgtcagattg

SEQ ID NO: 2016342 - DNA, 15 bp, Homo sapiens
ggtttgtcagattgg

SEQ ID NO: 2016343 - DNA, 15 bp, Homo sapiens
gtttgtcagattggt

SEQ ID NO: 2016344 - DNA, 15 bp, Homo sapiens
tttgtcagattggtt

SEQ ID NO: 2016345 - DNA, 15 bp, Homo sapiens
ttgtcagattggtta

SEQ ID NO: 2016346 - DNA, 15 bp, Homo sapiens
tgtcagattggttac

SEQ ID NO: 2016347 - DNA, 15 bp, Homo sapiens
gtcagattggttact

SEQ ID NO: 2016348 - DNA, 15 bp, Homo sapiens
tcagattggttactt

SEQ ID NO: 2016349 - DNA, 15 bp, Homo sapiens
cagattggttacttt

SEQ ID NO: 2016350 - DNA, 15 bp, Homo sapiens
agattggttactttc

SEQ ID NO: 2016351 - DNA, 15 bp, Homo sapiens
gattggttactttcc

SEQ ID NO: 2016352 - DNA, 15 bp, Homo sapiens
attggttactttcct

SEQ ID NO: 2016353 - DNA, 15 bp, Homo sapiens
ttggttactttcctg

SEQ ID NO: 2016354 - DNA, 15 bp, Homo sapiens
tggttactttcctgt

SEQ ID NO: 2016355 - DNA, 15 bp, Homo sapiens
ggttactttcctgtc

SEQ ID NO: 2016356 - DNA, 15 bp, Homo sapiens
gttactttcctgtcc

SEQ ID NO: 2016357 - DNA, 15 bp, Homo sapiens
ttactttcctgtcct

SEQ ID NO: 2016358 - DNA, 15 bp, Homo sapiens
tactttcctgtcctt

SEQ ID NO: 2016359 - DNA, 15 bp, Homo sapiens
actttcctgtccttc

SEQ ID NO: 2016360 - DNA, 15 bp, Homo sapiens
ctttcctgtccttcc

SEQ ID NO: 2016361 - DNA, 15 bp, Homo sapiens
tttcctgtccttcca

SEQ ID NO: 2016362 - DNA, 15 bp, Homo sapiens
ttcctgtccttccaa

SEQ ID NO: 2016363 - DNA, 15 bp, Homo sapiens
tcctgtccttccaaa

SEQ ID NO: 2016364 - DNA, 15 bp, Homo sapiens
cctgtccttccaaat

SEQ ID NO: 2016365 - DNA, 15 bp, Homo sapiens
ctgtccttccaaatc

SEQ ID NO: 2016366 - DNA, 15 bp, Homo sapiens
tgtccttccaaatcc

SEQ ID NO: 2016367 - DNA, 15 bp, Homo sapiens
gtccttccaaatcca

SEQ ID NO: 2016368 - DNA, 15 bp, Homo sapiens
tccttccaaatccag

SEQ ID NO: 2016369 - DNA, 15 bp, Homo sapiens
ccttccaaatccaga

SEQ ID NO: 2016370 - DNA, 15 bp, Homo sapiens
cttccaaatccagaa

SEQ ID NO: 2016371 - DNA, 15 bp, Homo sapiens
ttccaaatccagaag

SEQ ID NO: 2016372 - DNA, 15 bp, Homo sapiens
tccaaatccagaagg

SEQ ID NO: 2016373 - DNA, 15 bp, Homo sapiens
ccaaatccagaaggg

SEQ ID NO: 2016374 - DNA, 15 bp, Homo sapiens
caaatccagaagggg

SEQ ID NO: 2016375 - DNA, 15 bp, Homo sapiens
aaatccagaagggga

SEQ ID NO: 2016376 - DNA, 15 bp, Homo sapiens
aatccagaaggggag

SEQ ID NO: 2016377 - DNA, 15 bp, Homo sapiens
atccagaaggggagg

SEQ ID NO: 2016378 - DNA, 15 bp, Homo sapiens
tccagaaggggaggt

SEQ ID NO: 2016379 - DNA, 15 bp, Homo sapiens
ccagaaggggaggtg

SEQ ID NO: 2016380 - DNA, 15 bp, Homo sapiens
cagaaggggaggtgg

SEQ ID NO: 2016381 - DNA, 15 bp, Homo sapiens
agaaggggaggtggt

SEQ ID NO: 2016382 - DNA, 15 bp, Homo sapiens
gaaggggaggtggtg

SEQ ID NO: 2016383 - DNA, 15 bp, Homo sapiens
aaggggaggtggtgg

SEQ ID NO: 2016384 - DNA, 15 bp, Homo sapiens
aggggaggtggtgga

SEQ ID NO: 2016385 - DNA, 15 bp, Homo sapiens
ggggaggtggtggag

SEQ ID NO: 2016386 - DNA, 15 bp, Homo sapiens
gggaggtggtggagg

SEQ ID NO: 2016387 - DNA, 15 bp, Homo sapiens
ggaggtggtggaggc

SEQ ID NO: 2016388 - DNA, 15 bp, Homo sapiens
gaggtggtggaggca

SEQ ID NO: 2016389 - DNA, 15 bp, Homo sapiens
aggtggtggaggcag

SEQ ID NO: 2016390 - DNA, 15 bp, Homo sapiens
ggtggtggaggcaga

SEQ ID NO: 2016391 - DNA, 15 bp, Homo sapiens
gtggtggaggcagat

SEQ ID NO: 2016392 - DNA, 15 bp, Homo sapiens
tggtggaggcagatc

SEQ ID NO: 2016393 - DNA, 15 bp, Homo sapiens
ggtggaggcagatct

SEQ ID NO: 2016394 - DNA, 15 bp, Homo sapiens
gtggaggcagatctg

SEQ ID NO: 2016395 - DNA, 15 bp, Homo sapiens
tggaggcagatctgc

SEQ ID NO: 2016396 - DNA, 15 bp, Homo sapiens
ggaggcagatctgca

SEQ ID NO: 2016397 - DNA, 15 bp, Homo sapiens
aggcagatctgcatc

SEQ ID NO: 2016398 - DNA, 15 bp, Homo sapiens
ggcagatctgcatca

SEQ ID NO: 2016399 - DNA, 15 bp, Homo sapiens
gcagatctgcatcat

SEQ ID NO: 2016400 - DNA, 15 bp, Homo sapiens
cagatctgcatcatc

SEQ ID NO: 2016401 - DNA, 15 bp, Homo sapiens
agatctgcatcatct

SEQ ID NO: 2016402 - DNA, 15 bp, Homo sapiens
gatctgcatcatctg

SEQ ID NO: 2016403 - DNA, 15 bp, Homo sapiens
atctgcatcatctga

SEQ ID NO: 2016404 - DNA, 15 bp, Homo sapiens
tctgcatcatctgaa

SEQ ID NO: 2016405 - DNA, 15 bp, Homo sapiens
ctgcatcatctgaag

SEQ ID NO: 2016406 - DNA, 15 bp, Homo sapiens
tgcatcatctgaaga

SEQ ID NO: 2016407 - DNA, 15 bp, Homo sapiens
gcatcatctgaagaa

SEQ ID NO: 2016408 - DNA, 15 bp, Homo sapiens
catcatctgaagaag

SEQ ID NO: 2016409 - DNA, 15 bp, Homo sapiens
atcatctgaagaaga

SEQ ID NO: 2016410 - DNA, 15 bp, Homo sapiens
tcatctgaagaagaa

SEQ ID NO: 2016411 - DNA, 15 bp, Homo sapiens
catctgaagaagaaa

SEQ ID NO: 2016412 - DNA, 15 bp, Homo sapiens
atctgaagaagaaac

SEQ ID NO: 2016413 - DNA, 15 bp, Homo sapiens
ctgaagaagaaacag

SEQ ID NO: 2016414 - DNA, 15 bp, Homo sapiens
tgaagaagaaacagc

SEQ ID NO: 2016415 - DNA, 15 bp, Homo sapiens
gaagaagaaacagca

SEQ ID NO: 2016416 - DNA, 15 bp, Homo sapiens
aagaagaaacagcag

SEQ ID NO: 2016417 - DNA, 15 bp, Homo sapiens
agaagaaacagcagt

SEQ ID NO: 2016418 - DNA, 15 bp, Homo sapiens
gaagaaacagcagtt

SEQ ID NO: 2016419 - DNA, 15 bp, Homo sapiens
aagaaacagcagttc

SEQ ID NO: 2016420 - DNA, 15 bp, Homo sapiens
agaaacagcagttcc

SEQ ID NO: 2016421 - DNA, 15 bp, Homo sapiens
gaaacagcagttcca

SEQ ID NO: 2016422 - DNA, 15 bp, Homo sapiens
aaacagcagttccaa

SEQ ID NO: 2016423 - DNA, 15 bp, Homo sapiens
aacagcagttccaac

SEQ ID NO: 2016424 - DNA, 15 bp, Homo sapiens
acagcagttccaact

SEQ ID NO: 2016425 - DNA, 15 bp, Homo sapiens
cagcagttccaactg

SEQ ID NO: 2016426 - DNA, 15 bp, Homo sapiens
agcagttccaactgt

SEQ ID NO: 2016427 - DNA, 15 bp, Homo sapiens
gcagttccaactgtt

SEQ ID NO: 2016428 - DNA, 15 bp, Homo sapiens
cagttccaactgttg

SEQ ID NO: 2016429 - DNA, 15 bp, Homo sapiens
agttccaactgttga

SEQ ID NO: 2016430 - DNA, 15 bp, Homo sapiens
gttccaactgttgaa

SEQ ID NO: 2016431 - DNA, 15 bp, Homo sapiens
ttccaactgttgaac

SEQ ID NO: 2016432 - DNA, 15 bp, Homo sapiens
tccaactgttgaacc

SEQ ID NO: 2016433 - DNA, 15 bp, Homo sapiens
ccaactgttgaacca

SEQ ID NO: 2016434 - DNA, 15 bp, Homo sapiens
caactgttgaaccat

SEQ ID NO: 2016435 - DNA, 15 bp, Homo sapiens
aactgttgaaccatc

SEQ ID NO: 2016436 - DNA, 15 bp, Homo sapiens
actgttgaaccatca

SEQ ID NO: 2016437 - DNA, 15 bp, Homo sapiens
ctgttgaaccatcag

SEQ ID NO: 2016438 - DNA, 15 bp, Homo sapiens
tgttgaaccatcagc

SEQ ID NO: 2016439 - DNA, 15 bp, Homo sapiens
gttgaaccatcagca

SEQ ID NO: 2016440 - DNA, 15 bp, Homo sapiens
ttgaaccatcagcac

SEQ ID NO: 2016441 - DNA, 15 bp, Homo sapiens
tgaaccatcagcact

SEQ ID NO: 2016442 - DNA, 15 bp, Homo sapiens
gaaccatcagcacta

SEQ ID NO: 2016443 - DNA, 15 bp, Homo sapiens
aaccatcagcactat

SEQ ID NO: 2016444 - DNA, 15 bp, Homo sapiens
accatcagcactatc

SEQ ID NO: 2016445 - DNA, 15 bp, Homo sapiens
ccatcagcactatct

SEQ ID NO: 2016446 - DNA, 15 bp, Homo sapiens
catcagcactatctt

SEQ ID NO: 2016447 - DNA, 15 bp, Homo sapiens
atcagcactatcttc

SEQ ID NO: 2016448 - DNA, 15 bp, Homo sapiens
tcagcactatcttct

SEQ ID NO: 2016449 - DNA, 15 bp, Homo sapiens
cagcactatcttctg

SEQ ID NO: 2016450 - DNA, 15 bp, Homo sapiens
agcactatcttctga

SEQ ID NO: 2016451 - DNA, 15 bp, Homo sapiens
gcactatcttctgat

SEQ ID NO: 2016452 - DNA, 15 bp, Homo sapiens
cactatcttctgatg

SEQ ID NO: 2016453 - DNA, 15 bp, Homo sapiens
actatcttctgatgt

SEQ ID NO: 2016454 - DNA, 15 bp, Homo sapiens
ctatcttctgatgta

SEQ ID NO: 2016455 - DNA, 15 bp, Homo sapiens
tatcttctgatgtac

SEQ ID NO: 2016456 - DNA, 15 bp, Homo sapiens
atcttctgatgtacc

SEQ ID NO: 2016457 - DNA, 15 bp, Homo sapiens
tcttctgatgtacca

SEQ ID NO: 2016458 - DNA, 15 bp, Homo sapiens
cttctgatgtaccat

SEQ ID NO: 2016459 - DNA, 15 bp, Homo sapiens
ttctgatgtaccatt

SEQ ID NO: 2016460 - DNA, 15 bp, Homo sapiens
tctgatgtaccattt

SEQ ID NO: 2016461 - DNA, 15 bp, Homo sapiens
ctgatgtaccattta

SEQ ID NO: 2016462 - DNA, 15 bp, Homo sapiens
tgatgtaccatttac

SEQ ID NO: 2016463 - DNA, 15 bp, Homo sapiens
gatgtaccatttact

SEQ ID NO: 2016464 - DNA, 15 bp, Homo sapiens
atgtaccatttactt

SEQ ID NO: 2016465 - DNA, 15 bp, Homo sapiens
tgtaccatttacttg

SEQ ID NO: 2016466 - DNA, 15 bp, Homo sapiens
gtaccatttacttga

SEQ ID NO: 2016467 - DNA, 15 bp, Homo sapiens
taccatttacttgat

SEQ ID NO: 2016468 - DNA, 15 bp, Homo sapiens
accatttacttgatc

SEQ ID NO: 2016469 - DNA, 15 bp, Homo sapiens
ccatttacttgatct

SEQ ID NO: 2016470 - DNA, 15 bp, Homo sapiens
catttacttgatctt

SEQ ID NO: 2016471 - DNA, 15 bp, Homo sapiens
atttacttgatcttt

SEQ ID NO: 2016472 - DNA, 15 bp, Homo sapiens
tttacttgatctttt

SEQ ID NO: 2016473 - DNA, 15 bp, Homo sapiens
ttacttgatctttta

SEQ ID NO: 2016474 - DNA, 15 bp, Homo sapiens
tacttgatcttttat

SEQ ID NO: 2016475 - DNA, 15 bp, Homo sapiens
acttgatcttttatt

SEQ ID NO: 2016476 - DNA, 15 bp, Homo sapiens
cttgatcttttattt

SEQ ID NO: 2016477 - DNA, 15 bp, Homo sapiens
ttgatcttttatttt

SEQ ID NO: 2016478 - DNA, 15 bp, Homo sapiens
tgatcttttattttc

SEQ ID NO: 2016479 - DNA, 15 bp, Homo sapiens
gatcttttattttct

SEQ ID NO: 2016480 - DNA, 15 bp, Homo sapiens
atcttttattttctc

SEQ ID NO: 2016481 - DNA, 15 bp, Homo sapiens
tcttttattttctct

SEQ ID NO: 2016482 - DNA, 15 bp, Homo sapiens
cttttattttctctg

SEQ ID NO: 2016483 - DNA, 15 bp, Homo sapiens
ttttattttctctgt

SEQ ID NO: 2016484 - DNA, 15 bp, Homo sapiens
tttattttctctgtt

SEQ ID NO: 2016485 - DNA, 15 bp, Homo sapiens
ttattttctctgttt

SEQ ID NO: 2016486 - DNA, 15 bp, Homo sapiens
tattttctctgtttt

SEQ ID NO: 2016487 - DNA, 15 bp, Homo sapiens
attttctctgttttg

SEQ ID NO: 2016488 - DNA, 15 bp, Homo sapiens
ttttctctgttttgg

SEQ ID NO: 2016489 - DNA, 15 bp, Homo sapiens
tttctctgttttggg

SEQ ID NO: 2016490 - DNA, 15 bp, Homo sapiens
ttctctgttttgggg

SEQ ID NO: 2016491 - DNA, 15 bp, Homo sapiens
tctctgttttggggt

SEQ ID NO: 2016492 - DNA, 15 bp, Homo sapiens
ctctgttttggggtt

SEQ ID NO: 2016493 - DNA, 15 bp, Homo sapiens
tctgttttggggttg

SEQ ID NO: 2016494 - DNA, 15 bp, Homo sapiens
ctgttttggggttgt

SEQ ID NO: 2016495 - DNA, 15 bp, Homo sapiens
tgttttggggttgtt

SEQ ID NO: 2016496 - DNA, 15 bp, Homo sapiens
gttttggggttgttg

SEQ ID NO: 2016497 - DNA, 15 bp, Homo sapiens
ttttggggttgttgg

SEQ ID NO: 2016498 - DNA, 15 bp, Homo sapiens
tttggggttgttgga

SEQ ID NO: 2016499 - DNA, 15 bp, Homo sapiens
ttggggttgttggag

SEQ ID NO: 2016500 - DNA, 15 bp, Homo sapiens
tggggttgttggagt

SEQ ID NO: 2016501 - DNA, 15 bp, Homo sapiens
ggggttgttggagtc

SEQ ID NO: 2016502 - DNA, 15 bp, Homo sapiens
gggttgttggagtct

SEQ ID NO: 2016503 - DNA, 15 bp, Homo sapiens
ggttgttggagtctt

SEQ ID NO: 2016504 - DNA, 15 bp, Homo sapiens
gttgttggagtcttc

SEQ ID NO: 2016505 - DNA, 15 bp, Homo sapiens
ttgttggagtcttca

SEQ ID NO: 2016506 - DNA, 15 bp, Homo sapiens
tgttggagtcttcaa

SEQ ID NO: 2016507 - DNA, 15 bp, Homo sapiens
gttggagtcttcaat

SEQ ID NO: 2016508 - DNA, 15 bp, Homo sapiens
ttggagtcttcaatg

SEQ ID NO: 2016509 - DNA, 15 bp, Homo sapiens
tggagtcttcaatgt

SEQ ID NO: 2016510 - DNA, 15 bp, Homo sapiens
ggagtcttcaatgtt

SEQ ID NO: 2016511 - DNA, 15 bp, Homo sapiens
gagtcttcaatgttt

SEQ ID NO: 2016512 - DNA, 15 bp, Homo sapiens
agtcttcaatgtttt

SEQ ID NO: 2016513 - DNA, 15 bp, Homo sapiens
gtcttcaatgttttc

SEQ ID NO: 2016514 - DNA, 15 bp, Homo sapiens
tcttcaatgttttca

SEQ ID NO: 2016515 - DNA, 15 bp, Homo sapiens
cttcaatgttttcac

SEQ ID NO: 2016516 - DNA, 15 bp, Homo sapiens
ttcaatgttttcact

SEQ ID NO: 2016517 - DNA, 15 bp, Homo sapiens
tcaatgttttcactt

SEQ ID NO: 2016518 - DNA, 15 bp, Homo sapiens
caatgttttcacttg

SEQ ID NO: 2016519 - DNA, 15 bp, Homo sapiens
aatgttttcacttga

SEQ ID NO: 2016520 - DNA, 15 bp, Homo sapiens
atgttttcacttgat

SEQ ID NO: 2016521 - DNA, 15 bp, Homo sapiens
tgttttcacttgatt

SEQ ID NO: 2016522 - DNA, 15 bp, Homo sapiens
gttttcacttgattc

SEQ ID NO: 2016523 - DNA, 15 bp, Homo sapiens
ttttcacttgattca

SEQ ID NO: 2016524 - DNA, 15 bp, Homo sapiens
tttcacttgattcaa

SEQ ID NO: 2016525 - DNA, 15 bp, Homo sapiens
ttcacttgattcaaa

SEQ ID NO: 2016526 - DNA, 15 bp, Homo sapiens
tcacttgattcaaac

SEQ ID NO: 2016527 - DNA, 15 bp, Homo sapiens
cacttgattcaaaca

SEQ ID NO: 2016528 - DNA, 15 bp, Homo sapiens
acttgattcaaacaa

SEQ ID NO: 2016529 - DNA, 15 bp, Homo sapiens
cttgattcaaacaac

SEQ ID NO: 2016530 - DNA, 15 bp, Homo sapiens
ttgattcaaacaact

SEQ ID NO: 2016531 - DNA, 15 bp, Homo sapiens
tgattcaaacaactt

SEQ ID NO: 2016532 - DNA, 15 bp, Homo sapiens
gattcaaacaactta

SEQ ID NO: 2016533 - DNA, 15 bp, Homo sapiens
attcaaacaacttaa

SEQ ID NO: 2016534 - DNA, 15 bp, Homo sapiens
ttcaaacaacttaat

SEQ ID NO: 2016535 - DNA, 15 bp, Homo sapiens
tcaaacaacttaatt

SEQ ID NO: 2016536 - DNA, 15 bp, Homo sapiens
caaacaacttaattt

SEQ ID NO: 2016537 - DNA, 15 bp, Homo sapiens
aaacaacttaatttc

SEQ ID NO: 2016538 - DNA, 15 bp, Homo sapiens
aacaacttaatttct

SEQ ID NO: 2016539 - DNA, 15 bp, Homo sapiens
acaacttaatttcta

SEQ ID NO: 2016540 - DNA, 15 bp, Homo sapiens
caacttaatttctaa

SEQ ID NO: 2016541 - DNA, 15 bp, Homo sapiens
aacttaatttctaag

SEQ ID NO: 2016542 - DNA, 15 bp, Homo sapiens
acttaatttctaagt

SEQ ID NO: 2016543 - DNA, 15 bp, Homo sapiens
cttaatttctaagtc

SEQ ID NO: 2016544 - DNA, 15 bp, Homo sapiens
ttaatttctaagtca

SEQ ID NO: 2016545 - DNA, 15 bp, Homo sapiens
taatttctaagtcat

SEQ ID NO: 2016546 - DNA, 15 bp, Homo sapiens
aatttctaagtcatc

SEQ ID NO: 2016547 - DNA, 15 bp, Homo sapiens
atttctaagtcatct

SEQ ID NO: 2016548 - DNA, 15 bp, Homo sapiens
tttctaagtcatctg

SEQ ID NO: 2016549 - DNA, 15 bp, Homo sapiens
ttctaagtcatctgc

SEQ ID NO: 2016550 - DNA, 15 bp, Homo sapiens
tctaagtcatctgct

SEQ ID NO: 2016551 - DNA, 15 bp, Homo sapiens
ctaagtcatctgcta

SEQ ID NO: 2016552 - DNA, 15 bp, Homo sapiens
taagtcatctgctaa

SEQ ID NO: 2016553 - DNA, 15 bp, Homo sapiens
aagtcatctgctaaa

SEQ ID NO: 2016554 - DNA, 15 bp, Homo sapiens
agtcatctgctaaaa

SEQ ID NO: 2016555 - DNA, 15 bp, Homo sapiens
gtcatctgctaaaag

SEQ ID NO: 2016556 - DNA, 15 bp, Homo sapiens
tcatctgctaaaagt

SEQ ID NO: 2016557 - DNA, 15 bp, Homo sapiens
catctgctaaaagtg

SEQ ID NO: 2016558 - DNA, 15 bp, Homo sapiens
atctgctaaaagtgt

SEQ ID NO: 2016559 - DNA, 15 bp, Homo sapiens
tctgctaaaagtgtg

SEQ ID NO: 2016560 - DNA, 15 bp, Homo sapiens
ctgctaaaagtgtgc

SEQ ID NO: 2016561 - DNA, 15 bp, Homo sapiens
tgctaaaagtgtgct

SEQ ID NO: 2016562 - DNA, 15 bp, Homo sapiens
gctaaaagtgtgctt

SEQ ID NO: 2016563 - DNA, 15 bp, Homo sapiens
ctaaaagtgtgcttt

SEQ ID NO: 2016564 - DNA, 15 bp, Homo sapiens
taaaagtgtgctttt

SEQ ID NO: 2016565 - DNA, 15 bp, Homo sapiens
aaaagtgtgcttttg

SEQ ID NO: 2016566 - DNA, 15 bp, Homo sapiens
aaagtgtgcttttgc

SEQ ID NO: 2016567 - DNA, 15 bp, Homo sapiens
aagtgtgcttttgct

SEQ ID NO: 2016568 - DNA, 15 bp, Homo sapiens
agtgtgcttttgctt

SEQ ID NO: 2016569 - DNA, 15 bp, Homo sapiens
gtgtgcttttgcttg

SEQ ID NO: 2016570 - DNA, 15 bp, Homo sapiens
tgtgcttttgcttgg

SEQ ID NO: 2016571 - DNA, 15 bp, Homo sapiens
gtgcttttgcttggt

SEQ ID NO: 2016572 - DNA, 15 bp, Homo sapiens
tgcttttgcttggtt

SEQ ID NO: 2016573 - DNA, 15 bp, Homo sapiens
gcttttgcttggttt

SEQ ID NO: 2016574 - DNA, 15 bp, Homo sapiens
cttttgcttggtttc

SEQ ID NO: 2016575 - DNA, 15 bp, Homo sapiens
ttttgcttggtttcc

SEQ ID NO: 2016576 - DNA, 15 bp, Homo sapiens
tttgcttggtttcca

SEQ ID NO: 2016577 - DNA, 15 bp, Homo sapiens
ttgcttggtttccag

SEQ ID NO: 2016578 - DNA, 15 bp, Homo sapiens
tgcttggtttccagg

SEQ ID NO: 2016579 - DNA, 15 bp, Homo sapiens
gcttggtttccaggg

SEQ ID NO: 2016580 - DNA, 15 bp, Homo sapiens
cttggtttccagggt

SEQ ID NO: 2016581 - DNA, 15 bp, Homo sapiens
ttggtttccagggtg

SEQ ID NO: 2016582 - DNA, 15 bp, Homo sapiens
tggtttccagggtgt

SEQ ID NO: 2016583 - DNA, 15 bp, Homo sapiens
ggtttccagggtgta

SEQ ID NO: 2016584 - DNA, 15 bp, Homo sapiens
gtttccagggtgtaa

SEQ ID NO: 2016585 - DNA, 15 bp, Homo sapiens
tttccagggtgtaag

SEQ ID NO: 2016586 - DNA, 15 bp, Homo sapiens
ttccagggtgtaagt

SEQ ID NO: 2016587 - DNA, 15 bp, Homo sapiens
tccagggtgtaagtg

SEQ ID NO: 2016588 - DNA, 15 bp, Homo sapiens
ccagggtgtaagtga

SEQ ID NO: 2016589 - DNA, 15 bp, Homo sapiens
cagggtgtaagtgaa

SEQ ID NO: 2016590 - DNA, 15 bp, Homo sapiens
agggtgtaagtgaaa

SEQ ID NO: 2016591 - DNA, 15 bp, Homo sapiens
gggtgtaagtgaaat

SEQ ID NO: 2016592 - DNA, 15 bp, Homo sapiens
ggtgtaagtgaaatg

SEQ ID NO: 2016593 - DNA, 15 bp, Homo sapiens
gtgtaagtgaaatga

SEQ ID NO: 2016594 - DNA, 15 bp, Homo sapiens
tgtaagtgaaatgat

SEQ ID NO: 2016595 - DNA, 15 bp, Homo sapiens
gtaagtgaaatgatt

SEQ ID NO: 2016596 - DNA, 15 bp, Homo sapiens
taagtgaaatgattg

SEQ ID NO: 2016597 - DNA, 15 bp, Homo sapiens
aagtgaaatgattga

SEQ ID NO: 2016598 - DNA, 15 bp, Homo sapiens
agtgaaatgattgat

SEQ ID NO: 2016599 - DNA, 15 bp, Homo sapiens
gtgaaatgattgatg

SEQ ID NO: 2016600 - DNA, 15 bp, Homo sapiens
tgaaatgattgatgt

SEQ ID NO: 2016601 - DNA, 15 bp, Homo sapiens
gaaatgattgatgta

SEQ ID NO: 2016602 - DNA, 15 bp, Homo sapiens
aaatgattgatgtac

SEQ ID NO: 2016603 - DNA, 15 bp, Homo sapiens
aatgattgatgtacg

SEQ ID NO: 2016604 - DNA, 15 bp, Homo sapiens
atgattgatgtacgt

SEQ ID NO: 2016605 - DNA, 15 bp, Homo sapiens
tgattgatgtacgtt

SEQ ID NO: 2016606 - DNA, 15 bp, Homo sapiens
gattgatgtacgttt

SEQ ID NO: 2016607 - DNA, 15 bp, Homo sapiens
attgatgtacgtttt

SEQ ID NO: 2016608 - DNA, 15 bp, Homo sapiens
ttgatgtacgttttg

SEQ ID NO: 2016609 - DNA, 15 bp, Homo sapiens
tgatgtacgttttgt

SEQ ID NO: 2016610 - DNA, 15 bp, Homo sapiens
gatgtacgttttgtg

SEQ ID NO: 2016611 - DNA, 15 bp, Homo sapiens
atgtacgttttgtgg

SEQ ID NO: 2016612 - DNA, 15 bp, Homo sapiens
tgtacgttttgtgga

SEQ ID NO: 2016613 - DNA, 15 bp, Homo sapiens
gtacgttttgtggat

SEQ ID NO: 2016614 - DNA, 15 bp, Homo sapiens
tacgttttgtggata

SEQ ID NO: 2016615 - DNA, 15 bp, Homo sapiens
acgttttgtggatat

SEQ ID NO: 2016616 - DNA, 15 bp, Homo sapiens
cgttttgtggatatt

SEQ ID NO: 2016617 - DNA, 15 bp, Homo sapiens
gttttgtggatattt

SEQ ID NO: 2016618 - DNA, 15 bp, Homo sapiens
ttttgtggatatttc

SEQ ID NO: 2016619 - DNA, 15 bp, Homo sapiens
tttgtggatatttca

SEQ ID NO: 2016620 - DNA, 15 bp, Homo sapiens
ttgtggatatttcat

SEQ ID NO: 2016621 - DNA, 15 bp, Homo sapiens
tgtggatatttcatt

SEQ ID NO: 2016622 - DNA, 15 bp, Homo sapiens
gtggatatttcattt

SEQ ID NO: 2016623 - DNA, 15 bp, Homo sapiens
tggatatttcatttt

SEQ ID NO: 2016624 - DNA, 15 bp, Homo sapiens
ggatatttcattttc

SEQ ID NO: 2016625 - DNA, 15 bp, Homo sapiens
gatatttcattttct

SEQ ID NO: 2016626 - DNA, 15 bp, Homo sapiens
atatttcattttctc

SEQ ID NO: 2016627 - DNA, 15 bp, Homo sapiens
tatttcattttctct

SEQ ID NO: 2016628 - DNA, 15 bp, Homo sapiens
atttcattttctctg

SEQ ID NO: 2016629 - DNA, 15 bp, Homo sapiens
tttcattttctctga

SEQ ID NO: 2016630 - DNA, 15 bp, Homo sapiens
ttcattttctctgat

SEQ ID NO: 2016631 - DNA, 15 bp, Homo sapiens
tcattttctctgatg

SEQ ID NO: 2016632 - DNA, 15 bp, Homo sapiens
cattttctctgatgt

SEQ ID NO: 2016633 - DNA, 15 bp, Homo sapiens
attttctctgatgtt

SEQ ID NO: 2016634 - DNA, 15 bp, Homo sapiens
ttttctctgatgtta

SEQ ID NO: 2016635 - DNA, 15 bp, Homo sapiens
tttctctgatgttat

SEQ ID NO: 2016636 - DNA, 15 bp, Homo sapiens
ttctctgatgttatc

SEQ ID NO: 2016637 - DNA, 15 bp, Homo sapiens
tctctgatgttatcc

SEQ ID NO: 2016638 - DNA, 15 bp, Homo sapiens
ctctgatgttatcca

SEQ ID NO: 2016639 - DNA, 15 bp, Homo sapiens
tctgatgttatccat

SEQ ID NO: 2016640 - DNA, 15 bp, Homo sapiens
ctgatgttatccata

SEQ ID NO: 2016641 - DNA, 15 bp, Homo sapiens
tgatgttatccatac

SEQ ID NO: 2016642 - DNA, 15 bp, Homo sapiens
gatgttatccataca

SEQ ID NO: 2016643 - DNA, 15 bp, Homo sapiens
atgttatccatacaa

SEQ ID NO: 2016644 - DNA, 15 bp, Homo sapiens
tgttatccatacaaa

SEQ ID NO: 2016645 - DNA, 15 bp, Homo sapiens
gttatccatacaaat

SEQ ID NO: 2016646 - DNA, 15 bp, Homo sapiens
ttatccatacaaatg

SEQ ID NO: 2016647 - DNA, 15 bp, Homo sapiens
tatccatacaaatgt

SEQ ID NO: 2016648 - DNA, 15 bp, Homo sapiens
atccatacaaatgtc

SEQ ID NO: 2016649 - DNA, 15 bp, Homo sapiens
tccatacaaatgtca

SEQ ID NO: 2016650 - DNA, 15 bp, Homo sapiens
ccatacaaatgtcag

SEQ ID NO: 2016651 - DNA, 15 bp, Homo sapiens
catacaaatgtcagg

SEQ ID NO: 2016652 - DNA, 15 bp, Homo sapiens
atacaaatgtcaggg

SEQ ID NO: 2016653 - DNA, 15 bp, Homo sapiens
tacaaatgtcagggg

SEQ ID NO: 2016654 - DNA, 15 bp, Homo sapiens
acaaatgtcaggggt

SEQ ID NO: 2016655 - DNA, 15 bp, Homo sapiens
caaatgtcaggggtt

SEQ ID NO: 2016656 - DNA, 15 bp, Homo sapiens
aaatgtcaggggttt

SEQ ID NO: 2016657 - DNA, 15 bp, Homo sapiens
aatgtcaggggtttc

SEQ ID NO: 2016658 - DNA, 15 bp, Homo sapiens
atgtcaggggtttct

SEQ ID NO: 2016659 - DNA, 15 bp, Homo sapiens
tgtcaggggtttctc

SEQ ID NO: 2016660 - DNA, 15 bp, Homo sapiens
gtcaggggtttctcc

SEQ ID NO: 2016661 - DNA, 15 bp, Homo sapiens
tcaggggtttctcca

SEQ ID NO: 2016662 - DNA, 15 bp, Homo sapiens
caggggtttctccat

SEQ ID NO: 2016663 - DNA, 15 bp, Homo sapiens
aggggtttctccatc

SEQ ID NO: 2016664 - DNA, 15 bp, Homo sapiens
ggggtttctccatca

SEQ ID NO: 2016665 - DNA, 15 bp, Homo sapiens
gggtttctccatcag

SEQ ID NO: 2016666 - DNA, 15 bp, Homo sapiens
ggtttctccatcagc

SEQ ID NO: 2016667 - DNA, 15 bp, Homo sapiens
gtttctccatcagca

SEQ ID NO: 2016668 - DNA, 15 bp, Homo sapiens
tttctccatcagcaa

SEQ ID NO: 2016669 - DNA, 15 bp, Homo sapiens
ttctccatcagcaaa

SEQ ID NO: 2016670 - DNA, 15 bp, Homo sapiens
tctccatcagcaaat

SEQ ID NO: 2016671 - DNA, 15 bp, Homo sapiens
ctccatcagcaaatg

SEQ ID NO: 2016672 - DNA, 15 bp, Homo sapiens
tccatcagcaaatgg

SEQ ID NO: 2016673 - DNA, 15 bp, Homo sapiens
ccatcagcaaatgga

SEQ ID NO: 2016674 - DNA, 15 bp, Homo sapiens
catcagcaaatggag

SEQ ID NO: 2016675 - DNA, 15 bp, Homo sapiens
atcagcaaatggaga

SEQ ID NO: 2016676 - DNA, 15 bp, Homo sapiens
tcagcaaatggagat

SEQ ID NO: 2016677 - DNA, 15 bp, Homo sapiens
cagcaaatggagatc

SEQ ID NO: 2016678 - DNA, 15 bp, Homo sapiens
agcaaatggagatct

SEQ ID NO: 2016679 - DNA, 15 bp, Homo sapiens
gcaaatggagatcta

SEQ ID NO: 2016680 - DNA, 15 bp, Homo sapiens
caaatggagatctac

SEQ ID NO: 2016681 - DNA, 15 bp, Homo sapiens
aaatggagatctacc

SEQ ID NO: 2016682 - DNA, 15 bp, Homo sapiens
aatggagatctacct

SEQ ID NO: 2016683 - DNA, 15 bp, Homo sapiens
atggagatctacctg

SEQ ID NO: 2016684 - DNA, 15 bp, Homo sapiens
tggagatctacctgc

SEQ ID NO: 2016685 - DNA, 15 bp, Homo sapiens
ggagatctacctgcc

SEQ ID NO: 2016686 - DNA, 15 bp, Homo sapiens
gagatctacctgccc

SEQ ID NO: 2016687 - DNA, 15 bp, Homo sapiens
agatctacctgccca

SEQ ID NO: 2016688 - DNA, 15 bp, Homo sapiens
gatctacctgcccaa

SEQ ID NO: 2016689 - DNA, 15 bp, Homo sapiens
atctacctgcccaat

SEQ ID NO: 2016690 - DNA, 15 bp, Homo sapiens
tctacctgcccaatt

SEQ ID NO: 2016691 - DNA, 15 bp, Homo sapiens
ctacctgcccaattt

SEQ ID NO: 2016692 - DNA, 15 bp, Homo sapiens
tacctgcccaatttt

SEQ ID NO: 2016693 - DNA, 15 bp, Homo sapiens
acctgcccaattttg

SEQ ID NO: 2016694 - DNA, 15 bp, Homo sapiens
cctgcccaattttga

SEQ ID NO: 2016695 - DNA, 15 bp, Homo sapiens
ctgcccaattttgat

SEQ ID NO: 2016696 - DNA, 15 bp, Homo sapiens
tgcccaattttgatc

SEQ ID NO: 2016697 - DNA, 15 bp, Homo sapiens
gcccaattttgatca

SEQ ID NO: 2016698 - DNA, 15 bp, Homo sapiens
cccaattttgatcat

SEQ ID NO: 2016699 - DNA, 15 bp, Homo sapiens
ccaattttgatcatt

SEQ ID NO: 2016700 - DNA, 15 bp, Homo sapiens
caattttgatcattt

SEQ ID NO: 2016701 - DNA, 15 bp, Homo sapiens
aattttgatcattta

SEQ ID NO: 2016702 - DNA, 15 bp, Homo sapiens
attttgatcatttaa

SEQ ID NO: 2016703 - DNA, 15 bp, Homo sapiens
ttttgatcatttaaa

SEQ ID NO: 2016704 - DNA, 15 bp, Homo sapiens
tttgatcatttaaaa

SEQ ID NO: 2016705 - DNA, 15 bp, Homo sapiens
ttgatcatttaaaac

SEQ ID NO: 2016706 - DNA, 15 bp, Homo sapiens
tgatcatttaaaact

SEQ ID NO: 2016707 - DNA, 15 bp, Homo sapiens
gatcatttaaaactg

SEQ ID NO: 2016708 - DNA, 15 bp, Homo sapiens
atcatttaaaactgg

SEQ ID NO: 2016709 - DNA, 15 bp, Homo sapiens
tcatttaaaactggt

SEQ ID NO: 2016710 - DNA, 15 bp, Homo sapiens
catttaaaactggtt

SEQ ID NO: 2016711 - DNA, 15 bp, Homo sapiens
atttaaaactggttt

SEQ ID NO: 2016712 - DNA, 15 bp, Homo sapiens
tttaaaactggtttc

SEQ ID NO: 2016713 - DNA, 15 bp, Homo sapiens
ttaaaactggtttcc

SEQ ID NO: 2016714 - DNA, 15 bp, Homo sapiens
taaaactggtttcct

SEQ ID NO: 2016715 - DNA, 15 bp, Homo sapiens
aaaactggtttcctt

SEQ ID NO: 2016716 - DNA, 15 bp, Homo sapiens
aaactggtttcctta

SEQ ID NO: 2016717 - DNA, 15 bp, Homo sapiens
aactggtttccttaa

SEQ ID NO: 2016718 - DNA, 15 bp, Homo sapiens
actggtttccttaag

SEQ ID NO: 2016719 - DNA, 15 bp, Homo sapiens
ctggtttccttaagc

SEQ ID NO: 2016720 - DNA, 15 bp, Homo sapiens
tggtttccttaagca

SEQ ID NO: 2016721 - DNA, 15 bp, Homo sapiens
ggtttccttaagcat

SEQ ID NO: 2016722 - DNA, 15 bp, Homo sapiens
gtttccttaagcatt

SEQ ID NO: 2016723 - DNA, 15 bp, Homo sapiens
tttccttaagcattt

SEQ ID NO: 2016724 - DNA, 15 bp, Homo sapiens
ttccttaagcatttc

SEQ ID NO: 2016725 - DNA, 15 bp, Homo sapiens
tccttaagcatttcc

SEQ ID NO: 2016726 - DNA, 15 bp, Homo sapiens
ccttaagcatttcca

SEQ ID NO: 2016727 - DNA, 15 bp, Homo sapiens
cttaagcatttccaa

SEQ ID NO: 2016728 - DNA, 15 bp, Homo sapiens
ttaagcatttccaaa

SEQ ID NO: 2016729 - DNA, 15 bp, Homo sapiens
taagcatttccaaag

SEQ ID NO: 2016730 - DNA, 15 bp, Homo sapiens
aagcatttccaaagt

SEQ ID NO: 2016731 - DNA, 15 bp, Homo sapiens
agcatttccaaagta

SEQ ID NO: 2016732 - DNA, 15 bp, Homo sapiens
gcatttccaaagtac

SEQ ID NO: 2016733 - DNA, 15 bp, Homo sapiens
catttccaaagtaca

SEQ ID NO: 2016734 - DNA, 15 bp, Homo sapiens
atttccaaagtacaa

SEQ ID NO: 2016735 - DNA, 15 bp, Homo sapiens
tttccaaagtacaat

SEQ ID NO: 2016736 - DNA, 15 bp, Homo sapiens
ttccaaagtacaatg

SEQ ID NO: 2016737 - DNA, 15 bp, Homo sapiens
tccaaagtacaatga

SEQ ID NO: 2016738 - DNA, 15 bp, Homo sapiens
ccaaagtacaatgat

SEQ ID NO: 2016739 - DNA, 15 bp, Homo sapiens
caaagtacaatgatg

SEQ ID NO: 2016740 - DNA, 15 bp, Homo sapiens
aaagtacaatgatga

SEQ ID NO: 2016741 - DNA, 15 bp, Homo sapiens
aagtacaatgatgat

SEQ ID NO: 2016742 - DNA, 15 bp, Homo sapiens
agtacaatgatgatt

SEQ ID NO: 2016743 - DNA, 15 bp, Homo sapiens
gtacaatgatgatta

SEQ ID NO: 2016744 - DNA, 15 bp, Homo sapiens
tacaatgatgattat

SEQ ID NO: 2016745 - DNA, 15 bp, Homo sapiens
acaatgatgattata

SEQ ID NO: 2016746 - DNA, 15 bp, Homo sapiens
caatgatgattatag

SEQ ID NO: 2016747 - DNA, 15 bp, Homo sapiens
aatgatgattatagc

SEQ ID NO: 2016748 - DNA, 15 bp, Homo sapiens
atgatgattatagct

SEQ ID NO: 2016749 - DNA, 15 bp, Homo sapiens
tgatgattatagcta

SEQ ID NO: 2016750 - DNA, 15 bp, Homo sapiens
gatgattatagctac

SEQ ID NO: 2016751 - DNA, 15 bp, Homo sapiens
atgattatagctacc

SEQ ID NO: 2016752 - DNA, 15 bp, Homo sapiens
tgattatagctacca

SEQ ID NO: 2016753 - DNA, 15 bp, Homo sapiens
gattatagctaccaa

SEQ ID NO: 2016754 - DNA, 15 bp, Homo sapiens
attatagctaccaac

SEQ ID NO: 2016755 - DNA, 15 bp, Homo sapiens
ttatagctaccaaca

SEQ ID NO: 2016756 - DNA, 15 bp, Homo sapiens
tatagctaccaacat

SEQ ID NO: 2016757 - DNA, 15 bp, Homo sapiens
atagctaccaacata

SEQ ID NO: 2016758 - DNA, 15 bp, Homo sapiens
tagctaccaacatag

SEQ ID NO: 2016759 - DNA, 15 bp, Homo sapiens
agctaccaacataga

SEQ ID NO: 2016760 - DNA, 15 bp, Homo sapiens
gctaccaacatagaa

SEQ ID NO: 2016761 - DNA, 15 bp, Homo sapiens
ctaccaacatagaag

SEQ ID NO: 2016762 - DNA, 15 bp, Homo sapiens
taccaacatagaagt

SEQ ID NO: 2016763 - DNA, 15 bp, Homo sapiens
accaacatagaagtc

SEQ ID NO: 2016764 - DNA, 15 bp, Homo sapiens
ccaacatagaagtca

SEQ ID NO: 2016765 - DNA, 15 bp, Homo sapiens
caacatagaagtcag

SEQ ID NO: 2016766 - DNA, 15 bp, Homo sapiens
aacatagaagtcaga

SEQ ID NO: 2016767 - DNA, 15 bp, Homo sapiens
acatagaagtcagaa

SEQ ID NO: 2016768 - DNA, 15 bp, Homo sapiens
catagaagtcagaag

SEQ ID NO: 2016769 - DNA, 15 bp, Homo sapiens
atagaagtcagaagt

SEQ ID NO: 2016770 - DNA, 15 bp, Homo sapiens
tagaagtcagaagta

SEQ ID NO: 2016771 - DNA, 15 bp, Homo sapiens
agaagtcagaagtac

SEQ ID NO: 2016772 - DNA, 15 bp, Homo sapiens
gaagtcagaagtaca

SEQ ID NO: 2016773 - DNA, 15 bp, Homo sapiens
aagtcagaagtacac

SEQ ID NO: 2016774 - DNA, 15 bp, Homo sapiens
agtcagaagtacacc

SEQ ID NO: 2016775 - DNA, 15 bp, Homo sapiens
gtcagaagtacacca

SEQ ID NO: 2016776 - DNA, 15 bp, Homo sapiens
tcagaagtacaccaa

SEQ ID NO: 2016777 - DNA, 15 bp, Homo sapiens
cagaagtacaccaat

SEQ ID NO: 2016778 - DNA, 15 bp, Homo sapiens
agaagtacaccaatt

SEQ ID NO: 2016779 - DNA, 15 bp, Homo sapiens
gaagtacaccaatta

SEQ ID NO: 2016780 - DNA, 15 bp, Homo sapiens
aagtacaccaattag

SEQ ID NO: 2016781 - DNA, 15 bp, Homo sapiens
agtacaccaattagt

SEQ ID NO: 2016782 - DNA, 15 bp, Homo sapiens
gtacaccaattagta

SEQ ID NO: 2016783 - DNA, 15 bp, Homo sapiens
tacaccaattagtat

SEQ ID NO: 2016784 - DNA, 15 bp, Homo sapiens
acaccaattagtatg

SEQ ID NO: 2016785 - DNA, 15 bp, Homo sapiens
caccaattagtatgg

SEQ ID NO: 2016786 - DNA, 15 bp, Homo sapiens
accaattagtatggc

SEQ ID NO: 2016787 - DNA, 15 bp, Homo sapiens
ccaattagtatggca

SEQ ID NO: 2016788 - DNA, 15 bp, Homo sapiens
caattagtatggcag

SEQ ID NO: 2016789 - DNA, 15 bp, Homo sapiens
aattagtatggcagc

SEQ ID NO: 2016790 - DNA, 15 bp, Homo sapiens
attagtatggcagct

SEQ ID NO: 2016791 - DNA, 15 bp, Homo sapiens
ttagtatggcagcta

SEQ ID NO: 2016792 - DNA, 15 bp, Homo sapiens
tagtatggcagctat

SEQ ID NO: 2016793 - DNA, 15 bp, Homo sapiens
agtatggcagctatt

SEQ ID NO: 2016794 - DNA, 15 bp, Homo sapiens
gtatggcagctattg

SEQ ID NO: 2016795 - DNA, 15 bp, Homo sapiens
tatggcagctattga

SEQ ID NO: 2016796 - DNA, 15 bp, Homo sapiens
atggcagctattgaa

SEQ ID NO: 2016797 - DNA, 15 bp, Homo sapiens
tggcagctattgaat

SEQ ID NO: 2016798 - DNA, 15 bp, Homo sapiens
ggcagctattgaatt

SEQ ID NO: 2016799 - DNA, 15 bp, Homo sapiens
gcagctattgaatta

SEQ ID NO: 2016800 - DNA, 15 bp, Homo sapiens
cagctattgaattat

SEQ ID NO: 2016801 - DNA, 15 bp, Homo sapiens
agctattgaattata

SEQ ID NO: 2016802 - DNA, 15 bp, Homo sapiens
gctattgaattataa

SEQ ID NO: 2016803 - DNA, 15 bp, Homo sapiens
ctattgaattataat

SEQ ID NO: 2016804 - DNA, 15 bp, Homo sapiens
tattgaattataatt

SEQ ID NO: 2016805 - DNA, 15 bp, Homo sapiens
attgaattataattg

SEQ ID NO: 2016806 - DNA, 15 bp, Homo sapiens
ttgaattataattgt

SEQ ID NO: 2016807 - DNA, 15 bp, Homo sapiens
tgaattataattgtt

SEQ ID NO: 2016808 - DNA, 15 bp, Homo sapiens
gaattataattgttt

SEQ ID NO: 2016809 - DNA, 15 bp, Homo sapiens
aattataattgtttt

SEQ ID NO: 2016810 - DNA, 15 bp, Homo sapiens
attataattgttttt

SEQ ID NO: 2016811 - DNA, 15 bp, Homo sapiens
ttataattgtttttt

SEQ ID NO: 2016812 - DNA, 15 bp, Homo sapiens
tataattgttttttt

SEQ ID NO: 2016813 - DNA, 15 bp, Homo sapiens
ataattgtttttttg

SEQ ID NO: 2016814 - DNA, 15 bp, Homo sapiens
taattgtttttttgt

SEQ ID NO: 2016815 - DNA, 15 bp, Homo sapiens
aattgtttttttgtg

SEQ ID NO: 2016816 - DNA, 15 bp, Homo sapiens
attgtttttttgtgg

SEQ ID NO: 2016817 - DNA, 15 bp, Homo sapiens
ttgtttttttgtggg

SEQ ID NO: 2016818 - DNA, 15 bp, Homo sapiens
tgtttttttgtgggg

SEQ ID NO: 2016819 - DNA, 15 bp, Homo sapiens
gtttttttgtggggt

SEQ ID NO: 2016820 - DNA, 15 bp, Homo sapiens
tttttttgtggggtt

SEQ ID NO: 2016821 - DNA, 15 bp, Homo sapiens
ttttttgtggggttt

SEQ ID NO: 2016822 - DNA, 15 bp, Homo sapiens
tttttgtggggtttg

SEQ ID NO: 2016823 - DNA, 15 bp, Homo sapiens
ttttgtggggtttgt

SEQ ID NO: 2016824 - DNA, 15 bp, Homo sapiens
tttgtggggtttgtt

SEQ ID NO: 2016825 - DNA, 15 bp, Homo sapiens
ttgtggggtttgttt

SEQ ID NO: 2016826 - DNA, 15 bp, Homo sapiens
tgtggggtttgtttg

SEQ ID NO: 2016827 - DNA, 15 bp, Homo sapiens
gtggggtttgtttgt

SEQ ID NO: 2016828 - DNA, 15 bp, Homo sapiens
tggggtttgtttgtt

SEQ ID NO: 2016829 - DNA, 15 bp, Homo sapiens
ggggtttgtttgtta

SEQ ID NO: 2016830 - DNA, 15 bp, Homo sapiens
gggtttgtttgttac

SEQ ID NO: 2016831 - DNA, 15 bp, Homo sapiens
ggtttgtttgttact

SEQ ID NO: 2016832 - DNA, 15 bp, Homo sapiens
gtttgtttgttactg

SEQ ID NO: 2016833 - DNA, 15 bp, Homo sapiens
tttgtttgttactgg

SEQ ID NO: 2016834 - DNA, 15 bp, Homo sapiens
ttgtttgttactggt

SEQ ID NO: 2016835 - DNA, 15 bp, Homo sapiens
tgtttgttactggta

SEQ ID NO: 2016836 - DNA, 15 bp, Homo sapiens
gtttgttactggtag

SEQ ID NO: 2016837 - DNA, 15 bp, Homo sapiens
tttgttactggtagt

SEQ ID NO: 2016838 - DNA, 15 bp, Homo sapiens
ttgttactggtagta

SEQ ID NO: 2016839 - DNA, 15 bp, Homo sapiens
tgttactggtagtat

SEQ ID NO: 2016840 - DNA, 15 bp, Homo sapiens
gttactggtagtatc

SEQ ID NO: 2016841 - DNA, 15 bp, Homo sapiens
ttactggtagtatct

SEQ ID NO: 2016842 - DNA, 15 bp, Homo sapiens
tactggtagtatcta

SEQ ID NO: 2016843 - DNA, 15 bp, Homo sapiens
actggtagtatctaa

SEQ ID NO: 2016844 - DNA, 15 bp, Homo sapiens
ctggtagtatctaag

SEQ ID NO: 2016845 - DNA, 15 bp, Homo sapiens
tggtagtatctaaga

SEQ ID NO: 2016846 - DNA, 15 bp, Homo sapiens
ggtagtatctaagat

SEQ ID NO: 2016847 - DNA, 15 bp, Homo sapiens
gtagtatctaagata

SEQ ID NO: 2016848 - DNA, 15 bp, Homo sapiens
tagtatctaagataa

SEQ ID NO: 2016849 - DNA, 15 bp, Homo sapiens
agtatctaagataaa

SEQ ID NO: 2016850 - DNA, 15 bp, Homo sapiens
gtatctaagataaat

SEQ ID NO: 2016851 - DNA, 15 bp, Homo sapiens
tatctaagataaatc

SEQ ID NO: 2016852 - DNA, 15 bp, Homo sapiens
atctaagataaatcc

SEQ ID NO: 2016853 - DNA, 15 bp, Homo sapiens
tctaagataaatcct

SEQ ID NO: 2016854 - DNA, 15 bp, Homo sapiens
ctaagataaatcctg

SEQ ID NO: 2016855 - DNA, 15 bp, Homo sapiens
taagataaatcctgg

SEQ ID NO: 2016856 - DNA, 15 bp, Homo sapiens
aagataaatcctggt

SEQ ID NO: 2016857 - DNA, 15 bp, Homo sapiens
agataaatcctggtg

SEQ ID NO: 2016858 - DNA, 15 bp, Homo sapiens
gataaatcctggtgt

SEQ ID NO: 2016859 - DNA, 15 bp, Homo sapiens
ataaatcctggtgta

SEQ ID NO: 2016860 - DNA, 15 bp, Homo sapiens
taaatcctggtgtac

SEQ ID NO: 2016861 - DNA, 15 bp, Homo sapiens
aaatcctggtgtact

SEQ ID NO: 2016862 - DNA, 15 bp, Homo sapiens
aatcctggtgtactc

SEQ ID NO: 2016863 - DNA, 15 bp, Homo sapiens
atcctggtgtactcc

SEQ ID NO: 2016864 - DNA, 15 bp, Homo sapiens
tcctggtgtactcct

SEQ ID NO: 2016865 - DNA, 15 bp, Homo sapiens
cctggtgtactccta

SEQ ID NO: 2016866 - DNA, 15 bp, Homo sapiens
ctggtgtactcctag

SEQ ID NO: 2016867 - DNA, 15 bp, Homo sapiens
tggtgtactcctagg

SEQ ID NO: 2016868 - DNA, 15 bp, Homo sapiens
ggtgtactcctaggt

SEQ ID NO: 2016869 - DNA, 15 bp, Homo sapiens
gtgtactcctaggtg

SEQ ID NO: 2016870 - DNA, 15 bp, Homo sapiens
tgtactcctaggtga

SEQ ID NO: 2016871 - DNA, 15 bp, Homo sapiens
gtactcctaggtgaa

SEQ ID NO: 2016872 - DNA, 15 bp, Homo sapiens
tactcctaggtgaat

SEQ ID NO: 2016873 - DNA, 15 bp, Homo sapiens
actcctaggtgaatt

SEQ ID NO: 2016874 - DNA, 15 bp, Homo sapiens
ctcctaggtgaattt

SEQ ID NO: 2016875 - DNA, 15 bp, Homo sapiens
tcctaggtgaatttt

SEQ ID NO: 2016876 - DNA, 15 bp, Homo sapiens
cctaggtgaattttt

SEQ ID NO: 2016877 - DNA, 15 bp, Homo sapiens
ctaggtgaatttttg

SEQ ID NO: 2016878 - DNA, 15 bp, Homo sapiens
taggtgaatttttga

SEQ ID NO: 2016879 - DNA, 15 bp, Homo sapiens
aggtgaatttttgac

SEQ ID NO: 2016880 - DNA, 15 bp, Homo sapiens
ggtgaatttttgaca

SEQ ID NO: 2016881 - DNA, 15 bp, Homo sapiens
gtgaatttttgacag

SEQ ID NO: 2016882 - DNA, 15 bp, Homo sapiens
tgaatttttgacagt

SEQ ID NO: 2016883 - DNA, 15 bp, Homo sapiens
gaatttttgacagtt

SEQ ID NO: 2016884 - DNA, 15 bp, Homo sapiens
aatttttgacagttg

SEQ ID NO: 2016885 - DNA, 15 bp, Homo sapiens
tttttgacagttgat

SEQ ID NO: 2016886 - DNA, 15 bp, Homo sapiens
ttttgacagttgatg

SEQ ID NO: 2016887 - DNA, 15 bp, Homo sapiens
tttgacagttgatgt

SEQ ID NO: 2016888 - DNA, 15 bp, Homo sapiens
ttgacagttgatgtt

SEQ ID NO: 2016889 - DNA, 15 bp, Homo sapiens
tgacagttgatgttg

SEQ ID NO: 2016890 - DNA, 15 bp, Homo sapiens
gacagttgatgttgg

SEQ ID NO: 2016891 - DNA, 15 bp, Homo sapiens
acagttgatgttggt

SEQ ID NO: 2016892 - DNA, 15 bp, Homo sapiens
cagttgatgttggtt

SEQ ID NO: 2016893 - DNA, 15 bp, Homo sapiens
agttgatgttggttg

SEQ ID NO: 2016894 - DNA, 15 bp, Homo sapiens
gttgatgttggttgt

SEQ ID NO: 2016895 - DNA, 15 bp, Homo sapiens
ttgatgttggttgtg

SEQ ID NO: 2016896 - DNA, 15 bp, Homo sapiens
tgatgttggttgtgt

SEQ ID NO: 2016897 - DNA, 15 bp, Homo sapiens
gatgttggttgtgtg

SEQ ID NO: 2016898 - DNA, 15 bp, Homo sapiens
atgttggttgtgtgg

SEQ ID NO: 2016899 - DNA, 15 bp, Homo sapiens
tgttggttgtgtgga

SEQ ID NO: 2016900 - DNA, 15 bp, Homo sapiens
gttggttgtgtggat

SEQ ID NO: 2016901 - DNA, 15 bp, Homo sapiens
ttggttgtgtggatg

SEQ ID NO: 2016902 - DNA, 15 bp, Homo sapiens
tggttgtgtggatgg

SEQ ID NO: 2016903 - DNA, 15 bp, Homo sapiens
tgtgtggatggatta

SEQ ID NO: 2016904 - DNA, 15 bp, Homo sapiens
gtgtggatggattat

SEQ ID NO: 2016905 - DNA, 15 bp, Homo sapiens
tgtggatggattatg

SEQ ID NO: 2016906 - DNA, 15 bp, Homo sapiens
gtggatggattatga

SEQ ID NO: 2016907 - DNA, 15 bp, Homo sapiens
tggatggattatgaa

SEQ ID NO: 2016908 - DNA, 15 bp, Homo sapiens
ggatggattatgaac

SEQ ID NO: 2016909 - DNA, 15 bp, Homo sapiens
gatggattatgaaca

SEQ ID NO: 2016910 - DNA, 15 bp, Homo sapiens
atggattatgaacag

SEQ ID NO: 2016911 - DNA, 15 bp, Homo sapiens
tggattatgaacagt

SEQ ID NO: 2016912 - DNA, 15 bp, Homo sapiens
ggattatgaacagtt

SEQ ID NO: 2016913 - DNA, 15 bp, Homo sapiens
gattatgaacagtta

SEQ ID NO: 2016914 - DNA, 15 bp, Homo sapiens
attatgaacagttat

SEQ ID NO: 2016915 - DNA, 15 bp, Homo sapiens
ttatgaacagttatt

SEQ ID NO: 2016916 - DNA, 15 bp, Homo sapiens
tatgaacagttattt

SEQ ID NO: 2016917 - DNA, 15 bp, Homo sapiens
atgaacagttatttg

SEQ ID NO: 2016918 - DNA, 15 bp, Homo sapiens
tgaacagttatttgt

SEQ ID NO: 2016919 - DNA, 15 bp, Homo sapiens
gaacagttatttgtt

SEQ ID NO: 2016920 - DNA, 15 bp, Homo sapiens
aacagttatttgttt

SEQ ID NO: 2016921 - DNA, 15 bp, Homo sapiens
acagttatttgtttt

SEQ ID NO: 2016922 - DNA, 15 bp, Homo sapiens
cagttatttgttttc

SEQ ID NO: 2016923 - DNA, 15 bp, Homo sapiens
agttatttgttttct

SEQ ID NO: 2016924 - DNA, 15 bp, Homo sapiens
gttatttgttttcta

SEQ ID NO: 2016925 - DNA, 15 bp, Homo sapiens
ttatttgttttctag

SEQ ID NO: 2016926 - DNA, 15 bp, Homo sapiens
tatttgttttctaga

SEQ ID NO: 2016927 - DNA, 15 bp, Homo sapiens
atttgttttctagaa

SEQ ID NO: 2016928 - DNA, 15 bp, Homo sapiens
tttgttttctagaag

SEQ ID NO: 2016929 - DNA, 15 bp, Homo sapiens
ttgttttctagaagg

SEQ ID NO: 2016930 - DNA, 15 bp, Homo sapiens
tgttttctagaaggg

SEQ ID NO: 2016931 - DNA, 15 bp, Homo sapiens
gttttctagaaggga

SEQ ID NO: 2016932 - DNA, 15 bp, Homo sapiens
ttttctagaagggat

SEQ ID NO: 2016933 - DNA, 15 bp, Homo sapiens
tttctagaagggatc

SEQ ID NO: 2016934 - DNA, 15 bp, Homo sapiens
ttctagaagggatct

SEQ ID NO: 2016935 - DNA, 15 bp, Homo sapiens
tctagaagggatctg

SEQ ID NO: 2016936 - DNA, 15 bp, Homo sapiens
ctagaagggatctgg

SEQ ID NO: 2016937 - DNA, 15 bp, Homo sapiens
tagaagggatctgga

SEQ ID NO: 2016938 - DNA, 15 bp, Homo sapiens
agaagggatctggac

SEQ ID NO: 2016939 - DNA, 15 bp, Homo sapiens
gaagggatctggaca

SEQ ID NO: 2016940 - DNA, 15 bp, Homo sapiens
aagggatctggacag

SEQ ID NO: 2016941 - DNA, 15 bp, Homo sapiens
agggatctggacaga

SEQ ID NO: 2016942 - DNA, 15 bp, Homo sapiens
gggatctggacagat

SEQ ID NO: 2016943 - DNA, 15 bp, Homo sapiens
ggatctggacagatg

SEQ ID NO: 2016944 - DNA, 15 bp, Homo sapiens
gatctggacagatga

SEQ ID NO: 2016945 - DNA, 15 bp, Homo sapiens
atctggacagatgat

SEQ ID NO: 2016946 - DNA, 15 bp, Homo sapiens
tctggacagatgatg

SEQ ID NO: 2016947 - DNA, 15 bp, Homo sapiens
ctggacagatgatga

SEQ ID NO: 2016948 - DNA, 15 bp, Homo sapiens
tggacagatgatgat

SEQ ID NO: 2016949 - DNA, 15 bp, Homo sapiens
ggacagatgatgatt

SEQ ID NO: 2016950 - DNA, 15 bp, Homo sapiens
gacagatgatgattg

SEQ ID NO: 2016951 - DNA, 15 bp, Homo sapiens
acagatgatgattgt

SEQ ID NO: 2016952 - DNA, 15 bp, Homo sapiens
cagatgatgattgtt

SEQ ID NO: 2016953 - DNA, 15 bp, Homo sapiens
agatgatgattgttg

SEQ ID NO: 2016954 - DNA, 15 bp, Homo sapiens
gatgatgattgttga

SEQ ID NO: 2016955 - DNA, 15 bp, Homo sapiens
atgatgattgttgag

SEQ ID NO: 2016956 - DNA, 15 bp, Homo sapiens
tgatgattgttgagt

SEQ ID NO: 2016957 - DNA, 15 bp, Homo sapiens
gatgattgttgagta

SEQ ID NO: 2016958 - DNA, 15 bp, Homo sapiens
atgattgttgagtaa

SEQ ID NO: 2016959 - DNA, 15 bp, Homo sapiens
tgattgttgagtaaa

SEQ ID NO: 2016960 - DNA, 15 bp, Homo sapiens
gattgttgagtaaaa

SEQ ID NO: 2016961 - DNA, 15 bp, Homo sapiens
attgttgagtaaaag

SEQ ID NO: 2016962 - DNA, 15 bp, Homo sapiens
ttgttgagtaaaagt

SEQ ID NO: 2016963 - DNA, 15 bp, Homo sapiens
tgttgagtaaaagta

SEQ ID NO: 2016964 - DNA, 15 bp, Homo sapiens
gttgagtaaaagtat

SEQ ID NO: 2016965 - DNA, 15 bp, Homo sapiens
ttgagtaaaagtata

SEQ ID NO: 2016966 - DNA, 15 bp, Homo sapiens
tgagtaaaagtatag

SEQ ID NO: 2016967 - DNA, 15 bp, Homo sapiens
gagtaaaagtataga

SEQ ID NO: 2016968 - DNA, 15 bp, Homo sapiens
agtaaaagtatagac

SEQ ID NO: 2016969 - DNA, 15 bp, Homo sapiens
gtaaaagtatagaca

SEQ ID NO: 2016970 - DNA, 15 bp, Homo sapiens
taaaagtatagacaa

SEQ ID NO: 2016971 - DNA, 15 bp, Homo sapiens
aaaagtatagacaaa

SEQ ID NO: 2016972 - DNA, 15 bp, Homo sapiens
aaagtatagacaaat

SEQ ID NO: 2016973 - DNA, 15 bp, Homo sapiens
aagtatagacaaatg

SEQ ID NO: 2016974 - DNA, 15 bp, Homo sapiens
agtatagacaaatga

SEQ ID NO: 2016975 - DNA, 15 bp, Homo sapiens
gtatagacaaatgac

SEQ ID NO: 2016976 - DNA, 15 bp, Homo sapiens
tatagacaaatgact

SEQ ID NO: 2016977 - DNA, 15 bp, Homo sapiens
atagacaaatgactt

SEQ ID NO: 2016978 - DNA, 15 bp, Homo sapiens
tagacaaatgacttt

SEQ ID NO: 2016979 - DNA, 15 bp, Homo sapiens
agacaaatgactttg

SEQ ID NO: 2016980 - DNA, 15 bp, Homo sapiens
gacaaatgactttgg

SEQ ID NO: 2016981 - DNA, 15 bp, Homo sapiens
acaaatgactttggt

SEQ ID NO: 2016982 - DNA, 15 bp, Homo sapiens
caaatgactttggtg

SEQ ID NO: 2016983 - DNA, 15 bp, Homo sapiens
aaatgactttggtgg

SEQ ID NO: 2016984 - DNA, 15 bp, Homo sapiens
aatgactttggtggt

SEQ ID NO: 2016985 - DNA, 15 bp, Homo sapiens
atgactttggtggtt

SEQ ID NO: 2016986 - DNA, 15 bp, Homo sapiens
tgactttggtggttg

SEQ ID NO: 2016987 - DNA, 15 bp, Homo sapiens
gactttggtggttgt

SEQ ID NO: 2016988 - DNA, 15 bp, Homo sapiens
actttggtggttgtg

SEQ ID NO: 2016989 - DNA, 15 bp, Homo sapiens
ctttggtggttgtgt

SEQ ID NO: 2016990 - DNA, 15 bp, Homo sapiens
tttggtggttgtgtg

SEQ ID NO: 2016991 - DNA, 15 bp, Homo sapiens
ttggtggttgtgtgg

SEQ ID NO: 2016992 - DNA, 15 bp, Homo sapiens
tggtggttgtgtggt

SEQ ID NO: 2016993 - DNA, 15 bp, Homo sapiens
ggtggttgtgtggta

SEQ ID NO: 2016994 - DNA, 15 bp, Homo sapiens
gtggttgtgtggtag

SEQ ID NO: 2016995 - DNA, 15 bp, Homo sapiens
ggttgtgtggtagaa

SEQ ID NO: 2016996 - DNA, 15 bp, Homo sapiens
gttgtgtggtagaag

SEQ ID NO: 2016997 - DNA, 15 bp, Homo sapiens
ttgtgtggtagaagt

SEQ ID NO: 2016998 - DNA, 15 bp, Homo sapiens
tgtgtggtagaagta

SEQ ID NO: 2016999 - DNA, 15 bp, Homo sapiens
gtgtggtagaagtac

SEQ ID NO: 2017000 - DNA, 15 bp, Homo sapiens
tgtggtagaagtacg

SEQ ID NO: 2017001 - DNA, 15 bp, Homo sapiens
gtggtagaagtacgg

SEQ ID NO: 2017002 - DNA, 15 bp, Homo sapiens
tggtagaagtacggg

SEQ ID NO: 2017003 - DNA, 15 bp, Homo sapiens
ggtagaagtacgggc

SEQ ID NO: 2017004 - DNA, 15 bp, Homo sapiens
gtagaagtacgggca

SEQ ID NO: 2017005 - DNA, 15 bp, Homo sapiens
tagaagtacgggcag

SEQ ID NO: 2017006 - DNA, 15 bp, Homo sapiens
agaagtacgggcaga

SEQ ID NO: 2017007 - DNA, 15 bp, Homo sapiens
gaagtacgggcagat

SEQ ID NO: 2017008 - DNA, 15 bp, Homo sapiens
aagtacgggcagatg

SEQ ID NO: 2017009 - DNA, 15 bp, Homo sapiens
agtacgggcagatgg

SEQ ID NO: 2017010 - DNA, 15 bp, Homo sapiens
gtacgggcagatggt

SEQ ID NO: 2017011 - DNA, 15 bp, Homo sapiens
tacgggcagatggta

SEQ ID NO: 2017012 - DNA, 15 bp, Homo sapiens
acgggcagatggtag

SEQ ID NO: 2017013 - DNA, 15 bp, Homo sapiens
cgggcagatggtagt

SEQ ID NO: 2017014 - DNA, 15 bp, Homo sapiens
gggcagatggtagtt

SEQ ID NO: 2017015 - DNA, 15 bp, Homo sapiens
ggcagatggtagttg

SEQ ID NO: 2017016 - DNA, 15 bp, Homo sapiens
gcagatggtagttgt

SEQ ID NO: 2017017 - DNA, 15 bp, Homo sapiens
cagatggtagttgtc

SEQ ID NO: 2017018 - DNA, 15 bp, Homo sapiens
agatggtagttgtct

SEQ ID NO: 2017019 - DNA, 15 bp, Homo sapiens
gatggtagttgtctg

SEQ ID NO: 2017020 - DNA, 15 bp, Homo sapiens
atggtagttgtctgg

SEQ ID NO: 2017021 - DNA, 15 bp, Homo sapiens
tggtagttgtctggc

SEQ ID NO: 2017022 - DNA, 15 bp, Homo sapiens
ggtagttgtctggca

SEQ ID NO: 2017023 - DNA, 15 bp, Homo sapiens
gtagttgtctggcag

SEQ ID NO: 2017024 - DNA, 15 bp, Homo sapiens
tagttgtctggcaga

SEQ ID NO: 2017025 - DNA, 15 bp, Homo sapiens
agttgtctggcagag

SEQ ID NO: 2017026 - DNA, 15 bp, Homo sapiens
gttgtctggcagagg

SEQ ID NO: 2017027 - DNA, 15 bp, Homo sapiens
ttgtctggcagaggt

SEQ ID NO: 2017028 - DNA, 15 bp, Homo sapiens
tgtctggcagaggtg

SEQ ID NO: 2017029 - DNA, 15 bp, Homo sapiens
gtctggcagaggtga

SEQ ID NO: 2017030 - DNA, 15 bp, Homo sapiens
tctggcagaggtgaa

SEQ ID NO: 2017031 - DNA, 15 bp, Homo sapiens
ctggcagaggtgaac

SEQ ID NO: 2017032 - DNA, 15 bp, Homo sapiens
tggcagaggtgaaca

SEQ ID NO: 2017033 - DNA, 15 bp, Homo sapiens
ggcagaggtgaacac

SEQ ID NO: 2017034 - DNA, 15 bp, Homo sapiens
gcagaggtgaacacg

SEQ ID NO: 2017035 - DNA, 15 bp, Homo sapiens
cagaggtgaacacgg

SEQ ID NO: 2017036 - DNA, 15 bp, Homo sapiens
agaggtgaacacggc

SEQ ID NO: 2017037 - DNA, 15 bp, Homo sapiens
gaggtgaacacggct

SEQ ID NO: 2017038 - DNA, 15 bp, Homo sapiens
aggtgaacacggctt

SEQ ID NO: 2017039 - DNA, 15 bp, Homo sapiens
ggtgaacacggcttg

SEQ ID NO: 2017040 - DNA, 15 bp, Homo sapiens
gtgaacacggcttgc

SEQ ID NO: 2017041 - DNA, 15 bp, Homo sapiens
tgaacacggcttgct

SEQ ID NO: 2017042 - DNA, 15 bp, Homo sapiens
gaacacggcttgctg

SEQ ID NO: 2017043 - DNA, 15 bp, Homo sapiens
aacacggcttgctgg

SEQ ID NO: 2017044 - DNA, 15 bp, Homo sapiens
acacggcttgctggg

SEQ ID NO: 2017045 - DNA, 15 bp, Homo sapiens
cacggcttgctggga

SEQ ID NO: 2017046 - DNA, 15 bp, Homo sapiens
acggcttgctgggag

SEQ ID NO: 2017047 - DNA, 15 bp, Homo sapiens
cggcttgctgggagg

SEQ ID NO: 2017048 - DNA, 15 bp, Homo sapiens
ggcttgctgggagga

SEQ ID NO: 2017049 - DNA, 15 bp, Homo sapiens
gcttgctgggaggag

SEQ ID NO: 2017050 - DNA, 15 bp, Homo sapiens
cttgctgggaggagg

SEQ ID NO: 2017051 - DNA, 15 bp, Homo sapiens
ttgctgggaggaggt

SEQ ID NO: 2017052 - DNA, 15 bp, Homo sapiens
tgctgggaggaggtg

SEQ ID NO: 2017053 - DNA, 15 bp, Homo sapiens
gctgggaggaggtgt

SEQ ID NO: 2017054 - DNA, 15 bp, Homo sapiens
ctgggaggaggtgtt

SEQ ID NO: 2017055 - DNA, 15 bp, Homo sapiens
tgggaggaggtgttg

SEQ ID NO: 2017056 - DNA, 15 bp, Homo sapiens
gggaggaggtgttgg

SEQ ID NO: 2017057 - DNA, 15 bp, Homo sapiens
ggaggaggtgttggc

SEQ ID NO: 2017058 - DNA, 15 bp, Homo sapiens
gaggaggtgttggct

SEQ ID NO: 2017059 - DNA, 15 bp, Homo sapiens
aggaggtgttggcta

SEQ ID NO: 2017060 - DNA, 15 bp, Homo sapiens
ggaggtgttggctat

SEQ ID NO: 2017061 - DNA, 15 bp, Homo sapiens
gaggtgttggctatt

SEQ ID NO: 2017062 - DNA, 15 bp, Homo sapiens
aggtgttggctattg

SEQ ID NO: 2017063 - DNA, 15 bp, Homo sapiens
ggtgttggctattgg

SEQ ID NO: 2017064 - DNA, 15 bp, Homo sapiens
gtgttggctattggt

SEQ ID NO: 2017065 - DNA, 15 bp, Homo sapiens
tgttggctattggtg

SEQ ID NO: 2017066 - DNA, 15 bp, Homo sapiens
gttggctattggtgt

SEQ ID NO: 2017067 - DNA, 15 bp, Homo sapiens
ttggctattggtgtt

SEQ ID NO: 2017068 - DNA, 15 bp, Homo sapiens
tggctattggtgttg

SEQ ID NO: 2017069 - DNA, 15 bp, Homo sapiens
ggctattggtgttgg

SEQ ID NO: 2017070 - DNA, 15 bp, Homo sapiens
gctattggtgttggt

SEQ ID NO: 2017071 - DNA, 15 bp, Homo sapiens
ctattggtgttggtt

SEQ ID NO: 2017072 - DNA, 15 bp, Homo sapiens
tattggtgttggttg

SEQ ID NO: 2017073 - DNA, 15 bp, Homo sapiens
attggtgttggttgt

SEQ ID NO: 2017074 - DNA, 15 bp, Homo sapiens
ttggtgttggttgtt

SEQ ID NO: 2017075 - DNA, 15 bp, Homo sapiens
tggtgttggttgttt

SEQ ID NO: 2017076 - DNA, 15 bp, Homo sapiens
ggtgttggttgtttg

SEQ ID NO: 2017077 - DNA, 15 bp, Homo sapiens
gtgttggttgtttgg

SEQ ID NO: 2017078 - DNA, 15 bp, Homo sapiens
tgttggttgtttggt

SEQ ID NO: 2017079 - DNA, 15 bp, Homo sapiens
gttggttgtttggtg

SEQ ID NO: 2017080 - DNA, 15 bp, Homo sapiens
ttggttgtttggtgt

SEQ ID NO: 2017081 - DNA, 15 bp, Homo sapiens
tggttgtttggtgtt

SEQ ID NO: 2017082 - DNA, 15 bp, Homo sapiens
ggttgtttggtgttg

SEQ ID NO: 2017083 - DNA, 15 bp, Homo sapiens
gttgtttggtgttgt

SEQ ID NO: 2017084 - DNA, 15 bp, Homo sapiens
ttgtttggtgttgta

SEQ ID NO: 2017085 - DNA, 15 bp, Homo sapiens
tgtttggtgttgtag

SEQ ID NO: 2017086 - DNA, 15 bp, Homo sapiens
gtttggtgttgtagg

SEQ ID NO: 2017087 - DNA, 15 bp, Homo sapiens
tttggtgttgtaggc

SEQ ID NO: 2017088 - DNA, 15 bp, Homo sapiens
ttggtgttgtaggca

SEQ ID NO: 2017089 - DNA, 15 bp, Homo sapiens
tggtgttgtaggcaa

SEQ ID NO: 2017090 - DNA, 15 bp, Homo sapiens
ggtgttgtaggcaag

SEQ ID NO: 2017091 - DNA, 15 bp, Homo sapiens
gtgttgtaggcaagt

SEQ ID NO: 2017092 - DNA, 15 bp, Homo sapiens
tgttgtaggcaagtg

SEQ ID NO: 2017093 - DNA, 15 bp, Homo sapiens
gttgtaggcaagtgg

SEQ ID NO: 2017094 - DNA, 15 bp, Homo sapiens
ttgtaggcaagtggt

SEQ ID NO: 2017095 - DNA, 15 bp, Homo sapiens
tgtaggcaagtggtt

SEQ ID NO: 2017096 - DNA, 15 bp, Homo sapiens
gtaggcaagtggttg

SEQ ID NO: 2017097 - DNA, 15 bp, Homo sapiens
taggcaagtggttgt

SEQ ID NO: 2017098 - DNA, 15 bp, Homo sapiens
aggcaagtggttgtc

SEQ ID NO: 2017099 - DNA, 15 bp, Homo sapiens
ggcaagtggttgtcc

SEQ ID NO: 2017100 - DNA, 15 bp, Homo sapiens
gcaagtggttgtcca

SEQ ID NO: 2017101 - DNA, 15 bp, Homo sapiens
caagtggttgtccag

SEQ ID NO: 2017102 - DNA, 15 bp, Homo sapiens
aagtggttgtccagc

SEQ ID NO: 2017103 - DNA, 15 bp, Homo sapiens
agtggttgtccagca

SEQ ID NO: 2017104 - DNA, 15 bp, Homo sapiens
gtggttgtccagcag

SEQ ID NO: 2017105 - DNA, 15 bp, Homo sapiens
tggttgtccagcaga

SEQ ID NO: 2017106 - DNA, 15 bp, Homo sapiens
ggttgtccagcagaa

SEQ ID NO: 2017107 - DNA, 15 bp, Homo sapiens
gttgtccagcagaag

SEQ ID NO: 2017108 - DNA, 15 bp, Homo sapiens
ttgtccagcagaagt

SEQ ID NO: 2017109 - DNA, 15 bp, Homo sapiens
tgtccagcagaagta

SEQ ID NO: 2017110 - DNA, 15 bp, Homo sapiens
gtccagcagaagtat

SEQ ID NO: 2017111 - DNA, 15 bp, Homo sapiens
tccagcagaagtatg

SEQ ID NO: 2017112 - DNA, 15 bp, Homo sapiens
ccagcagaagtatgt

SEQ ID NO: 2017113 - DNA, 15 bp, Homo sapiens
cagcagaagtatgtg

SEQ ID NO: 2017114 - DNA, 15 bp, Homo sapiens
agcagaagtatgtgc

SEQ ID NO: 2017115 - DNA, 15 bp, Homo sapiens
gcagaagtatgtgct

SEQ ID NO: 2017116 - DNA, 15 bp, Homo sapiens
cagaagtatgtgctt

SEQ ID NO: 2017117 - DNA, 15 bp, Homo sapiens
agaagtatgtgcttc

SEQ ID NO: 2017118 - DNA, 15 bp, Homo sapiens
gaagtatgtgcttct

SEQ ID NO: 2017119 - DNA, 15 bp, Homo sapiens
aagtatgtgcttctg

SEQ ID NO: 2017120 - DNA, 15 bp, Homo sapiens
agtatgtgcttctgg

SEQ ID NO: 2017121 - DNA, 15 bp, Homo sapiens
gtatgtgcttctggt

SEQ ID NO: 2017122 - DNA, 15 bp, Homo sapiens
tatgtgcttctggtt

SEQ ID NO: 2017123 - DNA, 15 bp, Homo sapiens
atgtgcttctggttt

SEQ ID NO: 2017124 - DNA, 15 bp, Homo sapiens
tgtgcttctggtttt

SEQ ID NO: 2017125 - DNA, 15 bp, Homo sapiens
gtgcttctggttttt

SEQ ID NO: 2017126 - DNA, 15 bp, Homo sapiens
tgcttctggtttttc

SEQ ID NO: 2017127 - DNA, 15 bp, Homo sapiens
gcttctggtttttca

SEQ ID NO: 2017128 - DNA, 15 bp, Homo sapiens
cttctggtttttcag

SEQ ID NO: 2017129 - DNA, 15 bp, Homo sapiens
ttctggtttttcaga

SEQ ID NO: 2017130 - DNA, 15 bp, Homo sapiens
tctggtttttcagaa

SEQ ID NO: 2017131 - DNA, 15 bp, Homo sapiens
ctggtttttcagaag

SEQ ID NO: 2017132 - DNA, 15 bp, Homo sapiens
tggtttttcagaaga

SEQ ID NO: 2017133 - DNA, 15 bp, Homo sapiens
ggtttttcagaagag

SEQ ID NO: 2017134 - DNA, 15 bp, Homo sapiens
gtttttcagaagagg

SEQ ID NO: 2017135 - DNA, 15 bp, Homo sapiens
tttttcagaagaggt

SEQ ID NO: 2017136 - DNA, 15 bp, Homo sapiens
ttttcagaagaggta

SEQ ID NO: 2017137 - DNA, 15 bp, Homo sapiens
tttcagaagaggtat

SEQ ID NO: 2017138 - DNA, 15 bp, Homo sapiens
ttcagaagaggtata

SEQ ID NO: 2017139 - DNA, 15 bp, Homo sapiens
tcagaagaggtatag

SEQ ID NO: 2017140 - DNA, 15 bp, Homo sapiens
cagaagaggtataga

SEQ ID NO: 2017141 - DNA, 15 bp, Homo sapiens
agaagaggtatagac

SEQ ID NO: 2017142 - DNA, 15 bp, Homo sapiens
gaagaggtatagaca

SEQ ID NO: 2017143 - DNA, 15 bp, Homo sapiens
aagaggtatagacag

SEQ ID NO: 2017144 - DNA, 15 bp, Homo sapiens
agaggtatagacagc

SEQ ID NO: 2017145 - DNA, 15 bp, Homo sapiens
gaggtatagacagct

SEQ ID NO: 2017146 - DNA, 15 bp, Homo sapiens
aggtatagacagctg

SEQ ID NO: 2017147 - DNA, 15 bp, Homo sapiens
ggtatagacagctgg

SEQ ID NO: 2017148 - DNA, 15 bp, Homo sapiens
gtatagacagctggt

SEQ ID NO: 2017149 - DNA, 15 bp, Homo sapiens
tatagacagctggtg

SEQ ID NO: 2017150 - DNA, 15 bp, Homo sapiens
atagacagctggtgt

SEQ ID NO: 2017151 - DNA, 15 bp, Homo sapiens
tagacagctggtgtt

SEQ ID NO: 2017152 - DNA, 15 bp, Homo sapiens
agacagctggtgttg

SEQ ID NO: 2017153 - DNA, 15 bp, Homo sapiens
gacagctggtgttgg

SEQ ID NO: 2017154 - DNA, 15 bp, Homo sapiens
acagctggtgttggt

SEQ ID NO: 2017155 - DNA, 15 bp, Homo sapiens
cagctggtgttggtt

SEQ ID NO: 2017156 - DNA, 15 bp, Homo sapiens
agctggtgttggttg

SEQ ID NO: 2017157 - DNA, 15 bp, Homo sapiens
gctggtgttggttgt

SEQ ID NO: 2017158 - DNA, 15 bp, Homo sapiens
ctggtgttggttgtc

SEQ ID NO: 2017159 - DNA, 15 bp, Homo sapiens
tggtgttggttgtcc

SEQ ID NO: 2017160 - DNA, 15 bp, Homo sapiens
ggtgttggttgtcca

SEQ ID NO: 2017161 - DNA, 15 bp, Homo sapiens
gtgttggttgtccag

SEQ ID NO: 2017162 - DNA, 15 bp, Homo sapiens
tgttggttgtccagc

SEQ ID NO: 2017163 - DNA, 15 bp, Homo sapiens
gttggttgtccagca

SEQ ID NO: 2017164 - DNA, 15 bp, Homo sapiens
ttggttgtccagcag

SEQ ID NO: 2017165 - DNA, 15 bp, Homo sapiens
tggttgtccagcagt

SEQ ID NO: 2017166 - DNA, 15 bp, Homo sapiens
ggttgtccagcagtg

SEQ ID NO: 2017167 - DNA, 15 bp, Homo sapiens
gttgtccagcagtga

SEQ ID NO: 2017168 - DNA, 15 bp, Homo sapiens
ttgtccagcagtgac

SEQ ID NO: 2017169 - DNA, 15 bp, Homo sapiens
tgtccagcagtgact

SEQ ID NO: 2017170 - DNA, 15 bp, Homo sapiens
gtccagcagtgactt

SEQ ID NO: 2017171 - DNA, 15 bp, Homo sapiens
tccagcagtgacttt

SEQ ID NO: 2017172 - DNA, 15 bp, Homo sapiens
ccagcagtgactttg

SEQ ID NO: 2017173 - DNA, 15 bp, Homo sapiens
cagcagtgactttgg

SEQ ID NO: 2017174 - DNA, 15 bp, Homo sapiens
agcagtgactttggc

SEQ ID NO: 2017175 - DNA, 15 bp, Homo sapiens
gcagtgactttggca

SEQ ID NO: 2017176 - DNA, 15 bp, Homo sapiens
cagtgactttggcag

SEQ ID NO: 2017177 - DNA, 15 bp, Homo sapiens
agtgactttggcagg

SEQ ID NO: 2017178 - DNA, 15 bp, Homo sapiens
gtgactttggcaggt

SEQ ID NO: 2017179 - DNA, 15 bp, Homo sapiens
tgactttggcaggtg

SEQ ID NO: 2017180 - DNA, 15 bp, Homo sapiens
gactttggcaggtga

SEQ ID NO: 2017181 - DNA, 15 bp, Homo sapiens
actttggcaggtgat

SEQ ID NO: 2017182 - DNA, 15 bp, Homo sapiens
ctttggcaggtgata

SEQ ID NO: 2017183 - DNA, 15 bp, Homo sapiens
tttggcaggtgatat

SEQ ID NO: 2017184 - DNA, 15 bp, Homo sapiens
ttggcaggtgatatt

SEQ ID NO: 2017185 - DNA, 15 bp, Homo sapiens
tggcaggtgatattg

SEQ ID NO: 2017186 - DNA, 15 bp, Homo sapiens
ggcaggtgatattga

SEQ ID NO: 2017187 - DNA, 15 bp, Homo sapiens
gcaggtgatattgat

SEQ ID NO: 2017188 - DNA, 15 bp, Homo sapiens
caggtgatattgatt

SEQ ID NO: 2017189 - DNA, 15 bp, Homo sapiens
aggtgatattgattg

SEQ ID NO: 2017190 - DNA, 15 bp, Homo sapiens
ggtgatattgattgt

SEQ ID NO: 2017191 - DNA, 15 bp, Homo sapiens
gtgatattgattgtc

SEQ ID NO: 2017192 - DNA, 15 bp, Homo sapiens
tgatattgattgtcc

SEQ ID NO: 2017193 - DNA, 15 bp, Homo sapiens
gatattgattgtcca

SEQ ID NO: 2017194 - DNA, 15 bp, Homo sapiens
atattgattgtccag

SEQ ID NO: 2017195 - DNA, 15 bp, Homo sapiens
tattgattgtccaga

SEQ ID NO: 2017196 - DNA, 15 bp, Homo sapiens
attgattgtccagaa

SEQ ID NO: 2017197 - DNA, 15 bp, Homo sapiens
ttgattgtccagaaa

SEQ ID NO: 2017198 - DNA, 15 bp, Homo sapiens
tgattgtccagaaaa

SEQ ID NO: 2017199 - DNA, 15 bp, Homo sapiens
gattgtccagaaaaa

SEQ ID NO: 2017200 - DNA, 15 bp, Homo sapiens
attgtccagaaaaag

SEQ ID NO: 2017201 - DNA, 15 bp, Homo sapiens
ttgtccagaaaaagt

SEQ ID NO: 2017202 - DNA, 15 bp, Homo sapiens
tgtccagaaaaagtg

SEQ ID NO: 2017203 - DNA, 15 bp, Homo sapiens
gtccagaaaaagtgt

SEQ ID NO: 2017204 - DNA, 15 bp, Homo sapiens
tccagaaaaagtgtc

SEQ ID NO: 2017205 - DNA, 15 bp, Homo sapiens
ccagaaaaagtgtcg

SEQ ID NO: 2017206 - DNA, 15 bp, Homo sapiens
cagaaaaagtgtcgc

SEQ ID NO: 2017207 - DNA, 15 bp, Homo sapiens
agaaaaagtgtcgct

SEQ ID NO: 2017208 - DNA, 15 bp, Homo sapiens
gaaaaagtgtcgctg

SEQ ID NO: 2017209 - DNA, 15 bp, Homo sapiens
aaaaagtgtcgctga

SEQ ID NO: 2017210 - DNA, 15 bp, Homo sapiens
aaaagtgtcgctgaa

SEQ ID NO: 2017211 - DNA, 15 bp, Homo sapiens
aaagtgtcgctgaat

SEQ ID NO: 2017212 - DNA, 15 bp, Homo sapiens
aagtgtcgctgaatt

SEQ ID NO: 2017213 - DNA, 15 bp, Homo sapiens
agtgtcgctgaattg

SEQ ID NO: 2017214 - DNA, 15 bp, Homo sapiens
gtgtcgctgaattgt

SEQ ID NO: 2017215 - DNA, 15 bp, Homo sapiens
tgtcgctgaattgtg

SEQ ID NO: 2017216 - DNA, 15 bp, Homo sapiens
gtcgctgaattgtgt

SEQ ID NO: 2017217 - DNA, 15 bp, Homo sapiens
tcgctgaattgtgtt

SEQ ID NO: 2017218 - DNA, 15 bp, Homo sapiens
cgctgaattgtgttg

SEQ ID NO: 2017219 - DNA, 15 bp, Homo sapiens
gctgaattgtgttgg

SEQ ID NO: 2017220 - DNA, 15 bp, Homo sapiens
ctgaattgtgttggt

SEQ ID NO: 2017221 - DNA, 15 bp, Homo sapiens
tgaattgtgttggtt

SEQ ID NO: 2017222 - DNA, 15 bp, Homo sapiens
gaattgtgttggttg

SEQ ID NO: 2017223 - DNA, 15 bp, Homo sapiens
aattgtgttggttga

SEQ ID NO: 2017224 - DNA, 15 bp, Homo sapiens
attgtgttggttgac

SEQ ID NO: 2017225 - DNA, 15 bp, Homo sapiens
ttgtgttggttgacc

SEQ ID NO: 2017226 - DNA, 15 bp, Homo sapiens
tgtgttggttgaccc

SEQ ID NO: 2017227 - DNA, 15 bp, Homo sapiens
gtgttggttgaccca

SEQ ID NO: 2017228 - DNA, 15 bp, Homo sapiens
tgttggttgacccaa

SEQ ID NO: 2017229 - DNA, 15 bp, Homo sapiens
gttggttgacccaaa

SEQ ID NO: 2017230 - DNA, 15 bp, Homo sapiens
ttggttgacccaaag

SEQ ID NO: 2017231 - DNA, 15 bp, Homo sapiens
tggttgacccaaagg

SEQ ID NO: 2017232 - DNA, 15 bp, Homo sapiens
ggttgacccaaagga

SEQ ID NO: 2017233 - DNA, 15 bp, Homo sapiens
gttgacccaaaggat

SEQ ID NO: 2017234 - DNA, 15 bp, Homo sapiens
ttgacccaaaggatt

SEQ ID NO: 2017235 - DNA, 15 bp, Homo sapiens
tgacccaaaggattc

SEQ ID NO: 2017236 - DNA, 15 bp, Homo sapiens
gacccaaaggattcc

SEQ ID NO: 2017237 - DNA, 15 bp, Homo sapiens
acccaaaggattccc

SEQ ID NO: 2017238 - DNA, 15 bp, Homo sapiens
cccaaaggattccct

SEQ ID NO: 2017239 - DNA, 15 bp, Homo sapiens
ccaaaggattccctg

SEQ ID NO: 2017240 - DNA, 15 bp, Homo sapiens
caaaggattccctgt

SEQ ID NO: 2017241 - DNA, 15 bp, Homo sapiens
aaaggattccctgtt

SEQ ID NO: 2017242 - DNA, 15 bp, Homo sapiens
aaggattccctgttg

SEQ ID NO: 2017243 - DNA, 15 bp, Homo sapiens
aggattccctgttgt

SEQ ID NO: 2017244 - DNA, 15 bp, Homo sapiens
ggattccctgttgtg

SEQ ID NO: 2017245 - DNA, 15 bp, Homo sapiens
gattccctgttgtgt

SEQ ID NO: 2017246 - DNA, 15 bp, Homo sapiens
attccctgttgtgtt

SEQ ID NO: 2017247 - DNA, 15 bp, Homo sapiens
ttccctgttgtgttt

SEQ ID NO: 2017248 - DNA, 15 bp, Homo sapiens
tccctgttgtgtttt

SEQ ID NO: 2017249 - DNA, 15 bp, Homo sapiens
ccctgttgtgttttg

SEQ ID NO: 2017250 - DNA, 15 bp, Homo sapiens
cctgttgtgttttga

SEQ ID NO: 2017251 - DNA, 15 bp, Homo sapiens
ctgttgtgttttgag

SEQ ID NO: 2017252 - DNA, 15 bp, Homo sapiens
tgttgtgttttgaga

SEQ ID NO: 2017253 - DNA, 15 bp, Homo sapiens
gttgtgttttgagaa

SEQ ID NO: 2017254 - DNA, 15 bp, Homo sapiens
ttgtgttttgagaat

SEQ ID NO: 2017255 - DNA, 15 bp, Homo sapiens
tgtgttttgagaatt

SEQ ID NO: 2017256 - DNA, 15 bp, Homo sapiens
gtgttttgagaatta

SEQ ID NO: 2017257 - DNA, 15 bp, Homo sapiens
tgttttgagaattag

SEQ ID NO: 2017258 - DNA, 15 bp, Homo sapiens
gttttgagaattagc

SEQ ID NO: 2017259 - DNA, 15 bp, Homo sapiens
ttttgagaattagcc

SEQ ID NO: 2017260 - DNA, 15 bp, Homo sapiens
tttgagaattagcca

SEQ ID NO: 2017261 - DNA, 15 bp, Homo sapiens
ttgagaattagccaa

SEQ ID NO: 2017262 - DNA, 15 bp, Homo sapiens
tgagaattagccaat

SEQ ID NO: 2017263 - DNA, 15 bp, Homo sapiens
gagaattagccaata

SEQ ID NO: 2017264 - DNA, 15 bp, Homo sapiens
agaattagccaatac

SEQ ID NO: 2017265 - DNA, 15 bp, Homo sapiens
gaattagccaatacc

SEQ ID NO: 2017266 - DNA, 15 bp, Homo sapiens
aattagccaatacct

SEQ ID NO: 2017267 - DNA, 15 bp, Homo sapiens
attagccaatacctg

SEQ ID NO: 2017268 - DNA, 15 bp, Homo sapiens
ttagccaatacctgt

SEQ ID NO: 2017269 - DNA, 15 bp, Homo sapiens
tagccaatacctgtg

SEQ ID NO: 2017270 - DNA, 15 bp, Homo sapiens
agccaatacctgtga

SEQ ID NO: 2017271 - DNA, 15 bp, Homo sapiens
gccaatacctgtgac

SEQ ID NO: 2017272 - DNA, 15 bp, Homo sapiens
ccaatacctgtgaca

SEQ ID NO: 2017273 - DNA, 15 bp, Homo sapiens
caatacctgtgacat

SEQ ID NO: 2017274 - DNA, 15 bp, Homo sapiens
aatacctgtgacatt

SEQ ID NO: 2017275 - DNA, 15 bp, Homo sapiens
atacctgtgacattg

SEQ ID NO: 2017276 - DNA, 15 bp, Homo sapiens
tacctgtgacattga

SEQ ID NO: 2017277 - DNA, 15 bp, Homo sapiens
acctgtgacattgat

SEQ ID NO: 2017278 - DNA, 15 bp, Homo sapiens
cctgtgacattgatg

SEQ ID NO: 2017279 - DNA, 15 bp, Homo sapiens
ctgtgacattgatga

SEQ ID NO: 2017280 - DNA, 15 bp, Homo sapiens
tgtgacattgatgat

SEQ ID NO: 2017281 - DNA, 15 bp, Homo sapiens
gtgacattgatgatg

SEQ ID NO: 2017282 - DNA, 15 bp, Homo sapiens
tgacattgatgatgt

SEQ ID NO: 2017283 - DNA, 15 bp, Homo sapiens
gacattgatgatgtg

SEQ ID NO: 2017284 - DNA, 15 bp, Homo sapiens
acattgatgatgtga

SEQ ID NO: 2017285 - DNA, 15 bp, Homo sapiens
cattgatgatgtgaa

SEQ ID NO: 2017286 - DNA, 15 bp, Homo sapiens
attgatgatgtgaat

SEQ ID NO: 2017287 - DNA, 15 bp, Homo sapiens
ttgatgatgtgaata

SEQ ID NO: 2017288 - DNA, 15 bp, Homo sapiens
tgatgatgtgaataa

SEQ ID NO: 2017289 - DNA, 15 bp, Homo sapiens
gatgatgtgaataag

SEQ ID NO: 2017290 - DNA, 15 bp, Homo sapiens
atgatgtgaataagg

SEQ ID NO: 2017291 - DNA, 15 bp, Homo sapiens
tgatgtgaataaggt

SEQ ID NO: 2017292 - DNA, 15 bp, Homo sapiens
gatgtgaataaggta

SEQ ID NO: 2017293 - DNA, 15 bp, Homo sapiens
atgtgaataaggtag

SEQ ID NO: 2017294 - DNA, 15 bp, Homo sapiens
tgtgaataaggtagg

SEQ ID NO: 2017295 - DNA, 15 bp, Homo sapiens
gtgaataaggtaggc

SEQ ID NO: 2017296 - DNA, 15 bp, Homo sapiens
tgaataaggtaggct

SEQ ID NO: 2017297 - DNA, 15 bp, Homo sapiens
gaataaggtaggctg

SEQ ID NO: 2017298 - DNA, 15 bp, Homo sapiens
aataaggtaggctgt

SEQ ID NO: 2017299 - DNA, 15 bp, Homo sapiens
ataaggtaggctgtg

SEQ ID NO: 2017300 - DNA, 15 bp, Homo sapiens
taaggtaggctgtga

SEQ ID NO: 2017301 - DNA, 15 bp, Homo sapiens
aaggtaggctgtgac

SEQ ID NO: 2017302 - DNA, 15 bp, Homo sapiens
aggtaggctgtgact

SEQ ID NO: 2017303 - DNA, 15 bp, Homo sapiens
ggtaggctgtgactg

SEQ ID NO: 2017304 - DNA, 15 bp, Homo sapiens
gtaggctgtgactgc

SEQ ID NO: 2017305 - DNA, 15 bp, Homo sapiens
taggctgtgactgct

SEQ ID NO: 2017306 - DNA, 15 bp, Homo sapiens
aggctgtgactgctt

SEQ ID NO: 2017307 - DNA, 15 bp, Homo sapiens
ggctgtgactgcttc

SEQ ID NO: 2017308 - DNA, 15 bp, Homo sapiens
gctgtgactgcttct

SEQ ID NO: 2017309 - DNA, 15 bp, Homo sapiens
ctgtgactgcttctc

SEQ ID NO: 2017310 - DNA, 15 bp, Homo sapiens
tgtgactgcttctct

SEQ ID NO: 2017311 - DNA, 15 bp, Homo sapiens
gtgactgcttctctg

SEQ ID NO: 2017312 - DNA, 15 bp, Homo sapiens
tgactgcttctctgt

SEQ ID NO: 2017313 - DNA, 15 bp, Homo sapiens
gactgcttctctgtt

SEQ ID NO: 2017314 - DNA, 15 bp, Homo sapiens
actgcttctctgttg

SEQ ID NO: 2017315 - DNA, 15 bp, Homo sapiens
ctgcttctctgttgt

SEQ ID NO: 2017316 - DNA, 15 bp, Homo sapiens
tgcttctctgttgta

SEQ ID NO: 2017317 - DNA, 15 bp, Homo sapiens
gcttctctgttgtaa

SEQ ID NO: 2017318 - DNA, 15 bp, Homo sapiens
cttctctgttgtaat

SEQ ID NO: 2017319 - DNA, 15 bp, Homo sapiens
ttctctgttgtaatt

SEQ ID NO: 2017320 - DNA, 15 bp, Homo sapiens
tctctgttgtaattg

SEQ ID NO: 2017321 - DNA, 15 bp, Homo sapiens
ctctgttgtaattgt

SEQ ID NO: 2017322 - DNA, 15 bp, Homo sapiens
tctgttgtaattgtc

SEQ ID NO: 2017323 - DNA, 15 bp, Homo sapiens
ctgttgtaattgtct

SEQ ID NO: 2017324 - DNA, 15 bp, Homo sapiens
tgttgtaattgtctc

SEQ ID NO: 2017325 - DNA, 15 bp, Homo sapiens
gttgtaattgtctct

SEQ ID NO: 2017326 - DNA, 15 bp, Homo sapiens
ttgtaattgtctctg

SEQ ID NO: 2017327 - DNA, 15 bp, Homo sapiens
tgtaattgtctctgt

SEQ ID NO: 2017328 - DNA, 15 bp, Homo sapiens
gtaattgtctctgtc

SEQ ID NO: 2017329 - DNA, 15 bp, Homo sapiens
taattgtctctgtct

SEQ ID NO: 2017330 - DNA, 15 bp, Homo sapiens
aattgtctctgtctt

SEQ ID NO: 2017331 - DNA, 15 bp, Homo sapiens
attgtctctgtcttt

SEQ ID NO: 2017332 - DNA, 15 bp, Homo sapiens
ttgtctctgtctttg

SEQ ID NO: 2017333 - DNA, 15 bp, Homo sapiens
tgtctctgtctttga

SEQ ID NO: 2017334 - DNA, 15 bp, Homo sapiens
gtctctgtctttgaa

SEQ ID NO: 2017335 - DNA, 15 bp, Homo sapiens
tctctgtctttgaaa

SEQ ID NO: 2017336 - DNA, 15 bp, Homo sapiens
ctctgtctttgaaaa

SEQ ID NO: 2017337 - DNA, 15 bp, Homo sapiens
tctgtctttgaaaaa

SEQ ID NO: 2017338 - DNA, 15 bp, Homo sapiens
ctgtctttgaaaaaa

SEQ ID NO: 2017339 - DNA, 15 bp, Homo sapiens
gtctttgaaaaaaat

SEQ ID NO: 2017340 - DNA, 15 bp, Homo sapiens
tctttgaaaaaaatg

SEQ ID NO: 2017341 - DNA, 15 bp, Homo sapiens
ctttgaaaaaaatgt

SEQ ID NO: 2017342 - DNA, 15 bp, Homo sapiens
tttgaaaaaaatgta

SEQ ID NO: 2017343 - DNA, 15 bp, Homo sapiens
ttgaaaaaaatgtat

SEQ ID NO: 2017344 - DNA, 15 bp, Homo sapiens
tgaaaaaaatgtatt

SEQ ID NO: 2017345 - DNA, 15 bp, Homo sapiens
gaaaaaaatgtattg

SEQ ID NO: 2017346 - DNA, 15 bp, Homo sapiens
aaaaaaatgtattgt

SEQ ID NO: 2017347 - DNA, 15 bp, Homo sapiens
aaaaaatgtattgtt

SEQ ID NO: 2017348 - DNA, 15 bp, Homo sapiens
aaaaatgtattgttc

SEQ ID NO: 2017349 - DNA, 15 bp, Homo sapiens
aaaatgtattgttca

SEQ ID NO: 2017350 - DNA, 15 bp, Homo sapiens
aaatgtattgttcag

SEQ ID NO: 2017351 - DNA, 15 bp, Homo sapiens
aatgtattgttcagg

SEQ ID NO: 2017352 - DNA, 15 bp, Homo sapiens
atgtattgttcaggt

SEQ ID NO: 2017353 - DNA, 15 bp, Homo sapiens
tgtattgttcaggtg

SEQ ID NO: 2017354 - DNA, 15 bp, Homo sapiens
gtattgttcaggtgt

SEQ ID NO: 2017355 - DNA, 15 bp, Homo sapiens
tattgttcaggtgtc

SEQ ID NO: 2017356 - DNA, 15 bp, Homo sapiens
attgttcaggtgtcc

SEQ ID NO: 2017357 - DNA, 15 bp, Homo sapiens
ttgttcaggtgtcca

SEQ ID NO: 2017358 - DNA, 15 bp, Homo sapiens
tgttcaggtgtccac

SEQ ID NO: 2017359 - DNA, 15 bp, Homo sapiens
gttcaggtgtccaca

SEQ ID NO: 2017360 - DNA, 15 bp, Homo sapiens
ttcaggtgtccacaa

SEQ ID NO: 2017361 - DNA, 15 bp, Homo sapiens
tcaggtgtccacaaa

SEQ ID NO: 2017362 - DNA, 15 bp, Homo sapiens
caggtgtccacaaaa

SEQ ID NO: 2017363 - DNA, 15 bp, Homo sapiens
aggtgtccacaaaac

SEQ ID NO: 2017364 - DNA, 15 bp, Homo sapiens
ggtgtccacaaaaca

SEQ ID NO: 2017365 - DNA, 15 bp, Homo sapiens
gtgtccacaaaacaa

SEQ ID NO: 2017366 - DNA, 15 bp, Homo sapiens
tgtccacaaaacaaa

SEQ ID NO: 2017367 - DNA, 15 bp, Homo sapiens
gtccacaaaacaaaa

SEQ ID NO: 2017368 - DNA, 15 bp, Homo sapiens
tccacaaaacaaaat

SEQ ID NO: 2017369 - DNA, 15 bp, Homo sapiens
ccacaaaacaaaatt

SEQ ID NO: 2017370 - DNA, 15 bp, Homo sapiens
cacaaaacaaaatta

SEQ ID NO: 2017371 - DNA, 15 bp, Homo sapiens
acaaaacaaaattaa

SEQ ID NO: 2017372 - DNA, 15 bp, Homo sapiens
caaaacaaaattaag

SEQ ID NO: 2017373 - DNA, 15 bp, Homo sapiens
aaaacaaaattaaga

SEQ ID NO: 2017374 - DNA, 15 bp, Homo sapiens
aaacaaaattaagat

SEQ ID NO: 2017375 - DNA, 15 bp, Homo sapiens
aacaaaattaagatg

SEQ ID NO: 2017376 - DNA, 15 bp, Homo sapiens
acaaaattaagatga

SEQ ID NO: 2017377 - DNA, 15 bp, Homo sapiens
caaaattaagatgaa

SEQ ID NO: 2017378 - DNA, 15 bp, Homo sapiens
aaaattaagatgaaa

SEQ ID NO: 2017379 - DNA, 15 bp, Homo sapiens
aaattaagatgaaat

SEQ ID NO: 2017380 - DNA, 15 bp, Homo sapiens
aattaagatgaaata

SEQ ID NO: 2017381 - DNA, 15 bp, Homo sapiens
attaagatgaaatat

SEQ ID NO: 2017382 - DNA, 15 bp, Homo sapiens
ttaagatgaaatatt

SEQ ID NO: 2017383 - DNA, 15 bp, Homo sapiens
taagatgaaatattt

SEQ ID NO: 2017384 - DNA, 15 bp, Homo sapiens
aagatgaaatatttg

SEQ ID NO: 2017385 - DNA, 15 bp, Homo sapiens
agatgaaatatttgg

SEQ ID NO: 2017386 - DNA, 15 bp, Homo sapiens
gatgaaatatttggg

SEQ ID NO: 2017387 - DNA, 15 bp, Homo sapiens
atgaaatatttggga

SEQ ID NO: 2017388 - DNA, 15 bp, Homo sapiens
tgaaatatttgggat

SEQ ID NO: 2017389 - DNA, 15 bp, Homo sapiens
gaaatatttgggatc

SEQ ID NO: 2017390 - DNA, 15 bp, Homo sapiens
aaatatttgggatcc

SEQ ID NO: 2017391 - DNA, 15 bp, Homo sapiens
aatatttgggatcca

SEQ ID NO: 2017392 - DNA, 15 bp, Homo sapiens
atatttgggatccat

SEQ ID NO: 2017393 - DNA, 15 bp, Homo sapiens
tatttgggatccatt

SEQ ID NO: 2017394 - DNA, 15 bp, Homo sapiens
atttgggatccattt

SEQ ID NO: 2017395 - DNA, 15 bp, Homo sapiens
tttgggatccatttc

SEQ ID NO: 2017396 - DNA, 15 bp, Homo sapiens
ttgggatccatttca

SEQ ID NO: 2017397 - DNA, 15 bp, Homo sapiens
tgggatccatttcag

SEQ ID NO: 2017398 - DNA, 15 bp, Homo sapiens
gggatccatttcaga

SEQ ID NO: 2017399 - DNA, 15 bp, Homo sapiens
ggatccatttcagaa

SEQ ID NO: 2017400 - DNA, 15 bp, Homo sapiens
gatccatttcagaat

SEQ ID NO: 2017401 - DNA, 15 bp, Homo sapiens
atccatttcagaata

SEQ ID NO: 2017402 - DNA, 15 bp, Homo sapiens
tccatttcagaatat

SEQ ID NO: 2017403 - DNA, 15 bp, Homo sapiens
ccatttcagaatatt

SEQ ID NO: 2017404 - DNA, 15 bp, Homo sapiens
catttcagaatattt

SEQ ID NO: 2017405 - DNA, 15 bp, Homo sapiens
atttcagaatatttc

SEQ ID NO: 2017406 - DNA, 15 bp, Homo sapiens
tttcagaatatttcc

SEQ ID NO: 2017407 - DNA, 15 bp, Homo sapiens
ttcagaatatttcct

SEQ ID NO: 2017408 - DNA, 15 bp, Homo sapiens
tcagaatatttcctc

SEQ ID NO: 2017409 - DNA, 15 bp, Homo sapiens
cagaatatttcctcg

SEQ ID NO: 2017410 - DNA, 15 bp, Homo sapiens
agaatatttcctcgt

SEQ ID NO: 2017411 - DNA, 15 bp, Homo sapiens
gaatatttcctcgtt

SEQ ID NO: 2017412 - DNA, 15 bp, Homo sapiens
aatatttcctcgtta

SEQ ID NO: 2017413 - DNA, 15 bp, Homo sapiens
atatttcctcgttat

SEQ ID NO: 2017414 - DNA, 15 bp, Homo sapiens
tatttcctcgttatc

SEQ ID NO: 2017415 - DNA, 15 bp, Homo sapiens
atttcctcgttatct

SEQ ID NO: 2017416 - DNA, 15 bp, Homo sapiens
tttcctcgttatcta

SEQ ID NO: 2017417 - DNA, 15 bp, Homo sapiens
ttcctcgttatctat

SEQ ID NO: 2017418 - DNA, 15 bp, Homo sapiens
tcctcgttatctata

SEQ ID NO: 2017419 - DNA, 15 bp, Homo sapiens
cctcgttatctatag

SEQ ID NO: 2017420 - DNA, 15 bp, Homo sapiens
ctcgttatctatagc

SEQ ID NO: 2017421 - DNA, 15 bp, Homo sapiens
tcgttatctatagcg

SEQ ID NO: 2017422 - DNA, 15 bp, Homo sapiens
cgttatctatagcgg

SEQ ID NO: 2017423 - DNA, 15 bp, Homo sapiens
gttatctatagcggg

SEQ ID NO: 2017424 - DNA, 15 bp, Homo sapiens
ttatctatagcgggt

SEQ ID NO: 2017425 - DNA, 15 bp, Homo sapiens
tatctatagcgggtt

SEQ ID NO: 2017426 - DNA, 15 bp, Homo sapiens
atctatagcgggttt

SEQ ID NO: 2017427 - DNA, 15 bp, Homo sapiens
tctatagcgggttta

SEQ ID NO: 2017428 - DNA, 15 bp, Homo sapiens
ctatagcgggtttat

SEQ ID NO: 2017429 - DNA, 15 bp, Homo sapiens
tatagcgggtttata

SEQ ID NO: 2017430 - DNA, 15 bp, Homo sapiens
atagcgggtttataa

SEQ ID NO: 2017431 - DNA, 15 bp, Homo sapiens
tagcgggtttataat

SEQ ID NO: 2017432 - DNA, 15 bp, Homo sapiens
agcgggtttataatg

SEQ ID NO: 2017433 - DNA, 15 bp, Homo sapiens
gcgggtttataatga

SEQ ID NO: 2017434 - DNA, 15 bp, Homo sapiens
cgggtttataatgaa

SEQ ID NO: 2017435 - DNA, 15 bp, Homo sapiens
gggtttataatgaaa

SEQ ID NO: 2017436 - DNA, 15 bp, Homo sapiens
ggtttataatgaaag

SEQ ID NO: 2017437 - DNA, 15 bp, Homo sapiens
gtttataatgaaaga

SEQ ID NO: 2017438 - DNA, 15 bp, Homo sapiens
tttataatgaaagag

SEQ ID NO: 2017439 - DNA, 15 bp, Homo sapiens
ttataatgaaagaga

SEQ ID NO: 2017440 - DNA, 15 bp, Homo sapiens
tataatgaaagagaa

SEQ ID NO: 2017441 - DNA, 15 bp, Homo sapiens
ataatgaaagagaaa

SEQ ID NO: 2017442 - DNA, 15 bp, Homo sapiens
taatgaaagagaaag

SEQ ID NO: 2017443 - DNA, 15 bp, Homo sapiens
aatgaaagagaaaga

SEQ ID NO: 2017444 - DNA, 15 bp, Homo sapiens
atgaaagagaaagac

SEQ ID NO: 2017445 - DNA, 15 bp, Homo sapiens
tgaaagagaaagaca

SEQ ID NO: 2017446 - DNA, 15 bp, Homo sapiens
gaaagagaaagacag

SEQ ID NO: 2017447 - DNA, 15 bp, Homo sapiens
aaagagaaagacagt

SEQ ID NO: 2017448 - DNA, 15 bp, Homo sapiens
aagagaaagacagtt

SEQ ID NO: 2017449 - DNA, 15 bp, Homo sapiens
agagaaagacagtta

SEQ ID NO: 2017450 - DNA, 15 bp, Homo sapiens
gagaaagacagttag

SEQ ID NO: 2017451 - DNA, 15 bp, Homo sapiens
agaaagacagttagg

SEQ ID NO: 2017452 - DNA, 15 bp, Homo sapiens
gaaagacagttaggc

SEQ ID NO: 2017453 - DNA, 15 bp, Homo sapiens
aaagacagttaggcg

SEQ ID NO: 2017454 - DNA, 15 bp, Homo sapiens
aagacagttaggcgt

SEQ ID NO: 2017455 - DNA, 15 bp, Homo sapiens
agacagttaggcgtc

SEQ ID NO: 2017456 - DNA, 15 bp, Homo sapiens
gacagttaggcgtca

SEQ ID NO: 2017457 - DNA, 15 bp, Homo sapiens
acagttaggcgtcat

SEQ ID NO: 2017458 - DNA, 15 bp, Homo sapiens
cagttaggcgtcatt

SEQ ID NO: 2017459 - DNA, 15 bp, Homo sapiens
agttaggcgtcattg

SEQ ID NO: 2017460 - DNA, 15 bp, Homo sapiens
gttaggcgtcattgg

SEQ ID NO: 2017461 - DNA, 15 bp, Homo sapiens
ttaggcgtcattggt

SEQ ID NO: 2017462 - DNA, 15 bp, Homo sapiens
taggcgtcattggtg

SEQ ID NO: 2017463 - DNA, 15 bp, Homo sapiens
aggcgtcattggtgt

SEQ ID NO: 2017464 - DNA, 15 bp, Homo sapiens
ggcgtcattggtgtc

SEQ ID NO: 2017465 - DNA, 15 bp, Homo sapiens
gcgtcattggtgtct

SEQ ID NO: 2017466 - DNA, 15 bp, Homo sapiens
cgtcattggtgtcta

SEQ ID NO: 2017467 - DNA, 15 bp, Homo sapiens
gtcattggtgtctag

SEQ ID NO: 2017468 - DNA, 15 bp, Homo sapiens
tcattggtgtctagt

SEQ ID NO: 2017469 - DNA, 15 bp, Homo sapiens
cattggtgtctagtt

SEQ ID NO: 2017470 - DNA, 15 bp, Homo sapiens
attggtgtctagtta

SEQ ID NO: 2017471 - DNA, 15 bp, Homo sapiens
ttggtgtctagttaa

SEQ ID NO: 2017472 - DNA, 15 bp, Homo sapiens
tggtgtctagttaaa

SEQ ID NO: 2017473 - DNA, 15 bp, Homo sapiens
ggtgtctagttaaaa

SEQ ID NO: 2017474 - DNA, 15 bp, Homo sapiens
gtgtctagttaaaaa

SEQ ID NO: 2017475 - DNA, 15 bp, Homo sapiens
tgtctagttaaaaat

SEQ ID NO: 2017476 - DNA, 15 bp, Homo sapiens
gtctagttaaaaatt

SEQ ID NO: 2017477 - DNA, 15 bp, Homo sapiens
tctagttaaaaattt

SEQ ID NO: 2017478 - DNA, 15 bp, Homo sapiens
ctagttaaaaatttg

SEQ ID NO: 2017479 - DNA, 15 bp, Homo sapiens
tagttaaaaatttga

SEQ ID NO: 2017480 - DNA, 15 bp, Homo sapiens
agttaaaaatttgac

SEQ ID NO: 2017481 - DNA, 15 bp, Homo sapiens
gttaaaaatttgact

SEQ ID NO: 2017482 - DNA, 15 bp, Homo sapiens
ttaaaaatttgactt

SEQ ID NO: 2017483 - DNA, 15 bp, Homo sapiens
taaaaatttgacttt

SEQ ID NO: 2017484 - DNA, 15 bp, Homo sapiens
aaaaatttgactttt

SEQ ID NO: 2017485 - DNA, 15 bp, Homo sapiens
aaaatttgacttttc

SEQ ID NO: 2017486 - DNA, 15 bp, Homo sapiens
aaatttgacttttca

SEQ ID NO: 2017487 - DNA, 15 bp, Homo sapiens
aatttgacttttcat

SEQ ID NO: 2017488 - DNA, 15 bp, Homo sapiens
atttgacttttcatt

SEQ ID NO: 2017489 - DNA, 15 bp, Homo sapiens
tttgacttttcatta

SEQ ID NO: 2017490 - DNA, 15 bp, Homo sapiens
ttgacttttcattat

SEQ ID NO: 2017491 - DNA, 15 bp, Homo sapiens
tgacttttcattatg

SEQ ID NO: 2017492 - DNA, 15 bp, Homo sapiens
gacttttcattatga

SEQ ID NO: 2017493 - DNA, 15 bp, Homo sapiens
acttttcattatgat

SEQ ID NO: 2017494 - DNA, 15 bp, Homo sapiens
cttttcattatgatt

SEQ ID NO: 2017495 - DNA, 15 bp, Homo sapiens
ttttcattatgattc

SEQ ID NO: 2017496 - DNA, 15 bp, Homo sapiens
tttcattatgattcc

SEQ ID NO: 2017497 - DNA, 15 bp, Homo sapiens
ttcattatgattcct

SEQ ID NO: 2017498 - DNA, 15 bp, Homo sapiens
tcattatgattcctg

SEQ ID NO: 2017499 - DNA, 15 bp, Homo sapiens
cattatgattcctgg

SEQ ID NO: 2017500 - DNA, 15 bp, Homo sapiens
attatgattcctggc

SEQ ID NO: 2017501 - DNA, 15 bp, Homo sapiens
ttatgattcctggca

SEQ ID NO: 2017502 - DNA, 15 bp, Homo sapiens
tatgattcctggcat

SEQ ID NO: 2017503 - DNA, 15 bp, Homo sapiens
atgattcctggcata

SEQ ID NO: 2017504 - DNA, 15 bp, Homo sapiens
tgattcctggcataa

SEQ ID NO: 2017505 - DNA, 15 bp, Homo sapiens
gattcctggcataaa

SEQ ID NO: 2017506 - DNA, 15 bp, Homo sapiens
attcctggcataaag

SEQ ID NO: 2017507 - DNA, 15 bp, Homo sapiens
ttcctggcataaagt

SEQ ID NO: 2017508 - DNA, 15 bp, Homo sapiens
tcctggcataaagta

SEQ ID NO: 2017509 - DNA, 15 bp, Homo sapiens
cctggcataaagtag

SEQ ID NO: 2017510 - DNA, 15 bp, Homo sapiens
ctggcataaagtagg

SEQ ID NO: 2017511 - DNA, 15 bp, Homo sapiens
tggcataaagtaggt

SEQ ID NO: 2017512 - DNA, 15 bp, Homo sapiens
ggcataaagtaggta

SEQ ID NO: 2017513 - DNA, 15 bp, Homo sapiens
gcataaagtaggtag

SEQ ID NO: 2017514 - DNA, 15 bp, Homo sapiens
cataaagtaggtaga

SEQ ID NO: 2017515 - DNA, 15 bp, Homo sapiens
ataaagtaggtagac

SEQ ID NO: 2017516 - DNA, 15 bp, Homo sapiens
taaagtaggtagaca

SEQ ID NO: 2017517 - DNA, 15 bp, Homo sapiens
aaagtaggtagacat

SEQ ID NO: 2017518 - DNA, 15 bp, Homo sapiens
aagtaggtagacatt

SEQ ID NO: 2017519 - DNA, 15 bp, Homo sapiens
agtaggtagacatta

SEQ ID NO: 2017520 - DNA, 15 bp, Homo sapiens
gtaggtagacattat

SEQ ID NO: 2017521 - DNA, 15 bp, Homo sapiens
taggtagacattatt

SEQ ID NO: 2017522 - DNA, 15 bp, Homo sapiens
aggtagacattattc

SEQ ID NO: 2017523 - DNA, 15 bp, Homo sapiens
ggtagacattattcc

SEQ ID NO: 2017524 - DNA, 15 bp, Homo sapiens
gtagacattattcct

SEQ ID NO: 2017525 - DNA, 15 bp, Homo sapiens
tagacattattccta

SEQ ID NO: 2017526 - DNA, 15 bp, Homo sapiens
agacattattcctaa

SEQ ID NO: 2017527 - DNA, 15 bp, Homo sapiens
gacattattcctaat

SEQ ID NO: 2017528 - DNA, 15 bp, Homo sapiens
acattattcctaatt

SEQ ID NO: 2017529 - DNA, 15 bp, Homo sapiens
cattattcctaatta

SEQ ID NO: 2017530 - DNA, 15 bp, Homo sapiens
attattcctaattag

SEQ ID NO: 2017531 - DNA, 15 bp, Homo sapiens
ttattcctaattagt

SEQ ID NO: 2017532 - DNA, 15 bp, Homo sapiens
tattcctaattagta

SEQ ID NO: 2017533 - DNA, 15 bp, Homo sapiens
attcctaattagtag

SEQ ID NO: 2017534 - DNA, 15 bp, Homo sapiens
ttcctaattagtagt

SEQ ID NO: 2017535 - DNA, 15 bp, Homo sapiens
tcctaattagtagta

SEQ ID NO: 2017536 - DNA, 15 bp, Homo sapiens
cctaattagtagtag

SEQ ID NO: 2017537 - DNA, 15 bp, Homo sapiens
ctaattagtagtagt

SEQ ID NO: 2017538 - DNA, 15 bp, Homo sapiens
taattagtagtagtt

SEQ ID NO: 2017539 - DNA, 15 bp, Homo sapiens
aattagtagtagttg

SEQ ID NO: 2017540 - DNA, 15 bp, Homo sapiens
attagtagtagttga

SEQ ID NO: 2017541 - DNA, 15 bp, Homo sapiens
ttagtagtagttgat

SEQ ID NO: 2017542 - DNA, 15 bp, Homo sapiens
tagtagtagttgatt

SEQ ID NO: 2017543 - DNA, 15 bp, Homo sapiens
agtagtagttgatta

SEQ ID NO: 2017544 - DNA, 15 bp, Homo sapiens
gtagtagttgattag

SEQ ID NO: 2017545 - DNA, 15 bp, Homo sapiens
tagtagttgattagt

SEQ ID NO: 2017546 - DNA, 15 bp, Homo sapiens
agtagttgattagta

SEQ ID NO: 2017547 - DNA, 15 bp, Homo sapiens
gtagttgattagtag

SEQ ID NO: 2017548 - DNA, 15 bp, Homo sapiens
tagttgattagtagt

SEQ ID NO: 2017549 - DNA, 15 bp, Homo sapiens
agttgattagtagtt

SEQ ID NO: 2017550 - DNA, 15 bp, Homo sapiens
gttgattagtagtta

SEQ ID NO: 2017551 - DNA, 15 bp, Homo sapiens
ttgattagtagttat

SEQ ID NO: 2017552 - DNA, 15 bp, Homo sapiens
tgattagtagttatt

SEQ ID NO: 2017553 - DNA, 15 bp, Homo sapiens
gattagtagttatta

SEQ ID NO: 2017554 - DNA, 15 bp, Homo sapiens
attagtagttattat

SEQ ID NO: 2017555 - DNA, 15 bp, Homo sapiens
ttagtagttattatt

SEQ ID NO: 2017556 - DNA, 15 bp, Homo sapiens
tagtagttattattc

SEQ ID NO: 2017557 - DNA, 15 bp, Homo sapiens
agtagttattattcc

SEQ ID NO: 2017558 - DNA, 15 bp, Homo sapiens
gtagttattattcct

SEQ ID NO: 2017559 - DNA, 15 bp, Homo sapiens
tagttattattccta

SEQ ID NO: 2017560 - DNA, 15 bp, Homo sapiens
agttattattcctaa

SEQ ID NO: 2017561 - DNA, 15 bp, Homo sapiens
gttattattcctaat

SEQ ID NO: 2017562 - DNA, 15 bp, Homo sapiens
ttattattcctaatt

SEQ ID NO: 2017563 - DNA, 15 bp, Homo sapiens
tattattcctaattt

SEQ ID NO: 2017564 - DNA, 15 bp, Homo sapiens
attattcctaattta

SEQ ID NO: 2017565 - DNA, 15 bp, Homo sapiens
ttattcctaatttag

SEQ ID NO: 2017566 - DNA, 15 bp, Homo sapiens
tattcctaatttaga

SEQ ID NO: 2017567 - DNA, 15 bp, Homo sapiens
attcctaatttagac

SEQ ID NO: 2017568 - DNA, 15 bp, Homo sapiens
ttcctaatttagact

SEQ ID NO: 2017569 - DNA, 15 bp, Homo sapiens
tcctaatttagactt

SEQ ID NO: 2017570 - DNA, 15 bp, Homo sapiens
cctaatttagacttg

SEQ ID NO: 2017571 - DNA, 15 bp, Homo sapiens
ctaatttagacttga

SEQ ID NO: 2017572 - DNA, 15 bp, Homo sapiens
taatttagacttgat

SEQ ID NO: 2017573 - DNA, 15 bp, Homo sapiens
aatttagacttgata

SEQ ID NO: 2017574 - DNA, 15 bp, Homo sapiens
atttagacttgatac

SEQ ID NO: 2017575 - DNA, 15 bp, Homo sapiens
tttagacttgataca

SEQ ID NO: 2017576 - DNA, 15 bp, Homo sapiens
ttagacttgatacac

SEQ ID NO: 2017577 - DNA, 15 bp, Homo sapiens
tagacttgatacact

SEQ ID NO: 2017578 - DNA, 15 bp, Homo sapiens
agacttgatacactg

SEQ ID NO: 2017579 - DNA, 15 bp, Homo sapiens
gacttgatacactgt

SEQ ID NO: 2017580 - DNA, 15 bp, Homo sapiens
acttgatacactgta

SEQ ID NO: 2017581 - DNA, 15 bp, Homo sapiens
cttgatacactgtag

SEQ ID NO: 2017582 - DNA, 15 bp, Homo sapiens
ttgatacactgtagg

SEQ ID NO: 2017583 - DNA, 15 bp, Homo sapiens
tgatacactgtaggt

SEQ ID NO: 2017584 - DNA, 15 bp, Homo sapiens
gatacactgtaggtt

SEQ ID NO: 2017585 - DNA, 15 bp, Homo sapiens
atacactgtaggttt

SEQ ID NO: 2017586 - DNA, 15 bp, Homo sapiens
tacactgtaggtttg

SEQ ID NO: 2017587 - DNA, 15 bp, Homo sapiens
acactgtaggtttgg

SEQ ID NO: 2017588 - DNA, 15 bp, Homo sapiens
cactgtaggtttggt

SEQ ID NO: 2017589 - DNA, 15 bp, Homo sapiens
actgtaggtttggtg

SEQ ID NO: 2017590 - DNA, 15 bp, Homo sapiens
ctgtaggtttggtgt

SEQ ID NO: 2017591 - DNA, 15 bp, Homo sapiens
tgtaggtttggtgta

SEQ ID NO: 2017592 - DNA, 15 bp, Homo sapiens
gtaggtttggtgtaa

SEQ ID NO: 2017593 - DNA, 15 bp, Homo sapiens
taggtttggtgtaac

SEQ ID NO: 2017594 - DNA, 15 bp, Homo sapiens
aggtttggtgtaaca

SEQ ID NO: 2017595 - DNA, 15 bp, Homo sapiens
ggtttggtgtaacaa

SEQ ID NO: 2017596 - DNA, 15 bp, Homo sapiens
gtttggtgtaacaac

SEQ ID NO: 2017597 - DNA, 15 bp, Homo sapiens
tttggtgtaacaact

SEQ ID NO: 2017598 - DNA, 15 bp, Homo sapiens
ttggtgtaacaactc

SEQ ID NO: 2017599 - DNA, 15 bp, Homo sapiens
tggtgtaacaactct

SEQ ID NO: 2017600 - DNA, 15 bp, Homo sapiens
ggtgtaacaactctt

SEQ ID NO: 2017601 - DNA, 15 bp, Homo sapiens
gtgtaacaactcttg

SEQ ID NO: 2017602 - DNA, 15 bp, Homo sapiens
tgtaacaactcttgg

SEQ ID NO: 2017603 - DNA, 15 bp, Homo sapiens
gtaacaactcttgga

SEQ ID NO: 2017604 - DNA, 15 bp, Homo sapiens
taacaactcttggat

SEQ ID NO: 2017605 - DNA, 15 bp, Homo sapiens
aacaactcttggata

SEQ ID NO: 2017606 - DNA, 15 bp, Homo sapiens
aactcttggatatac

SEQ ID NO: 2017607 - DNA, 15 bp, Homo sapiens
actcttggatatact

SEQ ID NO: 2017608 - DNA, 15 bp, Homo sapiens
ctcttggatatactc

SEQ ID NO: 2017609 - DNA, 15 bp, Homo sapiens
tcttggatatactct

SEQ ID NO: 2017610 - DNA, 15 bp, Homo sapiens
cttggatatactcta

SEQ ID NO: 2017611 - DNA, 15 bp, Homo sapiens
ttggatatactctaa

SEQ ID NO: 2017612 - DNA, 15 bp, Homo sapiens
tggatatactctaac

SEQ ID NO: 2017613 - DNA, 15 bp, Homo sapiens
ggatatactctaacc

SEQ ID NO: 2017614 - DNA, 15 bp, Homo sapiens
gatatactctaaccc

SEQ ID NO: 2017615 - DNA, 15 bp, Homo sapiens
atatactctaaccca

SEQ ID NO: 2017616 - DNA, 15 bp, Homo sapiens
tatactctaacccat

SEQ ID NO: 2017617 - DNA, 15 bp, Homo sapiens
atactctaacccatc

SEQ ID NO: 2017618 - DNA, 15 bp, Homo sapiens
tactctaacccatca

SEQ ID NO: 2017619 - DNA, 15 bp, Homo sapiens
actctaacccatcat

SEQ ID NO: 2017620 - DNA, 15 bp, Homo sapiens
ctctaacccatcata

SEQ ID NO: 2017621 - DNA, 15 bp, Homo sapiens
tctaacccatcatac

SEQ ID NO: 2017622 - DNA, 15 bp, Homo sapiens
ctaacccatcataca

SEQ ID NO: 2017623 - DNA, 15 bp, Homo sapiens
taacccatcatacag

SEQ ID NO: 2017624 - DNA, 15 bp, Homo sapiens
aacccatcatacagc

SEQ ID NO: 2017625 - DNA, 15 bp, Homo sapiens
acccatcatacagca

SEQ ID NO: 2017626 - DNA, 15 bp, Homo sapiens
cccatcatacagcat

SEQ ID NO: 2017627 - DNA, 15 bp, Homo sapiens
ccatcatacagcatt

SEQ ID NO: 2017628 - DNA, 15 bp, Homo sapiens
catcatacagcattt

SEQ ID NO: 2017629 - DNA, 15 bp, Homo sapiens
atcatacagcatttg

SEQ ID NO: 2017630 - DNA, 15 bp, Homo sapiens
tcatacagcatttgg

SEQ ID NO: 2017631 - DNA, 15 bp, Homo sapiens
catacagcatttgga

SEQ ID NO: 2017632 - DNA, 15 bp, Homo sapiens
atacagcatttggac

SEQ ID NO: 2017633 - DNA, 15 bp, Homo sapiens
tacagcatttggacc

SEQ ID NO: 2017634 - DNA, 15 bp, Homo sapiens
acagcatttggacct

SEQ ID NO: 2017635 - DNA, 15 bp, Homo sapiens
cagcatttggacctc

SEQ ID NO: 2017636 - DNA, 15 bp, Homo sapiens
agcatttggacctca

SEQ ID NO: 2017637 - DNA, 15 bp, Homo sapiens
gcatttggacctcat

SEQ ID NO: 2017638 - DNA, 15 bp, Homo sapiens
catttggacctcata

SEQ ID NO: 2017639 - DNA, 15 bp, Homo sapiens
atttggacctcataa

SEQ ID NO: 2017640 - DNA, 15 bp, Homo sapiens
tttggacctcataag

SEQ ID NO: 2017641 - DNA, 15 bp, Homo sapiens
ttggacctcataagc

SEQ ID NO: 2017642 - DNA, 15 bp, Homo sapiens
tggacctcataagca

SEQ ID NO: 2017643 - DNA, 15 bp, Homo sapiens
ggacctcataagcag

SEQ ID NO: 2017644 - DNA, 15 bp, Homo sapiens
gacctcataagcagt

SEQ ID NO: 2017645 - DNA, 15 bp, Homo sapiens
acctcataagcagtg

SEQ ID NO: 2017646 - DNA, 15 bp, Homo sapiens
cctcataagcagtga

SEQ ID NO: 2017647 - DNA, 15 bp, Homo sapiens
ctcataagcagtgat

SEQ ID NO: 2017648 - DNA, 15 bp, Homo sapiens
tcataagcagtgatc

SEQ ID NO: 2017649 - DNA, 15 bp, Homo sapiens
cataagcagtgatct

SEQ ID NO: 2017650 - DNA, 15 bp, Homo sapiens
ataagcagtgatctc

SEQ ID NO: 2017651 - DNA, 15 bp, Homo sapiens
taagcagtgatctct

SEQ ID NO: 2017652 - DNA, 15 bp, Homo sapiens
aagcagtgatctctc

SEQ ID NO: 2017653 - DNA, 15 bp, Homo sapiens
agcagtgatctctct

SEQ ID NO: 2017654 - DNA, 15 bp, Homo sapiens
gcagtgatctctctt

SEQ ID NO: 2017655 - DNA, 15 bp, Homo sapiens
cagtgatctctcttc

SEQ ID NO: 2017656 - DNA, 15 bp, Homo sapiens
agtgatctctcttct

SEQ ID NO: 2017657 - DNA, 15 bp, Homo sapiens
gtgatctctcttctt

SEQ ID NO: 2017658 - DNA, 15 bp, Homo sapiens
tgatctctcttcttt

SEQ ID NO: 2017659 - DNA, 15 bp, Homo sapiens
gatctctcttctttt

SEQ ID NO: 2017660 - DNA, 15 bp, Homo sapiens
atctctcttctttta

SEQ ID NO: 2017661 - DNA, 15 bp, Homo sapiens
tctctcttcttttat

SEQ ID NO: 2017662 - DNA, 15 bp, Homo sapiens
ctctcttcttttatt

SEQ ID NO: 2017663 - DNA, 15 bp, Homo sapiens
tctcttcttttatta

SEQ ID NO: 2017664 - DNA, 15 bp, Homo sapiens
ctcttcttttattaa

SEQ ID NO: 2017665 - DNA, 15 bp, Homo sapiens
tcttcttttattaat

SEQ ID NO: 2017666 - DNA, 15 bp, Homo sapiens
cttcttttattaata

SEQ ID NO: 2017667 - DNA, 15 bp, Homo sapiens
ttcttttattaatac

SEQ ID NO: 2017668 - DNA, 15 bp, Homo sapiens
tcttttattaataca

SEQ ID NO: 2017669 - DNA, 15 bp, Homo sapiens
cttttattaatacaa

SEQ ID NO: 2017670 - DNA, 15 bp, Homo sapiens
ttttattaatacaag

SEQ ID NO: 2017671 - DNA, 15 bp, Homo sapiens
tttattaatacaagt

SEQ ID NO: 2017672 - DNA, 15 bp, Homo sapiens
ttattaatacaagtt

SEQ ID NO: 2017673 - DNA, 15 bp, Homo sapiens
tattaatacaagttc

SEQ ID NO: 2017674 - DNA, 15 bp, Homo sapiens
attaatacaagttct

SEQ ID NO: 2017675 - DNA, 15 bp, Homo sapiens
ttaatacaagttctg

SEQ ID NO: 2017676 - DNA, 15 bp, Homo sapiens
taatacaagttctgt

SEQ ID NO: 2017677 - DNA, 15 bp, Homo sapiens
aatacaagttctgta

SEQ ID NO: 2017678 - DNA, 15 bp, Homo sapiens
atacaagttctgtac

SEQ ID NO: 2017679 - DNA, 15 bp, Homo sapiens
tacaagttctgtact

SEQ ID NO: 2017680 - DNA, 15 bp, Homo sapiens
acaagttctgtactt

SEQ ID NO: 2017681 - DNA, 15 bp, Homo sapiens
caagttctgtacttg

SEQ ID NO: 2017682 - DNA, 15 bp, Homo sapiens
aagttctgtacttgg

SEQ ID NO: 2017683 - DNA, 15 bp, Homo sapiens
agttctgtacttggc

SEQ ID NO: 2017684 - DNA, 15 bp, Homo sapiens
gttctgtacttggct

SEQ ID NO: 2017685 - DNA, 15 bp, Homo sapiens
ttctgtacttggctc

SEQ ID NO: 2017686 - DNA, 15 bp, Homo sapiens
tctgtacttggctct

SEQ ID NO: 2017687 - DNA, 15 bp, Homo sapiens
ctgtacttggctctg

SEQ ID NO: 2017688 - DNA, 15 bp, Homo sapiens
tgtacttggctctgc

SEQ ID NO: 2017689 - DNA, 15 bp, Homo sapiens
gtacttggctctgct

SEQ ID NO: 2017690 - DNA, 15 bp, Homo sapiens
tacttggctctgctg

SEQ ID NO: 2017691 - DNA, 15 bp, Homo sapiens
acttggctctgctgc

SEQ ID NO: 2017692 - DNA, 15 bp, Homo sapiens
cttggctctgctgcc

SEQ ID NO: 2017693 - DNA, 15 bp, Homo sapiens
ttggctctgctgccc

SEQ ID NO: 2017694 - DNA, 15 bp, Homo sapiens
tggctctgctgcccc

SEQ ID NO: 2017695 - DNA, 15 bp, Homo sapiens
ggctctgctgcccct

SEQ ID NO: 2017696 - DNA, 15 bp, Homo sapiens
gctctgctgcccctc

SEQ ID NO: 2017697 - DNA, 15 bp, Homo sapiens
ctctgctgcccctct

SEQ ID NO: 2017698 - DNA, 15 bp, Homo sapiens
tctgctgcccctcta

SEQ ID NO: 2017699 - DNA, 15 bp, Homo sapiens
ctgctgcccctctag

SEQ ID NO: 2017700 - DNA, 15 bp, Homo sapiens
tgctgcccctctagc

SEQ ID NO: 2017701 - DNA, 15 bp, Homo sapiens
gctgcccctctagct

SEQ ID NO: 2017702 - DNA, 15 bp, Homo sapiens
ctgcccctctagctt

SEQ ID NO: 2017703 - DNA, 15 bp, Homo sapiens
tgcccctctagcttc

SEQ ID NO: 2017704 - DNA, 15 bp, Homo sapiens
gcccctctagcttca

SEQ ID NO: 2017705 - DNA, 15 bp, Homo sapiens
cccctctagcttcat

SEQ ID NO: 2017706 - DNA, 15 bp, Homo sapiens
ccctctagcttcatt

SEQ ID NO: 2017707 - DNA, 15 bp, Homo sapiens
cctctagcttcatta

SEQ ID NO: 2017708 - DNA, 15 bp, Homo sapiens
ctctagcttcattat

SEQ ID NO: 2017709 - DNA, 15 bp, Homo sapiens
tctagcttcattata

SEQ ID NO: 2017710 - DNA, 15 bp, Homo sapiens
ctagcttcattatat

SEQ ID NO: 2017711 - DNA, 15 bp, Homo sapiens
tagcttcattatatt

SEQ ID NO: 2017712 - DNA, 15 bp, Homo sapiens
agcttcattatattt

SEQ ID NO: 2017713 - DNA, 15 bp, Homo sapiens
gcttcattatatttc

SEQ ID NO: 2017714 - DNA, 15 bp, Homo sapiens
cttcattatatttca

SEQ ID NO: 2017715 - DNA, 15 bp, Homo sapiens
ttcattatatttcag

SEQ ID NO: 2017716 - DNA, 15 bp, Homo sapiens
tcattatatttcagt

SEQ ID NO: 2017717 - DNA, 15 bp, Homo sapiens
cattatatttcagta

SEQ ID NO: 2017718 - DNA, 15 bp, Homo sapiens
attatatttcagtac

SEQ ID NO: 2017719 - DNA, 15 bp, Homo sapiens
ttatatttcagtact

SEQ ID NO: 2017720 - DNA, 15 bp, Homo sapiens
atatttcagtacttc

SEQ ID NO: 2017721 - DNA, 15 bp, Homo sapiens
tatttcagtacttca

SEQ ID NO: 2017722 - DNA, 15 bp, Homo sapiens
atttcagtacttcac

SEQ ID NO: 2017723 - DNA, 15 bp, Homo sapiens
tttcagtacttcact

SEQ ID NO: 2017724 - DNA, 15 bp, Homo sapiens
ttcagtacttcactt

SEQ ID NO: 2017725 - DNA, 15 bp, Homo sapiens
tcagtacttcactta

SEQ ID NO: 2017726 - DNA, 15 bp, Homo sapiens
cagtacttcacttag

SEQ ID NO: 2017727 - DNA, 15 bp, Homo sapiens
agtacttcacttagt

SEQ ID NO: 2017728 - DNA, 15 bp, Homo sapiens
gtacttcacttagtc

SEQ ID NO: 2017729 - DNA, 15 bp, Homo sapiens
tacttcacttagtca

SEQ ID NO: 2017730 - DNA, 15 bp, Homo sapiens
acttcacttagtcat

SEQ ID NO: 2017731 - DNA, 15 bp, Homo sapiens
cttcacttagtcata

SEQ ID NO: 2017732 - DNA, 15 bp, Homo sapiens
ttcacttagtcatac

SEQ ID NO: 2017733 - DNA, 15 bp, Homo sapiens
tcacttagtcatact

SEQ ID NO: 2017734 - DNA, 15 bp, Homo sapiens
cacttagtcatactt

SEQ ID NO: 2017735 - DNA, 15 bp, Homo sapiens
acttagtcatacttc

SEQ ID NO: 2017736 - DNA, 15 bp, Homo sapiens
cttagtcatacttct

SEQ ID NO: 2017737 - DNA, 15 bp, Homo sapiens
ttagtcatacttctc

SEQ ID NO: 2017738 - DNA, 15 bp, Homo sapiens
tagtcatacttctca

SEQ ID NO: 2017739 - DNA, 15 bp, Homo sapiens
agtcatacttctcaa

SEQ ID NO: 2017740 - DNA, 15 bp, Homo sapiens
gtcatacttctcaaa

SEQ ID NO: 2017741 - DNA, 15 bp, Homo sapiens
tcatacttctcaaaa

SEQ ID NO: 2017742 - DNA, 15 bp, Homo sapiens
catacttctcaaaac

SEQ ID NO: 2017743 - DNA, 15 bp, Homo sapiens
atacttctcaaaacg

SEQ ID NO: 2017744 - DNA, 15 bp, Homo sapiens
tacttctcaaaacgc

SEQ ID NO: 2017745 - DNA, 15 bp, Homo sapiens
acttctcaaaacgca

SEQ ID NO: 2017746 - DNA, 15 bp, Homo sapiens
cttctcaaaacgcat

SEQ ID NO: 2017747 - DNA, 15 bp, Homo sapiens
ttctcaaaacgcata

SEQ ID NO: 2017748 - DNA, 15 bp, Homo sapiens
tctcaaaacgcatag

SEQ ID NO: 2017749 - DNA, 15 bp, Homo sapiens
ctcaaaacgcatagg

SEQ ID NO: 2017750 - DNA, 15 bp, Homo sapiens
tcaaaacgcataggc

SEQ ID NO: 2017751 - DNA, 15 bp, Homo sapiens
caaaacgcataggct

SEQ ID NO: 2017752 - DNA, 15 bp, Homo sapiens
aaaacgcataggctc

SEQ ID NO: 2017753 - DNA, 15 bp, Homo sapiens
aaacgcataggctct

SEQ ID NO: 2017754 - DNA, 15 bp, Homo sapiens
aacgcataggctcta

SEQ ID NO: 2017755 - DNA, 15 bp, Homo sapiens
acgcataggctctat

SEQ ID NO: 2017756 - DNA, 15 bp, Homo sapiens
cgcataggctctata

SEQ ID NO: 2017757 - DNA, 15 bp, Homo sapiens
gcataggctctatat

SEQ ID NO: 2017758 - DNA, 15 bp, Homo sapiens
cataggctctatatg

SEQ ID NO: 2017759 - DNA, 15 bp, Homo sapiens
ataggctctatatgc

SEQ ID NO: 2017760 - DNA, 15 bp, Homo sapiens
taggctctatatgct

SEQ ID NO: 2017761 - DNA, 15 bp, Homo sapiens
aggctctatatgctg

SEQ ID NO: 2017762 - DNA, 15 bp, Homo sapiens
ggctctatatgctgg

SEQ ID NO: 2017763 - DNA, 15 bp, Homo sapiens
gctctatatgctgga

SEQ ID NO: 2017764 - DNA, 15 bp, Homo sapiens
ctctatatgctggat

SEQ ID NO: 2017765 - DNA, 15 bp, Homo sapiens
tctatatgctggatc

SEQ ID NO: 2017766 - DNA, 15 bp, Homo sapiens
ctatatgctggatcc

SEQ ID NO: 2017767 - DNA, 15 bp, Homo sapiens
tatatgctggatcca

SEQ ID NO: 2017768 - DNA, 15 bp, Homo sapiens
atatgctggatccat

SEQ ID NO: 2017769 - DNA, 15 bp, Homo sapiens
tatgctggatccatg

SEQ ID NO: 2017770 - DNA, 15 bp, Homo sapiens
atgctggatccatgt

SEQ ID NO: 2017771 - DNA, 15 bp, Homo sapiens
tgctggatccatgtg

SEQ ID NO: 2017772 - DNA, 15 bp, Homo sapiens
gctggatccatgtgt

SEQ ID NO: 2017773 - DNA, 15 bp, Homo sapiens
ctggatccatgtgtt

SEQ ID NO: 2017774 - DNA, 15 bp, Homo sapiens
tggatccatgtgttc

SEQ ID NO: 2017775 - DNA, 15 bp, Homo sapiens
ggatccatgtgttct

SEQ ID NO: 2017776 - DNA, 15 bp, Homo sapiens
gatccatgtgttctc

SEQ ID NO: 2017777 - DNA, 15 bp, Homo sapiens
atccatgtgttctct

SEQ ID NO: 2017778 - DNA, 15 bp, Homo sapiens
tccatgtgttctcta

SEQ ID NO: 2017779 - DNA, 15 bp, Homo sapiens
ccatgtgttctctac

SEQ ID NO: 2017780 - DNA, 15 bp, Homo sapiens
catgtgttctctacc

SEQ ID NO: 2017781 - DNA, 15 bp, Homo sapiens
atgtgttctctacct

SEQ ID NO: 2017782 - DNA, 15 bp, Homo sapiens
tgtgttctctacctt

SEQ ID NO: 2017783 - DNA, 15 bp, Homo sapiens
gtgttctctaccttt

SEQ ID NO: 2017784 - DNA, 15 bp, Homo sapiens
tgttctctacctttt

SEQ ID NO: 2017785 - DNA, 15 bp, Homo sapiens
gttctctaccttttt

SEQ ID NO: 2017786 - DNA, 15 bp, Homo sapiens
ttctctacctttttt

SEQ ID NO: 2017787 - DNA, 15 bp, Homo sapiens
tctctaccttttttc

SEQ ID NO: 2017788 - DNA, 15 bp, Homo sapiens
ctctaccttttttca

SEQ ID NO: 2017789 - DNA, 15 bp, Homo sapiens
tctaccttttttcac

SEQ ID NO: 2017790 - DNA, 15 bp, Homo sapiens
ctaccttttttcacc

SEQ ID NO: 2017791 - DNA, 15 bp, Homo sapiens
taccttttttcacca

SEQ ID NO: 2017792 - DNA, 15 bp, Homo sapiens
accttttttcaccat

SEQ ID NO: 2017793 - DNA, 15 bp, Homo sapiens
ccttttttcaccatt

SEQ ID NO: 2017794 - DNA, 15 bp, Homo sapiens
cttttttcaccattt

SEQ ID NO: 2017795 - DNA, 15 bp, Homo sapiens
ttttttcaccatttt

SEQ ID NO: 2017796 - DNA, 15 bp, Homo sapiens
tttttcaccattttc

SEQ ID NO: 2017797 - DNA, 15 bp, Homo sapiens
ttttcaccattttct

SEQ ID NO: 2017798 - DNA, 15 bp, Homo sapiens
tttcaccattttcta

SEQ ID NO: 2017799 - DNA, 15 bp, Homo sapiens
ttcaccattttctac

SEQ ID NO: 2017800 - DNA, 15 bp, Homo sapiens
tcaccattttctact

SEQ ID NO: 2017801 - DNA, 15 bp, Homo sapiens
caccattttctacta

SEQ ID NO: 2017802 - DNA, 15 bp, Homo sapiens
accattttctactag

SEQ ID NO: 2017803 - DNA, 15 bp, Homo sapiens
ccattttctactaga

SEQ ID NO: 2017804 - DNA, 15 bp, Homo sapiens
cattttctactagaa

SEQ ID NO: 2017805 - DNA, 15 bp, Homo sapiens
attttctactagaaa

SEQ ID NO: 2017806 - DNA, 15 bp, Homo sapiens
ttttctactagaaat

SEQ ID NO: 2017807 - DNA, 15 bp, Homo sapiens
tttctactagaaata

SEQ ID NO: 2017808 - DNA, 15 bp, Homo sapiens
ttctactagaaatat

SEQ ID NO: 2017809 - DNA, 15 bp, Homo sapiens
tctactagaaatata

SEQ ID NO: 2017810 - DNA, 15 bp, Homo sapiens
ctactagaaatatat

SEQ ID NO: 2017811 - DNA, 15 bp, Homo sapiens
tactagaaatatatt

SEQ ID NO: 2017812 - DNA, 15 bp, Homo sapiens
actagaaatatattg

SEQ ID NO: 2017813 - DNA, 15 bp, Homo sapiens
ctagaaatatattga

SEQ ID NO: 2017814 - DNA, 15 bp, Homo sapiens
tagaaatatattgat

SEQ ID NO: 2017815 - DNA, 15 bp, Homo sapiens
agaaatatattgatt

SEQ ID NO: 2017816 - DNA, 15 bp, Homo sapiens
gaaatatattgattc

SEQ ID NO: 2017817 - DNA, 15 bp, Homo sapiens
aaatatattgattct

SEQ ID NO: 2017818 - DNA, 15 bp, Homo sapiens
aatatattgattctc

SEQ ID NO: 2017819 - DNA, 15 bp, Homo sapiens
atatattgattctcc

SEQ ID NO: 2017820 - DNA, 15 bp, Homo sapiens
tatattgattctcct

SEQ ID NO: 2017821 - DNA, 15 bp, Homo sapiens
atattgattctcctg

SEQ ID NO: 2017822 - DNA, 15 bp, Homo sapiens
tattgattctcctgc

SEQ ID NO: 2017823 - DNA, 15 bp, Homo sapiens
attgattctcctgcc

SEQ ID NO: 2017824 - DNA, 15 bp, Homo sapiens
ttgattctcctgcct

SEQ ID NO: 2017825 - DNA, 15 bp, Homo sapiens
tgattctcctgcctt

SEQ ID NO: 2017826 - DNA, 15 bp, Homo sapiens
gattctcctgccttg

SEQ ID NO: 2017827 - DNA, 15 bp, Homo sapiens
attctcctgccttga

SEQ ID NO: 2017828 - DNA, 15 bp, Homo sapiens
ttctcctgccttgaa

SEQ ID NO: 2017829 - DNA, 15 bp, Homo sapiens
tctcctgccttgaag

SEQ ID NO: 2017830 - DNA, 15 bp, Homo sapiens
ctcctgccttgaaga

SEQ ID NO: 2017831 - DNA, 15 bp, Homo sapiens
tcctgccttgaagaa

SEQ ID NO: 2017832 - DNA, 15 bp, Homo sapiens
cctgccttgaagaac

SEQ ID NO: 2017833 - DNA, 15 bp, Homo sapiens
ctgccttgaagaaca

SEQ ID NO: 2017834 - DNA, 15 bp, Homo sapiens
tgccttgaagaacac

SEQ ID NO: 2017835 - DNA, 15 bp, Homo sapiens
gccttgaagaacacc

SEQ ID NO: 2017836 - DNA, 15 bp, Homo sapiens
ccttgaagaacacca

SEQ ID NO: 2017837 - DNA, 15 bp, Homo sapiens
cttgaagaacaccag

SEQ ID NO: 2017838 - DNA, 15 bp, Homo sapiens
ttgaagaacaccagt

SEQ ID NO: 2017839 - DNA, 15 bp, Homo sapiens
tgaagaacaccagtg

SEQ ID NO: 2017840 - DNA, 15 bp, Homo sapiens
gaagaacaccagtga

SEQ ID NO: 2017841 - DNA, 15 bp, Homo sapiens
aagaacaccagtgat

SEQ ID NO: 2017842 - DNA, 15 bp, Homo sapiens
agaacaccagtgatc

SEQ ID NO: 2017843 - DNA, 15 bp, Homo sapiens
gaacaccagtgatca

SEQ ID NO: 2017844 - DNA, 15 bp, Homo sapiens
aacaccagtgatcat

SEQ ID NO: 2017845 - DNA, 15 bp, Homo sapiens
acaccagtgatcatc

SEQ ID NO: 2017846 - DNA, 15 bp, Homo sapiens
caccagtgatcatct

SEQ ID NO: 2017847 - DNA, 15 bp, Homo sapiens
accagtgatcatctg

SEQ ID NO: 2017848 - DNA, 15 bp, Homo sapiens
ccagtgatcatctgt

SEQ ID NO: 2017849 - DNA, 15 bp, Homo sapiens
cagtgatcatctgtt

SEQ ID NO: 2017850 - DNA, 15 bp, Homo sapiens
agtgatcatctgtta

SEQ ID NO: 2017851 - DNA, 15 bp, Homo sapiens
gtgatcatctgttac

SEQ ID NO: 2017852 - DNA, 15 bp, Homo sapiens
tgatcatctgttacc

SEQ ID NO: 2017853 - DNA, 15 bp, Homo sapiens
gatcatctgttacct

SEQ ID NO: 2017854 - DNA, 15 bp, Homo sapiens
atcatctgttaccta

SEQ ID NO: 2017855 - DNA, 15 bp, Homo sapiens
tcatctgttacctaa

SEQ ID NO: 2017856 - DNA, 15 bp, Homo sapiens
catctgttacctaat

SEQ ID NO: 2017857 - DNA, 15 bp, Homo sapiens
atctgttacctaatc

SEQ ID NO: 2017858 - DNA, 15 bp, Homo sapiens
tctgttacctaatct

SEQ ID NO: 2017859 - DNA, 15 bp, Homo sapiens
ctgttacctaatcta

SEQ ID NO: 2017860 - DNA, 15 bp, Homo sapiens
tgttacctaatctaa

SEQ ID NO: 2017861 - DNA, 15 bp, Homo sapiens
gttacctaatctaat

SEQ ID NO: 2017862 - DNA, 15 bp, Homo sapiens
ttacctaatctaatt

SEQ ID NO: 2017863 - DNA, 15 bp, Homo sapiens
tacctaatctaattg

SEQ ID NO: 2017864 - DNA, 15 bp, Homo sapiens
acctaatctaattgt

SEQ ID NO: 2017865 - DNA, 15 bp, Homo sapiens
cctaatctaattgtt

SEQ ID NO: 2017866 - DNA, 15 bp, Homo sapiens
ctaatctaattgttc

SEQ ID NO: 2017867 - DNA, 15 bp, Homo sapiens
taatctaattgttct

SEQ ID NO: 2017868 - DNA, 15 bp, Homo sapiens
aatctaattgttctt

SEQ ID NO: 2017869 - DNA, 15 bp, Homo sapiens
atctaattgttcttt

SEQ ID NO: 2017870 - DNA, 15 bp, Homo sapiens
tctaattgttcttta

SEQ ID NO: 2017871 - DNA, 15 bp, Homo sapiens
ctaattgttctttat

SEQ ID NO: 2017872 - DNA, 15 bp, Homo sapiens
taattgttctttatt

SEQ ID NO: 2017873 - DNA, 15 bp, Homo sapiens
aattgttctttattt

SEQ ID NO: 2017874 - DNA, 15 bp, Homo sapiens
attgttctttatttc

SEQ ID NO: 2017875 - DNA, 15 bp, Homo sapiens
ttgttctttatttct

SEQ ID NO: 2017876 - DNA, 15 bp, Homo sapiens
tgttctttatttctt

SEQ ID NO: 2017877 - DNA, 15 bp, Homo sapiens
gttctttatttcttc

SEQ ID NO: 2017878 - DNA, 15 bp, Homo sapiens
ttctttatttcttct

SEQ ID NO: 2017879 - DNA, 15 bp, Homo sapiens
tctttatttcttctc

SEQ ID NO: 2017880 - DNA, 15 bp, Homo sapiens
ctttatttcttctct

SEQ ID NO: 2017881 - DNA, 15 bp, Homo sapiens
tttatttcttctctc

SEQ ID NO: 2017882 - DNA, 15 bp, Homo sapiens
ttatttcttctctcc

SEQ ID NO: 2017883 - DNA, 15 bp, Homo sapiens
tatttcttctctccc

SEQ ID NO: 2017884 - DNA, 15 bp, Homo sapiens
atttcttctctcccc

SEQ ID NO: 2017885 - DNA, 15 bp, Homo sapiens
tttcttctctcccct

SEQ ID NO: 2017886 - DNA, 15 bp, Homo sapiens
ttcttctctcccctc

SEQ ID NO: 2017887 - DNA, 15 bp, Homo sapiens
tcttctctcccctcc

SEQ ID NO: 2017888 - DNA, 15 bp, Homo sapiens
cttctctcccctccc

SEQ ID NO: 2017889 - DNA, 15 bp, Homo sapiens
ttctctcccctcccc

SEQ ID NO: 2017890 - DNA, 15 bp, Homo sapiens
tctctcccctcccct

SEQ ID NO: 2017891 - DNA, 15 bp, Homo sapiens
ctctcccctcccctc

SEQ ID NO: 2017892 - DNA, 15 bp, Homo sapiens
tctcccctcccctcc

SEQ ID NO: 2017893 - DNA, 15 bp, Homo sapiens
ctcccctcccctcct

SEQ ID NO: 2017894 - DNA, 15 bp, Homo sapiens
tcccctcccctcctt

SEQ ID NO: 2017895 - DNA, 15 bp, Homo sapiens
cccctcccctccttg

SEQ ID NO: 2017896 - DNA, 15 bp, Homo sapiens
ccctcccctccttga

SEQ ID NO: 2017897 - DNA, 15 bp, Homo sapiens
cctcccctccttgac

SEQ ID NO: 2017898 - DNA, 15 bp, Homo sapiens
ctcccctccttgacc

SEQ ID NO: 2017899 - DNA, 15 bp, Homo sapiens
tcccctccttgacca

SEQ ID NO: 2017900 - DNA, 15 bp, Homo sapiens
cccctccttgaccac

SEQ ID NO: 2017901 - DNA, 15 bp, Homo sapiens
ccctccttgaccaca

SEQ ID NO: 2017902 - DNA, 15 bp, Homo sapiens
cctccttgaccacat

SEQ ID NO: 2017903 - DNA, 15 bp, Homo sapiens
ctccttgaccacatt

SEQ ID NO: 2017904 - DNA, 15 bp, Homo sapiens
tccttgaccacatta

SEQ ID NO: 2017905 - DNA, 15 bp, Homo sapiens
ccttgaccacattag

SEQ ID NO: 2017906 - DNA, 15 bp, Homo sapiens
cttgaccacattaga

SEQ ID NO: 2017907 - DNA, 15 bp, Homo sapiens
ttgaccacattagac

SEQ ID NO: 2017908 - DNA, 15 bp, Homo sapiens
tgaccacattagaca

SEQ ID NO: 2017909 - DNA, 15 bp, Homo sapiens
gaccacattagacac

SEQ ID NO: 2017910 - DNA, 15 bp, Homo sapiens
accacattagacact

SEQ ID NO: 2017911 - DNA, 15 bp, Homo sapiens
ccacattagacacta

SEQ ID NO: 2017912 - DNA, 15 bp, Homo sapiens
cacattagacactac

SEQ ID NO: 2017913 - DNA, 15 bp, Homo sapiens
acattagacactact

SEQ ID NO: 2017914 - DNA, 15 bp, Homo sapiens
cattagacactactg

SEQ ID NO: 2017915 - DNA, 15 bp, Homo sapiens
attagacactactgt

SEQ ID NO: 2017916 - DNA, 15 bp, Homo sapiens
ttagacactactgtt

SEQ ID NO: 2017917 - DNA, 15 bp, Homo sapiens
tagacactactgttc

SEQ ID NO: 2017918 - DNA, 15 bp, Homo sapiens
agacactactgttcc

SEQ ID NO: 2017919 - DNA, 15 bp, Homo sapiens
gacactactgttcct

SEQ ID NO: 2017920 - DNA, 15 bp, Homo sapiens
acactactgttcctt

SEQ ID NO: 2017921 - DNA, 15 bp, Homo sapiens
cactactgttccttc

SEQ ID NO: 2017922 - DNA, 15 bp, Homo sapiens
actactgttccttca

SEQ ID NO: 2017923 - DNA, 15 bp, Homo sapiens
ctactgttccttcac

SEQ ID NO: 2017924 - DNA, 15 bp, Homo sapiens
tactgttccttcact

SEQ ID NO: 2017925 - DNA, 15 bp, Homo sapiens
actgttccttcacta

SEQ ID NO: 2017926 - DNA, 15 bp, Homo sapiens
ctgttccttcactaa

SEQ ID NO: 2017927 - DNA, 15 bp, Homo sapiens
tgttccttcactaat

SEQ ID NO: 2017928 - DNA, 15 bp, Homo sapiens
gttccttcactaata

SEQ ID NO: 2017929 - DNA, 15 bp, Homo sapiens
ttccttcactaatat

SEQ ID NO: 2017930 - DNA, 15 bp, Homo sapiens
tccttcactaatatt

SEQ ID NO: 2017931 - DNA, 15 bp, Homo sapiens
ccttcactaatattc

SEQ ID NO: 2017932 - DNA, 15 bp, Homo sapiens
cttcactaatattca

SEQ ID NO: 2017933 - DNA, 15 bp, Homo sapiens
ttcactaatattcaa

SEQ ID NO: 2017934 - DNA, 15 bp, Homo sapiens
tcactaatattcaag

SEQ ID NO: 2017935 - DNA, 15 bp, Homo sapiens
cactaatattcaagt

SEQ ID NO: 2017936 - DNA, 15 bp, Homo sapiens
actaatattcaagta

SEQ ID NO: 2017937 - DNA, 15 bp, Homo sapiens
ctaatattcaagtag

SEQ ID NO: 2017938 - DNA, 15 bp, Homo sapiens
taatattcaagtagc

SEQ ID NO: 2017939 - DNA, 15 bp, Homo sapiens
aatattcaagtagct

SEQ ID NO: 2017940 - DNA, 15 bp, Homo sapiens
atattcaagtagctt

SEQ ID NO: 2017941 - DNA, 15 bp, Homo sapiens
tattcaagtagcttt

SEQ ID NO: 2017942 - DNA, 15 bp, Homo sapiens
attcaagtagctttt

SEQ ID NO: 2017943 - DNA, 15 bp, Homo sapiens
ttcaagtagcttttt

SEQ ID NO: 2017944 - DNA, 15 bp, Homo sapiens
tcaagtagctttttg

SEQ ID NO: 2017945 - DNA, 15 bp, Homo sapiens
caagtagctttttgt

SEQ ID NO: 2017946 - DNA, 15 bp, Homo sapiens
aagtagctttttgta

SEQ ID NO: 2017947 - DNA, 15 bp, Homo sapiens
agtagctttttgtaa

SEQ ID NO: 2017948 - DNA, 15 bp, Homo sapiens
gtagctttttgtaat

SEQ ID NO: 2017949 - DNA, 15 bp, Homo sapiens
tagctttttgtaatc

SEQ ID NO: 2017950 - DNA, 15 bp, Homo sapiens
agctttttgtaatca

SEQ ID NO: 2017951 - DNA, 15 bp, Homo sapiens
gctttttgtaatcag

SEQ ID NO: 2017952 - DNA, 15 bp, Homo sapiens
ctttttgtaatcagt

SEQ ID NO: 2017953 - DNA, 15 bp, Homo sapiens
tttttgtaatcagtc

SEQ ID NO: 2017954 - DNA, 15 bp, Homo sapiens
ttttgtaatcagtct

SEQ ID NO: 2017955 - DNA, 15 bp, Homo sapiens
tttgtaatcagtctt

SEQ ID NO: 2017956 - DNA, 15 bp, Homo sapiens
ttgtaatcagtcttc

SEQ ID NO: 2017957 - DNA, 15 bp, Homo sapiens
tgtaatcagtcttcc

SEQ ID NO: 2017958 - DNA, 15 bp, Homo sapiens
gtaatcagtcttcct

SEQ ID NO: 2017959 - DNA, 15 bp, Homo sapiens
taatcagtcttcctt

SEQ ID NO: 2017960 - DNA, 15 bp, Homo sapiens
aatcagtcttccttt

SEQ ID NO: 2017961 - DNA, 15 bp, Homo sapiens
atcagtcttcctttc

SEQ ID NO: 2017962 - DNA, 15 bp, Homo sapiens
tcagtcttcctttca

SEQ ID NO: 2017963 - DNA, 15 bp, Homo sapiens
cagtcttcctttcat

SEQ ID NO: 2017964 - DNA, 15 bp, Homo sapiens
agtcttcctttcatg

SEQ ID NO: 2017965 - DNA, 15 bp, Homo sapiens
gtcttcctttcatgt

SEQ ID NO: 2017966 - DNA, 15 bp, Homo sapiens
tcttcctttcatgtt

SEQ ID NO: 2017967 - DNA, 15 bp, Homo sapiens
cttcctttcatgtta

SEQ ID NO: 2017968 - DNA, 15 bp, Homo sapiens
ttcctttcatgttac

SEQ ID NO: 2017969 - DNA, 15 bp, Homo sapiens
tcctttcatgttact

SEQ ID NO: 2017970 - DNA, 15 bp, Homo sapiens
cctttcatgttactc

SEQ ID NO: 2017971 - DNA, 15 bp, Homo sapiens
ctttcatgttactct

SEQ ID NO: 2017972 - DNA, 15 bp, Homo sapiens
tttcatgttactctc

SEQ ID NO: 2017973 - DNA, 15 bp, Homo sapiens
ttcatgttactctca

SEQ ID NO: 2017974 - DNA, 15 bp, Homo sapiens
tcatgttactctcac

SEQ ID NO: 2017975 - DNA, 15 bp, Homo sapiens
catgttactctcact

SEQ ID NO: 2017976 - DNA, 15 bp, Homo sapiens
atgttactctcacta

SEQ ID NO: 2017977 - DNA, 15 bp, Homo sapiens
tgttactctcactag

SEQ ID NO: 2017978 - DNA, 15 bp, Homo sapiens
gttactctcactagc

SEQ ID NO: 2017979 - DNA, 15 bp, Homo sapiens
ttactctcactagct

SEQ ID NO: 2017980 - DNA, 15 bp, Homo sapiens
tactctcactagctc

SEQ ID NO: 2017981 - DNA, 15 bp, Homo sapiens
actctcactagctct

SEQ ID NO: 2017982 - DNA, 15 bp, Homo sapiens
ctctcactagctctt

SEQ ID NO: 2017983 - DNA, 15 bp, Homo sapiens
tctcactagctcttt

SEQ ID NO: 2017984 - DNA, 15 bp, Homo sapiens
ctcactagctctttt

SEQ ID NO: 2017985 - DNA, 15 bp, Homo sapiens
tcactagctcttttt

SEQ ID NO: 2017986 - DNA, 15 bp, Homo sapiens
cactagctctttttc

SEQ ID NO: 2017987 - DNA, 15 bp, Homo sapiens
actagctctttttct

SEQ ID NO: 2017988 - DNA, 15 bp, Homo sapiens
ctagctctttttctt

SEQ ID NO: 2017989 - DNA, 15 bp, Homo sapiens
tagctctttttcttc

SEQ ID NO: 2017990 - DNA, 15 bp, Homo sapiens
agctctttttcttct

SEQ ID NO: 2017991 - DNA, 15 bp, Homo sapiens
gctctttttcttctg

SEQ ID NO: 2017992 - DNA, 15 bp, Homo sapiens
ctctttttcttctgc

SEQ ID NO: 2017993 - DNA, 15 bp, Homo sapiens
tctttttcttctgcc

SEQ ID NO: 2017994 - DNA, 15 bp, Homo sapiens
ctttttcttctgcct

SEQ ID NO: 2017995 - DNA, 15 bp, Homo sapiens
tttttcttctgcctc

SEQ ID NO: 2017996 - DNA, 15 bp, Homo sapiens
ttttcttctgcctcc

SEQ ID NO: 2017997 - DNA, 15 bp, Homo sapiens
tttcttctgcctcct

SEQ ID NO: 2017998 - DNA, 15 bp, Homo sapiens
ttcttctgcctccta

SEQ ID NO: 2017999 - DNA, 15 bp, Homo sapiens
tcttctgcctcctaa

SEQ ID NO: 2018000 - DNA, 15 bp, Homo sapiens
cttctgcctcctaaa

SEQ ID NO: 2018001 - DNA, 15 bp, Homo sapiens
ttctgcctcctaaat

SEQ ID NO: 2018002 - DNA, 15 bp, Homo sapiens
tctgcctcctaaata

SEQ ID NO: 2018003 - DNA, 15 bp, Homo sapiens
ctgcctcctaaatat

SEQ ID NO: 2018004 - DNA, 15 bp, Homo sapiens
tgcctcctaaatatg

SEQ ID NO: 2018005 - DNA, 15 bp, Homo sapiens
gcctcctaaatatgg

SEQ ID NO: 2018006 - DNA, 15 bp, Homo sapiens
cctcctaaatatggt

SEQ ID NO: 2018007 - DNA, 15 bp, Homo sapiens
ctcctaaatatggtt

SEQ ID NO: 2018008 - DNA, 15 bp, Homo sapiens
tcctaaatatggtta

SEQ ID NO: 2018009 - DNA, 15 bp, Homo sapiens
cctaaatatggttaa

SEQ ID NO: 2018010 - DNA, 15 bp, Homo sapiens
ctaaatatggttaat

SEQ ID NO: 2018011 - DNA, 15 bp, Homo sapiens
taaatatggttaatt

SEQ ID NO: 2018012 - DNA, 15 bp, Homo sapiens
aaatatggttaattg

SEQ ID NO: 2018013 - DNA, 15 bp, Homo sapiens
aatatggttaattga

SEQ ID NO: 2018014 - DNA, 15 bp, Homo sapiens
atatggttaattgat

SEQ ID NO: 2018015 - DNA, 15 bp, Homo sapiens
tatggttaattgata

SEQ ID NO: 2018016 - DNA, 15 bp, Homo sapiens
atggttaattgatat

SEQ ID NO: 2018017 - DNA, 15 bp, Homo sapiens
tggttaattgatatt

SEQ ID NO: 2018018 - DNA, 15 bp, Homo sapiens
ggttaattgatattc

SEQ ID NO: 2018019 - DNA, 15 bp, Homo sapiens
gttaattgatattct

SEQ ID NO: 2018020 - DNA, 15 bp, Homo sapiens
ttaattgatattctg

SEQ ID NO: 2018021 - DNA, 15 bp, Homo sapiens
taattgatattctgt

SEQ ID NO: 2018022 - DNA, 15 bp, Homo sapiens
aattgatattctgtc

SEQ ID NO: 2018023 - DNA, 15 bp, Homo sapiens
attgatattctgtcc

SEQ ID NO: 2018024 - DNA, 15 bp, Homo sapiens
ttgatattctgtcct

SEQ ID NO: 2018025 - DNA, 15 bp, Homo sapiens
tgatattctgtcctc

SEQ ID NO: 2018026 - DNA, 15 bp, Homo sapiens
gatattctgtcctca

SEQ ID NO: 2018027 - DNA, 15 bp, Homo sapiens
atattctgtcctcac

SEQ ID NO: 2018028 - DNA, 15 bp, Homo sapiens
tattctgtcctcacc

SEQ ID NO: 2018029 - DNA, 15 bp, Homo sapiens
attctgtcctcaccc

SEQ ID NO: 2018030 - DNA, 15 bp, Homo sapiens
ttctgtcctcaccct

SEQ ID NO: 2018031 - DNA, 15 bp, Homo sapiens
tctgtcctcaccctt

SEQ ID NO: 2018032 - DNA, 15 bp, Homo sapiens
ctgtcctcaccctta

SEQ ID NO: 2018033 - DNA, 15 bp, Homo sapiens
tgtcctcacccttac

SEQ ID NO: 2018034 - DNA, 15 bp, Homo sapiens
gtcctcacccttacc

SEQ ID NO: 2018035 - DNA, 15 bp, Homo sapiens
tcctcacccttacct

SEQ ID NO: 2018036 - DNA, 15 bp, Homo sapiens
cctcacccttaccta

SEQ ID NO: 2018037 - DNA, 15 bp, Homo sapiens
ctcacccttacctac

SEQ ID NO: 2018038 - DNA, 15 bp, Homo sapiens
tcacccttacctact

SEQ ID NO: 2018039 - DNA, 15 bp, Homo sapiens
cacccttacctactt

SEQ ID NO: 2018040 - DNA, 15 bp, Homo sapiens
acccttacctacttt

SEQ ID NO: 2018041 - DNA, 15 bp, Homo sapiens
cccttacctactttt

SEQ ID NO: 2018042 - DNA, 15 bp, Homo sapiens
ccttacctacttttc

SEQ ID NO: 2018043 - DNA, 15 bp, Homo sapiens
cttacctacttttct

SEQ ID NO: 2018044 - DNA, 15 bp, Homo sapiens
ttacctacttttctt

SEQ ID NO: 2018045 - DNA, 15 bp, Homo sapiens
tacctacttttcttt

SEQ ID NO: 2018046 - DNA, 15 bp, Homo sapiens
acctacttttctttg

SEQ ID NO: 2018047 - DNA, 15 bp, Homo sapiens
cctacttttctttgt

SEQ ID NO: 2018048 - DNA, 15 bp, Homo sapiens
ctacttttctttgtt

SEQ ID NO: 2018049 - DNA, 15 bp, Homo sapiens
tacttttctttgttc

SEQ ID NO: 2018050 - DNA, 15 bp, Homo sapiens
acttttctttgttcc

SEQ ID NO: 2018051 - DNA, 15 bp, Homo sapiens
cttttctttgttcct

SEQ ID NO: 2018052 - DNA, 15 bp, Homo sapiens
ttttctttgttcctg

SEQ ID NO: 2018053 - DNA, 15 bp, Homo sapiens
tttctttgttcctga

SEQ ID NO: 2018054 - DNA, 15 bp, Homo sapiens
ttctttgttcctgat

SEQ ID NO: 2018055 - DNA, 15 bp, Homo sapiens
tctttgttcctgatt

SEQ ID NO: 2018056 - DNA, 15 bp, Homo sapiens
ctttgttcctgattc

SEQ ID NO: 2018057 - DNA, 15 bp, Homo sapiens
tttgttcctgattct

SEQ ID NO: 2018058 - DNA, 15 bp, Homo sapiens
ttgttcctgattctg

SEQ ID NO: 2018059 - DNA, 15 bp, Homo sapiens
tgttcctgattctgt

SEQ ID NO: 2018060 - DNA, 15 bp, Homo sapiens
gttcctgattctgta

SEQ ID NO: 2018061 - DNA, 15 bp, Homo sapiens
ttcctgattctgtaa

SEQ ID NO: 2018062 - DNA, 15 bp, Homo sapiens
tcctgattctgtaag

SEQ ID NO: 2018063 - DNA, 15 bp, Homo sapiens
cctgattctgtaaga

SEQ ID NO: 2018064 - DNA, 15 bp, Homo sapiens
ctgattctgtaagat

SEQ ID NO: 2018065 - DNA, 15 bp, Homo sapiens
tgattctgtaagatt

SEQ ID NO: 2018066 - DNA, 15 bp, Homo sapiens
gattctgtaagattt

SEQ ID NO: 2018067 - DNA, 15 bp, Homo sapiens
attctgtaagatttt

SEQ ID NO: 2018068 - DNA, 15 bp, Homo sapiens
ttctgtaagatttta

SEQ ID NO: 2018069 - DNA, 15 bp, Homo sapiens
tctgtaagattttag

SEQ ID NO: 2018070 - DNA, 15 bp, Homo sapiens
ctgtaagattttagt

SEQ ID NO: 2018071 - DNA, 15 bp, Homo sapiens
tgtaagattttagtt

SEQ ID NO: 2018072 - DNA, 15 bp, Homo sapiens
gtaagattttagttc

SEQ ID NO: 2018073 - DNA, 15 bp, Homo sapiens
taagattttagttct

SEQ ID NO: 2018074 - DNA, 15 bp, Homo sapiens
aagattttagttctc

SEQ ID NO: 2018075 - DNA, 15 bp, Homo sapiens
agattttagttctca

SEQ ID NO: 2018076 - DNA, 15 bp, Homo sapiens
gattttagttctcag

SEQ ID NO: 2018077 - DNA, 15 bp, Homo sapiens
attttagttctcagc

SEQ ID NO: 2018078 - DNA, 15 bp, Homo sapiens
ttttagttctcagct

SEQ ID NO: 2018079 - DNA, 15 bp, Homo sapiens
tttagttctcagctt

SEQ ID NO: 2018080 - DNA, 15 bp, Homo sapiens
ttagttctcagcttt

SEQ ID NO: 2018081 - DNA, 15 bp, Homo sapiens
tagttctcagcttta

SEQ ID NO: 2018082 - DNA, 15 bp, Homo sapiens
agttctcagctttat

SEQ ID NO: 2018083 - DNA, 15 bp, Homo sapiens
gttctcagctttatg

SEQ ID NO: 2018084 - DNA, 15 bp, Homo sapiens
ttctcagctttatgc

SEQ ID NO: 2018085 - DNA, 15 bp, Homo sapiens
tctcagctttatgcc

SEQ ID NO: 2018086 - DNA, 15 bp, Homo sapiens
ctcagctttatgcca

SEQ ID NO: 2018087 - DNA, 15 bp, Homo sapiens
tcagctttatgccac

SEQ ID NO: 2018088 - DNA, 15 bp, Homo sapiens
cagctttatgccaca

SEQ ID NO: 2018089 - DNA, 15 bp, Homo sapiens
agctttatgccacaa

SEQ ID NO: 2018090 - DNA, 15 bp, Homo sapiens
gctttatgccacaat

SEQ ID NO: 2018091 - DNA, 15 bp, Homo sapiens
ctttatgccacaatt

SEQ ID NO: 2018092 - DNA, 15 bp, Homo sapiens
tttatgccacaattc

SEQ ID NO: 2018093 - DNA, 15 bp, Homo sapiens
ttatgccacaattcc

SEQ ID NO: 2018094 - DNA, 15 bp, Homo sapiens
tatgccacaattcct

SEQ ID NO: 2018095 - DNA, 15 bp, Homo sapiens
atgccacaattccta

SEQ ID NO: 2018096 - DNA, 15 bp, Homo sapiens
tgccacaattcctaa

SEQ ID NO: 2018097 - DNA, 15 bp, Homo sapiens
gccacaattcctaaa

SEQ ID NO: 2018098 - DNA, 15 bp, Homo sapiens
ccacaattcctaaac

SEQ ID NO: 2018099 - DNA, 15 bp, Homo sapiens
cacaattcctaaacc

SEQ ID NO: 2018100 - DNA, 15 bp, Homo sapiens
acaattcctaaacct

SEQ ID NO: 2018101 - DNA, 15 bp, Homo sapiens
caattcctaaacctg

SEQ ID NO: 2018102 - DNA, 15 bp, Homo sapiens
aattcctaaacctgt

SEQ ID NO: 2018103 - DNA, 15 bp, Homo sapiens
attcctaaacctgta

SEQ ID NO: 2018104 - DNA, 15 bp, Homo sapiens
ttcctaaacctgtac

SEQ ID NO: 2018105 - DNA, 15 bp, Homo sapiens
tcctaaacctgtacc

SEQ ID NO: 2018106 - DNA, 15 bp, Homo sapiens
cctaaacctgtacct

SEQ ID NO: 2018107 - DNA, 15 bp, Homo sapiens
ctaaacctgtacctc

SEQ ID NO: 2018108 - DNA, 15 bp, Homo sapiens
taaacctgtacctcc

SEQ ID NO: 2018109 - DNA, 15 bp, Homo sapiens
aaacctgtacctcca

SEQ ID NO: 2018110 - DNA, 15 bp, Homo sapiens
aacctgtacctccag

SEQ ID NO: 2018111 - DNA, 15 bp, Homo sapiens
acctgtacctccagc

SEQ ID NO: 2018112 - DNA, 15 bp, Homo sapiens
cctgtacctccagcc

SEQ ID NO: 2018113 - DNA, 15 bp, Homo sapiens
ctgtacctccagcct

SEQ ID NO: 2018114 - DNA, 15 bp, Homo sapiens
tgtacctccagccta

SEQ ID NO: 2018115 - DNA, 15 bp, Homo sapiens
gtacctccagcctac

SEQ ID NO: 2018116 - DNA, 15 bp, Homo sapiens
tacctccagcctaca

SEQ ID NO: 2018117 - DNA, 15 bp, Homo sapiens
acctccagcctacat

SEQ ID NO: 2018118 - DNA, 15 bp, Homo sapiens
cctccagcctacatc

SEQ ID NO: 2018119 - DNA, 15 bp, Homo sapiens
ctccagcctacatct

SEQ ID NO: 2018120 - DNA, 15 bp, Homo sapiens
tccagcctacatctt

SEQ ID NO: 2018121 - DNA, 15 bp, Homo sapiens
ccagcctacatcttc

SEQ ID NO: 2018122 - DNA, 15 bp, Homo sapiens
cagcctacatcttct

SEQ ID NO: 2018123 - DNA, 15 bp, Homo sapiens
agcctacatcttctt

SEQ ID NO: 2018124 - DNA, 15 bp, Homo sapiens
gcctacatcttcttt

SEQ ID NO: 2018125 - DNA, 15 bp, Homo sapiens
cctacatcttctttg

SEQ ID NO: 2018126 - DNA, 15 bp, Homo sapiens
ctacatcttctttgt

SEQ ID NO: 2018127 - DNA, 15 bp, Homo sapiens
tacatcttctttgtc

SEQ ID NO: 2018128 - DNA, 15 bp, Homo sapiens
acatcttctttgtcc

SEQ ID NO: 2018129 - DNA, 15 bp, Homo sapiens
catcttctttgtcct

SEQ ID NO: 2018130 - DNA, 15 bp, Homo sapiens
atcttctttgtccta

SEQ ID NO: 2018131 - DNA, 15 bp, Homo sapiens
tcttctttgtcctaa

SEQ ID NO: 2018132 - DNA, 15 bp, Homo sapiens
cttctttgtcctaat

SEQ ID NO: 2018133 - DNA, 15 bp, Homo sapiens
ttctttgtcctaatt

SEQ ID NO: 2018134 - DNA, 15 bp, Homo sapiens
tctttgtcctaattc

SEQ ID NO: 2018135 - DNA, 15 bp, Homo sapiens
ctttgtcctaattct

SEQ ID NO: 2018136 - DNA, 15 bp, Homo sapiens
tttgtcctaattcta

SEQ ID NO: 2018137 - DNA, 15 bp, Homo sapiens
ttgtcctaattctat

SEQ ID NO: 2018138 - DNA, 15 bp, Homo sapiens
tgtcctaattctatt

SEQ ID NO: 2018139 - DNA, 15 bp, Homo sapiens
gtcctaattctattt

SEQ ID NO: 2018140 - DNA, 15 bp, Homo sapiens
tcctaattctatttg

SEQ ID NO: 2018141 - DNA, 15 bp, Homo sapiens
cctaattctatttgt

SEQ ID NO: 2018142 - DNA, 15 bp, Homo sapiens
ctaattctatttgtg

SEQ ID NO: 2018143 - DNA, 15 bp, Homo sapiens
taattctatttgtgt

SEQ ID NO: 2018144 - DNA, 15 bp, Homo sapiens
aattctatttgtgtg

SEQ ID NO: 2018145 - DNA, 15 bp, Homo sapiens
attctatttgtgtga

SEQ ID NO: 2018146 - DNA, 15 bp, Homo sapiens
ttctatttgtgtgac

SEQ ID NO: 2018147 - DNA, 15 bp, Homo sapiens
tctatttgtgtgact

SEQ ID NO: 2018148 - DNA, 15 bp, Homo sapiens
ctatttgtgtgactt

SEQ ID NO: 2018149 - DNA, 15 bp, Homo sapiens
tatttgtgtgacttc

SEQ ID NO: 2018150 - DNA, 15 bp, Homo sapiens
atttgtgtgacttct

SEQ ID NO: 2018151 - DNA, 15 bp, Homo sapiens
tttgtgtgacttctt

SEQ ID NO: 2018152 - DNA, 15 bp, Homo sapiens
ttgtgtgacttcttg

SEQ ID NO: 2018153 - DNA, 15 bp, Homo sapiens
tgtgtgacttcttgg

SEQ ID NO: 2018154 - DNA, 15 bp, Homo sapiens
gtgtgacttcttggt

SEQ ID NO: 2018155 - DNA, 15 bp, Homo sapiens
tgtgacttcttggtg

SEQ ID NO: 2018156 - DNA, 15 bp, Homo sapiens
gtgacttcttggtgg

SEQ ID NO: 2018157 - DNA, 15 bp, Homo sapiens
tgacttcttggtgga

SEQ ID NO: 2018158 - DNA, 15 bp, Homo sapiens
gacttcttggtggat

SEQ ID NO: 2018159 - DNA, 15 bp, Homo sapiens
acttcttggtggatt

SEQ ID NO: 2018160 - DNA, 15 bp, Homo sapiens
cttcttggtggattt

SEQ ID NO: 2018161 - DNA, 15 bp, Homo sapiens
ttcttggtggatttt

SEQ ID NO: 2018162 - DNA, 15 bp, Homo sapiens
tcttggtggattttt

SEQ ID NO: 2018163 - DNA, 15 bp, Homo sapiens
cttggtggatttttc

SEQ ID NO: 2018164 - DNA, 15 bp, Homo sapiens
ttggtggatttttcc

SEQ ID NO: 2018165 - DNA, 15 bp, Homo sapiens
tggtggatttttcca

SEQ ID NO: 2018166 - DNA, 15 bp, Homo sapiens
ggtggatttttccat

SEQ ID NO: 2018167 - DNA, 15 bp, Homo sapiens
gtggatttttccata

SEQ ID NO: 2018168 - DNA, 15 bp, Homo sapiens
tggatttttccatat

SEQ ID NO: 2018169 - DNA, 15 bp, Homo sapiens
ggatttttccatatt

SEQ ID NO: 2018170 - DNA, 15 bp, Homo sapiens
gatttttccatattt

SEQ ID NO: 2018171 - DNA, 15 bp, Homo sapiens
atttttccatatttt

SEQ ID NO: 2018172 - DNA, 15 bp, Homo sapiens
tttttccatatttta

SEQ ID NO: 2018173 - DNA, 15 bp, Homo sapiens
ttttccatattttat

SEQ ID NO: 2018174 - DNA, 15 bp, Homo sapiens
tttccatattttata

SEQ ID NO: 2018175 - DNA, 15 bp, Homo sapiens
ttccatattttatat

SEQ ID NO: 2018176 - DNA, 15 bp, Homo sapiens
tccatattttatata

SEQ ID NO: 2018177 - DNA, 15 bp, Homo sapiens
ccatattttatatat

SEQ ID NO: 2018178 - DNA, 15 bp, Homo sapiens
catattttatatata

SEQ ID NO: 2018179 - DNA, 15 bp, Homo sapiens
atattttatatatat

SEQ ID NO: 2018180 - DNA, 15 bp, Homo sapiens
tattttatatatata

SEQ ID NO: 2018181 - DNA, 15 bp, Homo sapiens
attttatatatatag

SEQ ID NO: 2018182 - DNA, 15 bp, Homo sapiens
ttttatatatataga

SEQ ID NO: 2018183 - DNA, 15 bp, Homo sapiens
tttatatatatagat

SEQ ID NO: 2018184 - DNA, 15 bp, Homo sapiens
ttatatatatagata

SEQ ID NO: 2018185 - DNA, 15 bp, Homo sapiens
tatatatatagatag

SEQ ID NO: 2018186 - DNA, 15 bp, Homo sapiens
atatatatagataga

SEQ ID NO: 2018187 - DNA, 15 bp, Homo sapiens
tatatatagatagat

SEQ ID NO: 2018188 - DNA, 15 bp, Homo sapiens
atatatagatagata

SEQ ID NO: 2018189 - DNA, 15 bp, Homo sapiens
tatatagatagatag

SEQ ID NO: 2018190 - DNA, 15 bp, Homo sapiens
atatagatagataga

SEQ ID NO: 2018191 - DNA, 15 bp, Homo sapiens
tatagatagatagac

SEQ ID NO: 2018192 - DNA, 15 bp, Homo sapiens
atagatagatagaca

SEQ ID NO: 2018193 - DNA, 15 bp, Homo sapiens
tagatagatagacat

SEQ ID NO: 2018194 - DNA, 15 bp, Homo sapiens
agatagatagacata

SEQ ID NO: 2018195 - DNA, 15 bp, Homo sapiens
gatagatagacatag

SEQ ID NO: 2018196 - DNA, 15 bp, Homo sapiens
atagatagacataga

SEQ ID NO: 2018197 - DNA, 15 bp, Homo sapiens
tagatagacatagat

SEQ ID NO: 2018198 - DNA, 15 bp, Homo sapiens
agatagacatagata

SEQ ID NO: 2018199 - DNA, 15 bp, Homo sapiens
gatagacatagatat

SEQ ID NO: 2018200 - DNA, 15 bp, Homo sapiens
atagacatagatata

SEQ ID NO: 2018201 - DNA, 15 bp, Homo sapiens
tagacatagatatag

SEQ ID NO: 2018202 - DNA, 15 bp, Homo sapiens
agacatagatataga

SEQ ID NO: 2018203 - DNA, 15 bp, Homo sapiens
gacatagatatagat

SEQ ID NO: 2018204 - DNA, 15 bp, Homo sapiens
acatagatatagata

SEQ ID NO: 2018205 - DNA, 15 bp, Homo sapiens
catagatatagatat

SEQ ID NO: 2018206 - DNA, 15 bp, Homo sapiens
atagatatagatata

SEQ ID NO: 2018207 - DNA, 15 bp, Homo sapiens
tagatatagatataa

SEQ ID NO: 2018208 - DNA, 15 bp, Homo sapiens
agatatagatataaa

SEQ ID NO: 2018209 - DNA, 15 bp, Homo sapiens
gatatagatataaat

SEQ ID NO: 2018210 - DNA, 15 bp, Homo sapiens
atatagatataaata

SEQ ID NO: 2018211 - DNA, 15 bp, Homo sapiens
tatagatataaatat

SEQ ID NO: 2018212 - DNA, 15 bp, Homo sapiens
atagatataaatatc

SEQ ID NO: 2018213 - DNA, 15 bp, Homo sapiens
tagatataaatatct

SEQ ID NO: 2018214 - DNA, 15 bp, Homo sapiens
agatataaatatctc

SEQ ID NO: 2018215 - DNA, 15 bp, Homo sapiens
gatataaatatctcc

SEQ ID NO: 2018216 - DNA, 15 bp, Homo sapiens
atataaatatctccc

SEQ ID NO: 2018217 - DNA, 15 bp, Homo sapiens
tataaatatctccca

SEQ ID NO: 2018218 - DNA, 15 bp, Homo sapiens
ataaatatctcccac

SEQ ID NO: 2018219 - DNA, 15 bp, Homo sapiens
taaatatctcccact

SEQ ID NO: 2018220 - DNA, 15 bp, Homo sapiens
aaatatctcccacta

SEQ ID NO: 2018221 - DNA, 15 bp, Homo sapiens
aatatctcccactat

SEQ ID NO: 2018222 - DNA, 15 bp, Homo sapiens
atatctcccactatc

SEQ ID NO: 2018223 - DNA, 15 bp, Homo sapiens
tatctcccactatca

SEQ ID NO: 2018224 - DNA, 15 bp, Homo sapiens
atctcccactatcag

SEQ ID NO: 2018225 - DNA, 15 bp, Homo sapiens
tctcccactatcagc

SEQ ID NO: 2018226 - DNA, 15 bp, Homo sapiens
ctcccactatcagca

SEQ ID NO: 2018227 - DNA, 15 bp, Homo sapiens
tcccactatcagcaa

SEQ ID NO: 2018228 - DNA, 15 bp, Homo sapiens
cccactatcagcaaa

SEQ ID NO: 2018229 - DNA, 15 bp, Homo sapiens
ccactatcagcaaat

SEQ ID NO: 2018230 - DNA, 15 bp, Homo sapiens
cactatcagcaaatt

SEQ ID NO: 2018231 - DNA, 15 bp, Homo sapiens
actatcagcaaattc

SEQ ID NO: 2018232 - DNA, 15 bp, Homo sapiens
ctatcagcaaattca

SEQ ID NO: 2018233 - DNA, 15 bp, Homo sapiens
tatcagcaaattcaa

SEQ ID NO: 2018234 - DNA, 15 bp, Homo sapiens
atcagcaaattcaac

SEQ ID NO: 2018235 - DNA, 15 bp, Homo sapiens
tcagcaaattcaaca

SEQ ID NO: 2018236 - DNA, 15 bp, Homo sapiens
cagcaaattcaacat

SEQ ID NO: 2018237 - DNA, 15 bp, Homo sapiens
agcaaattcaacata

SEQ ID NO: 2018238 - DNA, 15 bp, Homo sapiens
gcaaattcaacatat

SEQ ID NO: 2018239 - DNA, 15 bp, Homo sapiens
caaattcaacatatt

SEQ ID NO: 2018240 - DNA, 15 bp, Homo sapiens
aaattcaacatattt

SEQ ID NO: 2018241 - DNA, 15 bp, Homo sapiens
aattcaacatattta

SEQ ID NO: 2018242 - DNA, 15 bp, Homo sapiens
attcaacatatttaa

SEQ ID NO: 2018243 - DNA, 15 bp, Homo sapiens
ttcaacatatttaaa

SEQ ID NO: 2018244 - DNA, 15 bp, Homo sapiens
tcaacatatttaaaa

SEQ ID NO: 2018245 - DNA, 15 bp, Homo sapiens
caacatatttaaaat

SEQ ID NO: 2018246 - DNA, 15 bp, Homo sapiens
aacatatttaaaatg

SEQ ID NO: 2018247 - DNA, 15 bp, Homo sapiens
acatatttaaaatgg

SEQ ID NO: 2018248 - DNA, 15 bp, Homo sapiens
catatttaaaatgga

SEQ ID NO: 2018249 - DNA, 15 bp, Homo sapiens
atatttaaaatggag

SEQ ID NO: 2018250 - DNA, 15 bp, Homo sapiens
tatttaaaatggagt

SEQ ID NO: 2018251 - DNA, 15 bp, Homo sapiens
atttaaaatggagtt

SEQ ID NO: 2018252 - DNA, 15 bp, Homo sapiens
tttaaaatggagttc

SEQ ID NO: 2018253 - DNA, 15 bp, Homo sapiens
ttaaaatggagttca

SEQ ID NO: 2018254 - DNA, 15 bp, Homo sapiens
taaaatggagttcat

SEQ ID NO: 2018255 - DNA, 15 bp, Homo sapiens
aaaatggagttcatc

SEQ ID NO: 2018256 - DNA, 15 bp, Homo sapiens
aaatggagttcatct

SEQ ID NO: 2018257 - DNA, 15 bp, Homo sapiens
aatggagttcatctt

SEQ ID NO: 2018258 - DNA, 15 bp, Homo sapiens
atggagttcatcttt

SEQ ID NO: 2018259 - DNA, 15 bp, Homo sapiens
tggagttcatcttta

SEQ ID NO: 2018260 - DNA, 15 bp, Homo sapiens
ggagttcatctttac

SEQ ID NO: 2018261 - DNA, 15 bp, Homo sapiens
gagttcatctttacc

SEQ ID NO: 2018262 - DNA, 15 bp, Homo sapiens
agttcatctttaccc

SEQ ID NO: 2018263 - DNA, 15 bp, Homo sapiens
gttcatctttaccct

SEQ ID NO: 2018264 - DNA, 15 bp, Homo sapiens
ttcatctttaccctc

SEQ ID NO: 2018265 - DNA, 15 bp, Homo sapiens
tcatctttaccctca

SEQ ID NO: 2018266 - DNA, 15 bp, Homo sapiens
catctttaccctcac

SEQ ID NO: 2018267 - DNA, 15 bp, Homo sapiens
atctttaccctcaca

SEQ ID NO: 2018268 - DNA, 15 bp, Homo sapiens
tctttaccctcacaa

SEQ ID NO: 2018269 - DNA, 15 bp, Homo sapiens
ctttaccctcacaac

SEQ ID NO: 2018270 - DNA, 15 bp, Homo sapiens
tttaccctcacaact

SEQ ID NO: 2018271 - DNA, 15 bp, Homo sapiens
ttaccctcacaactg

SEQ ID NO: 2018272 - DNA, 15 bp, Homo sapiens
taccctcacaactga

SEQ ID NO: 2018273 - DNA, 15 bp, Homo sapiens
accctcacaactgac

SEQ ID NO: 2018274 - DNA, 15 bp, Homo sapiens
ccctcacaactgaca

SEQ ID NO: 2018275 - DNA, 15 bp, Homo sapiens
cctcacaactgacaa

SEQ ID NO: 2018276 - DNA, 15 bp, Homo sapiens
ctcacaactgacaac

SEQ ID NO: 2018277 - DNA, 15 bp, Homo sapiens
tcacaactgacaact

SEQ ID NO: 2018278 - DNA, 15 bp, Homo sapiens
cacaactgacaactg

SEQ ID NO: 2018279 - DNA, 15 bp, Homo sapiens
acaactgacaactga

SEQ ID NO: 2018280 - DNA, 15 bp, Homo sapiens
caactgacaactgac

SEQ ID NO: 2018281 - DNA, 15 bp, Homo sapiens
aactgacaactgact

SEQ ID NO: 2018282 - DNA, 15 bp, Homo sapiens
actgacaactgactc

SEQ ID NO: 2018283 - DNA, 15 bp, Homo sapiens
ctgacaactgactct

SEQ ID NO: 2018284 - DNA, 15 bp, Homo sapiens
tgacaactgactctt

SEQ ID NO: 2018285 - DNA, 15 bp, Homo sapiens
gacaactgactcttc

SEQ ID NO: 2018286 - DNA, 15 bp, Homo sapiens
acaactgactcttct

SEQ ID NO: 2018287 - DNA, 15 bp, Homo sapiens
caactgactcttctc

SEQ ID NO: 2018288 - DNA, 15 bp, Homo sapiens
aactgactcttctcc

SEQ ID NO: 2018289 - DNA, 15 bp, Homo sapiens
actgactcttctccc

SEQ ID NO: 2018290 - DNA, 15 bp, Homo sapiens
ctgactcttctccca

SEQ ID NO: 2018291 - DNA, 15 bp, Homo sapiens
tgactcttctcccaa

SEQ ID NO: 2018292 - DNA, 15 bp, Homo sapiens
gactcttctcccaac

SEQ ID NO: 2018293 - DNA, 15 bp, Homo sapiens
actcttctcccaact

SEQ ID NO: 2018294 - DNA, 15 bp, Homo sapiens
ctcttctcccaactt

SEQ ID NO: 2018295 - DNA, 15 bp, Homo sapiens
tcttctcccaacttc

SEQ ID NO: 2018296 - DNA, 15 bp, Homo sapiens
cttctcccaacttct

SEQ ID NO: 2018297 - DNA, 15 bp, Homo sapiens
ttctcccaacttctc

SEQ ID NO: 2018298 - DNA, 15 bp, Homo sapiens
tctcccaacttctct

SEQ ID NO: 2018299 - DNA, 15 bp, Homo sapiens
ctcccaacttctctg

SEQ ID NO: 2018300 - DNA, 15 bp, Homo sapiens
tcccaacttctctgt

SEQ ID NO: 2018301 - DNA, 15 bp, Homo sapiens
cccaacttctctgta

SEQ ID NO: 2018302 - DNA, 15 bp, Homo sapiens
ccaacttctctgtat

SEQ ID NO: 2018303 - DNA, 15 bp, Homo sapiens
caacttctctgtatc

SEQ ID NO: 2018304 - DNA, 15 bp, Homo sapiens
aacttctctgtatct

SEQ ID NO: 2018305 - DNA, 15 bp, Homo sapiens
acttctctgtatctg

SEQ ID NO: 2018306 - DNA, 15 bp, Homo sapiens
cttctctgtatctgt

SEQ ID NO: 2018307 - DNA, 15 bp, Homo sapiens
ttctctgtatctgtt

SEQ ID NO: 2018308 - DNA, 15 bp, Homo sapiens
tctctgtatctgtta

SEQ ID NO: 2018309 - DNA, 15 bp, Homo sapiens
ctctgtatctgttaa

SEQ ID NO: 2018310 - DNA, 15 bp, Homo sapiens
tctgtatctgttaat

SEQ ID NO: 2018311 - DNA, 15 bp, Homo sapiens
ctgtatctgttaatg

SEQ ID NO: 2018312 - DNA, 15 bp, Homo sapiens
tgtatctgttaatgg

SEQ ID NO: 2018313 - DNA, 15 bp, Homo sapiens
gtatctgttaatggt

SEQ ID NO: 2018314 - DNA, 15 bp, Homo sapiens
tatctgttaatggta

SEQ ID NO: 2018315 - DNA, 15 bp, Homo sapiens
atctgttaatggtac

SEQ ID NO: 2018316 - DNA, 15 bp, Homo sapiens
tctgttaatggtacc

SEQ ID NO: 2018317 - DNA, 15 bp, Homo sapiens
ctgttaatggtacca

SEQ ID NO: 2018318 - DNA, 15 bp, Homo sapiens
tgttaatggtaccac

SEQ ID NO: 2018319 - DNA, 15 bp, Homo sapiens
gttaatggtaccact

SEQ ID NO: 2018320 - DNA, 15 bp, Homo sapiens
ttaatggtaccacta

SEQ ID NO: 2018321 - DNA, 15 bp, Homo sapiens
taatggtaccactaa

SEQ ID NO: 2018322 - DNA, 15 bp, Homo sapiens
aatggtaccactaag

SEQ ID NO: 2018323 - DNA, 15 bp, Homo sapiens
atggtaccactaagt

SEQ ID NO: 2018324 - DNA, 15 bp, Homo sapiens
tggtaccactaagtt

SEQ ID NO: 2018325 - DNA, 15 bp, Homo sapiens
ggtaccactaagttt

SEQ ID NO: 2018326 - DNA, 15 bp, Homo sapiens
gtaccactaagtttc

SEQ ID NO: 2018327 - DNA, 15 bp, Homo sapiens
taccactaagtttct

SEQ ID NO: 2018328 - DNA, 15 bp, Homo sapiens
accactaagtttctt

SEQ ID NO: 2018329 - DNA, 15 bp, Homo sapiens
ccactaagtttctta

SEQ ID NO: 2018330 - DNA, 15 bp, Homo sapiens
cactaagtttcttag

SEQ ID NO: 2018331 - DNA, 15 bp, Homo sapiens
actaagtttcttagg

SEQ ID NO: 2018332 - DNA, 15 bp, Homo sapiens
ctaagtttcttaggc

SEQ ID NO: 2018333 - DNA, 15 bp, Homo sapiens
taagtttcttaggca

SEQ ID NO: 2018334 - DNA, 15 bp, Homo sapiens
aagtttcttaggcac

SEQ ID NO: 2018335 - DNA, 15 bp, Homo sapiens
agtttcttaggcaca

SEQ ID NO: 2018336 - DNA, 15 bp, Homo sapiens
gtttcttaggcacag

SEQ ID NO: 2018337 - DNA, 15 bp, Homo sapiens
tttcttaggcacaga

SEQ ID NO: 2018338 - DNA, 15 bp, Homo sapiens
ttcttaggcacagag

SEQ ID NO: 2018339 - DNA, 15 bp, Homo sapiens
tcttaggcacagagt

SEQ ID NO: 2018340 - DNA, 15 bp, Homo sapiens
cttaggcacagagtc

SEQ ID NO: 2018341 - DNA, 15 bp, Homo sapiens
ttaggcacagagtct

SEQ ID NO: 2018342 - DNA, 15 bp, Homo sapiens
taggcacagagtcta

SEQ ID NO: 2018343 - DNA, 15 bp, Homo sapiens
aggcacagagtctat

SEQ ID NO: 2018344 - DNA, 15 bp, Homo sapiens
ggcacagagtctatt

SEQ ID NO: 2018345 - DNA, 15 bp, Homo sapiens
gcacagagtctatta

SEQ ID NO: 2018346 - DNA, 15 bp, Homo sapiens
cacagagtctattag

SEQ ID NO: 2018347 - DNA, 15 bp, Homo sapiens
acagagtctattagt

SEQ ID NO: 2018348 - DNA, 15 bp, Homo sapiens
cagagtctattagta

SEQ ID NO: 2018349 - DNA, 15 bp, Homo sapiens
agagtctattagtaa

SEQ ID NO: 2018350 - DNA, 15 bp, Homo sapiens
gagtctattagtaat

SEQ ID NO: 2018351 - DNA, 15 bp, Homo sapiens
agtctattagtaatc

SEQ ID NO: 2018352 - DNA, 15 bp, Homo sapiens
gtctattagtaatct

SEQ ID NO: 2018353 - DNA, 15 bp, Homo sapiens
tctattagtaatctt

SEQ ID NO: 2018354 - DNA, 15 bp, Homo sapiens
ctattagtaatcttt

SEQ ID NO: 2018355 - DNA, 15 bp, Homo sapiens
tattagtaatctttg

SEQ ID NO: 2018356 - DNA, 15 bp, Homo sapiens
attagtaatctttga

SEQ ID NO: 2018357 - DNA, 15 bp, Homo sapiens
ttagtaatctttgaa

SEQ ID NO: 2018358 - DNA, 15 bp, Homo sapiens
tagtaatctttgaag

SEQ ID NO: 2018359 - DNA, 15 bp, Homo sapiens
agtaatctttgaagc

SEQ ID NO: 2018360 - DNA, 15 bp, Homo sapiens
gtaatctttgaagca

SEQ ID NO: 2018361 - DNA, 15 bp, Homo sapiens
taatctttgaagcat

SEQ ID NO: 2018362 - DNA, 15 bp, Homo sapiens
aatctttgaagcatc

SEQ ID NO: 2018363 - DNA, 15 bp, Homo sapiens
atctttgaagcatcc

SEQ ID NO: 2018364 - DNA, 15 bp, Homo sapiens
tctttgaagcatcct

SEQ ID NO: 2018365 - DNA, 15 bp, Homo sapiens
ctttgaagcatcctt

SEQ ID NO: 2018366 - DNA, 15 bp, Homo sapiens
tttgaagcatcctta

SEQ ID NO: 2018367 - DNA, 15 bp, Homo sapiens
ttgaagcatccttag

SEQ ID NO: 2018368 - DNA, 15 bp, Homo sapiens
tgaagcatccttagt

SEQ ID NO: 2018369 - DNA, 15 bp, Homo sapiens
gaagcatccttagtg

SEQ ID NO: 2018370 - DNA, 15 bp, Homo sapiens
aagcatccttagtgt

SEQ ID NO: 2018371 - DNA, 15 bp, Homo sapiens
agcatccttagtgtc

SEQ ID NO: 2018372 - DNA, 15 bp, Homo sapiens
gcatccttagtgtct

SEQ ID NO: 2018373 - DNA, 15 bp, Homo sapiens
catccttagtgtctc

SEQ ID NO: 2018374 - DNA, 15 bp, Homo sapiens
atccttagtgtctct

SEQ ID NO: 2018375 - DNA, 15 bp, Homo sapiens
tccttagtgtctctg

SEQ ID NO: 2018376 - DNA, 15 bp, Homo sapiens
ccttagtgtctctgt

SEQ ID NO: 2018377 - DNA, 15 bp, Homo sapiens
cttagtgtctctgta

SEQ ID NO: 2018378 - DNA, 15 bp, Homo sapiens
ttagtgtctctgtag

SEQ ID NO: 2018379 - DNA, 15 bp, Homo sapiens
tagtgtctctgtagc

SEQ ID NO: 2018380 - DNA, 15 bp, Homo sapiens
agtgtctctgtagcg

SEQ ID NO: 2018381 - DNA, 15 bp, Homo sapiens
gtgtctctgtagcgt

SEQ ID NO: 2018382 - DNA, 15 bp, Homo sapiens
tgtctctgtagcgtg

SEQ ID NO: 2018383 - DNA, 15 bp, Homo sapiens
gtctctgtagcgtgg

SEQ ID NO: 2018384 - DNA, 15 bp, Homo sapiens
tctctgtagcgtggt

SEQ ID NO: 2018385 - DNA, 15 bp, Homo sapiens
ctctgtagcgtggta

SEQ ID NO: 2018386 - DNA, 15 bp, Homo sapiens
tctgtagcgtggtag

SEQ ID NO: 2018387 - DNA, 15 bp, Homo sapiens
ctgtagcgtggtagc

SEQ ID NO: 2018388 - DNA, 15 bp, Homo sapiens
tgtagcgtggtagcc

SEQ ID NO: 2018389 - DNA, 15 bp, Homo sapiens
gtagcgtggtagcct

SEQ ID NO: 2018390 - DNA, 15 bp, Homo sapiens
tagcgtggtagcctt

SEQ ID NO: 2018391 - DNA, 15 bp, Homo sapiens
agcgtggtagcctta

SEQ ID NO: 2018392 - DNA, 15 bp, Homo sapiens
gcgtggtagccttat

SEQ ID NO: 2018393 - DNA, 15 bp, Homo sapiens
cgtggtagccttatg

SEQ ID NO: 2018394 - DNA, 15 bp, Homo sapiens
gtggtagccttatgt

SEQ ID NO: 2018395 - DNA, 15 bp, Homo sapiens
tggtagccttatgtt

SEQ ID NO: 2018396 - DNA, 15 bp, Homo sapiens
ggtagccttatgtta

SEQ ID NO: 2018397 - DNA, 15 bp, Homo sapiens
gtagccttatgttaa

SEQ ID NO: 2018398 - DNA, 15 bp, Homo sapiens
tagccttatgttaat

SEQ ID NO: 2018399 - DNA, 15 bp, Homo sapiens
agccttatgttaata

SEQ ID NO: 2018400 - DNA, 15 bp, Homo sapiens
gccttatgttaatat

SEQ ID NO: 2018401 - DNA, 15 bp, Homo sapiens
ccttatgttaatatt

SEQ ID NO: 2018402 - DNA, 15 bp, Homo sapiens
cttatgttaatattg

SEQ ID NO: 2018403 - DNA, 15 bp, Homo sapiens
ttatgttaatattgc

SEQ ID NO: 2018404 - DNA, 15 bp, Homo sapiens
tatgttaatattgca

SEQ ID NO: 2018405 - DNA, 15 bp, Homo sapiens
atgttaatattgcat

SEQ ID NO: 2018406 - DNA, 15 bp, Homo sapiens
tgttaatattgcata

SEQ ID NO: 2018407 - DNA, 15 bp, Homo sapiens
gttaatattgcatat

SEQ ID NO: 2018408 - DNA, 15 bp, Homo sapiens
ttaatattgcatatt

SEQ ID NO: 2018409 - DNA, 15 bp, Homo sapiens
taatattgcatattt

SEQ ID NO: 2018410 - DNA, 15 bp, Homo sapiens
aatattgcatatttt

SEQ ID NO: 2018411 - DNA, 15 bp, Homo sapiens
atattgcatattttt

SEQ ID NO: 2018412 - DNA, 15 bp, Homo sapiens
tattgcatattttta

SEQ ID NO: 2018413 - DNA, 15 bp, Homo sapiens
attgcatatttttaa

SEQ ID NO: 2018414 - DNA, 15 bp, Homo sapiens
ttgcatatttttaaa

SEQ ID NO: 2018415 - DNA, 15 bp, Homo sapiens
tgcatatttttaaag

SEQ ID NO: 2018416 - DNA, 15 bp, Homo sapiens
gcatatttttaaaga

SEQ ID NO: 2018417 - DNA, 15 bp, Homo sapiens
catatttttaaagaa

SEQ ID NO: 2018418 - DNA, 15 bp, Homo sapiens
atatttttaaagaat

SEQ ID NO: 2018419 - DNA, 15 bp, Homo sapiens
tatttttaaagaatt

SEQ ID NO: 2018420 - DNA, 15 bp, Homo sapiens
atttttaaagaattt

SEQ ID NO: 2018421 - DNA, 15 bp, Homo sapiens
tttttaaagaatttc

SEQ ID NO: 2018422 - DNA, 15 bp, Homo sapiens
ttttaaagaatttca

SEQ ID NO: 2018423 - DNA, 15 bp, Homo sapiens
tttaaagaatttcat

SEQ ID NO: 2018424 - DNA, 15 bp, Homo sapiens
ttaaagaatttcatt

SEQ ID NO: 2018425 - DNA, 15 bp, Homo sapiens
taaagaatttcattc

SEQ ID NO: 2018426 - DNA, 15 bp, Homo sapiens
aaagaatttcattca

SEQ ID NO: 2018427 - DNA, 15 bp, Homo sapiens
aagaatttcattcaa

SEQ ID NO: 2018428 - DNA, 15 bp, Homo sapiens
agaatttcattcaac

SEQ ID NO: 2018429 - DNA, 15 bp, Homo sapiens
gaatttcattcaact

SEQ ID NO: 2018430 - DNA, 15 bp, Homo sapiens
aatttcattcaactc

SEQ ID NO: 2018431 - DNA, 15 bp, Homo sapiens
atttcattcaactca

SEQ ID NO: 2018432 - DNA, 15 bp, Homo sapiens
tttcattcaactcag

SEQ ID NO: 2018433 - DNA, 15 bp, Homo sapiens
ttcattcaactcaga

SEQ ID NO: 2018434 - DNA, 15 bp, Homo sapiens
tcattcaactcagag

SEQ ID NO: 2018435 - DNA, 15 bp, Homo sapiens
cattcaactcagagt

SEQ ID NO: 2018436 - DNA, 15 bp, Homo sapiens
attcaactcagagtc

SEQ ID NO: 2018437 - DNA, 15 bp, Homo sapiens
ttcaactcagagtct

SEQ ID NO: 2018438 - DNA, 15 bp, Homo sapiens
tcaactcagagtctt

SEQ ID NO: 2018439 - DNA, 15 bp, Homo sapiens
caactcagagtctta

SEQ ID NO: 2018440 - DNA, 15 bp, Homo sapiens
aactcagagtcttag

SEQ ID NO: 2018441 - DNA, 15 bp, Homo sapiens
actcagagtcttagg

SEQ ID NO: 2018442 - DNA, 15 bp, Homo sapiens
ctcagagtcttaggc

SEQ ID NO: 2018443 - DNA, 15 bp, Homo sapiens
tcagagtcttaggct

SEQ ID NO: 2018444 - DNA, 15 bp, Homo sapiens
cagagtcttaggctt

SEQ ID NO: 2018445 - DNA, 15 bp, Homo sapiens
agagtcttaggctta

SEQ ID NO: 2018446 - DNA, 15 bp, Homo sapiens
gagtcttaggcttaa

SEQ ID NO: 2018447 - DNA, 15 bp, Homo sapiens
agtcttaggcttaaa

SEQ ID NO: 2018448 - DNA, 15 bp, Homo sapiens
gtcttaggcttaaaa

SEQ ID NO: 2018449 - DNA, 15 bp, Homo sapiens
tcttaggcttaaaat

SEQ ID NO: 2018450 - DNA, 15 bp, Homo sapiens
cttaggcttaaaatc

SEQ ID NO: 2018451 - DNA, 15 bp, Homo sapiens
ttaggcttaaaatcc

SEQ ID NO: 2018452 - DNA, 15 bp, Homo sapiens
taggcttaaaatcct

SEQ ID NO: 2018453 - DNA, 15 bp, Homo sapiens
aggcttaaaatccta

SEQ ID NO: 2018454 - DNA, 15 bp, Homo sapiens
ggcttaaaatcctag

SEQ ID NO: 2018455 - DNA, 15 bp, Homo sapiens
gcttaaaatcctaga

SEQ ID NO: 2018456 - DNA, 15 bp, Homo sapiens
cttaaaatcctagag

SEQ ID NO: 2018457 - DNA, 15 bp, Homo sapiens
ttaaaatcctagagt

SEQ ID NO: 2018458 - DNA, 15 bp, Homo sapiens
taaaatcctagagtg

SEQ ID NO: 2018459 - DNA, 15 bp, Homo sapiens
aaaatcctagagtga

SEQ ID NO: 2018460 - DNA, 15 bp, Homo sapiens
aaatcctagagtgat

SEQ ID NO: 2018461 - DNA, 15 bp, Homo sapiens
aatcctagagtgatc

SEQ ID NO: 2018462 - DNA, 15 bp, Homo sapiens
atcctagagtgatct

SEQ ID NO: 2018463 - DNA, 15 bp, Homo sapiens
tcctagagtgatctc

SEQ ID NO: 2018464 - DNA, 15 bp, Homo sapiens
cctagagtgatctct

SEQ ID NO: 2018465 - DNA, 15 bp, Homo sapiens
ctagagtgatctctg

SEQ ID NO: 2018466 - DNA, 15 bp, Homo sapiens
tagagtgatctctga

SEQ ID NO: 2018467 - DNA, 15 bp, Homo sapiens
agagtgatctctgaa

SEQ ID NO: 2018468 - DNA, 15 bp, Homo sapiens
gagtgatctctgaat

SEQ ID NO: 2018469 - DNA, 15 bp, Homo sapiens
agtgatctctgaatc

SEQ ID NO: 2018470 - DNA, 15 bp, Homo sapiens
gtgatctctgaatct

SEQ ID NO: 2018471 - DNA, 15 bp, Homo sapiens
tgatctctgaatctg

SEQ ID NO: 2018472 - DNA, 15 bp, Homo sapiens
gatctctgaatctgg

SEQ ID NO: 2018473 - DNA, 15 bp, Homo sapiens
atctctgaatctggt

SEQ ID NO: 2018474 - DNA, 15 bp, Homo sapiens
tctctgaatctggtg

SEQ ID NO: 2018475 - DNA, 15 bp, Homo sapiens
ctctgaatctggtgg

SEQ ID NO: 2018476 - DNA, 15 bp, Homo sapiens
tctgaatctggtgga

SEQ ID NO: 2018477 - DNA, 15 bp, Homo sapiens
ctgaatctggtggag

SEQ ID NO: 2018478 - DNA, 15 bp, Homo sapiens
tgaatctggtggagt

SEQ ID NO: 2018479 - DNA, 15 bp, Homo sapiens
gaatctggtggagta

SEQ ID NO: 2018480 - DNA, 15 bp, Homo sapiens
aatctggtggagtaa

SEQ ID NO: 2018481 - DNA, 15 bp, Homo sapiens
atctggtggagtaaa

SEQ ID NO: 2018482 - DNA, 15 bp, Homo sapiens
tctggtggagtaaat

SEQ ID NO: 2018483 - DNA, 15 bp, Homo sapiens
ctggtggagtaaatt

SEQ ID NO: 2018484 - DNA, 15 bp, Homo sapiens
tggtggagtaaattc

SEQ ID NO: 2018485 - DNA, 15 bp, Homo sapiens
ggtggagtaaattca

SEQ ID NO: 2018486 - DNA, 15 bp, Homo sapiens
gtggagtaaattcaa

SEQ ID NO: 2018487 - DNA, 15 bp, Homo sapiens
tggagtaaattcaat

SEQ ID NO: 2018488 - DNA, 15 bp, Homo sapiens
ggagtaaattcaatc

SEQ ID NO: 2018489 - DNA, 15 bp, Homo sapiens
gagtaaattcaatcc

SEQ ID NO: 2018490 - DNA, 15 bp, Homo sapiens
agtaaattcaatcca

SEQ ID NO: 2018491 - DNA, 15 bp, Homo sapiens
gtaaattcaatccag

SEQ ID NO: 2018492 - DNA, 15 bp, Homo sapiens
taaattcaatccagt

SEQ ID NO: 2018493 - DNA, 15 bp, Homo sapiens
aaattcaatccagtt

SEQ ID NO: 2018494 - DNA, 15 bp, Homo sapiens
aattcaatccagttg

SEQ ID NO: 2018495 - DNA, 15 bp, Homo sapiens
attcaatccagttgg

SEQ ID NO: 2018496 - DNA, 15 bp, Homo sapiens
ttcaatccagttggt

SEQ ID NO: 2018497 - DNA, 15 bp, Homo sapiens
tcaatccagttggtc

SEQ ID NO: 2018498 - DNA, 15 bp, Homo sapiens
caatccagttggtca

SEQ ID NO: 2018499 - DNA, 15 bp, Homo sapiens
aatccagttggtcaa

SEQ ID NO: 2018500 - DNA, 15 bp, Homo sapiens
atccagttggtcaag

SEQ ID NO: 2018501 - DNA, 15 bp, Homo sapiens
tccagttggtcaagt

SEQ ID NO: 2018502 - DNA, 15 bp, Homo sapiens
ccagttggtcaagta

SEQ ID NO: 2018503 - DNA, 15 bp, Homo sapiens
cagttggtcaagtag

SEQ ID NO: 2018504 - DNA, 15 bp, Homo sapiens
agttggtcaagtagt

SEQ ID NO: 2018505 - DNA, 15 bp, Homo sapiens
gttggtcaagtagtc

SEQ ID NO: 2018506 - DNA, 15 bp, Homo sapiens
ttggtcaagtagtcc

SEQ ID NO: 2018507 - DNA, 15 bp, Homo sapiens
tggtcaagtagtcct

SEQ ID NO: 2018508 - DNA, 15 bp, Homo sapiens
ggtcaagtagtcctg

SEQ ID NO: 2018509 - DNA, 15 bp, Homo sapiens
gtcaagtagtcctgc

SEQ ID NO: 2018510 - DNA, 15 bp, Homo sapiens
tcaagtagtcctgct

SEQ ID NO: 2018511 - DNA, 15 bp, Homo sapiens
caagtagtcctgctg

SEQ ID NO: 2018512 - DNA, 15 bp, Homo sapiens
aagtagtcctgctgc

SEQ ID NO: 2018513 - DNA, 15 bp, Homo sapiens
agtagtcctgctgct

SEQ ID NO: 2018514 - DNA, 15 bp, Homo sapiens
gtagtcctgctgctg

SEQ ID NO: 2018515 - DNA, 15 bp, Homo sapiens
tagtcctgctgctgc

SEQ ID NO: 2018516 - DNA, 15 bp, Homo sapiens
agtcctgctgctgct

SEQ ID NO: 2018517 - DNA, 15 bp, Homo sapiens
gtcctgctgctgctt

SEQ ID NO: 2018518 - DNA, 15 bp, Homo sapiens
tcctgctgctgcttt

SEQ ID NO: 2018519 - DNA, 15 bp, Homo sapiens
cctgctgctgctttc

SEQ ID NO: 2018520 - DNA, 15 bp, Homo sapiens
ctgctgctgctttca

SEQ ID NO: 2018521 - DNA, 15 bp, Homo sapiens
tgctgctgctttcat

SEQ ID NO: 2018522 - DNA, 15 bp, Homo sapiens
gctgctgctttcatt

SEQ ID NO: 2018523 - DNA, 15 bp, Homo sapiens
ctgctgctttcattc

SEQ ID NO: 2018524 - DNA, 15 bp, Homo sapiens
tgctgctttcattca

SEQ ID NO: 2018525 - DNA, 15 bp, Homo sapiens
gctgctttcattcat

SEQ ID NO: 2018526 - DNA, 15 bp, Homo sapiens
ctgctttcattcatc

SEQ ID NO: 2018527 - DNA, 15 bp, Homo sapiens
tgctttcattcatct

SEQ ID NO: 2018528 - DNA, 15 bp, Homo sapiens
gctttcattcatcta

SEQ ID NO: 2018529 - DNA, 15 bp, Homo sapiens
ctttcattcatctat

SEQ ID NO: 2018530 - DNA, 15 bp, Homo sapiens
tttcattcatctatt

SEQ ID NO: 2018531 - DNA, 15 bp, Homo sapiens
ttcattcatctattg

SEQ ID NO: 2018532 - DNA, 15 bp, Homo sapiens
tcattcatctattgg

SEQ ID NO: 2018533 - DNA, 15 bp, Homo sapiens
cattcatctattggt

SEQ ID NO: 2018534 - DNA, 15 bp, Homo sapiens
attcatctattggta

SEQ ID NO: 2018535 - DNA, 15 bp, Homo sapiens
ttcatctattggtaa

SEQ ID NO: 2018536 - DNA, 15 bp, Homo sapiens
tcatctattggtaaa

SEQ ID NO: 2018537 - DNA, 15 bp, Homo sapiens
catctattggtaaat

SEQ ID NO: 2018538 - DNA, 15 bp, Homo sapiens
atctattggtaaatg

SEQ ID NO: 2018539 - DNA, 15 bp, Homo sapiens
tctattggtaaatgc

SEQ ID NO: 2018540 - DNA, 15 bp, Homo sapiens
ctattggtaaatgcc

SEQ ID NO: 2018541 - DNA, 15 bp, Homo sapiens
tattggtaaatgcca

SEQ ID NO: 2018542 - DNA, 15 bp, Homo sapiens
attggtaaatgccac

SEQ ID NO: 2018543 - DNA, 15 bp, Homo sapiens
ttggtaaatgccaca

SEQ ID NO: 2018544 - DNA, 15 bp, Homo sapiens
tggtaaatgccacat

SEQ ID NO: 2018545 - DNA, 15 bp, Homo sapiens
ggtaaatgccacatt

SEQ ID NO: 2018546 - DNA, 15 bp, Homo sapiens
gtaaatgccacattt

SEQ ID NO: 2018547 - DNA, 15 bp, Homo sapiens
taaatgccacatttg

SEQ ID NO: 2018548 - DNA, 15 bp, Homo sapiens
aaatgccacatttgt

SEQ ID NO: 2018549 - DNA, 15 bp, Homo sapiens
aatgccacatttgtg

SEQ ID NO: 2018550 - DNA, 15 bp, Homo sapiens
atgccacatttgtgt

SEQ ID NO: 2018551 - DNA, 15 bp, Homo sapiens
tgccacatttgtgtg

SEQ ID NO: 2018552 - DNA, 15 bp, Homo sapiens
gccacatttgtgtgg

SEQ ID NO: 2018553 - DNA, 15 bp, Homo sapiens
ccacatttgtgtgga

SEQ ID NO: 2018554 - DNA, 15 bp, Homo sapiens
cacatttgtgtggag

SEQ ID NO: 2018555 - DNA, 15 bp, Homo sapiens
acatttgtgtggagc

SEQ ID NO: 2018556 - DNA, 15 bp, Homo sapiens
catttgtgtggagct

SEQ ID NO: 2018557 - DNA, 15 bp, Homo sapiens
atttgtgtggagctc

SEQ ID NO: 2018558 - DNA, 15 bp, Homo sapiens
tttgtgtggagctct

SEQ ID NO: 2018559 - DNA, 15 bp, Homo sapiens
ttgtgtggagctctg

SEQ ID NO: 2018560 - DNA, 15 bp, Homo sapiens
tgtgtggagctctgt

SEQ ID NO: 2018561 - DNA, 15 bp, Homo sapiens
gtgtggagctctgtt

SEQ ID NO: 2018562 - DNA, 15 bp, Homo sapiens
tgtggagctctgttc

SEQ ID NO: 2018563 - DNA, 15 bp, Homo sapiens
gtggagctctgttct

SEQ ID NO: 2018564 - DNA, 15 bp, Homo sapiens
tggagctctgttcta

SEQ ID NO: 2018565 - DNA, 15 bp, Homo sapiens
ggagctctgttctag

SEQ ID NO: 2018566 - DNA, 15 bp, Homo sapiens
gagctctgttctagg

SEQ ID NO: 2018567 - DNA, 15 bp, Homo sapiens
agctctgttctaggt

SEQ ID NO: 2018568 - DNA, 15 bp, Homo sapiens
gctctgttctaggtt

SEQ ID NO: 2018569 - DNA, 15 bp, Homo sapiens
ctctgttctaggttt

SEQ ID NO: 2018570 - DNA, 15 bp, Homo sapiens
tctgttctaggttta

SEQ ID NO: 2018571 - DNA, 15 bp, Homo sapiens
ctgttctaggtttag

SEQ ID NO: 2018572 - DNA, 15 bp, Homo sapiens
tgttctaggtttagg

SEQ ID NO: 2018573 - DNA, 15 bp, Homo sapiens
gttctaggtttagga

SEQ ID NO: 2018574 - DNA, 15 bp, Homo sapiens
ttctaggtttaggag

SEQ ID NO: 2018575 - DNA, 15 bp, Homo sapiens
tctaggtttaggaga

SEQ ID NO: 2018576 - DNA, 15 bp, Homo sapiens
ctaggtttaggagat

SEQ ID NO: 2018577 - DNA, 15 bp, Homo sapiens
taggtttaggagatt

SEQ ID NO: 2018578 - DNA, 15 bp, Homo sapiens
aggtttaggagatta

SEQ ID NO: 2018579 - DNA, 15 bp, Homo sapiens
ggtttaggagattaa

SEQ ID NO: 2018580 - DNA, 15 bp, Homo sapiens
gtttaggagattaaa

SEQ ID NO: 2018581 - DNA, 15 bp, Homo sapiens
tttaggagattaaaa

SEQ ID NO: 2018582 - DNA, 15 bp, Homo sapiens
ttaggagattaaaaa

SEQ ID NO: 2018583 - DNA, 15 bp, Homo sapiens
taggagattaaaaaa

SEQ ID NO: 2018584 - DNA, 15 bp, Homo sapiens
aggagattaaaaaaa

SEQ ID NO: 2018585 - DNA, 15 bp, Homo sapiens
ggagattaaaaaaaa

SEQ ID NO: 2018586 - DNA, 15 bp, Homo sapiens
aaaaaaaaaagatag

SEQ ID NO: 2018587 - DNA, 15 bp, Homo sapiens
aaaaaaaaagatagt

SEQ ID NO: 2018588 - DNA, 15 bp, Homo sapiens
aaaaaaaagatagtc

SEQ ID NO: 2018589 - DNA, 15 bp, Homo sapiens
aaaaaaagatagtca

SEQ ID NO: 2018590 - DNA, 15 bp, Homo sapiens
aaaaaagatagtcac

SEQ ID NO: 2018591 - DNA, 15 bp, Homo sapiens
aaaaagatagtcact

SEQ ID NO: 2018592 - DNA, 15 bp, Homo sapiens
aaaagatagtcactg

SEQ ID NO: 2018593 - DNA, 15 bp, Homo sapiens
aaagatagtcactgc

SEQ ID NO: 2018594 - DNA, 15 bp, Homo sapiens
aagatagtcactgcc

SEQ ID NO: 2018595 - DNA, 15 bp, Homo sapiens
agatagtcactgcct

SEQ ID NO: 2018596 - DNA, 15 bp, Homo sapiens
gatagtcactgcctt

SEQ ID NO: 2018597 - DNA, 15 bp, Homo sapiens
atagtcactgccttt

SEQ ID NO: 2018598 - DNA, 15 bp, Homo sapiens
tagtcactgccttta

SEQ ID NO: 2018599 - DNA, 15 bp, Homo sapiens
agtcactgcctttaa

SEQ ID NO: 2018600 - DNA, 15 bp, Homo sapiens
gtcactgcctttaag

SEQ ID NO: 2018601 - DNA, 15 bp, Homo sapiens
tcactgcctttaagt

SEQ ID NO: 2018602 - DNA, 15 bp, Homo sapiens
cactgcctttaagtg

SEQ ID NO: 2018603 - DNA, 15 bp, Homo sapiens
actgcctttaagtgt

SEQ ID NO: 2018604 - DNA, 15 bp, Homo sapiens
ctgcctttaagtgtt

SEQ ID NO: 2018605 - DNA, 15 bp, Homo sapiens
tgcctttaagtgttt

SEQ ID NO: 2018606 - DNA, 15 bp, Homo sapiens
gcctttaagtgtttc

SEQ ID NO: 2018607 - DNA, 15 bp, Homo sapiens
cctttaagtgtttca

SEQ ID NO: 2018608 - DNA, 15 bp, Homo sapiens
ctttaagtgtttcag

SEQ ID NO: 2018609 - DNA, 15 bp, Homo sapiens
tttaagtgtttcaga

SEQ ID NO: 2018610 - DNA, 15 bp, Homo sapiens
ttaagtgtttcagat

SEQ ID NO: 2018611 - DNA, 15 bp, Homo sapiens
taagtgtttcagatt

SEQ ID NO: 2018612 - DNA, 15 bp, Homo sapiens
aagtgtttcagattc

SEQ ID NO: 2018613 - DNA, 15 bp, Homo sapiens
agtgtttcagattct

SEQ ID NO: 2018614 - DNA, 15 bp, Homo sapiens
gtgtttcagattcta

SEQ ID NO: 2018615 - DNA, 15 bp, Homo sapiens
tgtttcagattctag

SEQ ID NO: 2018616 - DNA, 15 bp, Homo sapiens
gtttcagattctagt

SEQ ID NO: 2018617 - DNA, 15 bp, Homo sapiens
tttcagattctagtg

SEQ ID NO: 2018618 - DNA, 15 bp, Homo sapiens
ttcagattctagtga

SEQ ID NO: 2018619 - DNA, 15 bp, Homo sapiens
tcagattctagtgat

SEQ ID NO: 2018620 - DNA, 15 bp, Homo sapiens
cagattctagtgata

SEQ ID NO: 2018621 - DNA, 15 bp, Homo sapiens
agattctagtgatag

SEQ ID NO: 2018622 - DNA, 15 bp, Homo sapiens
gattctagtgataga

SEQ ID NO: 2018623 - DNA, 15 bp, Homo sapiens
attctagtgatagaa

SEQ ID NO: 2018624 - DNA, 15 bp, Homo sapiens
ttctagtgatagaag

SEQ ID NO: 2018625 - DNA, 15 bp, Homo sapiens
tctagtgatagaagc

SEQ ID NO: 2018626 - DNA, 15 bp, Homo sapiens
ctagtgatagaagca

SEQ ID NO: 2018627 - DNA, 15 bp, Homo sapiens
tagtgatagaagcaa

SEQ ID NO: 2018628 - DNA, 15 bp, Homo sapiens
agtgatagaagcaaa

SEQ ID NO: 2018629 - DNA, 15 bp, Homo sapiens
gtgatagaagcaaac

SEQ ID NO: 2018630 - DNA, 15 bp, Homo sapiens
tgatagaagcaaaca

SEQ ID NO: 2018631 - DNA, 15 bp, Homo sapiens
gatagaagcaaacag

SEQ ID NO: 2018632 - DNA, 15 bp, Homo sapiens
atagaagcaaacagt

SEQ ID NO: 2018633 - DNA, 15 bp, Homo sapiens
tagaagcaaacagta

SEQ ID NO: 2018634 - DNA, 15 bp, Homo sapiens
agaagcaaacagtaa

SEQ ID NO: 2018635 - DNA, 15 bp, Homo sapiens
gaagcaaacagtaaa

SEQ ID NO: 2018636 - DNA, 15 bp, Homo sapiens
aagcaaacagtaaag

SEQ ID NO: 2018637 - DNA, 15 bp, Homo sapiens
agcaaacagtaaagg

SEQ ID NO: 2018638 - DNA, 15 bp, Homo sapiens
gcaaacagtaaaggc

SEQ ID NO: 2018639 - DNA, 15 bp, Homo sapiens
caaacagtaaaggcc

SEQ ID NO: 2018640 - DNA, 15 bp, Homo sapiens
aaacagtaaaggcca

SEQ ID NO: 2018641 - DNA, 15 bp, Homo sapiens
aacagtaaaggccag

SEQ ID NO: 2018642 - DNA, 15 bp, Homo sapiens
acagtaaaggccagg

SEQ ID NO: 2018643 - DNA, 15 bp, Homo sapiens
cagtaaaggccaggc

SEQ ID NO: 2018644 - DNA, 15 bp, Homo sapiens
agtaaaggccaggcg

SEQ ID NO: 2018645 - DNA, 15 bp, Homo sapiens
gtaaaggccaggcgt

SEQ ID NO: 2018646 - DNA, 15 bp, Homo sapiens
taaaggccaggcgta

SEQ ID NO: 2018647 - DNA, 15 bp, Homo sapiens
aaaggccaggcgtag

SEQ ID NO: 2018648 - DNA, 15 bp, Homo sapiens
aaggccaggcgtagt

SEQ ID NO: 2018649 - DNA, 15 bp, Homo sapiens
aggccaggcgtagtg

SEQ ID NO: 2018650 - DNA, 15 bp, Homo sapiens
ggcgtagtggctcat

SEQ ID NO: 2018651 - DNA, 15 bp, Homo sapiens
gcgtagtggctcatt

SEQ ID NO: 2018652 - DNA, 15 bp, Homo sapiens
cgtagtggctcattc

SEQ ID NO: 2018653 - DNA, 15 bp, Homo sapiens
gtagtggctcattcc

SEQ ID NO: 2018654 - DNA, 15 bp, Homo sapiens
tagtggctcattcct

SEQ ID NO: 2018655 - DNA, 15 bp, Homo sapiens
agtggctcattcctg

SEQ ID NO: 2018656 - DNA, 15 bp, Homo sapiens
tttgggaagccaaga

SEQ ID NO: 2018657 - DNA, 15 bp, Homo sapiens
ttgggaagccaagat

SEQ ID NO: 2018658 - DNA, 15 bp, Homo sapiens
tgggaagccaagatg

SEQ ID NO: 2018659 - DNA, 15 bp, Homo sapiens
gggaagccaagatgg

SEQ ID NO: 2018660 - DNA, 15 bp, Homo sapiens
ggaagccaagatggg

SEQ ID NO: 2018661 - DNA, 15 bp, Homo sapiens
gaagccaagatggga

SEQ ID NO: 2018662 - DNA, 15 bp, Homo sapiens
aagccaagatgggag

SEQ ID NO: 2018663 - DNA, 15 bp, Homo sapiens
agccaagatgggagg

SEQ ID NO: 2018664 - DNA, 15 bp, Homo sapiens
gccaagatgggagga

SEQ ID NO: 2018665 - DNA, 15 bp, Homo sapiens
ccaagatgggaggat

SEQ ID NO: 2018666 - DNA, 15 bp, Homo sapiens
agatgggaggatcgt

SEQ ID NO: 2018667 - DNA, 15 bp, Homo sapiens
gatgggaggatcgtt

SEQ ID NO: 2018668 - DNA, 15 bp, Homo sapiens
atgggaggatcgttt

SEQ ID NO: 2018669 - DNA, 15 bp, Homo sapiens
tgggaggatcgtttg

SEQ ID NO: 2018670 - DNA, 15 bp, Homo sapiens
gggaggatcgtttga

SEQ ID NO: 2018671 - DNA, 15 bp, Homo sapiens
ggaggatcgtttgag

SEQ ID NO: 2018672 - DNA, 15 bp, Homo sapiens
tcgtttgaggccagg

SEQ ID NO: 2018673 - DNA, 15 bp, Homo sapiens
cgtttgaggccagga

SEQ ID NO: 2018674 - DNA, 15 bp, Homo sapiens
gtttgaggccaggag

SEQ ID NO: 2018675 - DNA, 15 bp, Homo sapiens
tttgaggccaggagt

SEQ ID NO: 2018676 - DNA, 15 bp, Homo sapiens
ccaggagttcaagaa

SEQ ID NO: 2018677 - DNA, 15 bp, Homo sapiens
caggagttcaagaac

SEQ ID NO: 2018678 - DNA, 15 bp, Homo sapiens
aggagttcaagaaca

SEQ ID NO: 2018679 - DNA, 15 bp, Homo sapiens
ggagttcaagaacag

SEQ ID NO: 2018680 - DNA, 15 bp, Homo sapiens
gagttcaagaacagc

SEQ ID NO: 2018681 - DNA, 15 bp, Homo sapiens
agttcaagaacagca

SEQ ID NO: 2018682 - DNA, 15 bp, Homo sapiens
gttcaagaacagcat

SEQ ID NO: 2018683 - DNA, 15 bp, Homo sapiens
ttcaagaacagcatg

SEQ ID NO: 2018684 - DNA, 15 bp, Homo sapiens
tcaagaacagcatgg

SEQ ID NO: 2018685 - DNA, 15 bp, Homo sapiens
caagaacagcatgga

SEQ ID NO: 2018686 - DNA, 15 bp, Homo sapiens
aagaacagcatggac

SEQ ID NO: 2018687 - DNA, 15 bp, Homo sapiens
agaacagcatggacc

SEQ ID NO: 2018688 - DNA, 15 bp, Homo sapiens
gaacagcatggacca

SEQ ID NO: 2018689 - DNA, 15 bp, Homo sapiens
aacagcatggaccac

SEQ ID NO: 2018690 - DNA, 15 bp, Homo sapiens
acagcatggaccaca

SEQ ID NO: 2018691 - DNA, 15 bp, Homo sapiens
cagcatggaccacat

SEQ ID NO: 2018692 - DNA, 15 bp, Homo sapiens
agcatggaccacata

SEQ ID NO: 2018693 - DNA, 15 bp, Homo sapiens
gcatggaccacatag

SEQ ID NO: 2018694 - DNA, 15 bp, Homo sapiens
catggaccacatagt

SEQ ID NO: 2018695 - DNA, 15 bp, Homo sapiens
atggaccacatagta

SEQ ID NO: 2018696 - DNA, 15 bp, Homo sapiens
tggaccacatagtaa

SEQ ID NO: 2018697 - DNA, 15 bp, Homo sapiens
ggaccacatagtaag

SEQ ID NO: 2018698 - DNA, 15 bp, Homo sapiens
gaccacatagtaaga

SEQ ID NO: 2018699 - DNA, 15 bp, Homo sapiens
accacatagtaagat

SEQ ID NO: 2018700 - DNA, 15 bp, Homo sapiens
ccacatagtaagatc

SEQ ID NO: 2018701 - DNA, 15 bp, Homo sapiens
cacatagtaagatcc

SEQ ID NO: 2018702 - DNA, 15 bp, Homo sapiens
acatagtaagatccc

SEQ ID NO: 2018703 - DNA, 15 bp, Homo sapiens
catagtaagatccca

SEQ ID NO: 2018704 - DNA, 15 bp, Homo sapiens
atagtaagatcccat

SEQ ID NO: 2018705 - DNA, 15 bp, Homo sapiens
tagtaagatcccatc

SEQ ID NO: 2018706 - DNA, 15 bp, Homo sapiens
agtaagatcccatct

SEQ ID NO: 2018707 - DNA, 15 bp, Homo sapiens
gtaagatcccatctc

SEQ ID NO: 2018708 - DNA, 15 bp, Homo sapiens
taagatcccatctct

SEQ ID NO: 2018709 - DNA, 15 bp, Homo sapiens
aagatcccatctcta

SEQ ID NO: 2018710 - DNA, 15 bp, Homo sapiens
agatcccatctctaa

SEQ ID NO: 2018711 - DNA, 15 bp, Homo sapiens
gatcccatctctaaa

SEQ ID NO: 2018712 - DNA, 15 bp, Homo sapiens
atcccatctctaaat

SEQ ID NO: 2018713 - DNA, 15 bp, Homo sapiens
tcccatctctaaata

SEQ ID NO: 2018714 - DNA, 15 bp, Homo sapiens
cccatctctaaataa

SEQ ID NO: 2018715 - DNA, 15 bp, Homo sapiens
ccatctctaaataaa

SEQ ID NO: 2018716 - DNA, 15 bp, Homo sapiens
catctctaaataaaa

SEQ ID NO: 2018717 - DNA, 15 bp, Homo sapiens
atctctaaataaaaa

SEQ ID NO: 2018718 - DNA, 15 bp, Homo sapiens
tctctaaataaaaag

SEQ ID NO: 2018719 - DNA, 15 bp, Homo sapiens
ctctaaataaaaaga

SEQ ID NO: 2018720 - DNA, 15 bp, Homo sapiens
tctaaataaaaagaa

SEQ ID NO: 2018721 - DNA, 15 bp, Homo sapiens
ctaaataaaaagaag

SEQ ID NO: 2018722 - DNA, 15 bp, Homo sapiens
taaataaaaagaaga

SEQ ID NO: 2018723 - DNA, 15 bp, Homo sapiens
aaataaaaagaagaa

SEQ ID NO: 2018724 - DNA, 15 bp, Homo sapiens
aataaaaagaagaaa

SEQ ID NO: 2018725 - DNA, 15 bp, Homo sapiens
ataaaaagaagaaag

SEQ ID NO: 2018726 - DNA, 15 bp, Homo sapiens
taaaaagaagaaaga

SEQ ID NO: 2018727 - DNA, 15 bp, Homo sapiens
aaaaagaagaaagaa

SEQ ID NO: 2018728 - DNA, 15 bp, Homo sapiens
aaagaagaaagaaaa

SEQ ID NO: 2018729 - DNA, 15 bp, Homo sapiens
agaagaaagaaaaaa

SEQ ID NO: 2018730 - DNA, 15 bp, Homo sapiens
gaagaaagaaaaaaa

SEQ ID NO: 2018731 - DNA, 15 bp, Homo sapiens
aagaaagaaaaaaag

SEQ ID NO: 2018732 - DNA, 15 bp, Homo sapiens
agaaagaaaaaaagc

SEQ ID NO: 2018733 - DNA, 15 bp, Homo sapiens
gaaagaaaaaaagct

SEQ ID NO: 2018734 - DNA, 15 bp, Homo sapiens
aaagaaaaaaagcta

SEQ ID NO: 2018735 - DNA, 15 bp, Homo sapiens
aagaaaaaaagctaa

SEQ ID NO: 2018736 - DNA, 15 bp, Homo sapiens
agaaaaaaagctaaa

SEQ ID NO: 2018737 - DNA, 15 bp, Homo sapiens
gaaaaaaagctaaaa

SEQ ID NO: 2018738 - DNA, 15 bp, Homo sapiens
aaaaaaagctaaaaa

SEQ ID NO: 2018739 - DNA, 15 bp, Homo sapiens
aaaaagctaaaaaat

SEQ ID NO: 2018740 - DNA, 15 bp, Homo sapiens
aaaagctaaaaaata

SEQ ID NO: 2018741 - DNA, 15 bp, Homo sapiens
aaagctaaaaaataa

SEQ ID NO: 2018742 - DNA, 15 bp, Homo sapiens
aagctaaaaaataat

SEQ ID NO: 2018743 - DNA, 15 bp, Homo sapiens
agctaaaaaataatt

SEQ ID NO: 2018744 - DNA, 15 bp, Homo sapiens
gctaaaaaataatta

SEQ ID NO: 2018745 - DNA, 15 bp, Homo sapiens
ctaaaaaataattac

SEQ ID NO: 2018746 - DNA, 15 bp, Homo sapiens
taaaaaataattaca

SEQ ID NO: 2018747 - DNA, 15 bp, Homo sapiens
aaaaaataattacaa

SEQ ID NO: 2018748 - DNA, 15 bp, Homo sapiens
aaaaataattacaat

SEQ ID NO: 2018749 - DNA, 15 bp, Homo sapiens
aaaataattacaata

SEQ ID NO: 2018750 - DNA, 15 bp, Homo sapiens
aaataattacaataa

SEQ ID NO: 2018751 - DNA, 15 bp, Homo sapiens
aataattacaataat

SEQ ID NO: 2018752 - DNA, 15 bp, Homo sapiens
ataattacaataatt

SEQ ID NO: 2018753 - DNA, 15 bp, Homo sapiens
taattacaataattt

SEQ ID NO: 2018754 - DNA, 15 bp, Homo sapiens
aattacaataatttt

SEQ ID NO: 2018755 - DNA, 15 bp, Homo sapiens
attacaataattttt

SEQ ID NO: 2018756 - DNA, 15 bp, Homo sapiens
ttacaataatttttt

SEQ ID NO: 2018757 - DNA, 15 bp, Homo sapiens
caataattttttttt

SEQ ID NO: 2018758 - DNA, 15 bp, Homo sapiens
aattttttttttttc

SEQ ID NO: 2018759 - DNA, 15 bp, Homo sapiens
tttttttttttcaag

SEQ ID NO: 2018760 - DNA, 15 bp, Homo sapiens
ttttttttttcaaga

SEQ ID NO: 2018761 - DNA, 15 bp, Homo sapiens
tttttttttcaagac

SEQ ID NO: 2018762 - DNA, 15 bp, Homo sapiens
ttttttttcaagaca

SEQ ID NO: 2018763 - DNA, 15 bp, Homo sapiens
tttttttcaagacag

SEQ ID NO: 2018764 - DNA, 15 bp, Homo sapiens
ttttttcaagacagt

SEQ ID NO: 2018765 - DNA, 15 bp, Homo sapiens
tttttcaagacagtc

SEQ ID NO: 2018766 - DNA, 15 bp, Homo sapiens
ttttcaagacagtct

SEQ ID NO: 2018767 - DNA, 15 bp, Homo sapiens
tttcaagacagtctt

SEQ ID NO: 2018768 - DNA, 15 bp, Homo sapiens
ttcaagacagtctta

SEQ ID NO: 2018769 - DNA, 15 bp, Homo sapiens
tcaagacagtcttac

SEQ ID NO: 2018770 - DNA, 15 bp, Homo sapiens
caagacagtcttact

SEQ ID NO: 2018771 - DNA, 15 bp, Homo sapiens
aagacagtcttactc

SEQ ID NO: 2018772 - DNA, 15 bp, Homo sapiens
agacagtcttactct

SEQ ID NO: 2018773 - DNA, 15 bp, Homo sapiens
gacagtcttactctg

SEQ ID NO: 2018774 - DNA, 15 bp, Homo sapiens
acagtcttactctgt

SEQ ID NO: 2018775 - DNA, 15 bp, Homo sapiens
cagtcttactctgtc

SEQ ID NO: 2018776 - DNA, 15 bp, Homo sapiens
agtcttactctgtca

SEQ ID NO: 2018777 - DNA, 15 bp, Homo sapiens
gtcttactctgtcac

SEQ ID NO: 2018778 - DNA, 15 bp, Homo sapiens
tcttactctgtcacc

SEQ ID NO: 2018779 - DNA, 15 bp, Homo sapiens
cttactctgtcaccc

SEQ ID NO: 2018780 - DNA, 15 bp, Homo sapiens
ttactctgtcaccca

SEQ ID NO: 2018781 - DNA, 15 bp, Homo sapiens
tactctgtcacccag

SEQ ID NO: 2018782 - DNA, 15 bp, Homo sapiens
caggctggagtgtag

SEQ ID NO: 2018783 - DNA, 15 bp, Homo sapiens
ctggagtgtagtggc

SEQ ID NO: 2018784 - DNA, 15 bp, Homo sapiens
tggagtgtagtggca

SEQ ID NO: 2018785 - DNA, 15 bp, Homo sapiens
ggagtgtagtggcac

SEQ ID NO: 2018786 - DNA, 15 bp, Homo sapiens
gagtgtagtggcaca

SEQ ID NO: 2018787 - DNA, 15 bp, Homo sapiens
agtgtagtggcacaa

SEQ ID NO: 2018788 - DNA, 15 bp, Homo sapiens
gtgtagtggcacaat

SEQ ID NO: 2018789 - DNA, 15 bp, Homo sapiens
tgtagtggcacaatc

SEQ ID NO: 2018790 - DNA, 15 bp, Homo sapiens
gtagtggcacaatct

SEQ ID NO: 2018791 - DNA, 15 bp, Homo sapiens
tagtggcacaatctg

SEQ ID NO: 2018792 - DNA, 15 bp, Homo sapiens
agtggcacaatctgg

SEQ ID NO: 2018793 - DNA, 15 bp, Homo sapiens
gtggcacaatctggg

SEQ ID NO: 2018794 - DNA, 15 bp, Homo sapiens
tggcacaatctgggc

SEQ ID NO: 2018795 - DNA, 15 bp, Homo sapiens
ggcacaatctgggct

SEQ ID NO: 2018796 - DNA, 15 bp, Homo sapiens
gcacaatctgggctc

SEQ ID NO: 2018797 - DNA, 15 bp, Homo sapiens
cacaatctgggctca

SEQ ID NO: 2018798 - DNA, 15 bp, Homo sapiens
acaatctgggctcac

SEQ ID NO: 2018799 - DNA, 15 bp, Homo sapiens
caatctgggctcact

SEQ ID NO: 2018800 - DNA, 15 bp, Homo sapiens
aatctgggctcactg

SEQ ID NO: 2018801 - DNA, 15 bp, Homo sapiens
tgggctcactgcaaa

SEQ ID NO: 2018802 - DNA, 15 bp, Homo sapiens
gggctcactgcaaat

SEQ ID NO: 2018803 - DNA, 15 bp, Homo sapiens
ggctcactgcaaatt

SEQ ID NO: 2018804 - DNA, 15 bp, Homo sapiens
gctcactgcaaattc

SEQ ID NO: 2018805 - DNA, 15 bp, Homo sapiens
ctcactgcaaattcc

SEQ ID NO: 2018806 - DNA, 15 bp, Homo sapiens
tcactgcaaattccg

SEQ ID NO: 2018807 - DNA, 15 bp, Homo sapiens
cactgcaaattccgc

SEQ ID NO: 2018808 - DNA, 15 bp, Homo sapiens
actgcaaattccgct

SEQ ID NO: 2018809 - DNA, 15 bp, Homo sapiens
ctgcaaattccgctt

SEQ ID NO: 2018810 - DNA, 15 bp, Homo sapiens
tgcaaattccgcttc

SEQ ID NO: 2018811 - DNA, 15 bp, Homo sapiens
ccctgaattaagctg

SEQ ID NO: 2018812 - DNA, 15 bp, Homo sapiens
cctgaattaagctgg

SEQ ID NO: 2018813 - DNA, 15 bp, Homo sapiens
ctgaattaagctggt

SEQ ID NO: 2018814 - DNA, 15 bp, Homo sapiens
tgaattaagctggtg

SEQ ID NO: 2018815 - DNA, 15 bp, Homo sapiens
gaattaagctggtga

SEQ ID NO: 2018816 - DNA, 15 bp, Homo sapiens
aattaagctggtgaa

SEQ ID NO: 2018817 - DNA, 15 bp, Homo sapiens
attaagctggtgaac

SEQ ID NO: 2018818 - DNA, 15 bp, Homo sapiens
ttaagctggtgaact

SEQ ID NO: 2018819 - DNA, 15 bp, Homo sapiens
taagctggtgaactg

SEQ ID NO: 2018820 - DNA, 15 bp, Homo sapiens
aagctggtgaactgt

SEQ ID NO: 2018821 - DNA, 15 bp, Homo sapiens
agctggtgaactgta

SEQ ID NO: 2018822 - DNA, 15 bp, Homo sapiens
gctggtgaactgtaa

SEQ ID NO: 2018823 - DNA, 15 bp, Homo sapiens
ctggtgaactgtaat

SEQ ID NO: 2018824 - DNA, 15 bp, Homo sapiens
tggtgaactgtaata

SEQ ID NO: 2018825 - DNA, 15 bp, Homo sapiens
ggtgaactgtaatac

SEQ ID NO: 2018826 - DNA, 15 bp, Homo sapiens
gtgaactgtaatacc

SEQ ID NO: 2018827 - DNA, 15 bp, Homo sapiens
tgaactgtaataccc

SEQ ID NO: 2018828 - DNA, 15 bp, Homo sapiens
gaactgtaataccca

SEQ ID NO: 2018829 - DNA, 15 bp, Homo sapiens
aactgtaatacccag

SEQ ID NO: 2018830 - DNA, 15 bp, Homo sapiens
actgtaatacccagg

SEQ ID NO: 2018831 - DNA, 15 bp, Homo sapiens
ctgtaatacccaggg

SEQ ID NO: 2018832 - DNA, 15 bp, Homo sapiens
tgtaatacccagggg

SEQ ID NO: 2018833 - DNA, 15 bp, Homo sapiens
gtaatacccaggggt

SEQ ID NO: 2018834 - DNA, 15 bp, Homo sapiens
taatacccaggggta

SEQ ID NO: 2018835 - DNA, 15 bp, Homo sapiens
aatacccaggggtag

SEQ ID NO: 2018836 - DNA, 15 bp, Homo sapiens
atacccaggggtagg

SEQ ID NO: 2018837 - DNA, 15 bp, Homo sapiens
tacccaggggtaggg

SEQ ID NO: 2018838 - DNA, 15 bp, Homo sapiens
acccaggggtaggga

SEQ ID NO: 2018839 - DNA, 15 bp, Homo sapiens
cccaggggtagggaa

SEQ ID NO: 2018840 - DNA, 15 bp, Homo sapiens
ccaggggtagggaat

SEQ ID NO: 2018841 - DNA, 15 bp, Homo sapiens
caggggtagggaatg

SEQ ID NO: 2018842 - DNA, 15 bp, Homo sapiens
aggggtagggaatgt

SEQ ID NO: 2018843 - DNA, 15 bp, Homo sapiens
ggggtagggaatgtg

SEQ ID NO: 2018844 - DNA, 15 bp, Homo sapiens
gggtagggaatgtgt

SEQ ID NO: 2018845 - DNA, 15 bp, Homo sapiens
ggtagggaatgtgtt

SEQ ID NO: 2018846 - DNA, 15 bp, Homo sapiens
gtagggaatgtgttt

SEQ ID NO: 2018847 - DNA, 15 bp, Homo sapiens
tagggaatgtgtttt

SEQ ID NO: 2018848 - DNA, 15 bp, Homo sapiens
agggaatgtgttttt

SEQ ID NO: 2018849 - DNA, 15 bp, Homo sapiens
gggaatgtgtttttg

SEQ ID NO: 2018850 - DNA, 15 bp, Homo sapiens
ggaatgtgtttttgt

SEQ ID NO: 2018851 - DNA, 15 bp, Homo sapiens
gaatgtgtttttgtt

SEQ ID NO: 2018852 - DNA, 15 bp, Homo sapiens
aatgtgtttttgttc

SEQ ID NO: 2018853 - DNA, 15 bp, Homo sapiens
atgtgtttttgttca

SEQ ID NO: 2018854 - DNA, 15 bp, Homo sapiens
tgtgtttttgttcaa

SEQ ID NO: 2018855 - DNA, 15 bp, Homo sapiens
gtgtttttgttcaaa

SEQ ID NO: 2018856 - DNA, 15 bp, Homo sapiens
tgtttttgttcaaaa

SEQ ID NO: 2018857 - DNA, 15 bp, Homo sapiens
gtttttgttcaaaac

SEQ ID NO: 2018858 - DNA, 15 bp, Homo sapiens
tttttgttcaaaact

SEQ ID NO: 2018859 - DNA, 15 bp, Homo sapiens
ttttgttcaaaacta

SEQ ID NO: 2018860 - DNA, 15 bp, Homo sapiens
tttgttcaaaactaa

SEQ ID NO: 2018861 - DNA, 15 bp, Homo sapiens
ttgttcaaaactaaa

SEQ ID NO: 2018862 - DNA, 15 bp, Homo sapiens
tgttcaaaactaaat

SEQ ID NO: 2018863 - DNA, 15 bp, Homo sapiens
gttcaaaactaaatg

SEQ ID NO: 2018864 - DNA, 15 bp, Homo sapiens
ttcaaaactaaatga

SEQ ID NO: 2018865 - DNA, 15 bp, Homo sapiens
tcaaaactaaatgac

SEQ ID NO: 2018866 - DNA, 15 bp, Homo sapiens
caaaactaaatgact

SEQ ID NO: 2018867 - DNA, 15 bp, Homo sapiens
aaaactaaatgactt

SEQ ID NO: 2018868 - DNA, 15 bp, Homo sapiens
aaactaaatgacttt

SEQ ID NO: 2018869 - DNA, 15 bp, Homo sapiens
aactaaatgactttt

SEQ ID NO: 2018870 - DNA, 15 bp, Homo sapiens
actaaatgactttta

SEQ ID NO: 2018871 - DNA, 15 bp, Homo sapiens
ctaaatgacttttaa

SEQ ID NO: 2018872 - DNA, 15 bp, Homo sapiens
taaatgacttttaaa

SEQ ID NO: 2018873 - DNA, 15 bp, Homo sapiens
aaatgacttttaaat

SEQ ID NO: 2018874 - DNA, 15 bp, Homo sapiens
aatgacttttaaatt

SEQ ID NO: 2018875 - DNA, 15 bp, Homo sapiens
atgacttttaaattt

SEQ ID NO: 2018876 - DNA, 15 bp, Homo sapiens
tgacttttaaatttt

SEQ ID NO: 2018877 - DNA, 15 bp, Homo sapiens
gacttttaaattttg

SEQ ID NO: 2018878 - DNA, 15 bp, Homo sapiens
acttttaaattttga

SEQ ID NO: 2018879 - DNA, 15 bp, Homo sapiens
cttttaaattttgaa

SEQ ID NO: 2018880 - DNA, 15 bp, Homo sapiens
ttttaaattttgaac

SEQ ID NO: 2018881 - DNA, 15 bp, Homo sapiens
tttaaattttgaact

SEQ ID NO: 2018882 - DNA, 15 bp, Homo sapiens
ttaaattttgaactc

SEQ ID NO: 2018883 - DNA, 15 bp, Homo sapiens
taaattttgaactca

SEQ ID NO: 2018884 - DNA, 15 bp, Homo sapiens
aaattttgaactcaa

SEQ ID NO: 2018885 - DNA, 15 bp, Homo sapiens
aattttgaactcaaa

SEQ ID NO: 2018886 - DNA, 15 bp, Homo sapiens
attttgaactcaaag

SEQ ID NO: 2018887 - DNA, 15 bp, Homo sapiens
ttttgaactcaaaga

SEQ ID NO: 2018888 - DNA, 15 bp, Homo sapiens
tttgaactcaaagat

SEQ ID NO: 2018889 - DNA, 15 bp, Homo sapiens
ttgaactcaaagata

SEQ ID NO: 2018890 - DNA, 15 bp, Homo sapiens
tgaactcaaagatat

SEQ ID NO: 2018891 - DNA, 15 bp, Homo sapiens
gaactcaaagatatc

SEQ ID NO: 2018892 - DNA, 15 bp, Homo sapiens
aactcaaagatatct

SEQ ID NO: 2018893 - DNA, 15 bp, Homo sapiens
actcaaagatatctt

SEQ ID NO: 2018894 - DNA, 15 bp, Homo sapiens
ctcaaagatatctta

SEQ ID NO: 2018895 - DNA, 15 bp, Homo sapiens
tcaaagatatcttac

SEQ ID NO: 2018896 - DNA, 15 bp, Homo sapiens
caaagatatcttacc

SEQ ID NO: 2018897 - DNA, 15 bp, Homo sapiens
aaagatatcttacct

SEQ ID NO: 2018898 - DNA, 15 bp, Homo sapiens
aagatatcttaccta

SEQ ID NO: 2018899 - DNA, 15 bp, Homo sapiens
agatatcttacctac

SEQ ID NO: 2018900 - DNA, 15 bp, Homo sapiens
gatatcttacctacc

SEQ ID NO: 2018901 - DNA, 15 bp, Homo sapiens
atatcttacctacca

SEQ ID NO: 2018902 - DNA, 15 bp, Homo sapiens
tatcttacctaccat

SEQ ID NO: 2018903 - DNA, 15 bp, Homo sapiens
atcttacctaccatt

SEQ ID NO: 2018904 - DNA, 15 bp, Homo sapiens
tcttacctaccattt

SEQ ID NO: 2018905 - DNA, 15 bp, Homo sapiens
cttacctaccatttt

SEQ ID NO: 2018906 - DNA, 15 bp, Homo sapiens
ttacctaccatttta

SEQ ID NO: 2018907 - DNA, 15 bp, Homo sapiens
tacctaccattttaa

SEQ ID NO: 2018908 - DNA, 15 bp, Homo sapiens
acctaccattttaaa

SEQ ID NO: 2018909 - DNA, 15 bp, Homo sapiens
cctaccattttaaaa

SEQ ID NO: 2018910 - DNA, 15 bp, Homo sapiens
ctaccattttaaaat

SEQ ID NO: 2018911 - DNA, 15 bp, Homo sapiens
taccattttaaaata

SEQ ID NO: 2018912 - DNA, 15 bp, Homo sapiens
accattttaaaatac

SEQ ID NO: 2018913 - DNA, 15 bp, Homo sapiens
ccattttaaaatacc

SEQ ID NO: 2018914 - DNA, 15 bp, Homo sapiens
cattttaaaatacct

SEQ ID NO: 2018915 - DNA, 15 bp, Homo sapiens
attttaaaatacctg

SEQ ID NO: 2018916 - DNA, 15 bp, Homo sapiens
ttttaaaatacctgt

SEQ ID NO: 2018917 - DNA, 15 bp, Homo sapiens
tttaaaatacctgtc

SEQ ID NO: 2018918 - DNA, 15 bp, Homo sapiens
ttaaaatacctgtca

SEQ ID NO: 2018919 - DNA, 15 bp, Homo sapiens
taaaatacctgtcat

SEQ ID NO: 2018920 - DNA, 15 bp, Homo sapiens
aaaatacctgtcatt

SEQ ID NO: 2018921 - DNA, 15 bp, Homo sapiens
aaatacctgtcattt

SEQ ID NO: 2018922 - DNA, 15 bp, Homo sapiens
aatacctgtcatttg

SEQ ID NO: 2018923 - DNA, 15 bp, Homo sapiens
atacctgtcatttgg

SEQ ID NO: 2018924 - DNA, 15 bp, Homo sapiens
tacctgtcatttgga

SEQ ID NO: 2018925 - DNA, 15 bp, Homo sapiens
acctgtcatttggaa

SEQ ID NO: 2018926 - DNA, 15 bp, Homo sapiens
cctgtcatttggaaa

SEQ ID NO: 2018927 - DNA, 15 bp, Homo sapiens
ctgtcatttggaaag

SEQ ID NO: 2018928 - DNA, 15 bp, Homo sapiens
tgtcatttggaaagg

SEQ ID NO: 2018929 - DNA, 15 bp, Homo sapiens
gtcatttggaaagga

SEQ ID NO: 2018930 - DNA, 15 bp, Homo sapiens
tcatttggaaaggaa

SEQ ID NO: 2018931 - DNA, 15 bp, Homo sapiens
catttggaaaggaaa

SEQ ID NO: 2018932 - DNA, 15 bp, Homo sapiens
atttggaaaggaaac

SEQ ID NO: 2018933 - DNA, 15 bp, Homo sapiens
tttggaaaggaaaca

SEQ ID NO: 2018934 - DNA, 15 bp, Homo sapiens
ttggaaaggaaacac

SEQ ID NO: 2018935 - DNA, 15 bp, Homo sapiens
tggaaaggaaacact

SEQ ID NO: 2018936 - DNA, 15 bp, Homo sapiens
ggaaaggaaacactt

SEQ ID NO: 2018937 - DNA, 15 bp, Homo sapiens
gaaaggaaacacttc

SEQ ID NO: 2018938 - DNA, 15 bp, Homo sapiens
aaaggaaacacttct

SEQ ID NO: 2018939 - DNA, 15 bp, Homo sapiens
aaggaaacacttctg

SEQ ID NO: 2018940 - DNA, 15 bp, Homo sapiens
aggaaacacttctgt

SEQ ID NO: 2018941 - DNA, 15 bp, Homo sapiens
ggaaacacttctgtt

SEQ ID NO: 2018942 - DNA, 15 bp, Homo sapiens
gaaacacttctgttt

SEQ ID NO: 2018943 - DNA, 15 bp, Homo sapiens
aaacacttctgtttg

SEQ ID NO: 2018944 - DNA, 15 bp, Homo sapiens
aacacttctgtttgt

SEQ ID NO: 2018945 - DNA, 15 bp, Homo sapiens
acacttctgtttgtt

SEQ ID NO: 2018946 - DNA, 15 bp, Homo sapiens
cacttctgtttgttc

SEQ ID NO: 2018947 - DNA, 15 bp, Homo sapiens
acttctgtttgttca

SEQ ID NO: 2018948 - DNA, 15 bp, Homo sapiens
cttctgtttgttcag

SEQ ID NO: 2018949 - DNA, 15 bp, Homo sapiens
ttctgtttgttcagt

SEQ ID NO: 2018950 - DNA, 15 bp, Homo sapiens
tctgtttgttcagta

SEQ ID NO: 2018951 - DNA, 15 bp, Homo sapiens
ctgtttgttcagtaa

SEQ ID NO: 2018952 - DNA, 15 bp, Homo sapiens
tgtttgttcagtaac

SEQ ID NO: 2018953 - DNA, 15 bp, Homo sapiens
gtttgttcagtaact

SEQ ID NO: 2018954 - DNA, 15 bp, Homo sapiens
tttgttcagtaacta

SEQ ID NO: 2018955 - DNA, 15 bp, Homo sapiens
ttgttcagtaactat

SEQ ID NO: 2018956 - DNA, 15 bp, Homo sapiens
tgttcagtaactatc

SEQ ID NO: 2018957 - DNA, 15 bp, Homo sapiens
gttcagtaactatca

SEQ ID NO: 2018958 - DNA, 15 bp, Homo sapiens
ttcagtaactatcat

SEQ ID NO: 2018959 - DNA, 15 bp, Homo sapiens
tcagtaactatcatt

SEQ ID NO: 2018960 - DNA, 15 bp, Homo sapiens
cagtaactatcattg

SEQ ID NO: 2018961 - DNA, 15 bp, Homo sapiens
agtaactatcattgg

SEQ ID NO: 2018962 - DNA, 15 bp, Homo sapiens
gtaactatcattgga

SEQ ID NO: 2018963 - DNA, 15 bp, Homo sapiens
taactatcattggat

SEQ ID NO: 2018964 - DNA, 15 bp, Homo sapiens
aactatcattggata

SEQ ID NO: 2018965 - DNA, 15 bp, Homo sapiens
actatcattggatag

SEQ ID NO: 2018966 - DNA, 15 bp, Homo sapiens
ctatcattggatagt

SEQ ID NO: 2018967 - DNA, 15 bp, Homo sapiens
tatcattggatagta

SEQ ID NO: 2018968 - DNA, 15 bp, Homo sapiens
atcattggatagtac

SEQ ID NO: 2018969 - DNA, 15 bp, Homo sapiens
tcattggatagtacc

SEQ ID NO: 2018970 - DNA, 15 bp, Homo sapiens
cattggatagtacca

SEQ ID NO: 2018971 - DNA, 15 bp, Homo sapiens
attggatagtaccat

SEQ ID NO: 2018972 - DNA, 15 bp, Homo sapiens
ttggatagtaccatt

SEQ ID NO: 2018973 - DNA, 15 bp, Homo sapiens
tggatagtaccattc

SEQ ID NO: 2018974 - DNA, 15 bp, Homo sapiens
ggatagtaccattct

SEQ ID NO: 2018975 - DNA, 15 bp, Homo sapiens
gatagtaccattctg

SEQ ID NO: 2018976 - DNA, 15 bp, Homo sapiens
atagtaccattctga

SEQ ID NO: 2018977 - DNA, 15 bp, Homo sapiens
tagtaccattctgag

SEQ ID NO: 2018978 - DNA, 15 bp, Homo sapiens
agtaccattctgaga

SEQ ID NO: 2018979 - DNA, 15 bp, Homo sapiens
gtaccattctgagag

SEQ ID NO: 2018980 - DNA, 15 bp, Homo sapiens
taccattctgagagt

SEQ ID NO: 2018981 - DNA, 15 bp, Homo sapiens
accattctgagagta

SEQ ID NO: 2018982 - DNA, 15 bp, Homo sapiens
ccattctgagagtat

SEQ ID NO: 2018983 - DNA, 15 bp, Homo sapiens
cattctgagagtata

SEQ ID NO: 2018984 - DNA, 15 bp, Homo sapiens
attctgagagtatat

SEQ ID NO: 2018985 - DNA, 15 bp, Homo sapiens
ttctgagagtatatg

SEQ ID NO: 2018986 - DNA, 15 bp, Homo sapiens
tctgagagtatatgt

SEQ ID NO: 2018987 - DNA, 15 bp, Homo sapiens
ctgagagtatatgtt

SEQ ID NO: 2018988 - DNA, 15 bp, Homo sapiens
tgagagtatatgttt

SEQ ID NO: 2018989 - DNA, 15 bp, Homo sapiens
gagagtatatgttta

SEQ ID NO: 2018990 - DNA, 15 bp, Homo sapiens
agagtatatgtttaa

SEQ ID NO: 2018991 - DNA, 15 bp, Homo sapiens
gagtatatgtttaat

SEQ ID NO: 2018992 - DNA, 15 bp, Homo sapiens
agtatatgtttaata

SEQ ID NO: 2018993 - DNA, 15 bp, Homo sapiens
gtatatgtttaatag

SEQ ID NO: 2018994 - DNA, 15 bp, Homo sapiens
tatatgtttaatagc

SEQ ID NO: 2018995 - DNA, 15 bp, Homo sapiens
atatgtttaatagcc

SEQ ID NO: 2018996 - DNA, 15 bp, Homo sapiens
tatgtttaatagcca

SEQ ID NO: 2018997 - DNA, 15 bp, Homo sapiens
atgtttaatagccaa

SEQ ID NO: 2018998 - DNA, 15 bp, Homo sapiens
tgtttaatagccaag

SEQ ID NO: 2018999 - DNA, 15 bp, Homo sapiens
gtttaatagccaaga

SEQ ID NO: 2019000 - DNA, 15 bp, Homo sapiens
tttaatagccaagat

SEQ ID NO: 2019001 - DNA, 15 bp, Homo sapiens
ttaatagccaagata

SEQ ID NO: 2019002 - DNA, 15 bp, Homo sapiens
taatagccaagatag

SEQ ID NO: 2019003 - DNA, 15 bp, Homo sapiens
aatagccaagatagt

SEQ ID NO: 2019004 - DNA, 15 bp, Homo sapiens
atagccaagatagtg

SEQ ID NO: 2019005 - DNA, 15 bp, Homo sapiens
tagccaagatagtga

SEQ ID NO: 2019006 - DNA, 15 bp, Homo sapiens
agccaagatagtgag

SEQ ID NO: 2019007 - DNA, 15 bp, Homo sapiens
gccaagatagtgagt

SEQ ID NO: 2019008 - DNA, 15 bp, Homo sapiens
ccaagatagtgagtg

SEQ ID NO: 2019009 - DNA, 15 bp, Homo sapiens
caagatagtgagtgg

SEQ ID NO: 2019010 - DNA, 15 bp, Homo sapiens
aagatagtgagtggt

SEQ ID NO: 2019011 - DNA, 15 bp, Homo sapiens
agatagtgagtggtg

SEQ ID NO: 2019012 - DNA, 15 bp, Homo sapiens
gatagtgagtggtga

SEQ ID NO: 2019013 - DNA, 15 bp, Homo sapiens
atagtgagtggtgaa

SEQ ID NO: 2019014 - DNA, 15 bp, Homo sapiens
tagtgagtggtgaat

SEQ ID NO: 2019015 - DNA, 15 bp, Homo sapiens
agtgagtggtgaatt

SEQ ID NO: 2019016 - DNA, 15 bp, Homo sapiens
gtgagtggtgaattt

SEQ ID NO: 2019017 - DNA, 15 bp, Homo sapiens
tgagtggtgaatttt

SEQ ID NO: 2019018 - DNA, 15 bp, Homo sapiens
gagtggtgaatttta

SEQ ID NO: 2019019 - DNA, 15 bp, Homo sapiens
agtggtgaattttaa

SEQ ID NO: 2019020 - DNA, 15 bp, Homo sapiens
gtggtgaattttaaa

SEQ ID NO: 2019021 - DNA, 15 bp, Homo sapiens
tggtgaattttaaat

SEQ ID NO: 2019022 - DNA, 15 bp, Homo sapiens
ggtgaattttaaata

SEQ ID NO: 2019023 - DNA, 15 bp, Homo sapiens
gtgaattttaaatat

SEQ ID NO: 2019024 - DNA, 15 bp, Homo sapiens
tgaattttaaatatt

SEQ ID NO: 2019025 - DNA, 15 bp, Homo sapiens
gaattttaaatattc

SEQ ID NO: 2019026 - DNA, 15 bp, Homo sapiens
aattttaaatattct

SEQ ID NO: 2019027 - DNA, 15 bp, Homo sapiens
attttaaatattctt

SEQ ID NO: 2019028 - DNA, 15 bp, Homo sapiens
ttttaaatattcttt

SEQ ID NO: 2019029 - DNA, 15 bp, Homo sapiens
tttaaatattctttt

SEQ ID NO: 2019030 - DNA, 15 bp, Homo sapiens
ttaaatattctttta

SEQ ID NO: 2019031 - DNA, 15 bp, Homo sapiens
taaatattcttttaa

SEQ ID NO: 2019032 - DNA, 15 bp, Homo sapiens
aaatattcttttaaa

SEQ ID NO: 2019033 - DNA, 15 bp, Homo sapiens
aatattcttttaaat

SEQ ID NO: 2019034 - DNA, 15 bp, Homo sapiens
atattcttttaaata

SEQ ID NO: 2019035 - DNA, 15 bp, Homo sapiens
tattcttttaaatat

SEQ ID NO: 2019036 - DNA, 15 bp, Homo sapiens
attcttttaaatatc

SEQ ID NO: 2019037 - DNA, 15 bp, Homo sapiens
ttcttttaaatatcc

SEQ ID NO: 2019038 - DNA, 15 bp, Homo sapiens
tcttttaaatatcct

SEQ ID NO: 2019039 - DNA, 15 bp, Homo sapiens
cttttaaatatcctt

SEQ ID NO: 2019040 - DNA, 15 bp, Homo sapiens
ttttaaatatccttg

SEQ ID NO: 2019041 - DNA, 15 bp, Homo sapiens
tttaaatatccttgt

SEQ ID NO: 2019042 - DNA, 15 bp, Homo sapiens
ttaaatatccttgtg

SEQ ID NO: 2019043 - DNA, 15 bp, Homo sapiens
taaatatccttgtgg

SEQ ID NO: 2019044 - DNA, 15 bp, Homo sapiens
aaatatccttgtggt

SEQ ID NO: 2019045 - DNA, 15 bp, Homo sapiens
aatatccttgtggta

SEQ ID NO: 2019046 - DNA, 15 bp, Homo sapiens
atatccttgtggtag

SEQ ID NO: 2019047 - DNA, 15 bp, Homo sapiens
tatccttgtggtaga

SEQ ID NO: 2019048 - DNA, 15 bp, Homo sapiens
atccttgtggtagaa

SEQ ID NO: 2019049 - DNA, 15 bp, Homo sapiens
tccttgtggtagaag

SEQ ID NO: 2019050 - DNA, 15 bp, Homo sapiens
ccttgtggtagaagc

SEQ ID NO: 2019051 - DNA, 15 bp, Homo sapiens
cttgtggtagaagct

SEQ ID NO: 2019052 - DNA, 15 bp, Homo sapiens
ttgtggtagaagctc

SEQ ID NO: 2019053 - DNA, 15 bp, Homo sapiens
tgtggtagaagctct

SEQ ID NO: 2019054 - DNA, 15 bp, Homo sapiens
gtggtagaagctctc

SEQ ID NO: 2019055 - DNA, 15 bp, Homo sapiens
tggtagaagctctct

SEQ ID NO: 2019056 - DNA, 15 bp, Homo sapiens
ggtagaagctctctg

SEQ ID NO: 2019057 - DNA, 15 bp, Homo sapiens
gtagaagctctctgg

SEQ ID NO: 2019058 - DNA, 15 bp, Homo sapiens
tagaagctctctggt

SEQ ID NO: 2019059 - DNA, 15 bp, Homo sapiens
agaagctctctggtg

SEQ ID NO: 2019060 - DNA, 15 bp, Homo sapiens
gaagctctctggtga

SEQ ID NO: 2019061 - DNA, 15 bp, Homo sapiens
aagctctctggtgag

SEQ ID NO: 2019062 - DNA, 15 bp, Homo sapiens
agctctctggtgaga

SEQ ID NO: 2019063 - DNA, 15 bp, Homo sapiens
gctctctggtgagaa

SEQ ID NO: 2019064 - DNA, 15 bp, Homo sapiens
ctctctggtgagaaa

SEQ ID NO: 2019065 - DNA, 15 bp, Homo sapiens
tctctggtgagaaaa

SEQ ID NO: 2019066 - DNA, 15 bp, Homo sapiens
ctctggtgagaaaat

SEQ ID NO: 2019067 - DNA, 15 bp, Homo sapiens
tctggtgagaaaatg

SEQ ID NO: 2019068 - DNA, 15 bp, Homo sapiens
ctggtgagaaaatgt

SEQ ID NO: 2019069 - DNA, 15 bp, Homo sapiens
tggtgagaaaatgtt

SEQ ID NO: 2019070 - DNA, 15 bp, Homo sapiens
ggtgagaaaatgttt

SEQ ID NO: 2019071 - DNA, 15 bp, Homo sapiens
gtgagaaaatgtttg

SEQ ID NO: 2019072 - DNA, 15 bp, Homo sapiens
tgagaaaatgtttga

SEQ ID NO: 2019073 - DNA, 15 bp, Homo sapiens
gagaaaatgtttgac

SEQ ID NO: 2019074 - DNA, 15 bp, Homo sapiens
agaaaatgtttgacc

SEQ ID NO: 2019075 - DNA, 15 bp, Homo sapiens
gaaaatgtttgacca

SEQ ID NO: 2019076 - DNA, 15 bp, Homo sapiens
aaaatgtttgaccag

SEQ ID NO: 2019077 - DNA, 15 bp, Homo sapiens
aaatgtttgaccagt

SEQ ID NO: 2019078 - DNA, 15 bp, Homo sapiens
aatgtttgaccagta

SEQ ID NO: 2019079 - DNA, 15 bp, Homo sapiens
atgtttgaccagtat

SEQ ID NO: 2019080 - DNA, 15 bp, Homo sapiens
tgtttgaccagtatg

SEQ ID NO: 2019081 - DNA, 15 bp, Homo sapiens
gtttgaccagtatgt

SEQ ID NO: 2019082 - DNA, 15 bp, Homo sapiens
tttgaccagtatgtt

SEQ ID NO: 2019083 - DNA, 15 bp, Homo sapiens
ttgaccagtatgttg

SEQ ID NO: 2019084 - DNA, 15 bp, Homo sapiens
tgaccagtatgttga

SEQ ID NO: 2019085 - DNA, 15 bp, Homo sapiens
gaccagtatgttgaa

SEQ ID NO: 2019086 - DNA, 15 bp, Homo sapiens
accagtatgttgaat

SEQ ID NO: 2019087 - DNA, 15 bp, Homo sapiens
ccagtatgttgaata

SEQ ID NO: 2019088 - DNA, 15 bp, Homo sapiens
cagtatgttgaatat

SEQ ID NO: 2019089 - DNA, 15 bp, Homo sapiens
agtatgttgaatatg

SEQ ID NO: 2019090 - DNA, 15 bp, Homo sapiens
gtatgttgaatatga

SEQ ID NO: 2019091 - DNA, 15 bp, Homo sapiens
tatgttgaatatgaa

SEQ ID NO: 2019092 - DNA, 15 bp, Homo sapiens
atgttgaatatgaaa

SEQ ID NO: 2019093 - DNA, 15 bp, Homo sapiens
tgttgaatatgaaag

SEQ ID NO: 2019094 - DNA, 15 bp, Homo sapiens
gttgaatatgaaagt

SEQ ID NO: 2019095 - DNA, 15 bp, Homo sapiens
ttgaatatgaaagta

SEQ ID NO: 2019096 - DNA, 15 bp, Homo sapiens
tgaatatgaaagtaa

SEQ ID NO: 2019097 - DNA, 15 bp, Homo sapiens
gaatatgaaagtaat

SEQ ID NO: 2019098 - DNA, 15 bp, Homo sapiens
aatatgaaagtaatt

SEQ ID NO: 2019099 - DNA, 15 bp, Homo sapiens
atatgaaagtaattt

SEQ ID NO: 2019100 - DNA, 15 bp, Homo sapiens
tatgaaagtaatttc

SEQ ID NO: 2019101 - DNA, 15 bp, Homo sapiens
atgaaagtaatttcc

SEQ ID NO: 2019102 - DNA, 15 bp, Homo sapiens
tgaaagtaatttcct

SEQ ID NO: 2019103 - DNA, 15 bp, Homo sapiens
gaaagtaatttccta

SEQ ID NO: 2019104 - DNA, 15 bp, Homo sapiens
aaagtaatttcctat

SEQ ID NO: 2019105 - DNA, 15 bp, Homo sapiens
aagtaatttcctatt

SEQ ID NO: 2019106 - DNA, 15 bp, Homo sapiens
agtaatttcctattt

SEQ ID NO: 2019107 - DNA, 15 bp, Homo sapiens
gtaatttcctatttt

SEQ ID NO: 2019108 - DNA, 15 bp, Homo sapiens
taatttcctattttt

SEQ ID NO: 2019109 - DNA, 15 bp, Homo sapiens
aatttcctattttta

SEQ ID NO: 2019110 - DNA, 15 bp, Homo sapiens
atttcctatttttat

SEQ ID NO: 2019111 - DNA, 15 bp, Homo sapiens
tttcctatttttatg

SEQ ID NO: 2019112 - DNA, 15 bp, Homo sapiens
ttcctatttttatga

SEQ ID NO: 2019113 - DNA, 15 bp, Homo sapiens
tcctatttttatgat

SEQ ID NO: 2019114 - DNA, 15 bp, Homo sapiens
cctatttttatgatg

SEQ ID NO: 2019115 - DNA, 15 bp, Homo sapiens
ctatttttatgatga

SEQ ID NO: 2019116 - DNA, 15 bp, Homo sapiens
tatttttatgatgat

SEQ ID NO: 2019117 - DNA, 15 bp, Homo sapiens
atttttatgatgata

SEQ ID NO: 2019118 - DNA, 15 bp, Homo sapiens
tttttatgatgatat

SEQ ID NO: 2019119 - DNA, 15 bp, Homo sapiens
ttttatgatgatatt

SEQ ID NO: 2019120 - DNA, 15 bp, Homo sapiens
tttatgatgatatta

SEQ ID NO: 2019121 - DNA, 15 bp, Homo sapiens
ttatgatgatattaa

SEQ ID NO: 2019122 - DNA, 15 bp, Homo sapiens
tatgatgatattaat

SEQ ID NO: 2019123 - DNA, 15 bp, Homo sapiens
atgatgatattaatt

SEQ ID NO: 2019124 - DNA, 15 bp, Homo sapiens
tgatgatattaattt

SEQ ID NO: 2019125 - DNA, 15 bp, Homo sapiens
gatgatattaatttc

SEQ ID NO: 2019126 - DNA, 15 bp, Homo sapiens
atgatattaatttct

SEQ ID NO: 2019127 - DNA, 15 bp, Homo sapiens
tgatattaatttctt

SEQ ID NO: 2019128 - DNA, 15 bp, Homo sapiens
gatattaatttcttt

SEQ ID NO: 2019129 - DNA, 15 bp, Homo sapiens
atattaatttctttt

SEQ ID NO: 2019130 - DNA, 15 bp, Homo sapiens
tattaatttctttta

SEQ ID NO: 2019131 - DNA, 15 bp, Homo sapiens
attaatttcttttaa

SEQ ID NO: 2019132 - DNA, 15 bp, Homo sapiens
ttaatttcttttaat

SEQ ID NO: 2019133 - DNA, 15 bp, Homo sapiens
taatttcttttaatt

SEQ ID NO: 2019134 - DNA, 15 bp, Homo sapiens
aatttcttttaattt

SEQ ID NO: 2019135 - DNA, 15 bp, Homo sapiens
atttcttttaatttt

SEQ ID NO: 2019136 - DNA, 15 bp, Homo sapiens
tttcttttaattttc

SEQ ID NO: 2019137 - DNA, 15 bp, Homo sapiens
ttcttttaattttct

SEQ ID NO: 2019138 - DNA, 15 bp, Homo sapiens
tcttttaattttctc

SEQ ID NO: 2019139 - DNA, 15 bp, Homo sapiens
cttttaattttctct

SEQ ID NO: 2019140 - DNA, 15 bp, Homo sapiens
ttttaattttctctg

SEQ ID NO: 2019141 - DNA, 15 bp, Homo sapiens
tttaattttctctga

SEQ ID NO: 2019142 - DNA, 15 bp, Homo sapiens
ttaattttctctgac

SEQ ID NO: 2019143 - DNA, 15 bp, Homo sapiens
taattttctctgaca

SEQ ID NO: 2019144 - DNA, 15 bp, Homo sapiens
aattttctctgacac

SEQ ID NO: 2019145 - DNA, 15 bp, Homo sapiens
attttctctgacacg

SEQ ID NO: 2019146 - DNA, 15 bp, Homo sapiens
ttttctctgacacgt

SEQ ID NO: 2019147 - DNA, 15 bp, Homo sapiens
tttctctgacacgtg

SEQ ID NO: 2019148 - DNA, 15 bp, Homo sapiens
ttctctgacacgtgt

SEQ ID NO: 2019149 - DNA, 15 bp, Homo sapiens
tctctgacacgtgtt

SEQ ID NO: 2019150 - DNA, 15 bp, Homo sapiens
ctctgacacgtgttt

SEQ ID NO: 2019151 - DNA, 15 bp, Homo sapiens
tctgacacgtgttta

SEQ ID NO: 2019152 - DNA, 15 bp, Homo sapiens
ctgacacgtgtttat

SEQ ID NO: 2019153 - DNA, 15 bp, Homo sapiens
tgacacgtgtttatt

SEQ ID NO: 2019154 - DNA, 15 bp, Homo sapiens
gacacgtgtttattt

SEQ ID NO: 2019155 - DNA, 15 bp, Homo sapiens
acacgtgtttattta

SEQ ID NO: 2019156 - DNA, 15 bp, Homo sapiens
cacgtgtttatttat

SEQ ID NO: 2019157 - DNA, 15 bp, Homo sapiens
acgtgtttatttatg

SEQ ID NO: 2019158 - DNA, 15 bp, Homo sapiens
cgtgtttatttatga

SEQ ID NO: 2019159 - DNA, 15 bp, Homo sapiens
gtgtttatttatgac

SEQ ID NO: 2019160 - DNA, 15 bp, Homo sapiens
tgtttatttatgacc

SEQ ID NO: 2019161 - DNA, 15 bp, Homo sapiens
gtttatttatgaccc

SEQ ID NO: 2019162 - DNA, 15 bp, Homo sapiens
tttatttatgaccct

SEQ ID NO: 2019163 - DNA, 15 bp, Homo sapiens
ttatttatgaccctt

SEQ ID NO: 2019164 - DNA, 15 bp, Homo sapiens
tatttatgacccttg

SEQ ID NO: 2019165 - DNA, 15 bp, Homo sapiens
atttatgacccttga

SEQ ID NO: 2019166 - DNA, 15 bp, Homo sapiens
tttatgacccttgat

SEQ ID NO: 2019167 - DNA, 15 bp, Homo sapiens
ttatgacccttgatt

SEQ ID NO: 2019168 - DNA, 15 bp, Homo sapiens
tatgacccttgattc

SEQ ID NO: 2019169 - DNA, 15 bp, Homo sapiens
atgacccttgattca

SEQ ID NO: 2019170 - DNA, 15 bp, Homo sapiens
tgacccttgattcaa

SEQ ID NO: 2019171 - DNA, 15 bp, Homo sapiens
gacccttgattcaag

SEQ ID NO: 2019172 - DNA, 15 bp, Homo sapiens
acccttgattcaagg

SEQ ID NO: 2019173 - DNA, 15 bp, Homo sapiens
cccttgattcaagga

SEQ ID NO: 2019174 - DNA, 15 bp, Homo sapiens
ccttgattcaaggag

SEQ ID NO: 2019175 - DNA, 15 bp, Homo sapiens
cttgattcaaggagt

SEQ ID NO: 2019176 - DNA, 15 bp, Homo sapiens
ttgattcaaggagtg

SEQ ID NO: 2019177 - DNA, 15 bp, Homo sapiens
tgattcaaggagtgc

SEQ ID NO: 2019178 - DNA, 15 bp, Homo sapiens
gattcaaggagtgct

SEQ ID NO: 2019179 - DNA, 15 bp, Homo sapiens
attcaaggagtgctt

SEQ ID NO: 2019180 - DNA, 15 bp, Homo sapiens
ttcaaggagtgcttt

SEQ ID NO: 2019181 - DNA, 15 bp, Homo sapiens
tcaaggagtgctttg

SEQ ID NO: 2019182 - DNA, 15 bp, Homo sapiens
caaggagtgctttgt

SEQ ID NO: 2019183 - DNA, 15 bp, Homo sapiens
aaggagtgctttgtg

SEQ ID NO: 2019184 - DNA, 15 bp, Homo sapiens
aggagtgctttgtgt

SEQ ID NO: 2019185 - DNA, 15 bp, Homo sapiens
ggagtgctttgtgtt

SEQ ID NO: 2019186 - DNA, 15 bp, Homo sapiens
gagtgctttgtgtta

SEQ ID NO: 2019187 - DNA, 15 bp, Homo sapiens
agtgctttgtgttac

SEQ ID NO: 2019188 - DNA, 15 bp, Homo sapiens
gtgctttgtgttact

SEQ ID NO: 2019189 - DNA, 15 bp, Homo sapiens
tgctttgtgttactc

SEQ ID NO: 2019190 - DNA, 15 bp, Homo sapiens
gctttgtgttactcc

SEQ ID NO: 2019191 - DNA, 15 bp, Homo sapiens
ctttgtgttactcct

SEQ ID NO: 2019192 - DNA, 15 bp, Homo sapiens
tttgtgttactcctg

SEQ ID NO: 2019193 - DNA, 15 bp, Homo sapiens
ttgtgttactcctgg

SEQ ID NO: 2019194 - DNA, 15 bp, Homo sapiens
tgtgttactcctgga

SEQ ID NO: 2019195 - DNA, 15 bp, Homo sapiens
gtgttactcctggat

SEQ ID NO: 2019196 - DNA, 15 bp, Homo sapiens
tgttactcctggatg

SEQ ID NO: 2019197 - DNA, 15 bp, Homo sapiens
gttactcctggatgt

SEQ ID NO: 2019198 - DNA, 15 bp, Homo sapiens
ttactcctggatgta

SEQ ID NO: 2019199 - DNA, 15 bp, Homo sapiens
tactcctggatgtac

SEQ ID NO: 2019200 - DNA, 15 bp, Homo sapiens
actcctggatgtact

SEQ ID NO: 2019201 - DNA, 15 bp, Homo sapiens
ctcctggatgtactg

SEQ ID NO: 2019202 - DNA, 15 bp, Homo sapiens
tcctggatgtactgg

SEQ ID NO: 2019203 - DNA, 15 bp, Homo sapiens
cctggatgtactggt

SEQ ID NO: 2019204 - DNA, 15 bp, Homo sapiens
ctggatgtactggtg

SEQ ID NO: 2019205 - DNA, 15 bp, Homo sapiens
tggatgtactggtgc

SEQ ID NO: 2019206 - DNA, 15 bp, Homo sapiens
ggatgtactggtgca

SEQ ID NO: 2019207 - DNA, 15 bp, Homo sapiens
gatgtactggtgcac

SEQ ID NO: 2019208 - DNA, 15 bp, Homo sapiens
atgtactggtgcaca

SEQ ID NO: 2019209 - DNA, 15 bp, Homo sapiens
tgtactggtgcacaa

SEQ ID NO: 2019210 - DNA, 15 bp, Homo sapiens
gtactggtgcacaat

SEQ ID NO: 2019211 - DNA, 15 bp, Homo sapiens
tactggtgcacaatc

SEQ ID NO: 2019212 - DNA, 15 bp, Homo sapiens
actggtgcacaatct

SEQ ID NO: 2019213 - DNA, 15 bp, Homo sapiens
ctggtgcacaatctc

SEQ ID NO: 2019214 - DNA, 15 bp, Homo sapiens
tggtgcacaatctca

SEQ ID NO: 2019215 - DNA, 15 bp, Homo sapiens
ggtgcacaatctcaa

SEQ ID NO: 2019216 - DNA, 15 bp, Homo sapiens
gtgcacaatctcaaa

SEQ ID NO: 2019217 - DNA, 15 bp, Homo sapiens
tgcacaatctcaaat

SEQ ID NO: 2019218 - DNA, 15 bp, Homo sapiens
gcacaatctcaaatt

SEQ ID NO: 2019219 - DNA, 15 bp, Homo sapiens
cacaatctcaaattt

SEQ ID NO: 2019220 - DNA, 15 bp, Homo sapiens
acaatctcaaatttt

SEQ ID NO: 2019221 - DNA, 15 bp, Homo sapiens
caatctcaaattttc

SEQ ID NO: 2019222 - DNA, 15 bp, Homo sapiens
aatctcaaattttca

SEQ ID NO: 2019223 - DNA, 15 bp, Homo sapiens
atctcaaattttcaa

SEQ ID NO: 2019224 - DNA, 15 bp, Homo sapiens
tctcaaattttcaat

SEQ ID NO: 2019225 - DNA, 15 bp, Homo sapiens
ctcaaattttcaatt

SEQ ID NO: 2019226 - DNA, 15 bp, Homo sapiens
tcaaattttcaattt

SEQ ID NO: 2019227 - DNA, 15 bp, Homo sapiens
caaattttcaatttt

SEQ ID NO: 2019228 - DNA, 15 bp, Homo sapiens
aaattttcaattttt

SEQ ID NO: 2019229 - DNA, 15 bp, Homo sapiens
aattttcaatttttg

SEQ ID NO: 2019230 - DNA, 15 bp, Homo sapiens
attttcaatttttgc

SEQ ID NO: 2019231 - DNA, 15 bp, Homo sapiens
ttttcaatttttgca

SEQ ID NO: 2019232 - DNA, 15 bp, Homo sapiens
tttcaatttttgcac

SEQ ID NO: 2019233 - DNA, 15 bp, Homo sapiens
ttcaatttttgcaca

SEQ ID NO: 2019234 - DNA, 15 bp, Homo sapiens
tcaatttttgcacag

SEQ ID NO: 2019235 - DNA, 15 bp, Homo sapiens
caatttttgcacaga

SEQ ID NO: 2019236 - DNA, 15 bp, Homo sapiens
aatttttgcacagaa

SEQ ID NO: 2019237 - DNA, 15 bp, Homo sapiens
atttttgcacagaat

SEQ ID NO: 2019238 - DNA, 15 bp, Homo sapiens
tttttgcacagaatg

SEQ ID NO: 2019239 - DNA, 15 bp, Homo sapiens
ttttgcacagaatgg

SEQ ID NO: 2019240 - DNA, 15 bp, Homo sapiens
tttgcacagaatggg

SEQ ID NO: 2019241 - DNA, 15 bp, Homo sapiens
ttgcacagaatggga

SEQ ID NO: 2019242 - DNA, 15 bp, Homo sapiens
tgcacagaatgggaa

SEQ ID NO: 2019243 - DNA, 15 bp, Homo sapiens
gcacagaatgggaag

SEQ ID NO: 2019244 - DNA, 15 bp, Homo sapiens
cacagaatgggaagt

SEQ ID NO: 2019245 - DNA, 15 bp, Homo sapiens
acagaatgggaagtc

SEQ ID NO: 2019246 - DNA, 15 bp, Homo sapiens
cagaatgggaagtct

SEQ ID NO: 2019247 - DNA, 15 bp, Homo sapiens
agaatgggaagtctg

SEQ ID NO: 2019248 - DNA, 15 bp, Homo sapiens
gaatgggaagtctgc

SEQ ID NO: 2019249 - DNA, 15 bp, Homo sapiens
aatgggaagtctgcc

SEQ ID NO: 2019250 - DNA, 15 bp, Homo sapiens
atgggaagtctgccc

SEQ ID NO: 2019251 - DNA, 15 bp, Homo sapiens
tgggaagtctgccca

SEQ ID NO: 2019252 - DNA, 15 bp, Homo sapiens
gggaagtctgcccag

SEQ ID NO: 2019253 - DNA, 15 bp, Homo sapiens
ggaagtctgcccagt

SEQ ID NO: 2019254 - DNA, 15 bp, Homo sapiens
gaagtctgcccagtt

SEQ ID NO: 2019255 - DNA, 15 bp, Homo sapiens
aagtctgcccagttt

SEQ ID NO: 2019256 - DNA, 15 bp, Homo sapiens
agtctgcccagtttc

SEQ ID NO: 2019257 - DNA, 15 bp, Homo sapiens
gtctgcccagtttca

SEQ ID NO: 2019258 - DNA, 15 bp, Homo sapiens
tctgcccagtttcat

SEQ ID NO: 2019259 - DNA, 15 bp, Homo sapiens
ctgcccagtttcatt

SEQ ID NO: 2019260 - DNA, 15 bp, Homo sapiens
tgcccagtttcattt

SEQ ID NO: 2019261 - DNA, 15 bp, Homo sapiens
gcccagtttcatttc

SEQ ID NO: 2019262 - DNA, 15 bp, Homo sapiens
cccagtttcatttct

SEQ ID NO: 2019263 - DNA, 15 bp, Homo sapiens
ccagtttcatttcta

SEQ ID NO: 2019264 - DNA, 15 bp, Homo sapiens
cagtttcatttctaa

SEQ ID NO: 2019265 - DNA, 15 bp, Homo sapiens
agtttcatttctaat

SEQ ID NO: 2019266 - DNA, 15 bp, Homo sapiens
gtttcatttctaatc

SEQ ID NO: 2019267 - DNA, 15 bp, Homo sapiens
tttcatttctaatct

SEQ ID NO: 2019268 - DNA, 15 bp, Homo sapiens
ttcatttctaatctg

SEQ ID NO: 2019269 - DNA, 15 bp, Homo sapiens
tcatttctaatctgg

SEQ ID NO: 2019270 - DNA, 15 bp, Homo sapiens
catttctaatctggg

SEQ ID NO: 2019271 - DNA, 15 bp, Homo sapiens
atttctaatctgggt

SEQ ID NO: 2019272 - DNA, 15 bp, Homo sapiens
tttctaatctgggtt

SEQ ID NO: 2019273 - DNA, 15 bp, Homo sapiens
ttctaatctgggtta

SEQ ID NO: 2019274 - DNA, 15 bp, Homo sapiens
tctaatctgggttat

SEQ ID NO: 2019275 - DNA, 15 bp, Homo sapiens
ctaatctgggttatt

SEQ ID NO: 2019276 - DNA, 15 bp, Homo sapiens
taatctgggttattt

SEQ ID NO: 2019277 - DNA, 15 bp, Homo sapiens
aatctgggttatttt

SEQ ID NO: 2019278 - DNA, 15 bp, Homo sapiens
atctgggttattttt

SEQ ID NO: 2019279 - DNA, 15 bp, Homo sapiens
tctgggttatttttc

SEQ ID NO: 2019280 - DNA, 15 bp, Homo sapiens
ctgggttatttttcc

SEQ ID NO: 2019281 - DNA, 15 bp, Homo sapiens
tgggttatttttccc

SEQ ID NO: 2019282 - DNA, 15 bp, Homo sapiens
gggttatttttcccc

SEQ ID NO: 2019283 - DNA, 15 bp, Homo sapiens
ggttatttttcccct

SEQ ID NO: 2019284 - DNA, 15 bp, Homo sapiens
gttatttttcccctc

SEQ ID NO: 2019285 - DNA, 15 bp, Homo sapiens
ttatttttcccctca

SEQ ID NO: 2019286 - DNA, 15 bp, Homo sapiens
tatttttcccctcaa

SEQ ID NO: 2019287 - DNA, 15 bp, Homo sapiens
atttttcccctcaaa

SEQ ID NO: 2019288 - DNA, 15 bp, Homo sapiens
tttttcccctcaaaa

SEQ ID NO: 2019289 - DNA, 15 bp, Homo sapiens
ttttcccctcaaaag

SEQ ID NO: 2019290 - DNA, 15 bp, Homo sapiens
tttcccctcaaaaga

SEQ ID NO: 2019291 - DNA, 15 bp, Homo sapiens
ttcccctcaaaagat

SEQ ID NO: 2019292 - DNA, 15 bp, Homo sapiens
tcccctcaaaagata

SEQ ID NO: 2019293 - DNA, 15 bp, Homo sapiens
cccctcaaaagataa

SEQ ID NO: 2019294 - DNA, 15 bp, Homo sapiens
ccctcaaaagataac

SEQ ID NO: 2019295 - DNA, 15 bp, Homo sapiens
cctcaaaagataacc

SEQ ID NO: 2019296 - DNA, 15 bp, Homo sapiens
ctcaaaagataacct

SEQ ID NO: 2019297 - DNA, 15 bp, Homo sapiens
tcaaaagataacctg

SEQ ID NO: 2019298 - DNA, 15 bp, Homo sapiens
caaaagataacctga

SEQ ID NO: 2019299 - DNA, 15 bp, Homo sapiens
aaaagataacctgat

SEQ ID NO: 2019300 - DNA, 15 bp, Homo sapiens
aaagataacctgatt

SEQ ID NO: 2019301 - DNA, 15 bp, Homo sapiens
aagataacctgattt

SEQ ID NO: 2019302 - DNA, 15 bp, Homo sapiens
agataacctgatttc

SEQ ID NO: 2019303 - DNA, 15 bp, Homo sapiens
gataacctgatttca

SEQ ID NO: 2019304 - DNA, 15 bp, Homo sapiens
ataacctgatttcag

SEQ ID NO: 2019305 - DNA, 15 bp, Homo sapiens
taacctgatttcagt

SEQ ID NO: 2019306 - DNA, 15 bp, Homo sapiens
aacctgatttcagtc

SEQ ID NO: 2019307 - DNA, 15 bp, Homo sapiens
acctgatttcagtca

SEQ ID NO: 2019308 - DNA, 15 bp, Homo sapiens
cctgatttcagtcac

SEQ ID NO: 2019309 - DNA, 15 bp, Homo sapiens
ctgatttcagtcacc

SEQ ID NO: 2019310 - DNA, 15 bp, Homo sapiens
tgatttcagtcacca

SEQ ID NO: 2019311 - DNA, 15 bp, Homo sapiens
gatttcagtcaccat

SEQ ID NO: 2019312 - DNA, 15 bp, Homo sapiens
atttcagtcaccatg

SEQ ID NO: 2019313 - DNA, 15 bp, Homo sapiens
tttcagtcaccatga

SEQ ID NO: 2019314 - DNA, 15 bp, Homo sapiens
ttcagtcaccatgac

SEQ ID NO: 2019315 - DNA, 15 bp, Homo sapiens
tcagtcaccatgact

SEQ ID NO: 2019316 - DNA, 15 bp, Homo sapiens
cagtcaccatgactg

SEQ ID NO: 2019317 - DNA, 15 bp, Homo sapiens
agtcaccatgactgg

SEQ ID NO: 2019318 - DNA, 15 bp, Homo sapiens
gtcaccatgactggc

SEQ ID NO: 2019319 - DNA, 15 bp, Homo sapiens
tcaccatgactggca

SEQ ID NO: 2019320 - DNA, 15 bp, Homo sapiens
caccatgactggcat

SEQ ID NO: 2019321 - DNA, 15 bp, Homo sapiens
accatgactggcatg

SEQ ID NO: 2019322 - DNA, 15 bp, Homo sapiens
ccatgactggcatga

SEQ ID NO: 2019323 - DNA, 15 bp, Homo sapiens
catgactggcatgaa

SEQ ID NO: 2019324 - DNA, 15 bp, Homo sapiens
atgactggcatgaat

SEQ ID NO: 2019325 - DNA, 15 bp, Homo sapiens
tgactggcatgaata

SEQ ID NO: 2019326 - DNA, 15 bp, Homo sapiens
gactggcatgaatat

SEQ ID NO: 2019327 - DNA, 15 bp, Homo sapiens
actggcatgaatatt

SEQ ID NO: 2019328 - DNA, 15 bp, Homo sapiens
ctggcatgaatattc

SEQ ID NO: 2019329 - DNA, 15 bp, Homo sapiens
tggcatgaatattct

SEQ ID NO: 2019330 - DNA, 15 bp, Homo sapiens
ggcatgaatattctc

SEQ ID NO: 2019331 - DNA, 15 bp, Homo sapiens
gcatgaatattctca

SEQ ID NO: 2019332 - DNA, 15 bp, Homo sapiens
atgaatattctcatg

SEQ ID NO: 2019333 - DNA, 15 bp, Homo sapiens
tgaatattctcatgc

SEQ ID NO: 2019334 - DNA, 15 bp, Homo sapiens
gaatattctcatgct

SEQ ID NO: 2019335 - DNA, 15 bp, Homo sapiens
aatattctcatgctt

SEQ ID NO: 2019336 - DNA, 15 bp, Homo sapiens
atattctcatgcttt

SEQ ID NO: 2019337 - DNA, 15 bp, Homo sapiens
tattctcatgctttc

SEQ ID NO: 2019338 - DNA, 15 bp, Homo sapiens
attctcatgctttcc

SEQ ID NO: 2019339 - DNA, 15 bp, Homo sapiens
ttctcatgctttcct

SEQ ID NO: 2019340 - DNA, 15 bp, Homo sapiens
tctcatgctttcctt

SEQ ID NO: 2019341 - DNA, 15 bp, Homo sapiens
ctcatgctttccttt

SEQ ID NO: 2019342 - DNA, 15 bp, Homo sapiens
tcatgctttcctttt

SEQ ID NO: 2019343 - DNA, 15 bp, Homo sapiens
catgctttccttttt

SEQ ID NO: 2019344 - DNA, 15 bp, Homo sapiens
atgctttccttttta

SEQ ID NO: 2019345 - DNA, 15 bp, Homo sapiens
tgctttcctttttac

SEQ ID NO: 2019346 - DNA, 15 bp, Homo sapiens
gctttcctttttact

SEQ ID NO: 2019347 - DNA, 15 bp, Homo sapiens
ctttcctttttactt

SEQ ID NO: 2019348 - DNA, 15 bp, Homo sapiens
tttcctttttacttt

SEQ ID NO: 2019349 - DNA, 15 bp, Homo sapiens
ttcctttttactttg

SEQ ID NO: 2019350 - DNA, 15 bp, Homo sapiens
tcctttttactttgt

SEQ ID NO: 2019351 - DNA, 15 bp, Homo sapiens
cctttttactttgtt

SEQ ID NO: 2019352 - DNA, 15 bp, Homo sapiens
ctttttactttgtta

SEQ ID NO: 2019353 - DNA, 15 bp, Homo sapiens
tttttactttgttaa

SEQ ID NO: 2019354 - DNA, 15 bp, Homo sapiens
ttttactttgttaac

SEQ ID NO: 2019355 - DNA, 15 bp, Homo sapiens
tttactttgttaaca

SEQ ID NO: 2019356 - DNA, 15 bp, Homo sapiens
ttactttgttaacac

SEQ ID NO: 2019357 - DNA, 15 bp, Homo sapiens
tactttgttaacact

SEQ ID NO: 2019358 - DNA, 15 bp, Homo sapiens
actttgttaacactt

SEQ ID NO: 2019359 - DNA, 15 bp, Homo sapiens
ctttgttaacactta

SEQ ID NO: 2019360 - DNA, 15 bp, Homo sapiens
tttgttaacacttaa

SEQ ID NO: 2019361 - DNA, 15 bp, Homo sapiens
ttgttaacacttaac

SEQ ID NO: 2019362 - DNA, 15 bp, Homo sapiens
tgttaacacttaact

SEQ ID NO: 2019363 - DNA, 15 bp, Homo sapiens
gttaacacttaactt

SEQ ID NO: 2019364 - DNA, 15 bp, Homo sapiens
ttaacacttaacttt

SEQ ID NO: 2019365 - DNA, 15 bp, Homo sapiens
taacacttaacttta

SEQ ID NO: 2019366 - DNA, 15 bp, Homo sapiens
aacacttaactttat

SEQ ID NO: 2019367 - DNA, 15 bp, Homo sapiens
acacttaactttatc

SEQ ID NO: 2019368 - DNA, 15 bp, Homo sapiens
cacttaactttatct

SEQ ID NO: 2019369 - DNA, 15 bp, Homo sapiens
acttaactttatctg

SEQ ID NO: 2019370 - DNA, 15 bp, Homo sapiens
cttaactttatctgg

SEQ ID NO: 2019371 - DNA, 15 bp, Homo sapiens
ttaactttatctgga

SEQ ID NO: 2019372 - DNA, 15 bp, Homo sapiens
taactttatctggaa

SEQ ID NO: 2019373 - DNA, 15 bp, Homo sapiens
aactttatctggaat

SEQ ID NO: 2019374 - DNA, 15 bp, Homo sapiens
actttatctggaata

SEQ ID NO: 2019375 - DNA, 15 bp, Homo sapiens
ctttatctggaataa

SEQ ID NO: 2019376 - DNA, 15 bp, Homo sapiens
tttatctggaataat

SEQ ID NO: 2019377 - DNA, 15 bp, Homo sapiens
ttatctggaataata

SEQ ID NO: 2019378 - DNA, 15 bp, Homo sapiens
tatctggaataatat

SEQ ID NO: 2019379 - DNA, 15 bp, Homo sapiens
atctggaataatatt

SEQ ID NO: 2019380 - DNA, 15 bp, Homo sapiens
tctggaataatattg

SEQ ID NO: 2019381 - DNA, 15 bp, Homo sapiens
ctggaataatattgt

SEQ ID NO: 2019382 - DNA, 15 bp, Homo sapiens
tggaataatattgtt

SEQ ID NO: 2019383 - DNA, 15 bp, Homo sapiens
ggaataatattgtta

SEQ ID NO: 2019384 - DNA, 15 bp, Homo sapiens
aataatattgttatg

SEQ ID NO: 2019385 - DNA, 15 bp, Homo sapiens
ataatattgttatga

SEQ ID NO: 2019386 - DNA, 15 bp, Homo sapiens
taatattgttatgat

SEQ ID NO: 2019387 - DNA, 15 bp, Homo sapiens
aatattgttatgatt

SEQ ID NO: 2019388 - DNA, 15 bp, Homo sapiens
atattgttatgattt

SEQ ID NO: 2019389 - DNA, 15 bp, Homo sapiens
tattgttatgatttc

SEQ ID NO: 2019390 - DNA, 15 bp, Homo sapiens
attgttatgatttct

SEQ ID NO: 2019391 - DNA, 15 bp, Homo sapiens
ttgttatgatttctc

SEQ ID NO: 2019392 - DNA, 15 bp, Homo sapiens
tgttatgatttctcg

SEQ ID NO: 2019393 - DNA, 15 bp, Homo sapiens
gttatgatttctcgt

SEQ ID NO: 2019394 - DNA, 15 bp, Homo sapiens
ttatgatttctcgtt

SEQ ID NO: 2019395 - DNA, 15 bp, Homo sapiens
tatgatttctcgttt

SEQ ID NO: 2019396 - DNA, 15 bp, Homo sapiens
atgatttctcgttta

SEQ ID NO: 2019397 - DNA, 15 bp, Homo sapiens
tgatttctcgtttag

SEQ ID NO: 2019398 - DNA, 15 bp, Homo sapiens
gatttctcgtttaga

SEQ ID NO: 2019399 - DNA, 15 bp, Homo sapiens
atttctcgtttagag

SEQ ID NO: 2019400 - DNA, 15 bp, Homo sapiens
tttctcgtttagaga

SEQ ID NO: 2019401 - DNA, 15 bp, Homo sapiens
ttctcgtttagagaa

SEQ ID NO: 2019402 - DNA, 15 bp, Homo sapiens
tctcgtttagagaat

SEQ ID NO: 2019403 - DNA, 15 bp, Homo sapiens
ctcgtttagagaata

SEQ ID NO: 2019404 - DNA, 15 bp, Homo sapiens
tcgtttagagaatag

SEQ ID NO: 2019405 - DNA, 15 bp, Homo sapiens
cgtttagagaataga

SEQ ID NO: 2019406 - DNA, 15 bp, Homo sapiens
gtttagagaatagat

SEQ ID NO: 2019407 - DNA, 15 bp, Homo sapiens
tttagagaatagatt

SEQ ID NO: 2019408 - DNA, 15 bp, Homo sapiens
ttagagaatagattt

SEQ ID NO: 2019409 - DNA, 15 bp, Homo sapiens
tagagaatagatttg

SEQ ID NO: 2019410 - DNA, 15 bp, Homo sapiens
agagaatagatttgt

SEQ ID NO: 2019411 - DNA, 15 bp, Homo sapiens
gagaatagatttgtt

SEQ ID NO: 2019412 - DNA, 15 bp, Homo sapiens
agaatagatttgttt

SEQ ID NO: 2019413 - DNA, 15 bp, Homo sapiens
gaatagatttgtttt

SEQ ID NO: 2019414 - DNA, 15 bp, Homo sapiens
aatagatttgttttt

SEQ ID NO: 2019415 - DNA, 15 bp, Homo sapiens
atagatttgtttttt

SEQ ID NO: 2019416 - DNA, 15 bp, Homo sapiens
tagatttgtttttta

SEQ ID NO: 2019417 - DNA, 15 bp, Homo sapiens
agatttgttttttac

SEQ ID NO: 2019418 - DNA, 15 bp, Homo sapiens
gatttgttttttaca

SEQ ID NO: 2019419 - DNA, 15 bp, Homo sapiens
atttgttttttacaa

SEQ ID NO: 2019420 - DNA, 15 bp, Homo sapiens
tttgttttttacaaa

SEQ ID NO: 2019421 - DNA, 15 bp, Homo sapiens
ttgttttttacaaat

SEQ ID NO: 2019422 - DNA, 15 bp, Homo sapiens
tgttttttacaaatt

SEQ ID NO: 2019423 - DNA, 15 bp, Homo sapiens
gttttttacaaattg

SEQ ID NO: 2019424 - DNA, 15 bp, Homo sapiens
ttttttacaaattgc

SEQ ID NO: 2019425 - DNA, 15 bp, Homo sapiens
tttttacaaattgct

SEQ ID NO: 2019426 - DNA, 15 bp, Homo sapiens
ttttacaaattgcta

SEQ ID NO: 2019427 - DNA, 15 bp, Homo sapiens
tttacaaattgctaa

SEQ ID NO: 2019428 - DNA, 15 bp, Homo sapiens
ttacaaattgctaat

SEQ ID NO: 2019429 - DNA, 15 bp, Homo sapiens
tacaaattgctaata

SEQ ID NO: 2019430 - DNA, 15 bp, Homo sapiens
acaaattgctaataa

SEQ ID NO: 2019431 - DNA, 15 bp, Homo sapiens
caaattgctaataaa

SEQ ID NO: 2019432 - DNA, 15 bp, Homo sapiens
aaattgctaataaat

SEQ ID NO: 2019433 - DNA, 15 bp, Homo sapiens
aattgctaataaatt

SEQ ID NO: 2019434 - DNA, 15 bp, Homo sapiens
attgctaataaattg

SEQ ID NO: 2019435 - DNA, 15 bp, Homo sapiens
ttgctaataaattga

SEQ ID NO: 2019436 - DNA, 15 bp, Homo sapiens
tgctaataaattgat

SEQ ID NO: 2019437 - DNA, 15 bp, Homo sapiens
gctaataaattgata

SEQ ID NO: 2019438 - DNA, 15 bp, Homo sapiens
ctaataaattgataa

SEQ ID NO: 2019439 - DNA, 15 bp, Homo sapiens
taataaattgataat

SEQ ID NO: 2019440 - DNA, 15 bp, Homo sapiens
aataaattgataata

SEQ ID NO: 2019441 - DNA, 15 bp, Homo sapiens
ataaattgataataa

SEQ ID NO: 2019442 - DNA, 15 bp, Homo sapiens
taaattgataataaa

SEQ ID NO: 2019443 - DNA, 15 bp, Homo sapiens
aaattgataataaaa

SEQ ID NO: 2019444 - DNA, 15 bp, Homo sapiens
aattgataataaaaa

SEQ ID NO: 2019445 - DNA, 15 bp, Homo sapiens
attgataataaaaat

SEQ ID NO: 2019446 - DNA, 15 bp, Homo sapiens
ttgataataaaaatg

SEQ ID NO: 2019447 - DNA, 15 bp, Homo sapiens
tgataataaaaatga

SEQ ID NO: 2019448 - DNA, 15 bp, Homo sapiens
gataataaaaatgat

SEQ ID NO: 2019449 - DNA, 15 bp, Homo sapiens
ataataaaaatgatg

SEQ ID NO: 2019450 - DNA, 15 bp, Homo sapiens
taataaaaatgatgc

SEQ ID NO: 2019451 - DNA, 15 bp, Homo sapiens
aataaaaatgatgct

SEQ ID NO: 2019452 - DNA, 15 bp, Homo sapiens
ataaaaatgatgctt

SEQ ID NO: 2019453 - DNA, 15 bp, Homo sapiens
taaaaatgatgcttt

SEQ ID NO: 2019454 - DNA, 15 bp, Homo sapiens
aaaaatgatgcttta

SEQ ID NO: 2019455 - DNA, 15 bp, Homo sapiens
aaaatgatgctttat

SEQ ID NO: 2019456 - DNA, 15 bp, Homo sapiens
aaatgatgctttatt

SEQ ID NO: 2019457 - DNA, 15 bp, Homo sapiens
aatgatgctttattt

SEQ ID NO: 2019458 - DNA, 15 bp, Homo sapiens
atgatgctttatttt

SEQ ID NO: 2019459 - DNA, 15 bp, Homo sapiens
tgatgctttattttt

SEQ ID NO: 2019460 - DNA, 15 bp, Homo sapiens
gatgctttatttttt

SEQ ID NO: 2019461 - DNA, 15 bp, Homo sapiens
atgctttattttttt

SEQ ID NO: 2019462 - DNA, 15 bp, Homo sapiens
tgctttatttttttc

SEQ ID NO: 2019463 - DNA, 15 bp, Homo sapiens
gctttatttttttcc

SEQ ID NO: 2019464 - DNA, 15 bp, Homo sapiens
ctttatttttttcct

SEQ ID NO: 2019465 - DNA, 15 bp, Homo sapiens
tttatttttttcctc

SEQ ID NO: 2019466 - DNA, 15 bp, Homo sapiens
tatttttttcctctc

SEQ ID NO: 2019467 - DNA, 15 bp, Homo sapiens
atttttttcctctca

SEQ ID NO: 2019468 - DNA, 15 bp, Homo sapiens
tttttttcctctcat

SEQ ID NO: 2019469 - DNA, 15 bp, Homo sapiens
ttttttcctctcatt

SEQ ID NO: 2019470 - DNA, 15 bp, Homo sapiens
tttttcctctcattt

SEQ ID NO: 2019471 - DNA, 15 bp, Homo sapiens
ttttcctctcatttt

SEQ ID NO: 2019472 - DNA, 15 bp, Homo sapiens
tttcctctcatttta

SEQ ID NO: 2019473 - DNA, 15 bp, Homo sapiens
ttcctctcattttaa

SEQ ID NO: 2019474 - DNA, 15 bp, Homo sapiens
tcctctcattttaat

SEQ ID NO: 2019475 - DNA, 15 bp, Homo sapiens
cctctcattttaata

SEQ ID NO: 2019476 - DNA, 15 bp, Homo sapiens
ctctcattttaataa

SEQ ID NO: 2019477 - DNA, 15 bp, Homo sapiens
tctcattttaataat

SEQ ID NO: 2019478 - DNA, 15 bp, Homo sapiens
ctcattttaataata

SEQ ID NO: 2019479 - DNA, 15 bp, Homo sapiens
tcattttaataatag

SEQ ID NO: 2019480 - DNA, 15 bp, Homo sapiens
cattttaataatagc

SEQ ID NO: 2019481 - DNA, 15 bp, Homo sapiens
attttaataatagct

SEQ ID NO: 2019482 - DNA, 15 bp, Homo sapiens
tttaataatagctag

SEQ ID NO: 2019483 - DNA, 15 bp, Homo sapiens
ttaataatagctaga

SEQ ID NO: 2019484 - DNA, 15 bp, Homo sapiens
taataatagctagac

SEQ ID NO: 2019485 - DNA, 15 bp, Homo sapiens
aataatagctagacg

SEQ ID NO: 2019486 - DNA, 15 bp, Homo sapiens
ataatagctagacgt

SEQ ID NO: 2019487 - DNA, 15 bp, Homo sapiens
taatagctagacgtt

SEQ ID NO: 2019488 - DNA, 15 bp, Homo sapiens
aatagctagacgttt

SEQ ID NO: 2019489 - DNA, 15 bp, Homo sapiens
atagctagacgtttg

SEQ ID NO: 2019490 - DNA, 15 bp, Homo sapiens
tagctagacgtttga

SEQ ID NO: 2019491 - DNA, 15 bp, Homo sapiens
agctagacgtttgaa

SEQ ID NO: 2019492 - DNA, 15 bp, Homo sapiens
gctagacgtttgaat

SEQ ID NO: 2019493 - DNA, 15 bp, Homo sapiens
ctagacgtttgaatt

SEQ ID NO: 2019494 - DNA, 15 bp, Homo sapiens
tagacgtttgaattt

SEQ ID NO: 2019495 - DNA, 15 bp, Homo sapiens
agacgtttgaatttg

SEQ ID NO: 2019496 - DNA, 15 bp, Homo sapiens
gacgtttgaatttga

SEQ ID NO: 2019497 - DNA, 15 bp, Homo sapiens
acgtttgaatttgat

SEQ ID NO: 2019498 - DNA, 15 bp, Homo sapiens
cgtttgaatttgatg

SEQ ID NO: 2019499 - DNA, 15 bp, Homo sapiens
gtttgaatttgatga

SEQ ID NO: 2019500 - DNA, 15 bp, Homo sapiens
tttgaatttgatgac

SEQ ID NO: 2019501 - DNA, 15 bp, Homo sapiens
ttgaatttgatgacc

SEQ ID NO: 2019502 - DNA, 15 bp, Homo sapiens
tgaatttgatgacca

SEQ ID NO: 2019503 - DNA, 15 bp, Homo sapiens
gaatttgatgaccaa

SEQ ID NO: 2019504 - DNA, 15 bp, Homo sapiens
aatttgatgaccaag

SEQ ID NO: 2019505 - DNA, 15 bp, Homo sapiens
atttgatgaccaaga

SEQ ID NO: 2019506 - DNA, 15 bp, Homo sapiens
tttgatgaccaagag

SEQ ID NO: 2019507 - DNA, 15 bp, Homo sapiens
ttgatgaccaagagc

SEQ ID NO: 2019508 - DNA, 15 bp, Homo sapiens
tgatgaccaagagca

SEQ ID NO: 2019509 - DNA, 15 bp, Homo sapiens
gatgaccaagagcag

SEQ ID NO: 2019510 - DNA, 15 bp, Homo sapiens
atgaccaagagcagt

SEQ ID NO: 2019511 - DNA, 15 bp, Homo sapiens
tgaccaagagcagtt

SEQ ID NO: 2019512 - DNA, 15 bp, Homo sapiens
gaccaagagcagtta

SEQ ID NO: 2019513 - DNA, 15 bp, Homo sapiens
accaagagcagttat

SEQ ID NO: 2019514 - DNA, 15 bp, Homo sapiens
ccaagagcagttatc

SEQ ID NO: 2019515 - DNA, 15 bp, Homo sapiens
caagagcagttatca

SEQ ID NO: 2019516 - DNA, 15 bp, Homo sapiens
aagagcagttatcac

SEQ ID NO: 2019517 - DNA, 15 bp, Homo sapiens
agagcagttatcacc

SEQ ID NO: 2019518 - DNA, 15 bp, Homo sapiens
gagcagttatcacct

SEQ ID NO: 2019519 - DNA, 15 bp, Homo sapiens
agcagttatcacctt

SEQ ID NO: 2019520 - DNA, 15 bp, Homo sapiens
gcagttatcaccttg

SEQ ID NO: 2019521 - DNA, 15 bp, Homo sapiens
cagttatcaccttga

SEQ ID NO: 2019522 - DNA, 15 bp, Homo sapiens
agttatcaccttgag

SEQ ID NO: 2019523 - DNA, 15 bp, Homo sapiens
gttatcaccttgaga

SEQ ID NO: 2019524 - DNA, 15 bp, Homo sapiens
ttatcaccttgagag

SEQ ID NO: 2019525 - DNA, 15 bp, Homo sapiens
tatcaccttgagagt

SEQ ID NO: 2019526 - DNA, 15 bp, Homo sapiens
atcaccttgagagtt

SEQ ID NO: 2019527 - DNA, 15 bp, Homo sapiens
tcaccttgagagtta

SEQ ID NO: 2019528 - DNA, 15 bp, Homo sapiens
caccttgagagttac

SEQ ID NO: 2019529 - DNA, 15 bp, Homo sapiens
accttgagagttacg

SEQ ID NO: 2019530 - DNA, 15 bp, Homo sapiens
ccttgagagttacgt

SEQ ID NO: 2019531 - DNA, 15 bp, Homo sapiens
cttgagagttacgta

SEQ ID NO: 2019532 - DNA, 15 bp, Homo sapiens
ttgagagttacgtaa

SEQ ID NO: 2019533 - DNA, 15 bp, Homo sapiens
tgagagttacgtaaa

SEQ ID NO: 2019534 - DNA, 15 bp, Homo sapiens
gagagttacgtaaaa

SEQ ID NO: 2019535 - DNA, 15 bp, Homo sapiens
agagttacgtaaaaa

SEQ ID NO: 2019536 - DNA, 15 bp, Homo sapiens
gagttacgtaaaaat

SEQ ID NO: 2019537 - DNA, 15 bp, Homo sapiens
agttacgtaaaaatt

SEQ ID NO: 2019538 - DNA, 15 bp, Homo sapiens
gttacgtaaaaatta

SEQ ID NO: 2019539 - DNA, 15 bp, Homo sapiens
ttacgtaaaaattac

SEQ ID NO: 2019540 - DNA, 15 bp, Homo sapiens
tacgtaaaaattacc

SEQ ID NO: 2019541 - DNA, 15 bp, Homo sapiens
acgtaaaaattacca

SEQ ID NO: 2019542 - DNA, 15 bp, Homo sapiens
cgtaaaaattaccaa

SEQ ID NO: 2019543 - DNA, 15 bp, Homo sapiens
gtaaaaattaccaat

SEQ ID NO: 2019544 - DNA, 15 bp, Homo sapiens
taaaaattaccaatg

SEQ ID NO: 2019545 - DNA, 15 bp, Homo sapiens
aaaaattaccaatgc

SEQ ID NO: 2019546 - DNA, 15 bp, Homo sapiens
aaaattaccaatgct

SEQ ID NO: 2019547 - DNA, 15 bp, Homo sapiens
aaattaccaatgctt

SEQ ID NO: 2019548 - DNA, 15 bp, Homo sapiens
aattaccaatgctta

SEQ ID NO: 2019549 - DNA, 15 bp, Homo sapiens
attaccaatgcttag

SEQ ID NO: 2019550 - DNA, 15 bp, Homo sapiens
ttaccaatgcttaga

SEQ ID NO: 2019551 - DNA, 15 bp, Homo sapiens
taccaatgcttagag

SEQ ID NO: 2019552 - DNA, 15 bp, Homo sapiens
accaatgcttagagt

SEQ ID NO: 2019553 - DNA, 15 bp, Homo sapiens
ccaatgcttagagtt

SEQ ID NO: 2019554 - DNA, 15 bp, Homo sapiens
caatgcttagagttc

SEQ ID NO: 2019555 - DNA, 15 bp, Homo sapiens
aatgcttagagttca

SEQ ID NO: 2019556 - DNA, 15 bp, Homo sapiens
atgcttagagttcac

SEQ ID NO: 2019557 - DNA, 15 bp, Homo sapiens
tgcttagagttcacc

SEQ ID NO: 2019558 - DNA, 15 bp, Homo sapiens
gcttagagttcaccc

SEQ ID NO: 2019559 - DNA, 15 bp, Homo sapiens
cttagagttcacccc

SEQ ID NO: 2019560 - DNA, 15 bp, Homo sapiens
ttagagttcacccca

SEQ ID NO: 2019561 - DNA, 15 bp, Homo sapiens
tagagttcaccccat

SEQ ID NO: 2019562 - DNA, 15 bp, Homo sapiens
agagttcaccccatt

SEQ ID NO: 2019563 - DNA, 15 bp, Homo sapiens
gagttcaccccattc

SEQ ID NO: 2019564 - DNA, 15 bp, Homo sapiens
agttcaccccattcc

SEQ ID NO: 2019565 - DNA, 15 bp, Homo sapiens
gttcaccccattcca

SEQ ID NO: 2019566 - DNA, 15 bp, Homo sapiens
ttcaccccattccag

SEQ ID NO: 2019567 - DNA, 15 bp, Homo sapiens
tcaccccattccagt

SEQ ID NO: 2019568 - DNA, 15 bp, Homo sapiens
caccccattccagtt

SEQ ID NO: 2019569 - DNA, 15 bp, Homo sapiens
accccattccagttg

SEQ ID NO: 2019570 - DNA, 15 bp, Homo sapiens
ccccattccagttgc

SEQ ID NO: 2019571 - DNA, 15 bp, Homo sapiens
cccattccagttgca

SEQ ID NO: 2019572 - DNA, 15 bp, Homo sapiens
ccattccagttgcat

SEQ ID NO: 2019573 - DNA, 15 bp, Homo sapiens
cattccagttgcatc

SEQ ID NO: 2019574 - DNA, 15 bp, Homo sapiens
attccagttgcatca

SEQ ID NO: 2019575 - DNA, 15 bp, Homo sapiens
ttccagttgcatcag

SEQ ID NO: 2019576 - DNA, 15 bp, Homo sapiens
tccagttgcatcaga

SEQ ID NO: 2019577 - DNA, 15 bp, Homo sapiens
ccagttgcatcagaa

SEQ ID NO: 2019578 - DNA, 15 bp, Homo sapiens
cagttgcatcagaag

SEQ ID NO: 2019579 - DNA, 15 bp, Homo sapiens
agttgcatcagaagg

SEQ ID NO: 2019580 - DNA, 15 bp, Homo sapiens
gttgcatcagaagga

SEQ ID NO: 2019581 - DNA, 15 bp, Homo sapiens
ttgcatcagaaggaa

SEQ ID NO: 2019582 - DNA, 15 bp, Homo sapiens
tgcatcagaaggaag

SEQ ID NO: 2019583 - DNA, 15 bp, Homo sapiens
gcatcagaaggaaga

SEQ ID NO: 2019584 - DNA, 15 bp, Homo sapiens
catcagaaggaagac

SEQ ID NO: 2019585 - DNA, 15 bp, Homo sapiens
atcagaaggaagaca

SEQ ID NO: 2019586 - DNA, 15 bp, Homo sapiens
tcagaaggaagacat

SEQ ID NO: 2019587 - DNA, 15 bp, Homo sapiens
cagaaggaagacatg

SEQ ID NO: 2019588 - DNA, 15 bp, Homo sapiens
agaaggaagacatgg

SEQ ID NO: 2019589 - DNA, 15 bp, Homo sapiens
gaaggaagacatggg

SEQ ID NO: 2019590 - DNA, 15 bp, Homo sapiens
aaggaagacatggga

SEQ ID NO: 2019591 - DNA, 15 bp, Homo sapiens
aggaagacatgggaa

SEQ ID NO: 2019592 - DNA, 15 bp, Homo sapiens
ggaagacatgggaat

SEQ ID NO: 2019593 - DNA, 15 bp, Homo sapiens
gaagacatgggaatt

SEQ ID NO: 2019594 - DNA, 15 bp, Homo sapiens
aagacatgggaatta

SEQ ID NO: 2019595 - DNA, 15 bp, Homo sapiens
agacatgggaattag

SEQ ID NO: 2019596 - DNA, 15 bp, Homo sapiens
gacatgggaattagg

SEQ ID NO: 2019597 - DNA, 15 bp, Homo sapiens
acatgggaattaggc

SEQ ID NO: 2019598 - DNA, 15 bp, Homo sapiens
catgggaattaggca

SEQ ID NO: 2019599 - DNA, 15 bp, Homo sapiens
atgggaattaggcat

SEQ ID NO: 2019600 - DNA, 15 bp, Homo sapiens
tgggaattaggcatt

SEQ ID NO: 2019601 - DNA, 15 bp, Homo sapiens
gggaattaggcattg

SEQ ID NO: 2019602 - DNA, 15 bp, Homo sapiens
ggaattaggcattgg

SEQ ID NO: 2019603 - DNA, 15 bp, Homo sapiens
gaattaggcattggt

SEQ ID NO: 2019604 - DNA, 15 bp, Homo sapiens
aattaggcattggtg

SEQ ID NO: 2019605 - DNA, 15 bp, Homo sapiens
attaggcattggtgt

SEQ ID NO: 2019606 - DNA, 15 bp, Homo sapiens
ttaggcattggtgtt

SEQ ID NO: 2019607 - DNA, 15 bp, Homo sapiens
taggcattggtgttt

SEQ ID NO: 2019608 - DNA, 15 bp, Homo sapiens
aggcattggtgtttt

SEQ ID NO: 2019609 - DNA, 15 bp, Homo sapiens
ggcattggtgttttt

SEQ ID NO: 2019610 - DNA, 15 bp, Homo sapiens
gcattggtgtttttt

SEQ ID NO: 2019611 - DNA, 15 bp, Homo sapiens
cattggtgtttttta

SEQ ID NO: 2019612 - DNA, 15 bp, Homo sapiens
attggtgttttttaa

SEQ ID NO: 2019613 - DNA, 15 bp, Homo sapiens
ttggtgttttttaaa

SEQ ID NO: 2019614 - DNA, 15 bp, Homo sapiens
tggtgttttttaaaa

SEQ ID NO: 2019615 - DNA, 15 bp, Homo sapiens
ggtgttttttaaaaa

SEQ ID NO: 2019616 - DNA, 15 bp, Homo sapiens
gtgttttttaaaaac

SEQ ID NO: 2019617 - DNA, 15 bp, Homo sapiens
tgttttttaaaaact

SEQ ID NO: 2019618 - DNA, 15 bp, Homo sapiens
gttttttaaaaactc

SEQ ID NO: 2019619 - DNA, 15 bp, Homo sapiens
ttttttaaaaactct

SEQ ID NO: 2019620 - DNA, 15 bp, Homo sapiens
tttttaaaaactctt

SEQ ID NO: 2019621 - DNA, 15 bp, Homo sapiens
ttttaaaaactcttc

SEQ ID NO: 2019622 - DNA, 15 bp, Homo sapiens
tttaaaaactcttca

SEQ ID NO: 2019623 - DNA, 15 bp, Homo sapiens
ttaaaaactcttcag

SEQ ID NO: 2019624 - DNA, 15 bp, Homo sapiens
taaaaactcttcagg

SEQ ID NO: 2019625 - DNA, 15 bp, Homo sapiens
aaaaactcttcaggt

SEQ ID NO: 2019626 - DNA, 15 bp, Homo sapiens
aaaactcttcaggtg

SEQ ID NO: 2019627 - DNA, 15 bp, Homo sapiens
aaactcttcaggtga

SEQ ID NO: 2019628 - DNA, 15 bp, Homo sapiens
aactcttcaggtgat

SEQ ID NO: 2019629 - DNA, 15 bp, Homo sapiens
actcttcaggtgatt

SEQ ID NO: 2019630 - DNA, 15 bp, Homo sapiens
ctcttcaggtgattc

SEQ ID NO: 2019631 - DNA, 15 bp, Homo sapiens
tcttcaggtgattct

SEQ ID NO: 2019632 - DNA, 15 bp, Homo sapiens
cttcaggtgattctg

SEQ ID NO: 2019633 - DNA, 15 bp, Homo sapiens
ttcaggtgattctga

SEQ ID NO: 2019634 - DNA, 15 bp, Homo sapiens
tcaggtgattctgac

SEQ ID NO: 2019635 - DNA, 15 bp, Homo sapiens
caggtgattctgaca

SEQ ID NO: 2019636 - DNA, 15 bp, Homo sapiens
aggtgattctgacat

SEQ ID NO: 2019637 - DNA, 15 bp, Homo sapiens
ggtgattctgacatg

SEQ ID NO: 2019638 - DNA, 15 bp, Homo sapiens
gtgattctgacatgc

SEQ ID NO: 2019639 - DNA, 15 bp, Homo sapiens
tgattctgacatgca

SEQ ID NO: 2019640 - DNA, 15 bp, Homo sapiens
gattctgacatgcag

SEQ ID NO: 2019641 - DNA, 15 bp, Homo sapiens
attctgacatgcagc

SEQ ID NO: 2019642 - DNA, 15 bp, Homo sapiens
ttctgacatgcagcc

SEQ ID NO: 2019643 - DNA, 15 bp, Homo sapiens
tctgacatgcagcca

SEQ ID NO: 2019644 - DNA, 15 bp, Homo sapiens
ctgacatgcagccag

SEQ ID NO: 2019645 - DNA, 15 bp, Homo sapiens
tgacatgcagccagg

SEQ ID NO: 2019646 - DNA, 15 bp, Homo sapiens
gacatgcagccaggg

SEQ ID NO: 2019647 - DNA, 15 bp, Homo sapiens
acatgcagccagggt

SEQ ID NO: 2019648 - DNA, 15 bp, Homo sapiens
catgcagccagggta

SEQ ID NO: 2019649 - DNA, 15 bp, Homo sapiens
atgcagccagggtaa

SEQ ID NO: 2019650 - DNA, 15 bp, Homo sapiens
tgcagccagggtaag

SEQ ID NO: 2019651 - DNA, 15 bp, Homo sapiens
gcagccagggtaaga

SEQ ID NO: 2019652 - DNA, 15 bp, Homo sapiens
cagccagggtaagaa

SEQ ID NO: 2019653 - DNA, 15 bp, Homo sapiens
agccagggtaagaat

SEQ ID NO: 2019654 - DNA, 15 bp, Homo sapiens
gccagggtaagaatc

SEQ ID NO: 2019655 - DNA, 15 bp, Homo sapiens
ccagggtaagaatca

SEQ ID NO: 2019656 - DNA, 15 bp, Homo sapiens
cagggtaagaatcac

SEQ ID NO: 2019657 - DNA, 15 bp, Homo sapiens
agggtaagaatcact

SEQ ID NO: 2019658 - DNA, 15 bp, Homo sapiens
gggtaagaatcacta

SEQ ID NO: 2019659 - DNA, 15 bp, Homo sapiens
ggtaagaatcactag

SEQ ID NO: 2019660 - DNA, 15 bp, Homo sapiens
gtaagaatcactagc

SEQ ID NO: 2019661 - DNA, 15 bp, Homo sapiens
taagaatcactagct

SEQ ID NO: 2019662 - DNA, 15 bp, Homo sapiens
aagaatcactagctt

SEQ ID NO: 2019663 - DNA, 15 bp, Homo sapiens
agaatcactagctta

SEQ ID NO: 2019664 - DNA, 15 bp, Homo sapiens
gaatcactagcttag

SEQ ID NO: 2019665 - DNA, 15 bp, Homo sapiens
aatcactagcttaga

SEQ ID NO: 2019666 - DNA, 15 bp, Homo sapiens
atcactagcttagaa

SEQ ID NO: 2019667 - DNA, 15 bp, Homo sapiens
tcactagcttagaag

SEQ ID NO: 2019668 - DNA, 15 bp, Homo sapiens
cactagcttagaagg

SEQ ID NO: 2019669 - DNA, 15 bp, Homo sapiens
actagcttagaaggg

SEQ ID NO: 2019670 - DNA, 15 bp, Homo sapiens
ctagcttagaaggga

SEQ ID NO: 2019671 - DNA, 15 bp, Homo sapiens
tagcttagaagggag

SEQ ID NO: 2019672 - DNA, 15 bp, Homo sapiens
agcttagaagggaga

SEQ ID NO: 2019673 - DNA, 15 bp, Homo sapiens
gcttagaagggagag

SEQ ID NO: 2019674 - DNA, 15 bp, Homo sapiens
cttagaagggagagt

SEQ ID NO: 2019675 - DNA, 15 bp, Homo sapiens
ttagaagggagagta

SEQ ID NO: 2019676 - DNA, 15 bp, Homo sapiens
tagaagggagagtaa

SEQ ID NO: 2019677 - DNA, 15 bp, Homo sapiens
agaagggagagtaag

SEQ ID NO: 2019678 - DNA, 15 bp, Homo sapiens
gaagggagagtaaga

SEQ ID NO: 2019679 - DNA, 15 bp, Homo sapiens
aagggagagtaagat

SEQ ID NO: 2019680 - DNA, 15 bp, Homo sapiens
agggagagtaagatt

SEQ ID NO: 2019681 - DNA, 15 bp, Homo sapiens
gggagagtaagattg

SEQ ID NO: 2019682 - DNA, 15 bp, Homo sapiens
ggagagtaagattgt

SEQ ID NO: 2019683 - DNA, 15 bp, Homo sapiens
gagagtaagattgta

SEQ ID NO: 2019684 - DNA, 15 bp, Homo sapiens
agagtaagattgtag

SEQ ID NO: 2019685 - DNA, 15 bp, Homo sapiens
gagtaagattgtagt

SEQ ID NO: 2019686 - DNA, 15 bp, Homo sapiens
agtaagattgtagtc

SEQ ID NO: 2019687 - DNA, 15 bp, Homo sapiens
gtaagattgtagtca

SEQ ID NO: 2019688 - DNA, 15 bp, Homo sapiens
taagattgtagtcat

SEQ ID NO: 2019689 - DNA, 15 bp, Homo sapiens
aagattgtagtcata

SEQ ID NO: 2019690 - DNA, 15 bp, Homo sapiens
agattgtagtcatac

SEQ ID NO: 2019691 - DNA, 15 bp, Homo sapiens
gattgtagtcatact

SEQ ID NO: 2019692 - DNA, 15 bp, Homo sapiens
attgtagtcatactt

SEQ ID NO: 2019693 - DNA, 15 bp, Homo sapiens
ttgtagtcatacttg

SEQ ID NO: 2019694 - DNA, 15 bp, Homo sapiens
tgtagtcatacttgg

SEQ ID NO: 2019695 - DNA, 15 bp, Homo sapiens
gtagtcatacttggg

SEQ ID NO: 2019696 - DNA, 15 bp, Homo sapiens
tagtcatacttggga

SEQ ID NO: 2019697 - DNA, 15 bp, Homo sapiens
agtcatacttgggaa

SEQ ID NO: 2019698 - DNA, 15 bp, Homo sapiens
gtcatacttgggaaa

SEQ ID NO: 2019699 - DNA, 15 bp, Homo sapiens
tcatacttgggaaaa

SEQ ID NO: 2019700 - DNA, 15 bp, Homo sapiens
catacttgggaaaaa

SEQ ID NO: 2019701 - DNA, 15 bp, Homo sapiens
atacttgggaaaaaa

SEQ ID NO: 2019702 - DNA, 15 bp, Homo sapiens
tacttgggaaaaaac

SEQ ID NO: 2019703 - DNA, 15 bp, Homo sapiens
acttgggaaaaaaca

SEQ ID NO: 2019704 - DNA, 15 bp, Homo sapiens
cttgggaaaaaacat

SEQ ID NO: 2019705 - DNA, 15 bp, Homo sapiens
ttgggaaaaaacata

SEQ ID NO: 2019706 - DNA, 15 bp, Homo sapiens
tgggaaaaaacatat

SEQ ID NO: 2019707 - DNA, 15 bp, Homo sapiens
gggaaaaaacatata

SEQ ID NO: 2019708 - DNA, 15 bp, Homo sapiens
ggaaaaaacatataa

SEQ ID NO: 2019709 - DNA, 15 bp, Homo sapiens
gaaaaaacatataaa

SEQ ID NO: 2019710 - DNA, 15 bp, Homo sapiens
aaaaaacatataaaa

SEQ ID NO: 2019711 - DNA, 15 bp, Homo sapiens
aaaaacatataaaaa

SEQ ID NO: 2019712 - DNA, 15 bp, Homo sapiens
aaaacatataaaaaa

SEQ ID NO: 2019713 - DNA, 15 bp, Homo sapiens
aaacatataaaaaat

SEQ ID NO: 2019714 - DNA, 15 bp, Homo sapiens
aacatataaaaaata

SEQ ID NO: 2019715 - DNA, 15 bp, Homo sapiens
acatataaaaaatat

SEQ ID NO: 2019716 - DNA, 15 bp, Homo sapiens
catataaaaaatatt

SEQ ID NO: 2019717 - DNA, 15 bp, Homo sapiens
atataaaaaatattt

SEQ ID NO: 2019718 - DNA, 15 bp, Homo sapiens
aaaaaatatttttaa

SEQ ID NO: 2019719 - DNA, 15 bp, Homo sapiens
aatatttttaaaatg

SEQ ID NO: 2019720 - DNA, 15 bp, Homo sapiens
atatttttaaaatgg

SEQ ID NO: 2019721 - DNA, 15 bp, Homo sapiens
tatttttaaaatggt

SEQ ID NO: 2019722 - DNA, 15 bp, Homo sapiens
atttttaaaatggtt

SEQ ID NO: 2019723 - DNA, 15 bp, Homo sapiens
tttttaaaatggtta

SEQ ID NO: 2019724 - DNA, 15 bp, Homo sapiens
ttttaaaatggttac

SEQ ID NO: 2019725 - DNA, 15 bp, Homo sapiens
tttaaaatggttact

SEQ ID NO: 2019726 - DNA, 15 bp, Homo sapiens
ttaaaatggttacta

SEQ ID NO: 2019727 - DNA, 15 bp, Homo sapiens
taaaatggttactat

SEQ ID NO: 2019728 - DNA, 15 bp, Homo sapiens
aaaatggttactata

SEQ ID NO: 2019729 - DNA, 15 bp, Homo sapiens
aaatggttactatat

SEQ ID NO: 2019730 - DNA, 15 bp, Homo sapiens
aatggttactatatt

SEQ ID NO: 2019731 - DNA, 15 bp, Homo sapiens
atggttactatattg

SEQ ID NO: 2019732 - DNA, 15 bp, Homo sapiens
tggttactatattgc

SEQ ID NO: 2019733 - DNA, 15 bp, Homo sapiens
ggttactatattgcc

SEQ ID NO: 2019734 - DNA, 15 bp, Homo sapiens
gttactatattgccc

SEQ ID NO: 2019735 - DNA, 15 bp, Homo sapiens
ttactatattgcccg

SEQ ID NO: 2019736 - DNA, 15 bp, Homo sapiens
tactatattgcccga

SEQ ID NO: 2019737 - DNA, 15 bp, Homo sapiens
actatattgcccgaa

SEQ ID NO: 2019738 - DNA, 15 bp, Homo sapiens
ctatattgcccgaaa

SEQ ID NO: 2019739 - DNA, 15 bp, Homo sapiens
tatattgcccgaaat

SEQ ID NO: 2019740 - DNA, 15 bp, Homo sapiens
atattgcccgaaata

SEQ ID NO: 2019741 - DNA, 15 bp, Homo sapiens
tattgcccgaaataa

SEQ ID NO: 2019742 - DNA, 15 bp, Homo sapiens
attgcccgaaataaa

SEQ ID NO: 2019743 - DNA, 15 bp, Homo sapiens
ttgcccgaaataaat

SEQ ID NO: 2019744 - DNA, 15 bp, Homo sapiens
tgcccgaaataaatg

SEQ ID NO: 2019745 - DNA, 15 bp, Homo sapiens
gcccgaaataaatgc

SEQ ID NO: 2019746 - DNA, 15 bp, Homo sapiens
cccgaaataaatgcc

SEQ ID NO: 2019747 - DNA, 15 bp, Homo sapiens
ccgaaataaatgccc

SEQ ID NO: 2019748 - DNA, 15 bp, Homo sapiens
cgaaataaatgccca

SEQ ID NO: 2019749 - DNA, 15 bp, Homo sapiens
gaaataaatgcccag

SEQ ID NO: 2019750 - DNA, 15 bp, Homo sapiens
aaataaatgcccagt

SEQ ID NO: 2019751 - DNA, 15 bp, Homo sapiens
aataaatgcccagta

SEQ ID NO: 2019752 - DNA, 15 bp, Homo sapiens
ataaatgcccagtaa

SEQ ID NO: 2019753 - DNA, 15 bp, Homo sapiens
taaatgcccagtaag

SEQ ID NO: 2019754 - DNA, 15 bp, Homo sapiens
aaatgcccagtaagg

SEQ ID NO: 2019755 - DNA, 15 bp, Homo sapiens
aatgcccagtaaggg

SEQ ID NO: 2019756 - DNA, 15 bp, Homo sapiens
atgcccagtaaggga

SEQ ID NO: 2019757 - DNA, 15 bp, Homo sapiens
tgcccagtaagggat

SEQ ID NO: 2019758 - DNA, 15 bp, Homo sapiens
gcccagtaagggatg

SEQ ID NO: 2019759 - DNA, 15 bp, Homo sapiens
cccagtaagggatga

SEQ ID NO: 2019760 - DNA, 15 bp, Homo sapiens
ccagtaagggatgag

SEQ ID NO: 2019761 - DNA, 15 bp, Homo sapiens
cagtaagggatgaga

SEQ ID NO: 2019762 - DNA, 15 bp, Homo sapiens
agtaagggatgagat

SEQ ID NO: 2019763 - DNA, 15 bp, Homo sapiens
gtaagggatgagatt

SEQ ID NO: 2019764 - DNA, 15 bp, Homo sapiens
taagggatgagattt

SEQ ID NO: 2019765 - DNA, 15 bp, Homo sapiens
aagggatgagatttt

SEQ ID NO: 2019766 - DNA, 15 bp, Homo sapiens
agggatgagattttt

SEQ ID NO: 2019767 - DNA, 15 bp, Homo sapiens
gggatgagatttttg

SEQ ID NO: 2019768 - DNA, 15 bp, Homo sapiens
ggatgagatttttga

SEQ ID NO: 2019769 - DNA, 15 bp, Homo sapiens
gatgagatttttgaa

SEQ ID NO: 2019770 - DNA, 15 bp, Homo sapiens
atgagatttttgaaa

SEQ ID NO: 2019771 - DNA, 15 bp, Homo sapiens
tgagatttttgaaat

SEQ ID NO: 2019772 - DNA, 15 bp, Homo sapiens
gagatttttgaaatg

SEQ ID NO: 2019773 - DNA, 15 bp, Homo sapiens
agatttttgaaatgt

SEQ ID NO: 2019774 - DNA, 15 bp, Homo sapiens
gatttttgaaatgtg

SEQ ID NO: 2019775 - DNA, 15 bp, Homo sapiens
atttttgaaatgtgg

SEQ ID NO: 2019776 - DNA, 15 bp, Homo sapiens
tttttgaaatgtggc

SEQ ID NO: 2019777 - DNA, 15 bp, Homo sapiens
ttttgaaatgtggcc

SEQ ID NO: 2019778 - DNA, 15 bp, Homo sapiens
tttgaaatgtggcct

SEQ ID NO: 2019779 - DNA, 15 bp, Homo sapiens
ttgaaatgtggcctg

SEQ ID NO: 2019780 - DNA, 15 bp, Homo sapiens
tgaaatgtggcctga

SEQ ID NO: 2019781 - DNA, 15 bp, Homo sapiens
gaaatgtggcctgat

SEQ ID NO: 2019782 - DNA, 15 bp, Homo sapiens
aaatgtggcctgatc

SEQ ID NO: 2019783 - DNA, 15 bp, Homo sapiens
aatgtggcctgatct

SEQ ID NO: 2019784 - DNA, 15 bp, Homo sapiens
atgtggcctgatctt

SEQ ID NO: 2019785 - DNA, 15 bp, Homo sapiens
tgtggcctgatctta

SEQ ID NO: 2019786 - DNA, 15 bp, Homo sapiens
gtggcctgatcttag

SEQ ID NO: 2019787 - DNA, 15 bp, Homo sapiens
tggcctgatcttagc

SEQ ID NO: 2019788 - DNA, 15 bp, Homo sapiens
ggcctgatcttagcc

SEQ ID NO: 2019789 - DNA, 15 bp, Homo sapiens
gcctgatcttagccc

SEQ ID NO: 2019790 - DNA, 15 bp, Homo sapiens
cctgatcttagccct

SEQ ID NO: 2019791 - DNA, 15 bp, Homo sapiens
ctgatcttagccctg

SEQ ID NO: 2019792 - DNA, 15 bp, Homo sapiens
tgatcttagccctgt

SEQ ID NO: 2019793 - DNA, 15 bp, Homo sapiens
gatcttagccctgtg

SEQ ID NO: 2019794 - DNA, 15 bp, Homo sapiens
atcttagccctgtgt

SEQ ID NO: 2019795 - DNA, 15 bp, Homo sapiens
tcttagccctgtgtt

SEQ ID NO: 2019796 - DNA, 15 bp, Homo sapiens
cttagccctgtgtta

SEQ ID NO: 2019797 - DNA, 15 bp, Homo sapiens
ttagccctgtgttaa

SEQ ID NO: 2019798 - DNA, 15 bp, Homo sapiens
tagccctgtgttaat

SEQ ID NO: 2019799 - DNA, 15 bp, Homo sapiens
agccctgtgttaatt

SEQ ID NO: 2019800 - DNA, 15 bp, Homo sapiens
gccctgtgttaattt

SEQ ID NO: 2019801 - DNA, 15 bp, Homo sapiens
ccctgtgttaatttc

SEQ ID NO: 2019802 - DNA, 15 bp, Homo sapiens
cctgtgttaatttca

SEQ ID NO: 2019803 - DNA, 15 bp, Homo sapiens
ctgtgttaatttcag

SEQ ID NO: 2019804 - DNA, 15 bp, Homo sapiens
tgtgttaatttcagt

SEQ ID NO: 2019805 - DNA, 15 bp, Homo sapiens
gtgttaatttcagta

SEQ ID NO: 2019806 - DNA, 15 bp, Homo sapiens
tgttaatttcagtag

SEQ ID NO: 2019807 - DNA, 15 bp, Homo sapiens
gttaatttcagtaga

SEQ ID NO: 2019808 - DNA, 15 bp, Homo sapiens
ttaatttcagtagat

SEQ ID NO: 2019809 - DNA, 15 bp, Homo sapiens
taatttcagtagata

SEQ ID NO: 2019810 - DNA, 15 bp, Homo sapiens
aatttcagtagatat

SEQ ID NO: 2019811 - DNA, 15 bp, Homo sapiens
atttcagtagatatt

SEQ ID NO: 2019812 - DNA, 15 bp, Homo sapiens
tttcagtagatattt

SEQ ID NO: 2019813 - DNA, 15 bp, Homo sapiens
ttcagtagatatttg

SEQ ID NO: 2019814 - DNA, 15 bp, Homo sapiens
tcagtagatatttgg

SEQ ID NO: 2019815 - DNA, 15 bp, Homo sapiens
cagtagatatttgga

SEQ ID NO: 2019816 - DNA, 15 bp, Homo sapiens
agtagatatttggaa

SEQ ID NO: 2019817 - DNA, 15 bp, Homo sapiens
gtagatatttggaaa

SEQ ID NO: 2019818 - DNA, 15 bp, Homo sapiens
tagatatttggaaag

SEQ ID NO: 2019819 - DNA, 15 bp, Homo sapiens
agatatttggaaagt

SEQ ID NO: 2019820 - DNA, 15 bp, Homo sapiens
gatatttggaaagtc

SEQ ID NO: 2019821 - DNA, 15 bp, Homo sapiens
atatttggaaagtct

SEQ ID NO: 2019822 - DNA, 15 bp, Homo sapiens
tatttggaaagtctc

SEQ ID NO: 2019823 - DNA, 15 bp, Homo sapiens
atttggaaagtctct

SEQ ID NO: 2019824 - DNA, 15 bp, Homo sapiens
tttggaaagtctctc

SEQ ID NO: 2019825 - DNA, 15 bp, Homo sapiens
ttggaaagtctctca

SEQ ID NO: 2019826 - DNA, 15 bp, Homo sapiens
tggaaagtctctcaa

SEQ ID NO: 2019827 - DNA, 15 bp, Homo sapiens
ggaaagtctctcaaa

SEQ ID NO: 2019828 - DNA, 15 bp, Homo sapiens
gaaagtctctcaaac

SEQ ID NO: 2019829 - DNA, 15 bp, Homo sapiens
aaagtctctcaaacc

SEQ ID NO: 2019830 - DNA, 15 bp, Homo sapiens
aagtctctcaaacca

SEQ ID NO: 2019831 - DNA, 15 bp, Homo sapiens
agtctctcaaaccaa

SEQ ID NO: 2019832 - DNA, 15 bp, Homo sapiens
gtctctcaaaccaat

SEQ ID NO: 2019833 - DNA, 15 bp, Homo sapiens
tctctcaaaccaatt

SEQ ID NO: 2019834 - DNA, 15 bp, Homo sapiens
ctctcaaaccaattt

SEQ ID NO: 2019835 - DNA, 15 bp, Homo sapiens
tctcaaaccaatttt

SEQ ID NO: 2019836 - DNA, 15 bp, Homo sapiens
ctcaaaccaattttt

SEQ ID NO: 2019837 - DNA, 15 bp, Homo sapiens
tcaaaccaatttttg

SEQ ID NO: 2019838 - DNA, 15 bp, Homo sapiens
caaaccaatttttgt

SEQ ID NO: 2019839 - DNA, 15 bp, Homo sapiens
aaaccaatttttgta

SEQ ID NO: 2019840 - DNA, 15 bp, Homo sapiens
aaccaatttttgtaa

SEQ ID NO: 2019841 - DNA, 15 bp, Homo sapiens
accaatttttgtaat

SEQ ID NO: 2019842 - DNA, 15 bp, Homo sapiens
ccaatttttgtaata

SEQ ID NO: 2019843 - DNA, 15 bp, Homo sapiens
caatttttgtaatat

SEQ ID NO: 2019844 - DNA, 15 bp, Homo sapiens
aatttttgtaatata

SEQ ID NO: 2019845 - DNA, 15 bp, Homo sapiens
atttttgtaatatat

SEQ ID NO: 2019846 - DNA, 15 bp, Homo sapiens
tttttgtaatatatt

SEQ ID NO: 2019847 - DNA, 15 bp, Homo sapiens
ttttgtaatatattt

SEQ ID NO: 2019848 - DNA, 15 bp, Homo sapiens
tttgtaatatattta

SEQ ID NO: 2019849 - DNA, 15 bp, Homo sapiens
ttgtaatatatttaa

SEQ ID NO: 2019850 - DNA, 15 bp, Homo sapiens
tgtaatatatttaat

SEQ ID NO: 2019851 - DNA, 15 bp, Homo sapiens
gtaatatatttaatt

SEQ ID NO: 2019852 - DNA, 15 bp, Homo sapiens
taatatatttaattg

SEQ ID NO: 2019853 - DNA, 15 bp, Homo sapiens
aatatatttaattga

SEQ ID NO: 2019854 - DNA, 15 bp, Homo sapiens
atatatttaattgaa

SEQ ID NO: 2019855 - DNA, 15 bp, Homo sapiens
tatatttaattgaag

SEQ ID NO: 2019856 - DNA, 15 bp, Homo sapiens
atatttaattgaaga

SEQ ID NO: 2019857 - DNA, 15 bp, Homo sapiens
tatttaattgaagat

SEQ ID NO: 2019858 - DNA, 15 bp, Homo sapiens
atttaattgaagatg

SEQ ID NO: 2019859 - DNA, 15 bp, Homo sapiens
tttaattgaagatgg

SEQ ID NO: 2019860 - DNA, 15 bp, Homo sapiens
ttaattgaagatggg

SEQ ID NO: 2019861 - DNA, 15 bp, Homo sapiens
taattgaagatgggg

SEQ ID NO: 2019862 - DNA, 15 bp, Homo sapiens
aattgaagatggggg

SEQ ID NO: 2019863 - DNA, 15 bp, Homo sapiens
attgaagatgggggg

SEQ ID NO: 2019864 - DNA, 15 bp, Homo sapiens
ttgaagatggggggg

SEQ ID NO: 2019865 - DNA, 15 bp, Homo sapiens
tgaagatgggggggt

SEQ ID NO: 2019866 - DNA, 15 bp, Homo sapiens
gaagatgggggggtt

SEQ ID NO: 2019867 - DNA, 15 bp, Homo sapiens
aagatgggggggttc

SEQ ID NO: 2019868 - DNA, 15 bp, Homo sapiens
agatgggggggttct

SEQ ID NO: 2019869 - DNA, 15 bp, Homo sapiens
gatgggggggttctc

SEQ ID NO: 2019870 - DNA, 15 bp, Homo sapiens
atgggggggttctca

SEQ ID NO: 2019871 - DNA, 15 bp, Homo sapiens
tgggggggttctcaa

SEQ ID NO: 2019872 - DNA, 15 bp, Homo sapiens
gggggggttctcaac

SEQ ID NO: 2019873 - DNA, 15 bp, Homo sapiens
ggggggttctcaact

SEQ ID NO: 2019874 - DNA, 15 bp, Homo sapiens
gggggttctcaactt

SEQ ID NO: 2019875 - DNA, 15 bp, Homo sapiens
ggggttctcaactta

SEQ ID NO: 2019876 - DNA, 15 bp, Homo sapiens
gggttctcaacttaa

SEQ ID NO: 2019877 - DNA, 15 bp, Homo sapiens
ggttctcaacttaaa

SEQ ID NO: 2019878 - DNA, 15 bp, Homo sapiens
gttctcaacttaaat

SEQ ID NO: 2019879 - DNA, 15 bp, Homo sapiens
ttctcaacttaaatg

SEQ ID NO: 2019880 - DNA, 15 bp, Homo sapiens
tctcaacttaaatgt

SEQ ID NO: 2019881 - DNA, 15 bp, Homo sapiens
ctcaacttaaatgta

SEQ ID NO: 2019882 - DNA, 15 bp, Homo sapiens
tcaacttaaatgtaa

SEQ ID NO: 2019883 - DNA, 15 bp, Homo sapiens
caacttaaatgtaag

SEQ ID NO: 2019884 - DNA, 15 bp, Homo sapiens
aacttaaatgtaagt

SEQ ID NO: 2019885 - DNA, 15 bp, Homo sapiens
acttaaatgtaagtc

SEQ ID NO: 2019886 - DNA, 15 bp, Homo sapiens
cttaaatgtaagtca

SEQ ID NO: 2019887 - DNA, 15 bp, Homo sapiens
ttaaatgtaagtcat

SEQ ID NO: 2019888 - DNA, 15 bp, Homo sapiens
taaatgtaagtcatt

SEQ ID NO: 2019889 - DNA, 15 bp, Homo sapiens
aaatgtaagtcatta

SEQ ID NO: 2019890 - DNA, 15 bp, Homo sapiens
aatgtaagtcattat

SEQ ID NO: 2019891 - DNA, 15 bp, Homo sapiens
atgtaagtcattatt

SEQ ID NO: 2019892 - DNA, 15 bp, Homo sapiens
tgtaagtcattattt

SEQ ID NO: 2019893 - DNA, 15 bp, Homo sapiens
gtaagtcattatttt

SEQ ID NO: 2019894 - DNA, 15 bp, Homo sapiens
taagtcattatttta

SEQ ID NO: 2019895 - DNA, 15 bp, Homo sapiens
aagtcattattttac

SEQ ID NO: 2019896 - DNA, 15 bp, Homo sapiens
agtcattattttact

SEQ ID NO: 2019897 - DNA, 15 bp, Homo sapiens
gtcattattttactt

SEQ ID NO: 2019898 - DNA, 15 bp, Homo sapiens
tcattattttacttg

SEQ ID NO: 2019899 - DNA, 15 bp, Homo sapiens
cattattttacttga

SEQ ID NO: 2019900 - DNA, 15 bp, Homo sapiens
attattttacttgaa

SEQ ID NO: 2019901 - DNA, 15 bp, Homo sapiens
ttattttacttgaag

SEQ ID NO: 2019902 - DNA, 15 bp, Homo sapiens
tattttacttgaagc

SEQ ID NO: 2019903 - DNA, 15 bp, Homo sapiens
attttacttgaagcc

SEQ ID NO: 2019904 - DNA, 15 bp, Homo sapiens
ttttacttgaagcca

SEQ ID NO: 2019905 - DNA, 15 bp, Homo sapiens
tttacttgaagccag

SEQ ID NO: 2019906 - DNA, 15 bp, Homo sapiens
ttacttgaagccagt

SEQ ID NO: 2019907 - DNA, 15 bp, Homo sapiens
tacttgaagccagtt

SEQ ID NO: 2019908 - DNA, 15 bp, Homo sapiens
acttgaagccagttt

SEQ ID NO: 2019909 - DNA, 15 bp, Homo sapiens
cttgaagccagtttc

SEQ ID NO: 2019910 - DNA, 15 bp, Homo sapiens
ttgaagccagtttct

SEQ ID NO: 2019911 - DNA, 15 bp, Homo sapiens
tgaagccagtttctt

SEQ ID NO: 2019912 - DNA, 15 bp, Homo sapiens
gaagccagtttcttt

SEQ ID NO: 2019913 - DNA, 15 bp, Homo sapiens
aagccagtttcttta

SEQ ID NO: 2019914 - DNA, 15 bp, Homo sapiens
agccagtttctttaa

SEQ ID NO: 2019915 - DNA, 15 bp, Homo sapiens
gccagtttctttaaa

SEQ ID NO: 2019916 - DNA, 15 bp, Homo sapiens
ccagtttctttaaag

SEQ ID NO: 2019917 - DNA, 15 bp, Homo sapiens
cagtttctttaaagg

SEQ ID NO: 2019918 - DNA, 15 bp, Homo sapiens
agtttctttaaaggt

SEQ ID NO: 2019919 - DNA, 15 bp, Homo sapiens
gtttctttaaaggtt

SEQ ID NO: 2019920 - DNA, 15 bp, Homo sapiens
tttctttaaaggtta

SEQ ID NO: 2019921 - DNA, 15 bp, Homo sapiens
ttctttaaaggttaa

SEQ ID NO: 2019922 - DNA, 15 bp, Homo sapiens
tctttaaaggttaaa

SEQ ID NO: 2019923 - DNA, 15 bp, Homo sapiens
ctttaaaggttaaat

SEQ ID NO: 2019924 - DNA, 15 bp, Homo sapiens
tttaaaggttaaatt

SEQ ID NO: 2019925 - DNA, 15 bp, Homo sapiens
ttaaaggttaaatta

SEQ ID NO: 2019926 - DNA, 15 bp, Homo sapiens
taaaggttaaattat

SEQ ID NO: 2019927 - DNA, 15 bp, Homo sapiens
aaaggttaaattata

SEQ ID NO: 2019928 - DNA, 15 bp, Homo sapiens
aaggttaaattataa

SEQ ID NO: 2019929 - DNA, 15 bp, Homo sapiens
aggttaaattataac

SEQ ID NO: 2019930 - DNA, 15 bp, Homo sapiens
ggttaaattataacc

SEQ ID NO: 2019931 - DNA, 15 bp, Homo sapiens
gttaaattataacct

SEQ ID NO: 2019932 - DNA, 15 bp, Homo sapiens
ttaaattataacctg

SEQ ID NO: 2019933 - DNA, 15 bp, Homo sapiens
taaattataacctga

SEQ ID NO: 2019934 - DNA, 15 bp, Homo sapiens
aaattataacctgaa

SEQ ID NO: 2019935 - DNA, 15 bp, Homo sapiens
aattataacctgaag

SEQ ID NO: 2019936 - DNA, 15 bp, Homo sapiens
attataacctgaagt

SEQ ID NO: 2019937 - DNA, 15 bp, Homo sapiens
ttataacctgaagta

SEQ ID NO: 2019938 - DNA, 15 bp, Homo sapiens
tataacctgaagtat

SEQ ID NO: 2019939 - DNA, 15 bp, Homo sapiens
ataacctgaagtatg

SEQ ID NO: 2019940 - DNA, 15 bp, Homo sapiens
taacctgaagtatgc

SEQ ID NO: 2019941 - DNA, 15 bp, Homo sapiens
aacctgaagtatgca

SEQ ID NO: 2019942 - DNA, 15 bp, Homo sapiens
acctgaagtatgcag

SEQ ID NO: 2019943 - DNA, 15 bp, Homo sapiens
cctgaagtatgcagt

SEQ ID NO: 2019944 - DNA, 15 bp, Homo sapiens
ctgaagtatgcagtt

SEQ ID NO: 2019945 - DNA, 15 bp, Homo sapiens
tgaagtatgcagttt

SEQ ID NO: 2019946 - DNA, 15 bp, Homo sapiens
gaagtatgcagtttt

SEQ ID NO: 2019947 - DNA, 15 bp, Homo sapiens
aagtatgcagttttc

SEQ ID NO: 2019948 - DNA, 15 bp, Homo sapiens
agtatgcagttttcc

SEQ ID NO: 2019949 - DNA, 15 bp, Homo sapiens
gtatgcagttttcca

SEQ ID NO: 2019950 - DNA, 15 bp, Homo sapiens
tatgcagttttccag

SEQ ID NO: 2019951 - DNA, 15 bp, Homo sapiens
atgcagttttccaga

SEQ ID NO: 2019952 - DNA, 15 bp, Homo sapiens
tgcagttttccagat

SEQ ID NO: 2019953 - DNA, 15 bp, Homo sapiens
gcagttttccagatt

SEQ ID NO: 2019954 - DNA, 15 bp, Homo sapiens
cagttttccagattt

SEQ ID NO: 2019955 - DNA, 15 bp, Homo sapiens
agttttccagatttg

SEQ ID NO: 2019956 - DNA, 15 bp, Homo sapiens
gttttccagatttga

SEQ ID NO: 2019957 - DNA, 15 bp, Homo sapiens
ttttccagatttgaa

SEQ ID NO: 2019958 - DNA, 15 bp, Homo sapiens
tttccagatttgaac

SEQ ID NO: 2019959 - DNA, 15 bp, Homo sapiens
ttccagatttgaaca

SEQ ID NO: 2019960 - DNA, 15 bp, Homo sapiens
tccagatttgaacac

SEQ ID NO: 2019961 - DNA, 15 bp, Homo sapiens
ccagatttgaacaca

SEQ ID NO: 2019962 - DNA, 15 bp, Homo sapiens
cagatttgaacacac

SEQ ID NO: 2019963 - DNA, 15 bp, Homo sapiens
agatttgaacacaca

SEQ ID NO: 2019964 - DNA, 15 bp, Homo sapiens
gatttgaacacacac

SEQ ID NO: 2019965 - DNA, 15 bp, Homo sapiens
atttgaacacacaca

SEQ ID NO: 2019966 - DNA, 15 bp, Homo sapiens
tttgaacacacacac

SEQ ID NO: 2019967 - DNA, 15 bp, Homo sapiens
cacacacacacccct

SEQ ID NO: 2019968 - DNA, 15 bp, Homo sapiens
acacacacaccccta

SEQ ID NO: 2019969 - DNA, 15 bp, Homo sapiens
cacacacacccctaa

SEQ ID NO: 2019970 - DNA, 15 bp, Homo sapiens
acacacacccctaat

SEQ ID NO: 2019971 - DNA, 15 bp, Homo sapiens
cacacacccctaata

SEQ ID NO: 2019972 - DNA, 15 bp, Homo sapiens
acacacccctaataa

SEQ ID NO: 2019973 - DNA, 15 bp, Homo sapiens
cacacccctaataaa

SEQ ID NO: 2019974 - DNA, 15 bp, Homo sapiens
acacccctaataaat

SEQ ID NO: 2019975 - DNA, 15 bp, Homo sapiens
cacccctaataaatc

SEQ ID NO: 2019976 - DNA, 15 bp, Homo sapiens
acccctaataaatca

SEQ ID NO: 2019977 - DNA, 15 bp, Homo sapiens
cccctaataaatcat

SEQ ID NO: 2019978 - DNA, 15 bp, Homo sapiens
ccctaataaatcatt

SEQ ID NO: 2019979 - DNA, 15 bp, Homo sapiens
cctaataaatcatta

SEQ ID NO: 2019980 - DNA, 15 bp, Homo sapiens
ctaataaatcattag

SEQ ID NO: 2019981 - DNA, 15 bp, Homo sapiens
taataaatcattagg

SEQ ID NO: 2019982 - DNA, 15 bp, Homo sapiens
aataaatcattaggc

SEQ ID NO: 2019983 - DNA, 15 bp, Homo sapiens
ataaatcattaggct

SEQ ID NO: 2019984 - DNA, 15 bp, Homo sapiens
taaatcattaggcta

SEQ ID NO: 2019985 - DNA, 15 bp, Homo sapiens
aaatcattaggctac

SEQ ID NO: 2019986 - DNA, 15 bp, Homo sapiens
aatcattaggctact

SEQ ID NO: 2019987 - DNA, 15 bp, Homo sapiens
atcattaggctactt

SEQ ID NO: 2019988 - DNA, 15 bp, Homo sapiens
tcattaggctacttg

SEQ ID NO: 2019989 - DNA, 15 bp, Homo sapiens
cattaggctacttgg

SEQ ID NO: 2019990 - DNA, 15 bp, Homo sapiens
attaggctacttggc

SEQ ID NO: 2019991 - DNA, 15 bp, Homo sapiens
ttaggctacttggca

SEQ ID NO: 2019992 - DNA, 15 bp, Homo sapiens
taggctacttggcat

SEQ ID NO: 2019993 - DNA, 15 bp, Homo sapiens
aggctacttggcatc

SEQ ID NO: 2019994 - DNA, 15 bp, Homo sapiens
ggctacttggcatcc

SEQ ID NO: 2019995 - DNA, 15 bp, Homo sapiens
gctacttggcatcct

SEQ ID NO: 2019996 - DNA, 15 bp, Homo sapiens
ctacttggcatcctt

SEQ ID NO: 2019997 - DNA, 15 bp, Homo sapiens
tacttggcatccttg

SEQ ID NO: 2019998 - DNA, 15 bp, Homo sapiens
acttggcatccttga

SEQ ID NO: 2019999 - DNA, 15 bp, Homo sapiens
cttggcatccttgaa

SEQ ID NO: 2020000 - DNA, 15 bp, Homo sapiens
ttggcatccttgaag

SEQ ID NO: 2020001 - DNA, 15 bp, Homo sapiens
tggcatccttgaagt

SEQ ID NO: 2020002 - DNA, 15 bp, Homo sapiens
ggcatccttgaagtc

SEQ ID NO: 2020003 - DNA, 15 bp, Homo sapiens
gcatccttgaagtcc

SEQ ID NO: 2020004 - DNA, 15 bp, Homo sapiens
catccttgaagtcca

SEQ ID NO: 2020005 - DNA, 15 bp, Homo sapiens
atccttgaagtccaa

SEQ ID NO: 2020006 - DNA, 15 bp, Homo sapiens
tccttgaagtccaaa

SEQ ID NO: 2020007 - DNA, 15 bp, Homo sapiens
ccttgaagtccaaaa

SEQ ID NO: 2020008 - DNA, 15 bp, Homo sapiens
cttgaagtccaaaaa

SEQ ID NO: 2020009 - DNA, 15 bp, Homo sapiens
ttgaagtccaaaaat

SEQ ID NO: 2020010 - DNA, 15 bp, Homo sapiens
tgaagtccaaaaatt

SEQ ID NO: 2020011 - DNA, 15 bp, Homo sapiens
gaagtccaaaaatta

SEQ ID NO: 2020012 - DNA, 15 bp, Homo sapiens
aagtccaaaaattaa

SEQ ID NO: 2020013 - DNA, 15 bp, Homo sapiens
agtccaaaaattaat

SEQ ID NO: 2020014 - DNA, 15 bp, Homo sapiens
gtccaaaaattaatc

SEQ ID NO: 2020015 - DNA, 15 bp, Homo sapiens
tccaaaaattaatca

SEQ ID NO: 2020016 - DNA, 15 bp, Homo sapiens
ccaaaaattaatcaa

SEQ ID NO: 2020017 - DNA, 15 bp, Homo sapiens
caaaaattaatcaac

SEQ ID NO: 2020018 - DNA, 15 bp, Homo sapiens
aaaaattaatcaacc

SEQ ID NO: 2020019 - DNA, 15 bp, Homo sapiens
aaaattaatcaacct

SEQ ID NO: 2020020 - DNA, 15 bp, Homo sapiens
aaattaatcaacctt

SEQ ID NO: 2020021 - DNA, 15 bp, Homo sapiens
aattaatcaaccttt

SEQ ID NO: 2020022 - DNA, 15 bp, Homo sapiens
attaatcaacctttg

SEQ ID NO: 2020023 - DNA, 15 bp, Homo sapiens
ttaatcaacctttgg

SEQ ID NO: 2020024 - DNA, 15 bp, Homo sapiens
taatcaacctttggt

SEQ ID NO: 2020025 - DNA, 15 bp, Homo sapiens
aatcaacctttggta

SEQ ID NO: 2020026 - DNA, 15 bp, Homo sapiens
atcaacctttggtac

SEQ ID NO: 2020027 - DNA, 15 bp, Homo sapiens
tcaacctttggtact

SEQ ID NO: 2020028 - DNA, 15 bp, Homo sapiens
caacctttggtactt

SEQ ID NO: 2020029 - DNA, 15 bp, Homo sapiens
aacctttggtacttg

SEQ ID NO: 2020030 - DNA, 15 bp, Homo sapiens
acctttggtacttgt

SEQ ID NO: 2020031 - DNA, 15 bp, Homo sapiens
cctttggtacttgtt

SEQ ID NO: 2020032 - DNA, 15 bp, Homo sapiens
ctttggtacttgttg

SEQ ID NO: 2020033 - DNA, 15 bp, Homo sapiens
tttggtacttgttgt

SEQ ID NO: 2020034 - DNA, 15 bp, Homo sapiens
ttggtacttgttgtt

SEQ ID NO: 2020035 - DNA, 15 bp, Homo sapiens
tggtacttgttgtta

SEQ ID NO: 2020036 - DNA, 15 bp, Homo sapiens
ggtacttgttgttaa

SEQ ID NO: 2020037 - DNA, 15 bp, Homo sapiens
gtacttgttgttaat

SEQ ID NO: 2020038 - DNA, 15 bp, Homo sapiens
tacttgttgttaatg

SEQ ID NO: 2020039 - DNA, 15 bp, Homo sapiens
acttgttgttaatgt

SEQ ID NO: 2020040 - DNA, 15 bp, Homo sapiens
cttgttgttaatgtt

SEQ ID NO: 2020041 - DNA, 15 bp, Homo sapiens
ttgttgttaatgttc

SEQ ID NO: 2020042 - DNA, 15 bp, Homo sapiens
tgttgttaatgttcc

SEQ ID NO: 2020043 - DNA, 15 bp, Homo sapiens
gttgttaatgttcca

SEQ ID NO: 2020044 - DNA, 15 bp, Homo sapiens
ttgttaatgttccag

SEQ ID NO: 2020045 - DNA, 15 bp, Homo sapiens
tgttaatgttccagt

SEQ ID NO: 2020046 - DNA, 15 bp, Homo sapiens
gttaatgttccagta

SEQ ID NO: 2020047 - DNA, 15 bp, Homo sapiens
ttaatgttccagtaa

SEQ ID NO: 2020048 - DNA, 15 bp, Homo sapiens
taatgttccagtaag

SEQ ID NO: 2020049 - DNA, 15 bp, Homo sapiens
aatgttccagtaagt

SEQ ID NO: 2020050 - DNA, 15 bp, Homo sapiens
atgttccagtaagta

SEQ ID NO: 2020051 - DNA, 15 bp, Homo sapiens
tgttccagtaagtag

SEQ ID NO: 2020052 - DNA, 15 bp, Homo sapiens
gttccagtaagtagt

SEQ ID NO: 2020053 - DNA, 15 bp, Homo sapiens
ttccagtaagtagta

SEQ ID NO: 2020054 - DNA, 15 bp, Homo sapiens
tccagtaagtagtat

SEQ ID NO: 2020055 - DNA, 15 bp, Homo sapiens
ccagtaagtagtatt

SEQ ID NO: 2020056 - DNA, 15 bp, Homo sapiens
cagtaagtagtattt

SEQ ID NO: 2020057 - DNA, 15 bp, Homo sapiens
agtaagtagtattta

SEQ ID NO: 2020058 - DNA, 15 bp, Homo sapiens
gtaagtagtatttat

SEQ ID NO: 2020059 - DNA, 15 bp, Homo sapiens
taagtagtatttata

SEQ ID NO: 2020060 - DNA, 15 bp, Homo sapiens
aagtagtatttatag

SEQ ID NO: 2020061 - DNA, 15 bp, Homo sapiens
agtagtatttataga

SEQ ID NO: 2020062 - DNA, 15 bp, Homo sapiens
gtagtatttatagaa

SEQ ID NO: 2020063 - DNA, 15 bp, Homo sapiens
tagtatttatagaaa

SEQ ID NO: 2020064 - DNA, 15 bp, Homo sapiens
agtatttatagaaaa

SEQ ID NO: 2020065 - DNA, 15 bp, Homo sapiens
gtatttatagaaaag

SEQ ID NO: 2020066 - DNA, 15 bp, Homo sapiens
tatttatagaaaaga

SEQ ID NO: 2020067 - DNA, 15 bp, Homo sapiens
atttatagaaaagat

SEQ ID NO: 2020068 - DNA, 15 bp, Homo sapiens
tttatagaaaagatg

SEQ ID NO: 2020069 - DNA, 15 bp, Homo sapiens
ttatagaaaagatga

SEQ ID NO: 2020070 - DNA, 15 bp, Homo sapiens
tatagaaaagatgaa

SEQ ID NO: 2020071 - DNA, 15 bp, Homo sapiens
atagaaaagatgaat

SEQ ID NO: 2020072 - DNA, 15 bp, Homo sapiens
tagaaaagatgaata

SEQ ID NO: 2020073 - DNA, 15 bp, Homo sapiens
agaaaagatgaatat

SEQ ID NO: 2020074 - DNA, 15 bp, Homo sapiens
gaaaagatgaatatt

SEQ ID NO: 2020075 - DNA, 15 bp, Homo sapiens
aaaagatgaatatta

SEQ ID NO: 2020076 - DNA, 15 bp, Homo sapiens
aaagatgaatattat

SEQ ID NO: 2020077 - DNA, 15 bp, Homo sapiens
aagatgaatattatt

SEQ ID NO: 2020078 - DNA, 15 bp, Homo sapiens
agatgaatattatta

SEQ ID NO: 2020079 - DNA, 15 bp, Homo sapiens
gatgaatattattaa

SEQ ID NO: 2020080 - DNA, 15 bp, Homo sapiens
atgaatattattaat

SEQ ID NO: 2020081 - DNA, 15 bp, Homo sapiens
tgaatattattaatc

SEQ ID NO: 2020082 - DNA, 15 bp, Homo sapiens
gaatattattaatca

SEQ ID NO: 2020083 - DNA, 15 bp, Homo sapiens
aatattattaatcat

SEQ ID NO: 2020084 - DNA, 15 bp, Homo sapiens
atattattaatcata

SEQ ID NO: 2020085 - DNA, 15 bp, Homo sapiens
tattattaatcataa

SEQ ID NO: 2020086 - DNA, 15 bp, Homo sapiens
attattaatcataaa

SEQ ID NO: 2020087 - DNA, 15 bp, Homo sapiens
ttattaatcataaac

SEQ ID NO: 2020088 - DNA, 15 bp, Homo sapiens
tattaatcataaaca

SEQ ID NO: 2020089 - DNA, 15 bp, Homo sapiens
attaatcataaacag

SEQ ID NO: 2020090 - DNA, 15 bp, Homo sapiens
ttaatcataaacagt

SEQ ID NO: 2020091 - DNA, 15 bp, Homo sapiens
taatcataaacagtg

SEQ ID NO: 2020092 - DNA, 15 bp, Homo sapiens
aatcataaacagtga

SEQ ID NO: 2020093 - DNA, 15 bp, Homo sapiens
atcataaacagtgaa

SEQ ID NO: 2020094 - DNA, 15 bp, Homo sapiens
tcataaacagtgaaa

SEQ ID NO: 2020095 - DNA, 15 bp, Homo sapiens
cataaacagtgaaac

SEQ ID NO: 2020096 - DNA, 15 bp, Homo sapiens
ataaacagtgaaaca

SEQ ID NO: 2020097 - DNA, 15 bp, Homo sapiens
taaacagtgaaacat

SEQ ID NO: 2020098 - DNA, 15 bp, Homo sapiens
aaacagtgaaacata

SEQ ID NO: 2020099 - DNA, 15 bp, Homo sapiens
aacagtgaaacatac

SEQ ID NO: 2020100 - DNA, 15 bp, Homo sapiens
acagtgaaacatact

SEQ ID NO: 2020101 - DNA, 15 bp, Homo sapiens
cagtgaaacatactt

SEQ ID NO: 2020102 - DNA, 15 bp, Homo sapiens
agtgaaacatacttt

SEQ ID NO: 2020103 - DNA, 15 bp, Homo sapiens
gtgaaacatactttg

SEQ ID NO: 2020104 - DNA, 15 bp, Homo sapiens
tgaaacatactttgc

SEQ ID NO: 2020105 - DNA, 15 bp, Homo sapiens
gaaacatactttgcg

SEQ ID NO: 2020106 - DNA, 15 bp, Homo sapiens
aaacatactttgcgt

SEQ ID NO: 2020107 - DNA, 15 bp, Homo sapiens
aacatactttgcgtt

SEQ ID NO: 2020108 - DNA, 15 bp, Homo sapiens
acatactttgcgttt

SEQ ID NO: 2020109 - DNA, 15 bp, Homo sapiens
catactttgcgttta

SEQ ID NO: 2020110 - DNA, 15 bp, Homo sapiens
atactttgcgtttac

SEQ ID NO: 2020111 - DNA, 15 bp, Homo sapiens
tactttgcgtttaca

SEQ ID NO: 2020112 - DNA, 15 bp, Homo sapiens
actttgcgtttacac

SEQ ID NO: 2020113 - DNA, 15 bp, Homo sapiens
ctttgcgtttacact

SEQ ID NO: 2020114 - DNA, 15 bp, Homo sapiens
tttgcgtttacactt

SEQ ID NO: 2020115 - DNA, 15 bp, Homo sapiens
ttgcgtttacactta

SEQ ID NO: 2020116 - DNA, 15 bp, Homo sapiens
tgcgtttacacttag

SEQ ID NO: 2020117 - DNA, 15 bp, Homo sapiens
gcgtttacacttagc

SEQ ID NO: 2020118 - DNA, 15 bp, Homo sapiens
cgtttacacttagcc

SEQ ID NO: 2020119 - DNA, 15 bp, Homo sapiens
gtttacacttagcct

SEQ ID NO: 2020120 - DNA, 15 bp, Homo sapiens
tttacacttagccta

SEQ ID NO: 2020121 - DNA, 15 bp, Homo sapiens
ttacacttagcctat

SEQ ID NO: 2020122 - DNA, 15 bp, Homo sapiens
tacacttagcctatt

SEQ ID NO: 2020123 - DNA, 15 bp, Homo sapiens
acacttagcctattg

SEQ ID NO: 2020124 - DNA, 15 bp, Homo sapiens
cacttagcctattgg

SEQ ID NO: 2020125 - DNA, 15 bp, Homo sapiens
acttagcctattggt

SEQ ID NO: 2020126 - DNA, 15 bp, Homo sapiens
cttagcctattggtg

SEQ ID NO: 2020127 - DNA, 15 bp, Homo sapiens
ttagcctattggtgt

SEQ ID NO: 2020128 - DNA, 15 bp, Homo sapiens
tagcctattggtgtg

SEQ ID NO: 2020129 - DNA, 15 bp, Homo sapiens
agcctattggtgtgg

SEQ ID NO: 2020130 - DNA, 15 bp, Homo sapiens
gcctattggtgtggc

SEQ ID NO: 2020131 - DNA, 15 bp, Homo sapiens
cctattggtgtggct

SEQ ID NO: 2020132 - DNA, 15 bp, Homo sapiens
ctattggtgtggcta

SEQ ID NO: 2020133 - DNA, 15 bp, Homo sapiens
tattggtgtggctat

SEQ ID NO: 2020134 - DNA, 15 bp, Homo sapiens
attggtgtggctata

SEQ ID NO: 2020135 - DNA, 15 bp, Homo sapiens
ttggtgtggctataa

SEQ ID NO: 2020136 - DNA, 15 bp, Homo sapiens
tggtgtggctataaa

SEQ ID NO: 2020137 - DNA, 15 bp, Homo sapiens
ggtgtggctataaat

SEQ ID NO: 2020138 - DNA, 15 bp, Homo sapiens
gtgtggctataaatc

SEQ ID NO: 2020139 - DNA, 15 bp, Homo sapiens
tgtggctataaatct

SEQ ID NO: 2020140 - DNA, 15 bp, Homo sapiens
gtggctataaatctt

SEQ ID NO: 2020141 - DNA, 15 bp, Homo sapiens
ggctataaatcttat

SEQ ID NO: 2020142 - DNA, 15 bp, Homo sapiens
gctataaatcttatt

SEQ ID NO: 2020143 - DNA, 15 bp, Homo sapiens
ctataaatcttattt

SEQ ID NO: 2020144 - DNA, 15 bp, Homo sapiens
tataaatcttattta

SEQ ID NO: 2020145 - DNA, 15 bp, Homo sapiens
ataaatcttatttat

SEQ ID NO: 2020146 - DNA, 15 bp, Homo sapiens
taaatcttatttatt

SEQ ID NO: 2020147 - DNA, 15 bp, Homo sapiens
aaatcttatttattt

SEQ ID NO: 2020148 - DNA, 15 bp, Homo sapiens
aatcttatttatttt

SEQ ID NO: 2020149 - DNA, 15 bp, Homo sapiens
atcttatttatttta

SEQ ID NO: 2020150 - DNA, 15 bp, Homo sapiens
tcttatttattttag

SEQ ID NO: 2020151 - DNA, 15 bp, Homo sapiens
cttatttattttagt

SEQ ID NO: 2020152 - DNA, 15 bp, Homo sapiens
tatttattttagttg

SEQ ID NO: 2020153 - DNA, 15 bp, Homo sapiens
atttattttagttgt

SEQ ID NO: 2020154 - DNA, 15 bp, Homo sapiens
tttattttagttgtg

SEQ ID NO: 2020155 - DNA, 15 bp, Homo sapiens
ttattttagttgtgc

SEQ ID NO: 2020156 - DNA, 15 bp, Homo sapiens
tattttagttgtgct

SEQ ID NO: 2020157 - DNA, 15 bp, Homo sapiens
attttagttgtgctc

SEQ ID NO: 2020158 - DNA, 15 bp, Homo sapiens
ttttagttgtgctct

SEQ ID NO: 2020159 - DNA, 15 bp, Homo sapiens
tttagttgtgctcta

SEQ ID NO: 2020160 - DNA, 15 bp, Homo sapiens
ttagttgtgctctat

SEQ ID NO: 2020161 - DNA, 15 bp, Homo sapiens
tagttgtgctctatt

SEQ ID NO: 2020162 - DNA, 15 bp, Homo sapiens
agttgtgctctattt

SEQ ID NO: 2020163 - DNA, 15 bp, Homo sapiens
gttgtgctctatttc

SEQ ID NO: 2020164 - DNA, 15 bp, Homo sapiens
ttgtgctctatttct

SEQ ID NO: 2020165 - DNA, 15 bp, Homo sapiens
tgtgctctatttctt

SEQ ID NO: 2020166 - DNA, 15 bp, Homo sapiens
gtgctctatttctta

SEQ ID NO: 2020167 - DNA, 15 bp, Homo sapiens
tgctctatttcttat

SEQ ID NO: 2020168 - DNA, 15 bp, Homo sapiens
gctctatttcttatt

SEQ ID NO: 2020169 - DNA, 15 bp, Homo sapiens
ctctatttcttattg

SEQ ID NO: 2020170 - DNA, 15 bp, Homo sapiens
tctatttcttattga

SEQ ID NO: 2020171 - DNA, 15 bp, Homo sapiens
ctatttcttattgat

SEQ ID NO: 2020172 - DNA, 15 bp, Homo sapiens
tatttcttattgatc

SEQ ID NO: 2020173 - DNA, 15 bp, Homo sapiens
atttcttattgatct

SEQ ID NO: 2020174 - DNA, 15 bp, Homo sapiens
tttcttattgatctt

SEQ ID NO: 2020175 - DNA, 15 bp, Homo sapiens
ttcttattgatcttt

SEQ ID NO: 2020176 - DNA, 15 bp, Homo sapiens
tcttattgatcttta

SEQ ID NO: 2020177 - DNA, 15 bp, Homo sapiens
cttattgatctttac

SEQ ID NO: 2020178 - DNA, 15 bp, Homo sapiens
ttattgatctttaca

SEQ ID NO: 2020179 - DNA, 15 bp, Homo sapiens
tattgatctttacaa

SEQ ID NO: 2020180 - DNA, 15 bp, Homo sapiens
attgatctttacaat

SEQ ID NO: 2020181 - DNA, 15 bp, Homo sapiens
ttgatctttacaatg

SEQ ID NO: 2020182 - DNA, 15 bp, Homo sapiens
tgatctttacaatgt

SEQ ID NO: 2020183 - DNA, 15 bp, Homo sapiens
gatctttacaatgtg

SEQ ID NO: 2020184 - DNA, 15 bp, Homo sapiens
atctttacaatgtgt

SEQ ID NO: 2020185 - DNA, 15 bp, Homo sapiens
tctttacaatgtgtt

SEQ ID NO: 2020186 - DNA, 15 bp, Homo sapiens
ctttacaatgtgttc

SEQ ID NO: 2020187 - DNA, 15 bp, Homo sapiens
tttacaatgtgttct

SEQ ID NO: 2020188 - DNA, 15 bp, Homo sapiens
ttacaatgtgttctc

SEQ ID NO: 2020189 - DNA, 15 bp, Homo sapiens
tacaatgtgttctct

SEQ ID NO: 2020190 - DNA, 15 bp, Homo sapiens
acaatgtgttctcta

SEQ ID NO: 2020191 - DNA, 15 bp, Homo sapiens
caatgtgttctctaa

SEQ ID NO: 2020192 - DNA, 15 bp, Homo sapiens
aatgtgttctctaaa

SEQ ID NO: 2020193 - DNA, 15 bp, Homo sapiens
atgtgttctctaaag

SEQ ID NO: 2020194 - DNA, 15 bp, Homo sapiens
tgtgttctctaaagt

SEQ ID NO: 2020195 - DNA, 15 bp, Homo sapiens
gtgttctctaaagta

SEQ ID NO: 2020196 - DNA, 15 bp, Homo sapiens
tgttctctaaagtaa

SEQ ID NO: 2020197 - DNA, 15 bp, Homo sapiens
gttctctaaagtaat

SEQ ID NO: 2020198 - DNA, 15 bp, Homo sapiens
ttctctaaagtaata

SEQ ID NO: 2020199 - DNA, 15 bp, Homo sapiens
tctctaaagtaataa

SEQ ID NO: 2020200 - DNA, 15 bp, Homo sapiens
ctctaaagtaataaa

SEQ ID NO: 2020201 - DNA, 15 bp, Homo sapiens
tctaaagtaataaag

SEQ ID NO: 2020202 - DNA, 15 bp, Homo sapiens
ctaaagtaataaagt

SEQ ID NO: 2020203 - DNA, 15 bp, Homo sapiens
taaagtaataaagtg

SEQ ID NO: 2020204 - DNA, 15 bp, Homo sapiens
aaagtaataaagtga

SEQ ID NO: 2020205 - DNA, 15 bp, Homo sapiens
aagtaataaagtgaa

SEQ ID NO: 2020206 - DNA, 15 bp, Homo sapiens
agtaataaagtgaat

SEQ ID NO: 2020207 - DNA, 15 bp, Homo sapiens
gtaataaagtgaatg

SEQ ID NO: 2020208 - DNA, 15 bp, Homo sapiens
taataaagtgaatgc

SEQ ID NO: 2020209 - DNA, 15 bp, Homo sapiens
aataaagtgaatgca

SEQ ID NO: 2020210 - DNA, 15 bp, Homo sapiens
ataaagtgaatgcaa

SEQ ID NO: 2020211 - DNA, 15 bp, Homo sapiens
taaagtgaatgcaaa

SEQ ID NO: 2020212 - DNA, 15 bp, Homo sapiens
aaagtgaatgcaaat

SEQ ID NO: 2020213 - DNA, 15 bp, Homo sapiens
aagtgaatgcaaata

SEQ ID NO: 2020214 - DNA, 15 bp, Homo sapiens
agtgaatgcaaatat

SEQ ID NO: 2020215 - DNA, 15 bp, Homo sapiens
gtgaatgcaaatata

SEQ ID NO: 2020216 - DNA, 15 bp, Homo sapiens
tgaatgcaaatatac

SEQ ID NO: 2020217 - DNA, 15 bp, Homo sapiens
gaatgcaaatatacg

SEQ ID NO: 2020218 - DNA, 15 bp, Homo sapiens
aatgcaaatatacgt

SEQ ID NO: 2020219 - DNA, 15 bp, Homo sapiens
atgcaaatatacgtg

SEQ ID NO: 2020220 - DNA, 15 bp, Homo sapiens
tgcaaatatacgtgg

SEQ ID NO: 2020221 - DNA, 15 bp, Homo sapiens
gcaaatatacgtggt

SEQ ID NO: 2020222 - DNA, 15 bp, Homo sapiens
caaatatacgtggtc

SEQ ID NO: 2020223 - DNA, 15 bp, Homo sapiens
aaatatacgtggtca

SEQ ID NO: 2020224 - DNA, 15 bp, Homo sapiens
aatatacgtggtcac

SEQ ID NO: 2020225 - DNA, 15 bp, Homo sapiens
atatacgtggtcaca

SEQ ID NO: 2020226 - DNA, 15 bp, Homo sapiens
tatacgtggtcacag

SEQ ID NO: 2020227 - DNA, 15 bp, Homo sapiens
atacgtggtcacagg

SEQ ID NO: 2020228 - DNA, 15 bp, Homo sapiens
tacgtggtcacaggt

SEQ ID NO: 2020229 - DNA, 15 bp, Homo sapiens
acgtggtcacaggtt

SEQ ID NO: 2020230 - DNA, 15 bp, Homo sapiens
cgtggtcacaggttt

SEQ ID NO: 2020231 - DNA, 15 bp, Homo sapiens
gtggtcacaggttta

SEQ ID NO: 2020232 - DNA, 15 bp, Homo sapiens
tggtcacaggtttat

SEQ ID NO: 2020233 - DNA, 15 bp, Homo sapiens
ggtcacaggtttatt

SEQ ID NO: 2020234 - DNA, 15 bp, Homo sapiens
gtcacaggtttattc

SEQ ID NO: 2020235 - DNA, 15 bp, Homo sapiens
tcacaggtttattct

SEQ ID NO: 2020236 - DNA, 15 bp, Homo sapiens
cacaggtttattctg

SEQ ID NO: 2020237 - DNA, 15 bp, Homo sapiens
acaggtttattctga

SEQ ID NO: 2020238 - DNA, 15 bp, Homo sapiens
caggtttattctgag

SEQ ID NO: 2020239 - DNA, 15 bp, Homo sapiens
aggtttattctgagt

SEQ ID NO: 2020240 - DNA, 15 bp, Homo sapiens
ggtttattctgagtt

SEQ ID NO: 2020241 - DNA, 15 bp, Homo sapiens
gtttattctgagttt

SEQ ID NO: 2020242 - DNA, 15 bp, Homo sapiens
tttattctgagtttt

SEQ ID NO: 2020243 - DNA, 15 bp, Homo sapiens
ttattctgagtttta

SEQ ID NO: 2020244 - DNA, 15 bp, Homo sapiens
tattctgagttttaa

SEQ ID NO: 2020245 - DNA, 15 bp, Homo sapiens
attctgagttttaat

SEQ ID NO: 2020246 - DNA, 15 bp, Homo sapiens
ttctgagttttaatt

SEQ ID NO: 2020247 - DNA, 15 bp, Homo sapiens
tctgagttttaattt

SEQ ID NO: 2020248 - DNA, 15 bp, Homo sapiens
ctgagttttaattta

SEQ ID NO: 2020249 - DNA, 15 bp, Homo sapiens
tgagttttaatttat

SEQ ID NO: 2020250 - DNA, 15 bp, Homo sapiens
gagttttaatttatt

SEQ ID NO: 2020251 - DNA, 15 bp, Homo sapiens
agttttaatttatta

SEQ ID NO: 2020252 - DNA, 15 bp, Homo sapiens
gttttaatttattat

SEQ ID NO: 2020253 - DNA, 15 bp, Homo sapiens
ttttaatttattata

SEQ ID NO: 2020254 - DNA, 15 bp, Homo sapiens
tttaatttattatac

SEQ ID NO: 2020255 - DNA, 15 bp, Homo sapiens
ttaatttattataca

SEQ ID NO: 2020256 - DNA, 15 bp, Homo sapiens
taatttattatacaa

SEQ ID NO: 2020257 - DNA, 15 bp, Homo sapiens
aatttattatacaaa

SEQ ID NO: 2020258 - DNA, 15 bp, Homo sapiens
atttattatacaaaa

SEQ ID NO: 2020259 - DNA, 15 bp, Homo sapiens
tttattatacaaaag

SEQ ID NO: 2020260 - DNA, 15 bp, Homo sapiens
ttattatacaaaagt

SEQ ID NO: 2020261 - DNA, 15 bp, Homo sapiens
tattatacaaaagta

SEQ ID NO: 2020262 - DNA, 15 bp, Homo sapiens
attatacaaaagtaa

SEQ ID NO: 2020263 - DNA, 15 bp, Homo sapiens
ttatacaaaagtaaa

SEQ ID NO: 2020264 - DNA, 15 bp, Homo sapiens
tatacaaaagtaaag

SEQ ID NO: 2020265 - DNA, 15 bp, Homo sapiens
atacaaaagtaaagg

SEQ ID NO: 2020266 - DNA, 15 bp, Homo sapiens
tacaaaagtaaaggt

SEQ ID NO: 2020267 - DNA, 15 bp, Homo sapiens
acaaaagtaaaggtt

SEQ ID NO: 2020268 - DNA, 15 bp, Homo sapiens
caaaagtaaaggttt

SEQ ID NO: 2020269 - DNA, 15 bp, Homo sapiens
aaaagtaaaggtttt

SEQ ID NO: 2020270 - DNA, 15 bp, Homo sapiens
aaagtaaaggtttta

SEQ ID NO: 2020271 - DNA, 15 bp, Homo sapiens
aagtaaaggttttaa

SEQ ID NO: 2020272 - DNA, 15 bp, Homo sapiens
agtaaaggttttaat

SEQ ID NO: 2020273 - DNA, 15 bp, Homo sapiens
gtaaaggttttaatt

SEQ ID NO: 2020274 - DNA, 15 bp, Homo sapiens
taaaggttttaattt

SEQ ID NO: 2020275 - DNA, 15 bp, Homo sapiens
aaaggttttaattta

SEQ ID NO: 2020276 - DNA, 15 bp, Homo sapiens
aaggttttaatttaa

SEQ ID NO: 2020277 - DNA, 15 bp, Homo sapiens
aggttttaatttaat

SEQ ID NO: 2020278 - DNA, 15 bp, Homo sapiens
ggttttaatttaata

SEQ ID NO: 2020279 - DNA, 15 bp, Homo sapiens
gttttaatttaatat

SEQ ID NO: 2020280 - DNA, 15 bp, Homo sapiens
ttttaatttaatatt

SEQ ID NO: 2020281 - DNA, 15 bp, Homo sapiens
tttaatttaatatta

SEQ ID NO: 2020282 - DNA, 15 bp, Homo sapiens
ttaatttaatattaa

SEQ ID NO: 2020283 - DNA, 15 bp, Homo sapiens
taatttaatattaat

SEQ ID NO: 2020284 - DNA, 15 bp, Homo sapiens
aatttaatattaata

SEQ ID NO: 2020285 - DNA, 15 bp, Homo sapiens
atttaatattaatag

SEQ ID NO: 2020286 - DNA, 15 bp, Homo sapiens
tttaatattaatagt

SEQ ID NO: 2020287 - DNA, 15 bp, Homo sapiens
ttaatattaatagta

SEQ ID NO: 2020288 - DNA, 15 bp, Homo sapiens
taatattaatagtag

SEQ ID NO: 2020289 - DNA, 15 bp, Homo sapiens
aatattaatagtaga

SEQ ID NO: 2020290 - DNA, 15 bp, Homo sapiens
atattaatagtagaa

SEQ ID NO: 2020291 - DNA, 15 bp, Homo sapiens
tattaatagtagaaa

SEQ ID NO: 2020292 - DNA, 15 bp, Homo sapiens
attaatagtagaaaa

SEQ ID NO: 2020293 - DNA, 15 bp, Homo sapiens
ttaatagtagaaaaa

SEQ ID NO: 2020294 - DNA, 15 bp, Homo sapiens
taatagtagaaaaac

SEQ ID NO: 2020295 - DNA, 15 bp, Homo sapiens
aatagtagaaaaaca

SEQ ID NO: 2020296 - DNA, 15 bp, Homo sapiens
atagtagaaaaacac

SEQ ID NO: 2020297 - DNA, 15 bp, Homo sapiens
tagtagaaaaacact

SEQ ID NO: 2020298 - DNA, 15 bp, Homo sapiens
agtagaaaaacactt

SEQ ID NO: 2020299 - DNA, 15 bp, Homo sapiens
gtagaaaaacacttt

SEQ ID NO: 2020300 - DNA, 15 bp, Homo sapiens
tagaaaaacactttc

SEQ ID NO: 2020301 - DNA, 15 bp, Homo sapiens
agaaaaacactttct

SEQ ID NO: 2020302 - DNA, 15 bp, Homo sapiens
aaaaacactttctta

SEQ ID NO: 2020303 - DNA, 15 bp, Homo sapiens
aaaacactttcttac

SEQ ID NO: 2020304 - DNA, 15 bp, Homo sapiens
aaacactttcttacg

SEQ ID NO: 2020305 - DNA, 15 bp, Homo sapiens
aacactttcttacgt

SEQ ID NO: 2020306 - DNA, 15 bp, Homo sapiens
acactttcttacgtg

SEQ ID NO: 2020307 - DNA, 15 bp, Homo sapiens
cactttcttacgtgt

SEQ ID NO: 2020308 - DNA, 15 bp, Homo sapiens
actttcttacgtgtg

SEQ ID NO: 2020309 - DNA, 15 bp, Homo sapiens
ctttcttacgtgtgc

SEQ ID NO: 2020310 - DNA, 15 bp, Homo sapiens
tttcttacgtgtgcc

SEQ ID NO: 2020311 - DNA, 15 bp, Homo sapiens
ttcttacgtgtgcca

SEQ ID NO: 2020312 - DNA, 15 bp, Homo sapiens
tcttacgtgtgccat

SEQ ID NO: 2020313 - DNA, 15 bp, Homo sapiens
cttacgtgtgccata

SEQ ID NO: 2020314 - DNA, 15 bp, Homo sapiens
ttacgtgtgccatat

SEQ ID NO: 2020315 - DNA, 15 bp, Homo sapiens
tacgtgtgccatatg

SEQ ID NO: 2020316 - DNA, 15 bp, Homo sapiens
acgtgtgccatatgg

SEQ ID NO: 2020317 - DNA, 15 bp, Homo sapiens
cgtgtgccatatgga

SEQ ID NO: 2020318 - DNA, 15 bp, Homo sapiens
gtgtgccatatggaa

SEQ ID NO: 2020319 - DNA, 15 bp, Homo sapiens
tgtgccatatggaaa

SEQ ID NO: 2020320 - DNA, 15 bp, Homo sapiens
gtgccatatggaaag

SEQ ID NO: 2020321 - DNA, 15 bp, Homo sapiens
tgccatatggaaaga

SEQ ID NO: 2020322 - DNA, 15 bp, Homo sapiens
gccatatggaaagat

SEQ ID NO: 2020323 - DNA, 15 bp, Homo sapiens
ccatatggaaagata

SEQ ID NO: 2020324 - DNA, 15 bp, Homo sapiens
catatggaaagataa

SEQ ID NO: 2020325 - DNA, 15 bp, Homo sapiens
atatggaaagataaa

SEQ ID NO: 2020326 - DNA, 15 bp, Homo sapiens
tatggaaagataaag

SEQ ID NO: 2020327 - DNA, 15 bp, Homo sapiens
atggaaagataaagg

SEQ ID NO: 2020328 - DNA, 15 bp, Homo sapiens
tggaaagataaagga

SEQ ID NO: 2020329 - DNA, 15 bp, Homo sapiens
ggaaagataaaggat

SEQ ID NO: 2020330 - DNA, 15 bp, Homo sapiens
gaaagataaaggatc

SEQ ID NO: 2020331 - DNA, 15 bp, Homo sapiens
aaagataaaggatct

SEQ ID NO: 2020332 - DNA, 15 bp, Homo sapiens
aagataaaggatcta

SEQ ID NO: 2020333 - DNA, 15 bp, Homo sapiens
agataaaggatctat

SEQ ID NO: 2020334 - DNA, 15 bp, Homo sapiens
gataaaggatctatt

SEQ ID NO: 2020335 - DNA, 15 bp, Homo sapiens
ataaaggatctattc

SEQ ID NO: 2020336 - DNA, 15 bp, Homo sapiens
taaaggatctattct

SEQ ID NO: 2020337 - DNA, 15 bp, Homo sapiens
aaaggatctattcta

SEQ ID NO: 2020338 - DNA, 15 bp, Homo sapiens
aaggatctattctaa

SEQ ID NO: 2020339 - DNA, 15 bp, Homo sapiens
aggatctattctaaa

SEQ ID NO: 2020340 - DNA, 15 bp, Homo sapiens
ggatctattctaaaa

SEQ ID NO: 2020341 - DNA, 15 bp, Homo sapiens
gatctattctaaaat

SEQ ID NO: 2020342 - DNA, 15 bp, Homo sapiens
atctattctaaaatt

SEQ ID NO: 2020343 - DNA, 15 bp, Homo sapiens
tctattctaaaatta

SEQ ID NO: 2020344 - DNA, 15 bp, Homo sapiens
ctattctaaaattag

SEQ ID NO: 2020345 - DNA, 15 bp, Homo sapiens
tattctaaaattagc

SEQ ID NO: 2020346 - DNA, 15 bp, Homo sapiens
attctaaaattagct

SEQ ID NO: 2020347 - DNA, 15 bp, Homo sapiens
ttctaaaattagctg

SEQ ID NO: 2020348 - DNA, 15 bp, Homo sapiens
tctaaaattagctgt

SEQ ID NO: 2020349 - DNA, 15 bp, Homo sapiens
ctaaaattagctgtg

SEQ ID NO: 2020350 - DNA, 15 bp, Homo sapiens
taaaattagctgtgt

SEQ ID NO: 2020351 - DNA, 15 bp, Homo sapiens
aaaattagctgtgtt

SEQ ID NO: 2020352 - DNA, 15 bp, Homo sapiens
aaattagctgtgttg

SEQ ID NO: 2020353 - DNA, 15 bp, Homo sapiens
aattagctgtgttgg

SEQ ID NO: 2020354 - DNA, 15 bp, Homo sapiens
attagctgtgttggt

SEQ ID NO: 2020355 - DNA, 15 bp, Homo sapiens
ttagctgtgttggtt

SEQ ID NO: 2020356 - DNA, 15 bp, Homo sapiens
tagctgtgttggttg

SEQ ID NO: 2020357 - DNA, 15 bp, Homo sapiens
agctgtgttggttga

SEQ ID NO: 2020358 - DNA, 15 bp, Homo sapiens
gctgtgttggttgat

SEQ ID NO: 2020359 - DNA, 15 bp, Homo sapiens
ctgtgttggttgata

SEQ ID NO: 2020360 - DNA, 15 bp, Homo sapiens
tgtgttggttgataa

SEQ ID NO: 2020361 - DNA, 15 bp, Homo sapiens
gtgttggttgataag

SEQ ID NO: 2020362 - DNA, 15 bp, Homo sapiens
tgttggttgataagc

SEQ ID NO: 2020363 - DNA, 15 bp, Homo sapiens
gttggttgataagct

SEQ ID NO: 2020364 - DNA, 15 bp, Homo sapiens
ttggttgataagctg

SEQ ID NO: 2020365 - DNA, 15 bp, Homo sapiens
tggttgataagctgg

SEQ ID NO: 2020366 - DNA, 15 bp, Homo sapiens
ggttgataagctggt

SEQ ID NO: 2020367 - DNA, 15 bp, Homo sapiens
gttgataagctggtg

SEQ ID NO: 2020368 - DNA, 15 bp, Homo sapiens
ttgataagctggtgt

SEQ ID NO: 2020369 - DNA, 15 bp, Homo sapiens
tgataagctggtgtg

SEQ ID NO: 2020370 - DNA, 15 bp, Homo sapiens
gataagctggtgtgg

SEQ ID NO: 2020371 - DNA, 15 bp, Homo sapiens
ataagctggtgtgga

SEQ ID NO: 2020372 - DNA, 15 bp, Homo sapiens
taagctggtgtggat

SEQ ID NO: 2020373 - DNA, 15 bp, Homo sapiens
aagctggtgtggatt

SEQ ID NO: 2020374 - DNA, 15 bp, Homo sapiens
agctggtgtggattc

SEQ ID NO: 2020375 - DNA, 15 bp, Homo sapiens
gctggtgtggattct

SEQ ID NO: 2020376 - DNA, 15 bp, Homo sapiens
ctggtgtggattctg

SEQ ID NO: 2020377 - DNA, 15 bp, Homo sapiens
tggtgtggattctgc

SEQ ID NO: 2020378 - DNA, 15 bp, Homo sapiens
ggtgtggattctgcc

SEQ ID NO: 2020379 - DNA, 15 bp, Homo sapiens
gtgtggattctgcca

SEQ ID NO: 2020380 - DNA, 15 bp, Homo sapiens
tgtggattctgccac

SEQ ID NO: 2020381 - DNA, 15 bp, Homo sapiens
gtggattctgccaca

SEQ ID NO: 2020382 - DNA, 15 bp, Homo sapiens
tggattctgccacat

SEQ ID NO: 2020383 - DNA, 15 bp, Homo sapiens
ggattctgccacatc

SEQ ID NO: 2020384 - DNA, 15 bp, Homo sapiens
gattctgccacatcc

SEQ ID NO: 2020385 - DNA, 15 bp, Homo sapiens
attctgccacatcca

SEQ ID NO: 2020386 - DNA, 15 bp, Homo sapiens
ttctgccacatccag

SEQ ID NO: 2020387 - DNA, 15 bp, Homo sapiens
tctgccacatccagc

SEQ ID NO: 2020388 - DNA, 15 bp, Homo sapiens
ctgccacatccagca

SEQ ID NO: 2020389 - DNA, 15 bp, Homo sapiens
tgccacatccagcaa

SEQ ID NO: 2020390 - DNA, 15 bp, Homo sapiens
gccacatccagcaag

SEQ ID NO: 2020391 - DNA, 15 bp, Homo sapiens
ccacatccagcaagg

SEQ ID NO: 2020392 - DNA, 15 bp, Homo sapiens
cacatccagcaagga

SEQ ID NO: 2020393 - DNA, 15 bp, Homo sapiens
acatccagcaaggaa

SEQ ID NO: 2020394 - DNA, 15 bp, Homo sapiens
catccagcaaggaag

SEQ ID NO: 2020395 - DNA, 15 bp, Homo sapiens
atccagcaaggaaga

SEQ ID NO: 2020396 - DNA, 15 bp, Homo sapiens
tccagcaaggaagat

SEQ ID NO: 2020397 - DNA, 15 bp, Homo sapiens
ccagcaaggaagata

SEQ ID NO: 2020398 - DNA, 15 bp, Homo sapiens
cagcaaggaagatac

SEQ ID NO: 2020399 - DNA, 15 bp, Homo sapiens
agcaaggaagatacc

SEQ ID NO: 2020400 - DNA, 15 bp, Homo sapiens
gcaaggaagatacca

SEQ ID NO: 2020401 - DNA, 15 bp, Homo sapiens
caaggaagataccat

SEQ ID NO: 2020402 - DNA, 15 bp, Homo sapiens
aaggaagataccatt

SEQ ID NO: 2020403 - DNA, 15 bp, Homo sapiens
aggaagataccatta

SEQ ID NO: 2020404 - DNA, 15 bp, Homo sapiens
ggaagataccattaa

SEQ ID NO: 2020405 - DNA, 15 bp, Homo sapiens
gaagataccattaaa

SEQ ID NO: 2020406 - DNA, 15 bp, Homo sapiens
aagataccattaaat

SEQ ID NO: 2020407 - DNA, 15 bp, Homo sapiens
agataccattaaatt

SEQ ID NO: 2020408 - DNA, 15 bp, Homo sapiens
gataccattaaatta

SEQ ID NO: 2020409 - DNA, 15 bp, Homo sapiens
ataccattaaattac

SEQ ID NO: 2020410 - DNA, 15 bp, Homo sapiens
taccattaaattaca

SEQ ID NO: 2020411 - DNA, 15 bp, Homo sapiens
accattaaattacac

SEQ ID NO: 2020412 - DNA, 15 bp, Homo sapiens
ccattaaattacaca

SEQ ID NO: 2020413 - DNA, 15 bp, Homo sapiens
cattaaattacacag

SEQ ID NO: 2020414 - DNA, 15 bp, Homo sapiens
attaaattacacagt

SEQ ID NO: 2020415 - DNA, 15 bp, Homo sapiens
ttaaattacacagtt

SEQ ID NO: 2020416 - DNA, 15 bp, Homo sapiens
taaattacacagttt

SEQ ID NO: 2020417 - DNA, 15 bp, Homo sapiens
aaattacacagttta

SEQ ID NO: 2020418 - DNA, 15 bp, Homo sapiens
aattacacagtttag

SEQ ID NO: 2020419 - DNA, 15 bp, Homo sapiens
attacacagtttagc

SEQ ID NO: 2020420 - DNA, 15 bp, Homo sapiens
ttacacagtttagct

SEQ ID NO: 2020421 - DNA, 15 bp, Homo sapiens
tacacagtttagctc

SEQ ID NO: 2020422 - DNA, 15 bp, Homo sapiens
acacagtttagctct

SEQ ID NO: 2020423 - DNA, 15 bp, Homo sapiens
cacagtttagctctc

SEQ ID NO: 2020424 - DNA, 15 bp, Homo sapiens
acagtttagctctct

SEQ ID NO: 2020425 - DNA, 15 bp, Homo sapiens
cagtttagctctctc

SEQ ID NO: 2020426 - DNA, 15 bp, Homo sapiens
agtttagctctctct

SEQ ID NO: 2020427 - DNA, 15 bp, Homo sapiens
gtttagctctctcta

SEQ ID NO: 2020428 - DNA, 15 bp, Homo sapiens
tttagctctctctat

SEQ ID NO: 2020429 - DNA, 15 bp, Homo sapiens
ttagctctctctatc

SEQ ID NO: 2020430 - DNA, 15 bp, Homo sapiens
tagctctctctatct

SEQ ID NO: 2020431 - DNA, 15 bp, Homo sapiens
agctctctctatcta

SEQ ID NO: 2020432 - DNA, 15 bp, Homo sapiens
gctctctctatctat

SEQ ID NO: 2020433 - DNA, 15 bp, Homo sapiens
ctctctctatctatg

SEQ ID NO: 2020434 - DNA, 15 bp, Homo sapiens
tctctctatctatgc

SEQ ID NO: 2020435 - DNA, 15 bp, Homo sapiens
ctctctatctatgca

SEQ ID NO: 2020436 - DNA, 15 bp, Homo sapiens
tctctatctatgcat

SEQ ID NO: 2020437 - DNA, 15 bp, Homo sapiens
ctctatctatgcatt

SEQ ID NO: 2020438 - DNA, 15 bp, Homo sapiens
tctatctatgcatta

SEQ ID NO: 2020439 - DNA, 15 bp, Homo sapiens
ctatctatgcattag

SEQ ID NO: 2020440 - DNA, 15 bp, Homo sapiens
tatctatgcattagg

SEQ ID NO: 2020441 - DNA, 15 bp, Homo sapiens
atctatgcattagga

SEQ ID NO: 2020442 - DNA, 15 bp, Homo sapiens
tctatgcattaggaa

SEQ ID NO: 2020443 - DNA, 15 bp, Homo sapiens
ctatgcattaggaat

SEQ ID NO: 2020444 - DNA, 15 bp, Homo sapiens
tatgcattaggaatt

SEQ ID NO: 2020445 - DNA, 15 bp, Homo sapiens
atgcattaggaattt

SEQ ID NO: 2020446 - DNA, 15 bp, Homo sapiens
tgcattaggaatttg

SEQ ID NO: 2020447 - DNA, 15 bp, Homo sapiens
gcattaggaatttga

SEQ ID NO: 2020448 - DNA, 15 bp, Homo sapiens
cattaggaatttgac

SEQ ID NO: 2020449 - DNA, 15 bp, Homo sapiens
attaggaatttgact

SEQ ID NO: 2020450 - DNA, 15 bp, Homo sapiens
ttaggaatttgactt

SEQ ID NO: 2020451 - DNA, 15 bp, Homo sapiens
taggaatttgacttc

SEQ ID NO: 2020452 - DNA, 15 bp, Homo sapiens
aggaatttgacttcc

SEQ ID NO: 2020453 - DNA, 15 bp, Homo sapiens
ggaatttgacttcca

SEQ ID NO: 2020454 - DNA, 15 bp, Homo sapiens
gaatttgacttccat

SEQ ID NO: 2020455 - DNA, 15 bp, Homo sapiens
aatttgacttccatt

SEQ ID NO: 2020456 - DNA, 15 bp, Homo sapiens
atttgacttccattt

SEQ ID NO: 2020457 - DNA, 15 bp, Homo sapiens
tttgacttccatttg

SEQ ID NO: 2020458 - DNA, 15 bp, Homo sapiens
ttgacttccatttga

SEQ ID NO: 2020459 - DNA, 15 bp, Homo sapiens
tgacttccatttgat

SEQ ID NO: 2020460 - DNA, 15 bp, Homo sapiens
gacttccatttgatg

SEQ ID NO: 2020461 - DNA, 15 bp, Homo sapiens
acttccatttgatgt

SEQ ID NO: 2020462 - DNA, 15 bp, Homo sapiens
cttccatttgatgtt

SEQ ID NO: 2020463 - DNA, 15 bp, Homo sapiens
ttccatttgatgtta

SEQ ID NO: 2020464 - DNA, 15 bp, Homo sapiens
tccatttgatgttaa

SEQ ID NO: 2020465 - DNA, 15 bp, Homo sapiens
ccatttgatgttaaa

SEQ ID NO: 2020466 - DNA, 15 bp, Homo sapiens
catttgatgttaaag

SEQ ID NO: 2020467 - DNA, 15 bp, Homo sapiens
atttgatgttaaagc

SEQ ID NO: 2020468 - DNA, 15 bp, Homo sapiens
tttgatgttaaagca

SEQ ID NO: 2020469 - DNA, 15 bp, Homo sapiens
ttgatgttaaagcat

SEQ ID NO: 2020470 - DNA, 15 bp, Homo sapiens
tgatgttaaagcata

SEQ ID NO: 2020471 - DNA, 15 bp, Homo sapiens
gatgttaaagcatat

SEQ ID NO: 2020472 - DNA, 15 bp, Homo sapiens
atgttaaagcatata

SEQ ID NO: 2020473 - DNA, 15 bp, Homo sapiens
tgttaaagcatatac

SEQ ID NO: 2020474 - DNA, 15 bp, Homo sapiens
gttaaagcatatact

SEQ ID NO: 2020475 - DNA, 15 bp, Homo sapiens
ttaaagcatatactt

SEQ ID NO: 2020476 - DNA, 15 bp, Homo sapiens
taaagcatatacttg

SEQ ID NO: 2020477 - DNA, 15 bp, Homo sapiens
aaagcatatacttgg

SEQ ID NO: 2020478 - DNA, 15 bp, Homo sapiens
aagcatatacttggc

SEQ ID NO: 2020479 - DNA, 15 bp, Homo sapiens
agcatatacttggct

SEQ ID NO: 2020480 - DNA, 15 bp, Homo sapiens
gcatatacttggctt

SEQ ID NO: 2020481 - DNA, 15 bp, Homo sapiens
catatacttggcttt

SEQ ID NO: 2020482 - DNA, 15 bp, Homo sapiens
atatacttggcttta

SEQ ID NO: 2020483 - DNA, 15 bp, Homo sapiens
tatacttggctttaa

SEQ ID NO: 2020484 - DNA, 15 bp, Homo sapiens
atacttggctttaag

SEQ ID NO: 2020485 - DNA, 15 bp, Homo sapiens
tacttggctttaagg

SEQ ID NO: 2020486 - DNA, 15 bp, Homo sapiens
acttggctttaagga

SEQ ID NO: 2020487 - DNA, 15 bp, Homo sapiens
cttggctttaaggac

SEQ ID NO: 2020488 - DNA, 15 bp, Homo sapiens
ttggctttaaggaca

SEQ ID NO: 2020489 - DNA, 15 bp, Homo sapiens
tggctttaaggacac

SEQ ID NO: 2020490 - DNA, 15 bp, Homo sapiens
ggctttaaggacaca

SEQ ID NO: 2020491 - DNA, 15 bp, Homo sapiens
gctttaaggacacac

SEQ ID NO: 2020492 - DNA, 15 bp, Homo sapiens
ctttaaggacacact

SEQ ID NO: 2020493 - DNA, 15 bp, Homo sapiens
tttaaggacacacta

SEQ ID NO: 2020494 - DNA, 15 bp, Homo sapiens
ttaaggacacactaa

SEQ ID NO: 2020495 - DNA, 15 bp, Homo sapiens
taaggacacactaaa

SEQ ID NO: 2020496 - DNA, 15 bp, Homo sapiens
aaggacacactaaaa

SEQ ID NO: 2020497 - DNA, 15 bp, Homo sapiens
aggacacactaaaac

SEQ ID NO: 2020498 - DNA, 15 bp, Homo sapiens
ggacacactaaaact

SEQ ID NO: 2020499 - DNA, 15 bp, Homo sapiens
gacacactaaaacta

SEQ ID NO: 2020500 - DNA, 15 bp, Homo sapiens
acacactaaaactat

SEQ ID NO: 2020501 - DNA, 15 bp, Homo sapiens
cacactaaaactatt

SEQ ID NO: 2020502 - DNA, 15 bp, Homo sapiens
acactaaaactattc

SEQ ID NO: 2020503 - DNA, 15 bp, Homo sapiens
cactaaaactattca

SEQ ID NO: 2020504 - DNA, 15 bp, Homo sapiens
actaaaactattcaa

SEQ ID NO: 2020505 - DNA, 15 bp, Homo sapiens
ctaaaactattcaaa

SEQ ID NO: 2020506 - DNA, 15 bp, Homo sapiens
taaaactattcaaag

SEQ ID NO: 2020507 - DNA, 15 bp, Homo sapiens
aaaactattcaaagt

SEQ ID NO: 2020508 - DNA, 15 bp, Homo sapiens
aaactattcaaagtt

SEQ ID NO: 2020509 - DNA, 15 bp, Homo sapiens
aactattcaaagttt

SEQ ID NO: 2020510 - DNA, 15 bp, Homo sapiens
actattcaaagttta

SEQ ID NO: 2020511 - DNA, 15 bp, Homo sapiens
ctattcaaagtttaa

SEQ ID NO: 2020512 - DNA, 15 bp, Homo sapiens
tattcaaagtttaat

SEQ ID NO: 2020513 - DNA, 15 bp, Homo sapiens
attcaaagtttaatt

SEQ ID NO: 2020514 - DNA, 15 bp, Homo sapiens
ttcaaagtttaatta

SEQ ID NO: 2020515 - DNA, 15 bp, Homo sapiens
tcaaagtttaattac

SEQ ID NO: 2020516 - DNA, 15 bp, Homo sapiens
caaagtttaattaca

SEQ ID NO: 2020517 - DNA, 15 bp, Homo sapiens
aaagtttaattacat

SEQ ID NO: 2020518 - DNA, 15 bp, Homo sapiens
aagtttaattacatt

SEQ ID NO: 2020519 - DNA, 15 bp, Homo sapiens
agtttaattacattc

SEQ ID NO: 2020520 - DNA, 15 bp, Homo sapiens
gtttaattacattca

SEQ ID NO: 2020521 - DNA, 15 bp, Homo sapiens
tttaattacattcag

SEQ ID NO: 2020522 - DNA, 15 bp, Homo sapiens
ttaattacattcaga

SEQ ID NO: 2020523 - DNA, 15 bp, Homo sapiens
taattacattcagac

SEQ ID NO: 2020524 - DNA, 15 bp, Homo sapiens
aattacattcagaca

SEQ ID NO: 2020525 - DNA, 15 bp, Homo sapiens
attacattcagacaa

SEQ ID NO: 2020526 - DNA, 15 bp, Homo sapiens
ttacattcagacaaa

SEQ ID NO: 2020527 - DNA, 15 bp, Homo sapiens
tacattcagacaaag

SEQ ID NO: 2020528 - DNA, 15 bp, Homo sapiens
acattcagacaaaga

SEQ ID NO: 2020529 - DNA, 15 bp, Homo sapiens
cattcagacaaagat

SEQ ID NO: 2020530 - DNA, 15 bp, Homo sapiens
attcagacaaagatc

SEQ ID NO: 2020531 - DNA, 15 bp, Homo sapiens
ttcagacaaagatca

SEQ ID NO: 2020532 - DNA, 15 bp, Homo sapiens
tcagacaaagatcat

SEQ ID NO: 2020533 - DNA, 15 bp, Homo sapiens
cagacaaagatcatc

SEQ ID NO: 2020534 - DNA, 15 bp, Homo sapiens
agacaaagatcatct

SEQ ID NO: 2020535 - DNA, 15 bp, Homo sapiens
gacaaagatcatcta

SEQ ID NO: 2020536 - DNA, 15 bp, Homo sapiens
acaaagatcatctaa

SEQ ID NO: 2020537 - DNA, 15 bp, Homo sapiens
caaagatcatctaac

SEQ ID NO: 2020538 - DNA, 15 bp, Homo sapiens
aaagatcatctaacc

SEQ ID NO: 2020539 - DNA, 15 bp, Homo sapiens
aagatcatctaacca

SEQ ID NO: 2020540 - DNA, 15 bp, Homo sapiens
agatcatctaaccac

SEQ ID NO: 2020541 - DNA, 15 bp, Homo sapiens
gatcatctaaccact

SEQ ID NO: 2020542 - DNA, 15 bp, Homo sapiens
atcatctaaccactg

SEQ ID NO: 2020543 - DNA, 15 bp, Homo sapiens
tcatctaaccactgt

SEQ ID NO: 2020544 - DNA, 15 bp, Homo sapiens
catctaaccactgtt

SEQ ID NO: 2020545 - DNA, 15 bp, Homo sapiens
atctaaccactgttg

SEQ ID NO: 2020546 - DNA, 15 bp, Homo sapiens
tctaaccactgttgc

SEQ ID NO: 2020547 - DNA, 15 bp, Homo sapiens
ctaaccactgttgct

SEQ ID NO: 2020548 - DNA, 15 bp, Homo sapiens
taaccactgttgcta

SEQ ID NO: 2020549 - DNA, 15 bp, Homo sapiens
aaccactgttgctac

SEQ ID NO: 2020550 - DNA, 15 bp, Homo sapiens
accactgttgctaca

SEQ ID NO: 2020551 - DNA, 15 bp, Homo sapiens
ccactgttgctacat

SEQ ID NO: 2020552 - DNA, 15 bp, Homo sapiens
cactgttgctacata

SEQ ID NO: 2020553 - DNA, 15 bp, Homo sapiens
actgttgctacatag

SEQ ID NO: 2020554 - DNA, 15 bp, Homo sapiens
ctgttgctacatagg

SEQ ID NO: 2020555 - DNA, 15 bp, Homo sapiens
tgttgctacataggg

SEQ ID NO: 2020556 - DNA, 15 bp, Homo sapiens
gttgctacataggga

SEQ ID NO: 2020557 - DNA, 15 bp, Homo sapiens
ttgctacatagggaa

SEQ ID NO: 2020558 - DNA, 15 bp, Homo sapiens
tgctacatagggaat

SEQ ID NO: 2020559 - DNA, 15 bp, Homo sapiens
gctacatagggaata

SEQ ID NO: 2020560 - DNA, 15 bp, Homo sapiens
ctacatagggaatat

SEQ ID NO: 2020561 - DNA, 15 bp, Homo sapiens
tacatagggaatatt

SEQ ID NO: 2020562 - DNA, 15 bp, Homo sapiens
acatagggaatattt

SEQ ID NO: 2020563 - DNA, 15 bp, Homo sapiens
catagggaatattta

SEQ ID NO: 2020564 - DNA, 15 bp, Homo sapiens
atagggaatatttat

SEQ ID NO: 2020565 - DNA, 15 bp, Homo sapiens
tagggaatatttatt

SEQ ID NO: 2020566 - DNA, 15 bp, Homo sapiens
agggaatatttattt

SEQ ID NO: 2020567 - DNA, 15 bp, Homo sapiens
gggaatatttattta

SEQ ID NO: 2020568 - DNA, 15 bp, Homo sapiens
aatatttatttaatt

SEQ ID NO: 2020569 - DNA, 15 bp, Homo sapiens
atatttatttaatta

SEQ ID NO: 2020570 - DNA, 15 bp, Homo sapiens
tatttatttaattat

SEQ ID NO: 2020571 - DNA, 15 bp, Homo sapiens
atttatttaattatc

SEQ ID NO: 2020572 - DNA, 15 bp, Homo sapiens
tttatttaattatcc

SEQ ID NO: 2020573 - DNA, 15 bp, Homo sapiens
ttatttaattatccc

SEQ ID NO: 2020574 - DNA, 15 bp, Homo sapiens
tatttaattatccct

SEQ ID NO: 2020575 - DNA, 15 bp, Homo sapiens
atttaattatccctt

SEQ ID NO: 2020576 - DNA, 15 bp, Homo sapiens
tttaattatcccttg

SEQ ID NO: 2020577 - DNA, 15 bp, Homo sapiens
ttaattatcccttgc

SEQ ID NO: 2020578 - DNA, 15 bp, Homo sapiens
taattatcccttgct

SEQ ID NO: 2020579 - DNA, 15 bp, Homo sapiens
aattatcccttgcta

SEQ ID NO: 2020580 - DNA, 15 bp, Homo sapiens
attatcccttgctat

SEQ ID NO: 2020581 - DNA, 15 bp, Homo sapiens
ttatcccttgctatc

SEQ ID NO: 2020582 - DNA, 15 bp, Homo sapiens
tatcccttgctatct

SEQ ID NO: 2020583 - DNA, 15 bp, Homo sapiens
atcccttgctatctc

SEQ ID NO: 2020584 - DNA, 15 bp, Homo sapiens
tcccttgctatctct

SEQ ID NO: 2020585 - DNA, 15 bp, Homo sapiens
cccttgctatctcta

SEQ ID NO: 2020586 - DNA, 15 bp, Homo sapiens
ccttgctatctctat

SEQ ID NO: 2020587 - DNA, 15 bp, Homo sapiens
cttgctatctctatt

SEQ ID NO: 2020588 - DNA, 15 bp, Homo sapiens
ttgctatctctatta

SEQ ID NO: 2020589 - DNA, 15 bp, Homo sapiens
tgctatctctattaa

SEQ ID NO: 2020590 - DNA, 15 bp, Homo sapiens
gctatctctattaat

SEQ ID NO: 2020591 - DNA, 15 bp, Homo sapiens
ctatctctattaatc

SEQ ID NO: 2020592 - DNA, 15 bp, Homo sapiens
tatctctattaatca

SEQ ID NO: 2020593 - DNA, 15 bp, Homo sapiens
atctctattaatcag

SEQ ID NO: 2020594 - DNA, 15 bp, Homo sapiens
tctctattaatcagt

SEQ ID NO: 2020595 - DNA, 15 bp, Homo sapiens
ctctattaatcagtt

SEQ ID NO: 2020596 - DNA, 15 bp, Homo sapiens
tctattaatcagttt

SEQ ID NO: 2020597 - DNA, 15 bp, Homo sapiens
ctattaatcagtttc

SEQ ID NO: 2020598 - DNA, 15 bp, Homo sapiens
tattaatcagtttcc

SEQ ID NO: 2020599 - DNA, 15 bp, Homo sapiens
attaatcagtttcct

SEQ ID NO: 2020600 - DNA, 15 bp, Homo sapiens
ttaatcagtttcctc

SEQ ID NO: 2020601 - DNA, 15 bp, Homo sapiens
taatcagtttcctca

SEQ ID NO: 2020602 - DNA, 15 bp, Homo sapiens
aatcagtttcctcaa

SEQ ID NO: 2020603 - DNA, 15 bp, Homo sapiens
atcagtttcctcaat

SEQ ID NO: 2020604 - DNA, 15 bp, Homo sapiens
cagtttcctcaattt

SEQ ID NO: 2020605 - DNA, 15 bp, Homo sapiens
agtttcctcaattta

SEQ ID NO: 2020606 - DNA, 15 bp, Homo sapiens
gtttcctcaatttat

SEQ ID NO: 2020607 - DNA, 15 bp, Homo sapiens
tttcctcaatttatc

SEQ ID NO: 2020608 - DNA, 15 bp, Homo sapiens
ttcctcaatttatcc

SEQ ID NO: 2020609 - DNA, 15 bp, Homo sapiens
tcctcaatttatcct

SEQ ID NO: 2020610 - DNA, 15 bp, Homo sapiens
cctcaatttatcctt

SEQ ID NO: 2020611 - DNA, 15 bp, Homo sapiens
ctcaatttatcctta

SEQ ID NO: 2020612 - DNA, 15 bp, Homo sapiens
tcaatttatccttaa

SEQ ID NO: 2020613 - DNA, 15 bp, Homo sapiens
caatttatccttaaa

SEQ ID NO: 2020614 - DNA, 15 bp, Homo sapiens
aatttatccttaaaa

SEQ ID NO: 2020615 - DNA, 15 bp, Homo sapiens
atttatccttaaaat

SEQ ID NO: 2020616 - DNA, 15 bp, Homo sapiens
tttatccttaaaatt

SEQ ID NO: 2020617 - DNA, 15 bp, Homo sapiens
ttatccttaaaattt

SEQ ID NO: 2020618 - DNA, 15 bp, Homo sapiens
tatccttaaaatttt

SEQ ID NO: 2020619 - DNA, 15 bp, Homo sapiens
atccttaaaattttc

SEQ ID NO: 2020620 - DNA, 15 bp, Homo sapiens
tccttaaaattttcc

SEQ ID NO: 2020621 - DNA, 15 bp, Homo sapiens
ccttaaaattttcct

SEQ ID NO: 2020622 - DNA, 15 bp, Homo sapiens
cttaaaattttcctc

SEQ ID NO: 2020623 - DNA, 15 bp, Homo sapiens
ttaaaattttcctca

SEQ ID NO: 2020624 - DNA, 15 bp, Homo sapiens
taaaattttcctcaa

SEQ ID NO: 2020625 - DNA, 15 bp, Homo sapiens
aaaattttcctcaaa

SEQ ID NO: 2020626 - DNA, 15 bp, Homo sapiens
aaattttcctcaaat

SEQ ID NO: 2020627 - DNA, 15 bp, Homo sapiens
aattttcctcaaatg

SEQ ID NO: 2020628 - DNA, 15 bp, Homo sapiens
attttcctcaaatgc

SEQ ID NO: 2020629 - DNA, 15 bp, Homo sapiens
ttttcctcaaatgct

SEQ ID NO: 2020630 - DNA, 15 bp, Homo sapiens
tttcctcaaatgctt

SEQ ID NO: 2020631 - DNA, 15 bp, Homo sapiens
ttcctcaaatgctta

SEQ ID NO: 2020632 - DNA, 15 bp, Homo sapiens
tcctcaaatgcttag

SEQ ID NO: 2020633 - DNA, 15 bp, Homo sapiens
cctcaaatgcttagt

SEQ ID NO: 2020634 - DNA, 15 bp, Homo sapiens
ctcaaatgcttagtt

SEQ ID NO: 2020635 - DNA, 15 bp, Homo sapiens
tcaaatgcttagtta

SEQ ID NO: 2020636 - DNA, 15 bp, Homo sapiens
caaatgcttagttat

SEQ ID NO: 2020637 - DNA, 15 bp, Homo sapiens
aaatgcttagttatt

SEQ ID NO: 2020638 - DNA, 15 bp, Homo sapiens
aatgcttagttattt

SEQ ID NO: 2020639 - DNA, 15 bp, Homo sapiens
atgcttagttatttt

SEQ ID NO: 2020640 - DNA, 15 bp, Homo sapiens
tgcttagttatttta

SEQ ID NO: 2020641 - DNA, 15 bp, Homo sapiens
gcttagttattttat

SEQ ID NO: 2020642 - DNA, 15 bp, Homo sapiens
cttagttattttatt

SEQ ID NO: 2020643 - DNA, 15 bp, Homo sapiens
ttagttattttatta

SEQ ID NO: 2020644 - DNA, 15 bp, Homo sapiens
tagttattttattat

SEQ ID NO: 2020645 - DNA, 15 bp, Homo sapiens
agttattttattatt

SEQ ID NO: 2020646 - DNA, 15 bp, Homo sapiens
gttattttattattt

SEQ ID NO: 2020647 - DNA, 15 bp, Homo sapiens
ttattttattatttg

SEQ ID NO: 2020648 - DNA, 15 bp, Homo sapiens
tattttattatttgc

SEQ ID NO: 2020649 - DNA, 15 bp, Homo sapiens
attttattatttgct

SEQ ID NO: 2020650 - DNA, 15 bp, Homo sapiens
ttttattatttgctt

SEQ ID NO: 2020651 - DNA, 15 bp, Homo sapiens
tttattatttgcttt

SEQ ID NO: 2020652 - DNA, 15 bp, Homo sapiens
ttattatttgctttt

SEQ ID NO: 2020653 - DNA, 15 bp, Homo sapiens
tattatttgcttttt

SEQ ID NO: 2020654 - DNA, 15 bp, Homo sapiens
attatttgcttttta

SEQ ID NO: 2020655 - DNA, 15 bp, Homo sapiens
ttatttgctttttaa

SEQ ID NO: 2020656 - DNA, 15 bp, Homo sapiens
tatttgctttttaaa

SEQ ID NO: 2020657 - DNA, 15 bp, Homo sapiens
atttgctttttaaaa

SEQ ID NO: 2020658 - DNA, 15 bp, Homo sapiens
tttgctttttaaaat

SEQ ID NO: 2020659 - DNA, 15 bp, Homo sapiens
ttgctttttaaaata

SEQ ID NO: 2020660 - DNA, 15 bp, Homo sapiens
tgctttttaaaatat

SEQ ID NO: 2020661 - DNA, 15 bp, Homo sapiens
gctttttaaaatatt

SEQ ID NO: 2020662 - DNA, 15 bp, Homo sapiens
ctttttaaaatattc

SEQ ID NO: 2020663 - DNA, 15 bp, Homo sapiens
tttttaaaatattca

SEQ ID NO: 2020664 - DNA, 15 bp, Homo sapiens
ttttaaaatattcag

SEQ ID NO: 2020665 - DNA, 15 bp, Homo sapiens
tttaaaatattcagt

SEQ ID NO: 2020666 - DNA, 15 bp, Homo sapiens
ttaaaatattcagtg

SEQ ID NO: 2020667 - DNA, 15 bp, Homo sapiens
taaaatattcagtgt

SEQ ID NO: 2020668 - DNA, 15 bp, Homo sapiens
aaaatattcagtgtc

SEQ ID NO: 2020669 - DNA, 15 bp, Homo sapiens
aaatattcagtgtca

SEQ ID NO: 2020670 - DNA, 15 bp, Homo sapiens
aatattcagtgtcaa

SEQ ID NO: 2020671 - DNA, 15 bp, Homo sapiens
atattcagtgtcaaa

SEQ ID NO: 2020672 - DNA, 15 bp, Homo sapiens
tattcagtgtcaaaa

SEQ ID NO: 2020673 - DNA, 15 bp, Homo sapiens
attcagtgtcaaaac

SEQ ID NO: 2020674 - DNA, 15 bp, Homo sapiens
ttcagtgtcaaaaca

SEQ ID NO: 2020675 - DNA, 15 bp, Homo sapiens
tcagtgtcaaaacaa

SEQ ID NO: 2020676 - DNA, 15 bp, Homo sapiens
cagtgtcaaaacaaa

SEQ ID NO: 2020677 - DNA, 15 bp, Homo sapiens
agtgtcaaaacaaaa

SEQ ID NO: 2020678 - DNA, 15 bp, Homo sapiens
gtgtcaaaacaaaag

SEQ ID NO: 2020679 - DNA, 15 bp, Homo sapiens
tgtcaaaacaaaagt

SEQ ID NO: 2020680 - DNA, 15 bp, Homo sapiens
gtcaaaacaaaagta

SEQ ID NO: 2020681 - DNA, 15 bp, Homo sapiens
tcaaaacaaaagtac

SEQ ID NO: 2020682 - DNA, 15 bp, Homo sapiens
caaaacaaaagtaca

SEQ ID NO: 2020683 - DNA, 15 bp, Homo sapiens
aaaacaaaagtacac

SEQ ID NO: 2020684 - DNA, 15 bp, Homo sapiens
aaacaaaagtacaca

SEQ ID NO: 2020685 - DNA, 15 bp, Homo sapiens
aacaaaagtacacag

SEQ ID NO: 2020686 - DNA, 15 bp, Homo sapiens
acaaaagtacacagt

SEQ ID NO: 2020687 - DNA, 15 bp, Homo sapiens
caaaagtacacagtt

SEQ ID NO: 2020688 - DNA, 15 bp, Homo sapiens
aaaagtacacagttt

SEQ ID NO: 2020689 - DNA, 15 bp, Homo sapiens
aaagtacacagttta

SEQ ID NO: 2020690 - DNA, 15 bp, Homo sapiens
aagtacacagtttaa

SEQ ID NO: 2020691 - DNA, 15 bp, Homo sapiens
agtacacagtttaaa

SEQ ID NO: 2020692 - DNA, 15 bp, Homo sapiens
gtacacagtttaaat

SEQ ID NO: 2020693 - DNA, 15 bp, Homo sapiens
tacacagtttaaata

SEQ ID NO: 2020694 - DNA, 15 bp, Homo sapiens
acacagtttaaataa

SEQ ID NO: 2020695 - DNA, 15 bp, Homo sapiens
cacagtttaaataat

SEQ ID NO: 2020696 - DNA, 15 bp, Homo sapiens
acagtttaaataatt

SEQ ID NO: 2020697 - DNA, 15 bp, Homo sapiens
cagtttaaataatta

SEQ ID NO: 2020698 - DNA, 15 bp, Homo sapiens
agtttaaataattaa

SEQ ID NO: 2020699 - DNA, 15 bp, Homo sapiens
gtttaaataattaag

SEQ ID NO: 2020700 - DNA, 15 bp, Homo sapiens
tttaaataattaagc

SEQ ID NO: 2020701 - DNA, 15 bp, Homo sapiens
ttaaataattaagca

SEQ ID NO: 2020702 - DNA, 15 bp, Homo sapiens
taaataattaagcag

SEQ ID NO: 2020703 - DNA, 15 bp, Homo sapiens
aaataattaagcagg

SEQ ID NO: 2020704 - DNA, 15 bp, Homo sapiens
aataattaagcaggc

SEQ ID NO: 2020705 - DNA, 15 bp, Homo sapiens
ataattaagcaggca

SEQ ID NO: 2020706 - DNA, 15 bp, Homo sapiens
taattaagcaggcat

SEQ ID NO: 2020707 - DNA, 15 bp, Homo sapiens
aattaagcaggcata

SEQ ID NO: 2020708 - DNA, 15 bp, Homo sapiens
attaagcaggcatac

SEQ ID NO: 2020709 - DNA, 15 bp, Homo sapiens
ttaagcaggcatact

SEQ ID NO: 2020710 - DNA, 15 bp, Homo sapiens
taagcaggcatactt

SEQ ID NO: 2020711 - DNA, 15 bp, Homo sapiens
aagcaggcatacttc

SEQ ID NO: 2020712 - DNA, 15 bp, Homo sapiens
agcaggcatacttct

SEQ ID NO: 2020713 - DNA, 15 bp, Homo sapiens
gcaggcatacttctc

SEQ ID NO: 2020714 - DNA, 15 bp, Homo sapiens
caggcatacttctcc

SEQ ID NO: 2020715 - DNA, 15 bp, Homo sapiens
aggcatacttctccc

SEQ ID NO: 2020716 - DNA, 15 bp, Homo sapiens
ggcatacttctccct

SEQ ID NO: 2020717 - DNA, 15 bp, Homo sapiens
gcatacttctccctg

SEQ ID NO: 2020718 - DNA, 15 bp, Homo sapiens
catacttctccctgt

SEQ ID NO: 2020719 - DNA, 15 bp, Homo sapiens
atacttctccctgtc

SEQ ID NO: 2020720 - DNA, 15 bp, Homo sapiens
tacttctccctgtct

SEQ ID NO: 2020721 - DNA, 15 bp, Homo sapiens
acttctccctgtctc

SEQ ID NO: 2020722 - DNA, 15 bp, Homo sapiens
cttctccctgtctca

SEQ ID NO: 2020723 - DNA, 15 bp, Homo sapiens
ttctccctgtctcac

SEQ ID NO: 2020724 - DNA, 15 bp, Homo sapiens
tctccctgtctcacc

SEQ ID NO: 2020725 - DNA, 15 bp, Homo sapiens
ctccctgtctcacct

SEQ ID NO: 2020726 - DNA, 15 bp, Homo sapiens
tccctgtctcacctg

SEQ ID NO: 2020727 - DNA, 15 bp, Homo sapiens
ccctgtctcacctgc

SEQ ID NO: 2020728 - DNA, 15 bp, Homo sapiens
cctgtctcacctgct

SEQ ID NO: 2020729 - DNA, 15 bp, Homo sapiens
ctgtctcacctgctt

SEQ ID NO: 2020730 - DNA, 15 bp, Homo sapiens
tgtctcacctgcttg

SEQ ID NO: 2020731 - DNA, 15 bp, Homo sapiens
gtctcacctgcttga

SEQ ID NO: 2020732 - DNA, 15 bp, Homo sapiens
tctcacctgcttgat

SEQ ID NO: 2020733 - DNA, 15 bp, Homo sapiens
ctcacctgcttgatt

SEQ ID NO: 2020734 - DNA, 15 bp, Homo sapiens
tcacctgcttgattc

SEQ ID NO: 2020735 - DNA, 15 bp, Homo sapiens
cacctgcttgattct

SEQ ID NO: 2020736 - DNA, 15 bp, Homo sapiens
acctgcttgattcta

SEQ ID NO: 2020737 - DNA, 15 bp, Homo sapiens
cctgcttgattctaa

SEQ ID NO: 2020738 - DNA, 15 bp, Homo sapiens
ctgcttgattctaaa

SEQ ID NO: 2020739 - DNA, 15 bp, Homo sapiens
tgcttgattctaaat

SEQ ID NO: 2020740 - DNA, 15 bp, Homo sapiens
gcttgattctaaatt

SEQ ID NO: 2020741 - DNA, 15 bp, Homo sapiens
cttgattctaaattg

SEQ ID NO: 2020742 - DNA, 15 bp, Homo sapiens
ttgattctaaattgc

SEQ ID NO: 2020743 - DNA, 15 bp, Homo sapiens
tgattctaaattgca

SEQ ID NO: 2020744 - DNA, 15 bp, Homo sapiens
gattctaaattgcaa

SEQ ID NO: 2020745 - DNA, 15 bp, Homo sapiens
attctaaattgcaag

SEQ ID NO: 2020746 - DNA, 15 bp, Homo sapiens
ttctaaattgcaagg

SEQ ID NO: 2020747 - DNA, 15 bp, Homo sapiens
tctaaattgcaaggt

SEQ ID NO: 2020748 - DNA, 15 bp, Homo sapiens
ctaaattgcaaggtc

SEQ ID NO: 2020749 - DNA, 15 bp, Homo sapiens
taaattgcaaggtct

SEQ ID NO: 2020750 - DNA, 15 bp, Homo sapiens
aaattgcaaggtcta

SEQ ID NO: 2020751 - DNA, 15 bp, Homo sapiens
aattgcaaggtctac

SEQ ID NO: 2020752 - DNA, 15 bp, Homo sapiens
attgcaaggtctacc

SEQ ID NO: 2020753 - DNA, 15 bp, Homo sapiens
ttgcaaggtctacca

SEQ ID NO: 2020754 - DNA, 15 bp, Homo sapiens
tgcaaggtctaccat

SEQ ID NO: 2020755 - DNA, 15 bp, Homo sapiens
gcaaggtctaccatg

SEQ ID NO: 2020756 - DNA, 15 bp, Homo sapiens
caaggtctaccatgt

SEQ ID NO: 2020757 - DNA, 15 bp, Homo sapiens
aaggtctaccatgtc

SEQ ID NO: 2020758 - DNA, 15 bp, Homo sapiens
aggtctaccatgtca

SEQ ID NO: 2020759 - DNA, 15 bp, Homo sapiens
ggtctaccatgtcaa

SEQ ID NO: 2020760 - DNA, 15 bp, Homo sapiens
gtctaccatgtcaaa

SEQ ID NO: 2020761 - DNA, 15 bp, Homo sapiens
tctaccatgtcaaat

SEQ ID NO: 2020762 - DNA, 15 bp, Homo sapiens
ctaccatgtcaaatt

SEQ ID NO: 2020763 - DNA, 15 bp, Homo sapiens
taccatgtcaaattt

SEQ ID NO: 2020764 - DNA, 15 bp, Homo sapiens
accatgtcaaatttt

SEQ ID NO: 2020765 - DNA, 15 bp, Homo sapiens
ccatgtcaaatttta

SEQ ID NO: 2020766 - DNA, 15 bp, Homo sapiens
catgtcaaattttag

SEQ ID NO: 2020767 - DNA, 15 bp, Homo sapiens
atgtcaaattttaga

SEQ ID NO: 2020768 - DNA, 15 bp, Homo sapiens
tgtcaaattttagat

SEQ ID NO: 2020769 - DNA, 15 bp, Homo sapiens
gtcaaattttagata

SEQ ID NO: 2020770 - DNA, 15 bp, Homo sapiens
tcaaattttagataa

SEQ ID NO: 2020771 - DNA, 15 bp, Homo sapiens
caaattttagataat

SEQ ID NO: 2020772 - DNA, 15 bp, Homo sapiens
aaattttagataatc

SEQ ID NO: 2020773 - DNA, 15 bp, Homo sapiens
aattttagataatca

SEQ ID NO: 2020774 - DNA, 15 bp, Homo sapiens
attttagataatcag

SEQ ID NO: 2020775 - DNA, 15 bp, Homo sapiens
ttttagataatcaga

SEQ ID NO: 2020776 - DNA, 15 bp, Homo sapiens
tttagataatcagaa

SEQ ID NO: 2020777 - DNA, 15 bp, Homo sapiens
ttagataatcagaac

SEQ ID NO: 2020778 - DNA, 15 bp, Homo sapiens
tagataatcagaaca

SEQ ID NO: 2020779 - DNA, 15 bp, Homo sapiens
agataatcagaacaa

SEQ ID NO: 2020780 - DNA, 15 bp, Homo sapiens
gataatcagaacaac

SEQ ID NO: 2020781 - DNA, 15 bp, Homo sapiens
ataatcagaacaaca

SEQ ID NO: 2020782 - DNA, 15 bp, Homo sapiens
taatcagaacaacac

SEQ ID NO: 2020783 - DNA, 15 bp, Homo sapiens
aatcagaacaacact

SEQ ID NO: 2020784 - DNA, 15 bp, Homo sapiens
atcagaacaacactt

SEQ ID NO: 2020785 - DNA, 15 bp, Homo sapiens
tcagaacaacacttt

SEQ ID NO: 2020786 - DNA, 15 bp, Homo sapiens
cagaacaacactttg

SEQ ID NO: 2020787 - DNA, 15 bp, Homo sapiens
agaacaacactttgg

SEQ ID NO: 2020788 - DNA, 15 bp, Homo sapiens
gaacaacactttggg

SEQ ID NO: 2020789 - DNA, 15 bp, Homo sapiens
aacaacactttggga

SEQ ID NO: 2020790 - DNA, 15 bp, Homo sapiens
acaacactttgggat

SEQ ID NO: 2020791 - DNA, 15 bp, Homo sapiens
caacactttgggatt

SEQ ID NO: 2020792 - DNA, 15 bp, Homo sapiens
aacactttgggatta

SEQ ID NO: 2020793 - DNA, 15 bp, Homo sapiens
acactttgggattaa

SEQ ID NO: 2020794 - DNA, 15 bp, Homo sapiens
cactttgggattaaa

SEQ ID NO: 2020795 - DNA, 15 bp, Homo sapiens
actttgggattaaat

SEQ ID NO: 2020796 - DNA, 15 bp, Homo sapiens
ctttgggattaaata

SEQ ID NO: 2020797 - DNA, 15 bp, Homo sapiens
tttgggattaaatac

SEQ ID NO: 2020798 - DNA, 15 bp, Homo sapiens
ttgggattaaatacc

SEQ ID NO: 2020799 - DNA, 15 bp, Homo sapiens
tgggattaaatacca

SEQ ID NO: 2020800 - DNA, 15 bp, Homo sapiens
gggattaaataccaa

SEQ ID NO: 2020801 - DNA, 15 bp, Homo sapiens
ggattaaataccaac

SEQ ID NO: 2020802 - DNA, 15 bp, Homo sapiens
gattaaataccaact

SEQ ID NO: 2020803 - DNA, 15 bp, Homo sapiens
attaaataccaactg

SEQ ID NO: 2020804 - DNA, 15 bp, Homo sapiens
ttaaataccaactga

SEQ ID NO: 2020805 - DNA, 15 bp, Homo sapiens
taaataccaactgac

SEQ ID NO: 2020806 - DNA, 15 bp, Homo sapiens
aaataccaactgact

SEQ ID NO: 2020807 - DNA, 15 bp, Homo sapiens
aataccaactgactt

SEQ ID NO: 2020808 - DNA, 15 bp, Homo sapiens
ataccaactgacttc

SEQ ID NO: 2020809 - DNA, 15 bp, Homo sapiens
taccaactgacttca

SEQ ID NO: 2020810 - DNA, 15 bp, Homo sapiens
accaactgacttcat

SEQ ID NO: 2020811 - DNA, 15 bp, Homo sapiens
ccaactgacttcatt

SEQ ID NO: 2020812 - DNA, 15 bp, Homo sapiens
caactgacttcattt

SEQ ID NO: 2020813 - DNA, 15 bp, Homo sapiens
aactgacttcatttt

SEQ ID NO: 2020814 - DNA, 15 bp, Homo sapiens
actgacttcattttt

SEQ ID NO: 2020815 - DNA, 15 bp, Homo sapiens
ctgacttcattttta

SEQ ID NO: 2020816 - DNA, 15 bp, Homo sapiens
tgacttcatttttac

SEQ ID NO: 2020817 - DNA, 15 bp, Homo sapiens
gacttcatttttact

SEQ ID NO: 2020818 - DNA, 15 bp, Homo sapiens
acttcatttttactc

SEQ ID NO: 2020819 - DNA, 15 bp, Homo sapiens
cttcatttttactcc

SEQ ID NO: 2020820 - DNA, 15 bp, Homo sapiens
ttcatttttactcca

SEQ ID NO: 2020821 - DNA, 15 bp, Homo sapiens
tcatttttactccat

SEQ ID NO: 2020822 - DNA, 15 bp, Homo sapiens
catttttactccata

SEQ ID NO: 2020823 - DNA, 15 bp, Homo sapiens
atttttactccataa

SEQ ID NO: 2020824 - DNA, 15 bp, Homo sapiens
tttttactccataag

SEQ ID NO: 2020825 - DNA, 15 bp, Homo sapiens
ttttactccataagc

SEQ ID NO: 2020826 - DNA, 15 bp, Homo sapiens
tttactccataagcc

SEQ ID NO: 2020827 - DNA, 15 bp, Homo sapiens
ttactccataagcct

SEQ ID NO: 2020828 - DNA, 15 bp, Homo sapiens
tactccataagcctt

SEQ ID NO: 2020829 - DNA, 15 bp, Homo sapiens
actccataagccttc

SEQ ID NO: 2020830 - DNA, 15 bp, Homo sapiens
ctccataagccttct

SEQ ID NO: 2020831 - DNA, 15 bp, Homo sapiens
tccataagccttctc

SEQ ID NO: 2020832 - DNA, 15 bp, Homo sapiens
ccataagccttctca

SEQ ID NO: 2020833 - DNA, 15 bp, Homo sapiens
cataagccttctcat

SEQ ID NO: 2020834 - DNA, 15 bp, Homo sapiens
ataagccttctcatt

SEQ ID NO: 2020835 - DNA, 15 bp, Homo sapiens
taagccttctcattg

SEQ ID NO: 2020836 - DNA, 15 bp, Homo sapiens
aagccttctcattgc

SEQ ID NO: 2020837 - DNA, 15 bp, Homo sapiens
agccttctcattgct

SEQ ID NO: 2020838 - DNA, 15 bp, Homo sapiens
gccttctcattgcta

SEQ ID NO: 2020839 - DNA, 15 bp, Homo sapiens
ccttctcattgctac

SEQ ID NO: 2020840 - DNA, 15 bp, Homo sapiens
cttctcattgctact

SEQ ID NO: 2020841 - DNA, 15 bp, Homo sapiens
ttctcattgctactt

SEQ ID NO: 2020842 - DNA, 15 bp, Homo sapiens
tctcattgctacttt

SEQ ID NO: 2020843 - DNA, 15 bp, Homo sapiens
ctcattgctactttg

SEQ ID NO: 2020844 - DNA, 15 bp, Homo sapiens
tcattgctactttgc

SEQ ID NO: 2020845 - DNA, 15 bp, Homo sapiens
cattgctactttgca

SEQ ID NO: 2020846 - DNA, 15 bp, Homo sapiens
attgctactttgcat

SEQ ID NO: 2020847 - DNA, 15 bp, Homo sapiens
ttgctactttgcatt

SEQ ID NO: 2020848 - DNA, 15 bp, Homo sapiens
tgctactttgcattt

SEQ ID NO: 2020849 - DNA, 15 bp, Homo sapiens
gctactttgcatttt

SEQ ID NO: 2020850 - DNA, 15 bp, Homo sapiens
ctactttgcattttt

SEQ ID NO: 2020851 - DNA, 15 bp, Homo sapiens
tactttgcatttttc

SEQ ID NO: 2020852 - DNA, 15 bp, Homo sapiens
actttgcatttttct

SEQ ID NO: 2020853 - DNA, 15 bp, Homo sapiens
ctttgcatttttctt

SEQ ID NO: 2020854 - DNA, 15 bp, Homo sapiens
tttgcatttttcttc

SEQ ID NO: 2020855 - DNA, 15 bp, Homo sapiens
ttgcatttttcttca

SEQ ID NO: 2020856 - DNA, 15 bp, Homo sapiens
tgcatttttcttcac

SEQ ID NO: 2020857 - DNA, 15 bp, Homo sapiens
gcatttttcttcact

SEQ ID NO: 2020858 - DNA, 15 bp, Homo sapiens
catttttcttcacta

SEQ ID NO: 2020859 - DNA, 15 bp, Homo sapiens
atttttcttcactaa

SEQ ID NO: 2020860 - DNA, 15 bp, Homo sapiens
tttttcttcactaac

SEQ ID NO: 2020861 - DNA, 15 bp, Homo sapiens
ttttcttcactaacc

SEQ ID NO: 2020862 - DNA, 15 bp, Homo sapiens
tttcttcactaacct

SEQ ID NO: 2020863 - DNA, 15 bp, Homo sapiens
ttcttcactaaccta

SEQ ID NO: 2020864 - DNA, 15 bp, Homo sapiens
tcttcactaacctat

SEQ ID NO: 2020865 - DNA, 15 bp, Homo sapiens
cttcactaacctatc

SEQ ID NO: 2020866 - DNA, 15 bp, Homo sapiens
ttcactaacctatct

SEQ ID NO: 2020867 - DNA, 15 bp, Homo sapiens
tcactaacctatctg

SEQ ID NO: 2020868 - DNA, 15 bp, Homo sapiens
cactaacctatctgt

SEQ ID NO: 2020869 - DNA, 15 bp, Homo sapiens
actaacctatctgtt

SEQ ID NO: 2020870 - DNA, 15 bp, Homo sapiens
ctaacctatctgttt

SEQ ID NO: 2020871 - DNA, 15 bp, Homo sapiens
taacctatctgtttg

SEQ ID NO: 2020872 - DNA, 15 bp, Homo sapiens
aacctatctgtttgt

SEQ ID NO: 2020873 - DNA, 15 bp, Homo sapiens
acctatctgtttgtt

SEQ ID NO: 2020874 - DNA, 15 bp, Homo sapiens
cctatctgtttgtta

SEQ ID NO: 2020875 - DNA, 15 bp, Homo sapiens
ctatctgtttgttag

SEQ ID NO: 2020876 - DNA, 15 bp, Homo sapiens
tatctgtttgttagt

SEQ ID NO: 2020877 - DNA, 15 bp, Homo sapiens
atctgtttgttagta

SEQ ID NO: 2020878 - DNA, 15 bp, Homo sapiens
tctgtttgttagtaa

SEQ ID NO: 2020879 - DNA, 15 bp, Homo sapiens
ctgtttgttagtaag

SEQ ID NO: 2020880 - DNA, 15 bp, Homo sapiens
tgtttgttagtaagt

SEQ ID NO: 2020881 - DNA, 15 bp, Homo sapiens
gtttgttagtaagtt

SEQ ID NO: 2020882 - DNA, 15 bp, Homo sapiens
tttgttagtaagttt

SEQ ID NO: 2020883 - DNA, 15 bp, Homo sapiens
ttgttagtaagtttt

SEQ ID NO: 2020884 - DNA, 15 bp, Homo sapiens
tgttagtaagttttt

SEQ ID NO: 2020885 - DNA, 15 bp, Homo sapiens
gttagtaagtttttc

SEQ ID NO: 2020886 - DNA, 15 bp, Homo sapiens
ttagtaagtttttca

SEQ ID NO: 2020887 - DNA, 15 bp, Homo sapiens
tagtaagtttttcag

SEQ ID NO: 2020888 - DNA, 15 bp, Homo sapiens
agtaagtttttcagt

SEQ ID NO: 2020889 - DNA, 15 bp, Homo sapiens
gtaagtttttcagtt

SEQ ID NO: 2020890 - DNA, 15 bp, Homo sapiens
taagtttttcagttc

SEQ ID NO: 2020891 - DNA, 15 bp, Homo sapiens
aagtttttcagttcc

SEQ ID NO: 2020892 - DNA, 15 bp, Homo sapiens
agtttttcagttcct

SEQ ID NO: 2020893 - DNA, 15 bp, Homo sapiens
gtttttcagttcctt

SEQ ID NO: 2020894 - DNA, 15 bp, Homo sapiens
tttttcagttccttc

SEQ ID NO: 2020895 - DNA, 15 bp, Homo sapiens
ttttcagttccttct

SEQ ID NO: 2020896 - DNA, 15 bp, Homo sapiens
tttcagttccttctt

SEQ ID NO: 2020897 - DNA, 15 bp, Homo sapiens
ttcagttccttcttc

SEQ ID NO: 2020898 - DNA, 15 bp, Homo sapiens
tcagttccttcttca

SEQ ID NO: 2020899 - DNA, 15 bp, Homo sapiens
cagttccttcttcat

SEQ ID NO: 2020900 - DNA, 15 bp, Homo sapiens
agttccttcttcatc

SEQ ID NO: 2020901 - DNA, 15 bp, Homo sapiens
gttccttcttcatct

SEQ ID NO: 2020902 - DNA, 15 bp, Homo sapiens
ttccttcttcatctt

SEQ ID NO: 2020903 - DNA, 15 bp, Homo sapiens
tccttcttcatcttt

SEQ ID NO: 2020904 - DNA, 15 bp, Homo sapiens
ccttcttcatctttt

SEQ ID NO: 2020905 - DNA, 15 bp, Homo sapiens
cttcttcatcttttc

SEQ ID NO: 2020906 - DNA, 15 bp, Homo sapiens
ttcttcatcttttct

SEQ ID NO: 2020907 - DNA, 15 bp, Homo sapiens
tcttcatcttttctt

SEQ ID NO: 2020908 - DNA, 15 bp, Homo sapiens
cttcatcttttcttt

SEQ ID NO: 2020909 - DNA, 15 bp, Homo sapiens
ttcatcttttctttc

SEQ ID NO: 2020910 - DNA, 15 bp, Homo sapiens
tcatcttttctttcc

SEQ ID NO: 2020911 - DNA, 15 bp, Homo sapiens
catcttttctttccc

SEQ ID NO: 2020912 - DNA, 15 bp, Homo sapiens
atcttttctttccct

SEQ ID NO: 2020913 - DNA, 15 bp, Homo sapiens
ttttctttcccttgt

SEQ ID NO: 2020914 - DNA, 15 bp, Homo sapiens
tttctttcccttgta

SEQ ID NO: 2020915 - DNA, 15 bp, Homo sapiens
ttctttcccttgtag

SEQ ID NO: 2020916 - DNA, 15 bp, Homo sapiens
tctttcccttgtagc

SEQ ID NO: 2020917 - DNA, 15 bp, Homo sapiens
ctttcccttgtagct

SEQ ID NO: 2020918 - DNA, 15 bp, Homo sapiens
tttcccttgtagctg

SEQ ID NO: 2020919 - DNA, 15 bp, Homo sapiens
ttcccttgtagctgt

SEQ ID NO: 2020920 - DNA, 15 bp, Homo sapiens
tcccttgtagctgtg

SEQ ID NO: 2020921 - DNA, 15 bp, Homo sapiens
cccttgtagctgtga

SEQ ID NO: 2020922 - DNA, 15 bp, Homo sapiens
ccttgtagctgtgag

SEQ ID NO: 2020923 - DNA, 15 bp, Homo sapiens
cttgtagctgtgagc

SEQ ID NO: 2020924 - DNA, 15 bp, Homo sapiens
ttgtagctgtgagca

SEQ ID NO: 2020925 - DNA, 15 bp, Homo sapiens
tgtagctgtgagcac

SEQ ID NO: 2020926 - DNA, 15 bp, Homo sapiens
gtagctgtgagcact

SEQ ID NO: 2020927 - DNA, 15 bp, Homo sapiens
tagctgtgagcactc

SEQ ID NO: 2020928 - DNA, 15 bp, Homo sapiens
agctgtgagcactcc

SEQ ID NO: 2020929 - DNA, 15 bp, Homo sapiens
gctgtgagcactcca

SEQ ID NO: 2020930 - DNA, 15 bp, Homo sapiens
ctgtgagcactccag

SEQ ID NO: 2020931 - DNA, 15 bp, Homo sapiens
tgtgagcactccagt

SEQ ID NO: 2020932 - DNA, 15 bp, Homo sapiens
gtgagcactccagta

SEQ ID NO: 2020933 - DNA, 15 bp, Homo sapiens
tgagcactccagtag

SEQ ID NO: 2020934 - DNA, 15 bp, Homo sapiens
gagcactccagtaga

SEQ ID NO: 2020935 - DNA, 15 bp, Homo sapiens
agcactccagtagat

SEQ ID NO: 2020936 - DNA, 15 bp, Homo sapiens
gcactccagtagatt

SEQ ID NO: 2020937 - DNA, 15 bp, Homo sapiens
cactccagtagattg

SEQ ID NO: 2020938 - DNA, 15 bp, Homo sapiens
actccagtagattgc

SEQ ID NO: 2020939 - DNA, 15 bp, Homo sapiens
ctccagtagattgca

SEQ ID NO: 2020940 - DNA, 15 bp, Homo sapiens
tccagtagattgcat

SEQ ID NO: 2020941 - DNA, 15 bp, Homo sapiens
ccagtagattgcatc

SEQ ID NO: 2020942 - DNA, 15 bp, Homo sapiens
cagtagattgcatca

SEQ ID NO: 2020943 - DNA, 15 bp, Homo sapiens
agtagattgcatcac

SEQ ID NO: 2020944 - DNA, 15 bp, Homo sapiens
gtagattgcatcact

SEQ ID NO: 2020945 - DNA, 15 bp, Homo sapiens
tagattgcatcacta

SEQ ID NO: 2020946 - DNA, 15 bp, Homo sapiens
agattgcatcactag

SEQ ID NO: 2020947 - DNA, 15 bp, Homo sapiens
gattgcatcactagg

SEQ ID NO: 2020948 - DNA, 15 bp, Homo sapiens
attgcatcactaggt

SEQ ID NO: 2020949 - DNA, 15 bp, Homo sapiens
ttgcatcactaggtt

SEQ ID NO: 2020950 - DNA, 15 bp, Homo sapiens
tgcatcactaggttg

SEQ ID NO: 2020951 - DNA, 15 bp, Homo sapiens
gcatcactaggttgg

SEQ ID NO: 2020952 - DNA, 15 bp, Homo sapiens
catcactaggttggg

SEQ ID NO: 2020953 - DNA, 15 bp, Homo sapiens
atcactaggttgggt

SEQ ID NO: 2020954 - DNA, 15 bp, Homo sapiens
tcactaggttgggtc

SEQ ID NO: 2020955 - DNA, 15 bp, Homo sapiens
cactaggttgggtcc

SEQ ID NO: 2020956 - DNA, 15 bp, Homo sapiens
actaggttgggtcct

SEQ ID NO: 2020957 - DNA, 15 bp, Homo sapiens
ctaggttgggtcctg

SEQ ID NO: 2020958 - DNA, 15 bp, Homo sapiens
taggttgggtcctgt

SEQ ID NO: 2020959 - DNA, 15 bp, Homo sapiens
aggttgggtcctgtg

SEQ ID NO: 2020960 - DNA, 15 bp, Homo sapiens
ggttgggtcctgtga

SEQ ID NO: 2020961 - DNA, 15 bp, Homo sapiens
gttgggtcctgtgag

SEQ ID NO: 2020962 - DNA, 15 bp, Homo sapiens
ttgggtcctgtgagc

SEQ ID NO: 2020963 - DNA, 15 bp, Homo sapiens
tgggtcctgtgagct

SEQ ID NO: 2020964 - DNA, 15 bp, Homo sapiens
gggtcctgtgagctg

SEQ ID NO: 2020965 - DNA, 15 bp, Homo sapiens
ggtcctgtgagctgt

SEQ ID NO: 2020966 - DNA, 15 bp, Homo sapiens
gtcctgtgagctgtt

SEQ ID NO: 2020967 - DNA, 15 bp, Homo sapiens
tcctgtgagctgttt

SEQ ID NO: 2020968 - DNA, 15 bp, Homo sapiens
cctgtgagctgtttt

SEQ ID NO: 2020969 - DNA, 15 bp, Homo sapiens
ctgtgagctgttttg

SEQ ID NO: 2020970 - DNA, 15 bp, Homo sapiens
tgtgagctgttttgt

SEQ ID NO: 2020971 - DNA, 15 bp, Homo sapiens
gtgagctgttttgtt

SEQ ID NO: 2020972 - DNA, 15 bp, Homo sapiens
tgagctgttttgttc

SEQ ID NO: 2020973 - DNA, 15 bp, Homo sapiens
gagctgttttgttct

SEQ ID NO: 2020974 - DNA, 15 bp, Homo sapiens
agctgttttgttctt

SEQ ID NO: 2020975 - DNA, 15 bp, Homo sapiens
gctgttttgttcttt

SEQ ID NO: 2020976 - DNA, 15 bp, Homo sapiens
ctgttttgttctttt

SEQ ID NO: 2020977 - DNA, 15 bp, Homo sapiens
tgttttgttcttttc

SEQ ID NO: 2020978 - DNA, 15 bp, Homo sapiens
gttttgttcttttcc

SEQ ID NO: 2020979 - DNA, 15 bp, Homo sapiens
ttttgttcttttcca

SEQ ID NO: 2020980 - DNA, 15 bp, Homo sapiens
tttgttcttttccaa

SEQ ID NO: 2020981 - DNA, 15 bp, Homo sapiens
ttgttcttttccaag

SEQ ID NO: 2020982 - DNA, 15 bp, Homo sapiens
tgttcttttccaagt

SEQ ID NO: 2020983 - DNA, 15 bp, Homo sapiens
gttcttttccaagtg

SEQ ID NO: 2020984 - DNA, 15 bp, Homo sapiens
ttcttttccaagtgt

SEQ ID NO: 2020985 - DNA, 15 bp, Homo sapiens
tcttttccaagtgtc

SEQ ID NO: 2020986 - DNA, 15 bp, Homo sapiens
cttttccaagtgtct

SEQ ID NO: 2020987 - DNA, 15 bp, Homo sapiens
ttttccaagtgtctg

SEQ ID NO: 2020988 - DNA, 15 bp, Homo sapiens
tttccaagtgtctga

SEQ ID NO: 2020989 - DNA, 15 bp, Homo sapiens
ttccaagtgtctgat

SEQ ID NO: 2020990 - DNA, 15 bp, Homo sapiens
tccaagtgtctgatt

SEQ ID NO: 2020991 - DNA, 15 bp, Homo sapiens
ccaagtgtctgattc

SEQ ID NO: 2020992 - DNA, 15 bp, Homo sapiens
caagtgtctgattca

SEQ ID NO: 2020993 - DNA, 15 bp, Homo sapiens
aagtgtctgattcag

SEQ ID NO: 2020994 - DNA, 15 bp, Homo sapiens
agtgtctgattcagc

SEQ ID NO: 2020995 - DNA, 15 bp, Homo sapiens
gtgtctgattcagcg

SEQ ID NO: 2020996 - DNA, 15 bp, Homo sapiens
tgtctgattcagcgg

SEQ ID NO: 2020997 - DNA, 15 bp, Homo sapiens
gtctgattcagcggg

SEQ ID NO: 2020998 - DNA, 15 bp, Homo sapiens
tctgattcagcgggc

SEQ ID NO: 2020999 - DNA, 15 bp, Homo sapiens
ctgattcagcgggcc

SEQ ID NO: 2021000 - DNA, 15 bp, Homo sapiens
tgattcagcgggcca

SEQ ID NO: 2021001 - DNA, 15 bp, Homo sapiens
gattcagcgggccat

SEQ ID NO: 2021002 - DNA, 15 bp, Homo sapiens
attcagcgggccata

SEQ ID NO: 2021003 - DNA, 15 bp, Homo sapiens
ttcagcgggccatag

SEQ ID NO: 2021004 - DNA, 15 bp, Homo sapiens
tcagcgggccataga

SEQ ID NO: 2021005 - DNA, 15 bp, Homo sapiens
cagcgggccatagac

SEQ ID NO: 2021006 - DNA, 15 bp, Homo sapiens
agcgggccatagacc

SEQ ID NO: 2021007 - DNA, 15 bp, Homo sapiens
gcgggccatagaccg

SEQ ID NO: 2021008 - DNA, 15 bp, Homo sapiens
cgggccatagaccgc

SEQ ID NO: 2021009 - DNA, 15 bp, Homo sapiens
gggccatagaccgct

SEQ ID NO: 2021010 - DNA, 15 bp, Homo sapiens
ggccatagaccgctt

SEQ ID NO: 2021011 - DNA, 15 bp, Homo sapiens
gccatagaccgcttg

SEQ ID NO: 2021012 - DNA, 15 bp, Homo sapiens
ccatagaccgcttgc

SEQ ID NO: 2021013 - DNA, 15 bp, Homo sapiens
catagaccgcttgcc

SEQ ID NO: 2021014 - DNA, 15 bp, Homo sapiens
atagaccgcttgcca

SEQ ID NO: 2021015 - DNA, 15 bp, Homo sapiens
tagaccgcttgccag

SEQ ID NO: 2021016 - DNA, 15 bp, Homo sapiens
agaccgcttgccaga

SEQ ID NO: 2021017 - DNA, 15 bp, Homo sapiens
gaccgcttgccagaa

SEQ ID NO: 2021018 - DNA, 15 bp, Homo sapiens
accgcttgccagaaa

SEQ ID NO: 2021019 - DNA, 15 bp, Homo sapiens
ccgcttgccagaaaa

SEQ ID NO: 2021020 - DNA, 15 bp, Homo sapiens
cgcttgccagaaaat

SEQ ID NO: 2021021 - DNA, 15 bp, Homo sapiens
gcttgccagaaaatc

SEQ ID NO: 2021022 - DNA, 15 bp, Homo sapiens
cttgccagaaaatcg

SEQ ID NO: 2021023 - DNA, 15 bp, Homo sapiens
ttgccagaaaatcgc

SEQ ID NO: 2021024 - DNA, 15 bp, Homo sapiens
tgccagaaaatcgcc

SEQ ID NO: 2021025 - DNA, 15 bp, Homo sapiens
gccagaaaatcgcca

SEQ ID NO: 2021026 - DNA, 15 bp, Homo sapiens
ccagaaaatcgccat

SEQ ID NO: 2021027 - DNA, 15 bp, Homo sapiens
cagaaaatcgccatt

SEQ ID NO: 2021028 - DNA, 15 bp, Homo sapiens
agaaaatcgccattg

SEQ ID NO: 2021029 - DNA, 15 bp, Homo sapiens
gaaaatcgccattgc

SEQ ID NO: 2021030 - DNA, 15 bp, Homo sapiens
aaaatcgccattgct

SEQ ID NO: 2021031 - DNA, 15 bp, Homo sapiens
aaatcgccattgctt

SEQ ID NO: 2021032 - DNA, 15 bp, Homo sapiens
aatcgccattgcttc

SEQ ID NO: 2021033 - DNA, 15 bp, Homo sapiens
atcgccattgcttct

SEQ ID NO: 2021034 - DNA, 15 bp, Homo sapiens
tcgccattgcttcta

SEQ ID NO: 2021035 - DNA, 15 bp, Homo sapiens
cgccattgcttctag

SEQ ID NO: 2021036 - DNA, 15 bp, Homo sapiens
gccattgcttctagg

SEQ ID NO: 2021037 - DNA, 15 bp, Homo sapiens
ccattgcttctaggc

SEQ ID NO: 2021038 - DNA, 15 bp, Homo sapiens
cattgcttctaggct

SEQ ID NO: 2021039 - DNA, 15 bp, Homo sapiens
attgcttctaggctg

SEQ ID NO: 2021040 - DNA, 15 bp, Homo sapiens
ttgcttctaggctga

SEQ ID NO: 2021041 - DNA, 15 bp, Homo sapiens
tgcttctaggctgac

SEQ ID NO: 2021042 - DNA, 15 bp, Homo sapiens
gcttctaggctgacg

SEQ ID NO: 2021043 - DNA, 15 bp, Homo sapiens
cttctaggctgacgc

SEQ ID NO: 2021044 - DNA, 15 bp, Homo sapiens
ttctaggctgacgct

SEQ ID NO: 2021045 - DNA, 15 bp, Homo sapiens
tctaggctgacgctt

SEQ ID NO: 2021046 - DNA, 15 bp, Homo sapiens
ctaggctgacgcttg

SEQ ID NO: 2021047 - DNA, 15 bp, Homo sapiens
taggctgacgcttgc

SEQ ID NO: 2021048 - DNA, 15 bp, Homo sapiens
aggctgacgcttgcc

SEQ ID NO: 2021049 - DNA, 15 bp, Homo sapiens
ggctgacgcttgcct

SEQ ID NO: 2021050 - DNA, 15 bp, Homo sapiens
gctgacgcttgccta

SEQ ID NO: 2021051 - DNA, 15 bp, Homo sapiens
ctgacgcttgcctac

SEQ ID NO: 2021052 - DNA, 15 bp, Homo sapiens
tgacgcttgcctact

SEQ ID NO: 2021053 - DNA, 15 bp, Homo sapiens
gacgcttgcctactt

SEQ ID NO: 2021054 - DNA, 15 bp, Homo sapiens
acgcttgcctacttg

SEQ ID NO: 2021055 - DNA, 15 bp, Homo sapiens
cgcttgcctacttgt

SEQ ID NO: 2021056 - DNA, 15 bp, Homo sapiens
gcttgcctacttgtt

SEQ ID NO: 2021057 - DNA, 15 bp, Homo sapiens
cttgcctacttgttt

SEQ ID NO: 2021058 - DNA, 15 bp, Homo sapiens
ttgcctacttgtttt

SEQ ID NO: 2021059 - DNA, 15 bp, Homo sapiens
tgcctacttgttttg

SEQ ID NO: 2021060 - DNA, 15 bp, Homo sapiens
gcctacttgttttga

SEQ ID NO: 2021061 - DNA, 15 bp, Homo sapiens
cctacttgttttgat

SEQ ID NO: 2021062 - DNA, 15 bp, Homo sapiens
ctacttgttttgatc

SEQ ID NO: 2021063 - DNA, 15 bp, Homo sapiens
tacttgttttgatcg

SEQ ID NO: 2021064 - DNA, 15 bp, Homo sapiens
acttgttttgatcgt

SEQ ID NO: 2021065 - DNA, 15 bp, Homo sapiens
cttgttttgatcgtc

SEQ ID NO: 2021066 - DNA, 15 bp, Homo sapiens
ttgttttgatcgtct

SEQ ID NO: 2021067 - DNA, 15 bp, Homo sapiens
tgttttgatcgtctg

SEQ ID NO: 2021068 - DNA, 15 bp, Homo sapiens
gttttgatcgtctga

SEQ ID NO: 2021069 - DNA, 15 bp, Homo sapiens
ttttgatcgtctgag

SEQ ID NO: 2021070 - DNA, 15 bp, Homo sapiens
tttgatcgtctgaga

SEQ ID NO: 2021071 - DNA, 15 bp, Homo sapiens
ttgatcgtctgagag

SEQ ID NO: 2021072 - DNA, 15 bp, Homo sapiens
tgatcgtctgagaga

SEQ ID NO: 2021073 - DNA, 15 bp, Homo sapiens
gatcgtctgagagaa

SEQ ID NO: 2021074 - DNA, 15 bp, Homo sapiens
atcgtctgagagaag

SEQ ID NO: 2021075 - DNA, 15 bp, Homo sapiens
tcgtctgagagaaga

SEQ ID NO: 2021076 - DNA, 15 bp, Homo sapiens
cgtctgagagaagag

SEQ ID NO: 2021077 - DNA, 15 bp, Homo sapiens
gtctgagagaagaga

SEQ ID NO: 2021078 - DNA, 15 bp, Homo sapiens
tctgagagaagagac

SEQ ID NO: 2021079 - DNA, 15 bp, Homo sapiens
ctgagagaagagact

SEQ ID NO: 2021080 - DNA, 15 bp, Homo sapiens
tgagagaagagactt

SEQ ID NO: 2021081 - DNA, 15 bp, Homo sapiens
gagagaagagacttt

SEQ ID NO: 2021082 - DNA, 15 bp, Homo sapiens
agagaagagactttg

SEQ ID NO: 2021083 - DNA, 15 bp, Homo sapiens
gagaagagactttgt

SEQ ID NO: 2021084 - DNA, 15 bp, Homo sapiens
agaagagactttgtt

SEQ ID NO: 2021085 - DNA, 15 bp, Homo sapiens
gaagagactttgttt

SEQ ID NO: 2021086 - DNA, 15 bp, Homo sapiens
aagagactttgtttg

SEQ ID NO: 2021087 - DNA, 15 bp, Homo sapiens
agagactttgtttgc

SEQ ID NO: 2021088 - DNA, 15 bp, Homo sapiens
gagactttgtttgcc

SEQ ID NO: 2021089 - DNA, 15 bp, Homo sapiens
agactttgtttgcca

SEQ ID NO: 2021090 - DNA, 15 bp, Homo sapiens
gactttgtttgccaa

SEQ ID NO: 2021091 - DNA, 15 bp, Homo sapiens
actttgtttgccaaa

SEQ ID NO: 2021092 - DNA, 15 bp, Homo sapiens
ctttgtttgccaaaa

SEQ ID NO: 2021093 - DNA, 15 bp, Homo sapiens
tttgtttgccaaaac

SEQ ID NO: 2021094 - DNA, 15 bp, Homo sapiens
ttgtttgccaaaacc

SEQ ID NO: 2021095 - DNA, 15 bp, Homo sapiens
tgtttgccaaaacca

SEQ ID NO: 2021096 - DNA, 15 bp, Homo sapiens
gtttgccaaaaccac

SEQ ID NO: 2021097 - DNA, 15 bp, Homo sapiens
tttgccaaaaccaca

SEQ ID NO: 2021098 - DNA, 15 bp, Homo sapiens
ttgccaaaaccacag

SEQ ID NO: 2021099 - DNA, 15 bp, Homo sapiens
tgccaaaaccacagt

SEQ ID NO: 2021100 - DNA, 15 bp, Homo sapiens
gccaaaaccacagtt

SEQ ID NO: 2021101 - DNA, 15 bp, Homo sapiens
ccaaaaccacagttg

SEQ ID NO: 2021102 - DNA, 15 bp, Homo sapiens
caaaaccacagttga

SEQ ID NO: 2021103 - DNA, 15 bp, Homo sapiens
aaaaccacagttgat

SEQ ID NO: 2021104 - DNA, 15 bp, Homo sapiens
aaaccacagttgata

SEQ ID NO: 2021105 - DNA, 15 bp, Homo sapiens
aaccacagttgatag

SEQ ID NO: 2021106 - DNA, 15 bp, Homo sapiens
accacagttgataga

SEQ ID NO: 2021107 - DNA, 15 bp, Homo sapiens
ccacagttgatagaa

SEQ ID NO: 2021108 - DNA, 15 bp, Homo sapiens
cacagttgatagaaa

SEQ ID NO: 2021109 - DNA, 15 bp, Homo sapiens
acagttgatagaaat

SEQ ID NO: 2021110 - DNA, 15 bp, Homo sapiens
cagttgatagaaata

SEQ ID NO: 2021111 - DNA, 15 bp, Homo sapiens
agttgatagaaatag

SEQ ID NO: 2021112 - DNA, 15 bp, Homo sapiens
gttgatagaaataga

SEQ ID NO: 2021113 - DNA, 15 bp, Homo sapiens
ttgatagaaatagaa

SEQ ID NO: 2021114 - DNA, 15 bp, Homo sapiens
tgatagaaatagaaa

SEQ ID NO: 2021115 - DNA, 15 bp, Homo sapiens
gatagaaatagaaag

SEQ ID NO: 2021116 - DNA, 15 bp, Homo sapiens
atagaaatagaaagg

SEQ ID NO: 2021117 - DNA, 15 bp, Homo sapiens
tagaaatagaaaggt

SEQ ID NO: 2021118 - DNA, 15 bp, Homo sapiens
agaaatagaaaggta

SEQ ID NO: 2021119 - DNA, 15 bp, Homo sapiens
gaaatagaaaggtac

SEQ ID NO: 2021120 - DNA, 15 bp, Homo sapiens
aaatagaaaggtaca

SEQ ID NO: 2021121 - DNA, 15 bp, Homo sapiens
aatagaaaggtacag

SEQ ID NO: 2021122 - DNA, 15 bp, Homo sapiens
atagaaaggtacaga

SEQ ID NO: 2021123 - DNA, 15 bp, Homo sapiens
tagaaaggtacagat

SEQ ID NO: 2021124 - DNA, 15 bp, Homo sapiens
agaaaggtacagata

SEQ ID NO: 2021125 - DNA, 15 bp, Homo sapiens
gaaaggtacagataa

SEQ ID NO: 2021126 - DNA, 15 bp, Homo sapiens
aaaggtacagataag

SEQ ID NO: 2021127 - DNA, 15 bp, Homo sapiens
aaggtacagataaga

SEQ ID NO: 2021128 - DNA, 15 bp, Homo sapiens
aggtacagataagaa

SEQ ID NO: 2021129 - DNA, 15 bp, Homo sapiens
ggtacagataagaaa

SEQ ID NO: 2021130 - DNA, 15 bp, Homo sapiens
gtacagataagaaaa

SEQ ID NO: 2021131 - DNA, 15 bp, Homo sapiens
tacagataagaaaaa

SEQ ID NO: 2021132 - DNA, 15 bp, Homo sapiens
acagataagaaaaag

SEQ ID NO: 2021133 - DNA, 15 bp, Homo sapiens
cagataagaaaaagc

SEQ ID NO: 2021134 - DNA, 15 bp, Homo sapiens
agataagaaaaagca

SEQ ID NO: 2021135 - DNA, 15 bp, Homo sapiens
gataagaaaaagcac

SEQ ID NO: 2021136 - DNA, 15 bp, Homo sapiens
ataagaaaaagcact

SEQ ID NO: 2021137 - DNA, 15 bp, Homo sapiens
taagaaaaagcactg

SEQ ID NO: 2021138 - DNA, 15 bp, Homo sapiens
aagaaaaagcactgc

SEQ ID NO: 2021139 - DNA, 15 bp, Homo sapiens
agaaaaagcactgca

SEQ ID NO: 2021140 - DNA, 15 bp, Homo sapiens
gaaaaagcactgcaa

SEQ ID NO: 2021141 - DNA, 15 bp, Homo sapiens
aaaaagcactgcaat

SEQ ID NO: 2021142 - DNA, 15 bp, Homo sapiens
aaaagcactgcaatt

SEQ ID NO: 2021143 - DNA, 15 bp, Homo sapiens
aaagcactgcaatta

SEQ ID NO: 2021144 - DNA, 15 bp, Homo sapiens
aagcactgcaattat

SEQ ID NO: 2021145 - DNA, 15 bp, Homo sapiens
agcactgcaattata

SEQ ID NO: 2021146 - DNA, 15 bp, Homo sapiens
gcactgcaattataa

SEQ ID NO: 2021147 - DNA, 15 bp, Homo sapiens
cactgcaattataat

SEQ ID NO: 2021148 - DNA, 15 bp, Homo sapiens
actgcaattataatt

SEQ ID NO: 2021149 - DNA, 15 bp, Homo sapiens
ctgcaattataatta

SEQ ID NO: 2021150 - DNA, 15 bp, Homo sapiens
tgcaattataattaa

SEQ ID NO: 2021151 - DNA, 15 bp, Homo sapiens
gcaattataattaag

SEQ ID NO: 2021152 - DNA, 15 bp, Homo sapiens
caattataattaagc

SEQ ID NO: 2021153 - DNA, 15 bp, Homo sapiens
aattataattaagca

SEQ ID NO: 2021154 - DNA, 15 bp, Homo sapiens
attataattaagcaa

SEQ ID NO: 2021155 - DNA, 15 bp, Homo sapiens
ttataattaagcaaa

SEQ ID NO: 2021156 - DNA, 15 bp, Homo sapiens
tataattaagcaaat

SEQ ID NO: 2021157 - DNA, 15 bp, Homo sapiens
ataattaagcaaatt

SEQ ID NO: 2021158 - DNA, 15 bp, Homo sapiens
taattaagcaaatta

SEQ ID NO: 2021159 - DNA, 15 bp, Homo sapiens
aattaagcaaattag

SEQ ID NO: 2021160 - DNA, 15 bp, Homo sapiens
attaagcaaattagc

SEQ ID NO: 2021161 - DNA, 15 bp, Homo sapiens
ttaagcaaattagca

SEQ ID NO: 2021162 - DNA, 15 bp, Homo sapiens
taagcaaattagcat

SEQ ID NO: 2021163 - DNA, 15 bp, Homo sapiens
aagcaaattagcata

SEQ ID NO: 2021164 - DNA, 15 bp, Homo sapiens
agcaaattagcatag

SEQ ID NO: 2021165 - DNA, 15 bp, Homo sapiens
gcaaattagcatagc

SEQ ID NO: 2021166 - DNA, 15 bp, Homo sapiens
caaattagcatagcc

SEQ ID NO: 2021167 - DNA, 15 bp, Homo sapiens
aaattagcatagcca

SEQ ID NO: 2021168 - DNA, 15 bp, Homo sapiens
aattagcatagccat

SEQ ID NO: 2021169 - DNA, 15 bp, Homo sapiens
attagcatagccatg

SEQ ID NO: 2021170 - DNA, 15 bp, Homo sapiens
ttagcatagccatgt

SEQ ID NO: 2021171 - DNA, 15 bp, Homo sapiens
tagcatagccatgtt

SEQ ID NO: 2021172 - DNA, 15 bp, Homo sapiens
agcatagccatgttg

SEQ ID NO: 2021173 - DNA, 15 bp, Homo sapiens
gcatagccatgttgt

SEQ ID NO: 2021174 - DNA, 15 bp, Homo sapiens
catagccatgttgtt

SEQ ID NO: 2021175 - DNA, 15 bp, Homo sapiens
atagccatgttgttg

SEQ ID NO: 2021176 - DNA, 15 bp, Homo sapiens
tagccatgttgttgt

SEQ ID NO: 2021177 - DNA, 15 bp, Homo sapiens
agccatgttgttgtt

SEQ ID NO: 2021178 - DNA, 15 bp, Homo sapiens
gccatgttgttgttg

SEQ ID NO: 2021179 - DNA, 15 bp, Homo sapiens
ccatgttgttgttgt

SEQ ID NO: 2021180 - DNA, 15 bp, Homo sapiens
catgttgttgttgtt

SEQ ID NO: 2021181 - DNA, 15 bp, Homo sapiens
atgttgttgttgttt

SEQ ID NO: 2021182 - DNA, 15 bp, Homo sapiens
gttgttgttgttttc

SEQ ID NO: 2021183 - DNA, 15 bp, Homo sapiens
ttgttgttgttttcc

SEQ ID NO: 2021184 - DNA, 15 bp, Homo sapiens
tgttgttgttttccg

SEQ ID NO: 2021185 - DNA, 15 bp, Homo sapiens
gttgttgttttccgc

SEQ ID NO: 2021186 - DNA, 15 bp, Homo sapiens
ttgttgttttccgca

SEQ ID NO: 2021187 - DNA, 15 bp, Homo sapiens
tgttgttttccgcac

SEQ ID NO: 2021188 - DNA, 15 bp, Homo sapiens
gttgttttccgcaca

SEQ ID NO: 2021189 - DNA, 15 bp, Homo sapiens
ttgttttccgcacag

SEQ ID NO: 2021190 - DNA, 15 bp, Homo sapiens
tgttttccgcacaga

SEQ ID NO: 2021191 - DNA, 15 bp, Homo sapiens
gttttccgcacagac

SEQ ID NO: 2021192 - DNA, 15 bp, Homo sapiens
ttttccgcacagaca

SEQ ID NO: 2021193 - DNA, 15 bp, Homo sapiens
tttccgcacagacat

SEQ ID NO: 2021194 - DNA, 15 bp, Homo sapiens
ttccgcacagacatc

SEQ ID NO: 2021195 - DNA, 15 bp, Homo sapiens
tccgcacagacatcc

SEQ ID NO: 2021196 - DNA, 15 bp, Homo sapiens
ccgcacagacatcct

SEQ ID NO: 2021197 - DNA, 15 bp, Homo sapiens
cgcacagacatcctt

SEQ ID NO: 2021198 - DNA, 15 bp, Homo sapiens
gcacagacatccttt

SEQ ID NO: 2021199 - DNA, 15 bp, Homo sapiens
cacagacatcctttt

SEQ ID NO: 2021200 - DNA, 15 bp, Homo sapiens
acagacatccttttt

SEQ ID NO: 2021201 - DNA, 15 bp, Homo sapiens
cagacatcctttttg

SEQ ID NO: 2021202 - DNA, 15 bp, Homo sapiens
agacatcctttttga

SEQ ID NO: 2021203 - DNA, 15 bp, Homo sapiens
gacatcctttttgaa

SEQ ID NO: 2021204 - DNA, 15 bp, Homo sapiens
acatcctttttgaaa

SEQ ID NO: 2021205 - DNA, 15 bp, Homo sapiens
catcctttttgaaaa

SEQ ID NO: 2021206 - DNA, 15 bp, Homo sapiens
atcctttttgaaaat

SEQ ID NO: 2021207 - DNA, 15 bp, Homo sapiens
tcctttttgaaaatt

SEQ ID NO: 2021208 - DNA, 15 bp, Homo sapiens
cctttttgaaaattt

SEQ ID NO: 2021209 - DNA, 15 bp, Homo sapiens
ctttttgaaaatttc

SEQ ID NO: 2021210 - DNA, 15 bp, Homo sapiens
tttttgaaaatttca

SEQ ID NO: 2021211 - DNA, 15 bp, Homo sapiens
ttttgaaaatttcac

SEQ ID NO: 2021212 - DNA, 15 bp, Homo sapiens
tttgaaaatttcacc

SEQ ID NO: 2021213 - DNA, 15 bp, Homo sapiens
ttgaaaatttcacca

SEQ ID NO: 2021214 - DNA, 15 bp, Homo sapiens
tgaaaatttcaccat

SEQ ID NO: 2021215 - DNA, 15 bp, Homo sapiens
gaaaatttcaccatg

SEQ ID NO: 2021216 - DNA, 15 bp, Homo sapiens
aaaatttcaccatga

SEQ ID NO: 2021217 - DNA, 15 bp, Homo sapiens
aaatttcaccatgac

SEQ ID NO: 2021218 - DNA, 15 bp, Homo sapiens
aatttcaccatgact

SEQ ID NO: 2021219 - DNA, 15 bp, Homo sapiens
atttcaccatgactt

SEQ ID NO: 2021220 - DNA, 15 bp, Homo sapiens
tttcaccatgacttt

SEQ ID NO: 2021221 - DNA, 15 bp, Homo sapiens
ttcaccatgactttt

SEQ ID NO: 2021222 - DNA, 15 bp, Homo sapiens
tcaccatgacttttg

SEQ ID NO: 2021223 - DNA, 15 bp, Homo sapiens
caccatgacttttgc

SEQ ID NO: 2021224 - DNA, 15 bp, Homo sapiens
accatgacttttgct

SEQ ID NO: 2021225 - DNA, 15 bp, Homo sapiens
ccatgacttttgctt

SEQ ID NO: 2021226 - DNA, 15 bp, Homo sapiens
catgacttttgcttg

SEQ ID NO: 2021227 - DNA, 15 bp, Homo sapiens
atgacttttgcttgt

SEQ ID NO: 2021228 - DNA, 15 bp, Homo sapiens
tgacttttgcttgtg

SEQ ID NO: 2021229 - DNA, 15 bp, Homo sapiens
gacttttgcttgtgt

SEQ ID NO: 2021230 - DNA, 15 bp, Homo sapiens
acttttgcttgtgtt

SEQ ID NO: 2021231 - DNA, 15 bp, Homo sapiens
cttttgcttgtgttt

SEQ ID NO: 2021232 - DNA, 15 bp, Homo sapiens
tttgcttgtgttttc

SEQ ID NO: 2021233 - DNA, 15 bp, Homo sapiens
ttgcttgtgttttca

SEQ ID NO: 2021234 - DNA, 15 bp, Homo sapiens
tgcttgtgttttcaa

SEQ ID NO: 2021235 - DNA, 15 bp, Homo sapiens
gcttgtgttttcaat

SEQ ID NO: 2021236 - DNA, 15 bp, Homo sapiens
cttgtgttttcaatg

SEQ ID NO: 2021237 - DNA, 15 bp, Homo sapiens
ttgtgttttcaatgc

SEQ ID NO: 2021238 - DNA, 15 bp, Homo sapiens
tgtgttttcaatgct

SEQ ID NO: 2021239 - DNA, 15 bp, Homo sapiens
gtgttttcaatgctc

SEQ ID NO: 2021240 - DNA, 15 bp, Homo sapiens
tgttttcaatgctct

SEQ ID NO: 2021241 - DNA, 15 bp, Homo sapiens
gttttcaatgctctg

SEQ ID NO: 2021242 - DNA, 15 bp, Homo sapiens
ttttcaatgctctgt

SEQ ID NO: 2021243 - DNA, 15 bp, Homo sapiens
tttcaatgctctgta

SEQ ID NO: 2021244 - DNA, 15 bp, Homo sapiens
ttcaatgctctgtac

SEQ ID NO: 2021245 - DNA, 15 bp, Homo sapiens
tcaatgctctgtact

SEQ ID NO: 2021246 - DNA, 15 bp, Homo sapiens
caatgctctgtactg

SEQ ID NO: 2021247 - DNA, 15 bp, Homo sapiens
aatgctctgtactgt

SEQ ID NO: 2021248 - DNA, 15 bp, Homo sapiens
atgctctgtactgtt

SEQ ID NO: 2021249 - DNA, 15 bp, Homo sapiens
tgctctgtactgttg

SEQ ID NO: 2021250 - DNA, 15 bp, Homo sapiens
gctctgtactgttga

SEQ ID NO: 2021251 - DNA, 15 bp, Homo sapiens
ctctgtactgttgaa

SEQ ID NO: 2021252 - DNA, 15 bp, Homo sapiens
tctgtactgttgaag

SEQ ID NO: 2021253 - DNA, 15 bp, Homo sapiens
ctgtactgttgaagg

SEQ ID NO: 2021254 - DNA, 15 bp, Homo sapiens
tgtactgttgaagga

SEQ ID NO: 2021255 - DNA, 15 bp, Homo sapiens
gtactgttgaaggac

SEQ ID NO: 2021256 - DNA, 15 bp, Homo sapiens
tactgttgaaggact

SEQ ID NO: 2021257 - DNA, 15 bp, Homo sapiens
actgttgaaggactg

SEQ ID NO: 2021258 - DNA, 15 bp, Homo sapiens
ctgttgaaggactgt

SEQ ID NO: 2021259 - DNA, 15 bp, Homo sapiens
tgttgaaggactgtt

SEQ ID NO: 2021260 - DNA, 15 bp, Homo sapiens
gttgaaggactgttg

SEQ ID NO: 2021261 - DNA, 15 bp, Homo sapiens
ttgaaggactgttgc

SEQ ID NO: 2021262 - DNA, 15 bp, Homo sapiens
tgaaggactgttgct

SEQ ID NO: 2021263 - DNA, 15 bp, Homo sapiens
gaaggactgttgctg

SEQ ID NO: 2021264 - DNA, 15 bp, Homo sapiens
aaggactgttgctga

SEQ ID NO: 2021265 - DNA, 15 bp, Homo sapiens
aggactgttgctgac

SEQ ID NO: 2021266 - DNA, 15 bp, Homo sapiens
ggactgttgctgacg

SEQ ID NO: 2021267 - DNA, 15 bp, Homo sapiens
gactgttgctgacga

SEQ ID NO: 2021268 - DNA, 15 bp, Homo sapiens
actgttgctgacgac

SEQ ID NO: 2021269 - DNA, 15 bp, Homo sapiens
ctgttgctgacgaca

SEQ ID NO: 2021270 - DNA, 15 bp, Homo sapiens
tgttgctgacgacag

SEQ ID NO: 2021271 - DNA, 15 bp, Homo sapiens
gttgctgacgacaga

SEQ ID NO: 2021272 - DNA, 15 bp, Homo sapiens
ttgctgacgacagaa

SEQ ID NO: 2021273 - DNA, 15 bp, Homo sapiens
tgctgacgacagaag

SEQ ID NO: 2021274 - DNA, 15 bp, Homo sapiens
gctgacgacagaagg

SEQ ID NO: 2021275 - DNA, 15 bp, Homo sapiens
ctgacgacagaaggt

SEQ ID NO: 2021276 - DNA, 15 bp, Homo sapiens
tgacgacagaaggta

SEQ ID NO: 2021277 - DNA, 15 bp, Homo sapiens
gacgacagaaggtat

SEQ ID NO: 2021278 - DNA, 15 bp, Homo sapiens
acgacagaaggtata

SEQ ID NO: 2021279 - DNA, 15 bp, Homo sapiens
cgacagaaggtatat

SEQ ID NO: 2021280 - DNA, 15 bp, Homo sapiens
gacagaaggtatata

SEQ ID NO: 2021281 - DNA, 15 bp, Homo sapiens
acagaaggtatataa

SEQ ID NO: 2021282 - DNA, 15 bp, Homo sapiens
cagaaggtatataaa

SEQ ID NO: 2021283 - DNA, 15 bp, Homo sapiens
agaaggtatataaag

SEQ ID NO: 2021284 - DNA, 15 bp, Homo sapiens
gaaggtatataaagc

SEQ ID NO: 2021285 - DNA, 15 bp, Homo sapiens
aaggtatataaagct

SEQ ID NO: 2021286 - DNA, 15 bp, Homo sapiens
aggtatataaagctc

SEQ ID NO: 2021287 - DNA, 15 bp, Homo sapiens
ggtatataaagctcc

SEQ ID NO: 2021288 - DNA, 15 bp, Homo sapiens
gtatataaagctcct

SEQ ID NO: 2021289 - DNA, 15 bp, Homo sapiens
tatataaagctcctg

SEQ ID NO: 2021290 - DNA, 15 bp, Homo sapiens
atataaagctcctgt

SEQ ID NO: 2021291 - DNA, 15 bp, Homo sapiens
tataaagctcctgtt

SEQ ID NO: 2021292 - DNA, 15 bp, Homo sapiens
ataaagctcctgttc

SEQ ID NO: 2021293 - DNA, 15 bp, Homo sapiens
taaagctcctgttca

SEQ ID NO: 2021294 - DNA, 15 bp, Homo sapiens
aaagctcctgttcag

SEQ ID NO: 2021295 - DNA, 15 bp, Homo sapiens
aagctcctgttcaga

SEQ ID NO: 2021296 - DNA, 15 bp, Homo sapiens
agctcctgttcagat

SEQ ID NO: 2021297 - DNA, 15 bp, Homo sapiens
gctcctgttcagatt

SEQ ID NO: 2021298 - DNA, 15 bp, Homo sapiens
ctcctgttcagattt

SEQ ID NO: 2021299 - DNA, 15 bp, Homo sapiens
tcctgttcagattta

SEQ ID NO: 2021300 - DNA, 15 bp, Homo sapiens
cctgttcagatttag

SEQ ID NO: 2021301 - DNA, 15 bp, Homo sapiens
ctgttcagatttaga

SEQ ID NO: 2021302 - DNA, 15 bp, Homo sapiens
tgttcagatttagaa

SEQ ID NO: 2021303 - DNA, 15 bp, Homo sapiens
gttcagatttagaag

SEQ ID NO: 2021304 - DNA, 15 bp, Homo sapiens
ttcagatttagaagt

SEQ ID NO: 2021305 - DNA, 15 bp, Homo sapiens
tcagatttagaagtt

SEQ ID NO: 2021306 - DNA, 15 bp, Homo sapiens
cagatttagaagtta

SEQ ID NO: 2021307 - DNA, 15 bp, Homo sapiens
agatttagaagttaa

SEQ ID NO: 2021308 - DNA, 15 bp, Homo sapiens
gatttagaagttaaa

SEQ ID NO: 2021309 - DNA, 15 bp, Homo sapiens
atttagaagttaaag

SEQ ID NO: 2021310 - DNA, 15 bp, Homo sapiens
tttagaagttaaagc

SEQ ID NO: 2021311 - DNA, 15 bp, Homo sapiens
ttagaagttaaagct

SEQ ID NO: 2021312 - DNA, 15 bp, Homo sapiens
tagaagttaaagcta

SEQ ID NO: 2021313 - DNA, 15 bp, Homo sapiens
agaagttaaagctac

SEQ ID NO: 2021314 - DNA, 15 bp, Homo sapiens
gaagttaaagctacg

SEQ ID NO: 2021315 - DNA, 15 bp, Homo sapiens
aagttaaagctacga

SEQ ID NO: 2021316 - DNA, 15 bp, Homo sapiens
agttaaagctacgat

SEQ ID NO: 2021317 - DNA, 15 bp, Homo sapiens
gttaaagctacgatg

SEQ ID NO: 2021318 - DNA, 15 bp, Homo sapiens
ttaaagctacgatgt

SEQ ID NO: 2021319 - DNA, 15 bp, Homo sapiens
taaagctacgatgtg

SEQ ID NO: 2021320 - DNA, 15 bp, Homo sapiens
aaagctacgatgtga

SEQ ID NO: 2021321 - DNA, 15 bp, Homo sapiens
aagctacgatgtgag

SEQ ID NO: 2021322 - DNA, 15 bp, Homo sapiens
agctacgatgtgaga

SEQ ID NO: 2021323 - DNA, 15 bp, Homo sapiens
gctacgatgtgagat

SEQ ID NO: 2021324 - DNA, 15 bp, Homo sapiens
ctacgatgtgagatg

SEQ ID NO: 2021325 - DNA, 15 bp, Homo sapiens
tacgatgtgagatgt

SEQ ID NO: 2021326 - DNA, 15 bp, Homo sapiens
acgatgtgagatgtt

SEQ ID NO: 2021327 - DNA, 15 bp, Homo sapiens
cgatgtgagatgttt

SEQ ID NO: 2021328 - DNA, 15 bp, Homo sapiens
gatgtgagatgtttc

SEQ ID NO: 2021329 - DNA, 15 bp, Homo sapiens
atgtgagatgtttca

SEQ ID NO: 2021330 - DNA, 15 bp, Homo sapiens
tgtgagatgtttcag

SEQ ID NO: 2021331 - DNA, 15 bp, Homo sapiens
gtgagatgtttcagg

SEQ ID NO: 2021332 - DNA, 15 bp, Homo sapiens
tgagatgtttcaggc

SEQ ID NO: 2021333 - DNA, 15 bp, Homo sapiens
gagatgtttcaggca

SEQ ID NO: 2021334 - DNA, 15 bp, Homo sapiens
agatgtttcaggcat

SEQ ID NO: 2021335 - DNA, 15 bp, Homo sapiens
gatgtttcaggcatg

SEQ ID NO: 2021336 - DNA, 15 bp, Homo sapiens
atgtttcaggcatgt

SEQ ID NO: 2021337 - DNA, 15 bp, Homo sapiens
tgtttcaggcatgtt

SEQ ID NO: 2021338 - DNA, 15 bp, Homo sapiens
gtttcaggcatgttt

SEQ ID NO: 2021339 - DNA, 15 bp, Homo sapiens
tttcaggcatgtttg

SEQ ID NO: 2021340 - DNA, 15 bp, Homo sapiens
ttcaggcatgtttgt

SEQ ID NO: 2021341 - DNA, 15 bp, Homo sapiens
tcaggcatgtttgta

SEQ ID NO: 2021342 - DNA, 15 bp, Homo sapiens
caggcatgtttgtag

SEQ ID NO: 2021343 - DNA, 15 bp, Homo sapiens
aggcatgtttgtaga

SEQ ID NO: 2021344 - DNA, 15 bp, Homo sapiens
ggcatgtttgtagaa

SEQ ID NO: 2021345 - DNA, 15 bp, Homo sapiens
gcatgtttgtagaat

SEQ ID NO: 2021346 - DNA, 15 bp, Homo sapiens
catgtttgtagaatt

SEQ ID NO: 2021347 - DNA, 15 bp, Homo sapiens
atgtttgtagaatta

SEQ ID NO: 2021348 - DNA, 15 bp, Homo sapiens
tgtttgtagaattac

SEQ ID NO: 2021349 - DNA, 15 bp, Homo sapiens
gtttgtagaattacc

SEQ ID NO: 2021350 - DNA, 15 bp, Homo sapiens
tttgtagaattacct

SEQ ID NO: 2021351 - DNA, 15 bp, Homo sapiens
ttgtagaattacctt

SEQ ID NO: 2021352 - DNA, 15 bp, Homo sapiens
tgtagaattaccttt

SEQ ID NO: 2021353 - DNA, 15 bp, Homo sapiens
gtagaattaccttta

SEQ ID NO: 2021354 - DNA, 15 bp, Homo sapiens
tagaattacctttat

SEQ ID NO: 2021355 - DNA, 15 bp, Homo sapiens
agaattacctttata

SEQ ID NO: 2021356 - DNA, 15 bp, Homo sapiens
gaattacctttataa

SEQ ID NO: 2021357 - DNA, 15 bp, Homo sapiens
aattacctttataat

SEQ ID NO: 2021358 - DNA, 15 bp, Homo sapiens
attacctttataatc

SEQ ID NO: 2021359 - DNA, 15 bp, Homo sapiens
ttacctttataatct

SEQ ID NO: 2021360 - DNA, 15 bp, Homo sapiens
tacctttataatcta

SEQ ID NO: 2021361 - DNA, 15 bp, Homo sapiens
acctttataatctac

SEQ ID NO: 2021362 - DNA, 15 bp, Homo sapiens
cctttataatctact

SEQ ID NO: 2021363 - DNA, 15 bp, Homo sapiens
ctttataatctactt

SEQ ID NO: 2021364 - DNA, 15 bp, Homo sapiens
tttataatctacttc

SEQ ID NO: 2021365 - DNA, 15 bp, Homo sapiens
ttataatctacttca

SEQ ID NO: 2021366 - DNA, 15 bp, Homo sapiens
tataatctacttcag

SEQ ID NO: 2021367 - DNA, 15 bp, Homo sapiens
ataatctacttcagg

SEQ ID NO: 2021368 - DNA, 15 bp, Homo sapiens
taatctacttcagga

SEQ ID NO: 2021369 - DNA, 15 bp, Homo sapiens
aatctacttcaggag

SEQ ID NO: 2021370 - DNA, 15 bp, Homo sapiens
atctacttcaggagt

SEQ ID NO: 2021371 - DNA, 15 bp, Homo sapiens
tctacttcaggagtt

SEQ ID NO: 2021372 - DNA, 15 bp, Homo sapiens
ctacttcaggagtta

SEQ ID NO: 2021373 - DNA, 15 bp, Homo sapiens
tacttcaggagttat

SEQ ID NO: 2021374 - DNA, 15 bp, Homo sapiens
acttcaggagttata

SEQ ID NO: 2021375 - DNA, 15 bp, Homo sapiens
cttcaggagttatag

SEQ ID NO: 2021376 - DNA, 15 bp, Homo sapiens
ttcaggagttatagg

SEQ ID NO: 2021377 - DNA, 15 bp, Homo sapiens
tcaggagttataggg

SEQ ID NO: 2021378 - DNA, 15 bp, Homo sapiens
caggagttatagggt

SEQ ID NO: 2021379 - DNA, 15 bp, Homo sapiens
aggagttatagggtt

SEQ ID NO: 2021380 - DNA, 15 bp, Homo sapiens
ggagttatagggttt

SEQ ID NO: 2021381 - DNA, 15 bp, Homo sapiens
gagttatagggtttg

SEQ ID NO: 2021382 - DNA, 15 bp, Homo sapiens
agttatagggtttgt

SEQ ID NO: 2021383 - DNA, 15 bp, Homo sapiens
gttatagggtttgtg

SEQ ID NO: 2021384 - DNA, 15 bp, Homo sapiens
ttatagggtttgtgt

SEQ ID NO: 2021385 - DNA, 15 bp, Homo sapiens
tatagggtttgtgtt

SEQ ID NO: 2021386 - DNA, 15 bp, Homo sapiens
atagggtttgtgtta

SEQ ID NO: 2021387 - DNA, 15 bp, Homo sapiens
tagggtttgtgttaa

SEQ ID NO: 2021388 - DNA, 15 bp, Homo sapiens
agggtttgtgttaat

SEQ ID NO: 2021389 - DNA, 15 bp, Homo sapiens
gggtttgtgttaatg

SEQ ID NO: 2021390 - DNA, 15 bp, Homo sapiens
ggtttgtgttaatgt

SEQ ID NO: 2021391 - DNA, 15 bp, Homo sapiens
gtttgtgttaatgtt

SEQ ID NO: 2021392 - DNA, 15 bp, Homo sapiens
tttgtgttaatgttt

SEQ ID NO: 2021393 - DNA, 15 bp, Homo sapiens
ttgtgttaatgtttt

SEQ ID NO: 2021394 - DNA, 15 bp, Homo sapiens
tgtgttaatgttttc

SEQ ID NO: 2021395 - DNA, 15 bp, Homo sapiens
gtgttaatgttttca

SEQ ID NO: 2021396 - DNA, 15 bp, Homo sapiens
tgttaatgttttcat

SEQ ID NO: 2021397 - DNA, 15 bp, Homo sapiens
gttaatgttttcatt

SEQ ID NO: 2021398 - DNA, 15 bp, Homo sapiens
ttaatgttttcattt

SEQ ID NO: 2021399 - DNA, 15 bp, Homo sapiens
taatgttttcatttt

SEQ ID NO: 2021400 - DNA, 15 bp, Homo sapiens
aatgttttcattttg

SEQ ID NO: 2021401 - DNA, 15 bp, Homo sapiens
atgttttcattttgg

SEQ ID NO: 2021402 - DNA, 15 bp, Homo sapiens
tgttttcattttggt

SEQ ID NO: 2021403 - DNA, 15 bp, Homo sapiens
gttttcattttggtt

SEQ ID NO: 2021404 - DNA, 15 bp, Homo sapiens
ttttcattttggttt

SEQ ID NO: 2021405 - DNA, 15 bp, Homo sapiens
tttcattttggtttc

SEQ ID NO: 2021406 - DNA, 15 bp, Homo sapiens
ttcattttggtttct

SEQ ID NO: 2021407 - DNA, 15 bp, Homo sapiens
tcattttggtttctg

SEQ ID NO: 2021408 - DNA, 15 bp, Homo sapiens
cattttggtttctgc

SEQ ID NO: 2021409 - DNA, 15 bp, Homo sapiens
attttggtttctgcc

SEQ ID NO: 2021410 - DNA, 15 bp, Homo sapiens
ttttggtttctgcct

SEQ ID NO: 2021411 - DNA, 15 bp, Homo sapiens
tttggtttctgcctg

SEQ ID NO: 2021412 - DNA, 15 bp, Homo sapiens
ttggtttctgcctgt

SEQ ID NO: 2021413 - DNA, 15 bp, Homo sapiens
tggtttctgcctgtc

SEQ ID NO: 2021414 - DNA, 15 bp, Homo sapiens
ggtttctgcctgtct

SEQ ID NO: 2021415 - DNA, 15 bp, Homo sapiens
gtttctgcctgtctt

SEQ ID NO: 2021416 - DNA, 15 bp, Homo sapiens
tttctgcctgtcttg

SEQ ID NO: 2021417 - DNA, 15 bp, Homo sapiens
ttctgcctgtcttgt

SEQ ID NO: 2021418 - DNA, 15 bp, Homo sapiens
tctgcctgtcttgtt

SEQ ID NO: 2021419 - DNA, 15 bp, Homo sapiens
ctgcctgtcttgttt

SEQ ID NO: 2021420 - DNA, 15 bp, Homo sapiens
tgcctgtcttgtttt

SEQ ID NO: 2021421 - DNA, 15 bp, Homo sapiens
gcctgtcttgttttg

SEQ ID NO: 2021422 - DNA, 15 bp, Homo sapiens
cctgtcttgttttga

SEQ ID NO: 2021423 - DNA, 15 bp, Homo sapiens
ctgtcttgttttgaa

SEQ ID NO: 2021424 - DNA, 15 bp, Homo sapiens
tgtcttgttttgaat

SEQ ID NO: 2021425 - DNA, 15 bp, Homo sapiens
gtcttgttttgaata

SEQ ID NO: 2021426 - DNA, 15 bp, Homo sapiens
tcttgttttgaataa

SEQ ID NO: 2021427 - DNA, 15 bp, Homo sapiens
cttgttttgaataac

SEQ ID NO: 2021428 - DNA, 15 bp, Homo sapiens
ttgttttgaataact

SEQ ID NO: 2021429 - DNA, 15 bp, Homo sapiens
tgttttgaataactg

SEQ ID NO: 2021430 - DNA, 15 bp, Homo sapiens
gttttgaataactga

SEQ ID NO: 2021431 - DNA, 15 bp, Homo sapiens
ttttgaataactgaa

SEQ ID NO: 2021432 - DNA, 15 bp, Homo sapiens
tttgaataactgaat

SEQ ID NO: 2021433 - DNA, 15 bp, Homo sapiens
ttgaataactgaatc

SEQ ID NO: 2021434 - DNA, 15 bp, Homo sapiens
tgaataactgaatcc

SEQ ID NO: 2021435 - DNA, 15 bp, Homo sapiens
gaataactgaatccc

SEQ ID NO: 2021436 - DNA, 15 bp, Homo sapiens
aataactgaatccca

SEQ ID NO: 2021437 - DNA, 15 bp, Homo sapiens
ataactgaatcccag

SEQ ID NO: 2021438 - DNA, 15 bp, Homo sapiens
taactgaatcccagg

SEQ ID NO: 2021439 - DNA, 15 bp, Homo sapiens
aactgaatcccagga

SEQ ID NO: 2021440 - DNA, 15 bp, Homo sapiens
actgaatcccaggaa

SEQ ID NO: 2021441 - DNA, 15 bp, Homo sapiens
ctgaatcccaggaag

SEQ ID NO: 2021442 - DNA, 15 bp, Homo sapiens
tgaatcccaggaaga

SEQ ID NO: 2021443 - DNA, 15 bp, Homo sapiens
gaatcccaggaagaa

SEQ ID NO: 2021444 - DNA, 15 bp, Homo sapiens
aatcccaggaagaag

SEQ ID NO: 2021445 - DNA, 15 bp, Homo sapiens
atcccaggaagaagt

SEQ ID NO: 2021446 - DNA, 15 bp, Homo sapiens
tcccaggaagaagta

SEQ ID NO: 2021447 - DNA, 15 bp, Homo sapiens
cccaggaagaagtac

SEQ ID NO: 2021448 - DNA, 15 bp, Homo sapiens
ccaggaagaagtact

SEQ ID NO: 2021449 - DNA, 15 bp, Homo sapiens
caggaagaagtactg

SEQ ID NO: 2021450 - DNA, 15 bp, Homo sapiens
aggaagaagtactgt

SEQ ID NO: 2021451 - DNA, 15 bp, Homo sapiens
ggaagaagtactgtt

SEQ ID NO: 2021452 - DNA, 15 bp, Homo sapiens
gaagaagtactgtta

SEQ ID NO: 2021453 - DNA, 15 bp, Homo sapiens
aagaagtactgttag

SEQ ID NO: 2021454 - DNA, 15 bp, Homo sapiens
agaagtactgttagc

SEQ ID NO: 2021455 - DNA, 15 bp, Homo sapiens
gaagtactgttagcc

SEQ ID NO: 2021456 - DNA, 15 bp, Homo sapiens
aagtactgttagccc

SEQ ID NO: 2021457 - DNA, 15 bp, Homo sapiens
agtactgttagccca

SEQ ID NO: 2021458 - DNA, 15 bp, Homo sapiens
gtactgttagcccac

SEQ ID NO: 2021459 - DNA, 15 bp, Homo sapiens
tactgttagcccaca

SEQ ID NO: 2021460 - DNA, 15 bp, Homo sapiens
actgttagcccacag

SEQ ID NO: 2021461 - DNA, 15 bp, Homo sapiens
ctgttagcccacaga

SEQ ID NO: 2021462 - DNA, 15 bp, Homo sapiens
tgttagcccacagac

SEQ ID NO: 2021463 - DNA, 15 bp, Homo sapiens
gttagcccacagacg

SEQ ID NO: 2021464 - DNA, 15 bp, Homo sapiens
ttagcccacagacgg

SEQ ID NO: 2021465 - DNA, 15 bp, Homo sapiens
tagcccacagacggg

SEQ ID NO: 2021466 - DNA, 15 bp, Homo sapiens
agcccacagacgggt

SEQ ID NO: 2021467 - DNA, 15 bp, Homo sapiens
gcccacagacgggta

SEQ ID NO: 2021468 - DNA, 15 bp, Homo sapiens
cccacagacgggtat

SEQ ID NO: 2021469 - DNA, 15 bp, Homo sapiens
ccacagacgggtata

SEQ ID NO: 2021470 - DNA, 15 bp, Homo sapiens
cacagacgggtatag

SEQ ID NO: 2021471 - DNA, 15 bp, Homo sapiens
acagacgggtatagt

SEQ ID NO: 2021472 - DNA, 15 bp, Homo sapiens
cagacgggtatagtt

SEQ ID NO: 2021473 - DNA, 15 bp, Homo sapiens
agacgggtatagttt

SEQ ID NO: 2021474 - DNA, 15 bp, Homo sapiens
gacgggtatagtttg

SEQ ID NO: 2021475 - DNA, 15 bp, Homo sapiens
acgggtatagtttgc

SEQ ID NO: 2021476 - DNA, 15 bp, Homo sapiens
cgggtatagtttgct

SEQ ID NO: 2021477 - DNA, 15 bp, Homo sapiens
gggtatagtttgctt

SEQ ID NO: 2021478 - DNA, 15 bp, Homo sapiens
ggtatagtttgcttt

SEQ ID NO: 2021479 - DNA, 15 bp, Homo sapiens
gtatagtttgctttt

SEQ ID NO: 2021480 - DNA, 15 bp, Homo sapiens
tatagtttgcttttg

SEQ ID NO: 2021481 - DNA, 15 bp, Homo sapiens
atagtttgcttttgt

SEQ ID NO: 2021482 - DNA, 15 bp, Homo sapiens
tagtttgcttttgtt

SEQ ID NO: 2021483 - DNA, 15 bp, Homo sapiens
agtttgcttttgttc

SEQ ID NO: 2021484 - DNA, 15 bp, Homo sapiens
gtttgcttttgttcc

SEQ ID NO: 2021485 - DNA, 15 bp, Homo sapiens
tttgcttttgttcca

SEQ ID NO: 2021486 - DNA, 15 bp, Homo sapiens
ttgcttttgttccag

SEQ ID NO: 2021487 - DNA, 15 bp, Homo sapiens
tgcttttgttccagg

SEQ ID NO: 2021488 - DNA, 15 bp, Homo sapiens
gcttttgttccagga

SEQ ID NO: 2021489 - DNA, 15 bp, Homo sapiens
cttttgttccaggag

SEQ ID NO: 2021490 - DNA, 15 bp, Homo sapiens
ttttgttccaggaga

SEQ ID NO: 2021491 - DNA, 15 bp, Homo sapiens
tttgttccaggagac

SEQ ID NO: 2021492 - DNA, 15 bp, Homo sapiens
ttgttccaggagaca

SEQ ID NO: 2021493 - DNA, 15 bp, Homo sapiens
tgttccaggagacaa

SEQ ID NO: 2021494 - DNA, 15 bp, Homo sapiens
gttccaggagacaaa

SEQ ID NO: 2021495 - DNA, 15 bp, Homo sapiens
ttccaggagacaaag

SEQ ID NO: 2021496 - DNA, 15 bp, Homo sapiens
tccaggagacaaaga

SEQ ID NO: 2021497 - DNA, 15 bp, Homo sapiens
ccaggagacaaagaa

SEQ ID NO: 2021498 - DNA, 15 bp, Homo sapiens
caggagacaaagaaa

SEQ ID NO: 2021499 - DNA, 15 bp, Homo sapiens
aggagacaaagaaaa

SEQ ID NO: 2021500 - DNA, 15 bp, Homo sapiens
ggagacaaagaaaaa

SEQ ID NO: 2021501 - DNA, 15 bp, Homo sapiens
gagacaaagaaaaaa

SEQ ID NO: 2021502 - DNA, 15 bp, Homo sapiens
agacaaagaaaaaac

SEQ ID NO: 2021503 - DNA, 15 bp, Homo sapiens
gacaaagaaaaaact

SEQ ID NO: 2021504 - DNA, 15 bp, Homo sapiens
acaaagaaaaaactg

SEQ ID NO: 2021505 - DNA, 15 bp, Homo sapiens
caaagaaaaaactgt

SEQ ID NO: 2021506 - DNA, 15 bp, Homo sapiens
aaagaaaaaactgtt

SEQ ID NO: 2021507 - DNA, 15 bp, Homo sapiens
aagaaaaaactgttg

SEQ ID NO: 2021508 - DNA, 15 bp, Homo sapiens
agaaaaaactgttgt

SEQ ID NO: 2021509 - DNA, 15 bp, Homo sapiens
gaaaaaactgttgtc

SEQ ID NO: 2021510 - DNA, 15 bp, Homo sapiens
aaaaaactgttgtca

SEQ ID NO: 2021511 - DNA, 15 bp, Homo sapiens
aaaaactgttgtcat

SEQ ID NO: 2021512 - DNA, 15 bp, Homo sapiens
aaaactgttgtcatc

SEQ ID NO: 2021513 - DNA, 15 bp, Homo sapiens
aaactgttgtcatca

SEQ ID NO: 2021514 - DNA, 15 bp, Homo sapiens
aactgttgtcatcag

SEQ ID NO: 2021515 - DNA, 15 bp, Homo sapiens
actgttgtcatcaga

SEQ ID NO: 2021516 - DNA, 15 bp, Homo sapiens
ctgttgtcatcagaa

SEQ ID NO: 2021517 - DNA, 15 bp, Homo sapiens
tgttgtcatcagaaa

SEQ ID NO: 2021518 - DNA, 15 bp, Homo sapiens
gttgtcatcagaaag

SEQ ID NO: 2021519 - DNA, 15 bp, Homo sapiens
ttgtcatcagaaagg

SEQ ID NO: 2021520 - DNA, 15 bp, Homo sapiens
tgtcatcagaaaggc

SEQ ID NO: 2021521 - DNA, 15 bp, Homo sapiens
gtcatcagaaaggca

SEQ ID NO: 2021522 - DNA, 15 bp, Homo sapiens
tcatcagaaaggcaa

SEQ ID NO: 2021523 - DNA, 15 bp, Homo sapiens
catcagaaaggcaag

SEQ ID NO: 2021524 - DNA, 15 bp, Homo sapiens
atcagaaaggcaaga

SEQ ID NO: 2021525 - DNA, 15 bp, Homo sapiens
tcagaaaggcaagat

SEQ ID NO: 2021526 - DNA, 15 bp, Homo sapiens
cagaaaggcaagatg

SEQ ID NO: 2021527 - DNA, 15 bp, Homo sapiens
agaaaggcaagatgt

SEQ ID NO: 2021528 - DNA, 15 bp, Homo sapiens
gaaaggcaagatgta

SEQ ID NO: 2021529 - DNA, 15 bp, Homo sapiens
aaaggcaagatgtag

SEQ ID NO: 2021530 - DNA, 15 bp, Homo sapiens
aaggcaagatgtagg

SEQ ID NO: 2021531 - DNA, 15 bp, Homo sapiens
aggcaagatgtaggt

SEQ ID NO: 2021532 - DNA, 15 bp, Homo sapiens
ggcaagatgtaggta

SEQ ID NO: 2021533 - DNA, 15 bp, Homo sapiens
gcaagatgtaggtaa

SEQ ID NO: 2021534 - DNA, 15 bp, Homo sapiens
caagatgtaggtaat

SEQ ID NO: 2021535 - DNA, 15 bp, Homo sapiens
aagatgtaggtaatg

SEQ ID NO: 2021536 - DNA, 15 bp, Homo sapiens
agatgtaggtaatgt

SEQ ID NO: 2021537 - DNA, 15 bp, Homo sapiens
gatgtaggtaatgtc

SEQ ID NO: 2021538 - DNA, 15 bp, Homo sapiens
atgtaggtaatgtcc

SEQ ID NO: 2021539 - DNA, 15 bp, Homo sapiens
tgtaggtaatgtcct

SEQ ID NO: 2021540 - DNA, 15 bp, Homo sapiens
gtaggtaatgtcctg

SEQ ID NO: 2021541 - DNA, 15 bp, Homo sapiens
taggtaatgtcctgt

SEQ ID NO: 2021542 - DNA, 15 bp, Homo sapiens
aggtaatgtcctgtg

SEQ ID NO: 2021543 - DNA, 15 bp, Homo sapiens
ggtaatgtcctgtgt

SEQ ID NO: 2021544 - DNA, 15 bp, Homo sapiens
gtaatgtcctgtgtg

SEQ ID NO: 2021545 - DNA, 15 bp, Homo sapiens
taatgtcctgtgtgt

SEQ ID NO: 2021546 - DNA, 15 bp, Homo sapiens
aatgtcctgtgtgtt

SEQ ID NO: 2021547 - DNA, 15 bp, Homo sapiens
atgtcctgtgtgttc

SEQ ID NO: 2021548 - DNA, 15 bp, Homo sapiens
tgtcctgtgtgttcc

SEQ ID NO: 2021549 - DNA, 15 bp, Homo sapiens
gtcctgtgtgttcca

SEQ ID NO: 2021550 - DNA, 15 bp, Homo sapiens
tcctgtgtgttccat

SEQ ID NO: 2021551 - DNA, 15 bp, Homo sapiens
cctgtgtgttccatg

SEQ ID NO: 2021552 - DNA, 15 bp, Homo sapiens
ctgtgtgttccatgt

SEQ ID NO: 2021553 - DNA, 15 bp, Homo sapiens
tgtgtgttccatgtc

SEQ ID NO: 2021554 - DNA, 15 bp, Homo sapiens
gtgtgttccatgtcc

SEQ ID NO: 2021555 - DNA, 15 bp, Homo sapiens
tgtgttccatgtccg

SEQ ID NO: 2021556 - DNA, 15 bp, Homo sapiens
gtgttccatgtccgt

SEQ ID NO: 2021557 - DNA, 15 bp, Homo sapiens
tgttccatgtccgtg

SEQ ID NO: 2021558 - DNA, 15 bp, Homo sapiens
gttccatgtccgtgg

SEQ ID NO: 2021559 - DNA, 15 bp, Homo sapiens
ttccatgtccgtggg

SEQ ID NO: 2021560 - DNA, 15 bp, Homo sapiens
tccatgtccgtgggc

SEQ ID NO: 2021561 - DNA, 15 bp, Homo sapiens
ccatgtccgtgggca

SEQ ID NO: 2021562 - DNA, 15 bp, Homo sapiens
catgtccgtgggcat

SEQ ID NO: 2021563 - DNA, 15 bp, Homo sapiens
atgtccgtgggcatg

SEQ ID NO: 2021564 - DNA, 15 bp, Homo sapiens
tgtccgtgggcatgc

SEQ ID NO: 2021565 - DNA, 15 bp, Homo sapiens
gtccgtgggcatgct

SEQ ID NO: 2021566 - DNA, 15 bp, Homo sapiens
tccgtgggcatgctt

SEQ ID NO: 2021567 - DNA, 15 bp, Homo sapiens
ccgtgggcatgcttg

SEQ ID NO: 2021568 - DNA, 15 bp, Homo sapiens
cgtgggcatgcttgg

SEQ ID NO: 2021569 - DNA, 15 bp, Homo sapiens
gtgggcatgcttggc

SEQ ID NO: 2021570 - DNA, 15 bp, Homo sapiens
tgggcatgcttggca

SEQ ID NO: 2021571 - DNA, 15 bp, Homo sapiens
gggcatgcttggcaa

SEQ ID NO: 2021572 - DNA, 15 bp, Homo sapiens
ggcatgcttggcaat

SEQ ID NO: 2021573 - DNA, 15 bp, Homo sapiens
gcatgcttggcaatc

SEQ ID NO: 2021574 - DNA, 15 bp, Homo sapiens
catgcttggcaatct

SEQ ID NO: 2021575 - DNA, 15 bp, Homo sapiens
atgcttggcaatctg

SEQ ID NO: 2021576 - DNA, 15 bp, Homo sapiens
tgcttggcaatctgt

SEQ ID NO: 2021577 - DNA, 15 bp, Homo sapiens
gcttggcaatctgtt

SEQ ID NO: 2021578 - DNA, 15 bp, Homo sapiens
cttggcaatctgttg

SEQ ID NO: 2021579 - DNA, 15 bp, Homo sapiens
ttggcaatctgttgg

SEQ ID NO: 2021580 - DNA, 15 bp, Homo sapiens
tggcaatctgttggg

SEQ ID NO: 2021581 - DNA, 15 bp, Homo sapiens
ggcaatctgttggga

SEQ ID NO: 2021582 - DNA, 15 bp, Homo sapiens
gcaatctgttgggat

SEQ ID NO: 2021583 - DNA, 15 bp, Homo sapiens
caatctgttgggata

SEQ ID NO: 2021584 - DNA, 15 bp, Homo sapiens
aatctgttgggatag

SEQ ID NO: 2021585 - DNA, 15 bp, Homo sapiens
atctgttgggatagc

SEQ ID NO: 2021586 - DNA, 15 bp, Homo sapiens
tctgttgggatagca

SEQ ID NO: 2021587 - DNA, 15 bp, Homo sapiens
ctgttgggatagcaa

SEQ ID NO: 2021588 - DNA, 15 bp, Homo sapiens
tgttgggatagcaat

SEQ ID NO: 2021589 - DNA, 15 bp, Homo sapiens
gttgggatagcaata

SEQ ID NO: 2021590 - DNA, 15 bp, Homo sapiens
ttgggatagcaatat

SEQ ID NO: 2021591 - DNA, 15 bp, Homo sapiens
tgggatagcaatata

SEQ ID NO: 2021592 - DNA, 15 bp, Homo sapiens
gggatagcaatataa

SEQ ID NO: 2021593 - DNA, 15 bp, Homo sapiens
ggatagcaatataat

SEQ ID NO: 2021594 - DNA, 15 bp, Homo sapiens
gatagcaatataatt

SEQ ID NO: 2021595 - DNA, 15 bp, Homo sapiens
atagcaatataattt

SEQ ID NO: 2021596 - DNA, 15 bp, Homo sapiens
tagcaatataatttg

SEQ ID NO: 2021597 - DNA, 15 bp, Homo sapiens
agcaatataatttgt

SEQ ID NO: 2021598 - DNA, 15 bp, Homo sapiens
gcaatataatttgtt

SEQ ID NO: 2021599 - DNA, 15 bp, Homo sapiens
caatataatttgtta

SEQ ID NO: 2021600 - DNA, 15 bp, Homo sapiens
aatataatttgttag

SEQ ID NO: 2021601 - DNA, 15 bp, Homo sapiens
atataatttgttagt

SEQ ID NO: 2021602 - DNA, 15 bp, Homo sapiens
tataatttgttagtt

SEQ ID NO: 2021603 - DNA, 15 bp, Homo sapiens
ataatttgttagttt

SEQ ID NO: 2021604 - DNA, 15 bp, Homo sapiens
taatttgttagtttg

SEQ ID NO: 2021605 - DNA, 15 bp, Homo sapiens
aatttgttagtttgt

SEQ ID NO: 2021606 - DNA, 15 bp, Homo sapiens
atttgttagtttgtg

SEQ ID NO: 2021607 - DNA, 15 bp, Homo sapiens
tttgttagtttgtga

SEQ ID NO: 2021608 - DNA, 15 bp, Homo sapiens
ttgttagtttgtgaa

SEQ ID NO: 2021609 - DNA, 15 bp, Homo sapiens
tgttagtttgtgaaa

SEQ ID NO: 2021610 - DNA, 15 bp, Homo sapiens
gttagtttgtgaaag

SEQ ID NO: 2021611 - DNA, 15 bp, Homo sapiens
ttagtttgtgaaaga

SEQ ID NO: 2021612 - DNA, 15 bp, Homo sapiens
tagtttgtgaaagaa

SEQ ID NO: 2021613 - DNA, 15 bp, Homo sapiens
agtttgtgaaagaat

SEQ ID NO: 2021614 - DNA, 15 bp, Homo sapiens
gtttgtgaaagaata

SEQ ID NO: 2021615 - DNA, 15 bp, Homo sapiens
tttgtgaaagaataa

SEQ ID NO: 2021616 - DNA, 15 bp, Homo sapiens
ttgtgaaagaataat

SEQ ID NO: 2021617 - DNA, 15 bp, Homo sapiens
tgtgaaagaataatg

SEQ ID NO: 2021618 - DNA, 15 bp, Homo sapiens
gtgaaagaataatgg

SEQ ID NO: 2021619 - DNA, 15 bp, Homo sapiens
tgaaagaataatgga

SEQ ID NO: 2021620 - DNA, 15 bp, Homo sapiens
gaaagaataatggat

SEQ ID NO: 2021621 - DNA, 15 bp, Homo sapiens
aaagaataatggatc

SEQ ID NO: 2021622 - DNA, 15 bp, Homo sapiens
aagaataatggatcc

SEQ ID NO: 2021623 - DNA, 15 bp, Homo sapiens
agaataatggatcct

SEQ ID NO: 2021624 - DNA, 15 bp, Homo sapiens
gaataatggatccta

SEQ ID NO: 2021625 - DNA, 15 bp, Homo sapiens
aataatggatcctag

SEQ ID NO: 2021626 - DNA, 15 bp, Homo sapiens
ataatggatcctagt

SEQ ID NO: 2021627 - DNA, 15 bp, Homo sapiens
taatggatcctagtt

SEQ ID NO: 2021628 - DNA, 15 bp, Homo sapiens
aatggatcctagttt

SEQ ID NO: 2021629 - DNA, 15 bp, Homo sapiens
atggatcctagtttt

SEQ ID NO: 2021630 - DNA, 15 bp, Homo sapiens
tggatcctagttttg

SEQ ID NO: 2021631 - DNA, 15 bp, Homo sapiens
ggatcctagttttgg

SEQ ID NO: 2021632 - DNA, 15 bp, Homo sapiens
gatcctagttttggt

SEQ ID NO: 2021633 - DNA, 15 bp, Homo sapiens
atcctagttttggta

SEQ ID NO: 2021634 - DNA, 15 bp, Homo sapiens
tcctagttttggtaa

SEQ ID NO: 2021635 - DNA, 15 bp, Homo sapiens
cctagttttggtaat

SEQ ID NO: 2021636 - DNA, 15 bp, Homo sapiens
ctagttttggtaatt

SEQ ID NO: 2021637 - DNA, 15 bp, Homo sapiens
tagttttggtaattg

SEQ ID NO: 2021638 - DNA, 15 bp, Homo sapiens
agttttggtaattgt

SEQ ID NO: 2021639 - DNA, 15 bp, Homo sapiens
gttttggtaattgta

SEQ ID NO: 2021640 - DNA, 15 bp, Homo sapiens
ttttggtaattgtag

SEQ ID NO: 2021641 - DNA, 15 bp, Homo sapiens
tttggtaattgtagt

SEQ ID NO: 2021642 - DNA, 15 bp, Homo sapiens
ttggtaattgtagtt

SEQ ID NO: 2021643 - DNA, 15 bp, Homo sapiens
tggtaattgtagtta

SEQ ID NO: 2021644 - DNA, 15 bp, Homo sapiens
ggtaattgtagttaa

SEQ ID NO: 2021645 - DNA, 15 bp, Homo sapiens
gtaattgtagttaaa

SEQ ID NO: 2021646 - DNA, 15 bp, Homo sapiens
taattgtagttaaaa

SEQ ID NO: 2021647 - DNA, 15 bp, Homo sapiens
aattgtagttaaaag

SEQ ID NO: 2021648 - DNA, 15 bp, Homo sapiens
attgtagttaaaaga

SEQ ID NO: 2021649 - DNA, 15 bp, Homo sapiens
ttgtagttaaaagat

SEQ ID NO: 2021650 - DNA, 15 bp, Homo sapiens
tgtagttaaaagata

SEQ ID NO: 2021651 - DNA, 15 bp, Homo sapiens
gtagttaaaagatag

SEQ ID NO: 2021652 - DNA, 15 bp, Homo sapiens
tagttaaaagatagt

SEQ ID NO: 2021653 - DNA, 15 bp, Homo sapiens
agttaaaagatagtg

SEQ ID NO: 2021654 - DNA, 15 bp, Homo sapiens
gttaaaagatagtgt

SEQ ID NO: 2021655 - DNA, 15 bp, Homo sapiens
ttaaaagatagtgtt

SEQ ID NO: 2021656 - DNA, 15 bp, Homo sapiens
taaaagatagtgttg

SEQ ID NO: 2021657 - DNA, 15 bp, Homo sapiens
aaaagatagtgttga

SEQ ID NO: 2021658 - DNA, 15 bp, Homo sapiens
aaagatagtgttgag

SEQ ID NO: 2021659 - DNA, 15 bp, Homo sapiens
aagatagtgttgaga

SEQ ID NO: 2021660 - DNA, 15 bp, Homo sapiens
agatagtgttgagat

SEQ ID NO: 2021661 - DNA, 15 bp, Homo sapiens
gatagtgttgagatg

SEQ ID NO: 2021662 - DNA, 15 bp, Homo sapiens
atagtgttgagatgt

SEQ ID NO: 2021663 - DNA, 15 bp, Homo sapiens
tagtgttgagatgtt

SEQ ID NO: 2021664 - DNA, 15 bp, Homo sapiens
agtgttgagatgtta

SEQ ID NO: 2021665 - DNA, 15 bp, Homo sapiens
gtgttgagatgttac

SEQ ID NO: 2021666 - DNA, 15 bp, Homo sapiens
tgttgagatgttaca

SEQ ID NO: 2021667 - DNA, 15 bp, Homo sapiens
gttgagatgttacaa

SEQ ID NO: 2021668 - DNA, 15 bp, Homo sapiens
ttgagatgttacaag

SEQ ID NO: 2021669 - DNA, 15 bp, Homo sapiens
tgagatgttacaagt

SEQ ID NO: 2021670 - DNA, 15 bp, Homo sapiens
gagatgttacaagta

SEQ ID NO: 2021671 - DNA, 15 bp, Homo sapiens
agatgttacaagtaa

SEQ ID NO: 2021672 - DNA, 15 bp, Homo sapiens
gatgttacaagtaaa

SEQ ID NO: 2021673 - DNA, 15 bp, Homo sapiens
atgttacaagtaaac

SEQ ID NO: 2021674 - DNA, 15 bp, Homo sapiens
tgttacaagtaaact

SEQ ID NO: 2021675 - DNA, 15 bp, Homo sapiens
gttacaagtaaacta

SEQ ID NO: 2021676 - DNA, 15 bp, Homo sapiens
ttacaagtaaactac

SEQ ID NO: 2021677 - DNA, 15 bp, Homo sapiens
tacaagtaaactaca

SEQ ID NO: 2021678 - DNA, 15 bp, Homo sapiens
acaagtaaactacaa

SEQ ID NO: 2021679 - DNA, 15 bp, Homo sapiens
caagtaaactacaag

SEQ ID NO: 2021680 - DNA, 15 bp, Homo sapiens
aagtaaactacaagc

SEQ ID NO: 2021681 - DNA, 15 bp, Homo sapiens
agtaaactacaagct

SEQ ID NO: 2021682 - DNA, 15 bp, Homo sapiens
gtaaactacaagctt

SEQ ID NO: 2021683 - DNA, 15 bp, Homo sapiens
taaactacaagctta

SEQ ID NO: 2021684 - DNA, 15 bp, Homo sapiens
aaactacaagcttat

SEQ ID NO: 2021685 - DNA, 15 bp, Homo sapiens
aactacaagcttatg

SEQ ID NO: 2021686 - DNA, 15 bp, Homo sapiens
actacaagcttatgc

SEQ ID NO: 2021687 - DNA, 15 bp, Homo sapiens
ctacaagcttatgcc

SEQ ID NO: 2021688 - DNA, 15 bp, Homo sapiens
tacaagcttatgcct

SEQ ID NO: 2021689 - DNA, 15 bp, Homo sapiens
acaagcttatgccta

SEQ ID NO: 2021690 - DNA, 15 bp, Homo sapiens
caagcttatgcctaa

SEQ ID NO: 2021691 - DNA, 15 bp, Homo sapiens
aagcttatgcctaat

SEQ ID NO: 2021692 - DNA, 15 bp, Homo sapiens
agcttatgcctaata

SEQ ID NO: 2021693 - DNA, 15 bp, Homo sapiens
gcttatgcctaatat

SEQ ID NO: 2021694 - DNA, 15 bp, Homo sapiens
cttatgcctaatatt

SEQ ID NO: 2021695 - DNA, 15 bp, Homo sapiens
ttatgcctaatattc

SEQ ID NO: 2021696 - DNA, 15 bp, Homo sapiens
tatgcctaatattcg

SEQ ID NO: 2021697 - DNA, 15 bp, Homo sapiens
atgcctaatattcgc

SEQ ID NO: 2021698 - DNA, 15 bp, Homo sapiens
tgcctaatattcgct

SEQ ID NO: 2021699 - DNA, 15 bp, Homo sapiens
gcctaatattcgcta

SEQ ID NO: 2021700 - DNA, 15 bp, Homo sapiens
cctaatattcgctac

SEQ ID NO: 2021701 - DNA, 15 bp, Homo sapiens
ctaatattcgctacc

SEQ ID NO: 2021702 - DNA, 15 bp, Homo sapiens
taatattcgctaccc

SEQ ID NO: 2021703 - DNA, 15 bp, Homo sapiens
aatattcgctaccct

SEQ ID NO: 2021704 - DNA, 15 bp, Homo sapiens
atattcgctaccctg

SEQ ID NO: 2021705 - DNA, 15 bp, Homo sapiens
tattcgctaccctga

SEQ ID NO: 2021706 - DNA, 15 bp, Homo sapiens
attcgctaccctgaa

SEQ ID NO: 2021707 - DNA, 15 bp, Homo sapiens
ttcgctaccctgaat

SEQ ID NO: 2021708 - DNA, 15 bp, Homo sapiens
tcgctaccctgaatt

SEQ ID NO: 2021709 - DNA, 15 bp, Homo sapiens
cgctaccctgaattc

SEQ ID NO: 2021710 - DNA, 15 bp, Homo sapiens
gctaccctgaattcc

SEQ ID NO: 2021711 - DNA, 15 bp, Homo sapiens
ctaccctgaattcct

SEQ ID NO: 2021712 - DNA, 15 bp, Homo sapiens
taccctgaattcctt

SEQ ID NO: 2021713 - DNA, 15 bp, Homo sapiens
accctgaattccttc

SEQ ID NO: 2021714 - DNA, 15 bp, Homo sapiens
ccctgaattccttct

SEQ ID NO: 2021715 - DNA, 15 bp, Homo sapiens
cctgaattccttctc

SEQ ID NO: 2021716 - DNA, 15 bp, Homo sapiens
ctgaattccttctca

SEQ ID NO: 2021717 - DNA, 15 bp, Homo sapiens
tgaattccttctcaa

SEQ ID NO: 2021718 - DNA, 15 bp, Homo sapiens
gaattccttctcaac

SEQ ID NO: 2021719 - DNA, 15 bp, Homo sapiens
aattccttctcaact

SEQ ID NO: 2021720 - DNA, 15 bp, Homo sapiens
attccttctcaacta

SEQ ID NO: 2021721 - DNA, 15 bp, Homo sapiens
ttccttctcaactaa

SEQ ID NO: 2021722 - DNA, 15 bp, Homo sapiens
tccttctcaactaaa

SEQ ID NO: 2021723 - DNA, 15 bp, Homo sapiens
ccttctcaactaaat

SEQ ID NO: 2021724 - DNA, 15 bp, Homo sapiens
cttctcaactaaatt

SEQ ID NO: 2021725 - DNA, 15 bp, Homo sapiens
ttctcaactaaattt

SEQ ID NO: 2021726 - DNA, 15 bp, Homo sapiens
tctcaactaaatttc

SEQ ID NO: 2021727 - DNA, 15 bp, Homo sapiens
ctcaactaaatttct

SEQ ID NO: 2021728 - DNA, 15 bp, Homo sapiens
tcaactaaatttctt

SEQ ID NO: 2021729 - DNA, 15 bp, Homo sapiens
actaaatttcttttc

SEQ ID NO: 2021730 - DNA, 15 bp, Homo sapiens
ctaaatttcttttct

SEQ ID NO: 2021731 - DNA, 15 bp, Homo sapiens
taaatttcttttcta

SEQ ID NO: 2021732 - DNA, 15 bp, Homo sapiens
aaatttcttttctat

SEQ ID NO: 2021733 - DNA, 15 bp, Homo sapiens
aatttcttttctatt

SEQ ID NO: 2021734 - DNA, 15 bp, Homo sapiens
atttcttttctattc

SEQ ID NO: 2021735 - DNA, 15 bp, Homo sapiens
tttcttttctattca

SEQ ID NO: 2021736 - DNA, 15 bp, Homo sapiens
ttcttttctattcag

SEQ ID NO: 2021737 - DNA, 15 bp, Homo sapiens
tcttttctattcagc

SEQ ID NO: 2021738 - DNA, 15 bp, Homo sapiens
cttttctattcagct

SEQ ID NO: 2021739 - DNA, 15 bp, Homo sapiens
ttttctattcagcta

SEQ ID NO: 2021740 - DNA, 15 bp, Homo sapiens
tttctattcagctat

SEQ ID NO: 2021741 - DNA, 15 bp, Homo sapiens
ttctattcagctatg

SEQ ID NO: 2021742 - DNA, 15 bp, Homo sapiens
tctattcagctatgt

SEQ ID NO: 2021743 - DNA, 15 bp, Homo sapiens
ctattcagctatgta

SEQ ID NO: 2021744 - DNA, 15 bp, Homo sapiens
tattcagctatgtat

SEQ ID NO: 2021745 - DNA, 15 bp, Homo sapiens
attcagctatgtatg

SEQ ID NO: 2021746 - DNA, 15 bp, Homo sapiens
ttcagctatgtatga

SEQ ID NO: 2021747 - DNA, 15 bp, Homo sapiens
tcagctatgtatgaa

SEQ ID NO: 2021748 - DNA, 15 bp, Homo sapiens
cagctatgtatgaag

SEQ ID NO: 2021749 - DNA, 15 bp, Homo sapiens
agctatgtatgaaga

SEQ ID NO: 2021750 - DNA, 15 bp, Homo sapiens
gctatgtatgaagaa

SEQ ID NO: 2021751 - DNA, 15 bp, Homo sapiens
ctatgtatgaagaag

SEQ ID NO: 2021752 - DNA, 15 bp, Homo sapiens
tatgtatgaagaagc

SEQ ID NO: 2021753 - DNA, 15 bp, Homo sapiens
atgtatgaagaagca

SEQ ID NO: 2021754 - DNA, 15 bp, Homo sapiens
tgtatgaagaagcat

SEQ ID NO: 2021755 - DNA, 15 bp, Homo sapiens
gtatgaagaagcatt

SEQ ID NO: 2021756 - DNA, 15 bp, Homo sapiens
tatgaagaagcattt

SEQ ID NO: 2021757 - DNA, 15 bp, Homo sapiens
atgaagaagcatttt

SEQ ID NO: 2021758 - DNA, 15 bp, Homo sapiens
tgaagaagcatttta

SEQ ID NO: 2021759 - DNA, 15 bp, Homo sapiens
gaagaagcattttaa

SEQ ID NO: 2021760 - DNA, 15 bp, Homo sapiens
aagaagcattttaat

SEQ ID NO: 2021761 - DNA, 15 bp, Homo sapiens
agaagcattttaatt

SEQ ID NO: 2021762 - DNA, 15 bp, Homo sapiens
gaagcattttaattt

SEQ ID NO: 2021763 - DNA, 15 bp, Homo sapiens
aagcattttaatttc

SEQ ID NO: 2021764 - DNA, 15 bp, Homo sapiens
agcattttaatttct

SEQ ID NO: 2021765 - DNA, 15 bp, Homo sapiens
gcattttaatttcta

SEQ ID NO: 2021766 - DNA, 15 bp, Homo sapiens
cattttaatttctat

SEQ ID NO: 2021767 - DNA, 15 bp, Homo sapiens
attttaatttctatt

SEQ ID NO: 2021768 - DNA, 15 bp, Homo sapiens
ttttaatttctatta

SEQ ID NO: 2021769 - DNA, 15 bp, Homo sapiens
tttaatttctattaa

SEQ ID NO: 2021770 - DNA, 15 bp, Homo sapiens
ttaatttctattaac

SEQ ID NO: 2021771 - DNA, 15 bp, Homo sapiens
taatttctattaaca

SEQ ID NO: 2021772 - DNA, 15 bp, Homo sapiens
aatttctattaacac

SEQ ID NO: 2021773 - DNA, 15 bp, Homo sapiens
atttctattaacact

SEQ ID NO: 2021774 - DNA, 15 bp, Homo sapiens
tttctattaacactt

SEQ ID NO: 2021775 - DNA, 15 bp, Homo sapiens
ttctattaacacttt

SEQ ID NO: 2021776 - DNA, 15 bp, Homo sapiens
tctattaacactttt

SEQ ID NO: 2021777 - DNA, 15 bp, Homo sapiens
ctattaacactttta

SEQ ID NO: 2021778 - DNA, 15 bp, Homo sapiens
tattaacacttttag

SEQ ID NO: 2021779 - DNA, 15 bp, Homo sapiens
attaacacttttaga

SEQ ID NO: 2021780 - DNA, 15 bp, Homo sapiens
ttaacacttttagat

SEQ ID NO: 2021781 - DNA, 15 bp, Homo sapiens
taacacttttagatg

SEQ ID NO: 2021782 - DNA, 15 bp, Homo sapiens
aacacttttagatgc

SEQ ID NO: 2021783 - DNA, 15 bp, Homo sapiens
acacttttagatgct

SEQ ID NO: 2021784 - DNA, 15 bp, Homo sapiens
cacttttagatgcta

SEQ ID NO: 2021785 - DNA, 15 bp, Homo sapiens
acttttagatgctag

SEQ ID NO: 2021786 - DNA, 15 bp, Homo sapiens
cttttagatgctaga

SEQ ID NO: 2021787 - DNA, 15 bp, Homo sapiens
ttttagatgctagaa

SEQ ID NO: 2021788 - DNA, 15 bp, Homo sapiens
tttagatgctagaag

SEQ ID NO: 2021789 - DNA, 15 bp, Homo sapiens
ttagatgctagaagt

SEQ ID NO: 2021790 - DNA, 15 bp, Homo sapiens
tagatgctagaagtt

SEQ ID NO: 2021791 - DNA, 15 bp, Homo sapiens
agatgctagaagtta

SEQ ID NO: 2021792 - DNA, 15 bp, Homo sapiens
gatgctagaagttag

SEQ ID NO: 2021793 - DNA, 15 bp, Homo sapiens
atgctagaagttagc

SEQ ID NO: 2021794 - DNA, 15 bp, Homo sapiens
tgctagaagttagca

SEQ ID NO: 2021795 - DNA, 15 bp, Homo sapiens
gctagaagttagcat

SEQ ID NO: 2021796 - DNA, 15 bp, Homo sapiens
ctagaagttagcatt

SEQ ID NO: 2021797 - DNA, 15 bp, Homo sapiens
tagaagttagcatta

SEQ ID NO: 2021798 - DNA, 15 bp, Homo sapiens
agaagttagcattac

SEQ ID NO: 2021799 - DNA, 15 bp, Homo sapiens
gaagttagcattaca

SEQ ID NO: 2021800 - DNA, 15 bp, Homo sapiens
aagttagcattacaa

SEQ ID NO: 2021801 - DNA, 15 bp, Homo sapiens
agttagcattacaaa

SEQ ID NO: 2021802 - DNA, 15 bp, Homo sapiens
gttagcattacaaat

SEQ ID NO: 2021803 - DNA, 15 bp, Homo sapiens
ttagcattacaaata

SEQ ID NO: 2021804 - DNA, 15 bp, Homo sapiens
tagcattacaaataa

SEQ ID NO: 2021805 - DNA, 15 bp, Homo sapiens
agcattacaaataaa

SEQ ID NO: 2021806 - DNA, 15 bp, Homo sapiens
gcattacaaataaat

SEQ ID NO: 2021807 - DNA, 15 bp, Homo sapiens
cattacaaataaata

SEQ ID NO: 2021808 - DNA, 15 bp, Homo sapiens
attacaaataaatat

SEQ ID NO: 2021809 - DNA, 15 bp, Homo sapiens
ttacaaataaatatt

SEQ ID NO: 2021810 - DNA, 15 bp, Homo sapiens
tacaaataaatatta

SEQ ID NO: 2021811 - DNA, 15 bp, Homo sapiens
acaaataaatattaa

SEQ ID NO: 2021812 - DNA, 15 bp, Homo sapiens
caaataaatattaat

SEQ ID NO: 2021813 - DNA, 15 bp, Homo sapiens
aaataaatattaatc

SEQ ID NO: 2021814 - DNA, 15 bp, Homo sapiens
aataaatattaatca

SEQ ID NO: 2021815 - DNA, 15 bp, Homo sapiens
ataaatattaatcat

SEQ ID NO: 2021816 - DNA, 15 bp, Homo sapiens
taaatattaatcatt

SEQ ID NO: 2021817 - DNA, 15 bp, Homo sapiens
aaatattaatcattt

SEQ ID NO: 2021818 - DNA, 15 bp, Homo sapiens
aatattaatcatttt

SEQ ID NO: 2021819 - DNA, 15 bp, Homo sapiens
atattaatcatttta

SEQ ID NO: 2021820 - DNA, 15 bp, Homo sapiens
tattaatcattttaa

SEQ ID NO: 2021821 - DNA, 15 bp, Homo sapiens
attaatcattttaag

SEQ ID NO: 2021822 - DNA, 15 bp, Homo sapiens
ttaatcattttaagt

SEQ ID NO: 2021823 - DNA, 15 bp, Homo sapiens
taatcattttaagtg

SEQ ID NO: 2021824 - DNA, 15 bp, Homo sapiens
aatcattttaagtgg

SEQ ID NO: 2021825 - DNA, 15 bp, Homo sapiens
atcattttaagtgga

SEQ ID NO: 2021826 - DNA, 15 bp, Homo sapiens
tcattttaagtggac

SEQ ID NO: 2021827 - DNA, 15 bp, Homo sapiens
cattttaagtggact

SEQ ID NO: 2021828 - DNA, 15 bp, Homo sapiens
attttaagtggacta

SEQ ID NO: 2021829 - DNA, 15 bp, Homo sapiens
ttttaagtggactat

SEQ ID NO: 2021830 - DNA, 15 bp, Homo sapiens
tttaagtggactatc

SEQ ID NO: 2021831 - DNA, 15 bp, Homo sapiens
ttaagtggactatca

SEQ ID NO: 2021832 - DNA, 15 bp, Homo sapiens
taagtggactatcat

SEQ ID NO: 2021833 - DNA, 15 bp, Homo sapiens
aagtggactatcatg

SEQ ID NO: 2021834 - DNA, 15 bp, Homo sapiens
agtggactatcatgg

SEQ ID NO: 2021835 - DNA, 15 bp, Homo sapiens
gtggactatcatggc

SEQ ID NO: 2021836 - DNA, 15 bp, Homo sapiens
tggactatcatggct

SEQ ID NO: 2021837 - DNA, 15 bp, Homo sapiens
ggactatcatggctt

SEQ ID NO: 2021838 - DNA, 15 bp, Homo sapiens
gactatcatggcttt

SEQ ID NO: 2021839 - DNA, 15 bp, Homo sapiens
actatcatggcttta

SEQ ID NO: 2021840 - DNA, 15 bp, Homo sapiens
ctatcatggctttat

SEQ ID NO: 2021841 - DNA, 15 bp, Homo sapiens
tatcatggctttata

SEQ ID NO: 2021842 - DNA, 15 bp, Homo sapiens
atcatggctttatat

SEQ ID NO: 2021843 - DNA, 15 bp, Homo sapiens
tcatggctttatata

SEQ ID NO: 2021844 - DNA, 15 bp, Homo sapiens
catggctttatatag

SEQ ID NO: 2021845 - DNA, 15 bp, Homo sapiens
atggctttatatagt

SEQ ID NO: 2021846 - DNA, 15 bp, Homo sapiens
tggctttatatagtt

SEQ ID NO: 2021847 - DNA, 15 bp, Homo sapiens
ggctttatatagttt

SEQ ID NO: 2021848 - DNA, 15 bp, Homo sapiens
gctttatatagtttt

SEQ ID NO: 2021849 - DNA, 15 bp, Homo sapiens
ctttatatagttttc

SEQ ID NO: 2021850 - DNA, 15 bp, Homo sapiens
tttatatagttttct

SEQ ID NO: 2021851 - DNA, 15 bp, Homo sapiens
ttatatagttttctt

SEQ ID NO: 2021852 - DNA, 15 bp, Homo sapiens
tatatagttttcttc

SEQ ID NO: 2021853 - DNA, 15 bp, Homo sapiens
atatagttttcttcc

SEQ ID NO: 2021854 - DNA, 15 bp, Homo sapiens
tatagttttcttcct

SEQ ID NO: 2021855 - DNA, 15 bp, Homo sapiens
atagttttcttcctt

SEQ ID NO: 2021856 - DNA, 15 bp, Homo sapiens
tagttttcttccttt

SEQ ID NO: 2021857 - DNA, 15 bp, Homo sapiens
agttttcttcctttg

SEQ ID NO: 2021858 - DNA, 15 bp, Homo sapiens
gttttcttcctttga

SEQ ID NO: 2021859 - DNA, 15 bp, Homo sapiens
ttttcttcctttgaa

SEQ ID NO: 2021860 - DNA, 15 bp, Homo sapiens
tttcttcctttgaag

SEQ ID NO: 2021861 - DNA, 15 bp, Homo sapiens
ttcttcctttgaagc

SEQ ID NO: 2021862 - DNA, 15 bp, Homo sapiens
tcttcctttgaagcg

SEQ ID NO: 2021863 - DNA, 15 bp, Homo sapiens
cttcctttgaagcgt

SEQ ID NO: 2021864 - DNA, 15 bp, Homo sapiens
ttcctttgaagcgtg

SEQ ID NO: 2021865 - DNA, 15 bp, Homo sapiens
tcctttgaagcgtgc

SEQ ID NO: 2021866 - DNA, 15 bp, Homo sapiens
cctttgaagcgtgct

SEQ ID NO: 2021867 - DNA, 15 bp, Homo sapiens
ctttgaagcgtgcta

SEQ ID NO: 2021868 - DNA, 15 bp, Homo sapiens
tttgaagcgtgctag

SEQ ID NO: 2021869 - DNA, 15 bp, Homo sapiens
ttgaagcgtgctaga

SEQ ID NO: 2021870 - DNA, 15 bp, Homo sapiens
tgaagcgtgctagac

SEQ ID NO: 2021871 - DNA, 15 bp, Homo sapiens
gaagcgtgctagact

SEQ ID NO: 2021872 - DNA, 15 bp, Homo sapiens
aagcgtgctagactt

SEQ ID NO: 2021873 - DNA, 15 bp, Homo sapiens
agcgtgctagacttc

SEQ ID NO: 2021874 - DNA, 15 bp, Homo sapiens
gcgtgctagacttct

SEQ ID NO: 2021875 - DNA, 15 bp, Homo sapiens
cgtgctagacttctg

SEQ ID NO: 2021876 - DNA, 15 bp, Homo sapiens
gtgctagacttctgc

SEQ ID NO: 2021877 - DNA, 15 bp, Homo sapiens
tgctagacttctgct

SEQ ID NO: 2021878 - DNA, 15 bp, Homo sapiens
gctagacttctgctt

SEQ ID NO: 2021879 - DNA, 15 bp, Homo sapiens
ctagacttctgcttt

SEQ ID NO: 2021880 - DNA, 15 bp, Homo sapiens
tagacttctgctttg

SEQ ID NO: 2021881 - DNA, 15 bp, Homo sapiens
agacttctgctttga

SEQ ID NO: 2021882 - DNA, 15 bp, Homo sapiens
gacttctgctttgag

SEQ ID NO: 2021883 - DNA, 15 bp, Homo sapiens
acttctgctttgagt

SEQ ID NO: 2021884 - DNA, 15 bp, Homo sapiens
cttctgctttgagtc

SEQ ID NO: 2021885 - DNA, 15 bp, Homo sapiens
ttctgctttgagtca

SEQ ID NO: 2021886 - DNA, 15 bp, Homo sapiens
tctgctttgagtcag

SEQ ID NO: 2021887 - DNA, 15 bp, Homo sapiens
ctgctttgagtcagt

SEQ ID NO: 2021888 - DNA, 15 bp, Homo sapiens
tgctttgagtcagtt

SEQ ID NO: 2021889 - DNA, 15 bp, Homo sapiens
gctttgagtcagtta

SEQ ID NO: 2021890 - DNA, 15 bp, Homo sapiens
ctttgagtcagttag

SEQ ID NO: 2021891 - DNA, 15 bp, Homo sapiens
tttgagtcagttagt

SEQ ID NO: 2021892 - DNA, 15 bp, Homo sapiens
ttgagtcagttagtt

SEQ ID NO: 2021893 - DNA, 15 bp, Homo sapiens
tgagtcagttagttc

SEQ ID NO: 2021894 - DNA, 15 bp, Homo sapiens
gagtcagttagttct

SEQ ID NO: 2021895 - DNA, 15 bp, Homo sapiens
agtcagttagttctg

SEQ ID NO: 2021896 - DNA, 15 bp, Homo sapiens
gtcagttagttctgc

SEQ ID NO: 2021897 - DNA, 15 bp, Homo sapiens
tcagttagttctgct

SEQ ID NO: 2021898 - DNA, 15 bp, Homo sapiens
cagttagttctgctt

SEQ ID NO: 2021899 - DNA, 15 bp, Homo sapiens
agttagttctgcttt

SEQ ID NO: 2021900 - DNA, 15 bp, Homo sapiens
gttagttctgctttt

SEQ ID NO: 2021901 - DNA, 15 bp, Homo sapiens
ttagttctgctttta

SEQ ID NO: 2021902 - DNA, 15 bp, Homo sapiens
tagttctgcttttac

SEQ ID NO: 2021903 - DNA, 15 bp, Homo sapiens
agttctgcttttact

SEQ ID NO: 2021904 - DNA, 15 bp, Homo sapiens
gttctgcttttactt

SEQ ID NO: 2021905 - DNA, 15 bp, Homo sapiens
ttctgcttttacttt

SEQ ID NO: 2021906 - DNA, 15 bp, Homo sapiens
tctgcttttactttt

SEQ ID NO: 2021907 - DNA, 15 bp, Homo sapiens
ctgcttttacttttc

SEQ ID NO: 2021908 - DNA, 15 bp, Homo sapiens
tgcttttacttttct

SEQ ID NO: 2021909 - DNA, 15 bp, Homo sapiens
gcttttacttttctg

SEQ ID NO: 2021910 - DNA, 15 bp, Homo sapiens
cttttacttttctga

SEQ ID NO: 2021911 - DNA, 15 bp, Homo sapiens
ttacttttctgattc

SEQ ID NO: 2021912 - DNA, 15 bp, Homo sapiens
tacttttctgattcc

SEQ ID NO: 2021913 - DNA, 15 bp, Homo sapiens
acttttctgattcct

SEQ ID NO: 2021914 - DNA, 15 bp, Homo sapiens
cttttctgattcctt

SEQ ID NO: 2021915 - DNA, 15 bp, Homo sapiens
ttttctgattccttc

SEQ ID NO: 2021916 - DNA, 15 bp, Homo sapiens
tttctgattccttct

SEQ ID NO: 2021917 - DNA, 15 bp, Homo sapiens
ttctgattccttctt

SEQ ID NO: 2021918 - DNA, 15 bp, Homo sapiens
tctgattccttcttt

SEQ ID NO: 2021919 - DNA, 15 bp, Homo sapiens
ctgattccttcttta

SEQ ID NO: 2021920 - DNA, 15 bp, Homo sapiens
tgattccttctttaa

SEQ ID NO: 2021921 - DNA, 15 bp, Homo sapiens
gattccttctttaaa

SEQ ID NO: 2021922 - DNA, 15 bp, Homo sapiens
attccttctttaaaa

SEQ ID NO: 2021923 - DNA, 15 bp, Homo sapiens
ttccttctttaaaaa

SEQ ID NO: 2021924 - DNA, 15 bp, Homo sapiens
tccttctttaaaaaa

SEQ ID NO: 2021925 - DNA, 15 bp, Homo sapiens
ccttctttaaaaaaa

SEQ ID NO: 2021926 - DNA, 15 bp, Homo sapiens
cttctttaaaaaaaa

SEQ ID NO: 2021927 - DNA, 15 bp, Homo sapiens
ttctttaaaaaaaaa

SEQ ID NO: 2021928 - DNA, 15 bp, Homo sapiens
aaaaaaaaaattaag

SEQ ID NO: 2021929 - DNA, 15 bp, Homo sapiens
aaaaaaaaattaagg

SEQ ID NO: 2021930 - DNA, 15 bp, Homo sapiens
aaaaaaaattaagga

SEQ ID NO: 2021931 - DNA, 15 bp, Homo sapiens
aaaaaaattaaggat

SEQ ID NO: 2021932 - DNA, 15 bp, Homo sapiens
aaaaaattaaggatc

SEQ ID NO: 2021933 - DNA, 15 bp, Homo sapiens
aaaaattaaggatca

SEQ ID NO: 2021934 - DNA, 15 bp, Homo sapiens
aaaattaaggatcat

SEQ ID NO: 2021935 - DNA, 15 bp, Homo sapiens
aaattaaggatcatt

SEQ ID NO: 2021936 - DNA, 15 bp, Homo sapiens
aattaaggatcattc

SEQ ID NO: 2021937 - DNA, 15 bp, Homo sapiens
attaaggatcattct

SEQ ID NO: 2021938 - DNA, 15 bp, Homo sapiens
ttaaggatcattctt

SEQ ID NO: 2021939 - DNA, 15 bp, Homo sapiens
taaggatcattctta

SEQ ID NO: 2021940 - DNA, 15 bp, Homo sapiens
aaggatcattcttac

SEQ ID NO: 2021941 - DNA, 15 bp, Homo sapiens
aggatcattcttaca

SEQ ID NO: 2021942 - DNA, 15 bp, Homo sapiens
ggatcattcttacag

SEQ ID NO: 2021943 - DNA, 15 bp, Homo sapiens
gatcattcttacaga

SEQ ID NO: 2021944 - DNA, 15 bp, Homo sapiens
atcattcttacagaa

SEQ ID NO: 2021945 - DNA, 15 bp, Homo sapiens
tcattcttacagaaa

SEQ ID NO: 2021946 - DNA, 15 bp, Homo sapiens
cattcttacagaaac

SEQ ID NO: 2021947 - DNA, 15 bp, Homo sapiens
attcttacagaaact

SEQ ID NO: 2021948 - DNA, 15 bp, Homo sapiens
ttcttacagaaacta

SEQ ID NO: 2021949 - DNA, 15 bp, Homo sapiens
tcttacagaaactac

SEQ ID NO: 2021950 - DNA, 15 bp, Homo sapiens
cttacagaaactacc

SEQ ID NO: 2021951 - DNA, 15 bp, Homo sapiens
ttacagaaactaccc

SEQ ID NO: 2021952 - DNA, 15 bp, Homo sapiens
tacagaaactaccca

SEQ ID NO: 2021953 - DNA, 15 bp, Homo sapiens
acagaaactacccac

SEQ ID NO: 2021954 - DNA, 15 bp, Homo sapiens
cagaaactacccacc

SEQ ID NO: 2021955 - DNA, 15 bp, Homo sapiens
agaaactacccaccc

SEQ ID NO: 2021956 - DNA, 15 bp, Homo sapiens
gaaactacccaccct

SEQ ID NO: 2021957 - DNA, 15 bp, Homo sapiens
aaactacccaccctc

SEQ ID NO: 2021958 - DNA, 15 bp, Homo sapiens
aactacccaccctct

SEQ ID NO: 2021959 - DNA, 15 bp, Homo sapiens
actacccaccctcta

SEQ ID NO: 2021960 - DNA, 15 bp, Homo sapiens
ctacccaccctctaa

SEQ ID NO: 2021961 - DNA, 15 bp, Homo sapiens
tacccaccctctaac

SEQ ID NO: 2021962 - DNA, 15 bp, Homo sapiens
acccaccctctaacc

SEQ ID NO: 2021963 - DNA, 15 bp, Homo sapiens
cccaccctctaacct

SEQ ID NO: 2021964 - DNA, 15 bp, Homo sapiens
ccaccctctaacctg

SEQ ID NO: 2021965 - DNA, 15 bp, Homo sapiens
caccctctaacctgt

SEQ ID NO: 2021966 - DNA, 15 bp, Homo sapiens
accctctaacctgtc

SEQ ID NO: 2021967 - DNA, 15 bp, Homo sapiens
ccctctaacctgtca

SEQ ID NO: 2021968 - DNA, 15 bp, Homo sapiens
cctctaacctgtcac

SEQ ID NO: 2021969 - DNA, 15 bp, Homo sapiens
ctctaacctgtcacc

SEQ ID NO: 2021970 - DNA, 15 bp, Homo sapiens
tctaacctgtcacca

SEQ ID NO: 2021971 - DNA, 15 bp, Homo sapiens
ctaacctgtcaccaa

SEQ ID NO: 2021972 - DNA, 15 bp, Homo sapiens
taacctgtcaccaat

SEQ ID NO: 2021973 - DNA, 15 bp, Homo sapiens
aacctgtcaccaatc

SEQ ID NO: 2021974 - DNA, 15 bp, Homo sapiens
acctgtcaccaatct

SEQ ID NO: 2021975 - DNA, 15 bp, Homo sapiens
cctgtcaccaatctt

SEQ ID NO: 2021976 - DNA, 15 bp, Homo sapiens
ctgtcaccaatcttt

SEQ ID NO: 2021977 - DNA, 15 bp, Homo sapiens
tgtcaccaatcttta

SEQ ID NO: 2021978 - DNA, 15 bp, Homo sapiens
gtcaccaatctttac

SEQ ID NO: 2021979 - DNA, 15 bp, Homo sapiens
tcaccaatctttaca

SEQ ID NO: 2021980 - DNA, 15 bp, Homo sapiens
caccaatctttacag

SEQ ID NO: 2021981 - DNA, 15 bp, Homo sapiens
accaatctttacaga

SEQ ID NO: 2021982 - DNA, 15 bp, Homo sapiens
ccaatctttacagaa

SEQ ID NO: 2021983 - DNA, 15 bp, Homo sapiens
caatctttacagaag

SEQ ID NO: 2021984 - DNA, 15 bp, Homo sapiens
aatctttacagaaga

SEQ ID NO: 2021985 - DNA, 15 bp, Homo sapiens
atctttacagaagaa

SEQ ID NO: 2021986 - DNA, 15 bp, Homo sapiens
tctttacagaagaaa

SEQ ID NO: 2021987 - DNA, 15 bp, Homo sapiens
ctttacagaagaaat

SEQ ID NO: 2021988 - DNA, 15 bp, Homo sapiens
tttacagaagaaatg

SEQ ID NO: 2021989 - DNA, 15 bp, Homo sapiens
ttacagaagaaatgt

SEQ ID NO: 2021990 - DNA, 15 bp, Homo sapiens
tacagaagaaatgtg

SEQ ID NO: 2021991 - DNA, 15 bp, Homo sapiens
acagaagaaatgtgg

SEQ ID NO: 2021992 - DNA, 15 bp, Homo sapiens
cagaagaaatgtggc

SEQ ID NO: 2021993 - DNA, 15 bp, Homo sapiens
agaagaaatgtggcc

SEQ ID NO: 2021994 - DNA, 15 bp, Homo sapiens
gaagaaatgtggcct

SEQ ID NO: 2021995 - DNA, 15 bp, Homo sapiens
aagaaatgtggcctt

SEQ ID NO: 2021996 - DNA, 15 bp, Homo sapiens
agaaatgtggccttg

SEQ ID NO: 2021997 - DNA, 15 bp, Homo sapiens
gaaatgtggccttga

SEQ ID NO: 2021998 - DNA, 15 bp, Homo sapiens
aaatgtggccttgag

SEQ ID NO: 2021999 - DNA, 15 bp, Homo sapiens
aatgtggccttgagc

SEQ ID NO: 2022000 - DNA, 15 bp, Homo sapiens
atgtggccttgagct

SEQ ID NO: 2022001 - DNA, 15 bp, Homo sapiens
tgtggccttgagctt

SEQ ID NO: 2022002 - DNA, 15 bp, Homo sapiens
gtggccttgagcttc

SEQ ID NO: 2022003 - DNA, 15 bp, Homo sapiens
tggccttgagcttct

SEQ ID NO: 2022004 - DNA, 15 bp, Homo sapiens
ggccttgagcttctt

SEQ ID NO: 2022005 - DNA, 15 bp, Homo sapiens
gccttgagcttcttg

SEQ ID NO: 2022006 - DNA, 15 bp, Homo sapiens
ccttgagcttcttgc

SEQ ID NO: 2022007 - DNA, 15 bp, Homo sapiens
cttgagcttcttgct

SEQ ID NO: 2022008 - DNA, 15 bp, Homo sapiens
ttgagcttcttgctt

SEQ ID NO: 2022009 - DNA, 15 bp, Homo sapiens
tgagcttcttgcttc

SEQ ID NO: 2022010 - DNA, 15 bp, Homo sapiens
gagcttcttgcttca

SEQ ID NO: 2022011 - DNA, 15 bp, Homo sapiens
agcttcttgcttcat

SEQ ID NO: 2022012 - DNA, 15 bp, Homo sapiens
gcttcttgcttcatg

SEQ ID NO: 2022013 - DNA, 15 bp, Homo sapiens
cttcttgcttcatgt

SEQ ID NO: 2022014 - DNA, 15 bp, Homo sapiens
ttcttgcttcatgta

SEQ ID NO: 2022015 - DNA, 15 bp, Homo sapiens
tcttgcttcatgtat

SEQ ID NO: 2022016 - DNA, 15 bp, Homo sapiens
cttgcttcatgtatg

SEQ ID NO: 2022017 - DNA, 15 bp, Homo sapiens
ttgcttcatgtatga

SEQ ID NO: 2022018 - DNA, 15 bp, Homo sapiens
tgcttcatgtatgaa

SEQ ID NO: 2022019 - DNA, 15 bp, Homo sapiens
gcttcatgtatgaaa

SEQ ID NO: 2022020 - DNA, 15 bp, Homo sapiens
cttcatgtatgaaat

SEQ ID NO: 2022021 - DNA, 15 bp, Homo sapiens
ttcatgtatgaaata

SEQ ID NO: 2022022 - DNA, 15 bp, Homo sapiens
tcatgtatgaaataa

SEQ ID NO: 2022023 - DNA, 15 bp, Homo sapiens
catgtatgaaataaa

SEQ ID NO: 2022024 - DNA, 15 bp, Homo sapiens
atgtatgaaataaat

SEQ ID NO: 2022025 - DNA, 15 bp, Homo sapiens
tgtatgaaataaatg

SEQ ID NO: 2022026 - DNA, 15 bp, Homo sapiens
gtatgaaataaatgc

SEQ ID NO: 2022027 - DNA, 15 bp, Homo sapiens
tatgaaataaatgca

SEQ ID NO: 2022028 - DNA, 15 bp, Homo sapiens
atgaaataaatgcaa

SEQ ID NO: 2022029 - DNA, 15 bp, Homo sapiens
tgaaataaatgcaaa

SEQ ID NO: 2022030 - DNA, 15 bp, Homo sapiens
gaaataaatgcaaat

SEQ ID NO: 2022031 - DNA, 15 bp, Homo sapiens
aataaatgcaaattt

SEQ ID NO: 2022032 - DNA, 15 bp, Homo sapiens
ataaatgcaaatttt

SEQ ID NO: 2022033 - DNA, 15 bp, Homo sapiens
taaatgcaaattttt

SEQ ID NO: 2022034 - DNA, 15 bp, Homo sapiens
aaatgcaaatttttt

SEQ ID NO: 2022035 - DNA, 15 bp, Homo sapiens
aatgcaaattttttt

SEQ ID NO: 2022036 - DNA, 15 bp, Homo sapiens
atgcaaatttttttg

SEQ ID NO: 2022037 - DNA, 15 bp, Homo sapiens
tgcaaatttttttgg

SEQ ID NO: 2022038 - DNA, 15 bp, Homo sapiens
gcaaatttttttggt

SEQ ID NO: 2022039 - DNA, 15 bp, Homo sapiens
caaatttttttggtg

SEQ ID NO: 2022040 - DNA, 15 bp, Homo sapiens
aaatttttttggtgg

SEQ ID NO: 2022041 - DNA, 15 bp, Homo sapiens
aatttttttggtgga

SEQ ID NO: 2022042 - DNA, 15 bp, Homo sapiens
atttttttggtggaa

SEQ ID NO: 2022043 - DNA, 15 bp, Homo sapiens
tttttttggtggaaa

SEQ ID NO: 2022044 - DNA, 15 bp, Homo sapiens
ttttttggtggaaag

SEQ ID NO: 2022045 - DNA, 15 bp, Homo sapiens
tttttggtggaaaga

SEQ ID NO: 2022046 - DNA, 15 bp, Homo sapiens
ttttggtggaaagag

SEQ ID NO: 2022047 - DNA, 15 bp, Homo sapiens
tttggtggaaagagg

SEQ ID NO: 2022048 - DNA, 15 bp, Homo sapiens
ttggtggaaagaggg

SEQ ID NO: 2022049 - DNA, 15 bp, Homo sapiens
tggtggaaagagggg

SEQ ID NO: 2022050 - DNA, 15 bp, Homo sapiens
ggtggaaagagggga

SEQ ID NO: 2022051 - DNA, 15 bp, Homo sapiens
gtggaaagaggggaa

SEQ ID NO: 2022052 - DNA, 15 bp, Homo sapiens
tggaaagaggggaag

SEQ ID NO: 2022053 - DNA, 15 bp, Homo sapiens
ggaaagaggggaagt

SEQ ID NO: 2022054 - DNA, 15 bp, Homo sapiens
gaaagaggggaagtt

SEQ ID NO: 2022055 - DNA, 15 bp, Homo sapiens
aaagaggggaagttt

SEQ ID NO: 2022056 - DNA, 15 bp, Homo sapiens
aagaggggaagtttg

SEQ ID NO: 2022057 - DNA, 15 bp, Homo sapiens
agaggggaagtttgg

SEQ ID NO: 2022058 - DNA, 15 bp, Homo sapiens
gaggggaagtttggt

SEQ ID NO: 2022059 - DNA, 15 bp, Homo sapiens
aggggaagtttggta

SEQ ID NO: 2022060 - DNA, 15 bp, Homo sapiens
ggggaagtttggtag

SEQ ID NO: 2022061 - DNA, 15 bp, Homo sapiens
gggaagtttggtagc

SEQ ID NO: 2022062 - DNA, 15 bp, Homo sapiens
ggaagtttggtagca

SEQ ID NO: 2022063 - DNA, 15 bp, Homo sapiens
gaagtttggtagcaa

SEQ ID NO: 2022064 - DNA, 15 bp, Homo sapiens
aagtttggtagcaac

SEQ ID NO: 2022065 - DNA, 15 bp, Homo sapiens
agtttggtagcaacc

SEQ ID NO: 2022066 - DNA, 15 bp, Homo sapiens
gtttggtagcaacca

SEQ ID NO: 2022067 - DNA, 15 bp, Homo sapiens
tttggtagcaaccaa

SEQ ID NO: 2022068 - DNA, 15 bp, Homo sapiens
ttggtagcaaccaaa

SEQ ID NO: 2022069 - DNA, 15 bp, Homo sapiens
tggtagcaaccaaaa

SEQ ID NO: 2022070 - DNA, 15 bp, Homo sapiens
ggtagcaaccaaaag

SEQ ID NO: 2022071 - DNA, 15 bp, Homo sapiens
gtagcaaccaaaaga

SEQ ID NO: 2022072 - DNA, 15 bp, Homo sapiens
tagcaaccaaaagaa

SEQ ID NO: 2022073 - DNA, 15 bp, Homo sapiens
agcaaccaaaagaaa

SEQ ID NO: 2022074 - DNA, 15 bp, Homo sapiens
gcaaccaaaagaaac

SEQ ID NO: 2022075 - DNA, 15 bp, Homo sapiens
caaccaaaagaaact

SEQ ID NO: 2022076 - DNA, 15 bp, Homo sapiens
aaccaaaagaaactg

SEQ ID NO: 2022077 - DNA, 15 bp, Homo sapiens
accaaaagaaactga

SEQ ID NO: 2022078 - DNA, 15 bp, Homo sapiens
ccaaaagaaactgaa

SEQ ID NO: 2022079 - DNA, 15 bp, Homo sapiens
caaaagaaactgaac

SEQ ID NO: 2022080 - DNA, 15 bp, Homo sapiens
aaaagaaactgaact

SEQ ID NO: 2022081 - DNA, 15 bp, Homo sapiens
aaagaaactgaactt

SEQ ID NO: 2022082 - DNA, 15 bp, Homo sapiens
aagaaactgaacttc

SEQ ID NO: 2022083 - DNA, 15 bp, Homo sapiens
agaaactgaacttca

SEQ ID NO: 2022084 - DNA, 15 bp, Homo sapiens
gaaactgaacttcaa

SEQ ID NO: 2022085 - DNA, 15 bp, Homo sapiens
aaactgaacttcaaa

SEQ ID NO: 2022086 - DNA, 15 bp, Homo sapiens
aactgaacttcaaat

SEQ ID NO: 2022087 - DNA, 15 bp, Homo sapiens
actgaacttcaaata

SEQ ID NO: 2022088 - DNA, 15 bp, Homo sapiens
ctgaacttcaaatag

SEQ ID NO: 2022089 - DNA, 15 bp, Homo sapiens
tgaacttcaaataga

SEQ ID NO: 2022090 - DNA, 15 bp, Homo sapiens
gaacttcaaatagaa

SEQ ID NO: 2022091 - DNA, 15 bp, Homo sapiens
aacttcaaatagaaa

SEQ ID NO: 2022092 - DNA, 15 bp, Homo sapiens
acttcaaatagaaat

SEQ ID NO: 2022093 - DNA, 15 bp, Homo sapiens
cttcaaatagaaatt

SEQ ID NO: 2022094 - DNA, 15 bp, Homo sapiens
ttcaaatagaaattc

SEQ ID NO: 2022095 - DNA, 15 bp, Homo sapiens
tcaaatagaaattca

SEQ ID NO: 2022096 - DNA, 15 bp, Homo sapiens
caaatagaaattcaa

SEQ ID NO: 2022097 - DNA, 15 bp, Homo sapiens
aaatagaaattcaag

SEQ ID NO: 2022098 - DNA, 15 bp, Homo sapiens
aatagaaattcaagg

SEQ ID NO: 2022099 - DNA, 15 bp, Homo sapiens
atagaaattcaaggt

SEQ ID NO: 2022100 - DNA, 15 bp, Homo sapiens
tagaaattcaaggtg

SEQ ID NO: 2022101 - DNA, 15 bp, Homo sapiens
agaaattcaaggtgt

SEQ ID NO: 2022102 - DNA, 15 bp, Homo sapiens
gaaattcaaggtgtt

SEQ ID NO: 2022103 - DNA, 15 bp, Homo sapiens
aaattcaaggtgttc

SEQ ID NO: 2022104 - DNA, 15 bp, Homo sapiens
aattcaaggtgttct

SEQ ID NO: 2022105 - DNA, 15 bp, Homo sapiens
attcaaggtgttctt

SEQ ID NO: 2022106 - DNA, 15 bp, Homo sapiens
ttcaaggtgttcttt

SEQ ID NO: 2022107 - DNA, 15 bp, Homo sapiens
tcaaggtgttctttt

SEQ ID NO: 2022108 - DNA, 15 bp, Homo sapiens
caaggtgttcttttt

SEQ ID NO: 2022109 - DNA, 15 bp, Homo sapiens
aaggtgttctttttt

SEQ ID NO: 2022110 - DNA, 15 bp, Homo sapiens
aggtgttcttttttt

SEQ ID NO: 2022111 - DNA, 15 bp, Homo sapiens
tgttctttttttttc

SEQ ID NO: 2022112 - DNA, 15 bp, Homo sapiens
gttctttttttttct

SEQ ID NO: 2022113 - DNA, 15 bp, Homo sapiens
ttctttttttttctt

SEQ ID NO: 2022114 - DNA, 15 bp, Homo sapiens
tctttttttttcttg

SEQ ID NO: 2022115 - DNA, 15 bp, Homo sapiens
ctttttttttcttgg

SEQ ID NO: 2022116 - DNA, 15 bp, Homo sapiens
tttttttttcttggg

SEQ ID NO: 2022117 - DNA, 15 bp, Homo sapiens
ttttttttcttgggt

SEQ ID NO: 2022118 - DNA, 15 bp, Homo sapiens
tttttttcttgggtg

SEQ ID NO: 2022119 - DNA, 15 bp, Homo sapiens
ttttttcttgggtgt

SEQ ID NO: 2022120 - DNA, 15 bp, Homo sapiens
tttttcttgggtgtt

SEQ ID NO: 2022121 - DNA, 15 bp, Homo sapiens
ttttcttgggtgttc

SEQ ID NO: 2022122 - DNA, 15 bp, Homo sapiens
tttcttgggtgttca

SEQ ID NO: 2022123 - DNA, 15 bp, Homo sapiens
ttcttgggtgttcat

SEQ ID NO: 2022124 - DNA, 15 bp, Homo sapiens
tcttgggtgttcatc

SEQ ID NO: 2022125 - DNA, 15 bp, Homo sapiens
cttgggtgttcatct

SEQ ID NO: 2022126 - DNA, 15 bp, Homo sapiens
ttgggtgttcatctt

SEQ ID NO: 2022127 - DNA, 15 bp, Homo sapiens
tgggtgttcatcttg

SEQ ID NO: 2022128 - DNA, 15 bp, Homo sapiens
gggtgttcatcttga

SEQ ID NO: 2022129 - DNA, 15 bp, Homo sapiens
ggtgttcatcttgaa

SEQ ID NO: 2022130 - DNA, 15 bp, Homo sapiens
gtgttcatcttgaag

SEQ ID NO: 2022131 - DNA, 15 bp, Homo sapiens
tgttcatcttgaagc

SEQ ID NO: 2022132 - DNA, 15 bp, Homo sapiens
gttcatcttgaagct

SEQ ID NO: 2022133 - DNA, 15 bp, Homo sapiens
ttcatcttgaagctt

SEQ ID NO: 2022134 - DNA, 15 bp, Homo sapiens
tcatcttgaagctta

SEQ ID NO: 2022135 - DNA, 15 bp, Homo sapiens
catcttgaagcttag

SEQ ID NO: 2022136 - DNA, 15 bp, Homo sapiens
atcttgaagcttaga

SEQ ID NO: 2022137 - DNA, 15 bp, Homo sapiens
tcttgaagcttagaa

SEQ ID NO: 2022138 - DNA, 15 bp, Homo sapiens
cttgaagcttagaat

SEQ ID NO: 2022139 - DNA, 15 bp, Homo sapiens
ttgaagcttagaata

SEQ ID NO: 2022140 - DNA, 15 bp, Homo sapiens
tgaagcttagaataa

SEQ ID NO: 2022141 - DNA, 15 bp, Homo sapiens
gaagcttagaataaa

SEQ ID NO: 2022142 - DNA, 15 bp, Homo sapiens
aagcttagaataaag

SEQ ID NO: 2022143 - DNA, 15 bp, Homo sapiens
agcttagaataaagc

SEQ ID NO: 2022144 - DNA, 15 bp, Homo sapiens
gcttagaataaagct

SEQ ID NO: 2022145 - DNA, 15 bp, Homo sapiens
cttagaataaagctg

SEQ ID NO: 2022146 - DNA, 15 bp, Homo sapiens
ttagaataaagctgg

SEQ ID NO: 2022147 - DNA, 15 bp, Homo sapiens
tagaataaagctggt

SEQ ID NO: 2022148 - DNA, 15 bp, Homo sapiens
agaataaagctggta

SEQ ID NO: 2022149 - DNA, 15 bp, Homo sapiens
gaataaagctggtac

SEQ ID NO: 2022150 - DNA, 15 bp, Homo sapiens
aataaagctggtact

SEQ ID NO: 2022151 - DNA, 15 bp, Homo sapiens
ataaagctggtactt

SEQ ID NO: 2022152 - DNA, 15 bp, Homo sapiens
taaagctggtactta

SEQ ID NO: 2022153 - DNA, 15 bp, Homo sapiens
aaagctggtacttag

SEQ ID NO: 2022154 - DNA, 15 bp, Homo sapiens
aagctggtacttaga

SEQ ID NO: 2022155 - DNA, 15 bp, Homo sapiens
agctggtacttagaa

SEQ ID NO: 2022156 - DNA, 15 bp, Homo sapiens
gctggtacttagaaa

SEQ ID NO: 2022157 - DNA, 15 bp, Homo sapiens
ctggtacttagaaat

SEQ ID NO: 2022158 - DNA, 15 bp, Homo sapiens
tggtacttagaaata

SEQ ID NO: 2022159 - DNA, 15 bp, Homo sapiens
ggtacttagaaatac

SEQ ID NO: 2022160 - DNA, 15 bp, Homo sapiens
gtacttagaaataca

SEQ ID NO: 2022161 - DNA, 15 bp, Homo sapiens
tacttagaaatacat

SEQ ID NO: 2022162 - DNA, 15 bp, Homo sapiens
acttagaaatacatt

SEQ ID NO: 2022163 - DNA, 15 bp, Homo sapiens
cttagaaatacattt

SEQ ID NO: 2022164 - DNA, 15 bp, Homo sapiens
ttagaaatacatttg

SEQ ID NO: 2022165 - DNA, 15 bp, Homo sapiens
tagaaatacatttgt

SEQ ID NO: 2022166 - DNA, 15 bp, Homo sapiens
agaaatacatttgta

SEQ ID NO: 2022167 - DNA, 15 bp, Homo sapiens
gaaatacatttgtaa

SEQ ID NO: 2022168 - DNA, 15 bp, Homo sapiens
aaatacatttgtaag

SEQ ID NO: 2022169 - DNA, 15 bp, Homo sapiens
aatacatttgtaagt

SEQ ID NO: 2022170 - DNA, 15 bp, Homo sapiens
atacatttgtaagtg

SEQ ID NO: 2022171 - DNA, 15 bp, Homo sapiens
tacatttgtaagtgt

SEQ ID NO: 2022172 - DNA, 15 bp, Homo sapiens
acatttgtaagtgta

SEQ ID NO: 2022173 - DNA, 15 bp, Homo sapiens
catttgtaagtgtat

SEQ ID NO: 2022174 - DNA, 15 bp, Homo sapiens
atttgtaagtgtatt

SEQ ID NO: 2022175 - DNA, 15 bp, Homo sapiens
tttgtaagtgtattt

SEQ ID NO: 2022176 - DNA, 15 bp, Homo sapiens
ttgtaagtgtatttg

SEQ ID NO: 2022177 - DNA, 15 bp, Homo sapiens
tgtaagtgtatttgt

SEQ ID NO: 2022178 - DNA, 15 bp, Homo sapiens
gtaagtgtatttgtg

SEQ ID NO: 2022179 - DNA, 15 bp, Homo sapiens
taagtgtatttgtga

SEQ ID NO: 2022180 - DNA, 15 bp, Homo sapiens
aagtgtatttgtgaa

SEQ ID NO: 2022181 - DNA, 15 bp, Homo sapiens
agtgtatttgtgaac

SEQ ID NO: 2022182 - DNA, 15 bp, Homo sapiens
gtgtatttgtgaacg

SEQ ID NO: 2022183 - DNA, 15 bp, Homo sapiens
tgtatttgtgaacgc

SEQ ID NO: 2022184 - DNA, 15 bp, Homo sapiens
gtatttgtgaacgca

SEQ ID NO: 2022185 - DNA, 15 bp, Homo sapiens
tatttgtgaacgcaa

SEQ ID NO: 2022186 - DNA, 15 bp, Homo sapiens
atttgtgaacgcaat

SEQ ID NO: 2022187 - DNA, 15 bp, Homo sapiens
tttgtgaacgcaatt

SEQ ID NO: 2022188 - DNA, 15 bp, Homo sapiens
ttgtgaacgcaattt

SEQ ID NO: 2022189 - DNA, 15 bp, Homo sapiens
tgtgaacgcaatttt

SEQ ID NO: 2022190 - DNA, 15 bp, Homo sapiens
gtgaacgcaatttta

SEQ ID NO: 2022191 - DNA, 15 bp, Homo sapiens
tgaacgcaattttac

SEQ ID NO: 2022192 - DNA, 15 bp, Homo sapiens
gaacgcaattttact

SEQ ID NO: 2022193 - DNA, 15 bp, Homo sapiens
aacgcaattttactg

SEQ ID NO: 2022194 - DNA, 15 bp, Homo sapiens
acgcaattttactgt

SEQ ID NO: 2022195 - DNA, 15 bp, Homo sapiens
cgcaattttactgtg

SEQ ID NO: 2022196 - DNA, 15 bp, Homo sapiens
gcaattttactgtgg

SEQ ID NO: 2022197 - DNA, 15 bp, Homo sapiens
caattttactgtggt

SEQ ID NO: 2022198 - DNA, 15 bp, Homo sapiens
aattttactgtggtg

SEQ ID NO: 2022199 - DNA, 15 bp, Homo sapiens
attttactgtggtgg

SEQ ID NO: 2022200 - DNA, 15 bp, Homo sapiens
ttttactgtggtggt

SEQ ID NO: 2022201 - DNA, 15 bp, Homo sapiens
tttactgtggtggtt

SEQ ID NO: 2022202 - DNA, 15 bp, Homo sapiens
ttactgtggtggttg

SEQ ID NO: 2022203 - DNA, 15 bp, Homo sapiens
tactgtggtggttgt

SEQ ID NO: 2022204 - DNA, 15 bp, Homo sapiens
actgtggtggttgtc

SEQ ID NO: 2022205 - DNA, 15 bp, Homo sapiens
ctgtggtggttgtct

SEQ ID NO: 2022206 - DNA, 15 bp, Homo sapiens
tgtggtggttgtctc

SEQ ID NO: 2022207 - DNA, 15 bp, Homo sapiens
gtggtggttgtctct

SEQ ID NO: 2022208 - DNA, 15 bp, Homo sapiens
tggtggttgtctctt

SEQ ID NO: 2022209 - DNA, 15 bp, Homo sapiens
ggtggttgtctcttt

SEQ ID NO: 2022210 - DNA, 15 bp, Homo sapiens
gtggttgtctctttt

SEQ ID NO: 2022211 - DNA, 15 bp, Homo sapiens
tggttgtctcttttc

SEQ ID NO: 2022212 - DNA, 15 bp, Homo sapiens
ggttgtctcttttca

SEQ ID NO: 2022213 - DNA, 15 bp, Homo sapiens
gttgtctcttttcat

SEQ ID NO: 2022214 - DNA, 15 bp, Homo sapiens
ttgtctcttttcatt

SEQ ID NO: 2022215 - DNA, 15 bp, Homo sapiens
tgtctcttttcattt

SEQ ID NO: 2022216 - DNA, 15 bp, Homo sapiens
gtctcttttcattta

SEQ ID NO: 2022217 - DNA, 15 bp, Homo sapiens
tctcttttcatttat

SEQ ID NO: 2022218 - DNA, 15 bp, Homo sapiens
ctcttttcatttata

SEQ ID NO: 2022219 - DNA, 15 bp, Homo sapiens
tcttttcatttatat

SEQ ID NO: 2022220 - DNA, 15 bp, Homo sapiens
cttttcatttatatt

SEQ ID NO: 2022221 - DNA, 15 bp, Homo sapiens
ttttcatttatattt

SEQ ID NO: 2022222 - DNA, 15 bp, Homo sapiens
tttcatttatatttc

SEQ ID NO: 2022223 - DNA, 15 bp, Homo sapiens
ttcatttatatttcc

SEQ ID NO: 2022224 - DNA, 15 bp, Homo sapiens
tcatttatatttccc

SEQ ID NO: 2022225 - DNA, 15 bp, Homo sapiens
catttatatttccct

SEQ ID NO: 2022226 - DNA, 15 bp, Homo sapiens
atttatatttccctg

SEQ ID NO: 2022227 - DNA, 15 bp, Homo sapiens
tttatatttccctgg

SEQ ID NO: 2022228 - DNA, 15 bp, Homo sapiens
ttatatttccctgga

SEQ ID NO: 2022229 - DNA, 15 bp, Homo sapiens
tatatttccctggac

SEQ ID NO: 2022230 - DNA, 15 bp, Homo sapiens
atatttccctggact

SEQ ID NO: 2022231 - DNA, 15 bp, Homo sapiens
tatttccctggactg

SEQ ID NO: 2022232 - DNA, 15 bp, Homo sapiens
atttccctggactga

SEQ ID NO: 2022233 - DNA, 15 bp, Homo sapiens
tttccctggactgac

SEQ ID NO: 2022234 - DNA, 15 bp, Homo sapiens
ttccctggactgact

SEQ ID NO: 2022235 - DNA, 15 bp, Homo sapiens
tccctggactgactg

SEQ ID NO: 2022236 - DNA, 15 bp, Homo sapiens
ccctggactgactgt

SEQ ID NO: 2022237 - DNA, 15 bp, Homo sapiens
cctggactgactgtg

SEQ ID NO: 2022238 - DNA, 15 bp, Homo sapiens
ctggactgactgtgt

SEQ ID NO: 2022239 - DNA, 15 bp, Homo sapiens
tggactgactgtgtc

SEQ ID NO: 2022240 - DNA, 15 bp, Homo sapiens
ggactgactgtgtct

SEQ ID NO: 2022241 - DNA, 15 bp, Homo sapiens
gactgactgtgtctt

SEQ ID NO: 2022242 - DNA, 15 bp, Homo sapiens
actgactgtgtcttt

SEQ ID NO: 2022243 - DNA, 15 bp, Homo sapiens
ctgactgtgtctttc

SEQ ID NO: 2022244 - DNA, 15 bp, Homo sapiens
tgactgtgtctttct

SEQ ID NO: 2022245 - DNA, 15 bp, Homo sapiens
gactgtgtctttctg

SEQ ID NO: 2022246 - DNA, 15 bp, Homo sapiens
actgtgtctttctga

SEQ ID NO: 2022247 - DNA, 15 bp, Homo sapiens
ctgtgtctttctgaa

SEQ ID NO: 2022248 - DNA, 15 bp, Homo sapiens
tgtgtctttctgaag

SEQ ID NO: 2022249 - DNA, 15 bp, Homo sapiens
gtgtctttctgaagg

SEQ ID NO: 2022250 - DNA, 15 bp, Homo sapiens
tgtctttctgaaggc

SEQ ID NO: 2022251 - DNA, 15 bp, Homo sapiens
gtctttctgaaggca

SEQ ID NO: 2022252 - DNA, 15 bp, Homo sapiens
tctttctgaaggcaa

SEQ ID NO: 2022253 - DNA, 15 bp, Homo sapiens
ctttctgaaggcaaa

SEQ ID NO: 2022254 - DNA, 15 bp, Homo sapiens
tttctgaaggcaaag

SEQ ID NO: 2022255 - DNA, 15 bp, Homo sapiens
ttctgaaggcaaagg

SEQ ID NO: 2022256 - DNA, 15 bp, Homo sapiens
tctgaaggcaaaggc

SEQ ID NO: 2022257 - DNA, 15 bp, Homo sapiens
ctgaaggcaaaggca

SEQ ID NO: 2022258 - DNA, 15 bp, Homo sapiens
tgaaggcaaaggcat

SEQ ID NO: 2022259 - DNA, 15 bp, Homo sapiens
gaaggcaaaggcata

SEQ ID NO: 2022260 - DNA, 15 bp, Homo sapiens
aaggcaaaggcatac

SEQ ID NO: 2022261 - DNA, 15 bp, Homo sapiens
aggcaaaggcatacc

SEQ ID NO: 2022262 - DNA, 15 bp, Homo sapiens
ggcaaaggcatacca

SEQ ID NO: 2022263 - DNA, 15 bp, Homo sapiens
gcaaaggcataccag

SEQ ID NO: 2022264 - DNA, 15 bp, Homo sapiens
caaaggcataccagt

SEQ ID NO: 2022265 - DNA, 15 bp, Homo sapiens
aaaggcataccagtt

SEQ ID NO: 2022266 - DNA, 15 bp, Homo sapiens
aaggcataccagttt

SEQ ID NO: 2022267 - DNA, 15 bp, Homo sapiens
aggcataccagtttt

SEQ ID NO: 2022268 - DNA, 15 bp, Homo sapiens
ggcataccagttttc

SEQ ID NO: 2022269 - DNA, 15 bp, Homo sapiens
gcataccagttttct

SEQ ID NO: 2022270 - DNA, 15 bp, Homo sapiens
cataccagttttctc

SEQ ID NO: 2022271 - DNA, 15 bp, Homo sapiens
ataccagttttctca

SEQ ID NO: 2022272 - DNA, 15 bp, Homo sapiens
taccagttttctcaa

SEQ ID NO: 2022273 - DNA, 15 bp, Homo sapiens
accagttttctcaac

SEQ ID NO: 2022274 - DNA, 15 bp, Homo sapiens
ccagttttctcaacc

SEQ ID NO: 2022275 - DNA, 15 bp, Homo sapiens
cagttttctcaacct

SEQ ID NO: 2022276 - DNA, 15 bp, Homo sapiens
agttttctcaaccta

SEQ ID NO: 2022277 - DNA, 15 bp, Homo sapiens
gttttctcaacctaa

SEQ ID NO: 2022278 - DNA, 15 bp, Homo sapiens
ttttctcaacctaaa

SEQ ID NO: 2022279 - DNA, 15 bp, Homo sapiens
tttctcaacctaaaa

SEQ ID NO: 2022280 - DNA, 15 bp, Homo sapiens
ttctcaacctaaaaa

SEQ ID NO: 2022281 - DNA, 15 bp, Homo sapiens
tctcaacctaaaaat

SEQ ID NO: 2022282 - DNA, 15 bp, Homo sapiens
ctcaacctaaaaatc

SEQ ID NO: 2022283 - DNA, 15 bp, Homo sapiens
tcaacctaaaaatct

SEQ ID NO: 2022284 - DNA, 15 bp, Homo sapiens
caacctaaaaatctg

SEQ ID NO: 2022285 - DNA, 15 bp, Homo sapiens
aacctaaaaatctga

SEQ ID NO: 2022286 - DNA, 15 bp, Homo sapiens
acctaaaaatctgaa

SEQ ID NO: 2022287 - DNA, 15 bp, Homo sapiens
cctaaaaatctgaag

SEQ ID NO: 2022288 - DNA, 15 bp, Homo sapiens
ctaaaaatctgaaga

SEQ ID NO: 2022289 - DNA, 15 bp, Homo sapiens
taaaaatctgaagaa

SEQ ID NO: 2022290 - DNA, 15 bp, Homo sapiens
aaaaatctgaagaaa

SEQ ID NO: 2022291 - DNA, 15 bp, Homo sapiens
aaaatctgaagaaaa

SEQ ID NO: 2022292 - DNA, 15 bp, Homo sapiens
aaatctgaagaaaaa

SEQ ID NO: 2022293 - DNA, 15 bp, Homo sapiens
aatctgaagaaaaaa

SEQ ID NO: 2022294 - DNA, 15 bp, Homo sapiens
atctgaagaaaaaaa

SEQ ID NO: 2022295 - DNA, 15 bp, Homo sapiens
tctgaagaaaaaaaa

SEQ ID NO: 2022296 - DNA, 15 bp, Homo sapiens
ctgaagaaaaaaaaa

SEQ ID NO: 2022297 - DNA, 15 bp, Homo sapiens
tgaagaaaaaaaaaa

SEQ ID NO: 2022298 - DNA, 15 bp, Homo sapiens
aaaaaaaaaaaacag

SEQ ID NO: 2022299 - DNA, 15 bp, Homo sapiens
aaaaaaaaaaacagc

SEQ ID NO: 2022300 - DNA, 15 bp, Homo sapiens
aaaaaaaaaacagca

SEQ ID NO: 2022301 - DNA, 15 bp, Homo sapiens
aaaaaaaaacagcaa

SEQ ID NO: 2022302 - DNA, 15 bp, Homo sapiens
aaaaaaaacagcaaa

SEQ ID NO: 2022303 - DNA, 15 bp, Homo sapiens
aaaaaaacagcaaat

SEQ ID NO: 2022304 - DNA, 15 bp, Homo sapiens
aaaaaacagcaaatt

SEQ ID NO: 2022305 - DNA, 15 bp, Homo sapiens
aaaaacagcaaattt

SEQ ID NO: 2022306 - DNA, 15 bp, Homo sapiens
aaaacagcaaatttc

SEQ ID NO: 2022307 - DNA, 15 bp, Homo sapiens
aaacagcaaatttcc

SEQ ID NO: 2022308 - DNA, 15 bp, Homo sapiens
acagcaaatttcctc

SEQ ID NO: 2022309 - DNA, 15 bp, Homo sapiens
cagcaaatttcctct

SEQ ID NO: 2022310 - DNA, 15 bp, Homo sapiens
agcaaatttcctctg

SEQ ID NO: 2022311 - DNA, 15 bp, Homo sapiens
gcaaatttcctctga

SEQ ID NO: 2022312 - DNA, 15 bp, Homo sapiens
caaatttcctctgag

SEQ ID NO: 2022313 - DNA, 15 bp, Homo sapiens
aaatttcctctgagt

SEQ ID NO: 2022314 - DNA, 15 bp, Homo sapiens
aatttcctctgagta

SEQ ID NO: 2022315 - DNA, 15 bp, Homo sapiens
atttcctctgagtag

SEQ ID NO: 2022316 - DNA, 15 bp, Homo sapiens
tttcctctgagtaga

SEQ ID NO: 2022317 - DNA, 15 bp, Homo sapiens
ttcctctgagtagac

SEQ ID NO: 2022318 - DNA, 15 bp, Homo sapiens
tcctctgagtagact

SEQ ID NO: 2022319 - DNA, 15 bp, Homo sapiens
cctctgagtagactt

SEQ ID NO: 2022320 - DNA, 15 bp, Homo sapiens
ctctgagtagactta

SEQ ID NO: 2022321 - DNA, 15 bp, Homo sapiens
tctgagtagacttaa

SEQ ID NO: 2022322 - DNA, 15 bp, Homo sapiens
ctgagtagacttaaa

SEQ ID NO: 2022323 - DNA, 15 bp, Homo sapiens
tgagtagacttaaaa

SEQ ID NO: 2022324 - DNA, 15 bp, Homo sapiens
gagtagacttaaaag

SEQ ID NO: 2022325 - DNA, 15 bp, Homo sapiens
agtagacttaaaagt

SEQ ID NO: 2022326 - DNA, 15 bp, Homo sapiens
gtagacttaaaagtt

SEQ ID NO: 2022327 - DNA, 15 bp, Homo sapiens
tagacttaaaagttc

SEQ ID NO: 2022328 - DNA, 15 bp, Homo sapiens
agacttaaaagttca

SEQ ID NO: 2022329 - DNA, 15 bp, Homo sapiens
gacttaaaagttcaa

SEQ ID NO: 2022330 - DNA, 15 bp, Homo sapiens
acttaaaagttcaac

SEQ ID NO: 2022331 - DNA, 15 bp, Homo sapiens
cttaaaagttcaaca

SEQ ID NO: 2022332 - DNA, 15 bp, Homo sapiens
ttaaaagttcaacaa

SEQ ID NO: 2022333 - DNA, 15 bp, Homo sapiens
taaaagttcaacaaa

SEQ ID NO: 2022334 - DNA, 15 bp, Homo sapiens
aaaagttcaacaaaa

SEQ ID NO: 2022335 - DNA, 15 bp, Homo sapiens
aaagttcaacaaaag

SEQ ID NO: 2022336 - DNA, 15 bp, Homo sapiens
aagttcaacaaaagt

SEQ ID NO: 2022337 - DNA, 15 bp, Homo sapiens
agttcaacaaaagtt

SEQ ID NO: 2022338 - DNA, 15 bp, Homo sapiens
gttcaacaaaagttg

SEQ ID NO: 2022339 - DNA, 15 bp, Homo sapiens
ttcaacaaaagttgc

SEQ ID NO: 2022340 - DNA, 15 bp, Homo sapiens
tcaacaaaagttgct

SEQ ID NO: 2022341 - DNA, 15 bp, Homo sapiens
caacaaaagttgctg

SEQ ID NO: 2022342 - DNA, 15 bp, Homo sapiens
aacaaaagttgctgg

SEQ ID NO: 2022343 - DNA, 15 bp, Homo sapiens
acaaaagttgctggg

SEQ ID NO: 2022344 - DNA, 15 bp, Homo sapiens
caaaagttgctgggt

SEQ ID NO: 2022345 - DNA, 15 bp, Homo sapiens
aaaagttgctgggtt

SEQ ID NO: 2022346 - DNA, 15 bp, Homo sapiens
aaagttgctgggttt

SEQ ID NO: 2022347 - DNA, 15 bp, Homo sapiens
aagttgctgggtttt

SEQ ID NO: 2022348 - DNA, 15 bp, Homo sapiens
agttgctgggttttc

SEQ ID NO: 2022349 - DNA, 15 bp, Homo sapiens
gttgctgggttttct

SEQ ID NO: 2022350 - DNA, 15 bp, Homo sapiens
ttgctgggttttctt

SEQ ID NO: 2022351 - DNA, 15 bp, Homo sapiens
tgctgggttttcttt

SEQ ID NO: 2022352 - DNA, 15 bp, Homo sapiens
gctgggttttctttt

SEQ ID NO: 2022353 - DNA, 15 bp, Homo sapiens
ctgggttttctttta

SEQ ID NO: 2022354 - DNA, 15 bp, Homo sapiens
tgggttttcttttaa

SEQ ID NO: 2022355 - DNA, 15 bp, Homo sapiens
gggttttcttttaaa

SEQ ID NO: 2022356 - DNA, 15 bp, Homo sapiens
ggttttcttttaaag

SEQ ID NO: 2022357 - DNA, 15 bp, Homo sapiens
gttttcttttaaagc

SEQ ID NO: 2022358 - DNA, 15 bp, Homo sapiens
ttttcttttaaagca

SEQ ID NO: 2022359 - DNA, 15 bp, Homo sapiens
tttcttttaaagcat

SEQ ID NO: 2022360 - DNA, 15 bp, Homo sapiens
ttcttttaaagcatc

SEQ ID NO: 2022361 - DNA, 15 bp, Homo sapiens
tcttttaaagcatca

SEQ ID NO: 2022362 - DNA, 15 bp, Homo sapiens
cttttaaagcatcat

SEQ ID NO: 2022363 - DNA, 15 bp, Homo sapiens
ttttaaagcatcatt

SEQ ID NO: 2022364 - DNA, 15 bp, Homo sapiens
tttaaagcatcattt

SEQ ID NO: 2022365 - DNA, 15 bp, Homo sapiens
ttaaagcatcattta

SEQ ID NO: 2022366 - DNA, 15 bp, Homo sapiens
taaagcatcatttat

SEQ ID NO: 2022367 - DNA, 15 bp, Homo sapiens
aaagcatcatttata

SEQ ID NO: 2022368 - DNA, 15 bp, Homo sapiens
aagcatcatttatac

SEQ ID NO: 2022369 - DNA, 15 bp, Homo sapiens
agcatcatttatacc

SEQ ID NO: 2022370 - DNA, 15 bp, Homo sapiens
gcatcatttatacct

SEQ ID NO: 2022371 - DNA, 15 bp, Homo sapiens
catcatttataccta

SEQ ID NO: 2022372 - DNA, 15 bp, Homo sapiens
atcatttatacctag

SEQ ID NO: 2022373 - DNA, 15 bp, Homo sapiens
tcatttatacctagc

SEQ ID NO: 2022374 - DNA, 15 bp, Homo sapiens
catttatacctagca

SEQ ID NO: 2022375 - DNA, 15 bp, Homo sapiens
atttatacctagcat

SEQ ID NO: 2022376 - DNA, 15 bp, Homo sapiens
tttatacctagcatt

SEQ ID NO: 2022377 - DNA, 15 bp, Homo sapiens
ttatacctagcattt

SEQ ID NO: 2022378 - DNA, 15 bp, Homo sapiens
tatacctagcatttt

SEQ ID NO: 2022379 - DNA, 15 bp, Homo sapiens
atacctagcattttt

SEQ ID NO: 2022380 - DNA, 15 bp, Homo sapiens
tacctagcatttttt

SEQ ID NO: 2022381 - DNA, 15 bp, Homo sapiens
acctagcattttttc

SEQ ID NO: 2022382 - DNA, 15 bp, Homo sapiens
cctagcattttttct

SEQ ID NO: 2022383 - DNA, 15 bp, Homo sapiens
ctagcattttttctg

SEQ ID NO: 2022384 - DNA, 15 bp, Homo sapiens
tagcattttttctga

SEQ ID NO: 2022385 - DNA, 15 bp, Homo sapiens
agcattttttctgat

SEQ ID NO: 2022386 - DNA, 15 bp, Homo sapiens
gcattttttctgatt

SEQ ID NO: 2022387 - DNA, 15 bp, Homo sapiens
cattttttctgattt

SEQ ID NO: 2022388 - DNA, 15 bp, Homo sapiens
attttttctgatttt

SEQ ID NO: 2022389 - DNA, 15 bp, Homo sapiens
ttttttctgattttg

SEQ ID NO: 2022390 - DNA, 15 bp, Homo sapiens
tttttctgattttga

SEQ ID NO: 2022391 - DNA, 15 bp, Homo sapiens
ttttctgattttgac

SEQ ID NO: 2022392 - DNA, 15 bp, Homo sapiens
tttctgattttgaca

SEQ ID NO: 2022393 - DNA, 15 bp, Homo sapiens
ttctgattttgacat

SEQ ID NO: 2022394 - DNA, 15 bp, Homo sapiens
tctgattttgacata

SEQ ID NO: 2022395 - DNA, 15 bp, Homo sapiens
ctgattttgacataa

SEQ ID NO: 2022396 - DNA, 15 bp, Homo sapiens
tgattttgacataat

SEQ ID NO: 2022397 - DNA, 15 bp, Homo sapiens
gattttgacataatt

SEQ ID NO: 2022398 - DNA, 15 bp, Homo sapiens
attttgacataattg

SEQ ID NO: 2022399 - DNA, 15 bp, Homo sapiens
ttttgacataattgt

SEQ ID NO: 2022400 - DNA, 15 bp, Homo sapiens
tttgacataattgta

SEQ ID NO: 2022401 - DNA, 15 bp, Homo sapiens
ttgacataattgtaa

SEQ ID NO: 2022402 - DNA, 15 bp, Homo sapiens
tgacataattgtaaa

SEQ ID NO: 2022403 - DNA, 15 bp, Homo sapiens
gacataattgtaaaa

SEQ ID NO: 2022404 - DNA, 15 bp, Homo sapiens
acataattgtaaaaa

SEQ ID NO: 2022405 - DNA, 15 bp, Homo sapiens
cataattgtaaaaaa

SEQ ID NO: 2022406 - DNA, 15 bp, Homo sapiens
ataattgtaaaaaaa

SEQ ID NO: 2022407 - DNA, 15 bp, Homo sapiens
taattgtaaaaaaaa

SEQ ID NO: 2022408 - DNA, 15 bp, Homo sapiens
aattgtaaaaaaaaa

SEQ ID NO: 2022409 - DNA, 15 bp, Homo sapiens
attgtaaaaaaaaat

SEQ ID NO: 2022410 - DNA, 15 bp, Homo sapiens
ttgtaaaaaaaaatg

SEQ ID NO: 2022411 - DNA, 15 bp, Homo sapiens
tgtaaaaaaaaatgt

SEQ ID NO: 2022412 - DNA, 15 bp, Homo sapiens
gtaaaaaaaaatgtg

SEQ ID NO: 2022413 - DNA, 15 bp, Homo sapiens
taaaaaaaaatgtgt

SEQ ID NO: 2022414 - DNA, 15 bp, Homo sapiens
aaaaaaaaatgtgta

SEQ ID NO: 2022415 - DNA, 15 bp, Homo sapiens
aaaaaaaatgtgtaa

SEQ ID NO: 2022416 - DNA, 15 bp, Homo sapiens
aaaaaaatgtgtaat

SEQ ID NO: 2022417 - DNA, 15 bp, Homo sapiens
aaaaaatgtgtaata

SEQ ID NO: 2022418 - DNA, 15 bp, Homo sapiens
aaaaatgtgtaataa

SEQ ID NO: 2022419 - DNA, 15 bp, Homo sapiens
aaaatgtgtaataaa

SEQ ID NO: 2022420 - DNA, 15 bp, Homo sapiens
aaatgtgtaataaaa

SEQ ID NO: 2022421 - DNA, 15 bp, Homo sapiens
aatgtgtaataaaat

SEQ ID NO: 2022422 - DNA, 15 bp, Homo sapiens
atgtgtaataaaata

SEQ ID NO: 2022423 - DNA, 15 bp, Homo sapiens
tgtgtaataaaatag

SEQ ID NO: 2022424 - DNA, 15 bp, Homo sapiens
gtgtaataaaataga

SEQ ID NO: 2022425 - DNA, 15 bp, Homo sapiens
tgtaataaaatagaa

SEQ ID NO: 2022426 - DNA, 15 bp, Homo sapiens
gtaataaaatagaaa

SEQ ID NO: 2022427 - DNA, 15 bp, Homo sapiens
taataaaatagaaat

SEQ ID NO: 2022428 - DNA, 15 bp, Homo sapiens
aataaaatagaaata

SEQ ID NO: 2022429 - DNA, 15 bp, Homo sapiens
ataaaatagaaatag

SEQ ID NO: 2022430 - DNA, 15 bp, Homo sapiens
taaaatagaaataga

SEQ ID NO: 2022431 - DNA, 15 bp, Homo sapiens
aaaatagaaatagag

SEQ ID NO: 2022432 - DNA, 15 bp, Homo sapiens
aatagaaatagagca

SEQ ID NO: 2022433 - DNA, 15 bp, Homo sapiens
atagaaatagagcat

SEQ ID NO: 2022434 - DNA, 15 bp, Homo sapiens
tagaaatagagcatc

SEQ ID NO: 2022435 - DNA, 15 bp, Homo sapiens
agaaatagagcatca

SEQ ID NO: 2022436 - DNA, 15 bp, Homo sapiens
gaaatagagcatcag

SEQ ID NO: 2022437 - DNA, 15 bp, Homo sapiens
aaatagagcatcagg

SEQ ID NO: 2022438 - DNA, 15 bp, Homo sapiens
aatagagcatcagga

SEQ ID NO: 2022439 - DNA, 15 bp, Homo sapiens
atagagcatcaggat

SEQ ID NO: 2022440 - DNA, 15 bp, Homo sapiens
tagagcatcaggatc

SEQ ID NO: 2022441 - DNA, 15 bp, Homo sapiens
agagcatcaggatct

SEQ ID NO: 2022442 - DNA, 15 bp, Homo sapiens
gagcatcaggatctt

SEQ ID NO: 2022443 - DNA, 15 bp, Homo sapiens
agcatcaggatcttg

SEQ ID NO: 2022444 - DNA, 15 bp, Homo sapiens
gcatcaggatcttga

SEQ ID NO: 2022445 - DNA, 15 bp, Homo sapiens
catcaggatcttgat

SEQ ID NO: 2022446 - DNA, 15 bp, Homo sapiens
atcaggatcttgatg

SEQ ID NO: 2022447 - DNA, 15 bp, Homo sapiens
tcaggatcttgatga

SEQ ID NO: 2022448 - DNA, 15 bp, Homo sapiens
caggatcttgatgat

SEQ ID NO: 2022449 - DNA, 15 bp, Homo sapiens
aggatcttgatgatt

SEQ ID NO: 2022450 - DNA, 15 bp, Homo sapiens
ggatcttgatgattt

SEQ ID NO: 2022451 - DNA, 15 bp, Homo sapiens
gatcttgatgatttg

SEQ ID NO: 2022452 - DNA, 15 bp, Homo sapiens
atcttgatgatttgg

SEQ ID NO: 2022453 - DNA, 15 bp, Homo sapiens
tcttgatgatttggg

SEQ ID NO: 2022454 - DNA, 15 bp, Homo sapiens
cttgatgatttggga

SEQ ID NO: 2022455 - DNA, 15 bp, Homo sapiens
ttgatgatttgggat

SEQ ID NO: 2022456 - DNA, 15 bp, Homo sapiens
tgatgatttgggatg

SEQ ID NO: 2022457 - DNA, 15 bp, Homo sapiens
gatgatttgggatga

SEQ ID NO: 2022458 - DNA, 15 bp, Homo sapiens
atgatttgggatgaa

SEQ ID NO: 2022459 - DNA, 15 bp, Homo sapiens
tgatttgggatgaag

SEQ ID NO: 2022460 - DNA, 15 bp, Homo sapiens
gatttgggatgaagt

SEQ ID NO: 2022461 - DNA, 15 bp, Homo sapiens
atttgggatgaagtg

SEQ ID NO: 2022462 - DNA, 15 bp, Homo sapiens
tttgggatgaagtgg

SEQ ID NO: 2022463 - DNA, 15 bp, Homo sapiens
ttgggatgaagtggc

SEQ ID NO: 2022464 - DNA, 15 bp, Homo sapiens
tgggatgaagtggca

SEQ ID NO: 2022465 - DNA, 15 bp, Homo sapiens
gggatgaagtggcag

SEQ ID NO: 2022466 - DNA, 15 bp, Homo sapiens
ggatgaagtggcagg

SEQ ID NO: 2022467 - DNA, 15 bp, Homo sapiens
gatgaagtggcaggt

SEQ ID NO: 2022468 - DNA, 15 bp, Homo sapiens
atgaagtggcaggtt

SEQ ID NO: 2022469 - DNA, 15 bp, Homo sapiens
tgaagtggcaggtta

SEQ ID NO: 2022470 - DNA, 15 bp, Homo sapiens
gaagtggcaggttat

SEQ ID NO: 2022471 - DNA, 15 bp, Homo sapiens
aagtggcaggttata

SEQ ID NO: 2022472 - DNA, 15 bp, Homo sapiens
agtggcaggttataa

SEQ ID NO: 2022473 - DNA, 15 bp, Homo sapiens
gtggcaggttataag

SEQ ID NO: 2022474 - DNA, 15 bp, Homo sapiens
tggcaggttataagc

SEQ ID NO: 2022475 - DNA, 15 bp, Homo sapiens
ggcaggttataagca

SEQ ID NO: 2022476 - DNA, 15 bp, Homo sapiens
gcaggttataagcat

SEQ ID NO: 2022477 - DNA, 15 bp, Homo sapiens
caggttataagcatc

SEQ ID NO: 2022478 - DNA, 15 bp, Homo sapiens
ggttataagcatctc

SEQ ID NO: 2022479 - DNA, 15 bp, Homo sapiens
gttataagcatctca

SEQ ID NO: 2022480 - DNA, 15 bp, Homo sapiens
ttataagcatctcaa

SEQ ID NO: 2022481 - DNA, 15 bp, Homo sapiens
tataagcatctcaac

SEQ ID NO: 2022482 - DNA, 15 bp, Homo sapiens
ataagcatctcaaca

SEQ ID NO: 2022483 - DNA, 15 bp, Homo sapiens
taagcatctcaacag

SEQ ID NO: 2022484 - DNA, 15 bp, Homo sapiens
aagcatctcaacaga

SEQ ID NO: 2022485 - DNA, 15 bp, Homo sapiens
agcatctcaacagat

SEQ ID NO: 2022486 - DNA, 15 bp, Homo sapiens
gcatctcaacagata

SEQ ID NO: 2022487 - DNA, 15 bp, Homo sapiens
catctcaacagataa

SEQ ID NO: 2022488 - DNA, 15 bp, Homo sapiens
atctcaacagataat

SEQ ID NO: 2022489 - DNA, 15 bp, Homo sapiens
tctcaacagataatt

SEQ ID NO: 2022490 - DNA, 15 bp, Homo sapiens
ctcaacagataattg

SEQ ID NO: 2022491 - DNA, 15 bp, Homo sapiens
tcaacagataattga

SEQ ID NO: 2022492 - DNA, 15 bp, Homo sapiens
caacagataattgaa

SEQ ID NO: 2022493 - DNA, 15 bp, Homo sapiens
aacagataattgaaa

SEQ ID NO: 2022494 - DNA, 15 bp, Homo sapiens
acagataattgaaaa

SEQ ID NO: 2022495 - DNA, 15 bp, Homo sapiens
cagataattgaaaat

SEQ ID NO: 2022496 - DNA, 15 bp, Homo sapiens
agataattgaaaatg

SEQ ID NO: 2022497 - DNA, 15 bp, Homo sapiens
gataattgaaaatgt

SEQ ID NO: 2022498 - DNA, 15 bp, Homo sapiens
ataattgaaaatgtt

SEQ ID NO: 2022499 - DNA, 15 bp, Homo sapiens
taattgaaaatgttg

SEQ ID NO: 2022500 - DNA, 15 bp, Homo sapiens
aattgaaaatgttga

SEQ ID NO: 2022501 - DNA, 15 bp, Homo sapiens
attgaaaatgttgaa

SEQ ID NO: 2022502 - DNA, 15 bp, Homo sapiens
ttgaaaatgttgaat

SEQ ID NO: 2022503 - DNA, 15 bp, Homo sapiens
tgaaaatgttgaatt

SEQ ID NO: 2022504 - DNA, 15 bp, Homo sapiens
gaaaatgttgaattt

SEQ ID NO: 2022505 - DNA, 15 bp, Homo sapiens
aaaatgttgaatttc

SEQ ID NO: 2022506 - DNA, 15 bp, Homo sapiens
aaatgttgaatttcc

SEQ ID NO: 2022507 - DNA, 15 bp, Homo sapiens
aatgttgaatttccg

SEQ ID NO: 2022508 - DNA, 15 bp, Homo sapiens
atgttgaatttccgc

SEQ ID NO: 2022509 - DNA, 15 bp, Homo sapiens
tgttgaatttccgct

SEQ ID NO: 2022510 - DNA, 15 bp, Homo sapiens
gttgaatttccgctt

SEQ ID NO: 2022511 - DNA, 15 bp, Homo sapiens
ttgaatttccgcttt

SEQ ID NO: 2022512 - DNA, 15 bp, Homo sapiens
tgaatttccgctttg

SEQ ID NO: 2022513 - DNA, 15 bp, Homo sapiens
gaatttccgctttgg

SEQ ID NO: 2022514 - DNA, 15 bp, Homo sapiens
aatttccgctttggc

SEQ ID NO: 2022515 - DNA, 15 bp, Homo sapiens
atttccgctttggcc

SEQ ID NO: 2022516 - DNA, 15 bp, Homo sapiens
tttccgctttggccc

SEQ ID NO: 2022517 - DNA, 15 bp, Homo sapiens
ttccgctttggccct

SEQ ID NO: 2022518 - DNA, 15 bp, Homo sapiens
tccgctttggccctg

SEQ ID NO: 2022519 - DNA, 15 bp, Homo sapiens
ccgctttggccctga

SEQ ID NO: 2022520 - DNA, 15 bp, Homo sapiens
cgctttggccctgag

SEQ ID NO: 2022521 - DNA, 15 bp, Homo sapiens
gctttggccctgagc

SEQ ID NO: 2022522 - DNA, 15 bp, Homo sapiens
ctttggccctgagct

SEQ ID NO: 2022523 - DNA, 15 bp, Homo sapiens
tttggccctgagctt

SEQ ID NO: 2022524 - DNA, 15 bp, Homo sapiens
ttggccctgagcttg

SEQ ID NO: 2022525 - DNA, 15 bp, Homo sapiens
tggccctgagcttgc

SEQ ID NO: 2022526 - DNA, 15 bp, Homo sapiens
ggccctgagcttgct

SEQ ID NO: 2022527 - DNA, 15 bp, Homo sapiens
gccctgagcttgctg

SEQ ID NO: 2022528 - DNA, 15 bp, Homo sapiens
ccctgagcttgctgg

SEQ ID NO: 2022529 - DNA, 15 bp, Homo sapiens
cctgagcttgctgga

SEQ ID NO: 2022530 - DNA, 15 bp, Homo sapiens
ctgagcttgctggaa

SEQ ID NO: 2022531 - DNA, 15 bp, Homo sapiens
tgagcttgctggaaa

SEQ ID NO: 2022532 - DNA, 15 bp, Homo sapiens
gagcttgctggaaac

SEQ ID NO: 2022533 - DNA, 15 bp, Homo sapiens
agcttgctggaaact

SEQ ID NO: 2022534 - DNA, 15 bp, Homo sapiens
gcttgctggaaacta

SEQ ID NO: 2022535 - DNA, 15 bp, Homo sapiens
cttgctggaaactag

SEQ ID NO: 2022536 - DNA, 15 bp, Homo sapiens
ttgctggaaactagt

SEQ ID NO: 2022537 - DNA, 15 bp, Homo sapiens
tgctggaaactagta

SEQ ID NO: 2022538 - DNA, 15 bp, Homo sapiens
gctggaaactagtac

SEQ ID NO: 2022539 - DNA, 15 bp, Homo sapiens
ctggaaactagtaca

SEQ ID NO: 2022540 - DNA, 15 bp, Homo sapiens
tggaaactagtacaa

SEQ ID NO: 2022541 - DNA, 15 bp, Homo sapiens
ggaaactagtacaaa

SEQ ID NO: 2022542 - DNA, 15 bp, Homo sapiens
gaaactagtacaaaa

SEQ ID NO: 2022543 - DNA, 15 bp, Homo sapiens
aaactagtacaaaaa

SEQ ID NO: 2022544 - DNA, 15 bp, Homo sapiens
aactagtacaaaaag

SEQ ID NO: 2022545 - DNA, 15 bp, Homo sapiens
actagtacaaaaagg

SEQ ID NO: 2022546 - DNA, 15 bp, Homo sapiens
ctagtacaaaaagga

SEQ ID NO: 2022547 - DNA, 15 bp, Homo sapiens
tagtacaaaaaggag

SEQ ID NO: 2022548 - DNA, 15 bp, Homo sapiens
agtacaaaaaggaga

SEQ ID NO: 2022549 - DNA, 15 bp, Homo sapiens
gtacaaaaaggagac

SEQ ID NO: 2022550 - DNA, 15 bp, Homo sapiens
tacaaaaaggagaca

SEQ ID NO: 2022551 - DNA, 15 bp, Homo sapiens
acaaaaaggagacaa

SEQ ID NO: 2022552 - DNA, 15 bp, Homo sapiens
caaaaaggagacaag

SEQ ID NO: 2022553 - DNA, 15 bp, Homo sapiens
aaaaaggagacaagt

SEQ ID NO: 2022554 - DNA, 15 bp, Homo sapiens
aaaaggagacaagtt

SEQ ID NO: 2022555 - DNA, 15 bp, Homo sapiens
aaaggagacaagtta

SEQ ID NO: 2022556 - DNA, 15 bp, Homo sapiens
aaggagacaagttat

SEQ ID NO: 2022557 - DNA, 15 bp, Homo sapiens
aggagacaagttata

SEQ ID NO: 2022558 - DNA, 15 bp, Homo sapiens
ggagacaagttatat

SEQ ID NO: 2022559 - DNA, 15 bp, Homo sapiens
gagacaagttatatt

SEQ ID NO: 2022560 - DNA, 15 bp, Homo sapiens
agacaagttatatta

SEQ ID NO: 2022561 - DNA, 15 bp, Homo sapiens
gacaagttatattat

SEQ ID NO: 2022562 - DNA, 15 bp, Homo sapiens
acaagttatattata

SEQ ID NO: 2022563 - DNA, 15 bp, Homo sapiens
caagttatattatac

SEQ ID NO: 2022564 - DNA, 15 bp, Homo sapiens
aagttatattataca

SEQ ID NO: 2022565 - DNA, 15 bp, Homo sapiens
agttatattatacat

SEQ ID NO: 2022566 - DNA, 15 bp, Homo sapiens
gttatattatacatt

SEQ ID NO: 2022567 - DNA, 15 bp, Homo sapiens
ttatattatacattt

SEQ ID NO: 2022568 - DNA, 15 bp, Homo sapiens
atattatacattttt

SEQ ID NO: 2022569 - DNA, 15 bp, Homo sapiens
tattatacatttttt

SEQ ID NO: 2022570 - DNA, 15 bp, Homo sapiens
attatacatttttta

SEQ ID NO: 2022571 - DNA, 15 bp, Homo sapiens
ttatacattttttaa

SEQ ID NO: 2022572 - DNA, 15 bp, Homo sapiens
tatacattttttaaa

SEQ ID NO: 2022573 - DNA, 15 bp, Homo sapiens
atacattttttaaat

SEQ ID NO: 2022574 - DNA, 15 bp, Homo sapiens
tacattttttaaatc

SEQ ID NO: 2022575 - DNA, 15 bp, Homo sapiens
acattttttaaatct

SEQ ID NO: 2022576 - DNA, 15 bp, Homo sapiens
cattttttaaatcta

SEQ ID NO: 2022577 - DNA, 15 bp, Homo sapiens
attttttaaatctac

SEQ ID NO: 2022578 - DNA, 15 bp, Homo sapiens
ttttttaaatctacc

SEQ ID NO: 2022579 - DNA, 15 bp, Homo sapiens
tttttaaatctacca

SEQ ID NO: 2022580 - DNA, 15 bp, Homo sapiens
ttttaaatctaccaa

SEQ ID NO: 2022581 - DNA, 15 bp, Homo sapiens
tttaaatctaccaaa

SEQ ID NO: 2022582 - DNA, 15 bp, Homo sapiens
ttaaatctaccaaat

SEQ ID NO: 2022583 - DNA, 15 bp, Homo sapiens
taaatctaccaaatg

SEQ ID NO: 2022584 - DNA, 15 bp, Homo sapiens
aaatctaccaaatga

SEQ ID NO: 2022585 - DNA, 15 bp, Homo sapiens
aatctaccaaatgat

SEQ ID NO: 2022586 - DNA, 15 bp, Homo sapiens
atctaccaaatgatt

SEQ ID NO: 2022587 - DNA, 15 bp, Homo sapiens
tctaccaaatgattg

SEQ ID NO: 2022588 - DNA, 15 bp, Homo sapiens
ctaccaaatgattga

SEQ ID NO: 2022589 - DNA, 15 bp, Homo sapiens
taccaaatgattgat

SEQ ID NO: 2022590 - DNA, 15 bp, Homo sapiens
accaaatgattgatt

SEQ ID NO: 2022591 - DNA, 15 bp, Homo sapiens
ccaaatgattgattt

SEQ ID NO: 2022592 - DNA, 15 bp, Homo sapiens
caaatgattgattta

SEQ ID NO: 2022593 - DNA, 15 bp, Homo sapiens
aaatgattgatttaa

SEQ ID NO: 2022594 - DNA, 15 bp, Homo sapiens
aatgattgatttaaa

SEQ ID NO: 2022595 - DNA, 15 bp, Homo sapiens
atgattgatttaaat

SEQ ID NO: 2022596 - DNA, 15 bp, Homo sapiens
tgattgatttaaata

SEQ ID NO: 2022597 - DNA, 15 bp, Homo sapiens
gattgatttaaatag

SEQ ID NO: 2022598 - DNA, 15 bp, Homo sapiens
ttgatttaaatagaa

SEQ ID NO: 2022599 - DNA, 15 bp, Homo sapiens
tgatttaaatagaaa

SEQ ID NO: 2022600 - DNA, 15 bp, Homo sapiens
gatttaaatagaaat

SEQ ID NO: 2022601 - DNA, 15 bp, Homo sapiens
atttaaatagaaatg

SEQ ID NO: 2022602 - DNA, 15 bp, Homo sapiens
tttaaatagaaatgg

SEQ ID NO: 2022603 - DNA, 15 bp, Homo sapiens
ttaaatagaaatggc

SEQ ID NO: 2022604 - DNA, 15 bp, Homo sapiens
taaatagaaatggca

SEQ ID NO: 2022605 - DNA, 15 bp, Homo sapiens
aaatagaaatggcat

SEQ ID NO: 2022606 - DNA, 15 bp, Homo sapiens
aatagaaatggcata

SEQ ID NO: 2022607 - DNA, 15 bp, Homo sapiens
atagaaatggcatat

SEQ ID NO: 2022608 - DNA, 15 bp, Homo sapiens
tagaaatggcatatc

SEQ ID NO: 2022609 - DNA, 15 bp, Homo sapiens
agaaatggcatatct

SEQ ID NO: 2022610 - DNA, 15 bp, Homo sapiens
gaaatggcatatctt

SEQ ID NO: 2022611 - DNA, 15 bp, Homo sapiens
aaatggcatatctta

SEQ ID NO: 2022612 - DNA, 15 bp, Homo sapiens
aatggcatatcttag

SEQ ID NO: 2022613 - DNA, 15 bp, Homo sapiens
atggcatatcttaga

SEQ ID NO: 2022614 - DNA, 15 bp, Homo sapiens
tggcatatcttagaa

SEQ ID NO: 2022615 - DNA, 15 bp, Homo sapiens
ggcatatcttagaat

SEQ ID NO: 2022616 - DNA, 15 bp, Homo sapiens
gcatatcttagaatt

SEQ ID NO: 2022617 - DNA, 15 bp, Homo sapiens
catatcttagaattt

SEQ ID NO: 2022618 - DNA, 15 bp, Homo sapiens
atatcttagaattta

SEQ ID NO: 2022619 - DNA, 15 bp, Homo sapiens
tatcttagaatttaa

SEQ ID NO: 2022620 - DNA, 15 bp, Homo sapiens
atcttagaatttaac

SEQ ID NO: 2022621 - DNA, 15 bp, Homo sapiens
tcttagaatttaaca

SEQ ID NO: 2022622 - DNA, 15 bp, Homo sapiens
cttagaatttaacag

SEQ ID NO: 2022623 - DNA, 15 bp, Homo sapiens
ttagaatttaacagt

SEQ ID NO: 2022624 - DNA, 15 bp, Homo sapiens
tagaatttaacagtt

SEQ ID NO: 2022625 - DNA, 15 bp, Homo sapiens
agaatttaacagttc

SEQ ID NO: 2022626 - DNA, 15 bp, Homo sapiens
gaatttaacagttcc

SEQ ID NO: 2022627 - DNA, 15 bp, Homo sapiens
aatttaacagttcca

SEQ ID NO: 2022628 - DNA, 15 bp, Homo sapiens
atttaacagttccat

SEQ ID NO: 2022629 - DNA, 15 bp, Homo sapiens
tttaacagttccatg

SEQ ID NO: 2022630 - DNA, 15 bp, Homo sapiens
ttaacagttccatgt

SEQ ID NO: 2022631 - DNA, 15 bp, Homo sapiens
taacagttccatgta

SEQ ID NO: 2022632 - DNA, 15 bp, Homo sapiens
aacagttccatgtac

SEQ ID NO: 2022633 - DNA, 15 bp, Homo sapiens
acagttccatgtact

SEQ ID NO: 2022634 - DNA, 15 bp, Homo sapiens
cagttccatgtactg

SEQ ID NO: 2022635 - DNA, 15 bp, Homo sapiens
agttccatgtactgc

SEQ ID NO: 2022636 - DNA, 15 bp, Homo sapiens
gttccatgtactgct

SEQ ID NO: 2022637 - DNA, 15 bp, Homo sapiens
ttccatgtactgcta

SEQ ID NO: 2022638 - DNA, 15 bp, Homo sapiens
tccatgtactgctaa

SEQ ID NO: 2022639 - DNA, 15 bp, Homo sapiens
ccatgtactgctaac

SEQ ID NO: 2022640 - DNA, 15 bp, Homo sapiens
catgtactgctaacc

SEQ ID NO: 2022641 - DNA, 15 bp, Homo sapiens
atgtactgctaaccc

SEQ ID NO: 2022642 - DNA, 15 bp, Homo sapiens
tgtactgctaaccca

SEQ ID NO: 2022643 - DNA, 15 bp, Homo sapiens
gtactgctaacccag

SEQ ID NO: 2022644 - DNA, 15 bp, Homo sapiens
tactgctaacccagc

SEQ ID NO: 2022645 - DNA, 15 bp, Homo sapiens
actgctaacccagca

SEQ ID NO: 2022646 - DNA, 15 bp, Homo sapiens
ctgctaacccagcag

SEQ ID NO: 2022647 - DNA, 15 bp, Homo sapiens
tgctaacccagcagg

SEQ ID NO: 2022648 - DNA, 15 bp, Homo sapiens
gctaacccagcagga

SEQ ID NO: 2022649 - DNA, 15 bp, Homo sapiens
ctaacccagcaggaa

SEQ ID NO: 2022650 - DNA, 15 bp, Homo sapiens
taacccagcaggaaa

SEQ ID NO: 2022651 - DNA, 15 bp, Homo sapiens
aacccagcaggaaag

SEQ ID NO: 2022652 - DNA, 15 bp, Homo sapiens
acccagcaggaaaga

SEQ ID NO: 2022653 - DNA, 15 bp, Homo sapiens
cccagcaggaaagat

SEQ ID NO: 2022654 - DNA, 15 bp, Homo sapiens
ccagcaggaaagatt

SEQ ID NO: 2022655 - DNA, 15 bp, Homo sapiens
cagcaggaaagattt

SEQ ID NO: 2022656 - DNA, 15 bp, Homo sapiens
agcaggaaagattta

SEQ ID NO: 2022657 - DNA, 15 bp, Homo sapiens
gcaggaaagatttat

SEQ ID NO: 2022658 - DNA, 15 bp, Homo sapiens
caggaaagatttata

SEQ ID NO: 2022659 - DNA, 15 bp, Homo sapiens
aggaaagatttataa

SEQ ID NO: 2022660 - DNA, 15 bp, Homo sapiens
ggaaagatttataat

SEQ ID NO: 2022661 - DNA, 15 bp, Homo sapiens
gaaagatttataatc

SEQ ID NO: 2022662 - DNA, 15 bp, Homo sapiens
aaagatttataatca

SEQ ID NO: 2022663 - DNA, 15 bp, Homo sapiens
aagatttataatcat

SEQ ID NO: 2022664 - DNA, 15 bp, Homo sapiens
agatttataatcatt

SEQ ID NO: 2022665 - DNA, 15 bp, Homo sapiens
gatttataatcatta

SEQ ID NO: 2022666 - DNA, 15 bp, Homo sapiens
atttataatcattat

SEQ ID NO: 2022667 - DNA, 15 bp, Homo sapiens
tttataatcattatt

SEQ ID NO: 2022668 - DNA, 15 bp, Homo sapiens
ttataatcattatta

SEQ ID NO: 2022669 - DNA, 15 bp, Homo sapiens
tataatcattattaa

SEQ ID NO: 2022670 - DNA, 15 bp, Homo sapiens
ataatcattattaag

SEQ ID NO: 2022671 - DNA, 15 bp, Homo sapiens
taatcattattaagg

SEQ ID NO: 2022672 - DNA, 15 bp, Homo sapiens
aatcattattaaggt

SEQ ID NO: 2022673 - DNA, 15 bp, Homo sapiens
atcattattaaggta

SEQ ID NO: 2022674 - DNA, 15 bp, Homo sapiens
tcattattaaggtat

SEQ ID NO: 2022675 - DNA, 15 bp, Homo sapiens
cattattaaggtatc

SEQ ID NO: 2022676 - DNA, 15 bp, Homo sapiens
attattaaggtatct

SEQ ID NO: 2022677 - DNA, 15 bp, Homo sapiens
ttattaaggtatctt

SEQ ID NO: 2022678 - DNA, 15 bp, Homo sapiens
tattaaggtatctta

SEQ ID NO: 2022679 - DNA, 15 bp, Homo sapiens
attaaggtatcttat

SEQ ID NO: 2022680 - DNA, 15 bp, Homo sapiens
ttaaggtatcttata

SEQ ID NO: 2022681 - DNA, 15 bp, Homo sapiens
taaggtatcttataa

SEQ ID NO: 2022682 - DNA, 15 bp, Homo sapiens
aaggtatcttataat

SEQ ID NO: 2022683 - DNA, 15 bp, Homo sapiens
aggtatcttataata

SEQ ID NO: 2022684 - DNA, 15 bp, Homo sapiens
ggtatcttataataa

SEQ ID NO: 2022685 - DNA, 15 bp, Homo sapiens
gtatcttataataat

SEQ ID NO: 2022686 - DNA, 15 bp, Homo sapiens
tatcttataataata

SEQ ID NO: 2022687 - DNA, 15 bp, Homo sapiens
atcttataataatat

SEQ ID NO: 2022688 - DNA, 15 bp, Homo sapiens
tcttataataatata

SEQ ID NO: 2022689 - DNA, 15 bp, Homo sapiens
cttataataatatac

SEQ ID NO: 2022690 - DNA, 15 bp, Homo sapiens
ttataataatatacc

SEQ ID NO: 2022691 - DNA, 15 bp, Homo sapiens
tataataatatacca

SEQ ID NO: 2022692 - DNA, 15 bp, Homo sapiens
ataataatataccag

SEQ ID NO: 2022693 - DNA, 15 bp, Homo sapiens
taataatataccagt

SEQ ID NO: 2022694 - DNA, 15 bp, Homo sapiens
aataatataccagtt

SEQ ID NO: 2022695 - DNA, 15 bp, Homo sapiens
ataatataccagttt

SEQ ID NO: 2022696 - DNA, 15 bp, Homo sapiens
taatataccagtttg

SEQ ID NO: 2022697 - DNA, 15 bp, Homo sapiens
aatataccagtttgt

SEQ ID NO: 2022698 - DNA, 15 bp, Homo sapiens
atataccagtttgtc

SEQ ID NO: 2022699 - DNA, 15 bp, Homo sapiens
tataccagtttgtct

SEQ ID NO: 2022700 - DNA, 15 bp, Homo sapiens
ataccagtttgtctt

SEQ ID NO: 2022701 - DNA, 15 bp, Homo sapiens
taccagtttgtcttg

SEQ ID NO: 2022702 - DNA, 15 bp, Homo sapiens
accagtttgtcttga

SEQ ID NO: 2022703 - DNA, 15 bp, Homo sapiens
ccagtttgtcttgag

SEQ ID NO: 2022704 - DNA, 15 bp, Homo sapiens
cagtttgtcttgagc

SEQ ID NO: 2022705 - DNA, 15 bp, Homo sapiens
agtttgtcttgagct

SEQ ID NO: 2022706 - DNA, 15 bp, Homo sapiens
gtttgtcttgagcta

SEQ ID NO: 2022707 - DNA, 15 bp, Homo sapiens
tttgtcttgagctac

SEQ ID NO: 2022708 - DNA, 15 bp, Homo sapiens
ttgtcttgagctact

SEQ ID NO: 2022709 - DNA, 15 bp, Homo sapiens
tgtcttgagctactt

SEQ ID NO: 2022710 - DNA, 15 bp, Homo sapiens
gtcttgagctacttt

SEQ ID NO: 2022711 - DNA, 15 bp, Homo sapiens
tcttgagctactttt

SEQ ID NO: 2022712 - DNA, 15 bp, Homo sapiens
cttgagctacttttg

SEQ ID NO: 2022713 - DNA, 15 bp, Homo sapiens
ttgagctacttttga

SEQ ID NO: 2022714 - DNA, 15 bp, Homo sapiens
tgagctacttttgaa

SEQ ID NO: 2022715 - DNA, 15 bp, Homo sapiens
gagctacttttgaaa

SEQ ID NO: 2022716 - DNA, 15 bp, Homo sapiens
agctacttttgaaag

SEQ ID NO: 2022717 - DNA, 15 bp, Homo sapiens
gctacttttgaaagg

SEQ ID NO: 2022718 - DNA, 15 bp, Homo sapiens
ctacttttgaaagga

SEQ ID NO: 2022719 - DNA, 15 bp, Homo sapiens
tacttttgaaaggag

SEQ ID NO: 2022720 - DNA, 15 bp, Homo sapiens
acttttgaaaggagt

SEQ ID NO: 2022721 - DNA, 15 bp, Homo sapiens
cttttgaaaggagta

SEQ ID NO: 2022722 - DNA, 15 bp, Homo sapiens
ttttgaaaggagtat

SEQ ID NO: 2022723 - DNA, 15 bp, Homo sapiens
tttgaaaggagtatt

SEQ ID NO: 2022724 - DNA, 15 bp, Homo sapiens
ttgaaaggagtattt

SEQ ID NO: 2022725 - DNA, 15 bp, Homo sapiens
tgaaaggagtatttt

SEQ ID NO: 2022726 - DNA, 15 bp, Homo sapiens
gaaaggagtatttta

SEQ ID NO: 2022727 - DNA, 15 bp, Homo sapiens
aaaggagtattttat

SEQ ID NO: 2022728 - DNA, 15 bp, Homo sapiens
aaggagtattttatt

SEQ ID NO: 2022729 - DNA, 15 bp, Homo sapiens
aggagtattttattg

SEQ ID NO: 2022730 - DNA, 15 bp, Homo sapiens
ggagtattttattgt

SEQ ID NO: 2022731 - DNA, 15 bp, Homo sapiens
gagtattttattgtt

SEQ ID NO: 2022732 - DNA, 15 bp, Homo sapiens
agtattttattgtta

SEQ ID NO: 2022733 - DNA, 15 bp, Homo sapiens
gtattttattgttag

SEQ ID NO: 2022734 - DNA, 15 bp, Homo sapiens
tattttattgttagc

SEQ ID NO: 2022735 - DNA, 15 bp, Homo sapiens
attttattgttagca

SEQ ID NO: 2022736 - DNA, 15 bp, Homo sapiens
ttttattgttagcat

SEQ ID NO: 2022737 - DNA, 15 bp, Homo sapiens
tttattgttagcatt

SEQ ID NO: 2022738 - DNA, 15 bp, Homo sapiens
ttattgttagcattt

SEQ ID NO: 2022739 - DNA, 15 bp, Homo sapiens
tattgttagcattta

SEQ ID NO: 2022740 - DNA, 15 bp, Homo sapiens
attgttagcatttat

SEQ ID NO: 2022741 - DNA, 15 bp, Homo sapiens
ttgttagcatttatt

SEQ ID NO: 2022742 - DNA, 15 bp, Homo sapiens
tgttagcatttattt

SEQ ID NO: 2022743 - DNA, 15 bp, Homo sapiens
gttagcatttatttg

SEQ ID NO: 2022744 - DNA, 15 bp, Homo sapiens
ttagcatttatttga

SEQ ID NO: 2022745 - DNA, 15 bp, Homo sapiens
tagcatttatttgaa

SEQ ID NO: 2022746 - DNA, 15 bp, Homo sapiens
agcatttatttgaat

SEQ ID NO: 2022747 - DNA, 15 bp, Homo sapiens
gcatttatttgaatg

SEQ ID NO: 2022748 - DNA, 15 bp, Homo sapiens
catttatttgaatga

SEQ ID NO: 2022749 - DNA, 15 bp, Homo sapiens
atttatttgaatgaa

SEQ ID NO: 2022750 - DNA, 15 bp, Homo sapiens
tttatttgaatgaac

SEQ ID NO: 2022751 - DNA, 15 bp, Homo sapiens
ttatttgaatgaact

SEQ ID NO: 2022752 - DNA, 15 bp, Homo sapiens
tatttgaatgaacta

SEQ ID NO: 2022753 - DNA, 15 bp, Homo sapiens
atttgaatgaactaa

SEQ ID NO: 2022754 - DNA, 15 bp, Homo sapiens
tttgaatgaactaaa

SEQ ID NO: 2022755 - DNA, 15 bp, Homo sapiens
ttgaatgaactaaaa

SEQ ID NO: 2022756 - DNA, 15 bp, Homo sapiens
tgaatgaactaaaag

SEQ ID NO: 2022757 - DNA, 15 bp, Homo sapiens
gaatgaactaaaagc

SEQ ID NO: 2022758 - DNA, 15 bp, Homo sapiens
aatgaactaaaagca

SEQ ID NO: 2022759 - DNA, 15 bp, Homo sapiens
atgaactaaaagcaa

SEQ ID NO: 2022760 - DNA, 15 bp, Homo sapiens
tgaactaaaagcaaa

SEQ ID NO: 2022761 - DNA, 15 bp, Homo sapiens
gaactaaaagcaaaa

SEQ ID NO: 2022762 - DNA, 15 bp, Homo sapiens
aactaaaagcaaaac

SEQ ID NO: 2022763 - DNA, 15 bp, Homo sapiens
actaaaagcaaaact

SEQ ID NO: 2022764 - DNA, 15 bp, Homo sapiens
ctaaaagcaaaacta

SEQ ID NO: 2022765 - DNA, 15 bp, Homo sapiens
taaaagcaaaactat

SEQ ID NO: 2022766 - DNA, 15 bp, Homo sapiens
aaaagcaaaactata

SEQ ID NO: 2022767 - DNA, 15 bp, Homo sapiens
aaagcaaaactatat

SEQ ID NO: 2022768 - DNA, 15 bp, Homo sapiens
aagcaaaactatatt

SEQ ID NO: 2022769 - DNA, 15 bp, Homo sapiens
agcaaaactatattg

SEQ ID NO: 2022770 - DNA, 15 bp, Homo sapiens
gcaaaactatattgt

SEQ ID NO: 2022771 - DNA, 15 bp, Homo sapiens
caaaactatattgtt

SEQ ID NO: 2022772 - DNA, 15 bp, Homo sapiens
aaaactatattgttc

SEQ ID NO: 2022773 - DNA, 15 bp, Homo sapiens
aaactatattgttct

SEQ ID NO: 2022774 - DNA, 15 bp, Homo sapiens
aactatattgttctc

SEQ ID NO: 2022775 - DNA, 15 bp, Homo sapiens
actatattgttctcc

SEQ ID NO: 2022776 - DNA, 15 bp, Homo sapiens
ctatattgttctcct

SEQ ID NO: 2022777 - DNA, 15 bp, Homo sapiens
tatattgttctcctg

SEQ ID NO: 2022778 - DNA, 15 bp, Homo sapiens
atattgttctcctga

SEQ ID NO: 2022779 - DNA, 15 bp, Homo sapiens
tattgttctcctgag

SEQ ID NO: 2022780 - DNA, 15 bp, Homo sapiens
attgttctcctgaga

SEQ ID NO: 2022781 - DNA, 15 bp, Homo sapiens
ttgttctcctgagat

SEQ ID NO: 2022782 - DNA, 15 bp, Homo sapiens
tgttctcctgagatt

SEQ ID NO: 2022783 - DNA, 15 bp, Homo sapiens
gttctcctgagattt

SEQ ID NO: 2022784 - DNA, 15 bp, Homo sapiens
ttctcctgagattta

SEQ ID NO: 2022785 - DNA, 15 bp, Homo sapiens
tctcctgagatttac

SEQ ID NO: 2022786 - DNA, 15 bp, Homo sapiens
ctcctgagatttact

SEQ ID NO: 2022787 - DNA, 15 bp, Homo sapiens
tcctgagatttacta

SEQ ID NO: 2022788 - DNA, 15 bp, Homo sapiens
cctgagatttactaa

SEQ ID NO: 2022789 - DNA, 15 bp, Homo sapiens
ctgagatttactaaa

SEQ ID NO: 2022790 - DNA, 15 bp, Homo sapiens
tgagatttactaaat

SEQ ID NO: 2022791 - DNA, 15 bp, Homo sapiens
gagatttactaaatg

SEQ ID NO: 2022792 - DNA, 15 bp, Homo sapiens
agatttactaaatga

SEQ ID NO: 2022793 - DNA, 15 bp, Homo sapiens
gatttactaaatgaa

SEQ ID NO: 2022794 - DNA, 15 bp, Homo sapiens
atttactaaatgaaa

SEQ ID NO: 2022795 - DNA, 15 bp, Homo sapiens
tttactaaatgaaat

SEQ ID NO: 2022796 - DNA, 15 bp, Homo sapiens
ttactaaatgaaatt

SEQ ID NO: 2022797 - DNA, 15 bp, Homo sapiens
tactaaatgaaattg

SEQ ID NO: 2022798 - DNA, 15 bp, Homo sapiens
actaaatgaaattgc

SEQ ID NO: 2022799 - DNA, 15 bp, Homo sapiens
ctaaatgaaattgcc

SEQ ID NO: 2022800 - DNA, 15 bp, Homo sapiens
taaatgaaattgcct

SEQ ID NO: 2022801 - DNA, 15 bp, Homo sapiens
aaatgaaattgcctg

SEQ ID NO: 2022802 - DNA, 15 bp, Homo sapiens
aatgaaattgcctgg

SEQ ID NO: 2022803 - DNA, 15 bp, Homo sapiens
atgaaattgcctggt

SEQ ID NO: 2022804 - DNA, 15 bp, Homo sapiens
tgaaattgcctggtt

SEQ ID NO: 2022805 - DNA, 15 bp, Homo sapiens
gaaattgcctggtta

SEQ ID NO: 2022806 - DNA, 15 bp, Homo sapiens
aaattgcctggttaa

SEQ ID NO: 2022807 - DNA, 15 bp, Homo sapiens
aattgcctggttaag

SEQ ID NO: 2022808 - DNA, 15 bp, Homo sapiens
tgcctggttaagaac

SEQ ID NO: 2022809 - DNA, 15 bp, Homo sapiens
gcctggttaagaacc

SEQ ID NO: 2022810 - DNA, 15 bp, Homo sapiens
cctggttaagaaccc

SEQ ID NO: 2022811 - DNA, 15 bp, Homo sapiens
ctggttaagaaccct

SEQ ID NO: 2022812 - DNA, 15 bp, Homo sapiens
tggttaagaacccta

SEQ ID NO: 2022813 - DNA, 15 bp, Homo sapiens
ggttaagaaccctac

SEQ ID NO: 2022814 - DNA, 15 bp, Homo sapiens
gttaagaaccctacg

SEQ ID NO: 2022815 - DNA, 15 bp, Homo sapiens
ttaagaaccctacgt

SEQ ID NO: 2022816 - DNA, 15 bp, Homo sapiens
taagaaccctacgta

SEQ ID NO: 2022817 - DNA, 15 bp, Homo sapiens
aagaaccctacgtat

SEQ ID NO: 2022818 - DNA, 15 bp, Homo sapiens
agaaccctacgtatg

SEQ ID NO: 2022819 - DNA, 15 bp, Homo sapiens
gaaccctacgtatgc

SEQ ID NO: 2022820 - DNA, 15 bp, Homo sapiens
aaccctacgtatgct

SEQ ID NO: 2022821 - DNA, 15 bp, Homo sapiens
accctacgtatgcta

SEQ ID NO: 2022822 - DNA, 15 bp, Homo sapiens
ccctacgtatgctat

SEQ ID NO: 2022823 - DNA, 15 bp, Homo sapiens
cctacgtatgctata

SEQ ID NO: 2022824 - DNA, 15 bp, Homo sapiens
ctacgtatgctatag

SEQ ID NO: 2022825 - DNA, 15 bp, Homo sapiens
tacgtatgctataga

SEQ ID NO: 2022826 - DNA, 15 bp, Homo sapiens
acgtatgctatagaa

SEQ ID NO: 2022827 - DNA, 15 bp, Homo sapiens
cgtatgctatagaaa

SEQ ID NO: 2022828 - DNA, 15 bp, Homo sapiens
gtatgctatagaaat

SEQ ID NO: 2022829 - DNA, 15 bp, Homo sapiens
tatgctatagaaatt

SEQ ID NO: 2022830 - DNA, 15 bp, Homo sapiens
atgctatagaaattc

SEQ ID NO: 2022831 - DNA, 15 bp, Homo sapiens
tgctatagaaattct

SEQ ID NO: 2022832 - DNA, 15 bp, Homo sapiens
gctatagaaattctt

SEQ ID NO: 2022833 - DNA, 15 bp, Homo sapiens
ctatagaaattcttc

SEQ ID NO: 2022834 - DNA, 15 bp, Homo sapiens
tatagaaattcttct

SEQ ID NO: 2022835 - DNA, 15 bp, Homo sapiens
atagaaattcttctc

SEQ ID NO: 2022836 - DNA, 15 bp, Homo sapiens
tagaaattcttctca

SEQ ID NO: 2022837 - DNA, 15 bp, Homo sapiens
agaaattcttctcaa

SEQ ID NO: 2022838 - DNA, 15 bp, Homo sapiens
gaaattcttctcaaa

SEQ ID NO: 2022839 - DNA, 15 bp, Homo sapiens
aaattcttctcaaat

SEQ ID NO: 2022840 - DNA, 15 bp, Homo sapiens
aattcttctcaaatg

SEQ ID NO: 2022841 - DNA, 15 bp, Homo sapiens
attcttctcaaatgt

SEQ ID NO: 2022842 - DNA, 15 bp, Homo sapiens
ttcttctcaaatgta

SEQ ID NO: 2022843 - DNA, 15 bp, Homo sapiens
tcttctcaaatgtac

SEQ ID NO: 2022844 - DNA, 15 bp, Homo sapiens
cttctcaaatgtact

SEQ ID NO: 2022845 - DNA, 15 bp, Homo sapiens
ttctcaaatgtactt

SEQ ID NO: 2022846 - DNA, 15 bp, Homo sapiens
tctcaaatgtactta

SEQ ID NO: 2022847 - DNA, 15 bp, Homo sapiens
ctcaaatgtacttag

SEQ ID NO: 2022848 - DNA, 15 bp, Homo sapiens
tcaaatgtacttagg

SEQ ID NO: 2022849 - DNA, 15 bp, Homo sapiens
caaatgtacttagga

SEQ ID NO: 2022850 - DNA, 15 bp, Homo sapiens
aaatgtacttaggag

SEQ ID NO: 2022851 - DNA, 15 bp, Homo sapiens
aatgtacttaggagt

SEQ ID NO: 2022852 - DNA, 15 bp, Homo sapiens
atgtacttaggagtc

SEQ ID NO: 2022853 - DNA, 15 bp, Homo sapiens
tgtacttaggagtcc

SEQ ID NO: 2022854 - DNA, 15 bp, Homo sapiens
gtacttaggagtcct

SEQ ID NO: 2022855 - DNA, 15 bp, Homo sapiens
tacttaggagtcctt

SEQ ID NO: 2022856 - DNA, 15 bp, Homo sapiens
acttaggagtccttt

SEQ ID NO: 2022857 - DNA, 15 bp, Homo sapiens
cttaggagtcctttt

SEQ ID NO: 2022858 - DNA, 15 bp, Homo sapiens
ttaggagtcctttta

SEQ ID NO: 2022859 - DNA, 15 bp, Homo sapiens
taggagtccttttat

SEQ ID NO: 2022860 - DNA, 15 bp, Homo sapiens
aggagtccttttatt

SEQ ID NO: 2022861 - DNA, 15 bp, Homo sapiens
ggagtccttttattt

SEQ ID NO: 2022862 - DNA, 15 bp, Homo sapiens
gagtccttttattta

SEQ ID NO: 2022863 - DNA, 15 bp, Homo sapiens
agtccttttatttaa

SEQ ID NO: 2022864 - DNA, 15 bp, Homo sapiens
gtccttttatttaaa

SEQ ID NO: 2022865 - DNA, 15 bp, Homo sapiens
tccttttatttaaaa

SEQ ID NO: 2022866 - DNA, 15 bp, Homo sapiens
ccttttatttaaaaa

SEQ ID NO: 2022867 - DNA, 15 bp, Homo sapiens
cttttatttaaaaaa

SEQ ID NO: 2022868 - DNA, 15 bp, Homo sapiens
ttttatttaaaaaaa

SEQ ID NO: 2022869 - DNA, 15 bp, Homo sapiens
tttatttaaaaaaaa

SEQ ID NO: 2022870 - DNA, 15 bp, Homo sapiens
ttatttaaaaaaaaa

SEQ ID NO: 2022871 - DNA, 15 bp, Homo sapiens
aaaaaaaaggcagat

SEQ ID NO: 2022872 - DNA, 15 bp, Homo sapiens
aaaaaaaggcagatt

SEQ ID NO: 2022873 - DNA, 15 bp, Homo sapiens
aaaaaaggcagattc

SEQ ID NO: 2022874 - DNA, 15 bp, Homo sapiens
aaaaaggcagattct

SEQ ID NO: 2022875 - DNA, 15 bp, Homo sapiens
aaaaggcagattctt

SEQ ID NO: 2022876 - DNA, 15 bp, Homo sapiens
aaaggcagattctta

SEQ ID NO: 2022877 - DNA, 15 bp, Homo sapiens
aaggcagattcttac

SEQ ID NO: 2022878 - DNA, 15 bp, Homo sapiens
aggcagattcttacc

SEQ ID NO: 2022879 - DNA, 15 bp, Homo sapiens
ggcagattcttacct

SEQ ID NO: 2022880 - DNA, 15 bp, Homo sapiens
gcagattcttaccta

SEQ ID NO: 2022881 - DNA, 15 bp, Homo sapiens
cagattcttacctag

SEQ ID NO: 2022882 - DNA, 15 bp, Homo sapiens
agattcttacctagc

SEQ ID NO: 2022883 - DNA, 15 bp, Homo sapiens
gattcttacctagct

SEQ ID NO: 2022884 - DNA, 15 bp, Homo sapiens
attcttacctagcta

SEQ ID NO: 2022885 - DNA, 15 bp, Homo sapiens
ttcttacctagctag

SEQ ID NO: 2022886 - DNA, 15 bp, Homo sapiens
tcttacctagctagt

SEQ ID NO: 2022887 - DNA, 15 bp, Homo sapiens
cttacctagctagta

SEQ ID NO: 2022888 - DNA, 15 bp, Homo sapiens
ttacctagctagtat

SEQ ID NO: 2022889 - DNA, 15 bp, Homo sapiens
tacctagctagtata

SEQ ID NO: 2022890 - DNA, 15 bp, Homo sapiens
acctagctagtatag

SEQ ID NO: 2022891 - DNA, 15 bp, Homo sapiens
cctagctagtatagg

SEQ ID NO: 2022892 - DNA, 15 bp, Homo sapiens
ctagctagtataggt

SEQ ID NO: 2022893 - DNA, 15 bp, Homo sapiens
tagctagtataggta

SEQ ID NO: 2022894 - DNA, 15 bp, Homo sapiens
agctagtataggtag

SEQ ID NO: 2022895 - DNA, 15 bp, Homo sapiens
gctagtataggtagg

SEQ ID NO: 2022896 - DNA, 15 bp, Homo sapiens
ctagtataggtaggg

SEQ ID NO: 2022897 - DNA, 15 bp, Homo sapiens
tagtataggtagggc

SEQ ID NO: 2022898 - DNA, 15 bp, Homo sapiens
agtataggtagggcc

SEQ ID NO: 2022899 - DNA, 15 bp, Homo sapiens
gtataggtagggcct

SEQ ID NO: 2022900 - DNA, 15 bp, Homo sapiens
tataggtagggcctg

SEQ ID NO: 2022901 - DNA, 15 bp, Homo sapiens
ataggtagggcctga

SEQ ID NO: 2022902 - DNA, 15 bp, Homo sapiens
taggtagggcctgaa

SEQ ID NO: 2022903 - DNA, 15 bp, Homo sapiens
ggtagggcctgaaag

SEQ ID NO: 2022904 - DNA, 15 bp, Homo sapiens
gtagggcctgaaagt

SEQ ID NO: 2022905 - DNA, 15 bp, Homo sapiens
tagggcctgaaagtc

SEQ ID NO: 2022906 - DNA, 15 bp, Homo sapiens
agggcctgaaagtct

SEQ ID NO: 2022907 - DNA, 15 bp, Homo sapiens
gggcctgaaagtctt

SEQ ID NO: 2022908 - DNA, 15 bp, Homo sapiens
ggcctgaaagtcttt

SEQ ID NO: 2022909 - DNA, 15 bp, Homo sapiens
gcctgaaagtctttg

SEQ ID NO: 2022910 - DNA, 15 bp, Homo sapiens
cctgaaagtctttgt

SEQ ID NO: 2022911 - DNA, 15 bp, Homo sapiens
ctgaaagtctttgtt

SEQ ID NO: 2022912 - DNA, 15 bp, Homo sapiens
tgaaagtctttgttt

SEQ ID NO: 2022913 - DNA, 15 bp, Homo sapiens
gaaagtctttgtttc

SEQ ID NO: 2022914 - DNA, 15 bp, Homo sapiens
aaagtctttgtttcc

SEQ ID NO: 2022915 - DNA, 15 bp, Homo sapiens
aagtctttgtttcca

SEQ ID NO: 2022916 - DNA, 15 bp, Homo sapiens
agtctttgtttccaa

SEQ ID NO: 2022917 - DNA, 15 bp, Homo sapiens
gtctttgtttccaaa

SEQ ID NO: 2022918 - DNA, 15 bp, Homo sapiens
tctttgtttccaaac

SEQ ID NO: 2022919 - DNA, 15 bp, Homo sapiens
ctttgtttccaaacc

SEQ ID NO: 2022920 - DNA, 15 bp, Homo sapiens
tttgtttccaaacca

SEQ ID NO: 2022921 - DNA, 15 bp, Homo sapiens
ttgtttccaaaccaa

SEQ ID NO: 2022922 - DNA, 15 bp, Homo sapiens
tgtttccaaaccaac

SEQ ID NO: 2022923 - DNA, 15 bp, Homo sapiens
gtttccaaaccaact

SEQ ID NO: 2022924 - DNA, 15 bp, Homo sapiens
tttccaaaccaactc

SEQ ID NO: 2022925 - DNA, 15 bp, Homo sapiens
ttccaaaccaactcc

SEQ ID NO: 2022926 - DNA, 15 bp, Homo sapiens
tccaaaccaactcct

SEQ ID NO: 2022927 - DNA, 15 bp, Homo sapiens
ccaaaccaactccta

SEQ ID NO: 2022928 - DNA, 15 bp, Homo sapiens
caaaccaactcctaa

SEQ ID NO: 2022929 - DNA, 15 bp, Homo sapiens
aaaccaactcctaag

SEQ ID NO: 2022930 - DNA, 15 bp, Homo sapiens
aaccaactcctaagc

SEQ ID NO: 2022931 - DNA, 15 bp, Homo sapiens
accaactcctaagca

SEQ ID NO: 2022932 - DNA, 15 bp, Homo sapiens
ccaactcctaagcaa

SEQ ID NO: 2022933 - DNA, 15 bp, Homo sapiens
caactcctaagcaac

SEQ ID NO: 2022934 - DNA, 15 bp, Homo sapiens
aactcctaagcaaca

SEQ ID NO: 2022935 - DNA, 15 bp, Homo sapiens
actcctaagcaacat

SEQ ID NO: 2022936 - DNA, 15 bp, Homo sapiens
ctcctaagcaacatg

SEQ ID NO: 2022937 - DNA, 15 bp, Homo sapiens
tcctaagcaacatgg

SEQ ID NO: 2022938 - DNA, 15 bp, Homo sapiens
cctaagcaacatgga

SEQ ID NO: 2022939 - DNA, 15 bp, Homo sapiens
ctaagcaacatggat

SEQ ID NO: 2022940 - DNA, 15 bp, Homo sapiens
taagcaacatggatg

SEQ ID NO: 2022941 - DNA, 15 bp, Homo sapiens
aagcaacatggatgc

SEQ ID NO: 2022942 - DNA, 15 bp, Homo sapiens
agcaacatggatgcc

SEQ ID NO: 2022943 - DNA, 15 bp, Homo sapiens
gcaacatggatgcca

SEQ ID NO: 2022944 - DNA, 15 bp, Homo sapiens
caacatggatgccac

SEQ ID NO: 2022945 - DNA, 15 bp, Homo sapiens
aacatggatgccact

SEQ ID NO: 2022946 - DNA, 15 bp, Homo sapiens
acatggatgccactg

SEQ ID NO: 2022947 - DNA, 15 bp, Homo sapiens
catggatgccactgc

SEQ ID NO: 2022948 - DNA, 15 bp, Homo sapiens
atggatgccactgct

SEQ ID NO: 2022949 - DNA, 15 bp, Homo sapiens
tggatgccactgcta

SEQ ID NO: 2022950 - DNA, 15 bp, Homo sapiens
ggatgccactgctag

SEQ ID NO: 2022951 - DNA, 15 bp, Homo sapiens
gatgccactgctagt

SEQ ID NO: 2022952 - DNA, 15 bp, Homo sapiens
atgccactgctagtc

SEQ ID NO: 2022953 - DNA, 15 bp, Homo sapiens
tgccactgctagtca

SEQ ID NO: 2022954 - DNA, 15 bp, Homo sapiens
gccactgctagtcag

SEQ ID NO: 2022955 - DNA, 15 bp, Homo sapiens
ccactgctagtcagg

SEQ ID NO: 2022956 - DNA, 15 bp, Homo sapiens
cactgctagtcaggc

SEQ ID NO: 2022957 - DNA, 15 bp, Homo sapiens
actgctagtcaggct

SEQ ID NO: 2022958 - DNA, 15 bp, Homo sapiens
ctgctagtcaggctt

SEQ ID NO: 2022959 - DNA, 15 bp, Homo sapiens
tgctagtcaggcttt

SEQ ID NO: 2022960 - DNA, 15 bp, Homo sapiens
gctagtcaggctttt

SEQ ID NO: 2022961 - DNA, 15 bp, Homo sapiens
ctagtcaggcttttg

SEQ ID NO: 2022962 - DNA, 15 bp, Homo sapiens
tagtcaggcttttga

SEQ ID NO: 2022963 - DNA, 15 bp, Homo sapiens
agtcaggcttttgaa

SEQ ID NO: 2022964 - DNA, 15 bp, Homo sapiens
gtcaggcttttgaac

SEQ ID NO: 2022965 - DNA, 15 bp, Homo sapiens
tcaggcttttgaaca

SEQ ID NO: 2022966 - DNA, 15 bp, Homo sapiens
caggcttttgaacat

SEQ ID NO: 2022967 - DNA, 15 bp, Homo sapiens
aggcttttgaacatc

SEQ ID NO: 2022968 - DNA, 15 bp, Homo sapiens
ggcttttgaacatca

SEQ ID NO: 2022969 - DNA, 15 bp, Homo sapiens
gcttttgaacatcaa

SEQ ID NO: 2022970 - DNA, 15 bp, Homo sapiens
cttttgaacatcaag

SEQ ID NO: 2022971 - DNA, 15 bp, Homo sapiens
ttttgaacatcaagg

SEQ ID NO: 2022972 - DNA, 15 bp, Homo sapiens
tttgaacatcaaggt

SEQ ID NO: 2022973 - DNA, 15 bp, Homo sapiens
ttgaacatcaaggtt

SEQ ID NO: 2022974 - DNA, 15 bp, Homo sapiens
tgaacatcaaggttt

SEQ ID NO: 2022975 - DNA, 15 bp, Homo sapiens
gaacatcaaggtttt

SEQ ID NO: 2022976 - DNA, 15 bp, Homo sapiens
aacatcaaggtttta

SEQ ID NO: 2022977 - DNA, 15 bp, Homo sapiens
acatcaaggttttat

SEQ ID NO: 2022978 - DNA, 15 bp, Homo sapiens
catcaaggttttata

SEQ ID NO: 2022979 - DNA, 15 bp, Homo sapiens
atcaaggttttataa

SEQ ID NO: 2022980 - DNA, 15 bp, Homo sapiens
tcaaggttttataag

SEQ ID NO: 2022981 - DNA, 15 bp, Homo sapiens
caaggttttataaga

SEQ ID NO: 2022982 - DNA, 15 bp, Homo sapiens
aaggttttataagaa

SEQ ID NO: 2022983 - DNA, 15 bp, Homo sapiens
aggttttataagaaa

SEQ ID NO: 2022984 - DNA, 15 bp, Homo sapiens
ggttttataagaaat

SEQ ID NO: 2022985 - DNA, 15 bp, Homo sapiens
gttttataagaaatg

SEQ ID NO: 2022986 - DNA, 15 bp, Homo sapiens
ttttataagaaatgg

SEQ ID NO: 2022987 - DNA, 15 bp, Homo sapiens
tttataagaaatggt

SEQ ID NO: 2022988 - DNA, 15 bp, Homo sapiens
ttataagaaatggtt

SEQ ID NO: 2022989 - DNA, 15 bp, Homo sapiens
tataagaaatggttg

SEQ ID NO: 2022990 - DNA, 15 bp, Homo sapiens
ataagaaatggttgt

SEQ ID NO: 2022991 - DNA, 15 bp, Homo sapiens
taagaaatggttgtt

SEQ ID NO: 2022992 - DNA, 15 bp, Homo sapiens
aagaaatggttgtta

SEQ ID NO: 2022993 - DNA, 15 bp, Homo sapiens
agaaatggttgttat

SEQ ID NO: 2022994 - DNA, 15 bp, Homo sapiens
gaaatggttgttata

SEQ ID NO: 2022995 - DNA, 15 bp, Homo sapiens
aaatggttgttatat

SEQ ID NO: 2022996 - DNA, 15 bp, Homo sapiens
aatggttgttatatg

SEQ ID NO: 2022997 - DNA, 15 bp, Homo sapiens
atggttgttatatgt

SEQ ID NO: 2022998 - DNA, 15 bp, Homo sapiens
tggttgttatatgtc

SEQ ID NO: 2022999 - DNA, 15 bp, Homo sapiens
ggttgttatatgtca

SEQ ID NO: 2023000 - DNA, 15 bp, Homo sapiens
gttgttatatgtcat

SEQ ID NO: 2023001 - DNA, 15 bp, Homo sapiens
ttgttatatgtcatt

SEQ ID NO: 2023002 - DNA, 15 bp, Homo sapiens
tgttatatgtcattg

SEQ ID NO: 2023003 - DNA, 15 bp, Homo sapiens
gttatatgtcattgg

SEQ ID NO: 2023004 - DNA, 15 bp, Homo sapiens
ttatatgtcattggc

SEQ ID NO: 2023005 - DNA, 15 bp, Homo sapiens
tatatgtcattggct

SEQ ID NO: 2023006 - DNA, 15 bp, Homo sapiens
atatgtcattggctg

SEQ ID NO: 2023007 - DNA, 15 bp, Homo sapiens
tatgtcattggctga

SEQ ID NO: 2023008 - DNA, 15 bp, Homo sapiens
atgtcattggctgac

SEQ ID NO: 2023009 - DNA, 15 bp, Homo sapiens
tgtcattggctgaca

SEQ ID NO: 2023010 - DNA, 15 bp, Homo sapiens
gtcattggctgacat

SEQ ID NO: 2023011 - DNA, 15 bp, Homo sapiens
tcattggctgacatt

SEQ ID NO: 2023012 - DNA, 15 bp, Homo sapiens
cattggctgacattt

SEQ ID NO: 2023013 - DNA, 15 bp, Homo sapiens
attggctgacatttg

SEQ ID NO: 2023014 - DNA, 15 bp, Homo sapiens
ttggctgacatttgt

SEQ ID NO: 2023015 - DNA, 15 bp, Homo sapiens
tggctgacatttgta

SEQ ID NO: 2023016 - DNA, 15 bp, Homo sapiens
ggctgacatttgtat

SEQ ID NO: 2023017 - DNA, 15 bp, Homo sapiens
gctgacatttgtata

SEQ ID NO: 2023018 - DNA, 15 bp, Homo sapiens
ctgacatttgtatac

SEQ ID NO: 2023019 - DNA, 15 bp, Homo sapiens
tgacatttgtatact

SEQ ID NO: 2023020 - DNA, 15 bp, Homo sapiens
gacatttgtatacta

SEQ ID NO: 2023021 - DNA, 15 bp, Homo sapiens
acatttgtatactat

SEQ ID NO: 2023022 - DNA, 15 bp, Homo sapiens
catttgtatactatt

SEQ ID NO: 2023023 - DNA, 15 bp, Homo sapiens
atttgtatactatta

SEQ ID NO: 2023024 - DNA, 15 bp, Homo sapiens
tttgtatactattaa

SEQ ID NO: 2023025 - DNA, 15 bp, Homo sapiens
ttgtatactattaaa

SEQ ID NO: 2023026 - DNA, 15 bp, Homo sapiens
tgtatactattaaaa

SEQ ID NO: 2023027 - DNA, 15 bp, Homo sapiens
gtatactattaaaat

SEQ ID NO: 2023028 - DNA, 15 bp, Homo sapiens
tatactattaaaata

SEQ ID NO: 2023029 - DNA, 15 bp, Homo sapiens
atactattaaaatac

SEQ ID NO: 2023030 - DNA, 15 bp, Homo sapiens
tactattaaaataca

SEQ ID NO: 2023031 - DNA, 15 bp, Homo sapiens
actattaaaatacag

SEQ ID NO: 2023032 - DNA, 15 bp, Homo sapiens
ctattaaaatacaga

SEQ ID NO: 2023033 - DNA, 15 bp, Homo sapiens
tattaaaatacagaa

SEQ ID NO: 2023034 - DNA, 15 bp, Homo sapiens
attaaaatacagaaa

SEQ ID NO: 2023035 - DNA, 15 bp, Homo sapiens
ttaaaatacagaaat

SEQ ID NO: 2023036 - DNA, 15 bp, Homo sapiens
taaaatacagaaatt

SEQ ID NO: 2023037 - DNA, 15 bp, Homo sapiens
aaaatacagaaattg

SEQ ID NO: 2023038 - DNA, 15 bp, Homo sapiens
aaatacagaaattga

SEQ ID NO: 2023039 - DNA, 15 bp, Homo sapiens
aatacagaaattgaa

SEQ ID NO: 2023040 - DNA, 15 bp, Homo sapiens
atacagaaattgaaa

SEQ ID NO: 2023041 - DNA, 15 bp, Homo sapiens
tacagaaattgaaaa

SEQ ID NO: 2023042 - DNA, 15 bp, Homo sapiens
acagaaattgaaaat

SEQ ID NO: 2023043 - DNA, 15 bp, Homo sapiens
cagaaattgaaaata

SEQ ID NO: 2023044 - DNA, 15 bp, Homo sapiens
agaaattgaaaataa

SEQ ID NO: 2023045 - DNA, 15 bp, Homo sapiens
gaaattgaaaataag

SEQ ID NO: 2023046 - DNA, 15 bp, Homo sapiens
aaattgaaaataaga

SEQ ID NO: 2023047 - DNA, 15 bp, Homo sapiens
aattgaaaataagaa

SEQ ID NO: 2023048 - DNA, 15 bp, Homo sapiens
attgaaaataagaaa

SEQ ID NO: 2023049 - DNA, 15 bp, Homo sapiens
ttgaaaataagaaat

SEQ ID NO: 2023050 - DNA, 15 bp, Homo sapiens
tgaaaataagaaatg

SEQ ID NO: 2023051 - DNA, 15 bp, Homo sapiens
gaaaataagaaatgt

SEQ ID NO: 2023052 - DNA, 15 bp, Homo sapiens
aaaataagaaatgtg

SEQ ID NO: 2023053 - DNA, 15 bp, Homo sapiens
aaataagaaatgtga

SEQ ID NO: 2023054 - DNA, 15 bp, Homo sapiens
aataagaaatgtgat

SEQ ID NO: 2023055 - DNA, 15 bp, Homo sapiens
ataagaaatgtgata

SEQ ID NO: 2023056 - DNA, 15 bp, Homo sapiens
taagaaatgtgatac

SEQ ID NO: 2023057 - DNA, 15 bp, Homo sapiens
aagaaatgtgatacg

SEQ ID NO: 2023058 - DNA, 15 bp, Homo sapiens
agaaatgtgatacgt

SEQ ID NO: 2023059 - DNA, 15 bp, Homo sapiens
gaaatgtgatacgtt

SEQ ID NO: 2023060 - DNA, 15 bp, Homo sapiens
aaatgtgatacgttg

SEQ ID NO: 2023061 - DNA, 15 bp, Homo sapiens
aatgtgatacgttga

SEQ ID NO: 2023062 - DNA, 15 bp, Homo sapiens
atgtgatacgttgag

SEQ ID NO: 2023063 - DNA, 15 bp, Homo sapiens
tgtgatacgttgagt

SEQ ID NO: 2023064 - DNA, 15 bp, Homo sapiens
gtgatacgttgagtt

SEQ ID NO: 2023065 - DNA, 15 bp, Homo sapiens
tgatacgttgagtta

SEQ ID NO: 2023066 - DNA, 15 bp, Homo sapiens
gatacgttgagttat

SEQ ID NO: 2023067 - DNA, 15 bp, Homo sapiens
atacgttgagttatg

SEQ ID NO: 2023068 - DNA, 15 bp, Homo sapiens
tacgttgagttatgc

SEQ ID NO: 2023069 - DNA, 15 bp, Homo sapiens
acgttgagttatgca

SEQ ID NO: 2023070 - DNA, 15 bp, Homo sapiens
cgttgagttatgcaa

SEQ ID NO: 2023071 - DNA, 15 bp, Homo sapiens
gttgagttatgcaaa

SEQ ID NO: 2023072 - DNA, 15 bp, Homo sapiens
ttgagttatgcaaac

SEQ ID NO: 2023073 - DNA, 15 bp, Homo sapiens
tgagttatgcaaaca

SEQ ID NO: 2023074 - DNA, 15 bp, Homo sapiens
gagttatgcaaacaa

SEQ ID NO: 2023075 - DNA, 15 bp, Homo sapiens
agttatgcaaacaaa

SEQ ID NO: 2023076 - DNA, 15 bp, Homo sapiens
gttatgcaaacaaaa

SEQ ID NO: 2023077 - DNA, 15 bp, Homo sapiens
ttatgcaaacaaaag

SEQ ID NO: 2023078 - DNA, 15 bp, Homo sapiens
tatgcaaacaaaagt

SEQ ID NO: 2023079 - DNA, 15 bp, Homo sapiens
atgcaaacaaaagta

SEQ ID NO: 2023080 - DNA, 15 bp, Homo sapiens
tgcaaacaaaagtag

SEQ ID NO: 2023081 - DNA, 15 bp, Homo sapiens
gcaaacaaaagtagc

SEQ ID NO: 2023082 - DNA, 15 bp, Homo sapiens
caaacaaaagtagca

SEQ ID NO: 2023083 - DNA, 15 bp, Homo sapiens
aaacaaaagtagcat

SEQ ID NO: 2023084 - DNA, 15 bp, Homo sapiens
aacaaaagtagcatg

SEQ ID NO: 2023085 - DNA, 15 bp, Homo sapiens
acaaaagtagcatgt

SEQ ID NO: 2023086 - DNA, 15 bp, Homo sapiens
caaaagtagcatgta

SEQ ID NO: 2023087 - DNA, 15 bp, Homo sapiens
aaaagtagcatgtaa

SEQ ID NO: 2023088 - DNA, 15 bp, Homo sapiens
aaagtagcatgtaat

SEQ ID NO: 2023089 - DNA, 15 bp, Homo sapiens
aagtagcatgtaata

SEQ ID NO: 2023090 - DNA, 15 bp, Homo sapiens
agtagcatgtaataa

SEQ ID NO: 2023091 - DNA, 15 bp, Homo sapiens
gtagcatgtaataaa

SEQ ID NO: 2023092 - DNA, 15 bp, Homo sapiens
tagcatgtaataaac

SEQ ID NO: 2023093 - DNA, 15 bp, Homo sapiens
agcatgtaataaaca

SEQ ID NO: 2023094 - DNA, 15 bp, Homo sapiens
gcatgtaataaacaa

SEQ ID NO: 2023095 - DNA, 15 bp, Homo sapiens
catgtaataaacaat

SEQ ID NO: 2023096 - DNA, 15 bp, Homo sapiens
atgtaataaacaatg

SEQ ID NO: 2023097 - DNA, 15 bp, Homo sapiens
tgtaataaacaatgc

SEQ ID NO: 2023098 - DNA, 15 bp, Homo sapiens
gtaataaacaatgct

SEQ ID NO: 2023099 - DNA, 15 bp, Homo sapiens
taataaacaatgcta

SEQ ID NO: 2023100 - DNA, 15 bp, Homo sapiens
aataaacaatgctaa

SEQ ID NO: 2023101 - DNA, 15 bp, Homo sapiens
ataaacaatgctaac

SEQ ID NO: 2023102 - DNA, 15 bp, Homo sapiens
taaacaatgctaact

SEQ ID NO: 2023103 - DNA, 15 bp, Homo sapiens
aaacaatgctaactg

SEQ ID NO: 2023104 - DNA, 15 bp, Homo sapiens
aacaatgctaactgg

SEQ ID NO: 2023105 - DNA, 15 bp, Homo sapiens
acaatgctaactgga

SEQ ID NO: 2023106 - DNA, 15 bp, Homo sapiens
caatgctaactggag

SEQ ID NO: 2023107 - DNA, 15 bp, Homo sapiens
aatgctaactggaga

SEQ ID NO: 2023108 - DNA, 15 bp, Homo sapiens
atgctaactggagac

SEQ ID NO: 2023109 - DNA, 15 bp, Homo sapiens
tgctaactggagact

SEQ ID NO: 2023110 - DNA, 15 bp, Homo sapiens
gctaactggagacta

SEQ ID NO: 2023111 - DNA, 15 bp, Homo sapiens
ctaactggagactat

SEQ ID NO: 2023112 - DNA, 15 bp, Homo sapiens
taactggagactata

SEQ ID NO: 2023113 - DNA, 15 bp, Homo sapiens
aactggagactatat

SEQ ID NO: 2023114 - DNA, 15 bp, Homo sapiens
actggagactatatt

SEQ ID NO: 2023115 - DNA, 15 bp, Homo sapiens
ctggagactatattt

SEQ ID NO: 2023116 - DNA, 15 bp, Homo sapiens
tggagactatatttc

SEQ ID NO: 2023117 - DNA, 15 bp, Homo sapiens
ggagactatatttca

SEQ ID NO: 2023118 - DNA, 15 bp, Homo sapiens
gagactatatttcat

SEQ ID NO: 2023119 - DNA, 15 bp, Homo sapiens
agactatatttcata

SEQ ID NO: 2023120 - DNA, 15 bp, Homo sapiens
gactatatttcatat

SEQ ID NO: 2023121 - DNA, 15 bp, Homo sapiens
actatatttcatatt

SEQ ID NO: 2023122 - DNA, 15 bp, Homo sapiens
ctatatttcatatta

SEQ ID NO: 2023123 - DNA, 15 bp, Homo sapiens
tatatttcatattaa

SEQ ID NO: 2023124 - DNA, 15 bp, Homo sapiens
atatttcatattaat

SEQ ID NO: 2023125 - DNA, 15 bp, Homo sapiens
tatttcatattaata

SEQ ID NO: 2023126 - DNA, 15 bp, Homo sapiens
atttcatattaatag

SEQ ID NO: 2023127 - DNA, 15 bp, Homo sapiens
tttcatattaatagt

SEQ ID NO: 2023128 - DNA, 15 bp, Homo sapiens
ttcatattaatagta

SEQ ID NO: 2023129 - DNA, 15 bp, Homo sapiens
tcatattaatagtag

SEQ ID NO: 2023130 - DNA, 15 bp, Homo sapiens
catattaatagtagg

SEQ ID NO: 2023131 - DNA, 15 bp, Homo sapiens
atattaatagtaggg

SEQ ID NO: 2023132 - DNA, 15 bp, Homo sapiens
tattaatagtaggga

SEQ ID NO: 2023133 - DNA, 15 bp, Homo sapiens
attaatagtagggag

SEQ ID NO: 2023134 - DNA, 15 bp, Homo sapiens
ttaatagtagggagg

SEQ ID NO: 2023135 - DNA, 15 bp, Homo sapiens
taatagtagggagga

SEQ ID NO: 2023136 - DNA, 15 bp, Homo sapiens
aatagtagggaggaa

SEQ ID NO: 2023137 - DNA, 15 bp, Homo sapiens
atagtagggaggaaa

SEQ ID NO: 2023138 - DNA, 15 bp, Homo sapiens
tagtagggaggaaaa

SEQ ID NO: 2023139 - DNA, 15 bp, Homo sapiens
agtagggaggaaaaa

SEQ ID NO: 2023140 - DNA, 15 bp, Homo sapiens
gtagggaggaaaaac

SEQ ID NO: 2023141 - DNA, 15 bp, Homo sapiens
tagggaggaaaaact

SEQ ID NO: 2023142 - DNA, 15 bp, Homo sapiens
agggaggaaaaacta

SEQ ID NO: 2023143 - DNA, 15 bp, Homo sapiens
gggaggaaaaactat

SEQ ID NO: 2023144 - DNA, 15 bp, Homo sapiens
ggaggaaaaactatt

SEQ ID NO: 2023145 - DNA, 15 bp, Homo sapiens
gaggaaaaactatta

SEQ ID NO: 2023146 - DNA, 15 bp, Homo sapiens
aggaaaaactattaa

SEQ ID NO: 2023147 - DNA, 15 bp, Homo sapiens
ggaaaaactattaaa

SEQ ID NO: 2023148 - DNA, 15 bp, Homo sapiens
gaaaaactattaaat

SEQ ID NO: 2023149 - DNA, 15 bp, Homo sapiens
aaaaactattaaata

SEQ ID NO: 2023150 - DNA, 15 bp, Homo sapiens
aaaactattaaatat

SEQ ID NO: 2023151 - DNA, 15 bp, Homo sapiens
aaactattaaatatt

SEQ ID NO: 2023152 - DNA, 15 bp, Homo sapiens
aactattaaatattc

SEQ ID NO: 2023153 - DNA, 15 bp, Homo sapiens
actattaaatattcc

SEQ ID NO: 2023154 - DNA, 15 bp, Homo sapiens
ctattaaatattcca

SEQ ID NO: 2023155 - DNA, 15 bp, Homo sapiens
tattaaatattccag

SEQ ID NO: 2023156 - DNA, 15 bp, Homo sapiens
attaaatattccagg

SEQ ID NO: 2023157 - DNA, 15 bp, Homo sapiens
ttaaatattccagga

SEQ ID NO: 2023158 - DNA, 15 bp, Homo sapiens
taaatattccaggat

SEQ ID NO: 2023159 - DNA, 15 bp, Homo sapiens
aaatattccaggatt

SEQ ID NO: 2023160 - DNA, 15 bp, Homo sapiens
aatattccaggatta

SEQ ID NO: 2023161 - DNA, 15 bp, Homo sapiens
atattccaggattaa

SEQ ID NO: 2023162 - DNA, 15 bp, Homo sapiens
tattccaggattaag

SEQ ID NO: 2023163 - DNA, 15 bp, Homo sapiens
attccaggattaaga

SEQ ID NO: 2023164 - DNA, 15 bp, Homo sapiens
ttccaggattaagat

SEQ ID NO: 2023165 - DNA, 15 bp, Homo sapiens
tccaggattaagatt

SEQ ID NO: 2023166 - DNA, 15 bp, Homo sapiens
ccaggattaagatta

SEQ ID NO: 2023167 - DNA, 15 bp, Homo sapiens
caggattaagattac

SEQ ID NO: 2023168 - DNA, 15 bp, Homo sapiens
aggattaagattact

SEQ ID NO: 2023169 - DNA, 15 bp, Homo sapiens
ggattaagattactt

SEQ ID NO: 2023170 - DNA, 15 bp, Homo sapiens
gattaagattacttt

SEQ ID NO: 2023171 - DNA, 15 bp, Homo sapiens
attaagattactttt

SEQ ID NO: 2023172 - DNA, 15 bp, Homo sapiens
ttaagattacttttt

SEQ ID NO: 2023173 - DNA, 15 bp, Homo sapiens
taagattacttttta

SEQ ID NO: 2023174 - DNA, 15 bp, Homo sapiens
aagattactttttag

SEQ ID NO: 2023175 - DNA, 15 bp, Homo sapiens
agattactttttaga

SEQ ID NO: 2023176 - DNA, 15 bp, Homo sapiens
gattactttttagat

SEQ ID NO: 2023177 - DNA, 15 bp, Homo sapiens
attactttttagatt

SEQ ID NO: 2023178 - DNA, 15 bp, Homo sapiens
ttactttttagatta

SEQ ID NO: 2023179 - DNA, 15 bp, Homo sapiens
tactttttagattat

SEQ ID NO: 2023180 - DNA, 15 bp, Homo sapiens
actttttagattatg

SEQ ID NO: 2023181 - DNA, 15 bp, Homo sapiens
ctttttagattatga

SEQ ID NO: 2023182 - DNA, 15 bp, Homo sapiens
tttttagattatgac

SEQ ID NO: 2023183 - DNA, 15 bp, Homo sapiens
ttttagattatgacc

SEQ ID NO: 2023184 - DNA, 15 bp, Homo sapiens
tttagattatgacct

SEQ ID NO: 2023185 - DNA, 15 bp, Homo sapiens
ttagattatgacctt

SEQ ID NO: 2023186 - DNA, 15 bp, Homo sapiens
tagattatgaccttt

SEQ ID NO: 2023187 - DNA, 15 bp, Homo sapiens
agattatgaccttta

SEQ ID NO: 2023188 - DNA, 15 bp, Homo sapiens
gattatgacctttag

SEQ ID NO: 2023189 - DNA, 15 bp, Homo sapiens
attatgacctttagt

SEQ ID NO: 2023190 - DNA, 15 bp, Homo sapiens
ttatgacctttagta

SEQ ID NO: 2023191 - DNA, 15 bp, Homo sapiens
tatgacctttagtag

SEQ ID NO: 2023192 - DNA, 15 bp, Homo sapiens
atgacctttagtaga

SEQ ID NO: 2023193 - DNA, 15 bp, Homo sapiens
tgacctttagtagac

SEQ ID NO: 2023194 - DNA, 15 bp, Homo sapiens
gacctttagtagaca

SEQ ID NO: 2023195 - DNA, 15 bp, Homo sapiens
acctttagtagacaa

SEQ ID NO: 2023196 - DNA, 15 bp, Homo sapiens
cctttagtagacaat

SEQ ID NO: 2023197 - DNA, 15 bp, Homo sapiens
ctttagtagacaatt

SEQ ID NO: 2023198 - DNA, 15 bp, Homo sapiens
tttagtagacaatta

SEQ ID NO: 2023199 - DNA, 15 bp, Homo sapiens
ttagtagacaattaa

SEQ ID NO: 2023200 - DNA, 15 bp, Homo sapiens
tagtagacaattaaa

SEQ ID NO: 2023201 - DNA, 15 bp, Homo sapiens
agtagacaattaaag

SEQ ID NO: 2023202 - DNA, 15 bp, Homo sapiens
gtagacaattaaagg

SEQ ID NO: 2023203 - DNA, 15 bp, Homo sapiens
tagacaattaaaggc

SEQ ID NO: 2023204 - DNA, 15 bp, Homo sapiens
agacaattaaaggcc

SEQ ID NO: 2023205 - DNA, 15 bp, Homo sapiens
gacaattaaaggccc

SEQ ID NO: 2023206 - DNA, 15 bp, Homo sapiens
acaattaaaggccca

SEQ ID NO: 2023207 - DNA, 15 bp, Homo sapiens
caattaaaggcccaa

SEQ ID NO: 2023208 - DNA, 15 bp, Homo sapiens
aattaaaggcccaag

SEQ ID NO: 2023209 - DNA, 15 bp, Homo sapiens
attaaaggcccaagt

SEQ ID NO: 2023210 - DNA, 15 bp, Homo sapiens
ttaaaggcccaagtc

SEQ ID NO: 2023211 - DNA, 15 bp, Homo sapiens
taaaggcccaagtca

SEQ ID NO: 2023212 - DNA, 15 bp, Homo sapiens
aaaggcccaagtcac

SEQ ID NO: 2023213 - DNA, 15 bp, Homo sapiens
aaggcccaagtcact

SEQ ID NO: 2023214 - DNA, 15 bp, Homo sapiens
aggcccaagtcactg

SEQ ID NO: 2023215 - DNA, 15 bp, Homo sapiens
ggcccaagtcactgg

SEQ ID NO: 2023216 - DNA, 15 bp, Homo sapiens
gcccaagtcactggc

SEQ ID NO: 2023217 - DNA, 15 bp, Homo sapiens
cccaagtcactggct

SEQ ID NO: 2023218 - DNA, 15 bp, Homo sapiens
ccaagtcactggctt

SEQ ID NO: 2023219 - DNA, 15 bp, Homo sapiens
caagtcactggcttt

SEQ ID NO: 2023220 - DNA, 15 bp, Homo sapiens
aagtcactggctttt

SEQ ID NO: 2023221 - DNA, 15 bp, Homo sapiens
agtcactggcttttg

SEQ ID NO: 2023222 - DNA, 15 bp, Homo sapiens
gtcactggcttttgt

SEQ ID NO: 2023223 - DNA, 15 bp, Homo sapiens
tcactggcttttgta

SEQ ID NO: 2023224 - DNA, 15 bp, Homo sapiens
cactggcttttgtat

SEQ ID NO: 2023225 - DNA, 15 bp, Homo sapiens
actggcttttgtata

SEQ ID NO: 2023226 - DNA, 15 bp, Homo sapiens
ctggcttttgtataa

SEQ ID NO: 2023227 - DNA, 15 bp, Homo sapiens
tggcttttgtataat

SEQ ID NO: 2023228 - DNA, 15 bp, Homo sapiens
ggcttttgtataata

SEQ ID NO: 2023229 - DNA, 15 bp, Homo sapiens
gcttttgtataatag

SEQ ID NO: 2023230 - DNA, 15 bp, Homo sapiens
cttttgtataatagt

SEQ ID NO: 2023231 - DNA, 15 bp, Homo sapiens
ttttgtataatagtg

SEQ ID NO: 2023232 - DNA, 15 bp, Homo sapiens
tttgtataatagtgt

SEQ ID NO: 2023233 - DNA, 15 bp, Homo sapiens
ttgtataatagtgtt

SEQ ID NO: 2023234 - DNA, 15 bp, Homo sapiens
tgtataatagtgttc

SEQ ID NO: 2023235 - DNA, 15 bp, Homo sapiens
gtataatagtgttca

SEQ ID NO: 2023236 - DNA, 15 bp, Homo sapiens
tataatagtgttcag

SEQ ID NO: 2023237 - DNA, 15 bp, Homo sapiens
ataatagtgttcagc

SEQ ID NO: 2023238 - DNA, 15 bp, Homo sapiens
taatagtgttcagct

SEQ ID NO: 2023239 - DNA, 15 bp, Homo sapiens
aatagtgttcagctt

SEQ ID NO: 2023240 - DNA, 15 bp, Homo sapiens
atagtgttcagcttt

SEQ ID NO: 2023241 - DNA, 15 bp, Homo sapiens
tagtgttcagcttta

SEQ ID NO: 2023242 - DNA, 15 bp, Homo sapiens
agtgttcagctttaa

SEQ ID NO: 2023243 - DNA, 15 bp, Homo sapiens
gtgttcagctttaat

SEQ ID NO: 2023244 - DNA, 15 bp, Homo sapiens
tgttcagctttaatt

SEQ ID NO: 2023245 - DNA, 15 bp, Homo sapiens
gttcagctttaattt

SEQ ID NO: 2023246 - DNA, 15 bp, Homo sapiens
ttcagctttaatttt

SEQ ID NO: 2023247 - DNA, 15 bp, Homo sapiens
tcagctttaattttt

SEQ ID NO: 2023248 - DNA, 15 bp, Homo sapiens
cagctttaattttta

SEQ ID NO: 2023249 - DNA, 15 bp, Homo sapiens
agctttaatttttaa

SEQ ID NO: 2023250 - DNA, 15 bp, Homo sapiens
gctttaatttttaag

SEQ ID NO: 2023251 - DNA, 15 bp, Homo sapiens
ctttaatttttaagt

SEQ ID NO: 2023252 - DNA, 15 bp, Homo sapiens
tttaatttttaagtt

SEQ ID NO: 2023253 - DNA, 15 bp, Homo sapiens
ttaatttttaagttt

SEQ ID NO: 2023254 - DNA, 15 bp, Homo sapiens
taatttttaagttta

SEQ ID NO: 2023255 - DNA, 15 bp, Homo sapiens
aatttttaagtttag

SEQ ID NO: 2023256 - DNA, 15 bp, Homo sapiens
atttttaagtttagt

SEQ ID NO: 2023257 - DNA, 15 bp, Homo sapiens
tttttaagtttagtg

SEQ ID NO: 2023258 - DNA, 15 bp, Homo sapiens
ttttaagtttagtga

SEQ ID NO: 2023259 - DNA, 15 bp, Homo sapiens
tttaagtttagtgac

SEQ ID NO: 2023260 - DNA, 15 bp, Homo sapiens
ttaagtttagtgaca

SEQ ID NO: 2023261 - DNA, 15 bp, Homo sapiens
taagtttagtgacat

SEQ ID NO: 2023262 - DNA, 15 bp, Homo sapiens
aagtttagtgacata

SEQ ID NO: 2023263 - DNA, 15 bp, Homo sapiens
agtttagtgacataa

SEQ ID NO: 2023264 - DNA, 15 bp, Homo sapiens
gtttagtgacataaa

SEQ ID NO: 2023265 - DNA, 15 bp, Homo sapiens
tttagtgacataaat

SEQ ID NO: 2023266 - DNA, 15 bp, Homo sapiens
ttagtgacataaatc

SEQ ID NO: 2023267 - DNA, 15 bp, Homo sapiens
tagtgacataaatct

SEQ ID NO: 2023268 - DNA, 15 bp, Homo sapiens
agtgacataaatctt

SEQ ID NO: 2023269 - DNA, 15 bp, Homo sapiens
gtgacataaatcttt

SEQ ID NO: 2023270 - DNA, 15 bp, Homo sapiens
tgacataaatctttg

SEQ ID NO: 2023271 - DNA, 15 bp, Homo sapiens
gacataaatctttgg

SEQ ID NO: 2023272 - DNA, 15 bp, Homo sapiens
acataaatctttgga

SEQ ID NO: 2023273 - DNA, 15 bp, Homo sapiens
cataaatctttggat

SEQ ID NO: 2023274 - DNA, 15 bp, Homo sapiens
ataaatctttggata

SEQ ID NO: 2023275 - DNA, 15 bp, Homo sapiens
taaatctttggatat

SEQ ID NO: 2023276 - DNA, 15 bp, Homo sapiens
aaatctttggatatt

SEQ ID NO: 2023277 - DNA, 15 bp, Homo sapiens
aatctttggatattt

SEQ ID NO: 2023278 - DNA, 15 bp, Homo sapiens
atctttggatatttc

SEQ ID NO: 2023279 - DNA, 15 bp, Homo sapiens
tctttggatatttca

SEQ ID NO: 2023280 - DNA, 15 bp, Homo sapiens
ctttggatatttcat

SEQ ID NO: 2023281 - DNA, 15 bp, Homo sapiens
tttggatatttcatg

SEQ ID NO: 2023282 - DNA, 15 bp, Homo sapiens
ttggatatttcatga

SEQ ID NO: 2023283 - DNA, 15 bp, Homo sapiens
tggatatttcatgat

SEQ ID NO: 2023284 - DNA, 15 bp, Homo sapiens
ggatatttcatgatt

SEQ ID NO: 2023285 - DNA, 15 bp, Homo sapiens
gatatttcatgattc

SEQ ID NO: 2023286 - DNA, 15 bp, Homo sapiens
atatttcatgattct

SEQ ID NO: 2023287 - DNA, 15 bp, Homo sapiens
tatttcatgattctt

SEQ ID NO: 2023288 - DNA, 15 bp, Homo sapiens
atttcatgattcttc

SEQ ID NO: 2023289 - DNA, 15 bp, Homo sapiens
tttcatgattcttcc

SEQ ID NO: 2023290 - DNA, 15 bp, Homo sapiens
ttcatgattcttcca

SEQ ID NO: 2023291 - DNA, 15 bp, Homo sapiens
tcatgattcttccac

SEQ ID NO: 2023292 - DNA, 15 bp, Homo sapiens
catgattcttccaca

SEQ ID NO: 2023293 - DNA, 15 bp, Homo sapiens
atgattcttccacaa

SEQ ID NO: 2023294 - DNA, 15 bp, Homo sapiens
tgattcttccacaaa

SEQ ID NO: 2023295 - DNA, 15 bp, Homo sapiens
gattcttccacaaaa

SEQ ID NO: 2023296 - DNA, 15 bp, Homo sapiens
attcttccacaaaaa

SEQ ID NO: 2023297 - DNA, 15 bp, Homo sapiens
ttcttccacaaaaag

SEQ ID NO: 2023298 - DNA, 15 bp, Homo sapiens
tcttccacaaaaaga

SEQ ID NO: 2023299 - DNA, 15 bp, Homo sapiens
cttccacaaaaagaa

SEQ ID NO: 2023300 - DNA, 15 bp, Homo sapiens
ttccacaaaaagaaa

SEQ ID NO: 2023301 - DNA, 15 bp, Homo sapiens
tccacaaaaagaaat

SEQ ID NO: 2023302 - DNA, 15 bp, Homo sapiens
ccacaaaaagaaata

SEQ ID NO: 2023303 - DNA, 15 bp, Homo sapiens
cacaaaaagaaatac

SEQ ID NO: 2023304 - DNA, 15 bp, Homo sapiens
acaaaaagaaatact

SEQ ID NO: 2023305 - DNA, 15 bp, Homo sapiens
caaaaagaaatactt

SEQ ID NO: 2023306 - DNA, 15 bp, Homo sapiens
aaaaagaaatacttg

SEQ ID NO: 2023307 - DNA, 15 bp, Homo sapiens
aaaagaaatacttga

SEQ ID NO: 2023308 - DNA, 15 bp, Homo sapiens
aaagaaatacttgaa

SEQ ID NO: 2023309 - DNA, 15 bp, Homo sapiens
aagaaatacttgaaa

SEQ ID NO: 2023310 - DNA, 15 bp, Homo sapiens
agaaatacttgaaat

SEQ ID NO: 2023311 - DNA, 15 bp, Homo sapiens
gaaatacttgaaatt

SEQ ID NO: 2023312 - DNA, 15 bp, Homo sapiens
aaatacttgaaattg

SEQ ID NO: 2023313 - DNA, 15 bp, Homo sapiens
aatacttgaaattgg

SEQ ID NO: 2023314 - DNA, 15 bp, Homo sapiens
atacttgaaattgga

SEQ ID NO: 2023315 - DNA, 15 bp, Homo sapiens
tacttgaaattggat

SEQ ID NO: 2023316 - DNA, 15 bp, Homo sapiens
acttgaaattggatt

SEQ ID NO: 2023317 - DNA, 15 bp, Homo sapiens
cttgaaattggatta

SEQ ID NO: 2023318 - DNA, 15 bp, Homo sapiens
ttgaaattggattag

SEQ ID NO: 2023319 - DNA, 15 bp, Homo sapiens
tgaaattggattagc

SEQ ID NO: 2023320 - DNA, 15 bp, Homo sapiens
gaaattggattagca

SEQ ID NO: 2023321 - DNA, 15 bp, Homo sapiens
aaattggattagcaa

SEQ ID NO: 2023322 - DNA, 15 bp, Homo sapiens
aattggattagcaag

SEQ ID NO: 2023323 - DNA, 15 bp, Homo sapiens
attggattagcaagt

SEQ ID NO: 2023324 - DNA, 15 bp, Homo sapiens
ttggattagcaagta

SEQ ID NO: 2023325 - DNA, 15 bp, Homo sapiens
tggattagcaagtaa

SEQ ID NO: 2023326 - DNA, 15 bp, Homo sapiens
ggattagcaagtaat

SEQ ID NO: 2023327 - DNA, 15 bp, Homo sapiens
gattagcaagtaatt

SEQ ID NO: 2023328 - DNA, 15 bp, Homo sapiens
attagcaagtaattt

SEQ ID NO: 2023329 - DNA, 15 bp, Homo sapiens
ttagcaagtaatttc

SEQ ID NO: 2023330 - DNA, 15 bp, Homo sapiens
tagcaagtaatttcc

SEQ ID NO: 2023331 - DNA, 15 bp, Homo sapiens
agcaagtaatttcca

SEQ ID NO: 2023332 - DNA, 15 bp, Homo sapiens
gcaagtaatttccat

SEQ ID NO: 2023333 - DNA, 15 bp, Homo sapiens
caagtaatttccatc

SEQ ID NO: 2023334 - DNA, 15 bp, Homo sapiens
aagtaatttccatct

SEQ ID NO: 2023335 - DNA, 15 bp, Homo sapiens
agtaatttccatctt

SEQ ID NO: 2023336 - DNA, 15 bp, Homo sapiens
gtaatttccatcttt

SEQ ID NO: 2023337 - DNA, 15 bp, Homo sapiens
taatttccatctttt

SEQ ID NO: 2023338 - DNA, 15 bp, Homo sapiens
aatttccatcttttt

SEQ ID NO: 2023339 - DNA, 15 bp, Homo sapiens
atttccatcttttta

SEQ ID NO: 2023340 - DNA, 15 bp, Homo sapiens
tttccatctttttat

SEQ ID NO: 2023341 - DNA, 15 bp, Homo sapiens
ttccatctttttata

SEQ ID NO: 2023342 - DNA, 15 bp, Homo sapiens
tccatctttttatac

SEQ ID NO: 2023343 - DNA, 15 bp, Homo sapiens
ccatctttttatact

SEQ ID NO: 2023344 - DNA, 15 bp, Homo sapiens
catctttttatacta

SEQ ID NO: 2023345 - DNA, 15 bp, Homo sapiens
atctttttatactag

SEQ ID NO: 2023346 - DNA, 15 bp, Homo sapiens
tctttttatactaga

SEQ ID NO: 2023347 - DNA, 15 bp, Homo sapiens
ctttttatactagac

SEQ ID NO: 2023348 - DNA, 15 bp, Homo sapiens
tttttatactagact

SEQ ID NO: 2023349 - DNA, 15 bp, Homo sapiens
ttttatactagactg

SEQ ID NO: 2023350 - DNA, 15 bp, Homo sapiens
tttatactagactgg

SEQ ID NO: 2023351 - DNA, 15 bp, Homo sapiens
ttatactagactgga

SEQ ID NO: 2023352 - DNA, 15 bp, Homo sapiens
tatactagactggac

SEQ ID NO: 2023353 - DNA, 15 bp, Homo sapiens
atactagactggact

SEQ ID NO: 2023354 - DNA, 15 bp, Homo sapiens
tactagactggactt

SEQ ID NO: 2023355 - DNA, 15 bp, Homo sapiens
actagactggacttc

SEQ ID NO: 2023356 - DNA, 15 bp, Homo sapiens
ctagactggacttct

SEQ ID NO: 2023357 - DNA, 15 bp, Homo sapiens
tagactggacttctg

SEQ ID NO: 2023358 - DNA, 15 bp, Homo sapiens
agactggacttctgt

SEQ ID NO: 2023359 - DNA, 15 bp, Homo sapiens
gactggacttctgta

SEQ ID NO: 2023360 - DNA, 15 bp, Homo sapiens
actggacttctgtat

SEQ ID NO: 2023361 - DNA, 15 bp, Homo sapiens
ctggacttctgtatt

SEQ ID NO: 2023362 - DNA, 15 bp, Homo sapiens
tggacttctgtatta

SEQ ID NO: 2023363 - DNA, 15 bp, Homo sapiens
ggacttctgtattag

SEQ ID NO: 2023364 - DNA, 15 bp, Homo sapiens
gacttctgtattaga

SEQ ID NO: 2023365 - DNA, 15 bp, Homo sapiens
acttctgtattagat

SEQ ID NO: 2023366 - DNA, 15 bp, Homo sapiens
cttctgtattagatg

SEQ ID NO: 2023367 - DNA, 15 bp, Homo sapiens
ttctgtattagatgc

SEQ ID NO: 2023368 - DNA, 15 bp, Homo sapiens
tctgtattagatgct

SEQ ID NO: 2023369 - DNA, 15 bp, Homo sapiens
ctgtattagatgcta

SEQ ID NO: 2023370 - DNA, 15 bp, Homo sapiens
tgtattagatgctag

SEQ ID NO: 2023371 - DNA, 15 bp, Homo sapiens
gtattagatgctaga

SEQ ID NO: 2023372 - DNA, 15 bp, Homo sapiens
tattagatgctagaa

SEQ ID NO: 2023373 - DNA, 15 bp, Homo sapiens
attagatgctagaat

SEQ ID NO: 2023374 - DNA, 15 bp, Homo sapiens
ttagatgctagaatg

SEQ ID NO: 2023375 - DNA, 15 bp, Homo sapiens
tagatgctagaatga

SEQ ID NO: 2023376 - DNA, 15 bp, Homo sapiens
agatgctagaatgat

SEQ ID NO: 2023377 - DNA, 15 bp, Homo sapiens
gatgctagaatgatt

SEQ ID NO: 2023378 - DNA, 15 bp, Homo sapiens
atgctagaatgattt

SEQ ID NO: 2023379 - DNA, 15 bp, Homo sapiens
tgctagaatgattta

SEQ ID NO: 2023380 - DNA, 15 bp, Homo sapiens
gctagaatgatttaa

SEQ ID NO: 2023381 - DNA, 15 bp, Homo sapiens
ctagaatgatttaaa

SEQ ID NO: 2023382 - DNA, 15 bp, Homo sapiens
tagaatgatttaaag

SEQ ID NO: 2023383 - DNA, 15 bp, Homo sapiens
agaatgatttaaagt

SEQ ID NO: 2023384 - DNA, 15 bp, Homo sapiens
gaatgatttaaagta

SEQ ID NO: 2023385 - DNA, 15 bp, Homo sapiens
aatgatttaaagtag

SEQ ID NO: 2023386 - DNA, 15 bp, Homo sapiens
atgatttaaagtaga

SEQ ID NO: 2023387 - DNA, 15 bp, Homo sapiens
tgatttaaagtagat

SEQ ID NO: 2023388 - DNA, 15 bp, Homo sapiens
gatttaaagtagatt

SEQ ID NO: 2023389 - DNA, 15 bp, Homo sapiens
atttaaagtagatta

SEQ ID NO: 2023390 - DNA, 15 bp, Homo sapiens
tttaaagtagattat

SEQ ID NO: 2023391 - DNA, 15 bp, Homo sapiens
ttaaagtagattatt

SEQ ID NO: 2023392 - DNA, 15 bp, Homo sapiens
taaagtagattattc

SEQ ID NO: 2023393 - DNA, 15 bp, Homo sapiens
aaagtagattattct

SEQ ID NO: 2023394 - DNA, 15 bp, Homo sapiens
aagtagattattctt

SEQ ID NO: 2023395 - DNA, 15 bp, Homo sapiens
agtagattattcttt

SEQ ID NO: 2023396 - DNA, 15 bp, Homo sapiens
gtagattattctttt

SEQ ID NO: 2023397 - DNA, 15 bp, Homo sapiens
tagattattcttttc

SEQ ID NO: 2023398 - DNA, 15 bp, Homo sapiens
agattattcttttca

SEQ ID NO: 2023399 - DNA, 15 bp, Homo sapiens
gattattcttttcac

SEQ ID NO: 2023400 - DNA, 15 bp, Homo sapiens
attattcttttcaca

SEQ ID NO: 2023401 - DNA, 15 bp, Homo sapiens
ttattcttttcacat

SEQ ID NO: 2023402 - DNA, 15 bp, Homo sapiens
tattcttttcacatt

SEQ ID NO: 2023403 - DNA, 15 bp, Homo sapiens
attcttttcacatta

SEQ ID NO: 2023404 - DNA, 15 bp, Homo sapiens
ttcttttcacattag

SEQ ID NO: 2023405 - DNA, 15 bp, Homo sapiens
tcttttcacattagt

SEQ ID NO: 2023406 - DNA, 15 bp, Homo sapiens
cttttcacattagtt

SEQ ID NO: 2023407 - DNA, 15 bp, Homo sapiens
ttttcacattagttc

SEQ ID NO: 2023408 - DNA, 15 bp, Homo sapiens
tttcacattagttca

SEQ ID NO: 2023409 - DNA, 15 bp, Homo sapiens
ttcacattagttcat

SEQ ID NO: 2023410 - DNA, 15 bp, Homo sapiens
tcacattagttcatt

SEQ ID NO: 2023411 - DNA, 15 bp, Homo sapiens
cacattagttcatta

SEQ ID NO: 2023412 - DNA, 15 bp, Homo sapiens
acattagttcattaa

SEQ ID NO: 2023413 - DNA, 15 bp, Homo sapiens
cattagttcattaac

SEQ ID NO: 2023414 - DNA, 15 bp, Homo sapiens
attagttcattaaca

SEQ ID NO: 2023415 - DNA, 15 bp, Homo sapiens
ttagttcattaacag

SEQ ID NO: 2023416 - DNA, 15 bp, Homo sapiens
tagttcattaacagt

SEQ ID NO: 2023417 - DNA, 15 bp, Homo sapiens
agttcattaacagtg

SEQ ID NO: 2023418 - DNA, 15 bp, Homo sapiens
gttcattaacagtgt

SEQ ID NO: 2023419 - DNA, 15 bp, Homo sapiens
ttcattaacagtgta

SEQ ID NO: 2023420 - DNA, 15 bp, Homo sapiens
tcattaacagtgtag

SEQ ID NO: 2023421 - DNA, 15 bp, Homo sapiens
cattaacagtgtagt

SEQ ID NO: 2023422 - DNA, 15 bp, Homo sapiens
attaacagtgtagta

SEQ ID NO: 2023423 - DNA, 15 bp, Homo sapiens
ttaacagtgtagtat

SEQ ID NO: 2023424 - DNA, 15 bp, Homo sapiens
taacagtgtagtata

SEQ ID NO: 2023425 - DNA, 15 bp, Homo sapiens
aacagtgtagtatac

SEQ ID NO: 2023426 - DNA, 15 bp, Homo sapiens
acagtgtagtataca

SEQ ID NO: 2023427 - DNA, 15 bp, Homo sapiens
cagtgtagtatacat

SEQ ID NO: 2023428 - DNA, 15 bp, Homo sapiens
agtgtagtatacatc

SEQ ID NO: 2023429 - DNA, 15 bp, Homo sapiens
gtgtagtatacatca

SEQ ID NO: 2023430 - DNA, 15 bp, Homo sapiens
tgtagtatacatcat

SEQ ID NO: 2023431 - DNA, 15 bp, Homo sapiens
gtagtatacatcata

SEQ ID NO: 2023432 - DNA, 15 bp, Homo sapiens
tagtatacatcatag

SEQ ID NO: 2023433 - DNA, 15 bp, Homo sapiens
agtatacatcatagt

SEQ ID NO: 2023434 - DNA, 15 bp, Homo sapiens
gtatacatcatagta

SEQ ID NO: 2023435 - DNA, 15 bp, Homo sapiens
tatacatcatagtat

SEQ ID NO: 2023436 - DNA, 15 bp, Homo sapiens
atacatcatagtatt

SEQ ID NO: 2023437 - DNA, 15 bp, Homo sapiens
tacatcatagtattg

SEQ ID NO: 2023438 - DNA, 15 bp, Homo sapiens
acatcatagtattgg

SEQ ID NO: 2023439 - DNA, 15 bp, Homo sapiens
catcatagtattggt

SEQ ID NO: 2023440 - DNA, 15 bp, Homo sapiens
atcatagtattggta

SEQ ID NO: 2023441 - DNA, 15 bp, Homo sapiens
tcatagtattggtac

SEQ ID NO: 2023442 - DNA, 15 bp, Homo sapiens
catagtattggtaca

SEQ ID NO: 2023443 - DNA, 15 bp, Homo sapiens
atagtattggtacac

SEQ ID NO: 2023444 - DNA, 15 bp, Homo sapiens
tagtattggtacaca

SEQ ID NO: 2023445 - DNA, 15 bp, Homo sapiens
agtattggtacacat

SEQ ID NO: 2023446 - DNA, 15 bp, Homo sapiens
gtattggtacacatt

SEQ ID NO: 2023447 - DNA, 15 bp, Homo sapiens
tattggtacacattt

SEQ ID NO: 2023448 - DNA, 15 bp, Homo sapiens
attggtacacatttt

SEQ ID NO: 2023449 - DNA, 15 bp, Homo sapiens
ttggtacacatttta

SEQ ID NO: 2023450 - DNA, 15 bp, Homo sapiens
tggtacacattttaa

SEQ ID NO: 2023451 - DNA, 15 bp, Homo sapiens
ggtacacattttaac

SEQ ID NO: 2023452 - DNA, 15 bp, Homo sapiens
gtacacattttaaca

SEQ ID NO: 2023453 - DNA, 15 bp, Homo sapiens
tacacattttaacag

SEQ ID NO: 2023454 - DNA, 15 bp, Homo sapiens
acacattttaacagt

SEQ ID NO: 2023455 - DNA, 15 bp, Homo sapiens
cacattttaacagtg

SEQ ID NO: 2023456 - DNA, 15 bp, Homo sapiens
acattttaacagtgc

SEQ ID NO: 2023457 - DNA, 15 bp, Homo sapiens
cattttaacagtgct

SEQ ID NO: 2023458 - DNA, 15 bp, Homo sapiens
attttaacagtgctt

SEQ ID NO: 2023459 - DNA, 15 bp, Homo sapiens
ttttaacagtgctta

SEQ ID NO: 2023460 - DNA, 15 bp, Homo sapiens
tttaacagtgcttac

SEQ ID NO: 2023461 - DNA, 15 bp, Homo sapiens
ttaacagtgcttacc

SEQ ID NO: 2023462 - DNA, 15 bp, Homo sapiens
taacagtgcttacca

SEQ ID NO: 2023463 - DNA, 15 bp, Homo sapiens
aacagtgcttaccac

SEQ ID NO: 2023464 - DNA, 15 bp, Homo sapiens
acagtgcttaccacg

SEQ ID NO: 2023465 - DNA, 15 bp, Homo sapiens
cagtgcttaccacgg

SEQ ID NO: 2023466 - DNA, 15 bp, Homo sapiens
agtgcttaccacgga

SEQ ID NO: 2023467 - DNA, 15 bp, Homo sapiens
gtgcttaccacggaa

SEQ ID NO: 2023468 - DNA, 15 bp, Homo sapiens
tgcttaccacggaac

SEQ ID NO: 2023469 - DNA, 15 bp, Homo sapiens
gcttaccacggaaca

SEQ ID NO: 2023470 - DNA, 15 bp, Homo sapiens
cttaccacggaacag

SEQ ID NO: 2023471 - DNA, 15 bp, Homo sapiens
ttaccacggaacaga

SEQ ID NO: 2023472 - DNA, 15 bp, Homo sapiens
taccacggaacagat

SEQ ID NO: 2023473 - DNA, 15 bp, Homo sapiens
accacggaacagata

SEQ ID NO: 2023474 - DNA, 15 bp, Homo sapiens
ccacggaacagataa

SEQ ID NO: 2023475 - DNA, 15 bp, Homo sapiens
cacggaacagataat

SEQ ID NO: 2023476 - DNA, 15 bp, Homo sapiens
acggaacagataata

SEQ ID NO: 2023477 - DNA, 15 bp, Homo sapiens
cggaacagataatag

SEQ ID NO: 2023478 - DNA, 15 bp, Homo sapiens
ggaacagataatagg

SEQ ID NO: 2023479 - DNA, 15 bp, Homo sapiens
gaacagataataggc

SEQ ID NO: 2023480 - DNA, 15 bp, Homo sapiens
aacagataataggcc

SEQ ID NO: 2023481 - DNA, 15 bp, Homo sapiens
acagataataggcct

SEQ ID NO: 2023482 - DNA, 15 bp, Homo sapiens
cagataataggcctg

SEQ ID NO: 2023483 - DNA, 15 bp, Homo sapiens
agataataggcctgc

SEQ ID NO: 2023484 - DNA, 15 bp, Homo sapiens
gataataggcctgct

SEQ ID NO: 2023485 - DNA, 15 bp, Homo sapiens
ataataggcctgctg

SEQ ID NO: 2023486 - DNA, 15 bp, Homo sapiens
taataggcctgctgt

SEQ ID NO: 2023487 - DNA, 15 bp, Homo sapiens
aataggcctgctgtt

SEQ ID NO: 2023488 - DNA, 15 bp, Homo sapiens
ataggcctgctgttg

SEQ ID NO: 2023489 - DNA, 15 bp, Homo sapiens
taggcctgctgttga

SEQ ID NO: 2023490 - DNA, 15 bp, Homo sapiens
aggcctgctgttgat

SEQ ID NO: 2023491 - DNA, 15 bp, Homo sapiens
ggcctgctgttgatt

SEQ ID NO: 2023492 - DNA, 15 bp, Homo sapiens
gcctgctgttgattg

SEQ ID NO: 2023493 - DNA, 15 bp, Homo sapiens
cctgctgttgattgt

SEQ ID NO: 2023494 - DNA, 15 bp, Homo sapiens
ctgctgttgattgtc

SEQ ID NO: 2023495 - DNA, 15 bp, Homo sapiens
tgctgttgattgtct

SEQ ID NO: 2023496 - DNA, 15 bp, Homo sapiens
gctgttgattgtctt

SEQ ID NO: 2023497 - DNA, 15 bp, Homo sapiens
ctgttgattgtcttc

SEQ ID NO: 2023498 - DNA, 15 bp, Homo sapiens
tgttgattgtcttca

SEQ ID NO: 2023499 - DNA, 15 bp, Homo sapiens
gttgattgtcttcag

SEQ ID NO: 2023500 - DNA, 15 bp, Homo sapiens
ttgattgtcttcagc

SEQ ID NO: 2023501 - DNA, 15 bp, Homo sapiens
tgattgtcttcagcc

SEQ ID NO: 2023502 - DNA, 15 bp, Homo sapiens
gattgtcttcagcca

SEQ ID NO: 2023503 - DNA, 15 bp, Homo sapiens
attgtcttcagccag

SEQ ID NO: 2023504 - DNA, 15 bp, Homo sapiens
ttgtcttcagccaga

SEQ ID NO: 2023505 - DNA, 15 bp, Homo sapiens
tgtcttcagccagat

SEQ ID NO: 2023506 - DNA, 15 bp, Homo sapiens
gtcttcagccagatg

SEQ ID NO: 2023507 - DNA, 15 bp, Homo sapiens
tcttcagccagatgt

SEQ ID NO: 2023508 - DNA, 15 bp, Homo sapiens
cttcagccagatgta

SEQ ID NO: 2023509 - DNA, 15 bp, Homo sapiens
ttcagccagatgtac

SEQ ID NO: 2023510 - DNA, 15 bp, Homo sapiens
tcagccagatgtact

SEQ ID NO: 2023511 - DNA, 15 bp, Homo sapiens
cagccagatgtactg

SEQ ID NO: 2023512 - DNA, 15 bp, Homo sapiens
agccagatgtactgc

SEQ ID NO: 2023513 - DNA, 15 bp, Homo sapiens
gccagatgtactgca

SEQ ID NO: 2023514 - DNA, 15 bp, Homo sapiens
ccagatgtactgcag

SEQ ID NO: 2023515 - DNA, 15 bp, Homo sapiens
cagatgtactgcagt

SEQ ID NO: 2023516 - DNA, 15 bp, Homo sapiens
agatgtactgcagtg

SEQ ID NO: 2023517 - DNA, 15 bp, Homo sapiens
gatgtactgcagtgc

SEQ ID NO: 2023518 - DNA, 15 bp, Homo sapiens
atgtactgcagtgcc

SEQ ID NO: 2023519 - DNA, 15 bp, Homo sapiens
tgtactgcagtgccc

SEQ ID NO: 2023520 - DNA, 15 bp, Homo sapiens
gtactgcagtgccca

SEQ ID NO: 2023521 - DNA, 15 bp, Homo sapiens
tactgcagtgcccaa

SEQ ID NO: 2023522 - DNA, 15 bp, Homo sapiens
actgcagtgcccaaa

SEQ ID NO: 2023523 - DNA, 15 bp, Homo sapiens
ctgcagtgcccaaat

SEQ ID NO: 2023524 - DNA, 15 bp, Homo sapiens
tgcagtgcccaaata

SEQ ID NO: 2023525 - DNA, 15 bp, Homo sapiens
gcagtgcccaaataa

SEQ ID NO: 2023526 - DNA, 15 bp, Homo sapiens
cagtgcccaaataaa

SEQ ID NO: 2023527 - DNA, 15 bp, Homo sapiens
agtgcccaaataaac

SEQ ID NO: 2023528 - DNA, 15 bp, Homo sapiens
gtgcccaaataaaca

SEQ ID NO: 2023529 - DNA, 15 bp, Homo sapiens
tgcccaaataaacaa

SEQ ID NO: 2023530 - DNA, 15 bp, Homo sapiens
gcccaaataaacaaa

SEQ ID NO: 2023531 - DNA, 15 bp, Homo sapiens
cccaaataaacaaac

SEQ ID NO: 2023532 - DNA, 15 bp, Homo sapiens
ccaaataaacaaact

SEQ ID NO: 2023533 - DNA, 15 bp, Homo sapiens
caaataaacaaactg

SEQ ID NO: 2023534 - DNA, 15 bp, Homo sapiens
aaataaacaaactgt

SEQ ID NO: 2023535 - DNA, 15 bp, Homo sapiens
aataaacaaactgta

SEQ ID NO: 2023536 - DNA, 15 bp, Homo sapiens
ataaacaaactgtat

SEQ ID NO: 2023537 - DNA, 15 bp, Homo sapiens
taaacaaactgtatg

SEQ ID NO: 2023538 - DNA, 15 bp, Homo sapiens
aaacaaactgtatga

SEQ ID NO: 2023539 - DNA, 15 bp, Homo sapiens
aacaaactgtatgac

SEQ ID NO: 2023540 - DNA, 15 bp, Homo sapiens
acaaactgtatgaca

SEQ ID NO: 2023541 - DNA, 15 bp, Homo sapiens
caaactgtatgacaa

SEQ ID NO: 2023542 - DNA, 15 bp, Homo sapiens
aaactgtatgacaaa

SEQ ID NO: 2023543 - DNA, 15 bp, Homo sapiens
aactgtatgacaaaa

SEQ ID NO: 2023544 - DNA, 15 bp, Homo sapiens
actgtatgacaaaat

SEQ ID NO: 2023545 - DNA, 15 bp, Homo sapiens
ctgtatgacaaaatg

SEQ ID NO: 2023546 - DNA, 15 bp, Homo sapiens
tgtatgacaaaatga

SEQ ID NO: 2023547 - DNA, 15 bp, Homo sapiens
gtatgacaaaatgag

SEQ ID NO: 2023548 - DNA, 15 bp, Homo sapiens
tatgacaaaatgaga

SEQ ID NO: 2023549 - DNA, 15 bp, Homo sapiens
atgacaaaatgagac

SEQ ID NO: 2023550 - DNA, 15 bp, Homo sapiens
tgacaaaatgagact

SEQ ID NO: 2023551 - DNA, 15 bp, Homo sapiens
gacaaaatgagactt

SEQ ID NO: 2023552 - DNA, 15 bp, Homo sapiens
acaaaatgagacttt

SEQ ID NO: 2023553 - DNA, 15 bp, Homo sapiens
caaaatgagactttc

SEQ ID NO: 2023554 - DNA, 15 bp, Homo sapiens
aaaatgagactttct

SEQ ID NO: 2023555 - DNA, 15 bp, Homo sapiens
aaatgagactttctc

SEQ ID NO: 2023556 - DNA, 15 bp, Homo sapiens
aatgagactttctct

SEQ ID NO: 2023557 - DNA, 15 bp, Homo sapiens
atgagactttctctt

SEQ ID NO: 2023558 - DNA, 15 bp, Homo sapiens
tgagactttctcttg

SEQ ID NO: 2023559 - DNA, 15 bp, Homo sapiens
gagactttctcttgc

SEQ ID NO: 2023560 - DNA, 15 bp, Homo sapiens
agactttctcttgcc

SEQ ID NO: 2023561 - DNA, 15 bp, Homo sapiens
gactttctcttgccc

SEQ ID NO: 2023562 - DNA, 15 bp, Homo sapiens
actttctcttgccct

SEQ ID NO: 2023563 - DNA, 15 bp, Homo sapiens
ctttctcttgccctt

SEQ ID NO: 2023564 - DNA, 15 bp, Homo sapiens
tttctcttgccctta

SEQ ID NO: 2023565 - DNA, 15 bp, Homo sapiens
ttctcttgcccttac

SEQ ID NO: 2023566 - DNA, 15 bp, Homo sapiens
tctcttgcccttaca

SEQ ID NO: 2023567 - DNA, 15 bp, Homo sapiens
ctcttgcccttacaa

SEQ ID NO: 2023568 - DNA, 15 bp, Homo sapiens
tcttgcccttacaaa

SEQ ID NO: 2023569 - DNA, 15 bp, Homo sapiens
cttgcccttacaaat

SEQ ID NO: 2023570 - DNA, 15 bp, Homo sapiens
ttgcccttacaaatg

SEQ ID NO: 2023571 - DNA, 15 bp, Homo sapiens
tgcccttacaaatgc

SEQ ID NO: 2023572 - DNA, 15 bp, Homo sapiens
gcccttacaaatgcc

SEQ ID NO: 2023573 - DNA, 15 bp, Homo sapiens
cccttacaaatgcct

SEQ ID NO: 2023574 - DNA, 15 bp, Homo sapiens
ccttacaaatgcctg

SEQ ID NO: 2023575 - DNA, 15 bp, Homo sapiens
cttacaaatgcctga

SEQ ID NO: 2023576 - DNA, 15 bp, Homo sapiens
ttacaaatgcctgag

SEQ ID NO: 2023577 - DNA, 15 bp, Homo sapiens
tacaaatgcctgaga

SEQ ID NO: 2023578 - DNA, 15 bp, Homo sapiens
acaaatgcctgagaa

SEQ ID NO: 2023579 - DNA, 15 bp, Homo sapiens
caaatgcctgagaat

SEQ ID NO: 2023580 - DNA, 15 bp, Homo sapiens
aaatgcctgagaatt

SEQ ID NO: 2023581 - DNA, 15 bp, Homo sapiens
aatgcctgagaattg

SEQ ID NO: 2023582 - DNA, 15 bp, Homo sapiens
atgcctgagaattga

SEQ ID NO: 2023583 - DNA, 15 bp, Homo sapiens
tgcctgagaattgag

SEQ ID NO: 2023584 - DNA, 15 bp, Homo sapiens
gcctgagaattgagg

SEQ ID NO: 2023585 - DNA, 15 bp, Homo sapiens
cctgagaattgagga

SEQ ID NO: 2023586 - DNA, 15 bp, Homo sapiens
ctgagaattgaggac

SEQ ID NO: 2023587 - DNA, 15 bp, Homo sapiens
tgagaattgaggact

SEQ ID NO: 2023588 - DNA, 15 bp, Homo sapiens
gagaattgaggactg

SEQ ID NO: 2023589 - DNA, 15 bp, Homo sapiens
agaattgaggactgt

SEQ ID NO: 2023590 - DNA, 15 bp, Homo sapiens
gaattgaggactgtt

SEQ ID NO: 2023591 - DNA, 15 bp, Homo sapiens
aattgaggactgttt

SEQ ID NO: 2023592 - DNA, 15 bp, Homo sapiens
attgaggactgtttt

SEQ ID NO: 2023593 - DNA, 15 bp, Homo sapiens
ttgaggactgttttt

SEQ ID NO: 2023594 - DNA, 15 bp, Homo sapiens
tgaggactgttttta

SEQ ID NO: 2023595 - DNA, 15 bp, Homo sapiens
gaggactgtttttac

SEQ ID NO: 2023596 - DNA, 15 bp, Homo sapiens
aggactgtttttact

SEQ ID NO: 2023597 - DNA, 15 bp, Homo sapiens
ggactgtttttactc

SEQ ID NO: 2023598 - DNA, 15 bp, Homo sapiens
gactgtttttactcc

SEQ ID NO: 2023599 - DNA, 15 bp, Homo sapiens
actgtttttactcca

SEQ ID NO: 2023600 - DNA, 15 bp, Homo sapiens
ctgtttttactccag

SEQ ID NO: 2023601 - DNA, 15 bp, Homo sapiens
tgtttttactccagt

SEQ ID NO: 2023602 - DNA, 15 bp, Homo sapiens
gtttttactccagtt

SEQ ID NO: 2023603 - DNA, 15 bp, Homo sapiens
tttttactccagttt

SEQ ID NO: 2023604 - DNA, 15 bp, Homo sapiens
ttttactccagttta

SEQ ID NO: 2023605 - DNA, 15 bp, Homo sapiens
tttactccagtttat

SEQ ID NO: 2023606 - DNA, 15 bp, Homo sapiens
ttactccagtttatg

SEQ ID NO: 2023607 - DNA, 15 bp, Homo sapiens
tactccagtttatgc

SEQ ID NO: 2023608 - DNA, 15 bp, Homo sapiens
actccagtttatgcc

SEQ ID NO: 2023609 - DNA, 15 bp, Homo sapiens
ctccagtttatgcct

SEQ ID NO: 2023610 - DNA, 15 bp, Homo sapiens
tccagtttatgcctt

SEQ ID NO: 2023611 - DNA, 15 bp, Homo sapiens
ccagtttatgccttg

SEQ ID NO: 2023612 - DNA, 15 bp, Homo sapiens
cagtttatgccttgg

SEQ ID NO: 2023613 - DNA, 15 bp, Homo sapiens
agtttatgccttgga

SEQ ID NO: 2023614 - DNA, 15 bp, Homo sapiens
gtttatgccttggag

SEQ ID NO: 2023615 - DNA, 15 bp, Homo sapiens
tttatgccttggagg

SEQ ID NO: 2023616 - DNA, 15 bp, Homo sapiens
ttatgccttggaggc

SEQ ID NO: 2023617 - DNA, 15 bp, Homo sapiens
tatgccttggaggcc

SEQ ID NO: 2023618 - DNA, 15 bp, Homo sapiens
tgccttggaggccag

SEQ ID NO: 2023619 - DNA, 15 bp, Homo sapiens
gccttggaggccagg

SEQ ID NO: 2023620 - DNA, 15 bp, Homo sapiens
ccttggaggccaggt

SEQ ID NO: 2023621 - DNA, 15 bp, Homo sapiens
cttggaggccaggtt

SEQ ID NO: 2023622 - DNA, 15 bp, Homo sapiens
ttggaggccaggttg

SEQ ID NO: 2023623 - DNA, 15 bp, Homo sapiens
tggaggccaggttgt

SEQ ID NO: 2023624 - DNA, 15 bp, Homo sapiens
ggaggccaggttgtg

SEQ ID NO: 2023625 - DNA, 15 bp, Homo sapiens
gaggccaggttgtgt

SEQ ID NO: 2023626 - DNA, 15 bp, Homo sapiens
aggccaggttgtgtt

SEQ ID NO: 2023627 - DNA, 15 bp, Homo sapiens
ggccaggttgtgtta

SEQ ID NO: 2023628 - DNA, 15 bp, Homo sapiens
gccaggttgtgttat

SEQ ID NO: 2023629 - DNA, 15 bp, Homo sapiens
ccaggttgtgttatc

SEQ ID NO: 2023630 - DNA, 15 bp, Homo sapiens
caggttgtgttatca

SEQ ID NO: 2023631 - DNA, 15 bp, Homo sapiens
aggttgtgttatcag

SEQ ID NO: 2023632 - DNA, 15 bp, Homo sapiens
ggttgtgttatcaga

SEQ ID NO: 2023633 - DNA, 15 bp, Homo sapiens
gttgtgttatcagaa

SEQ ID NO: 2023634 - DNA, 15 bp, Homo sapiens
ttgtgttatcagaag

SEQ ID NO: 2023635 - DNA, 15 bp, Homo sapiens
tgtgttatcagaagt

SEQ ID NO: 2023636 - DNA, 15 bp, Homo sapiens
gtgttatcagaagtt

SEQ ID NO: 2023637 - DNA, 15 bp, Homo sapiens
tgttatcagaagttt

SEQ ID NO: 2023638 - DNA, 15 bp, Homo sapiens
gttatcagaagtttt

SEQ ID NO: 2023639 - DNA, 15 bp, Homo sapiens
ttatcagaagttttc

SEQ ID NO: 2023640 - DNA, 15 bp, Homo sapiens
tatcagaagttttct

SEQ ID NO: 2023641 - DNA, 15 bp, Homo sapiens
atcagaagttttctt

SEQ ID NO: 2023642 - DNA, 15 bp, Homo sapiens
tcagaagttttctta

SEQ ID NO: 2023643 - DNA, 15 bp, Homo sapiens
cagaagttttcttat

SEQ ID NO: 2023644 - DNA, 15 bp, Homo sapiens
agaagttttcttata

SEQ ID NO: 2023645 - DNA, 15 bp, Homo sapiens
gaagttttcttatat

SEQ ID NO: 2023646 - DNA, 15 bp, Homo sapiens
aagttttcttatatc

SEQ ID NO: 2023647 - DNA, 15 bp, Homo sapiens
agttttcttatatct

SEQ ID NO: 2023648 - DNA, 15 bp, Homo sapiens
gttttcttatatctg

SEQ ID NO: 2023649 - DNA, 15 bp, Homo sapiens
ttttcttatatctga

SEQ ID NO: 2023650 - DNA, 15 bp, Homo sapiens
tttcttatatctgat

SEQ ID NO: 2023651 - DNA, 15 bp, Homo sapiens
ttcttatatctgatc

SEQ ID NO: 2023652 - DNA, 15 bp, Homo sapiens
tcttatatctgatca

SEQ ID NO: 2023653 - DNA, 15 bp, Homo sapiens
cttatatctgatcat

SEQ ID NO: 2023654 - DNA, 15 bp, Homo sapiens
ttatatctgatcatt

SEQ ID NO: 2023655 - DNA, 15 bp, Homo sapiens
tatatctgatcattt

SEQ ID NO: 2023656 - DNA, 15 bp, Homo sapiens
atatctgatcatttt

SEQ ID NO: 2023657 - DNA, 15 bp, Homo sapiens
tatctgatcattttc

SEQ ID NO: 2023658 - DNA, 15 bp, Homo sapiens
atctgatcattttca

SEQ ID NO: 2023659 - DNA, 15 bp, Homo sapiens
tctgatcattttcag

SEQ ID NO: 2023660 - DNA, 15 bp, Homo sapiens
ctgatcattttcagt

SEQ ID NO: 2023661 - DNA, 15 bp, Homo sapiens
tgatcattttcagta

SEQ ID NO: 2023662 - DNA, 15 bp, Homo sapiens
gatcattttcagtag

SEQ ID NO: 2023663 - DNA, 15 bp, Homo sapiens
atcattttcagtaga

SEQ ID NO: 2023664 - DNA, 15 bp, Homo sapiens
tcattttcagtagaa

SEQ ID NO: 2023665 - DNA, 15 bp, Homo sapiens
cattttcagtagaat

SEQ ID NO: 2023666 - DNA, 15 bp, Homo sapiens
attttcagtagaatt

SEQ ID NO: 2023667 - DNA, 15 bp, Homo sapiens
ttttcagtagaattt

SEQ ID NO: 2023668 - DNA, 15 bp, Homo sapiens
tttcagtagaattta

SEQ ID NO: 2023669 - DNA, 15 bp, Homo sapiens
ttcagtagaatttat

SEQ ID NO: 2023670 - DNA, 15 bp, Homo sapiens
tcagtagaatttatt

SEQ ID NO: 2023671 - DNA, 15 bp, Homo sapiens
cagtagaatttattt

SEQ ID NO: 2023672 - DNA, 15 bp, Homo sapiens
agtagaatttatttt

SEQ ID NO: 2023673 - DNA, 15 bp, Homo sapiens
gtagaatttattttc

SEQ ID NO: 2023674 - DNA, 15 bp, Homo sapiens
tagaatttattttca

SEQ ID NO: 2023675 - DNA, 15 bp, Homo sapiens
agaatttattttcag

SEQ ID NO: 2023676 - DNA, 15 bp, Homo sapiens
gaatttattttcagt

SEQ ID NO: 2023677 - DNA, 15 bp, Homo sapiens
aatttattttcagta

SEQ ID NO: 2023678 - DNA, 15 bp, Homo sapiens
atttattttcagtag

SEQ ID NO: 2023679 - DNA, 15 bp, Homo sapiens
tttattttcagtaga

SEQ ID NO: 2023680 - DNA, 15 bp, Homo sapiens
ttattttcagtagaa

SEQ ID NO: 2023681 - DNA, 15 bp, Homo sapiens
tattttcagtagaat

SEQ ID NO: 2023682 - DNA, 15 bp, Homo sapiens
tttcagtagaatttg

SEQ ID NO: 2023683 - DNA, 15 bp, Homo sapiens
ttcagtagaatttgt

SEQ ID NO: 2023684 - DNA, 15 bp, Homo sapiens
tcagtagaatttgta

SEQ ID NO: 2023685 - DNA, 15 bp, Homo sapiens
cagtagaatttgtaa

SEQ ID NO: 2023686 - DNA, 15 bp, Homo sapiens
agtagaatttgtaat

SEQ ID NO: 2023687 - DNA, 15 bp, Homo sapiens
gtagaatttgtaatg

SEQ ID NO: 2023688 - DNA, 15 bp, Homo sapiens
tagaatttgtaatgt

SEQ ID NO: 2023689 - DNA, 15 bp, Homo sapiens
agaatttgtaatgtc

SEQ ID NO: 2023690 - DNA, 15 bp, Homo sapiens
gaatttgtaatgtcc

SEQ ID NO: 2023691 - DNA, 15 bp, Homo sapiens
aatttgtaatgtcca

SEQ ID NO: 2023692 - DNA, 15 bp, Homo sapiens
atttgtaatgtccaa

SEQ ID NO: 2023693 - DNA, 15 bp, Homo sapiens
tttgtaatgtccaag

SEQ ID NO: 2023694 - DNA, 15 bp, Homo sapiens
ttgtaatgtccaagc

SEQ ID NO: 2023695 - DNA, 15 bp, Homo sapiens
tgtaatgtccaagca

SEQ ID NO: 2023696 - DNA, 15 bp, Homo sapiens
gtaatgtccaagcat

SEQ ID NO: 2023697 - DNA, 15 bp, Homo sapiens
taatgtccaagcatt

SEQ ID NO: 2023698 - DNA, 15 bp, Homo sapiens
aatgtccaagcatta

SEQ ID NO: 2023699 - DNA, 15 bp, Homo sapiens
atgtccaagcattag

SEQ ID NO: 2023700 - DNA, 15 bp, Homo sapiens
tgtccaagcattagt

SEQ ID NO: 2023701 - DNA, 15 bp, Homo sapiens
gtccaagcattagta

SEQ ID NO: 2023702 - DNA, 15 bp, Homo sapiens
tccaagcattagtaa

SEQ ID NO: 2023703 - DNA, 15 bp, Homo sapiens
ccaagcattagtaat

SEQ ID NO: 2023704 - DNA, 15 bp, Homo sapiens
caagcattagtaatg

SEQ ID NO: 2023705 - DNA, 15 bp, Homo sapiens
aagcattagtaatga

SEQ ID NO: 2023706 - DNA, 15 bp, Homo sapiens
agcattagtaatgag

SEQ ID NO: 2023707 - DNA, 15 bp, Homo sapiens
gcattagtaatgaga

SEQ ID NO: 2023708 - DNA, 15 bp, Homo sapiens
cattagtaatgagaa

SEQ ID NO: 2023709 - DNA, 15 bp, Homo sapiens
attagtaatgagaaa

SEQ ID NO: 2023710 - DNA, 15 bp, Homo sapiens
ttagtaatgagaaat

SEQ ID NO: 2023711 - DNA, 15 bp, Homo sapiens
tagtaatgagaaatt

SEQ ID NO: 2023712 - DNA, 15 bp, Homo sapiens
agtaatgagaaattt

SEQ ID NO: 2023713 - DNA, 15 bp, Homo sapiens
gtaatgagaaattta

SEQ ID NO: 2023714 - DNA, 15 bp, Homo sapiens
taatgagaaatttat

SEQ ID NO: 2023715 - DNA, 15 bp, Homo sapiens
aatgagaaatttatt

SEQ ID NO: 2023716 - DNA, 15 bp, Homo sapiens
atgagaaatttattt

SEQ ID NO: 2023717 - DNA, 15 bp, Homo sapiens
tgagaaatttatttt

SEQ ID NO: 2023718 - DNA, 15 bp, Homo sapiens
gagaaatttattttt

SEQ ID NO: 2023719 - DNA, 15 bp, Homo sapiens
agaaatttatttttt

SEQ ID NO: 2023720 - DNA, 15 bp, Homo sapiens
gaaatttatttttta

SEQ ID NO: 2023721 - DNA, 15 bp, Homo sapiens
aaatttattttttaa

SEQ ID NO: 2023722 - DNA, 15 bp, Homo sapiens
aatttattttttaac

SEQ ID NO: 2023723 - DNA, 15 bp, Homo sapiens
atttattttttaact

SEQ ID NO: 2023724 - DNA, 15 bp, Homo sapiens
tttattttttaactt

SEQ ID NO: 2023725 - DNA, 15 bp, Homo sapiens
ttattttttaacttt

SEQ ID NO: 2023726 - DNA, 15 bp, Homo sapiens
tattttttaactttt

SEQ ID NO: 2023727 - DNA, 15 bp, Homo sapiens
attttttaacttttg

SEQ ID NO: 2023728 - DNA, 15 bp, Homo sapiens
ttttttaacttttga

SEQ ID NO: 2023729 - DNA, 15 bp, Homo sapiens
tttttaacttttgaa

SEQ ID NO: 2023730 - DNA, 15 bp, Homo sapiens
ttttaacttttgaaa

SEQ ID NO: 2023731 - DNA, 15 bp, Homo sapiens
tttaacttttgaaaa

SEQ ID NO: 2023732 - DNA, 15 bp, Homo sapiens
ttaacttttgaaaaa

SEQ ID NO: 2023733 - DNA, 15 bp, Homo sapiens
taacttttgaaaaat

SEQ ID NO: 2023734 - DNA, 15 bp, Homo sapiens
aacttttgaaaaata

SEQ ID NO: 2023735 - DNA, 15 bp, Homo sapiens
acttttgaaaaataa

SEQ ID NO: 2023736 - DNA, 15 bp, Homo sapiens
cttttgaaaaataac

SEQ ID NO: 2023737 - DNA, 15 bp, Homo sapiens
ttttgaaaaataaca

SEQ ID NO: 2023738 - DNA, 15 bp, Homo sapiens
tttgaaaaataacaa

SEQ ID NO: 2023739 - DNA, 15 bp, Homo sapiens
ttgaaaaataacaaa

SEQ ID NO: 2023740 - DNA, 15 bp, Homo sapiens
tgaaaaataacaaaa

SEQ ID NO: 2023741 - DNA, 15 bp, Homo sapiens
gaaaaataacaaaac

SEQ ID NO: 2023742 - DNA, 15 bp, Homo sapiens
aaaaataacaaaaca

SEQ ID NO: 2023743 - DNA, 15 bp, Homo sapiens
aaaataacaaaacat

SEQ ID NO: 2023744 - DNA, 15 bp, Homo sapiens
aaataacaaaacatt

SEQ ID NO: 2023745 - DNA, 15 bp, Homo sapiens
aataacaaaacattt

SEQ ID NO: 2023746 - DNA, 15 bp, Homo sapiens
ataacaaaacatttc

SEQ ID NO: 2023747 - DNA, 15 bp, Homo sapiens
taacaaaacatttcc

SEQ ID NO: 2023748 - DNA, 15 bp, Homo sapiens
aacaaaacatttcca

SEQ ID NO: 2023749 - DNA, 15 bp, Homo sapiens
caaaacatttccagt

SEQ ID NO: 2023750 - DNA, 15 bp, Homo sapiens
aaaacatttccagtt

SEQ ID NO: 2023751 - DNA, 15 bp, Homo sapiens
aaacatttccagttt

SEQ ID NO: 2023752 - DNA, 15 bp, Homo sapiens
aacatttccagttta

SEQ ID NO: 2023753 - DNA, 15 bp, Homo sapiens
acatttccagtttac

SEQ ID NO: 2023754 - DNA, 15 bp, Homo sapiens
catttccagtttact

SEQ ID NO: 2023755 - DNA, 15 bp, Homo sapiens
atttccagtttactt

SEQ ID NO: 2023756 - DNA, 15 bp, Homo sapiens
tttccagtttacttg

SEQ ID NO: 2023757 - DNA, 15 bp, Homo sapiens
ttccagtttacttga

SEQ ID NO: 2023758 - DNA, 15 bp, Homo sapiens
tccagtttacttgag

SEQ ID NO: 2023759 - DNA, 15 bp, Homo sapiens
ccagtttacttgagg

SEQ ID NO: 2023760 - DNA, 15 bp, Homo sapiens
cagtttacttgagga

SEQ ID NO: 2023761 - DNA, 15 bp, Homo sapiens
agtttacttgaggaa

SEQ ID NO: 2023762 - DNA, 15 bp, Homo sapiens
gtttacttgaggaaa

SEQ ID NO: 2023763 - DNA, 15 bp, Homo sapiens
tttacttgaggaaac

SEQ ID NO: 2023764 - DNA, 15 bp, Homo sapiens
ttacttgaggaaacc

SEQ ID NO: 2023765 - DNA, 15 bp, Homo sapiens
tacttgaggaaacca

SEQ ID NO: 2023766 - DNA, 15 bp, Homo sapiens
acttgaggaaaccaa

SEQ ID NO: 2023767 - DNA, 15 bp, Homo sapiens
cttgaggaaaccaaa

SEQ ID NO: 2023768 - DNA, 15 bp, Homo sapiens
ttgaggaaaccaaac

SEQ ID NO: 2023769 - DNA, 15 bp, Homo sapiens
tgaggaaaccaaact

SEQ ID NO: 2023770 - DNA, 15 bp, Homo sapiens
gaggaaaccaaactt

SEQ ID NO: 2023771 - DNA, 15 bp, Homo sapiens
aggaaaccaaactta

SEQ ID NO: 2023772 - DNA, 15 bp, Homo sapiens
ggaaaccaaacttag

SEQ ID NO: 2023773 - DNA, 15 bp, Homo sapiens
gaaaccaaacttaga

SEQ ID NO: 2023774 - DNA, 15 bp, Homo sapiens
aaaccaaacttagat

SEQ ID NO: 2023775 - DNA, 15 bp, Homo sapiens
aaccaaacttagatc

SEQ ID NO: 2023776 - DNA, 15 bp, Homo sapiens
accaaacttagatcc

SEQ ID NO: 2023777 - DNA, 15 bp, Homo sapiens
ccaaacttagatcct

SEQ ID NO: 2023778 - DNA, 15 bp, Homo sapiens
caaacttagatcctt

SEQ ID NO: 2023779 - DNA, 15 bp, Homo sapiens
aaacttagatccttc

SEQ ID NO: 2023780 - DNA, 15 bp, Homo sapiens
aacttagatccttcg

SEQ ID NO: 2023781 - DNA, 15 bp, Homo sapiens
acttagatccttcgt

SEQ ID NO: 2023782 - DNA, 15 bp, Homo sapiens
cttagatccttcgta

SEQ ID NO: 2023783 - DNA, 15 bp, Homo sapiens
ttagatccttcgtaa

SEQ ID NO: 2023784 - DNA, 15 bp, Homo sapiens
tagatccttcgtaat

SEQ ID NO: 2023785 - DNA, 15 bp, Homo sapiens
agatccttcgtaatc

SEQ ID NO: 2023786 - DNA, 15 bp, Homo sapiens
gatccttcgtaatcc

SEQ ID NO: 2023787 - DNA, 15 bp, Homo sapiens
atccttcgtaatcct

SEQ ID NO: 2023788 - DNA, 15 bp, Homo sapiens
tccttcgtaatccta

SEQ ID NO: 2023789 - DNA, 15 bp, Homo sapiens
ccttcgtaatcctaa

SEQ ID NO: 2023790 - DNA, 15 bp, Homo sapiens
cttcgtaatcctaat

SEQ ID NO: 2023791 - DNA, 15 bp, Homo sapiens
ttcgtaatcctaatt

SEQ ID NO: 2023792 - DNA, 15 bp, Homo sapiens
tcgtaatcctaattt

SEQ ID NO: 2023793 - DNA, 15 bp, Homo sapiens
cgtaatcctaattta

SEQ ID NO: 2023794 - DNA, 15 bp, Homo sapiens
gtaatcctaatttaa

SEQ ID NO: 2023795 - DNA, 15 bp, Homo sapiens
taatcctaatttaaa

SEQ ID NO: 2023796 - DNA, 15 bp, Homo sapiens
aatcctaatttaaaa

SEQ ID NO: 2023797 - DNA, 15 bp, Homo sapiens
atcctaatttaaaac

SEQ ID NO: 2023798 - DNA, 15 bp, Homo sapiens
tcctaatttaaaact

SEQ ID NO: 2023799 - DNA, 15 bp, Homo sapiens
cctaatttaaaactc

SEQ ID NO: 2023800 - DNA, 15 bp, Homo sapiens
ctaatttaaaactcc

SEQ ID NO: 2023801 - DNA, 15 bp, Homo sapiens
taatttaaaactcca

SEQ ID NO: 2023802 - DNA, 15 bp, Homo sapiens
aatttaaaactccat

SEQ ID NO: 2023803 - DNA, 15 bp, Homo sapiens
atttaaaactccatg

SEQ ID NO: 2023804 - DNA, 15 bp, Homo sapiens
tttaaaactccatgg

SEQ ID NO: 2023805 - DNA, 15 bp, Homo sapiens
ttaaaactccatggc

SEQ ID NO: 2023806 - DNA, 15 bp, Homo sapiens
taaaactccatggcg

SEQ ID NO: 2023807 - DNA, 15 bp, Homo sapiens
aaaactccatggcga

SEQ ID NO: 2023808 - DNA, 15 bp, Homo sapiens
aaactccatggcgat

SEQ ID NO: 2023809 - DNA, 15 bp, Homo sapiens
aactccatggcgatg

SEQ ID NO: 2023810 - DNA, 15 bp, Homo sapiens
actccatggcgatgg

SEQ ID NO: 2023811 - DNA, 15 bp, Homo sapiens
ctccatggcgatggc

SEQ ID NO: 2023812 - DNA, 15 bp, Homo sapiens
tccatggcgatggca

SEQ ID NO: 2023813 - DNA, 15 bp, Homo sapiens
ccatggcgatggcaa

SEQ ID NO: 2023814 - DNA, 15 bp, Homo sapiens
catggcgatggcaaa

SEQ ID NO: 2023815 - DNA, 15 bp, Homo sapiens
atggcgatggcaaat

SEQ ID NO: 2023816 - DNA, 15 bp, Homo sapiens
tggcgatggcaaatt

SEQ ID NO: 2023817 - DNA, 15 bp, Homo sapiens
ggcgatggcaaattt

SEQ ID NO: 2023818 - DNA, 15 bp, Homo sapiens
gcgatggcaaatttt

SEQ ID NO: 2023819 - DNA, 15 bp, Homo sapiens
cgatggcaaattttt

SEQ ID NO: 2023820 - DNA, 15 bp, Homo sapiens
gatggcaaatttttt

SEQ ID NO: 2023821 - DNA, 15 bp, Homo sapiens
atggcaaattttttc

SEQ ID NO: 2023822 - DNA, 15 bp, Homo sapiens
tggcaaattttttca

SEQ ID NO: 2023823 - DNA, 15 bp, Homo sapiens
ggcaaattttttcat

SEQ ID NO: 2023824 - DNA, 15 bp, Homo sapiens
gcaaattttttcatt

SEQ ID NO: 2023825 - DNA, 15 bp, Homo sapiens
caaattttttcattt

SEQ ID NO: 2023826 - DNA, 15 bp, Homo sapiens
aaattttttcatttc

SEQ ID NO: 2023827 - DNA, 15 bp, Homo sapiens
aattttttcatttct

SEQ ID NO: 2023828 - DNA, 15 bp, Homo sapiens
attttttcatttcta

SEQ ID NO: 2023829 - DNA, 15 bp, Homo sapiens
ttttttcatttctaa

SEQ ID NO: 2023830 - DNA, 15 bp, Homo sapiens
tttttcatttctaac

SEQ ID NO: 2023831 - DNA, 15 bp, Homo sapiens
ttttcatttctaact

SEQ ID NO: 2023832 - DNA, 15 bp, Homo sapiens
tttcatttctaactt

SEQ ID NO: 2023833 - DNA, 15 bp, Homo sapiens
ttcatttctaactta

SEQ ID NO: 2023834 - DNA, 15 bp, Homo sapiens
tcatttctaacttaa

SEQ ID NO: 2023835 - DNA, 15 bp, Homo sapiens
catttctaacttaaa

SEQ ID NO: 2023836 - DNA, 15 bp, Homo sapiens
atttctaacttaaaa

SEQ ID NO: 2023837 - DNA, 15 bp, Homo sapiens
tttctaacttaaaat

SEQ ID NO: 2023838 - DNA, 15 bp, Homo sapiens
ttctaacttaaaatt

SEQ ID NO: 2023839 - DNA, 15 bp, Homo sapiens
tctaacttaaaattt

SEQ ID NO: 2023840 - DNA, 15 bp, Homo sapiens
ctaacttaaaattta

SEQ ID NO: 2023841 - DNA, 15 bp, Homo sapiens
taacttaaaatttat

SEQ ID NO: 2023842 - DNA, 15 bp, Homo sapiens
aacttaaaatttatg

SEQ ID NO: 2023843 - DNA, 15 bp, Homo sapiens
acttaaaatttatgt

SEQ ID NO: 2023844 - DNA, 15 bp, Homo sapiens
cttaaaatttatgta

SEQ ID NO: 2023845 - DNA, 15 bp, Homo sapiens
ttaaaatttatgtaa

SEQ ID NO: 2023846 - DNA, 15 bp, Homo sapiens
taaaatttatgtaac

SEQ ID NO: 2023847 - DNA, 15 bp, Homo sapiens
aaaatttatgtaaca

SEQ ID NO: 2023848 - DNA, 15 bp, Homo sapiens
aaatttatgtaacag

SEQ ID NO: 2023849 - DNA, 15 bp, Homo sapiens
aatttatgtaacagg

SEQ ID NO: 2023850 - DNA, 15 bp, Homo sapiens
atttatgtaacagga

SEQ ID NO: 2023851 - DNA, 15 bp, Homo sapiens
tttatgtaacaggac

SEQ ID NO: 2023852 - DNA, 15 bp, Homo sapiens
ttatgtaacaggaca

SEQ ID NO: 2023853 - DNA, 15 bp, Homo sapiens
tatgtaacaggacag

SEQ ID NO: 2023854 - DNA, 15 bp, Homo sapiens
atgtaacaggacaga

SEQ ID NO: 2023855 - DNA, 15 bp, Homo sapiens
tgtaacaggacagaa

SEQ ID NO: 2023856 - DNA, 15 bp, Homo sapiens
gtaacaggacagaaa

SEQ ID NO: 2023857 - DNA, 15 bp, Homo sapiens
taacaggacagaaaa

SEQ ID NO: 2023858 - DNA, 15 bp, Homo sapiens
aacaggacagaaaaa

SEQ ID NO: 2023859 - DNA, 15 bp, Homo sapiens
acaggacagaaaaaa

SEQ ID NO: 2023860 - DNA, 15 bp, Homo sapiens
caggacagaaaaaaa

SEQ ID NO: 2023861 - DNA, 15 bp, Homo sapiens
aggacagaaaaaaaa

SEQ ID NO: 2023862 - DNA, 15 bp, Homo sapiens
ggacagaaaaaaaaa

SEQ ID NO: 2023863 - DNA, 15 bp, Homo sapiens
gacagaaaaaaaaag

SEQ ID NO: 2023864 - DNA, 15 bp, Homo sapiens
acagaaaaaaaaagt

SEQ ID NO: 2023865 - DNA, 15 bp, Homo sapiens
cagaaaaaaaaagta

SEQ ID NO: 2023866 - DNA, 15 bp, Homo sapiens
agaaaaaaaaagtat

SEQ ID NO: 2023867 - DNA, 15 bp, Homo sapiens
gaaaaaaaaagtata

SEQ ID NO: 2023868 - DNA, 15 bp, Homo sapiens
aaaaaaagtatacat

SEQ ID NO: 2023869 - DNA, 15 bp, Homo sapiens
aaaaaagtatacatt

SEQ ID NO: 2023870 - DNA, 15 bp, Homo sapiens
aaaaagtatacattt

SEQ ID NO: 2023871 - DNA, 15 bp, Homo sapiens
aaaagtatacatttt

SEQ ID NO: 2023872 - DNA, 15 bp, Homo sapiens
aaagtatacattttc

SEQ ID NO: 2023873 - DNA, 15 bp, Homo sapiens
aagtatacattttca

SEQ ID NO: 2023874 - DNA, 15 bp, Homo sapiens
agtatacattttcag

SEQ ID NO: 2023875 - DNA, 15 bp, Homo sapiens
gtatacattttcagt

SEQ ID NO: 2023876 - DNA, 15 bp, Homo sapiens
tatacattttcagtc

SEQ ID NO: 2023877 - DNA, 15 bp, Homo sapiens
atacattttcagtca

SEQ ID NO: 2023878 - DNA, 15 bp, Homo sapiens
tacattttcagtcac

SEQ ID NO: 2023879 - DNA, 15 bp, Homo sapiens
acattttcagtcaca

SEQ ID NO: 2023880 - DNA, 15 bp, Homo sapiens
cattttcagtcacaa

SEQ ID NO: 2023881 - DNA, 15 bp, Homo sapiens
attttcagtcacaat

SEQ ID NO: 2023882 - DNA, 15 bp, Homo sapiens
ttttcagtcacaatt

SEQ ID NO: 2023883 - DNA, 15 bp, Homo sapiens
tttcagtcacaattc

SEQ ID NO: 2023884 - DNA, 15 bp, Homo sapiens
ttcagtcacaattct

SEQ ID NO: 2023885 - DNA, 15 bp, Homo sapiens
tcagtcacaattcta

SEQ ID NO: 2023886 - DNA, 15 bp, Homo sapiens
cagtcacaattctag

SEQ ID NO: 2023887 - DNA, 15 bp, Homo sapiens
agtcacaattctagt

SEQ ID NO: 2023888 - DNA, 15 bp, Homo sapiens
gtcacaattctagtt

SEQ ID NO: 2023889 - DNA, 15 bp, Homo sapiens
tcacaattctagttt

SEQ ID NO: 2023890 - DNA, 15 bp, Homo sapiens
cacaattctagtttg

SEQ ID NO: 2023891 - DNA, 15 bp, Homo sapiens
acaattctagtttgt

SEQ ID NO: 2023892 - DNA, 15 bp, Homo sapiens
caattctagtttgtt

SEQ ID NO: 2023893 - DNA, 15 bp, Homo sapiens
aattctagtttgtta

SEQ ID NO: 2023894 - DNA, 15 bp, Homo sapiens
attctagtttgttag

SEQ ID NO: 2023895 - DNA, 15 bp, Homo sapiens
ttctagtttgttagt

SEQ ID NO: 2023896 - DNA, 15 bp, Homo sapiens
tctagtttgttagtg

SEQ ID NO: 2023897 - DNA, 15 bp, Homo sapiens
ctagtttgttagtga

SEQ ID NO: 2023898 - DNA, 15 bp, Homo sapiens
tagtttgttagtgag

SEQ ID NO: 2023899 - DNA, 15 bp, Homo sapiens
agtttgttagtgaga

SEQ ID NO: 2023900 - DNA, 15 bp, Homo sapiens
gtttgttagtgagat

SEQ ID NO: 2023901 - DNA, 15 bp, Homo sapiens
tttgttagtgagatt

SEQ ID NO: 2023902 - DNA, 15 bp, Homo sapiens
ttgttagtgagattc

SEQ ID NO: 2023903 - DNA, 15 bp, Homo sapiens
tgttagtgagattct

SEQ ID NO: 2023904 - DNA, 15 bp, Homo sapiens
gttagtgagattctt

SEQ ID NO: 2023905 - DNA, 15 bp, Homo sapiens
ttagtgagattctta

SEQ ID NO: 2023906 - DNA, 15 bp, Homo sapiens
tagtgagattcttac

SEQ ID NO: 2023907 - DNA, 15 bp, Homo sapiens
agtgagattcttaca

SEQ ID NO: 2023908 - DNA, 15 bp, Homo sapiens
gtgagattcttacac

SEQ ID NO: 2023909 - DNA, 15 bp, Homo sapiens
tgagattcttacaca

SEQ ID NO: 2023910 - DNA, 15 bp, Homo sapiens
gagattcttacacac

SEQ ID NO: 2023911 - DNA, 15 bp, Homo sapiens
agattcttacacact

SEQ ID NO: 2023912 - DNA, 15 bp, Homo sapiens
gattcttacacactt

SEQ ID NO: 2023913 - DNA, 15 bp, Homo sapiens
attcttacacacttt

SEQ ID NO: 2023914 - DNA, 15 bp, Homo sapiens
ttcttacacactttg

SEQ ID NO: 2023915 - DNA, 15 bp, Homo sapiens
tcttacacactttga

SEQ ID NO: 2023916 - DNA, 15 bp, Homo sapiens
cttacacactttgat

SEQ ID NO: 2023917 - DNA, 15 bp, Homo sapiens
ttacacactttgata

SEQ ID NO: 2023918 - DNA, 15 bp, Homo sapiens
tacacactttgatag

SEQ ID NO: 2023919 - DNA, 15 bp, Homo sapiens
acacactttgatagc

SEQ ID NO: 2023920 - DNA, 15 bp, Homo sapiens
cacactttgatagca

SEQ ID NO: 2023921 - DNA, 15 bp, Homo sapiens
acactttgatagcat

SEQ ID NO: 2023922 - DNA, 15 bp, Homo sapiens
cactttgatagcatt

SEQ ID NO: 2023923 - DNA, 15 bp, Homo sapiens
actttgatagcattt

SEQ ID NO: 2023924 - DNA, 15 bp, Homo sapiens
ctttgatagcatttc

SEQ ID NO: 2023925 - DNA, 15 bp, Homo sapiens
tttgatagcatttcc

SEQ ID NO: 2023926 - DNA, 15 bp, Homo sapiens
ttgatagcatttcct

SEQ ID NO: 2023927 - DNA, 15 bp, Homo sapiens
tgatagcatttcctc

SEQ ID NO: 2023928 - DNA, 15 bp, Homo sapiens
gatagcatttcctcg

SEQ ID NO: 2023929 - DNA, 15 bp, Homo sapiens
atagcatttcctcga

SEQ ID NO: 2023930 - DNA, 15 bp, Homo sapiens
tagcatttcctcgaa

SEQ ID NO: 2023931 - DNA, 15 bp, Homo sapiens
agcatttcctcgaac

SEQ ID NO: 2023932 - DNA, 15 bp, Homo sapiens
gcatttcctcgaaca

SEQ ID NO: 2023933 - DNA, 15 bp, Homo sapiens
catttcctcgaacac

SEQ ID NO: 2023934 - DNA, 15 bp, Homo sapiens
atttcctcgaacact

SEQ ID NO: 2023935 - DNA, 15 bp, Homo sapiens
tttcctcgaacacta

SEQ ID NO: 2023936 - DNA, 15 bp, Homo sapiens
ttcctcgaacactaa

SEQ ID NO: 2023937 - DNA, 15 bp, Homo sapiens
tcctcgaacactaat

SEQ ID NO: 2023938 - DNA, 15 bp, Homo sapiens
cctcgaacactaatc

SEQ ID NO: 2023939 - DNA, 15 bp, Homo sapiens
ctcgaacactaatct

SEQ ID NO: 2023940 - DNA, 15 bp, Homo sapiens
tcgaacactaatctg

SEQ ID NO: 2023941 - DNA, 15 bp, Homo sapiens
cgaacactaatctgt

SEQ ID NO: 2023942 - DNA, 15 bp, Homo sapiens
gaacactaatctgtc

SEQ ID NO: 2023943 - DNA, 15 bp, Homo sapiens
aacactaatctgtca

SEQ ID NO: 2023944 - DNA, 15 bp, Homo sapiens
acactaatctgtcag

SEQ ID NO: 2023945 - DNA, 15 bp, Homo sapiens
cactaatctgtcaga

SEQ ID NO: 2023946 - DNA, 15 bp, Homo sapiens
actaatctgtcagac

SEQ ID NO: 2023947 - DNA, 15 bp, Homo sapiens
ctaatctgtcagacg

SEQ ID NO: 2023948 - DNA, 15 bp, Homo sapiens
taatctgtcagacgt

SEQ ID NO: 2023949 - DNA, 15 bp, Homo sapiens
aatctgtcagacgtt

SEQ ID NO: 2023950 - DNA, 15 bp, Homo sapiens
atctgtcagacgtta

SEQ ID NO: 2023951 - DNA, 15 bp, Homo sapiens
tctgtcagacgttag

SEQ ID NO: 2023952 - DNA, 15 bp, Homo sapiens
ctgtcagacgttaga

SEQ ID NO: 2023953 - DNA, 15 bp, Homo sapiens
tgtcagacgttagaa

SEQ ID NO: 2023954 - DNA, 15 bp, Homo sapiens
gtcagacgttagaag

SEQ ID NO: 2023955 - DNA, 15 bp, Homo sapiens
tcagacgttagaagt

SEQ ID NO: 2023956 - DNA, 15 bp, Homo sapiens
cagacgttagaagtg

SEQ ID NO: 2023957 - DNA, 15 bp, Homo sapiens
agacgttagaagtga

SEQ ID NO: 2023958 - DNA, 15 bp, Homo sapiens
gacgttagaagtgaa

SEQ ID NO: 2023959 - DNA, 15 bp, Homo sapiens
acgttagaagtgaaa

SEQ ID NO: 2023960 - DNA, 15 bp, Homo sapiens
cgttagaagtgaaaa

SEQ ID NO: 2023961 - DNA, 15 bp, Homo sapiens
gttagaagtgaaaag

SEQ ID NO: 2023962 - DNA, 15 bp, Homo sapiens
ttagaagtgaaaagg

SEQ ID NO: 2023963 - DNA, 15 bp, Homo sapiens
tagaagtgaaaaggc

SEQ ID NO: 2023964 - DNA, 15 bp, Homo sapiens
agaagtgaaaaggca

SEQ ID NO: 2023965 - DNA, 15 bp, Homo sapiens
gaagtgaaaaggcat

SEQ ID NO: 2023966 - DNA, 15 bp, Homo sapiens
aagtgaaaaggcata

SEQ ID NO: 2023967 - DNA, 15 bp, Homo sapiens
agtgaaaaggcataa

SEQ ID NO: 2023968 - DNA, 15 bp, Homo sapiens
gtgaaaaggcataag

SEQ ID NO: 2023969 - DNA, 15 bp, Homo sapiens
tgaaaaggcataaga

SEQ ID NO: 2023970 - DNA, 15 bp, Homo sapiens
gaaaaggcataagaa

SEQ ID NO: 2023971 - DNA, 15 bp, Homo sapiens
aaaaggcataagaaa

SEQ ID NO: 2023972 - DNA, 15 bp, Homo sapiens
aaaggcataagaaaa

SEQ ID NO: 2023973 - DNA, 15 bp, Homo sapiens
aaggcataagaaaag

SEQ ID NO: 2023974 - DNA, 15 bp, Homo sapiens
aggcataagaaaagc

SEQ ID NO: 2023975 - DNA, 15 bp, Homo sapiens
ggcataagaaaagcc

SEQ ID NO: 2023976 - DNA, 15 bp, Homo sapiens
gcataagaaaagccg

SEQ ID NO: 2023977 - DNA, 15 bp, Homo sapiens
cataagaaaagccgt

SEQ ID NO: 2023978 - DNA, 15 bp, Homo sapiens
ataagaaaagccgta

SEQ ID NO: 2023979 - DNA, 15 bp, Homo sapiens
taagaaaagccgtat

SEQ ID NO: 2023980 - DNA, 15 bp, Homo sapiens
aagaaaagccgtata

SEQ ID NO: 2023981 - DNA, 15 bp, Homo sapiens
agaaaagccgtatat

SEQ ID NO: 2023982 - DNA, 15 bp, Homo sapiens
gaaaagccgtatata

SEQ ID NO: 2023983 - DNA, 15 bp, Homo sapiens
aaaagccgtatatat

SEQ ID NO: 2023984 - DNA, 15 bp, Homo sapiens
aaagccgtatatata

SEQ ID NO: 2023985 - DNA, 15 bp, Homo sapiens
aagccgtatatatat

SEQ ID NO: 2023986 - DNA, 15 bp, Homo sapiens
agccgtatatatatg

SEQ ID NO: 2023987 - DNA, 15 bp, Homo sapiens
gccgtatatatatga

SEQ ID NO: 2023988 - DNA, 15 bp, Homo sapiens
ccgtatatatatgac

SEQ ID NO: 2023989 - DNA, 15 bp, Homo sapiens
cgtatatatatgacc

SEQ ID NO: 2023990 - DNA, 15 bp, Homo sapiens
gtatatatatgacct

SEQ ID NO: 2023991 - DNA, 15 bp, Homo sapiens
tatatatatgaccta

SEQ ID NO: 2023992 - DNA, 15 bp, Homo sapiens
atatatatgacctac

SEQ ID NO: 2023993 - DNA, 15 bp, Homo sapiens
tatatatgacctacc

SEQ ID NO: 2023994 - DNA, 15 bp, Homo sapiens
atatatgacctacct

SEQ ID NO: 2023995 - DNA, 15 bp, Homo sapiens
tatatgacctacctt

SEQ ID NO: 2023996 - DNA, 15 bp, Homo sapiens
atatgacctacctta

SEQ ID NO: 2023997 - DNA, 15 bp, Homo sapiens
tatgacctaccttac

SEQ ID NO: 2023998 - DNA, 15 bp, Homo sapiens
atgacctaccttaca

SEQ ID NO: 2023999 - DNA, 15 bp, Homo sapiens
tgacctaccttacaa

SEQ ID NO: 2024000 - DNA, 15 bp, Homo sapiens
gacctaccttacaaa

SEQ ID NO: 2024001 - DNA, 15 bp, Homo sapiens
acctaccttacaaaa

SEQ ID NO: 2024002 - DNA, 15 bp, Homo sapiens
cctaccttacaaaat

SEQ ID NO: 2024003 - DNA, 15 bp, Homo sapiens
ctaccttacaaaatg

SEQ ID NO: 2024004 - DNA, 15 bp, Homo sapiens
taccttacaaaatgc

SEQ ID NO: 2024005 - DNA, 15 bp, Homo sapiens
accttacaaaatgct

SEQ ID NO: 2024006 - DNA, 15 bp, Homo sapiens
ccttacaaaatgctt

SEQ ID NO: 2024007 - DNA, 15 bp, Homo sapiens
cttacaaaatgcttg

SEQ ID NO: 2024008 - DNA, 15 bp, Homo sapiens
ttacaaaatgcttgg

SEQ ID NO: 2024009 - DNA, 15 bp, Homo sapiens
tacaaaatgcttggt

SEQ ID NO: 2024010 - DNA, 15 bp, Homo sapiens
acaaaatgcttggtc

SEQ ID NO: 2024011 - DNA, 15 bp, Homo sapiens
caaaatgcttggtca

SEQ ID NO: 2024012 - DNA, 15 bp, Homo sapiens
aaaatgcttggtcaa

SEQ ID NO: 2024013 - DNA, 15 bp, Homo sapiens
aaatgcttggtcaaa

SEQ ID NO: 2024014 - DNA, 15 bp, Homo sapiens
aatgcttggtcaaaa

SEQ ID NO: 2024015 - DNA, 15 bp, Homo sapiens
atgcttggtcaaaat

SEQ ID NO: 2024016 - DNA, 15 bp, Homo sapiens
tgcttggtcaaaatc

SEQ ID NO: 2024017 - DNA, 15 bp, Homo sapiens
gcttggtcaaaatct

SEQ ID NO: 2024018 - DNA, 15 bp, Homo sapiens
cttggtcaaaatctg

SEQ ID NO: 2024019 - DNA, 15 bp, Homo sapiens
ttggtcaaaatctga

SEQ ID NO: 2024020 - DNA, 15 bp, Homo sapiens
tggtcaaaatctgat

SEQ ID NO: 2024021 - DNA, 15 bp, Homo sapiens
ggtcaaaatctgatt

SEQ ID NO: 2024022 - DNA, 15 bp, Homo sapiens
gtcaaaatctgatta

SEQ ID NO: 2024023 - DNA, 15 bp, Homo sapiens
tcaaaatctgattat

SEQ ID NO: 2024024 - DNA, 15 bp, Homo sapiens
caaaatctgattata

SEQ ID NO: 2024025 - DNA, 15 bp, Homo sapiens
aaaatctgattataa

SEQ ID NO: 2024026 - DNA, 15 bp, Homo sapiens
aaatctgattataac

SEQ ID NO: 2024027 - DNA, 15 bp, Homo sapiens
aatctgattataacg

SEQ ID NO: 2024028 - DNA, 15 bp, Homo sapiens
atctgattataacgt

SEQ ID NO: 2024029 - DNA, 15 bp, Homo sapiens
tctgattataacgtg

SEQ ID NO: 2024030 - DNA, 15 bp, Homo sapiens
ctgattataacgtga

SEQ ID NO: 2024031 - DNA, 15 bp, Homo sapiens
tgattataacgtgat

SEQ ID NO: 2024032 - DNA, 15 bp, Homo sapiens
gattataacgtgatt

SEQ ID NO: 2024033 - DNA, 15 bp, Homo sapiens
attataacgtgattt

SEQ ID NO: 2024034 - DNA, 15 bp, Homo sapiens
ttataacgtgatttt

SEQ ID NO: 2024035 - DNA, 15 bp, Homo sapiens
tataacgtgattttg

SEQ ID NO: 2024036 - DNA, 15 bp, Homo sapiens
ataacgtgattttga

SEQ ID NO: 2024037 - DNA, 15 bp, Homo sapiens
taacgtgattttgat

SEQ ID NO: 2024038 - DNA, 15 bp, Homo sapiens
aacgtgattttgata

SEQ ID NO: 2024039 - DNA, 15 bp, Homo sapiens
acgtgattttgataa

SEQ ID NO: 2024040 - DNA, 15 bp, Homo sapiens
cgtgattttgataaa

SEQ ID NO: 2024041 - DNA, 15 bp, Homo sapiens
gtgattttgataaac

SEQ ID NO: 2024042 - DNA, 15 bp, Homo sapiens
tgattttgataaacc

SEQ ID NO: 2024043 - DNA, 15 bp, Homo sapiens
gattttgataaacca

SEQ ID NO: 2024044 - DNA, 15 bp, Homo sapiens
attttgataaaccac

SEQ ID NO: 2024045 - DNA, 15 bp, Homo sapiens
ttttgataaaccact

SEQ ID NO: 2024046 - DNA, 15 bp, Homo sapiens
tttgataaaccactt

SEQ ID NO: 2024047 - DNA, 15 bp, Homo sapiens
ttgataaaccacttc

SEQ ID NO: 2024048 - DNA, 15 bp, Homo sapiens
tgataaaccacttct

SEQ ID NO: 2024049 - DNA, 15 bp, Homo sapiens
gataaaccacttctt

SEQ ID NO: 2024050 - DNA, 15 bp, Homo sapiens
ataaaccacttcttt

SEQ ID NO: 2024051 - DNA, 15 bp, Homo sapiens
taaaccacttctttt

SEQ ID NO: 2024052 - DNA, 15 bp, Homo sapiens
aaaccacttcttttc

SEQ ID NO: 2024053 - DNA, 15 bp, Homo sapiens
aaccacttcttttct

SEQ ID NO: 2024054 - DNA, 15 bp, Homo sapiens
accacttcttttctt

SEQ ID NO: 2024055 - DNA, 15 bp, Homo sapiens
ccacttcttttcttg

SEQ ID NO: 2024056 - DNA, 15 bp, Homo sapiens
cacttcttttcttgt

SEQ ID NO: 2024057 - DNA, 15 bp, Homo sapiens
acttcttttcttgtc

SEQ ID NO: 2024058 - DNA, 15 bp, Homo sapiens
cttcttttcttgtct

SEQ ID NO: 2024059 - DNA, 15 bp, Homo sapiens
ttcttttcttgtctt

SEQ ID NO: 2024060 - DNA, 15 bp, Homo sapiens
tcttttcttgtcttc

SEQ ID NO: 2024061 - DNA, 15 bp, Homo sapiens
cttttcttgtcttct

SEQ ID NO: 2024062 - DNA, 15 bp, Homo sapiens
ttttcttgtcttctt

SEQ ID NO: 2024063 - DNA, 15 bp, Homo sapiens
tttcttgtcttcttt

SEQ ID NO: 2024064 - DNA, 15 bp, Homo sapiens
tgtcttctttttaaa

SEQ ID NO: 2024065 - DNA, 15 bp, Homo sapiens
gtcttctttttaaag

SEQ ID NO: 2024066 - DNA, 15 bp, Homo sapiens
tcttctttttaaagc

SEQ ID NO: 2024067 - DNA, 15 bp, Homo sapiens
cttctttttaaagca

SEQ ID NO: 2024068 - DNA, 15 bp, Homo sapiens
ttctttttaaagcag

SEQ ID NO: 2024069 - DNA, 15 bp, Homo sapiens
tctttttaaagcaga

SEQ ID NO: 2024070 - DNA, 15 bp, Homo sapiens
tttttaaagcagaat

SEQ ID NO: 2024071 - DNA, 15 bp, Homo sapiens
ttttaaagcagaata

SEQ ID NO: 2024072 - DNA, 15 bp, Homo sapiens
tttaaagcagaatag

SEQ ID NO: 2024073 - DNA, 15 bp, Homo sapiens
ttaaagcagaataga

SEQ ID NO: 2024074 - DNA, 15 bp, Homo sapiens
taaagcagaatagac

SEQ ID NO: 2024075 - DNA, 15 bp, Homo sapiens
aaagcagaatagact

SEQ ID NO: 2024076 - DNA, 15 bp, Homo sapiens
aagcagaatagactt

SEQ ID NO: 2024077 - DNA, 15 bp, Homo sapiens
agcagaatagacttg

SEQ ID NO: 2024078 - DNA, 15 bp, Homo sapiens
gcagaatagacttgg

SEQ ID NO: 2024079 - DNA, 15 bp, Homo sapiens
cagaatagacttgga

SEQ ID NO: 2024080 - DNA, 15 bp, Homo sapiens
agaatagacttggag

SEQ ID NO: 2024081 - DNA, 15 bp, Homo sapiens
gaatagacttggaga

SEQ ID NO: 2024082 - DNA, 15 bp, Homo sapiens
aatagacttggagaa

SEQ ID NO: 2024083 - DNA, 15 bp, Homo sapiens
atagacttggagaat

SEQ ID NO: 2024084 - DNA, 15 bp, Homo sapiens
tagacttggagaata

SEQ ID NO: 2024085 - DNA, 15 bp, Homo sapiens
agacttggagaatat

SEQ ID NO: 2024086 - DNA, 15 bp, Homo sapiens
gacttggagaatatg

SEQ ID NO: 2024087 - DNA, 15 bp, Homo sapiens
acttggagaatatga

SEQ ID NO: 2024088 - DNA, 15 bp, Homo sapiens
cttggagaatatgag

SEQ ID NO: 2024089 - DNA, 15 bp, Homo sapiens
ttggagaatatgagc

SEQ ID NO: 2024090 - DNA, 15 bp, Homo sapiens
tggagaatatgagcc

SEQ ID NO: 2024091 - DNA, 15 bp, Homo sapiens
ggagaatatgagcct

SEQ ID NO: 2024092 - DNA, 15 bp, Homo sapiens
gagaatatgagcctt

SEQ ID NO: 2024093 - DNA, 15 bp, Homo sapiens
agaatatgagcctta

SEQ ID NO: 2024094 - DNA, 15 bp, Homo sapiens
gaatatgagccttaa

SEQ ID NO: 2024095 - DNA, 15 bp, Homo sapiens
aatatgagccttaaa

SEQ ID NO: 2024096 - DNA, 15 bp, Homo sapiens
atatgagccttaaag

SEQ ID NO: 2024097 - DNA, 15 bp, Homo sapiens
tatgagccttaaagt

SEQ ID NO: 2024098 - DNA, 15 bp, Homo sapiens
atgagccttaaagta

SEQ ID NO: 2024099 - DNA, 15 bp, Homo sapiens
tgagccttaaagtaa

SEQ ID NO: 2024100 - DNA, 15 bp, Homo sapiens
gagccttaaagtaaa

SEQ ID NO: 2024101 - DNA, 15 bp, Homo sapiens
agccttaaagtaaat

SEQ ID NO: 2024102 - DNA, 15 bp, Homo sapiens
gccttaaagtaaatc

SEQ ID NO: 2024103 - DNA, 15 bp, Homo sapiens
ccttaaagtaaatct

SEQ ID NO: 2024104 - DNA, 15 bp, Homo sapiens
cttaaagtaaatctg

SEQ ID NO: 2024105 - DNA, 15 bp, Homo sapiens
ttaaagtaaatctgc

SEQ ID NO: 2024106 - DNA, 15 bp, Homo sapiens
taaagtaaatctgca

SEQ ID NO: 2024107 - DNA, 15 bp, Homo sapiens
aaagtaaatctgcag

SEQ ID NO: 2024108 - DNA, 15 bp, Homo sapiens
aagtaaatctgcagt

SEQ ID NO: 2024109 - DNA, 15 bp, Homo sapiens
agtaaatctgcagta

SEQ ID NO: 2024110 - DNA, 15 bp, Homo sapiens
gtaaatctgcagtaa

SEQ ID NO: 2024111 - DNA, 15 bp, Homo sapiens
taaatctgcagtaaa

SEQ ID NO: 2024112 - DNA, 15 bp, Homo sapiens
aaatctgcagtaaaa

SEQ ID NO: 2024113 - DNA, 15 bp, Homo sapiens
aatctgcagtaaaaa

SEQ ID NO: 2024114 - DNA, 15 bp, Homo sapiens
atctgcagtaaaaaa

SEQ ID NO: 2024115 - DNA, 15 bp, Homo sapiens
tctgcagtaaaaaag

SEQ ID NO: 2024116 - DNA, 15 bp, Homo sapiens
ctgcagtaaaaaagg

SEQ ID NO: 2024117 - DNA, 15 bp, Homo sapiens
tgcagtaaaaaagga

SEQ ID NO: 2024118 - DNA, 15 bp, Homo sapiens
gcagtaaaaaaggat

SEQ ID NO: 2024119 - DNA, 15 bp, Homo sapiens
cagtaaaaaaggata

SEQ ID NO: 2024120 - DNA, 15 bp, Homo sapiens
agtaaaaaaggatat

SEQ ID NO: 2024121 - DNA, 15 bp, Homo sapiens
gtaaaaaaggatatg

SEQ ID NO: 2024122 - DNA, 15 bp, Homo sapiens
taaaaaaggatatgt

SEQ ID NO: 2024123 - DNA, 15 bp, Homo sapiens
aaaaaaggatatgtg

SEQ ID NO: 2024124 - DNA, 15 bp, Homo sapiens
aaaaaggatatgtgc

SEQ ID NO: 2024125 - DNA, 15 bp, Homo sapiens
aaaaggatatgtgca

SEQ ID NO: 2024126 - DNA, 15 bp, Homo sapiens
aaaggatatgtgcag

SEQ ID NO: 2024127 - DNA, 15 bp, Homo sapiens
aaggatatgtgcagc

SEQ ID NO: 2024128 - DNA, 15 bp, Homo sapiens
aggatatgtgcagct

SEQ ID NO: 2024129 - DNA, 15 bp, Homo sapiens
ggatatgtgcagcta

SEQ ID NO: 2024130 - DNA, 15 bp, Homo sapiens
gatatgtgcagctag

SEQ ID NO: 2024131 - DNA, 15 bp, Homo sapiens
atatgtgcagctagt

SEQ ID NO: 2024132 - DNA, 15 bp, Homo sapiens
tatgtgcagctagtt

SEQ ID NO: 2024133 - DNA, 15 bp, Homo sapiens
atgtgcagctagttt

SEQ ID NO: 2024134 - DNA, 15 bp, Homo sapiens
tgtgcagctagtttt

SEQ ID NO: 2024135 - DNA, 15 bp, Homo sapiens
gtgcagctagttttc

SEQ ID NO: 2024136 - DNA, 15 bp, Homo sapiens
tgcagctagttttcc

SEQ ID NO: 2024137 - DNA, 15 bp, Homo sapiens
gcagctagttttcca

SEQ ID NO: 2024138 - DNA, 15 bp, Homo sapiens
cagctagttttccac

SEQ ID NO: 2024139 - DNA, 15 bp, Homo sapiens
agctagttttccact

SEQ ID NO: 2024140 - DNA, 15 bp, Homo sapiens
gctagttttccactt

SEQ ID NO: 2024141 - DNA, 15 bp, Homo sapiens
ctagttttccacttt

SEQ ID NO: 2024142 - DNA, 15 bp, Homo sapiens
tagttttccactttt

SEQ ID NO: 2024143 - DNA, 15 bp, Homo sapiens
agttttccactttta

SEQ ID NO: 2024144 - DNA, 15 bp, Homo sapiens
gttttccacttttaa

SEQ ID NO: 2024145 - DNA, 15 bp, Homo sapiens
ttttccacttttaaa

SEQ ID NO: 2024146 - DNA, 15 bp, Homo sapiens
tttccacttttaaaa

SEQ ID NO: 2024147 - DNA, 15 bp, Homo sapiens
ttccacttttaaaac

SEQ ID NO: 2024148 - DNA, 15 bp, Homo sapiens
tccacttttaaaacc

SEQ ID NO: 2024149 - DNA, 15 bp, Homo sapiens
ccacttttaaaacca

SEQ ID NO: 2024150 - DNA, 15 bp, Homo sapiens
cacttttaaaaccaa

SEQ ID NO: 2024151 - DNA, 15 bp, Homo sapiens
acttttaaaaccaaa

SEQ ID NO: 2024152 - DNA, 15 bp, Homo sapiens
cttttaaaaccaaac

SEQ ID NO: 2024153 - DNA, 15 bp, Homo sapiens
ttttaaaaccaaacc

SEQ ID NO: 2024154 - DNA, 15 bp, Homo sapiens
tttaaaaccaaacca

SEQ ID NO: 2024155 - DNA, 15 bp, Homo sapiens
ttaaaaccaaaccac

SEQ ID NO: 2024156 - DNA, 15 bp, Homo sapiens
taaaaccaaaccaca

SEQ ID NO: 2024157 - DNA, 15 bp, Homo sapiens
aaaaccaaaccacag

SEQ ID NO: 2024158 - DNA, 15 bp, Homo sapiens
aaaccaaaccacaga

SEQ ID NO: 2024159 - DNA, 15 bp, Homo sapiens
aaccaaaccacagat

SEQ ID NO: 2024160 - DNA, 15 bp, Homo sapiens
accaaaccacagatg

SEQ ID NO: 2024161 - DNA, 15 bp, Homo sapiens
ccaaaccacagatga

SEQ ID NO: 2024162 - DNA, 15 bp, Homo sapiens
caaaccacagatgac

SEQ ID NO: 2024163 - DNA, 15 bp, Homo sapiens
aaaccacagatgaca

SEQ ID NO: 2024164 - DNA, 15 bp, Homo sapiens
aaccacagatgacac

SEQ ID NO: 2024165 - DNA, 15 bp, Homo sapiens
accacagatgacaca

SEQ ID NO: 2024166 - DNA, 15 bp, Homo sapiens
ccacagatgacacat

SEQ ID NO: 2024167 - DNA, 15 bp, Homo sapiens
cacagatgacacatt

SEQ ID NO: 2024168 - DNA, 15 bp, Homo sapiens
acagatgacacattt

SEQ ID NO: 2024169 - DNA, 15 bp, Homo sapiens
cagatgacacatttc

SEQ ID NO: 2024170 - DNA, 15 bp, Homo sapiens
agatgacacatttcc

SEQ ID NO: 2024171 - DNA, 15 bp, Homo sapiens
gatgacacatttcct

SEQ ID NO: 2024172 - DNA, 15 bp, Homo sapiens
atgacacatttcctt

SEQ ID NO: 2024173 - DNA, 15 bp, Homo sapiens
tgacacatttccttt

SEQ ID NO: 2024174 - DNA, 15 bp, Homo sapiens
gacacatttcctttc

SEQ ID NO: 2024175 - DNA, 15 bp, Homo sapiens
acacatttcctttcc

SEQ ID NO: 2024176 - DNA, 15 bp, Homo sapiens
cacatttcctttcca

SEQ ID NO: 2024177 - DNA, 15 bp, Homo sapiens
acatttcctttccac

SEQ ID NO: 2024178 - DNA, 15 bp, Homo sapiens
catttcctttccact

SEQ ID NO: 2024179 - DNA, 15 bp, Homo sapiens
atttcctttccactg

SEQ ID NO: 2024180 - DNA, 15 bp, Homo sapiens
tttcctttccactgc

SEQ ID NO: 2024181 - DNA, 15 bp, Homo sapiens
ttcctttccactgca

SEQ ID NO: 2024182 - DNA, 15 bp, Homo sapiens
tcctttccactgcaa

SEQ ID NO: 2024183 - DNA, 15 bp, Homo sapiens
cctttccactgcaac

SEQ ID NO: 2024184 - DNA, 15 bp, Homo sapiens
ctttccactgcaact

SEQ ID NO: 2024185 - DNA, 15 bp, Homo sapiens
tttccactgcaacta

SEQ ID NO: 2024186 - DNA, 15 bp, Homo sapiens
ttccactgcaactaa

SEQ ID NO: 2024187 - DNA, 15 bp, Homo sapiens
tccactgcaactaaa

SEQ ID NO: 2024188 - DNA, 15 bp, Homo sapiens
ccactgcaactaaag

SEQ ID NO: 2024189 - DNA, 15 bp, Homo sapiens
cactgcaactaaagc

SEQ ID NO: 2024190 - DNA, 15 bp, Homo sapiens
actgcaactaaagca

SEQ ID NO: 2024191 - DNA, 15 bp, Homo sapiens
ctgcaactaaagcac

SEQ ID NO: 2024192 - DNA, 15 bp, Homo sapiens
tgcaactaaagcaca

SEQ ID NO: 2024193 - DNA, 15 bp, Homo sapiens
gcaactaaagcacat

SEQ ID NO: 2024194 - DNA, 15 bp, Homo sapiens
caactaaagcacatg

SEQ ID NO: 2024195 - DNA, 15 bp, Homo sapiens
aactaaagcacatgt

SEQ ID NO: 2024196 - DNA, 15 bp, Homo sapiens
actaaagcacatgtc

SEQ ID NO: 2024197 - DNA, 15 bp, Homo sapiens
ctaaagcacatgtca

SEQ ID NO: 2024198 - DNA, 15 bp, Homo sapiens
taaagcacatgtcac

SEQ ID NO: 2024199 - DNA, 15 bp, Homo sapiens
aaagcacatgtcaca

SEQ ID NO: 2024200 - DNA, 15 bp, Homo sapiens
aagcacatgtcacag

SEQ ID NO: 2024201 - DNA, 15 bp, Homo sapiens
agcacatgtcacagg

SEQ ID NO: 2024202 - DNA, 15 bp, Homo sapiens
gcacatgtcacagga

SEQ ID NO: 2024203 - DNA, 15 bp, Homo sapiens
cacatgtcacaggag

SEQ ID NO: 2024204 - DNA, 15 bp, Homo sapiens
acatgtcacaggagg

SEQ ID NO: 2024205 - DNA, 15 bp, Homo sapiens
catgtcacaggaggg

SEQ ID NO: 2024206 - DNA, 15 bp, Homo sapiens
atgtcacaggaggga

SEQ ID NO: 2024207 - DNA, 15 bp, Homo sapiens
tgtcacaggagggaa

SEQ ID NO: 2024208 - DNA, 15 bp, Homo sapiens
gtcacaggagggaaa

SEQ ID NO: 2024209 - DNA, 15 bp, Homo sapiens
tcacaggagggaaaa

SEQ ID NO: 2024210 - DNA, 15 bp, Homo sapiens
cacaggagggaaaaa

SEQ ID NO: 2024211 - DNA, 15 bp, Homo sapiens
acaggagggaaaaaa

SEQ ID NO: 2024212 - DNA, 15 bp, Homo sapiens
caggagggaaaaaaa

SEQ ID NO: 2024213 - DNA, 15 bp, Homo sapiens
aggagggaaaaaaaa

SEQ ID NO: 2024214 - DNA, 15 bp, Homo sapiens
ggagggaaaaaaaaa

SEQ ID NO: 2024215 - DNA, 15 bp, Homo sapiens
gagggaaaaaaaaaa

SEQ ID NO: 2024216 - DNA, 15 bp, Homo sapiens
agggaaaaaaaaaaa

SEQ ID NO: 2024217 - DNA, 15 bp, Homo sapiens
gaaaaaaaaaaaaac

SEQ ID NO: 2024218 - DNA, 15 bp, Homo sapiens
aaaaaaaaaacaacg

SEQ ID NO: 2024219 - DNA, 15 bp, Homo sapiens
aaaaaaaaacaacga

SEQ ID NO: 2024220 - DNA, 15 bp, Homo sapiens
aaaaaaaacaacgaa

SEQ ID NO: 2024221 - DNA, 15 bp, Homo sapiens
aaaaaaacaacgaaa

SEQ ID NO: 2024222 - DNA, 15 bp, Homo sapiens
aaaaaacaacgaaaa

SEQ ID NO: 2024223 - DNA, 15 bp, Homo sapiens
aaaaacaacgaaaaa

SEQ ID NO: 2024224 - DNA, 15 bp, Homo sapiens
aaaacaacgaaaaag

SEQ ID NO: 2024225 - DNA, 15 bp, Homo sapiens
aaacaacgaaaaagc

SEQ ID NO: 2024226 - DNA, 15 bp, Homo sapiens
aacaacgaaaaagct

SEQ ID NO: 2024227 - DNA, 15 bp, Homo sapiens
acaacgaaaaagctc

SEQ ID NO: 2024228 - DNA, 15 bp, Homo sapiens
caacgaaaaagctcc

SEQ ID NO: 2024229 - DNA, 15 bp, Homo sapiens
aacgaaaaagctcca

SEQ ID NO: 2024230 - DNA, 15 bp, Homo sapiens
acgaaaaagctccaa

SEQ ID NO: 2024231 - DNA, 15 bp, Homo sapiens
cgaaaaagctccaac

SEQ ID NO: 2024232 - DNA, 15 bp, Homo sapiens
gaaaaagctccaact

SEQ ID NO: 2024233 - DNA, 15 bp, Homo sapiens
aaaaagctccaactt

SEQ ID NO: 2024234 - DNA, 15 bp, Homo sapiens
aaaagctccaacttc

SEQ ID NO: 2024235 - DNA, 15 bp, Homo sapiens
aaagctccaacttct

SEQ ID NO: 2024236 - DNA, 15 bp, Homo sapiens
aagctccaacttctc

SEQ ID NO: 2024237 - DNA, 15 bp, Homo sapiens
agctccaacttctct

SEQ ID NO: 2024238 - DNA, 15 bp, Homo sapiens
gctccaacttctcta

SEQ ID NO: 2024239 - DNA, 15 bp, Homo sapiens
ctccaacttctctag

SEQ ID NO: 2024240 - DNA, 15 bp, Homo sapiens
tccaacttctctagt

SEQ ID NO: 2024241 - DNA, 15 bp, Homo sapiens
ccaacttctctagtt

SEQ ID NO: 2024242 - DNA, 15 bp, Homo sapiens
caacttctctagttg

SEQ ID NO: 2024243 - DNA, 15 bp, Homo sapiens
aacttctctagttgg

SEQ ID NO: 2024244 - DNA, 15 bp, Homo sapiens
acttctctagttggc

SEQ ID NO: 2024245 - DNA, 15 bp, Homo sapiens
cttctctagttggcc

SEQ ID NO: 2024246 - DNA, 15 bp, Homo sapiens
ttctctagttggcca

SEQ ID NO: 2024247 - DNA, 15 bp, Homo sapiens
tctctagttggccac

SEQ ID NO: 2024248 - DNA, 15 bp, Homo sapiens
ctctagttggccact

SEQ ID NO: 2024249 - DNA, 15 bp, Homo sapiens
tctagttggccactg

SEQ ID NO: 2024250 - DNA, 15 bp, Homo sapiens
ctagttggccactgg

SEQ ID NO: 2024251 - DNA, 15 bp, Homo sapiens
tagttggccactggc

SEQ ID NO: 2024252 - DNA, 15 bp, Homo sapiens
agttggccactggca

SEQ ID NO: 2024253 - DNA, 15 bp, Homo sapiens
gttggccactggcat

SEQ ID NO: 2024254 - DNA, 15 bp, Homo sapiens
ttggccactggcatg

SEQ ID NO: 2024255 - DNA, 15 bp, Homo sapiens
tggccactggcatga

SEQ ID NO: 2024256 - DNA, 15 bp, Homo sapiens
ggccactggcatgac

SEQ ID NO: 2024257 - DNA, 15 bp, Homo sapiens
gccactggcatgaca

SEQ ID NO: 2024258 - DNA, 15 bp, Homo sapiens
ccactggcatgacag

SEQ ID NO: 2024259 - DNA, 15 bp, Homo sapiens
cactggcatgacagg

SEQ ID NO: 2024260 - DNA, 15 bp, Homo sapiens
actggcatgacagga

SEQ ID NO: 2024261 - DNA, 15 bp, Homo sapiens
ctggcatgacaggag

SEQ ID NO: 2024262 - DNA, 15 bp, Homo sapiens
tggcatgacaggagg

SEQ ID NO: 2024263 - DNA, 15 bp, Homo sapiens
ggcatgacaggaggc

SEQ ID NO: 2024264 - DNA, 15 bp, Homo sapiens
gcatgacaggaggct

SEQ ID NO: 2024265 - DNA, 15 bp, Homo sapiens
catgacaggaggctt

SEQ ID NO: 2024266 - DNA, 15 bp, Homo sapiens
atgacaggaggcttt

SEQ ID NO: 2024267 - DNA, 15 bp, Homo sapiens
tgacaggaggctttg

SEQ ID NO: 2024268 - DNA, 15 bp, Homo sapiens
gacaggaggctttgt

SEQ ID NO: 2024269 - DNA, 15 bp, Homo sapiens
acaggaggctttgta

SEQ ID NO: 2024270 - DNA, 15 bp, Homo sapiens
caggaggctttgtag

SEQ ID NO: 2024271 - DNA, 15 bp, Homo sapiens
aggaggctttgtaga

SEQ ID NO: 2024272 - DNA, 15 bp, Homo sapiens
ggaggctttgtagaa

SEQ ID NO: 2024273 - DNA, 15 bp, Homo sapiens
gaggctttgtagaac

SEQ ID NO: 2024274 - DNA, 15 bp, Homo sapiens
aggctttgtagaacc

SEQ ID NO: 2024275 - DNA, 15 bp, Homo sapiens
ggctttgtagaacca

SEQ ID NO: 2024276 - DNA, 15 bp, Homo sapiens
gctttgtagaaccaa

SEQ ID NO: 2024277 - DNA, 15 bp, Homo sapiens
ctttgtagaaccaat

SEQ ID NO: 2024278 - DNA, 15 bp, Homo sapiens
tttgtagaaccaatc

SEQ ID NO: 2024279 - DNA, 15 bp, Homo sapiens
ttgtagaaccaatcc

SEQ ID NO: 2024280 - DNA, 15 bp, Homo sapiens
tgtagaaccaatccc

SEQ ID NO: 2024281 - DNA, 15 bp, Homo sapiens
gtagaaccaatcccc

SEQ ID NO: 2024282 - DNA, 15 bp, Homo sapiens
tagaaccaatccccg

SEQ ID NO: 2024283 - DNA, 15 bp, Homo sapiens
agaaccaatccccgc

SEQ ID NO: 2024284 - DNA, 15 bp, Homo sapiens
gaaccaatccccgcc

SEQ ID NO: 2024285 - DNA, 15 bp, Homo sapiens
aaccaatccccgcct

SEQ ID NO: 2024286 - DNA, 15 bp, Homo sapiens
accaatccccgcctc

SEQ ID NO: 2024287 - DNA, 15 bp, Homo sapiens
ccaatccccgcctcc

SEQ ID NO: 2024288 - DNA, 15 bp, Homo sapiens
caatccccgcctcca

SEQ ID NO: 2024289 - DNA, 15 bp, Homo sapiens
aatccccgcctccag

SEQ ID NO: 2024290 - DNA, 15 bp, Homo sapiens
atccccgcctccaga

SEQ ID NO: 2024291 - DNA, 15 bp, Homo sapiens
tccccgcctccagag

SEQ ID NO: 2024292 - DNA, 15 bp, Homo sapiens
ccccgcctccagagc

SEQ ID NO: 2024293 - DNA, 15 bp, Homo sapiens
cccgcctccagagca

SEQ ID NO: 2024294 - DNA, 15 bp, Homo sapiens
ccgcctccagagcag

SEQ ID NO: 2024295 - DNA, 15 bp, Homo sapiens
cgcctccagagcagg

SEQ ID NO: 2024296 - DNA, 15 bp, Homo sapiens
gcctccagagcaggg

SEQ ID NO: 2024297 - DNA, 15 bp, Homo sapiens
cctccagagcaggga

SEQ ID NO: 2024298 - DNA, 15 bp, Homo sapiens
ctccagagcagggag

SEQ ID NO: 2024299 - DNA, 15 bp, Homo sapiens
tccagagcagggagg

SEQ ID NO: 2024300 - DNA, 15 bp, Homo sapiens
ccagagcagggaggg

SEQ ID NO: 2024301 - DNA, 15 bp, Homo sapiens
cagagcagggagggt

SEQ ID NO: 2024302 - DNA, 15 bp, Homo sapiens
agagcagggagggtt

SEQ ID NO: 2024303 - DNA, 15 bp, Homo sapiens
gagcagggagggttt

SEQ ID NO: 2024304 - DNA, 15 bp, Homo sapiens
agcagggagggtttt

SEQ ID NO: 2024305 - DNA, 15 bp, Homo sapiens
gcagggagggttttc

SEQ ID NO: 2024306 - DNA, 15 bp, Homo sapiens
cagggagggttttcc

SEQ ID NO: 2024307 - DNA, 15 bp, Homo sapiens
agggagggttttcca

SEQ ID NO: 2024308 - DNA, 15 bp, Homo sapiens
gggagggttttccac

SEQ ID NO: 2024309 - DNA, 15 bp, Homo sapiens
ggagggttttccact

SEQ ID NO: 2024310 - DNA, 15 bp, Homo sapiens
gagggttttccactt

SEQ ID NO: 2024311 - DNA, 15 bp, Homo sapiens
agggttttccactta

SEQ ID NO: 2024312 - DNA, 15 bp, Homo sapiens
gggttttccacttaa

SEQ ID NO: 2024313 - DNA, 15 bp, Homo sapiens
ggttttccacttaat

SEQ ID NO: 2024314 - DNA, 15 bp, Homo sapiens
gttttccacttaatg

SEQ ID NO: 2024315 - DNA, 15 bp, Homo sapiens
ttttccacttaatgc

SEQ ID NO: 2024316 - DNA, 15 bp, Homo sapiens
tttccacttaatgcc

SEQ ID NO: 2024317 - DNA, 15 bp, Homo sapiens
ttccacttaatgcct

SEQ ID NO: 2024318 - DNA, 15 bp, Homo sapiens
tccacttaatgcctt

SEQ ID NO: 2024319 - DNA, 15 bp, Homo sapiens
ccacttaatgccttt

SEQ ID NO: 2024320 - DNA, 15 bp, Homo sapiens
cacttaatgcctttt

SEQ ID NO: 2024321 - DNA, 15 bp, Homo sapiens
acttaatgccttttg

SEQ ID NO: 2024322 - DNA, 15 bp, Homo sapiens
cttaatgccttttga

SEQ ID NO: 2024323 - DNA, 15 bp, Homo sapiens
ttaatgccttttgac

SEQ ID NO: 2024324 - DNA, 15 bp, Homo sapiens
taatgccttttgaca

SEQ ID NO: 2024325 - DNA, 15 bp, Homo sapiens
aatgccttttgacag

SEQ ID NO: 2024326 - DNA, 15 bp, Homo sapiens
atgccttttgacagt

SEQ ID NO: 2024327 - DNA, 15 bp, Homo sapiens
tgccttttgacagta

SEQ ID NO: 2024328 - DNA, 15 bp, Homo sapiens
gccttttgacagtat

SEQ ID NO: 2024329 - DNA, 15 bp, Homo sapiens
ccttttgacagtatg

SEQ ID NO: 2024330 - DNA, 15 bp, Homo sapiens
cttttgacagtatgc

SEQ ID NO: 2024331 - DNA, 15 bp, Homo sapiens
ttttgacagtatgct

SEQ ID NO: 2024332 - DNA, 15 bp, Homo sapiens
tttgacagtatgctc

SEQ ID NO: 2024333 - DNA, 15 bp, Homo sapiens
ttgacagtatgctca

SEQ ID NO: 2024334 - DNA, 15 bp, Homo sapiens
tgacagtatgctcat

SEQ ID NO: 2024335 - DNA, 15 bp, Homo sapiens
gacagtatgctcatt

SEQ ID NO: 2024336 - DNA, 15 bp, Homo sapiens
acagtatgctcattc

SEQ ID NO: 2024337 - DNA, 15 bp, Homo sapiens
cagtatgctcattct

SEQ ID NO: 2024338 - DNA, 15 bp, Homo sapiens
agtatgctcattcta

SEQ ID NO: 2024339 - DNA, 15 bp, Homo sapiens
gtatgctcattctat

SEQ ID NO: 2024340 - DNA, 15 bp, Homo sapiens
tatgctcattctata

SEQ ID NO: 2024341 - DNA, 15 bp, Homo sapiens
atgctcattctatag

SEQ ID NO: 2024342 - DNA, 15 bp, Homo sapiens
tgctcattctatagg

SEQ ID NO: 2024343 - DNA, 15 bp, Homo sapiens
gctcattctataggc

SEQ ID NO: 2024344 - DNA, 15 bp, Homo sapiens
ctcattctataggcc

SEQ ID NO: 2024345 - DNA, 15 bp, Homo sapiens
tcattctataggcct

SEQ ID NO: 2024346 - DNA, 15 bp, Homo sapiens
cattctataggcctg

SEQ ID NO: 2024347 - DNA, 15 bp, Homo sapiens
attctataggcctgc

SEQ ID NO: 2024348 - DNA, 15 bp, Homo sapiens
ttctataggcctgct

SEQ ID NO: 2024349 - DNA, 15 bp, Homo sapiens
tctataggcctgcta

SEQ ID NO: 2024350 - DNA, 15 bp, Homo sapiens
ctataggcctgctac

SEQ ID NO: 2024351 - DNA, 15 bp, Homo sapiens
tataggcctgctaca

SEQ ID NO: 2024352 - DNA, 15 bp, Homo sapiens
ataggcctgctacat

SEQ ID NO: 2024353 - DNA, 15 bp, Homo sapiens
taggcctgctacatg

SEQ ID NO: 2024354 - DNA, 15 bp, Homo sapiens
aggcctgctacatgc

SEQ ID NO: 2024355 - DNA, 15 bp, Homo sapiens
ggcctgctacatgct

SEQ ID NO: 2024356 - DNA, 15 bp, Homo sapiens
gcctgctacatgctt

SEQ ID NO: 2024357 - DNA, 15 bp, Homo sapiens
cctgctacatgcttt

SEQ ID NO: 2024358 - DNA, 15 bp, Homo sapiens
ctgctacatgcttta

SEQ ID NO: 2024359 - DNA, 15 bp, Homo sapiens
tgctacatgctttag

SEQ ID NO: 2024360 - DNA, 15 bp, Homo sapiens
gctacatgctttagt

SEQ ID NO: 2024361 - DNA, 15 bp, Homo sapiens
ctacatgctttagtg

SEQ ID NO: 2024362 - DNA, 15 bp, Homo sapiens
tacatgctttagtgt

SEQ ID NO: 2024363 - DNA, 15 bp, Homo sapiens
acatgctttagtgtc

SEQ ID NO: 2024364 - DNA, 15 bp, Homo sapiens
catgctttagtgtca

SEQ ID NO: 2024365 - DNA, 15 bp, Homo sapiens
atgctttagtgtcat

SEQ ID NO: 2024366 - DNA, 15 bp, Homo sapiens
tgctttagtgtcatt

SEQ ID NO: 2024367 - DNA, 15 bp, Homo sapiens
gctttagtgtcattc

SEQ ID NO: 2024368 - DNA, 15 bp, Homo sapiens
ctttagtgtcattca

SEQ ID NO: 2024369 - DNA, 15 bp, Homo sapiens
tttagtgtcattcaa

SEQ ID NO: 2024370 - DNA, 15 bp, Homo sapiens
ttagtgtcattcaaa

SEQ ID NO: 2024371 - DNA, 15 bp, Homo sapiens
tagtgtcattcaaaa

SEQ ID NO: 2024372 - DNA, 15 bp, Homo sapiens
agtgtcattcaaaag

SEQ ID NO: 2024373 - DNA, 15 bp, Homo sapiens
gtgtcattcaaaaga

SEQ ID NO: 2024374 - DNA, 15 bp, Homo sapiens
tgtcattcaaaagag

SEQ ID NO: 2024375 - DNA, 15 bp, Homo sapiens
gtcattcaaaagagg

SEQ ID NO: 2024376 - DNA, 15 bp, Homo sapiens
tcattcaaaagaggt

SEQ ID NO: 2024377 - DNA, 15 bp, Homo sapiens
cattcaaaagaggtt

SEQ ID NO: 2024378 - DNA, 15 bp, Homo sapiens
attcaaaagaggttt

SEQ ID NO: 2024379 - DNA, 15 bp, Homo sapiens
ttcaaaagaggtttt

SEQ ID NO: 2024380 - DNA, 15 bp, Homo sapiens
tcaaaagaggttttg

SEQ ID NO: 2024381 - DNA, 15 bp, Homo sapiens
caaaagaggttttga

SEQ ID NO: 2024382 - DNA, 15 bp, Homo sapiens
aaaagaggttttgaa

SEQ ID NO: 2024383 - DNA, 15 bp, Homo sapiens
aaagaggttttgaaa

SEQ ID NO: 2024384 - DNA, 15 bp, Homo sapiens
aagaggttttgaaat

SEQ ID NO: 2024385 - DNA, 15 bp, Homo sapiens
agaggttttgaaatg

SEQ ID NO: 2024386 - DNA, 15 bp, Homo sapiens
gaggttttgaaatgg

SEQ ID NO: 2024387 - DNA, 15 bp, Homo sapiens
aggttttgaaatggt

SEQ ID NO: 2024388 - DNA, 15 bp, Homo sapiens
ggttttgaaatggta

SEQ ID NO: 2024389 - DNA, 15 bp, Homo sapiens
gttttgaaatggtat

SEQ ID NO: 2024390 - DNA, 15 bp, Homo sapiens
ttttgaaatggtatc

SEQ ID NO: 2024391 - DNA, 15 bp, Homo sapiens
tttgaaatggtatct

SEQ ID NO: 2024392 - DNA, 15 bp, Homo sapiens
ttgaaatggtatctt

SEQ ID NO: 2024393 - DNA, 15 bp, Homo sapiens
tgaaatggtatcttc

SEQ ID NO: 2024394 - DNA, 15 bp, Homo sapiens
gaaatggtatcttcc

SEQ ID NO: 2024395 - DNA, 15 bp, Homo sapiens
aaatggtatcttcca

SEQ ID NO: 2024396 - DNA, 15 bp, Homo sapiens
aatggtatcttccat

SEQ ID NO: 2024397 - DNA, 15 bp, Homo sapiens
atggtatcttccatt

SEQ ID NO: 2024398 - DNA, 15 bp, Homo sapiens
tggtatcttccattt

SEQ ID NO: 2024399 - DNA, 15 bp, Homo sapiens
ggtatcttccatttc

SEQ ID NO: 2024400 - DNA, 15 bp, Homo sapiens
gtatcttccatttca

SEQ ID NO: 2024401 - DNA, 15 bp, Homo sapiens
tatcttccatttcaa

SEQ ID NO: 2024402 - DNA, 15 bp, Homo sapiens
atcttccatttcaaa

SEQ ID NO: 2024403 - DNA, 15 bp, Homo sapiens
tcttccatttcaaat

SEQ ID NO: 2024404 - DNA, 15 bp, Homo sapiens
cttccatttcaaatc

SEQ ID NO: 2024405 - DNA, 15 bp, Homo sapiens
ttccatttcaaatct

SEQ ID NO: 2024406 - DNA, 15 bp, Homo sapiens
tccatttcaaatctt

SEQ ID NO: 2024407 - DNA, 15 bp, Homo sapiens
ccatttcaaatcttc

SEQ ID NO: 2024408 - DNA, 15 bp, Homo sapiens
catttcaaatcttct

SEQ ID NO: 2024409 - DNA, 15 bp, Homo sapiens
atttcaaatcttctc

SEQ ID NO: 2024410 - DNA, 15 bp, Homo sapiens
tttcaaatcttctct

SEQ ID NO: 2024411 - DNA, 15 bp, Homo sapiens
ttcaaatcttctcta

SEQ ID NO: 2024412 - DNA, 15 bp, Homo sapiens
tcaaatcttctctaa

SEQ ID NO: 2024413 - DNA, 15 bp, Homo sapiens
caaatcttctctaaa

SEQ ID NO: 2024414 - DNA, 15 bp, Homo sapiens
aaatcttctctaaaa

SEQ ID NO: 2024415 - DNA, 15 bp, Homo sapiens
aatcttctctaaaag

SEQ ID NO: 2024416 - DNA, 15 bp, Homo sapiens
atcttctctaaaaga

SEQ ID NO: 2024417 - DNA, 15 bp, Homo sapiens
tcttctctaaaagac

SEQ ID NO: 2024418 - DNA, 15 bp, Homo sapiens
cttctctaaaagact

SEQ ID NO: 2024419 - DNA, 15 bp, Homo sapiens
ttctctaaaagactt

SEQ ID NO: 2024420 - DNA, 15 bp, Homo sapiens
tctctaaaagactta

SEQ ID NO: 2024421 - DNA, 15 bp, Homo sapiens
ctctaaaagacttat

SEQ ID NO: 2024422 - DNA, 15 bp, Homo sapiens
tctaaaagacttatt

SEQ ID NO: 2024423 - DNA, 15 bp, Homo sapiens
ctaaaagacttattt

SEQ ID NO: 2024424 - DNA, 15 bp, Homo sapiens
taaaagacttatttg

SEQ ID NO: 2024425 - DNA, 15 bp, Homo sapiens
aaaagacttatttga

SEQ ID NO: 2024426 - DNA, 15 bp, Homo sapiens
aaagacttatttgaa

SEQ ID NO: 2024427 - DNA, 15 bp, Homo sapiens
aagacttatttgaaa

SEQ ID NO: 2024428 - DNA, 15 bp, Homo sapiens
agacttatttgaaat

SEQ ID NO: 2024429 - DNA, 15 bp, Homo sapiens
gacttatttgaaatc

SEQ ID NO: 2024430 - DNA, 15 bp, Homo sapiens
acttatttgaaatct

SEQ ID NO: 2024431 - DNA, 15 bp, Homo sapiens
cttatttgaaatcta

SEQ ID NO: 2024432 - DNA, 15 bp, Homo sapiens
ttatttgaaatctac

SEQ ID NO: 2024433 - DNA, 15 bp, Homo sapiens
tatttgaaatctaca

SEQ ID NO: 2024434 - DNA, 15 bp, Homo sapiens
atttgaaatctacag

SEQ ID NO: 2024435 - DNA, 15 bp, Homo sapiens
tttgaaatctacaga

SEQ ID NO: 2024436 - DNA, 15 bp, Homo sapiens
ttgaaatctacagac

SEQ ID NO: 2024437 - DNA, 15 bp, Homo sapiens
tgaaatctacagact

SEQ ID NO: 2024438 - DNA, 15 bp, Homo sapiens
gaaatctacagactg

SEQ ID NO: 2024439 - DNA, 15 bp, Homo sapiens
aaatctacagactga

SEQ ID NO: 2024440 - DNA, 15 bp, Homo sapiens
aatctacagactgat

SEQ ID NO: 2024441 - DNA, 15 bp, Homo sapiens
atctacagactgatt

SEQ ID NO: 2024442 - DNA, 15 bp, Homo sapiens
tctacagactgattt

SEQ ID NO: 2024443 - DNA, 15 bp, Homo sapiens
ctacagactgatttg

SEQ ID NO: 2024444 - DNA, 15 bp, Homo sapiens
tacagactgatttga

SEQ ID NO: 2024445 - DNA, 15 bp, Homo sapiens
acagactgatttgaa

SEQ ID NO: 2024446 - DNA, 15 bp, Homo sapiens
cagactgatttgaaa

SEQ ID NO: 2024447 - DNA, 15 bp, Homo sapiens
agactgatttgaaaa

SEQ ID NO: 2024448 - DNA, 15 bp, Homo sapiens
gactgatttgaaaat

SEQ ID NO: 2024449 - DNA, 15 bp, Homo sapiens
actgatttgaaaatg

SEQ ID NO: 2024450 - DNA, 15 bp, Homo sapiens
ctgatttgaaaatgt

SEQ ID NO: 2024451 - DNA, 15 bp, Homo sapiens
tgatttgaaaatgtg

SEQ ID NO: 2024452 - DNA, 15 bp, Homo sapiens
gatttgaaaatgtga

SEQ ID NO: 2024453 - DNA, 15 bp, Homo sapiens
atttgaaaatgtgag

SEQ ID NO: 2024454 - DNA, 15 bp, Homo sapiens
tttgaaaatgtgagt

SEQ ID NO: 2024455 - DNA, 15 bp, Homo sapiens
ttgaaaatgtgagtt

SEQ ID NO: 2024456 - DNA, 15 bp, Homo sapiens
tgaaaatgtgagttt

SEQ ID NO: 2024457 - DNA, 15 bp, Homo sapiens
gaaaatgtgagtttg

SEQ ID NO: 2024458 - DNA, 15 bp, Homo sapiens
aaaatgtgagtttgg

SEQ ID NO: 2024459 - DNA, 15 bp, Homo sapiens
aaatgtgagtttgga

SEQ ID NO: 2024460 - DNA, 15 bp, Homo sapiens
aatgtgagtttggag

SEQ ID NO: 2024461 - DNA, 15 bp, Homo sapiens
atgtgagtttggagt

SEQ ID NO: 2024462 - DNA, 15 bp, Homo sapiens
tgtgagtttggagtc

SEQ ID NO: 2024463 - DNA, 15 bp, Homo sapiens
gtgagtttggagtcc

SEQ ID NO: 2024464 - DNA, 15 bp, Homo sapiens
tgagtttggagtcca

SEQ ID NO: 2024465 - DNA, 15 bp, Homo sapiens
gagtttggagtccat

SEQ ID NO: 2024466 - DNA, 15 bp, Homo sapiens
agtttggagtccatg

SEQ ID NO: 2024467 - DNA, 15 bp, Homo sapiens
gtttggagtccatgg

SEQ ID NO: 2024468 - DNA, 15 bp, Homo sapiens
tttggagtccatggg

SEQ ID NO: 2024469 - DNA, 15 bp, Homo sapiens
ttggagtccatggga

SEQ ID NO: 2024470 - DNA, 15 bp, Homo sapiens
tggagtccatgggat

SEQ ID NO: 2024471 - DNA, 15 bp, Homo sapiens
ggagtccatgggata

SEQ ID NO: 2024472 - DNA, 15 bp, Homo sapiens
gagtccatgggatac

SEQ ID NO: 2024473 - DNA, 15 bp, Homo sapiens
agtccatgggatact

SEQ ID NO: 2024474 - DNA, 15 bp, Homo sapiens
gtccatgggatactg

SEQ ID NO: 2024475 - DNA, 15 bp, Homo sapiens
tccatgggatactga

SEQ ID NO: 2024476 - DNA, 15 bp, Homo sapiens
ccatgggatactgat

SEQ ID NO: 2024477 - DNA, 15 bp, Homo sapiens
catgggatactgatc

SEQ ID NO: 2024478 - DNA, 15 bp, Homo sapiens
atgggatactgatca

SEQ ID NO: 2024479 - DNA, 15 bp, Homo sapiens
tgggatactgatcag

SEQ ID NO: 2024480 - DNA, 15 bp, Homo sapiens
gggatactgatcaga

SEQ ID NO: 2024481 - DNA, 15 bp, Homo sapiens
ggatactgatcagat

SEQ ID NO: 2024482 - DNA, 15 bp, Homo sapiens
gatactgatcagata

SEQ ID NO: 2024483 - DNA, 15 bp, Homo sapiens
atactgatcagataa

SEQ ID NO: 2024484 - DNA, 15 bp, Homo sapiens
tactgatcagataat

SEQ ID NO: 2024485 - DNA, 15 bp, Homo sapiens
actgatcagataatg

SEQ ID NO: 2024486 - DNA, 15 bp, Homo sapiens
ctgatcagataatgt

SEQ ID NO: 2024487 - DNA, 15 bp, Homo sapiens
tgatcagataatgta

SEQ ID NO: 2024488 - DNA, 15 bp, Homo sapiens
gatcagataatgtaa

SEQ ID NO: 2024489 - DNA, 15 bp, Homo sapiens
atcagataatgtaac

SEQ ID NO: 2024490 - DNA, 15 bp, Homo sapiens
tcagataatgtaaca

SEQ ID NO: 2024491 - DNA, 15 bp, Homo sapiens
cagataatgtaacaa

SEQ ID NO: 2024492 - DNA, 15 bp, Homo sapiens
agataatgtaacaat

SEQ ID NO: 2024493 - DNA, 15 bp, Homo sapiens
gataatgtaacaatt

SEQ ID NO: 2024494 - DNA, 15 bp, Homo sapiens
ataatgtaacaattg

SEQ ID NO: 2024495 - DNA, 15 bp, Homo sapiens
taatgtaacaattgt

SEQ ID NO: 2024496 - DNA, 15 bp, Homo sapiens
aatgtaacaattgtg

SEQ ID NO: 2024497 - DNA, 15 bp, Homo sapiens
atgtaacaattgtgg

SEQ ID NO: 2024498 - DNA, 15 bp, Homo sapiens
tgtaacaattgtgga

SEQ ID NO: 2024499 - DNA, 15 bp, Homo sapiens
gtaacaattgtggaa

SEQ ID NO: 2024500 - DNA, 15 bp, Homo sapiens
taacaattgtggaac

SEQ ID NO: 2024501 - DNA, 15 bp, Homo sapiens
aacaattgtggaact

SEQ ID NO: 2024502 - DNA, 15 bp, Homo sapiens
acaattgtggaactg

SEQ ID NO: 2024503 - DNA, 15 bp, Homo sapiens
caattgtggaactgc

SEQ ID NO: 2024504 - DNA, 15 bp, Homo sapiens
aattgtggaactgca

SEQ ID NO: 2024505 - DNA, 15 bp, Homo sapiens
attgtggaactgcag

SEQ ID NO: 2024506 - DNA, 15 bp, Homo sapiens
ttgtggaactgcagc

SEQ ID NO: 2024507 - DNA, 15 bp, Homo sapiens
tgtggaactgcagca

SEQ ID NO: 2024508 - DNA, 15 bp, Homo sapiens
gtggaactgcagcaa

SEQ ID NO: 2024509 - DNA, 15 bp, Homo sapiens
tggaactgcagcaat

SEQ ID NO: 2024510 - DNA, 15 bp, Homo sapiens
ggaactgcagcaatt

SEQ ID NO: 2024511 - DNA, 15 bp, Homo sapiens
gaactgcagcaatta

SEQ ID NO: 2024512 - DNA, 15 bp, Homo sapiens
aactgcagcaattat

SEQ ID NO: 2024513 - DNA, 15 bp, Homo sapiens
actgcagcaattatt

SEQ ID NO: 2024514 - DNA, 15 bp, Homo sapiens
ctgcagcaattattt

SEQ ID NO: 2024515 - DNA, 15 bp, Homo sapiens
tgcagcaattatttg

SEQ ID NO: 2024516 - DNA, 15 bp, Homo sapiens
gcagcaattatttga

SEQ ID NO: 2024517 - DNA, 15 bp, Homo sapiens
cagcaattatttgag

SEQ ID NO: 2024518 - DNA, 15 bp, Homo sapiens
agcaattatttgaga

SEQ ID NO: 2024519 - DNA, 15 bp, Homo sapiens
gcaattatttgagaa

SEQ ID NO: 2024520 - DNA, 15 bp, Homo sapiens
caattatttgagaaa

SEQ ID NO: 2024521 - DNA, 15 bp, Homo sapiens
aattatttgagaaaa

SEQ ID NO: 2024522 - DNA, 15 bp, Homo sapiens
attatttgagaaaat

SEQ ID NO: 2024523 - DNA, 15 bp, Homo sapiens
ttatttgagaaaata

SEQ ID NO: 2024524 - DNA, 15 bp, Homo sapiens
tatttgagaaaatat

SEQ ID NO: 2024525 - DNA, 15 bp, Homo sapiens
atttgagaaaatatc

SEQ ID NO: 2024526 - DNA, 15 bp, Homo sapiens
tttgagaaaatatct

SEQ ID NO: 2024527 - DNA, 15 bp, Homo sapiens
ttgagaaaatatcta

SEQ ID NO: 2024528 - DNA, 15 bp, Homo sapiens
tgagaaaatatctag

SEQ ID NO: 2024529 - DNA, 15 bp, Homo sapiens
gagaaaatatctagt

SEQ ID NO: 2024530 - DNA, 15 bp, Homo sapiens
agaaaatatctagta

SEQ ID NO: 2024531 - DNA, 15 bp, Homo sapiens
gaaaatatctagtaa

SEQ ID NO: 2024532 - DNA, 15 bp, Homo sapiens
aaaatatctagtaaa

SEQ ID NO: 2024533 - DNA, 15 bp, Homo sapiens
aaatatctagtaaac

SEQ ID NO: 2024534 - DNA, 15 bp, Homo sapiens
aatatctagtaaact

SEQ ID NO: 2024535 - DNA, 15 bp, Homo sapiens
atatctagtaaactt

SEQ ID NO: 2024536 - DNA, 15 bp, Homo sapiens
tatctagtaaactta

SEQ ID NO: 2024537 - DNA, 15 bp, Homo sapiens
atctagtaaacttag

SEQ ID NO: 2024538 - DNA, 15 bp, Homo sapiens
tctagtaaacttaga

SEQ ID NO: 2024539 - DNA, 15 bp, Homo sapiens
ctagtaaacttagat

SEQ ID NO: 2024540 - DNA, 15 bp, Homo sapiens
tagtaaacttagatt

SEQ ID NO: 2024541 - DNA, 15 bp, Homo sapiens
agtaaacttagatta

SEQ ID NO: 2024542 - DNA, 15 bp, Homo sapiens
gtaaacttagattat

SEQ ID NO: 2024543 - DNA, 15 bp, Homo sapiens
taaacttagattata

SEQ ID NO: 2024544 - DNA, 15 bp, Homo sapiens
aaacttagattatat

SEQ ID NO: 2024545 - DNA, 15 bp, Homo sapiens
aacttagattatatg

SEQ ID NO: 2024546 - DNA, 15 bp, Homo sapiens
acttagattatatgg

SEQ ID NO: 2024547 - DNA, 15 bp, Homo sapiens
cttagattatatggg

SEQ ID NO: 2024548 - DNA, 15 bp, Homo sapiens
ttagattatatggga

SEQ ID NO: 2024549 - DNA, 15 bp, Homo sapiens
tagattatatgggac

SEQ ID NO: 2024550 - DNA, 15 bp, Homo sapiens
agattatatgggaca

SEQ ID NO: 2024551 - DNA, 15 bp, Homo sapiens
gattatatgggacag

SEQ ID NO: 2024552 - DNA, 15 bp, Homo sapiens
attatatgggacaga

SEQ ID NO: 2024553 - DNA, 15 bp, Homo sapiens
ttatatgggacagaa

SEQ ID NO: 2024554 - DNA, 15 bp, Homo sapiens
tatatgggacagaaa

SEQ ID NO: 2024555 - DNA, 15 bp, Homo sapiens
atatgggacagaaaa

SEQ ID NO: 2024556 - DNA, 15 bp, Homo sapiens
tatgggacagaaaat

SEQ ID NO: 2024557 - DNA, 15 bp, Homo sapiens
atgggacagaaaatg

SEQ ID NO: 2024558 - DNA, 15 bp, Homo sapiens
tgggacagaaaatgc

SEQ ID NO: 2024559 - DNA, 15 bp, Homo sapiens
gggacagaaaatgct

SEQ ID NO: 2024560 - DNA, 15 bp, Homo sapiens
ggacagaaaatgctt

SEQ ID NO: 2024561 - DNA, 15 bp, Homo sapiens
gacagaaaatgcttt

SEQ ID NO: 2024562 - DNA, 15 bp, Homo sapiens
acagaaaatgctttc

SEQ ID NO: 2024563 - DNA, 15 bp, Homo sapiens
cagaaaatgctttcg

SEQ ID NO: 2024564 - DNA, 15 bp, Homo sapiens
agaaaatgctttcgt

SEQ ID NO: 2024565 - DNA, 15 bp, Homo sapiens
gaaaatgctttcgtg

SEQ ID NO: 2024566 - DNA, 15 bp, Homo sapiens
aaaatgctttcgtgt

SEQ ID NO: 2024567 - DNA, 15 bp, Homo sapiens
aaatgctttcgtgtg

SEQ ID NO: 2024568 - DNA, 15 bp, Homo sapiens
aatgctttcgtgtgg

SEQ ID NO: 2024569 - DNA, 15 bp, Homo sapiens
atgctttcgtgtggt

SEQ ID NO: 2024570 - DNA, 15 bp, Homo sapiens
tgctttcgtgtggtg

SEQ ID NO: 2024571 - DNA, 15 bp, Homo sapiens
gctttcgtgtggtgt

SEQ ID NO: 2024572 - DNA, 15 bp, Homo sapiens
ctttcgtgtggtgta

SEQ ID NO: 2024573 - DNA, 15 bp, Homo sapiens
tttcgtgtggtgtag

SEQ ID NO: 2024574 - DNA, 15 bp, Homo sapiens
ttcgtgtggtgtagt

SEQ ID NO: 2024575 - DNA, 15 bp, Homo sapiens
tcgtgtggtgtagtg

SEQ ID NO: 2024576 - DNA, 15 bp, Homo sapiens
cgtgtggtgtagtgt

SEQ ID NO: 2024577 - DNA, 15 bp, Homo sapiens
gtgtggtgtagtgtg

SEQ ID NO: 2024578 - DNA, 15 bp, Homo sapiens
tgtggtgtagtgtgt

SEQ ID NO: 2024579 - DNA, 15 bp, Homo sapiens
gtggtgtagtgtgtg

SEQ ID NO: 2024580 - DNA, 15 bp, Homo sapiens
tggtgtagtgtgtgt

SEQ ID NO: 2024581 - DNA, 15 bp, Homo sapiens
ggtgtagtgtgtgta

SEQ ID NO: 2024582 - DNA, 15 bp, Homo sapiens
gtgtagtgtgtgtat

SEQ ID NO: 2024583 - DNA, 15 bp, Homo sapiens
tgtagtgtgtgtata

SEQ ID NO: 2024584 - DNA, 15 bp, Homo sapiens
gtagtgtgtgtatac

SEQ ID NO: 2024585 - DNA, 15 bp, Homo sapiens
tagtgtgtgtataca

SEQ ID NO: 2024586 - DNA, 15 bp, Homo sapiens
agtgtgtgtatacac

SEQ ID NO: 2024587 - DNA, 15 bp, Homo sapiens
gtgtgtgtatacaca

SEQ ID NO: 2024588 - DNA, 15 bp, Homo sapiens
tgtgtgtatacacac

SEQ ID NO: 2024589 - DNA, 15 bp, Homo sapiens
gtgtgtatacacaca

SEQ ID NO: 2024590 - DNA, 15 bp, Homo sapiens
tgtgtatacacacac

SEQ ID NO: 2024591 - DNA, 15 bp, Homo sapiens
gtgtatacacacaca

SEQ ID NO: 2024592 - DNA, 15 bp, Homo sapiens
tgtatacacacacac

SEQ ID NO: 2024593 - DNA, 15 bp, Homo sapiens
gtatacacacacaca

SEQ ID NO: 2024594 - DNA, 15 bp, Homo sapiens
acacacacacacaac

SEQ ID NO: 2024595 - DNA, 15 bp, Homo sapiens
cacacacacacaact

SEQ ID NO: 2024596 - DNA, 15 bp, Homo sapiens
acacacacacaactg

SEQ ID NO: 2024597 - DNA, 15 bp, Homo sapiens
cacacacacaactgt

SEQ ID NO: 2024598 - DNA, 15 bp, Homo sapiens
acacacacaactgtc

SEQ ID NO: 2024599 - DNA, 15 bp, Homo sapiens
cacacacaactgtca

SEQ ID NO: 2024600 - DNA, 15 bp, Homo sapiens
acacacaactgtcaa

SEQ ID NO: 2024601 - DNA, 15 bp, Homo sapiens
cacacaactgtcaaa

SEQ ID NO: 2024602 - DNA, 15 bp, Homo sapiens
acacaactgtcaaac

SEQ ID NO: 2024603 - DNA, 15 bp, Homo sapiens
cacaactgtcaaaca

SEQ ID NO: 2024604 - DNA, 15 bp, Homo sapiens
acaactgtcaaacat

SEQ ID NO: 2024605 - DNA, 15 bp, Homo sapiens
caactgtcaaacatc

SEQ ID NO: 2024606 - DNA, 15 bp, Homo sapiens
aactgtcaaacatcc

SEQ ID NO: 2024607 - DNA, 15 bp, Homo sapiens
actgtcaaacatcct

SEQ ID NO: 2024608 - DNA, 15 bp, Homo sapiens
ctgtcaaacatcctg

SEQ ID NO: 2024609 - DNA, 15 bp, Homo sapiens
tgtcaaacatcctgt

SEQ ID NO: 2024610 - DNA, 15 bp, Homo sapiens
gtcaaacatcctgtc

SEQ ID NO: 2024611 - DNA, 15 bp, Homo sapiens
tcaaacatcctgtca

SEQ ID NO: 2024612 - DNA, 15 bp, Homo sapiens
caaacatcctgtcat

SEQ ID NO: 2024613 - DNA, 15 bp, Homo sapiens
aaacatcctgtcatc

SEQ ID NO: 2024614 - DNA, 15 bp, Homo sapiens
aacatcctgtcatca

SEQ ID NO: 2024615 - DNA, 15 bp, Homo sapiens
acatcctgtcatcac

SEQ ID NO: 2024616 - DNA, 15 bp, Homo sapiens
catcctgtcatcacc

SEQ ID NO: 2024617 - DNA, 15 bp, Homo sapiens
atcctgtcatcacct

SEQ ID NO: 2024618 - DNA, 15 bp, Homo sapiens
tcctgtcatcacctc

SEQ ID NO: 2024619 - DNA, 15 bp, Homo sapiens
cctgtcatcacctca

SEQ ID NO: 2024620 - DNA, 15 bp, Homo sapiens
ctgtcatcacctcaa

SEQ ID NO: 2024621 - DNA, 15 bp, Homo sapiens
tgtcatcacctcaag

SEQ ID NO: 2024622 - DNA, 15 bp, Homo sapiens
gtcatcacctcaagt

SEQ ID NO: 2024623 - DNA, 15 bp, Homo sapiens
tcatcacctcaagtt

SEQ ID NO: 2024624 - DNA, 15 bp, Homo sapiens
catcacctcaagttt

SEQ ID NO: 2024625 - DNA, 15 bp, Homo sapiens
atcacctcaagttta

SEQ ID NO: 2024626 - DNA, 15 bp, Homo sapiens
tcacctcaagtttaa

SEQ ID NO: 2024627 - DNA, 15 bp, Homo sapiens
cacctcaagtttaac

SEQ ID NO: 2024628 - DNA, 15 bp, Homo sapiens
acctcaagtttaaca

SEQ ID NO: 2024629 - DNA, 15 bp, Homo sapiens
cctcaagtttaacat

SEQ ID NO: 2024630 - DNA, 15 bp, Homo sapiens
ctcaagtttaacatg

SEQ ID NO: 2024631 - DNA, 15 bp, Homo sapiens
tcaagtttaacatga

SEQ ID NO: 2024632 - DNA, 15 bp, Homo sapiens
caagtttaacatgac

SEQ ID NO: 2024633 - DNA, 15 bp, Homo sapiens
aagtttaacatgact

SEQ ID NO: 2024634 - DNA, 15 bp, Homo sapiens
agtttaacatgactg

SEQ ID NO: 2024635 - DNA, 15 bp, Homo sapiens
gtttaacatgactga

SEQ ID NO: 2024636 - DNA, 15 bp, Homo sapiens
tttaacatgactgaa

SEQ ID NO: 2024637 - DNA, 15 bp, Homo sapiens
ttaacatgactgaaa

SEQ ID NO: 2024638 - DNA, 15 bp, Homo sapiens
taacatgactgaaac

SEQ ID NO: 2024639 - DNA, 15 bp, Homo sapiens
aacatgactgaaaca

SEQ ID NO: 2024640 - DNA, 15 bp, Homo sapiens
acatgactgaaacag

SEQ ID NO: 2024641 - DNA, 15 bp, Homo sapiens
catgactgaaacaga

SEQ ID NO: 2024642 - DNA, 15 bp, Homo sapiens
atgactgaaacagac

SEQ ID NO: 2024643 - DNA, 15 bp, Homo sapiens
tgactgaaacagact

SEQ ID NO: 2024644 - DNA, 15 bp, Homo sapiens
gactgaaacagactt

SEQ ID NO: 2024645 - DNA, 15 bp, Homo sapiens
actgaaacagacttt

SEQ ID NO: 2024646 - DNA, 15 bp, Homo sapiens
ctgaaacagacttta

SEQ ID NO: 2024647 - DNA, 15 bp, Homo sapiens
tgaaacagactttaa

SEQ ID NO: 2024648 - DNA, 15 bp, Homo sapiens
gaaacagactttaag

SEQ ID NO: 2024649 - DNA, 15 bp, Homo sapiens
aaacagactttaaga

SEQ ID NO: 2024650 - DNA, 15 bp, Homo sapiens
aacagactttaagaa

SEQ ID NO: 2024651 - DNA, 15 bp, Homo sapiens
acagactttaagaac

SEQ ID NO: 2024652 - DNA, 15 bp, Homo sapiens
cagactttaagaact

SEQ ID NO: 2024653 - DNA, 15 bp, Homo sapiens
agactttaagaacta

SEQ ID NO: 2024654 - DNA, 15 bp, Homo sapiens
gactttaagaactag

SEQ ID NO: 2024655 - DNA, 15 bp, Homo sapiens
actttaagaactagg

SEQ ID NO: 2024656 - DNA, 15 bp, Homo sapiens
ctttaagaactaggt

SEQ ID NO: 2024657 - DNA, 15 bp, Homo sapiens
tttaagaactaggta

SEQ ID NO: 2024658 - DNA, 15 bp, Homo sapiens
ttaagaactaggtat

SEQ ID NO: 2024659 - DNA, 15 bp, Homo sapiens
taagaactaggtatg

SEQ ID NO: 2024660 - DNA, 15 bp, Homo sapiens
aagaactaggtatgg

SEQ ID NO: 2024661 - DNA, 15 bp, Homo sapiens
agaactaggtatggg

SEQ ID NO: 2024662 - DNA, 15 bp, Homo sapiens
gaactaggtatgggc

SEQ ID NO: 2024663 - DNA, 15 bp, Homo sapiens
aactaggtatgggct

SEQ ID NO: 2024664 - DNA, 15 bp, Homo sapiens
actaggtatgggctg

SEQ ID NO: 2024665 - DNA, 15 bp, Homo sapiens
ctaggtatgggctga

SEQ ID NO: 2024666 - DNA, 15 bp, Homo sapiens
taggtatgggctgaa

SEQ ID NO: 2024667 - DNA, 15 bp, Homo sapiens
aggtatgggctgaac

SEQ ID NO: 2024668 - DNA, 15 bp, Homo sapiens
ggtatgggctgaaca

SEQ ID NO: 2024669 - DNA, 15 bp, Homo sapiens
gtatgggctgaacac

SEQ ID NO: 2024670 - DNA, 15 bp, Homo sapiens
tatgggctgaacacg

SEQ ID NO: 2024671 - DNA, 15 bp, Homo sapiens
atgggctgaacacgg

SEQ ID NO: 2024672 - DNA, 15 bp, Homo sapiens
tgggctgaacacggt

SEQ ID NO: 2024673 - DNA, 15 bp, Homo sapiens
gggctgaacacggtg

SEQ ID NO: 2024674 - DNA, 15 bp, Homo sapiens
ggctgaacacggtgg

SEQ ID NO: 2024675 - DNA, 15 bp, Homo sapiens
gctgaacacggtggc

SEQ ID NO: 2024676 - DNA, 15 bp, Homo sapiens
ctgaacacggtggct

SEQ ID NO: 2024677 - DNA, 15 bp, Homo sapiens
tgaacacggtggctc

SEQ ID NO: 2024678 - DNA, 15 bp, Homo sapiens
gaacacggtggctca

SEQ ID NO: 2024679 - DNA, 15 bp, Homo sapiens
aacacggtggctcac

SEQ ID NO: 2024680 - DNA, 15 bp, Homo sapiens
acacggtggctcaca

SEQ ID NO: 2024681 - DNA, 15 bp, Homo sapiens
tgtaatcccagcacg

SEQ ID NO: 2024682 - DNA, 15 bp, Homo sapiens
gtaatcccagcacgt

SEQ ID NO: 2024683 - DNA, 15 bp, Homo sapiens
taatcccagcacgtt

SEQ ID NO: 2024684 - DNA, 15 bp, Homo sapiens
aatcccagcacgttg

SEQ ID NO: 2024685 - DNA, 15 bp, Homo sapiens
atcccagcacgttgg

SEQ ID NO: 2024686 - DNA, 15 bp, Homo sapiens
tcccagcacgttggg

SEQ ID NO: 2024687 - DNA, 15 bp, Homo sapiens
cccagcacgttggga

SEQ ID NO: 2024688 - DNA, 15 bp, Homo sapiens
ccagcacgttgggag

SEQ ID NO: 2024689 - DNA, 15 bp, Homo sapiens
cagcacgttgggagg

SEQ ID NO: 2024690 - DNA, 15 bp, Homo sapiens
agcacgttgggaggg

SEQ ID NO: 2024691 - DNA, 15 bp, Homo sapiens
gcacgttgggagggt

SEQ ID NO: 2024692 - DNA, 15 bp, Homo sapiens
cacgttgggagggtt

SEQ ID NO: 2024693 - DNA, 15 bp, Homo sapiens
acgttgggagggttg

SEQ ID NO: 2024694 - DNA, 15 bp, Homo sapiens
cgttgggagggttga

SEQ ID NO: 2024695 - DNA, 15 bp, Homo sapiens
gttgggagggttgac

SEQ ID NO: 2024696 - DNA, 15 bp, Homo sapiens
ttgggagggttgacg

SEQ ID NO: 2024697 - DNA, 15 bp, Homo sapiens
tgggagggttgacgc

SEQ ID NO: 2024698 - DNA, 15 bp, Homo sapiens
gggagggttgacgca

SEQ ID NO: 2024699 - DNA, 15 bp, Homo sapiens
ggagggttgacgcag

SEQ ID NO: 2024700 - DNA, 15 bp, Homo sapiens
gagggttgacgcagg

SEQ ID NO: 2024701 - DNA, 15 bp, Homo sapiens
agggttgacgcaggc

SEQ ID NO: 2024702 - DNA, 15 bp, Homo sapiens
gggttgacgcaggca

SEQ ID NO: 2024703 - DNA, 15 bp, Homo sapiens
ggttgacgcaggcag

SEQ ID NO: 2024704 - DNA, 15 bp, Homo sapiens
gttgacgcaggcaga

SEQ ID NO: 2024705 - DNA, 15 bp, Homo sapiens
ttgacgcaggcagat

SEQ ID NO: 2024706 - DNA, 15 bp, Homo sapiens
tgacgcaggcagatc

SEQ ID NO: 2024707 - DNA, 15 bp, Homo sapiens
gacgcaggcagatca

SEQ ID NO: 2024708 - DNA, 15 bp, Homo sapiens
acgcaggcagatcac

SEQ ID NO: 2024709 - DNA, 15 bp, Homo sapiens
cgcaggcagatcact

SEQ ID NO: 2024710 - DNA, 15 bp, Homo sapiens
cagatcacttgaggc

SEQ ID NO: 2024711 - DNA, 15 bp, Homo sapiens
agatcacttgaggcc

SEQ ID NO: 2024712 - DNA, 15 bp, Homo sapiens
cctggccaacataga

SEQ ID NO: 2024713 - DNA, 15 bp, Homo sapiens
ctggccaacatagag

SEQ ID NO: 2024714 - DNA, 15 bp, Homo sapiens
tggccaacatagaga

SEQ ID NO: 2024715 - DNA, 15 bp, Homo sapiens
ggccaacatagagaa

SEQ ID NO: 2024716 - DNA, 15 bp, Homo sapiens
gccaacatagagaaa

SEQ ID NO: 2024717 - DNA, 15 bp, Homo sapiens
ccaacatagagaaaa

SEQ ID NO: 2024718 - DNA, 15 bp, Homo sapiens
caacatagagaaaac

SEQ ID NO: 2024719 - DNA, 15 bp, Homo sapiens
aacatagagaaaacc

SEQ ID NO: 2024720 - DNA, 15 bp, Homo sapiens
acatagagaaaacct

SEQ ID NO: 2024721 - DNA, 15 bp, Homo sapiens
catagagaaaacctg

SEQ ID NO: 2024722 - DNA, 15 bp, Homo sapiens
atagagaaaacctgt

SEQ ID NO: 2024723 - DNA, 15 bp, Homo sapiens
tagagaaaacctgtc

SEQ ID NO: 2024724 - DNA, 15 bp, Homo sapiens
agagaaaacctgtct

SEQ ID NO: 2024725 - DNA, 15 bp, Homo sapiens
gagaaaacctgtctc

SEQ ID NO: 2024726 - DNA, 15 bp, Homo sapiens
agaaaacctgtctct

SEQ ID NO: 2024727 - DNA, 15 bp, Homo sapiens
gaaaacctgtctcta

SEQ ID NO: 2024728 - DNA, 15 bp, Homo sapiens
aaatataaaaattaa

SEQ ID NO: 2024729 - DNA, 15 bp, Homo sapiens
aatataaaaattaac

SEQ ID NO: 2024730 - DNA, 15 bp, Homo sapiens
atataaaaattaacc

SEQ ID NO: 2024731 - DNA, 15 bp, Homo sapiens
tataaaaattaacca

SEQ ID NO: 2024732 - DNA, 15 bp, Homo sapiens
ataaaaattaaccag

SEQ ID NO: 2024733 - DNA, 15 bp, Homo sapiens
taaaaattaaccagg

SEQ ID NO: 2024734 - DNA, 15 bp, Homo sapiens
aaaaattaaccaggc

SEQ ID NO: 2024735 - DNA, 15 bp, Homo sapiens
aaaattaaccaggca

SEQ ID NO: 2024736 - DNA, 15 bp, Homo sapiens
aaattaaccaggcag

SEQ ID NO: 2024737 - DNA, 15 bp, Homo sapiens
aattaaccaggcagg

SEQ ID NO: 2024738 - DNA, 15 bp, Homo sapiens
attaaccaggcaggg

SEQ ID NO: 2024739 - DNA, 15 bp, Homo sapiens
ttaaccaggcagggt

SEQ ID NO: 2024740 - DNA, 15 bp, Homo sapiens
taaccaggcagggta

SEQ ID NO: 2024741 - DNA, 15 bp, Homo sapiens
aaccaggcagggtag

SEQ ID NO: 2024742 - DNA, 15 bp, Homo sapiens
accaggcagggtagc

SEQ ID NO: 2024743 - DNA, 15 bp, Homo sapiens
ccaggcagggtagca

SEQ ID NO: 2024744 - DNA, 15 bp, Homo sapiens
caggcagggtagcat

SEQ ID NO: 2024745 - DNA, 15 bp, Homo sapiens
aggcagggtagcatg

SEQ ID NO: 2024746 - DNA, 15 bp, Homo sapiens
ggcagggtagcatgc

SEQ ID NO: 2024747 - DNA, 15 bp, Homo sapiens
gcagggtagcatgca

SEQ ID NO: 2024748 - DNA, 15 bp, Homo sapiens
cagggtagcatgcac

SEQ ID NO: 2024749 - DNA, 15 bp, Homo sapiens
agggtagcatgcacc

SEQ ID NO: 2024750 - DNA, 15 bp, Homo sapiens
gggtagcatgcacct

SEQ ID NO: 2024751 - DNA, 15 bp, Homo sapiens
ggtagcatgcacctg

SEQ ID NO: 2024752 - DNA, 15 bp, Homo sapiens
gtagcatgcacctgt

SEQ ID NO: 2024753 - DNA, 15 bp, Homo sapiens
tagcatgcacctgta

SEQ ID NO: 2024754 - DNA, 15 bp, Homo sapiens
agcatgcacctgtag

SEQ ID NO: 2024755 - DNA, 15 bp, Homo sapiens
catgcacctgtagtc
